(19) United States
(12) Patent Application Publication
(10) Pub. No.: US 2022/0211838 A1
(43) Pub. Date: Jul. 7, 2022

(54) NUCLEIC ACID BASED COMBINATION VACCINES

(71) Applicant: CureVac AG, Tübingen (DE)

(72) Inventors: Cornelia OOSTVOGELS, Tübingen (DE); Benjamin PETSCH, Tübingen (DE); Susanne RAUCH, Tübingen (DE); Kim Ellen SCHWENDT, Tübingen (DE)

(73) Assignee: CureVac AG, Tübingen (DE)

(21) Appl. No.: 17/665,704

(22) Filed: Feb. 7, 2022

Related U.S. Application Data
(63) Continuation of application No. PCT/EP2021/064216, filed on May 27, 2021.

(30) Foreign Application Priority Data
May 29, 2020 (EP) PCT/EP2020/065094
Feb. 3, 2021 (EP) PCT/EP2021/052458

(51) Int. Cl. A61K 39/145; A61K 39/155; C07K 14/005; C12N 7/00

(52) U.S. Cl. CPC A61K 39/145; A61K 39/155; A61K 2039/53; C12N 7/00; C07K 14/005

(57) ABSTRACT

The present invention is inter alia directed to pharmaceutical compositions comprising at least one nucleic acid encoding at least one antigenic peptide or protein from a Coronavirus, preferably a pandemic Coronavirus, and at least one nucleic acid encoding at least one antigenic peptide or protein from a further virus, e.g. an Influenza virus or an RSV virus. Pharmaceutical compositions provided herein are suitable for use in treatment or prophylaxis of an infection with at least one Coronavirus and at least one further virus infection, and may therefore be comprised in a combination vaccine. The nucleic acid sequences of the pharmaceutical compositions and combination vaccines are preferably in association with a polymeric carrier, a polycationic protein or peptide, or a lipid nanoparticle (LNP). The invention is also directed to first and second and further medical uses of the pharmaceutical compositions and combination vaccines, and to methods of treating or preventing a Coronavirus infection and a further virus infection.

[0001] The present application is a continuation of International Application No. PCT/EP2021/064216, filed May 27, 2021, which claims the priority benefit of International Application No. PCT/EP2021/052458, filed Feb. 3, 2021, and International Application No. PCT/EP2020/065094, filed May 29, 2020, the entire contents of each of which are hereby incorporated by reference.

[0002] The sequence listing that is contained in the file named “CRVCP0312US_ST25.txt”, which is 171,405,987 bytes (as measured in Microsoft Windows®) and was created on Jan. 26, 2022, is filed concurrently herewith on optical disc by Priority Express Mail and is incorporated by reference herein.

### INTRODUCTION

[0003] The present invention is inter alia directed to pharmaceutical compositions comprising at least one nucleic acid encoding at least one antigenic peptide or protein from a Coronavirus, preferably a pandemic Coronavirus, and at least one nucleic acid encoding at least one antigenic peptide or protein from a further virus, e.g. an Influenza virus or an RSV virus. Pharmaceutical compositions provided herein are suitable for use in treatment or prophylaxis of an infection with at least one Coronavirus and at least one further virus infection, and may therefore be comprised in a combination vaccine. The nucleic acid sequences of the pharmaceutical compositions and combination vaccines are preferably in association with a polymeric carrier, a polycationic protein or peptide, or a lipid nanoparticle (LNP). The invention is also directed to first and second and further medical uses of the pharmaceutical compositions and combination vaccines, and to methods of treating or preventing a Coronavirus infection and a further virus infection.

[0004] Coronaviruses are highly contagious, enveloped, positive single stranded RNA viruses of the Coronaviridae family. Coronaviruses (CoV) are genetically highly variable, and individual virus species can also infect several host species by overcoming the species barrier. Such transfers have resulted in infections in humans with the SARS-associated coronavirus (SARS-CoV-1), with the Middle East respiratory syndrome coronavirus (MERS-CoV), and with SARS-CoV-2 (causing COVID-19 disease).

[0005] SARS-CoV-1, which causes severe acute respiratory syndrome (SARS), infected 8422 humans and resulted in 916 deaths in 37 countries between 2002 and 2003. MERS-CoV was first identified in the Middle East in 2012. A report confirmed 1791 MERS-CoV infection cases, including at least 640 deaths in 27 countries, as of July 2016.

[0006] The Coronavirus pandemic that (most likely) started in the Chinese city of Wuhan at the turn of 2019/2020 has been attributed to a previously unknown coronavirus (SARS-CoV-2) which causes a severe respiratory disease (COVID-19). By end of Mai 2020, there were almost 6,000,000 confirmed cases of a SARS-CoV-2 infection, spreading across almost every country in the world, with more than 350,000 COVID-19 associated deaths.

[0007] These current Coronavirus outbreaks show the substantial risk of a severe global pandemic that can be caused by Coronaviruses. It would be fundamentally important for the global health to provide a vaccine that provides protection against (a pandemic) Coronavirus. To prevent re-occurrence of such a Coronavirus outbreak, it would also be advantageous to provide a combination vaccine (or multipathogen vaccine) that protects against a Coronavirus infection and at least one further virus infection, preferably a further infection with a virus that also causes respiratory diseases. Further, as the elderly population is strongly affected by such viruses, it would be advantageous to provide a combination vaccine that is efficient in the elderly population.

[0008] An example of such a suitable further virus is an Influenza virus. Influenza viruses are enveloped RNA viruses. Three genera of this family, influenza virus A, B and C, cause influenza in humans. They differ with respect to host range, variability of the surface glycoproteins, genome organization and morphology. Influenza virus A and B are further classified, based on the viral surface proteins hemagglutinin (HA) and neuraminidase (NA). Usually, two to three different strains of influenza circulate concurrently during an influenza season. Typical influenza epidemics cause increases in incidence of pneumonia and lower respiratory disease by increased rates of hospitalization or mortality. The elderly or those with underlying chronic diseases are most likely to experience such complications, but young infants also may suffer severe disease. It is estimated that more than one billion cases of influenza occur globally every year, which results in 3 to 5 million cases of severe illness and 300,000 to 500,000 deaths. In addition, there are large losses both in productivity and quality of life for people who overcome mild cases of the disease in just a few days or weeks.

[0009] Besides Coronaviruses and Influenza viruses, viruses of the Pneumoviridae virus family also cause severe respiratory diseases. Members of the Pneumoviridae virus family include e.g. Respiratory syncytial virus (RSV), and Metapneumovirus (hMPV). RSV is the most common cause of bronchiolitis and pneumonia among children in their first year of life. RSV also causes repeated infections including severe lower respiratory tract disease, which may occur at any age, especially among the elderly or those with compromised cardiac, pulmonary, or immune systems. hPMV is an important cause of viral lower respiratory tract illness in young children. The seasonal epidemiology of hMPV appears to be similar to that of RSV, but the incidence of infection and illness appears to be substantially lower. However, hMPV is nearly as common and as severe as influenza in older adults. hMPV is associated with more severe disease in people with asthma and adults with chronic obstructive pulmonary disease (COPD). Numerous outbreaks of hMPV have been reported in long-term care facilities for children and adults, causing fatalities.

[0010] Besides Coronaviruses, Influenza viruses, and Pneumoviridae, viruses of the Paramyxoviridae family can cause severe respiratory diseases. Members of the Paramyxoviridae virus family include Parainfluenza virus (PIV) and Henipavirus virus.

[0011] Parainfluenza virus, e.g. PIV type 3 (PIV3) is a major cause of ubiquitous acute respiratory infections of infancy and early childhood. Its incidence peaks around 4-12 months of age, and the virus is responsible for 3-10% of hospitalizations, mainly for bronchiolitis and pneumonia. PIV3 can be fatal, and in some instances is associated with neurologic diseases, such as febrile seizures. It can also result in airway remodelling, a significant cause of morbidity. In developing regions of the world, infants and young children are at the highest risk of mortality, either from primary PIV3 viral infection or a secondary consequences, such as bacterial infections.

[0012] Henipavirus, including Hendra virus and Nipah virus, is a source of recently emerging potentially pandemic diseases. Hendra virus was first recognized in 1994 after an outbreak of respiratory illness among twenty horses and two humans in Hendra, Queensland, Australia. In 1995, a second unrelated outbreak was identified that had occurred in August 1994 in Mackay, Queensland, in which two horses died and one human became. The fatality rate has been reported at more than 70% in horses and 50% in humans.

[0013] The Nipah virus was initially isolated in 1999 upon examining samples from an outbreak of encephalitis and respiratory illness among adult men in Malaysia and Singapore. The host for Nipah virus is still unknown, but flying foxes are suspected to be the natural host. Infection with Nipah virus in humans has been associated with encephalitis characterized by fever and drowsiness and more serious central nerve system disease, such as coma, seizures and inability to maintain breathing. Some patients have had a respiratory illness during the early part of their infections. During a Nipah virus disease outbreak in 1998-1999, about 40% of the patients with serious nerve disease who entered hospitals died.

[0014] As outlined above, an object of the present invention is the provision of a nucleic-acid based combination vaccine that provides effective protection against at least one Coronavirus, in particular against at least one pandemic Coronavirus, and additionally against at least one further virus, e.g. selected from at least one Influenza virus, at least one Pneumoviridae virus, and/or at least one Paramyxoviridae virus.

[0015] It is a big challenge to develop combination vaccines as the different components of such a vaccine are often not compatible with each other. Further, different vaccine components may required different vaccination intervals to be effective, which impedes the development of a combination vaccine. In addition to that, it is important that the all components of a combination vaccine induce efficient immune responses and that single components are not immuno dominant, or that the components do not show immune-interference. In particular, a vaccine is needed to protect the elderly population where high mortality rates in the case of SARS-CoV-2 have been observed.

[0016] Nucleic acid based vaccination, including DNA or RNA, represents a promising technique for novel vaccines against emerging viruses and for the provision of combination vaccines. Nucleic acids can be genetically engineered and administered to a human subject. Transfected cells directly produce the encoded antigen (e.g. provided by a DNA or an RNA, in particular an mRNA), which results in protective immunological responses.

[0017] A pivotal role for virus-specific memory T-cells in broad and long-term protection against SARS-CoV infection has been elucidated (see e.g. Channappanavar, Rudragouda, et al. “Virus-specific memory CD8 T cells provide substantial protection from lethal severe acute respiratory syndrome coronavirus infection.” Journal of virology 88.19 (2014): 11034-11044). Virus-specific CD8 T cells are e.g. required for pathogen clearance and for mediating protection after viral challenge. An effective combination vaccine, e.g. comprising a SARS-CoV-2 vaccine, should therefore not only induce strong functional humoral immune responses against the respective pathogen, but also induce pathogen specific CD8+ T-cell and CD4+ T-cell responses, e.g. SARS-CoV-2 specific CD8+ T-cell and CD4+ T-cell responses.

[0018] Therefore, it is the object of the underlying invention to provide a nucleic acid based combination vaccine or multipathogen vaccine that provides protection against Coronavirus infections and protection against at least one further virus.

### Definitions

[0019] For the sake of clarity and readability the following definitions are provided. Any technical feature mentioned for these definitions may be read on each and every embodiment of the invention. Additional definitions and explanations may be specifically provided in the context of these embodiments.

[0020] Percentages in the context of numbers should be understood as relative to the total number of the respective items. In other cases, and unless the context dictates otherwise, percentages should be understood as percentages by weight (wt.-%).

[0021] About: The term “about” is used when determinants or values do not need to be identical, i.e. 100% the same. Accordingly, “about” means, that a determinant or values may diverge by 0.1% to 20%, preferably by 0.1% to 10%; in particular, by 0.5%, 1%, 2%, 3%, 4%, 5%, 6%, 7%, 8%, 9%, 10%, 11%, 12%, 13%, 14%, 15%, 16%, 17%, 18%, 19%, 20%. The skilled person will know that e.g. certain parameters or determinants may slightly vary based on the method how the parameter was determined. For example, if a certain determinants or value is defined herein to have e.g. a length of “about 1000 nucleotides”, the length may diverge by 0.1% to 20%, preferably by 0.1% to 10%; in particular, by 0.5%, 1%, 2%, 3%, 4%, 5%, 6%, 7%, 8%, 9%, 10%, 11%, 12%, 13%, 14%, 15%, 16%, 17%, 18%, 19%, 20%. Accordingly, the skilled person will know that in that specific example, the length may diverge by 1 to 200 nucleotides, preferably by 1 to 200 nucleotides; in particular, by 5, 10, 20, 30, 40, 50, 60, 70, 80, 90, 100, 110, 120, 130, 140, 150, 160, 170, 180, 190, 200 nucleotides.

[0022] Adaptive immune response: The term “adaptive immune response” as used herein will be recognized and understood by the person of ordinary skill in the art, and is e.g. intended to refer to an antigen-specific response of the immune system (the adaptive immune system). Antigen specificity allows for the generation of responses that are tailored to specific pathogens or pathogen-infected cells. The ability to mount these tailored responses is usually maintained in the body by “memory cells” (B-cells). In the context of the invention, the antigen is provided by the nucleic acid (e.g. an RNA or a DNA) encoding at least one antigenic peptide or protein derived from coronavirus (component A), or the further virus (component B).

[0023] Antigen: The term “antigen” as used herein will be recognized and understood by the person of ordinary skill in the art, and is e.g. intended to refer to a substance which may be recognized by the immune system, preferably by the adaptive immune system, and is capable of triggering an antigen-specific immune response, e.g. by formation of antibodies and/or antigen-specific T cells as part of an adaptive immune response. Typically, an antigen may be or may comprise a peptide or protein which may be presented by the MHC to T-cells. Also fragments, variants and derivatives of peptides or proteins comprising at least one epitope are understood as antigens in the context of the invention. In the context of the present invention, an antigen may be the product of translation of a provided nucleic acid as specified herein.

[0024] Antigenic peptide or protein: The term “antigenic peptide or protein” or “immunogenic peptide or protein” will be recognized and understood by the person of ordinary skill in the art, and is e.g. intended to refer to a peptide, protein derived from a (antigenic or immunogenic) protein which stimulates the body's adaptive immune system to provide an adaptive immune response. Therefore an antigenic/immunogenic peptide or protein comprises at least one epitope (as defined herein) or antigen (as defined herein) of the protein it is derived from (e.g., spike protein (S) of coronavirus (preferably from SARS-CoV-2), HA of influenza virus, F protein of RSV virus ect.).

[0025] Cationic: Unless a different meaning is clear from the specific context, the term “cationic” means that the respective structure bears a positive charge, either permanently or not permanently, but in response to certain conditions such as pH. Thus, the term “cationic” covers both “permanently cationic” and “cationisable”.

[0026] Cationisable: The term “cationisable” as used herein means that a compound, or group or atom, is positively charged at a lower pH and uncharged at a higher pH of its environment. Also in non-aqueous environments where no pH value can be determined, a cationisable compound, group or atom is positively charged at a high hydrogen ion concentration and uncharged at a low concentration or activity of hydrogen ions. It depends on the individual properties of the cationisable or polycationisable compound, in particular the pKa of the respective cationisable group or atom, at which pH or hydrogen ion concentration it is charged or uncharged. In diluted aqueous environments, the fraction of cationisable compounds, groups or atoms bearing a positive charge may be estimated using the so-called Henderson-Hasselbalch equation which is well-known to a person skilled in the art. E.g., in some embodiments, if a compound or moiety is cationisable, it is preferred that it is positively charged at a pH value of about 1 to 9, preferably 4 to 9, 5 to 8 or even 6 to 8, more preferably of a pH value of or below 9, of or below 8, of or below 7, most preferably at physiological pH values, e.g. about 7.3 to 7.4, i.e. under physiological conditions, particularly under physiological salt conditions of the cell in vivo. In other embodiments, it is preferred that the cationisable compound or moiety is predominantly neutral at physiological pH values, e.g. about 7.0-7.4, but becomes positively charged at lower pH values. In some embodiments, the preferred range of pKa for the cationisable compound or moiety is about 5 to about 7.

[0027] Coding sequence/coding region: The terms “coding sequence” or “coding region” and the corresponding abbreviation “cds” as used herein will be recognized and understood by the person of ordinary skill in the art, and are e.g. intended to refer to a sequence of several nucleotide triplets, which may be translated into a peptide or protein. A coding sequence in the context of the present invention may be a DNA sequence, preferably an RNA sequence, consisting of a number of nucleotides that may be divided by three, which starts with a start codon and which preferably terminates with a stop codon.

[0028] Derived from: The term “derived from” as used throughout the present specification in the context of a nucleic acid, i.e. for a nucleic acid “derived from” (another) nucleic acid, means that the nucleic acid, which is derived from (another) nucleic acid, shares e.g. at least 60%, 70%, 80%, 81%, 82%, 83%, 84%, 85%, 86%, 87%, 88%, 89%, 90%, 91%, 92%, 93%, 94%, 95%, 96%, 97%, 98%, or 99% sequence identity with the nucleic acid from which it is derived. The skilled person is aware that sequence identity is typically calculated for the same types of nucleic acids, i.e. for DNA sequences or for RNA sequences. Thus, it is understood, if a DNA is “derived from” an RNA or if an RNA is “derived from” a DNA, in a first step the RNA sequence is converted into the corresponding DNA sequence (in particular by replacing the uracils (U) by thymidines (T) throughout the sequence) or, vice versa, the DNA sequence is converted into the corresponding RNA sequence (in particular by replacing the T by U throughout the sequence). Thereafter, the sequence identity of the DNA sequences or the sequence identity of the RNA sequences is determined. Preferably, a nucleic acid “derived from” a nucleic acid also refers to nucleic acid, which is modified in comparison to the nucleic acid from which it is derived, e.g. in order to increase RNA stability even further and/or to prolong and/or increase protein production. In the context of amino acid sequences (e.g. antigenic peptides or proteins) the term “derived from” means that the amino acid sequence, which is derived from (another) amino acid sequence, shares e.g. at least 60%, 70%, 75%, 80%, 81%, 82%, 83%, 84%, 85%, 86%, 87%, 88%, 89%, 90%, 91%, 92%, 93%, 94%, 95%, 96%, 97%, 98%, or 99% sequence identity with the amino acid sequence from which it is derived.

[0029] Epitope: The term “epitope” (also called “antigen determinant” in the art) as used herein will be recognized and understood by the person of ordinary skill in the art, and is e.g. intended to refer to T cell epitopes and B cell epitopes. T cell epitopes or parts of the antigenic peptides or proteins and may comprise fragments preferably having a length of about 6 to about 20 or even more amino acids, e.g. fragments as processed and presented by MHC class I molecules, preferably having a length of about 8 to about 10 amino acids, e.g. 8, 9, or 10, (or even 11, or 12 amino acids), or fragments as processed and presented by MHC class II molecules, preferably having a length of about 13 to about 20 or even more amino acids. These fragments are typically recognized by T cells in form of a complex consisting of the peptide fragment and an MHC molecule, i.e. the fragments are typically not recognized in their native form. B cell epitopes are typically fragments located on the outer surface of (native) protein or peptide antigens, preferably having 5 to 15 amino acids, more preferably having 5 to 12 amino acids, even more preferably having 6 to 9 amino acids, which may be recognized by antibodies, i.e. in their native form. Such epitopes of proteins or peptides may furthermore be selected from any of the herein mentioned variants of such proteins or peptides. In this context epitopes can be conformational or discontinuous epitopes which are composed of segments of the proteins or peptides as defined herein that are discontinuous in the amino acid sequence of the proteins or peptides as defined herein but are brought together in the three-dimensional structure or continuous or linear epitopes which are composed of a single polypeptide chain.

[0030] Fragment: The term “fragment” as used throughout the present specification in the context of a nucleic acid sequence (e.g. RNA or a DNA) or an amino acid sequence may typically be a shorter portion of a full-length sequence of e.g. a nucleic acid sequence or an amino acid sequence. Accordingly, a fragment, typically, consists of a sequence that is identical to the corresponding stretch within the full-length sequence. A preferred fragment of a sequence in the context of the present invention, consists of a continuous stretch of entities, such as nucleotides or amino acids corresponding to a continuous stretch of entities in the molecule the fragment is derived from, which represents at least 40%, 50%, 60%, 70%, 80%, 90%, 95% of the total (i.e. full-length) molecule from which the fragment is derived (e.g. spike protein (S) of coronavirus, HA/NA of an influenza virus, ect.). The term “fragment” as used throughout the present specification in the context of proteins or peptides may, typically, comprise a sequence of a protein or peptide as defined herein, which is, with regard to its amino acid sequence, N-terminally and/or C-terminally truncated compared to the amino acid sequence of the original protein. Such truncation may thus occur either on the amino acid level or correspondingly on the nucleic acid level. A sequence identity with respect to such a fragment as defined herein may therefore preferably refer to the entire protein or peptide as defined herein or to the entire (coding) nucleic acid molecule of such a protein or peptide. Fragments of proteins or peptides may comprise at least one epitope of those proteins or peptides.

[0031] Heterologous: The terms “heterologous” or “heterologous sequence” as used throughout the present specification in the context of a nucleic acid sequence or an amino acid sequence refers to a sequence (e.g. RNA, DNA, amino acid) has to be understood as a sequence that is derived from another gene, another allele, or e.g. another species or virus. Two sequences are typically understood to be “heterologous” if they are not derivable from the same gene or from the same allele. I.e., although heterologous sequences may be derivable from the same organism or virus, in nature, they do not occur in the same nucleic acid or protein.

[0032] Humoral immune response: The terms “humoral immunity” or “humoral immune response” will be recognized and understood by the person of ordinary skill in the art, and are e.g. intended to refer to B-cell mediated antibody production and optionally to accessory processes accompanying antibody production. A humoral immune response may be typically characterized, e.g. by Th2 activation and cytokine production, germinal center formation and isotype switching, affinity maturation and memory cell generation. Humoral immunity may also refer to the effector functions of antibodies, which include pathogen and toxin neutralization, classical complement activation, and opsonin promotion of phagocytosis and pathogen elimination.

[0033] Identity (of a sequence): The term “identity” as used throughout the present specification in the context of a nucleic acid sequence or an amino acid sequence will be recognized and understood by the person of ordinary skill in the art, and is e.g. intended to refer to the percentage to which two sequences are identical. To determine the percentage to which two sequences are identical, e.g. nucleic acid sequences or amino acid (aa) sequences as defined herein, preferably the aa sequences encoded by the nucleic acid sequence as defined herein or the aa sequences themselves, the sequences can be aligned in order to be subsequently compared to one another. Therefore, e.g. a position of a first sequence may be compared with the corresponding position of the second sequence. If a position in the first sequence is occupied by the same residue as is the case at a position in the second sequence, the two sequences are identical at this position. If this is not the case, the sequences differ at this position. If insertions occur in the second sequence in comparison to the first sequence, gaps can be inserted into the first sequence to allow a further alignment. If deletions occur in the second sequence in comparison to the first sequence, gaps can be inserted into the second sequence to allow a further alignment. The percentage to which two sequences are identical is then a function of the number of identical positions divided by the total number of positions including those positions which are only occupied in one sequence. The percentage to which two sequences are identical can be determined using an algorithm, e.g. an algorithm integrated in the BLAST program.

[0034] Immunogen, immunogenic: The terms “immunogen” or “immunogenic” will be recognized and understood by the person of ordinary skill in the art, and are e.g. intended to refer to a compound that is able to stimulate/induce an immune response. Preferably, an immunogen is a peptide, polypeptide, or protein. An immunogen in the sense of the present invention is the product of translation of a provided nucleic acid (component A and B), comprising at least one coding sequence encoding at least one antigenic peptide, protein derived from e.g. a coronavirus spike protein (S) (preferably from SARS-CoV-2) as defined herein. Typically, an immunogen elicits an adaptive immune response.

[0035] Immune response: The term “immune response” will be recognized and understood by the person of ordinary skill in the art, and is e.g. intended to refer to a specific reaction of the adaptive immune system to a particular antigen (so called specific or adaptive immune response) or an unspecific reaction of the innate immune system (so called unspecific or innate immune response), or a combination thereof.

[0036] Immune system: The term “immune system” will be recognized and understood by the person of ordinary skill in the art, and is e.g. intended to refer to a system of the organism that may protect the organisms from infection. If a pathogen succeeds in passing a physical barrier of an organism and enters this organism, the innate immune system provides an immediate, but non-specific response. If pathogens evade this innate response, vertebrates possess a second layer of protection, the adaptive immune system. Here, the immune system adapts its response during an infection to improve its recognition of the pathogen. This improved response is then retained after the pathogen has been eliminated, in the form of an immunological memory, and allows the adaptive immune system to mount faster and stronger attacks each time this pathogen is encountered. According to this, the immune system comprises the innate and the adaptive immune system. Each of these two parts typically contains so called humoral and cellular components.

[0037] Innate immune system: The term “innate immune system” (also known as non-specific or unspecific immune system) will be recognized and understood by the person of ordinary skill in the art, and is e.g. intended to refer to a system typically comprising the cells and mechanisms that defend the host from infection by other organisms in a non-specific manner. This means that the cells of the innate system may recognize and respond to pathogens in a generic way, but unlike the adaptive immune system, it does not confer long-lasting or protective immunity to the host. The innate immune system may be activated by ligands of pattern recognition receptor e.g. Toll-like receptors, NOD-like receptors, or RIG-I like receptors etc.

[0038] Lipidoid compound: A lipidoid compound, also simply referred to as lipidoid, is a lipid-like compound, i.e. an amphiphilic compound with lipid-like physical properties. In the context of the present invention, the term lipid is considered to encompass lipidoid compounds.

[0039] Nucleic acid, nucleic acid molecule: The terms “nucleic acid” or “nucleic acid molecule” as used herein, in particular as used herein in the context of component A and component B, will be recognized and understood by the person of ordinary skill in the art. The terms “nucleic acid” or “nucleic acid molecule” preferably refers to DNA (molecules) or RNA (molecules). The term is used synonymously with the term polynucleotide. Preferably, a nucleic acid or a nucleic acid molecule is a polymer comprising or consisting of nucleotide monomers that are covalently linked to each other by phosphodiester-bonds of a sugar/phosphate-backbone. The terms “nucleic acid” or “nucleic acid molecule” also encompasses modified nucleic acid (molecules), such as base-modified, sugar-modified or backbone-modified DNA or RNA (molecules) as defined herein. Accordingly, the nucleic acid of component A and component B may be a DNA or an RNA.

[0040] Nucleic acid sequence, DNA sequence, RNA sequence: The terms “nucleic acid sequence”, “DNA sequence”, “RNA sequence” will be recognized and understood by the person of ordinary skill in the art, and e.g. refer to a particular and individual order of the succession of its nucleotides.

[0041] Multivalent vaccine or combination vaccine: Both terms have to be understood interchangeably herein. A multivalent vaccine or combination vaccine of the invention provides more than one valence (e.g. an antigen) derived from more than one virus (e.g. at least one Coronavirus as defined herein and at least one further virus as defined herein). The nucleic acid based combination vaccine may also be considered as a “multipathogen vaccine”.

[0042] Permanently cationic: The term “permanently cationic” as used herein will be recognized and understood by the person of ordinary skill in the art, and means, e.g., that the respective compound, or group, or atom, is positively charged at any pH value or hydrogen ion activity of its environment. Typically, the positive charge results from the presence of a quaternary nitrogen atom. Where a compound carries a plurality of such positive charges, it may be referred to as permanently polycationic.

[0043] Stabilized RNA: The term “stabilized RNA” refer to an RNA that is modified such, that it is more stable to disintegration or degradation, e.g., by environmental factors or enzymatic digest, such as by exo- or endonuclease degradation, compared to an RNA without such modification. Preferably, a stabilized RNA in the context of the present invention is stabilized in a cell, such as a prokaryotic or eukaryotic cell, preferably in a mammalian cell, such as a human cell. The stabilization effect may also be exerted outside of cells, e.g. in a buffer solution etc., e.g., for storage of a composition comprising the stabilized RNA.

[0044] T-cell responses: The terms “cellular immunity” or “cellular immune response” or “cellular T-cell responses” as used herein will be recognized and understood by the person of ordinary skill in the art, and are for example intended to refer to the activation of macrophages, natural killer cells (NK), antigen-specific cytotoxic T-lymphocytes, and the release of various cytokines in response to an antigen. In more general terms, cellular immunity is not based on antibodies, but on the activation of cells of the immune system. Typically, a cellular immune response may be characterized e.g. by activating antigen-specific cytotoxic T-lymphocytes that are able to induce apoptosis in cells, e.g. specific immune cells like dendritic cells or other cells, displaying epitopes of foreign antigens on their surface.

[0045] Variant (of a sequence): The term “Variant” as used throughout the present specification in the context of a nucleic acid sequence will be recognized and understood by the person of ordinary skill in the art, and is e.g. intended to refer to a variant of a nucleic acid sequence derived from another nucleic acid sequence. E.g., a variant of a nucleic acid sequence may exhibit one or more nucleotide deletions, insertions, additions and/or substitutions compared to the nucleic acid sequence from which the variant is derived. A variant of a nucleic acid sequence may at least 50%, 60%, 70%, 80%, 90%, or 95% identical to the nucleic acid sequence the variant is derived from. The variant is a functional variant in the sense that the variant has retained at least 50%, 60%, 70%, 80%, 90%, or 95% or more of the function of the sequence where it is derived from. A “variant” of a nucleic acid sequence may have at least 70%, 75%, 80%, 85%, 90%, 95%, 98% or 99% nucleotide identity over a stretch of at least 10, 20, 30, 50, 75 or 100 nucleotide of such nucleic acid sequence.

[0046] The term “variant” as used throughout the present specification in the context of proteins or peptides is e.g. intended to refer to a proteins or peptide variant having an amino acid sequence which differs from the original sequence in one or more mutation(s)/substitution(s), such as one or more substituted, inserted and/or deleted amino acid(s). Preferably, these fragments and/or variants have the same, or a comparable specific antigenic property (immunogenic variants, antigenic variants). Insertions and substitutions are possible, in particular, at those sequence positions which cause no modification to the three-dimensional structure or do not affect the binding region. Modifications to a three-dimensional structure by insertion(s) or deletion(s) can easily be determined e.g. using CD spectra (circular dichroism spectra). A “Variant” of a protein or peptide may have at least 70%, 75%, 80%, 85%, 90%, 95%, 98% or 99% amino acid identity over a stretch of at least 10, 20, 30, 50, 75 or 100 amino acids of such protein or peptide. Preferably, a variant of a protein comprises a functional variant of the protein, which means, in the context of the invention, that the variant exerts essentially the same, or at least 40%, 50%, 60%, 70%, 80%, 90% of the immunogenicity as the protein it is derived from.

### Short Description of the Invention

[0047] As further defined in the claims and the underlying description, these objects of the invention are inter alia solved by providing a pharmaceutical composition comprising or consisting of a nucleic acid, e.g. an RNA or a DNA, comprising at least one coding sequence encoding at least one antigenic peptide or protein from a Coronavirus (“component A”), and a nucleic acid, e.g. an RNA or a DNA, comprising at least one coding sequence encoding at least one antigenic peptide or protein from at least one further virus (“component B)”.

[0048] Suitably, the pharmaceutical composition or the combination vaccine of the invention has at least some of the following advantageous features:
[0049] Translation of the nucleic acid of component A and component B at the site of injection/vaccination (e.g. muscle);
[0050] Induction of antigen-specific immune responses against all the encoded proteins (provided by component A and component B), suitably at a very low dosage and dosing regimen;
[0051] Suitability for vaccination of infants and/or newborns or the elderly, in particular the elderly;
[0052] Suitability of the composition/vaccine for intramuscular administration;
[0053] Induction of specific and functional humoral immune response against coronavirus, preferably SARS-CoV-2 (component A) and against the at least one further virus (component B);
[0054] Induction of broad, functional cellular T-cell responses against coronavirus, preferably SARS-CoV-2 (component A) and against the at least one further virus (component B);
[0055] Induction of specific B-cell memory against coronavirus, preferably SARS-CoV-2 (component A) and the at least one further virus (component B);
[0056] Induction of functional antibodies that can effectively neutralize the Coronavirus, e.g. SARS-CoV-2, and the at least one further virus;
[0057] Induction of functional antibodies that can effectively neutralize emerging variants of a Coronavirus, e.g. SARS-CoV-2;
[0058] Eliciting of mucosal IgA immunity by inducing of mucosal IgA antibodies;
[0059] Induction of a well-balanced B cell and T cell responses;
[0060] Induction of protective immunity against coronavirus infection, e.g. against SARS-CoV-2 or emerging variants thereof;
[0061] Fast onset of immune protection against coronavirus, preferably SARS-CoV-2 (component A) and the at least one further virus (component B);
[0062] Longevity of the induced immune responses against coronavirus, preferably SARS-CoV-2 (component A) and the at least one further virus (component B);
[0063] No enhancement of a virus infection (e.g. SARS-CoV-2 infection) due to vaccination or immunopathological effects;
[0064] No antibody dependent enhancement (ADE) caused by the nucleic acid based combination vaccine;
[0065] No excessive induction of systemic cytokine or chemokine response after application of the vaccine, which could lead to an undesired high reactogenicity upon vaccination;
[0066] Well tolerability, no side-effects, non-toxicity of the combination vaccine;
[0067] Advantageous stability characteristics of the nucleic acid-based combination vaccine;
[0068] Speed, adaptability, simplicity and scalability of combination vaccine production;
[0069] Advantageous vaccination regimen that only requires one or two vaccination for sufficient protection;
[0070] Advantageous vaccination regimen that only requires a low dose of the composition/vaccine for sufficient protection.

[0071] The present invention is based on the inventor's surprising finding that a pharmaceutical composition comprising at least one nucleic acid encoding at least one peptide or protein from a Coronavirus (“component A”) and at least one nucleic acid encoding at least one peptide or protein from a further virus (“component B”) can efficiently be co-expressed in human cells. Even more surprising and unexpected, the administration of such a pharmaceutical compositions comprising said components induces antigen-specific immune responses against the encoded coronavirus antigen and against the at least one further virus antigen. Those findings are the basis for a nucleic acid based combination vaccine of the invention that provides protection against at least one Coronavirus, e.g. a pandemic Coronavirus, and at least one further virus, e.g. an influenza virus and/or an RSV virus (see Example section).

[0072] In a first aspect, the present invention provides pharmaceutical compositions comprising or consisting of at least one component A comprising at least one nucleic acid comprising at least one coding sequence encoding at least one antigenic peptide or protein selected or derived from at least one Coronavirus, or an immunogenic fragment or immunogenic variant thereof, and at least one component B comprising at least one nucleic acid comprising at least one coding sequence encoding at least one antigenic peptide or protein selected or derived from at least one further virus, or an immunogenic fragment or immunogenic variant thereof.

[0073] The at least one Coronavirus of component A may suitably be derived or selected from a pandemic Coronavirus, e.g. SARS-CoV-1, SARS-CoV-2, MERS-CoV. The at least one further virus of component B may suitably be derived or selected from at least one further virus, e.g. at least one different Coronavirus, at least one Influenza virus, at least one Pneumoviridae virus (e.g. Respiratory syncytial virus, and/or at least one Metapneumovirus), and/or at least one Paramyxoviridae virus (e.g. Parainfluenza virus, and/or at least one Henipavirus).

[0074] In a second aspect, the present invention provides combination vaccines, wherein the combination vaccines comprise the pharmaceutical compositions (including component A and component B) as defined in the first aspect. Accordingly, the second aspect relates to multipathogen vaccines.

[0075] In a third aspect, the present invention provides kits or kits of parts comprising at least one pharmaceutical composition of first aspect (including component A and component B), and/or at least one combination vaccine of the second aspect.

[0076] Further aspects of the invention concern methods of treating or preventing multiple virus infections in a subject, and first and second medical uses of the pharmaceutical compositions, the combination vaccines, or the kits. Also provided are methods of manufacturing the pharmaceutical compositions, or the combination vaccines.

### DETAILED DESCRIPTION OF THE INVENTION

[0077] The present application is filed together with a sequence listing in electronic format, which is part of the description (WIPO standard ST.25). The information contained in the sequence listing is incorporated herein by reference in its entirety. Where reference is made herein to a “SEQ ID NO”, the corresponding nucleic acid sequence or amino acid (aa) sequence in the sequence listing having the respective identifier is referred to. For many sequences, the sequence listing also provides additional detailed information, e.g. regarding certain structural features, sequence optimizations, GenBank (NCBI) or GISAID (epi) identifiers, or additional detailed information regarding its coding capacity. In particular, such information is provided under numeric identifier <223> in the WIPO standard ST.25 sequence listing. Accordingly, information provided under said numeric identifier <223> is explicitly included herein in its entirety and has to be understood as integral part of the description of the underlying invention. Where reference is made to “SEQ ID NOs” of other published patent applications or patents, said sequences, e.g. amino acid sequences or nucleic acid sequences, are explicitly incorporated herein by reference. Accordingly, these sequences constitute an integral part of the underlying description. For “SEQ ID NOs” that are included by reference, information provided under numeric identifier <223> (of the respective sequence protocol) is also explicitly included herein in its entirety, and has to be understood as integral part of the description of the underlying invention. Accordingly, “SEQ ID NOs” provided in WO2014160463, WO2015024668, WO2017070626, WO2017070622, WO2017172890, WO2018081318, WO2018115527, WO2018170245, WO2018078053, WO2018115507, WO2019092153, WO2019202035 are herewith incorporated by reference, and are therefore part of the description.

[0078] Pharmaceutical Composition:

[0079] In a first aspect, the invention relates to a pharmaceutical composition suitable fora combination vaccine or a multipathogen vaccine.

[0080] It has to be noted that specific features and embodiments that are described in the context of the first aspect of the invention, that is the pharmaceutical composition of the invention, are likewise applicable to the second aspect (combination vaccine of the invention), the third aspect (kit or kit of parts of the invention), or further aspects including e.g. medical uses (first and second medical uses) and e.g. method of treatments.

[0081] In a preferred embodiment, the pharmaceutical composition of the first aspect comprises or consists of
[0082] at least one component A comprising at least one nucleic acid comprising at least one coding sequence encoding at least one antigenic peptide or protein selected or derived from at least one Coronavirus, or an immunogenic fragment or immunogenic variant thereof, and
[0083] at least one component B comprising at least one nucleic acid comprising at least one coding sequence encoding at least one antigenic peptide or protein selected or derived from at least one further virus, or an immunogenic fragment or immunogenic variant thereof.

[0084] A nucleic acid according to the invention, e.g. the DNA or the RNA, forms the basis for a nucleic acid based pharmaceutical composition or a nucleic acid based vaccine.

[0085] Such nucleic acid based pharmaceutical composition (first aspect) or nucleic acid based vaccines (second aspect) as provided herein have advantages over classical vaccine approaches: In general, protein-based vaccines, or live attenuated vaccines are suboptimal for use in developing countries due to their high production costs. In addition, protein-based vaccines, or live attenuated vaccines require long development times and are not suitable for rapid responses of pandemic virus outbreaks such as e.g. the Coronavirus SARS-CoV-2 outbreak in 2019/2020. Furthermore, using classical approaches it remains to be a challenge to provide a combination vaccine that is effective against a Coronavirus and a further virus (e.g. problems in regard of compatibility of the individual components).

[0086] In contrast, the nucleic acid-based pharmaceutical compositions and vaccines according to the present invention allow very fast and cost-effective manufacturing. Therefore, in comparison with known vaccines, vaccine based on the inventive nucleic acid can be produced and manufactured significantly cheaper and faster, which is very advantageous particularly for use in developing countries or in the context of a global pandemic.

[0087] One further advantage of a pharmaceutical compositions or vaccines based on nucleic acid of component A and component B is that the components are temperature-stable in comparison to protein or peptide-based vaccines. Moreover, the inventors found that respective nucleic acid sequences encoding antigens selected or derived from a Coronavirus can be combined with e.g. nucleic acid sequences encoding antigens selected or derived from a further virus (e.g. a different Coronavirus, a Influenza viruses, RSV viruses, PIV, hMPV, Hendra, Nipah) without impeding the efficacy (e.g. induction of cellular and humoral immune responses) of the individual components (see Example section).

[0088] Component A:

[0089] In various preferred embodiments, the at least one component A of the pharmaceutical composition comprises at least one nucleic acid comprising at least one coding sequence encoding at least one antigenic peptide or protein selected or derived from at least one Coronavirus, or an immunogenic fragment or immunogenic variant thereof.

[0090] Coronaviruses can be classified into the genus Alphacoronavirus, Betacoronavirus, Deltacoronavirus, Gammacoronavirus, and unclassified Coronaviruses. Coronaviruses are genetically highly variable, and individual virus species can also infect several host species by overcoming the species barrier, to potentially become pandemic.

[0091] In preferred embodiments the at least one Coronavirus of component A is selected or derived from at least one pandemic Coronavirus.

[0092] In various embodiments the at least one Coronavirus of component A, or the at least one pandemic Coronavirus of component A, is selected from at least one Alphacoronavirus, at least one Betacoronavirus, at least one Gammacoronavirus, and/or at least one Deltacoronavirus, preferably a pandemic Alphacoronavirus, Betacoronavirus, Gammacoronavirus, Deltacoronavirus.

[0093] In various embodiments, the at least one Coronavirus of component A, or the at least one pandemic Coronavirus of component A, is a Betacoronavirus. Suitably, the Betacoronavirus is selected from at least one Sarbecovirus, at least one Merbecovirus, at least one Embecovirus, at least one Nobecovirus, and/or at least one Hibecovirus.

[0094] In a preferred embodiments, the at least one Coronavirus of component A, or the at least one pandemic Coronavirus of component A, is a Betacoronavirus, preferably a Sarbecovirus. In the context of the invention, a preferred Sarbecovirus may be selected from a SARS-associated Coronavirus. Preferred SARS-associated Coronaviruses can be selected from SARS-CoV-1 and/or SARS-CoV-2.

[0095] In preferred embodiments, the at least one Coronavirus of component A, or the at least one pandemic Coronavirus of component A, is a Betacoronavirus, preferably a Merbecovirus. In the context of the invention, a preferred Merbecovirus may be selected from a MERS-associated coronavirus. Preferred MERS-associated Coronaviruses can be selected from MERS-CoV.

[0096] The term “antigenic peptide or protein of a Coronavirus” relates to any peptide or protein that is selected or is derived from the respective Coronavirus as defined herein, but also to fragments, variants or derivatives thereof, preferably to immunogenic fragments or immunogenic variants thereof.

[0097] The term “immunogenic fragment” or “immunogenic variant” has to be understood as any fragment/variant of the corresponding Coronavirus antigen that is capable of raising an immune response in a subject.

[0098] In the context of the invention, any protein selected or derived from a Coronavirus, preferably a pandemic Coronavirus, may be used in the context of the invention and may be suitably encoded by the coding sequence or the nucleic acid of component A. It is further in the scope of the underlying invention, that the at least one antigenic peptide or protein may comprise or consist of a synthetically engineered or an artificial Coronavirus peptide or protein. The term “synthetically engineered” Coronavirus peptide or protein, or the term “artificial Coronavirus peptide or protein” relates to a protein that does not occur in nature. Accordingly, an “artificial Coronavirus peptide or protein” or a “synthetically engineered Coronavirus peptide or protein” may for example differ in at least one amino acid compared to the naturally existing Coronavirus peptide or protein, and/or may comprise an additional peptide or protein element (e.g. a heterologous element), and/or may be N-terminally or C-terminally extended or truncated.

[0099] In preferred embodiments, the nucleic acid of component A comprises at least one coding sequence encoding at least one antigenic peptide or protein selected or derived from a Coronavirus, preferably a pandemic Coronavirus, or an immunogenic fragment or immunogenic variant thereof, wherein the at least one antigenic peptide or protein comprises at least one peptide or protein that is selected or is derived from a structural protein, an accessory protein, or a replicase protein or an immunogenic fragment or immunogenic variant of any of these.

[0100] Suitably, the structural protein is selected or derived from a Coronavirus spike protein (S), a Coronavirus envelope protein (E), a Coronavirus membrane protein (M) or a Coronavirus nucleocapsid protein (N), or an immunogenic fragment or variant of any of these.

[0101] In particularly preferred embodiments, the encoded at least one antigenic peptide or protein of component A comprises or consists at least one peptide or protein selected or derived from a Coronavirus spike protein (S, 51, S2, or S1 and S2), or an immunogenic fragment or immunogenic variant of any of these.

[0102] The term spike protein (S) as used herein refers to a Coronavirus protein. Spike protein (S) is a typical type I viral fusion protein that exists as trimer on the viral surface with each monomer consisting of a Head (S1) and stem (S2). Individual precursor S polypeptides form a homotrimer and undergo glycosylation within the Golgi apparatus as well as processing to remove the signal peptide, and cleavage by a cellular protease to generate separate S1 and S2 polypeptide chains, which remain associated as S1/S2 protomers within the homotrimer and is therefore a trimer of heterodimers. The S1 domain of the spike glycoprotein includes the receptor binding domain (RBD) that engages (most likely) with the angiotensin-converting enzyme 2 receptors and mediates viral fusion into the host cell, an N-terminal domain that may make initial contact with target cells, and 2 subdomains, all of which are susceptible to neutralizing antibodies. S2 domain consists of a six helix bundle fusion core involved in membrane fusion with the host endosomal membrane and is also a target for neutralization. The S2 subunit further comprises two heptad-repeat sequences (HR1 and HR2) and a central helix typical of fusion glycoproteins, a transmembrane domain, and the cytosolic tail domain.

[0103] In preferred embodiments, a fragment of a spike protein (S) is encoded by the nucleic acid of component A, wherein said fragment may be N-terminally truncated, lacking e.g. the N-terminal amino acids 1 to up to 100 of the full length Coronavirus S protein. In embodiments, a fragment of a spike protein (S) may be encoded by the nucleic acid of component A, wherein said fragment may be C-terminally truncated, lacking e.g. the C-terminal amino acids 1 to up to 200 of the full length Coronavirus S protein. Such “fragment of a spike protein (S)” may comprise amino acid substitutions and, optionally, at least one heterologous peptide or protein element (as described below for specific Coronaviruses below). In preferred embodiments, a fragment of Coronavirus spike protein (S) may be C-terminally truncated, thereby lacking the C-terminal transmembrane domain.

[0104] In preferred embodiments, the encoded at least one antigenic peptide or protein of component A comprises or consists of a Coronavirus spike protein (S), wherein the spike protein (S) lacks the transmembrane domain (TM or TMflex). Without wishing to being bound to theory, a Coronavirus spike protein (S) lacking the transmembrane domain (TM or TMflex) as defined herein could be suitable for a vaccine as such a protein would be soluble and not anchored in the cell membrane. A soluble protein may therefore be produced (that is translated) in higher concentrations upon administration to a subject or a cell, thereby leading to improved immune responses.

[0105] Without wishing to being bound to theory, RBD and CND domains may be crucial for immunogenicity of the Coronavirus spike protein (S). Both regions are located at the S1 fragment of the Coronavirus spike protein. Accordingly, it may be suitable in the context of the invention that the antigenic peptide or protein comprises or consists of an S1 fragment of the spike protein of a Coronavirus or an immunogenic fragment or immunogenic variant thereof. Suitably, such an S1 fragment may comprise at least an RBD and/or a CND domain as defined above.

[0106] In particularly preferred embodiments, the encoded at least one antigenic peptide or protein of component A comprises or consists of a Coronavirus spike protein (S), wherein spike protein (S) comprises or consists of a spike protein fragment S1, or an immunogenic fragment or immunogenic variant thereof.

[0107] In preferred embodiments, the encoded at least one antigenic peptide or protein comprises an Coronavirus spike protein fragment S1, and lacks at least 70%, 80%, 90%, preferably 100% of spike protein fragment S2. Such embodiments may be beneficial as the S1 fragment comprises neutralizing epitopes without potential problems of full length protein comprising S1 and S2.

[0108] Without wishing to being bound to theory, it may be suitable that the antigenic peptide or protein of component A comprises or consists of Coronavirus spike protein fragment S1 and (at least a fragment of) Coronavirus spike protein fragment S2, because the formation of an immunogenic Coronavirus spike protein may be promoted.

[0109] Accordingly, in particularly preferred embodiments, the encoded at least one antigenic peptide or protein of component A comprises or consists of a Coronavirus spike protein (S), wherein the Coronavirus spike protein (S) comprises or consists of a Coronavirus spike protein fragment S1 or an immunogenic fragment or immunogenic variant thereof, and Coronavirus spike protein fragment S2 or an immunogenic fragment or immunogenic variant thereof.

[0110] In particularly preferred embodiments, the encoded at least one antigenic peptide or protein of component A comprises or consists of a full length Coronavirus spike protein or an immunogenic fragment or immunogenic variant of any of these. The term “full length Coronavirus spike protein” has to be understood as a Coronavirus spike protein, preferably derived from a pandemic Coronavirus, having an amino acid sequence corresponding to essentially the full spike protein.

[0111] In particularly preferred embodiments, the Coronavirus spike protein (S) that is provided by the nucleic acid of component A is designed or adapted to stabilize the S antigen in pre-fusion conformation. A pre-fusion conformation is particularly advantageous in the context of an efficient vaccine, as several potential epitopes for neutralizing antibodies may merely be accessible in said pre-fusion protein conformation. Furthermore, remaining of the S protein in the pre-fusion conformation is aimed to avoid immunopathological effects, like e.g. enhanced disease and/or antibody dependent enhancement (ADE).

[0112] Accordingly, in preferred embodiments, the nucleic acid of component A comprises at least one coding sequence encoding at least one antigenic peptide or protein that is selected or derived from an Coronavirus, preferably a pandemic Coronavirus, wherein the at least one antigenic peptide or protein is selected or derived or from a spike protein (S), wherein the spike protein (S) is a pre-fusion stabilized spike protein (S_stab). Suitably, said pre-fusion stabilized spike protein comprises at least one pre-fusion stabilizing mutation.

[0113] The term “pre-fusion conformation” as used herein relates to a structural conformation adopted by the ectodomain of the coronavirus S protein following processing into a mature coronavirus S protein in the secretory system, and prior to triggering of the fusogenic event that leads to transition of coronavirus S to the postfusion conformation.

[0114] A “pre-fusion stabilized spike protein (S_stab)” as described herein comprises one or more amino acid substitutions, deletions, or insertions compared to a native coronavirus S sequence that provide for increased retention of the prefusion conformation compared to coronavirus S ectodomain trimers formed from a corresponding native coronavirus S sequence. The “stabilization” of the prefusion conformation by the one or more amino acid substitutions, deletions, or insertions can be, for example, energetic stabilization (for example, reducing the energy of the prefusion conformation relative to the post-fusion open conformation) and/or kinetic stabilization (for example, reducing the rate of transition from the prefusion conformation to the postfusion conformation). Additionally, stabilization of the coronavirus S ectodomain trimer in the prefusion conformation can include an increase in resistance to denaturation compared to a corresponding native coronavirus S sequence.

[0115] Accordingly, in preferred embodiments, the Coronavirus spike protein includes one or more amino acid substitutions that stabilize the S protein in the pre-fusion conformation, for example, substitutions that stabilize the membrane distal portion of the S protein (including the N-terminal region) in the pre-fusion conformation.

[0116] In embodiments, the pre-fusion stabilizing mutation comprises an amino acid substitution at position at amino acids of the distal portion of the S protein (including the N-terminal region), wherein said amino acids are substituted with one selected from A, I, L, M, F, V, G, or P (amino acid positions according to reference), preferably wherein said amino acids are substituted with P. Suitably, stabilization of the Coronavirus spike protein may be obtained by substituting two consecutive amino acids with amino acids that stabilize the spike protein in a perfusion conformation.

[0117] In preferred embodiments, the at least one pre-fusion stabilizing mutation comprises a cavity filling mutation that further stabilizes the pre-fusion state of the Coronavirus S protein. The term “cavity filling mutation” or “cavity filling amino acid substitution” relates to an amino acid substitution that fills a cavity within the protein core of a protein, such as a Coronavirus S protein ectodomain. Cavities are essentially voids within a folded protein where amino acids or amino acid side chains are not present. In several embodiments, a cavity-filling amino acid substitution is introduced to fill a cavity present in the prefusion conformation of a Coronavirus S ectodomain core that collapses (e.g., has reduced volume) after transition to the postfusion conformation.

[0118] In preferred embodiments, the at least one pre-fusion stabilizing mutation comprises a mutated protonation site that further stabilizes the pre-fusion state.

[0119] In preferred embodiments, the at least one pre-fusion stabilizing mutation comprises an artificial intramolecular disulfide bond. Such an artificial intramolecular disulfide bond can be introduced to further stabilize the membrane distal portion of the S protein (including the N-terminal region) in the pre-fusion conformation; that is, in a conformation that specifically binds to one or more pre-fusion specification antibodies, and/or presents a suitable antigenic site that is present on the pre-fusion conformation but not in the post fusion conformation of the S protein. In embodiments, the at least one pre-fusion stabilizing mutation comprises 2, 3, 4, 5, 6, 7, or 8 different artificial intramolecular disulfide bonds.

[0120] It has to be emphasized that in the context of the invention any Coronavirus S protein, preferably any pandemic Coronavirus S protein may be mutated as described above to stabilize the spike protein in the pre-fusion conformation. Accordingly, a spike protein may be selected from any Coronavirus, preferably from any Alphacoronavirus, Betacoronavirus, Gammacoronavirus, Deltacoronavirus, more preferably Betacoronavirus.

[0121] According to various preferred embodiments, the nucleic acid of component A encodes at least one antigenic peptide or protein from Coronavirus as defined herein, preferably of a pandemic Coronavirus, and, additionally, at least one heterologous peptide or protein element.

[0122] Suitably, the at least one heterologous peptide or protein element may promote or improve secretion of the encoded Coronavirus antigenic peptide or protein (e.g. via secretory signal sequences), promote or improve anchoring of the encoded antigenic peptide or protein of the invention in the plasma membrane (e.g. via transmembrane elements), promote or improve formation of antigen complexes (e.g. via multimerization domains or antigen clustering elements), or promote or improve virus-like particle formation (VLP forming sequence). In addition, the nucleic acid of component A may additionally encode peptide linker elements, self-cleaving peptides, immunologic adjuvant sequences or dendritic cell targeting sequences.

[0123] Suitable multimerization domains may be selected from the list of amino acid sequences according to SEQ ID NOs: 1116-1167 of WO2017081082, or fragments or variants of these sequences. Suitable transmembrane elements may be selected from the list of amino acid sequences according to SEQ ID NOs: 1228-1343 of WO2017081082, or fragments or variants of these sequences. Suitable VLP forming sequences may be selected from the list of amino acid sequences according to SEQ ID NOs: 1168-1227 of the patent application WO2017081082, or fragments or variants of these sequences. Suitable peptide linkers may be selected from the list of amino acid sequences according to SEQ ID NOs: 1509-1565 of the patent application WO2017081082, or fragments or variants of these sequences. Suitable self-cleaving peptides may be selected from the list of amino acid sequences according to SEQ ID NOs: 1434-1508 of the patent application WO2017081082, or fragments or variants of these sequences. Suitable immunologic adjuvant sequences may be selected from the list of amino acid sequences according to SEQ ID NOs: 1360-1421 of the patent application WO2017081082, or fragments or variants of these sequences. Suitable dendritic cell (DCs) targeting sequences may be selected from the list of amino acid sequences according to SEQ ID NOs: 1344-1359 of the patent application WO2017081082, or fragments or variants of these sequences. Suitable secretory signal peptides may be selected from the list of amino acid sequences according to SEQ ID NOs: 1-1115 and SEQ ID NO: 1728 of published PCT patent application WO2017081082, or fragments or variants of these sequences

[0124] In preferred embodiments, the at least one coding sequence additionally encodes one or more heterologous peptide or protein elements selected from a signal peptide, a linker peptide, a helper epitope, an antigen clustering element, a trimerization or multimerization element, a transmembrane element, or a VLP forming sequence.

[0125] In preferred embodiments, the nucleic acid of component A encoding at least one antigenic protein derived from a Coronavirus, additionally encodes at least one heterologous trimerization element, an antigen clustering element, or a VLP forming sequence.

[0126] In preferred embodiments, the antigen clustering elements may be selected from a ferritin element, or a lumazine synthase element, surface antigen of Hepatitis B virus (HBsAg), or encapsulin. Expressing a stably clustered Coronavirus spike protein, preferably in in its prefusion conformation, may increases the magnitude and breadth of neutralizing activity against the encoded Coronavirus antigen.

[0127] Lumazine synthase (Lumazine, LS, LumSynth) is an enzyme with particle-forming properties, present in a broad variety of organisms, and involved in riboflavin biosynthesis. In particularly preferred embodiments, lumazine synthase is used to promote antigen clustering and may therefore promote or enhance immune responses of the encoded Coronavirus antigen of the invention.

[0128] In particularly preferred embodiments, the antigen clustering element (multimerization element) is or is derived from lumazine synthase, wherein the amino acid sequences of said antigen clustering domain is preferably identical or at least 70%, 80%, 85%, 86%, 87%, 88%, 89%, 90%, 91%, 92%, 93%, 94%, 95%, 96%, 97%, 98%, or 99% identical to any one of amino acid sequences SEQ ID NO: 112, a fragment or variant thereof.

[0129] Ferritin is a protein whose main function is intracellular iron storage. Almost all living organisms produce ferritin which is made of 24 subunits, each composed of a four-alpha-helix bundle, that self-assemble in a quaternary structure with octahedral symmetry. Its properties to self-assemble into nanoparticles are well-suited to carry and expose antigens.

[0130] In particularly preferred embodiments, ferritin is used to promote the antigen clustering and may therefore promote immune responses of the encoded Coronavirus antigen, preferably spike protein.

[0131] In particularly preferred embodiments, the antigen clustering element (multimerization element) is selected or derived from ferritin wherein the amino acid sequences of said antigen clustering domain is preferably identical or at least 70%, 80%, 85%, 86%, 87%, 88%, 89%, 90%, 91%, 92%, 93%, 94%, 95%, 96%, 97%, 98%, or 99% identical to any one of amino acid sequence SEQ ID NO: 113, a fragment or variant thereof.

[0132] In some embodiments, the antigen clustering domain is a Hepatitis B surface antigen (HBsAg). HBsAg forms spherical particles. The addition of a fragment of the surface antigen of Hepatitis B virus (HBsAg) sequence may be particularly effective in enhancing the immune response of the nucleic-acid-based vaccine against Coronavirus.

[0133] In particularly preferred embodiments, HBsAg is used to promote the antigen clustering and may therefore promote immune responses of the encoded coronavirus antigen, preferably a spike protein as defined herein.

[0134] In some embodiments, the antigen clustering element is an encapsulin element. The addition of an encapsulin sequence may be particularly effective in enhancing the immune response of the nucleic-acid-based vaccine against Coronavirus. In particularly preferred embodiments, encapsulin is used to promote the antigen clustering and may therefore promote immune responses of the encoded coronavirus antigen, preferably a Coronavirus spike protein as defined herein.

[0135] Encapsulin is a protein isolated from thermophile Thermotoga maritima and may be used as an element to allow self-assembly of antigens to form antigen (nano)particles. Encapsulin is assembled from 60 copies of identical 31 kDa monomers having a thin and icosahedral T=1 symmetric cage structure with interior and exterior diameters of 20 nm and 24 nm, respectively.

[0136] In embodiments where the coding sequence of the nucleic acid of component A additionally encodes heterologous antigen clustering element, it is particularly preferred and suitable to generate a fusion protein comprising an antigen clustering element and an antigenic peptide or protein derived from a Coronavirus. Suitably, said antigenic peptide or protein, preferably the spike protein, is lacking the C-terminal transmembrane domain (TM) or is lacking a part of the C-terminal transmembrane domain (TM).

[0137] In other embodiments, where the coding sequence of the nucleic acid of component A additionally encodes heterologous antigen clustering element as defined above, it is particularly preferred and suitable to generate a fusion protein comprising an antigen clustering element and an antigenic peptide or protein derived from a Coronavirus spike protein fragment S1 (lacking S2 and/or TM and/or TMflex). Further, it may be suitable to use linker elements for separating the heterologous antigen clustering element from the antigenic peptide or protein (e.g. a linker according to SEQ ID NO: 115, 13148, 13152).

[0138] Further suitable multimerization elements may be selected from the list of amino acid sequences according to SEQ ID NOs: 1116-1167 of WO2017081082, or fragments or variants of these sequences. SEQ ID NOs: 1116-1167 of WO2017081082 are herewith incorporated by reference.

[0139] In preferred embodiments, the trimerization element may be selected from a foldon element. In preferred embodiments, the foldon element is a fibritin foldon element. Expressing a stable trimeric spike protein, preferably in its prefusion conformation, may increases the magnitude and breadth of neutralizing activity against a Coronavirus.

[0140] In particularly preferred embodiments, a fibritin foldon element is used to promote the antigen trimerization and may therefore promote immune responses of the encoded coronavirus antigen, preferably spike protein. Preferably, the foldon element is or is derived from a bacteriophage, preferably from bacteriophage T4, most preferably from fibritin of bacteriophage T4.

[0141] In particularly preferred embodiments, the trimerization element is selected or derived from foldon wherein the amino acid sequences of said trimerization element is preferably identical or at least 70%, 80%, 85%, 86%, 87%, 88%, 89%, 90%, 91%, 92%, 93%, 94%, 95%, 96%, 97%, 98%, or 99% identical to any one of amino acid sequence SEQ ID NO: 114, a fragment or variant of any of these.

[0142] In embodiments where the coding sequence of the nucleic acid of component A additionally encodes heterologous trimerization element, it is particularly preferred and suitable to generate a fusion protein comprising a trimerization element and an antigenic peptide or protein derived from a Coronavirus. Suitably, said antigenic peptide or protein, preferably the spike protein derived from Coronavirus that is lacking the C-terminal transmembrane domain, or is lacking a part of the C-terminal transmembrane domain (TMflex).

[0143] In other embodiments, where the coding sequence of the nucleic acid of component A additionally encodes heterologous trimerization element as defined above, it is particularly preferred and suitable to generate a fusion protein comprising an trimerization element and an antigenic peptide or protein derived from Coronavirus spike protein fragment S1 (lacking S2 and/or TM and/or TMflex). Further, it may be suitable to use linker elements for separating the heterologous antigen clustering element from the antigenic peptide or protein (e.g. a linker according to SEQ ID NO: 115, 13148, 13152).

[0144] Further suitable trimerization elements may be selected from the list of amino acid sequences according to SEQ ID NOs: 1116-1167 of WO2017081082, or fragments or variants of these sequences. SEQ ID NOs: 1116-1167 of WO2017081082 are herewith incorporated by reference.

[0145] In preferred embodiments, the VLP forming sequence may be selected and fused to the Coronavirus antigen as defined herein. Expressing a stably clustered spike protein in VLP form may increases the magnitude and breadth of neutralizing activity against Coronavirus. VLPs structurally mimic infectious viruses and they can induce potent cellular and humoral immune responses.

[0146] Suitable VLP forming sequences may be selected from elements derived from Hepatitis B virus core antigen, HIV-1 Gag protein, or Woodchuck hepatitis core antigen element (WhcAg).

[0147] In particularly preferred embodiments, the at least one VLP-forming sequence is a Woodchuck hepatitis core antigen element (WhcAg). The WhcAg element is used to promote VLP formation and may therefore promote immune responses of the encoded coronavirus antigen, preferably spike protein.

[0148] In particularly preferred embodiments, the VLP forming sequence is selected or derived from foldon wherein the amino acid sequences of said VLP forming sequences is preferably identical or at least 70%, 80%, 85%, 86%, 87%, 88%, 89%, 90%, 91%, 92%, 93%, 94%, 95%, 96%, 97%, 98%, or 99% identical to any one of amino acid sequence SEQ ID NO: 13171, a fragment or variant of any of these.

[0149] In embodiments where the coding sequence of the nucleic acid of component A additionally encodes heterologous VLP forming sequence, it is particularly preferred and suitable to generate a fusion protein comprising a VLP forming sequence and an antigenic peptide or protein derived from Coronavirus. Suitably, said antigenic peptide or protein, preferably the spike protein derived from a Coronavirus that is lacking the C-terminal transmembrane domain, or is lacking a part of the C-terminal transmembrane domain.

[0150] In other embodiments, where the coding sequence of the nucleic acid of component A additionally encodes heterologous VLP-forming sequence as defined above, it is particularly preferred and suitable to generate a fusion protein comprising a VLP-forming sequence and an antigenic peptide or protein derived from a Coronavirus spike protein fragment S1 (lacking S2 and/or TM and/or TMflex). Further, it may be suitable to use linker elements for separating the heterologous antigen clustering element from the antigenic peptide or protein (e.g. a linker according to SEQ ID NO: 115, 13148, 13152).

[0151] Further suitable VLP forming sequences in that context may be selected from the list of amino acid sequences according to SEQ ID NOs: 1168-1227 of the patent application WO2017081082, or fragments or variants of these sequences. SEQ ID NOs: 1168-1227 of WO2017081082 are herewith incorporated by reference.

[0152] In embodiments, the antigenic peptide or protein comprises a heterologous signal peptide. A heterologous signal peptide may be used to improve the secretion of the encoded Coronavirus antigen.

[0153] Suitable secretory signal peptides may be selected from the list of amino acid sequences according to SEQ ID NOs: 1-1115 and SEQ ID NO: 1728 of published PCT patent application WO2017081082, or fragments or variants of these sequences. 1-1115 and SEQ ID NO: 1728 of WO2017081082 are herewith incorporated by reference.

[0154] In embodiments where the coding sequence of the nucleic acid of component A additionally encodes heterologous secretory signal peptide, it is particularly preferred and suitable to generate a fusion protein comprising a heterologous secretory signal peptide and an antigenic peptide or protein derived from a Coronavirus. Suitably, said antigenic peptide or protein, preferably the spike protein derived from Coronavirus is lacking the N-terminal endogenous secretory signal peptide (lacking aa 1 to aa 15).

[0155] According to preferred embodiments, the nucleic acid of component A comprises at least one coding sequence encoding at least one antigenic peptide or protein selected or derived from a Coronavirus as defined herein, or fragments and variants thereof. In preferred embodiments, the nucleic acid of component A comprises at least one coding sequence encoding at least one antigenic peptide or protein selected or derived from at least one Coronavirus as defined herein, or fragments and variants thereof, wherein said at least one Coronavirus is selected from at least one (pandemic) Alphacoronavirus, at least one (pandemic) Betacoronavirus, at least one (pandemic) Gammacoronavirus, and/or at least one (pandemic) Deltacoronavirus.

[0156] In that context, any coding sequence encoding at least one antigenic protein of a Coronavirus as defined herein, or fragments and variants thereof may be understood as suitable coding sequence and may therefore be comprised in the nucleic acid of component A.

[0157] Suitable features and embodiments that apply to nucleic acids of component A are provided in paragraph “Nucleic acid features and embodiments” below.

[0158] Suitably, the nucleic acids of component A is formulated and/or complexed. Suitable features and embodiments that apply to nucleic acids complexation or formulation of component A are provided in paragraph “Formulation and Complexation” below.

[0159] In the context of the invention, the term “nucleic acid species” is not restricted to mean “one single nucleic acid molecule” but is understood to comprise an ensemble of essentially identical nucleic acid molecules. Accordingly, it may relate to a plurality of essentially identical nucleic acid molecules, e.g. DNA or RNA molecules.

[0160] In embodiments, component A may comprise at least 2, 3, 4, 5, 6, 7, 8, 9, 10 or even more different nucleic acid species, e.g. DNA or RNA, as defined herein, each encoding at least one antigenic peptide or protein derived from the same Coronavirus, or a fragment or variant thereof. Particularly, said (genetically) same Coronavirus expresses (essentially) the same repertoire of proteins or peptides, wherein all proteins or peptides have (essentially) the same amino acid sequence. Particularly, said (genetically) same Coronavirus expresses essentially the same proteins, peptides or polyproteins, wherein these protein, peptide or polyproteins preferably do not differ in their amino acid sequence(s).

[0161] In embodiments, the component A comprises at least 2, 3, 4, 5, 6, 7, 8, 9, 10 or even more different nucleic acid species, e.g. DNA or RNA, as defined herein, each encoding at least one peptide or protein derived from a genetically distinct Coronavirus (e.g. a distinct Coronavirus isolate, a distinct Betacoronavirus, a distinct pandemic Coronavirus), or a fragment or variant thereof. The terms “distinct” or “distinct Coronavirus” as used throughout the present specification have to be understood as the difference between at least two respective Coronaviruses (e.g. a distinct Coronavirus isolate, a distinct Betacoronavirus, a distinct pandemic Coronavirus, ect.), wherein the difference is manifested on the genome of the respective distinct Coronavirus. Particularly, said (genetically) distinct Coronavirus may express at least one distinct protein, peptide or polyprotein, wherein the at least one distinct protein, peptide or polyprotein differs in at least one amino acid.

[0162] In preferred embodiments, the component A comprises at least one nucleic acid encoding at least one antigenic peptide or protein that is selected or derived from at least one Coronavirus, or an immunogenic fragment or immunogenic variant thereof, wherein said component A is to be, preferably, administered intramuscularly or intradermal.

[0163] Preferably, intramuscular or intradermal administration of said component A results in expression of the encoded antigen construct in a subject. In embodiments where the nucleic acid is an RNA, administration of component A results in translation of the RNA and to a production of the encoded Coronavirus antigen in a subject. In embodiments where the nucleic acid is a DNA (e.g. plasmid DNA, adenovirus DNA), administration of said composition results in transcription of the DNA into RNA, and to a subsequent translation of the RNA into the encoded Coronavirus antigen in a subject.

[0164] In embodiments, administration of the pharmaceutical composition comprising component A to a subject elicits neutralizing antibodies and does not elicit disease enhancing antibodies. In particular, administration of a pharmaceutical composition comprising component A encoding Coronavirus pre-fusion stabilized spike protein to a subject does not elicit immunopathological effects, like e.g. enhanced disease and/or antibody dependent enhancement (ADE).

[0165] Preferably, the component A is suitable for a vaccine, in particular, suitable for a Coronavirus vaccine, preferably a combination vaccine of the invention.

[0166] Embodiments relating to specific Coronaviruses in the context of the invention are provided below (Component A-1, Component A-2, Component A-3).

[0167] Component A-1: SARS-CoV-2

[0168] In a particularly preferred embodiment, the at least one Coronavirus of component A, is a SARS-CoV-2 virus (also referred to as component A-1).

[0169] Accordingly, in preferred embodiments of the first aspect, the nucleic acid of component A comprises at least one coding sequence encoding at least one antigenic peptide or protein selected or derived from at least one SARS-CoV-2, or an immunogenic fragment or immunogenic variant thereof.

[0170] It has to be understood that generic embodiments and features that have been described in paragraph “Component A” may also apply to a nucleic acid encoding a SARS-CoV-2 antigenic peptide or protein.

[0171] As used herein, the terms “Human coronavirus 2019”, “Wuhan Human coronavirus” (WHCV), “nCoV-2019 coronavirus”, “nCoV-2019”, “Wuhan seafood market pneumonia virus”, “Wuhan coronavirus”, “WHCV coronavirus”, “HCoV-19”, “SARS2”, “COVID-19 virus”, “hCoV-19”, “SARS-CoV-2”, or “coronavirus SARS-CoV-2” may be used interchangeable throughout the present invention, relating to a new pandemic coronavirus that has been emerged in the Chinese city of Wuhan at the turn of 2019/2020, causing the disease COVID-19. According to the WHO (February 2020), the virus is officially termed “SARS-CoV-2”, and the associated disease is officially termed “COVID-19”.

[0172] SARS-CoV-2 belongs to the Coronaviridae, in particular to Orthocoronaviruses, more specifically to the genus Betacoronavirus. Exemplary SARS-CoV-2 coronaviruses are isolates including but not limited to those provided in List A and List B below.

[0173] List A: Exemplary SARS-CoV-2 Coronavirus Isolates (EPI/GISAID):

[0174] EPI_ISL_402119, EPI_ISL_402120, EPI_ISL_402121, EPI_ISL_402123, EPI_ISL_402124 (hCoV-19/Wuhan/WIV04/2019), EPI_ISL_402125, EPI_ISL_402127, EPI_ISL_402128 (BetaCoV_Wuhan_WIV05_2019_EPI_ISL_402128), EPI_ISL_402129, EPI_ISL_402130, EPI_ISL_402131, EPI_ISL_402132, EPI_ISL_403928, EPI_ISL_403929, EPI_ISL_403930, EPI_ISL_403931, EPI_ISL_403932, EPI_ISL_403933, EPI_ISL_403934, EPI_ISL_403935, EPI_ISL_403936, EPI_ISL_403937, EPI_ISL_403962, EPI_ISL_403963, EPI_ISL_404227, EPI_ISL_404228, EPI_ISL_404253, EPI_ISL_404895, EPI_ISL_405839, EPI_ISL_406030, EPI_ISL_406031, EPI_ISL_406034, EPI_ISL_406036, EPI_ISL_406223, EPI_ISL_406531, EPI_ISL_406533, EPI_ISL_406534, EPI_ISL_406535, EPI_ISL_406536, EPI_ISL_406538, EPI_ISL_406592, EPI_ISL_406593, EPI_ISL_406594, EPI_ISL_406595, EPI_ISL_406596, EPI_ISL_406597, EPI_ISL_406798, EPI_ISL_406800, EPI_ISL_406801, EPI_ISL_406844, EPI_ISL_406862, EPI_ISL_406716, EPI_ISL_406717, EPI_ISL_406970, EPI_ISL_406973, EPI_ISL_407071, EPI_ISL_407073, EPI_ISL_407079, EPI_ISL_407084, EPI_ISL_407193, EPI_ISL_407214, EPI_ISL_407215, EPI_ISL_407313, EPI_ISL_407893, EPI_ISL_407894, EPI_ISL_407896, EPI_ISL_407976, EPI_ISL_407987, EPI_ISL_407988, EPI_ISL_408008, EPI_ISL_408009, EPI_ISL_408010, EPI_ISL_408430, EPI_ISL_408431, EPI_ISL_408478, EPI_ISL_408479, EPI_ISL_408480, EPI_ISL_408481, EPI_ISL_408482, EPI_ISL_408484, EPI_ISL_408486, EPI_ISL_408488, EPI_ISL_408489, EPI_ISL_408514, EPI_ISL_408515, EPI_ISL_408665, EPI_ISL_408666, EPI_ISL_408667, EPI_ISL_408668, EPI_ISL_408669, EPI_ISL_408670, EPI_ISL_408976, EPI_ISL_408977, EPI_ISL_409067, EPI_ISL_410044, EPI_ISL_410045, EPI_ISL_410218, EPI_ISL_410301, EPI_ISL_410486, EPI_ISL_410531, EPI_ISL_410532, EPI_ISL_410535, EPI_ISL_410536, EPI_ISL_410537, EPI_ISL_410538, EPI_ISL_410539, EPI_ISL_410540, EPI_ISL_410541, EPI_ISL_410542, EPI_ISL_410713, EPI_ISL_410714, EPI_ISL_410715, EPI_ISL_410716, EPI_ISL_410717, EPI_ISL_410718, EPI_ISL_410719, EPI_ISL_410720, EPI_ISL_410984, EPI_ISL_411060, EPI_ISL_411066, EPI_ISL_411218, EPI_ISL_411219, EPI_ISL_411220, EPI_ISL_411902, EPI_ISL_411915, EPI_ISL_411926, EPI_ISL_411927, EPI_ISL_411929, EPI_ISL_411950, EPI_ISL_411951, EPI_ISL_411952, EPI_ISL_411953, EPI_ISL_411954, EPI_ISL_411955, EPI_ISL_411956, EPI_ISL_411957, EPI_ISL_412026, EPI_ISL_412028, EPI_ISL_412029, EPI_ISL_412030, EPI_ISL_412459, EPI_ISL_412862, EPI_ISL_412869, EPI_ISL_412870, EPI_ISL_412871, EPI_ISL_412872, EPI_ISL_412873, EPI_ISL_412898, EPI_ISL_412899, EPI_ISL_412912, EPI_ISL_412966, EPI_ISL_412967, EPI_ISL_412968, EPI_ISL_412969, EPI_ISL_412970, EPI_ISL_412972, EPI_ISL_412973, EPI_ISL_412974, EPI_ISL_412975, EPI_ISL_412978, EPI_ISL_412979, EPI_ISL_412980, EPI_ISL_412981, EPI_ISL_412982, EPI_ISL_412983, EPI_ISL_413014, EPI_ISL_413015, EPI_ISL_413016, EPI_ISL_413017, EPI_ISL_413018, EPI_ISL_413021, EPI_ISL_413022, EPI_ISL_413023, EPI_ISL_413024, EPI_ISL_413213, EPI_ISL_413214, EPI_ISL_413455, EPI_ISL_413456, EPI_ISL_413457, EPI_ISL_413458, EPI_ISL_413459, EPI_ISL_413485, EPI_ISL_413486, EPI_ISL_413488, EPI_ISL_413489, EPI_ISL_413490, EPI_ISL_413513, EPI_ISL_413514, EPI_ISL_413515, EPI_ISL_413516, EPI_ISL_413518, EPI_ISL_413519, EPI_ISL_413520, EPI_ISL_413521, EPI_ISL_413522, EPI_ISL_413523, EPI_ISL_413555, EPI_ISL_413557, EPI_ISL_413558, EPI_ISL_413559, EPI_ISL_413560, EPI_ISL_413562, EPI_ISL_413563, EPI_ISL_413566, EPI_ISL_413572, EPI_ISL_413573, EPI_ISL_413577, EPI_ISL_413579, EPI_ISL_413580, EPI_ISL_413581, EPI_ISL_413582, EPI_ISL_413583, EPI_ISL_413584, EPI_ISL_413587, EPI_ISL_413589, EPI_ISL_413590, EPI_ISL_413591, EPI_ISL_413592, EPI_ISL_413593, EPI_ISL_413594, EPI_ISL_413595, EPI_ISL_413596, EPI_ISL_413597, EPI_ISL_413598, EPI_ISL_413599, EPI_ISL_413600, EPI_ISL_413602, EPI_ISL_413603, EPI_ISL_413604, EPI_ISL_413606, EPI_ISL_413607, EPI_ISL_413608, EPI_ISL_413609, EPI_ISL_413610, EPI_ISL_413611, EPI_ISL_413612, EPI_ISL_413613, EPI_ISL_413614, EPI_ISL_413615, EPI_ISL_413616, EPI_ISL_413617, EPI_ISL_413618, EPI_ISL_413619, EPI_ISL_413620, EPI_ISL_413621, EPI_ISL_413622, EPI_ISL_413647, EPI_ISL_413648, EPI_ISL_413691, EPI_ISL_413692, EPI_ISL_413693, EPI_ISL_413694, EPI_ISL_413697, EPI_ISL_413711, EPI_ISL_413729, EPI_ISL_413746, EPI_ISL_413748, EPI_ISL_413749, EPI_ISL_413750, EPI_ISL_413751, EPI_ISL_413761, EPI_ISL_413791, EPI_ISL_413809, EPI_ISL_413852, EPI_ISL_413853, EPI_ISL_413854, EPI_ISL_413856, EPI_ISL_413857, EPI_ISL_413858, EPI_ISL_413860, EPI_ISL_413861, EPI_ISL_413862, EPI_ISL_413863, EPI_ISL_413928, EPI_ISL_413931, EPI_ISL_413996, EPI_ISL_413997, EPI_ISL_413999, EPI_ISL_414005, EPI_ISL_414006, EPI_ISL_414007, EPI_ISL_414008, EPI_ISL_414009, EPI_ISL_414011, EPI_ISL_414012, EPI_ISL_414019, EPI_ISL_414020, EPI_ISL_414021, EPI_ISL_414022, EPI_ISL_414023, EPI_ISL_414027, EPI_ISL_414040, EPI_ISL_414041, EPI_ISL_414042, EPI_ISL_414043, EPI_ISL_414044, EPI_ISL_414045, EPI_ISL_414363, EPI_ISL_414366, EPI_ISL_414367, EPI_ISL_414368, EPI_ISL_414369, EPI_ISL_414414, EPI_ISL_414423, EPI_ISL_414428, EPI_ISL_414429, EPI_ISL_414433, EPI_ISL_414435, EPI_ISL_414439, EPI_ISL_414443, EPI_ISL_414445, EPI_ISL_414446, EPI_ISL_414451, EPI_ISL_414457, EPI_ISL_414468, EPI_ISL_414470, EPI_ISL_414476, EPI_ISL_414477, EPI_ISL_414479, EPI_ISL_414480, EPI_ISL_414481, EPI_ISL_414482, EPI_ISL_414483, EPI_ISL_414484, EPI_ISL_414485, EPI_ISL_414487, EPI_ISL_414500, EPI_ISL_414505, EPI_ISL_414509, EPI_ISL_414510, EPI_ISL_414511, EPI_ISL_414517, EPI_ISL_414519, EPI_ISL_414520, EPI_ISL_414521, EPI_ISL_414522, EPI_ISL_414523, EPI_ISL_414524, EPI_ISL_414525, EPI_ISL_414526, EPI_ISL_414527, EPI_ISL_414528, EPI_ISL_414529, EPI_ISL_414530, EPI_ISL_414531, EPI_ISL_414532, EPI_ISL_414534, EPI_ISL_414535, EPI_ISL_414545, EPI_ISL_414546, EPI_ISL_414547, EPI_ISL_414548, EPI_ISL_414549, EPI_ISL_414552, EPI_ISL_414554, EPI_ISL_414555, EPI_ISL_414556, EPI_ISL_414557, EPI_ISL_414558, EPI_ISL_414559, EPI_ISL_414560, EPI_ISL_414561, EPI_ISL_414562, EPI_ISL_414564, EPI_ISL_414565, EPI_ISL_414566, EPI_ISL_414569, EPI_ISL_414571, EPI_ISL_414574, EPI_ISL_414577, EPI_ISL_414578, EPI_ISL_414579, EPI_ISL_414580, EPI_ISL_414586, EPI_ISL_414587, EPI_ISL_414588, EPI_ISL_414589, EPI_ISL_414590, EPI_ISL_414591, EPI_ISL_414592, EPI_ISL_414593, EPI_ISL_414594, EPI_ISL_414595, EPI_ISL_414596, EPI_ISL_414597, EPI_ISL_414600, EPI_ISL_414601, EPI_ISL_414616, EPI_ISL_414617, EPI_ISL_414618, EPI_ISL_414619, EPI_ISL_414620, EPI_ISL_414621, EPI_ISL_414622, EPI_ISL_414623, EPI_ISL_414624, EPI_ISL_414625, EPI_ISL_414626, EPI_ISL_414627, EPI_ISL_414628, EPI_ISL_414629, EPI_ISL_414630, EPI_ISL_414631, EPI_ISL_414632, EPI_ISL_414633, EPI_ISL_414635, EPI_ISL_414637, EPI_ISL_414638, EPI_ISL_414641, EPI_ISL_414642, EPI_ISL_414643, EPI_ISL_414646, EPI_ISL_414648, EPI_ISL_414663, EPI_ISL_414684, EPI_ISL_414685, EPI_ISL_414686, EPI_ISL_414687, EPI_ISL_414688, EPI_ISL_414689, EPI_ISL_414690, EPI_ISL_414691, EPI_ISL_414692, EPI_ISL_414936, EPI_ISL_414937, EPI_ISL_414938, EPI_ISL_414940, EPI_ISL_414941, EPI_ISL_415105, EPI_ISL_415128, EPI_ISL_415129, EPI_ISL_415136, EPI_ISL_415141, EPI_ISL_415142, EPI_ISL_415147, EPI_ISL_415150, EPI_ISL_415151, EPI_ISL_415152, EPI_ISL_415153, EPI_ISL_415154, EPI_ISL_415155, EPI_ISL_415156, EPI_ISL_415157, EPI_ISL_415158, EPI_ISL_415159, EPI_ISL_415710, EPI_ISL_416426, EPI_ISL_416457, EPI_ISL_416481, EPI_ISL_416489, EPI_ISL_416491, EPI_ISL_416492, EPI_ISL_416514, EPI_ISL_416515, EPI_ISL_416516, EPI_ISL_416517, EPI_ISL_416518, EPI_ISL_416538, EPI_ISL_416539, EPI_ISL_416683, EPI_ISL_416685, EPI_ISL_416704, EPI_ISL_416711, EPI_ISL_416713, EPI_ISL_416715, EPI_ISL_416717, EPI_ISL_416744, EPI_ISL_416830, EPI_ISL_416831, EPI_ISL_416832, EPI_ISL_417020, EPI_ISL_417021, EPI_ISL_417022, EPI_ISL_417023, EPI_ISL_417024, EPI_ISL_417025, EPI_ISL_417026, EPI_ISL_417027, EPI_ISL_417028, EPI_ISL_417034, EPI_ISL_417200, EPI_ISL_417201, EPI_ISL_417202, EPI_ISL_417203, EPI_ISL_417204, EPI_ISL_417374, EPI_ISL_417375, EPI_ISL_417376, EPI_ISL_417377, EPI_ISL_417379, EPI_ISL_417382, EPI_ISL_417408, EPI_ISL_417409, EPI_ISL_417410, EPI_ISL_417411, EPI_ISL_417412, EPI_ISL_417413, EPI_ISL_417420, EPI_ISL_417435, EPI_ISL_417436, EPI_ISL_417437, EPI_ISL_417438, EPI_ISL_417439, EPI_ISL_417440, EPI_ISL_417441, EPI_ISL_417442, EPI_ISL_417467, EPI_ISL_417468, EPI_ISL_417504, EPI_ISL_417505, EPI_ISL_417506, EPI_ISL_417507, EPI_ISL_417508, EPI_ISL_417509, EPI_ISL_417510, EPI_ISL_417512, EPI_ISL_417513, EPI_ISL_417514, EPI_ISL_417515, EPI_ISL_417516, EPI_ISL_417517, EPI_ISL_417526, EPI_ISL_417527, EPI_ISL_417528, EPI_ISL_417529, EPI_ISL_417530, EPI_ISL_417531, EPI_ISL_417532, EPI_ISL_417533, EPI_ISL_417534, EPI_ISL_417536, EPI_ISL_417537, EPI_ISL_417538, EPI_ISL_417539, EPI_ISL_417540, EPI_ISL_417541, EPI_ISL_417542, EPI_ISL_417543, EPI_ISL_417544, EPI_ISL_417545, EPI_ISL_417546, EPI_ISL_417547, EPI_ISL_417548, EPI_ISL_417550, EPI_ISL_417551, EPI_ISL_417552, EPI_ISL_417553, EPI_ISL_417554, EPI_ISL_417555, EPI_ISL_417556, EPI_ISL_417557, EPI_ISL_417558, EPI_ISL_417559, EPI_ISL_417560, EPI_ISL_417561, EPI_ISL_417562, EPI_ISL_417563, EPI_ISL_417564, EPI_ISL_417565, EPI_ISL_417566, EPI_ISL_417567, EPI_ISL_417568, EPI_ISL_417569, EPI_ISL_417570, EPI_ISL_417571, EPI_ISL_417572, EPI_ISL_417573, EPI_ISL_417574, EPI_ISL_417575, EPI_ISL_417576, EPI_ISL_417577, EPI_ISL_417578, EPI_ISL_417579, EPI_ISL_417580, EPI_ISL_417581, EPI_ISL_417582, EPI_ISL_417583, EPI_ISL_417584, EPI_ISL_417585, EPI_ISL_417586, EPI_ISL_417587, EPI_ISL_417588, EPI_ISL_417589, EPI_ISL_417590, EPI_ISL_417591, EPI_ISL_417592, EPI_ISL_417593, EPI_ISL_417594, EPI_ISL_417595, EPI_ISL_417596, EPI_ISL_417597, EPI_ISL_417598, EPI_ISL_417599, EPI_ISL_417600, EPI_ISL_417601, EPI_ISL_417602, EPI_ISL_417603, EPI_ISL_417604, EPI_ISL_417605, EPI_ISL_417606, EPI_ISL_417607, EPI_ISL_417608, EPI_ISL_417609, EPI_ISL_417610, EPI_ISL_417611, EPI_ISL_417612, EPI_ISL_417613, EPI_ISL_417614, EPI_ISL_417615, EPI_ISL_417616, EPI_ISL_417617, EPI_ISL_417618, EPI_ISL_417619, EPI_ISL_417620, EPI_ISL_417621, EPI_ISL_417622, EPI_ISL_417623, EPI_ISL_417624, EPI_ISL_417625, EPI_ISL_417626, EPI_ISL_417627, EPI_ISL_417628, EPI_ISL_417629, EPI_ISL_417630, EPI_ISL_417631, EPI_ISL_417632, EPI_ISL_417633, EPI_ISL_417634, EPI_ISL_417635, EPI_ISL_417636, EPI_ISL_417637, EPI_ISL_417638, EPI_ISL_417639, EPI_ISL_417640, EPI_ISL_417641, EPI_ISL_417642, EPI_ISL_417643, EPI_ISL_417644, EPI_ISL_417645, EPI_ISL_417646, EPI_ISL_417647, EPI_ISL_417648, EPI_ISL_417649, EPI_ISL_417650, EPI_ISL_417651, EPI_ISL_417652, EPI_ISL_417653, EPI_ISL_417654, EPI_ISL_417666, EPI_ISL_417667, EPI_ISL_417668, EPI_ISL_417669, EPI_ISL_417670, EPI_ISL_417671, EPI_ISL_417672, EPI_ISL_417676, EPI_ISL_417678, EPI_ISL_417680, EPI_ISL_417685, EPI_ISL_417699, EPI_ISL_417700, EPI_ISL_417703, EPI_ISL_417706, EPI_ISL_417709, EPI_ISL_417712, EPI_ISL_417716, EPI_ISL_417717, EPI_ISL_417724, EPI_ISL_417733, EPI_ISL_417737, EPI_ISL_417740, EPI_ISL_417742, EPI_ISL_417743, EPI_ISL_417746, EPI_ISL_417750, EPI_ISL_417752, EPI_ISL_417753, EPI_ISL_417754, EPI_ISL_417762, EPI_ISL_417763, EPI_ISL_417764, EPI_ISL_417766, EPI_ISL_417774, EPI_ISL_417808, EPI_ISL_417809, EPI_ISL_417813, EPI_ISL_417814, EPI_ISL_417815, EPI_ISL_417816, EPI_ISL_417818, EPI_ISL_417819, EPI_ISL_417820, EPI_ISL_417821, EPI_ISL_417822, EPI_ISL_417823, EPI_ISL_417824, EPI_ISL_417825, EPI_ISL_417826, EPI_ISL_417827, EPI_ISL_417829, EPI_ISL_417830, EPI_ISL_417831, EPI_ISL_417832, EPI_ISL_417833, EPI_ISL_417834, EPI_ISL_417835, EPI_ISL_417836, EPI_ISL_417837, EPI_ISL_417838, EPI_ISL_417839, EPI_ISL_417864, EPI_ISL_417917, EPI_ISL_417918, EPI_ISL_417920, EPI_ISL_417925, EPI_ISL_417926, EPI_ISL_417931, EPI_ISL_417932, EPI_ISL_417933, EPI_ISL_417935, EPI_ISL_417936, EPI_ISL_417937, EPI_ISL_417938, EPI_ISL_417939, EPI_ISL_417940, EPI_ISL_417941, EPI_ISL_417942, EPI_ISL_417943, EPI_ISL_417944, EPI_ISL_417945, EPI_ISL_417946, EPI_ISL_417947, EPI_ISL_417948, EPI_ISL_417949, EPI_ISL_417950, EPI_ISL_417951, EPI_ISL_417953, EPI_ISL_417955, EPI_ISL_417958, EPI_ISL_417959, EPI_ISL_417960, EPI_ISL_417962, EPI_ISL_417964, EPI_ISL_417965, EPI_ISL_417966, EPI_ISL_417968, EPI_ISL_417970, EPI_ISL_417971, EPI_ISL_417973, EPI_ISL_417974, EPI_ISL_417976, EPI_ISL_417977, EPI_ISL_417982, EPI_ISL_417983, EPI_ISL_417984, EPI_ISL_417985, EPI_ISL_418009, EPI_ISL_418017, EPI_ISL_418018, EPI_ISL_418019, EPI_ISL_418020, EPI_ISL_418021, EPI_ISL_418022, EPI_ISL_418023, EPI_ISL_418024, EPI_ISL_418025, EPI_ISL_418026, EPI_ISL_418027, EPI_ISL_418029, EPI_ISL_418030, EPI_ISL_418031, EPI_ISL_418032, EPI_ISL_418033, EPI_ISL_418034, EPI_ISL_418037, EPI_ISL_418038, EPI_ISL_418040, EPI_ISL_418046, EPI_ISL_418047, EPI_ISL_418048, EPI_ISL_418050, EPI_ISL_418052, EPI_ISL_418053, EPI_ISL_418054, EPI_ISL_418063, EPI_ISL_418064, EPI_ISL_418067, EPI_ISL_418071, EPI_ISL_418072, EPI_ISL_418073, EPI_ISL_418074, EPI_ISL_418075, EPI_ISL_418076, EPI_ISL_418077, EPI_ISL_418078, EPI_ISL_418079, EPI_ISL_418080, EPI_ISL_418081, EPI_ISL_418082, EPI_ISL_418101, EPI_ISL_418102, EPI_ISL_418103, EPI_ISL_418104, EPI_ISL_418105, EPI_ISL_418126, EPI_ISL_418127, EPI_ISL_418128, EPI_ISL_418129, EPI_ISL_418130, EPI_ISL_418131, EPI_ISL_418132, EPI_ISL_418133, EPI_ISL_418134, EPI_ISL_418135, EPI_ISL_418136, EPI_ISL_418137, EPI_ISL_418138, EPI_ISL_418139, EPI_ISL_418140, EPI_ISL_418148, EPI_ISL_418149, EPI_ISL_418150, EPI_ISL_418151, EPI_ISL_418152, EPI_ISL_418153, EPI_ISL_418154, EPI_ISL_418155, EPI_ISL_418156, EPI_ISL_418157, EPI_ISL_418158, EPI_ISL_418159, EPI_ISL_418160, EPI_ISL_418161, EPI_ISL_418162, EPI_ISL_418163, EPI_ISL_418164, EPI_ISL_418165, EPI_ISL_418183, EPI_ISL_418184, EPI_ISL_418185, EPI_ISL_418186, EPI_ISL_418187, EPI_ISL_418188, EPI_ISL_418189, EPI_ISL_418190, EPI_ISL_418191, EPI_ISL_418192, EPI_ISL_418193, EPI_ISL_418194, EPI_ISL_418195, EPI_ISL_418197, EPI_ISL_418198, EPI_ISL_418199, EPI_ISL_418200, EPI_ISL_418201, EPI_ISL_418202, EPI_ISL_418203, EPI_ISL_418204, EPI_ISL_418231, EPI_ISL_418232, EPI_ISL_418233, EPI_ISL_418235, EPI_ISL_418236, EPI_ISL_418237, EPI_ISL_418238, EPI_ISL_418239, EPI_ISL_418240, EPI_ISL_418257, EPI_ISL_418260, EPI_ISL_418263, EPI_ISL_418264 or EPI_ISL_418265 or EPI_ISL_616802 (hCoV-19/Denmark/DCGC-3024/2020).

[0175] Exemplary SARS-CoV-2 coronaviruses can also be defined or identified by genetic information provided by GenBank Accession Numbers as provided in List B below.

[0176] List B: GenBank Accession Numbers of different SARS-CoV-2 isolates:

[0177] NC_045512, LC528232, LC528233, LC529905, MN908947, MN938384, MN938385, MN938386, MN938387, MN938388, MN938389, MN938390, MN970003, MN970004, MN975262, MN975263, MN975264, MN975265, MN975266, MN975267, MN975268, MN985325, MN988668, MN988669, MN994467, MN994468, MN996527, MN996528, MN996529, MN996530, MN996531, MN997409, MT007544, MT012098, MT019529, MT019530, MT019531, MT019532, MT019533, MT020880, MT020881, MT027062, MT027063, MT027064, MT039873, MT039887, MT039888, MT039890, MT044257, MT044258, MT049951, MT050493, MT066156, MT066175, MT066176, MT072688, MT093571, MT093631, MT106052, MT106053, MT106054, MT118835, MT121215, MT123290, MT123291, MT123292, MT123293, MT126808, MT135041, MT135042, MT135043, MT135044, MT152824, MT159705, MT159706, MT159707, MT159708, MT159709, MT159710, MT159711, MT159712, MT159713, MT159714, MT159715, MT159716, MT159717, MT159718, MT159719, MT159720, MT159721, MT159722, MT163716, MT163717, MT163718, MT163719, MT163720, MT163721, MT184907, MT184908, MT184909, MT184910, MT184911, MT184912, MT184913, MT188339, MT188340, MT188341, MT192759, MT192765, MT192772 or MT192773.

[0178] SARS-CoV-2 coronavirus has been attributed the NCBI Taxonomy ID (NCBI:txid or taxID): 2697049.

[0179] In the context of the invention, any protein selected or derived from a SARS-CoV-2 may be used in the context of the invention and may be suitably encoded by the coding sequence or the nucleic acid of component A. It is further in the scope of the underlying invention, that the at least one antigenic peptide or protein may comprise or consist of a synthetically engineered or an artificial SARS-CoV-2 peptide or protein. The term “synthetically engineered” SARS-CoV-2 peptide or protein, or the term “artificial SARS-CoV-2 peptide or protein” relates to a protein that does not occur in nature. Accordingly, an “artificial SARS-CoV-2 peptide or protein” or a “synthetically engineered SARS-CoV-2 peptide or protein” may for example differ in at least one amino acid compared to the natural SARS-CoV-2 peptide or protein, and/or may comprise an additional heterologous peptide or protein element, and/or may be N-terminally or C-terminally extended or truncated.

[0180] In preferred embodiments, the nucleic acid of component A (in particular component A-1) comprises at least one coding sequence encoding at least one antigenic peptide or protein selected or derived from SARS-CoV-2, or an immunogenic fragment or immunogenic variant thereof, wherein the at least one antigenic peptide or protein comprises at least one peptide or protein that is selected or is derived from a structural protein, an accessory protein, or a replicase protein or an immunogenic fragment or immunogenic variant of any of these.

[0181] Suitably, the structural protein is selected or derived from a spike protein (S), an envelope protein (E), a membrane protein (M) or a nucleocapsid protein (N), or an immunogenic fragment or variant of any of these.

[0182] In particularly preferred embodiments of the pharmaceutical composition, the encoded at least one antigenic peptide or protein of component A (in particular component A-1) comprises or consists at least one peptide or protein selected or derived from a SARS-CoV-2 spike protein (S, S1, S2, or S1 and S2), or an immunogenic fragment or immunogenic variant of any of these.

[0183] Suitable antigenic peptide or protein sequences that are provided by the nucleic acid of component A are disclosed in Table 1, rows 1 to 41, Column A and B. In addition, further information regarding said suitable antigenic peptide or protein sequences selected or derived from SARS-CoV-2 are provided under <223> identifier of the ST.25 sequence listing.

[0184] In the following, preferred antigenic peptide or protein sequences selected or derived from SARS-CoV-2 that are provided by the nucleic acid of component A (in particular component A-1) are described in detail.

[0185] It has to be noted that where reference is made to amino acid (aa) residues and their position in a spike protein (S) of SARS-CoV-2, any numbering used herein—unless stated otherwise—relates to the position of the respective amino acid residue in a corresponding spike protein (S) of SARS-CoV-2 coronavirus isolate EPI_ISL_402128 (BetaCoV_Wuhan_WIV05_2019_EPI_ISL_402128) according to SEQ ID NO: 1. Respective amino acid positions are, if referring to SARS-CoV-2 Spike protein, exemplarily indicated for spike protein (S) of SARS-CoV-2 coronavirus isolate EPI_ISL_402128 (SEQ ID NO: 1). The person skilled in the art will of course be able to adapt the teaching provided in the present specification exemplified for SARS-CoV-2 EPI_ISL_402128 (SEQ ID NO: 1) to other antigenic peptides or proteins in other SARS-CoV-2 coronavirus isolates, e.g. to isolates including but not limited to EPI_ISL_404227, EPI_ISL_403963, EPI_ISL_403962, EPI_ISL_403931, EPI_ISL_403930, EPI_ISL_403929, EPI_ISL_402130, EPI_ISL_402129, EPI_ISL_402128, EPI_ISL_402126, EPI_ISL_402125, EPI_ISL_402124, EPI_ISL_402123, EPI_ISL_402120, EPI_ISL_402119 (further SARS-CoV-2 isolates are provided in List A and/or List B)

[0186] Protein annotation for SARS-CoV-2 spike protein (S) was performed using SEQ ID NO: 1 as a reference protein. The full length S of SARS-CoV-2 reference protein has 1273 amino acid residues, and comprises the following elements:
[0187] secretory signal peptide: amino acid position aa 1 to aa 15 (see SEQ ID NO: 28)
[0188] spike protein fragment S1: amino acid position aa 1 to aa 681 (see SEQ ID NO: 27)
[0189] receptor binding domain (RBD): amino acid position aa 319 to aa 541 (see SEQ ID NO: 13243)
[0190] critical neutralisation domain (CND): amino acid position aa 329 to aa 529 (see SEQ ID NO: 13310)
[0191] spike protein fragment S2: amino acid position aa 682 to aa 1273 (see SEQ ID NO: 30)
[0192] transmembrane domain (TM): amino acid position aa 1212 to aa 1273 (see SEQ ID NO: 49)
[0193] transmembrane domain (TMflex): amino acid position aa 1148 to aa 1273 (see SEQ ID NO: 13176)

[0194] It has to be noted that variation on amino acid level naturally occurs between spike proteins derived from different SARS-CoV-2 isolates (exemplary SARS-CoV-2 isolates are provided in List A and List B). In the context of the invention, such amino acid variations can be applied to each antigenic peptide or protein derived from a SARS-CoV-2 spike protein as described herein.

[0195] Accordingly, each spike protein of SARS-CoV-2 provided herein and contemplated as suitable antigen in the context of the invention may have one ore more of the following amino acid variations/substitutions (amino acid positions according to reference SEQ ID NO: 1):

[0196] D614G or G614D; H49Y or Y49H; V367F or F367V; P1263L or L1263P; V483A or A483V; S939F or F939S; 5943P or P943S; L5F or FSL; L8V or V8L; S940F or F940S; C1254F or F1254C; Q239K or K239Q; M153T or T153M; V1040F or F1040V; A8455 or 5845A; Y145H or H145Y; A831V or V831A; M1229I or I1229M; H69 or H69del/aa deleted; V70 or H70del/aa deleted; H69_V70 or H69del and H70del/aa deleted; A222V or V222A; Y453F or F453Y; S477N or N477S; 1692V or V6921; R403K or K403R; K417N or N417K; N4375 or 5437N; N439K or K439N; V445A or A445V; V445I or 111′15V; V445F or F′1′15V; G446V or V446G; G446S or 5446G; G446A or A446G; L455F or F455L; F456L or L456F; K458N or N458K; A475V or V475A; G476S or S476G; G476A or A476G; S4771 or 1477S; S477R or R477S; S477G or G477S; 5477T or T477S; T4781 or 1478T; T478K or K478T; T478R or R478T; T478A or A478T; E484Q or Q484E; E484K or K484E; E484A or A484E; E484D or D484E; G485R or R485G; G485S or S485G, F486L or L486F; N4871 or 1487N; Y489H or H489Y; F490S or S490F; F490L or L490F; Q493L or L4930; Q493K or K493Q; S494P or P494S; S494L or L494S; P499L or L499P; T5001 or 1500T; N501Y or Y501N; N501T or T501N; N501S or S501N; V503F or F503V; V5031 or 1503V; G504D or D504G; Y505W or W505Y; 0506K or K5060; 0506H or H5060; H69 or H69del/aa deleted; V70 or H70del/aa deleted; H69_V70 or H69del and H70del/aa deleted; A222V or V222A; Y453F or F453Y; S477N or N477S; 1692V or V6921; R403K or K403R; K417N or N417K; N4375 or 5437N; N439K or K439N; V445A or A445V; V445I or 1445V; V445F or F445V; G446V or V446G; G446S or S446G; G446A or A446G; L455F or F455L; F456L or L456F; K458N or N458K; A475V or V475A; G476S or S476G; G476A or A476G; S4771 or 1477S; S477R or R477S; S477G or G477S; 5477T or T477S; T4781 or 1478T; T478K or K478T; T478R or R478T; T478A or A478T; E484Q or Q484E; E484K or K484E; E484A or A484E; E484D or D484E; G485R or R485G; G485S or S485G; F486L or L486F; N4871 or 1487N; Y489H or H489Y; F490S or S490F; F490L or L490F; Q493L or L493Q; Q493K or K493Q; S494P or P494S; S494L or L494S; P499L or L499P; T5001 or 1500T; N501Y or Y501N; N501T or T501N; N501S or S501N; V503F or F503V; V5031 or 1503V; G504D or D504G; Y505W or W505Y; 0506K or K5060; 0506H or H5060; Y144 or Y144del/aa del; A570D or D570A; P681H or H681P; T716I or 1716T; S982A or A982S; D1118H or H1118D; L18F or F18L; D80A or A80D; D215G or G215D; L242 or L242del/aa deleted; A243 or A243del/aa deleted; L244 or L244del/aa deleted; L242_A243_L244 or L242del and A243del and L244del/aa deleted; 82461 or 1246R; A701V or V701A; T20N or N20T; P26S or S26P; D138Y or Y138D; R190S or S190R; H655Y or Y655H; T10271 or I1027T; S131 or 113S; W152C or C152W; L452R or R452L; R346T or T346R; P384L or L384P; L452M or M452L; F456A or A456F; F456K or K456F; F456V or V456F; E484P or P484E; K417T or T417K; G447V or V447G; L4520 or 0452L; A475S or S475A; F4861 or 1486F; F490Y or Y490F; Q493R or R493Q; S494A or A494S; P499H or H499P; P499S or S499P; G502V or V502G; T748K or K748T; A522S or S522A; and/or V1176F or F1176V.

[0197] The following amino acid variations (amino acid positions according to reference SEQ ID NO: 1) are particularly preferred:
[0198] H69del, V70del, Y144del, N501Y, A570D, D614G, P681H, T716I, S982A, and D1118H
[0199] L18F, D80A, D215G, L242del, A243del, L244del, R2461, K417N, E484K, N501Y, D614G, and A701V
[0200] K417N, E484K, N501Y, and D614G
[0201] E484K and D614G
[0202] L18F, T20N, P26S, D138Y, R190S, K417T, E484K, N501Y, D614G, H655Y, and T10271
[0203] S131, W152C, L452R, and D614G
[0204] delH69, delV70, Y453F, D614G, 1692V, and M1229I
[0205] E484K, E484P, or E484Q
[0206] G446V
[0207] G485R

[0208] In preferred embodiments, the SARS-CoV-2 spike proteins (S) comprises the following amino acid variations (amino acid positions according to reference SEQ ID NO: 1): L18F, D80A, D215G, delL242, delA243, delL244, R2461, K417N, E484K, N501Y, D614G, A701V.

[0209] Suitable SARS-CoV-2 spike proteins (S) may be selected or derived from emerging SARS-CoV-2 variants according to the following Table:

| Variant | Amino acid changes in spike protein |
|---|---|
| Mink Cluster 5 variant GISAID: EPI_ISL_616802 (hCoV- | delH69, delV70, Y453F, D614G, I692V, M1229I |
| 19/Denmark/DCGC-3024/2020) | |
| B.1.1.7 (a.k.a., 20B/501Y.V1, 501Y.V1, Variant of Concern- | delH69, delV70, delY144, N501Y, A570D, D614G, |
| 202012/01, VOC-202012/01, VUI-202012/01, B117, “UK variant”) | P681H, T716I, S982A, D1118H |
| B.1.351 (a.k.a., 20C/501Y.V2, 501Y.V2, N501Y.V2, “SA variant”, | L18F, D80A, D215G, delL242, delA243, delL244, |
| “South Africa variant”) | R246I, K417N, E484K, N501Y, D614G, A701V |
| P.1 (a.k.a., “Brazil variant” = “Japan variant”) | L18F, T20N, P26S, D138Y, R190S, K417T, E484K, |
| | N501Y, D614G, H655Y, T1027I |
| CAL.20C (a.k.a., “California variant”) | S13I, W152C, L452R, D614G |
| NCBI: QQN00429.1 (CAL.20.C example: SARS-CoV- | |
| 2/human/USA/CA-LACPHL-AF00114/2021) | |

[0210] In a particularly preferred embodiment, the SARS-CoV-2 spike proteins (S) is selected or derived from B.1.351.

[0211] In some embodiments, a fragment of a SARS-CoV-2 spike protein (S) may be encoded by the nucleic acid of component A, wherein said fragment may be N-terminally truncated, lacking the N-terminal amino acids 1 to up to 100 of the full length SARS-CoV-2 coronavirus reference protein (SEQ ID NO: 1) and/or wherein said fragment may be C-terminally truncated, lacking the C-terminal amino acids (aa) 531 to up to aa 1273 of the full length SARS-CoV-2 coronavirus reference protein (SEQ ID NO: 1). Such “fragment of a spike protein (S)” may additionally comprise amino acid substitutions (as described below) and may additionally comprise at least one heterologous peptide or protein element (as described below). In preferred embodiments, a fragment of a SARS-CoV-2 spike protein (S) may be C-terminally truncated, thereby lacking the C-terminal transmembrane domain (that is, lacking aa 1212 to aa 1273 or lacking aa 1148 to aa 1273).

[0212] In some embodiments, the encoded at least one antigenic peptide or protein of component A comprises or consists of a SARS-CoV-2 spike protein (S), wherein the spike protein (S) lacks the transmembrane domain (TM) (amino acid position aa 1212 to aa 1273). In embodiments, the encoded at least one antigenic peptide or protein comprises or consists of a SARS-CoV-2 spike protein (S), wherein the spike protein (S) lacks an extended part of the transmembrane domain (TMflex) (amino acid position aa 1148 to aa 1273). Without wishing to being bound to theory, a SARS-CoV-2 spike protein (S) lacking the transmembrane domain (TM or TMflex) as defined herein could be suitable for a SARS-CoV-2 vaccine, as such a protein would be soluble and not anchored in the cell membrane. A soluble protein may therefore be produced (that is translated) in higher concentrations upon administration to a subject, leading to improved immune responses.

[0213] Without wishing to being bound to theory, RBD (aa 319 to aa 541) and CND (aa 29 to aa 529) domains may be crucial for immunogenicity of SARS-CoV-2 spike protein (S). Both regions are located at the 51 fragment of the spike protein. Accordingly, it may be suitable in the context of the invention that the antigenic peptide or protein comprises or consists of an 51 fragment of the spike protein or an immunogenic fragment or immunogenic variant thereof.

[0214] Suitably, a 51 fragment of SARS-CoV-2 may comprise at least an RBD and/or a CND domain as defined above.

[0215] In preferred embodiments, the encoded at least one antigenic peptide or protein comprises or consists of a receptor-binding domain (RBD; aa 319 to aa 541), wherein the RBD comprises or consists of a spike protein fragment, or an immunogenic fragment or immunogenic variant thereof.

[0216] In further preferred embodiments, the encoded at least one antigenic peptide or protein comprises or consists of a truncated receptor-binding domain (truncRBD; aa 334 to aa 528), wherein the RBD comprises or consists of a spike protein fragment, or an immunogenic fragment or immunogenic variant thereof.

[0217] Such “fragment of a spike protein (S)” (RBD; aa 319 to aa 541 or truncRBD, aa 334 to aa 528), may additionally comprise amino acid substitutions (as described below) and may additionally comprise at least one heterologous peptide or protein element (as described below).

[0218] In particularly preferred embodiments, the encoded at least one antigenic peptide or protein of component A comprises or consists of a SARS-CoV-2 spike protein (S), wherein the SARS-CoV-2 spike protein (S) comprises or consists of a spike protein fragment 51, or an immunogenic fragment or immunogenic variant thereof.

[0219] In preferred embodiments, the encoded at least one antigenic peptide or protein comprises a SARS-CoV-2 spike protein fragment 51, and lacks at least 70%, 80%, 90%, preferably 100% of spike protein fragment S2 (aa 682 to aa 1273). Such embodiments may be beneficial as the SARS-CoV-2 S1 fragment comprises neutralizing epitopes without potential problems of full length protein comprising S1 and S2.

[0220] Without wishing to being bound to theory, it may be suitable that the antigenic peptide or protein of component A comprises or consists of SARS-CoV-2 spike protein fragment S1 and (at least a fragment of) SARS-CoV-2 spike protein fragment S2, because the formation of an immunogenic SARS-CoV-2 spike protein may be promoted.

[0221] Accordingly, in particularly preferred embodiments, the encoded at least one antigenic peptide or protein of component A comprises or consists of a SARS-CoV-2 spike protein (S), wherein the SARS-CoV-2 spike protein (S) comprises or consists of a SARS-CoV-2 spike protein fragment S1 or an immunogenic fragment or immunogenic variant thereof, and SARS-CoV-2 spike protein fragment S2 or an immunogenic fragment or immunogenic variant thereof.

[0222] In particularly preferred embodiments, the encoded at least one antigenic peptide or protein of component A comprises or consists of a full length SARS-CoV-2 spike protein or an immunogenic fragment or immunogenic variant of any of these.

[0223] The term “full length SARS-CoV-2 spike protein” has to be understood as a SARS-CoV-2 spike protein, preferably derived from a SARS-CoV-2 cornavirus, having an amino acid sequence corresponding to essentially the full spike protein. Accordingly, a “full length spike protein” may comprise aa 1 to aa 1273 (reference protein: SEQ ID NOs: 1). Accordingly, a full length SARS-CoV-2 spike protein may typically comprise a secretory signal peptide, a spike protein fragment S1, a spike protein fragment S2, a receptor binding domain (RBD), and a critical neutralisation domain CND, and a transmembrane domain. Notably, also variants that comprise certain amino acid substitutions (e.g. for allowing pre-fusion stabilization of the S protein) or natural occurring amino acid deletions are encompassed by the term “full length SARS-CoV-2 spike protein”.

[0224] In particularly preferred embodiments, the SARS-CoV-2 spike protein (S) that is provided by the nucleic acid of component A is designed or adapted to stabilize the antigen in pre-fusion conformation. A pre-fusion conformation is particularly advantageous in the context of an efficient SARS-CoV-2 vaccine, as several potential epitopes for neutralizing antibodies may merely be accessible in said pre-fusion protein conformation. Furthermore, remaining of the protein in the pre-fusion conformation is aimed to avoid immunopathological effects, like e.g. enhanced disease and/or antibody dependent enhancement (ADE).

[0225] In preferred embodiments, administration of a nucleic acid (or a composition or vaccine) encoding pre-fusion stabilized spike protein to a subject elicits spike protein neutralizing antibodies and does not elicit disease-enhancing antibodies. In particular, administration of a nucleic acid (or a composition or vaccine) encoding pre-fusion stabilized spike protein to a subject does not elicit immunopathological effects, like e.g. enhanced disease and/or antibody dependent enhancement (ADE).

[0226] Accordingly, in preferred embodiments, the nucleic acid of component A comprises at least one coding sequence encoding at least one antigenic peptide or protein that is selected or derived from an SARS-CoV-2 coronavirus, wherein the at least one antigenic peptide or protein is selected or derived or from a spike protein (S), wherein the spike protein (S) is a pre-fusion stabilized spike protein (S_stab). Suitably, said pre-fusion stabilized spike protein comprises at least one pre-fusion stabilizing mutation.

[0227] Stabilization of the SARS-CoV-2 spike protein may be obtained by substituting at least one amino acids at position K986 and/or V987 with amino acids that stabilize the spike protein in a perfusion conformation (amino acid positions according to reference SEQ ID NO: 1).

[0228] In embodiments, the pre-fusion stabilizing mutation of SARS-CoV-2 spike protein comprises an amino acid substitution at position K986, wherein the amino acids K986 is substituted with one selected from A, I, L, M, F, V, G, or P (amino acid positions according to reference SEQ ID NO: 1), preferably wherein the amino acids K986 is substituted with P. In embodiments, the pre-fusion stabilizing mutation comprises an amino acid substitution at position V987, wherein the amino acids V987 is substituted with one selected from A, I, L, M, F, V, G, or P (amino acid positions according to reference SEQ ID NO: 1), preferably wherein the amino acids V987 is substituted with P.

[0229] Suitably, stabilization of the SARS-CoV-2 spike protein may be obtained by substituting two consecutive amino acids at position K986 and V987 with amino acids that stabilize the spike protein in a perfusion conformation (Amino acid positions according to reference SEQ ID NO: 1).

[0230] In preferred embodiments, the pre-fusion stabilizing mutation of the SARS-CoV-2 spike protein comprises an amino acid substitution at position K986 and V987, wherein the amino acids K986 and/or V987 are substituted with one selected from A, I, L, M, F, V, G, or P (amino acid positions according to reference SEQ ID NO: 1).

[0231] Preferably, stabilization of the perfusion conformation is obtained by introducing two consecutive proline substitutions at residues K986 and V987 in the SARS-CoV-2 spike protein (Amino acid positions according to reference SEQ ID NO: 1).

[0232] Accordingly, in preferred embodiments, the pre-fusion stabilized spike protein (S_stab) of SARS-CoV-2 comprises at least one pre-fusion stabilizing mutation, wherein the at least one pre-fusion stabilizing mutation comprises the following amino acid substitutions: K986P and V987P (amino acid positions according to reference SEQ ID NO: 1).

[0233] Accordingly, any NCBI Protein Accession numbers provided above, or any protein selected from SEQ ID NOs: 1-9, 274-340, 22737, 22739, 22741, 22743, 22745, 22747, 22749, 22751, 22753, 22755, 22757, 22929-22946 or fragments or variants thereof can be chosen by the skilled person to introduce such amino acid changes into SARS-CoV-2 spike proteins, preferably amino acid substitutions: K986P and V987P (amino acid positions according to reference SEQ ID NO: 1).

[0234] In preferred embodiments, the at least one pre-fusion stabilizing mutation of SARS-CoV-2 spike protein comprises a cavity filling mutation that further stabilizes the pre-fusion state, wherein said mutation/amino acid substitution is selected from the list comprising T887W; A1020W; T887W and A1020W; or P1069F (amino acid positions according to reference SEQ ID NO: 1).

[0235] In some embodiments, at least one of the following amino acid substitutions T887W; A1020W; T887W and A1020W; or P1069F may be combined with a (K986P and V987P) substitution in the SARS-CoV-2 spike protein (amino acid positions according to reference SEQ ID NO: 1).

[0236] In particularly preferred embodiments, the SARS-CoV-2 spike protein comprises at least one of the following amino acid substitutions (amino acid positions according to reference SEQ ID NO: 1):
[0237] T887W; K986P and V987P
[0238] A1020W; K986P and V987P
[0239] T887W and A1020W; K986P and V987P
[0240] P1069F; K986P and V987P

[0241] Accordingly, any NCBI protein accession numbers of SARS-CoV-2 provided above, or any protein selected from SEQ ID NOs: 1-9, 274-340, 22737, 22739, 22741, 22743, 22745, 22747, 22749, 22751, 22753, 22755, 22757, 22929-22946 or fragments or variants thereof, can be chosen by the skilled person to introduce such amino acid changes, suitably amino acid substitutions selected from T887W; A1020W; T887W and A1020W; or P1069F; or amino acid substitutions selected from (T887W; K986P and V987P); (A1020W; K986P and V987P); (T887W and A1020W; K986P and V987P); (P1069F; K986P and V987P) (amino acid positions according to reference SEQ ID NO: 1).

[0242] In embodiments, at least one of the following amino acid substitutions F817P, A892P, A899P and A942P may be combined with a (K986P and V987P) substitution (amino acid positions according to reference SEQ ID NO: 1).

[0243] In embodiments, the SARS-CoV-2 coronavirus spike protein comprises at least one of the following amino acid substitutions (Amino acid positions according to reference SEQ ID NO: 1):
[0244] F817P; K986P and V987P
[0245] A892P; K986P and V987P
[0246] A899P; K986P and V987P
[0247] A942P; K986P and V987P

[0248] In particularly preferred embodiments, the SARS-CoV-2 coronavirus spike protein comprises the following amino acid substitutions (Amino acid positions according to reference SEQ ID NO: 1):
[0249] F817P, A892P, A899P, A942P, K986P and V987P (S_stab_PP_hex)

[0250] Accordingly, any NCBI protein accession numbers provided above, or any protein selected from SEQ ID NOs: 1-9, 274-340, 22737, 22739, 22741, 22743, 22745, 22747, 22749, 22751, 22753, 22755, 22757, 22929-22946 or fragments or variants thereof can be chosen by the skilled person to introduce such amino acid changes, suitably amino acid substitutions selected from F817P, A892P, A899P, A942P; or amino acid substitutions selected from (F817P; K986P and V987P); (A892P; K986P and V987P); (A899P; K986P and V987P); (A942P; K986P and V987P); (F817P, A892P, A899P, A942P, K986P and V987P) (amino acid positions according to reference SEQ ID NO: 1).

[0251] In preferred embodiments, the at least one pre-fusion stabilizing mutation of SARS-CoV-2 spike protein comprises a mutated protonation site that further stabilizes the pre-fusion state, wherein said mutation/amino acid substitution is selected from H10480 and H1064N; H1083N and H1101N; or H10480 and H1064N and H1083N and H1101N (amino acid positions according to reference SEQ ID NO: 1).

[0252] In embodiments, at least one of the following amino acid substitutions H10480 and H1064N; H1083N and H1101N; or H10480 and H1064N and H1083N and H1101N may be combined with a (K986P and V987P) substitution (amino acid positions according to reference SEQ ID NO: 1) into a SARS-CoV-2 spike protein.

[0253] In particularly preferred embodiments, the SARS-CoV-2 spike protein comprises at least one of the following amino acid substitutions (Amino acid positions according to reference SEQ ID NO: 1):
[0254] H10480 and H1064N; K986P and V987P
[0255] H1083N and H1101N; K986P and V987P
[0256] H1048Q and H1064N and H1083N and H1101N; K986P and V987P

[0257] Accordingly, any SARS-CoV-2 NCBI protein accession numbers provided above, or any protein selected from SEQ ID NOs: 1-9, 274-340, 22737, 22739, 22741, 22743, 22745, 22747, 22749, 22751, 22753, 22755, 22757, 22929-22946 or fragments or variants thereof can be chosen by the skilled person to introduce such amino acid changes into a SARS-CoV-2 spike protein, suitably amino acid substitutions selected from H10480 and H1064N; H1083N and H1101N; or H10480 and H1064N and H1083N and H1101N; or amino acid substitutions selected from (H1048Q and H1064N; K986P and V987P); (H1083N and H1101N; K986P and V987P); (H10480 and H1064N and H1083N and H1101N; K986P and V987P); (amino acid positions according to reference SEQ ID NO: 1).

[0258] In preferred embodiments, the at least one pre-fusion stabilizing mutation of the SARS-CoV-2 spike protein comprises an artificial intramolecular disulfide bond. Such an artificial intramolecular disulfide bond can be introduced to further stabilize the membrane distal portion of the SARS-CoV-2 S protein (including the N-terminal region) in the pre-fusion conformation; that is, in a conformation that specifically binds to one or more pre-fusion specification antibodies, and/or presents a suitable antigenic site that is present on the pre-fusion conformation but not in the post fusion conformation of the SARS-CoV-2 S protein.

[0259] In preferred embodiments, the at least one pre-fusion stabilizing mutation of the SARS-CoV-2 spike protein comprises an artificial intramolecular disulfide bond, preferably wherein the at least one artificial intramolecular disulfide bond comprises at least two of the following amino acid substitutions selected from the list comprising I7120, I7140, P715C, T8740, G889C, A890C, 19090, N914C, Q9650, F970C, A9720, R995C, G999C, S1003C, L1034C, V1040C, Y1047C, S1055C, P1069C, T1077C, Y1110C, or S1123C (amino acid positions according to reference SEQ ID NO: 1).

[0260] In preferred embodiments, the at least one pre-fusion stabilizing mutation of the SARS-CoV-2 spike protein comprises an artificial intramolecular disulfide bond, wherein the at least one artificial intramolecular disulfide bond comprises at least one of the following amino acid substitutions: 1712C and T1077C; I714C and Y1110C; P715C and P1069C; G889C and L1034C; I909C and Y1047C; Q965C and S1003C; F970C and G999C; A972C and R995C; A890C and V1040C; T8740 and S1055C; or N914C and S1123C (amino acid positions according to reference SEQ ID NO: 1).

[0261] In embodiments, the at least one pre-fusion stabilizing mutation of the SARS-CoV-2 spike protein comprises 2, 3, 4, 5, 6, 7, or 8 different artificial intramolecular disulfide bonds, wherein each may be selected from the following amino acid substitutions: I712C and T10770; I7140 and Y1110C; P715C and P1069C; G889C and L1034C; I909C and Y1047C; Q965C and S1003C; F970C and G999C; A9720 and R995C; A890C and V1040C; N914C and S1123C; T8740 and 510550; or N914C and S1123C (amino acid positions according to reference SEQ ID NO: 1).

[0262] In embodiments, at least one, preferably 2, 3, 4, 5 or more of the following amino acid substitutions I7120 and T1077C; I714C and Y1110C; P715C and P1069C; G889C and L1034C; I909C and Y1047C; Q965C and S1003C; F970C and G999C; A972C and R995C; A890C and V1040C; T8740 and S1055C; or N914C and S1123C may be combined with a (K986P and V987P) substitution. For example, a pre-fusion stabilized SARS-CoV-2 S protein may comprise two different artificial intramolecular disulfide bonds, e.g. I712C and T1077C; P715C and P1069C; and additionally a K986P and V987P substitution, etc. (amino acid positions according to reference SEQ ID NO: 1).

[0263] In particularly preferred embodiments, the SARS-CoV-2 spike protein comprises at least one of the following amino acid substitutions (amino acid positions according to reference SEQ ID NO: 1):
[0264] I712C and T1077C; K986P and V987P
[0265] I714C and Y1110C; K986P and V987P
[0266] P715C and P1069C; K986P and V987P
[0267] G889C and L1034C; K986P and V987P
[0268] I909C and Y1047C; K986P and V987P
[0269] Q965C and S1003C; K986P and V987P
[0270] F970C and G999C; K986P and V987P
[0271] A972C and R995C; K986P and V987P
[0272] A890C and V1040C; K986P and V987P
[0273] T8740 and S1055C; K986P and V987P
[0274] N914C and S1123C; K986P and V987P

[0275] Accordingly, any SARS-CoV-2 NCBI protein accession numbers provided above, or any protein selected from SEQ ID NOs: 1-9, 274-340, 22737, 22739, 22741, 22743, 22745, 22747, 22749, 22751, 22753, 22755, 22757, 22929-22946 or fragments or variants thereof can be chosen by the skilled person to introduce such amino acid changes into a SARS-CoV-2 spike protein, suitably amino acid substitutions selected from I712C and T10770; 17140 and Y1110C; P715C and P1069C; G889C and L1034C; I909C and Y1047C; Q965C and S1003C; F970C and G999C; A9720 and R9950; A8900 and V1040C; T8740 and S1055C; or N914C and S1123C; or amino acid substitutions selected from (1712C; T1077C; K986P; V987P) or (1714C; Y1110C; K986P; V987P) or (P715C; P1069C; K986P; V987P) or (G889C; L1034C; K986P; V987P) or (1909C; Y1047C; K986P; V987P) or (09650; S1003C; K986P; V987P) or (F970C; G999C; K986P; V987P) or (A972C; R995C; K986P; V987P) or (A8900 and V1040C; K986P and V987P) or (T874C and S1055C; K986P and V987P) or (N914C and S1123C; K986P and V987P) (amino acid positions according to reference SEQ ID NO: 1).

[0276] It has to be emphasized that in the context of the invention any SARS-CoV-2 spike protein may be mutated or modified as described above (exemplified for reference protein SEQ ID NO: 1) to stabilize the spike protein in the pre-fusion conformation.

[0277] According to various preferred embodiments, the nucleic acid of component A encodes at least one antigenic peptide or protein selected or derived from SARS-CoV-2 as defined herein and, additionally, at least one heterologous peptide or protein element, preferably selected or derived from a signal peptide, a linker, a helper epitope, an antigen clustering element, a trimerization element, a transmembrane element, and/or a VLP-forming sequence.

[0278] Suitably, the at least one heterologous peptide or protein element may promote or improve secretion of the encoded antigenic peptide or protein of SARS-CoV-2 (e.g. via secretory signal sequences), promote or improve anchoring of the encoded antigenic peptide or protein of the invention in the plasma membrane (e.g. via transmembrane elements), promote or improve formation of antigen complexes (e.g. via multimerization domains or antigen clustering elements), or promote or improve virus-like particle formation (VLP forming sequence). In addition, the nucleic acid of component A may additionally encode peptide linker elements, self-cleaving peptides, immunologic adjuvant sequences or dendritic cell targeting sequences.

[0279] In preferred embodiments, the nucleic acid of component A encoding at least one antigenic protein selected or derived from SARS-CoV-2 as defined herein, additionally encodes at least one heterologous trimerization element, an antigen clustering element, or a VLP forming sequence.

[0280] In preferred embodiments, the antigen clustering elements may be selected from a ferritin element, or a lumazine synthase element, surface antigen of Hepatitis B virus (HBsAg), or encapsulin. Expressing a stably clustered SARS-CoV-2 spike protein, preferably in in its prefusion conformation may increases the magnitude and breadth of neutralizing activity against the encoded SARS-CoV-2 peptide/protein.

[0281] In preferred embodiments, lumazine synthase is used to promote antigen clustering of the SARS-CoV-2 protein and may therefore promote or enhance immune responses of the encoded SARS-CoV-2 antigen, preferably the SARS-CoV-2 spike protein. In preferred embodiments, ferritin is used to promote the antigen clustering of the SARS-CoV-2 protein and may therefore promote immune responses of the encoded SARS-CoV-2 antigen, preferably the SARS-CoV-2 spike protein. In preferred embodiments, HBsAg is used to promote the antigen clustering of the SARS-CoV-2 protein and may therefore promote immune responses of the encoded SARS-CoV-2 antigen, preferably the SARS-CoV-2 spike protein. In preferred embodiments, encapsulin is used to promote the antigen clustering of the SARS-CoV-2 protein and may therefore promote immune responses of the encoded SARS-CoV-2 antigen, preferably the SARS-CoV-2 spike protein.

[0282] In some embodiments where the coding sequence of component A additionally encodes heterologous antigen clustering element, it is particularly preferred and suitable to generate a fusion protein comprising an antigen clustering element and an antigenic peptide or protein derived from SARS-CoV-2. Suitably, said antigenic peptide or protein, preferably the spike protein, is lacking the C-terminal transmembrane domain (TM) (lacking aa 1212 to aa 1273) or is lacking a part of the C-terminal transmembrane domain (TMflex), e.g. lacking aa 1148 to aa 1273.

[0283] Accordingly, any amino acid sequences being identical or at least 50%, 60%, 70%, 80%, 85%, 86%, 87%, 88%, 89%, 90%, 91%, 92%, 93%, 94%, 95%, 96%, 97%, 98%, or 99% identical to any one of SEQ ID NOs: 1-26, 274-1278, 13521-13587, 22732, 22737-22758, 22929-22964 can be modified to remove the endogenous transmembrane domain (TM) at position aa 1212 to aa 1273 and may therefore be used as “C-terminally truncated” SARS-CoV-2 proteins in the context of the invention (amino acid positions according to reference SEQ ID NO: 1). Furthermore, any amino acid sequences being identical or at least 50%, 60%, 70%, 80%, 85%, 86%, 87%, 88%, 89%, 90%, 91%, 92%, 93%, 94%, 95%, 96%, 97%, 98%, or 99% identical to any one of SEQ ID NOs: 1-26, 274-1278, 13521-13587, 22732, 22737-22758, 22929-22964 can be modified to remove a part the endogenous transmembrane domain (TMflex) at position aa 1148 to aa 1273 and may therefore be used as “C-terminally truncated” SARS-CoV-2 proteins in the context of the invention (Amino acid positions according to reference SEQ ID NO: 1). Suitable spike proteins lacking the C-terminal transmembrane domain (TM or TMflex) may be selected from SEQ ID NOs: 31-39, 1614-3623, 13377-13510.

[0284] In other embodiments, where the coding sequence of component A additionally encodes heterologous antigen clustering element as defined above, it is particularly preferred and suitable to generate a fusion protein comprising an antigen clustering element and an antigenic peptide or protein selected or derived from SARS-CoV-2 spike protein fragment S1 (lacking S2 and/or TM and/or TMflex). Further, it may be suitable to use linker elements for separating the heterologous antigen clustering element from the antigenic peptide or protein (e.g. a linker according to SEQ ID NO: 115, 13148, 13152).

[0285] In preferred embodiments, the trimerization element may be selected from a foldon element. In preferred embodiments, the foldon element is a fibritin foldon element. Expressing a stable trimeric spike protein, preferably in its prefusion conformation, may increases the magnitude and breadth of neutralizing activity against SARS-CoV-2.

[0286] In particularly preferred embodiments, a fibritin foldon element is used to promote the antigen trimerization and may therefore promote immune responses of the encoded SARS-CoV-2antigen, preferably SARS-CoV-2 spike protein. Preferably, the foldon element is or is derived from a bacteriophage, preferably from bacteriophage T4, most preferably from fibritin of bacteriophage T4.

[0287] In embodiments where the coding sequence of the nucleic acid of component A additionally encodes heterologous trimerization element, it is particularly preferred and suitable to generate a fusion protein comprising a trimerization element and an antigenic peptide or protein derived from SARS-CoV-2. Suitably, said antigenic peptide or protein, preferably the spike protein derived from SARS-CoV-2 that is lacking the C-terminal transmembrane domain (lacking aa 1212 to aa 1273), or is lacking a part of the C-terminal transmembrane domain (TMflex), e.g. lacking aa 1148 to aa 1273.

[0288] In other embodiments, where the coding sequence of the nucleic acid of component A additionally encodes heterologous trimerization element as defined above, it is particularly preferred and suitable to generate a fusion protein comprising an trimerization element and an antigenic peptide or protein derived from SARS-CoV-2 spike protein fragment S1 (lacking S2 and/or TM and/or TMflex). Further, it may be suitable to use linker elements for separating the heterologous antigen clustering element from the antigenic peptide or protein (e.g. a linker according to SEQ ID NO: 115, 13148, 13152).

[0289] In preferred embodiments, a VLP forming sequence may be selected and fused to the SARS-CoV-2 antigen as defined herein. Expressing a stably clustered SARS-CoV-2spike protein in VLP form may increases the magnitude and breadth of neutralizing activity against SARS-CoV-2. VLPs structurally mimic infectious viruses and they can induce potent cellular and humoral immune responses.

[0290] Suitable VLP forming sequences may be selected from elements derived from Hepatitis B virus core antigen, HIV-1 Gag protein, or Woodchuck hepatitis core antigen element (WhcAg).

[0291] In particularly preferred embodiments, the at least one VLP-forming sequence is a Woodchuck hepatitis core antigen element (WhcAg). The WhcAg element is used to promote VLP formation and may therefore promote immune responses of the encoded coronavirus antigen, preferably spike protein.

[0292] In embodiments where the coding sequence of the nucleic acid of component A additionally encodes heterologous VLP forming sequence, it is particularly preferred and suitable to generate a fusion protein comprising a VLP forming sequence and an antigenic peptide or protein derived from SARS-CoV-2. Suitably, said antigenic peptide or protein, preferably the spike protein derived from SARS-CoV-2 that is lacking the C-terminal transmembrane domain (lacking aa 1212 to aa 1273), or is lacking a part of the C-terminal transmembrane domain (TMflex), e.g. lacking aa 1148 to aa 1273.

[0293] Accordingly, any amino acid sequences being identical or at least 50%, 60%, 70%, 80%, 85%, 86%, 87%, 88%, 89%, 90%, 91%, 92%, 93%, 94%, 95%, 96%, 97%, 98%, or 99% identical to any one of SEQ ID NOs: 1-26, 274-1278, 13521-13587, 22732, 22737-22758, 22929-22964 can be modified to lack the endogenous transmembrane element at position aa 1212 to aa 1273 and may therefore be used as “C-terminally truncated” SARS-CoV-2 S proteins in the context of the invention. Furthermore, any amino acid sequences being identical or at least 50%, 60%, 70%, 80%, 85%, 86%, 87%, 88%, 89%, 90%, 91%, 92%, 93%, 94%, 95%, 96%, 97%, 98%, or 99% identical to any one of SEQ ID NOs: 1-26, 274-1278, 13521-13587, 22732, 22737-22758, 22929-22964 can be modified to remove a part the endogenous transmembrane domain (TMflex) at position aa 1148 to aa 1273 and may therefore be used as “C-terminally truncated” SARS-CoV-2 S proteins in the context of the invention (amino acid positions according to reference SEQ ID NO: 1). Suitable SARS-CoV-2 spike proteins lacking the C-terminal transmembrane domain (TM or TMflex) may be selected from SEQ ID NOs: 31-39, 1614-3623, 13377-13510.

[0294] In other embodiments, where the coding sequence of the nucleic acid additionally encodes heterologous VLP-forming sequence as defined above, it is particularly preferred and suitable to generate a fusion protein comprising a VLP-forming sequence and an antigenic peptide or protein derived from SARS-CoV-2 spike protein fragment S1 (lacking S2 and/or TM and/or TMflex). Further, it may be suitable to use linker elements for separating the heterologous antigen clustering element from the antigenic peptide or protein (e.g. a linker according to SEQ ID NO: 115, 13148, 13152).

[0295] In embodiments, the antigenic peptide or protein comprises a heterologous signal peptide as defined above. A heterologous signal peptide may be used to improve the secretion of the encoded SARS-CoV-2 antigen.

[0296] In embodiments where the coding sequence of the nucleic acid of component A additionally encodes heterologous secretory signal peptide, it is particularly preferred and suitable to generate a fusion protein comprising a heterologous secretory signal peptide and an antigenic peptide or protein derived from SARS-CoV-2. Suitably, said antigenic peptide or protein, preferably the spike protein derived from SARS-CoV-2 is lacking the N-terminal endogenous secretory signal peptide (lacking aa 1 to aa 15). Accordingly, any amino acid sequences being identical or at least 50%, 60%, 70%, 80%, 85%, 86%, 87%, 88%, 89%, 90%, 91%, 92%, 93%, 94%, 95%, 96%, 97%, 98%, or 99% identical to any one of SEQ ID NOs: 1-26, 274-1278, 13521-13587, 22732 or 22737-22758, 22929-22964 can be modified to lack the endogenous secretory signal peptide at position aa 1 to aa 15 and may therefore be used as “N-terminally truncated” SARS-CoV-2 proteins in the context of the invention.

[0297] In the following List 1, suitable SARS-CoV-2 coronavirus antigenic peptides and proteins as defined above are further specified in detail (e.g. nomenclature, protein elements, etc.).

[0298] List 1: Exemplary suitable SARS-CoV-2 antigen designs:
[0299] Full length spike protein (S) comprising aa 1 to aa 1273;
   [0300] see for example SEQ ID NO: 1, 274.
[0301] Stabilized S protein comprising aa1-aa1273 and K986P, V987P substitutions (S_stab_PP);
   [0302] see for example SEQ ID NO: 10, 341.
[0303] Stabilized S protein comprising aa1-aa1273 and K986P, V987P substitutions (S_stab_PP);
   [0304] see for example SEQ ID NO: 22961.
[0305] Stabilized S protein comprising aa1-aa1273 and K986P, V987P substitutions (S_stab_PP);
   [0306] see for example SEQ ID NO: 22960.
[0307] Stabilized S protein comprising aa1-aa1273 and K986P, V987P, F817P, A892P, A899P, A942P proline substitutions; S_stab_PP_hex
   [0308] see for example SEQ ID NO: 22732.
[0309] Stabilized S protein comprising aa1-aa1273 and K986P, V987P substitutions and a cavity filling mutation (T887W, A1020W); S_stab_PP_cav
   [0310] see for example SEQ ID NO: 408.
[0311] Stabilized S protein comprising aa1-aa1273 and K986P, V987P substitutions and a cavity filling mutation (P1069F); S_stab_PP_cav
   [0312] see for example SEQ ID NO: 475.
[0313] Stabilized S protein comprising aa1-aa1273 and K986P, V987P substitutions and a cavity filling mutation (H10480, H1064N, H1083N, H1101N); S_stab_PP_prot
   [0314] see for example SEQ ID NO: 542.
[0315] Stabilized S protein comprising aa1-aa1273 and an artificial disulfide bond (S_stab_disul) 1712C, T1077C;
   [0316] see for example SEQ ID NO: 19, 609.
[0317] S without transmembrane domain comprising aa1-aa1211 (S_woTM);
   [0318] see for example SEQ ID NO: 31, 1614.
[0319] S without transmembrane domain flex comprising aa1-aa1147 (S_woTMflex);
   [0320] see for example SEQ ID NO: 2619.
[0321] S_woTM comprising K986P, V987P substitutions (S_stab_PP_woTM)
   [0322] see for example SEQ ID NO: 40, 1681.
[0323] S_woTMflex comprising K986P, V987P substitutions (S_stab_PP_woTMflex)
   [0324] see for example SEQ ID NO: 2686.
[0325] Spike protein fragment S1 comprising aa 1 to aa 681 (S1);
   [0326] see for example SEQ ID NO: 27, 1279.
[0327] S_woTM comprising a lumazine synthase;
   [0328] see for example SEQ ID NO: 58, 3624.
[0329] S_woTMflex comprising a lumazine synthase;
   [0330] see for example SEQ ID NO: 7644.
[0331] S_stab_PP_woTM comprising a lumazine synthase;
   [0332] see for example SEQ ID NO: 85, 3691.
[0333] S_stab_PP_woTMflex comprising a lumazine synthase;
   [0334] see for example SEQ ID NO: 7711.
[0335] S_woTM comprising a ferritin element;
   [0336] see for example SEQ ID NO: 67, 4629.
[0337] S_woTMflex comprising a ferritin element;
   [0338] see for example SEQ ID NO: 8649.
[0339] S_stab_PP_woTM comprising a ferritin element;
   [0340] see for example SEQ ID NO: 94, 4696.
[0341] S_stab_PP_woTMflex comprising a ferritin element;
   [0342] see for example SEQ ID NO: 8716.
[0343] S_woTM comprising a foldon element;
   [0344] see for example SEQ ID NO: 76, 5634.
[0345] S_woTMflex comprising a foldon element;
   [0346] see for example SEQ ID NO: 9654.
[0347] S_stab_PP_woTM comprising a foldon element;
   [0348] see for example SEQ ID NO: 103, 5701.
[0349] S_stab_PP_woTMflex comprising a foldon element;
   [0350] see for example SEQ ID NO: 9721.
[0351] S_woTM comprising a VLP-sequence (WhcAg);
   [0352] see for example SEQ ID NO: 6639.
[0353] S_woTMflex comprising a VLP-sequence (WhcAg);
   [0354] see for example SEQ ID NO 10659.
[0355] S_stab_PP_woTM comprising a VLP-sequence (WhcAg);
   [0356] see for example SEQ ID NO: 6706.
[0357] S_stab_PP_woTMflex comprising a VLP-sequence (WhcAg);
   [0358] see for example SEQ ID NO: 10726.
[0359] truncRBD comprising a foldon element:
   [0360] see for example SEQ ID NO: 22734.
[0361] truncRBD comprising a lumazine synthase (C-terminal)
   [0362] see for example SEQ ID NO: 22735.
[0363] truncRBD comprising a lumazine synthase (N-terminal)
   [0364] see for example SEQ ID NO: 22736
[0365] truncRBD comprising a ferritin element:
   [0366] see for example SEQ ID NO: 22733.

[0367] Amino acid positions provided in List 1 are according to reference SEQ ID NO: 1.

[0368] Preferred antigenic peptide or proteins selected or derived from a SARS-CoV-2 coronavirus as defined above are provided in Table 1 (rows 1 to 41). Therein, each row 1 to 41 corresponds to a suitable SARS-CoV-2 constructs. Column A of Table 1 provides a short description of suitable SARS-CoV-2 antigen constructs. Column B of Table 1 provides protein (amino acid) SEQ ID NOs of respective SARS-CoV-2 antigen constructs. Column C of Table 1 provides SEQ ID NO of the corresponding wild type or reference nucleic acid coding sequences. Column D of Table 1 provides SEQ ID NO of the corresponding G/C optimized nucleic acid coding sequences (opt1, gc). Column E of Table 1 provides SEQ ID NO of the corresponding human codon usage adapted nucleic acid coding sequences (opt 3, human). Column F of Table 1 provides SEQ ID NO of the corresponding G/C content modified nucleic acid coding sequences (opt10, gc mod).

[0369] Notably, the description of the invention explicitly includes the information provided under <223> identifier of the ST.25 sequence listing of the present application. Preferred nucleic acid constructs comprising coding sequences of Table 1, e.g. mRNA sequences comprising the coding sequences of Table 1 are provided in Table 3A and B.

TABLE 1
Preferred SARS-CoV-2 constructs (amino acid sequences and nucleic acid coding sequences):

| row | A | B | C | D | E | F |
|---|---|---|---|---|---|---|
| 1 | Full-length spike protein; S | 1-9, 274-340, | 116-131, | 136,11731- | 11967- | 12034, 23041- |
| | | 22737, 22739, | 11664- | 11797, 22764, | 12033 | 23076 |
| | | 22741, 22743, | 11730 | 22766, 22768, | | |
| | | 22745, 22747, | | 22770, 22772, | | |
| | | 22749, 22751, | | 22774, 22776, | | |
| | | 22753, 22755, | | 22778, 22780, | | |
| | | 22757, 22929- | | 22782, 22784, | | |
| | | 22946 | | 22969-23040 | | |
| 2 | Stabilized spike protein; | 10-18, 341-407, | | 137, 11798, | 142 | 146, 12035, |
| | S_stab_PP | 22738, 22740, | | 22765, 22767, | | 23149-23184 |
| | | 22742, 22744, | | 22769, 22771, | | |
| | | 22746, 22748, | | 22773, 22775, | | |
| | | 22750, 22752, | | 22777, 22779, | | |
| | | 22754, 22756, | | 22781, 22783, | | |
| | | 22758, 22947- | | 22785, 23077- | | |
| | | 22964 | | 23148 | | |
| 3 | Stabilized spike protein; | 408-541 | | 11799, 11800 | | 12036, 12037 |
| | S_stab_PP_cav | | | | | |
| 4 | Stabilized spike protein; | 542-608 | | 11801 | | 12038 |
| | S_stab_PP_prot | | | | | |
| 5 | Stabilized spike protein; | 19-26, 609-1278, | | 11802-11811, | | 12039-12048, |
| | S_stab_disul | 13521-13587 | | 14124 | | 14133 |
| 6 | Spike protein fragment S1 | 27, 1279-1345 | 132 | 138, 11812 | 143 | 147, 12049 |
| 7 | Spike protein fragment S2 | 30, 1346-1412 | 135 | 141, 11813 | | 12050 |
| 8 | Signal peptide of spike protein; | 28, 1413-1479 | 133 | 139, 11814 | 144 | 12051 |
| | SP | | | | | |
| 9 | S1 without signal peptide; | 29, 1480-1546 | 134 | 140, 11815 | 145 | 12052 |
| | S1_woSP | | | | | |
| 10 | Transmembrane domain of | 49-57, 1547-1613, | | 11816, 13511 | | 12053, 13516 |
| | spike protein; TM/TMflex | 13176-13242 | | | | |
| 11 | S without transmembrane | 31-39, 1614-1680, | | 11817, 11832 | | 12054, 12069 |
| | domain; S_woTM/woTMflex | 2619-2685 | | | | |
| 12 | Stabilized S without | 40-48, 1681-1747, | | 11818, 11833 | | 12055, 12070 |
| | transmembrane domain; | 2686-2752 | | | | |
| | S_stab_PP_woTM/woTMflex | | | | | |
| 13 | Stabilized S without | 1748-1881, 2753- | | 11819, 11820, | | 12056, 12057, |
| | transmembrane domain; | 2886 | | 11834, 11835 | | 12071, 12072 |
| | S_stab_PP_cav_woTM/ | | | | | |
| | woTMflex | | | | | |
| 14 | Stabilized S without | 1882-1948, 2887- | | 11821, 11836 | | 12058, 12073 |
| | transmembrane domain; | 2953 | | | | |
| | S_stab_PP_prot_woTM/ | | | | | |
| | woTMflex | | | | | |
| 15 | Stabilized S without | 1949-2618, 2954- | 11822-11831, | 12059-12068, | | |
| | transmembrane domain; | 3623, 13377- | | 11837-11846, | | 12074-12083, |
| | S_stab_disul_woTM/ | 13510 | | 13514, 13515 | | 13519, 13520 |
| | woTMflex | | | | | |
| 16 | S_woTM/woTMflex | 58-66, 3624-3690, | | 11847, 11907 | | 12084, 12144 |
| | comprising a lumazine | 7644-7710 | | | | |
| | synthase | | | | | |
| 17 | S_stab_PP_woTM/woTMflex | 85-93, 3691-3757, | | 11848, | 11908 | 12085, 12145 |
| | comprising a lumazine | 7711-7777 | | | | |
| | synthase | | | | | |
| 18 | S_stab_PP_cav_woTM/ | 3758-3891, 7778- | | 11849, 11850, | | 12086, 12087, |
| | woTMflex comprising a | 7911 | | 11909, | 11910 | 12146, 12147 |
| | lumazine synthase | | | | | |
| 19 | S_stab_PP_prot_woTM/ | 3892-3958, 7912- | | 11851, 11911 | | 12088, 12148 |
| | woTMflex comprising a | 7978 | | | | |
| | lumazine synthase | | | | | |
| 20 | S_stab_disul_woTM/ | 3959-4628, 7979- | | 11852-11861, | | 12089-12098, |
| | woTMflex comprising a | 8648, 13588- | | 11912-11921, | | 12149-12158, |
| | lumazine synthase | 13654, 13856- | | 14125, 14129 | | 14134, 14138 |
| | | 13922 | | | | |
| 21 | S_woTM/woTMflex | 67-75, 4629-4695, | | 11862, 11922 | | 12099, 12159 |
| | comprising a ferritin | 8649-8715 | | | | |
| 22 | S_stab_PP_woTM/woTMflex | 94-102, 4696- | | 11863, 11923 | | 12100, 12160 |
| | comprising a ferritin | 4762, 8716-8782 | | | | |
| 23 | S_stab_PP_cav_woTM/ | 4763-4896, 8783- | | 11864, 11865, | | 12101, 12102, |
| | woTMflex comprising a ferritin | 8916 | | 11924, 11925 | | 12161, 12162 |
| 24 | S_stab_PP_prot_woTM/ | 4897-4963, 8917- | | 11866, 11926 | | 12103, 12163 |
| | woTMflex comprising a ferritin | 8983 | | | | |
| 25 | S_stab_disul_woTM/ | 4964-5633, 8984- | | 11867-11876, | | 12104-12113, |
| | woTMflex comprising a ferritin | 9653, 13655- | | 11927-11936, | | 12164-12173, |
| | | 13721, 13923- | | 14126, 14130 | | 14135, 14139 |
| | | 13989 | | | | |
| 26 | S_woTM/woTMflex | 76-84, 5634-5700, | | 11877, 11937 | | 12114, 12174 |
| | comprising a foldon | 9654-9720 | | | | |
| 27 | S_stab_PP_woTM/woTMflex | 103-111, 5701- | | 11878, 11938 | | 12115, 12175 |
| | comprising a foldon | 5767, 9721-9787 | | | | |
| 28 | S_stab_PP_cav_woTM/ | 5768-5901, 9788- | | 11879, 11880, | | 12116, 12117, |
| | woTMflex comprising a foldon | 9921 | | 11939, 11940 | | 12176, 12177 |
| 29 | S_stab_PP_prot_woTM/ | 5902-5968, 9922- | | 11881, 1941 | | 12118, 12178 |
| | woTMflex comprising a foldon | 9988 | | | | |
| 30 | S_stab_disul_woTM/ | 5969-6638, 9989- | | 11882-11891, | | 12119-12128, |
| | woTMflex comprising a foldon | 10658, 13722- | | 11942-11951, | | 12179-12188, |
| | | 13788,13990- | | 14127, 14131 | | 14136, 14140 |
| | | 14056 | | | | |
| 31 | S_woTM/woTMflex | 6639-6705, | | 11892, 11952 | | 12129, 12189 |
| | comprising a WhcAg (VLP) | 10659-10725 | | | | |
| 32 | S_stab_PP_woTM/woTMflex | 6706-6772, | | 11893, 11953 | | 12130, 12190 |
| | comprising a WhcAg (VLP) | 10726-10792 | | | | |
| 33 | S_stab_PP_cav_woTM/ | 6773-6906, | | 11894, 11895, | | 12131, 12132, |
| | woTMflex comprising a | 10793-10926 | | 11954, 11955 | | 12191, 12192 |
| | WhcAg (VLP) | | | | | |
| 34 | S_stab_PP_prot_woTM/ | 6907-6973, | | 11896, 11956 | | 12133, 12193 |
| | woTMflex comprising a | 10927-10993 | | | | |
| | WhcAg (VLP) | | | | | |
| 35 | S_stab_disul_woTM/ | 6974-7643, | | 11897-11906, | | 12134-12143, |
| | woTMflex comprising a | 10994-11663, | | 11957-11966, | | 12194-12203, |
| | WhcAg (VLP) | 13789-13855, | | 14128, 14132 | | 14137, 14141 |
| | | 14057-14123 | | | | |
| 36 | Receptor binding domain; | 13243-13309, | | 13512, 22914, | | 13517, 22915, |
| | RBD | 22917, 22923 | | 22918, 22919, | | 22916, 22920- |
| | | | | 22924, 22925 | | 22922, 22926- |
| | | | | | | 22928 |
| 37 | Critical neutralisation domain; | 13310-13376 | | 13513 | | 13518 |
| | CND | | | | | |
| 38 | Stabilized spike protein; | 22732 | | 22759 | | |
| | S_stab_PP_hex | | | | | |
| 39 | RBD comprising a lumazyne | 22735, 22736 | | 22762, 22763, | | |
| | synthase | | | 22967, 22968 | | |
| 40 | RBD comprising a ferritin | 22733 | | 22760 | | |
| 41 | RBD comprising a foldon | 22734, 26938, | | 22761, 22966, | | |
| | | 26939 | | 26940, 26941 | | |

[0370] In preferred embodiments, the at least one antigenic peptide or protein selected or derived from SARS-CoV-2 encoded by the at least one nucleic acid of component A (in particular component A-1) comprises or consists of at least one of the amino acid sequences being identical or at least 50%, 60%, 70%, 80%, 85%, 86%, 87%, 88%, 89%, 90%, 91%, 92%, 93%, 94%, 95%, 96%, 97%, 98%, or 99% identical to any one of SEQ ID NOs: 1-111, 274-11663, 13176-13510, 13521-14123, 22732-22758, 22917, 22923, 22929-22964, 26938, 26939 or an immunogenic fragment or immunogenic variant of any of these. Further information regarding said amino acid sequences is also provided in Table 1 (see rows 1 to 41 of Column A and B), and under <223> identifier of the ST.25 sequence listing of respective sequence SEQ ID NOs.

[0371] In preferred embodiments, the at least one antigenic peptide or protein (pre-fusion stabilized spike protein (S_stab)) selected or derived from SARS-CoV-2 encoded by the at least one nucleic acid of component A (in particular component A-1) comprises or consists of at least one of the amino acid sequences being identical or at least 50%, 60%, 70%, 80%, 85%, 86%, 87%, 88%, 89%, 90%, 91%, 92%, 93%, 94%, 95%, 96%, 97%, 98%, or 99% identical to any one of SEQ ID NOs: 10-26, 40-48, 85-111, 341-1278, 1681-2618, 2686-3623, 3691-4628, 4696-5633, 5701-6638, 6706-7643, 7711-8648, 8716-9653, 9721-10658, 10726-11663, 13377-13510, 13521-14123, 22732, 22738, 22740, 22742, 22744, 22746, 22748, 22750, 22752, 22754, 22756, 22758, 22947-22964 or an immunogenic fragment or immunogenic variant of any of these. Further information regarding said amino acid sequences is also provided in Table 1 (see rows 2 to 5, 12-15, 17-20, 22-25, 27-30, and 32-35 of Column A and B), and under <223> identifier of the ST.25 sequence listing of respective sequence SEQ ID NOs.

[0372] In particularly preferred embodiments, the at least one antigenic peptide or protein selected or derived from SARS-CoV-2 comprises or consists of at least one of the amino acid sequences being identical or at least 50%, 60%, 70%, 80%, 85%, 86%, 87%, 88%, 89%, 90%, 91%, 92%, 93%, 94%, 95%, 96%, 97%, 98%, or 99% identical to any one of SEQ ID NOs: 10, 21, 22, 25, 27, 274, 341, 408, 475, 542, 743, 810, 1011, 1145, 1212, 1279, 8716, 10726, 22732-22758, 22929-22942, 22947-22964 or an immunogenic fragment or immunogenic variant of any of these.

[0373] In particularly preferred embodiments, the at least one antigenic peptide or protein selected or derived from SARS-CoV-2 comprises or consists of at least one of the amino acid sequences being identical or at least 50%, 60%, 70%, 80%, 85%, 86%, 87%, 88%, 89%, 90%, 91%, 92%, 93%, 94%, 95%, 96%, 97%, 98%, or 99% identical to any one of SEQ ID NOs: 10-18, 341-407, 22947-22964 or an immunogenic fragment or immunogenic variant of any of these. Further information regarding said amino acid sequences is also provided in Table 1 (see row 2 of Column A and B), and under <223> identifier of the ST.25 sequence listing of respective sequence SEQ ID NOs.

[0374] In a further, more preferred embodiment, the pre-fusion stabilized spike protein (S_stab) comprises or consists of at least one of the amino acid sequences being identical or at least 50%, 60%, 70%, 80%, 85%, 86%, 87%, 88%, 89%, 90%, 91%, 92%, 93%, 94%, 95%, 96%, 97%, 98%, or 99% identical to any one of SEQ ID NOs: 22960, 22961, 22963 or an immunogenic fragment or immunogenic variant of any of these.

[0375] In a particularly preferred embodiment, the pre-fusion stabilized spike protein (S_stab) comprises or consists of at least one of the amino acid sequences being identical or at least 50%, 60%, 70%, 80%, 85%, 86%, 87%, 88%, 89%, 90%, 91%, 92%, 93%, 94%, 95%, 96%, 97%, 98%, or 99% identical to any one of SEQ ID NOs: 22961, or an immunogenic fragment or immunogenic variant of any of these.

[0376] In an even more preferred embodiment, the at least one antigenic peptide or protein selected or derived from SARS-CoV-2 comprises or consists of at least one of the amino acid sequences being identical or at least 50%, 60%, 70%, 80%, 85%, 86%, 87%, 88%, 89%, 90%, 91%, 92%, 93%, 94%, 95%, 96%, 97%, 98%, or 99% identical to any one of SEQ ID NOs: 10 or 341 or an immunogenic fragment or immunogenic variant of any of these.

[0377] According to preferred embodiments, the nucleic acid of component A (in particular component A-1) comprises at least one coding sequence encoding at least one antigenic peptide or protein derived from SARS-CoV-2 as defined above, or fragments and variants thereof. In that context, any coding sequence encoding at least one SARS-CoV-2 antigenic protein as defined herein, or fragments and variants thereof may be understood as suitable coding sequence and may therefore be comprised in the nucleic acid of component A.

[0378] In preferred embodiments, the nucleic acid of component A (in particular component A-1) comprises or consists of at least one coding sequence encoding at least one antigenic peptide or protein selected or derived from a SARS-CoV-2 coronavirus as defined herein, preferably encoding any one of SEQ ID NOs: 1-111, 274-11663, 13176-13510, 13521-14123, 22732-22758, 22917, 22923, 22929-22964, 26938, 26939 or fragments of variants thereof. It has to be understood that, on nucleic acid level, any sequence (DNA or RNA sequence) which encodes an amino acid sequences being identical or at least 70%, 80%, 85%, 86%, 87%, 88%, 89%, 90%, 91%, 92%, 93%, 94%, 95%, 96%, 97%, 98%, or 99% identical to any one of SEQ ID NOs: 1-111, 274-11663, 13176-13510, 13521-14123, 22732-22758, 22917, 22923, 22929-22964, 26938, 26939 or fragments or variants thereof, may be selected and may accordingly be understood as suitable coding sequence of the invention. Further information regarding said amino acid sequences is also provided in Table 1 (see rows 1 to 41 of Column A and B), Table 3A and B, and under <223> identifier of the ST.25 sequence listing of respective sequence SEQ ID NOs.

[0379] In preferred embodiments, the nucleic acid of component A (in particular component A-1) comprises a coding sequence that comprises at least one of the nucleic acid sequences encoding a SARS-CoV-2 antigen being identical or at least 70%, 80%, 85%, 86%, 87%, 88%, 89%, 90%, 91%, 92%, 93%, 94%, 95%, 96%, 97%, 98%, or 99% identical to any one of the nucleic acid sequences selected from SEQ ID NOs: 116-132, 134-138, 140-143, 145-147, 148-175, 11664-11813, 11815, 11817-12050, 12052, 12054-13147, 13514, 13515, 13519, 13520, 14124-14177, 22759, 22764-22786, 22791-22813, 22818-22839, 22969-23184, 23189-23404, 23409-23624, 23629-23844, 23849-24064, 24069-24284, 24289-24504, 24509-24724, 24729-24944, 24949-25164, 25169-25384, 25389-25604, 25609-25824, 25829-26044, 26049-26264, 26269-26484, 26489-26704, 26709-26937 or a fragment or a fragment or variant of any of these sequences. Further information regarding said nucleic acid sequences is also provided in Table 1 (see rows 1 to 7, 9, 11-41 of Column C-F), Table 3A and B, and under <223> identifier of the ST.25 sequence listing of respective sequence SEQ ID NOs.

[0380] In preferred embodiments, the at least one coding sequence of the nucleic acid of component A is a codon modified coding sequence as defined herein, wherein the amino acid sequence, that is the SARS-CoV-2 peptide or protein, encoded by the at least one codon modified coding sequence is preferably not being modified compared to the amino acid sequence encoded by the corresponding wild type or reference coding sequence.

[0381] The term “reference coding sequence” relates to the coding sequence, which was the origin sequence to be modified and/or optimized.

[0382] In particularly preferred embodiments, the at least one coding sequence of the nucleic acid component A is a codon modified coding sequence, wherein the codon modified coding sequence is selected a G/C optimized coding sequence, a human codon usage adapted coding sequence, or a G/C modified coding sequence

[0383] In preferred embodiments, the nucleic acid of component A (in particular component A-1) comprises at least one coding sequence comprising or consisting a codon modified nucleic acid sequence encoding a SARS-CoV-2 antigen which is identical or at least 70%, 80%, 85%, 86%, 87%, 88%, 89%, 90%, 91%, 92%, 93%, 94%, 95%, 96%, 97%, 98%, or 99% identical to a codon modified nucleic acid sequence selected from the group consisting of SEQ ID NOs: 136-138, 140-143, 145-175, 11731-11813, 11815, 11817-12050, 12052, 12054-13147, 14142-14177, 22759, 22764-22786, 22791-22813, 22818-22839, 22969-23184, 23189-23404, 23409-23624, 23629-23844, 23849-24064, 24069-24284, 24289-24504, 24509-24724, 24729-24944, 24949-25164, 25169-25384, 25389-25604, 25609-25824, 25829-26044, 26049-26264, 26269-26484, 26489-26704, 26709-26937 or a fragment or variant of any of these sequences. Additional information regarding each of these suitable nucleic acid sequences encoding may also be derived from the sequence listing, in particular from the details provided therein under identifier <223>. Suitable coding sequences of the first aspect are provided in Table 1. Further information regarding said nucleic acid sequences is also provided in Table 1 (see rows 1 to 7, 9, 11-41 of Column D-F), Table 3A and B, and under <223> identifier of the ST.25 sequence listing of respective sequence SEQ ID NOs.

[0384] In particularly preferred embodiments, the nucleic acid of component A (in particular component A-1) comprises at least one coding sequence comprising or consisting a G/C optimized coding sequence encoding a SARS-CoV-2 antigen which is identical or at least 70%, 80%, 85%, 86%, 87%, 88%, 89%, 90%, 91%, 92%, 93%, 94%, 95%, 96%, 97%, 98%, or 99% identical to a codon modified nucleic acid sequence selected from the group consisting of SEQ ID NOs: 136-138, 140, 141, 148, 149, 152, 155, 156, 159, 162, 163, 166, 169, 170, 173, 11731-11813, 11815, 11817-11966, 12271-12472, 12743-12944, 13514, 13515, 14124-14132, 14142-14150, 14160-14168, 22759, 22764-22786, 22791-22813, 22818-22839, 22969-23040, 23077-23148, 23189-23260, 23297-23368, 23409-23480, 23517-23588, 23629-23700, 23737-23808, 23849-23920, 23957-24028, 24069-24140, 24177-24248, 24289-24360, 24397-24468, 24509-24580, 24617-24688, 24729-24800, 24837-24908, 24949-25020, 25057-25128, 25169-25240, 25277-25348, 25389-25460, 25497-25568, 25609-25680, 25717-25788, 25829-25900, 25937-26008, 26049-26120, 26157-26228, 26269-26340, 26377-26448, 26489-26560, 26597-26668, 26709-26780, 26817-26888, 26925-26937 or a fragment or variant of any of these sequences. Additional information regarding each of these suitable nucleic acid sequences encoding may also be derived from the sequence listing, in particular from the details provided therein under identifier <223>. Suitable coding sequences of the first aspect are provided in Table 1. Further information regarding said nucleic acid sequences is also provided in Table 1 (see rows 1 to 7, 9, 11-41 of Column D), Table 3A and B, and under <223> identifier of the ST.25 sequence listing of respective sequence SEQ ID NOs.

[0385] In particularly preferred embodiments, the nucleic acid of component A (in particular component A-1) comprises at least one coding sequence comprising or consisting a human codon usage adapted coding sequence encoding a SARS-CoV-2 antigen which is identical or at least 70%, 80%, 85%, 86%, 87%, 88%, 89%, 90%, 91%, 92%, 93%, 94%, 95%, 96%, 97%, 98%, or 99% identical to a codon modified nucleic acid sequence selected from the group consisting of SEQ ID NOs: 142, 143, 145, 150, 153, 157, 160, 164, 167, 171, 174, 11967-12033, 12473-12539, 12945-13011 or a fragment or variant of any of these sequences. Additional information regarding each of these suitable nucleic acid sequences encoding may also be derived from the sequence listing, in particular from the details provided therein under identifier <223>. Suitable coding sequences of the first aspect are provided in Table 1. Further information regarding said nucleic acid sequences is also provided in Table 1 (see rows 1 to 7, 9, 11-41 of Column E), Table 3A and B, and under <223> identifier of the ST.25 sequence listing of respective sequence SEQ ID NOs.

[0386] In particularly preferred embodiments, the nucleic acid of component A (in particular component A-1) comprises at least one coding sequence comprising or consisting a G/C modified coding sequence encoding a SARS-CoV-2 antigen which is identical or at least 70%, 80%, 85%, 86%, 87%, 88%, 89%, 90%, 91%, 92%, 93%, 94%, 95%, 96%, 97%, 98%, or 99% identical to a codon modified nucleic acid sequence selected from the group consisting of SEQ ID NOs: 146, 147, 151, 154, 158, 161, 165, 168, 172, 175, 12034-12050, 12052, 12054-12203, 12540-12675, 13012-13147, 13519, 13520, 14133-14141, 14151-14159, 14169-14177, 23041-23076, 23149-23184, 23261-23296, 23369-23404, 23481-23516, 23589-23624, 23701-23736, 23809-23844, 23921-23956, 24029-24064, 24141-24176, 24249-24284, 24361-24396, 24469-24504, 24581-24616, 24689-24724, 24801-24836, 24909-24944, 25021-25056, 25129-25164, 25241-25276, 25349-25384, 25461-25496, 25569-25604, 25681-25716, 25789-25824, 25901-25936, 26009-26044, 26121-26156, 26229-26264, 26341-26376, 26449-26484, 26561-26596, 26669-26704, 26781-26816, 26889-26924 or a fragment or variant of any of these sequences. Additional information regarding each of these suitable nucleic acid sequences encoding may also be derived from the sequence listing, in particular from the details provided therein under identifier <223>. Suitable coding sequences of the first aspect are provided in Table 1. Further information regarding said nucleic acid sequences is also provided in Table 1 (see rows 1 to 7, 9, 11-41 of Column F), Table 3A and B, and under <223> identifier of the ST.25 sequence listing of respective sequence SEQ ID NOs.

[0387] In even more preferred embodiments, the nucleic acid of component A (in particular component A-1) comprises at least one coding sequence comprising or consisting a G/C modified coding sequence encoding a SARS-CoV-2 antigen which is identical or at least 70%, 80%, 85%, 86%, 87%, 88%, 89%, 90%, 91%, 92%, 93%, 94%, 95%, 96%, 97%, 98%, or 99% identical to a codon modified nucleic acid sequence selected from the group consisting of SEQ ID NOs: 136-138, 142, 143, 146, 147, 11731, 11798, 11804, 11805, 11808, 11810, 11811, 11812, 12035, 12049, 22759-22785, 22965-22982, 23077-23094, 23149 or a fragment or variant of any of these sequences. Additional information regarding each of these suitable nucleic acid sequences encoding may also be derived from the sequence listing, in particular from the details provided therein under identifier <223>. Suitable coding sequences of the first aspect are provided in Table 1. Further information regarding said nucleic acid sequences is also provided in Table 1 (see rows 1 to 7, 9, 11-41 of Column F), Table 3A and B, and under <223> identifier of the ST.25 sequence listing of respective sequence SEQ ID NOs.

[0388] In an particularly preferred embodiment, the nucleic acid of component A (in particular component A-1) comprises at least one coding sequence comprising or consisting a G/C modified coding sequence encoding a SARS-CoV-2 antigen which is identical or at least 70%, 80%, 85%, 86%, 87%, 88%, 89%, 90%, 91%, 92%, 93%, 94%, 95%, 96%, 97%, 98%, or 99% identical to a codon modified nucleic acid sequence according to SEQ ID NOs: 137 or a fragment or variant thereof.

[0389] In further particularly preferred embodiments, the nucleic acid of component A (in particular component A-1) comprises at least one coding sequence comprising or consisting a G/C modified coding sequence encoding a SARS-CoV-2 antigen which is identical or at least 70%, 80%, 85%, 86%, 87%, 88%, 89%, 90%, 91%, 92%, 93%, 94%, 95%, 96%, 97%, 98%, or 99% identical to a codon modified nucleic acid sequence according to SEQ ID NOs: 23090, 23091, 23093, 23094 or a fragment or variant thereof.

[0390] In further particularly preferred embodiments, the nucleic acid of component A (in particular component A-1) comprises at least one coding sequence comprising or consisting a G/C modified coding sequence encoding a SARS-CoV-2 antigen which is identical or at least 70%, 80%, 85%, 86%, 87%, 88%, 89%, 90%, 91%, 92%, 93%, 94%, 95%, 96%, 97%, 98%, or 99% identical to a codon modified nucleic acid sequence according to SEQ ID NOs: 23091, or a fragment or variant thereof.

[0391] In further embodiments, the nucleic acid of component A (in particular component A-1) comprises at least one coding sequence comprising or consisting a G/C modified coding sequence encoding a SARS-CoV-2 antigen which is identical or at least 70%, 80%, 85%, 86%, 87%, 88%, 89%, 90%, 91%, 92%, 93%, 94%, 95%, 96%, 97%, 98%, or 99% identical to a codon modified nucleic acid sequence according to SEQ ID NOs: 23113, 23167 or a fragment or variant thereof.

[0392] Preferred nucleic acid sequences of component A (in particular component A-1), including particularly preferred mRNA sequences, are provided in Table 3A (column C and D). Therein, each row represents a specific suitable SARS-CoV-2 construct of the invention (compare with Table 1), wherein the description of the SARS-CoV-2 construct is indicated in column A of Table 3A and the SEQ ID NOs of the amino acid sequence of the respective SARS-CoV-2 construct is provided in column B. The corresponding SEQ ID NOs of the coding sequences encoding the respective SARS-CoV-2 constructs are provided in Table 1. Further information is provided under <223> identifier of the respective SEQ ID NOs in the sequence listing.

[0393] The corresponding nucleic acid, preferably coding RNA sequences, in particular mRNA sequences comprising preferred coding sequences are provided in columns C and D, wherein column C provides nucleic acid sequences with an UTR combination “HSD17B4/PSMB3” as defined herein, wherein column D provides nucleic acid sequences with an “alpha-globin” 3′ UTR as defined herein.

TABLE 3A
Nucleic acid, preferably mRNA constructs encoding SARS-CoV-2 antigens

| row | A | B | C | D |
|---|---|---|---|---|
| 1 | Full-length spike protein; S | 1-9, 274-340, | 148, 155, 12204-12337, | 162, 169, 12676-12809, |
| | | 22737, 22739, | 12473-12540, 22791, | 12945-13012, 22818, |
| | | 22741, 22743, | 22793, 22795, 22797, | 22820, 22822, 22824, |
| | | 22745, 22747, | 22799, 22801, 22803, | 22826, 22828, 22830, |
| | | 22749, 22751, | 22805, 22807, 22809, | 22832, 22834, 22836, |
| | | 22753, 22755, | 22811, 23409-23516 | 22838, 23189-23296 |
| | | 22757, 22929- | | |
| | | 22946 | | |
| 2 | Stabilized spike protein; S_stab_PP | 10-18, 341-407, | 149-151, 156-158, | 163-165, 170-172, |
| | | 22738, 22740, | 12338, 12541, 22792, | 12810, 13013, 22819, |
| | | 22742, 22744, | 22794, 22796, 22798, | 22821, 22823, 22825, |
| | | 22746, 22748, | 22800, 22802, 22804, | 22827, 22829, 22831, |
| | | 22750, 22752, | 22806, 22808, 22810, | 22833, 22835, 22837, |
| | | 22754, 22756, | 22812, 23517-23624 | 22839, 23297-23404 |
| | | 22758, 22947- | | |
| | | 22964 | | |
| 3 | Stabilized spike protein; S_stab_PP_cav | 408-541 | 12339, 12340, 12542, | 12811, 12812, 13014, |
| | | | 12543 | 13015 |
| 4 | Stabilized spike protein; S_stab_PP_prot | 542-608 | 12341, 12544 | 12813, 13016 |
| 5 | Stabilized spike protein; S_stab_disul | 19-26, 609-1278, | 12342-12351, 12545- | 12814-12823, 13017- |
| | | 13521-13587 | 12554, 14142, 14151 | 13026, 14160, 14169 |
| 6 | Spike protein fragment S1 | 27, 1279-1345 | 152-154, 159-161, | 166-168, 173-175, |
| | | | 12352, 12555 | 12824, 13027 |
| 7 | S_woTM comprising a lumazine synthase | 58-66, 3624-3690 | 12353, 12556 | 12825, 13028 |
| 8 | S_stab_PP_woTM comprising a lumazine | 85-93, 3691-3757 | 12354, 12557 | 12826, 13029 |
| | synthase | | | |
| 9 | S_stab_PP_cav_woTM comprising a | 3758-3891 | 12355, 12356, 12558, | 12827, 12828, 13030, |
| | lumazine synthase | | 12559 | 13031 |
| 10 | S_stab_PP_prot_woTM comprising a | 3892-3958 | 12357, 12560 | 12829, 13032 |
| | lumazine synthase | | | |
| 11 | S_stab_disul_woTM comprising a lumazine | 3959-4628, 13588- | 12358-12367, 12561- | 12830-12839, 13033- |
| | synthase | 13654 | 12570, 14143, 14152 | 13042, 14161, 14170 |
| 12 | S_woTM comprising a ferritin | 67-75, 4629-4695 | 12368, 12571 | 12840, 13043 |
| 13 | S_stab_PP_woTM comprising a ferritin | 94-102, 4696-4762 | 12369, 12572 | 12841, 13044 |
| 14 | S_stab_PP_cav_woTM comprising a ferritin | 4763-4896 | 12370, 12371, 12573, | 12842, 12843, 13045, |
| | | | 12574 | 13046 |
| 15 | S_stab_PP_prot_woTM comprising a ferritin | 4897-4963 | 12372, 12575 | 12844, 13047 |
| 16 | S_stab_disul_woTM comprising a ferritin | 4964-5633, 13655- | 12373-12382, 12576- | 12845-12854, 13048- |
| | | 13721 | 12585, 14144, 14153 | 13057, 14162, 14171 |
| 17 | S_woTM comprising a foldon | 76-84, 5634-5700 | 12383, 12586 | 12855, 13058 |
| 18 | S_stab_PP_woTM comprising a foldon | 103-111, 5701- | 12384, 12587 | 12856, 13059 |
| | | 5767 | | |
| 19 | S_stab_PP_cav_woTM comprising a foldon | 5768-5901 | 12385, 12386, 12588, | 12857, 12858, 13060, |
| | | | 12589 | 13061 |
| 20 | S_stab_PP_prot_woTM comprising a foldon | 5902-5968 | 12387, 12590 | 12859, 13062 |
| 21 | S_stab_disul_woTM comprising a foldon | 5969-6638, 13722- | 12388-12397, 12591- | 12860-12869, 13063- |
| | | 13788 | 12600, 14145, 14154 | 13072, 14163, 14172 |
| 22 | S_woTM comprising a WhcAg (VLP) | 6639-6705 | 12398, 12601 | 12870, 13073 |
| 23 | S_stab_PP_woTM comprising a WhcAg | 6706-6772 | 12399, 12602 | 12871, 13074 |
| | (VLP) | | | |
| 24 | S_stab_PP_cav_woTM comprising a | 6773-6906 | 12400, 12401, 12603, | 12872, 12873, 13075, |
| | WhcAg (VLP) | | 12604 | 13076 |
| 25 | S_stab_PP_prot_woTM comprising a | 6907-6973 | 12402, 12605 | 12874, 13077 |
| | WhcAg (VLP) | | | |
| 26 | S_stab_disul_woTM comprising a WhcAg | 6974-7643, 13789- | 12403-12412, 12606- | 12875-12884, 13078- |
| | (VLP) | 13855 | 12615, 14146, 14155 | 13087, 14164, 14173 |
| 27 | S_woTMflex comprising a lumazine | 7644-7710 | 12413, 12616 | 12885, 13088 |
| | synthase | | | |
| 28 | S_stab_PP_woTMflex comprising a | 7711-7777 | 12414, 12617 | 12886, 13089 |
| | lumazine synthase | | | |
| 29 | S_stab_PP_cav_woTMflex comprising a | 7778-7911 | 12415, 12416, 12618, | 12887, 12888, 13090, |
| | lumazine synthase | | 12619 | 13091 |
| 30 | S_stab_PP_prot_woTMflex comprising a | 7912-7978 | 12417, 12620 | 12889, 13092 |
| | lumazine synthase | | | |
| 31 | S_stab_disul_woTMflex comprising a | 7979-8648, 13856- | 12418-12427, 12621- | 12890-12899, 13093- |
| | lumazine synthase | 13922 | 12630, 14147, 14156 | 13102, 14165, 14174 |
| 32 | S_woTMflex comprising a ferritin | 8649-8715 | 12428, 12631 | 12900, 13103 |
| 33 | S_stab_PP_woTMflex comprising a ferritin | 8716-8782 | 12429, 12632 | 12901, 13104 |
| 34 | S_stab_PP_cav_woTMflex comprising a | 8783-8916 | 12430, 12431, 12633, | 12902, 12903, 13105, |
| | ferritin | | 12634 | 13106 |
| 35 | S_stab_PP_prot_woTMflex comprising a | 8917-8983 | 12432, 12635 | 12904, 13107 |
| | ferritin | | | |
| 36 | S_stab_disul_woTMflex comprising a ferritin | 8984-9653, 13923- | 12433-12442, 12636- | 12905-12914, 13108- |
| | | 13989 | 12645, 14148, 14157 | 13117, 14166, 14175 |
| 37 | S_woTMflex comprising a foldon | 9654-9720 | 12443, 12646 | 12915, 13118 |
| 38 | S_stab_PP_woTMflex comprising a foldon | 9721-9787 | 12444, 12647 | 12916, 13119 |
| 39 | S_stab_PP_cav_woTMflex comprising a | 9788-9921 | 12445, 12446, 12648, | 12917, 12918, 13120, |
| | foldon | | 12649 | 13121 |
| 40 | S_stab_PP_prot_woTMflex comprising a | 9922-9988 | 12447, 12650 | 12919, 13122 |
| | foldon | | | |
| 41 | S_stab_disul_woTMflex comprising a foldon | 9989-10658, | 12448-12457, 12651- | 12920-12929, 13123- |
| | | 13990-14056 | 12660, 14149, 14158 | 13132, 14167, 14176 |
| 42 | S_woTMflex comprising a WhcAg (VLP) | 10659-10725 | 12458, 12661 | 12930, 13133 |
| 43 | S_stab_PP_woTMflex comprising a WhcAg | 10726-10792 | 12459, 12662 | 12931, 13134 |
| | (VLP) | | | |
| 44 | S_stab_PP_cav_woTMflex comprising a | 10793-10926 | 12460, 12461, 12663, | 12932, 12933, 13135, |
| | WhcAg (VLP) | | 12664 | 13136 |
| 45 | S_stab_PP_prot_woTMflex comprising a | 10927-10993 | 12462, 12665 | 12934, 13137 |
| | WhcAg (VLP) | | | |
| 46 | S_stab_disul_woTMflex comprising a | 10994-11663, | 12463-12472, 12666- | 12935-12944, 13138- |
| | WhcAg (VLP) | 14057-14123 | 12675, 14150, 14159 | 13147, 14168, 14177 |
| 47 | Stabilized spike protein; S_stab_PP_hex | 22732 | 22786 | 22813 |
| 48 | RBD comprising a lumazyne synthase | 22735, 22736 | 22789, 22790 | 22816, 22817 |
| 49 | RBD comprising a ferritin | 22733 | 22787 | 22814 |
| 50 | RBD comprising a foldon | 22734 | 22788 | 22815 |

[0394] Further preferred nucleic acid sequences, preferably mRNA sequences of the invention are provided in Table 3B. Therein, each column represents a specific suitable SARS-CoV-2 (nCoV-2019) construct of the invention (compare with Table 1 and Table 3B), wherein column B represents “Full-length spike protein; S”,row 1 of Table 1 and Table 3A and column C “Stabilized spike protein; S_stab_PP”, compare with row 2 of Table 1 and Table 3A.

[0395] The SEQ ID NOs of the amino acid sequence of the respective SARS-CoV-2 construct are provided in row 1. The corresponding SEQ ID NOs of the coding sequences encoding the respective SARS-CoV-2 constructs are provided in in Table 1. Further information is provided under <223> identifier of the respective SEQ ID NOs in the sequence listing.

[0396] The corresponding nucleic acid, preferably coding RNA sequences, in particular mRNA sequences comprising preferred coding sequences are provided in rows 2-16, wherein each row provides nucleic acid sequences with UTR combinations and suitable 3′ ends.

TABLE 3B
Nucleic acid, preferably mRNA constructs suitable for a coronavirus vaccine

| row | A | B | C |
|---|---|---|---|
| 1 | Protein | 1-9, 274-340, 22737, 22739, 22741, 22743, | 10-18, 341-407, 22738, 22740, 22742, |
| | | 22745, 22747, 22749, 22751, 22753, 22755, | 22744, 22746, 22748, 22750, 22752, 22754, |
| | | 22757, 22929-22946 | 22756, 22758, 22947-22964 |
| 2 | RNA i-3 | 162, 169, 12676-12809, 12945-13012, | 163-165, 170-172, 12810, 13013, 22819, |
| | (A64-N5- | 22818, 22820, 22822, 22824, 22826, 22828, | 22821, 22823, 22825, 22827, 22829, 22831, |
| | C30-hSL-N5) | 22830, 22832, 22834, 22836, 22838, 23189- | 22833, 22835, 22837, 22839, 23297-23404 |
| | | 23296 | |
| 3 | RNA a-1 | 148, 155, 12204-12337, 12473-12540, | 149-151, 156-158, 12338, 12541, 22792, |
| | (hSL-A100) | 22791, 22793, 22795, 22797, 22799, 22801, | 22794, 22796, 22798, 22800, 22802, 22804, |
| | | 22803, 22805, 22807, 22809, 22811, 23409- | 22806, 22808, 22810, 22812, 23517-23624 |
| | | 23516 | |
| 4 | RNA a-3 | 23629-23736 | 23737-23844 |
| | (hSL-A100) | | |
| 5 | RNA e-2 | 23849-23956 | 23957-24064 |
| | (hSL-A100) | | |
| 6 | RNA i-3 | 24069-24176, 24289-24396, 24509-24616 | 24177-24284, 24397-24504, 24617-24724 |
| | (hSL-A100) | | |
| 7 | RNA a-1 | 24729-24836 | 24837-24944 |
| | (A100) | | |
| 8 | RNA a-3 | 24949-25056 | 25057-25164 |
| | (A100) | | |
| 9 | RNA e-2 | 25169-25276 | 25277-25384 |
| | (A100) | | |
| 10 | RNA i-3 | 25389-25496, 25609-25716, 25829-25936 | 25497-25604, 25717-25824, 25937-26044 |
| | (A100) | | |
| 13 | RNA x-1 | 26049-26156 | 26157-26264 |
| | (A100) | | |
| 14 | RNA x-2 | 26269-26376 | 26377-26484 |
| | (A100) | | |
| 15 | RNA x-1 | 26489-26596 | 26597-26704 |
| | (A100-N5) | | |
| 16 | RNA x-2 | 26709-26816 | 26817-26924 |
| | (A30-N10-A70) | | |

[0397] In preferred embodiments, the nucleic acid of component A (in particular component A-1), preferably the RNA, comprises or consists of a nucleic acid sequence encoding a SARS-CoV-2 antigen which is identical or at least 70%, 80%, 85%, 86%, 87%, 88%, 89%, 90%, 91%, 92%, 93%, 94%, 95%, 96%, 97%, 98%, or 99% identical to a nucleic acid sequence selected SEQ ID NOs: 148-175, 12204-13147, 14142-14177, 22786-22839, 23189-23404, 23409-23624, 23629-23844, 23849-24064, 24069-24284, 24289-24504, 24509-24724, 24729-24944, 24949-25164, 25169-25384, 25389-25604, 25609-25824, 25829-26044, 26049-26264, 26269-26484, 26489-26704, 26709-26937 or a fragment or variant of any of these sequences. Further information regarding respective nucleic acid sequences is provided under <223> identifier of the respective SEQ ID NO in the sequence listing, and in Table 3A (see in particular Column C and D) and 3B (see in particular rows 2-16).

[0398] In particularly preferred embodiments, the nucleic acid of component A (in particular component A-1), preferably the RNA, comprises or consists of a nucleic acid sequence encoding a SARS-CoV-2 antigen which is identical or at least 70%, 80%, 85%, 86%, 87%, 88%, 89%, 90%, 91%, 92%, 93%, 94%, 95%, 96%, 97%, 98%, or 99% identical to a nucleic acid sequence selected from SEQ ID NOs: 162-175, 12676-13147, 14160-14177, 22813-22839, 23189-23404 or a fragment or variant of any of these sequences. Further information regarding respective nucleic acid sequences is provided under <223> identifier of the respective SEQ ID NO in the sequence listing, and in Table 3A (see in particular Column D) and 3B (row 2).

[0399] In particularly preferred embodiments, the nucleic acid of component A (in particular component A-1), preferably the RNA, comprises or consists of a nucleic acid sequence encoding a SARS-CoV-2 antigen which is identical or at least 70%, 80%, 85%, 86%, 87%, 88%, 89%, 90%, 91%, 92%, 93%, 94%, 95%, 96%, 97%, 98%, or 99% identical to a nucleic acid sequence selected from SEQ ID NOs: 148-161, 12204-12675, 14142-14159, 22786-22812, 23409-23624, 24729-24944 or a fragment or variant of any of these sequences. Further information regarding respective nucleic acid sequences is provided under <223> identifier of the respective SEQ ID NO in the sequence listing, and in Table 3A (see in particular Column C) and Table 3B (see rows 3, 7).

[0400] In particularly preferred embodiments, the nucleic acid of component A (in particular component A-1), preferably the RNA, comprises or consists of a nucleic acid sequence encoding a SARS-CoV-2 antigen which is identical or at least 70%, 80%, 85%, 86%, 87%, 88%, 89%, 90%, 91%, 92%, 93%, 94%, 95%, 96%, 97%, 98%, or 99% identical to a nucleic acid sequence selected from SEQ ID NOs: 149-154, 156-161, 163-168, 170-175, 12338, 12352, 12541, 12555, 12810, 12824, 13013, 13027, 22786, 22792, 22794, 22796, 22798, 22800, 22802, 22804, 22806, 22808, 22810, 22812, 22813, 22819, 22821, 22823, 22825, 22827, 22829, 22831, 22833, 22835, 22837, 22839, 23517-23624, 23297-23404, 24837-24944 or a fragment or variant of any of these sequences. Further information regarding respective nucleic acid sequences is provided under <223> identifier of the respective SEQ ID NO in the sequence listing and in Table 3A (see Column C and D, rows 2 and 6) and Table 3B (see Column C).

[0401] In even more preferred embodiments, the nucleic acid of component A (in particular component A-1), preferably the RNA, comprises or consists of a nucleic acid sequence encoding a SARS-CoV-2 antigen which is identical or at least 70%, 80%, 85%, 86%, 87%, 88%, 89%, 90%, 91%, 92%, 93%, 94%, 95%, 96%, 97%, 98%, or 99% identical to a nucleic acid sequence selected from SEQ ID NOs: 149, 156, 12338, 150, 157, 151, 158, 12541, 163, 170, 12810, 164, 171, 165, 172, 13013, 12342-12351, 12545-12554, 12814-12823, 13017-13026, 14133 or a fragment or variant of any of these sequences. Further information regarding respective nucleic acid sequences is provided under <223> identifier of the respective SEQ ID NO in the sequence listing and in Table 3 A and 3B.

[0402] In even more preferred embodiments, the nucleic acid of component A (in particular component A-1), preferably the RNA, comprises or consists of a nucleic acid sequence encoding a SARS-CoV-2 antigen selected from SEQ ID NOs: 149, 150, 163, 164, 165, 24837, 23311, 23531, 24851, 23310, 23530, 24850, 23313, 23533, 24853, 23314, 23534, 24854 or a fragment or variant of any of these sequences. Further information regarding respective nucleic acid sequences is provided under <223> identifier of the respective SEQ ID NO in the sequence listing and in Table 3 (see Column C and D, row 2).

[0403] In a particularly preferred embodiment, the nucleic acid of component A (in particular component A-1), preferably the RNA, comprises or consists of a nucleic acid sequence encoding a SARS-CoV-2 antigen selected from SEQ ID NOs: 163 or a fragment or variant of that sequence.

[0404] In a particularly preferred embodiment, the nucleic acid of component A (in particular component A-1), preferably the RNA, comprises or consists of a nucleic acid sequence encoding a SARS-CoV-2 antigen selected from SEQ ID NOs: 149 or a fragment or variant of that sequence.

[0405] In a further particularly preferred embodiment, the nucleic acid of component A (in particular component A-1), preferably the RNA, comprises or consists of a nucleic acid sequence which is identical or at least 70%, 80%, 85%, 86%, 87%, 88%, 89%, 90%, 91%, 92%, 93%, 94%, 95%, 96%, 97%, 98%, or 99% identical to a nucleic acid sequence of SEQ ID NO: 24837 or a fragment or variant of that sequence

[0406] In a further particularly preferred embodiment, the nucleic acid of component A (in particular component A-1), preferably the RNA, comprises or consists of a nucleic acid sequence which is identical or at least 70%, 80%, 85%, 86%, 87%, 88%, 89%, 90%, 91%, 92%, 93%, 94%, 95%, 96%, 97%, 98%, or 99% identical to a nucleic acid sequence of SEQ ID NO: 23311, 23531, 24851 or a fragment or variant of these sequences.

[0407] In a further preferred embodiment, the nucleic acid of component A (in particular component A-1), preferably the RNA, comprises or consists of a nucleic acid sequence which is identical or at least 70%, 80%, 85%, 86%, 87%, 88%, 89%, 90%, 91%, 92%, 93%, 94%, 95%, 96%, 97%, 98%, or 99% identical to a nucleic acid sequence of SEQ ID NO: 23310, 23530, 24850 or a fragment or variant of these sequences.

[0408] In a further preferred embodiment, the nucleic acid of component A (in particular component A-1), preferably the RNA, comprises or consists of a nucleic acid sequence which is identical or at least 70%, 80%, 85%, 86%, 87%, 88%, 89%, 90%, 91%, 92%, 93%, 94%, 95%, 96%, 97%, 98%, or 99% identical to a nucleic acid sequence of SEQ ID NO: 23313, 23533, 24853, 23314, 23534, 24854 or a fragment or variant of these sequences.

[0409] In a further embodiment, the nucleic acid of component A (in particular component A-1), preferably the RNA, comprises or consists of a nucleic acid sequence which is identical or at least 70%, 80%, 85%, 86%, 87%, 88%, 89%, 90%, 91%, 92%, 93%, 94%, 95%, 96%, 97%, 98%, or 99% identical to a nucleic acid sequence of SEQ ID NO: 26633 or 26907 or a fragment or variant of these sequences.

[0410] In further preferred embodiments, the nucleic acid of component A (in particular component A-1), preferably the RNA, comprises or consists of a nucleic acid sequence encoding a SARS-CoV-2 antigen which is identical or at least 70%, 80%, 85%, 86%, 87%, 88%, 89%, 90%, 91%, 92%, 93%, 94%, 95%, 96%, 97%, 98%, or 99% identical to a nucleic acid sequence selected from SEQ ID NOs: 148-175, 12204-13147, 14142-14177, 22786-22839, 23189-23404, 23409-23624, 23629-23844, 23849-24064, 24069-24284, 24289-24504, 24509-24724, 24729-24944, 24949-25164, 25169-25384, 25389-25604, 25609-25824, 25829-26044, 26049-26264, 26269-26484, 26489-26704, 26709-26937 wherein said RNA sequences comprise a cap1 structure as defined herein. Further information regarding respective nucleic acid sequences is provided under <223> identifier of the respective SEQ ID NO in the sequence listing and in Table 3A and 3B.

[0411] In further embodiments, the nucleic acid of component A (in particular component A-1), preferably the RNA, comprises or consists of a nucleic acid sequence encoding a SARS-CoV-2 antigen which is identical or at least 70%, 80%, 85%, 86%, 87%, 88%, 89%, 90%, 91%, 92%, 93%, 94%, 95%, 96%, 97%, 98%, or 99% identical to a nucleic acid sequence selected from SEQ ID NOs: 148-175, 12204-13147, 14142-14177, 22786-22839, 23189-23404, 23409-23624, 23629-23844, 23849-24064, 24069-24284, 24289-24504, 24509-24724, 24729-24944, 24949-25164, 25169-25384, 25389-25604, 25609-25824, 25829-26044, 26049-26264, 26269-26484, 26489-26704, 26709-26937 wherein at least one, preferably all uracil nucleotides in said RNA sequences are replaced by pseudouridine (ψ) nucleotides and/or N1-methylpseudouridine (m1ψ) nucleotides. Further information regarding respective nucleic acid sequences is provided under <223> identifier of the respective SEQ ID NO in the sequence listing and in Table 3A and 3B.

[0412] In further embodiments, the nucleic acid of component A (in particular component A-1), preferably the RNA, comprises or consists of a nucleic acid sequence encoding a SARS-CoV-2 antigen which is identical or at least 70%, 80%, 85%, 86%, 87%, 88%, 89%, 90%, 91%, 92%, 93%, 94%, 95%, 96%, 97%, 98%, or 99% identical to a nucleic acid sequence selected from SEQ ID NOs: 148-175, 12204-13147, 14142-14177, 22786-22839, 23189-23404, 23409-23624, 23629-23844, 23849-24064, 24069-24284, 24289-24504, 24509-24724, 24729-24944, 24949-25164, 25169-25384, 25389-25604, 25609-25824, 25829-26044, 26049-26264, 26269-26484, 26489-26704, 26709-26937 wherein said RNA sequences comprise a cap1 structure as defined herein, and, wherein at least one, preferably all uracil nucleotides in said RNA sequences are replaced by pseudouridine (ψ) nucleotides and/or N1-methylpseudouridine (m1ψ) nucleotides. Further information regarding respective nucleic acid sequences is provided under <223> identifier of the respective SEQ ID NO in the sequence listing and in Table 3A and 3B.

[0413] Suitable features and embodiments that apply to nucleic acids of component A-1 are provided in paragraph “Nucleic acid features and embodiment” below.

[0414] Suitably, the nucleic acids of component A-1 is formulated and/or complexed. Suitable features and embodiments that apply to nucleic acids complexation or formulation of component A are provided in paragraph “Formulation and Complexation” below.

[0415] In embodiments, the component A comprises a plurality or at least more than one of the nucleic acid species comprising at least one coding sequence encoding at least one antigenic peptide or protein selected or derived from at least one SARS-CoV-2, or an immunogenic fragment or immunogenic variant thereof, e.g. DNA or RNA species as defined herein. Preferably, component A (in particular component A-1) as defined herein comprises 2, 3, 4, 5, 6, 7, 8, 9, or 10 different nucleic acids each defined as defined herein.

[0416] In embodiments, component A may comprise at least 2, 3, 4, 5, 6, 7, 8, 9, 10 or even more different nucleic acid species, e.g. DNA or RNA, as defined herein, each encoding at least one antigenic peptide or protein derived from the same SARS-CoV-2, or a fragment or variant thereof. Particularly, said (genetically) same SARS-CoV-2expresses (essentially) the same repertoire of proteins or peptides, wherein all proteins or peptides have (essentially) the same amino acid sequence. Particularly, said (genetically) same SARS-CoV-2expresses essentially the same proteins, peptides or polyproteins, wherein these protein, peptide or polyproteins preferably do not differ in their amino acid sequence(s).

[0417] In embodiments, the component A comprises at least 2, 3, 4, 5, 6, 7, 8, 9, 10 or even more different nucleic acid species, e.g. DNA or RNA, as defined herein, each encoding at least one peptide or protein derived from a genetically distinct SARS-CoV-2 (e.g. a distinct SARS-CoV-2 isolate), or a fragment or variant thereof. The terms “distinct” or “distinct SARS-CoV-2” as used throughout the present specification have to be understood as the difference between at least two respective SARS-CoV-2 (e.g. a distinct SARS-CoV-2 isolate), wherein the difference is manifested on the genome of the respective distinct SARS-CoV-2. Particularly, said (genetically) distinct SARS-CoV-2 may express at least one distinct protein, peptide or polyprotein, wherein the at least one distinct protein, peptide or polyprotein differs in at least one amino acid.

[0418] In embodiments, the component A-1 comprises 2, 3, 4 or 5 nucleic acid species (e.g. DNA or RNA), preferably RNA species, wherein said nucleic acid species comprise or consist of a nucleic acid sequence which is identical or at least 70%, 80%, 85%, 86%, 87%, 88%, 89%, 90%, 91%, 92%, 93%, 94%, 95%, 96%, 97%, 98%, or 99% identical to a nucleic acid sequence selected from the group consisting of SEQ ID NOs: 116-132, 134-138, 140-143, 145-175, 11664-11813, 11815, 11817-12050, 12052, 12054-13147, 13514, 13515, 13519, 13520, 14124-14177, 22759, 22764-22786, 22791-22813, 22818-22839, 22969-23184, 23189-23404, 23409-23624, 23629-23844, 23849-24064, 24069-24284, 24289-24504, 24509-24724, 24729-24944, 24949-25164, 25169-25384, 25389-25604, 25609-25824, 25829-26044, 26049-26264, 26269-26484, 26489-26704, 26709-26937 and, optionally, at least one pharmaceutically acceptable carrier or excipient, wherein each of the 2, 3, 4 or 5 nucleic acid species encode a different antigenic peptide or protein of a SARS-CoV-2 coronavirus.

[0419] Accordingly, in embodiments, the component A-1 comprises two nucleic acid species (e.g. DNA or RNA), preferably RNA species, wherein the nucleic acid species comprise or consist of a nucleic acid sequence which is identical or at least 70%, 80%, 85%, 86%, 87%, 88%, 89%, 90%, 91%, 92%, 93%, 94%, 95%, 96%, 97%, 98%, or 99% identical to a nucleic acid sequence selected from the group consisting of SEQ ID NOs: 148-175, 12204-13147, 14142-14177, 22786-22839, 23189-23404, 23409-23624, 23629-23844, 23849-24064, 24069-24284, 24289-24504, 24509-24724, 24729-24944, 24949-25164, 25169-25384, 25389-25604, 25609-25824, 25829-26044, 26049-26264, 26269-26484, 26489-26704, 26709-26937 and, optionally, at least one pharmaceutically acceptable carrier or excipient, wherein each of the two nucleic acid species encode a different antigenic peptide or protein of a SARS-CoV-2 coronavirus.

[0420] In embodiments, the component A-1 comprises three nucleic acid species (e.g. DNA or RNA), preferably RNA species, wherein the nucleic acid comprises or consists of a nucleic acid sequence which is identical or at least 70%, 80%, 85%, 86%, 87%, 88%, 89%, 90%, 91%, 92%, 93%, 94%, 95%, 96%, 97%, 98%, or 99% identical to a nucleic acid sequence selected from the group consisting 148-175, 12204-13147, 14142-14177, 22786-22839, 23189-23404, 23409-23624, 23629-23844, 23849-24064, 24069-24284, 24289-24504, 24509-24724, 24729-24944, 24949-25164, 25169-25384, 25389-25604, 25609-25824, 25829-26044, 26049-26264, 26269-26484, 26489-26704, 26709-26937 and, optionally, at least one pharmaceutically acceptable carrier or excipient, wherein each of the 2, 3, 4 or 5 nucleic acid species encode a different antigenic peptide or protein of a SARS-CoV-2 coronavirus.

[0421] Preferably, the at least 2, 3, 4, 5, 6, 7, 8, 9, 10 or even more different nucleic acid species of component A-1 each encode a different prefusion stabilized spike protein (as defined in the first aspect). Preferably, stabilization of the perfusion conformation is obtained by introducing two consecutive proline substitutions at residues K986 and V987 in the spike protein (Amino acid positions according to reference SEQ ID NO: 1). Accordingly, in preferred embodiments, the at least 2, 3, 4, 5, 6, 7, 8, 9, 10 pre-fusion stabilized spike proteins (S_stab) each comprises at least one pre-fusion stabilizing mutation, wherein the at least one pre-fusion stabilizing mutation comprises the following amino acid substitutions: K986P and V987P (amino acid positions according to reference SEQ ID NO: 1).

[0422] Suitably, the different spike proteins or prefusion stabilized spike proteins are derived from at least B.1.1.7, B.1.351, P.1, or CAL.20C.

[0423] Suitably, the different spike proteins or prefusion stabilized spike proteins have amino acid changes in the S protein comprising:
[0424] (i) delH69, delV70, Y453F, D614G, 1692V and M1229I;
[0425] (ii) delH69, delV70, delY144, N501Y, A570D, D614G, P681H, T716I, S982A and D1118H;
[0426] (iii) L18F, D80A, D215G, delL242, delA243, delL244, 82461, K417N, E484K, N501Y, D614G and A701V;
[0427] (iv) L18F, T20N, P26S, D138Y, R190S, K417T, E484K, N501Y, D614G, H655Y and T10271; and/or
[0428] (v) S131, W152C, L452R, and D614G.

[0429] Accordingly, the at least 2, 3, 4, 5, 6, 7, 8, 9, 10 or even more different nucleic acid species of component A-1 each encode a different prefusion stabilized spike protein, wherein the at least 2, 3, 4, 5, 6, 7, 8, 9, 10 or even more stabilized spike proteins are selected from amino acid sequences being identical or at least 70%, 80%, 85%, 86%, 87%, 88%, 89%, 90%, 91%, 92%, 93%, 94%, 95%, 96%, 97%, 98%, or 99% identical to any one of SEQ ID NOs: 10-26, 341-407, 609-1278, 13521-13587, 22738, 22740, 22742, 22744, 22746, 22748, 22750, 22752, 22754, 22756, 22758, 22947-22964 or an immunogenic fragment or immunogenic variant of any of these.

[0430] In preferred embodiments, component A-1 comprises at 2, 3, 4, or 5 nucleic acid species comprising a coding sequence encoding an amino acid sequence being identical or at least 70%, 80%, 85%, 86%, 87%, 88%, 89%, 90%, 91%, 92%, 93%, 94%, 95%, 96%, 97%, 98%, or 99% identical to any one of SEQ ID NOs: 10, 22961; 22960, 22963, 22941, 22964.

[0431] In preferred embodiments, component A-1 comprises one nucleic acid species comprising a coding sequence encoding an amino acid sequence being identical or at least 70%, 80%, 85%, 86%, 87%, 88%, 89%, 90%, 91%, 92%, 93%, 94%, 95%, 96%, 97%, 98%, or 99% identical to any one of SEQ ID NOs: 10, wherein the multivalent composition additionally comprises at least 2, 3, 4 further RNA species selected from
[0432] i) one nucleic acid species comprises a coding sequence encoding an amino acid sequence being identical or at least 70%, 80%, 85%, 86%, 87%, 88%, 89%, 90%, 91%, 92%, 93%, 94%, 95%, 96%, 97%, 98%, or 99% identical to any one of SEQ ID NOs: 22961; and/or
[0433] ii) one nucleic acid species comprises a coding sequence encoding an amino acid sequence being identical or at least 70%, 80%, 85%, 86%, 87%, 88%, 89%, 90%, 91%, 92%, 93%, 94%, 95%, 96%, 97%, 98%, or 99% identical to any one of SEQ ID NOs: 22960; and/or
[0434] iii) one nucleic acid species comprises a coding sequence encoding an amino acid sequence being identical or at least 70%, 80%, 85%, 86%, 87%, 88%, 89%, 90%, 91%, 92%, 93%, 94%, 95%, 96%, 97%, 98%, or 99% identical to any one of SEQ ID NOs: 22963; and/or
[0435] iv) one nucleic acid species comprises a coding sequence encoding an amino acid sequence being identical or at least 70%, 80%, 85%, 86%, 87%, 88%, 89%, 90%, 91%, 92%, 93%, 94%, 95%, 96%, 97%, 98%, or 99% identical to any one of SEQ ID NOs: 22941; and/or
[0436] v) one nucleic acid species comprises a coding sequence encoding an amino acid sequence being identical or at least 70%, 80%, 85%, 86%, 87%, 88%, 89%, 90%, 91%, 92%, 93%, 94%, 95%, 96%, 97%, 98%, or 99% identical to any one of SEQ ID NOs: 22964.

[0437] Preferably, the at least 2, 3, 4, 5, 6, 7, 8, 9, 10 or even more different nucleic acid species of component A comprise nucleic acid coding sequences each encoding a different prefusion stabilized spike protein, wherein the at least 2, 3, 4, 5, 6, 7, 8, 9, 10 or even more nucleic acid coding sequences are selected from nucleic acid sequences being identical or at least 70%, 80%, 85%, 86%, 87%, 88%, 89%, 90%, 91%, 92%, 93%, 94%, 95%, 96%, 97%, 98%, or 99% identical to any one of SEQ ID NOs: 136-138, 140-143, 145-175, 11731-11813, 11815, 11817-12050, 12052, 12054-12203, 13514, 13515, 13519, 13520, 14124-14141, 22759, 22764-22785, 22969-23184 or fragments or variants of any of these.

[0438] In preferred embodiments, component A-1 comprises one nucleic acid species comprising a coding sequence being identical or at least 70%, 80%, 85%, 86%, 87%, 88%, 89%, 90%, 91%, 92%, 93%, 94%, 95%, 96%, 97%, 98%, or 99% identical to any one of SEQ ID NOs: 137, wherein the multivalent composition additionally comprises at least 2, 3, 4 further RNA species selected from
[0439] i) one nucleic acid species comprises a coding sequence being identical or at least 70%, 80%, 85%, 86%, 87%, 88%, 89%, 90%, 91%, 92%, 93%, 94%, 95%, 96%, 97%, 98%, or 99% identical to any one of SEQ ID NOs: 23091; and/or
[0440] ii) one nucleic acid species comprises a coding sequence being identical or at least 70%, 80%, 85%, 86%, 87%, 88%, 89%, 90%, 91%, 92%, 93%, 94%, 95%, 96%, 97%, 98%, or 99% identical to any one of SEQ ID NOs: 23090; and/or
[0441] iii) one nucleic acid species comprises a coding sequence being identical or at least 70%, 80%, 85%, 86%, 87%, 88%, 89%, 90%, 91%, 92%, 93%, 94%, 95%, 96%, 97%, 98%, or 99% identical to any one of SEQ ID NOs: 23093; and/or
[0442] iv) one nucleic acid species comprises a coding sequence being identical or at least 70%, 80%, 85%, 86%, 87%, 88%, 89%, 90%, 91%, 92%, 93%, 94%, 95%, 96%, 97%, 98%, or 99% identical to any one of SEQ ID NOs: 22999; and/or
[0443] v) one nucleic acid species comprises a coding sequence being identical or at least 70%, 80%, 85%, 86%, 87%, 88%, 89%, 90%, 91%, 92%, 93%, 94%, 95%, 96%, 97%, 98%, or 99% identical to any one of SEQ ID NOs: 23094.

[0444] Preferably, the at least 2, 3, 4, 5, 6, 7, 8, 9, 10 or even more different nucleic acid species of component A-1 composition comprise nucleic acid coding sequences each encoding a different prefusion stabilized spike protein,

[0445] wherein the at least 2, 3, 4, 5, 6, 7, 8, 9, 10 or even more nucleic acid coding sequences are selected from RNA sequences being identical or at least 70%, 80%, 85%, 86%, 87%, 88%, 89%, 90%, 91%, 92%, 93%, 94%, 95%, 96%, 97%, 98%, or 99% identical to any one of SEQ ID NOs: 149-151, 163-165, 12338, 12541, 12810-12813, 12901, 12931, 13013, 22792, 22794, 22796, 22798, 22802, 22804, 22806, 22810, 22813, 22819, 22821, 22823, 22825, 22827, 22829, 22831, 22833, 22835, 22837, 22839, 23297-23314, 23369, 23517-23520, 23523-23525, 23527, 23529, 23530, 23589, 23737, 23957, 24397, 24837, 25057, 25277, 25717, 26925-26937 or fragments or variants of any of these.

[0446] In preferred embodiments, component A-1 comprises one RNA species comprising or consisting of an RNA sequence being identical or at least 70%, 80%, 85%, 86%, 87%, 88%, 89%, 90%, 91%, 92%, 93%, 94%, 95%, 96%, 97%, 98%, or 99% identical to any one of SEQ ID NOs: 163, wherein the multivalent composition additionally comprises at least 2, 3, 4 further RNA species selected from
[0447] i) one RNA species comprising or consisting of an RNA sequence being identical or at least 70%, 80%, 85%, 86%, 87%, 88%, 89%, 90%, 91%, 92%, 93%, 94%, 95%, 96%, 97%, 98%, or 99% identical to any one of SEQ ID NOs: 23311; and/or
[0448] ii) one RNA species comprises a coding sequence being identical or at least 70%, 80%, 85%, 86%, 87%, 88%, 89%, 90%, 91%, 92%, 93%, 94%, 95%, 96%, 97%, 98%, or 99% identical to any one of SEQ ID NOs: 23310; and/or
[0449] iii) one RNA species comprises a coding sequence being identical or at least 70%, 80%, 85%, 86%, 87%, 88%, 89%, 90%, 91%, 92%, 93%, 94%, 95%, 96%, 97%, 98%, or 99% identical to any one of SEQ ID NOs: 23313; and/or
[0450] iv) one RNA species comprises a coding sequence being identical or at least 70%, 80%, 85%, 86%, 87%, 88%, 89%, 90%, 91%, 92%, 93%, 94%, 95%, 96%, 97%, 98%, or 99% identical to any one of SEQ ID NOs: 23219; and/or
[0451] v) one RNA species comprises a coding sequence being identical or at least 70%, 80%, 85%, 86%, 87%, 88%, 89%, 90%, 91%, 92%, 93%, 94%, 95%, 96%, 97%, 98%, or 99% identical to any one of SEQ ID NOs: 23314;

[0452] wherein, preferably, each of the mRNA species comprise a Cap1 structure, and, optionally, each of the mRNA species do not comprise modified nucleotides.

[0453] In preferred embodiments, component A-1 comprises one RNA species comprising or consisting of an RNA sequence being identical or at least 70%, 80%, 85%, 86%, 87%, 88%, 89%, 90%, 91%, 92%, 93%, 94%, 95%, 96%, 97%, 98%, or 99% identical to any one of SEQ ID NOs: 149 or 24837, wherein the multivalent composition additionally comprises at least 2, 3, 4 further RNA species selected from
[0454] i) one RNA species comprising or consisting of an RNA sequence being identical or at least 70%, 80%, 85%, 86%, 87%, 88%, 89%, 90%, 91%, 92%, 93%, 94%, 95%, 96%, 97%, 98%, or 99% identical to any one of SEQ ID NOs: 23531 or 24851; and/or
[0455] ii) one RNA species comprises a coding sequence being identical or at least 70%, 80%, 85%, 86%, 87%, 88%, 89%, 90%, 91%, 92%, 93%, 94%, 95%, 96%, 97%, 98%, or 99% identical to any one of SEQ ID NOs: 23530 or 24850; and/or
[0456] iii) one RNA species comprises a coding sequence being identical or at least 70%, 80%, 85%, 86%, 87%, 88%, 89%, 90%, 91%, 92%, 93%, 94%, 95%, 96%, 97%, 98%, or 99% identical to any one of SEQ ID NOs: 23533 or 24853; and/or
[0457] iv) one RNA species comprises a coding sequence being identical or at least 70%, 80%, 85%, 86%, 87%, 88%, 89%, 90%, 91%, 92%, 93%, 94%, 95%, 96%, 97%, 98%, or 99% identical to any one of SEQ ID NOs: 23439 or 24759; and/or
[0458] v) one RNA species comprises a coding sequence being identical or at least 70%, 80%, 85%, 86%, 87%, 88%, 89%, 90%, 91%, 92%, 93%, 94%, 95%, 96%, 97%, 98%, or 99% identical to any one of SEQ ID NOs: 23534 or 24854;

[0459] wherein, preferably, each of the mRNA species comprise a Cap1 structure, and, optionally, each of the mRNA species do not comprise modified nucleotides.

[0460] In further preferred embodiments, component A-1 comprises at least two RNA species being identical or at least 70%, 80%, 85%, 86%, 87%, 88%, 89%, 90%, 91%, 92%, 93%, 94%, 95%, 96%, 97%, 98%, or 99% identical to any one of SEQ ID NOs: 149 or 24837, 23531 or 24851, 23530 or 24850, 23533 or 24853, 23439 or 24759 or 23534 or 24854.

[0461] In preferred embodiments, component A-1 comprises at least one nucleic acid encoding at least one antigenic peptide or protein that is selected or derived from at least one SARS-CoV-2, or an immunogenic fragment or immunogenic variant thereof, wherein said component A is to be, preferably, administered intramuscularly or intradermal.

[0462] Preferably, intramuscular or intradermal administration of said component A-1 results in expression of the encoded SARS-CoV-2 antigen construct in a subject. In embodiments where the nucleic acid is an RNA, administration of component A results in translation of the RNA and to a production of the encoded SARS-CoV-2 antigen in a subject. In embodiments where the nucleic acid is a DNA (e.g. plasmid DNA, adenovirus DNA), administration of said composition results in transcription of the DNA into RNA, and to a subsequent translation of the RNA into the encoded SARS-CoV-2 antigen in a subject.

[0463] In embodiments, administration of the pharmaceutical composition comprising component A-1 to a subject elicits neutralizing antibodies against SARS-CoV-2 and does not elicit disease enhancing antibodies. In particular, administration of a pharmaceutical composition comprising component A-1 encoding SARS-CoV-2 pre-fusion stabilized spike protein to a subject does not elicit immunopathological effects, like e.g. enhanced disease and/or antibody dependent enhancement (ADE).

[0464] In preferred embodiments, administration of component A-1 elicits antigen-specific immune responses comprising T-cell responses and/or B-cell responses against the encoded SARS-CoV-2 antigens provided by the at least one nucleic acid of component A-1.

[0465] Preferably, the component A-1 is suitable for a vaccine, in particular, suitable for a SARS-CoV-2 vaccine, preferably a combination vaccine of the invention.

[0466] In embodiments, the nucleic acid as comprised in component A-1 as defined herein is provided in an amount of about 100 ng to about 500 ug, in an amount of about 1 ug to about 200 ug, in an amount of about 1 ug to about 100 ug, in an amount of about 5 ug to about 100 ug, preferably in an amount of about 10 ug to about 50 ug, specifically, in an amount of about 1 ug, 2 ug, 3 ug, 4 ug, 5 ug, 6 ug, 7 ug, 8 ug, 9 ug, 10 ug, 11 ug, 12 ug, 13 ug, 14 ug, 15 ug, 20 ug, 25 ug, 30 ug, 35 ug, 40 ug, 45 ug, 50 ug, 55 ug, 60 ug, 65 ug, 70 ug, 75 ug, 80 ug, 85 ug, 90 ug, 95 ug or 100 ug.

[0467] In case component A-1 comprises a plurality or at least more than one of the nucleic acid species as defined herein, the amount of nucleic acid for each nucleic acid species is provided in an amount of about 100 ng to about 500 ug, in an amount of about 1 ug to about 200 ug, in an amount of about 1 ug to about 100 ug, in an amount of about 5 ug to about 100 ug, preferably in an amount of about 10 ug to about 50 ug, specifically, in an amount of about 1 ug, 2 ug, 3 ug, 4 ug, 5 ug, 6 ug, 7 ug, 8 ug, 9 ug, 10 ug, 11 ug, 12 ug, 13 ug, 14 ug, 15 ug, 20 ug, 25 ug, 30 ug, 35 ug, 40 ug, 45 ug, 50 ug, 55 ug, 60 ug, 65 ug, 70 ug, 75 ug, 80 ug, 85 ug, 90 ug, 95 ug or 100 ug.

[0468] In some embodiments, the amount of nucleic acid for each nucleic acid species is essentially equal in mass. In other embodiments, the amount of nucleic acid for each nucleic acid species is selected to be equimolar.

[0469] In the following, preferred embodiments of component A1 are provided in form of an item list (see below).

[0470] Item 1: Component A-1 relates to a composition comprising an mRNA comprising:

[0471] (a) at least one coding sequence encoding a SARS-CoV-2 spike protein (S) at least 90% identical to SEQ ID NOs: 10, 341, 22960, 22961, 22963, preferably SEQ ID NO: 10, that is a pre-fusion stabilized spike protein (S_stab) comprising at least one pre-fusion stabilizing mutation;

[0472] (b) at least one heterologous untranslated region (UTR); and

[0473] (c) at least one pharmaceutically acceptable carrier, wherein the mRNA is complexed or associated with lipid nanoparticles (LNP) and wherein the LNP comprises:

[0474] (i) at least one cationic lipid;

[0475] (ii) at least one neutral lipid;

[0476] (iii) at least one steroid or steroid analogue; and

[0477] (iv) at least one PEG-lipid,

[0478] wherein (i) to (iv) are in a molar ratio of about 20-60% cationic lipid, 5-25% neutral lipid, 25-55% sterol, and 0.5-15% PEG-lipid.

[0479] Item 2: Component A-1 of item 1, wherein the mRNA comprises at least one poly(A) sequence, preferably comprising 30 to 200 adenosine nucleotides and/or at least one poly(C) sequence, preferably comprising 10 to 40 cytosine nucleotides.

[0480] Item 3: Component A-1 of item 1 or 2, wherein the mRNA comprises a 5′-cap structure, preferably m7G, cap0, cap1, cap2, a modified cap0 or a modified cap1 structure.

[0481] Item 4: Component A-1 of any of the proceeding items, wherein the S protein comprises a pre-fusion stabilizing K986P and V987P mutation.

[0482] Item 5: Component A-1 of any of the proceeding items, wherein the at least one coding sequence is a codon modified coding sequence, wherein the at least one codon modified coding sequence is selected from C maximized coding sequence, CAI maximized coding sequence, human codon usage adapted coding sequence, G/C content modified coding sequence, and G/C optimized coding sequence, or any combination thereof.

[0483] Item 6: Component A-1 of any of the proceeding items, wherein the at least one coding sequence has a G/C content that is increased by at least 10% 20% or 30% compared to the G/C content of the coding sequence of the corresponding wild-type or reference nucleic acid sequence.

[0484] Item 7: Component A-1 of any of the proceeding items, wherein the at least one coding sequence has a G/C content of at least about 50%, 55%, or 60%, preferably of about 63.9%.

[0485] Item 8: Component A-1 of any of the proceeding items, wherein the mRNA comprises a sequence at least 90% identical to SEQ ID NOs: 149, 163, 24837, 26633, 26907, preferably SEQ ID NO: 163.

[0486] Item 9: Component A-1 of any of the proceeding items, wherein the at least one heterologous untranslated region is selected from at least one heterologous 5′-UTR and/or at least one heterologous 3′-UTR.

[0487] Item 10: Component A-1 of item 9, wherein the at least one heterologous 3′-UTR comprises or consists of a nucleic acid sequence derived from a 3′-UTR of a gene selected from PSMB3, ALB7, alpha-globin (referred to as “muag”), CASP1, COX6B1, GNAS, NDUFA1 and RPS9, or from a homolog, a fragment or a variant of any one of these genes.

[0488] Item 11: Component A-1 of item 9, wherein the at least one heterologous 5′-UTR comprises or consists of a nucleic acid sequence derived from a 5′-UTR of a gene selected from HSD17B4, RPL32, ASAH1, ATP5A1, MP68, NDUFA4, NOSIP, RPL31, SLC7A3, TUBB4B and UBQLN2, or from a homolog, a fragment or variant of any one of these genes.

[0489] Item 12: Component A-1 of any of the proceeding items, wherein the nucleic acid comprises at least one histone stem-loop.

[0490] Item 13: Component A-1 of any of the proceeding items, wherein the mRNA comprises a nucleotide analog.

[0491] Item 14: Component A-1 of any of the proceeding items, wherein the mRNA does not comprise a 1-methylpseudouridine substitution.

[0492] Item 15: Component A-1 of any of the proceeding items, wherein the mRNA has an RNA integrity of at least about 50%, preferably of at least about 60%, more preferably of at least about 70%, most preferably of at least about 80%.

[0493] Item 16: Component A-1 of any of the proceeding items, wherein the mRNA is a purified mRNA that has been purified by RP-HPLC and/or TFF.

[0494] Item 17: Component A-1 of any of the proceeding items, wherein the mRNA is a purified mRNA that has been purified by RP-HPLC and/or TFF and comprises about 5%, 10%, or 20% less double stranded RNA side products as an RNA that has not been purified with RP-HPLC and/or TFF.

[0495] Item 18: Component A-1 of any of the proceeding items, wherein the LNP comprises a cationic lipid according to formula III:

[chemical structure]

[0496] or a pharmaceutically acceptable salt, tautomer, prodrug or stereoisomer thereof, wherein:

[0497] L1 or L2 is each independently —O(C═O)—, —(C═O)O—, —C(═O)—, —O—, —S(O)x—, —S—S—, —C(═O)S—, —SC(═O)—, —NRaC(═O)—, —C(═O)NRa—, —NRaC(═O)NRa—, —OC(═O)NRa— or —NRaC(═O)O—, preferably L1 or L2 is —O(C═O)— or —(C═O)O—;

[0498] G1 and G2 are each independently unsubstituted C1-C12 alkylene or C1-C12 alkenylene;

[0499] G3 is C1-C24 alkylene, C1-C24 alkenylene, C3-C8 cycloalkylene, or C3-C8 cycloalkenylene;

[0500] Ra is H or C1-C12 alkyl;

[0501] R1 and R2 are each independently C6-C24 alkyl or C6-C24 alkenyl;

[0502] R3 is H, OR5, CN, —C(—O)OR4, —OC(—O)R4 or —NR5C(—O)R4;

[0503] R4 is C1-C12 alkyl;

[0504] R5 is H or C1-C6 alkyl; and

[0505] x is 0, 1 or 2.

[0506] Item 19: Component A-1 of any of the proceeding items, wherein the LNP comprises a cationic lipid according to formula III-3:

[chemical structure]

[0507] Item 20: Component A-1 of any of the proceeding items, wherein the LNP comprises a PEG lipid according to formula IVa:

[chemical structure]

[0508] Item 21: Component A-1 of any of the proceeding items, wherein the LNP comprises:

[0509] (i) at least one cationic lipid according to formula (III-3);

[0510] (ii) at least one neutral lipid comprising 1,2-distearoyl-sn-glycero-3-phosphocholine (DSPC);

[0511] (iii) at least one sterol comprising cholesterol; and

[0512] (iv) at least one PEG-lipid according to formula (IVa),

[0513] wherein (i) to (iv) are in a molar ratio of about 20-60% cationic lipid, 5-25% neutral lipid, 25-55% sterol, and 0.5-15% PEG-lipid.

[0514] Item 22: Component A-1 of any of the proceeding items, wherein at least 70%, 75%, 80%, 85%, 90% or 95% of the mRNA is intact at least about two weeks after storage as a liquid at temperatures of about 5° C.

[0515] Item 23: Component A-1 of any of the proceeding items, wherein the composition comprises less than about 20% free RNA, preferably less than about 15% free RNA, more preferably less than about 10% free RNA.

[0516] Item 24: Component A-1 of any of the proceeding items, wherein the LNPs have a mean diameter of from about 30 nm, 35 nm, 40 nm, 45 nm, 50 nm, 55 nm, 60 nm, 65 nm, 70 nm, 75 nm, 80 nm, 85 nm, 90 nm, 95 nm, 100 nm, 105 nm, 110 nm, 115 nm, 120 nm, 125 nm, 130 nm, 135 nm, 140 nm, 145 nm, 150 nm, 160 nm, 170 nm, 180 nm, 190 nm to 200 nm.

[0517] Item 25: Component A-1 of any of the proceeding items, wherein component A-1 is suitable for treating or preventing COVID-19.

[0518] Item 26: Component A-1 of any of the proceeding items, wherein (upon administration) component A-1 induces neutralizing antibodies against SARS-CoV-2 in the subject.

[0519] Item 27: Component A-1 of any of the proceeding items, wherein (upon administration) component A-1 stimulates an antibody response that produces between about 10 and about 300; about 20 and about 300; about 20 and about 200; or about 30 and about 100 coronavirus spike protein-binding antibodies for every coronavirus neutralizing antibody.

[0520] Item 27: Component A-1 of any of the proceeding items, wherein (upon administration) component A-1 stimulates an immune response in the subject that protects the subject from COVID-19.

[0521] Component A-2: SARS Associated Virus

[0522] In a particularly preferred embodiment, the at least one Coronavirus of component A, is a SARS-associated virus, preferably a SARS-CoV-1 virus (also referred to as component A-2).

[0523] Accordingly, in embodiments of the first aspect, the nucleic acid of component A comprises at least one coding sequence encoding at least one antigenic peptide or protein selected or derived from at least one SARS-associated virus, preferably a SARS-CoV-1, or an immunogenic fragment or immunogenic variant thereof.

[0524] It has to be understood that generic embodiments and features that have been described in paragraph “Component A”, may also apply to a nucleic acid encoding a SARS-CoV-1 antigenic peptide or protein.

[0525] SARS-CoV associated viruses belong to the Coronaviridae, in particular to Orthocoronaviruses, more specifically to the genus Betacoronavirus. SARS-CoV-1 (severe acute respiratory syndrome coronavirus, SARS-Coronavirus, SCV) causes a severe respiratory syndrome disease (SARS). An exemplary SARS-CoV-1 coronaviruses is identifiable by NCBI Taxonomy ID: 694009, NCBI Reference: DQ182595.1.

[0526] Further suitable SARS-associated viruses in the context of the invention are SARS-CoV/Tor 2, HCoV/OC43, HCoV/HKU1/N5, HCoV/229E/BN1/GER/2015, HCoV/NL63/RPTEC/2004, Bat SARS-like CoV/WIV1, BatCoV/HKU9-1 BF_0051, PDCoV/Swine/Thailand/S5011/2015, PEDV/NPL-PEDv/2013/P10, PEDV/NPL-PEDv/2013/P10, or MHV/S.

[0527] In the context of the invention, any protein selected or derived from a SARS-associated virus, preferably a SARS-CoV-1 may be used in the context of the invention and may be suitably encoded by the coding sequence or the nucleic acid of component A (in particular, component A-2). It is further in the scope of the underlying invention, that the at least one antigenic peptide or protein may comprise or consist of a synthetically engineered or an artificial SARS-CoV-1 peptide or protein. The term “synthetically engineered” SARS-CoV-1 peptide or protein, or the term “artificial coronavirus peptide or protein” relates to a protein that does not occur in nature. Accordingly, an “artificial coronavirus peptide or protein” or a “synthetically engineered coronavirus peptide or protein” may for example differ in at least one amino acid compared to the natural SARS-CoV-1 peptide or protein, and/or may comprise an additional heterologous peptide or protein element, and/or may be N-terminally or C-terminally extended or truncated.

[0528] In preferred embodiments, the nucleic acid of component A comprises at least one coding sequence encoding at least one antigenic peptide or protein selected or derived from a SARS-associated virus, preferably a SARS-CoV-1, or an immunogenic fragment or immunogenic variant thereof, wherein the at least one antigenic peptide or protein comprises at least one peptide or protein that is selected or is derived from a structural protein, an accessory protein, or a replicase protein or an immunogenic fragment or immunogenic variant of any of these.

[0529] Suitably, the structural protein is selected or derived from a spike protein (S), an envelope protein (E), a membrane protein (M) or a nucleocapsid protein (N), or an immunogenic fragment or variant of any of these.

[0530] In particularly preferred embodiments of the pharmaceutical composition, the encoded at least one antigenic peptide or protein component A (in particular component A-2) comprises or consists at least one peptide or protein selected or derived from a SARS-associated virus, preferably a SARS-CoV-1 spike protein (S, 51, S2, or 51 and S2), or an immunogenic fragment or immunogenic variant of any of these.

[0531] Suitable antigenic peptide or protein sequences that are provided by the nucleic acid of component A (in particular, component A-2) are disclosed in Table 4, rows 1 to 45, Column A and B. In addition, further information regarding said suitable antigenic peptide or protein sequences selected or derived from SARS-associated virus, preferably a SARS-CoV-1 are provided under <223> identifier of the ST.25 sequence listing.

[0532] In the following, preferred antigenic peptide or protein sequences selected or derived from SARS-CoV-1 that are provided by the nucleic acid of component A are described in detail.

[0533] It has to be noted that variation on amino acid level naturally occurs between spike proteins derived from different SARS isolates. In the context of the invention, such amino acid variations can be applied to each antigenic peptide or protein derived from a SARS-associated virus or a SARS-CoV-1 spike protein as described herein.

[0534] In embodiments, a fragment of a SARS-associated virus, preferably a SARS-CoV-1 spike protein (S) may be encoded by the nucleic acid of component A, wherein said fragment may be N-terminally truncated, and/or wherein said fragment may be C-terminally truncated. Such “fragment of a spike protein (S)” may additionally comprise amino acid substitutions (as described below) and may additionally comprise at least one heterologous peptide or protein element (as described below).

[0535] In embodiments, the encoded at least one antigenic peptide or protein of component A comprises or consists of a SARS-associated virus, preferably a SARS-CoV-1 spike protein (S), wherein the spike protein (S) lacks the transmembrane domain (TM). Without wishing to being bound to theory, a SARS-CoV-1 spike protein (S) lacking the transmembrane domain (TM) as defined herein could be suitable for a combination vaccine, as such a protein would be soluble and not anchored in the cell membrane. A soluble protein may therefore be produced (that is translated) in higher concentrations upon administration to a subject, leading to improved immune responses.

[0536] Without wishing to being bound to theory, RBD and CND domains may be crucial for immunogenicity of SARS-associated virus, preferably a SARS-CoV-1 spike protein (S). Both regions are located at the 51 fragment of the spike protein. Accordingly, it may be suitable in the context of the invention that the antigenic peptide or protein comprises or consists of an 51 fragment of the spike protein or an immunogenic fragment or immunogenic variant thereof.

[0537] Suitably, a 51 fragment of SARS-associated virus, preferably a SARS-CoV-1 may comprise at least an RBD and/or a CND domain as defined above.

[0538] In particularly preferred embodiments, the encoded at least one antigenic peptide or protein of component A (in particular component A-2) comprises or consists of a SARS-associated virus, preferably a SARS-CoV-1 spike protein (S), wherein the spike protein (S) comprises or consists of a spike protein fragment S1, or an immunogenic fragment or immunogenic variant thereof.

[0539] In preferred embodiments, the encoded at least one antigenic peptide or protein comprises a SARS-associated virus, preferably a SARS-CoV-1 spike protein fragment S1, and lacks at least 70%, 80%, 90%, preferably 100% of spike protein fragment S2. Such embodiments may be beneficial as the SARS-CoV-1 S1 fragment comprises neutralizing epitopes without potential problems of full length protein comprising 51 and S2.

[0540] Without wishing to being bound to theory, it may be suitable that the antigenic peptide or protein of component A (in particular component A-2) comprises or consists of SARS-associated virus, preferably a SARS-CoV-1 spike protein fragment S1 and (at least a fragment of) SARS-CoV-1 spike protein fragment S2, because the formation of an immunogenic spike protein may be promoted.

[0541] Accordingly, in particularly preferred embodiments, the encoded at least one antigenic peptide or protein of component A (in particular component A-2) comprises or consists of a SARS-associated virus, preferably a SARS-CoV-1 spike protein (S), wherein the spike protein (S) comprises or consists of a spike protein fragment S1 or an immunogenic fragment or immunogenic variant thereof, and spike protein fragment S2 or an immunogenic fragment or immunogenic variant thereof.

[0542] In particularly preferred embodiments, the encoded at least one antigenic peptide or protein of component A (in particular component A-2) comprises or consists of a full length SARS-associated virus, preferably a SARS-CoV-1 spike protein or an immunogenic fragment or immunogenic variant of any of these.

[0543] In particularly preferred embodiments, the SARS-associated virus, preferably a SARS-CoV-1 spike protein (S) that is provided by the nucleic acid of component A (in particular component A-2) is designed or adapted to stabilize the antigen in pre-fusion conformation. A pre-fusion conformation is particularly advantageous in the context of an efficient SARS-CoV-1 vaccine, as several potential epitopes for neutralizing antibodies may merely be accessible in said pre-fusion protein conformation. Furthermore, remaining of the protein in the pre-fusion conformation is aimed to avoid immunopathological effects, like e.g. enhanced disease and/or antibody dependent enhancement (ADE).

[0544] Accordingly, in preferred embodiments, the nucleic acid of component A (in particular component A-2) comprises at least one coding sequence encoding at least one antigenic peptide or protein that is selected or derived from an SARS-associated virus, preferably a SARS-CoV-1, wherein the at least one antigenic peptide or protein is selected or derived or from a spike protein (S), wherein the spike protein (S) is a pre-fusion stabilized spike protein (S_stab). Suitably, said pre-fusion stabilized spike protein comprises at least one pre-fusion stabilizing mutation.

[0545] Stabilization of the SARS-CoV-1 spike protein may be obtained by substituting at least one amino acids at position K968 and/or V969 with amino acids that stabilize the spike protein in a perfusion conformation (amino acid positions according to reference SEQ ID NO: 14906).

[0546] In embodiments, the pre-fusion stabilizing mutation of SARS-CoV-1 spike protein comprises an amino acid substitution at position K968, wherein the amino acids K968 is substituted with one selected from A, I, L, M, F, V, G, or P (amino acid positions according to reference SEQ ID NO: 14906), preferably wherein the amino acids K968 is substituted with P. In embodiments, the pre-fusion stabilizing mutation comprises an amino acid substitution at position V969, wherein the amino acids V969 is substituted with one selected from A, I, L, M, F, V, G, or P (amino acid positions according to reference SEQ ID NO: 14906), preferably wherein the amino acids V969 is substituted with P.

[0547] Accordingly, in preferred embodiments, the pre-fusion stabilized spike protein (S_stab) of SARS-CoV-1 comprises at least one pre-fusion stabilizing mutation, wherein the at least one pre-fusion stabilizing mutation comprises the following amino acid substitutions: K968P and V969P (amino acid positions according to reference SEQ ID NO: 14906).

[0548] Any SARS-associated virus protein or fragments or variants thereof can be chosen by the skilled person to introduce such amino acid changes (e.g. such a double Proline mutation). Examples comprise HCoV/OC43 spike protein (1-1353)(A1070P_L1071P), HCoV/OC43/1783A_10 spike protein (1-1362)(A1079P_L1080P), HCoV/HKU1/N5 spike protein (1-1351)(N1067P_L1068P), HCoV/229E/BN1/GER/2015 spike protein (1-1171)(1869P_I870P), HCoV/NL63/RPTEC/2004 spike protein (1-1356)(S1052P_I1053P), Bat SARS-like CoV/WIV1 spike protein (1-1256)(K969P_V970P), BatCoV/HKU9-1 BF_0051 spike protein (1-1274)(G983P_L984P), PDCoV/Swine/Thailand/S5011/2015 spike protein (1-1160)((E855P_V856P), PEDV/NPL-PEDv/2013/P10 spike protein (1-1386)(I1076P_L1077P), MHV/S spike protein (1-1361)(A1073P_L1074P).

[0549] In embodiments, the at least one pre-fusion stabilizing mutation of SARS-associated virus, preferably a SARS-CoV-1 spike protein comprises a cavity filling mutation.

[0550] In embodiments, the at least one pre-fusion stabilizing mutation of SARS-associated virus, preferably a SARS-CoV-1 spike protein comprises a mutated protonation site.

[0551] In embodiments, the at least one pre-fusion stabilizing mutation of the SARS-associated virus, preferably a SARS-CoV-1 spike protein comprises an artificial intramolecular disulfide bond. Such an artificial intramolecular disulfide bond can be introduced to further stabilize the membrane distal portion of the S protein (including the N-terminal region) in the pre-fusion conformation; that is, in a conformation that specifically binds to one or more pre-fusion specification antibodies, and/or presents a suitable antigenic site that is present on the pre-fusion conformation but not in the post fusion conformation of the S protein.

[0552] Any SARS-associated virus, preferably a SARS-associated virus, preferably a SARS-CoV-1 S protein or fragments or variants thereof can be chosen by the skilled person to introduce at least one cavity filling mutation, at least one mutated protonation site, and/or at least one artificial intramolecular disulfide bond.

[0553] According to various preferred embodiments, the nucleic acid of component A (in particular component A-2) encodes at least one antigenic peptide or protein selected or derived from SARS-associated virus, preferably a SARS-CoV-1 as defined herein and, additionally, at least one heterologous peptide or protein element, preferably selected or derived from a signal peptide, a linker, a helper epitope, an antigen clustering element, a trimerization element, a transmembrane element, and/or a VLP-forming sequence.

[0554] Suitably, the at least one heterologous peptide or protein element may promote or improve secretion of the encoded antigenic peptide or protein of SARS-associated virus, preferably a SARS-CoV-1 (e.g. via secretory signal sequences), promote or improve anchoring of the encoded antigenic peptide or protein in the plasma membrane (e.g. via transmembrane elements), promote or improve formation of antigen complexes (e.g. via multimerization domains or antigen clustering elements), or promote or improve virus-like particle formation (VLP forming sequence). In addition, the nucleic acid of component A (in particular component A-2) may additionally encode peptide linker elements, self-cleaving peptides, immunologic adjuvant sequences or dendritic cell targeting sequences.

[0555] In preferred embodiments, the nucleic acid of component A (in particular component A-2) encoding at least one antigenic protein selected or derived from SARS-associated virus, preferably a SARS-CoV-1 as defined herein, additionally encodes at least one heterologous trimerization element as defined herein, an antigen clustering element as defined herein, or a VLP forming sequence as defined herein.

[0556] The antigen clustering elements may be selected from a ferritin element as defined herein, or a lumazine synthase element as defined herein, surface antigen of Hepatitis B virus (HBsAg) as defined herein, or encapsulin as defined herein. In embodiments where the coding sequence of component A (in particular component A-2) additionally encodes heterologous antigen clustering element, it is particularly preferred and suitable to generate a fusion protein comprising an antigen clustering element and an antigenic peptide or protein derived from SARS-CoV-1. Suitably, said antigenic peptide or protein, preferably the SARS-CoV-1 spike protein, is lacking the C-terminal transmembrane domain (TM) or parts of the TM. Further, it may be suitable to use linker elements as defined for separating the heterologous antigen clustering element from the antigenic peptide or protein.

[0557] The trimerization element may be selected from a foldon element as defined herein. In preferred embodiments, the foldon element is a fibritin foldon element as defined herein. In embodiments where the coding sequence of the nucleic acid of component A (in particular component A-2) additionally encodes heterologous trimerization element, it is particularly preferred and suitable to generate a fusion protein comprising a trimerization element and an antigenic peptide or protein derived from SARS-associated virus, preferably a SARS-CoV-1. Suitably, said antigenic peptide or protein, preferably the spike protein derived from SARS-associated virus, preferably a SARS-CoV-1 that is lacking the C-terminal transmembrane domain, or parts of the TM. Further, it may be suitable to use linker elements as defined for separating the heterologous antigen clustering element from the antigenic peptide or protein.

[0558] The VLP forming sequence may be selected and fused to the SARS-associated virus, preferably a SARS-CoV-1 antigen as defined herein. Suitable VLP forming sequences may be selected from elements derived from Hepatitis B virus core antigen as defined herein, HIV-1 Gag protein as defined herein, or Woodchuck hepatitis core antigen element (WhcAg) as defined herein. In embodiments where the coding sequence of the nucleic acid of component A (in particular component A-2) additionally encodes heterologous VLP forming sequence, it is particularly preferred and suitable to generate a fusion protein comprising a VLP forming sequence and an antigenic peptide or protein derived from SARS-CoV-1. Suitably, said antigenic peptide or protein, preferably the spike protein derived from SARS-CoV-1 that is lacking the C-terminal transmembrane domain (TM), or parts of the TM. Further, it may be suitable to use linker elements as defined herein for separating the heterologous antigen clustering element from the antigenic peptide or protein.

[0559] In embodiments, the antigenic peptide or protein comprises a heterologous signal peptide as defined above. A heterologous signal peptide may be used to improve the secretion of the encoded SARS-associated virus, preferably a SARS-CoV-1 antigen. In embodiments where the coding sequence of the nucleic acid of component A (in particular component A-2) additionally encodes heterologous secretory signal peptide, it is particularly preferred and suitable to generate a fusion protein comprising a heterologous secretory signal peptide and an antigenic peptide or protein derived from SARS-associated virus, preferably a SARS-CoV-1. Suitably, said antigenic peptide or protein, preferably the spike protein derived from SARS-associated virus, preferably a SARS-CoV-1 is lacking the N-terminal endogenous secretory signal peptide.

[0560] Preferred antigenic peptide or proteins selected or derived from a SARS-associated virus, preferably a SARS-CoV-1 as defined above are provided in Table 4 (rows 1 to 45). Therein, each row 1 to 45 corresponds to a suitable SARS-CoV-1 constructs or a SARS-associated virus construct. Column A of Table 4 provides a short description of suitable antigen constructs. Column B of Table 4 provides protein (amino acid) SEQ ID NOs of respective antigen constructs. Column D of Table 4 provides SEQ ID NO of the corresponding G/C optimized nucleic acid coding sequences (opt1, gc). Column E of Table 4 provides SEQ ID NO of the corresponding human codon usage adapted nucleic acid coding sequences (opt 3, human).

[0561] Notably, the description of the invention explicitly includes the information provided under <223> identifier of the ST.25 sequence listing of the present application. Preferred nucleic acid constructs comprising coding sequences of Table 4, e.g. mRNA sequences comprising the coding sequences of Table 4 are provided in Table 5.

TABLE 4
SARS-CoV-1 and SARS-associated constructs (amino acid sequences and nucleic acid coding sequences):

| row | A | B | D | E |
|---|---|---|---|---|
| 1 | SARS-CoV spike protein (1-1255) | 14906 | 14951 | 14996 |
| 2 | SARS-CoV spike protein (1-1255)(K968P_V969P) | 14907 | 14952 | 14997 |
| 3 | SARS-CoV spike protein (1-17_747-1255) | 14908 | 14953 | 14998 |
| 4 | SARS-CoV/Tor2 spike protein (1-1255) | 14909 | 14954 | 14999 |
| 5 | SARS-CoV/Tor2 spike protein (1-1255)(K968P_V969P) | 14910 | 14955 | 15000 |
| 6 | SARS-CoV/Tor2 spike protein (variant) | 14911 | 14956 | 15001 |
| 7 | SARS-CoV/Tor2 spike protein (variant) | 14912 | 14957 | 15002 |
| 8 | HCoV/OC43 spike protein (1-1353) | 14913 | 14958 | 15003 |
| 9 | HCoV/OC43 spike protein (1-1353)(A1070P_L1071P) | 14914 | 14959 | 15004 |
| 10 | HCoV/OC43/1783A_10 spike protein (1-1362) | 14915 | 14960 | 15005 |
| 11 | HCoV/OC43/1783A_10 spike protein (1-1362)(A1079P_L1080P) | 14916 | 14961 | 15006 |
| 12 | HCoV/OC43/1783A_10 spike protein (variant) | 14917 | 14962 | 15007 |
| 13 | HCoV/OC43/1783A_10 spike protein (variant) | 14918 | 14963 | 15008 |
| 14 | HCoV/HKU1/N5 spike protein (1-1351) | 14919 | 14964 | 15009 |
| 15 | HCoV/HKU1/N5 spike protein (1-1351)(N1067P_L1068P) | 14920 | 14965 | 15010 |
| 16 | HCoV/HKU1/N5 spike protein (variant) | 14921 | 14966 | 15011 |
| 17 | HCoV/HKU1/N5 spike protein (variant) | 14922 | 14967 | 15012 |
| 18 | HCoV/229E/BN1/GER/2015 spike protein (1-1171) | 14923 | 14968 | 15013 |
| 19 | HCoV/229E/BN1/GER/2015 spike protein (1-1171)(I869P_I870P) | 14924 | 14969 | 15014 |
| 20 | HCoV/229E/BN1/GER/2015 spike protein (variant) | 14925 | 14970 | 15015 |
| 21 | HCoV/229E/BN1/GER/2015 spike protein (variant) | 14926 | 14971 | 15016 |
| 22 | HCoV/NL63/RPTEC/2004 spike protein (1-1356) | 14927 | 14972 | 15017 |
| 23 | HCoV/NL63/RPTEC/2004 spike protein (1-1356)(S1052P_I1053P) | 14928 | 14973 | 15018 |
| 24 | HCoV/NL63/RPTEC/2004 spike protein (variant) | 14929 | 14974 | 15019 |
| 25 | HCoV/NL63/RPTEC/2004 spike protein (variant) | 14930 | 14975 | 15020 |
| 26 | Bat SARS-like CoV/WIV1 spike protein (1-1256) | 14931 | 14976 | 15021 |
| 27 | Bat SARS-like CoV/WIV1 spike protein (1-1256)(K969P_V970P) | 14932 | 14977 | 15022 |
| 28 | Bat SARS-like CoV/WIV1 spike protein (variant) | 14933 | 14978 | 15023 |
| 29 | Bat SARS-like CoV/WIV1 spike protein (variant) | 14934 | 14979 | 15024 |
| 30 | BatCoV/HKU9-1 BF_0051 spike protein (1-1274) | 14935 | 14980 | 15025 |
| 31 | BatCoV/HKU9-1 BF_0051 spike protein (1-1274)(G983P_L984P) | 14936 | 14981 | 15026 |
| 32 | BatCoV/HKU9-1 BF_0051 spike protein (variant) | 14937 | 14982 | 15027 |
| 33 | BatCoV/HKU9-1 BF_0051 spike protein (variant) | 14938 | 14983 | 15028 |
| 34 | PDCoV/Swine/Thailand/S5011/2015 spike protein (1-1160) | 14939 | 14984 | 15029 |
| 35 | PDCoV/Swine/Thailand/S5011/2015 spike protein (1-1160)((E855P_V856P) | 14940 | 14985 | 15030 |
| 36 | PDCoV/Swine/Thailand/S5011/2015 spike protein (variant) | 14941 | 14986 | 15031 |
| 37 | PDCoV/Swine/Thailand/S5011/2015 spike protein (variant) | 14942 | 14987 | 15032 |
| 38 | PEDV/NPL-PEDv/2013/P10 spike protein (1-1386) | 14943 | 14988 | 15033 |
| 39 | PEDV/NPL-PEDv/2013/P10 spike protein (1-1386)(I1076P_L1077P) | 14944 | 14989 | 15034 |
| 40 | PEDV/NPL-PEDv/2013/P10 spike protein (variant) | 14945 | 14990 | 15035 |
| 41 | PEDV/NPL-PEDv/2013/P10 spike protein (variant) | 14946 | 14991 | 15036 |
| 42 | MHV/S spike protein (1-1361) | 14947 | 14992 | 15037 |
| 43 | MHV/S spike protein (1-1361)(A1073P_L1074P) | 14948 | 14993 | 15038 |
| 44 | MHV/S spike protein (variant) | 14949 | 14994 | 15039 |
| 45 | MHV/S spike protein (variant) | 14950 | 14995 | 15040 |

[0562] In preferred embodiments, the at least one antigenic peptide or protein selected or derived from a SARS associated virus, preferably SARS-CoV-1 encoded by the at least one nucleic acid of component A (in particular component A-2) comprises or consists of at least one of the amino acid sequences being identical or at least 50%, 60%, 70%, 80%, 85%, 86%, 87%, 88%, 89%, 90%, 91%, 92%, 93%, 94%, 95%, 96%, 97%, 98%, or 99% identical to any one of SEQ ID NOs: 14906-14950 or an immunogenic fragment or immunogenic variant of any of these. Further information regarding said amino acid sequences is also provided in Table 4 (see rows 1 to 45 of Column A and B), and under <223> identifier of the ST.25 sequence listing of respective sequence SEQ ID NOs.

[0563] In further embodiments, the at least one antigenic peptide or protein selected or derived from SARS-CoV-1 encoded by the at least one nucleic acid of component A (in particular component A-2) comprises or consists of at least one of the amino acid sequences being identical or at least 50%, 60%, 70%, 80%, 85%, 86%, 87%, 88%, 89%, 90%, 91%, 92%, 93%, 94%, 95%, 96%, 97%, 98%, or 99% identical to any one of SEQ ID NOs: 29, 32 or 34 of published PCT patent application WO2017070626 or an immunogenic fragment or immunogenic variant of any of these. SEQ ID NOs: 29, 32 or 34 of WO2017070626, and the corresponding disclosure relating thereto are herewith incorporated by reference.

[0564] In further embodiments, the at least one antigenic peptide or protein selected or derived from SARS-CoV-1 encoded by the at least one nucleic acid of component A (in particular component A-2) comprises or consists of at least one of the amino acid sequences being identical or at least 50%, 60%, 70%, 80%, 85%, 86%, 87%, 88%, 89%, 90%, 91%, 92%, 93%, 94%, 95%, 96%, 97%, 98%, or 99% identical to any one of SEQ ID NOs: 7 or 30 of published PCT patent application WO2018081318 or an immunogenic fragment or immunogenic variant of any of these. SEQ ID NOs: 7 or 30 of WO2018081318, and the corresponding disclosure relating thereto are herewith incorporated by reference.

[0565] Further suitable antigenic peptide or proteins selected or derived from SARS-CoV-1 can be selected or derived from Table 12 of WO2017070626. Accordingly, the full content of Table 12 of WO2017070626 herewith incorporated by reference.

[0566] In preferred embodiments, the at least one antigenic peptide or protein (pre-fusion stabilized spike protein (S_stab)) selected or derived from a SARS associated virus, preferably a SARS-CoV-1 encoded by the at least one nucleic acid of component A (in particular component A-2) comprises or consists of at least one of the amino acid sequences being identical or at least 50%, 60%, 70%, 80%, 85%, 86%, 87%, 88%, 89%, 90%, 91%, 92%, 93%, 94%, 95%, 96%, 97%, 98%, or 99% identical to any one of SEQ ID NOs: 14907, 14910, 14914, 14916, 14920, 14924, 14928, 14932, 14936, 14940, 14944, 14948 or an immunogenic fragment or immunogenic variant of any of these. Further information regarding said amino acid sequences is also provided in Table 4, and under <223> identifier of the ST.25 sequence listing of respective sequence SEQ ID NOs.

[0567] According to preferred embodiments, the nucleic acid of component A (in particular component A-2) comprises at least one coding sequence encoding at least one antigenic peptide or protein derived from SARS associated virus, preferably a SARS-CoV-1 as defined above, or fragments and variants thereof. In that context, any coding sequence encoding at least one SARS associated virus, preferably a SARS-CoV-1 antigenic protein as defined herein, or fragments and variants thereof may be understood as suitable coding sequence and may therefore be comprised in the nucleic acid of component A.

[0568] In preferred embodiments, the nucleic acid of component A (in particular component A-2) comprise or consist of at least one coding sequence encoding at least one antigenic peptide or protein selected or derived from a SARS-associated virus as defined herein, preferably encoding any one of SEQ ID NOs: 14906-14950; SEQ ID NOs: 1-152, 1448-1548 of WO2018115527; SEQ ID NOs: 29, 32 or 34 of WO2017070626; SEQ ID NOs: 7 or 30 of WO2018081318, or fragments of variants thereof. It has to be understood that, on nucleic acid level, any sequence (DNA or RNA sequence) which encodes an amino acid sequences being identical or at least 70%, 80%, 85%, 86%, 87%, 88%, 89%, 90%, 91%, 92%, 93%, 94%, 95%, 96%, 97%, 98%, or 99% identical to any one of SEQ ID NOs: 14906-14950; SEQ ID NOs: 1-152, 1448-1548 of WO2018115527; SEQ ID NOs: 29, 32 or 34 of WO2017070626; SEQ ID NOs: 7 or 30 of WO2018081318, or fragments or variants thereof, may be selected and may accordingly be understood as suitable coding sequence of the invention. Further information regarding said amino acid sequences is also provided in Table 4 (see rows 1 to 45 of Column A and B), Table 5, and under <223> identifier of the ST.25 sequence listing of respective sequence SEQ ID NOs.

[0569] In preferred embodiments, the nucleic acid of component A (in particular component A-2) comprises a coding sequence that comprises at least one of the nucleic acid sequences encoding a SARS-associated virus antigen, preferably a SARS-CoV-1 antigen, being identical or at least 70%, 80%, 85%, 86%, 87%, 88%, 89%, 90%, 91%, 92%, 93%, 94%, 95%, 96%, 97%, 98%, or 99% identical to any one of the nucleic acid sequences selected from SEQ ID NOs: 14951-15220, or a fragment or a fragment or variant of any of these sequences. Further information regarding said nucleic acid sequences is also provided in Table 4 (see rows 1 to 45), Table 5, and under <223> identifier of the ST.25 sequence listing of respective sequence SEQ ID NOs.

[0570] In preferred embodiments, the at least one coding sequence of the nucleic acid of component A (in particular component A-2) is a codon modified coding sequence as defined herein, wherein the amino acid sequence, that is the SARS-associated virus peptide or protein, encoded by the at least one codon modified coding sequence, is preferably not being modified compared to the amino acid sequence encoded by the corresponding wild type or reference coding sequence.

[0571] In particularly preferred embodiments, the at least one coding sequence of the nucleic acid component A (in particular component A-2) is a codon modified coding sequence, wherein the codon modified coding sequence is selected a G/C optimized coding sequence, a human codon usage adapted coding sequence, or a G/C modified coding sequence.

[0572] Preferred nucleic acid sequences of component A (in particular component A-2), including particularly preferred mRNA sequences, are provided in Table 5 (column C and D). Therein, each row represents a specific suitable SARS-associated virus construct of the invention (compare with Table 4), wherein the description of the SARS-associated virus construct is indicated in column A of Table 5 and the SEQ ID NOs of the amino acid sequence of the respective SARS-associated virus construct is provided in column B. The corresponding SEQ ID NOs of the coding sequences encoding the respective SARS-associated virus constructs are provided in Table 4. Further information is provided under <223> identifier of the respective SEQ ID NOs in the sequence listing.

TABLE 5
Nucleic acid, preferably mRNA constructs encoding SARS-associated or SARS-CoV-1 antigens

| A | B | C | D |
|---|---|---|---|
| SARS-CoV spike protein (1-1255) | 14906 | 15041, 15086 | 15131, 15176 |
| SARS-CoV spike protein (1-1255)(K968P_V969P) | 14907 | 15042, 15087 | 15132, 15177 |
| SARS-CoV spike protein (1-17_747-1255) | 14908 | 15043, 15088 | 15133, 15178 |
| SARS-CoV/Tor2 spike protein (1-1255) | 14909 | 15044, 15089 | 15134, 15179 |
| SARS-CoV/Tor2 spike protein (1-1255)(K968P_V969P) | 14910 | 15045, 15090 | 15135, 15180 |
| SARS-CoV/Tor2 spike protein (variant) | 14911 | 15046, 15091 | 15136, 15181 |
| SARS-CoV/Tor2 spike protein (variant) | 14912 | 15047, 15092 | 15137, 15182 |
| HCoV/OC43 spike protein (1-1353) | 14913 | 15048, 15093 | 15138, 15183 |
| HCoV/OC43 spike protein (1-1353)(A1070P_L1071P) | 14914 | 15049, 15094 | 15139, 15184 |
| HCoV/OC43/1783A_10 spike protein (1-1362) | 14915 | 15050, 15095 | 15140, 15185 |
| HCoV/OC43/1783A_10 spike protein (1-1362)(A1079P_L1080P) | 14916 | 15051, 15096 | 15141, 15186 |
| HCoV/OC43/1783A_10 spike protein (variant) | 14917 | 15052, 15097 | 15142, 15187 |
| HCoV/OC43/1783A_10 spike protein (variant) | 14918 | 15053, 15098 | 15143, 15188 |
| HCoV/HKU1/N5 spike protein (1-1351) | 14919 | 15054, 15099 | 15144, 15189 |
| HCoV/HKU1/N5 spike protein (1-1351)(N1067P_L1068P) | 14920 | 15055, 15100 | 15145, 15190 |
| HCoV/HKU1/N5 spike protein (variant) | 14921 | 15056, 15101 | 15146, 15191 |
| HCoV/HKU1/N5 spike protein (variant) | 14922 | 15057, 15102 | 15147, 15192 |
| HCoV/229E/BN1/GER/2015 spike protein (1-1171) | 14923 | 15058, 15103 | 15148, 15193 |
| HCoV/229E/BN1/GER/2015 spike protein (1-1171)(I869P_I870P) | 14924 | 15059, 15104 | 15149, 15194 |
| HCoV/229E/BN1/GER/2015 spike protein (variant) | 14925 | 15060, 15105 | 15150, 15195 |
| HCoV/229E/BN1/GER/2015 spike protein (variant) | 14926 | 15061, 15106 | 15151, 15196 |
| HCoV/NL63/RPTEC/2004 spike protein (1-1356) | 14927 | 15062, 15107 | 15152, 15197 |
| HCoV/NL63/RPTEC/2004 spike protein (1-1356)(S1052P_I1053P) | 14928 | 15063, 15108 | 15153, 15198 |
| HCoV/NL63/RPTEC/2004 spike protein (variant) | 14929 | 15064, 15109 | 15154, 15199 |
| HCoV/NL63/RPTEC/2004 spike protein (variant) | 14930 | 15065, 15110 | 15155, 15200 |
| Bat SARS-like CoV/WIV1 spike protein (1-1256) | 14931 | 15066, 15111 | 15156, 15201 |
| Bat SARS-like CoV/WIV1 spike protein (1-1256)(K969P_V970P) | 14932 | 15067, 15112 | 15157, 15202 |
| Bat SARS-like CoV/WIV1 spike protein (variant) | 14933 | 15068, 15113 | 15158, 15203 |
| Bat SARS-like CoV/WIV1 spike protein (variant) | 14934 | 15069, 15114 | 15159, 15204 |
| BatCoV/HKU9-1 BF_005I spike protein (1-1274) | 14935 | 15070, 15115 | 15160, 15205 |
| BatCoV/HKU9-1 BF_005I spike protein (1-1274)(G983P_L984P) | 14936 | 15071, 15116 | 15161, 15206 |
| BatCoV/HKU9-1 BF_005I spike protein (variant) | 14937 | 15072, 15117 | 15162, 15207 |
| BatCoV/HKU9-1 BF_005I spike protein (variant) | 14938 | 15073, 15118 | 15163, 15208 |
| PDCoV/Swine/Thailand/S5011/2015 spike protein (1-1160) | 14939 | 15074, 15119 | 15164, 15209 |
| PDCoV/Swine/Thailand/S5011/2015 spike protein (1-1160)((E855P_V856P) | 14940 | 15075, 15120 | 15165, 15210 |
| PDCoV/Swine/Thailand/S5011/2015 spike protein (variant) | 14941 | 15076, 15121 | 15166, 15211 |
| PDCoV/Swine/Thailand/S5011/2015 spike protein (variant) | 14942 | 15077, 15122 | 15167, 15212 |
| PEDV/NPL-PEDv/2013/P10 spike protein (1-1386) | 14943 | 15078, 15123 | 15168, 15213 |
| PEDV/NPL-PEDv/2013/P10 spike protein (1-1386)(I1076P_L1077P) | 14944 | 15079, 15124 | 15169, 15214 |
| PEDV/NPL-PEDv/2013/P10 spike protein (variant) | 14945 | 15080, 15125 | 15170, 15215 |
| PEDV/NPL-PEDv/2013/P10 spike protein (variant) | 14946 | 15081, 15126 | 15171, 15216 |
| MHV/S spike protein (1-1361) | 14947 | 15082, 15127 | 15172, 15217 |
| MHV/S spike protein (1-1361)(A1073P_L1074P) | 14948 | 15083, 15128 | 15173, 15218 |
| MHV/S spike protein (variant) | 14949 | 15084, 15129 | 15174, 15219 |
| MHV/S spike protein (variant) | 14950 | 15085, 15130 | 15175, 15220 |

[0573] In preferred embodiments, the nucleic acid of component A (in particular component A-2), preferably the RNA, comprises or consists of a nucleic acid sequence encoding a SARS-associated virus antigen which is identical or at least 70%, 80%, 85%, 86%, 87%, 88%, 89%, 90%, 91%, 92%, 93%, 94%, 95%, 96%, 97%, 98%, or 99% identical to a nucleic acid sequence selected from SEQ ID NOs: 15041-15220 or a fragment or variant of any of these sequences. Further information regarding respective nucleic acid sequences is provided under <223> identifier of the respective SEQ ID NO in the sequence listing, and in Table 5 (see in particular Column C and D). Optionally, said nucleic acid sequences comprise a cap1 structure as defined herein, and/or at least one, preferably all uracil nucleotides in said RNA sequences are replaced by pseudouridine (ψ) nucleotides and/or N1-methylpseudouridine (m1ψ) nucleotides.

[0574] Suitable features and embodiments that apply to nucleic acids of component A-2 are provided in paragraph “Nucleic acid features and embodiment” below.

[0575] Suitably, the nucleic acids of component A-2 is formulated and/or complexed. Suitable features and embodiments that apply to nucleic acids complexation or formulation of component A are provided in paragraph “Formulation and Complexation” below.

[0576] In embodiments, the component A (in particular component A-2) comprises a plurality or at least more than one of the nucleic acid species comprising at least one coding sequence encoding at least one antigenic peptide or protein selected or derived from at least one SARS-associated virus, preferably SARS-CoV-1, or an immunogenic fragment or immunogenic variant thereof, e.g. DNA or RNA species as defined herein. Preferably, component A (in particular component A-2) as defined herein comprises 2, 3, 4, 5, 6, 7, 8, 9, or 10 different nucleic acids each defined as defined herein.

[0577] In embodiments, component A (in particular component A-2) may comprise at least 2, 3, 4, 5, 6, 7, 8, 9, 10 or even more different nucleic acid species, e.g. DNA or RNA, as defined herein, each encoding at least one antigenic peptide or protein derived from the same SARS-associated virus, or a fragment or variant thereof. Particularly, said (genetically) same SARS-associated virus expresses (essentially) the same repertoire of proteins or peptides, wherein all proteins or peptides have (essentially) the same amino acid sequence. Particularly, said (genetically) same SARS-associated virus expresses essentially the same proteins, peptides or polyproteins, wherein these protein, peptide or polyproteins preferably do not differ in their amino acid sequence(s).

[0578] In embodiments, the component A (in particular component A-2) comprises at least 2, 3, 4, 5, 6, 7, 8, 9, 10 or even more different nucleic acid species, e.g. DNA or RNA, as defined herein, each encoding at least one peptide or protein derived from a genetically distinct SARS-associated virus (e.g. a distinct SARS-associated virus isolate), or a fragment or variant thereof. The terms “distinct” or “distinct SARS-associated virus” as used throughout the present specification have to be understood as the difference between at least two respective SARS-associated virus (e.g. a distinct SARS-associated virus isolate), wherein the difference is manifested on the genome of the respective distinct SARS-associated virus. Particularly, said (genetically) distinct SARS-associated virus may express at least one distinct protein, peptide or polyprotein, wherein the at least one distinct protein, peptide or polyprotein differs in at least one amino acid.

[0579] In preferred embodiments, the component A-2 comprises at least one nucleic acid encoding at least one antigenic peptide or protein that is selected or derived from at least one SARS-associated virus, preferably SARS-CoV-1, or an immunogenic fragment or immunogenic variant thereof, wherein said component A-2 is to be, preferably, administered intramuscularly or intradermal.

[0580] Preferably, intramuscular or intradermal administration of said component A-2 results in expression of the encoded SARS-associated virus antigen construct in a subject. In embodiments where the nucleic acid is an RNA, administration of component A-2 results in translation of the RNA and to a production of the encoded SARS-associated virus antigen in a subject. In embodiments where the nucleic acid is a DNA (e.g. plasmid DNA, adenovirus DNA), administration of said composition results in transcription of the DNA into RNA, and to a subsequent translation of the RNA into the encoded SARS-associated virus antigen in a subject.

[0581] In embodiments, administration of the pharmaceutical composition comprising component A-2 to a subject elicits neutralizing antibodies against SARS-associated virus and does not elicit disease enhancing antibodies. In particular, administration of a pharmaceutical composition comprising component A-2 encoding SARS-associated virus pre-fusion stabilized spike protein to a subject does not elicit immunopathological effects, like e.g. enhanced disease and/or antibody dependent enhancement (ADE).

[0582] In preferred embodiments, administration of component A-2 elicits antigen-specific immune responses comprising T-cell responses and/or B-cell responses against the encoded SARS-associated virus antigens provided by the at least one nucleic acid of component A-2.

[0583] Preferably, the component A-2 is suitable for a vaccine, in particular, suitable for a SARS-associated virus, preferably a SARS-CoV-1 vaccine, preferably a combination vaccine of the invention.

[0584] In embodiments, the nucleic acid as comprised in component A-2 as defined herein is provided in an amount of about 100 ng to about 500 ug, in an amount of about 1 ug to about 200 ug, in an amount of about 1 ug to about 100 ug, in an amount of about 5 ug to about 100 ug, preferably in an amount of about 10 ug to about 50 ug, specifically, in an amount of about 1 ug, 2 ug, 3 ug, 4 ug, 5 ug, 6 ug, 1 ug, 8 ug, 9 ug, 10 ug, 11 ug, 12 ug, 13 ug, 14 ug, 15 ug, 20 ug, 25 ug, 30 ug, 35 ug, 40 ug, 45 ug, 50 ug, 55 ug, 60 ug, 65 ug, 70 ug, 75 ug, 80 ug, 85 ug, 90 ug, 95 ug or 100 ug.

[0585] In case component A-2 comprises a plurality or at least more than one of the nucleic acid species as defined herein, the amount of nucleic acid for each nucleic acid species is provided in an amount of about 100 ng to about 500 ug, in an amount of about 1 ug to about 200 ug, in an amount of about 1 ug to about 100 ug, in an amount of about 5 ug to about 100 ug, preferably in an amount of about 10 ug to about 50 ug, specifically, in an amount of about 1 ug, 2 ug, 3 ug, 4 ug, 5 ug, 6 ug, 1 ug, 8 ug, 9 ug, 10 ug, 11 ug, 12 ug, 13 ug, 14 ug, 15 ug, 20 ug, 25 ug, 30 ug, 35 ug, 40 ug, 45 ug, 50 ug, 55 ug, 60 ug, 65 ug, 70 ug, 75 ug, 80 ug, 85 ug, 90 ug, 95 ug or 100 ug.

[0586] In some embodiments, the amount of nucleic acid for each nucleic acid species is essentially equal in mass. In other embodiments, the amount of nucleic acid for each nucleic acid species is selected to be equimolar.

[0587] Component A-3: MERS-CoV

[0588] In a particularly preferred embodiment, the at least one Coronavirus of component A, is a MERS-CoV virus (also referred to as component A-3).

[0589] Accordingly, in embodiments of the first aspect, the nucleic acid of component A comprises at least one coding sequence encoding at least one antigenic peptide or protein selected or derived from at least one MERS-CoV, or an immunogenic fragment or immunogenic variant thereof.

[0590] It has to be understood that generic embodiments and features that have been described in paragraph “Component A”, may also apply to a nucleic acid encoding a MERS-CoV antigenic peptide or protein.

[0591] MERS-CoV belongs to the Coronaviridae, in particular to Orthocoronaviruses, more specifically to the genus Betacoronavirus. MERS-CoV (Middle East respiratory syndrome coronavirus, MERS-Coronavirus, EMC/2012 (HCoV-EMC/2012)) causes a severe respiratory syndrome disease. An exemplary MERS-CoV coronaviruses is identifiable by NCBI Taxonomy ID: 1335626, NCBI Reference: NC_038294.1. Suitable MERS-CoV strains/isolates may be selected from MERS-CoV/MERS-CoV-Jeddah-human-1, MERS-CoV/Al-Hasa_4_2013, MERS-CoV/Riyadh_14_2013, MERS-CoV/Riyadh_14_2013, MERS-CoV/Riyadh_14_2013 spike protein, MERS-CoV/England 1 spike protein, MERS-CoV/England 1 spike protein (variant).

[0592] In the context of the invention, any protein selected or derived from a MERS-CoV may be used in the context of the invention and may be suitably encoded by the coding sequence or the nucleic acid of component A (in particular, component A-3). It is further in the scope of the underlying invention, that the at least one antigenic peptide or protein may comprise or consist of a synthetically engineered or an artificial MERS-CoV peptide or protein. The term “synthetically engineered” MERS-CoV peptide or protein, or the term “artificial coronavirus peptide or protein” relates to a protein that does not occur in nature. Accordingly, an “artificial coronavirus peptide or protein” or a “synthetically engineered coronavirus peptide or protein” may for example differ in at least one amino acid compared to the natural MERS-CoV peptide or protein, and/or may comprise an additional heterologous peptide or protein element, and/or may be N-terminally or C-terminally extended or truncated.

[0593] In preferred embodiments, the nucleic acid of component A comprises at least one coding sequence encoding at least one antigenic peptide or protein selected or derived from a MERS-CoV, or an immunogenic fragment or immunogenic variant thereof, wherein the at least one antigenic peptide or protein comprises at least one peptide or protein that is selected or is derived from a structural protein, an accessory protein, or a replicase protein or an immunogenic fragment or immunogenic variant of any of these.

[0594] Suitably, the structural protein is selected or derived from a spike protein (S), an envelope protein (E), a membrane protein (M) or a nucleocapsid protein (N), or an immunogenic fragment or variant of any of these.

[0595] In particularly preferred embodiments of the pharmaceutical composition, the encoded at least one antigenic peptide or protein of component A (in particular component A-3) comprises or consists at least one peptide or protein selected or derived from a MERS-CoV spike protein (S, S1, S2, or S1 and S2), or an immunogenic fragment or immunogenic variant of any of these.

[0596] Suitable antigenic peptide or protein sequences that are provided by the nucleic acid of component A (in particular, component A-3) are disclosed in Table 6, rows 1 to 16, Column A and B. In addition, further information regarding said suitable antigenic peptide or protein sequences selected or derived from MERS-CoV are provided under <223> identifier of the ST.25 sequence listing.

[0597] In the following, preferred antigenic peptide or protein sequences selected or derived from MERS-CoV that are provided by the nucleic acid of component A are described in detail.

[0598] It has to be noted that variation on amino acid level naturally occurs between spike proteins derived from different MERS-CoV isolates. In the context of the invention, such amino acid variations can be applied to each antigenic peptide or protein derived from a MERS-CoV spike protein as described herein.

[0599] In embodiments, a fragment of a MERS-CoV spike protein (S) may be encoded by the nucleic acid of component A, wherein said fragment may be N-terminally truncated, and/or wherein said fragment may be C-terminally truncated. Such “fragment of a spike protein (S)” may additionally comprise amino acid substitutions (as described below) and may additionally comprise at least one heterologous peptide or protein element (as described below).

[0600] In embodiments, the encoded at least one antigenic peptide or protein of component A comprises or consists of a MERS-CoV spike protein (S), wherein the spike protein (S) lacks the transmembrane domain (TM). Without wishing to being bound to theory, a MERS-CoV spike protein (S) lacking the transmembrane domain (TM) as defined herein could be suitable for a combination vaccine, as such a protein would be soluble and not anchored in the cell membrane. A soluble protein may therefore be produced (that is translated) in higher concentrations upon administration to a subject, leading to improved immune responses.

[0601] Without wishing to being bound to theory, RBD and CND domains may be crucial for immunogenicity of MERS-CoV spike protein (S). Both regions are located at the S1 fragment of the spike protein. Accordingly, it may be suitable in the context of the invention that the antigenic peptide or protein comprises or consists of an S1 fragment of the spike protein or an immunogenic fragment or immunogenic variant thereof.

[0602] Suitably, a S1 fragment of MERS-CoV may comprise at least an RBD and/or a CND domain as defined above.

[0603] In particularly preferred embodiments, the encoded at least one antigenic peptide or protein of component A (in particular component A-3) comprises or consists of a MERS-CoV spike protein (S), wherein the MERS-CoV spike protein (S) comprises or consists of a spike protein fragment S1, or an immunogenic fragment or immunogenic variant thereof.

[0604] In preferred embodiments, the encoded at least one antigenic peptide or protein comprises a MERS-CoV spike protein fragment S1, and lacks at least 70%, 80%, 90%, preferably 100% of spike protein fragment S2. Such embodiments may be beneficial as the MERS-CoV S1 fragment comprises neutralizing epitopes without potential problems of full length protein comprising S1 and S2.

[0605] Without wishing to being bound to theory, it may be suitable that the antigenic peptide or protein of component A (in particular component A-3) comprises or consists of MERS-CoV spike protein fragment S1 and (at least a fragment of) MERS-CoV spike protein fragment S2, because the formation of an immunogenic MERS-CoV spike protein may be promoted.

[0606] Accordingly, in particularly preferred embodiments, the encoded at least one antigenic peptide or protein of component A (in particular component A-3) comprises or consists of a MERS-CoV spike protein (S), wherein the MERS-CoV spike protein (S) comprises or consists of a MERS-CoV spike protein fragment S1 or an immunogenic fragment or immunogenic variant thereof, and MERS-CoV spike protein fragment S2 or an immunogenic fragment or immunogenic variant thereof.

[0607] In particularly preferred embodiments, the encoded at least one antigenic peptide or protein of component A (in particular component A-3) comprises or consists of a full length MERS-CoV spike protein or an immunogenic fragment or immunogenic variant of any of these.

[0608] In particularly preferred embodiments, the MERS-CoV spike protein (S) that is provided by the nucleic acid of component A (in particular component A-3) is designed or adapted to stabilize the antigen in pre-fusion conformation. A pre-fusion conformation is particularly advantageous in the context of an efficient MERS-CoV vaccine, as several potential epitopes for neutralizing antibodies may merely be accessible in said pre-fusion protein conformation. Furthermore, remaining of the protein in the pre-fusion conformation is aimed to avoid immunopathological effects, like e.g. enhanced disease and/or antibody dependent enhancement (ADE).

[0609] Accordingly, in preferred embodiments, the nucleic acid of component A (in particular component A-3) comprises at least one coding sequence encoding at least one antigenic peptide or protein that is selected or derived from MERS-CoV, wherein the at least one antigenic peptide or protein is selected or derived or from a spike protein (S), wherein the spike protein (S) is a pre-fusion stabilized spike protein (S_stab). Suitably, said pre-fusion stabilized spike protein comprises at least one pre-fusion stabilizing mutation.

[0610] Stabilization of the MERS-CoV spike protein may be obtained by substituting at least one amino acids at position V1060 and/or L1061 with amino acids that stabilize the spike protein in a perfusion conformation (amino acid positions according to reference SEQ ID NO: 14794).

[0611] In embodiments, the pre-fusion stabilizing mutation of MERS-CoV spike protein comprises an amino acid substitution at position V1060, wherein the amino acids V1060 is substituted with one selected from A, I, L, M, F, V, G, or P (amino acid positions according to reference SEQ ID NO: 14794), preferably wherein the amino acids V1060 is substituted with P. In embodiments, the pre-fusion stabilizing mutation comprises an amino acid substitution at position L1061, wherein the amino acids L1061 is substituted with one selected from A, I, L, M, F, V, G, or P (amino acid positions according to reference SEQ ID NO: 14794), preferably wherein the amino acids L1061 is substituted with P.

[0612] Accordingly, in preferred embodiments, the pre-fusion stabilized spike protein (S_stab) of MERS-CoV comprises at least one pre-fusion stabilizing mutation, wherein the at least one pre-fusion stabilizing mutation comprises the following amino acid substitutions: V1060P and L1061P (amino acid positions according to reference SEQ ID NO: 14794).

[0613] Any MERS-CoV spike protein or fragments or variants thereof can be chosen by the skilled person to introduce such amino acid changes, preferably amino acid substitutions: V1060P and L1061P (amino acid positions according to reference SEQ ID NO: 14794).

[0614] Any MERS-CoV spike protein or fragments or variants thereof can be chosen by the skilled person to introduce such amino acid changes (e.g. such a double Proline mutation). Examples comprise MERS-CoV/MERS-CoV-Jeddah-human-1 spike protein (1-1353)(V1060P_L1061P), MERS-CoV/Al-Hasa_4_2013 spike protein (1-1353)(V1060P_L1061P), MERS-CoV/Riyadh_14_2013 spike protein (1-1353)(V1060P_L1061P), MERS-CoV/England 1 spike protein (1-1353)(V1060P_L1061P).

[0615] In embodiments, the at least one pre-fusion stabilizing mutation of MERS-CoV spike protein comprises a cavity filling mutation.

[0616] In some embodiments, the cavity filling substitutions to stabilize the MERS-CoV S ectodomain the prefusion conformation, may be selected from the following amino acid substitutions: N1072F and A10831; N1072F and L1086F; N1072F and V10871; N1072F and E10901; T1076F and A10831; T1076F and L1086F; T1076F and V10871; T1076F and El 0901; T10761 and A10831; T10761 and L1086F; T10761 and V10871; T10761 and E10901; A1018V; or A10181.

[0617] In embodiments, the at least one pre-fusion stabilizing mutation of MERS-CoV spike protein comprises a mutated protonation site (R1020Q).

[0618] In embodiments, the at least one pre-fusion stabilizing mutation of MERS-CoV spike protein comprises a repacking substitution to stabilize the S ectodomain the prefusion conformation, such as one of: E793M and K1102F; E793M, K1102F, and H1138F; D1068M and R1069W; A1083L; A1083L and V10871; A1083L, V1087, and E1090L; A834L and Q1084M; Q1066M; S454F; R921W; S612F and G1052F; or P476V, T477A, and R1057W.

[0619] In embodiments, the at least one pre-fusion stabilizing mutation of the MERS-CoV spike protein comprises an artificial intramolecular disulfide bond. Such an artificial intramolecular disulfide bond can be introduced to further stabilize the membrane distal portion of the MERS-CoV spike protein (including the N-terminal region) in the pre-fusion conformation; that is, in a conformation that specifically binds to one or more pre-fusion specification antibodies, and/or presents a suitable antigenic site that is present on the pre-fusion conformation but not in the post fusion conformation of the MERS-CoV spike protein.

[0620] In some embodiments, the disulfide bond substitutions to stabilize the MERS-CoV S ectodomain the prefusion conformation, may be selected from the following amino acid substitutions: T63C and V631C; T63C and Q638C; 07330 and D940C; S676C and D910C; V1087C (which forms a disulfide bond with a cysteine present in the native sequence); A4320 and L1058C; or A432C and D1059C to stabilize the S ectodomain the prefusion conformation.

[0621] Any MERS-CoV spike protein or fragments or variants thereof can be chosen by the skilled person to introduce at least one cavity filling mutation, at least one mutated protonation site, and/or at least one artificial intramolecular disulfide bond.

[0622] According to various preferred embodiments, the nucleic acid of component A (in particular component A-3) encodes at least one antigenic peptide or protein selected or derived from MERS-CoV as defined herein and, additionally, at least one heterologous peptide or protein element, preferably selected or derived from a signal peptide, a linker, a helper epitope, an antigen clustering element, a trimerization element, a transmembrane element, and/or a VLP-forming sequence.

[0623] Suitably, the at least one heterologous peptide or protein element may promote or improve secretion of the encoded antigenic peptide or protein of MERS-CoV (e.g. via secretory signal sequences), promote or improve anchoring of the encoded antigenic peptide or protein of MERS-CoV in the plasma membrane (e.g. via transmembrane elements), promote or improve formation of antigen complexes (e.g. via multimerization domains or antigen clustering elements), or promote or improve virus-like particle formation (VLP forming sequence). In addition, the nucleic acid of component A (in particular component A-3) may additionally encode peptide linker elements, self-cleaving peptides, immunologic adjuvant sequences or dendritic cell targeting sequences.

[0624] In preferred embodiments, the nucleic acid of component A (in particular component A-3) encoding at least one antigenic protein selected or derived from MERS-CoV as defined herein, additionally encodes at least one heterologous trimerization element as defined herein, an antigen clustering element as defined herein, or a VLP forming sequence as defined herein.

[0625] The antigen clustering elements may be selected from a ferritin element as defined herein, or a lumazine synthase element as defined herein, surface antigen of Hepatitis B virus (HBsAg) as defined herein, or encapsulin as defined herein. In embodiments where the coding sequence of component A (in particular component A-3) additionally encodes heterologous antigen clustering element, it is particularly preferred and suitable to generate a fusion protein comprising an antigen clustering element and an antigenic peptide or protein derived from MERS-CoV. Suitably, said antigenic peptide or protein, preferably the MERS-CoV spike protein, is lacking the C-terminal transmembrane domain (TM) or parts of the TM. Further, it may be suitable to use linker elements as defined for separating the heterologous antigen clustering element from the antigenic peptide or protein.

[0626] The trimerization element may be selected from a foldon element as defined herein. In preferred embodiments, the foldon element is a fibritin foldon element as defined herein. In embodiments where the coding sequence of the nucleic acid of component A (in particular component A-3) additionally encodes heterologous trimerization element, it is particularly preferred and suitable to generate a fusion protein comprising a trimerization element and an antigenic peptide or protein derived from MERS-CoV. Suitably, said antigenic peptide or protein, preferably the spike protein derived from MERS-CoV that is lacking the C-terminal transmembrane domain, or parts of the TM. Further, it may be suitable to use linker elements as defined for separating the heterologous antigen clustering element from the antigenic peptide or protein.

[0627] The VLP forming sequence may be selected and fused to the MERS-CoV antigen as defined herein. Suitable VLP forming sequences may be selected from elements derived from Hepatitis B virus core antigen as defined herein, HIV-1 Gag protein as defined herein, or Woodchuck hepatitis core antigen element (WhcAg) as defined herein. In embodiments where the coding sequence of the nucleic acid of component A (in particular component A-3) additionally encodes heterologous VLP forming sequence, it is particularly preferred and suitable to generate a fusion protein comprising a VLP forming sequence and an antigenic peptide or protein derived from MERS-CoV. Suitably, said antigenic peptide or protein, preferably the spike protein derived from MERS-CoV that is lacking the C-terminal transmembrane domain (TM), or parts of the TM. Further, it may be suitable to use linker elements as defined herein for separating the heterologous antigen clustering element from the antigenic peptide or protein.

[0628] In embodiments, the antigenic peptide or protein comprises a heterologous signal peptide as defined above. A heterologous signal peptide may be used to improve the secretion of the encoded MERS-CoV antigen. In embodiments where the coding sequence of the nucleic acid of component A (in particular component A-3) additionally encodes heterologous secretory signal peptide, it is particularly preferred and suitable to generate a fusion protein comprising a heterologous secretory signal peptide and an antigenic peptide or protein derived from MERS-CoV. Suitably, said antigenic peptide or protein, preferably the spike protein derived from MERS-CoV is lacking the N-terminal endogenous secretory signal peptide.

[0629] Preferred antigenic peptide or proteins selected or derived from a MERS-CoV as defined above are provided in Table 6 (rows 1 to 16). Therein, each row 1 to 16 corresponds to a suitable MERS-CoV constructs. Column A of Table 6 provides a short description of suitable MERS-CoV antigen constructs. Column B of Table 6 provides protein (amino acid) SEQ ID NOs of respective MERS-CoV antigen constructs. Column D of Table 6 provides SEQ ID NO of the corresponding G/C optimized nucleic acid coding sequences (opt1, gc). Column E of Table 6 provides SEQ ID NO of the corresponding human codon usage adapted nucleic acid coding sequences (opt 3, human).

[0630] Notably, the description of the invention explicitly includes the information provided under <223> identifier of the ST.25 sequence listing of the present application. Preferred nucleic acid constructs comprising coding sequences of Table 6, e.g. mRNA sequences comprising the coding sequences of Table 6 are provided in Table 7.

TABLE 6
Preferred MERS-CoV constructs (amino acid sequences and nucleic acid coding sequences):

| row | A | B | D | E |
|---|---|---|---|---|
| 1 | MERS-CoV/MERS-CoV-Jeddah-human-1 spike protein (1-1353) | 14794 | 14810 | 14826 |
| 2 | MERS-CoV/MERS-CoV-Jeddah-human-1 spike protein (1-1353)(V1060P_L1061P) | 14795 | 14811 | 14827 |
| 3 | MERS-CoV/Al-Hasa_4_2013 spike protein (1-1353) | 14796 | 14812 | 14828 |
| 4 | MERS-CoV/Al-Hasa_4_2013 spike protein (1-1353)(V1060P_L1061P) | 14797 | 14813 | 14829 |
| 5 | MERS-CoV/Riyadh_14_2013 spike protein (1-1353) | 14798 | 14814 | 14830 |
| 6 | MERS-CoV/Riyadh_14_2013 spike protein (1-1353)(V1060P_L1061P) | 14799 | 14815 | 14831 |
| 7 | MERS-CoV/Riyadh_14_2013 spike protein (1-1353)(R1020Q) | 14800 | 14816 | 14832 |
| 8 | MERS-CoV/Riyadh_14_2013 spike protein (1-17_726-1296)(R1020Q) | 14801 | 14817 | 14833 |
| 9 | MERS-CoV/Riyadh_14_2013 spike protein (1-17_726-1296)(R1020Q)_LeucineZipper | 14802 | 14818 | 14834 |
| 10 | MERS-CoV/England 1 spike protein (1-1353) | 14803 | 14819 | 14835 |
| 11 | MERS-CoV/England 1 spike protein (1-1353)(V1060P_L1061P) | 14804 | 14820 | 14836 |
| 12 | MERS-CoV/England 1 spike protein (variant) | 14805 | 14821 | 14837 |
| 13 | MERS-CoV/England 1 spike protein (variant) | 14806 | 14822 | 14838 |
| 14 | MERS-CoV/England 1 spike protein (variant) | 14807 | 14823 | 14839 |
| 15 | MERS-CoV/England 1 spike protein (variant) | 14808 | 14824 | 14840 |
| 16 | MERS-CoV/England 1 spike protein (variant) | 14809 | 14825 | 14841 |

[0631] In preferred embodiments, the at least one antigenic peptide or protein selected or derived from MERS-CoV encoded by the at least one nucleic acid of component A (in particular component A-3) comprises or consists of at least one of the amino acid sequences being identical or at least 50%, 60%, 70%, 80%, 85%, 86%, 87%, 88%, 89%, 90%, 91%, 92%, 93%, 94%, 95%, 96%, 97%, 98%, or 99% identical to any one of SEQ ID NOs: 14794-14809 or an immunogenic fragment or immunogenic variant of any of these. Further information regarding said amino acid sequences is also provided in Table 6 (see rows 1 to 16 of Column A and B), and under <223> identifier of the ST.25 sequence listing of respective sequence SEQ ID NOs.

[0632] In further embodiments, the at least one antigenic peptide or protein selected or derived from at least one MERS-CoV encoded by the at least one nucleic acid of component A (in particular, component A-3) comprises or consists of at least one of the amino acid sequences being identical or at least 70%, 80%, 85%, 86%, 87%, 88%, 89%, 90%, 91%, 92%, 93%, 94%, 95%, 96%, 97%, 98%, or 99% identical to any one of SEQ ID NOs: 1-152 or 1448 to 1548 of published PCT application WO2018115527, or an immunogenic fragment or immunogenic variant of any of these. Accordingly, SEQ ID NOs: 1-152 or 1448 to 1548 of WO2018115527 and the corresponding disclosure relating thereto (e.g. information in the respective sequence listing, column 1 or 2 of Tables 1-4 and Table 7) are herewith incorporated by reference.

[0633] In further embodiments, the at least one antigenic peptide or protein selected or derived from at least one MERS-CoV encoded by the at least one nucleic acid of component A (in particular, component A-3) comprises or consists of at least one of the amino acid sequences being identical or at least 70%, 80%, 85%, 86%, 87%, 88%, 89%, 90%, 91%, 92%, 93%, 94%, 95%, 96%, 97%, 98%, or 99% identical to any one of SEQ ID NOs: 2-4, 28-29 of published PCT application WO2018081318, or an immunogenic fragment or immunogenic variant of any of these. Accordingly, SEQ ID NOs: 2-4, 28-29 of WO2018081318 and the corresponding disclosure relating thereto are herewith incorporated by reference.

[0634] In further embodiments, the at least one antigenic peptide or protein selected or derived from at least one MERS-CoV encoded by the at least one nucleic acid of component A (in particular, component A-3) comprises or consists of at least one of the amino acid sequences being identical or at least 70%, 80%, 85%, 86%, 87%, 88%, 89%, 90%, 91%, 92%, 93%, 94%, 95%, 96%, 97%, 98%, or 99% identical to any one of SEQ ID NOs: 24-28 or 33 of published PCT application WO2017070626, or an immunogenic fragment or immunogenic variant of any of these. Accordingly, SEQ ID NOs: 24-28 or 33 of WO2017070626 and the corresponding disclosure relating thereto are herewith incorporated by reference.

[0635] Further suitable antigenic peptide or proteins selected or derived from MERS-CoV can be selected or derived from Table 12 of WO2017070626. Accordingly, the full content of Table 12 of WO2017070626 herewith incorporated by reference.

[0636] In preferred embodiments, the at least one antigenic peptide or protein (pre-fusion stabilized spike protein (S_stab)) selected or derived from MERS-CoV encoded by the at least one nucleic acid of component A (in particular component A-3) comprises or consists of at least one of the amino acid sequences being identical or at least 50%, 60%, 70%, 80%, 85%, 86%, 87%, 88%, 89%, 90%, 91%, 92%, 93%, 94%, 95%, 96%, 97%, 98%, or 99% identical to any one of SEQ ID NOs: 14795, 14797, 14799-14802, 14804 or an immunogenic fragment or immunogenic variant of any of these. Further information regarding said amino acid sequences is also provided in Table 6 (Column A and B), and under <223> identifier of the ST.25 sequence listing of respective sequence SEQ ID NOs.

[0637] According to preferred embodiments, the nucleic acid of component A (in particular component A-3) comprises at least one coding sequence encoding at least one antigenic peptide or protein derived from MERS-CoV as defined above, or fragments and variants thereof. In that context, any coding sequence encoding at least one MERS-CoV antigenic protein as defined herein, or fragments and variants thereof may be understood as suitable coding sequence and may therefore be comprised in the nucleic acid of component A.

[0638] In preferred embodiments, the nucleic acid of component A (in particular component A-3) comprise or consist of at least one coding sequence encoding at least one antigenic peptide or protein selected or derived from a MERS-CoV as defined herein, preferably encoding any one of SEQ ID NOs: 14794-14809; SEQ ID NOs: 1-152, 1448-1548 of WO2018115527; SEQ ID NOs: 2-4, 28-29 of WO2018081318; SEQ ID NOs: 24-28 or 33 of WO2017070626, or fragments of variants thereof. It has to be understood that, on nucleic acid level, any sequence (DNA or RNA sequence) which encodes an amino acid sequences being identical or at least 70%, 80%, 85%, 86%, 87%, 88%, 89%, 90%, 91%, 92%, 93%, 94%, 95%, 96%, 97%, 98%, or 99% identical to any one of SEQ ID NOs: 14794-14809; SEQ ID NOs: 1-152, 1448-1548 of WO2018115527; SEQ ID NOs: 2-4, 28-29 of WO2018081318; SEQ ID NOs: 24-28 or 33 of WO2017070626, or fragments or variants thereof, may be selected and may accordingly be understood as suitable coding sequence of the invention. Further information regarding said amino acid sequences is also provided in Table 6, Table 7, and under <223> identifier of the ST.25 sequence listing of respective sequence SEQ ID NOs.

[0639] In preferred embodiments, the nucleic acid of component A (in particular component A-3) comprises a coding sequence that comprises at least one of the nucleic acid sequences encoding a MERS-CoV antigen being identical or at least 70%, 80%, 85%, 86%, 87%, 88%, 89%, 90%, 91%, 92%, 93%, 94%, 95%, 96%, 97%, 98%, or 99% identical to any one of the nucleic acid sequences SEQ ID NOs: 14810-14905 or a fragment or a fragment or variant of any of these sequences. Further information regarding said nucleic acid sequences is also provided in Table 6, Table 7, and under <223> identifier of the ST.25 sequence listing of respective sequence SEQ ID NOs.

[0640] In further embodiments, the at least one coding sequence of the at least one nucleic acid of component A (in particular, component A-3) comprises or consists at least one nucleic acid sequence encoding a MERS-CoV antigen being identical or at least 70%, 80%, 85%, 86%, 87%, 88%, 89%, 90%, 91%, 92%, 93%, 94%, 95%, 96%, 97%, 98%, or 99% identical to any one of the nucleic acid sequences SEQ ID NOs: 153-304 or 1549-1649, 305-1368, 1650-2356, 2365, 2366, 2373-2378 of published PCT application WO2018115527, or an immunogenic fragment or immunogenic variant of any of these. Notably, SEQ ID NOs: 153-304 or 1549-1649, 305-1368, 1650-2356, 2365, 2366, 2373-2378 of WO2018115527 and the corresponding disclosure relating thereto (e.g. information in the respective sequence listing, column 4 or 4 of Tables 1˜4 and Table 7) are herewith incorporated by reference.

[0641] In further embodiments, the at least one coding sequence of the at least one nucleic acid of component A (in particular, component A-3) comprises or consists at least one nucleic acid sequence encoding a MERS-CoV antigen being identical or at least 70%, 80%, 85%, 86%, 87%, 88%, 89%, 90%, 91%, 92%, 93%, 94%, 95%, 96%, 97%, 98%, or 99% identical to any one of the nucleic acid sequences SEQ ID NOs: 20-23, 65-68 of published PCT application WO2017070626, or an immunogenic fragment or immunogenic variant of any of these. Notably, SEQ ID NOs: 20-23, 65-68 of WO2017070626 and the corresponding disclosure relating thereto (e.g. information in the respective sequence listing, Tables 1-4 and Table 7) are herewith incorporated by reference.

[0642] In preferred embodiments, the at least one coding sequence of the nucleic acid of component A (in particular component A-3) is a codon modified coding sequence as defined herein, wherein the amino acid sequence, that is the MERS-CoV peptide or protein, encoded by the at least one codon modified coding sequence, is preferably not being modified compared to the amino acid sequence encoded by the corresponding wild type or reference coding sequence.

[0643] In particularly preferred embodiments, the at least one coding sequence of the nucleic acid component A (in particular component A-3) is a codon modified coding sequence, wherein the codon modified coding sequence is selected a G/C optimized coding sequence, a human codon usage adapted coding sequence, or a G/C modified coding sequence.

[0644] Preferred nucleic acid sequences of component A (in particular component A-3), including particularly preferred mRNA sequences, are provided in Table 7 (column C and D). Therein, each row represents a specific suitable MERS-CoV construct of the invention (compare with Table 6), wherein the description of the MERS-CoV construct is indicated in column A of Table 7 and the SEQ ID NOs of the amino acid sequence of the respective MERS-CoV construct is provided in column B. The corresponding SEQ ID NOs of the coding sequences encoding the respective MERS-CoV constructs are provided in in Table 6. Further information is provided under <223> identifier of the respective SEQ ID NOs in the sequence listing.

TABLE 7
Nucleic acid, preferably mRNA constructs encoding MERS-CoV antigens

| A | B | C | D |
|---|---|---|---|
| MERS-CoV/MERS-CoV-Jeddah-human-1 spike protein (1-1353) | 14794 | 14842, 14858 | 14874, 14890 |
| MERS-CoV/MERS-CoV-Jeddah-human-1 spike protein (1-1353)(V1060P_L1061P) | 14795 | 14843, 14859 | 14875, 14891 |
| MERS-CoV/Al-Hasa_4_2013 spike protein (1-1353) | 14796 | 14844, 14860 | 14876, 14892 |
| MERS-CoV/Al-Hasa_4_2013 spike protein (1-1353)(V1060P_L1061P) | 14797 | 14845, 14861 | 14877, 14893 |
| MERS-CoV/Riyadh_14_2013 spike protein (1-1353) | 14798 | 14846, 14862 | 14878, 14894 |
| MERS-CoV/Riyadh_14_2013 spike protein (1-1353)(V1060P_L1061P) | 14799 | 14847, 14863 | 14879, 14895 |
| MERS-CoV/Riyadh_14_2013 spike protein (1-1353)(R1020Q) | 14800 | 14848, 14864 | 14880, 14896 |
| MERS-CoV/Riyadh_14_2013 spike protein (1-17_726-1296)(R1020Q) | 14801 | 14849, 14865 | 14881, 14897 |
| MERS-CoV/Riyadh_14_2013 spike protein (1-17_726-1296)(R1020Q)_LeucineZipper | 14802 | 14850, 14866 | 14882, 14898 |
| MERS-CoV/England 1 spike protein (1-1353) | 14803 | 14851, 14867 | 14883, 14899 |
| MERS-CoV/England 1 spike protein (1-1353)(V1060P_L1061P) | 14804 | 14852, 14868 | 14884, 14900 |
| MERS-CoV/England 1 spike protein (variant) | 14805 | 14853, 14869 | 14885, 14901 |
| MERS-CoV/England 1 spike protein (variant) | 14806 | 14854, 14870 | 14886, 14902 |
| MERS-CoV/England 1 spike protein (variant) | 14807 | 14855, 14871 | 14887, 14903 |
| MERS-CoV/England 1 spike protein (variant) | 14808 | 14856, 14872 | 14888, 14904 |
| MERS-CoV/England 1 spike protein (variant) | 14809 | 14857, 14873 | 14889, 14905 |

[0645] In preferred embodiments, the nucleic acid of component A (in particular component A-3), preferably the RNA, comprises or consists of a nucleic acid sequence encoding a MERS-CoV antigen which is identical or at least 70%, 80%, 85%, 86%, 87%, 88%, 89%, 90%, 91%, 92%, 93%, 94%, 95%, 96%, 97%, 98%, or 99% identical to a nucleic acid sequence seceded from SEQ ID NOs: 14842-14905 or a fragment or variant of any of these sequences. Further information regarding respective nucleic acid sequences is provided under <223> identifier of the respective SEQ ID NO in the sequence listing, and in Table 7 (see in particular Column C and D). Optionally, said nucleic acid sequences comprise a cap1 structure as defined herein, and/or at least one, preferably all uracil nucleotides in said RNA sequences are replaced by pseudouridine (ψ) nucleotides and/or N1-methylpseudouridine (m1ψ) nucleotides

[0646] In further embodiments, the nucleic acid of component A (in particular component A-3), preferably the RNA, comprises or consists of a nucleic acid sequence encoding a MERS-CoV antigen which is identical or at least 70%, 80%, 85%, 86%, 87%, 88%, 89%, 90%, 91%, 92%, 93%, 94%, 95%, 96%, 97%, 98%, or 99% identical to a nucleic acid sequence selected from SEQ ID NOs: 2373-2378 of WO2018115527 and SEQ ID NOs: 65-68 of WO2017070626, or a fragment or variant of any of these sequences. Further information regarding respective nucleic acid sequences is provided under <223> identifier of the respective SEQ ID NOs in the sequence listing of WO2018115527 or WO2017070626, and in Tables 1˜4 and Table 7 of WO2018115527. Optionally, said nucleic acid sequences comprise a cap1 structure as defined herein, and/or at least one, preferably all uracil nucleotides in said RNA sequences are replaced by pseudouridine (ψ) nucleotides and/or N1-methylpseudouridine (m1ψ) nucleotides.

[0647] Suitable features and embodiments that apply to nucleic acids of component A-3 are provided in paragraph “Nucleic acid features and embodiment” below.

[0648] Suitably, the nucleic acids of component A-3 is formulated and/or complexed. Suitable features and embodiments that apply to nucleic acids complexation or formulation of component A are provided in paragraph “Formulation and Complexation” below.

[0649] In embodiments, the component A (in particular component A-3) comprises a plurality or at least more than one of the nucleic acid species comprising at least one coding sequence encoding at least one antigenic peptide or protein selected or derived from at least one MERS-CoV, or an immunogenic fragment or immunogenic variant thereof, e.g. DNA or RNA species as defined herein. Preferably, component A (in particular component A-3) as defined herein comprises 2, 3, 4, 5, 6, 7, 8, 9, or 10 different nucleic acids each defined as defined herein.

[0650] In embodiments, component A (in particular component A-3) may comprise at least 2, 3, 4, 5, 6, 7, 8, 9, 10 or even more different nucleic acid species, e.g. DNA or RNA, as defined herein, each encoding at least one antigenic peptide or protein derived from the same MERS-CoV, or a fragment or variant thereof. Particularly, said (genetically) same MERS-CoV expresses (essentially) the same repertoire of proteins or peptides, wherein all proteins or peptides have (essentially) the same amino acid sequence. Particularly, said (genetically) same MERS-CoV expresses essentially the same proteins, peptides or polyproteins, wherein these protein, peptide or polyproteins preferably do not differ in their amino acid sequence(s).

[0651] In embodiments, the component A (in particular component A-3) comprises at least 2, 3, 4, 5, 6, 7, 8, 9, 10 or even more different nucleic acid species, e.g. DNA or RNA, as defined herein, each encoding at least one peptide or protein derived from a genetically distinct MERS-CoV (e.g. a distinct MERS-CoV isolate), or a fragment or variant thereof. The terms “distinct” or “distinct MERS-Coy” as used throughout the present specification have to be understood as the difference between at least two respective MERS-CoV (e.g. a distinct MERS-CoV isolate), wherein the difference is manifested on the genome of the respective distinct MERS-CoV. Particularly, said (genetically) distinct MERS-CoV may express at least one distinct protein, peptide or polyprotein, wherein the at least one distinct protein, peptide or polyprotein differs in at least one amino acid.

[0652] In preferred embodiments, the component A-3 comprises at least one nucleic acid encoding at least one antigenic peptide or protein that is selected or derived from at least one MERS-CoV, or an immunogenic fragment or immunogenic variant thereof, wherein said component A-3 is to be, preferably, administered intramuscularly or intradermal.

[0653] Preferably, intramuscular or intradermal administration of said component A-3 results in expression of the encoded MERS-CoV antigen construct in a subject. In embodiments where the nucleic acid is an RNA, administration of component A-3 results in translation of the RNA and to a production of the encoded MERS-CoV antigen in a subject. In embodiments where the nucleic acid is a DNA (e.g. plasmid DNA, adenovirus DNA), administration of said composition results in transcription of the DNA into RNA, and to a subsequent translation of the RNA into the encoded MERS-CoV antigen in a subject.

[0654] In embodiments, administration of the pharmaceutical composition comprising component A-3 to a subject elicits neutralizing antibodies against MERS-CoV and does not elicit disease enhancing antibodies. In particular, administration of a pharmaceutical composition comprising component A-3 encoding MERS-CoV pre-fusion stabilized spike protein to a subject does not elicit immunopathological effects, like e.g. enhanced disease and/or antibody dependent enhancement (ADE).

[0655] In preferred embodiments, administration of component A-3 elicits antigen-specific immune responses comprising T-cell responses and/or B-cell responses against the encoded MERS-CoV antigens provided by the at least one nucleic acid of component A-3.

[0656] Preferably, the component A-3 is suitable for a vaccine, in particular, suitable for a MERS-CoV vaccine, preferably a combination vaccine of the invention.

[0657] In embodiments, the nucleic acid as comprised in component A-3 as defined herein is provided in an amount of about 100 ng to about 500 ug, in an amount of about 1 ug to about 200 ug, in an amount of about 1 ug to about 100 ug, in an amount of about 5 ug to about 100 ug, preferably in an amount of about 10 ug to about 50 ug, specifically, in an amount of about 1 ug, 2 ug, 3 ug, 4 ug, 5 ug, 6 ug, 7 ug, 8 ug, 9 ug, 10 ug, 11 ug, 12 ug, 13 ug, 14 ug, 15 ug, 20 ug, 25 ug, 30 ug, 35 ug, 40 ug, 45 ug, 50 ug, 55 ug, 60 ug, 65 ug, 70 ug, 75 ug, 80 ug, 85 ug, 90 ug, 95 ug or 100 ug.

[0658] In case component A-3 comprises a plurality or at least more than one of the nucleic acid species as defined herein, the amount of nucleic acid for each nucleic acid species is provided in an amount of about 100 ng to about 500 ug, in an amount of about 1 ug to about 200 ug, in an amount of about 1 ug to about 100 ug, in an amount of about 5 ug to about 100 ug, preferably in an amount of about 10 ug to about 50 ug, specifically, in an amount of about 1 ug, 2 ug, 3 ug, 4 ug, 5 ug, 6 ug, 7 ug, 8 ug, 9 ug, 10 ug, 11 ug, 12 ug, 13 ug, 14 ug, 15 ug, 20 ug, 25 ug, 30 ug, 35 ug, 40 ug, 45 ug, 50 ug, 55 ug, 60 ug, 65 ug, 70 ug, 75 ug, 80 ug, 85 ug, 90 ug, 95 ug or 100 ug.

[0659] In some embodiments, the amount of nucleic acid for each nucleic acid species is essentially equal in mass. In other embodiments, the amount of nucleic acid for each nucleic acid species is selected to be equimolar.

[0660] Component

[0661] In various preferred embodiments, the at least one component B of the pharmaceutical composition comprises at least one nucleic acid comprising at least one coding sequence encoding at least one antigenic peptide or protein selected or derived from at least one further virus, or an immunogenic fragment or immunogenic variant thereof.

[0662] In the context of the invention, the term “peptide or protein selected or derived from at least one further virus” in the broadest sense relates to peptides or proteins from a further virus, wherein that further virus is not selected for component A. Accordingly, in embodiments where SARS-CoV-2 is selected as the at least one Coronavirus of component A, the at least one further virus of component B can be any virus excluding SARS-CoV-2.

[0663] In preferred embodiments the at least one further virus of component B is selected or derived from at least one different Coronavirus, at least one Influenza virus, at least one Pneumoviridae virus, and/or at least one Paramyxoviridae virus.

[0664] In preferred embodiments, the at least one Pneumoviridae virus is selected from at least one Respiratory syncytial virus, and/or at least one Metapneumovirus.

[0665] In preferred embodiments, the at least one Paramyxoviridae virus is selected from at least one Parainfluenza virus, and/or at least one Henipavirus.

[0666] In preferred embodiments, the at least one Paramyxoviridae virus is selected from at least one Parainfluenza virus, and/or at least one Henipavirus.

[0667] According to embodiments, the nucleic acid of component B comprises at least one coding sequence encoding at least one antigenic peptide or protein selected or derived from at least one further virus as defined herein, or fragments and variants thereof. In preferred embodiments, the nucleic acid of component B comprises at least one coding sequence encoding at least one antigenic peptide or protein selected or derived from at least one further virus as defined herein, or fragments and variants thereof, wherein said at least one further virus is selected from at least one different Coronavirus, at least one Influenza virus, at least one Pneumoviridae virus, and/or at least one Paramyxoviridae virus.

[0668] In that context, any coding sequence encoding at least one antigenic protein of a further virus as defined herein, or fragments and variants thereof may be understood as suitable coding sequence and may therefore be comprised in the nucleic acid of component B.

[0669] Suitable features and embodiments that apply to nucleic acids of component B are provided in paragraph “Nucleic acid features and embodiment” below.

[0670] Suitably, the nucleic acids of component B is formulated and/or complexed. Suitable features and embodiments that apply to nucleic acids complexation or formulation of component A are provided in paragraph “Formulation and Complexation” below.

[0671] In embodiments, the component B may comprise a plurality or at least more than one of the nucleic acid species comprising at least one coding sequence encoding at least one antigenic peptide or protein selected or derived from at least one further virus, or an immunogenic fragment or immunogenic variant thereof, e.g. DNA or RNA species as defined herein. Preferably, component B as defined herein may comprise 2, 3, 4, 5, 6, 7, 8, 9, or 10 different nucleic acids each defined as defined herein.

[0672] In embodiments, component B may comprise at least 2, 3, 4, 5, 6, 7, 8, 9, 10 or even more different nucleic acid species, e.g. DNA or RNA, as defined herein, e.g. encoding at least one antigenic peptide or protein derived from the same further virus, or a fragment or variant thereof. Particularly, said (genetically) same further virus expresses (essentially) the same repertoire of proteins or peptides, wherein all proteins or peptides have (essentially) the same amino acid sequence. Particularly, said (genetically) same further virus expresses essentially the same proteins, peptides or polyproteins, wherein these protein, peptide or polyproteins preferably do not differ in their amino acid sequence(s).

[0673] In embodiments, the component B comprises at least 2, 3, 4, 5, 6, 7, 8, 9, 10 or even more different nucleic acid species, e.g. DNA or RNA, as defined herein, each encoding at least one peptide or protein derived from a genetically distinct further virus (e.g. a distinct Influenza virus, a distinct RSV virus, a distinct PIV), or a fragment or variant thereof. The terms “distinct” or “distinct further virus” as used throughout the present specification have to be understood as the difference between at least two respective further viruses, wherein the difference is manifested on the genome of the respective distinct further virus. Particularly, said (genetically) distinct further viruses may express at least one distinct protein, peptide or polyprotein, wherein the at least one distinct protein, peptide or polyprotein differs in at least one amino acid.

[0674] In preferred embodiments, the component B comprises at least one nucleic acid encoding at least one antigenic peptide or protein that is selected or derived from at least one further virus, or an immunogenic fragment or immunogenic variant thereof, wherein said component B is to be, preferably, administered intramuscularly or intradermal.

[0675] Preferably, intramuscular or intradermal administration of said component B results in expression of the encoded further virus antigen construct in a subject. In embodiments where the nucleic acid is an RNA, administration of component B results in translation of the RNA and to a production of the encoded further virus antigen in a subject. In embodiments where the nucleic acid is a DNA (e.g. plasmid DNA, adenovirus DNA), administration of said composition results in transcription of the DNA into RNA, and to a subsequent translation of the RNA into the encoded further virus antigen in a subject.

[0676] In preferred embodiments, administration of component B elicits antigen-specific immune responses comprising T-cell responses and/or B-cell responses against the encoded further virus antigens provided by the at least one nucleic acid of component B.

[0677] Preferably, component B is suitable for a vaccine, preferably a combination vaccine or combination vaccine of the invention.

[0678] Embodiments relating to specific further viruses in the context of the invention are provided below (Component B-1, Component B-2, Component B-3, Component B-4).

[0679] Component B-1: Different Coronavirus

[0680] In preferred embodiments, the at least one further virus of component B is selected from at least one different Coronavirus (also referred to as component B-1), wherein said at least one different Coronavirus is not the Coronavirus of component A.

[0681] It has to be understood that generic embodiments and features that have been described in paragraph “Component B” may also apply to a nucleic acid encoding a different Coronavirus antigenic peptide or protein.

[0682] Features and embodiments provided in the context of component A (including component A-1, component A-2, and component A-3) may likewise apply to component B (in particular component B-1). Accordingly, any nucleic acid, e.g. DNA or RNA provided in the context of component A (including component A-1, component A-2, and component A-3) may likewise be selected for component B (in particular component B-1).

[0683] In embodiments where Component A comprises at least one nucleic acid comprising at least one coding sequence encoding at least one antigenic peptide or protein selected or derived from at least one SARS-CoV-2 as defined herein, or an immunogenic fragment or immunogenic variant thereof, the at least one different Coronavirus of component B may be selected from any Coronavirus, preferably any pandemic Coronavirus, wherein the at least one different Coronavirus is not SARS-CoV-2. Accordingly, any nucleic acid provided in the context of component A (including component A-1, component A-2, and component A-3) may likewise be selected for component B (in particular component B-1), wherein the at least one nucleic acid of component B is does not encode a SARS-CoV-2 antigen.

[0684] In embodiments where Component A comprises at least one nucleic acid comprising at least one coding sequence encoding at least one antigenic peptide or protein selected or derived from at least one SARS-CoV-1 as defined herein, or an immunogenic fragment or immunogenic variant thereof, the at least one different Coronavirus of component B may be selected from any Coronavirus, preferably any pandemic Coronavirus, wherein the at least one different Coronavirus is not SARS-CoV-1. Accordingly, any nucleic acid provided in the context of component A (including component A-1, component A-2, and component A-3) may likewise be selected for component B (in particular component B-1), wherein the at least one nucleic acid of component B is does not encode a SARS-CoV-1 antigen.

[0685] In embodiments where Component A comprises at least one nucleic acid comprising at least one coding sequence encoding at least one antigenic peptide or protein selected or derived from at least one MERS-CoV as defined herein, or an immunogenic fragment or immunogenic variant thereof, the at least one different Coronavirus of component B may be selected from any Coronavirus, preferably any pandemic Coronavirus, wherein the at least one different Coronavirus is not MERS-CoV. Accordingly, any nucleic acid provided in the context of component A (including component A-1, component A-2, and component A-3) may likewise be selected for component B (in particular component B-1), wherein the at least one nucleic acid of component B is does not encode a MERS-CoV antigen.

[0686] In preferred embodiments, the at least one antigenic peptide or protein selected or derived from at least one different Coronavirus encoded by the at least one nucleic acid of component B comprises or consists of at least one of the amino acid sequences being identical or at least 70%, 80%, 85%, 86%, 87%, 88%, 89%, 90%, 91%, 92%, 93%, 94%, 95%, 96%, 97%, 98%, or 99% identical to any one of SEQ ID NOs: 1-111, 274-11663, 13176-13510, 13521-14123, 14794-14809, 14906-14950, 22732-22758, 22917, 22923, 22929-22964, 26938, 26939, or an immunogenic fragment or immunogenic variant of any of these.

[0687] In preferred embodiments, the at least one coding sequence of the at least one nucleic acid of component B comprises or consists at least one nucleic acid sequence encoding at least one different Coronavirus antigen being identical or at least 70%, 80%, 85%, 86%, 87%, 88%, 89%, 90%, 91%, 92%, 93%, 94%, 95%, 96%, 97%, 98%, or 99% identical to any one of the nucleic acid sequences SEQ ID NOs: 116-132, 134-138, 140-143, 145-147, 148-175, 11664-11813, 11815, 11817-12050, 12052, 12054-13147, 13514, 13515, 13519, 13520, 14124-14177, 14810-14905, 14951-15220, 22759, 22764-22786, 22791-22813, 22818-22839, 22969-23184, 23189-23404, 23409-23624, 23629-23844, 23849-24064, 24069-24284, 24289-24504, 24509-24724, 24729-24944, 24949-25164, 25169-25384, 25389-25604, 25609-25824, 25829-26044, 26049-26264, 26269-26484, 26489-26704, 26709-26937, or a fragment or variant of any of these sequences.

[0688] In preferred embodiments, the at least one nucleic acid of component B comprises or consists of a nucleic acid sequence encoding at least one different Coronavirus antigen which is identical or at least 70%, 80%, 85%, 86%, 87%, 88%, 89%, 90%, 91%, 92%, 93%, 94%, 95%, 96%, 97%, 98%, or 99% identical to a nucleic acid sequence selected from SEQ ID NOs: 148-175, 12204-13147, 14142-14177, 14842-14905, 15041-15220, 22786-22839, 23189-23404, 23409-23624, 23629-23844, 23849-24064, 24069-24284, 24289-24504, 24509-24724, 24729-24944, 24949-25164, 25169-25384, 25389-25604, 25609-25824, 25829-26044, 26049-26264, 26269-26484, 26489-26704, 26709-26937, or a fragment or variant of any of these sequences.

[0689] In embodiments, component B (in particular component B-1) may comprise a plurality or at least more than one of the nucleic acid species comprising at least one coding sequence encoding at least one antigenic peptide or protein selected or derived from at least one different Coronavirus, or an immunogenic fragment or immunogenic variant thereof, e.g. DNA or RNA species as defined herein. Preferably, component B as defined herein may comprise 2, 3, 4, 5, 6, 7, 8, 9, or 10 different nucleic acids each defined as defined herein.

[0690] In preferred embodiments, the component B-1 comprises at least one nucleic acid encoding at least one antigenic peptide or protein that is selected or derived from at least one different Coronavirus, or an immunogenic fragment or immunogenic variant thereof, wherein said component B-1 is to be, preferably, administered intramuscularly or intradermal.

[0691] Preferably, intramuscular or intradermal administration of said component B-1 results in expression of the encoded different Coronavirus antigen construct in a subject. In embodiments where the nucleic acid is an RNA, administration of component B-1 results in translation of the RNA and to a production of the encoded different Coronavirus antigen in a subject. In embodiments where the nucleic acid is a DNA (e.g. plasmid DNA, adenovirus DNA), administration of said composition results in transcription of the DNA into RNA, and to a subsequent translation of the RNA into the encoded different Coronavirus antigen in a subject.

[0692] In embodiments, administration of the pharmaceutical composition comprising component B-1 to a subject elicits neutralizing antibodies against the different Coronavirus and does not elicit disease enhancing antibodies. In particular, administration of a pharmaceutical composition comprising component B-1 encoding Coronavirus pre-fusion stabilized spike protein to a subject does not elicit immunopathological effects, like e.g. enhanced disease and/or antibody dependent enhancement (ADE).

[0693] In preferred embodiments, administration of component B-1 elicits antigen-specific immune responses comprising T-cell responses and/or B-cell responses against the encoded different Coronavirus antigens provided by the at least one nucleic acid of component B-1.

[0694] Preferably, the component B-1 is suitable for a vaccine, in particular, suitable for a different Coronavirus vaccine, preferably a combination vaccine of the invention.

[0695] In embodiments, the nucleic acid as comprised in component B-1 as defined herein is provided in an amount of about 100 ng to about 500 ug, in an amount of about 1 ug to about 200 ug, in an amount of about 1 ug to about 100 ug, in an amount of about 5 ug to about 100 ug, preferably in an amount of about 10 ug to about 50 ug, specifically, in an amount of about 1 ug, 2 ug, 3 ug, 4 ug, 5 ug, 6 ug, 7 ug, 8 ug, 9 ug, 10 ug, 11 ug, 12 ug, 13 ug, 14 ug, 15 ug, 20 ug, 25 ug, 30 ug, 35 ug, 40 ug, 45 ug, 50 ug, 55 ug, 60 ug, 65 ug, 70 ug, 75 ug, 80 ug, 85 ug, 90 ug, 95 ug or 100 ug.

[0696] In case component B-1 comprises a plurality or at least more than one of the nucleic acid species as defined herein, the amount of nucleic acid for each nucleic acid species is provided in an amount of about 100 ng to about 500 ug, in an amount of about 1 ug to about 200 ug, in an amount of about 1 ug to about 100 ug, in an amount of about 5 ug to about 100 ug, preferably in an amount of about 10 ug to about 50 ug, specifically, in an amount of about 1 ug, 2 ug, 3 ug, 4 ug, 5 ug, 6 ug, 1 ug, 8 ug, 9 ug, 10 ug, 11 ug, 12 ug, 13 ug, 14 ug, 15 ug, 20 ug, 25 ug, 30 ug, 35 ug, 40 ug, 45 ug, 50 ug, 55 ug, 60 ug, 65 ug, 70 ug, 75 ug, 80 ug, 85 ug, 90 ug, 95 ug or 100 ug.

[0697] In embodiments, the amount of nucleic acid for each nucleic acid species is essentially equal in mass. In other embodiments, the amount of nucleic acid for each nucleic acid species is selected to be equimolar.

[0698] Component B-2: Influenza Virus

[0699] In preferred embodiments, the at least one further virus of component B is selected from at least one Influenza virus (also referred to as component B-2). Influenza viruses belong to the Orthomyxoviridae family (NCBI Taxonomy ID: 11308), the Orthomyxoviridae family being sub-divided into Alphainfluenzavirus (the genus that includes Influenza A viruses), Betainflurnzavirus (the genus that includes Influenza B viruses), Gammainfluenzavirus (the genus that includes Influenza C viruses), and Deltainfluenzavirus (the genus that Includes influenza D viruses)

[0700] It has to be understood that generic embodiments and features that have been described in paragraph “Component 5” may also apply to a nucleic acid encoding a Influenza virus antigenic peptide or protein.

[0701] In the context of the invention, any Influenza virus, irrespective of a specific genotype, species, strain, isolate, or serotype may selected as the “at least one further virus” of component B.

[0702] Suitably, the at least one Influenza virus of component B (in particular component B-2) may be selected from at least one Influenza A virus (NCBI Taxonomy ID: 11320), and/or at least one Influenza B virus (NCBI Taxonomy ID: 11520), and/or at least one Influenza C virus (NCBI Taxonomy ID: 11552), and/or at least one Influenza D virus (NCBI Taxonomy ID: 1511084).

[0703] Accordingly, in embodiments, the at least one Influenza virus of component B (in particular component B-2) is selected from at least one Influenza A, and/or at least one Influenza B and/or at least one Influenza C. In preferred embodiments, the at least one Influenza virus is selected from at least one Influenza A virus and/or at least one Influenza B virus.

[0704] The at least one influenza A virus may be selected from influenza A viruses characterized by a hemagglutinin (HA) selected from the group consisting of H1, H2, H3, H4, H5, H6, H7, H8, H9, H10, H11, H12, H13, H14, H15, H16, H17 and H18. Preferably the influenza A virus is selected from an Influenza virus characterized by a hemagglutinin (HA) selected from the group consisting of H1, H3, H5, H7, H9, or H10.

[0705] Furthermore, particularly preferred are influenza A viruses characterized by a neuraminidase (NA) selected from the group consisting of N1, N2, N3, N4, N5, N6, N7, N8, N9, N10, and N11. Most preferably the influenza A virus is selected from an Influenza virus characterized by a neuraminidase (NA) selected from the group consisting of N1, N2, and N8.

[0706] In embodiments, the at least one Influenza virus is selected from at least one Influenza A virus selected from at least one of the list comprising H1N1, H1N2, H2N2, H3N1, H3N2, H3N8, H5N1, H5N2, H5N3, H5N8, H5N9, H7N1, H7N2, H7N3, H7N4, H7N7, H7N9, H9N2, H10N7 and H10N8, preferably from at least one of H1N1, H3N2, H5N1, and H5N8.

[0707] Suitable influenza virus A and B strains may be selected from FLUAV/H1N1/A/California/7/2009, FLUAV/H1N1/A/Michigan/45/2015, FLUAV/H1N1/A/Netherlands/602/2009, FLUAV/H3N2/A/Hong Kong/4801/2014, FLUBV/H0N0/B/Brisbane/60/2008, FLUBV/H0N0/B/Phuket/3073/2013, FLUAV/H1N1/A/Brisbane/02/2018, FLUAV/H1N1/A/Brisbane/02/2018, FLUAV/H1N1/A/Guangdong-Maonan/SWL1536/2019, FLUAV/H1N1/A/Guangdong-Maonan/SWL1536/2019, FLUAV/H3N2/A/Singapore/INFIMH-16-0019/2016, FLUAV/H3N2/A/Singapore/INFIMH-16-0019/2016 NYMC-X-307, FLUAV/H3N2/A/Singapore/INFIMH-16-0019/2016-CDC-LV18A, FLUAV/H3N2/A/Kansas/14/2017, FLUAV/H3N2/A/Kansas/14/2017 CBER-22B CDC19A, FLUAV/H3N2/A/Switzerland/8060/2017, FLUAV/H3N2/A/Hong Kong/2671/2019, FLUAV/H3N2/A/Hong Kong/45/2019, FLUAV/H3N2/A/South Australia/34/2019, FLUAV/H7N9/A/chicken/Zhejiang/C483/2013(H7N9), FLUAV/H10N8/A/Jiangxi/IPB13/2013(H10N8), FLUAV/Vietnam/1203/2004 (H5N1)

[0708] In embodiments, the at least one antigenic peptide or protein encoded by the at least one nucleic acid of component B (in particular component B-2) comprises or consists at least one peptide or protein selected or derived from at least one Influenza virus hemagglutinin (HA), neuraminidase (NA), nucleoprotein (NP), matrix protein 1 (M1), matrix protein 2 (M2), non-structural protein 1 (NS1), non-structural protein 2 (NS2), nuclear export protein (NEP), polymerase acidic protein (PA), polymerase basic protein PB1, PB1-F2, and/or polymerase basic protein 2 (PB2), or a fragment or variant thereof or from any synthetically engineered influenza virus peptide or protein.

[0709] In a preferred embodiment, the at least one antigenic peptide or protein encoded by the at least one nucleic acid of component B comprises or consists at least one peptide or protein selected or derived from at least one hemagglutinin (HA) or neuraminidase (NA) or an immunogenic fragment or immunogenic variant of any of these.

[0710] In particularly preferred embodiments the at least one coding region encodes at least one full-length protein of hemagglutinin (HA), and/or at least one full-length protein of neuraminidase (NA) of an influenza virus or a variant thereof.

[0711] According to various embodiments, the nucleic acid of component B (in particular component B-2) encodes at least one antigenic peptide or protein from an Influenza virus as defined herein, and, additionally, at least one heterologous peptide or protein element.

[0712] Suitably, the at least one heterologous peptide or protein element may promote or improve secretion of the encoded Influenza antigenic peptide or protein (e.g. via secretory signal sequences), promote or improve anchoring of the encoded antigenic peptide or protein of the invention in the plasma membrane (e.g. via transmembrane elements), promote or improve formation of antigen complexes (e.g. via multimerization domains or antigen clustering elements), or promote or improve virus-like particle formation (VLP forming sequence). In addition, the nucleic acid of component B may additionally encode peptide linker elements, self-cleaving peptides, immunologic adjuvant sequences or dendritic cell targeting sequences.

[0713] Suitable multimerization domains may be selected from the list of amino acid sequences according to SEQ ID NOs: 1116-1167 of WO2017081082, or fragments or variants of these sequences. Suitable transmembrane elements may be selected from the list of amino acid sequences according to SEQ ID NOs: 1228-1343 of WO2017081082, or fragments or variants of these sequences. Suitable VLP forming sequences may be selected from the list of amino acid sequences according to SEQ ID NOs: 1168-1227 of the patent application WO2017081082, or fragments or variants of these sequences. Suitable peptide linkers may be selected from the list of amino acid sequences according to SEQ ID NOs: 1509-1565 of the patent application WO2017081082, or fragments or variants of these sequences. Suitable self-cleaving peptides may be selected from the list of amino acid sequences according to SEQ ID NOs: 1434-1508 of the patent application WO2017081082, or fragments or variants of these sequences. Suitable immunologic adjuvant sequences may be selected from the list of amino acid sequences according to SEQ ID NOs: 1360-1421 of the patent application WO2017081082, or fragments or variants of these sequences. Suitable dendritic cell (DCs) targeting sequences may be selected from the list of amino acid sequences according to SEQ ID NOs: 1344-1359 of the patent application WO2017081082, or fragments or variants of these sequences. Suitable secretory signal peptides may be selected from the list of amino acid sequences according to SEQ ID NOs: 1-1115 and SEQ ID NO: 1728 of published PCT patent application WO2017081082, or fragments or variants of these sequences.

[0714] In preferred embodiments, the at least one coding sequence additionally encodes one or more heterologous peptide or protein elements selected from a signal peptide, a linker peptide, a helper epitope, an antigen clustering element, a trimerization or multimerization element, a transmembrane element, or a VLP forming sequence.

[0715] Preferred antigenic peptide or proteins selected or derived from an Influenza virus as defined above are provided in Table 8 (rows 1 to 52). Therein, each row 1 to 52 corresponds to a suitable Influenza constructs. Column A of Table 8 provides a short description of suitable Influenza antigen constructs. Column B of Table 8 provides protein (amino acid) SEQ ID NOs of respective Influenza antigen constructs. Column D of Table 8 provides SEQ ID NO of the corresponding G/C optimized nucleic acid coding sequences (opt1, gc). Column E of Table 8 provides SEQ ID NO of the corresponding human codon usage adapted nucleic acid coding sequences (opt 3, human).

[0716] Notably, the description of the invention explicitly includes the information provided under <223> identifier of the ST.25 sequence listing of the present application. Preferred nucleic acid constructs comprising coding sequences of Table 8, e.g. mRNA sequences comprising the coding sequences of Table 8 are provided in Table 9 and Table 10.

TABLE 8
Preferred Influenza virus constructs (amino acid sequences and nucleic acid coding sequences):

| row | A | B | D | E |
|---|---|---|---|---|
| 1 | FLUAV/H1N1/A/California/7/2009 hemagglutinin (HA) | 14178 | 14230 | 14282 |
| 2 | FLUAV/H1N1/A/Michigan/45/2015 hemagglutinin (HA) | 14179 | 14231 | 14283 |
| 3 | FLUAV/H1N1/A/Netherlands/602/2009 hemagglutinin (HA) | 14180 | 14232 | 14284 |
| 4 | FLUAV/H3N2/A/Hong/Kong/4801/2014 hemagglutinin (HA) | 14181 | 14233, | 14285 |
| | | | 26946 | |
| 5 | FLUBV/H0N0/B/Brisbane/60/2008 hemagglutinin (HA) | 14182 | 14234 | 14286 |
| 6 | FLUBV/H0N0/B/Phuket/3073/2013 hemagglutinin (HA) | 14183 | 14235 | 14287 |
| 7 | FLUAV/H1N1/A/Brisbane/02/2018 hemagglutinin (HA) | 14184 | 14236 | 14288 |
| 8 | FLUAV/H1N1/A/Brisbane/02/2018 hemagglutinin (HA) | 14185 | 14237 | 14289 |
| 9 | FLUAV/H1N1/A/Guangdong-Maonan/SWL1536/2019 hemagglutinin (HA) | 14186 | 14238 | 14290 |
| 10 | FLUAV/H1N1/A/Guangdong-Maonan/SWL1536/2019 hemagglutinin (HA) | 14187 | 14239 | 14291 |
| 11 | FLUAV/H3N2/A/Singapore/INFIMH-16-0019/2016 hemagglutinin (HA) | 14188 | 14240 | 14292 |
| 12 | FLUAV/H3N2/A/Singapore/INFIMH-16-0019/2016 hemagglutinin (HA) | 14189 | 14241 | 14293 |
| 13 | FLUAV/H3N2/A/Singapore/INFIMH-16-0019/2016 NYMC-X-307 hemagglutinin (HA) | 14190 | 14242 | 14294 |
| 14 | FLUAV/H3N2/A/Singapore/INFIMH-16-0019/2016-CDC-LV18A hemagglutinin (HA) | 14191 | 14243 | 14295 |
| 15 | FLUAV/H3N2/A/Kansas/14/2017 hemagglutinin (HA) | 14192 | 14244 | 14296 |
| 16 | FLUAV/H3N2/A/Kansas/14/2017 hemagglutinin (HA) | 14193 | 14245 | 14297 |
| 17 | FLUAV/H3N2/A/Kansas/14/2017 hemagglutinin (HA) | 14194 | 14246 | 14298 |
| 18 | FLUAV/H3N2/A/Kansas/14/2017 CBER-22B CDC19A hemagglutinin (HA) | 14195 | 14247 | 14299 |
| 19 | FLUAV/H3N2/A/Switzerland/8060/2017 hemagglutinin (HA) | 14196 | 14248 | 14300 |
| 20 | FLUAV/H3N2/A/Switzerland/8060/2017 hemagglutinin (HA) | 14197 | 14249 | 14301 |
| 21 | FLUAV/H3N2/A/Hong Kong/2671/2019 hemagglutinin (HA) | 14198 | 14250 | 14302 |
| 22 | FLUAV/H3N2/A/Hong Kong/2671/2019 hemagglutinin (HA) | 14199 | 14251 | 14303 |
| 23 | FLUAV/H3N2/A/Hong Kong/45/2019 hemagglutinin (HA) | 14200 | 14252 | 14304 |
| 24 | FLUAV/H3N2/A/South Australia/34/2019 hemagglutinin (HA) | 14201 | 14253 | 14305 |
| 25 | FLUAV/H3N2/A/South Australia/34/2019 hemagglutinin (HA) | 14202 | 14254 | 14306 |
| 26 | FLUAV/H7N9/A/chicken/Zhejiang/C483/2013(H7N9) hemagglutinin (HA) | 14203 | 14255 | 14307 |
| 27 | FLUAV/H10N8/A/Jiangxi/IPB13/2013(H10N8) hemagglutinin (HA) | 14204 | 14256 | 14308 |
| 28 | FLUBV/H0N0/B/Colorado/06/2017 hemagglutinin (HA) | 14205 | 14257 | 14309 |
| 29 | FLUBV/H0N0/B/Colorado/06/2017 hemagglutinin (HA) | 14206 | 14258 | 14310 |
| 30 | FLUBV/H0N0/B/Colorado/06/2017 BX-71 hemagglutinin (HA) | 14207 | 14259 | 14311 |
| 31 | FLUBV/H0N0/B/Washington/02/2019 hemagglutinin (HA) | 14208 | 14260 | 14312 |
| 32 | FLUBV/H0N0/B/Washington/02/2019 hemagglutinin (HA) | 14209 | 14261 | 14313 |
| 33 | FLUAV/H1N1/A/California/7/2009 neuraminidase (NA) | 14210 | 14262 | 14314 |
| 34 | FLUAV/H1N1/A/Michigan/45/2015 neuraminidase (NA) | 14211 | 14263 | 14315 |
| 35 | FLUAV/H1N1/A/Netherlands/602/2009 neuraminidase (NA) | 14212 | 14264 | 14316 |
| 36 | FLUAV/H3N2/A/Hong Kong/4801/2014 neuraminidase (NA) | 14213 | 14265 | 14317 |
| 37 | FLUBV/H0N0/B/Brisbane/60/2008 neuraminidase (NA) | 14214 | 14266 | 14318 |
| 38 | FLUBV/H0N0/B/Phuket/3073/2013 neuraminidase (NA) | 14215 | 14267 | 14319 |
| 39 | FLUAV/H1N1/A/Brisbane/02/2018 neuraminidase (NA) | 14216 | 14268 | 14320 |
| 40 | FLUAV/H1N1/A/Guangdong-Maonan/SWL1536/2019 neuraminidase (NA) | 14217 | 14269 | 14321 |
| 41 | FLUAV/H3N2/A/Singapore/INFIMH-16-0019/2016 neuraminidase (NA) | 14218 | 14270 | 14322 |
| 42 | FLUAV/H3N2/A/Kansas/14/2017 neuraminidase (NA) | 14219 | 14271 | 14323 |
| 43 | FLUAV/H3N2/A/Kansas/14/2017-CDC-LV24A neuraminidase (NA) | 14220 | 14272 | 14324 |
| 44 | FLUAV/H3N2/A/Switzerland/8060/2017 neuraminidase (NA) | 14221 | 14273 | 14325 |
| 45 | FLUAV/H3N2/A/Switzerland/8060/2017(H3N2)-CDC-LV21A neuraminidase (NA) | 14222 | 14274 | 14326 |
| 46 | FLUAV/H3N2/A/Hong Kong/2671/2019 neuraminidase (NA) | 14223 | 14275 | 14327 |
| 47 | FLUAV/H3N2/A/Hong Kong/45/2019 neuraminidase (NA) | 14224 | 14276 | 14328 |
| 48 | FLUAV/H3N2/A/South Australia/34/2019 neuraminidase (NA) | 14225 | 14277 | 14329 |
| 49 | FLUAV/H7N9/A/chicken/Zhejiang/C483/2013(H7N9) neuraminidase (NA) | 14226 | 14278 | 14330 |
| 50 | FLUAV/H10N8/A/Jiangxi/IPB13/2013(H10N8) neuraminidase (NA) | 14227 | 14279 | 14331 |
| 51 | FLUBV/H0N0/B/Colorado/06/2017 neuraminidase (NA) | 14228 | 14280 | 14332 |
| 52 | FLUBV/H0N0/B/Washington/02/2019 neuraminidase (NA) | 14229 | 14281 | 14333 |

[0717] In preferred embodiments, the at least one antigenic peptide or protein selected or derived from at least one Influenza virus encoded by the at least one nucleic acid of component B (in particular, component B-2) comprises or consists of at least one of the amino acid sequences being identical or at least 70%, 80%, 85%, 86%, 87%, 88%, 89%, 90%, 91%, 92%, 93%, 94%, 95%, 96%, 97%, 98%, or 99% identical to any one of SEQ ID NOs: 14178-14229, or an immunogenic fragment or immunogenic variant of any of these. Further information regarding said amino acid sequences is also provided in Table 8 (see rows 1 to 52 of Column A and B), and under <223> identifier of the ST.25 sequence listing of respective sequence SEQ ID NOs.

[0718] In preferred embodiments, the at least one antigenic peptide or protein selected or derived from at least one Influenza A virus (HA) encoded by the at least one nucleic acid of component B (in particular, component B-2) comprises or consists of at least one of the amino acid sequences being identical or at least 70%, 80%, 85%, 86%, 87%, 88%, 89%, 90%, 91%, 92%, 93%, 94%, 95%, 96%, 97%, 98%, or 99% identical to any one of SEQ ID NOs: 14178-14181, 14184-14204 (HA of Influenza A), or an immunogenic fragment or immunogenic variant of any of these. Further information regarding said amino acid sequences is also provided in Table 8 (Column A and B), and under <223> identifier of the ST.25 sequence listing of respective sequence SEQ ID NOs.

[0719] In preferred embodiments, the at least one antigenic peptide or protein selected or derived from at least one Influenza A virus (NA) encoded by the at least one nucleic acid of component B (in particular, component B-2) comprises or consists of at least one of the amino acid sequences being identical or at least 70%, 80%, 85%, 86%, 87%, 88%, 89%, 90%, 91%, 92%, 93%, 94%, 95%, 96%, 97%, 98%, or 99% identical to any one of SEQ ID NOs: 14210-14213, 14216-14227 (NA of Influenza A), or an immunogenic fragment or immunogenic variant of any of these. Further information regarding said amino acid sequences is also provided in Table 8 (Column A and B), and under <223> identifier of the ST.25 sequence listing of respective sequence SEQ ID NOs.

[0720] In preferred embodiments, the at least one antigenic peptide or protein selected or derived from at least one Influenza B virus (HA and NA) encoded by the at least one nucleic acid of component B (in particular, component B-2) comprises or consists of at least one of the amino acid sequences being identical or at least 70%, 80%, 85%, 86%, 87%, 88%, 89%, 90%, 91%, 92%, 93%, 94%, 95%, 96%, 97%, 98%, or 99% identical to any one of SEQ ID NOs: 14182-14183, 14205-14209, 14214-14215, 14228-14229 or an immunogenic fragment or immunogenic variant of any of these. Further information regarding said amino acid sequences is also provided in Table 8 (Column A and B), and under <223> identifier of the ST.25 sequence listing of respective sequence SEQ ID NOs.

[0721] In further embodiments, the at least one antigenic peptide or protein selected or derived from at least one Influenza virus encoded by the at least one nucleic acid of component B (in particular, component B-2) comprises or consists of at least one of the amino acid sequences being identical or at least 70%, 80%, 85%, 86%, 87%, 88%, 89%, 90%, 91%, 92%, 93%, 94%, 95%, 96%, 97%, 98%, or 99% identical to any one of SEQ ID NO: 1-444, 458, 460, 462-479, or 543-565 of published PCT application WO2018170245, or an immunogenic fragment or immunogenic variant of any of these. Notably, SEQ ID NO: 1-444, 458, 460, 462-479, or 543-565 of WO2018170245 and the corresponding disclosure relating thereto are herewith incorporated by reference.

[0722] In embodiments, the at least one antigenic peptide or protein selected or derived from at least one Influenza virus encoded by the at least one nucleic acid of component B (in particular, component B-2) comprises or consists of at least one of the amino acid sequences being identical or at least 70%, 80%, 85%, 86%, 87%, 88%, 89%, 90%, 91%, 92%, 93%, 94%, 95%, 96%, 97%, 98%, or 99% identical to any one of SEQ ID NOs: 1-32012, 224269, 224309 of published PCT application WO2018078053, or an immunogenic fragment or immunogenic variant of any of these. Accordingly, SEQ ID NOs: 1-32012, 224269, 224309, 224310 of WO2018078053 and the corresponding disclosure relating thereto are herewith incorporated by reference. In embodiments, the at least one antigenic peptide or protein selected or derived from at least one Influenza A virus (HA) encoded by the at least one nucleic acid of component B (in particular, component B-2) comprises or consists of at least one of the amino acid sequences being identical or at least 70%, 80%, 85%, 86%, 87%, 88%, 89%, 90%, 91%, 92%, 93%, 94%, 95%, 96%, 97%, 98%, or 99% identical to any one of SEQ ID NOs: 1-14031 of published PCT application WO2018078053, or an immunogenic fragment or immunogenic variant of any of these. Accordingly, SEQ ID NOs: 1-14031 of WO2018078053 and the corresponding disclosure relating thereto are herewith incorporated by reference. In embodiments, the at least one antigenic peptide or protein selected or derived from at least one Influenza A virus (NA) encoded by the at least one nucleic acid of component B (in particular, component B-2) comprises or consists of at least one of the amino acid sequences being identical or at least 70%, 80%, 85%, 86%, 87%, 88%, 89%, 90%, 91%, 92%, 93%, 94%, 95%, 96%, 97%, 98%, or 99% identical to any one of SEQ ID NOs: 14032-26397, 224309, 224310 of published PCT application WO2018078053, or an immunogenic fragment or immunogenic variant of any of these. Accordingly, SEQ ID NOs: 14032-26397, 224309, 224310 of WO2018078053 and the corresponding disclosure relating thereto are herewith incorporated by reference. In embodiments, the at least one antigenic peptide or protein selected or derived from at least one Influenza B virus (HA) encoded by the at least one nucleic acid of component B (in particular, component B-2) comprises or consists of at least one of the amino acid sequences being identical or at least 70%, 80%, 85%, 86%, 87%, 88%, 89%, 90%, 91%, 92%, 93%, 94%, 95%, 96%, 97%, 98%, or 99% identical to any one of SEQ ID NOs: 26398-28576 of published PCT application WO2018078053, or an immunogenic fragment or immunogenic variant of any of these. Accordingly, SEQ ID NOs: 26398-28576 of WO2018078053 and the corresponding disclosure relating thereto are herewith incorporated by reference. In embodiments, the at least one antigenic peptide or protein selected or derived from at least one Influenza B virus (NA) encoded by the at least one nucleic acid of component B (in particular, component B-2) comprises or consists of at least one of the amino acid sequences being identical or at least 70%, 80%, 85%, 86%, 87%, 88%, 89%, 90%, 91%, 92%, 93%, 94%, 95%, 96%, 97%, 98%, or 99% identical to any one of SEQ ID NOs: 28577-30504 of published PCT application WO2018078053, or an immunogenic fragment or immunogenic variant of any of these. Accordingly, SEQ ID NOs: 28577-30504 of WO2018078053 and the corresponding disclosure relating thereto are herewith incorporated by reference.

[0723] According to preferred embodiments, the nucleic acid of component B (in particular, component B-2) comprises at least one coding sequence encoding at least one antigenic peptide or protein derived from at least one Influenza virus as defined above, or fragments and variants thereof. In that context, any coding sequence encoding at least one Influenza virus antigenic protein as defined herein, or fragments and variants thereof, may be understood as suitable coding sequence and may therefore be comprised in the nucleic acid of component B.

[0724] In embodiments, the nucleic acid of component B (in particular component B-2) comprises or consists of at least one coding sequence encoding at least one antigenic peptide or protein selected or derived from an Influenza virus as defined herein, preferably encoding any one of SEQ ID NO: 1-444, 458, 460, 462-479, or 543-565 of WO2018170245; SEQ ID NOs: 1-32012, 224269, 224309 of WO2018078053, or fragment or variants of any of these. It has to be understood that, on nucleic acid level, any sequence (DNA or RNA sequence) which encodes an amino acid sequences being identical or at least 70%, 80%, 85%, 86%, 87%, 88%, 89%, 90%, 91%, 92%, 93%, 94%, 95%, 96%, 97%, 98%, or 99% identical to any one of SEQ ID NO: 1-444, 458, 460, 462-479, or 543-565 of WO2018170245; SEQ ID NOs: 1-32012, 224269, 224309 of WO2018078053, or fragment or variants of any of these, may be selected and may accordingly be understood as suitable coding sequence of the invention.

[0725] In preferred embodiments, the nucleic acid of component B (in particular component B-2) comprises or consists of at least one coding sequence encoding at least one antigenic peptide or protein selected or derived from an Influenza virus as defined herein, preferably encoding any one of SEQ ID NOs: 14178-14229 or fragments of variants of any of these. It has to be understood that, on nucleic acid level, any sequence (DNA or RNA sequence) which encodes an amino acid sequences being identical or at least 70%, 80%, 85%, 86%, 87%, 88%, 89%, 90%, 91%, 92%, 93%, 94%, 95%, 96%, 97%, 98%, or 99% identical to any one of SEQ ID NOs: 14178-14229 or fragment or variants of any of these, may be selected and may accordingly be understood as suitable coding sequence of the invention.

[0726] In embodiments, the at least one coding sequence of the at least one nucleic acid of component B (in particular, component B-2) comprises or consists at least one nucleic acid sequence encoding a Influenza virus antigen being identical or at least 70%, 80%, 85%, 86%, 87%, 88%, 89%, 90%, 91%, 92%, 93%, 94%, 95%, 96%, 97%, 98%, or 99% identical to a nucleic acid sequence selected from SEQ ID NO: 447-457, 459, 461, 491-503, 505-523, 524-542, 566-569, 570-573 of published PCT application WO2018170245, or an immunogenic fragment or immunogenic variant of any of these. Accordingly, SEQ ID NO: 447-457, 459, 461, 491-503, 505-523, 524-542, 566-569, 570-573 of WO2018170245 and the corresponding disclosure relating thereto are herewith incorporated by reference.

[0727] In embodiments, the at least one coding sequence of the at least one nucleic acid of component B (in particular, component B-2) comprises or consists at least one nucleic acid sequence encoding a Influenza virus antigen being identical or at least 70%, 80%, 85%, 86%, 87%, 88%, 89%, 90%, 91%, 92%, 93%, 94%, 95%, 96%, 97%, 98%, or 99% identical to a nucleic acid sequence selected from SEQ ID NOs: 32013-46043, 64025-78055, 224085-224106, 96037-110067, 128049-142079, 160061-174091, 192073-206103, 58410-60588, 90422-92600, 224107-224112, 122434-124612, 154446-156624, 186458-188636, 218470-220648, 46044-58409, 224311, 224312, 78056-90421, 224113, 224313-224317, 110068-122433, 142080-154445, 174092-186457, 206104-218469, 60589-62516, 92601-94528, 124613-126540, 156625-158552, 188637-190564, 220649-222576, 224085-224284 of published PCT application WO2018078053, or an immunogenic fragment or immunogenic variant of any of these. Accordingly, SEQ ID NOs: 32013-46043, 64025-78055, 224085-224106, 96037-110067, 128049-142079, 160061-174091, 192073-206103, 58410-60588, 90422-92600, 224107-224112, 122434-124612, 154446-156624, 186458-188636, 218470-220648, 46044-58409, 224311, 224312, 78056-90421, 224113, 224313-224317, 110068-122433, 142080-154445, 174092-186457, 206104-218469, 60589-62516, 92601-94528, 124613-126540, 156625-158552, 188637-190564, 220649-222576, 224085-224284 of WO2018078053 and the corresponding disclosure relating thereto are herewith incorporated by reference.

[0728] In embodiments, the at least one coding sequence of the at least one nucleic acid of component B (in particular, component B-2) comprises or consists at least one nucleic acid sequence encoding a Influenza virus antigen being identical or at least 70%, 80%, 85%, 86%, 87%, 88%, 89%, 90%, 91%, 92%, 93%, 94%, 95%, 96%, 97%, 98%, or 99% identical to a nucleic acid sequence selected from SEQ ID NOs: 26-14079, 14080-16264, 16265-28640, 28641 of published PCT application WO2019092153, or an immunogenic fragment or immunogenic variant of any of these. Accordingly, SEQ ID NO: 26 to 14079, 14080 to 16264, 16265 to 28640, 28641 of WO2019092153 and the corresponding disclosure relating thereto are herewith incorporated by reference.

[0729] In preferred embodiments, the at least one coding sequence of the at least one nucleic acid of component B (in particular component B-2) comprises or consists at least one nucleic acid sequence encoding a Influenza virus antigen, the nucleic acid being identical or at least 70%, 80%, 85%, 86%, 87%, 88%, 89%, 90%, 91%, 92%, 93%, 94%, 95%, 96%, 97%, 98%, or 99% identical to any one of the nucleic acid sequence selected from SEQ ID NOs: 14230-14333, 14334-14541, 26946, 26947-26955, or a fragment or variant of any of these sequences. Further information regarding said nucleic acid sequences is also provided in Table 8 (Column C-F), Table 9, and under <223> identifier of the ST.25 sequence listing of respective sequence SEQ ID NOs.

[0730] In preferred embodiments, the at least one coding sequence of the at least one nucleic acid of component B (in particular component B-2) comprises or consists at least one nucleic acid sequence encoding an Influenza virus A antigen (HA) being identical or at least 70%, 80%, 85%, 86%, 87%, 88%, 89%, 90%, 91%, 92%, 93%, 94%, 95%, 96%, 97%, 98%, or 99% identical to any one of the nucleic acid sequence selected from SEQ ID NOs: 14230-14233, 14236-14256, 14282-14285, 14288-14308, 14334-14337, 14340-14360, 14386-14389, 14392-14412, 14438-14441, 14444-14464, 14490-14493, 14496-14516, 26949, 26947, 26950, 26948, or a fragment or variant of any of these sequences. Further information regarding said nucleic acid sequences is also provided in Table 8 (Column C-F), Table 9, and under <223> identifier of the ST.25 sequence listing of respective sequence SEQ ID NOs.

[0731] In preferred embodiments, the at least one coding sequence of the at least one nucleic acid of component B (in particular component B-2) comprises or consists at least one nucleic acid sequence encoding a Influenza virus A (NA) antigen being identical or at least 70%, 80%, 85%, 86%, 87%, 88%, 89%, 90%, 91%, 92%, 93%, 94%, 95%, 96%, 97%, 98%, or 99% identical to any one of the nucleic acid sequence selected from SEQ ID NOs: 14366-14369, 14372-14383, 14418-14421, 14424-14435, 14470-14473, 14476-14487, 14522-14525, 14528-14539, 26953, 26954, or a fragment or variant of any of these sequences. Further information regarding said nucleic acid sequences is also provided in Table 8 (Column C-F), Table 9, and under <223> identifier of the ST.25 sequence listing of respective sequence SEQ ID NOs.

[0732] In preferred embodiments, the at least one coding sequence of the at least one nucleic acid of component B (in particular component B-2) comprises or consists at least one nucleic acid sequence encoding a Influenza virus B antigen being identical or at least 70%, 80%, 85%, 86%, 87%, 88%, 89%, 90%, 91%, 92%, 93%, 94%, 95%, 96%, 97%, 98%, or 99% identical to any one of the nucleic acid sequence selected from SEQ ID NOs: 14234, 14235, 14257-14261, 14266, 14267, 14280, 14281, 14286, 14287, 14309-14313, 14318, 14319, 14332, 14333, 14338, 14339, 14361-14365, 14370, 14371, 14384, 14385, 14390, 14391, 14413-14417, 14422, 14423, 14436, 14437, 14442, 14443, 14465-14469, 14474, 14475, 14488, 14489, 14494, 14495, 14517-14521, 14526, 14527, 14540, 14541, 26951, 26952, 26955, or a fragment or variant of any of these sequences. Further information regarding said nucleic acid sequences is also provided in Table 8 (Column C-F), Table 9, and under <223> identifier of the ST.25 sequence listing of respective sequence SEQ ID NOs.

[0733] In preferred embodiments, the at least one coding sequence of the nucleic acid of component B (in particular of component B-2) is a codon modified coding sequence as defined herein, wherein the amino acid sequence, that is the Influenza virus peptide or protein, encoded by the at least one codon modified coding sequence is preferably not being modified compared to the amino acid sequence encoded by the corresponding wild type or reference coding sequence. In particularly preferred embodiments, the at least one coding sequence of the nucleic acid component B is a codon modified coding sequence, wherein the codon modified coding sequence is selected a G/C optimized coding sequence, a human codon usage adapted coding sequence, or a G/C modified coding sequence.

[0734] Preferred nucleic acid sequences of component B (in particular of component B-2) including particularly preferred mRNA sequences, are provided in Table 9 (column C and D). Therein, each row represents a specific suitable Influenza virus construct of the invention (compare with Table 8), wherein the description of the Influenza virus construct is indicated in column A of Table 9 and the SEQ ID NOs of the amino acid sequence of the respective Influenza virus construct is provided in column B. The corresponding SEQ ID NOs of the coding sequences encoding the respective Influenza virus constructs are provided in Table 8. Further information is provided under <223> identifier of the respective SEQ ID NOs in the sequence listing.

TABLE 9
Nucleic acid, preferably mRNA constructs encoding Influenza virus antigens

| A | B | C | D |
|---|---|---|---|
| FLUAV/H1N1/A/California/7/2009 hemagglutinin (HA) | 14178 | 14334, 14386, | 14438, 14490 |
| | | 26949 | |
| FLUAV/H1N1/A/Michigan/45/2015 hemagglutinin (HA) | 14179 | 14335, 14387 | 14439, 14491 |
| FLUAV/H1N1/A/Netherlands/602/2009 hemagglutinin (HA) | 14180 | 14336, 14388 | 14440, 14492 |
| FLUAV/H3N2/A/Hong Kong/4801/2014 hemagglutinin (HA) | 14181 | 14337, 14389, | 14441, 14493, |
| | | 26947, 26950 | 26948 |
| FLUBV/H0N0/B/Brisbane/60/2008 hemagglutinin (HA) | 14182 | 14338, 14390, | 14442, 14494 |
| | | 26951 | |
| FLUBV/H0N0/B/Phuket/3073/2013 hemagglutinin (HA) | 14183 | 14339, 14391, | 14443, 14495 |
| | | 26952 | |
| FLUAV/H1N1/A/Brisbane/02/2018 hemagglutinin (HA) | 14184 | 14340, 14392 | 14444, 14496 |
| FLUAV/H1N1/A/Brisbane/02/2018 hemagglutinin (HA) | 14185 | 14341, 14393 | 14445, 14497 |
| FLUAV/H1N1/A/Guangdong-Maonan/SWL1536/2019 hemagglutinin (HA) | 14186 | 14342, 14394 | 14446, 14498 |
| FLUAV/H1N1/A/Guangdong-Maonan/SWL1536/2019 hemagglutinin (HA) | 14187 | 14343, 14395 | 14447, 14499 |
| FLUAV/H3N2/A/Singapore/INFIMH-16-0019/2016 hemagglutinin (HA) | 14188 | 14344, 14396 | 14448, 14500 |
| FLUAV/H3N2/A/Singapore/INFIMH-16-0019/2016 hemagglutinin (HA) | 14189 | 14345, 14397 | 14449, 14501 |
| FLUAV/H3N2/A/Singapore/INFIMH-16-0019/2016 NYMC-X-307 | 14190 | 14346, 14398 | 14450, 14502 |
| hemagglutinin (HA) | | | |
| FLUAV/H3N2/A/Singapore/INFIMH-16-0019/2016-CDC-LV18A | 14191 | 14347, 14399 | 14451, 14503 |
| hemagglutinin (HA) | | | |
| FLUAV/H3N2/A/Kansas/14/2017 hemagglutinin (HA) | 14192 | 14348, 14400 | 14452, 14504 |
| FLUAV/H3N2/A/Kansas/14/2017 hemagglutinin (HA) | 14193 | 14349, 14401 | 14453, 14505 |
| FLUAV/H3N2/A/Kansas/14/2017 hemagglutinin (HA) | 14194 | 14350, 14402 | 14454, 14506 |
| FLUAV/H3N2/A/Kansas/14/2017 CBER-22B CDC19A hemagglutinin (HA) | 14195 | 14351, 14403 | 14455, 14507 |
| FLUAV/H3N2/A/Switzerland/8060/2017 hemagglutinin (HA) | 14196 | 14352, 14404 | 14456, 14508 |
| FLUAV/H3N2/A/Switzerland/8060/2017 hemagglutinin (HA) | 14197 | 14353, 14405 | 14457, 14509 |
| FLUAV/H3N2/A/Hong Kong/2671/2019 hemagglutinin (HA) | 14198 | 14354, 14406 | 14458, 14510 |
| FLUAV/H3N2/A/Hong Kong/2671/2019 hemagglutinin (HA) | 14199 | 14355, 14407 | 14459, 14511 |
| FLUAV/H3N2/A/Hong Kong/45/2019 hemagglutinin (HA) | 14200 | 14356, 14408 | 14460, 14512 |
| FLUAV/H3N2/A/South Australia/34/2019 hemagglutinin (HA) | 14201 | 14357, 14409 | 14461, 14513 |
| FLUAV/H3N2/A/South Australia/34/2019 hemagglutinin (HA) | 14202 | 14358, 14410 | 14462, 14514 |
| FLUAV/H7N9/A/chicken/Zhejiang/C483/2013(H7N9) hemagglutinin (HA) | 14203 | 14359, 14411 | 14463, 14515 |
| FLUAV/H10N8/A/Jiangxi/IPB13/2013(H10N8) hemagglutinin (HA) | 14204 | 14360, 14412 | 14464, 14516 |
| FLUBV/H0N0/B/Colorado/06/2017 hemagglutinin (HA) | 14205 | 14361, 14413 | 14465, 14517 |
| FLUBV/H0N0/B/Colorado/06/2017 hemagglutinin (HA) | 14206 | 14362, 14414 | 14466, 14518 |
| FLUBV/H0N0/B/Colorado/06/2017 BX-71 hemagglutinin (HA) | 14207 | 14363, 14415 | 14467, 14519 |
| FLUBV/H0N0/B/Washington/02/2019 hemagglutinin (HA) | 14208 | 14364, 14416 | 14468, 14520 |
| FLUBV/H0N0/B/Washington/02/2019 hemagglutinin (HA) | 14209 | 14365, 14417 | 14469, 14521 |
| FLUAV/H1N1/A/California/7/2009 neuraminidase (NA) | 14210 | 14366, 14418, | 14470, 14522 |
| | | 26953 | |
| FLUAV/H1N1/A/Michigan/45/2015 neuraminidase (NA) | 14211 | 14367, 14419 | 14471, 14523 |
| FLUAV/H1N1/A/Netherlands/602/2009 neuraminidase (NA) | 14212 | 14368, 14420 | 14472, 14524 |
| FLUAV/H3N2/A/Hong Kong/4801/2014 neuraminidase (NA) | 14213 | 14369, 14421, | 14473, 14525 |
| | | 26954 | |
| FLUBV/H0N0/B/Brisbane/60/2008 neuraminidase (NA) | 14214 | 14370, 14422, | 14474, 14526 |
| | | 26955 | |
| FLUBV/H0N0/B/Phuket/3073/2013 neuraminidase (NA) | 14215 | 14371, 14423 | 14475, 14527 |
| FLUAV/H1N1/A/Brisbane/02/2018 neuraminidase (NA) | 14216 | 14372, 14424 | 14476, 14528 |
| FLUAV/H1N1/A/Guangdong-Maonan/SWL1536/2019 neuraminidase (NA) | 14217 | 14373, 14425 | 14477, 14529 |
| FLUAV/H3N2/A/Singapore/INFIMH-16-0019/2016 neuraminidase (NA) | 14218 | 14374, 14426 | 14478, 14530 |
| FLUAV/H3N2/A/Kansas/14/2017 neuraminidase (NA) | 14219 | 14375, 14427 | 14479, 14531 |
| FLUAV/H3N2/A/Kansas/14/2017-CDC-LV24A neuraminidase (NA) | 14220 | 14376, 14428 | 14480, 14532 |
| FLUAV/H3N2/A/Switzerland/8060/2017 neuraminidase (NA) | 14221 | 14377, 14429 | 14481, 14533 |
| FLUAV/H3N2/A/Switzerland/8060/2017(H3N2)-CDC-LV21A neuraminidase | 14222 | 14378, 14430 | 14482, 14534 |
| (NA) | | | |
| FLUAV/H3N2/A/Hong Kong/2671/2019 neuraminidase (NA) | 14223 | 14379, 14431 | 14483, 14535 |
| FLUAV/H3N2/A/Hong Kong/45/2019 neuraminidase (NA) | 14224 | 14380, 14432 | 14484, 14536 |
| FLUAV/H3N2/A/South Australia/34/2019 neuraminidase (NA) | 14225 | 14381, 14433 | 14485, 14537 |
| FLUAV/H7N9/A/chicken/Zhejiang/C483/2013(H7N9) neuraminidase (NA) | 14226 | 14382, 14434 | 14486, 14538 |
| FLUAV/H10N8/A/Jiangxi/IPB13/2013(H10N8) neuraminidase (NA) | 14227 | 14383, 14435 | 14487, 14539 |
| FLUBV/H0N0/B/Colorado/06/2017 neuraminidase (NA) | 14228 | 14384, 14436 | 14488, 14540 |
| FLUBV/H0N0/B/Washington/02/2019 neuraminidase (NA) | 14229 | 14385, 14437 | 14489, 14541 |

[0735] In embodiments, the at least one coding sequence of the at least one nucleic acid of component B (in particular, component B-2) comprises or consists at least one nucleic acid sequence, preferably mRNA sequence, encoding a Influenza virus antigen being identical or at least 70%, 80%, 85%, 86%, 87%, 88%, 89%, 90%, 91%, 92%, 93%, 94%, 95%, 96%, 97%, 98%, or 99% identical to any one of SEQ ID NOs: 224085-224284 of published PCT application WO2018078053, or an immunogenic fragment or immunogenic variant of any of these. Optionally, wherein said nucleic acid sequences comprise a cap1 structure as defined herein, and/or wherein at least one, preferably all uracil nucleotides in said RNA sequences are replaced by pseudouridine (ψ) nucleotides and/or N1-methylpseudouridine (m1ψ) nucleotides.

[0736] In preferred embodiments, the nucleic acid of component B (in particular component B-2), preferably the RNA, comprises or consists of a nucleic acid sequence encoding an Influenza antigen which is identical or at least 70%, 80%, 85%, 86%, 87%, 88%, 89%, 90%, 91%, 92%, 93%, 94%, 95%, 96%, 97%, 98%, or 99% identical to a nucleic acid sequence selected from SEQ ID NOs: 14334-14541, 26946-26955, or a fragment or variant of any of these sequences. Optionally, wherein said nucleic acid sequences comprise a cap1 structure as defined herein, and/or wherein at least one, preferably all uracil nucleotides in said RNA sequences are replaced by pseudouridine (ψ) nucleotides and/or N1-methylpseudouridine (m1ψ) nucleotides. Further information regarding respective nucleic acid sequences is provided under <223> identifier of the respective SEQ ID NO in the sequence listing, and in Table 9 (see in particular Column C and D).

[0737] In embodiments, the component B (in particular component B-2) comprises a plurality or at least more than one of the nucleic acid species comprising at least one coding sequence encoding at least one antigenic peptide or protein selected or derived from at least one Influenza virus, or an immunogenic fragment or immunogenic variant thereof, e.g. DNA or RNA species as defined herein. Preferably, component B (in particular component B-2) as defined herein comprises 2, 3, 4, 5, 6, 7, 8, 9, or 10 different nucleic acids each as defined herein.

[0738] In embodiments, component B (in particular component B-2) may comprise at least 2, 3, 4, 5, 6, 7, 8, 9, 10 or even more different nucleic acid species, e.g. DNA or RNA, as defined herein, each encoding at least one antigenic peptide or protein derived from the same Influenza virus, or a fragment or variant thereof. Particularly, said (genetically) same Influenza virus expresses (essentially) the same repertoire of proteins or peptides, wherein all proteins or peptides have (essentially) the same amino acid sequence. Particularly, said (genetically) same Influenza virus expresses essentially the same proteins, peptides or polyproteins, wherein these protein, peptide or polyproteins preferably do not differ in their amino acid sequence(s).

[0739] In embodiments, the component B (in particular component B-2) comprises at least 2, 3, 4, 5, 6, 7, 8, 9, 10 or even more different nucleic acid species, e.g. DNA or RNA, as defined herein, each encoding at least one peptide or protein derived from a genetically distinct Influenza virus (e.g. a distinct Influenza virus isolate/strain), or a fragment or variant thereof. The terms “distinct” or “distinct Influenza virus” as used throughout the present specification have to be understood as the difference between at least two respective Influenza virus (e.g. a distinct Influenza virus isolate), wherein the difference is manifested on the genome of the respective distinct Influenza virus. Particularly, said (genetically) distinct Influenza virus may express at least one distinct protein, peptide or polyprotein, wherein the at least one distinct protein, peptide or polyprotein differs in at least one amino acid.

[0740] In preferred embodiments, component B (in particular component B-2) comprises a plurality of nucleic acid sequences encoding an Influenza virus antigen, preferably 2, 3, 4, 5, 6, 7, 6, 9, 10, 11, 12, 13, 14, 15, 16, 17, 18, 19, 20, 25, 30, 35, 40, 45, 50, 60, 70, 80, or 100 of nucleic acid sequences encoding an Influenza virus antigen, preferablywherein each of the plurality of nucleic acid sequences is selected from nucleic acid sequences encoding Influenza antigens as defined herein.

[0741] In preferred embodiments, the plurality of nucleic acid sequences of component B (in particular component B-2) encodes at least one, preferably 2, 3, 4, 5, 6 antigenic peptide or protein selected or derived from HA as defined herein and at least one, preferably 2, 3, 4, 5, 6 antigenic peptide or protein selected or derived from NA as defined herein of at least one Influenza A virus as defined herein.

[0742] In preferred embodiments, the plurality of nucleic acid sequences of component B (in particular component B-2) encodes at least one, preferably 2, 3, 4, 5, 6 antigenic peptide or protein selected or derived from HA as defined herein and at least one, preferably 2, 3, 4, 5, 6 antigenic peptide or protein selected or derived from NA as defined herein of at least one Influenza B virus.

[0743] In this context it is particularly preferred that component B (in particular component B-2) of the pharmaceutical composition comprises at least one nucleic acid, in particular RNA sequence encoding at least one antigenic peptide or protein derived from a protein of influenza A virus H1, preferably hemagglutinin (HA) and/or neuraminidase (NA), at least one nucleic acid, in particular RNA sequence encoding at least one antigenic peptide or protein derived from a protein of influenza A virus H3, preferably hemagglutinin (HA) and/or neuraminidase (NA), at least one nucleic acid, in particular RNA sequence encoding at least one antigenic peptide or protein derived from a protein of influenza A virus H5, preferably hemagglutinin (HA) and/or neuraminidase (NA), and optionally at least one nucleic acid, in particular RNA sequence encoding at least one antigenic peptide or protein derived from a protein of influenza A virus H7, preferably hemagglutinin (HA) and/or neuraminidase (NA), and/or optionally at least one nucleic acid, in particular RNA sequence encoding at least one antigenic peptide or protein derived from a protein of influenza A virus H9, preferably hemagglutinin (HA) and/or neuraminidase (NA).

[0744] Preferably, component B (in particular component B-2) of the pharmaceutical composition comprises at least one nucleic acid, in particular RNA sequence encoding at least one antigenic peptide or protein derived from hemagglutinin (HA) and/or at least one nucleic acid, in particular RNA sequence encoding at least one antigenic peptide or protein derived from neuraminidase (NA) of influenza A virus H1, at least one nucleic acid, in particular RNA sequence encoding at least one antigenic peptide or protein derived from hemagglutinin (HA) and/or at least one nucleic acid, in particular RNA sequence encoding at least one antigenic peptide or protein derived from neuraminidase (NA) of influenza A virus H3, at least one nucleic acid, in particular RNA sequence encoding at least one antigenic peptide or protein derived from hemagglutinin (HA) and/or at least one nucleic acid, in particular RNA sequence encoding at least one antigenic peptide or protein derived from neuraminidase (NA) of influenza A virus H5, and optionally at least one nucleic acid, in particular RNA sequence encoding at least one antigenic peptide or protein derived from preferably hemagglutinin (HA) and/or at least one nucleic acid, in particular RNA sequence encoding at least one antigenic peptide or protein derived from neuraminidase (NA) of influenza A virus H7, and/or optionally at least one nucleic acid, in particular RNA sequence encoding at least one antigenic peptide or protein derived from, preferably hemagglutinin (HA) and/or at least one nucleic acid, in particular RNA sequence encoding at least one antigenic peptide or protein derived from neuraminidase (NA) of influenza A virus H9.

[0745] In a specific embodiment, component B (in particular component B-2) of the pharmaceutical composition comprises at least one nucleic acid, in particular RNA sequence encoding at least one antigenic peptide or protein derived from hemagglutinin (HA) and/or at least one nucleic acid, in particular RNA sequence encoding at least one antigenic peptide or protein derived from neuraminidase (NA) of influenza A virus H1N1, at least one nucleic acid, in particular RNA sequence encoding at least one antigenic peptide or protein derived from hemagglutinin (HA) and/or at least one nucleic acid, in particular RNA sequence encoding at least one antigenic peptide or protein derived from neuraminidase (NA) of influenza A virus H3N2, at least one nucleic acid, in particular RNA sequence encoding at least one antigenic peptide or protein derived from hemagglutinin (HA) and/or at least one nucleic acid, in particular RNA sequence encoding at least one antigenic peptide or protein derived from neuraminidase (NA) of influenza A virus H5N1.

[0746] Additionally, component B (in particular component B-2) of the pharmaceutical composition preferably further comprises at least one nucleic acid, in particular RNA sequence encoding at least one antigenic peptide or protein derived from hemagglutinin (HA) and/or at least one nucleic acid, in particular RNA sequence encoding at least one antigenic peptide or protein derived from neuraminidase (NA) of at least one influenza B virus.

[0747] Preferably in this context, the nucleic acid sequence(s) of component B comprises or consists of the following RNA sequences of Table 10 (“preferred RNA sequences”):

TABLE 10
preferred Influenza virus RNA sequences

| Strain/Organism | HA | NA |
|---|---|---|
| FLUAV/H1N1/A/California/7/2009 | 14334, 14386, 14438, 14490, 26949 | 14366, 14418, 14470, 14522, 26953 |
| FLUAV/H1N1/A/Michigan/45/2015 | 14335, 14387, 14439, 14491 | 14367, 14419, 14471, 14523 |
| FLUAV/H1N1/A/Netherlands/602/2009 | 14336, 14388, 14440, 14492 | 14368, 14420, 14472, 14524 |
| FLUAV/H3N2/A/Hong Kong/4301/2014 | 14337, 14389, 14441, 14493, 26947, | 14369, 14421, 14473, 14525, 26954 |
| | 26950, 26948 | |
| FLUBV/H0N0/B/Brisbane/60/2008 | 14338, 14390, 14442, 14494, 26951 | 14370, 14422, 14474, 14526, 26955 |
| FLUBV/H0N0/B/Phuket/3073/2013 | 14339, 14391, 14443, 14495, 26952 | 14371, 14423, 14475, 14527 |

[0748] In preferred embodiments, component B (in particular component B-2) of the pharmaceutical composition is a tetravalent influenza cocktail, comprising nucleic acid, preferably RNA sequences as defined herein. Particularly preferred in this context is the combination of nucleic acids, preferably RNAs encoding the following protein sequences (e.g. suitable for a tetravalent influenza cocktail):
[0749] HA protein of FLUAV/H3N2/A/Hong Kong/4801/2014
[0750] HA protein of FLUAV/H1N1/A/California/7/2009
[0751] HA protein of FLUBV/H0N0/B/Phuket/3073/2013
[0752] HA protein of FLUBV/H0N0/B/Brisbane/60/2008

[0753] Suitable RNA sequences for said tetravalent influenza cocktail can be selected from Table 10.

[0754] In preferred embodiments, component B (in particular component B-2) of the pharmaceutical composition is a trivalent influenza cocktail, comprising nucleic acid, preferably RNA sequences as defined herein. Particularly preferred in this context is the combination of nucleic acids, preferably RNAs encoding the following protein sequences (e.g. suitable for a trivalent influenza cocktail):
[0755] NA protein of FLUAV/H3N2/A/Hong Kong/4801/2014
[0756] NA protein of FLUAV/H1N1/A/California/7/2009
[0757] NA protein of FLUBV/H0N0/B/Brisbane/60/2008

[0758] Suitable RNA sequences for said trivalent influenza cocktail can be selected from Table 10.

[0759] In more preferred embodiments, component B (in particular component B-2) of the pharmaceutical composition is a tetravalent influenza cocktail, comprising nucleic acid, preferably RNA sequences as defined herein. Particularly preferred in this context is the combination of nucleic acids, preferably RNAs encoding the following protein sequences (e.g. suitable for a tetravalent influenza cocktail):
[0760] HA protein of FLUAV/H1N1/A/Netherlands/602/2009
[0761] HA protein of FLUAV/H3N2/A/Hong Kong/4801/2014
[0762] HA protein of FLUBV/H0N0/B/Brisbane/60/2008
[0763] HA protein of influenza A/Vietnam/1194/2004 (H5N1)

[0764] Suitable RNA sequences for said tetravalent influenza cocktail can be selected from Table 10.

[0765] In an also particularly preferred embodiment, component B (in particular component B-2) of the pharmaceutical composition is a septavalent (or septivalent) influenza cocktail, comprising nucleic acid, preferably RNA sequences as defined herein. Particularly preferred in this context is the combination of nucleic acids, preferably RNAs encoding the following protein sequences (e.g. suitable for a septavalent influenza cocktail):
[0766] HA protein of FLUAV/H3N2/A/Hong Kong/4801/2014
[0767] HA protein of FLUAV/H1N1/A/California/7/2009
[0768] HA protein of FLUBV/H0N0/B/Phuket/3073/2013
[0769] HA protein of FLUBV/H0N0/B/Brisbane/60/2008
[0770] NA protein of FLUAV/H3N2/A/Hong Kong/4801/2014
[0771] NA protein of FLUAV/H1N1/A/California/7/2009
[0772] NA protein of FLUBV/H0N0/B/Brisbane/60/2008

[0773] Suitable RNA sequences for said septavalent influenza cocktail can be selected from Table 10.

[0774] Accordingly, in embodiments, component B (in particular B-2) comprises a plurality of nucleic acid sequences encoding an Influenza virus antigen, wherein the influenza virus is selected from the list comprising FLUAV/H1N1/A/California/7/2009, FLUAV/H1N1/A/Michigan/45/2015, FLUAV/H1N1/A/Netherlands/602/2009, FLUAV/H3N2/A/Hong Kong/4801/2014, FLUBV/H0N0/B/Brisbane/60/2008, FLUBV/H0N0/B/Phuket/3073/2013.

[0775] In preferred embodiments, component B (in particular B-2) comprises a plurality of nucleic acid sequences, preferably seven nucleic acid sequences, encoding a plurality of Influenza virus antigens, preferably seven Influenza virus antigens, wherein the influenza virus antigens are selected from
[0776] HA protein of FLUAV/H3N2/A/Hong Kong/4801/2014,
[0777] HA protein of FLUAV/H1N1/A/California/7/2009,
[0778] HA protein of FLUBV/H0N0/B/Phuket/3073/2013,
[0779] HA protein of FLUBV/H0N0/B/Brisbane/60/2008,
[0780] NA protein of FLUAV/H3N2/A/Hong Kong/4801/2014,
[0781] NA protein of FLUAV/H1N1/A/California/7/2009, and
[0782] NA protein of FLUBV/H0N0/B/Brisbane/60/2008,

[0783] Preferably, wherein nucleic acid sequences, preferably RNA sequences, are selected from Table 10.

[0784] In preferred embodiments, the component B-2 comprises at least one nucleic acid encoding at least one antigenic peptide or protein that is selected or derived from at least one Influenza virus, or an immunogenic fragment or immunogenic variant thereof, wherein said component B-2 is to be, preferably, administered intramuscularly or intradermal.

[0785] Preferably, intramuscular or intradermal administration of said component B-2 results in expression of the encoded Influenza virus antigen construct in a subject. In embodiments where the nucleic acid is an RNA, administration of component B-2 results in translation of the RNA and to a production of the encoded Influenza virus antigen in a subject. In embodiments where the nucleic acid is a DNA (e.g. plasmid DNA, adenovirus DNA), administration of said composition results in transcription of the DNA into RNA, and to a subsequent translation of the RNA into the encoded Influenza virus antigen in a subject.

[0786] In preferred embodiments, administration of component B-2 elicits antigen-specific immune responses comprising T-cell responses and/or B-cell responses against the encoded Influenza virus antigens provided by the at least one nucleic acid of component B-2.

[0787] Preferably, the component B-2 is suitable for a vaccine, in particular, suitable for a Influenza virus vaccine, preferably a combination vaccine of the invention.

[0788] In embodiments, the nucleic acid as comprised in component B-2 as defined herein is provided in an amount of about 100 ng to about 500 ug, in an amount of about 1 ug to about 200 ug, in an amount of about 1 ug to about 100 ug, in an amount of about 5 ug to about 100 ug, preferably in an amount of about 10 ug to about 50 ug, specifically, in an amount of about 1 ug, 2 ug, 3 ug, 4 ug, 5 ug, 6 ug, 1 ug, 8 ug, 9 ug, 10 ug, 11 ug, 12 ug, 13 ug, 14 ug, 15 ug, 20 ug, 25 ug, 30 ug, 35 ug, 40 ug, 45 ug, 50 ug, 55 ug, 60 ug, 65 ug, 70 ug, 75 ug, 80 ug, 85 ug, 90 ug, 95 ug or 100 ug.

[0789] In case component B-2 comprises a plurality or at least more than one of the nucleic acid species as defined herein, the amount of nucleic acid for each nucleic acid species is provided in an amount of about 100 ng to about 500 ug, in an amount of about 1 ug to about 200 ug, in an amount of about 1 ug to about 100 ug, in an amount of about 5 ug to about 100 ug, preferably in an amount of about 10 ug to about 50 ug, specifically, in an amount of about 1 ug, 2 ug, 3 ug, 4 ug, 5 ug, 6 ug, 1 ug, 8 ug, 9 ug, 10 ug, 11 ug, 12 ug, 13 ug, 14 ug, 15 ug, 20 ug, 25 ug, 30 ug, 35 ug, 40 ug, 45 ug, 50 ug, 55 ug, 60 ug, 65 ug, 70 ug, 75 ug, 80 ug, 85 ug, 90 ug, 95 ug or 100 ug.

[0790] In some embodiments, the amount of nucleic acid for each nucleic acid species is essentially equal in mass. In other embodiments, the amount of nucleic acid for each nucleic acid species is selected to be equimolar.

[0791] Component B-3: Pneumoviridae Virus

[0792] In preferred embodiments, the at least one further virus of component B is selected from at least one virus of the Pneumoviridae virus family.

[0793] It has to be understood that generic embodiments and features that have been described in paragraph “Component B” may also apply to a nucleic acid encoding a Pneumoviridae antigenic peptide or protein.

[0794] Pneumoviridae (NCBI Taxonomy ID: 11244) is a virus family in the order Mononegavirales. It was created in 2015 by elevating the now dissolved paramyxoviral subfamily Pneumoviridae. There are currently five species in the Pneumoviridae family, divided between 2 genera (Metapneumovirus and Orthopneumovirus). Orthopneumovirus (NCBI Taxonomy ID: 1868215) is a genus that includes Human respiratory syncytial viruses RSV (e.g. RSV A, RSV B). Metapneumovirus (NCBI Taxonomy ID: 162387) is a genus that includes Human metapneumovirus (hMPV).

[0795] The genome of Pneumoviridae viruses is composed of negative-sense single-stranded RNA that is non-segmented. It is about 15 kb in size, and typically encodes 11 proteins. A unique feature of the genome is the M2 gene, which encodes proteins M2-1 and M2-2. Viruses in this family are often associated with respiratory infections, and are transmitted through respiratory secretions

[0796] In embodiments of the invention, any protein selected or derived from a Pneumoviridae may be used in the context of the invention and may be encoded by the coding sequence or the nucleic acid of component B (in particular, component B-4).

[0797] Suitable in the context of the invention are pathogenic Pneumoviridae viruses, including Respiratory syncytial virus, and/or at least one Metapneumovirus.

[0798] Component B-3a: Respiratory Syncytial Virus (RSV):

[0799] In preferred embodiments, the at least one further virus of component B is selected from at least one Respiratory syncytial virus (RSV) of the Pneumoviridae virus family (also herein referred to as component B-3a).

[0800] As used herein, the term “Respiratory syncytial virus” or the corresponding abbreviation “RSV” is not limited to a particular virus strain, variant, serotype, or isolate, etc. comprising any Respiratory syncytial virus of any origin.

[0801] Suitable RSV viruses in the context of the invention may be selected from List 1 (“RSV virus strains”) of published PCT patent application WO2019202035. Accordingly, List 1 of WO2019202035, and the disclosure relating thereto, is herewith incorporated by reference.

[0802] In preferred embodiments of the invention, the at least one antigenic peptide or protein is derived from a Respiratory syncytial virus isolate RSV Memphis-37 (strain Memphis-37) (NCBI Taxonomy ID: 12814) and/or a Human respiratory syncytial virus A2, Human respiratory syncytial virus (strain A2) (NCBI Taxonomy ID: 11259).

[0803] In embodiments, the at least one antigenic peptide or protein encoded by the at least one nucleic acid of component B (in particular component B-3) comprises or consists at least one peptide or protein selected or derived from at least one RSV fusion protein F, RSV matrix protein M, RSV nucleoprotein N, RSV M2-1 protein, and/or RSV phosphoprotein P, or an immunogenic fragment or immunogenic variant of any of these.

[0804] In preferred embodiments, the at least one antigenic peptide or protein encoded by the at least one nucleic acid of component B (in particular component B-3) comprises or consists at least one peptide or protein selected or derived from at least one RSV fusion protein F, or an immunogenic fragment or immunogenic variant thereof.

[0805] RSV F protein is initially expressed (after infection of a host cell) as a single polypeptide precursor, designated full-length fusion protein F (herein referred to as “F0”). F0 forms a trimer in the endoplasmic reticulum and is processed by a cellular/host furin-like protease at two conserved sites, generating, F1, F2, and Pep27 polypeptides. The Pep27 polypeptide is excised and does not form part of the mature F protein. The F2 polypeptide originates from the N-terminal portion of the F0 precursor and links to the F1 polypeptide via two disulfide bonds. The F1 polypeptide originates from the C-terminal portion of the F0 precursor and anchors the mature F protein in the membrane via a transmembrane domain, which is linked to a cytoplasmic tail. Three F2-F1 heterodimer units (“protomers”) assemble to form a mature F protein. Initially, the mature F protein is in a metastable form (herein referred to as “pre-fusion conformation”). Upon triggering, it undergoes a dramatic and irreversible conformational change (herein referred to as “postfusion conformation”) that fuses the viral and target-cell membranes.

[0806] In the context of the invention, a suitable RSV F protein may be selected or derived from RSV F proteins provided in List 2 of published PCT patent application WO2019202035. Accordingly, List 2 of WO2019202035, and the disclosure relating thereto, is herewith incorporated by reference.

[0807] In preferred embodiments, the at least one antigenic peptide or protein selected or derived from RSV F protein is a full-length F protein (F0) or an F protein with deleted C-terminus (F-del), or an immunogenic fragment or immunogenic variant thereof.

[0808] In the context of the present invention, “RSV F protein”, “RSV fusion protein (F)”, “RSV F”, or “F” may be understood in its broadest sense and refers to F0 (F polypeptide precursor), F1, F2 and Pep27 polypeptides, F2-F1 heterodimer, or the mature F protein (comprising three F2-F1 heterodimers), or fragments and variants of any of these. Accordingly, the term “peptide or protein derived from a RSV fusion (F) protein” refers to a peptide, protein, fragment or variant derived from e.g. F0 (F protein polypeptide precursor), F1, F2 and Pep27 polypeptides, F2-F1 heterodimer, or the mature F protein. Additionally, the term “peptide or protein derived from a RSV fusion (F) protein” refers to peptide, protein, fragment or variant derived from “RSV F protein” or “RSV fusion protein (F)” as defined above which may be genetically engineered to e.g. to lack certain protein elements (e.g. the cytoplasmic tail, the furin cleavage site, Pep27) or e.g. comprise additional elements (e.g., linker elements, heterologous signal peptides etc.).

[0809] It has to be noted that where reference is made to amino acid (aa) residues and their position in an RSV F protein, any numbering used herein—unless stated otherwise—relates to the position of the respective aa residue in a corresponding F0 precursor protein of HRSV(A2) (SEQ ID NO: 68 of WO2019202035) or a corresponding F0 precursor protein of HRSV(Memphis-37) (SEQ ID NOs: 8937 or 11726 of WO2019202035) wherein position “1” corresponds to the first aa residue, i.e. the aa residue at the N-terminus of a HRSV(A2) F0 precursor protein or a HRSV(Memphis-37) F0 precursor protein.

[0810] In particularly preferred embodiments, the nucleic acid of component B (in particular, component B-3a) encodes least one antigenic peptide or protein derived from RSV F protein, wherein said RSV F protein is designed to stabilize the antigen in pre-fusion conformation. A pre-fusion conformation is particularly advantageous in the context of an efficient RSV vaccine, as several potential epitopes for neutralizing antibodies are merely accessible in said protein conformation.

[0811] Accordingly, in preferred embodiments, the RSV F protein is selected or derived from a pre-fusion stabilized F protein (F_stab) comprising at least one pre-fusion stabilizing mutation.

[0812] In several embodiments, the RSV F protein includes one or more amino acid substitutions that stabilize the F protein in the pre-fusion conformation, for example, substitutions that stabilize the membrane distal portion of the F protein (including the N-terminal region of the F1 polypeptide) in the pre-fusion conformation. For example, the amino acid substitution can introduce a non-natural disulfide bond or can be a cavity-filling amino acid substitution.

[0813] Accordingly, in several embodiments, a preferred RSV F protein includes S155C and S290C substitutions that form a non-natural disulfide bond that stabilizes the protein in a pre-fusion conformation; that is, in a conformation that specifically binds to one or more pre-fusion specification antibodies, and/or presents a suitable antigenic site that is present on the pre-fusion conformation but not in the postfusion conformation of RSV F protein. In further embodiments, the recombinant RSV F protein can additionally include F, L, W, Y, H, or M substitution at position 190, position 207, or positions 190 and 207.

[0814] Accordingly, in particularly preferred embodiments, the nucleic acid of component B encodes least one antigenic peptide or protein derived from RSV F protein, wherein the RSV F protein comprises a DSCav1 mutation (S155C, S290C, S190F, and V207L), or a fragment or a variant thereof.

[0815] In preferred embodiments, the at least one antigenic peptide or protein may be an engineered protein comprising the two subunits, F1 and F2 of mature F as a single polypeptide chain, wherein F2 and F1 are preferably connected via a linker (GS). F2-linker-F1 RSV F proteins lack aa104-144 (comprising the furine cleavage site and Pep27) and comprise a linker element between F2 polypeptide and F1 polypeptide (e.g. GS linker). F2-linker-F1 proteins may show superior properties in terms of stability and/or antigenicity.

[0816] Accordingly, in preferred embodiments, the RSV F protein comprises the two subunits F2 and F1 fused into a single polypeptide chain, wherein F2 and F1 are connected via a linker element, preferably a GS linker as specified herein, preferably generating a stable F2-linker-F1 proteins.

[0817] Preferably, said F2-linker-F1 fusion proteins, e.g. F(1-103)-GS-F(145-574) or F(1-103)-GS-F(145-553) additionally comprise a DScav1 mutation as outlined above (herein referred to as “mut0”).

[0818] In particularly preferred embodiments, the RSV F protein may additionally comprise at least one further mutation selected from (S46G, A149C, S215P, Y458C, K465Q), (S46G, E92D, A149C, S215P, Y4580, K465Q), (S46G, N671, E92D, A149C, S215P, Y4580, K465Q), (A149C, Y4580), (N183GC, N428C), (0980, 03610, S46G, E92D, L95M, S215P, I217P, I221M, R429K, K465Q), (0980, Q361C, L95M, I221M, R429K), or (N183G0, N428C, S46G, N671, E92D, S215P, K465Q) or a fragment or a variant thereof.

[0819] In particularly preferred embodiments, F2-linker-F1 proteins (F(1-103)-GS-F(145-574) or F(1-103)-GS-F(145-553)) may additionally comprise, preferably in addition to the DSCav1 mutation, at least one mutation selected from S46G, A149C, S215P, Y4580, K465Q, herein referred to as “mut1”; S46G, E92D, A149C, S215P, Y4580, K465Q, herein referred to as “mut1”; S46G, N671, E92D, A149C, S215P, Y4580, K465Q, herein referred to as “mut3”; A149C, Y4580, herein referred to as “mut4”; N183GC, N428C, herein referred to as “mut5”; Q98C, Q361C, S46G, E92D, L95M, S215P, I217P, I221M, R429K, K465Q, herein referred to as “mut6”; Q98C, Q361C, L95M, I221M, R429K, herein referred to as “mut7”; N183GC, N428C, S46G, N671, E92D, S215P, K465Q, herein referred to as “mut8”.

[0820] According to various embodiments, the nucleic acid of component B (in particular component B-3a) encodes at least one antigenic peptide or protein from an RSV as defined herein, and, additionally, at least one heterologous peptide or protein element.

[0821] Suitably, the at least one heterologous peptide or protein element may promote or improve secretion of the encoded RSV antigenic peptide or protein (e.g. via secretory signal sequences), promote or improve anchoring of the encoded RSV antigenic peptide or protein in the plasma membrane (e.g. via transmembrane elements), promote or improve formation of antigen complexes (e.g. via multimerization domains or antigen clustering elements), or promote or improve virus-like particle formation (VLP forming sequence). In addition, the nucleic acid of component B (in particular component B-3a) may additionally encode peptide linker elements, self-cleaving peptides, immunologic adjuvant sequences or dendritic cell targeting sequences.

[0822] Suitable multimerization domains may be selected from the list of amino acid sequences according to SEQ ID NOs: 1116-1167 of WO2017081082, or fragments or variants of these sequences. Suitable transmembrane elements may be selected from the list of amino acid sequences according to SEQ ID NOs: 1228-1343 of WO2017081082, or fragments or variants of these sequences. Suitable VLP forming sequences may be selected from the list of amino acid sequences according to SEQ ID NOs: 1168-1227 of the patent application WO2017081082, or fragments or variants of these sequences. Suitable peptide linkers may be selected from the list of amino acid sequences according to SEQ ID NOs: 1509-1565 of the patent application WO2017/081082, or fragments or variants of these sequences. Suitable self-cleaving peptides may be selected from the list of amino acid sequences according to SEQ ID NOs: 1434-1508 of the patent application WO2017081082, or fragments or variants of these sequences. Suitable immunologic adjuvant sequences may be selected from the list of amino acid sequences according to SEQ ID NOs: 1360-1421 of the patent application WO2017081082, or fragments or variants of these sequences. Suitable dendritic cell (DCs) targeting sequences may be selected from the list of amino acid sequences according to SEQ ID NOs: 1344-1359 of the patent application WO2017081082, or fragments or variants of these sequences. Suitable secretory signal peptides may be selected from the list of amino acid sequences according to SEQ ID NOs: 1-1115 and SEQ ID NO: 1728 of published PCT patent application WO2017081082, or fragments or variants of these sequences.

[0823] In preferred embodiments, the at least one coding sequence additionally encodes one or more heterologous peptide or protein elements selected from a signal peptide, a linker peptide, a helper epitope, an antigen clustering element, a trimerization or multimerization element, a transmembrane element, or a VLP forming sequence.

[0824] Preferred antigenic peptide or proteins selected or derived from an RSV as defined above are provided in Table 11 (rows 1 to 10) below. Therein, each row 1 to 10 corresponds to a suitable RSV constructs. Column A of Table 11 provides a short description of suitable RSV antigen constructs. Column B of Table 11 provides protein (amino acid) SEQ ID NOs of respective RSV antigen constructs. Column D of Table 11 provides SEQ ID NO of the corresponding G/C optimized nucleic acid coding sequences (opt1, gc). Column E of Table 11 provides SEQ ID NO of the corresponding human codon usage adapted nucleic acid coding sequences (opt 3, human).

[0825] Notably, the description of the invention explicitly includes the information provided under <223> identifier of the ST.25 sequence listing of the present application. Preferred nucleic acid constructs comprising coding sequences of Table 11, e.g. mRNA sequences comprising the coding sequences of Table 11 are provided in Table 12.

TABLE 11
Preferred RSV constructs (amino acid sequences and nucleic acid coding sequences):

| row | A | B | D | E |
|---|---|---|---|---|
| 1 | HRSV-A/RSVA/Homo sapiens/USA/ | 14542 | 14552 | 14562 |
| | 84I-215A-01/1984 fusion glycoprotein (F0) | | | |
| 2 | HRSV-A/A2 fusion glycoprotein (F0) | 14543 | 14553 | 14563 |
| 3 | HRSV-A/A2 fusion glycoprotein (F-del) | 14544 | 14554 | 14564 |
| 4 | HRSV-A/A2 fusion glycoprotein (F0_DSCav1) | 14545 | 14555 | 14565 |
| 5 | HRSV-A/A2 fusion glycoprotein (F-del_DSCav1) | 14546 | 14556 | 14566 |
| 6 | HRSV-A/A2 fusion glycoprotein (F_DSCav1_mut4) | 14547 | 14557 | 14567 |
| 7 | HRSV-A/A2 fusion glycoprotein (F-del_DSCav1_mut4) | 14548 | 14558 | 14568 |
| 8 | HRSV-A/A2 fusion glycoprotein (F_DSCav1_mut5) | 14549 | 14559 | 14569 |
| 9 | HRSV-A/A2 fusion glycoprotein (F-del_DSCav1_mut5) | 14550 | 14560 | 14570 |
| 10 | HRSV-A/A2 matrix protein (M2-1) | 14551 | 14561 | 14571 |

[0826] In preferred embodiments, the at least one antigenic peptide or protein selected or derived from at least one RSV encoded by the at least one nucleic acid of component B (in particular component B-3a) comprises or consists of at least one of the amino acid sequences being identical or at least 70%, 80%, 85%, 86%, 87%, 88%, 89%, 90%, 91%, 92%, 93%, 94%, 95%, 96%, 97%, 98%, or 99% identical to any one of SEQ ID NOs: 14542-14551, or an immunogenic fragment or immunogenic variant of any of these. Further information regarding said amino acid sequences is also provided in Table 8 (see rows 1 to 10 of Column A and B), and under <223> identifier of the ST.25 sequence listing of respective sequence SEQ ID NOs.

[0827] Further RSV F proteins that may be encoded by the nucleic acid of component B (in particular, component B-3a) are provided in Table 1 of published PCT patent application WO2019202035. Accordingly, Table 1 of published PCT patent application WO2019202035, and the disclosure and explanations relating thereto, is herewith incorporated by reference.

[0828] In other embodiments, the at least one antigenic peptide or protein selected or derived from at least one RSV encoded by the at least one nucleic acid of component B (in particular, component B-3a) comprises or consists of at least one of the amino acid sequences being identical or at least 70%, 80%, 85%, 86%, 87%, 88%, 89%, 90%, 91%, 92%, 93%, 94%, 95%, 96%, 97%, 98%, or 99% identical to any one of SEQ ID NO: 68, 483, 898, 1267, 1636, 2005, 2374, 2743, 3112, 3481, 3850, 4219, 4588, 4957, 5326, 5695, 6064, 6433, 6802, 7171, 7540, 7909, 11726, 12095, 12464, 12833, 13940, 14309, 14678, 15047, 15416, 15785, 13202, 13571, 16154, 16523, 16892, 17261, 17630, 17999, 18368, 18737, 19106, 19475, 8279-9683 of published PCT application WO2019202035, or an immunogenic fragment or immunogenic variant of any of these. Accordingly, SEQ ID NO: 68, 483, 898, 1267, 1636, 2005, 2374, 2743, 3112, 3481, 3850, 4219, 4588, 4957, 5326, 5695, 6064, 6433, 6802, 7171, 7540, 7909, 11726, 12095, 12464, 12833, 13940, 14309, 14678, 15047, 15416, 15785, 13202, 13571, 16154, 16523, 16892, 17261, 17630, 17999, 18368, 18737, 19106, 19475, 8279-9683 of WO2019202035 and the corresponding disclosure relating thereto (e.g. information provided in Table 1 of WO2019202035) are herewith incorporated by reference.

[0829] In other embodiments, the at least one antigenic peptide or protein selected or derived from at least one RSV encoded by the at least one nucleic acid of component B (in particular, component B-3) comprises or consists of at least one of the amino acid sequences being identical or at least 70%, 80%, 85%, 86%, 87%, 88%, 89%, 90%, 91%, 92%, 93%, 94%, 95%, 96%, 97%, 98%, or 99% identical to any one of SEQ ID NOs: 1-1428 of published PCT patent application WO2014160463 or a fragment or variant of any of these sequences. Accordingly, SEQ ID NOs: 1-1428 of WO2014160463 and the corresponding disclosure related thereto are herewith incorporated by reference.

[0830] In other embodiments, the at least one antigenic peptide or protein selected or derived from at least one RSV encoded by the at least one nucleic acid of component B (in particular, component B-3a) comprises or consists of at least one of the amino acid sequences being identical or at least 70%, 80%, 85%, 86%, 87%, 88%, 89%, 90%, 91%, 92%, 93%, 94%, 95%, 96%, 97%, 98%, or 99% identical to any one of SEQ ID NOs: 1-11 of published PCT patent application WO2015024668 or a fragment or variant of any of these sequences. Accordingly, SEQ ID NOs: 1-11 of WO2015024668 and the corresponding disclosure related thereto are herewith incorporated by reference.

[0831] In other embodiments, the at least one antigenic peptide or protein selected or derived from at least one RSV encoded by the at least one nucleic acid of component B (in particular, component B-3a) comprises or consists of at least one of the amino acid sequences being identical or at least 70%, 80%, 85%, 86%, 87%, 88%, 89%, 90%, 91%, 92%, 93%, 94%, 95%, 96%, 97%, 98%, or 99% identical to any one of SEQ ID NO: 3, 4, 6, 8, 10, 12, 14, 16, 18, 20, 22, 24, 26, 28, 243, or 245 of published PCT patent application WO2017070622 or a fragment or variant of any of these sequences. Accordingly, SEQ ID NO: 3, 4, 6, 8, 10, 12, 14, 16, 18, 20, 22, 24, 26, 28, 243, or 245 of WO2017070622 and the corresponding disclosure related thereto are herewith incorporated by reference.

[0832] In other embodiments, the at least one antigenic peptide or protein selected or derived from at least one RSV encoded by the at least one nucleic acid of component B (in particular, component B-3a) comprises or consists of at least one of the amino acid sequences being identical or at least 70%, 80%, 85%, 86%, 87%, 88%, 89%, 90%, 91%, 92%, 93%, 94%, 95%, 96%, 97%, 98%, or 99% identical to any one of SEQ ID NOs: 1-65, 81-95, 110-116 of published PCT patent application WO2017172890 or a fragment or variant of any of these sequences. Accordingly, SEQ ID NOs: 1-65, 81-95, 110-116 of WO2017172890 and the corresponding disclosure related thereto are herewith incorporated by reference.

[0833] According to preferred embodiments, the nucleic acid of component B (in particular, component B-3a) comprises at least one coding sequence encoding at least one antigenic peptide or protein derived from at least one RSV as defined above, or fragments and variants thereof. In that context, any coding sequence encoding at least one RSV antigenic protein as defined herein, or fragments and variants thereof, may be understood as suitable coding sequence and may therefore be comprised in the nucleic acid of component B.

[0834] In embodiments, the nucleic acid of component B (in particular component B-3a) comprises or consists of at least one coding sequence encoding at least one antigenic peptide or protein selected or derived from an RSV as defined herein, preferably encoding any one of SEQ ID NO: 68, 483, 898, 1267, 1636, 2005, 2374, 2743, 3112, 3481, 3850, 4219, 4588, 4957, 5326, 5695, 6064, 6433, 6802, 7171, 7540, 7909, 11726, 12095, 12464, 12833, 13940, 14309, 14678, 15047, 15416, 15785, 13202, 13571, 16154, 16523, 16892, 17261, 17630, 17999, 18368, 18737, 19106, 19475, 8279-9683 of WO2019202035; SEQ ID NOs: 1-1428 of WO2014160463; SEQ ID NOs: 1-11 of WO2015024668; SEQ ID NO: 3, 4, 6, 8, 10, 12, 14, 16, 18, 20, 22, 24, 26, 28, 243, 245 of WO2017070622; and SEQ ID NOs: 1-65, 81-95, 110-116 of WO2017172890 or fragments of variants of any of these sequences. It has to be understood that, on nucleic acid level, any sequence (DNA or RNA sequence) which encodes an amino acid sequences being identical or at least 70%, 80%, 85%, 86%, 87%, 88%, 89%, 90%, 91%, 92%, 93%, 94%, 95%, 96%, 97%, 98%, or 99% identical to any one of SEQ ID NO: 68, 483, 898, 1267, 1636, 2005, 2374, 2743, 3112, 3481, 3850, 4219, 4588, 4957, 5326, 5695, 6064, 6433, 6802, 7171, 7540, 7909, 11726, 12095, 12464, 12833, 13940, 14309, 14678, 15047, 15416, 15785, 13202, 13571, 16154, 16523, 16892, 17261, 17630, 17999, 18368, 18737, 19106, 19475, 8279-9683 of WO2019202035; SEQ ID NOs: 1-1428 of WO2014160463; SEQ ID NOs: 1-11 of WO2015024668; SEQ ID NO: 3, 4, 6, 8, 10, 12, 14, 16, 18, 20, 22, 24, 26, 28, 243, or 245 of WO2017070622; and SEQ ID NOs: 1-65, 81-95, 110-116 of WO2017172890, or fragments or variants of any of these sequences, may be selected and may accordingly be used as suitable coding sequence of the invention.

[0835] In preferred embodiments, the nucleic acid of component B (in particular component B-3a) comprises or consists of at least one coding sequence encoding at least one antigenic peptide or protein selected or derived from an RSV as defined herein, preferably encoding any one of SEQ ID NOs: 14542-14551 or fragments of variants of any of these. It has to be understood that, on nucleic acid level, any sequence (DNA or RNA sequence) which encodes an amino acid sequences being identical or at least 70%, 80%, 85%, 86%, 87%, 88%, 89%, 90%, 91%, 92%, 93%, 94%, 95%, 96%, 97%, 98%, or 99% identical to any one of SEQ ID NOs: 14542-14551 or fragment or variants of any of these, may be selected and may accordingly be understood as suitable coding sequence of the invention.

[0836] In embodiments, the at least one coding sequence of the at least one nucleic acid of component B (in particular, component B-3a) comprises or consists at least one nucleic acid sequence encoding a RSV antigen, the nucleic acid being identical or at least 70%, 80%, 85%, 86%, 87%, 88%, 89%, 90%, 91%, 92%, 93%, 94%, 95%, 96%, 97%, 98%, or 99% identical to any one of SEQ ID NOs: 69-482, 484-897, 899-1266, 1268-1635, 1637-2004, 2006-2373, 2375-2742, 2744-3111, 3113-3480, 3482-3849, 3851-4218, 4220-4587, 4589-4956, 4958-5325, 5327-5694, 5696-6063, 6065-6432, 6434-6801, 6803-7170, 7172-7539, 7541-7908, 7910-8277, 8278, 11727-12094, 12096-12463, 12465-12832, 12834-13201, 13941-14308, 14310-14677, 14679-15046, 15048-15415, 15417-15784, 15786-16153, 13203-13570, 13572-13939, 16155-16522, 16524-16891, 16893-17260, 17262-17629, 17631-17998, 18000-17998, 18369-18736, 18738-19105, 19107-19474, 19476-19843, 21363-21706 of published PCT application WO2019202035, or an immunogenic fragment or immunogenic variant of any of these. Accordingly, SEQ ID NOs: 69-482, 484-897, 899-1266, 1268-1635, 1637-2004, 2006-2373, 2375-2742, 2744-3111, 3113-3480, 3482-3849, 3851-4218, 4220-4587, 4589-4956, 4958-5325, 5327-5694, 5696-6063, 6065-6432, 6434-6801, 6803-7170, 7172-7539, 7541-7908, 7910-8277, 8278, 11727-12094, 12096-12463, 12465-12832, 12834-13201, 13941-14308, 14310-14677, 14679-15046, 15048-15415, 15417-15784, 15786-16153, 13203-13570, 13572-13939, 16155-16522, 16524-16891, 16893-17260, 17262-17629, 17631-17998, 18000-17998, 18369-18736, 18738-19105, 19107-19474, 19476-19843, 21363-21706 of WO2019202035 and the corresponding disclosure relating thereto (see also Table 3-6 in WO2019202035) are herewith incorporated by reference. Additional information regarding each of these suitable nucleic acid sequences encoding may also be derived from the sequence listing of WO2019202035, in particular from the details provided therein under identifier <223> in the sequence listing of WO2019202035.

[0837] In other embodiments, the at least one coding sequence of the at least one nucleic acid of component B (in particular, component B-3a) comprises or consists at least one nucleic acid sequence encoding a RSV antigen, the nucleic acid being identical or at least 70%, 80%, 85%, 86%, 87%, 88%, 89%, 90%, 91%, 92%, 93%, 94%, 95%, 96%, 97%, 98%, or 99% identical to SEQ ID NOs: 383-388 of published patent application WO2014160463 or a fragment or a fragment or variant of any of these sequences. Accordingly, SEQ ID NOs: 383-388 of WO2014160463 and the corresponding disclosure relating thereto are herewith incorporated by reference.

[0838] In other embodiments, the at least one coding sequence of the at least one nucleic acid of component B (in particular, component B-3a) comprises or consists at least one nucleic acid sequence encoding a RSV antigen, the nucleic acid being identical or at least 70%, 80%, 85%, 86%, 87%, 88%, 89%, 90%, 91%, 92%, 93%, 94%, 95%, 96%, 97%, 98%, or 99% identical to SEQ ID NOs: 12-22 of published patent application WO2015024668 or a fragment or a fragment or variant of any of these sequences. Accordingly, SEQ ID NOs: 12-22 of WO2015024668 and the corresponding disclosure relating thereto are herewith incorporated by reference.

[0839] In other embodiments, the at least one coding sequence of the at least one nucleic acid of component B (in particular, component B-3a) comprises or consists at least one nucleic acid sequence encoding an RSV antigen, the nucleic acid being identical or at least 70%, 80%, 85%, 86%, 87%, 88%, 89%, 90%, 91%, 92%, 93%, 94%, 95%, 96%, 97%, 98%, or 99% identical to SEQ ID NOs: 1, 2, 5, 7, 9, 11, 13, 15, 17, 19, 21, 23, 25, 27, 242, 244, 246, 257, 258-280 of published patent application WO2017070622 or a fragment or a fragment or variant of any of these sequences. Accordingly, SEQ ID NOs: 1, 2, 5, 7, 9, 11, 13, 15, 17, 19, 21, 23, 25, 27, 242, 244, 246, 257, 258-280 of WO2017070622 and the corresponding disclosure relating thereto are herewith incorporated by reference.

[0840] In other embodiments, the at least one coding sequence of the at least one nucleic acid of component B (in particular, component B-3a) comprises or consists at least one nucleic acid sequence encoding a RSV antigen, the nucleic acid being identical or at least 70%, 80%, 85%, 86%, 87%, 88%, 89%, 90%, 91%, 92%, 93%, 94%, 95%, 96%, 97%, 98%, or 99% identical to SEQ ID NOs: 96-99 of published patent application WO2017172890 or a fragment or a fragment or variant of any of these sequences. Accordingly, SEQ ID NOs: 96-99 of WO2017172890 and the corresponding disclosure relating thereto are herewith incorporated by reference.

[0841] In preferred embodiments, the at least one coding sequence of the at least one nucleic acid of component B (in particular component B-3a) comprises or consists of a nucleic acid sequence encoding an RSV antigen, the nucleic acid comprising or consisting of a nucleic acid sequence being identical or at least 70%, 80%, 85%, 86%, 87%, 88%, 89%, 90%, 91%, 92%, 93%, 94%, 95%, 96%, 97%, 98%, or 99% identical to any one of the nucleic acid sequence selected from SEQ ID NOs: 14552-14571, 14572-14611 or a fragment or variant of any of these sequences. Further information regarding said nucleic acid sequences is also provided in Table 11 (Column C-F), Table 12, and under <223> identifier of the ST.25 sequence listing of respective sequence SEQ ID NOs.

[0842] In preferred embodiments, the at least one coding sequence of the nucleic acid of component B (in particular of component B-3) is a codon modified coding sequence as defined herein, wherein the amino acid sequence, that is the RSV peptide or protein, encoded by the at least one codon modified coding sequence is preferably not being modified compared to the amino acid sequence encoded by the corresponding wild type or reference coding sequence. In particularly preferred embodiments, the at least one coding sequence of the nucleic acid component B (in particular of component B-3) is a codon modified coding sequence, wherein the codon modified coding sequence is selected a G/C optimized coding sequence, a human codon usage adapted coding sequence, or a G/C modified coding sequence.

[0843] Preferred nucleic acid sequences of component B (in particular of component B-3a) including particularly preferred mRNA sequences, are provided in Table 12 (column C and D). Therein, each row represents a specific suitable RSV construct of the invention (compare with Table 11), wherein the description of the RSV construct is indicated in column A of Table 12 and the SEQ ID NOs of the amino acid sequence of the respective RSV virus construct is provided in column B. The corresponding SEQ ID NOs of the coding sequences encoding the respective RSV constructs are provided in Table 11. Further information is provided under <223> identifier of the respective SEQ ID NOs in the sequence listing.

TABLE 12
Nucleic acid, preferably mRNA constructs encoding RSV antigens

| A | B | C | D |
|---|---|---|---|
| HRSV-A/RSVA/Homo sapiens/USA/ | 14542 | 14572, 14582 | 14592, 14602 |
| 84I-215A-01/1984 fusion glycoprotein (F0) | | | |
| HRSV-A/A2 fusion glycoprotein (F0) | 14543 | 14573, 14583 | 14593, 14603 |
| HRSV-A/A2 fusion glycoprotein (F-del) | 14544 | 14574, 14584 | 14594, 14604 |
| HRSV-A/A2 fusion glycoprotein (F0_DSCav1) | 14545 | 14575, 14585 | 14595, 14605 |
| HRSV-A/A2 fusion glycoprotein (F-del_DSCav1) | 14546 | 14576, 14586 | 14596, 14606 |
| HRSV-A/A2 fusion glycoprotein (F_DSCav1_mut4) | 14547 | 14577, 14587 | 14597, 14607 |
| HRSV-A/A2 fusion glycoprotein (F-del_DSCav1_mut4) | 14548 | 14578, 14588 | 14598, 14608 |
| HRSV-A/A2 fusion glycoprotein (F_DSCav1_mut5) | 14549 | 14579, 14589 | 14599, 14609 |
| HRSV-A/A2 fusion glycoprotein (F-del_DSCav1_mut5) | 14550 | 14580, 14590 | 14600, 14610 |
| HRSV-A/A2 matrix protein (M2-1) | 14551 | 14581, 14591 | 14601, 14611 |

[0844] In preferred embodiments, the at least one nucleic acid of component B (in particular component B-3a) comprises or consists of a nucleic acid sequence encoding an RSV antigen which is identical or at least 70%, 80%, 85%, 86%, 87%, 88%, 89%, 90%, 91%, 92%, 93%, 94%, 95%, 96%, 97%, 98%, or 99% identical to a nucleic acid sequence selected from SEQ ID NOs: 14572-14611, or a fragment or variant of any of these sequences. Further information regarding respective nucleic acid sequences is provided under <223> identifier of the respective SEQ ID NO in the sequence listing, and in Table 12. Optionally, said nucleic acid sequences comprise a cap1 structure as defined herein, and/or at least one, preferably all uracil nucleotides in said RNA sequences are replaced by pseudouridine (ψ) nucleotides and/or N1-methylpseudouridine (m1ψ) nucleotides

[0845] In further embodiments, the at least one nucleic acid of component B (in particular component B-3) comprises or consists of a nucleic acid sequence encoding an RSV antigen which is identical or at least 70%, 80%, 85%, 86%, 87%, 88%, 89%, 90%, 91%, 92%, 93%, 94%, 95%, 96%, 97%, 98%, or 99% identical to a nucleic acid sequence selected from the group consisting of SEQ ID NOs: 78-482, 493-897, 907-1266, 1276-1635, 1645-2004, 2014-2373, 2383-2742, 2752-3111, 3121-3480, 3490-3849, 3859-4218, 4228-4587, 4597-4956, 4966-5325, 5335-5694, 5704-6063, 6073-6432, 6442-6801, 6811-7170, 7180-7539, 7549-7908, 7918-8277, 8278, 21415-21480, 21561-21626, 11735-12094, 12104-12463, 12473-12832, 12842-13201, 13949-14308, 14318-14677, 14687-15046, 15056-15415, 15425-15784, 15794-16153, 13211-13570, 13580-13939, 16163-16522, 16532-16891, 16901-17260, 17270-17629, 17639-17998, 18008-18367, 18377-18736, 18746-19105, 19115-19474, 19484-19843, 21489-21552, 21635-21698 of published PCT application WO2019202035 or a fragment or variant of any of these sequences. Additional information regarding each of these suitable nucleic acid sequences may also be derived from the sequence listing of WO2019202035, in particular from the details provided therein under identifier <223> in the sequence listing of WO2019202035, or from Table 5A, 5B, 6A, 6B in WO2019202035. Optionally, said nucleic acid sequences comprise a cap1 structure as defined herein, and/or at least one, preferably all uracil nucleotides in said RNA sequences are replaced by pseudouridine (ψ) nucleotides and/or N1-methylpseudouridine (m1 ψ) nucleotides

[0846] In various embodiments, component B, in particular component B-3a as defined herein, may comprise a plurality or at least more than one of the nucleic acid sequences as defined herein. In embodiment, component B of the pharmaceutical composition may comprise at least 2, 3, 4, 5, 6, 7, 8, 9, 10 or even more different nucleic acid sequences as defined herein each encoding at least one antigenic peptide or protein derived from genetically the same RSV or a fragment or variant thereof.

[0847] In various embodiments, component B, in particular component B-3 as defined herein, may comprise a plurality or at least more than one of the nucleic acid sequences as defined herein. In embodiment, component B of the pharmaceutical composition may comprise at least 2, 3, 4, 5, 6, 7, 8, 9, 10 or even more different nucleic acid sequences as defined herein each encoding at least one antigenic peptide or protein derived from genetically distinct RSV or a fragment or variant thereof. Particularly, said (genetically) distinct RSV expresses at least one different protein, peptide or polyprotein, wherein the at least one different protein, peptide or polyprotein preferably differs in at least one amino acid.

[0848] In some embodiments, component B (in particular component B-3a) comprises at least 1, 2, 3, 4, 5, 6, 7, 8, 9, 10 or even more further nucleic acid, e.g. DNA or RNA constructs encoding RSV antigens selected from glycoprotein G, short hydrophobic protein SH, matrix protein M, nucleoprotein N, large polymerase L, M2-1 protein, M2-2 protein, phosphoprotein P, non-structural protein NS1 or non-structural protein NS2, or any combination thereof.

[0849] According to preferred embodiments, component B (in particular component B-3a) comprises at least one, two or three further nucleic acid sequences comprising at least one coding sequence encoding at least one antigenic peptide or protein selected or derived from RSV matrix protein M, nucleoprotein N, M2-1 protein, and/or phosphoprotein P or combinations thereof, preferably selected from M2-1.

[0850] Accordingly, in some embodiments, component B may comprise at least one nucleic acid encoding an RSV F peptide or protein as defined above, and, additionally, at least one further nucleic acid comprising at least one coding sequence encoding at least one antigenic peptide or protein derived from RSV selected from matrix protein M, nucleoprotein N, M2-1 protein, and/or phosphoprotein P or combinations thereof.

[0851] The addition of a further nucleic acid comprising at least one coding sequence encoding at least one antigenic peptide or protein derived from RSV M, N, M2-1, and/or phosphoprotein P (or combinations thereof) is particularly advantageous to e.g. promote a T-cell immune response.

[0852] In preferred embodiments, the composition of the second aspect may suitably comprise at least one artificial RNA of the first aspect encoding RSF F, at least one further artificial RNA comprising at least one coding sequence encoding at least one antigenic peptide or protein derived from RSV M, at least one further artificial RNA comprising at least one coding sequence encoding at least one antigenic peptide or protein derived from RSV N, at least one further artificial RNA comprising at least one coding sequence encoding at least one antigenic peptide or protein derived from RSV P, and at least one further artificial RNA comprising at least one coding sequence encoding at least one antigenic peptide or protein derived from RSV M2-1.

[0853] In preferred, the coding sequence of the further nucleic acid of component B (in particular B-3a) encodes at least one of the amino acid sequences being identical or at least 70%, 80%, 85%, 86%, 87%, 88%, 89%, 90%, 91%, 92%, 93%, 94%, 95%, 96%, 97%, 98%, or 99% identical to any one of SEQ ID NOs: 9684, 10053-10133, 10134, 10503-10636, 10637, 11006-11182, 11183, 11552-11725, 19844, 20213, 20582, 20951 of published PCT application WO2019202035, or a fragment or variant of any of these sequences. Accordingly, SEQ ID NOs: 9684, 10053-10133, 10134, 10503-10636, 10637, 11006-11182, 11183, 11552-11725, 19844, 20213, 20582, 20951 of WO2019202035, and the disclosure relating to these sequences, are herewith incorporated by reference. Additional information regarding each of these suitable amino acid sequences encoding RSV proteins may also be derived from the sequence listing of WO2019202035, in particular from the details provided therein under identifier <223> as explained in the following.

[0854] In further embodiments, the coding sequence of the further nucleic acid encodes at least one antigenic peptide or protein as defined herein and additionally a heterologous secretory signal sequence or heterologous secretory signal peptide. The heterologous secretory signal sequence may increase the secretion of the encoded antigenic peptide or protein.

[0855] In preferred embodiments, the at least one coding sequence of the at least one further nucleic acid sequence of component B (in particular component B-3a) comprises or consists of a nucleic acid sequence encoding an RSV antigen, the nucleic acid comprising or consisting of a nucleic acid sequence being identical or at least 70%, 80%, 85%, 86%, 87%, 88%, 89%, 90%, 91%, 92%, 93%, 94%, 95%, 96%, 97%, 98%, or 99% identical to any one of the nucleic acid sequences selected from SEQ ID NOs: 9685-9692, 10135-10142, 10638-10645, 11184-11119, 19845-19852, 20214-20221, 20583-20590, 20952-20959, 21385-21388, 21411-21414 of published PCT application WO2019202035, or a fragment or variant of any of these sequences. Accordingly, SEQ ID NOs: 9685-9692, 10135-10142, 10638-10645, 11184-11119, 19845-19852, 20214-20221, 20583-20590, 20952-20959, 21385-21388, 21411-21414 of WO2019202035, and the disclosure relating to these sequences, are herewith incorporated by reference. Additional information regarding each of these suitable amino acid sequences encoding RSV proteins may also be derived from the sequence listing of WO2019202035, in particular from the details provided therein under identifier <223> as explained in the following. In that context, respective preferred RSV polypeptide, nucleic acid, and mRNA sequences are provided in Table 7A of published PCT application WO2019202035. The full content of Table 7A of WO2019202035 is herewith incorporated by reference.

[0856] In preferred embodiments, the at least one coding sequence of the at least one further nucleic acid sequence of component B (in particular component B-3a) comprises or consists of a nucleic acid sequence encoding an RSV antigen, the nucleic acid comprising or consisting of a nucleic acid sequence being identical or at least 70%, 80%, 85%, 86%, 87%, 88%, 89%, 90%, 91%, 92%, 93%, 94%, 95%, 96%, 97%, 98%, or 99% identical to any one of the nucleic acid sequences selected from SEQ ID NOs: 9693-10052, 10143-10502, 10646-11005, 11192-11551, 19853-20212, 20222-20581, 20591-20950, 20960-21319, 21481-21488, 21627-21634, 21553-21560, 21699-21706 of published PCT application WO2019202035, or a fragment or variant of any of these sequences. Accordingly SEQ ID NOs: 9693-10052, 10143-10502, 10646-11005, 11192-11551, 19853-20212, 20222-20581, 20591-20950, 20960-21319, 21481-21488, 21627-21634, 21553-21560, 21699-21706 of WO2019202035, and the disclosure relating to these sequences, are herewith incorporated by reference. Additional information regarding each of these suitable amino acid sequences encoding RSV proteins may also be derived from the sequence listing of WO2019202035, in particular from the details provided therein under identifier <223> as explained in the following. In that context, respective preferred RSV polypeptide, nucleic acid, and mRNA sequences are provided in Table 7A of published PCT application WO2019202035. The full content of Table 7A of WO2019202035 is herewith incorporated by reference.

[0857] Suitably, component B, in particular component B-3a comprises nucleic acid sequences encoding at least two different RSV antigens, wherein suitable combinations are provided in Table 7B of WO2019202035, the full content of Table 7A of WO2019202035 is herewith incorporated by reference.

[0858] In preferred embodiments, component B-3a comprises at least one nucleic acid encoding at least one antigenic peptide or protein that is selected or derived from at least one RSV, or an immunogenic fragment or immunogenic variant thereof, wherein said component B-3a is to be, preferably, administered intramuscularly or intradermal.

[0859] Preferably, intramuscular or intradermal administration of said component B-3a results in expression of the encoded RSV antigen construct in a subject. In embodiments where the nucleic acid is an RNA, administration of component B-3a results in translation of the RNA and to a production of the encoded RSV antigen in a subject. In embodiments where the nucleic acid is a DNA (e.g. plasmid DNA, adenovirus DNA), administration of said composition results in transcription of the DNA into RNA, and to a subsequent translation of the RNA into the encoded RSV antigen in a subject.

[0860] In preferred embodiments, administration of component B-3a elicits antigen-specific immune responses comprising T-cell responses and/or B-cell responses against the encoded RSV antigens provided by the at least one nucleic acid of component B-3a.

[0861] Preferably, the component B-3a is suitable for a vaccine, in particular, suitable for a RSV vaccine, preferably a combination vaccine of the invention.

[0862] In embodiments, the nucleic acid as comprised in component B-3a as defined herein is provided in an amount of about 100 ng to about 500 ug, in an amount of about 1 ug to about 200 ug, in an amount of about 1 ug to about 100 ug, in an amount of about 5 ug to about 100 ug, preferably in an amount of about 10 ug to about 50 ug, specifically, in an amount of about 1 ug, 2 ug, 3 ug, 4 ug, 5 ug, 6 ug, 7 ug, 8 ug, 9 ug, 10 ug, 11 ug, 12 ug, 13 ug, 14 ug, 15 ug, 20 ug, 25 ug, 30 ug, 35 ug, 40 ug, 45 ug, 50 ug, 55 ug, 60 ug, 65 ug, 70 ug, 75 ug, 80 ug, 85 ug, 90 ug, 95 ug or 100 ug.

[0863] In case component B-3a comprises a plurality or at least more than one of the nucleic acid species as defined herein, the amount of nucleic acid for each nucleic acid species is provided in an amount of about 100 ng to about 500 ug, in an amount of about 1 ug to about 200 ug, in an amount of about 1 ug to about 100 ug, in an amount of about 5 ug to about 100 ug, preferably in an amount of about 10 ug to about 50 ug, specifically, in an amount of about 1 ug, 2 ug, 3 ug, 4 ug, 5 ug, 6 ug, 7 ug, 8 ug, 9 ug, 10 ug, 11 ug, 12 ug, 13 ug, 14 ug, 15 ug, 20 ug, 25 ug, 30 ug, 35 ug, 40 ug, 45 ug, 50 ug, 55 ug, 60 ug, 65 ug, 70 ug, 75 ug, 80 ug, 85 ug, 90 ug, 95 ug or 100 ug.

[0864] In some embodiments, the amount of nucleic acid for each nucleic acid species is essentially equal in mass. In other embodiments, the amount of nucleic acid for each nucleic acid species is selected to be equimolar.

[0865] Component B-3b: Human Metapneumovirus:

[0866] In preferred embodiments, the at least one further virus of component B is selected from at least one Metapneumovirus of the Pneumoviridae virus family (also herein referred to as component B-3b). Suitably, the Metapneumovirus is selected from human Metapneumovirus (hMPV).

[0867] Human metapneumovirus (hMPV) is a negative-sense single-stranded RNA virus of the family Pneumoviridae and is closely related to the Avian metapneumovirus (AMPV) subgroup C. It was isolated for the first time in 2001. It is the second most common cause after Human orthopneumovirus (RSV) of lower respiratory infection in young children. hMPV is nearly as common and as severe as influenza in older adults. hMPV is associated with more severe disease in people with asthma and adults with chronic obstructive pulmonary disease (COPD). Numerous outbreaks of hMPV have been reported in long-term care facilities for children and adults, causing fatalities.

[0868] In the context of the invention, any Human metapneumovirus (hMPV; NCBI Taxonomy ID: 162145) may be selected, irrespective of genotype, species, strain, isolate, or serotype. Non-limiting examples of strains of hMPV for use as provided herein include CAN98-75 (CAN75) and CAN97-83 (CAN83) hMPV strains, hMPV A1, A2, B 1 or B2 strain, hMPV isolate TN/92-4 (e.g., SEQ ID NO: 1 and 5 of WO2017070626), a hMPV isolate NL/1/99 (e.g., SEQ ID NO: 2 and 6 of WO2017070626), a hMPV isolate PER/CFI0497/2010/B (e.g., SEQ ID NO: 3 and 7 of WO2017070626), or hMPV isolate 00-1.

[0869] In some embodiments, the Metapneumovirus is selected from hMPV A1, A2, B 1 or B2 strain, CAN98-75 (CAN75) hMPV strain, CAN97-83 (CAN83) hMPV, hMPV isolate TN/92-4 (e.g., SEQ ID NO: 1 and 5 of WO2017070626), hMPV isolate NL/1/99 (e.g., SEQ ID NO: 2 and 6 of WO2017070626), hMPV isolate PER/CFI0497/2010/B (e.g., SEQ ID NO: 3 and 7 of WO2017070626). In some embodiments, the Metapneumovirus is selected from HMPV/TN/92-4, HMPV/NL/1/99, HMPV/Sabana, or HMPV/00-1

[0870] In some embodiments, the at least one antigenic peptide or protein encoded by the at least one nucleic acid of component B comprises or consists at least one peptide or protein selected or derived from at least one hMPV F protein, G protein, M protein, P protein, N protein and/or SH protein, or an immunogenic fragment or immunogenic variant thereof.

[0871] In preferred embodiments, the at least one antigenic peptide or protein of component B (in particular component B-3b) is selected or derived from hMPV F protein, or an immunogenic fragment or variant thereof.

[0872] In preferred embodiments, the at least one antigenic peptide or protein selected or derived from hMPV F protein is a full-length F protein (F0) or an F protein with deleted C-terminus (F-del), or an immunogenic fragment or immunogenic variant thereof.

[0873] In preferred embodiments, the hMPV F protein is selected or derived from a pre-fusion stabilized F protein (F_stab) comprising at least one pre-fusion stabilizing mutation.

[0874] According to various preferred embodiments, the nucleic acid of component B encodes at least one antigenic peptide or protein from hMPV as defined herein, and, additionally, at least one heterologous peptide or protein element.

[0875] Suitably, the at least one heterologous peptide or protein element may promote or improve secretion of the encoded hMPV antigenic peptide or protein (e.g. via secretory signal sequences), promote or improve anchoring of the encoded hMPV antigenic peptide or protein in the plasma membrane (e.g. via transmembrane elements), promote or improve formation of antigen complexes (e.g. via multimerization domains or antigen clustering elements), or promote or improve virus-like particle formation (VLP forming sequence). In addition, the nucleic acid of component B (in particular, component B-3b) may additionally encode peptide linker elements, self-cleaving peptides, immunologic adjuvant sequences or dendritic cell targeting sequences.

[0876] Preferred antigenic peptide or proteins selected or derived from a hMPV as defined above are provided in Table 13 (rows 1 to 29). Therein, each row 1 to 29 corresponds to a suitable hMPV constructs. Column A of Table 13 provides a short description of suitable hMPV antigen constructs. Column B of Table 13 provides protein (amino acid) SEQ ID NOs of respective hMPV antigen constructs. Column D of Table 13 provides SEQ ID NO of the corresponding G/C optimized nucleic acid coding sequences (opt1, gc). Column E of Table 13 provides SEQ ID NO of the corresponding human codon usage adapted nucleic acid coding sequences (opt 3, human).

[0877] Notably, the description of the invention explicitly includes the information provided under <223> identifier of the ST.25 sequence listing of the present application. Preferred nucleic acid constructs comprising coding sequences of Table 13, e.g. mRNA sequences comprising the coding sequences of Table 13 are provided in Table 14.

TABLE 13
Preferred hMPV constructs (amino acid sequences
and nucleic acid coding sequences):

| row | A | B | D | E |
|---|---|---|---|---|
| 1 | HMPV/TN/92-4 fusion glycoprotein (F0) | 14626 | 14650, | 14674 |
| | | | 26978 | |
| 2 | HMPV/TN/92-4 fusion glycoprotein (variant) | 14627 | 14651 | 14675 |
| 3 | HMPV/TN/92-4 fusion glycoprotein (variant) | 14628 | 14652 | 14676 |
| 4 | HMPV/TN/92-4 fusion glycoprotein (variant) | 14629 | 14653 | 14677 |
| 5 | HMPV/TN/92-4 fusion glycoprotein (variant) | 14630 | 14654 | 14678 |
| 6 | HMPV/TN/92-4 fusion glycoprotein (variant) | 14631 | 14655 | 14679 |
| 7 | HMPV/TN/92-4 fusion glycoprotein (variant) | 14632 | 14656 | 14680 |
| 8 | HMPV/TN/92-4 fusion glycoprotein (variant) | 14633 | 14657 | 14681 |
| 9 | HMPV/TN/92-4 fusion glycoprotein (variant) | 14634 | 14658 | 14682 |
| 10 | HMPV/TN/92-4 fusion glycoprotein (variant) | 14635 | 14659 | 14683 |
| 11 | HMPV/TN/92-4 fusion glycoprotein (variant) | 14636 | 14660 | 14684 |
| 12 | HMPV/TN/92-4 fusion glycoprotein (variant) | 14637 | 14661 | 14685 |
| 13 | HMPV/TN/92-4 fusion glycoprotein (variant) | 14638 | 14662 | 14686 |
| 14 | HMPV/TN/92-4 fusion glycoprotein (variant) | 14639 | 14663 | 14687 |
| 15 | HMPV/TN/92-4 fusion glycoprotein (variant) | 14640 | 14664 | 14688 |
| 16 | HMPV/TN/92-4 fusion glycoprotein (variant) | 14641 | 14665 | 14689 |
| 17 | HMPV/TN/92-4 fusion glycoprotein (variant) | 14642 | 14666 | 14690 |
| 18 | HMPV/TN/92-4 fusion glycoprotein (variant) | 14643 | 14667 | 14691 |
| 19 | HMPV/TN/92-4 fusion glycoprotein (variant) | 14644 | 14668 | 14692 |
| 20 | HMPV/TN/92-4 fusion glycoprotein (variant) | 14645 | 14669 | 14693 |
| 21 | HMPV/TN/92-4 fusion glycoprotein (variant) | 14646 | 14670 | 14694 |
| 22 | HMPV/TN/92-4 fusion glycoprotein (variant) | 14647 | 14671 | 14695 |
| 23 | HMPV/NL/1/99 fusion glycoprotein (F0) | 14648 | 14672, | 14696 |
| | | | 26972 | |
| 24 | HMPV/Sabana fusion glycoprotein (F0) | 14649 | 14673 | 14697 |
| 25 | HMPV/NL/1/99 fusion glycoprotein (variant) | 26967 | 26973 | |
| 26 | HMPV/NL/1/99 fusion glycoprotein (variant) | 26968 | 26974 | |
| 27 | HMPV/00-1 fusion glycoprotein (F0) | 26969 | 26975 | |
| 28 | HMPV/00-1 fusion glycoprotein (variant) | 26970 | 26976 | |
| 29 | HMPV/00-1 fusion glycoprotein (variant) | 26971 | 26977 | |

[0878] In preferred embodiments, the at least one antigenic peptide or protein selected or derived from at least one hMPV encoded by the at least one nucleic acid of component B (in particular component B-3b) comprises or consists of at least one of the amino acid sequences being identical or at least 70%, 80%, 85%, 86%, 87%, 88%, 89%, 90%, 91%, 92%, 93%, 94%, 95%, 96%, 97%, 98%, or 99% identical to any one of SEQ ID NOs: 14626-14649, 26966-26971 or an immunogenic fragment or immunogenic variant of any of these. Further information regarding said amino acid sequences is also provided in Table 13 (see rows 1 to 29 of Column A and B), and under <223> identifier of the ST.25 sequence listing of respective sequence SEQ ID NOs.

[0879] In further embodiments, the at least one antigenic peptide or protein selected or derived from hMPV encoded by the at least one nucleic acid of component B (in particular component B-3b) comprises or consists of at least one of the amino acid sequences being identical or at least 50%, 60%, 70%, 80%, 85%, 86%, 87%, 88%, 89%, 90%, 91%, 92%, 93%, 94%, 95%, 96%, 97%, 98%, or 99% identical to any one of SEQ ID NOs: 5-8 of published PCT patent application WO2017070626 or an immunogenic fragment or immunogenic variant of any of these. Accordingly, SEQ ID NOs: 5-8 of WO2017070626, and the corresponding disclosure relating thereto, are herewith incorporated by reference.

[0880] Further hMPV antigens may also be derived from or selected proteins identifiable by GenBank Accession Numbers provided in Table 4 of WO2017070626. The full content of Table 4 of WO2017070626 herewith incorporated by reference.

[0881] According to preferred embodiments, the nucleic acid of component B (in particular component B-3b) comprises at least one coding sequence encoding at least one antigenic peptide or protein derived from hMPV as defined above, or fragments and variants thereof. In that context, any coding sequence encoding at least one hMPV antigenic protein as defined herein, or fragments and variants thereof may be understood as suitable coding sequence of component B.

[0882] In preferred embodiments, the nucleic acid of component B (in particular component B-3b) comprise or consist of at least one coding sequence encoding at least one antigenic peptide or protein selected or derived from a hMPV as defined herein, preferably encoding any one of SEQ ID NOs: 14626-14649, 26966-26971; SEQ ID NOs: 5-8 of WO2017070626, or fragments of variants thereof. It has to be understood that, on nucleic acid level, any sequence (DNA or RNA sequence) which encodes an amino acid sequences being identical or at least 70%, 80%, 85%, 86%, 87%, 88%, 89%, 90%, 91%, 92%, 93%, 94%, 95%, 96%, 97%, 98%, or 99% identical to any one of SEQ ID NOs: 14626-14649, 26966-26971; SEQ ID NOs: 5-8 of WO2017070626, or fragments or variants thereof, may be selected and may accordingly be understood as suitable coding sequence of the invention. Further information regarding said amino acid sequences is also provided in Table 13, Table 14, and under <223> identifier of the ST.25 sequence listing of respective sequence SEQ ID NOs.

[0883] In preferred embodiments, the at least one coding sequence of the at least one nucleic acid of component B (in particular component B-3b) comprises or consists of a nucleic acid sequence encoding an hMPV antigen comprising or consisting of a nucleic acid sequence being identical or at least 70%, 80%, 85%, 86%, 87%, 88%, 89%, 90%, 91%, 92%, 93%, 94%, 95%, 96%, 97%, 98%, or 99% identical to any one of the nucleic acid sequences selected from SEQ ID NOs: 14650-14697, 14698-14793, 26972-26978, 26979-26991, or a fragment or variant of any of these sequences. Further information regarding said nucleic acid sequences is also provided in Table 13, Table 14, and under <223> identifier of the ST.25 sequence listing of respective sequence SEQ ID NOs.

[0884] In further embodiments, the nucleic acid of component B (in particular component B-3b) comprises a coding sequence that comprises at least one of the nucleic acid sequences encoding a hMPV antigen being identical or at least 70%, 80%, 85%, 86%, 87%, 88%, 89%, 90%, 91%, 92%, 93%, 94%, 95%, 96%, 97%, 98%, or 99% identical to any one of the nucleic acid sequences selected from SEQ ID NOs: 1-4, 57-60 of published PCT patent application WO2017070626 or a fragment or a fragment or variant of any of these sequences. Accordingly, SEQ ID NOs: 1-4, 57-60 of WO2017070626, and the corresponding disclosure relating thereto, are herewith incorporated by reference.

[0885] In preferred embodiments, the at least one coding sequence of the nucleic acid of component B (in particular component B-3b) is a codon modified coding sequence as defined herein, wherein the amino acid sequence, that is the hMPV peptide or protein, encoded by the at least one codon modified coding sequence, is preferably not being modified compared to the amino acid sequence encoded by the corresponding wild type or reference coding sequence.

[0886] In particularly preferred embodiments, the at least one coding sequence of the nucleic acid component B (in particular component B-3b) is a codon modified coding sequence, wherein the codon modified coding sequence is selected a G/C optimized coding sequence, a human codon usage adapted coding sequence, or a G/C modified coding sequence.

[0887] Preferred nucleic acid sequences of component B (in particular component B-3b), including particularly preferred mRNA sequences, are provided in Table 14 (column C and D). Therein, each row represents a specific suitable hMPV construct of the invention (compare with Table 13), wherein the description of the hMPV construct is indicated in column A of Table 14 and the SEQ ID NOs of the amino acid sequence of the respective hMPV construct is provided in column B. The corresponding SEQ ID NOs of the coding sequences encoding the respective hMPV constructs are provided in in Table 13. Further information is provided under <223> identifier of the respective SEQ ID NOs in the sequence listing.

TABLE 14
Nucleic acid, preferably mRNA constructs encoding hMPV antigens

| A | B | C | D |
|---|---|---|---|
| HMPV/TN/92-4 fusion glycoprotein (F0) | 14626 | 14698, 14722 | 14746, 14770 |
| HMPV/TN/92-4 fusion glycoprotein (variant) | 14627 | 14699, 14723 | 14747, 14771 |
| HMPV/TN/92-4 fusion glycoprotein (variant) | 14628 | 14700, 14724 | 14748, 14772 |
| HMPV/TN/92-4 fusion glycoprotein (variant) | 14629 | 14701, 14725 | 14749, 14773 |
| HMPV/TN/92-4 fusion glycoprotein (variant) | 14630 | 14702, 14726 | 14750, 14774 |
| HMPV/TN/92-4 fusion glycoprotein (variant) | 14631 | 14703, 14727 | 14751, 14775 |
| HMPV/TN/92-4 fusion glycoprotein (variant) | 14632 | 14704, 14728 | 14752, 14776 |
| HMPV/TN/92-4 fusion glycoprotein (variant) | 14633 | 14705, 14729 | 14753, 14777 |
| HMPV/TN/92-4 fusion glycoprotein (variant) | 14634 | 14706, 14730 | 14754, 14778 |
| HMPV/TN/92-4 fusion glycoprotein (variant) | 14635 | 14707, 14731 | 14755, 14779 |
| HMPV/TN/92-4 fusion glycoprotein (variant) | 14636 | 14708, 14732 | 14756, 14780 |
| HMPV/TN/92-4 fusion glycoprotein (variant) | 14637 | 14709, 14733 | 14757, 14781 |
| HMPV/TN/92-4 fusion glycoprotein (variant) | 14638 | 14710, 14734 | 14758, 14782 |
| HMPV/TN/92-4 fusion glycoprotein (variant) | 14639 | 14711, 14735 | 14759, 14783 |
| HMPV/TN/92-4 fusion glycoprotein (variant) | 14640 | 14712, 14736 | 14760, 14784 |
| HMPV/TN/92-4 fusion glycoprotein (variant) | 14641 | 14713, 14737 | 14761, 14785 |
| HMPV/TN/92-4 fusion glycoprotein (variant) | 14642 | 14714, 14738 | 14762, 14786 |
| HMPV/TN/92-4 fusion glycoprotein (variant) | 14643 | 14715, 14739 | 14763, 14787 |
| HMPV/TN/92-4 fusion glycoprotein (variant) | 14644 | 14716, 14740 | 14764, 14788 |
| HMPV/TN/92-4 fusion glycoprotein (variant) | 14645 | 14717, 14741 | 14765, 14789 |
| HMPV/TN/92-4 fusion glycoprotein (variant) | 14646 | 14718, 14742 | 14766, 14790 |
| HMPV/TN/92-4 fusion glycoprotein (variant) | 14647 | 14719, 14743 | 14767, 14791 |
| HMPV/NL71/99 fusion glycoprotein (F0) | 14643 | 14720, 14744, | 14768, 14792, |
| | | 26979 | 26985 |
| HMPV/Sabana fusion glycoprotein (F0) | 14649 | 14721, 14745 | 14769, 14793 |
| HMPV/NL71/99 fusion glycoprotein (variant) | 26967 | 26980 | 26986 |
| HMPV/NL71/99 fusion glycoprotein (variant) | 26968 | 26981 | 26987 |
| HMPV/00-1 fusion glycoprotein (F0) | 26969 | 26982 | 26988 |
| HMPV/00-1 fusion glycoprotein (variant) | 26970 | 26983 | 26989 |
| HMPV/00-1 fusion glycoprotein (variant) | 26971 | 26984 | 26990 |

[0888] In preferred embodiments, the at least one nucleic acid of component B (in particular component B-3b) comprises or consists of a nucleic acid sequence encoding an hMPV antigen which is identical or at least 70%, 80%, 85%, 86%, 87%, 88%, 89%, 90%, 91%, 92%, 93%, 94%, 95%, 96%, 97%, 98%, or 99% identical to a nucleic acid sequence selected from the group consisting of SEQ ID NOs: 14698-14793, 26979-26991 or a fragment or variant of any of these sequences. Further information regarding respective nucleic acid sequences is provided under <223> identifier of the respective SEQ ID NO in the sequence listing and in Table 14 (Column C and D). Optionally, said nucleic acid sequences comprise a cap1 structure as defined herein, and/or at least one, preferably all uracil nucleotides in said RNA sequences are replaced by pseudouridine (ψ) nucleotides and/or N1-methylpseudouridine (m1ψ) nucleotides

[0889] In further embodiments, the nucleic acid of component B (in particular component B-3b), preferably the RNA, comprises or consists of a nucleic acid sequence encoding a hMPV antigen which is identical or at least 70%, 80%, 85%, 86%, 87%, 88%, 89%, 90%, 91%, 92%, 93%, 94%, 95%, 96%, 97%, 98%, or 99% identical to a nucleic acid sequence selected from SEQ ID NOs: 57-60 of WO2017070626 or a fragment or variant of any of these sequences. Optionally, said nucleic acid sequences comprise a cap1 structure as defined herein, and/or at least one, preferably all uracil nucleotides in said RNA sequences are replaced by pseudouridine (ψ) nucleotides and/or N1-methylpseudouridine (m1ψ) nucleotides

[0890] In embodiments, component B (in particular component B-3b) comprises a plurality or at least more than one of the nucleic acid species comprising at least one coding sequence encoding at least one antigenic peptide or protein selected or derived from at least one hMPV, or an immunogenic fragment or immunogenic variant thereof, e.g. DNA or RNA species as defined herein. Preferably, component B (in particular component B-3b) as defined herein comprises 2, 3, 4, 5, 6, 7, 8, 9, or 10 different nucleic acids each defined as defined herein.

[0891] In embodiments, component B (in particular component B-3b) may comprise at least 2, 3, 4, 5, 6, 7, 8, 9, 10 or even more different nucleic acid species, e.g. DNA or RNA, as defined herein, each encoding at least one antigenic peptide or protein derived from the same hMPV, or a fragment or variant thereof. Particularly, said (genetically) same hMPV expresses (essentially) the same repertoire of proteins or peptides, wherein all proteins or peptides have (essentially) the same amino acid sequence. Particularly, said (genetically) same hMPV expresses essentially the same proteins, peptides or polyproteins, wherein these protein, peptide or polyproteins preferably do not differ in their amino acid sequence(s).

[0892] In embodiments, component B (in particular component B-3b) comprises at least 2, 3, 4, 5, 6, 7, 8, 9, 10 or even more different nucleic acid species, e.g. DNA or RNA, as defined herein, each encoding at least one peptide or protein derived from a genetically distinct hMPV (e.g. a distinct hMPV isolate), or a fragment or variant thereof. The terms “distinct” or “distinct hMPV” as used throughout the present specification have to be understood as the difference between at least two respective hMPV (e.g. a distinct hMPV isolate), wherein the difference is manifested on the genome of the respective distinct hMPV. Particularly, said (genetically) distinct hMPV may express at least one distinct protein, peptide or polyprotein, wherein the at least one distinct protein, peptide or polyprotein differs in at least one amino acid.

[0893] In preferred embodiments, the component B-3b comprises at least one nucleic acid encoding at least one antigenic peptide or protein that is selected or derived from at least one hMPV, or an immunogenic fragment or immunogenic variant thereof, wherein said component B-3b is to be, preferably, administered intramuscularly or intradermal.

[0894] Preferably, intramuscular or intradermal administration of said component B-3b results in expression of the encoded hMPV antigen construct in a subject. In embodiments where the nucleic acid is an RNA, administration of component B-3b results in translation of the RNA and to a production of the encoded hMPV antigen in a subject. In embodiments where the nucleic acid is a DNA (e.g. plasmid DNA, adenovirus DNA), administration of said composition results in transcription of the DNA into RNA, and to a subsequent translation of the RNA into the encoded hMPV antigen in a subject.

[0895] In preferred embodiments, administration of component B-3b elicits antigen-specific immune responses comprising T-cell responses and/or B-cell responses against the encoded hMPV antigens provided by the at least one nucleic acid of component B-3b.

[0896] Preferably, the component B-3b is suitable for a vaccine, in particular, suitable for a hMPV vaccine, preferably a combination vaccine of the invention.

[0897] In embodiments, the nucleic acid as comprised in component B-3 as defined herein is provided in an amount of about 100 ng to about 500 ug, in an amount of about 1 ug to about 200 ug, in an amount of about 1 ug to about 100 ug, in an amount of about 5 ug to about 100 ug, preferably in an amount of about 10 ug to about 50 ug, specifically, in an amount of about 1 ug, 2 ug, 3 ug, 4 ug, 5 ug, 6 ug, 7 ug, 8 ug, 9 ug, 10 ug, 11 ug, 12 ug, 13 ug, 14 ug, 15 ug, 20 ug, 25 ug, 30 ug, 35 ug, 40 ug, 45 ug, 50 ug, 55 ug, 60 ug, 65 ug, 70 ug, 75 ug, 80 ug, 85 ug, 90 ug, 95 ug or 100 ug.

[0898] In case component B-3 comprises a plurality or at least more than one of the nucleic acid species as defined herein, the amount of nucleic acid for each nucleic acid species is provided in an amount of about 100 ng to about 500 ug, in an amount of about 1 ug to about 200 ug, in an amount of about 1 ug to about 100 ug, in an amount of about 5 ug to about 100 ug, preferably in an amount of about 10 ug to about 50 ug, specifically, in an amount of about 1 ug, 2 ug, 3 ug, 4 ug, 5 ug, 6 ug, 7 ug, 8 ug, 9 ug, 10 ug, 11 ug, 12 ug, 13 ug, 14 ug, 15 ug, 20 ug, 25 ug, 30 ug, 35 ug, 40 ug, 45 ug, 50 ug, 55 ug, 60 ug, 65 ug, 70 ug, 75 ug, 80 ug, 85 ug, 90 ug, 95 ug or 100 ug.

[0899] In some embodiments, the amount of nucleic acid for each nucleic acid species is essentially equal in mass. In other embodiments, the amount of nucleic acid for each nucleic acid species is selected to be equimolar.

[0900] Component B-4: Paramyxoviridae Virus

[0901] In preferred embodiments, the at least one further virus of component B is selected from at least one virus of the Paramyxoviridae virus family (“Paramyxovirus”).

[0902] It has to be understood that generic embodiments and features that have been described in paragraph “Component B” may also apply to a nucleic acid encoding a Paramyxoviridae antigenic peptide or protein.

[0903] Paramyxoviridae has four subfamilies, 17 genera, and 77 species, three genera of which are unassigned to a subfamily. Diseases associated with this family include measles, mumps, and respiratory tract infections.

[0904] In embodiments, any protein selected or derived from a Paramyxovirus may be used in the context of the invention and may be encoded by the coding sequence or the nucleic acid of component B (in particular, component B-4).

[0905] Suitable in the context of the invention are pathogenic Paramyxoviruses, including human parainfluenza viruses (hPIV) or Henipaviruses.

[0906] Component B-4a: Parainfluenzavirus (PIV):

[0907] In preferred embodiments, the at least one further virus of component B is selected from at least one Parainfluenza virus (PIV) of the Paramyxoviridae virus family, preferably a human Parainfluenzavirus (hPIV) of the Paramyxoviridae virus family (also herein referred to as component B-4a).

[0908] The human parainfluenza viruses (hPIV) are the second most common causes of respiratory tract disease in infants and children. hPIV viruses belong to the Respirovirus genus (NCBI Taxonomy ID: 186938). Parainfluenza viruses are also referred to as Respiroviruses. There are four types of hPIVs, known as HPIV-1, HPIV-2, HPIV-3 and HPIV-4. HPIV-1 and HPIV-2 may cause cold-like symptoms, along with croup in children. HPIV-3 is associated with bronchiolitis, bronchitis, and pneumonia. HPIV-4 is less common than the other types, and is known to cause mild to severe respiratory tract illnesses. In the context of the invention, any Parainfluenzavirus may be selected.

[0909] In the context of the invention, any Parainfluenzavirus, e.g. any hPIV may be selected, irrespective of genotype, species, strain, isolate, or serotype.

[0910] In embodiments, the at least one human hPIV is selected from a hPIV-1, a hPIV-2, a hPIV-3 or hPIV-4.

[0911] In embodiments, the at least one human hPIV may be selected from a hPIV-1 (alternative name, Human respirovirus 1, NCBI Taxonomy ID: 12730). In the context of the invention, hPIV-1 viruses may be selected from hPIV-1 (human/Washington/1957; NCBI Taxonomy ID: 11211), hPIV-1 (CI-14/83; NCBI Taxonomy ID: 31606), hPIV-1 (CI-5/73; NCBI Taxonomy ID: 31607), hPIV-1 (A1426/86-315/62M-753; NCBI Taxonomy ID: 36412), hPIV-1 (C35; NCBI Taxonomy ID: 31605), hPIV-1 (C39; NCBI Taxonomy ID: 11210), hPIV-1 (Washington/1964; NCBI Taxonomy ID: 188538).

[0912] In embodiments, the at least one human hPIV may be selected from a hPIV-3 (alternative name, Human respirovirus 3, NCBI Taxonomy ID: 11216). In the context of the invention, hPIV-3 viruses may be selected from hPIV-3 (AUS/124854/74; NCBI Taxonomy ID: 11218), hPIV-3 (NIH 47885; NCBI Taxonomy ID: 11217), hPIV-3 (TEX/12677/83; NCBI Taxonomy ID: 11221), hPIV-3 (TEX/545/80; NCBI Taxonomy ID: 11219), hPIV-3 (TEX/9305/82; NCBI Taxonomy ID: 11220), hPIV-3 (WASH/1511/73; NCBI Taxonomy ID: 11223), hPIV-3 (WASH/641/79; NCBI Taxonomy ID: 11222), hPIV-3 (Simian Agent 10; NCBI Taxonomy ID: 929831), hPIV-3 (HPIV3/Homo sapiens/PER/FLA4571/2008; NCBI Taxonomy ID: 11216), or hPIV-3 (HPIV3/USA/629-D01959/2007; NCBI Taxonomy ID: 11216).

[0913] In preferred embodiments, the at least one human hPIV is selected from a hPIV-3 virus as defined herein.

[0914] In preferred embodiments, the at least one antigenic peptide or protein encoded by the at least one nucleic acid of component B (in particular, component B-4a) comprises or consists at least one peptide or protein selected or derived from at least one PIV hemagglutinin-neuraminidase, fusion (F) glycoprotein, matrix protein (M), nucleocapsid protein (N), viral replicase (L), non-structural V protein, or an immunogenic fragment thereof.

[0915] PIV hemagglutinin-neuraminidase (PIV HN), a structural protein, is found on the viral envelope, where it is necessary for attachment and cell entry. It recognizes and binds to sialic acid-containing receptors on the host cell's surface. As a neuraminidase, HN removes sialic acid from virus particles, preventing self-aggregation of the virus, and promoting the efficient spread of the virus. Furthermore, HN promotes the activity of the fusion (F or F0) protein, contributing to the penetration of the host cell's surface.

[0916] PIV fusion protein (PIV F) is located on the viral envelope, where it facilitates the viral fusion and cell entry. The F protein is initially inactive, but proteolytic cleavage leads to its active forms, F1 and F2, which are linked by disulfide bonds. This occurs when the HN protein binds its receptor on the host cell's surface. During early phases of infection, the F glycoprotein mediates penetration of the host cell by fusion of the viral envelope to the plasma membrane. In later stages of the infection, the F protein facilitates the fusion of the infected cells with neighbouring uninfected cells, which leads to the formation of a syncytium and spread of the infection.

[0917] PIV matrix protein (PIV M) is found within the viral envelope and assists with viral assembly. It interacts with the nucleocapsid and envelope glycoproteins, where it facilitates the budding of progeny viruses through its interactions with specific sites on the cytoplasmic tail of the viral glycoproteins and nucleocapsid. It also plays a role in transporting viral components to the budding site.

[0918] PIV phosphoprotein (PIV P) and PIV large polymerase protein (L) are found in the nucleocapsid where they form part of the RNA polymerase complex. The L protein, a viral RNA-dependent RNA polymerase, facilitates genomic transcription, while the host ribosomes translate the viral mRNA into viral proteins.

[0919] PIV V is a non-structural protein that blocks IFN signalling in the infected cell, therefore acting as a virulence factor.

[0920] PIV nucleoprotein (N) encapsulates the genome in a ratio of 1 N per 6 ribonucleotides, protecting it from nucleases. The nucleocapsid (NC) has a helical structure. The encapsulated genomic RNA is termed the NC and serves as template for transcription and replication. During replication, encapsulation by PIV3 N is coupled to RNA synthesis and all replicative products are resistant to nucleases. PrV3 N homo-multimerizes to form the nucleocapsid and binds to viral genomic RNA. PrV3 N binds the P protein and thereby positions the polymerase on the template.

[0921] According to various preferred embodiments, the nucleic acid of component B encodes at least one antigenic peptide or protein from PIV as defined herein, and, additionally, at least one heterologous peptide or protein element.

[0922] Suitably, the at least one heterologous peptide or protein element may promote or improve secretion of the encoded PIV antigenic peptide or protein (e.g. via secretory signal sequences), promote or improve anchoring of the encoded PIV antigenic peptide or protein in the plasma membrane (e.g. via transmembrane elements), promote or improve formation of antigen complexes (e.g. via multimerization domains or antigen clustering elements), or promote or improve virus-like particle formation (VLP forming sequence). In addition, the nucleic acid of component B (in particular, component B-4a) may additionally encode peptide linker elements, self-cleaving peptides, immunologic adjuvant sequences or dendritic cell targeting sequences.

[0923] Preferred antigenic peptide or proteins selected or derived from a hPIV as defined above are provided in Table 15. Therein, each row corresponds to a suitable hPIV constructs. Column A of Table 15 provides a short description of suitable hPIV antigen constructs. Column B of Table 15 provides protein (amino acid) SEQ ID NOs of respective hPIV antigen constructs. Column D of Table 15 provides SEQ ID NO of the corresponding G/C optimized nucleic acid coding sequences (opt1, gc). Column E of Table 15 provides SEQ ID NO of the corresponding human codon usage adapted nucleic acid coding sequences (opt 3, human).

[0924] Notably, the description of the invention explicitly includes the information provided under <223> identifier of the ST.25 sequence listing of the present application. Preferred nucleic acid constructs comprising coding sequences of Table 15, e.g. mRNA sequences comprising the coding sequences of Table 15 are provided in Table 16.

TABLE 15
Preferred PIV constructs (amino acid sequences and nucleic acid coding sequences):

| A | B | D | E |
|---|---|---|---|
| HPIV3/Homo sapiens/PER/FLA4571/2008 fusion glycoprotein (F0) | 14612 | 14614, | 14616 |
| | | 26960 | |
| HPIV3/BJ/001/08 hemagglutinin-neuraminidase (HN) | 14613 | 14615 | 14617 |
| HPIV3/USA/629-D01959/2007 fusion glycoprotein (F0) | 26956 | 26958 | |
| HPIV3/USA/629-D01959/2007 fusion glycoprotein (variant) | 26957 | 26959 | |

[0925] In preferred embodiments, the at least one antigenic peptide or protein selected or derived from at least one PIV encoded by the at least one nucleic acid of component B (in particular component B-4a) comprises or consists of at least one of the amino acid sequences being identical or at least 70%, 80%, 85%, 86%, 87%, 88%, 89%, 90%, 91%, 92%, 93%, 94%, 95%, 96%, 97%, 98%, or 99% identical to any one of SEQ ID NOs: 14612, 14613, 26956, 26957 or an immunogenic fragment or immunogenic variant of any of these. Further information regarding said amino acid sequences is also provided in Table 15 (Column A and B), and under <223> identifier of the ST.25 sequence listing of respective sequence SEQ ID NOs.

[0926] In further embodiments, the at least one antigenic peptide or protein selected or derived from PIV encoded by the at least one nucleic acid of component B (in particular component B-4a) comprises or consists of at least one of the amino acid sequences being identical or at least 50%, 60%, 70%, 80%, 85%, 86%, 87%, 88%, 89%, 90%, 91%, 92%, 93%, 94%, 95%, 96%, 97%, 98%, or 99% identical to any one of SEQ ID NOs: 13-14 of published PCT patent application WO2017070626 or an immunogenic fragment or immunogenic variant of any of these. Accordingly, SEQ ID NOs: 13-14 of WO2017070626, and the corresponding disclosure relating thereto are herewith incorporated by reference. Further PIV antigen may also be derived from or selected proteins identifiable by GenBank Accession Numbers provided in Table 7 of WO2017070626. The full content of Table 7 of WO2017070626 herewith incorporated by reference.

[0927] According to preferred embodiments, the nucleic acid of component B (in particular component B-4a) comprises at least one coding sequence encoding at least one antigenic peptide or protein derived from PIV as defined above, or fragments and variants thereof. In that context, any coding sequence encoding at least one PIV antigenic protein as defined herein, or fragments and variants thereof may be understood as suitable coding sequence of component B.

[0928] In preferred embodiments, the nucleic acid of component B (in particular component B-4a) comprise or consist of at least one coding sequence encoding at least one antigenic peptide or protein selected or derived from a PIV as defined herein, preferably encoding any one of SEQ ID NOs: 14612, 14613, 26956, 26957; SEQ ID NOs: 13-14 of WO2017070626, or fragments of variants thereof. It has to be understood that, on nucleic acid level, any sequence (DNA or RNA sequence) which encodes an amino acid sequences being identical or at least 70%, 80%, 85%, 86%, 87%, 88%, 89%, 90%, 91%, 92%, 93%, 94%, 95%, 96%, 97%, 98%, or 99% identical to any one of SEQ ID NOs: 14612, 14613, 26956, 26957; SEQ ID NOs: 13-14 of WO2017070626, or fragments or variants thereof, may be selected and may accordingly be understood as suitable coding sequence of the invention. Further information regarding said amino acid sequences is also provided in Table 15 (Column A and B), Table 16, and under <223> identifier of the ST.25 sequence listing of respective sequence SEQ ID NOs.

[0929] In preferred embodiments, the at least one coding sequence of the at least one nucleic acid of component B (in particular component B-4a) comprises or consists of a nucleic acid sequence encoding an PIV antigen comprising or consisting of a nucleic acid sequence being identical or at least 70%, 80%, 85%, 86%, 87%, 88%, 89%, 90%, 91%, 92%, 93%, 94%, 95%, 96%, 97%, 98%, or 99% identical to any one of the nucleic acid sequences selected from SEQ ID NOs: 14614-14625, 26958-26965 or a fragment or variant of any of these sequences. Further information regarding said nucleic acid sequences is also provided in Table 15, Table 16, and under <223> identifier of the ST.25 sequence listing of respective sequence SEQ ID NOs.

[0930] In preferred embodiments, the nucleic acid of component B (in particular component B-4a) comprises a coding sequence that comprises at least one of the nucleic acid sequences encoding a hPIV antigen being identical or at least 70%, 80%, 85%, 86%, 87%, 88%, 89%, 90%, 91%, 92%, 93%, 94%, 95%, 96%, 97%, 98%, or 99% identical to any one of the nucleic acid sequences selected from SEQ ID NOs: 9-12, 61-64 of published PCT patent application WO2017070626 or a fragment or a fragment or variant of any of these sequences. Accordingly, SEQ ID NOs: 9-12, 61-64 of WO2017070626, and the corresponding disclosure relating thereto, are herewith incorporated by reference.

[0931] In preferred embodiments, the at least one coding sequence of the nucleic acid of component B (in particular component B-4a) is a codon modified coding sequence as defined herein, wherein the amino acid sequence, that is the PIV peptide or protein, encoded by the at least one codon modified coding sequence, is preferably not being modified compared to the amino acid sequence encoded by the corresponding wild type or reference coding sequence.

[0932] In particularly preferred embodiments, the at least one coding sequence of the nucleic acid component B (in particular component B-4a) is a codon modified coding sequence, wherein the codon modified coding sequence is selected a G/C optimized coding sequence, a human codon usage adapted coding sequence, or a G/C modified coding sequence.

[0933] Preferred nucleic acid sequences of component B (in particular component B-4a), including particularly preferred mRNA sequences, are provided in Table 16 (column C and D). Therein, each row represents a specific suitable PIV construct of the invention (compare with Table 15), wherein the description of the PIV construct is indicated in column A of Table 16 and the SEQ ID NOs of the amino acid sequence of the respective PIV construct is provided in column B. The corresponding SEQ ID NOs of the coding sequences encoding the respective PIV constructs are provided in in Table 15. Further information is provided under <223> identifier of the respective SEQ ID NOs in the sequence listing.

TABLE 16
Nucleic acid, preferably mRNA constructs encoding PIV antigens

| A | B | C | D |
|---|---|---|---|
| HPIV3/Homo sapiens/PER/FLA4571/2008 fusion glycoprotein (F0) | 14612 | 14618, | 14622, |
| | | 14620 | 14624 |
| HPIV3/BJ/001/08 hemagglutinin-neuraminidase (HN) | 14613 | 14619, | 14623, |
| | | 14621 | 14625 |
| HPIV3/USA/629-D01959/2007 fusion glycoprotein (F0) | 26956 | 26961 | 26963 |
| HPIV3/USA/629-D01959/2007 fusion glycoprotein (variant) | 26957 | 26962 | 26964 |

[0934] In preferred embodiments, the at least one nucleic acid of component B (in particular component B-4a) comprises or consists of a nucleic acid sequence encoding an PIV antigen which is identical or at least 70%, 80%, 85%, 86%, 87%, 88%, 89%, 90%, 91%, 92%, 93%, 94%, 95%, 96%, 97%, 98%, or 99% identical to a nucleic acid sequence selected from the group consisting of SEQ ID NOs: 14618-14625, 26961-26965 or a fragment or variant of any of these sequences. Further information regarding respective nucleic acid sequences is provided under <223> identifier of the respective SEQ ID NO in the sequence listing and in Table 16 (Column C and D). Optionally, said nucleic acid sequences comprise a cap1 structure as defined herein, and/or at least one, preferably all uracil nucleotides in said RNA sequences are replaced by pseudouridine (ψ) nucleotides and/or N1-methylpseudouridine (m1ψ) nucleotides

[0935] In further embodiments, the nucleic acid of component B (in particular component B-4a), preferably the RNA, comprises or consists of a nucleic acid sequence encoding a hPIV antigen which is identical or at least 70%, 80%, 85%, 86%, 87%, 88%, 89%, 90%, 91%, 92%, 93%, 94%, 95%, 96%, 97%, 98%, or 99% identical to a nucleic acid sequence selected from SEQ ID NOs: 61-64 of WO2017070626 or a fragment or variant of any of these sequences. Optionally, said nucleic acid sequences comprise a cap1 structure as defined herein, and/or at least one, preferably all uracil nucleotides in said RNA sequences are replaced by pseudouridine (ψ) nucleotides and/or N1-methylpseudouridine (m1ψ) nucleotides

[0936] In embodiments, the component B (in particular component B-4a) comprises a plurality or at least more than one of the nucleic acid species comprising at least one coding sequence encoding at least one antigenic peptide or protein selected or derived from at least one hPIV, or an immunogenic fragment or immunogenic variant thereof, e.g. DNA or RNA species as defined herein. Preferably, component B (in particular component B-4) as defined herein comprises 2, 3, 4, 5, 6, 7, 8, 9, or 10 different nucleic acids each defined as defined herein.

[0937] In embodiments, component B (in particular component B-4a) may comprise at least 2, 3, 4, 5, 6, 7, 8, 9, 10 or even more different nucleic acid species, e.g. DNA or RNA, as defined herein, each encoding at least one antigenic peptide or protein derived from the same hPIV, or a fragment or variant thereof. Particularly, said (genetically) same hPIV expresses (essentially) the same repertoire of proteins or peptides, wherein all proteins or peptides have (essentially) the same amino acid sequence. Particularly, said (genetically) same hPIV expresses essentially the same proteins, peptides or polyproteins, wherein these protein, peptide or polyproteins preferably do not differ in their amino acid sequence(s).

[0938] In embodiments, the component B (in particular component B-4a) comprises at least 2, 3, 4, 5, 6, 7, 8, 9, 10 or even more different nucleic acid species, e.g. DNA or RNA, as defined herein, each encoding at least one peptide or protein derived from a genetically distinct hPIV (e.g. a distinct hPIV isolate), or a fragment or variant thereof. The terms “distinct” or “distinct hPIV” as used throughout the present specification have to be understood as the difference between at least two respective hPIV (e.g. a distinct hPIV isolate), wherein the difference is manifested on the genome of the respective distinct hPIV. Particularly, said (genetically) distinct hPIV may express at least one distinct protein, peptide or polyprotein, wherein the at least one distinct protein, peptide or polyprotein differs in at least one amino acid.

[0939] In preferred embodiments, the component B-4a comprises at least one nucleic acid encoding at least one antigenic peptide or protein that is selected or derived from at least one PIV, or an immunogenic fragment or immunogenic variant thereof, wherein said component B-4a is to be, preferably, administered intramuscularly or intradermal.

[0940] Preferably, intramuscular or intradermal administration of said component B-4a results in expression of the encoded PIV antigen construct in a subject. In embodiments where the nucleic acid is an RNA, administration of component B-4a results in translation of the RNA and to a production of the encoded PIV antigen in a subject. In embodiments where the nucleic acid is a DNA (e.g. plasmid DNA, adenovirus DNA), administration of said composition results in transcription of the DNA into RNA, and to a subsequent translation of the RNA into the encoded PIV antigen in a subject.

[0941] In preferred embodiments, administration of component B-4a elicits antigen-specific immune responses comprising T-cell responses and/or B-cell responses against the encoded PIV antigens provided by the at least one nucleic acid of component B-4a.

[0942] Preferably, the component B-4a is suitable for a vaccine, in particular, suitable for a PIV vaccine, preferably a combination vaccine of the invention.

[0943] Preferably, the component B-4a is suitable for a vaccine, in particular, suitable for a RSV vaccine, preferably a combination vaccine of the invention.

[0944] In embodiments, the nucleic acid as comprised in component B-4a as defined herein is provided in an amount of about 100 ng to about 500 ug, in an amount of about 1 ug to about 200 ug, in an amount of about 1 ug to about 100 ug, in an amount of about 5 ug to about 100 ug, preferably in an amount of about 10 ug to about 50 ug, specifically, in an amount of about 1 ug, 2 ug, 3 ug, 4 ug, 5 ug, 6 ug, 7 ug, 8 ug, 9 ug, 10 ug, 11 ug, 12 ug, 13 ug, 14 ug, 15 ug, 20 ug, 25 ug, 30 ug, 35 ug, 40 ug, 45 ug, 50 ug, 55 ug, 60 ug, 65 ug, 70 ug, 75 ug, 80 ug, 85 ug, 90 ug, 95 ug or 100 ug.

[0945] In case component B-4a comprises a plurality or at least more than one of the nucleic acid species as defined herein, the amount of nucleic acid for each nucleic acid species is provided in an amount of about 100 ng to about 500 ug, in an amount of about 1 ug to about 200 ug, in an amount of about 1 ug to about 100 ug, in an amount of about 5 ug to about 100 ug, preferably in an amount of about 10 ug to about 50 ug, specifically, in an amount of about 1 ug, 2 ug, 3 ug, 4 ug, 5 ug, 6 ug, 7 ug, 8 ug, 9 ug, 10 ug, 11 ug, 12 ug, 13 ug, 14 ug, 15 ug, 20 ug, 25 ug, 30 ug, 35 ug, 40 ug, 45 ug, 50 ug, 55 ug, 60 ug, 65 ug, 70 ug, 75 ug, 80 ug, 85 ug, 90 ug, 95 ug or 100 ug.

[0946] In some embodiments, the amount of nucleic acid for each nucleic acid species is essentially equal in mass. In other embodiments, the amount of nucleic acid for each nucleic acid species is selected to be equimolar.

[0947] Component B-4b: Henipavirus:

[0948] In embodiments, the at least one further virus of component B (in particular, component B-4b) is selected from at least one Henipavirus of the Paramyxoviridae virus family.

[0949] The term “Henipavirus” relates to any virus of the Henipavirus genus, irrespective of genotype, species, strain, isolate, or serotype (NCBI Taxonomy ID: 260964). The term Henipavirus relates to a virus genus comprising virus strains selected from but not limited to Cedar henipavirus or Cedar virus (NCBI Taxonomy ID: 1221391), Ghanaian bat henipavirus or Bat paramyxovirus (NCBI Taxonomy ID: 665603), Mojiang henipavirus or Mojiang virus (NCBI Taxonomy ID: 1474807), Hendra virus (NCBI Taxonomy ID: 928303), Nipah virus (NCBI Taxonomy ID: 121791).

[0950] In preferred embodiments, the at least one Henipavirus is selected from at least one Hendra virus and/or at least one Nipah virus.

[0951] In embodiments, the at least one antigenic peptide or protein encoded by the at least one nucleic acid of component B (in particular, component B-4b) comprises or consists at least one peptide or protein selected or derived from at least one Henipavirus RNA-directed RNA polymerase (L), Henipavirus fusion protein (F), Henipavirus non-structural protein (V), Henipavirus glycoprotein (G), Henipavirus nucleoprotein (N), Henipavirus matrix protein (M), Henipavirus phosphoprotein (P), Henipavirus protein C, and Henipavirus protein W.

[0952] In preferred embodiments, the at least one antigenic peptide or protein encoded by the at least one nucleic acid of component B (in particular, component B-4b) comprises or consists at least one peptide or protein selected or derived from at least one Henipavirus glycoprotein and/or at least one Henipavirus fusion protein or a fragment or variant thereof.

[0953] In preferred embodiments, the at least one antigenic peptide or protein selected or derived from at least one Henipavirus encoded by the at least one nucleic acid of component B (in particular, component B-4b) comprises or consists of at least one of the amino acid sequences being identical or at least 70%, 80%, 85%, 86%, 87%, 88%, 89%, 90%, 91%, 92%, 93%, 94%, 95%, 96%, 97%, 98%, or 99% identical to any one of SEQ ID NOs: 1-26, 573-598, 807-832, 1041-1066, 1513-1515 of published PCT patent application WO2018115507, or an immunogenic fragment or immunogenic variant of any of these. Notably, SEQ ID NOs: 1-26, 573-598, 807-832, 1041-1066, 1513-1515 of published PCT patent application WO2018115507, and the corresponding disclosure relating thereto (e.g. Table 1, Table 1B, Table 2, Table 2B, or claims 1-43 of WO2018115507) are herewith incorporated by reference.

[0954] According to preferred embodiments, the at least one nucleic acid of component B (in particular component B-4b) comprises or consists of at least one coding sequence encoding at least one antigenic peptide or protein derived from a Henipavirus as defined above, in particular Hendra virus or Nipah virus, or fragments and variants thereof. In that context, any coding sequence encoding at least one Henipavirus antigenic protein as defined herein, or fragments and variants thereof, may be understood as suitable coding sequence of component B.

[0955] In preferred embodiments, the at least one nucleic acid of component B (in particular component B-4b) comprises or consists of at least one coding sequence encoding at least one antigenic peptide or protein selected or derived from a Henipavirus as defined herein, in particular Hendra virus or Nipah virus, preferably encoding any one of SEQ ID NOs: 1-26, 573-598, 807-832, 1041-1066, 1513-1515 of published PCT patent application WO2018115507, or fragments of variants thereof. It has to be understood that, on nucleic acid level, any sequence (DNA or RNA sequence) which encodes an amino acid sequences being identical or at least 70%, 80%, 85%, 86%, 87%, 88%, 89%, 90%, 91%, 92%, 93%, 94%, 95%, 96%, 97%, 98%, or 99% identical to any one of SEQ ID NOs: 1-26, 573-598, 807-832, 1041-1066, 1513-1515 of published PCT patent application WO2018115507, or fragments or variants thereof, may be selected and may accordingly be understood as suitable coding sequence of the invention.

[0956] In preferred embodiments, the at least one coding sequence of the at least one nucleic acid of component B (in particular, component B-4b) comprises or consists of a nucleic acid sequence encoding an Henipavirus antigen, preferably a Hendra virus or Nipah virus antigen, comprising or consisting of a nucleic acid sequence being identical or at least 70%, 80%, 85%, 86%, 87%, 88%, 89%, 90%, 91%, 92%, 93%, 94%, 95%, 96%, 97%, 98%, or 99% identical to any one SEQ ID NOs: 27-234, 599-806, 833-1040, 1067-1274, 1275-1508, 1516-1539, 1540-1548 of published PCT patent application WO2018115507, or a fragment or variant of any of these sequences. Notably, SEQ ID NOs: 27-234, 599-806, 833-1040, 1067-1274, 1275-1508, 1516-1539, 1540-1548 of published PCT patent application WO2018115507, and the corresponding disclosure relating thereto (e.g. Table 5, 6, 7 or claims 1-43 of WO2018115507) are herewith incorporated by reference.

[0957] In preferred embodiments, the at least one coding sequence of the nucleic acid of component B (in particular component B-4b) is a codon modified coding sequence as defined herein, wherein the amino acid sequence, that is the Henipavirus peptide or protein, encoded by the at least one codon modified coding sequence, is preferably not being modified compared to the amino acid sequence encoded by the corresponding wild type or reference coding sequence.

[0958] In particularly preferred embodiments, the at least one coding sequence of the nucleic acid component B (in particular component B-4b) is a codon modified coding sequence encoding an Henipavirus antigen, wherein the codon modified coding sequence is suitably selected from a G/C optimized coding sequence, a human codon usage adapted coding sequence, or a G/C modified coding sequence.

[0959] In preferred embodiments, at least one nucleic acid of component B (in particular component B-4b) comprises or consists of a nucleic acid sequence encoding an Henipavirus antigen, preferably a Hendra virus or Nipah virus antigen, which is identical or at least 70%, 80%, 85%, 86%, 87%, 88%, 89%, 90%, 91%, 92%, 93%, 94%, 95%, 96%, 97%, 98%, or 99% identical to a nucleic acid sequence selected from the group consisting of SEQ ID NOs: 1275-1508, 1540-1548 of published PCT patent application WO2018115507, or a fragment or variant of any of these sequences. Notably, SEQ ID NOs: 1275-1508, 1540-1548 of published PCT patent application WO2018115507, and the corresponding disclosure relating thereto (e.g. Table 5, 6, 7, or claims 1-43 of WO2018115507) are herewith incorporated by reference. Optionally, said nucleic acid sequences comprise a cap1 structure as defined herein, and/or at least one, preferably all uracil nucleotides in said RNA sequences are replaced by pseudouridine (ψ) nucleotides and/or N1-methylpseudouridine (m1ψ) nucleotides

[0960] In embodiments, component B (in particular component B-4b) comprises a plurality or at least more than one of the nucleic acid species comprising at least one coding sequence encoding at least one antigenic peptide or protein selected or derived from at least one Henipavirus, preferably a Hendra virus or Nipah virus, or an immunogenic fragment or immunogenic variant thereof, e.g. DNA or RNA species as defined herein. Preferably, component B (in particular component B-4b) as defined herein comprises 2, 3, 4, 5, 6, 7, 8, 9, or 10 different nucleic acids each as defined herein.

[0961] In embodiments, component B (in particular component B-4b) may comprise at least 2, 3, 4, 5, 6, 7, 8, 9, 10 or even more different nucleic acid species, e.g. DNA or RNA, as defined herein, each encoding at least one antigenic peptide or protein derived from the same Henipavirus, or a fragment or variant thereof. Particularly, said (genetically) same Henipavirus expresses (essentially) the same repertoire of proteins or peptides, wherein all proteins or peptides have (essentially) the same amino acid sequence. Particularly, said (genetically) same Henipavirus expresses essentially the same proteins, peptides or polyproteins, wherein these protein, peptide or polyproteins preferably do not differ in their amino acid sequence(s).

[0962] In embodiments, component B (in particular component B-4b) comprises at least 2, 3, 4, 5, 6, 7, 8, 9, 10 or even more different nucleic acid species, e.g. DNA or RNA, as defined herein, each encoding at least one peptide or protein derived from a genetically distinct Henipavirus (e.g. a distinct Henipavirus strain or isolate), or a fragment or variant thereof. The terms “distinct” or “distinct Henipavirus” as used throughout the present specification have to be understood as the difference between at least two respective Henipavirus (e.g. a distinct Henipavirus strain or isolate isolate), wherein the difference is manifested on the genome of the respective distinct Henipavirus. Particularly, said (genetically) distinct Henipavirus may express at least one distinct protein, peptide or polyprotein, wherein the at least one distinct protein, peptide or polyprotein differs in at least one amino acid.

[0963] In preferred embodiments, the component B-4b comprises at least one nucleic acid encoding at least one antigenic peptide or protein that is selected or derived from at least one Henipavirus, or an immunogenic fragment or immunogenic variant thereof, wherein said component B-4b is to be, preferably, administered intramuscularly or intradermal.

[0964] Preferably, intramuscular or intradermal administration of said component B-4b results in expression of the encoded Henipavirus antigen construct in a subject. In embodiments where the nucleic acid is an RNA, administration of component B-4b results in translation of the RNA and to a production of the encoded Henipavirus antigen in a subject. In embodiments where the nucleic acid is a DNA (e.g. plasmid DNA, adenovirus DNA), administration of said composition results in transcription of the DNA into RNA, and to a subsequent translation of the RNA into the encoded Henipavirus antigen in a subject.

[0965] In preferred embodiments, administration of component B-4b elicits antigen-specific immune responses comprising T-cell responses and/or B-cell responses against the encoded Henipavirus antigens provided by the at least one nucleic acid of component B-4b.

[0966] Preferably, the component B-4b is suitable for a vaccine, in particular, suitable for a Henipavirus vaccine, preferably a combination vaccine of the invention.

[0967] In embodiments, the nucleic acid as comprised in component B-4b as defined herein is provided in an amount of about 100 ng to about 500 ug, in an amount of about 1 ug to about 200 ug, in an amount of about 1 ug to about 100 ug, in an amount of about 5 ug to about 100 ug, preferably in an amount of about 10 ug to about 50 ug, specifically, in an amount of about 1 ug, 2 ug, 3 ug, 4 ug, 5 ug, 6 ug, 7 ug, 8 ug, 9 ug, 10 ug, 11 ug, 12 ug, 13 ug, 14 ug, 15 ug, 20 ug, 25 ug, 30 ug, 35 ug, 40 ug, 45 ug, 50 ug, 55 ug, 60 ug, 65 ug, 70 ug, 75 ug, 80 ug, 85 ug, 90 ug, 95 ug or 100 ug.

[0968] In case component B-4b comprises a plurality or at least more than one of the nucleic acid species as defined herein, the amount of nucleic acid for each nucleic acid species is provided in an amount of about 100 ng to about 500 ug, in an amount of about 1 ug to about 200 ug, in an amount of about 1 ug to about 100 ug, in an amount of about 5 ug to about 100 ug, preferably in an amount of about 10 ug to about 50 ug, specifically, in an amount of about 1 ug, 2 ug, 3 ug, 4 ug, 5 ug, 6 ug, 1 ug, 8 ug, 9 ug, 10 ug, 11 ug, 12 ug, 13 ug, 14 ug, 15 ug, 20 ug, 25 ug, 30 ug, 35 ug, 40 ug, 45 ug, 50 ug, 55 ug, 60 ug, 65 ug, 70 ug, 75 ug, 80 ug, 85 ug, 90 ug, 95 ug or 100 ug.

[0969] In some embodiments, the amount of nucleic acid for each nucleic acid species is essentially equal in mass. In other embodiments, the amount of nucleic acid for each nucleic acid species is selected to be equimolar.

[0970] Nucleic Acid Features and Embodiments:

[0971] In the following, suitable features and embodiments relating to the nucleic acid comprised in the pharmaceutical composition are further specified. In particular, suitable features and embodiments relating to nucleic acid of component A (in particular, component A-1, A-2, A-3), and/or component B (in particular component B-1, B-2, B-3, B-3a, B-3b, B-4, B-4a, B-4b) are further specified.

[0972] Accordingly, features and embodiments provided in the following may be read as suitable features and embodiments of (i) the at least one nucleic acid comprising at least one coding sequence encoding at least one antigenic peptide or protein selected or derived from at least one Coronavirus, or an immunogenic fragment or immunogenic variant thereof (component A, in particular, component A-1, A-2, A-3). Features and embodiments provided in the following may be read as suitable features and embodiments of (ii) the at least one nucleic acid comprising at least one coding sequence encoding at least one antigenic peptide or protein selected or derived from at least one further virus, or an immunogenic fragment or immunogenic variant thereof (component B, in particular component B-1, B-2, B-3, B-3a, B-3b, B-4, B-4a, B-4b).

[0973] In preferred embodiments, the nucleic acid of component A and/or component B is an artificial nucleic acid, e.g. an artificial DNA or an artificial RNA.

[0974] The term “artificial nucleic acid” as used herein is intended to refer to a nucleic acid that does not occur naturally. In other words, an artificial nucleic acid may be understood as a non-natural nucleic acid molecule. Such nucleic acid molecules may be non-natural due to its individual sequence (e.g. G/C content modified coding sequence, UTRs) and/or due to other modifications, e.g. structural modifications of nucleotides. Typically, artificial nucleic acid may be designed and/or generated by genetic engineering to correspond to a desired artificial sequence of nucleotides. In this context, an artificial nucleic acid is a sequence that may not occur naturally, i.e. a sequence that differs from the wild type or reference sequence/the naturally occurring sequence by at least one nucleotide (via e.g. codon modification as further specified below). The term “artificial nucleic acid” is not restricted to mean “one single molecule” but is understood to comprise an ensemble of essentially identical nucleic acid molecules. Accordingly, it may relate to a plurality of essentially identical nucleic acid molecules. The term “artificial nucleic acid” as used herein may for example relate to an artificial DNA or, preferably, to an artificial RNA.

[0975] In preferred embodiments, the nucleic acid of component A and/or component B, e.g. the DNA or RNA, is a modified and/or stabilized nucleic acid, preferably a modified and/or stabilized artificial nucleic acid.

[0976] According to preferred embodiments, the nucleic acid of component A and/or component B may thus be provided as a “stabilized artificial nucleic acid” or “stabilized coding nucleic acid” that is to say a nucleic acid showing improved resistance to in vivo degradation and/or a nucleic acid showing improved stability in vivo, and/or a nucleic acid showing improved translatability in vivo.

[0977] In the following, specific suitable modifications/adaptations in this context are described which are suitably to “stabilize” the nucleic acid. Preferably, the nucleic acid of the present invention may be provided as a “stabilized RNA”, “stabilized coding RNA”, “stabilized DNA” or “stabilized coding DNA”.

[0978] In the following, suitable modifications are described that are capable of “stabilizing” the nucleic acid of component A and/or component B.

[0979] In preferred embodiments, the nucleic acid of component A and/or component B, e.g. the RNA or DNA, comprises at least one codon modified coding sequence.

[0980] In preferred embodiments, the at least one coding sequence of the nucleic acid of component A and/or component B is a codon modified coding sequence. Suitably, the amino acid sequence encoded by the at least one codon modified coding sequence is not being modified compared to the amino acid sequence encoded by the corresponding wild type or reference coding sequence.

[0981] The term “codon modified coding sequence” relates to coding sequences that differ in at least one codon (triplets of nucleotides coding for one amino acid) compared to the corresponding wild type or reference coding sequence. Suitably, a codon modified coding sequence in the context of the invention may show improved resistance to in vivo degradation and/or improved stability in vivo, and/or improved translatability in vivo. Codon modifications in the broadest sense make use of the degeneracy of the genetic code wherein multiple codons may encode the same amino acid and may be used interchangeably (cf. Table 1 of WO2020002525) to optimize/modify the coding sequence for in vivo applications as outlined above.

[0982] In preferred embodiments, the at least one coding sequence of the nucleic acid of component A and/or component B is a codon modified coding sequence, wherein the codon modified coding sequence is selected from C maximized coding sequence, CAI maximized coding sequence, human codon usage adapted coding sequence, G/C content modified coding sequence, and G/C optimized coding sequence, or any combination thereof.

[0983] In preferred embodiments, the at least one coding sequence of the nucleic acid of component A and/or component B has a G/C content of at least about 50%, 55%, or 60%. In particular embodiments, the at least one coding sequence of the nucleic acid of component A and/or component B has a G/C content of at least about 50%, 51%, 52%, 53%, 54%, 55%, 56%, 57%, 58%, 59%, 60%, 61%, 62%, 63%, 64%, 65%, 66%, 67%, 68%, 69%, or 70%.

[0984] When transfected into mammalian host cells, the nucleic acid of component A and/or component B comprising a codon modified coding sequence has a stability of between 12-18 hours, or greater than 18 hours, e.g., 24, 36, 48, 60, 72, or greater than 72 hours and are capable of being expressed by the mammalian host cell (e.g. a muscle cell).

[0985] When transfected into mammalian host cells, the nucleic acid of component A and/or component B comprising a codon modified coding sequence is translated into protein, wherein the amount of protein is at least comparable to, or preferably at least 10% more than, or at least 20% more than, or at least 30% more than, or at least 40% more than, or at least 50% more than, or at least 100% more than, or at least 200% or more than the amount of protein obtained by a naturally occurring or wild type or reference coding sequence transfected into mammalian host cells.

[0986] In embodiments, the nucleic acid of component A and/or component B may be modified, wherein the C content of the at least one coding sequence may be increased, preferably maximized, compared to the C content of the corresponding wild type or reference coding sequence (herein referred to as “C maximized coding sequence”). The amino acid sequence encoded by the C maximized coding sequence of the nucleic acid is preferably not modified compared to the amino acid sequence encoded by the respective wild type or reference coding sequence. The generation of a C maximized nucleic acid sequences may suitably be carried out using a modification method according to WO2015/062738. In this context, the disclosure of WO2015/062738 is included herewith by reference.

[0987] In preferred embodiments, the nucleic acid of component A and/or component B may be modified, wherein the G/C content of the at least one coding sequence may be optimized compared to the G/C content of the corresponding wild type or reference coding sequence (herein referred to as “G/C content optimized coding sequence”). “Optimized” in that context refers to a coding sequence wherein the G/C content is preferably increased to the essentially highest possible G/C content. The amino acid sequence encoded by the G/C content optimized coding sequence of the nucleic acid is preferably not modified as compared to the amino acid sequence encoded by the respective wild type or reference coding sequence. The generation of a G/C content optimized nucleic acid sequence (RNA or DNA) may be carried out using a method according to WO2002/098443. In this context, the disclosure of WO2002/098443 is included in its full scope in the present invention. Throughout the description, including the <223> identifier of the sequence listing, G/C optimized coding sequences are indicated by the abbreviations “opt1” or “gc”.

[0988] In preferred embodiments, the nucleic acid of component A and/or component B may be modified, wherein the codons in the at least one coding sequence may be adapted to human codon usage (herein referred to as “human codon usage adapted coding sequence”). Codons encoding the same amino acid occur at different frequencies in humans. Accordingly, the coding sequence of the nucleic acid is preferably modified such that the frequency of the codons encoding the same amino acid corresponds to the naturally occurring frequency of that codon according to the human codon usage. For example, in the case of the amino acid Ala, the wild type or reference coding sequence is preferably adapted in a way that the codon “GCC” is used with a frequency of 0.40, the codon “GCT” is used with a frequency of 0.28, the codon “GCA” is used with a frequency of 0.22 and the codon “GCG” is used with a frequency of 0.10 etc. (see e.g. Table 1 of WO2020002525). Accordingly, such a procedure (as exemplified for Ala) is applied for each amino acid encoded by the coding sequence of the nucleic acid to obtain sequences adapted to human codon usage. Throughout the description, including the <223> identifier of the sequence listing, human codon usage adapted coding sequences are indicated by the abbreviation “opt3” or “human”.

[0989] In embodiments, the nucleic acid of component A and/or component B may be modified, wherein the G/C content of the at least one coding sequence may be modified compared to the G/C content of the corresponding wild type or reference coding sequence (herein referred to as “G/C content modified coding sequence”). In this context, the terms “G/C optimization” or “G/C content modification” relate to a nucleic acid that comprises a modified, preferably an increased number of guanosine and/or cytosine nucleotides as compared to the corresponding wild type or reference coding sequence. Such an increased number may be generated by substitution of codons containing adenosine or thymidine nucleotides by codons containing guanosine or cytosine nucleotides. Advantageously, nucleic acid sequences having an increased G/C content are more stable or show a better expression than sequences having an increased NU. The amino acid sequence encoded by the G/C content modified coding sequence of the nucleic acid of component A and/or component B is preferably not modified as compared to the amino acid sequence encoded by the respective wild type or reference sequence. Preferably, the G/C content of the coding sequence of the nucleic acid is increased by at least 10%, 20%, 30%, preferably by at least 40% compared to the G/C content of the coding sequence of the corresponding wild type or reference nucleic acid sequence (herein referred to “opt 10” or “gc mod”)

[0990] In embodiments, the nucleic acid of component A and/or component B may be modified, wherein the codon adaptation index (CAI) may be increased or preferably maximised in the at least one coding sequence (herein referred to as “CAI maximized coding sequence”). It is preferred that all codons of the wild type or reference nucleic acid sequence that are relatively rare in e.g. a human are exchanged for a respective codon that is frequent in the e.g. a human, wherein the frequent codon encodes the same amino acid as the relatively rare codon. Suitably, the most frequent codons are used for each amino acid of the encoded protein (see Table 1 of WO2020002525, most frequent human codons are marked with asterisks). Suitably, the nucleic acid comprises at least one coding sequence, wherein the codon adaptation index (CAI) of the at least one coding sequence is at least 0.5, at least 0.8, at least 0.9 or at least 0.95. Most preferably, the codon adaptation index (CAI) of the at least one coding sequence is 1 (CAI=1). For example, in the case of the amino acid Ala, the wild type or reference coding sequence may be adapted in a way that the most frequent human codon “GCC” is always used for said amino acid. Accordingly, such a procedure (as exemplified for Ala) may be applied for each amino acid encoded by the coding sequence of the nucleic acid to obtain CAI maximized coding sequences.

[0991] In embodiments, the nucleic acid of component A and/or component B may be modified by altering the number of A and/or U nucleotides in the nucleic acid sequence with respect to the number of A and/or U nucleotides in the original nucleic acid sequence (e.g. the wild type or reference sequence). Preferably, such an AU alteration is performed to modify the retention time of the individual nucleic acids in a composition, to (i) allow co-purification using a HPLC method, and/or to allow analysis of the obtained nucleic acid composition. Such a method is described in detail in published PCT application WO2019092153A1. Claims 1 to 70 of WO2019092153A1 herewith incorporated by reference.

[0992] In particularly preferred embodiments, the at least one coding sequence of the nucleic acid of component A and/or component B is a codon modified coding sequence, wherein the codon modified coding sequence is selected a G/C optimized coding sequence, a human codon usage adapted coding sequence, or a G/C modified coding sequence

[0993] In preferred embodiments, the nucleic acid of component A and/or component B comprises at least one heterologous untranslated region (UTR).

[0994] The term “untranslated region” or “UTR” or “UTR element” will be recognized and understood by the person of ordinary skill in the art, and are e.g. intended to refer to a part of a nucleic acid molecule typically located 5′ or 3′ of a coding sequence. An UTR is not translated into protein. An UTR may be part of a nucleic acid, e.g. a DNA or an RNA. An UTR may comprise elements for controlling gene expression, also called regulatory elements. Such regulatory elements may be, e.g., ribosomal binding sites, miRNA binding sites, promotor elements etc.

[0995] In preferred embodiments, the nucleic acid of component A and/or component B comprises a protein-coding region (“coding sequence” or “cds”), and 5′-UTR and/or 3′-UTR. Notably, UTRs may harbor regulatory sequence elements that determine nucleic acid, e.g. RNA turnover, stability, and localization. Moreover, UTRs may harbor sequence elements that enhance translation. In medical application of nucleic acid sequences (including DNA and RNA), translation of the nucleic acid into at least one peptide or protein is of paramount importance to therapeutic efficacy. Certain combinations of 3′-UTRs and/or 5′-UTRs may enhance the expression of operably linked coding sequences encoding peptides or proteins of the invention. Nucleic acid molecules harboring said UTR combinations advantageously enable rapid and transient expression of antigenic peptides or proteins after administration to a subject, preferably after intramuscular administration. Accordingly, the nucleic acid of component A and/or component B comprising certain combinations of 3′-UTRs and/or 5′-UTRs as provided herein is particularly suitable for administration as a vaccine, in particular, suitable for administration into the muscle, the dermis, or the epidermis of a subject.

[0996] Suitably, the nucleic acid of component A and/or component B comprises at least one heterologous 5′-UTR and/or at least one heterologous 3′-UTR. Said heterologous 5′-UTRs or 3′-UTRs may be derived from naturally occurring genes or may be synthetically engineered. In preferred embodiments, the nucleic acid, preferably the RNA comprises at least one coding sequence as defined herein operably linked to at least one (heterologous) 3′-UTR and/or at least one (heterologous) 5′-UTR.

[0997] In preferred embodiments, the nucleic acid of component A and/or component B, e.g. the RNA or DNA, comprises at least one heterologous 3′-UTR.

[0998] The term “3′-untranslated region” or “3′-UTR” or “3′-UTR element” will be recognized and understood by the person of ordinary skill in the art, and are e.g. intended to refer to a part of a nucleic acid molecule located 3′ (i.e. downstream) of a coding sequence and which is not translated into protein. A 3′-UTR may be part of a nucleic acid, e.g. a DNA or an RNA, located between a coding sequence and an (optional) terminal poly(A) sequence. A 3′-UTR may comprise elements for controlling gene expression, also called regulatory elements. Such regulatory elements may be, e.g., ribosomal binding sites, miRNA binding sites etc.

[0999] Preferably, the nucleic acid of component A and/or component B comprises a 3′-UTR, which may be derivable from a gene that relates to an RNA with enhanced half-life (i.e. that provides a stable RNA).

[1000] In some embodiments, a 3′-UTR comprises one or more of a polyadenylation signal, a binding site for proteins that affect a nucleic acid stability of location in a cell, or one or more miRNA or binding sites for miRNAs.

[1001] MicroRNAs (or miRNA) are 19-25 nucleotide long noncoding RNAs that bind to the 3′-UTR of nucleic acid molecules and down-regulate gene expression either by reducing nucleic acid molecule stability or by inhibiting translation. E.g., microRNAs are known to regulate RNA, and thereby protein expression, e.g. in liver (miR-122), heart (miR-Id, miR-149), endothelial cells (miR-17-92, miR-126), adipose tissue (let-7, miR-30c), kidney (miR-192, miR-194, miR-204), myeloid cells (miR-142-3p, miR-142-5p, miR-16, miR-21, miR-223, miR-24, miR-27), muscle (miR-133, miR-206, miR-208), and lung epithelial cells (let-7, miR-133, miR-126). The RNA may comprise one or more microRNA target sequences, microRNA sequences, or microRNA seeds. Such sequences may e.g. correspond to any known microRNA such as those taught in US20050261218 and US20050059005.

[1002] Accordingly, miRNA, or binding sites for miRNAs as defined above may be removed from the 3′-UTR or may be introduced into the 3′-UTR in order to tailor the expression of the nucleic acid, e.g. the DNA or RNA to desired cell types or tissues (e.g. muscle cells).

[1003] In preferred embodiments, the nucleic acid of component A and/or component B comprises at least one heterologous 3′-UTR, wherein the at least one heterologous 3′-UTR comprises a nucleic acid sequence is derived or selected from a 3′-UTR of a gene selected from PSMB3, ALB7, alpha-globin (referred to as “muag”), CASP1, COX6B1, GNAS, NDUFA1 and RPS9, or from a homolog, a fragment or variant of any one of these genes, preferably according to nucleic acid sequences being identical or at least 70%, 80%, 85%, 86%, 87%, 88%, 89%, 90%, 91%, 92%, 93%, 94%, 95%, 96%, 97%, 98%, or 99% identical to SEQ ID NOs: 253-268, 22902-22905, 22892-22895 or a fragment or a variant of any of these. Particularly preferred nucleic acid sequences in that context can be derived from published PCT application WO2019077001A1, in particular, claim 9 of WO2019077001A1. The corresponding 3′-UTR sequences of claim 9 of WO2019077001A1 are herewith incorporated by reference (e.g., SEQ ID NOs: 23-34 of WO2019077001A1, or fragments or variants thereof).

[1004] In preferred embodiments, the nucleic acid of component A and/or component B comprises a 3′-UTR derived from an alpha-globin gene. Said 3′-UTR derived from a alpha-globin gene (“muag”) may comprise or consist of a nucleic acid sequence being identical or at least 70%, 80%, 85%, 86%, 87%, 88%, 89%, 90%, 91%, 92%, 93%, 94%, 95%, 96%, 97%, 98%, or 99% identical to SEQ ID NOs: 267, 268, 22896-22901, 22906-22911 or a fragment or a variant thereof.

[1005] In further embodiments, the nucleic acid comprises a 3′-UTR derived from a RPS9 gene. Said 3′-UTR derived from a RPS9 gene may comprise or consist of a nucleic acid sequence being identical or at least 70%, 80%, 85%, 86%, 87%, 88%, 89%, 90%, 91%, 92%, 93%, 94%, 95%, 96%, 97%, 98%, or 99% identical to SEQ ID NOs: 263, 264, 22894, 22895, 22904, 22905 or a fragment or a variant thereof.

[1006] In other embodiments, the nucleic acid comprise a 3′-UTR which comprise or consist of a nucleic acid sequence being identical or at least 70%, 80%, 85%, 86%, 87%, 88%, 89%, 90%, 91%, 92%, 93%, 94%, 95%, 96%, 97%, 98%, or 99% identical to SEQ ID NO: 22876-22891 or a fragment or a variant thereof.

[1007] In preferred embodiments, the nucleic acid of component A and/or component B comprises a 3′-UTR derived from a PSMB3 gene. Said 3′-UTR derived from a PSMB3 gene may comprise or consist of a nucleic acid sequence being identical or at least 70%, 80%, 85%, 86%, 87%, 88%, 89%, 90%, 91%, 92%, 93%, 94%, 95%, 96%, 97%, 98%, or 99% identical to SEQ ID NOs: 253 or 254 or a fragment or a variant thereof.

[1008] In other embodiments, the nucleic acid of component A and/or component B may comprise a 3′-UTR as described in WO2016107877, the disclosure of WO2016107877 relating to 3′-UTR sequences herewith incorporated by reference. Suitable 3′-UTRs are SEQ ID NOs: 1-24 and SEQ ID NOs: 49-318 of WO2016107877, or fragments or variants of these sequences. In other embodiments, the nucleic acid comprises a 3′-UTR as described in WO2017036580, the disclosure of WO2017036580 relating to 3′-UTR sequences herewith incorporated by reference. Suitable 3′-UTRs are SEQ ID NOs: 152-204 of WO2017036580, or fragments or variants of these sequences. In other embodiments, the nucleic acid comprises a 3′-UTR as described in WO2016022914, the disclosure of WO2016022914 relating to 3′-UTR sequences herewith incorporated by reference. Particularly preferred 3′-UTRs are nucleic acid sequences according to SEQ ID NOs: 20-36 of WO2016022914, or fragments or variants of these sequences.

[1009] In preferred embodiments, the nucleic acid of component A and/or component B, e.g. the RNA or DNA, comprises at least one heterologous 5′-UTR.

[1010] The terms “5′-untranslated region” or “5′-UTR” or “5′-UTR element” will be recognized and understood by the person of ordinary skill in the art, and are e.g. intended to refer to a part of a nucleic acid molecule located 5′ (i.e. “upstream”) of a coding sequence and which is not translated into protein. A 5′-UTR may be part of a nucleic acid located 5′ of the coding sequence. Typically, a 5′-UTR starts with the transcriptional start site and ends before the start codon of the coding sequence. A 5′-UTR may comprise elements for controlling gene expression, also called regulatory elements. Such regulatory elements may be, e.g., ribosomal binding sites, miRNA binding sites etc. The 5′-UTR may be post-transcriptionally modified, e.g. by enzymatic or post-transcriptional addition of a 5′-cap structure (e.g. for mRNA as defined below).

[1011] Preferably, the nucleic acid of component A and/or component B comprises a 5′-UTR, which may be derivable from a gene that relates to an RNA with enhanced half-life (i.e. that provides a stable RNA).

[1012] In some embodiments, a 5′-UTR comprises one or more of a binding site for proteins that affect an RNA stability or RNA location in a cell, or one or more miRNA or binding sites for miRNAs (as defined above).

[1013] Accordingly, miRNA or binding sites for miRNAs as defined above may be removed from the 5′-UTR or introduced into the 5′-UTR in order to tailor the expression of the nucleic acid to desired cell types or tissues (e.g. muscle cells).

[1014] In preferred embodiments, the nucleic acid of component A and/or component B comprises at least one heterologous 5′-UTR, wherein the at least one heterologous 5′-UTR comprises a nucleic acid sequence is derived or selected from a 5′-UTR of gene selected from HSD17B4, RPL32, ASAH1, ATP5A1, MP68, NDUFA4, NOSIP, RPL31, SLC7A3, TUBB4B, and UBQLN2, or from a homolog, a fragment or variant of any one of these genes according to nucleic acid sequences being identical or at least 70%, 80%, 85%, 86%, 87%, 88%, 89%, 90%, 91%, 92%, 93%, 94%, 95%, 96%, 97%, 98%, or 99% identical to SEQ ID NOs: 231-252, 22870-22875 or a fragment or a variant of any of these. Particularly preferred nucleic acid sequences in that context can be selected from published PCT application WO2019077001A1, in particular, claim 9 of WO2019077001A1. The corresponding 5′-UTR sequences of claim 9 of WO2019077001A1 are herewith incorporated by reference (e.g., SEQ ID NOs: 1-20 of WO2019077001A1, or fragments or variants thereof).

[1015] In preferred embodiments, the nucleic acid of component A and/or component B comprises a 5′-UTR derived from a RPL31 gene, wherein said 5′-UTR derived from a RPL31 gene comprises or consists of a nucleic acid sequence being identical or at least 70%, 80%, 85%, 86%, 87%, 88%, 89%, 90%, 91%, 92%, 93%, 94%, 95%, 96%, 97%, 98%, or 99% identical to SEQ ID NOs: 243, 244, 22872, 22873 or a fragment or a variant thereof.

[1016] In embodiments, the nucleic acid of component A and/or component B may comprise a 5′-UTR derived from a SLC7A3 gene, wherein said 5′-UTR derived from a SLC7A3 gene comprises or consists of a nucleic acid sequence being identical or at least 70%, 80%, 85%, 86%, 87%, 88%, 89%, 90%, 91%, 92%, 93%, 94%, 95%, 96%, 97%, 98%, or 99% identical to SEQ ID NOs: 245, 246, 22874, 22875 or a fragment or a variant thereof.

[1017] In particularly preferred embodiments, the nucleic acid of component A and/or component B comprises a 5′-UTR derived or selected from a HSD17B4 gene, wherein said 5′-UTR derived from a HSD17B4 gene comprises or consists of a nucleic acid sequence being identical or at least 70%, 80%, 85%, 86%, 87%, 88%, 89%, 90%, 91%, 92%, 93%, 94%, 95%, 96%, 97%, 98%, or 99% identical to SEQ ID NOs: 231,232, 22870, 22871 or a fragment or a variant thereof.

[1018] In other embodiments, the nucleic acid of component A and/or component B comprises a 5′-UTR which comprises or consists of a nucleic acid sequence being identical or at least 70%, 80%, 85%, 86%, 87%, 88%, 89%, 90%, 91%, 92%, 93%, 94%, 95%, 96%, 97%, 98%, or 99% identical to SEQ ID NO: 22848-22869 or a fragment or a variant thereof.

[1019] In other embodiments, the nucleic acid of component A and/or component B may comprise a 5′-UTR as described in WO2013143700, the disclosure of WO2013143700 relating to 5′-UTR sequences herewith incorporated by reference. Particularly preferred 5′-UTRs are nucleic acid sequences derived from SEQ ID NOs: 1-1363, SEQ ID NO: 1395, SEQ ID NO: 1421 and SEQ ID NO: 1422 of WO2013143700, or fragments or variants of these sequences. In other embodiments, the nucleic acid comprises a 5′-UTR as described in WO2016107877, the disclosure of WO2016107877 relating to 5′-UTR sequences herewith incorporated by reference. Particularly preferred 5′-UTRs are nucleic acid sequences according to SEQ ID NOs: 25-30 and SEQ ID NOs: 319-382 of WO2016107877, or fragments or variants of these sequences. In other embodiments, the nucleic acid comprises a 5′-UTR as described in WO2017036580, the disclosure of WO2017036580 relating to 5′-UTR sequences herewith incorporated by reference. Particularly preferred 5′-UTRs are nucleic acid sequences according to SEQ ID NOs: 1-151 of WO2017036580, or fragments or variants of these sequences. In other embodiments, the nucleic acid comprises a 5′-UTR as described in WO2016022914, the disclosure of WO2016022914 relating to 5′-UTR sequences herewith incorporated by reference. Particularly preferred 5′-UTRs are nucleic acid sequences according to SEQ ID NOs: 3-19 of WO2016022914, or fragments or variants of these sequences.

[1020] In preferred embodiments, the nucleic acid of component A and/or component B comprises at least one coding sequence as specified herein encoding at least one antigenic protein as defined herein, operably linked to a 3′-UTR and/or a 5′-UTR selected from the following 5′UTR/3′UTR combinations (“also referred to UTR designs”):

[1021] a-1 (HSD17B4/PSMB3), a-2 (NDUFA4/PSMB3), a-3 (SLC7A3/PSMB3), a-4 (NOSIP/PSMB3), a-5 (MP68/PSMB3), b-1 (UBQLN2/RPS9), b-2 (ASAH1/RPS9), b-3 (HSD17B4/RPS9), b-4 (HSD17B4/CASP1), b-5 (NOSIP/COX6B1), c-1 (NDUFA4/RPS9), c-2 (NOSIP/NDUFA1), c-3 (NDUFA4/COX6B1), c-4 (NDUFA4/NDUFA1), c-5 (ATP5A1/PSMB3), d-1 (RpI31/PSMB3), d-2 (ATP5A1/CASP1), d-3 (SLC7A3/GNAS), d-4 (HSD17B4/NDUFA1), d-5 (S1c7a3/Ndufa1), e-1 (TUBB4B/RPS9), e-2 (RPL31/RPS9), e-3 (MP68/RPS9), e-4 (NOSIP/RPS9), e-5 (ATP5A1/RPS9), e-6 (ATP5A1/COX6B1), f-1 (ATP5A1/GNAS), f-2 (ATP5A1/NDUFA1), f-3 (HSD17B4/COX6B1), f-4 (HSD17B4/GNAS), f-5 (MP68/COX6B1), g-1 (MP68/NDUFA1), g-2 (NDUFA4/CASP1), g-3 (NDUFA4/GNAS), g-4 (NOSIP/CASP1), g-5 (RPL31/CASP1), h-1 (RPL31/COX6B1), h-2 (RPL31/GNAS), h-3 (RPL31/NDUFA1), h-4 (S1c7a3/CASP1), h-5 (SLC7A3/COX6B1), i-1 (SLC7A3/RPS9), i-2 (RPL32/ALB7), i-2 (RPL32/ALB7), or i-3 (alpha-globin gene).

[1022] In particularly preferred embodiments, the nucleic acid of component A and/or component B comprises at least one coding sequence as defined herein encoding at least one antigenic protein as defined herein, wherein said coding sequence is operably linked to a HSD17B4 5′-UTR and a PSMB3 3′-UTR (HSD17B4/PSMB3 (UTR design a-1)).

[1023] In further preferred embodiments, the nucleic acid of component A and/or component B comprises at least one coding sequence as specified herein encoding at least one antigenic protein as defined herein, preferably derived from SARS-CoV-2 (nCoV-2019) coronavirus, wherein said coding sequence is operably linked to a SLC7A3 5′-UTR and a PSMB3 3′-UTR (SLC7A3/PSMB3 (UTR design a-3)).

[1024] In further preferred embodiments, the nucleic acid of component A and/or component B comprises at least one coding sequence as specified herein encoding at least one antigenic protein as defined herein, preferably derived from SARS-CoV-2 (nCoV-2019) coronavirus, wherein said coding sequence is operably linked to a RPL31 5′-UTR and a RPS9 3′-UTR (RPL31/RPS9 (UTR design e-2)).

[1025] In particularly preferred embodiments, the nucleic acid of component A and/or component B comprises at least one coding sequence as defined herein encoding at least one antigenic protein as defined herein, wherein said coding sequence is operably linked to an alpha-globin (“muag”) 3′-UTR.

[1026] In embodiments, the nucleic acid of component A and/or component B, e.g. the DNA or RNA may be monocistronic, bicistronic, or multicistronic.

[1027] The term “monocistronic” will be recognized and understood by the person of ordinary skill in the art, and is e.g. intended to refer to a nucleic acid that comprises only one coding sequence. The terms “bicistronic”, or “multicistronic” as used herein will be recognized and understood by the person of ordinary skill in the art, and are e.g. intended to refer to a nucleic acid that may comprise two (bicistronic) or more (multicistronic) coding sequences.

[1028] In preferred embodiments, the nucleic acid of component A and/or component B is monocistronic.

[1029] In embodiments, the nucleic acid of component A and/or component B is monocistronic and the coding sequence of said nucleic acid encodes at least two different antigenic peptides or proteins. Accordingly, said coding sequence may encode at least two, three, four, five, six, seven, eight and more antigenic peptides or proteins, linked with or without an amino acid linker sequence, wherein said linker sequence can comprise rigid linkers, flexible linkers, cleavable linkers, or a combination thereof. Such constructs are herein referred to as “multi-antigen-constructs”.

[1030] In embodiments, the nucleic acid of component A and/or component B may be bicistronic or multicistronic and comprises at least two coding sequences, wherein the at least two coding sequences encode two or more different antigenic peptides or proteins as specified herein. Accordingly, the coding sequences in a bicistronic or multicistronic nucleic acid suitably encodes distinct antigenic proteins or peptides as defined herein or immunogenic fragments or immunogenic variants thereof. Preferably, the coding sequences in said bicistronic or multicistronic constructs may be separated by at least one IRES (internal ribosomal entry site) sequence. Thus, the term “encoding two or more antigenic peptides or proteins” may mean, without being limited thereto, that the bicistronic or multicistronic nucleic acid encodes e.g. at least two, three, four, five, six or more (preferably different) antigenic peptides or proteins of virus isolates. Alternatively, the bicistronic or multicistronic nucleic acid may encode e.g. at least two, three, four, five, six or more (preferably different) antigenic peptides or proteins derived from the same virus. In that context, suitable IRES sequences may be selected from the list of nucleic acid sequences according to SEQ ID NOs: 1566-1662 of the patent application WO2017081082, or fragments or variants of these sequences. In this context, the disclosure of WO2017081082 relating to IRES sequences is herewith incorporated by reference.

[1031] It has to be understood that, in the context of the invention, certain combinations of coding sequences may be generated by any combination of monocistronic, bicistronic and multicistronic DNA and/or RNA constructs and/or multi-antigen-constructs to obtain a nucleic acid set encoding multiple antigenic peptides or proteins as defined herein.

[1032] In embodiments, the A/U (A/T) content in the environment of the ribosome binding site of the nucleic acid of component A and/or component B may be increased compared to the A/U (A/T) content in the environment of the ribosome binding site of its respective wild type or reference nucleic acid. This modification (an increased A/U (A/T) content around the ribosome binding site) increases the efficiency of ribosome binding to the nucleic acid, e.g. to an RNA. An effective binding of the ribosomes to the ribosome binding site in turn has the effect of an efficient translation the nucleic acid.

[1033] Accordingly, in a particularly preferred embodiment, the nucleic acid of component A and/or component B comprises a ribosome binding site, also referred to as “Kozak sequence” identical to or at least 80%, 85%, 90%, 95% identical to any one of the sequences SEQ ID NOs: 180,181, 22845-22847 or fragments or variants thereof.

[1034] In preferred embodiments, the nucleic acid of component A and/or component B comprises at least one poly(N) sequence, e.g. at least one poly(A) sequence, at least one poly(U) sequence, at least one poly(C) sequence, or combinations thereof.

[1035] In preferred embodiments, the nucleic acid of component A and/or component B, preferably the RNA comprises at least one poly(A) sequence.

[1036] The terms “poly(A) sequence”, “poly(A) tail” or “3′-poly(A) tail” as used herein will be recognized and understood by the person of ordinary skill in the art, and are e.g. intended to be a sequence of adenosine nucleotides, typically located at the 3′-end of a linear RNA (or in a circular RNA), of up to about 1000 adenosine nucleotides. Preferably, said poly(A) sequence is essentially homopolymeric, e.g. a poly(A) sequence of e.g. 100 adenosine nucleotides has essentially the length of 100 nucleotides. In other embodiments, the poly(A) sequence may be interrupted by at least one nucleotide different from an adenosine nucleotide, e.g. a poly(A) sequence of e.g. 100 adenosine nucleotides may have a length of more than 100 nucleotides (comprising 100 adenosine nucleotides and in addition said at least one nucleotide—or a stretch of nucleotides—different from an adenosine nucleotide). It has to be understood that “poly(A) sequence” as defined herein typically relates to RNA—however in the context of the invention, the term likewise relates to corresponding sequences in a DNA molecule (e.g. a “poly(T) sequence”).

[1037] The poly(A) sequence may comprise about 10 to about 500 adenosine nucleotides, about 10 to about 200 adenosine nucleotides, about 40 to about 200 adenosine nucleotides, or about 40 to about 150 adenosine nucleotides. Suitably, the length of the poly(A) sequence may be at least about or even more than about 10, 50, 64, 75, 100, 200, 300, 400, or 500 adenosine nucleotides.

[1038] In preferred embodiments, the nucleic acid of component A and/or component B comprises at least one poly(A) sequence comprising about 30 to about 200 adenosine nucleotides. In particularly preferred embodiments, the poly(A) sequence comprises about 64 adenosine nucleotides (A64). In other particularly preferred embodiments, the poly(A) sequence comprises about 100 adenosine nucleotides (A100). In other embodiments, the poly(A) sequence comprises about 150 adenosine nucleotides.

[1039] In further embodiments, the nucleic acid of component A and/or component B comprises at least one poly(A) sequence comprising about 100 adenosine nucleotides, wherein the poly(A) sequence is interrupted by non-adenosine nucleotides, preferably by 10 non-adenosine nucleotides (A30-N10-A70).

[1040] The poly(A) sequence as defined herein may be located directly at the 3′ terminus of the nucleic acid of component A and/or component B, preferably directly located at the 3′ terminus of an RNA. In preferred embodiments, the 3′-terminal nucleotide (that is the last 3′-terminal nucleotide in the polynucleotide chain) is the 3′-terminal A nucleotide of the at least one poly(A) sequence. The term “directly located at the 3′ terminus” has to be understood as being located exactly at the 3′ terminus—in other words, the 3′ terminus of the nucleic acid consists of a poly(A) sequence terminating with an A nucleotide.

[1041] In a particularly preferred embodiment the nucleic acid sequence of component A and/or component B, preferably the RNA comprises a poly(A) sequence of at least 70 adenosine nucleotides, preferably consecutive at least 70 adenosine nucleotides, wherein the 3′-terminal nucleotide is an adenosine nucleotide.

[1042] In this context it has been shown that ending on an adenosine nucleotide decreases the induction of IFNalpha by the RNA vaccine. This is particularly important as the induction of IFNalpha is thought to be the main factor for induction of fever in vaccinated subjects, which of course has to be avoided.

[1043] In embodiments where the nucleic acid of component A and/or component B is an RNA, the poly(A) sequence of the nucleic acid is preferably obtained from a DNA template during RNA in vitro transcription. In other embodiments, the poly(A) sequence is obtained in vitro by common methods of chemical synthesis without being necessarily transcribed from a DNA template. In other embodiments, poly(A) sequences are generated by enzymatic polyadenylation of the RNA (after RNA in vitro transcription) using commercially available polyadenylation kits and corresponding protocols known in the art, or alternatively, by using immobilized poly(A)polymerases e.g. using a methods and means as described in WO2016174271.

[1044] The nucleic acid of component A and/or component B may comprise a poly(A) sequence obtained by enzymatic polyadenylation, wherein the majority of nucleic acid molecules comprise about 100 (+/−20) to about 500 (+/−50), preferably about 250 (+/−20) adenosine nucleotides.

[1045] In embodiments, the nucleic acid of component A and/or component B comprises a poly(A) sequence derived from a template DNA and, optionally, additionally comprises at least one additional poly(A) sequence generated by enzymatic polyadenylation, e.g. as described in WO2016091391.

[1046] In embodiments, the nucleic acid of component A and/or component B comprises at least one polyadenylation signal.

[1047] In embodiments, the nucleic acid of component A and/or component B comprises at least one poly(C) sequence.

[1048] The term “poly(C) sequence” as used herein is intended to be a sequence of cytosine nucleotides of up to about 200 cytosine nucleotides. In preferred embodiments, the poly(C) sequence comprises about 10 to about 200 cytosine nucleotides, about 10 to about 100 cytosine nucleotides, about 20 to about 70 cytosine nucleotides, about 20 to about 60 cytosine nucleotides, or about 10 to about 40 cytosine nucleotides. In a particularly preferred embodiment, the poly(C) sequence comprises about 30 cytosine nucleotides.

[1049] In preferred embodiments, the nucleic acid of component A and/or component B comprises at least one histone stem-loop (hSL) or histone stem loop structure.

[1050] The term “histone stem-loop” (abbreviated as “hSL” in e.g. the sequence listing) is intended to refer to nucleic acid sequences that form a stem-loop secondary structure predominantly found in histone mRNAs.

[1051] Histone stem-loop sequences/structures may suitably be selected from histone stem-loop sequences as disclosed in WO2012019780, the disclosure relating to histone stem-loop sequences/histone stem-loop structures incorporated herewith by reference. A histone stem-loop sequence that may be used within the present invention may preferably be derived from formulae (I) or (II) of WO2012019780. According to a further preferred embodiment, the nucleic acid of component A and/or component B comprises at least one histone stem-loop sequence derived from at least one of the specific formulae (Ia) or (IIa) of the patent application WO2012019780.

[1052] In preferred embodiments, the nucleic acid of component A and/or component B comprises at least one histone stem-loop, wherein said histone stem-loop (hSL) comprises or consists a nucleic acid sequence identical or at least 70%, 80%, 90%, 91%, 92%, 93%, 94%, 95%, 96%, 97%, 98%, or 99% identical to SEQ ID NOs: 178 or 179, or fragments or variants thereof.

[1053] In other embodiments, the nucleic acid of component A and/or component B does not comprise a hsL as defined herein.

[1054] In embodiments, in particular in embodiments that relate to RNA, the nucleic acid of component A and/or component B comprises a 3′-terminal sequence element. Said 3′-terminal sequence element comprises a poly(A) sequence and optionally a histone-stem-loop sequence. Accordingly, the nucleic acid of component A and/or component B comprises at least one 3′-terminal sequence element comprising or consisting of a nucleic acid sequence being identical or at least 70%, 80%, 90%, 91%, 92%, 93%, 94%, 95%, 96%, 97%, 98%, or 99% identical to SEQ ID NOs: 182-230, 22912, 22913 or a fragment or variant thereof.

[1055] In preferred embodiments, in particular in embodiments that relate to RNA, the nucleic acid of component A and/or component B comprises a 3′-terminal sequence element. Said 3′-terminal sequence element comprises a poly(A) sequence and optionally a histone-stem-loop sequence. Accordingly, the nucleic acid of component A and/or component B may comprise at least one 3′-terminal sequence element comprising or consisting of a nucleic acid sequence being identical or at least 70%, 80%, 90%, 91%, 92%, 93%, 94%, 95%, 96%, 97%, 98%, or 99% identical to SEQ ID NOs: 182, 187, 189, 192, 199, 207, or a fragment or variant thereof.

[1056] In various embodiments, in particular in embodiments that relate to RNA, the nucleic acid of component A and/or component B may comprise a 5-terminal sequence element according to SEQ ID NOs: 176,177, 22840-22844, or a fragment or variant thereof. Such a 5′-terminal sequence element comprises e.g. a binding site for T7 RNA polymerase. Further, the first nucleotide of said 5′-terminal start sequence may preferably comprise a 2′O methylation, e.g. 2′O methylated guanosine or a 2′O methylated adenosine.

[1057] Preferably, the nucleic acid of component A and/or component B, e.g. the RNA or DNA, typically comprises about 50 to about 20000 nucleotides, or about 500 to about 10000 nucleotides, or about 1000 to about 10000 nucleotides, or preferably about 1000 to about 5000 nucleotides, or even more preferably about 2000 to about 5000 nucleotides.

[1058] In embodiments, the nucleic acid of component A and/or component B is a DNA or an RNA.

[1059] In embodiments, the DNA is a plasmid DNA or a linear coding DNA construct, wherein the DNA comprises or consists of the nucleic acid elements as defined herein (e.g. including coding sequences, UTRs, poly(A/T), polyadenylation signal, a promoter).

[1060] In embodiments, the nucleic acid of component A and/or component B is a DNA expression vector. Such a DNA expression vector may be selected from the group consisting of a bacterial plasmid, an Adenovirus, a Poxvirus, a Parapoxivirus (orf virus), a Vaccinia virus, a Fowlpox virus, a Herpes virus, an Adeno-associated virus (AAV), an Alphavirus, a Lentivirus, a Lambda phage, a Lymphocytic choriomeningitis virus, a Listeria sp and Salmonella sp.

[1061] Suitably, the DNA may also comprise a promoter that is operably linked to the respective antigen coding sequence of component A and/or component B. The promoter operably linked to the antigen coding sequence can be e.g. a promoter from simian virus 40 (SV40), a mouse mammary tumor virus (MMTV) promoter, a human immunodeficiency virus (HIV) promoter such as the bovine immunodeficiency virus (BIV) long terminal repeat (LTR) promoter, a Moloney virus promoter, an avian leukosis virus (ALV) promoter, a cytomegalovirus (CMV) promoter such as the CMV immediate early promoter, Epstein Barr virus (EBV) promoter, or a Rous sarcoma virus (RSV) promoter. The promoter can also be a promoter from a human gene such as human actin, human myosin, human hemoglobin, human muscle creatine, or human metalothionein. The promoter can also be a tissue specific promoter, such as a muscle or skin specific promoter, natural or synthetic. Examples of such promoters are described in US patent application publication no. US20040175727. In preferred embodiments, the vector can be pVAX, pcDNA3.0, or provax, or any other expression vector capable of expressing DNA encoding the coronavirus antigen and enabling a cell to translate the sequence to an antigen that is recognized by the immune system.

[1062] Further suitable plasmid DNA may be generated to allow efficient production of the encoded antigens in cell lines, e.g. in insect cell lines, for example using vectors as described in WO2009150222A2 and as defined in PCT claims 1 to 33, the disclosure relating to claims 1 to 33 of WO2009150222A2 herewith incorporated by reference.

[1063] In embodiments, the nucleic acid of component A and/or component B is an adenovirus based vector. Such an adenovirus based vector may comprise at least one coding sequence encoding at least one antigenic peptide or protein as defined herein (e.g. Coronavirus antigen of component A, further viral antigen of component B).

[1064] In the context of the invention, any suitable adenovirus based vector may be used such as those described in WO2005071093 or WO2006048215. Suitably, the adenovirus based vector used is a simian adenovirus, thereby avoiding dampening of the immune response after vaccination by pre-existing antibodies to common human entities such as AdHu5. Suitable simian adenovirus vectors include AdCh63 (see WO2005071093) or AdCh68 (Cohen et al J. Gen Virol 2002 83:151) but others may also be used. Suitably the adenovirus vector will have the E1 region deleted, rendering it replication-deficient in human cells. Other regions of the adenovirus such as E3 and E4 may also be deleted.

[1065] In embodiments, the nucleic acid of component A and/or component B is an orf virus based vector. Such an orf virus based vector may comprise at least one coding sequence encoding at least one antigenic peptide or protein as defined herein (e.g. Coronavirus antigen of component A, further viral antigen of component B).

[1066] In particularly preferred embodiments of the invention, the nucleic acid of component A and/or component B is an RNA.

[1067] Preferably, the RNA of component A and/or component B typically comprises about 50 to about 20000 nucleotides, or about 500 to about 10000 nucleotides, or about 1000 to about 10000 nucleotides, or preferably about 1000 to about 5000 nucleotides, or even more preferably about 2000 to about 5000 nucleotides.

[1068] According to preferred embodiments, the nucleic acid of component A and/or component B is an RNA, preferably a coding RNA.

[1069] In preferred embodiments, the (coding) RNA of component A and/or component B is selected from an mRNA, a (coding) self-replicating RNA, a (coding) circular RNA, a (coding) viral RNA, or a (coding) replicon RNA.

[1070] In embodiments, the RNA is a circular RNA. As used herein, “circular RNA” or “circRNAs” have to be understood as a circular polynucleotide constructs that encode at least one antigenic peptide or protein as defined herein. Preferably, such a circRNA is a single stranded RNA molecule. In preferred embodiments, said circRNA comprises at least one coding sequence encoding at least one antigenic protein as defined herein, or an immunogenic fragment or an immunogenic variant thereof.

[1071] In embodiments, the RNA is a replicon RNA. The term “replicon RNA” will be recognized and understood by the person of ordinary skill in the art, and is e.g. intended to be an optimized self-replicating RNA. Such constructs may include replicase elements derived from e.g. alphaviruses (e.g. SFV, SIN, VEE, or RRV) and the substitution of the structural virus proteins with the nucleic acid of interest (that is, the coding sequence encoding an antigenic peptide or protein as defined herein). Alternatively, the replicase may be provided on an independent coding RNA construct or a coding DNA construct. Downstream of the replicase may be a sub-genomic promoter that controls replication of the replicon RNA.

[1072] In particularly preferred embodiments, the nucleic acid of component A and/or component B is not a replicon RNA or a self-replicating RNA.

[1073] In particularly preferred embodiments, the nucleic acid of component A and/or component B is an mRNA.

[1074] Preferably, the mRNA of component A and/or component B does not comprise a replicase element (e.g. a nucleic acid encoding a replicase).

[1075] The terms “RNA” and “mRNA” will be recognized and understood by the person of ordinary skill in the art, and are e.g. intended to be a ribonucleic acid molecule, i.e. a polymer consisting of nucleotides. These nucleotides are usually adenosine-monophosphate, uridine-monophosphate, guanosine-monophosphate and cytidine-monophosphate monomers which are connected to each other along a so-called backbone. The backbone is formed by phosphodiester bonds between the sugar, i.e. ribose, of a first and a phosphate moiety of a second, adjacent monomer. The specific succession of the monomers is called the RNA-sequence. The mRNA (messenger RNA) provides the nucleotide coding sequence that may be translated into an amino-acid sequence of a particular peptide or protein.

[1076] In the context of the invention, the RNA of component A and/or component B, preferably the mRNA, may provide at least one coding sequence encoding an antigenic protein as defined herein that is translated into a (functional) antigen after administration (e.g. after administration to a subject, e.g. a human subject).

[1077] Accordingly, the RNA of component A and/or component B, preferably the mRNA, is suitable for a vaccine, preferably a combination vaccine of the invention.

[1078] Suitably, the RNA of component A and/or component B may be modified by the addition of a 5′-cap structure, which preferably stabilizes the RNA and/or enhances expression of the encoded antigen and/or reduces the stimulation of the innate immune system (after administration to a subject). A 5′-cap structure is of particular importance in embodiments where the nucleic acid is an RNA, in particular a linear coding RNA, e.g. a linear mRNA or a linear coding replicon RNA.

[1079] Accordingly, in preferred embodiments, the at least one nucleic acid of component A and/or the at least one nucleic acid of component B comprises a 5′-cap structure, preferably m7G, cap0, cap1, cap2, a modified cap0 or a modified cap1 structure.

[1080] The term “5-cap structure” as used herein will be recognized and understood by the person of ordinary skill in the art, and is e.g. intended to refer to a 5′ modified nucleotide, particularly a guanine nucleotide, positioned at the 5′-end of an RNA, e.g. an mRNA. Preferably, the 5′-cap structure is connected via a 5′-5′-triphosphate linkage to the RNA.

[1081] 5′-cap structures which may be suitable in the context of the present invention are cap0 (methylation of the first nucleobase, e.g. m7GpppN), cap1 (additional methylation of the ribose of the adjacent nucleotide of m7GpppN), cap2 (additional methylation of the ribose of the 2nd nucleotide downstream of the m7GpppN), cap3 (additional methylation of the ribose of the 3rd nucleotide downstream of the m7GpppN), cap4 (additional methylation of the ribose of the 4th nucleotide downstream of the m7GpppN), ARCA (anti-reverse cap analogue), modified ARCA (e.g. phosphothioate modified ARCA), inosine, N1-methyl-guanosine, 2′-fluoro-guanosine, 7-deaza-guanosine, 8-oxo-guanosine, 2-amino-guanosine, LNA-guanosine, and 2-azido-guanosine.

[1082] A 5′-cap (cap0 or cap1) structure may be formed in chemical RNA synthesis or in RNA in vitro transcription (co-transcriptional capping) using cap analogues.

[1083] The term “cap analogue” as used herein will be recognized and understood by the person of ordinary skill in the art, and is e.g. intended to refer to a non-polymerizable di-nucleotide or tri-nucleotide that has cap functionality in that it facilitates translation or localization, and/or prevents degradation of a nucleic acid molecule, particularly of an RNA molecule, when incorporated at the 5′-end of the nucleic acid molecule. Non-polymerizable means that the cap analogue will be incorporated only at the 5′-terminus because it does not have a 5′ triphosphate and therefore cannot be extended in the 3′-direction by a template-dependent polymerase, particularly, by template-dependent RNA polymerase. Examples of cap analogues include, but are not limited to, a chemical structure selected from the group consisting of m7GpppG, m7GpppA, m7GpppC; unmethylated cap analogues (e.g. GpppG); dimethylated cap analogue (e.g. m2,7GpppG), trimethylated cap analogue (e.g. m2,2,7GpppG), dimethylated symmetrical cap analogues (e.g. m7Gpppm7G), or anti reverse cap analogues (e.g. ARCA; m7,2′OmeGpppG, m7,2′dGpppG, m7,3′OmeGpppG, m7,3′dGpppG and their tetraphosphate derivatives). Further cap analogues have been described previously (WO2008016473, WO2008157688, WO2009149253, WO2011015347, and WO2013059475). Further suitable cap analogues in that context are described in WO2017066793, WO2017066781, WO2017066791, WO2017066789, WO2017/053297, WO2017066782, WO2018075827 and WO2017066797 wherein the disclosures referring to cap analogues are incorporated herewith by reference.

[1084] In embodiments, a modified cap1 structure is generated using tri-nucleotide cap analogue as disclosed in WO2017053297, WO2017066793, WO2017066781, WO2017066791, WO2017066789, WO2017066782, WO2018075827 and WO2017066797. In particular, any cap structures derivable from the structure disclosed in claim 1-5 of WO2017053297 may be suitably used to co-transcriptionally generate a modified cap1 structure. Further, any cap structures derivable from the structure defined in claim 1 or claim 21 of WO2018075827 may be suitably used to co-transcriptionally generate a modified cap1 structure.

[1085] In preferred embodiments, the RNA of component A and/or component B, in particular the mRNA comprises a cap1 structure.

[1086] In preferred embodiments, the 5-cap structure may suitably be added co-transcriptionally using tri-nucleotide cap analogue as defined herein, preferably in an RNA in vitro transcription reaction as defined herein.

[1087] In preferred embodiments, the cap1 structure of the RNA of component A and/or component B, is formed using co-transcriptional capping using tri-nucleotide cap analogues m7G(5′)ppp(5′)(2′OMeA)pG or m7G(5′)ppp(5′)(2′OMeG)pG. A preferred cap1 analogues in that context is m7G(5′)ppp(5′)(2′OMeA)pG.

[1088] In other preferred embodiments, the cap1 structure of the RNA of the invention is formed using co-transcriptional capping using tri-nucleotide cap analogue 3′OMe-m7G(5′)ppp(5′)(2′OMeA)pG.

[1089] In other embodiments, a cap0 structure of the RNA of the invention is formed using co-transcriptional capping using cap analogue 3′OMe-m7G(5′)ppp(5′)G.

[1090] In other embodiments, the 5′-cap structure is formed via enzymatic capping using capping enzymes (e.g. vaccinia virus capping enzymes and/or cap-dependent 2′-0 methyltransferases) to generate cap0 or cap1 or cap2 structures. The 5′-cap structure (cap0 or cap1) may be added using immobilized capping enzymes and/or cap-dependent 2′-0 methyltransferases using methods and means disclosed in WO2016193226.

[1091] In preferred embodiments, about 70%, 75%, 80%, 85%, 90%, 95% of the RNA (species) of component A and/or component B comprises a cap1 structure as determined using a capping assay. In preferred embodiments, less than about 20%, 15%, 10%, 5%, 4%, 3%, 2%, 1% of the RNA (species) of component A and/or component B does not comprises a cap1 structure as determined using a capping assay. In other preferred embodiments, about 70%, 75%, 80%, 85%, 90%, 95% of the RNA (species) of component A and/or component B comprises a cap0 structure as determined using a capping assay. In preferred embodiments, less than about 20%, 15%, 10%, 5%, 4%, 3%, 2%, 1% of the RNA (species) of component A and/or component B does not comprises a cap0 structure as determined using a capping assay.

[1092] In the context of the invention, the term “RNA species” is not restricted to mean “one single molecule” but is understood to comprise an ensemble of essentially identical RNA molecules. Accordingly, it may relate to a plurality of essentially identical (coding) RNA molecules.

[1093] For determining the presence/absence of a cap0 or a cap1 structure, a capping assays as described in published PCT application WO2015101416, in particular, as described in claims 27 to 46 of published PCT application WO2015101416 can be used. Other capping assays that may be used to determine the presence/absence of a cap0 or a cap1 structure of an RNA are described in PCT/EP2018/08667, or published PCT applications WO2014152673 and WO2014152659.

[1094] In preferred embodiments, the RNA of component A and/or component B comprises an m7G(5′)ppp(5′)(2′OMeA) cap structure. In such embodiments, the RNA comprises a 5-terminal m7G cap, and an additional methylation of the ribose of the adjacent nucleotide of m7GpppN, in that case, a 2′O methylated Adenosine. Preferably, about 70%, 75%, 80%, 85%, 90%, 95% of the RNA (species) comprises such a cap1 structure as determined using a capping assay.

[1095] In other preferred embodiments, the RNA of component A and/or component B comprises an m7G(5′)ppp(5′)(2′OMeG) cap structure. In such embodiments, the RNA comprises a 5-terminal m7G cap, and an additional methylation of the ribose of the adjacent nucleotide, in that case, a 2′O methylated guanosine. Preferably, about 70%, 75%, 80%, 85%, 90%, 95% of the coding RNA (species) comprises such a cap1 structure as determined using a capping assay.

[1096] Accordingly, the first nucleotide of said RNA or mRNA sequence, that is, the nucleotide downstream of the m7G(5′)ppp structure, may be a 2′O methylated guanosine or a 2′O methylated adenosine.

[1097] According to embodiments, the RNA of component A and/or component B is a modified RNA, wherein the modification refers to chemical modifications comprising backbone modifications as well as sugar modifications or base modifications.

[1098] A modified RNA may comprise nucleotide analogues/modifications, e.g. backbone modifications, sugar modifications or base modifications. A backbone modification in the context of the invention is a modification, in which phosphates of the backbone of the nucleotides of the RNA are chemically modified. A sugar modification in the context of the invention is a chemical modification of the sugar of the nucleotides of the RNA. Furthermore, a base modification in the context of the invention is a chemical modification of the base moiety of the nucleotides of the RNA. In this context, nucleotide analogues or modifications are preferably selected from nucleotide analogues which are applicable for transcription and/or translation.

[1099] In particularly preferred embodiments, the nucleotide analogues/modifications which may be incorporated into a modified RNA of component A and/or component B are preferably selected from 2-amino-6-chloropurineriboside-5′-triphosphate, 2-Aminopurine-riboside-5′-triphosphate; 2-aminoadenosine-5′-triphosphate, 2′-Amino-2′-deoxycytidine-triphosphate, 2-thiocytidine-5′-triphosphate, 2-thiouridine-5′-triphosphate, 2′-Fluorothymidine-5′-triphosphate, 2′-O-Methyl-inosine-5′-triphosphate 4-thiouridine-5′-triphosphate, 5-aminoallylcytidine-5′-triphosphate, 5-aminoallyluridine-5′-triphosphate, 5-bromocytidine-5′-triphosphate, 5-bromouridine-5′-triphosphate, 5-Bromo-2′-deoxycytidine-5′-triphosphate, 5-Bromo-2′-deoxyuridine-5′-triphosphate, 5-iodocytidine-5′-triphosphate, 5-lodo-2′-deoxycytidine-5′-triphosphate, 5-iodouridine-5′-triphosphate, 5-lodo-2′-deoxyuridine-5′-triphosphate, 5-methylcytidine-5′-triphosphate, 5-methyluridine-5′-triphosphate, 5-Propynyl-2′-deoxycytidine-5′-triphosphate, 5-Propynyl-2′-deoxyuridine-5′-triphosphate, 6-azacytidine-5′-triphosphate, 6-azauridine-5′-triphosphate, 6-chloropurineriboside-5′-triphosphate, 7-deazaadenosine-5′-triphosphate, 7-deazaguanosine-5′-triphosphate, 8-azaadenosine-5′-triphosphate, 8-azidoadenosine-5′-triphosphate, benzimidazole-riboside-5′-triphosphate, N1-methyladenosine-5′-triphosphate, N1-methylguanosine-5′-triphosphate, N6-methyladenosine-5′-triphosphate, 06-methylguanosine-5′-triphosphate, pseudouridine-5′-triphosphate, or puromycin-5′-triphosphate, xanthosine-5′-triphosphate. Particular preference is given to nucleotides for base modifications selected from the group of base-modified nucleotides consisting of 5-methylcytidine-5′-triphosphate, 7-deazaguanosine-5′-triphosphate, 5-bromocytidine-5′-triphosphate, and pseudouridine-5′-triphosphate, pyridin-4-one ribonucleoside, 5-aza-uridine, 2-thio-5-aza-uridine, 2-thiouridine, 4-thio-pseudouridine, 2-thio-pseudouridine, 5-hydroxyuridine, 3-methyluridine, 5-carboxymethyl-uridine, 1-carboxymethyl-pseudouridine, 5-propynyl-uridine, 1-propynyl-pseudouridine, 5-taurinomethyluridine, 1-taurinomethyl-pseudouridine, 5-taurinomethyl-2-thio-uridine, 1-taurinomethyl-4-thio-uridine, 5-methyl-uridine, 1-methyl-pseudouridine, 4-thio-1-methyl-pseudouridine, 2-thio-1-methyl-pseudouridine, 1-methyl-1-deaza-pseudouridine, 2-thio-1-methyl-1-deaza-pseudouridine, dihydrouridine, dihydropseudouridine, 2-thio-dihydrouridine, 2-thio-dihydropseudouridine, 2-methoxyuridine, 2-methoxy-4-thio-uridine, 4-methoxy-pseudouridine, and 4-methoxy-2-thio-pseudouridine, 5-aza-cytidine, pseudoisocytidine, 3-methyl-cytidine, N4-acetylcytidine, 5-formylcytidine, N4-methylcytidine, 5-hydroxymethylcytidine, 1-methyl-pseudoisocytidine, pyrrolo-cytidine, pyrrolo-pseudoisocytidine, 2-thio-cytidine, 2-thio-5-methyl-cytidine, 4-thio-pseudoisocytidine, 4-thio-1-methyl-pseudoisocytidine, 4-thio-1-methyl-1-deaza-pseudoisocytidine, 1-methyl-1-deaza-pseudoisocytidine, zebularine, 5-aza-zebularine, 5-methyl-zebularine, 5-aza-2-thio-zebularine, 2-thio-zebularine, 2-methoxy-cytidine, 2-methoxy-5-methyl-cytidine, 4-methoxy-pseudoisocytidine, and 4-methoxy-1-methyl-pseudoisocytidine, 2-aminopurine, 2, 6-diaminopurine, 7-deaza-adenine, 7-deaza-8-aza-adenine, 7-deaza-2-aminopurine, 7-deaza-8-aza-2-aminopurine, 7-deaza-2,6-diaminopurine, 7-deaza-8-aza-2,6-diaminopurine, 1-methyladenosine, N6-methyladenosine, N6-isopentenyladenosine, N6-(cis-hydroxyisopentenyl)adenosine, 2-methylthio-N6-(cis-hydroxyisopentenyl) adenosine, N6-glycinylcarbamoyladenosine, N6-threonylcarbamoyladenosine, 2-methylthio-N6-threonyl carbamoyladenosine, N6,N6-dimethyladenosine, 7-methyladenine, 2-methylthio-adenine, and 2-methoxy-adenine, inosine, 1-methyl-inosine, wyosine, wybutosine, 7-deaza-guanosine, 7-deaza-8-aza-guanosine, 6-thio-guanosine, 6-thio-7-deaza-guanosine, 6-thio-7-deaza-8-aza-guanosine, 7-methyl-guanosine, 6-thio-7-methyl-guanosine, 7-methylinosine, 6-methoxy-guanosine, 1-methylguanosine, N2-methylguanosine, N2,N2-dimethylguanosine, 8-oxo-guanosine, 7-methyl-8-oxo-guanosine, 1-methyl-6-thio-guanosine, N2-methyl-6-thio-guanosine, and N2,N2-dimethyl-6-thio-guanosine, 5′-O-(1-thiophosphate)-adenosine, 5′-O-(1-thiophosphate)-cytidine, (1-thiophosphate)-guanosine, 5′-O-(1-thiophosphate)-uridine, 5′-O-(1-thiophosphate)-pseudouridine, 6-aza-cytidine, 2-thio-cytidine, alpha-thio-cytidine, Pseudo-iso-cytidine, 5-aminoallyl-uridine, 5-iodo-uridine, N1-methyl-pseudouridine, 5,6-dihydrouridine, alpha-thio-uridine, 4-thio-uridine, 6-aza-uridine, 5-hydroxy-uridine, deoxy-thymidine, 5-methyl-uridine, Pyrrolo-cytidine, inosine, alpha-thio-guanosine, 6-methyl-guanosine, 5-methyl-cytdine, 8-oxo-guanosine, 7-deaza-guanosine, N1-methyl-adenosine, 2-amino-6-Chloro-purine, N6-methyl-2-amino-purine, Pseudo-iso-cytidine, 6-Chloro-purine, N6-methyl-adenosine, alpha-thio-adenosine, 8-azido-adenosine, 7-deaza-adenosine.

[1100] In some embodiments, the at least one modified nucleotide is selected from pseudouridine, N1-methylpseudouridine, N1-ethylpseudouridine, 2-thiouridine, 4′-thiouridine, 5-methylcytosine, 5-methyluridine, 2-thio-1-methyl-1-deaza-pseudouridine, 2-thio-1-methyl-pseudouridine, 2-thio-5-aza-uridine, 2-thio-dihydropseudouridine, 2-thio-dihydrouridine, 2-thio-pseudouridine, 4-methoxy-2-thio-pseudouridine, 4-methoxy-pseudouridine, 4-thio-1-methyl-pseudouridine, 4-thio-pseudouridine, 5-aza-uridine, dihydropseudouridine, 5-methoxyuridine and 2′-O-methyl uridine.

[1101] Particularly preferred in that context are pseudouridine N1-methylpseudouridine (m1 ψ), 5-methylcytosine, and 5-methoxyuridine.

[1102] Accordingly, in embodiments, the at least one nucleic acid of component A and/or the at least one nucleic acid of component B comprises at least one modified nucleotide.

[1103] In some embodiments, essentially all, e.g. essentially 100% of the uracil in the coding sequence of component A and/or component B have a chemical modification, preferably a chemical modification is in the 5-position of the uracil.

[1104] Incorporating modified nucleotides such as e.g. pseudouridine N1-methylpseudouridine (m1 ψ), 5-methylcytosine, and/or 5-methoxyuridine into the coding sequence of component A and/or component B may be advantageous as unwanted innate immune responses (upon administration of the coding RNA or the vaccine) may be adjusted or reduced (if required).

[1105] In embodiments, the RNA of component A and/or component B comprises at least one coding sequence encoding at least one antigenic protein as defined herein, wherein said coding sequence comprises at least one modified nucleotide selected from pseudouridine (ψ) and N1-methylpseudouridine (m1 ψ), preferably wherein all uracil nucleotides are replaced by pseudouridine (ψ) nucleotides and/or N1-methylpseudouridine (m1 ψ) nucleotides, optionally wherein all uracil nucleotides are replaced by pseudouridine (ψ) nucleotides and/or N1-methylpseudouridine (m1ψ) nucleotides.

[1106] In preferred embodiments, the RNA of component A and/or component B does not comprise N1-methylpseudouridine (m14)) substituted positions. In further embodiments, the RNA of component A and/or component B does not comprise pseudouridine (ψ), N1-methylpseudouridine (m1 ψ), 5-methylcytosine, and 5-methoxyuridine substituted position.

[1107] In preferred embodiments, the RNA of component A and/or component B comprises a coding sequence that consists only of G, C, A and U nucleotides and therefore does not comprise modified nucleotides (except of the 5′ terminal cap structure (cap0, cap1, cap2)).

[1108] In embodiments, the nucleic acid of component A and/or component B is an RNA, wherein the RNA may be prepared using any method known in the art, including chemical synthesis such as e.g. solid phase RNA synthesis, as well as in vitro methods, such as RNA in vitro transcription reactions. Accordingly, in a preferred embodiment, the RNA is obtained by RNA in vitro transcription.

[1109] Accordingly, in preferred embodiments, the nucleic acid of component A and/or component B is preferably an in vitro transcribed RNA.

[1110] The terms “RNA in vitro transcription” or “in vitro transcription” relate to a process wherein RNA is synthesized in a cell-free system (in vitro). RNA may be obtained by DNA-dependent in vitro transcription of an appropriate DNA template, which according to the present invention is a linearized plasmid DNA template or a PCR-amplified DNA template. The promoter for controlling RNA in vitro transcription can be any promoter for any DNA-dependent RNA polymerase. Particular examples of DNA-dependent RNA polymerases are the T7, T3, SP6, or Syn5 RNA polymerases. In a preferred embodiment of the present invention the DNA template is linearized with a suitable restriction enzyme, before it is subjected to RNA in vitro transcription.

[1111] Reagents used in RNA in vitro transcription typically include: a DNA template (linearized plasmid DNA or PCR product) with a promoter sequence that has a high binding affinity for its respective RNA polymerase such as bacteriophage-encoded RNA polymerases (T7, T3, SP6, or Syn5); ribonucleotide triphosphates (NTPs) for the four bases (adenine, cytosine, guanine and uracil); optionally, a cap analogue as defined herein; optionally, further modified nucleotides as defined herein; a DNA-dependent RNA polymerase capable of binding to the promoter sequence within the DNA template (e.g. T7, T3, SP6, or Syn5 RNA polymerase); optionally, a ribonuclease (RNase) inhibitor to inactivate any potentially contaminating RNase; optionally, a pyrophosphatase to degrade pyrophosphate, which may inhibit RNA in vitro transcription; MgCl2, which supplies Mg2+ ions as a co-factor for the polymerase; a buffer (TRIS or HEPES) to maintain a suitable pH value, which can also contain antioxidants (e.g. DTT), and/or polyamines such as spermidine at optimal concentrations, e.g. a buffer system comprising TRIS-Citrate as disclosed in WO2017109161.

[1112] In preferred embodiments, the cap1 structure of the RNA of component A and/or component B is formed using co-transcriptional capping using tri-nucleotide cap analogues m7G(5′)ppp(5′)(2′OMeA)pG or m7G(5′)ppp(5′)(2′OMeG)pG. A preferred cap1 analogue that may suitably be used in manufacturing the coding RNA of the invention is m7G(5′)ppp(5′)(2′OMeA)pG.

[1113] In other preferred embodiments, the cap1 structure of the RNA of the invention is formed using co-transcriptional capping using tri-nucleotide cap analogue 3′OMe-m7G(5′)ppp(5′)(2′OMeA)pG.

[1114] In other embodiments, a cap0 structure of the RNA of the invention is formed using co-transcriptional capping using cap analogue 3′OMe-m7G(5′)ppp(5′)G.

[1115] In embodiments, the nucleotide mixture used in RNA in vitro transcription may additionally comprise modified nucleotides as defined herein. In that context, preferred modified nucleotides may be selected from pseudouridine (ψ), N1-methylpseudouridine 5-methylcytosine, and 5-methoxyuridine. In particular embodiments, uracil nucleotides in the nucleotide mixture are replaced (either partially or completely) by pseudouridine (ψ) and/or N1-methylpseudouridine (m1ψ) to obtain a modified RNA.

[1116] In preferred embodiments, the nucleotide mixture used in RNA in vitro transcription does not comprise modified nucleotides as defined herein. In preferred embodiments, the nucleotide mixture used in RNA in vitro transcription does only comprise G, C, A and U nucleotides, and, optionally, a cap analog as defined herein.

[1117] In preferred embodiments, the nucleotide mixture (i.e. the fraction of each nucleotide in the mixture) used for RNA in vitro transcription reactions may be optimized for the given RNA sequence, preferably as described WO2015188933.

[1118] In this context, the in vitro transcription has been performed in the presence of a sequence optimized nucleotide mixture and optionally a cap analog, preferably wherein the sequence optimized nucleotide mixture does not comprise chemically modified nucleotides.

[1119] In this context a sequence-optimized nucleoside triphosphate (NTP) mix is a mixture of nucleoside triphosphates (NTPs) for use in an in vitro transcription reaction of an RNA molecule of a given sequence comprising the four nucleoside triphosphates (NTPs) GTP, ATP, CTP and UTP, wherein the fraction of each of the four nucleoside triphosphates (NTPs) in the sequence-optimized nucleoside triphosphate (NTP) mix corresponds to the fraction of the respective nucleotide in said RNA molecule. If a ribonucleotide is not present in the RNA molecule, the corresponding nucleoside triphosphate is also not present in the sequence-optimized nucleoside triphosphate (NTP) mix.

[1120] In embodiment where more than one different RNA as defined herein have to be produced, e.g. where 2, 3, 4, 5, 6, 7, 8, 9, 10 or even more different RNAs have to be produced, procedures as described in WO2017109134 may suitably be used.

[1121] In the context of nucleic acid-based vaccine production, it may be required to provide GMP-grade nucleic acid, e.g. a GMP grade RNA or DNA. GMP-grade RNA or DNA may be produced using a manufacturing process approved by regulatory authorities. Accordingly, in a particularly preferred embodiment, RNA production is performed under current good manufacturing practice (GMP), implementing various quality control steps on DNA and RNA level, preferably according to WO2016180430. In preferred embodiments, the RNA of the invention is a GMP-grade RNA, particularly a GMP-grade mRNA. Accordingly, an RNA for a vaccine is preferably a GMP grade RNA.

[1122] The obtained RNA products are preferably purified using PureMessenger® (CureVac, Tubingen, Germany; RP-HPLC according to WO2008077592) and/or tangential flow filtration (as described in WO2016193206) and/or oligo d(T) purification (see WO2016180430).

[1123] Preferably, the RNA according to the invention is purified using RP-HPLC, preferably using Reversed-Phase High pressure liquid chromatography (RP-HPLC) with a macroporous styrene/divinylbenzene column (e.g. particle size 30 μm, pore size 4000 Å and additionally using a filter cassette with a cellulose based membrane with a molecular weight cutoff of about 100 kDa.

[1124] In a further preferred embodiment, the nucleic acid of component A and/or component B, preferably the RNA, is lyophilized (e.g. according to WO2016165831 or WO2011069586) to yield a temperature stable dried nucleic acid (powder) as defined herein (e.g. RNA or DNA). The nucleic acid of the invention, particularly the RNA may also be dried using spray-drying or spray-freeze drying (e.g. according to WO2016184575 or WO2016184576) to yield a temperature stable RNA (powder) as defined herein. Accordingly, in the context of manufacturing and purifying nucleic acid, in particular RNA, the disclosures of WO2017109161, WO2015188933, WO2016180430, WO2008077592, WO2016193206, WO2016165831, WO2011069586, WO2016184575, and WO2016184576 are incorporated herewith by reference.

[1125] Accordingly, in preferred embodiments, the nucleic acid of component A and/or component B is a dried nucleic acid, particularly a dried RNA.

[1126] The term “dried RNA” as used herein has to be understood as RNA that has been lyophilized, or spray-dried, or spray-freeze dried as defined above to obtain a temperature stable dried RNA (powder).

[1127] In preferred embodiments, the nucleic acid of component A and/or component B is a purified nucleic acid, particularly a purified RNA.

[1128] The term “purified nucleic acid” as used herein has to be understood as nucleic acid which has a higher purity after certain purification steps than the starting material. Typical impurities that are essentially not present in purified nucleic acid comprise peptides or proteins, spermidine, BSA, abortive nucleic acid sequences, nucleic acid fragments, free nucleotides, bacterial impurities, or impurities derived from purification procedures. Accordingly, it is desirable in this regard for the “degree of nucleic acid purity” to be as close as possible to 100%. It is also desirable for the degree of nucleic acid purity that the amount of full-length nucleic acid is as close as possible to 100%. Accordingly “purified nucleic acid” as used herein has a degree of purity of more than 75%, 80%, 85%, very particularly 90%, 91%, 92%, 93%, 94%, 95%, 96%, 97%, 98% and most favorably 99% or more. The degree of purity may for example be determined by an analytical HPLC, wherein the percentages provided above correspond to the ratio between the area of the peak for the target nucleic acid and the total area of all peaks representing the by-products. Alternatively, the degree of purity may for example be determined by an analytical agarose gel electrophoresis or capillary gel electrophoresis.

[1129] In preferred embodiments, the nucleic acid of component A and/or component B is a purified RNA, preferably a purified mRNA.

[1130] The term “purified RNA” or “purified mRNA” as used herein has to be understood as RNA which has a higher purity after certain purification steps (e.g. HPLC, TFF, Oligo d(T) purification, precipitation steps) than the starting material (e.g. in vitro transcribed RNA). Typical impurities that are essentially not present in purified RNA comprise peptides or proteins (e.g. enzymes derived from DNA dependent RNA in vitro transcription, e.g. RNA polymerases, RNases, pyrophosphatase, restriction endonuclease, DNase), spermidine, BSA, abortive RNA sequences, RNA fragments (short double stranded RNA fragments, abortive sequences etc.), free nucleotides (modified nucleotides, conventional NTPs, cap analogue), template DNA fragments, buffer components (HEPES, TRIS, MgCl2) etc. Other potential impurities that may be derived from e.g. fermentation procedures comprise bacterial impurities (bioburden, bacterial DNA) or impurities derived from purification procedures (organic solvents etc.). Accordingly, it is desirable in this regard for the “degree of RNA purity” to be as close as possible to 100%. It is also desirable for the degree of RNA purity that the amount of full-length RNA transcripts is as close as possible to 100%. Accordingly, “purified RNA” as used herein has a degree of purity of more than 75%, 80%, 85%, very particularly 90%, 91%, 92%, 93%, 94%, 95%, 96%, 97%, 98% and most favorably 99% or more. The degree of purity may for example be determined by an analytical HPLC, wherein the percentages provided above correspond to the ratio between the area of the peak for the target RNA and the total area of all peaks representing the by-products. Alternatively, the degree of purity may for example be determined by an analytical agarose gel electrophoresis or capillary gel electrophoresis.

[1131] It has to be understood that “dried RNA” as defined herein and “purified RNA” as defined herein or “GMP-grade RNA” as defined herein may have superior stability characteristics (in vitro, in vivo) and improved efficiency (e.g. better translatability of the mRNA in vivo) and are therefore particularly suitable for a medical purpose, e.g. a combination vaccine.

[1132] In particularly preferred embodiments where the nucleic acid of component A and/or component B is an RNA, the RNA has been purified by RP-HPLC and/or TFF to remove double-stranded RNA, non-capped RNA and/or RNA fragments.

[1133] The formation of double stranded RNA as side products during e.g. RNA in vitro transcription can lead to an induction of the innate immune response, particularly IFNalpha which is the main factor of inducing fever in vaccinated subjects, which is of course an unwanted side effect. Current techniques for immunoblotting of dsRNA (via dot Blot, serological specific electron microscopy (SSEM) or ELISA for example) are used for detecting and sizing dsRNA species from a mixture of nucleic acids.

[1134] Suitably, the RNA has been purified by RP-HPLC and/or TFF as described herein to reduce the amount of dsRNA.

[1135] In preferred embodiments, the RNA comprises about 5%, 10%, or 20% less double stranded RNA side products as an RNA that has not been purified with RP-HPLC and/or TFF.

[1136] In preferred embodiments, the RP-HPLC and/or TFF purified RNA of component A and/or component B comprises about 5%, 10%, or 20% less double stranded RNA side products as an RNA that has been purified with Oligo dT purification, precipitation, filtration and/or AEX.

[1137] In embodiments, RNA of a composition has an RNA integrity ranging from about 40% to about 100%.

[1138] The term “RNA integrity” generally describes whether the complete RNA sequence is present in the composition. Low RNA integrity could be due to, amongst others, RNA degradation, RNA cleavage, incorrect or incomplete chemical synthesis of the RNA, incorrect base pairing, integration of modified nucleotides or the modification of already integrated nucleotides, lack of capping or incomplete capping, lack of polyadenylation or incomplete polyadenylation, or incomplete RNA in vitro transcription. RNA is a fragile molecule that can easily degrade, which may be caused e.g. by temperature, ribonucleases, pH or other factors (e.g. nucleophilic attacks, hydrolysis etc.), which may reduce the RNA integrity and, consequently, the functionality of the RNA.

[1139] The skilled person can choose from a variety of different chromatographic or electrophoretic methods for determining an RNA integrity. Chromatographic and electrophoretic methods are well-known in the art. In case chromatography is used (e.g. RP-HPLC), the analysis of the integrity of the RNA may be based on determining the peak area (or “area under the peak”) of the full length RNA in a corresponding chromatogram. The peak area may be determined by any suitable software which evaluates the signals of the detector system. The process of determining the peak area is also referred to as integration. The peak area representing the full length RNA is typically set in relation to the peak area of the total RNA in a respective sample. The RNA integrity may be expressed in % RNA integrity.

[1140] In the context of aspects of the invention, RNA integrity may be determined using analytical (RP)HPLC. Typically, a test sample of the composition comprising lipid based carrier encapsulating RNA may be treated with a detergent (e.g. about 2% Triton X100) to dissociate the lipid based carrier and to release the encapsulated RNA. The released RNA may be captured using suitable binding compounds, e.g. Agencourt AMPure XP beads (Beckman Coulter, Brea, Calif., USA) essentially according to the manufacturers instructions. Following preparation of the RNA sample, analytical (RP)HPLC may be performed to determine the integrity of RNA. Typically, for determining RNA integrity, the RNA samples may be diluted to a concentration of 0.1 g/l using e.g. water for injection (WFI). About 10 μl of the diluted RNA sample may be injected into an HPLC column (e.g. a monolithic poly(styrene-divinylbenzene) matrix). Analytical (RP)HPLC may be performed using standard conditions, for example: Gradient 1: Buffer A (0.1M TEAA (pH 7.0)); Buffer B (0.1M TEAA (pH 7.0) containing 25% acetonitrile). Starting at 30% buffer B the gradient extended to 32% buffer B in 2 min, followed by an extension to 55% buffer B over 15 minutes at a flow rate of 1 ml/min. HPLC chromatograms are typically recorded at a wavelength of 260 nm. The obtained chromatograms may be evaluated using a software and the relative peak area may be determined in percent (%) as commonly known in the art. The relative peak area indicates the amount of RNA that has 100% RNA integrity. Since the amount of the RNA injected into the HPLC is typically known, the analysis of the relative peak area provides information on the integrity of the RNA. Thus, if e.g. 100 ng RNA have been injected in total, and 100 ng are determined as the relative peak area, the RNA integrity would be 100%. If, for example, the relative peak area would correspond to 80 ng, the RNA integrity would be 80%. Accordingly, RNA integrity in the context of the invention is determined using analytical HPLC, preferably analytical RP-HPLC.

[1141] In embodiments, RNA of a composition has an RNA integrity ranging from about 40% to about 100%. In embodiments, the RNA has an RNA integrity ranging from about 50% to about 100%. In embodiments, the RNA has an RNA integrity ranging from about 60% to about 100%. In embodiments, the RNA has an RNA integrity ranging from about 70% to about 100%. In embodiments, the RNA integrity is for example about 50%, about 60%, about 70%, about 80%, or about 90%. RNA is suitably determined using analytical HPLC, preferably analytical RP-HPLC.

[1142] In preferred embodiments, the RNA of a composition has an RNA integrity of at least about 50%, preferably of at least about 60%, more preferably of at least about 70%, most preferably of at least about 80% or ABOUT 90%. RNA is suitably determined using analytical HPLC, preferably analytical RP-HPLC.

[1143] Following co-transcriptional capping as defined herein, and following purification as defined herein, the capping degree of the obtained RNA may be determined using capping assays as described in published PCT application WO2015101416, in particular, as described in claims 27 to 46 of published PCT application WO2015101416 can be used. Alternatively, a capping assays described in PCT/EP2018/08667 may be used.

[1144] In embodiments, an automated device for performing RNA in vitro transcription may be used to produce and purify the nucleic acid of component A and/or component B. Such a device may also be used to produce the composition or the vaccine (see aspects 2 and 3). Preferably, a device as described in WO2020002598, in particular, a device as described in claims 1 to 59 and/or 68 to 76 of WO2020002598 (and FIGS. 1-18) may suitably be used.

[1145] The methods described herein may preferably applied to a method of producing an pharmaceutical composition or combination vaccine as described in further detail below.

[1146] In various embodiments the nucleic acid of component A and/or component B, preferably the mRNA of component A and component B comprises, preferably in 5′- to 3′-direction, the following elements:
[1147] A) 5′-cap structure, preferably as specified herein;
[1148] B) 5-terminal start element, preferably as specified herein;
[1149] C) optionally, a 5′-UTR, preferably as specified herein;
[1150] D) a ribosome binding site, preferably as specified herein;
[1151] E) at least one coding sequence, preferably as specified herein;
[1152] F) 3′-UTR, preferably as specified herein;
[1153] G) optionally, poly(A) sequence, preferably as specified herein;
[1154] H) optionally, poly(C) sequence, preferably as specified herein;
[1155] I) optionally, histone stem-loop preferably as specified herein;
[1156] J) optionally, 3′-terminal sequence element, preferably as specified herein.

[1157] In preferred embodiments the nucleic acid of component A and/or component B, preferably the mRNA of component A and component B, comprises the following elements preferably in 5′- to 3′-direction:
[1158] A) 5-cap structure selected from m7G(5′), m7G(5′)ppp(5′)(2′OMeA), or m7G(5′)ppp(5′)(2′OMeG);
[1159] B) 5-terminal start element selected from SEQ ID NOs: 176 or 177 or fragments or variants thereof;
[1160] C) optionally, a 5′-UTR derived from a HSD17B4 gene;
[1161] D) a ribosome binding site selected from SEQ ID NOs: 180, 181, 22845-22847 or fragments or variants thereof;
[1162] E) at least one coding sequence as specified herein, preferably a codon optimized coding sequence;
[1163] F) 3′-UTR derived from a 3′-UTR of a PSMB3 gene or an alpha-globin gene (“muag”);
[1164] G) optionally, poly(A) sequence comprising about 30 to about 500 adenosines;
[1165] H) optionally, poly(C) sequence comprising about 10 to about 100 cytosines;
[1166] I) optionally, histone stem-loop selected from SEQ ID NOs: 178 or 179;
[1167] J) optionally, 3′-terminal sequence element selected from SEQ ID NOs: 182-230.

[1168] In particularly preferred embodiments the nucleic acid of component A and/or component B, preferably the mRNA of component A and component B, comprises the following elements in 5′- to 3′-direction:
[1169] A) cap1 structure as defined herein;
[1170] B) coding sequence as specified herein, preferably a codon optimized coding sequence;
[1171] C) 3′-UTR derived from a 3′-UTR of a muag gene as defined herein, preferably according to SEQ ID NO: 267, 268, 22896-22901, 22906-22911;
[1172] D) poly(A) sequence comprising about 64 A nucleotides.
[1173] E) poly(C) sequence comprising about 10 to about 100 cytosines;
[1174] F) histone stem-loop selected from SEQ ID NOs: 178 or 179;

[1175] In preferred embodiments the nucleic acid of component A and/or component B, preferably the mRNA of component A and component B, comprises the following elements in 5′- to 3′-direction:
[1176] A) cap1 structure as defined herein, preferably a codon optimized coding sequence;
[1177] B) 5′-UTR derived from a HSD17B4 gene as defined herein, preferably according to SEQ ID NO: 231 or 232;
[1178] C) coding sequence as specified herein;
[1179] D) 3′-UTR derived from a 3′-UTR of a PSMB3 gene as defined herein, preferably according to SEQ ID NO: 253 or 254;
[1180] E) poly(A) sequence comprising about 64 A nucleotides.
[1181] F) optionally a poly(C) sequence comprising about 10 to about 100 cytosines;
[1182] G) histone stem-loop selected from SEQ ID NOs: 178 or 179;
[1183] H) optionally, 3′-terminal sequence element SEQ ID NOs: 182-230.

[1184] In particularly preferred embodiments the nucleic acid of component A and/or component B, preferably the mRNA of component A and component B, comprises the following elements in 5′- to 3′-direction:
[1185] A) cap1 structure as defined herein;
[1186] B) 5′-UTR derived from a HSD17B4 gene as defined herein, preferably according to SEQ ID NO: 231 or 232;
[1187] C) coding sequence selected as specified herein, preferably a codon optimized coding sequence;
[1188] D) 3′-UTR derived from a 3′-UTR of a PSMB3 gene as defined herein, preferably according to SEQ ID NO: 253 or 254;
[1189] E) a histone stem-loop selected from SEQ ID NOs: 178 or 179;
[1190] F) poly(A) sequence comprising about 100 A nucleotides, preferably representing the 3′ terminus.

[1191] In even more particularly preferred embodiments the nucleic acid of component A and/or component B, preferably the mRNA of component A and component B, comprises the following elements in 5′- to 3′-direction:
[1192] A) cap1 structure as defined herein;
[1193] B) 5′-UTR derived from a HSD17B4 gene as defined herein, preferably according to SEQ ID NO: 231 or 232;
[1194] C) coding sequence selected as specified herein, preferably a codon optimized coding sequence;
[1195] D) 3′-UTR derived from a 3′-UTR of a PSMB3 gene as defined herein, preferably according to SEQ ID NO: 253 or 254;
[1196] E) poly(A) sequence comprising about 100 A nucleotides, preferably representing the 3′ terminus.

[1197] In further preferred embodiments the nucleic acid of component A and/or component B, preferably the mRNA of component A and component B, comprises the following elements in 5′- to 3′-direction:
[1198] A) cap1 structure as defined herein;
[1199] B) 5′-UTR derived from a SLC7A3 gene as defined herein, preferably according to SEQ ID NO: 245 or 246;
[1200] C) coding sequence selected as specified herein, preferably a codon optimized coding sequence;
[1201] D) 3′-UTR derived from a 3′-UTR of a PSMB3 gene as defined herein, preferably according to SEQ ID NO: 253 or 254;
[1202] E) optionally, a histone stem-loop selected from SEQ ID NOs: 178 or 179;
[1203] F) poly(A) sequence comprising about 100 A nucleotides, preferably representing the 3′ terminus.

[1204] In further preferred embodiments the nucleic acid of component A and/or component B, preferably the mRNA of component A and component B, comprises the following elements in 5′- to 3′-direction:
[1205] A) cap1 structure as defined herein;
[1206] B) 5′-UTR derived from a RPL31 gene as defined herein, preferably according to SEQ ID NO: 243 or 243;
[1207] C) coding sequence selected as specified herein, preferably a codon optimized coding sequence;
[1208] D) 3′-UTR derived from a 3′-UTR of a RPS9 gene as defined herein, preferably according to SEQ ID NO: 263 or 264;
[1209] E) optionally, a histone stem-loop selected from SEQ ID NOs: 178 or 179;
[1210] F) poly(A) sequence comprising about 100 A nucleotides, preferably representing the 3′ terminus.

[1211] Formulation and Complexation:

[1212] In the following, suitable features and embodiments relating to the formulation and/or complexation of the pharmaceutical composition are further specified. In particular, suitable features and embodiments relating to formulation and/or complexation of component A (in particular, component A-1, A-2, A-3), and/or formulation and/or complexation of component B (in particular component B-1, B-2, B-3, B-3a, B-3b, B-4, B-4a, B-4b) are further specified.

[1213] In preferred embodiments, the pharmaceutical composition comprises at least one pharmaceutically acceptable carrier or excipient.

[1214] The term “pharmaceutically acceptable carrier” or “pharmaceutically acceptable excipient” as used herein preferably includes the liquid or non-liquid basis of the composition for administration. If the composition is provided in liquid form, the carrier may be water, e.g. pyrogen-free water; isotonic saline or buffered (aqueous) solutions, e.g. phosphate, citrate etc. buffered solutions. Water or preferably a buffer, more preferably an aqueous buffer, may be used, containing a sodium salt, preferably at least 50 mM of a sodium salt, a calcium salt, preferably at least 0.01 mM of a calcium salt, and optionally a potassium salt, preferably at least 3 mM of a potassium salt. According to preferred embodiments, the sodium, calcium and, optionally, potassium salts may occur in the form of their halogenides, e.g. chlorides, iodides, or bromides, in the form of their hydroxides, carbonates, hydrogen carbonates, or sulfates, etc. Examples of sodium salts include NaCl, NaI, NaBr, Na₂CO₃, NaHCO₃, Na₂SO₄, examples of the optional potassium salts include KCl, KI, KBr, K₂CO₃, KHCO₃, K₂SO₄, and examples of calcium salts include CaCl₂, Cal₂, CaBr₂, CaCO₃, CaSO₄, Ca(OH)₂.

[1215] Furthermore, organic anions of the aforementioned cations may be in the buffer. Accordingly, in embodiments, the pharmaceutical composition may comprise pharmaceutically acceptable carriers or excipients using one or more pharmaceutically acceptable carriers or excipients to e.g. increase stability, increase cell transfection, permit the sustained or delayed, increase the translation of encoded antigenic peptides or proteins in vivo, and/or alter the release profile of encoded antigenic peptides or proteins protein in vivo. In addition to traditional excipients such as any and all solvents, dispersion media, diluents, or other liquid vehicles, dispersion or suspension aids, surface active agents, isotonic agents, thickening or emulsifying agents, preservatives, excipients of the present invention can include, without limitation, lipidoids, liposomes, lipid nanoparticles, polymers, lipoplexes, core-shell nanoparticles, peptides, proteins, cells transfected with polynucleotides, hyaluronidase, nanoparticle mimics and combinations thereof. In embodiments, one or more compatible solid or liquid fillers or diluents or encapsulating compounds may be used as well, which are suitable for administration to a subject. The term “compatible” as used herein means that the constituents of the composition are capable of being mixed with the at least one nucleic acid of component A and/or component B and, optionally, a plurality of nucleic acids of the composition, in such a manner that no interaction occurs, which would substantially reduce the biological activity or the pharmaceutical effectiveness of the composition under typical use conditions (e.g., intramuscular or intradermal administration). Pharmaceutically acceptable carriers or excipients must have sufficiently high purity and sufficiently low toxicity to make them suitable for administration to a subject to be treated. Compounds which may be used as pharmaceutically acceptable carriers or excipients may be sugars, such as, for example, lactose, glucose, trehalose, mannose, and sucrose; starches, such as, for example, corn starch or potato starch; dextrose; cellulose and its derivatives, such as, for example, sodium carboxymethylcellulose, ethylcellulose, cellulose acetate; powdered tragacanth; malt; gelatin; tallow; solid glidants, such as, for example, stearic acid, magnesium stearate; calcium sulfate; vegetable oils, such as, for example, groundnut oil, cottonseed oil, sesame oil, olive oil, corn oil and oil from theobroma; polyols, such as, for example, polypropylene glycol, glycerol, sorbitol, mannitol and polyethylene glycol; alginic acid.

[1216] The at least one pharmaceutically acceptable carrier or excipient of the pharmaceutical composition may preferably be selected to be suitable for intramuscular or intradermal delivery/administration of said pharmaceutical composition. The pharmaceutical composition is preferably a composition suitable for intramuscular administration to a subject.

[1217] Subjects to which administration of the pharmaceutical compositions is contemplated include, but are not limited to, humans and/or other primates; mammals, including commercially relevant mammals such as cattle, pigs, horses, sheep, cats, dogs, mice, and/or rats; and/or birds, including commercially relevant birds such as poultry, chickens, ducks, geese, and/or turkeys.

[1218] Pharmaceutical compositions of the present invention may suitably be sterile and/or pyrogen-free.

[1219] In a preferred embodiments, the at least one nucleic acid of component A and/or component B is complexed or associated with further compound to obtain a formulated composition. A formulation in that context may have the function of a transfection agent. A formulation in that context may also have the function of protecting the nucleic acid from degradation.

[1220] In embodiments, the at least one nucleic acid of component A and the at least one nucleic acid of component B are formulated separately.

[1221] In preferred embodiments, the at least one nucleic acid of component A and the at least one nucleic acid of component B are co-formulated.

[1222] In a preferred embodiment, the at least one nucleic acid of component A and/or component B, preferably the at least one RNA of component A and/or component B, is complexed or associated with, or at least partially complexed or partially associated with one or more cationic or polycationic compound. Preferably, the at least one nucleic acid of component A and component B are complexed or associated with, or at least partially complexed or partially associated with one or more cationic or polycationic compound, wherein component A and component B are formulated separately or wherein component A and component B are co-formulated.

[1223] In preferred embodiments, the one or more cationic or polycationic compound is selected from a cationic or polycationic polymer, cationic or polycationic polysaccharide, cationic or polycationic lipid, cationic or polycationic protein, cationic or polycationic peptide, or any combinations thereof.

[1224] The term “cationic or polycationic compound” as used herein will be recognized and understood by the person of ordinary skill in the art, and is for example intended to refer to a charged molecule, which is positively charged at a pH value ranging from about 1 to 9, at a pH value ranging from about 3 to 8, at a pH value ranging from about 4 to 8, at a pH value ranging from about 5 to 8, more preferably at a pH value ranging from about 6 to 8, even more preferably at a pH value ranging from about 7 to 8, most preferably at a physiological pH, e.g. ranging from about 7.2 to about 7.5. Accordingly, a cationic component, e.g. a cationic peptide, cationic protein, cationic polymer, cationic polysaccharide, cationic lipid (including lipidoids) may be any positively charged compound or polymer which is positively charged under physiological conditions. A “cationic or polycationic peptide or protein” may contain at least one positively charged amino acid, or more than one positively charged amino acid, e.g. selected from Arg, His, Lys or Orn. Accordingly, “polycationic” components are also within the scope exhibiting more than one positive charge under the given conditions.

[1225] Cationic or polycationic compounds, being particularly preferred in this context may be selected from the following list of cationic or polycationic peptides or proteins of fragments thereof: protamine, nucleoline, spermine or spermidine, or other cationic peptides or proteins, such as poly-L-lysine (PLL), poly-arginine, basic polypeptides, cell penetrating peptides (CPPs), including HIV-binding peptides, HIV-1 Tat (HIV), Tat-derived peptides, Penetratin, VP22 derived or analog peptides, HSV VP22 (Herpes simplex), MAP, KALA or protein transduction domains (PTDs), PpT620, prolin-rich peptides, arginine-rich peptides, lysine-rich peptides, MPG-peptide(s), Pep-1, L-oligomers, Calcitonin peptide(s), Antennapedia-derived peptides, pAntp, plsl, FGF, Lactoferrin, Transportan, Buforin-2, Bac715-24, SynB, SynB(1), pVEC, hCT-derived peptides, SAP, or histones. More preferably, the nucleic acid (e.g. DNA or RNA) of component A and/or component B, e.g. the coding RNA, preferably the mRNA, is complexed with one or more polycations, preferably with protamine or oligofectamine, most preferably with protamine. In preferred embodiment, the at least one nucleic acid component A and/or component B (e.g. DNA or RNA), preferably the at least one RNA, is complexed with protamine.

[1226] Further preferred cationic or polycationic compounds, which can be used as transfection or complexation agent may include cationic polysaccharides, for example chitosan, polybrene etc.; cationic lipids, e.g. DOTMA, DMRIE, di-C14-amidine, DOTIM, SAINT, DC-Chol, BGTC, CTAP, DOPC, DODAP, DOPE: Dioleyl phosphatidylethanol-amine, DOSPA, DODAB, DOIC, DMEPC, DOGS, DIMRI, DOTAP, DC-6-14, CLIP1, CLIP6, CLIP9, oligofectamine; or cationic or polycationic polymers, e.g. modified polyaminoacids, such as beta-aminoacid-polymers or reversed polyamides, etc., modified polyethylenes, such as PVP etc., modified acrylates, such as pDMAEMA etc., modified amidoamines such as pAMAM etc., modified polybetaaminoester (PBAE), such as diamine end modified 1,4 butanediol diacrylate-co-5-amino-1-pentanol polymers, etc., dendrimers, such as polypropylamine dendrimers or pAMAM based dendrimers, etc., polyimine(s), such as PEI, poly(propyleneimine), etc., polyallylamine, sugar backbone based polymers, such as cyclodextrin based polymers, dextran based polymers, etc., silan backbone based polymers, such as PMOXA-PDMS copolymers, etc., blockpolymers consisting of a combination of one or more cationic blocks (e.g. selected from a cationic polymer as mentioned above) and of one or more hydrophilic or hydrophobic blocks (e.g. polyethyleneglycole); etc.

[1227] In this context it is particularly preferred that the at least one nucleic acid of component A and/or component B (e.g. DNA or RNA), preferably the at least one RNA, is complexed or at least partially complexed with a cationic or polycationic compound and/or a polymeric carrier, preferably cationic proteins or peptides. In this context, the disclosure of WO2010037539 and WO2012113513 is incorporated herewith by reference. Partially means that only a part of the nucleic acid is complexed with a cationic compound and that the rest of the nucleic acid is in uncomplexed form (“free”).

[1228] In embodiments, the pharmaceutical composition comprises at least one nucleic acid of component A and/or component B (e.g. DNA or RNA), preferably at least one RNA, complexed with one or more cationic or polycationic compounds, preferably protamine, and at least one free (non-complexed) nucleic acid.

[1229] In this context it is particularly preferred that the at least one nucleic acid of component A and/or component B (e.g. DNA or RNA), preferably the at least one RNA is complexed, or at least partially complexed with protamine. Preferably, the molar ratio of the nucleic acid of component A and/or component B, particularly the RNA of the protamine-complexed RNA to the free RNA may be selected from a molar ratio of about 0.001:1 to about 1:0.001, including a ratio of about 1:1. Suitably, the complexed RNA is complexed with protamine by addition of protamine-trehalose solution to the RNA sample at a RNA:protamine weight to weight ratio (w/w) of 2:1.

[1230] Further preferred cationic or polycationic proteins or peptides that may be used for complexation of the nucleic acid of component A and/or component B can be derived from formula (Arg)l;(Lys)m;(His)n;(Orn)o;(Xaa)x of the patent application WO2009030481 or WO2011026641, the disclosure of WO2009030481 or WO2011026641 relating thereto incorporated herewith by reference.

[1231] In preferred embodiments, the at least one nucleic acid of component A and/or component B (e.g. DNA or RNA), preferably the at least one RNA is complexed, or at least partially complexed, with at least one cationic or polycationic proteins or peptides preferably selected from SEQ ID NOs: 269-273, or any combinations thereof.

[1232] According to various embodiments, the composition of the present invention comprises at least one nucleic acid of component A and component B (e.g. DNA or RNA), preferably at least one RNA as defined herein, and a polymeric carrier.

[1233] The term “polymeric carrier” as used herein will be recognized and understood by the person of ordinary skill in the art, and are e.g. intended to refer to a compound that facilitates transport and/or complexation of another compound (e.g. cargo nucleic acid of component A and/or component B). A polymeric carrier is typically a carrier that is formed of a polymer. A polymeric carrier may be associated to its cargo (e.g. DNA, or RNA of component A and/or component B) by covalent or non-covalent interaction. A polymer may be based on different subunits, such as a copolymer.

[1234] Suitable polymeric carriers in that context may include, for example, polyacrylates, polyalkycyanoacrylates, polylactide, polylactide-polyglycolide copolymers, polycaprolactones, dextran, albumin, gelatin, alginate, collagen, chitosan, cyclodextrins, protamine, PEGylated protamine, PEGylated PLL and polyethylenimine (PEI), dithiobis(succinimidylpropionate) (DSP), Dimethyl-3,3′-dithiobispropionimidate (DTBP), poly(ethylene imine) biscarbamate (PEIC), poly(L-lysine) (PLL), histidine modified PLL, poly(N-vinylpyrrolidone) (PVP), poly(propylenimine (PPI), poly(amidoamine) (PAMAM), poly(amido ethylenimine) (SS-PAEI), triehtylenetetramine (TETA), poly(β-aminoester), poly(4-hydroxy-L-proine ester) (PHP), poly(allylamine), poly(a-[4-aminobutyl]-L-glycolic acid (PAGA), Poly(D,L-lactic-co-glycolid acid (PLGA), Poly(N-ethyl-4-vinylpyridinium bromide), poly(phosphazene)s (PPZ), poly(phosphoester)s (PPE), poly(phosphoramidate)s (PPA), poly(N-2-hydroxypropylmethacrylamide) (pHPMA), poly(2-(dimethylamino)ethyl methacrylate) (pDMAEMA), poly(2-aminoethyl propylene phosphate) PPE_EA), galactosylated chitosan, N-dodecylated chitosan, histone, collagen and dextran-spermine. In one embodiment, the polymer may be an inert polymer such as, but not limited to, PEG. In one embodiment, the polymer may be a cationic polymer such as, but not limited to, PEI, PLL, TETA, poly(allylamine), Poly(N-ethyl-4-vinylpyridinium bromide), pHPMA and pDMAEMA. In one embodiment, the polymer may be a biodegradable PEI such as, but not limited to, DSP, DTBP and PEIC. In one embodiment, the polymer may be biodegradable such as, but not limited to, histine modified PLL, SS-PAEI, poly(β-aminoester), PHP, PAGA, PLGA, PPZ, PPE, PPA and PPE-EA.

[1235] A suitable polymeric carrier may be a polymeric carrier formed by disulfide-crosslinked cationic compounds. The disulfide-crosslinked cationic compounds may be the same or different from each other. The polymeric carrier can also contain further components. The polymeric carrier used according to the present invention may comprise mixtures of cationic peptides, proteins or polymers and optionally further components as defined herein, which are crosslinked by disulfide bonds (via —SH groups).

[1236] In this context, polymeric carriers according to formula {(Arg)l;(Lys)m;(His)n;(Orn)o;(Xaa)x(Cys)y} and formula Cys,{(Arg)l;(Lys)m;(His)n;(Orn)o;(Xaa)x}Cys₂ of the patent application WO2012/013326 are preferred, the disclosure of WO2012/013326 relating thereto incorporated herewith by reference.

[1237] In embodiments, the polymeric carrier used to complex the at least one nucleic acid of component A and/or component B (e.g. DNA or RNA), preferably the at least one RNA of component A and/or component B may be derived from a polymeric carrier molecule according formula (L-P¹—S—[S—P²—S]ₙ—S—P³-L) of the patent application WO2011026641, the disclosure of WO2011026641 relating thereto incorporated herewith by reference.

[1238] In embodiments, the polymeric carrier compound is formed by, or comprises or consists of the peptide elements CysArg12Cys (SEQ ID NO: 269) or CysArg12 (SEQ ID NO: 270) or TrpArg12Cys (SEQ ID NO: 271). In particularly preferred embodiments, the polymeric carrier compound consists of a (R₁₂C)—(R₁₂C) dimer, a (WR₁₂C)—(WR₁₂C) dimer, or a (CR₁₂)—(CR₁₂C)—(CR₁₂) trimer, wherein the individual peptide elements in the dimer (e.g. (WR12C)), or the trimer (e.g. (CR12)), are connected via —SH groups.

[1239] In a embodiments, at least one nucleic acid of component A and/or component B (e.g. DNA or RNA), preferably the at least one RNA is complexed or associated with a polyethylene glycol/peptide polymer comprising HO-PEG5000-S-(S—CHHHHHHRRRRHHHHHHC-S-)7-S-PEG5000-OH (SEQ ID NO: 272 as peptide monomer), HO-PEG5000-S-(S—CHHHHHHRRRRHHHHHHC-S-)4-S-PEG5000-OH (SEQ ID NO: 272 as peptide monomer), HO-PEG5000-S-(S-CGHHHHHRRRRHHHHHGC-S-)7-S-PEG5000-OH (SEQ ID NO: 273 as peptide monomer) and/or a polyethylene glycol/peptide polymer comprising HO-PEG5000-S-(S-CGHHHHHRRRRHHHHHGC-S-)4-S-PEG5000-OH (SEQ ID NO: 273 of the peptide monomer).

[1240] In other embodiments, the composition comprises at least one nucleic acid of component A and/or component B (e.g. DNA or RNA), wherein the at least one nucleic acid of component A and/or component B, preferably the at least one RNA is complexed or associated with polymeric carriers and, optionally, with at least one lipid component as described in WO2017212008A1, WO2017212006A1, WO2017212007A1, and WO2017212009A1. In this context, the disclosures of WO2017212008A1, WO2017212006A1, WO2017212007A1, and WO2017212009A1 are herewith incorporated by reference.

[1241] In preferred embodiments, the polymeric carrier (of the first and/or second component) is a peptide polymer, preferably a polyethylene glycol/peptide polymer as defined above, and a lipid component, preferably a lipidoid component.

[1242] A lipidoid (or lipidoit) is a lipid-like compound, i.e. an amphiphilic compound with lipid-like physical properties. The lipidoid is preferably a compound, which comprises two or more cationic nitrogen atoms and at least two lipophilic tails. In contrast to many conventional cationic lipids, the lipidoid may be free of a hydrolysable linking group, in particular linking groups comprising hydrolysable ester, amide or carbamate groups. The cationic nitrogen atoms of the lipidoid may be cationisable or permanently cationic, or both types of cationic nitrogens may be present in the compound. In the context of the present invention, the term lipid is considered to also encompass lipidoids.

[1243] In some embodiments of the inventions, the lipidoid may comprise a PEG moiety.

[1244] In preferred embodiments, the at least one nucleic acid of component A and/or component B (e.g. DNA or RNA), preferably the at least one RNA acid of component A and/or component B is complexed or associated with a polymeric carrier, preferably with a polyethylene glycol/peptide polymer as defined above, and a lipidoid component.

[1245] In embodiments, the at least one nucleic acid of component A and component B are complexed or associated with, or at least partially complexed or partially associated with polymer as defined above, and a lipid or lipidoid component as defined above, wherein component A and component B are formulated separately or wherein component A and component B are co-formulated.

[1246] Suitably, the lipidoid is cationic, which means that it is cationisable or permanently cationic. In one embodiment, the lipidoid is cationisable, i.e. it comprises one or more cationisable nitrogen atoms, but no permanently cationic nitrogen atoms. In another embodiment, at least one of the cationic nitrogen atoms of the lipidoid is permanently cationic. Optionally, the lipidoid comprises two permanently cationic nitrogen atoms, three permanently cationic nitrogen atoms, or even four or more permanently cationic nitrogen atoms.

[1247] In a preferred embodiment, the lipidoid component may be any one selected from the lipidoids of the lipidoids provided in the table of page 50-54 of published PCT patent application WO2017212009A1, the specific lipidoids provided in said table, and the specific disclosure relating thereto herewith incorporated by reference.

[1248] In preferred embodiments, the lipidoid component may be any one selected from 3-C12-OH, 3-C12-OH-cat, 3-C12-amide, 3-C12-amide monomethyl, 3-C12-amide dimethyl, RevPEG(10)-3-C12-OH, RevPEG(10)-DLin-pAbenzoic, 3C12amide-TMA cat., 3C12amide-DMA, 3C12amide-NH2, 3C12amide-OH, 3C12Ester-OH, 3C12 Ester-amin, 3C12Ester-DMA, 2C12Amid-DMA, 3C12-lin-amid-DMA, 2C12-sperm-amid-DMA, or 3C12-sperm-amid-DMA (see table of published PCT patent application WO2017212009A1 (pages 50-54)). Particularly preferred are 3-C12-OH or 3-C12-OH-cat.

[1249] In preferred embodiments, the polyethylene glycol/peptide polymer comprising a lipidoid as specified above (e.g. 3-C12-OH or 3-C12-OH-cat), is used to complex the at least one nucleic acid to form complexes having an N/P ratio from about 0.1 to about 20, or from about 0.2 to about 15, or from about 2 to about 15, or from about 2 to about 12, wherein the N/P ratio is defined as the mole ratio of the nitrogen atoms of the basic groups of the cationic peptide or polymer to the phosphate groups of the nucleic acid. In that context, the disclosure of published PCT patent application WO2017212009A1, in particular claims 1 to 10 of WO2017212009A1, and the specific disclosure relating thereto is herewith incorporated by reference.

[1250] Further suitable lipidoids may be derived from published PCT patent application WO2010053572. In particular, lipidoids derivable from claims 1 to 297 of published PCT patent application WO2010053572 may be used in the context of the invention, e.g. incorporated into the peptide polymer as described herein, or e.g. incorporated into the lipid nanoparticle (as described below). Accordingly, claims 1 to 297 of published PCT patent application WO2010053572, and the specific disclosure relating thereto, is herewith incorporated by reference.

[1251] Encapsulation/Complexation in Liposomes or LNPs:

[1252] In preferred embodiments, the at least one nucleic acid of component A and/or the at least one nucleic acid of component B (e.g. DNA or RNA), preferably the at least one RNA of component A and/or the at least one RNA of component B is complexed, encapsulated, partially encapsulated, or associated with one or more lipids (e.g. cationic lipids and/or neutral lipids), thereby forming lipid-based carriers such as liposomes, lipid nanoparticles (LNPs), lipoplexes, and/or nanoliposomes, preferably lipid nanoparticles.

[1253] In embodiments, the at least one nucleic acid of component A and the at least one nucleic acid of component B are complexed, encapsulated, partially encapsulated, or associated with one or more lipids (e.g. cationic lipids and/or neutral lipids), thereby forming liposomes, lipid nanoparticles (LNPs), lipoplexes, and/or nanoliposomes, preferably lipid nanoparticles.

[1254] In embodiments, the at least one nucleic acid of component A and/or the at least one nucleic acid of component B are formulated separately (in any formulation or complexation agent defined herein), preferably wherein the at least one nucleic acid of component A and/or the at least one nucleic acid of component B are formulated in separate liposomes, lipid nanoparticles (LNP), lipoplexes, and/or nanoliposomes

[1255] In embodiments, the at least one nucleic acid of component A and the at least one nucleic acid of component B are co-formulated (in any formulation or complexation agent defined herein), preferably wherein the at least one nucleic acid of component A and the at least one nucleic acid of component B are formulated in separate liposomes, lipid nanoparticles (LNP), lipoplexes, and/or nanoliposomes

[1256] The liposomes, lipid nanoparticles (LNPs), lipoplexes, and/or nanoliposomes—incorporated nucleic acid (e.g. DNA or RNA) may be completely or partially located in the interior space of the liposomes, lipid nanoparticles (LNPs), lipoplexes, and/or nanoliposomes, within the lipid layer/membrane, or associated with the exterior surface of the lipid layer/membrane. The incorporation of a nucleic acid into liposomes/LNPs is also referred to herein as “encapsulation” wherein the nucleic acid, e.g. the RNA is entirely contained within the interior space of the liposomes, lipid nanoparticles (LNPs), lipoplexes, and/or nanoliposomes. The purpose of incorporating nucleic acid into liposomes, lipid nanoparticles (LNPs), lipoplexes, and/or nanoliposomes is to protect the nucleic acid, preferably RNA from an environment which may contain enzymes or chemicals or conditions that degrade nucleic acid and/or systems or receptors that cause the rapid excretion of the nucleic acid. Moreover, incorporating nucleic acid, preferably RNA into liposomes, lipid nanoparticles (LNPs), lipoplexes, and/or nanoliposomes may promote the uptake of the nucleic acid, and hence, may enhance the therapeutic effect of the nucleic acid of component A and/or component B, e.g. the nucleic acid encoding at least one antigenic peptide or protein. Accordingly, incorporating a nucleic acid of component A or B, e.g. RNA or DNA of component A and/or component B, into liposomes, lipid nanoparticles (LNPs), lipoplexes, and/or nanoliposomes may be particularly suitable for combination vaccine of the invention, e.g. for intramuscular and/or intradermal administration. In this context, the terms “complexed” or “associated” refer to the essentially stable combination of nucleic acid (of component A and/or component B) with one or more lipids into larger complexes or assemblies without covalent binding.

[1257] The term “lipid nanoparticle”, also referred to as “LNP”, is not restricted to any particular morphology, and include any morphology generated when a cationic lipid and optionally one or more further lipids are combined, e.g. in an aqueous environment and/or in the presence of a nucleic acid, e.g. an RNA. For example, a liposome, a lipid complex, a lipoplex and the like are within the scope of a lipid nanoparticle (LNP).

[1258] Liposomes, lipid nanoparticles (LNPs), lipoplexes, and/or nanoliposomes can be of different sizes such as, but not limited to, a multilamellar vesicle (MLV) which may be hundreds of nanometers in diameter and may contain a series of concentric bilayers separated by narrow aqueous compartments, a small unicellular vesicle (SUV) which may be smaller than 50 nm in diameter, and a large unilamellar vesicle (LUV) which may be between 50 nm and 500 nm in diameter.

[1259] LNPs of the invention are suitably characterized as microscopic vesicles having an interior aqua space sequestered from an outer medium by a membrane of one or more bilayers. Bilayer membranes of LNPs are typically formed by amphiphilic molecules, such as lipids of synthetic or natural origin that comprise spatially separated hydrophilic and hydrophobic domains. Bilayer membranes of the liposomes can also be formed by amphophilic polymers and surfactants (e.g., polymerosomes, niosomes, etc.). In the context of the present invention, an LNP typically serves to transport the at least one nucleic acid of component A and/or the at least one nucleic acid of component B, preferably the at least one RNA, to a target tissue.

[1260] Accordingly, in preferred embodiments, the at least one nucleic acid of component A and/or the at least one nucleic acid of component B, preferably the at least one RNA, is complexed with one or more lipids thereby forming lipid nanoparticles (LNP), liposomes, nanoliposomes, lipoplexes, preferably LNPs. Preferably, LNPs (liposomes, nanoliposomes, lipoplexes) are particularly suitable for intramuscular and/or intradermal administration.

[1261] In embodiments, at least about 80%, 85%, 90%, 95% of lipid-based carriers, preferably the LNPs, have a spherical morphology, preferably comprising a solid core or partially solid core.

[1262] LNPs (or liposomes, nanoliposomes, lipoplexes) typically comprise a cationic lipid and one or more excipients selected from neutral lipids, charged lipids, steroids and polymer conjugated lipids (e.g. PEGylated lipid). The nucleic acid (e.g. RNA, DNA) may be encapsulated in the lipid portion of the LNP or an aqueous space enveloped by some or the entire lipid portion of the LNP. The nucleic acid (e.g. RNA, DNA) or a portion thereof may also be associated and complexed with the LNP. An LNP may comprise any lipid capable of forming a particle to which the nucleic acids are attached, or in which the one or more nucleic acids are encapsulated. Preferably, the LNP comprising nucleic acids comprises one or more cationic lipids, and one or more stabilizing lipids. Stabilizing lipids include neutral lipids and PEGylated lipids.

[1263] Preferably, the LNP (or liposomes, nanoliposomes, lipoplexes) comprises

[1264] (i) at least one cationic lipid;

[1265] (ii) at least one neutral lipid;

[1266] (iii) at least one steroid or steroid analogue, preferably cholesterol; and

[1267] (iv) at least one polymer conjugated lipid, preferably a PEG-lipid;

[1268] wherein (i) to (iv) are in a molar ratio of about 20-60% cationic lipid, 5-25% neutral lipid, 25-55% sterol, and 0.5-15% polymer conjugated lipid.

[1269] The cationic lipid of an LNP (or liposomes, nanoliposomes, lipoplexes) may be cationisable, i.e. it becomes protonated as the pH is lowered below the pK of the ionizable group of the lipid, but is progressively more neutral at higher pH values. At pH values below the pK, the lipid is then able to associate with negatively charged nucleic acids. In certain embodiments, the cationic lipid comprises a zwitterionic lipid that assumes a positive charge on pH decrease.

[1270] Such lipids (for liposomes, lipid nanoparticles (LNP), lipoplexes, and/or nanoliposomes) include, but are not limited to, DSDMA, N,N-dioleyl-N,N-dimethylammonium chloride (DODAC), N,N-distearyl-N,N-dimethylammonium bromide (DDAB), 1,2-dioleoyltrimethyl ammonium propane chloride (DOTAP) (also known as N-(2,3-dioleoyloxy)propyl)-N,N,N-trimethylammonium chloride and 1,2-Dioleyloxy-3-trimethylaminopropane chloride salt), N-(1-(2,3-dioleyloxy)propyl)-N,N,N-trimethylammonium chloride (DOTMA), N,N-dimethyl-2,3-dioleyloxy)propylamine (DODMA), ckk-E12, ckk, 1,2-DiLinoleyloxy-N,N-dimethylaminopropane (DLinDMA), 1,2-Dilinolenyloxy-N,N-dimethylaminopropane (DLenDMA), 1,2-di-y-linolenyloxy-N,N-dimethylaminopropane (γ-DLenDMA), 98N12-5, 1,2-Dilinoleylcarbamoyloxy-3-dimethylaminopropane (DLin-C-DAP), 1,2-Dilinoleyoxy-3-(dimethylamino)acetoxypropane (DLin-DAC), 1,2-Dilinoleyoxy-3-morpholinopropane (DLin-MA), 1,2-Dilinoleoyl-3-dimethylaminopropane (DLinDAP), 1,2-Dilinoleylthio-3-dimethylaminopropane (DLin-S-DMA), 1-Linoleoyl-2-linoleyloxy-3-dimethylaminopropane (DLin-2-DMAP), 1,2-Dilinoleyloxy-3-trimethylaminopropane chloride salt (DLin-TMA.Cl), ICE (Imidazol-based), HGT5000, HGT5001, DMDMA, CLinDMA, CpLinDMA, DMOBA, DOcarbDAP, DLincarbDAP, DLinCDAP, KLin-K-DMA, DLin-K-XTC2-DMA, XTC (2,2-Dilinoleyl-4-dimethylaminoethyl[1,3]-dioxolane) HGT4003, 1,2-Dilinoleoyl-3-trimethylaminopropane chloride salt (DLin-TAP.Cl), 1,2-Dilinoleyloxy-3-(N-methylpiperazino)propane (DLin-MPZ), or 3-(N,N-Dilinoleylamino)-1,2-propanediol (DLinAP), 3-(N,N-Dioleylamino)-1,2-propanedio (DOAP), 1,2-Dilinoleyloxo-3-(2-N,N-dimethylamino)ethoxypropane (DLin-EG-DM A), 2,2-Dilinoleyl-4-dimethylaminomethyl-[1,3]-dioxolane (DLin-K-DMA) or analogs thereof, (3aR,5s,6aS)-N,N-dimethyl-2,2-di((9Z,12Z)-octadeca-9,12-dienyl)tetrahydro-3aH-cyclopenta[d][1,3]dioxol-5-amine, (6Z,9Z,28Z,31Z)-heptatriaconta-6,9,28,31-tetraen-19-yl-4-(dimethylamino)butanoate (MC3), ALNY-100 ((3aR,5s,6aS)-N,N-dimethyl-2,2-d((9Z,12Z)-octadeca-9,12-dienyl)tetrahydro-3aH-cyclopenta[d] [1,3]dioxol-5-amine)), 1,1′-(2-(4-(2-((2-(bis(2-hydroxydodecyl)amino)ethyl)(2-hydroxydodecyl)amino)ethyl)piperazin-1-yl)ethylazanediyl)didodecan-2-ol (C12-200), 2,2-dilinoleyl-4-(2-dimethylaminoethyl)-[1,3]-dioxolane (DLin-K-C2-DMA), 2,2-dilinoleyl-4-dimethylaminomethyl[1,3]-dioxolane (DLin-K-DMA), NC98-5 (4,7, 13-tris(3-oxo-3-(undecylamino)propyl)-N,N 16-diundecyl-4,7, 10,13-tetraazahexadecane-1,16-diamide), (6Z,9Z,28Z,31Z)-heptatriaconta-6,9,28,31-tetraen-19-yl 4-(dimethylamino) butanoate (DLin-M-C3-DMA), 3-((6Z,9Z,28Z,31Z)-heptatriaconta-6,9,28,31-tetraen-19-yloxy)-N,N-dimethylpropan-1-amine (MC3 Ether), 4-((6Z,9Z,28Z,31Z)-heptatriaconta-6,9,28,31-tetraen-19-yloxy)-N,N-dimethylbutan-1-amine (MC4 Ether), LIPOFECTIN® (commercially available cationic liposomes comprising DOTMA and 1,2-dioleoyl-sn-3phosphoethanolamine (DOPE), from GIBCO/BRL, Grand Island, N.Y.); LIPOFECTAMINE® (commercially available cationic liposomes comprising N-(1-(2,3dioleyloxy)propyl)-N-(2-(sperminecarboxamido)ethyl)-N,N-dimethylammonium trifluoroacetate (DOSPA) and (DOPE), from GIBCO/BRL); and TRANSFECTAM® (commercially available cationic lipids comprising dioctadecylamidoglycyl carboxyspermine (DOGS) in ethanol from Promega Corp., Madison, Wis.) or any combination of any of the foregoing. Further suitable cationic lipids for use in the compositions and methods of the invention include those described in international patent publications WO2010053572 (and particularly, CI 2-200 described at paragraph [00225]) and WO2012170930, both of which are incorporated herein by reference, HGT4003, HGT5000, HGT5001, HGT5001, HGT5002 (see US20150140070A1).

[1271] In embodiments, the cationic lipid of the liposomes, lipid nanoparticles (LNP), lipoplexes, and/or nanoliposomes may be an amino lipid.

[1272] Representative amino lipids include, but are not limited to, 1,2-dilinoleyoxy-3-(dimethylamino)acetoxypropane (DLin-DAC), 1,2-dilinoleyoxy-3morpholinopropane (DLin-MA), 1,2-dilinoleoyl-3-dimethylaminopropane (DLinDAP), 1,2-dlinoleylthio-3-dimethylaminopropane (DLin-S-DMA), 1-linoleoyl-2-linoleyloxy-3dimethylaminopropane (DLin-2-DMAP), 1,2-dilinoleyloxy-3-trimethylaminopropane chloride salt (DLin-TMA.Cl), 1,2-dilinoleoyl-3-trimethylaminopropane chloride salt (DLin-TAP.Cl), 1,2-dilinoleyloxy-3-(N-methylpiperazino)propane (DLin-MPZ), 3-(N,Ndilinoleylamino)-1,2-propanediol (DLinAP), 3-(N,N-dioleylamino)-1,2-propanediol (DOAP), 1,2-dilinoleyloxo-3-(2-N,N-dimethylamino)ethoxypropane (DLin-EG-DMA), and 2,2-dilinoleyl-4-dimethylaminomethyl-[1,3]-dioxolane (DLin-K-DMA), 2,2-dilinoleyl-4-(2-dimethylaminoethyl)[1,3]-dioxolane (DLin-KC2-DMA); dilinoleyl-methyl-4-dimethylaminobutyrate (DLin-MC3-DMA); MC3 (US20100324120).

[1273] In embodiments, the cationic lipid of the liposomes, lipid nanoparticles (LNP), lipoplexes, and/or nanoliposomes may an aminoalcohol lipidoid.

[1274] Aminoalcohol lipidoids which may be used in the present invention may be prepared by the methods described in U.S. Pat. No. 8,450,298, herein incorporated by reference in its entirety. Suitable (ionizable) lipids can also be the compounds as disclosed in Tables 1, 2 and 3 and as defined in claims 1-24 of WO2017075531A1, hereby incorporated by reference.

[1275] In another embodiment, suitable lipids can also be the compounds as disclosed in WO2015074085A1 (i.e. ATX-001 to ATX-032 or the compounds as specified in claims 1-26), U.S. Appl. Nos. 61/905,724 and 15/614,499 or U.S. Pat. Nos. 9,593,077 and 9,567,296 hereby incorporated by reference in their entirety.

[1276] In other embodiments, suitable cationic lipids can also be the compounds as disclosed in WO2017117530A1 (i.e. lipids 13, 14, 15, 16, 17, 18, 19, 20, or the compounds as specified in the claims), hereby incorporated by reference in its entirety.

[1277] In preferred embodiments, ionizable or cationic lipids may also be selected from the lipids disclosed in WO2018078053A1 (i.e. lipids derived from formula I, II, and III of WO2018078053A1, or lipids as specified in claims 1 to 12 of WO2018078053A1), the disclosure of WO2018078053A1 hereby incorporated by reference in its entirety. In that context, lipids disclosed in Table 7 of WO2018078053A1 (e.g. lipids derived from formula I-1 to 1-41) and lipids disclosed in Table 8 of WO2018078053A1 (e.g. lipids derived from formula II-1 to 11-36) may be suitably used in the context of the invention. Accordingly, formula I-1 to formula I-41 and formula II-1 to formula II-36 of WO2018078053A1, and the specific disclosure relating thereto, are herewith incorporated by reference.

[1278] In preferred embodiments, cationic lipids may be derived from formula III of published PCT patent application WO2018078053A1. Accordingly, formula III of WO2018078053A1, and the specific disclosure relating thereto, are herewith incorporated by reference.

[1279] In particularly preferred embodiments, the at least one nucleic acid of component A and/or component B (e.g. DNA or RNA), preferably the at least one RNA of component A and/or component B is complexed with one or more lipids thereby forming LNPs (or liposomes, nanoliposomes, lipoplexes), wherein the cationic lipid of the LNP is selected from structures III-1 to III-36 of Table 9 of published PCT patent application WO2018078053A1. Accordingly, formula III-1 to III-36 of WO2018078053A1, and the specific disclosure relating thereto, are herewith incorporated by reference.

[1280] In particularly preferred embodiments, the at least one nucleic acid of component A and/or the at least one nucleic acid of component B (e.g. DNA or RNA), preferably the at least one RNA acid of component A and/or the at least one RNA component B is complexed with one or more lipids thereby forming liposomes, lipid nanoparticles (LNP), lipoplexes, and/or nanoliposomes, preferably LNPs, wherein the liposomes, lipid nanoparticles (LNP), lipoplexes, and/or nanoliposomes, preferably the LNPs comprise a cationic lipid according to formula III-3:

[chemical structure]

[1281] The lipid of formula III-3 as suitably used herein has the chemical term ((4-hydroxybutyl)azanediyl)bis(hexane-6,1-diyl)bis(2-hexyldecanoate), also referred to as ALC-0315.

[1282] In certain embodiments, the cationic lipid as defined herein, more preferably cationic lipid compound III-3, is present in the LNP (or liposomes, nanoliposomes, lipoplexes) in an amount from about 30 to about 95 mole percent, relative to the total lipid content of the LNP. If more than one cationic lipid is incorporated within the LNP, such percentages apply to the combined cationic lipids.

[1283] In embodiments, the cationic lipid is present in the LNP (or liposomes, nanoliposomes, lipoplexes) in an amount from about 30 to about 70 mole percent. In one embodiment, the cationic lipid is present in the LNP (or liposomes, nanoliposomes, lipoplexes) in an amount from about 40 to about 60 mole percent, such as about 40, 41, 42, 43, 44, 45, 46, 47, 48, 49, 50, 51, 52, 53, 54, 55, 56, 57, 58, 59 or 60 mole percent, respectively. In embodiments, the cationic lipid is present in the LNP (or liposomes, nanoliposomes, lipoplexes) in an amount from about 47 to about 48 mole percent, such as about 47.0, 47.1, 47.2, 47.3, 47.4, 47.5, 47.6, 47.7, 47.8, 47.9, 50.0 mole percent, respectively, wherein 47.7 mole percent are particularly preferred.

[1284] In some embodiments, the cationic lipid is present in a ratio of from about 20 mol % to about 70 or 75 mol % or from about 45 to about 65 mol % or about 20, 25, 30, 35, 40, 45, 50, 55, 60, 65, or about 70 mol % of the total lipid present in the LNP (or liposomes, nanoliposomes, lipoplexes). In further embodiments, the LNPs (or liposomes, nanoliposomes, lipoplexes) comprise from about 25% to about 75% on a molar basis of cationic lipid, e.g., from about 20 to about 70%, from about 35 to about 65%, from about 45 to about 65%, about 60%, about 57.5%, about 57.1%, about 50% or about 40% on a molar basis (based upon 100% total moles of lipid in the lipid nanoparticle). In some embodiments, the ratio of cationic lipid to nucleic acid (e.g. coding RNA or DNA) is from about 3 to about 15, such as from about 5 to about 13 or from about 7 to about 11.

[1285] Other suitable (cationic or ionizable) lipids are disclosed in WO2009086558, WO2009127060, WO2010048536, WO2010054406, WO2010088537, WO2010129709, WO2011153493, WO 2013063468, US20110256175, US20120128760, US20120027803, U.S. Pat. No. 8,158,601, WO2016118724, WO2016118725, WO2017070613, WO2017070620, WO2017099823, WO2012040184, WO2011153120, WO2011149733, WO2011090965, WO2011043913, WO2011022460, WO2012061259, WO2012054365, WO2012044638, WO2010080724, WO201021865, WO2008103276, WO2013086373, WO2013086354, U.S. Pat. Nos. 7,893,302, 7,404,969, 8,283,333, 8,466,122 and 8,569,256 and US Patent Publication No. US20100036115, US20120202871, US20130064894, US20130129785, US20130150625, US20130178541, US20130225836, US20140039032 and WO2017112865. In that context, the disclosures of WO2009086558, WO2009127060, WO2010048536, WO2010054406, WO2010088537, WO2010129709, WO2011153493, WO 2013063468, US20110256175, US20120128760, US20120027803, U.S. Pat. No. 8,158,601, WO2016118724, WO2016118725, WO2017070613, WO2017070620, WO2017099823, WO2012040184, WO2011153120, WO2011149733, WO2011090965, WO2011043913, WO2011022460, WO2012061259, WO2012054365, WO2012044638, WO2010080724, WO201021865, WO2008103276, WO2013086373, WO2013086354, U.S. Pat. Nos. 7,893,302, 7,404,969, 8,283,333, 8,466,122 and 8,569,256 and US Patent Publication No. US20100036115, US20120202871, US20130064894, US20130129785, US20130150625, US20130178541, US20130225836 and US20140039032 and WO2017112865 specifically relating to (cationic) lipids suitable for LNPs (or liposomes, nanoliposomes, lipoplexes) are incorporated herewith by reference.

[1286] In embodiments, amino or cationic lipids as defined herein have at least one protonatable or deprotonatable group, such that the lipid is positively charged at a pH at or below physiological pH (e.g. pH 7.4), and neutral at a second pH, preferably at or above physiological pH. It will, of course, be understood that the addition or removal of protons as a function of pH is an equilibrium process, and that the reference to a charged or a neutral lipid refers to the nature of the predominant species and does not require that all of lipids have to be present in the charged or neutral form. Lipids having more than one protonatable or deprotonatable group, or which are zwitterionic, are not excluded and may likewise suitable in the context of the present invention. In some embodiments, the protonatable lipids have a pKa of the protonatable group in the range of about 4 to about 11, e.g., a pKa of about 5 to about 7.

[1287] LNPs (or liposomes, nanoliposomes, lipoplexes) can comprise two or more (different) cationic lipids as defined herein. Cationic lipids may be selected to contribute to different advantageous properties. For example, cationic lipids that differ in properties such as amine pKa, chemical stability, half-life in circulation, half-life in tissue, net accumulation in tissue, or toxicity can be used in the LNP (or liposomes, nanoliposomes, lipoplexes). In particular, the cationic lipids can be chosen so that the properties of the mixed-LNP are more desirable than the properties of a single-LNP of individual lipids.

[1288] The amount of the permanently cationic lipid or lipidoid may be selected taking the amount of the nucleic acid cargo into account. In one embodiment, these amounts are selected such as to result in an N/P ratio of the nanoparticle(s) or of the composition in the range from about 0.1 to about 20. In this context, the N/P ratio is defined as the mole ratio of the nitrogen atoms (“N”) of the basic nitrogen-containing groups of the lipid or lipidoid to the phosphate groups (“P”) of the nucleic acid which is used as cargo. The N/P ratio may be calculated on the basis that, for example, 1 ug RNA typically contains about 3 nmol phosphate residues, provided that the RNA exhibits a statistical distribution of bases. The “N”-value of the lipid or lipidoid may be calculated on the basis of its molecular weight and the relative content of permanently cationic and—if present—cationisable groups.

[1289] In vivo characteristics and behavior of LNPs (or liposomes, nanoliposomes, lipoplexes) can be modified by addition of a hydrophilic polymer coating, e.g. polyethylene glycol (PEG), to the LNP surface to confer steric stabilization. Furthermore, LNPs (or liposomes, nanoliposomes, lipoplexes) can be used for specific targeting by attaching ligands (e.g. antibodies, peptides, and carbohydrates) to its surface or to the terminal end of the attached PEG chains (e.g. via PEGylated lipids or PEGylated cholesterol).

[1290] In some embodiments, the LNPs (or liposomes, nanoliposomes, lipoplexes) comprise a polymer conjugated lipid. The term “polymer conjugated lipid” refers to a molecule comprising both a lipid portion and a polymer portion. An example of a polymer conjugated lipid is a PEGylated lipid. The term “PEGylated lipid” refers to a molecule comprising both a lipid portion and a polyethylene glycol portion. PEGylated lipids are known in the art and include 1-(monomethoxy-polyethyleneglycol)-2,3-dimyristoylglycerol (PEG-s-DMG) and the like.

[1291] A polymer conjugated lipid as defined herein, e.g. a PEG-lipid, may serve as an aggregation reducing lipid.

[1292] In certain embodiments, the LNP (or liposomes, nanoliposomes, lipoplexes) comprises a stabilizing-lipid which is a polyethylene glycol-lipid (PEGylated lipid). Suitable polyethylene glycol-lipids include PEG-modified phosphatidylethanolamine, PEG-modified phosphatidic acid, PEG-modified ceramides (e.g. PEG-CerC14 or PEG-CerC20), PEG-modified dialkylamines, PEG-modified diacylglycerols, PEG-modified dialkylglycerols. Representative polyethylene glycol-lipids include PEG-c-DOMG, PEG-c-DMA, and PEG-s-DMG. In one embodiment, the polyethylene glycol-lipid is N-[(methoxy poly(ethylene glycol)2000)carbamyl]-1,2-dimyristyloxlpropyl-3-amine (PEG-c-DMA). In a preferred embodiment, the polyethylene glycol-lipid is PEG-2000-DMG. In one embodiment, the polyethylene glycol-lipid is PEG-c-DOMG). In other embodiments, the LNPs comprise a PEGylated diacylglycerol (PEG-DAG) such as 1-(monomethoxy-polyethyleneglycol)-2,3-dimyristoylglycerol (PEG-DMG), a PEGylated phosphatidylethanoloamine (PEG-PE), a PEG succinate diacylglycerol (PEG-S-DAG) such as 4-O-(2′,3′-di(tetradecanoyloxy)propyl-1-O-(ω-methoxy(polyethoxy)ethyl)butanedioate (PEG-S-DMG), a PEGylated ceramide (PEG-cer), or a PEG dialkoxypropylcarbamate such as ω-methoxy(polyethoxy)ethyl-N-(2,3di(tetradecanoxy)propyl)carbamate or 2,3-di(tetradecanoxy)propyl-N-(ω-methoxy(polyethoxy)ethyl)carbamate.

[1293] In preferred embodiments, the PEGylated lipid is preferably derived from formula (IV) of published PCT patent application WO2018078053A1. Accordingly, PEGylated lipids derived from formula (IV) of published PCT patent application WO2018078053A1, and the respective disclosure relating thereto, are herewith incorporated by reference.

[1294] In a preferred embodiments, the at least one nucleic acid of component A and/or the at least one nucleic acid of component B (e.g. RNA or DNA) of the pharmaceutical composition is complexed with one or more lipids thereby forming LNPs (or liposomes, nanoliposomes, lipoplexes), wherein the LNP comprises a polymer conjugated lipid, preferably a PEGylated lipid, wherein the PEG lipid is preferably derived from formula (IVa) of published PCT patent application WO2018078053A1. Accordingly, PEGylated lipid derived from formula (IVa) of published PCT patent application WO2018078053A1, and the respective disclosure relating thereto, is herewith incorporated by reference.

[1295] In a preferred embodiment, the at least one nucleic acid of component A and/or the at least one nucleic acid of component B, preferably the at least one RNA component A and/or component B, is complexed with one or more lipids thereby forming lipid nanoparticles (or liposomes, nanoliposomes, lipoplexes), wherein the LNP (or liposomes, nanoliposomes, lipoplexes) comprises a polymer conjugated lipid, preferably a PEGylated lipid/PEG lipid. In preferred embodiments, said PEG lipid or PEGylated lipid is of formula (IVa):

[chemical structure]

[1296] wherein n has a mean value ranging from 30 to 60, such as about 30±2, 32±2, 34±2, 36±2, 38±2, 40±2, 42±2, 44±2, 46±2, 48±2, 50±2, 52±2, 54±2, 56±2, 58±2, or 60±2. In a most preferred embodiment n is about 49. In another preferred embodiment n is about 45. In further preferred embodiments, said PEG lipid is of formula (IVa) wherein n is an integer selected such that the average molecular weight of the PEG lipid is about 2000 g/mol to about 3000 g/mol or about 2300 g/mol to about 2700 g/mol, even more preferably about 2500 g/mol.

[1297] The lipid of formula IVa as suitably used herein has the chemical term 2[(polyethylene glycol)-2000]-N,N-ditetradecylacetamide, also referred to as ALC-0159.

[1298] Further examples of PEG-lipids suitable in that context are provided in US20150376115A1 and WO2015199952, each of which is incorporated by reference in its entirety.

[1299] In some embodiments, LNPs (or liposomes, nanoliposomes, lipoplexes) include less than about 3, 2, or 1 mole percent of PEG or PEG-modified lipid, based on the total moles of lipid in the LNP. In further embodiments, LNPs (or liposomes, nanoliposomes, lipoplexes) comprise from about 0.1% to about 20% of the PEG-modified lipid on a molar basis, e.g., about 0.5 to about 10%, about 0.5 to about 5%, about 10%, about 5%, about 3.5%, about 3%, about 2,5%, about 2%, about 1.5%, about 1%, about 0.5%, or about 0.3% on a molar basis (based on 100% total moles of lipids in the LNP). In preferred embodiments, LNPs (or liposomes, nanoliposomes, lipoplexes) comprise from about 1.0% to about 2.0% of the PEG-modified lipid on a molar basis, e.g., about 1.2 to about 1.9%, about 1.2 to about 1.8%, about 1.3 to about 1.8%, about 1.4 to about 1.8%, about 1.5 to about 1.8%, about 1.6 to about 1.8%, in particular about 1.4%, about 1.5%, about 1.6%, about 1.7%, about 1.8%, about 1.9%, most preferably 1.7% (based on 100% total moles of lipids in the LNP). In various embodiments, the molar ratio of the cationic lipid to the PEGylated lipid ranges from about 100:1 to about 25:1.

[1300] In preferred embodiments, the LNP (or liposomes, nanoliposomes, lipoplexes) comprises one or more additional lipids, which stabilize the formation of particles during their formulation or during the manufacturing process (e.g. neutral lipid and/or one or more steroid or steroid analogue).

[1301] In preferred embodiments, the at least one nucleic acid of component A and/or the at least one nucleic acid of component B, preferably the at least one RNA is complexed with one or more lipids thereby forming lipid nanoparticles (or liposomes, nanoliposomes, lipoplexes), wherein the LNP (or liposomes, nanoliposomes, lipoplexes) comprises one or more neutral lipid and/or one or more steroid or steroid analogue.

[1302] Suitable stabilizing lipids include neutral lipids and anionic lipids. The term “neutral lipid” refers to any one of a number of lipid species that exist in either an uncharged or neutral zwitterionic form at physiological pH. Representative neutral lipids include diacylphosphatidylcholines, diacylphosphatidylethanolamines, ceramides, sphingomyelins, dihydro sphingomyelins, cephalins, and cerebrosides.

[1303] In embodiments, the LNP (or liposome, nanoliposome, lipoplexe) comprises one or more neutral lipids, wherein the neutral lipid is selected from the group comprising distearoylphosphatidylcholine (DSPC), dioleoylphosphatidylcholine (DOPC), dipalmitoylphosphatidylcholine (DPPC), dioleoylphosphatidylglycerol (DOPG), dipalmitoylphosphatidylglycerol (DPPG), dioleoyl-phosphatidylethanolamine (DOPE), palmitoyloleoylphosphatidylcholine (POPC), palmitoyloleoyl-phosphatidylethanolamine (POPE) and dioleoyl-phosphatidylethanolamine 4-(N-maleimidomethyl)-cyclohexane-1carboxylate (DOPE-mal), dipalmitoyl phosphatidyl ethanolamine (DPPE), dimyristoylphosphoethanolamine (DMPE), distearoyl-phosphatidylethanolamine (DSPE), 16-O-monomethyl PE, 16-O-dimethyl PE, 18-1-trans PE, 1-stearioyl-2-oleoylphosphatidyethanol amine (SOPE), and 1,2-dielaidoyl-sn-glycero-3-phophoethanolamine (transDOPE), or mixtures thereof.

[1304] In some embodiments, the LNPs (or liposomes, nanoliposomes, lipoplexes) comprise a neutral lipid selected from DSPC, DPPC, DMPC, DOPC, POPC, DOPE and SM. In various embodiments, the molar ratio of the cationic lipid to the neutral lipid ranges from about 2:1 to about 8:1.

[1305] In preferred embodiments, the neutral lipid is 1,2-distearoyl-sn-glycero-3-phosphocholine (DSPC). Suitably, the molar ratio of the cationic lipid to DSPC may be in the range from about 2:1 to about 8:1.

[1306] In preferred embodiments, the steroid is cholesterol. Suitably, the molar ratio of the cationic lipid to cholesterol may be in the range from about 2:1 to about 1:1. In some embodiments, the cholesterol may be PEGylated.

[1307] The sterol can be about 10 mol % to about 60 mol % or about 25 mol % to about 40 mol % of the lipid particle. In one embodiment, the sterol is about 10, 15, 20, 25, 30, 35, 40, 45, 50, 55, or about 60 mol % of the total lipid present in the lipid particle. In another embodiment, the LNPs include from about 5% to about 50% on a molar basis of the sterol, e.g., about 15% to about 45%, about 20% to about 40%, about 48%, about 40%, about 38.5%, about 35%, about 34.4%, about 31.5% or about 31% on a molar basis (based upon 100% total moles of lipid in the lipid nanoparticle).

[1308] Preferably, lipid LNPs (or liposomes, nanoliposomes, lipoplexes) comprise:

[1309] (a) the at least one nucleic acid of component A and/or at least one nucleic acid of component B, preferably the at least one RNA of component A and/or component B, (b) a cationic lipid, (c) an aggregation reducing agent (such as polyethylene glycol (PEG) lipid or PEG-modified lipid), (d) optionally a non-cationic lipid (such as a neutral lipid), and (e) optionally, a sterol.

[1310] In some embodiments, the cationic lipids (as defined above), non-cationic lipids (as defined above), cholesterol (as defined above), and/or PEG-modified lipids (as defined above) may be combined at various relative molar ratios. For example, the ratio of cationic lipid to non-cationic lipid to cholesterol-based lipid to PEGylated lipid may be between about 30-60:20-35:20-30:1-15, or at a ratio of about 40:30:25:5, 50:25:20:5, 50:27:20:3, 40:30:20:10, 40:32:20:8, 40:32:25:3 or 40:33:25:2, or at a ratio of about 50:25:20:5, 50:20:25:5, 50:27:20:3 40:30:20:10,40:30:25:5 or 40:32:20:8, 40:32:25:3 or 40:33:25:2, respectively.

[1311] In some embodiments, the LNPs (or liposomes, nanoliposomes, lipoplexes) comprise a lipid of formula (III), the at least one nucleic acid of component A and/or component B, preferably the at least one RNA as defined herein, a neutral lipid, a steroid and a PEGylated lipid. In preferred embodiments, the lipid of formula (III) is lipid compound III-3 (ALC-0315), the neutral lipid is DSPC, the steroid is cholesterol, and the PEGylated lipid is the compound of formula (Iva ALC-0159).

[1312] In a preferred embodiment, the LNP (or liposomes, nanoliposomes, lipoplexes) consists essentially of (i) at least one cationic lipid; (ii) a neutral lipid; (iii) a sterol, e.g., cholesterol; and (iv) a PEG-lipid, e.g. PEG-DMG or PEG-cDMA, in a molar ratio of about 20-60% cationic lipid: 5-25% neutral lipid: 25-55% sterol; 0.5-15% PEG-lipid.

[1313] In particularly preferred embodiments, the at least one nucleic acid of component A and/or component B, preferably the at least one RNA of component A and/or component B is complexed with one or more lipids thereby forming lipid nanoparticles (or liposomes, nanoliposomes, lipoplexes), wherein the LNP (or liposome, nanoliposome, lipoplex) comprises
[1314] (i) at least one cationic lipid as defined herein, preferably a lipid of formula (III), more preferably lipid III-3 (ALC-0315);
[1315] (ii) at least one neutral lipid as defined herein, preferably 1,2-distearoyl-sn-glycero-3-phosphocholine (DSPC);
[1316] (iii) at least one steroid or steroid analogue as defined herein, preferably cholesterol; and
[1317] (iv) at least one polymer conjugated lipid, preferably a PEG-lipid as defined herein, e.g. PEG-DMG or PEG-cDMA, preferably a PEGylated lipid that is or is derived from formula (IVa ALC-0159).

[1318] In particularly preferred embodiments, the at least one nucleic acid of component A and/or component B, preferably the at least one RNA of component A and/or component B is complexed with one or more lipids thereby forming lipid nanoparticles (LNP), wherein the LNP comprises (i) to (iv) in a molar ratio of about 20-60% cationic lipid: 5-25% neutral lipid: 25-55% sterol; 0.5-15% polymer conjugated lipid, preferably PEG-lipid.

[1319] In one preferred embodiment, the lipid nanoparticle (or liposome, nanoliposome, lipoplexe) comprises: a cationic lipid with formula (III) and/or PEG lipid with formula (IV), optionally a neutral lipid, preferably 1,2-distearoyl-sn-glycero-3-phosphocholine (DSPC) and optionally a steroid, preferably cholesterol, wherein the molar ratio of the cationic lipid to DSPC is optionally in the range from about 2:1 to 8:1, wherein the molar ratio of the cationic lipid to cholesterol is optionally in the range from about 2:1 to 1:1.

[1320] In a particular preferred embodiment, the composition comprises the at least one nucleic acid of component A and/or at least one nucleic acid of component B, preferably the at least one RNA, comprises lipid nanoparticles (LNPs), which have a molar ratio of approximately 50:10:38.5:1.5, preferably 47.5:10:40.8:1.7 or more preferably 47.4:10:40.9:1.7 (i.e. proportion (mol %) of cationic lipid (preferably lipid III-3 (ALC-0315)), DSPC, cholesterol and polymer conjugated lipid, preferably PEG-lipid (preferably PEG-lipid of formula (IVa) with n=49, even more preferably PEG-lipid of formula (IVa) with n=45; ALC-0159); solubilized in ethanol).

[1321] The total amount of nucleic acid in the lipid nanoparticles may vary and is defined depending on the e.g. nucleic acid to total lipid w/w ratio. In one embodiment of the invention the nucleic acid, in particular the RNA to total lipid ratio is less than 0.06 w/w, preferably between 0.03 w/w and 0.04 w/w.

[1322] In preferred embodiments, the wt/wt ratio of lipid to nucleic acid is from about 10:1 to about 60:1, preferably from about 20:1 to about 30:1, for example about 25:1.

[1323] In preferred embodiments, the n/p ratio of the liposome, lipid nanoparticle (LNP), lipoplex, and/or nanoliposome encapsulating the nucleic acid is in a range from about 1 to about 10, preferably in a range from about 5 to about 7, more preferably about 6.

[1324] In some embodiments, the lipid nanoparticles (or liposomes, nanoliposomes, lipoplexes) are composed of only three lipid components, namely imidazole cholesterol ester (ICE), 1,2-dioleoyl-sn-glycero-3-phosphoethanolamine (DOPE), and 1,2-dimyristoyl-sn-glycerol, methoxypolyethylene glycol (DMG-PEG-2K)

[1325] In one embodiment, the lipid nanoparticle (or liposomes, nanoliposomes, lipoplexes) of the composition comprises a cationic lipid, a steroid, a neutral lipid, and a polymer conjugated lipid, preferably a pegylated lipid. Preferably, the polymer conjugated lipid is a pegylated lipid or PEG-lipid. In a specific embodiment, lipid nanoparticles comprise a cationic lipid resembled by the cationic lipid COATSOME® SS-EC (former name: SS-33/4PE-15; NOF Corporation, Tokyo, Japan), in accordance with the following formula

[chemical structure]

[1326] As described further below, those lipid nanoparticles are termed “GN01”.

[1327] Furthermore, in a specific embodiment, the GN01 lipid nanoparticles comprise a neutral lipid being resembled by the structure 1,2-diphytanoyl-sn-glycero-3-phosphoethanolamine (DPhyPE):

[chemical structure]

[1328] Furthermore, in a specific embodiment, the GN01 lipid nanoparticles comprise a polymer conjugated lipid, preferably a pegylated lipid, being 1,2-dimyristoyl-rac-glycero-3-methoxypolyethylene glycol 2000 (DMG-PEG 2000) having the following structure:

[chemical structure]

[1329] As used in the art, “DMG-PEG 2000” is considered a mixture of 1,2-DMG PEG2000 and 1,3-DMG PEG2000 in ˜97:3 ratio.

[1330] Accordingly, GN01 lipid nanoparticles (GN01-LNPs) according to one of the preferred embodiments comprise a SS-EC cationic lipid, neutral lipid DPhyPE, cholesterol, and the polymer conjugated lipid (pegylated lipid) 1,2-dimyristoyl-rac-glycero-3-methoxypolyethylene glycol (PEG-DMG).

[1331] In a preferred embodiment, the GN01 LNPs comprise:

[1332] (a) cationic lipid SS-EC (former name: SS-33/4PE-15; NOF Corporation, Tokyo, Japan) at an amount of 45-65 mol %;

[1333] (b) cholesterol at an amount of 25-45 mol %;

[1334] (c) DPhyPE at an amount of 8-12 mol %; and

[1335] (d) PEG-DMG 2000 at an amount of 1-3 mol %;

[1336] each amount being relative to the total molar amount of all lipidic excipients of the GN01 lipid nanoparticles.

[1337] In a further preferred embodiment, the GN01 lipid nanoparticles as described herein comprises 59 mol % cationic lipid, 10 mol % neutral lipid, 29.3 mol % steroid and 1.7 mol % polymer conjugated lipid, preferably pegylated lipid. In a most preferred embodiment, the GN01 lipid nanoparticles as described herein comprise 59 mol % cationic lipid SS-EC, 10 mol % DPhyPE, 29.3 mol % cholesterol and 1.7 mol % DMG-PEG 2000.

[1338] The amount of the cationic lipid relative to that of the nucleic acid in the GN01 lipid nanoparticle may also be expressed as a weight ratio (abbreviated e.g. “m/m”). For example, the GN01 lipid nanoparticles comprise the at least one nucleic acid, preferably the at least one RNA at an amount such as to achieve a lipid to RNA weight ratio in the range of about 20 to about 60, or about 10 to about 50. In other embodiments, the ratio of cationic lipid to nucleic acid or RNA is from about 3 to about 15, such as from about 5 to about 13, from about 4 to about 8 or from about 7 to about 11. In a very preferred embodiment of the present invention, the total lipid/RNA mass ratio is about 40 or 40, i.e. about 40 or 40 times mass excess to ensure RNA encapsulation. Another preferred RNA/lipid ratio is between about 1 and about 10, about 2 and about 5, about 2 and about 4, or preferably about 3.

[1339] Further, the amount of the cationic lipid may be selected taking the amount of the nucleic acid cargo such as the RNA compound into account. In one embodiment, the N/P ratio can be in the range of about 1 to about 50. In another embodiment, the range is about 1 to about 20, about 1 to about 10, about 1 to about 5. In one preferred embodiment, these amounts are selected such as to result in an N/P ratio of the GN01 lipid nanoparticles or of the composition in the range from about 10 to about 20. In a further very preferred embodiment, the N/P is 14 (i.e. 14 times mol excess of positive charge to ensure nucleic acid encapsulation).

[1340] In a preferred embodiment, GN01 lipid nanoparticles comprise 59 mol % cationic lipid COATSOME® SS-EC (former name: SS-33/4PE-15 as apparent from the examples section; NOF Corporation, Tokyo, Japan), 29.3 mol % cholesterol as steroid, 10 mol % DPhyPE as neutral lipid/phospholipid and 1.7 mol % DMG-PEG 2000 as polymer conjugated lipid. A further inventive advantage connected with the use of DPhyPE is the high capacity for fusogenicity due to its bulky tails, whereby it is able to fuse at a high level with endosomal lipids. For “GN01”, N/P (lipid to nucleic acid, e.g. RNA mol ratio) preferably is 14 and total lipid/RNA mass ratio preferably is 40 (m/m).

[1341] In other embodiments, the at least one nucleic acid of component A and/or the at least one nucleic acid of component B, preferably the at least one RNA is complexed with one or more lipids thereby forming lipid nanoparticles (or liposomes, nanoliposomes, lipoplexes), wherein the LNP (or liposomes, nanoliposomes, lipoplexes) comprises

[1342] I. at least one cationic lipid;

[1343] Ii. at least one neutral lipid;

[1344] Iii. at least one steroid or steroid analogue; and

[1345] Iiii. at least one PEG-lipid as defined herein,

[1346] wherein the cationic lipid is DLin-KC2-DMA (50 mol %) or DLin-MC3-DMA (50 mol %), the neutral lipid is DSPC (10 mol %), the PEG lipid is PEG-DOMG (1.5 mol %) and the structural lipid is cholesterol (38.5 mol %).

[1347] In other embodiments, the at least one nucleic acid of component A and/or component B (e.g. DNA or RNA), preferably the at least one RNA is complexed with one or more lipids thereby forming lipid nanoparticles (LNP), wherein the LNP comprises SS15/Chol/DOPE (or DOPC)/DSG-5000 at mol % 50/38.5/10/1.5.

[1348] In other embodiments, the nucleic acid of component A and/or component B may be formulated in liposomes, e.g. in liposomes as described in WO2019222424, WO2019226925, WO2019232095, WO2019232097, or WO2019232208, the disclosure of WO2019222424, WO2019226925, WO2019232095, WO2019232097, or WO2019232208 relating to liposomes or lipid-based carrier molecules herewith incorporated by reference.

[1349] In various embodiments, LNPs that suitably encapsulates the at least one nucleic acid of component A and/or component B have a mean diameter of from about 50 nm to about 200 nm, from about 60 nm to about 200 nm, from about 70 nm to about 200 nm, from about 80 nm to about 200 nm, from about 90 nm to about 200 nm, from about 90 nm to about 190 nm, from about 90 nm to about 180 nm, from about 90 nm to about 170 nm, from about 90 nm to about 160 nm, from about 90 nm to about 150 nm, from about 90 nm to about 140 nm, from about 90 nm to about 130 nm, from about 90 nm to about 120 nm, from about 90 nm to about 100 nm, from about 70 nm to about 90 nm, from about 80 nm to about 90 nm, from about 70 nm to about 80 nm, or about 30 nm, 35 nm, 40 nm, 45 nm, 50 nm, 55 nm, 60 nm, 65 nm, 70 nm, 75 nm, 80 nm, 85 nm, 90 nm, 95 nm, 100 nm, 105 nm, 110 nm, 115 nm, 120 nm, 125 nm, 130 nm, 135 nm, 140 nm, 145 nm, 150 nm, 160 nm, 170 nm, 180 nm, 190 nm, or 200 nm and are substantially non-toxic. As used herein, the mean diameter may be represented by the z-average size as determined by dynamic light scattering as commonly known in the art.

[1350] In another preferred embodiment of the invention the lipid nanoparticles have a hydrodynamic diameter in the range from about 50 nm to about 300 nm, or from about 60 nm to about 250 nm, from about 60 nm to about 150 nm, or from about 60 nm to about 120 nm, respectively.

[1351] In another preferred embodiment of the invention the lipid nanoparticles have a hydrodynamic diameter in the range from about 50 nm to about 300 nm, or from about 60 nm to about 250 nm, from about 60 nm to about 150 nm, or from about 60 nm to about 120 nm, respectively.

[1352] In another preferred embodiments, the lipid nanoparticles have a Z-average size in a range of about 60 nm to about 120 nm, preferably less than about 120 nm, more preferably less than about 100 nm, most preferably less than about 80 nm.

[1353] Suitably, LNPs comprise less than about 10%, 9%, 8%, 7%, 6%, 5%, 4%, 3%, 2%, 1% LNPs that have a particle size exceeding about 500 nm. Suitably, the LNPs comprise less than about 10%, 9%, 8%, 7%, 6%, 5%, 4%, 3%, 2%, 1% LNPs that have a particle size smaller than about 20 nm.

[1354] The polydispersity index (PDI) of the nanoparticles (e.g. LNPs) is typically in the range of 0.1 to 0.5. In a particular embodiment, a PDI is below 0.2. Typically, the PDI is determined by dynamic light scattering.

[1355] In preferred embodiments, the composition has a polydispersity index (PDI) value of less than about 0.4, preferably of less than about 0.3, more preferably of less than about 0.2, most preferably of less than about 0.1.

[1356] In various embodiments, nucleic acid, e.g., RNA of the pharmaceutical composition does not exceed a certain proportion of free RNA.

[1357] In this context, the term “free RNA” or “non-complexed RNA” or “non-encapsulated RNA” comprise the RNA molecules that are not encapsulated in the lipid-based carriers as defined herein. During formulation of the composition (e.g. during encapsulation of the RNA into the lipid-based carriers), free RNA may represent a contamination or an impurity.

[1358] The skilled person can choose from a variety of different methods for determining the amount and/or the proportion of free nucleic acid of free RNA in the composition. Free RNA in the composition may be determined by chromatographic methods (e.g. AEX, SEC) or by using probes (e.g. dyes) that bind to free RNA in the composition. In the context of the invention, the amount of free RNA or non-encapsulated RNA may be determined using a dye based assay. Suitable dyes that may be used to determine the amount and/or the proportion of free RNA comprise RiboGreen®, PicoGreen® dye, OliGreen® dye, QuantiFluor® RNA dye, Qubit® RNA dye, Quant-iT™ RNA dye, TOTO®-1 dye, YOYO®-1 dye. Such dyes are suitable to discriminate between free RNA and encapsulated RNA. Reference standards consisting of defined amounts of free RNA or encapsulated RNA may be used and mixed with the respective reagent (e.g. RiboGreen® reagent (Excitation 500 nm/Emission 525 nm)) as recommended by the supplier's instructions. Typically, the free RNA of the composition is quantitated using the Quant-iT RiboGreen RNA Reagent according to the manufacturer's instructions. The proportion of free RNA in the context of the invention is typically determined using a RiboGreen assay.

[1359] In embodiments, a composition comprises free nucleic acid, such as free RNA ranging from about 30% to about 0%. In embodiments, the composition comprises about 20% free RNA (and about 80% encapsulated RNA), about 15% free RNA (and about 85% encapsulated RNA), about 10% free RNA (and about 90% encapsulated RNA), or about 5% free RNA (and about 95% encapsulated RNA). In preferred embodiments, the composition comprises less than about 20% free RNA, preferably less than about 15% free RNA, more preferably less than about 10% free RNA, most preferably less than about 5% free RNA.

[1360] In aspects comprising RNA nucleic acids, the term “encapsulated RNA” comprise the RNA molecules that are encapsulated in the lipid-based carriers as defined herein. The proportion of encapsulated RNA in the context of the invention is typically determined using a RiboGreen assay.

[1361] Accordingly, in embodiments, about 70% to about 100% of the RNA in the composition is encapsulated in the lipid-based carriers. In embodiments, the composition comprises about 80% encapsulated RNA (and about 20% free RNA), about 85% encapsulated RNA (and about 15% free RNA), about 90% encapsulated RNA (and about 10% free RNA), or about 95% encapsulated RNA (and 5% about free RNA).

[1362] In preferred embodiments, 80% of the nucleic acid (e.g., RNA) comprised in the composition is encapsulated, preferably 85% of the RNA comprised in the composition is encapsulated, more preferably 90% of the RNA comprised in the composition is encapsulated, most preferably 95% of the RNA comprised in the composition is encapsulated.

[1363] In embodiments, the lipid-based carriers encapsulating the RNA has been purified by at least one purification step, preferably by at least one step of TFF and/or at least one step of clarification and/or at least one step of filtration. Suitably, the purified composition w comprises less than about 500 ppM ethanol, preferably less than about 50 ppM ethanol, more preferably less than about 5 ppM ethanol.

[1364] In various embodiments, the pharmaceutical composition of the first aspect comprises a sugar in a concentration of about 50 mM to about 300 mM, preferably sucrose in a concentration of about 150 mM.

[1365] In embodiments where more than one or a plurality, e.g. 2, 3, 4, 5, 6, 7, 8, 9, 10, 11, 12, 13, 14, 15 of nucleic acid species of component A and/or component B of the invention are comprised in the composition, said more than one or said plurality e.g. 2, 3, 4, 5, 6, 7, 8, 9, 10, 11, 12, 13, 14, 15 of nucleic acid species may be complexed within one or more lipids thereby forming LNPs comprising more than one or a plurality, e.g. 2, 3, 4, 5, 6, 7, 8, 9, 10, 11, 12, 13, 14, 15 of different nucleic acid species.

[1366] In embodiments, the nucleic acid formulation (e.g. Polymers, LNPs, liposomes, nanoliposomes, lipoplexes) described herein may be lyophilized in order to improve storage stability of the formulation and/or the nucleic acid of component A and/or component B. In embodiments, the nucleic acid formulation (e.g. Polymers, LNPs, liposomes, nanoliposomes, lipoplexes) described herein may be spray dried in order to improve storage stability of the formulation and/or the nucleic acid of component A and/or B. Lyoprotectants for lyophilization and or spray drying may be selected from trehalose, sucrose, mannose, dextran and inulin. A preferred lyoprotectant is sucrose, optionally comprising a further lyoprotectant. A further preferred lyoprotectant is trehalose, optionally comprising a further lyoprotectant.

[1367] Suitably, the pharmaceutical composition, e.g. the composition comprising LNPs, is lyophilized (e.g. according to WO2016165831 or WO2011069586) to yield a temperature stable dried nucleic acid (powder) composition as defined herein (e.g. RNA or DNA). The composition, e.g. the composition comprising LNPs, may also be dried using spray-drying or spray-freeze drying (e.g. according to WO2016184575 or WO2016184576) to yield a temperature stable composition (powder) as defined herein.

[1368] Accordingly, in preferred embodiments, the pharmaceutical composition is a dried composition.

[1369] The term “dried composition” as used herein has to be understood as composition that has been lyophilized, or spray-dried, or spray-freeze dried as defined above to obtain a temperature stable dried composition (powder) e.g. comprising LNP complexed RNA (as defined above).

[1370] In embodiments, lyophilized or spray-dried composition has a water content of less than about 10%.

[1371] In preferred embodiments, lyophilized or spray-dried composition has a water content of between about 0.5% and 5%.

[1372] In preferred embodiments, the lyophilized or spray-dried composition is stable for at least 2 months after storage at about 5° C., preferably for at least 3 months, 4 months, 5 months, 6 months.

[1373] According to further embodiments, the pharmaceutical composition may comprise at least one adjuvant.

[1374] Suitably, the adjuvant is preferably added to enhance the immunostimulatory properties of the composition.

[1375] The term “adjuvant” as used herein will be recognized and understood by the person of ordinary skill in the art, and is for example intended to refer to a pharmacological and/or immunological agent that may modify, e.g. enhance, the effect of other agents or that may be suitable to support administration and delivery of the composition. The term “adjuvant” refers to a broad spectrum of substances. Typically, these substances are able to increase the immunogenicity of antigens. For example, adjuvants may be recognized by the innate immune systems and, e.g., may elicit an innate immune response (that is, a non-specific immune response). “Adjuvants” typically do not elicit an adaptive immune response. In the context of the invention, adjuvants may enhance the effect of the antigenic peptide or protein provided by the nucleic acid. In that context, the at least one adjuvant may be selected from any adjuvant known to a skilled person and suitable for the present case, i.e. supporting the induction of an immune response in a subject, e.g. in a human subject.

[1376] Accordingly, the pharmaceutical composition may comprise at least one adjuvant, wherein the at least one adjuvant may be suitably selected from any adjuvant provided in WO2016203025. Adjuvants disclosed in any of the claims 2 to 17 of WO2016203025, preferably adjuvants disclosed in claim 17 of WO2016203025 are particularly suitable, the specific content relating thereto herewith incorporated by reference. Adjuvants may suitably used and comprised in the composition of the first aspect, or the combination vaccine of the second aspect, to e.g. reduce the amount of nucleic acid (of component A and/or component B) required for a sufficient immune response against the encoded protein and/or the improve the efficacy of the composition/the vaccine for treatment/vaccination, in particular of the elderly. A suitable adjuvant in the context of a coronavirus composition or vaccine (in particular for compositions comprising a polypeptide of the third aspect) may be a Toll-like receptor 9 (TLR9) agonist adjuvant, CpG 1018TM.

[1377] The pharmaceutical composition may comprise, besides the components specified herein, at least one further component which may be selected from the group consisting of further antigens (e.g. in the form of a peptide or protein, preferably derived from a coronavirus as specified herein and/or a further virus as specified herein) or further antigen-encoding nucleic acids; a further immunotherapeutic agent; one or more auxiliary substances (cytokines, such as monokines, lymphokines, interleukins or chemokines); or any further compound, which is known to be immune stimulating due to its binding affinity (as ligands) to human Toll-like receptors; and/or an adjuvant nucleic acid, preferably an immunostimulatory RNA (isRNA), e.g. CpG-RNA etc.

[1378] In embodiments, the pharmaceutical composition comprises at least one antagonist of at least one RNA sensing pattern recognition receptor. Such an antagonist may preferably be co-formulated in lipid-based carriers as defined herein.

[1379] Suitable antagonist of at least one RNA sensing pattern recognition receptor are disclosed in PCT patent application PCT/EP2020/072516, the full disclosure herewith incorporated by reference. In particular, the disclosure relating to suitable antagonist of at least one RNA sensing pattern recognition receptors as defined in any one of the claims 1 to 94 of PCT/EP2020/072516 are incorporated.

[1380] In preferred embodiments, the composition comprises at least one antagonist of at least one RNA sensing pattern recognition receptor selected from a Toll-like receptor, preferably TLR7 and/or TLR8.

[1381] In embodiments, the at least one antagonist of at least one RNA sensing pattern recognition receptor is selected from a nucleotide, a nucleotide analog, a nucleic acid, a peptide, a protein, a small molecule, a lipid, or a fragment, variant or derivative of any of these.

[1382] In preferred embodiments, the at least one antagonist of at least one RNA sensing pattern recognition receptor is a single stranded oligonucleotide, preferably a single stranded RNA Oligonucleotide.

[1383] In embodiments, the antagonist of at least one RNA sensing pattern recognition receptor is a single stranded oligonucleotide that comprises or consists of a nucleic acid sequence identical or at least 70%, 80%, 85%, 86%, 87%, 88%, 89%, 90%, 91%, 92%, 93%, 94%, 95%, 96%, 97%, 98%, or 99% identical to a nucleic acid sequence selected from the group consisting of SEQ ID NOs: 85-212 of PCT/EP2020/072516, or fragments of any of these sequences.

[1384] In preferred embodiments, the antagonist of at least one RNA sensing pattern recognition receptor is a single stranded oligonucleotide that comprises or consists of a nucleic acid sequence identical or at least 70%, 80%, 85%, 86%, 87%, 88%, 89%, 90%, 91%, 92%, 93%, 94%, 95%, 96%, 97%, 98%, or 99% identical to a nucleic acid sequence selected from the group consisting of SEQ ID NOs: 85-87, 149-212 of PCT/EP2020/072516, or fragments of any of these sequences.

[1385] A particularly preferred antagonist of at least one RNA sensing pattern recognition receptor in the context of the invention is 5′-GAG CGmG CCA-3′ (SEQ ID NO: 85 of PCT/EP2020/072516), or a fragment thereof.

[1386] In embodiments, the molar ratio of the at least one antagonist of at least one RNA sensing pattern recognition receptor as defined herein to the at least one nucleic acid, preferably RNA encoding an antigenic peptide or protein as defined herein suitably ranges from about 1:1, to about 100:1, or ranges from about 20:1, to about 80:1.

[1387] In embodiments, the wherein the weight to weight ratio of the at least one antagonist of at least one RNA sensing pattern recognition receptor as defined herein to the at least one nucleic acid, preferably RNA encoding an antigenic peptide or protein as defined herein suitably ranges from about 1:1, to about 1:30, or ranges from about 1:2, to about 1:10.

[1388] Combinations of Component A and Component B:

[1389] In the following, suitable features and embodiments relating to suitable combinations of component A (in particular, component A-1, A-2, A-3) and component B (in particular component B-1, B-2, B-3, B-3a, B-3b, B-4, B-4a, B-4b) of the pharmaceutical composition (and the combination vaccine) are further specified.

[1390] As outlined herein, the invention relates to a pharmaceutical composition comprising at least one component A and at least one component B, wherein component A comprises at least one nucleic acid comprising at least one coding sequence encoding at least one antigenic peptide or protein selected or derived from at least one Coronavirus, or an immunogenic fragment or immunogenic variant thereof.

[1391] Suitably, component A is selected from at least one of component

[1392] A-1 at least one nucleic acid comprising at least one coding sequence encoding at least one antigenic peptide or protein selected or derived from at least one SARS-CoV-2 or an immunogenic fragment or immunogenic variant thereof, preferably as defined herein, and/or

[1393] A-2 at least one nucleic acid comprising at least one coding sequence encoding at least one antigenic peptide or protein selected or derived from at least one SARS-associated virus (e.g. SARS-CoV-1) or an immunogenic fragment or immunogenic variant thereof, preferably as defined herein, and/or

[1394] A-3 at least one nucleic acid comprising at least one coding sequence encoding at least one antigenic peptide or protein selected or derived from at least one MERS-CoV or an immunogenic fragment or immunogenic variant thereof, preferably as defined herein.

[1395] It has to be understood that component A-1 comprises at least one nucleic acid encoding at least one antigenic peptide or protein selected or derived from at least one SARS-CoV-2 as defined in paragraph “Component A-1: SARS-CoV-2”, preferably having a nucleic acid sequence, preferably an mRNA sequence, as defined in the context of component A-1. Suitable features of said nucleic acid sequence encoding a SARS-CoV-2 antigen are provided in paragraph “Nucleic acid features and embodiments”. Further, it is preferred that the at least one nucleic acid encoding a SARS-CoV-2 antigen is formulated and/or complexed. Suitable formulations or complexations of said nucleic acid encoding a SARS-CoV-2 antigen are provided in paragraph “Formulation and complexation”.

[1396] It has to be understood that component A-2 comprises at least one nucleic acid encoding at least one antigenic peptide or protein selected or derived from at least one SARS-associated virus (e.g. SARS-CoV-1) as defined in paragraph “Component A-2: SARS-associated virus”, preferably having a nucleic acid sequence, preferably an mRNA sequence, as defined in the context of component A-2. Suitable features of said nucleic acid sequence encoding at least one SARS-associated virus antigen are provided in paragraph “Nucleic acid features and embodiments”. Further, it is preferred that the at least one nucleic acid encoding at least one SARS-associated virus antigen is formulated and/or complexed. Suitable formulations or complexations of said nucleic acid encoding at least one SARS-associated virus antigen are provided in paragraph “Formulation and complexation”.

[1397] It has to be understood that component A-3 comprises at least one nucleic acid encoding at least one antigenic peptide or protein selected or derived from at least one MERS-CoV as defined in paragraph “Component A-3: MERS-CoV”, preferably having a nucleic acid sequence, preferably an mRNA sequence, as defined in the context of component A-3. Suitable features of said nucleic acid sequence encoding at least one MERS-CoV antigen are provided in paragraph “Nucleic acid features and embodiment”. Further, it is preferred that the at least one nucleic acid encoding at least one MERS-CoV antigen is formulated and/or complexed. Suitable formulations or complexations of said nucleic acid encoding at least one MERS-CoV antigen are provided in paragraph “Formulation and complexation”.

[1398] In embodiments, component A is selected from A-1 and A-2; A-1 and A-3; A-2 and A-3; or A-1 and A-2 and A-3.

[1399] In preferred embodiments, component A is selected from component A-1 (SARS-CoV-2).

[1400] As outlined herein, the invention relates to a pharmaceutical composition comprising at least one component A and at least one component B, wherein component B comprises at least one nucleic acid comprising at least one coding sequence encoding at least one antigenic peptide or protein selected or derived from at least one further virus, or an immunogenic fragment or immunogenic variant thereof.

[1401] Suitably, component B is selected from at least one of component

[1402] B-1 at least one nucleic acid comprising at least one coding sequence encoding at least one antigenic peptide or protein selected or derived from at least one different Coronavirus or an immunogenic fragment or immunogenic variant thereof, preferably as defined herein, and/or

[1403] B-2 at least one nucleic acid comprising at least one coding sequence encoding at least one antigenic peptide or protein selected or derived from at least one Influenza virus or an immunogenic fragment or immunogenic variant thereof, preferably as defined herein, and/or

[1404] B-3 at least one nucleic acid comprising at least one coding sequence encoding at least one antigenic peptide or protein selected or derived from at least one Pneumoviridae virus or an immunogenic fragment or immunogenic variant thereof, preferably as defined herein, and/or

[1405] B-4 at least one nucleic acid comprising at least one coding sequence encoding at least one antigenic peptide or protein selected or derived from at least one Paramyxoviridae virus or an immunogenic fragment or immunogenic variant thereof, preferably as defined herein.

[1406] It has to be understood that component B-1 comprises at least one nucleic acid encoding at least one antigenic peptide or protein selected or derived from at least one different Coronavirus as defined in paragraph “Component B-1: Different Coronavirus”, preferably having a nucleic acid sequence, preferably an mRNA sequence, as defined in the context of component B-1. Suitable features of said nucleic acid sequence encoding an antigen of a different Coronavirus are provided in paragraph “Nucleic acid features and embodiment”. Further, it is preferred that the at least one nucleic acid encoding a different Coronavirus antigen is formulated and/or complexed. Suitable formulations or complexations of said nucleic acid encoding a different Coronavirus antigen are provided in paragraph “Formulation and complexation”.

[1407] It has to be understood that component B-2 comprises at least one nucleic acid encoding at least one antigenic peptide or protein selected or derived from at least one Influenza virus as defined in paragraph “Component B-2: Influenza virus”, preferably having a nucleic acid sequence, preferably an mRNA sequence, as defined in the context of component B-2. Suitable features of said nucleic acid sequence encoding at least one Influenza virus antigen are provided in paragraph “Nucleic acid features and embodiment”. Further, it is preferred that the at least one nucleic acid encoding at least one Influenza virus antigen is formulated and/or complexed. Suitable formulations or complexations of said nucleic acid encoding at least one Influenza virus antigen are provided in paragraph “Formulation and complexation”.

[1408] It has to be understood that component B-3 comprises at least one nucleic acid encoding at least one antigenic peptide or protein selected or derived from at least one Pneumoviridae virus (e.g. RSV and/or hMPV) as defined in paragraph “Component B-3: Pneumoviridae virus”, preferably having a nucleic acid sequence, preferably an mRNA sequence, as defined in the context of component B-3. Suitable features of said nucleic acid sequence encoding at least one Pneumoviridae virus (e.g. RSV and/or hMPV) antigen are provided in paragraph “Nucleic acid features and embodiments”. Further, it is preferred that the at least one nucleic acid encoding at least one Pneumoviridae virus (e.g. RSV and/or hMPV) antigen is formulated and/or complexed. Suitable formulations or complexations of said nucleic acid encoding at least one Pneumoviridae virus (e.g. RSV and/or hMPV) antigen are provided in paragraph “Formulation and complexation”.

[1409] It has to be understood that component B-4 comprises at least one nucleic acid encoding at least one antigenic peptide or protein selected or derived from at least one Paramyxoviridae virus (e.g. PIV and/or Henipavirus) as defined in paragraph “Component B-4: Paramyxoviridae virus”, preferably having a nucleic acid sequence, preferably an mRNA sequence, as defined in the context of component B-4. Suitable features of said nucleic acid sequence encoding at least one Paramyxoviridae virus (e.g. PIV and/or Henipavirus) antigen are provided in paragraph “Nucleic acid features and embodiments”. Further, it is preferred that the at least one nucleic acid encoding at least one Paramyxoviridae virus (e.g. PIV and/or Henipavirus) antigen is formulated and/or complexed. Suitable formulations or complexations of said nucleic acid encoding at least one Paramyxoviridae virus (e.g. PIV and/or Henipavirus) antigen are provided in paragraph “Formulation and complexation”.

[1410] In preferred embodiments, component B of the pharmaceutical composition is selected from component B-1 and component B-2. Accordingly, in preferred embodiments, the pharmaceutical composition comprises at least one component B-1 as defined herein and at least one component B-2 as defined herein. In particularly preferred embodiments, the pharmaceutical composition comprises at least one component B-1 as defined herein and at least one component B-2 as defined herein and at least one component A-1 as defined herein.

[1411] In preferred embodiments, component B of the pharmaceutical composition is selected from component B-1 and component B-3. Accordingly, in preferred embodiments, the pharmaceutical composition comprises at least one component B-1 as defined herein and at least one component B-3 as defined herein. In particularly preferred embodiments, the pharmaceutical composition comprises at least one component B-1 as defined herein and at least one component B-3 as defined herein and at least one component A-1 as defined herein.

[1412] In preferred embodiments, component B of the pharmaceutical composition is selected from component B-1 and component B-4. Accordingly, in preferred embodiments, the pharmaceutical composition comprises at least one component B-1 as defined herein and at least one component B-4 as defined herein. In particularly preferred embodiments, the pharmaceutical composition comprises at least one component B-1 as defined herein and at least one component B-4 as defined herein and at least one component A-1 as defined herein.

[1413] In preferred embodiments, component B of the pharmaceutical composition is selected from component B-2 and component B-3. Accordingly, in preferred embodiments, the pharmaceutical composition comprises at least one component B-2 as defined herein and at least one component B-3 as defined herein. In particularly preferred embodiments, the pharmaceutical composition comprises at least one component B-2 as defined herein and at least one component B-3 as defined herein and at least one component A-1 as defined herein.

[1414] In preferred embodiments, component B of the pharmaceutical composition is selected from component B-2 and component B-4. Accordingly, in preferred embodiments, the pharmaceutical composition comprises at least one component B-2 as defined herein and at least one component B-4 as defined herein. In particularly preferred embodiments, the pharmaceutical composition comprises at least one component B-2 as defined herein and at least one component B-4 as defined herein and at least one component A-1 as defined herein.

[1415] In preferred embodiments, component B of the pharmaceutical composition is selected from component B-3 and component B-4. Accordingly, in preferred embodiments, the pharmaceutical composition comprises at least one component B-3 as defined herein and at least one component B-4 as defined herein. In particularly preferred embodiments, the pharmaceutical composition comprises at least one component B-3 as defined herein and at least one component B-4 as defined herein and at least one component A-1 as defined herein.

[1416] In preferred embodiments, component B of the pharmaceutical composition is selected from component B-1 and component B-2 and component B3. Accordingly, in preferred embodiments, the pharmaceutical composition comprises at least one component B-1 as defined herein and at least one component B-2 as defined herein and at least one component B-3 as defined herein. In particularly preferred embodiments, the pharmaceutical composition comprises at least one component B-1 as defined herein and at least one component B-2 as defined herein and at least one component B-3 as defined herein and at least one component A-1 as defined herein.

[1417] In preferred embodiments, component B of the pharmaceutical composition is selected from component B-1 and component B-2 and component B4. Accordingly, in preferred embodiments, the pharmaceutical composition comprises at least one component B-1 as defined herein and at least one component B-2 as defined herein and at least one component B-4 as defined herein. In particularly preferred embodiments, the pharmaceutical composition comprises at least one component B-1 as defined herein and at least one component B-2 as defined herein and at least one component B-4 as defined herein and at least one component A-1 as defined herein.

[1418] In preferred embodiments, component B of the pharmaceutical composition is selected from component B-1 and component B-3 and component B4. Accordingly, in preferred embodiments, the pharmaceutical composition comprises at least one component B-1 as defined herein and at least one component B-3 as defined herein and at least one component B-4 as defined herein. In particularly preferred embodiments, the pharmaceutical composition comprises at least one component B-1 as defined herein and at least one component B-3 as defined herein and at least one component B-4 as defined herein and at least one component A-1 as defined herein.

[1419] In preferred embodiments, component B of the pharmaceutical composition is selected from component B-2 and component B-3 and component B4. Accordingly, in preferred embodiments, the pharmaceutical composition comprises at least one component B-2 as defined herein and at least one component B-3 as defined herein and at least one component B-4 as defined herein. In particularly preferred embodiments, the pharmaceutical composition comprises at least one component B-2 as defined herein and at least one component B-3 as defined herein and at least one component B-4 as defined herein and at least one component A-1 as defined herein.

[1420] Suitably, component B-3 is selected from at least one of component

[1421] B-3a at least one nucleic acid comprising at least one coding sequence encoding at least one antigenic peptide or protein selected or derived from at least one RSV virus or an immunogenic fragment or immunogenic variant thereof, preferably as defined herein, and/or

[1422] B-3b at least one nucleic acid comprising at least one coding sequence encoding at least one antigenic peptide or protein selected or derived from at least one hMPV virus or an immunogenic fragment or immunogenic variant thereof, preferably as defined herein.

[1423] It has to be understood that component B-3a comprises at least one nucleic acid encoding at least one antigenic peptide or protein selected or derived from at least one RSV as defined in paragraph “Component B-3a: Respiratory syncytial virus (RSV)”, preferably having a nucleic acid sequence, preferably an mRNA sequence, as defined in the context of component B-3a. Suitable features of said nucleic acid sequence encoding at least one RSV antigen are provided in paragraph “Nucleic acid features and embodiment”. Further, it is preferred that the at least one nucleic acid encoding at least one RSV antigen is formulated and/or complexed. Suitable formulations or complexations of said nucleic acid encoding at least one RSV antigen are provided in paragraph “Formulation and complexation”.

[1424] It has to be understood that component B-3b comprises at least one nucleic acid encoding at least one antigenic peptide or protein selected or derived from at least one hMPV as defined in paragraph “Component B-3b: Human metapneumovirus”, preferably having a nucleic acid sequence, preferably an mRNA sequence, as defined in the context of component B-3a. Suitable features of said nucleic acid sequence encoding at least one hMPV antigen are provided in paragraph “Nucleic acid features and embodiment”. Further, it is preferred that the at least one nucleic acid encoding at least one hMPV antigen is formulated and/or complexed. Suitable formulations or complexations of said nucleic acid encoding at least one hMPV antigen are provided in paragraph “Formulation and complexation”.

[1425] In preferred embodiments, component B-3 is selected from component B-3a. Accordingly, in preferred embodiments, the pharmaceutical composition comprises at least one component B-3a as defined herein.

[1426] Suitably, component B-4 is selected from at least one of component

[1427] B-4a at least one nucleic acid comprising at least one coding sequence encoding at least one antigenic peptide or protein selected or derived from at least one PIV virus or an immunogenic fragment or immunogenic variant thereof, preferably as defined herein, and/or

[1428] B-4b at least one nucleic acid comprising at least one coding sequence encoding at least one antigenic peptide or protein selected or derived from at least one Henipavirus or an immunogenic fragment or immunogenic variant thereof, preferably as defined herein.

[1429] It has to be understood that component B-4a comprises at least one nucleic acid encoding at least one antigenic peptide or protein selected or derived from at least one hPIV as defined in paragraph “Component B-4a: Parainfiuenzavirus”, preferably having a nucleic acid sequence, preferably an mRNA sequence, as defined in the context of component B-4a. Suitable features of said nucleic acid sequence encoding at least one PIV antigen are provided in paragraph “Nucleic acid features and embodiments”. Further, it is preferred that the at least one nucleic acid encoding at least one PIV antigen is formulated and/or complexed. Suitable formulations or complexations of said nucleic acid encoding at least one PIV antigen are provided in paragraph “Formulation and complexation”.

[1430] It has to be understood that component B-4b comprises at least one nucleic acid encoding at least one antigenic peptide or protein selected or derived from at least one Henipavirus as defined in paragraph “Component B-4b: Henipavirus”, preferably having a nucleic acid sequence, preferably an mRNA sequence, as defined in the context of component B-4b. Suitable features of said nucleic acid sequence encoding at least one Henipavirus antigen are provided in paragraph “Nucleic acid features and embodiment”. Further, it is preferred that the at least one nucleic acid encoding at least one Henipavirus antigen is formulated and/or complexed. Suitable formulations or complexations of said nucleic acid encoding at least one Henipavirus antigen are provided in paragraph “Formulation and complexation”.

[1431] In preferred embodiments, component B-4 is selected from component B-4a. Accordingly, in preferred embodiments, the pharmaceutical composition comprises at least one component B-4a as defined herein.

[1432] In preferred embodiments, the pharmaceutical composition of comprises or consists of component A-1 as defined herein and component B-3a as defined herein.

[1433] In preferred embodiments, the pharmaceutical composition comprises or consists of component A-1 as defined herein and component B-2 as defined herein.

[1434] In preferred embodiments, the Pharmaceutical composition comprises or consists of component A-1 as defined herein and component B-2 as defined herein and component B-3a as defined herein.

[1435] In preferred embodiments of the pharmaceutical composition or vaccine, the at least one nucleic acid of component A (in particular, component A-1, A-2, A-3) and the at least one nucleic acid of component B (in particular component B-1, B-2, B-3, B-3a, B-3b, B-4, B-4a, B-4b) are translated into an antigenic peptide or protein when administered to a subject.

[1436] When administered to a subject, it is preferred that the pharmaceutical composition or vaccine induces an antigen-specific humoral immune responses against the peptide or protein encoded by component A (in particular, component A-1, A-2, A-3) and an antigen-specific humoral immune responses against the peptide or protein encoded by component B (in particular component B-1, B-2, B-3, B-3a, B-3b, B-4, B-4a, B-4b) in said subject.

[1437] When administered to a subject, it is preferred that the pharmaceutical composition or vaccine induces an antigen-specific T-cell responses against the peptide or protein encoded by component A (in particular, component A-1, A-2, A-3) and an antigen-specific T-cell responses against the peptide or protein encoded by component B (in particular component B-1, B-2, B-3, B-3a, B-3b, B-4, B-4a, B-4b) in said subject.

[1438] When administered to a subject, it is preferred that the pharmaceutical composition or vaccine induces/establishes an antigen-specific B-cell memory against the peptide or protein encoded by component A (in particular, component A-1, A-2, A-3) and an antigen-specific B-cell memory against the peptide or protein encoded by component B (in particular component B-1, B-2, B-3, B-3a, B-3b, B-4, B-4a, B-4b) in said subject.

[1439] Combination Vaccine:

[1440] In a second aspect, the invention relates to a nucleic acid based combination vaccine or multipathogen vaccine.

[1441] It has to be noted that specific features and embodiments that are described in the context of the first aspect of the invention, that is the pharmaceutical composition of the invention comprising component A and component B, are likewise applicable to the second aspect (combination vaccine), the third aspect (kit or kit of parts of the invention), or further aspects including e.g. medical uses (first and second medical uses) and e.g. method of treatments.

[1442] In preferred embodiments of the second aspect, the combination vaccine comprises at least one component A (in particular, component A-1, A-2, A-3) as defined in the context of the first aspect, and at least one component B (in particular component B-1, B-2, B-3, B-3a, B-3b, B-4, B-4a, B-4b) as defined in the context of the first aspect

[1443] The term “combination vaccine” or “multipathogen vaccine” or “multivalent vaccine” will be recognized and understood by the person of ordinary skill in the art, and is for example intended to be a prophylactic or therapeutic material providing at least two epitopes or antigens, preferably an immunogen. In the context of the invention the at least two antigens or antigenic functions are suitably provided by component A and component B as defined herein, and are selected or derived from at least two different viruses (e.g. a SARS-CoV-2 (of component A) and an Influenza virus (of component B)).

[1444] Accordingly, in preferred embodiments, the combination vaccine of the second aspect comprises at least one component A (in particular, component A-1, A-2, A-3) as defined in the context of the first aspect and at least one component B (in particular component B-1, B-2, B-3, B-3a, B-3b, B-4, B-4a, B-4b) as defined in the context of the first aspect.

[1445] According to a preferred embodiment, the combination vaccine as defined herein may further comprise a pharmaceutically acceptable carrier or excipient and optionally at least one adjuvant as specified in the context of the first aspect. Suitable adjuvants in that context may be selected from adjuvants disclosed in claim 17 of WO2016203025.

[1446] The combination vaccine typically comprises a safe and effective amount of nucleic acid (e.g. DNA or RNA), preferably RNA of the first aspect (provided by component A and component B). As used herein, “safe and effective amount” means an amount of nucleic acid component sufficient to significantly induce a positive modification of a disease or disorder related to an infection with a virus as specified herein. At the same time, a “safe and effective amount” is small enough to avoid serious side-effects. In relation to the nucleic acid, composition, or vaccine of the present invention, the expression “safe and effective amount” preferably means an amount of nucleic acid, composition, or vaccine that is suitable for stimulating the adaptive immune system against a virus as specified herein in such a manner that no excessive or damaging immune reactions (e.g. innate immune responses) are achieved.

[1447] A “safe and effective amount” of the nucleic acid, composition, or vaccine as defined herein will vary in connection with the particular condition to be treated and also with the age and physical condition of the patient to be treated, the severity of the condition, the duration of the treatment, the nature of the accompanying therapy, of the particular pharmaceutically acceptable carrier used, and similar factors, within the knowledge and experience of the skilled person. Moreover, the “safe and effective amount” of the nucleic acid, the composition, or vaccine may depend from application/delivery route (intradermal, intramuscular, intranasal), application device (jet injection, needle injection, microneedle patch, electroporation device) and/or complexation/formulation (protamine complexation or LNP encapsulation, DNA or RNA). Moreover, the “safe and effective amount” of the nucleic acid, the composition, or the vaccine may depend from the physical condition of the treated subject (infant, pregnant women, immunocompromised human subject etc.).

[1448] The pharmaceutically acceptable carrier as used herein preferably includes the liquid or non-liquid basis of the inventive coronavirus vaccine. If the inventive vaccine is provided in liquid form, the carrier will be water, typically pyrogen-free water; isotonic saline or buffered (aqueous) solutions, e.g. phosphate, citrate etc. buffered solutions. Preferably, Ringer-Lactate solution is used as a liquid basis for the vaccine or the composition according to the invention as described in WO2006122828, the disclosure relating to suitable buffered solutions incorporated herewith by reference. Other preferred solutions used as a liquid basis for the vaccine or the composition, in particular for compositions/vaccines comprising LNPs, comprise sucrose and/or trehalose.

[1449] The choice of a pharmaceutically acceptable carrier or excipient as defined herein is determined, in principle, by the manner, in which the pharmaceutical composition(s) or vaccine according to the invention is administered. The coronavirus vaccine is preferably administered locally. Routes for local administration in general include, for example, topical administration routes but also intradermal, transdermal, subcutaneous, or intramuscular injections or intralesional, intracranial, intrapulmonal, intracardial, intraarticular and sublingual injections. More preferably, composition or vaccines according to the present invention may be administered by an intradermal, subcutaneous, or intramuscular route, preferably by injection, which may be needle-free and/or needle injection. Preferred in the context of the invention is intramuscular injection. Compositions/vaccines are therefore preferably formulated in liquid or solid form. The suitable amount of the vaccine or composition according to the invention to be administered can be determined by routine experiments, e.g. by using animal models. Such models include, without implying any limitation, rabbit, sheep, mouse, rat, dog and non-human primate models. Preferred unit dose forms for injection include sterile solutions of water, physiological saline or mixtures thereof. The pH of such solutions should be adjusted to about 7.4.

[1450] In embodiments, the combination vaccine is provided in lyophilized or spray-dried form. Such a lyophilized or spray-dried vaccine may comprise trehalose and/or sucrose and may be re-constituted in a suitable liquid buffer before administration to a subject. In some embodiments, a lyophilized vaccine comprises RNA complexed with LNPs. In some embodiments, a lyophilized composition has a water content of less than about 10%. For example, a lyophilized composition can have a water content of about 0.1% to 10%, 0.1% to 7.5%, or 0.5% to 7.5%, preferably the lyophilized composition has a water content of about 0.5% to about 5.0%.

[1451] The combination vaccine can be used according to the invention for human medical purposes and also for veterinary medical purposes (mammals, vertebrates, or avian species).

[1452] In preferred embodiments, the combination vaccine elicits an adaptive immune response against at least one Coronavirus, preferably against a pandemic Coronavirus, preferably against SARS-CoV-2, SARS-CoV-1, or MERS-CoV. In preferred embodiments, the combination vaccine elicits an adaptive immune response against at least one Influenza virus, preferably against at least one Influenza A virus and/or at least one Influenza B virus. In preferred embodiments, the combination vaccine elicits an adaptive immune response against at least one Pneumoviridae virus, preferably against at least one RSV and/or at least one hMPV. In embodiments, the combination vaccine elicits an adaptive immune response against at least one Paramyxoviridae virus, preferably against at least one PIV and/or at least one Henipavirus.

[1453] In preferred embodiments, the combination vaccine elicits neutralizing antibody titers against at least one Coronavirus, preferably against a pandemic Coronavirus, preferably against SARS-CoV-2, SARS-CoV-1, or MERS-CoV. In preferred embodiments, the combination vaccine elicits neutralizing antibody titers against at least one Influenza virus, preferably against at least one Influenza A virus and/or at least one Influenza B virus. In preferred embodiments, the combination vaccine elicits neutralizing antibody titers against at least one Pneumoviridae virus, preferably against at least one RSV and/or at least one hMPV. In embodiments, the combination vaccine elicits neutralizing antibody titers against at least one Paramyxoviridae virus, preferably against at least one PIV and/or at least one Henipavirus.

[1454] In some embodiments, the neutralizing antibody titer is at least 100 neutralizing units per milliliter (NU/mL), at least 500 NU/mL, or at least 1000 NU/mL.

[1455] In some embodiments, detectable levels of the respective antigen are produced in a subject at about 1 to about 72 hours post administration of the composition or the combination vaccine.

[1456] In some embodiments, a neutralizing antibody titer (against coronavirus) of at least 100NU/ml, at least 500NU/ml, or at least 1000NU/ml is produced in the serum of the subject at about 1 day to about 72 days post administration of the composition or the combination vaccine.

[1457] In particularly preferred embodiments, the combination vaccine or the composition elicits functional antibodies that can effectively neutralize the respective viruses (e.g. SARS-CoV-2 coronavirus and at least one further virus).

[1458] In further preferred embodiments, the combination vaccine or the composition elicits mucosal IgA immunity by inducing of mucosal IgA antibodies.

[1459] In particularly preferred embodiments, the combination vaccine or the composition elicits functional antibodies that can effectively neutralize the respective viruses (e.g. SARS-CoV-2 coronavirus and at least one further virus).

[1460] In further particularly preferred embodiments, the combination vaccine or the composition induces broad, functional cellular T-cell responses against the respective viruses (e.g. against SARS-CoV-2 coronavirus and at least one further virus).

[1461] In further particularly preferred embodiments, the combination vaccine or the composition induces a well-balanced B cell and T cell response against the respective viruses (e.g. against SARS-CoV-2 coronavirus and at least one further virus).

[1462] In some embodiments, the neutralizing antibody titer is sufficient to reduce virus infection by at least 50% relative to a neutralizing antibody titer of an unvaccinated control subject or relative to a neutralizing antibody titer of a subject vaccinated with a live attenuated viral vaccine, an inactivated viral vaccine, or a protein sub unit viral vaccine.

[1463] In some embodiments, the neutralizing antibody titer and/or a T cell immune response is sufficient to reduce the rate of asymptomatic viral infection relative to the neutralizing antibody titer of unvaccinated control subjects.

[1464] In some embodiments, the neutralizing antibody titer and/or a T cell immune response is sufficient to prevent viral latency in the subject.

[1465] In some embodiments, the neutralizing antibody titer is sufficient to block fusion of virus with epithelial cells of the subject.

[1466] In preferred embodiments, the neutralizing antibody titer is induced following a single 1 ug-100 ug dose of the composition, or the combination vaccine. In further preferred embodiments, the neutralizing antibody titer is induced following a single 2 ug-20 ug dose of the composition, or the combination vaccine.

[1467] In some embodiments, the neutralizing antibody titer is induced within 20 days following a single 1 ug-100 ug dose of the composition, or the combination vaccine, or within 40 days following a second 1 ug-100 μg dose of the composition, or the combination vaccine.

[1468] In preferred embodiments, administration of a therapeutically effective amount of the composition, or the combination vaccine to a subject induces a T cell immune response against coronavirus in the subject. In preferred embodiments, the T cell immune response comprises a CD4+ T cell immune response and/or a CD8+ T cell immune response.

[1469] In preferred embodiments, the combination vaccine of the second aspect elicits antigen-specific immune responses comprising T-cell responses and/or B-cell responses against all encoded antigens provided by the at least one nucleic acid of component A (in particular, component A-1, A-2, A-3) and additionally eliciting an antigen-specific immune responses comprising T-cell responses and/or B-cell responses against all encoded antigens provided by the at least one nucleic acid of component B (in particular component B-1, B-2, B-3, B-3a, B-3b, B-4, B-4a, B-4b).

[1470] In preferred embodiments, the combination vaccine of the second aspect elicits antigen-specific immune responses comprising T-cell responses and/or B-cell responses against all encoded antigens upon administration of a low dose of the combination vaccine. In preferred embodiments, a low dose comprises less that about 100 μg, preferably less than about 50 μg, more preferably less than about 20 μg of nucleic acid, even more preferably less than about 10 μg.

[1471] In preferred embodiments, the combination vaccine of the second aspect elicits antigen-specific immune responses comprising T-cell responses and/or B-cell responses against all encoded antigens upon administration of a low dose of the combination vaccine. In preferred embodiments, a low dose comprises less that about 100 μg, preferably less than about 50 μg, more preferably less than about 20 μg of nucleic acid, even more preferably less than about 10 μg of nucleic acid.

[1472] In preferred embodiments, the combination vaccine of the second aspect elicits antigen-specific immune responses in a subject that has an age of about 5 years old or younger. Accordingly, the nucleic acid based combination vaccines are particularly suitable for infants.

[1473] In preferred embodiments, the combination vaccine of the second aspect elicits antigen-specific immune responses in a subject that has an age of about 60 years old or older. Accordingly, the nucleic acid based combination vaccines are particularly suitable for the elderly.

[1474] In various embodiments, the combination vaccine is against at least one Coronavirus, and, additionally against at least one additional Coronavirus, and/or at least one Influenza virus and/or at least one Pneumoviridae virus, and/or at least one Paramyxoviridae virus. Accordingly, the combination vaccine is a combination vaccine against multiple respiratory viruses.

[1475] In preferred embodiments, the combination vaccine is against at least one Coronavirus, preferably SARS-CoV-2, and at least one Influenza virus and/or RSV virus. Accordingly, the combination vaccine is a Coronavirus—Influenza vaccine, a Coronavirus—RSV vaccine, or a Coronavirus—Influenza—RSV vaccine.

[1476] In embodiments, the combination vaccine is against at least one Coronavirus, preferably SARS-CoV-2, and at least one Influenza virus and/or RSV virus and, optionally, against at least one PIV and/or at least one hMPV. Accordingly, the combination vaccine is a Coronavirus—Influenza—PIV vaccine, a Coronavirus—RSV—PIV vaccine, a Coronavirus—Influenza—RSV—PIV vaccine, a Coronavirus—Influenza—hMPV vaccine, a Coronavirus—RSV—hMPV vaccine, a Coronavirus—Influenza—RSV—hMPV vaccine, a Coronavirus—Influenza—PIV—hMPV vaccine, a Coronavirus—RSV—PIV—hMPV vaccine, or a Coronavirus—Influenza—RSV—PIV—hMPV vaccine.

[1477] Kit or Kit of Parts, Application, Medical Uses, Method of Treatment:

[1478] In a third aspect, the present invention provides a kit or kit of parts suitable for treating or preventing virus infections. Preferably, said kit or kit of parts is suitable for treating or preventing a Coronavirus, preferably a SARS-CoV-2 infection and, additionally, a further infection.

[1479] Notably, embodiments relating to the pharmaceutical composition of the first aspect and the combination vaccine of the second aspect may likewise be read on and be understood as suitable embodiments of the kit or kit of parts of the third aspect of the invention.

[1480] In preferred embodiments, the kit or kit of parts comprises at least one pharmaceutical composition of the first aspect, and/or at least one combination vaccine of the second aspect.

[1481] In addition, the kit or kit of parts may comprise a liquid vehicle for solubilising, and/or technical instructions providing information on administration and dosage of the components.

[1482] The technical instructions of said kit may contain information about administration and dosage and patient groups. Such kits, preferably kits of parts, may be applied e.g. for any of the applications or uses mentioned herein, preferably for the use of the pharmaceutical composition of the first aspect or the combination vaccine of the second aspect, for the treatment or prophylaxis of an infection or diseases caused by a coronavirus, preferably SARS-CoV-2 coronavirus, and a further virus infection (e.g. caused by an Influenza virus, and/or an RSV, and/or a PIV and/or a hMPV)

[1483] Preferably, the pharmaceutical composition or the vaccine is provided in a separate part of the kit, wherein the pharmaceutical composition or the combination vaccine is preferably lyophilised or spray-dried or spray-freeze dried.

[1484] The kit may further contain as a part a vehicle (e.g. buffer solution) for solubilising the dried or lyophilized nucleic composition or the vaccine.

[1485] In preferred embodiments, the kit or kit of parts as defined herein comprises Ringer lactate solution.

[1486] In preferred embodiments, the kit or kit of parts as defined herein comprises a multi-dose container for administration of the composition/the vaccine and/or an administration device (e.g. an injector for intradermal injection).

[1487] Any of the above kits may be used in a treatment or prophylaxis as defined herein.

[1488] First and Second/Further Medical Use:

[1489] A further aspect relates to the first medical use of the pharmaceutical composition of the first aspect, the combination vaccine of the second aspect, and the kit or kit of parts of the third aspect.

[1490] Notably, embodiments relating to the composition of the first aspect, the vaccine of the second aspect, or the kit or kit of parts of the third aspect may likewise be read on and be understood as suitable embodiments of medical uses of the invention.

[1491] Accordingly, the invention provides a pharmaceutical composition as defined in the first aspect for use as a medicament, the combination vaccine as defined in the second aspect for use as a medicament, and the kit or kit of parts as defined in the third aspect for use as a medicament.

[1492] The present invention furthermore provides several applications and uses of the composition, vaccine, or kit.

[1493] In particular, pharmaceutical compositions, polypeptide, vaccine, or kit may be used for human medical purposes and also for veterinary medical purposes, preferably for human medical purposes.

[1494] In particular, the pharmaceutical composition, the combination vaccine, or kit or kit of parts is for use as a medicament for human medical purposes, wherein said composition, vaccine, or kit or kit of parts may be suitable for young infants, newborns, immunocompromised recipients, as well as pregnant and breast-feeding women and elderly people. In particular, the pharmaceutical composition, combination vaccine, or kit or kit of parts is for use as a medicament for human medical purposes, wherein said composition, vaccine, or kit or kit of parts is particularly suitable for elderly human subjects.

[1495] Said pharmaceutical composition, combination vaccine, or kit is for use as a medicament for human medical purposes, wherein said composition, vaccine, or the kit or kit of parts is particularly suitable for intramuscular injection or intradermal injection.

[1496] In yet another aspect, the invention relates to the second medical use of the provided pharmaceutical composition, combination vaccine, or kit.

[1497] In an aspect, the invention relates to a pharmaceutical composition of the first aspect, a combination vaccine of the second aspect, a kit or kit of parts of the third aspect, for use in the treatment or prophylaxis of an infection with a coronavirus, preferably SARS-CoV-2 (or a disorder related to such an infection) and in the treatment or prophylaxis of an infection with at least one further virus (or a disorder related to such an infection), preferably wherein said further virus is selected from at least one different Coronavirus, at least one Influenza virus, at least one Pneumoviridae virus, and/or at least one Paramyxoviridae virus.

[1498] In an aspect, the invention relates to a pharmaceutical composition of the first aspect, a combination vaccine of the second aspect, a kit or kit of parts of the third aspect, for use in the treatment or prophylaxis of an infection with a coronavirus, preferably SARS-CoV-2 (or a disorder related to such an infection) and in the treatment or prophylaxis of an infection with at least one Influenza virus (or a disorder related to such an infection), and, optionally, treatment or prophylaxis of an infection with at least one PIV and/or hMPV.

[1499] In an aspect, the invention relates to a pharmaceutical composition of the first aspect, a combination vaccine of the second aspect, a kit or kit of parts of the third aspect, for use in the treatment or prophylaxis of an infection with a coronavirus, preferably SARS-CoV-2 (or a disorder related to such an infection) and in the treatment or prophylaxis of an infection with at least one RSV (or a disorder related to such an infection), and, optionally, treatment or prophylaxis of an infection with at least one PIV and/or hMPV.

[1500] In an aspect, the invention relates to a pharmaceutical composition of the first aspect, a combination vaccine of the second aspect, a kit or kit of parts of the third aspect, for use in the treatment or prophylaxis of an infection with a coronavirus, preferably SARS-CoV-2 (or a disorder related to such an infection) and in the treatment or prophylaxis of an infection with at least one Influenza virus (or a disorder related to such an infection) and at least one RSV (or a disorder related to such an infection), and, optionally, treatment or prophylaxis of an infection with at least one PIV and/or hMPV.

[1501] Particularly, the pharmaceutical composition of the first aspect, the combination vaccine of the second aspect, or the kit or kit of parts of the third aspect may be used in a method of prophylactic (pre-exposure prophylaxis or post-exposure prophylaxis) and/or therapeutic treatment of infections caused by at least one Coronavirus, preferably SARS-CoV-2 coronavirus, and by at least one further virus (e.g. different Coronavirus, at least one Influenza virus, at least one Pneumoviridae virus, and/or at least one Paramyxoviridae virus).

[1502] The pharmaceutical composition or the combination vaccine may preferably be administered locally. In particular, composition or vaccines may be administered by an intradermal, subcutaneous, intranasal, or intramuscular route. In embodiments, the inventive nucleic acid, composition, polypeptide, vaccine may be administered by conventional needle injection or needle-free jet injection. Preferred in that context is intramuscular injection.

[1503] In embodiments where plasmid DNA is used and comprised in the pharmaceutical composition or vaccine, the composition/vaccine may be administered by a device, e.g. an electroporation device, preferably an electroporation device for intradermal or intramuscular delivery. Suitably, a device as described in U.S. Pat. No. 7,245,963B2 may be used, in particular a device as defined by claims 1 to 68 of U.S. Pat. No. 7,245,963B2.

[1504] In embodiments where adenovirus DNA is used and comprised in the pharmaceutical composition or combination vaccine, the composition/vaccine may be administered by intranasal administration.

[1505] In embodiments, the nucleic acid as comprised in a composition or vaccine as defined herein is provided in an amount of about 100 ng to about 500 ug, in an amount of about 1 ug to about 200 ug, in an amount of about 1 ug to about 100 ug, in an amount of about 5 ug to about 100 ug, preferably in an amount of about 10 ug to about 50 ug, specifically, in an amount of about 1 ug, 2 ug, 3 ug, 4 ug, 5 ug, 6 ug, 1 ug, 8 ug, 9 ug, 10 ug, 11 ug, 12 ug, 13 ug, 14 ug, 15 ug, 20 ug, 25 ug, 30 ug, 35 ug, 40 ug, 45 ug, 50 ug, 55 ug, 60 ug, 65 ug, 70 ug, 75 ug, 80 ug, 85 ug, 90 ug, 95 ug or 100 ug.

[1506] Notably, the amount relates to the total amount of nucleic acid, provided by the at least one component A and component B.

[1507] In some embodiments, the vaccine comprising the nucleic acid, or the composition comprising the nucleic acid is formulated in an effective amount to produce an antigen specific immune response in a subject. In some embodiments, the effective amount is a total dose of 1 pg to 200 μg, 1 pg to 100 μg, or 5 pg to 100 μg.

[1508] Notably, the effective amount relates to the total amount of nucleic acid, provided by the at least one component A and component B.

[1509] In embodiments where the nucleic acid is provided in a lipid-based carrier, e.g. an LNP, the amount of PEG-lipid as defined herein comprised in one dose is lower than about 50 μg PEG lipid, preferably lower than about 45 pg PEG lipid, more preferably lower than about 40 μg PEG lipid.

[1510] Having a low amount of PEG lipid in one dose may reduce the risk of adverse effects (e.g. allergies).

[1511] In particularly preferred embodiments, the amount of PEG-lipid comprised in one dose is in a range from about 3.5 pg PEG lipid to about 35 pg PEG lipid.

[1512] In embodiments where the nucleic acid is provided in a lipid-based carrier, e.g. an LNP, the amount of cationic lipid as defined herein comprised in one dose is lower than about 400 μg cationic lipid, preferably lower than about 350 μg cationic lipid, more preferably lower than about 300 μg cationic lipid.

[1513] Having a low amount of cationic lipid in one dose may reduce the risk of adverse effects (e.g. fewer).

[1514] In particularly preferred embodiments, the amount of cationic-lipid comprised in one dose is in a range from about 30 μg PEG lipid to about 300 μg PEG lipid.

[1515] In one embodiment, the immunization protocol for the treatment or prophylaxis of a subject against at least one Coronavirus, preferablySARS-CoV-2 and against at least one further virus comprises one single dose of the pharmaceutical composition or the combination vaccine.

[1516] In some embodiments, the effective amount is a dose of 1 ug administered to the subject in one vaccination. In some embodiments, the effective amount is a dose of 2 ug administered to the subject in one vaccination. In some embodiments, the effective amount is a dose of 3 ug administered to the subject in one vaccination. In some embodiments, the effective amount is a dose of 4 ug administered to the subject in one vaccination. In some embodiments, the effective amount is a dose of 5 ug administered to the subject in one vaccination. In some embodiments, the effective amount is a dose of 6 ug administered to the subject in one vaccination. In some embodiments, the effective amount is a dose of 1 ug administered to the subject in one vaccination. In some embodiments, the effective amount is a dose of 8 ug administered to the subject in one vaccination. In some embodiments, the effective amount is a dose of 9 ug administered to the subject in one vaccination. In some embodiments, the effective amount is a dose of 10 ug administered to the subject in one vaccination. In some embodiments, the effective amount is a dose of 11 ug administered to the subject in one vaccination. In some embodiments, the effective amount is a dose of 12 ug administered to the subject in one vaccination. In some embodiments, the effective amount is a dose of 13 ug administered to the subject in one vaccination. In some embodiments, the effective amount is a dose of 14 ug administered to the subject in one vaccination. In some embodiments, the effective amount is a dose of 15 ug administered to the subject in one vaccination. In some embodiments, the effective amount is a dose of 20 ug administered to the subject in one vaccination. In some embodiments, the effective amount is a dose of 25 ug administered to the subject in one vaccination. In some embodiments, the effective amount is a dose of 30 ug administered to the subject in one vaccination. In some embodiments, the effective amount is a dose of 40 ug administered to the subject in one vaccination. In some embodiments, the effective amount is a dose of 50 ug administered to the subject in one vaccination. In some embodiments, the effective amount is a dose of 100 ug administered to the subject in one vaccination. In some embodiments, the effective amount is a dose of 200 ug administered to the subject in one vaccination. Notably, the dose relates to the total dose of nucleic acid, provided by the at least one component A and component B.

[1517] In preferred embodiments, the immunization protocol for the treatment or prophylaxis of at least one Coronavirus infection and at least one further virus infection comprises a series of single doses or dosages of the pharmaceutical composition or the combination vaccine. A single dosage, as used herein, refers to the initial/first dose, a second dose or any further doses, respectively, which are preferably administered in order to “boost” the immune reaction.

[1518] In some embodiments, the effective amount is a dose of 1 ug administered to the subject a total of two times. In some embodiments, the effective amount is a dose of 2 ug administered to the subject a total of two times. In some embodiments, the effective amount is a dose of 3 ug administered to the subject a total of two times. In some embodiments, the effective amount is a dose of 4 ug administered to the subject a total of two times. In some embodiments, the effective amount is a dose of 5 ug administered to the subject a total of two times. In some embodiments, the effective amount is a dose of 6 ug administered to the subject a total of two times. In some embodiments, the effective amount is a dose of 1 ug administered to the subject a total of two times. In some embodiments, the effective amount is a dose of 8 ug administered to the subject a total of two times. In some embodiments, the effective amount is a dose of 9 ug administered to the subject a total of two times. In some embodiments, the effective amount is a dose of 10 ug administered to the subject a total of two times. In some embodiments, the effective amount is a dose of 11 ug administered to the subject a total of two times. In some embodiments, the effective amount is a dose of 12 ug administered to the subject a total of two times. In some embodiments, the effective amount is a dose of 13 ug administered to the subject a total of two times. In some embodiments, the effective amount is a dose of 14 ug administered to the subject a total of two times. In some embodiments, the effective amount is a dose of 15 ug administered to the subject a total of two times. In some embodiments, the effective amount is a dose of 20 ug administered to the subject a total of two times. In some embodiments, the effective amount is a dose of 25 ug administered to the subject a total of two times. In some embodiments, the effective amount is a dose of 30 ug administered to the subject a total of two times. In some embodiments, the effective amount is a dose of 40 ug administered to the subject a total of two times. In some embodiments, the effective amount is a dose of 50 ug administered to the subject a total of two times. In some embodiments, the effective amount is a dose of 100 ug administered to the subject a total of two times. In some embodiments, the effective amount is a dose of 200 ug administered to the subject a total of two times. Notably, the dose relates to the total dose of nucleic acid, provided by the at least one component A and component B.

[1519] In preferred embodiments, the vaccine/composition immunizes the subject against a Coronavirus infection and against one further virus infection (upon administration as defined herein) for at least 1 year, preferably at least 2 years. In preferred embodiments, the vaccine/composition immunizes the subject against a Coronavirus infection and against one further virus infection for more than 2 years, more preferably for more than 3 years, even more preferably for more than 4 years, even more preferably for more than 5-10 years.

[1520] Method of Treatment and Use, Diagnostic Method and Use:

[1521] In another aspect, the present invention relates to a method of treating or preventing a disorder.

[1522] Notably, embodiments relating to the pharmaceutical composition of the first aspect, the combination vaccine of the second aspect, the kit or kit of parts of the third aspect, or medical uses may likewise be read on and be understood as suitable embodiments of methods of treatments as provided herein. Furthermore, specific features and embodiments relating to method of treatments as provided herein may also apply for medical uses of the invention.

[1523] Preventing (Inhibiting) or treating a disease, in particular a virus infection relates to inhibiting the full development of a disease or condition, for example, in a subject who is at risk for a disease such as a virus infection. “Treatment” refers to a therapeutic intervention that ameliorates a sign or symptom of a disease or pathological condition after it has begun to develop. The term “ameliorating”, with reference to a disease or pathological condition, refers to any observable beneficial effect of the treatment. Inhibiting a disease can include preventing or reducing the risk of the disease, such as preventing or reducing the risk of viral infection. The beneficial effect can be evidenced, for example, by a delayed onset of clinical symptoms of the disease in a susceptible subject, a reduction in severity of some or all clinical symptoms of the disease, a slower progression of the disease, a reduction in the viral load, an improvement in the overall health or well-being of the subject, or by other parameters that are specific to the particular disease. A “prophylactic” treatment is a treatment administered to a subject who does not exhibit signs of a disease or exhibits only early signs for the purpose of decreasing the risk of developing pathology.

[1524] In preferred embodiments, the present invention relates to a method of treating or preventing a disorder, wherein the method comprises applying or administering to a subject in need thereof at least one pharmaceutical composition of the first aspect, the combination vaccine of the second aspect, or the kit or kit of parts of the third aspect.

[1525] In preferred embodiments, the disorder is an infection with a Coronavirus, or a disorder related to such infections, in particular an infection with SARS-CoV-2, or a disorder related to such infections (e.g. COVID-19), and an additional further virus infection, optionally wherein said further virus is selected from at least one different Coronavirus, at least one Influenza virus, at least one Pneumoviridae virus, and/or at least one Paramyxoviridae virus, or of a disorder related to any of these infections.

[1526] In preferred embodiments, the present invention relates to a method of treating or preventing a disorder as defined above, wherein the method comprises applying or administering to a subject in need thereof at least pharmaceutical composition of the first aspect, the combination vaccine of the second aspect, or the kit or kit of parts of the third aspect, wherein the subject in need is preferably a mammalian subject.

[1527] In particularly preferred embodiments, the subject in need is a mammalian subject, preferably a human subject, e.g. new-born, pregnant, immunocompromised, and/or elderly.

[1528] In particularly preferred embodiments, the human subject is an elderly human subject.

[1529] In certain embodiments, a method of treating or preventing disease by applying or administering to a subject in need thereof at least pharmaceutical composition of the first aspect, the combination vaccine of the second aspect, or the kit or kit of parts of the third aspect is further defined as a method of reducing disease burden in the subject. For example, the method preferably reduces the severity and/or duration of one or more symptom of COVID-19 disease. In some aspects, a method reduces the probability that a subject will require hospital admission, intensive care unit admission, treatment with supplemental oxygen and/or treatment with a ventilator. In further aspects, the method reduces the probability that a subject will develop a fever, breathing difficulties; loss of smell and/or loss of taste. In preferred aspects, the method reduces the probability that a subject will develop severe or moderate COVID-19 disease. In certain aspects, a method of the embodiments prevents severe or moderate COVID-19 disease in the subject between about 2 weeks and 1 month, 2 months, 3 months, 4 months, 5 months, 6 months, 1 year or 2 years after the subject is administered a composition of the embodiments. In preferred aspects, a method of the embodiments prevents symptomatic COVID-19 disease. In further aspects, a method of the embodiment prevents detectable levels of SARS CoV-2 nucleic acid in the subject between about 2 weeks and 1 month, 2 months, 3 months, 4 months, 5 months, 6 months, 1 year or 2 years after the subject is administered a composition of the embodiments. In further aspects, a method of the embodiments is defined as a method for providing protective immunity to a coronavirus infection (e.g., SARS CoV-2 infection) in the subject. In still further aspects, a method of the embodiments prevents moderate and severe COVID-19 disease in at least 80%, 85%, 90% or 95% of treated subjects. In yet further aspects, a method of the embodiments prevents moderate and severe COVID-19 disease in at least 80%, 85%, 90% or 95% of treated subjects from about 2 weeks to about 1 year after administering the second or subsequent immunogenic composition (e.g., a booster administration). In yet further aspects, a method of the embodiments prevents moderate and severe COVID-19 disease in at least 80%, 85%, 90% or 95% of treated subjects from about 2 weeks to about 3 month, 6 months, 9 months, 1 year, 1.5 years, 2 years or 3 years after administering the second or subsequent composition.

[1530] As used herein severe COVID-19 disease is defined as a subject experiencing one or more of the following:
[1531] Clinical signs at rest indicative of severe systemic illness (respiratory rate 30 breaths per minute, heart rate 125 per minute, SpO2≤93% on room air at sea level or PaO2/FOI2<300 mm Hg (adjusted according to altitude))
[1532] Respiratory failure (defined as needing high flow-oxygen, noninvasive ventilation, mechanical ventilation or ECMO)
[1533] Evidence of shock (SBP <90 mm Hg, DBP <60 mmHg, or requiring vasopressors)
[1534] Significant renal, hepatic, or neurologic dysfunction
[1535] Admission to ICU
[1536] Death

[1537] As used herein moderate COVID-19 disease is defined as a subject experiencing one or more of the following:
[1538] Shortness of breath or difficulty breathing
[1539] Respiratory rate ≥20 breaths per minute
[1540] Abnormal SpO2 but still >93% on room air at sea level (adjusted according to altitude)
[1541] Clinical or radiographic evidence of lower respiratory tract disease
[1542] Radiologic evidence of deep vein thrombosis (DVT)

[1543] As used herein mild COVID-19 disease is defined as a subject experiencing all of the following:
[1544] Symptomatic AND
[1545] No shortness of breath or difficulty breathing AND
[1546] No hypoxemia (adjusted according to altitude) AND
[1547] Does not meet the case definition of moderate or severe COVID-19 disease

[1548] In a further aspects, a method of the embodiments comprises (i) obtaining a composition (e.g., a vaccine composition) of the embodiments, wherein the composition is lyophilized; (ii) solubilizing the lyophilized composition in a pharmaceutically acceptable liquid carrier to produce a liquid composition; and (iii) administering an effective amount of the liquid composition to the subject. In some aspects, the lyophilized composition comprises less than about 10% water content. For example, the lyophilized composition can preferably comprise about 0.1% to about 10%, 0.5% to 7.5% or 0.5% to 5.0% water.

[1549] In particular, such the method of treatment may comprise the steps of:
[1550] a) providing at least one pharmaceutical composition of the first aspect, at least one combination vaccine of the second aspect, or the kit or kit of parts of the third aspect;
[1551] b) applying or administering said composition, vaccine, or kit or kit of parts to a subject as a first dose
[1552] c) optionally, applying or administering said composition, vaccine, or kit or kit of parts to a subject as a second dose or a further dose, preferably at least 1, 2, 3, 4, 5, 6, 7, 8, 9, 10, 11, 12, months after the first dose.

[1553] The first dosage, as used herein, refers to the initial/first dose, a second dose or any further doses, respectively, which are preferably administered in order to “boost” the immune reaction.

[1554] In certain aspects, the vaccine/composition is administered to a subject one, two three, four or more times. In some aspects, the vaccine/composition is administered to the subject at least first and a second time (e.g., a prime and boost). I some aspects, the send administration is at least 10 days, 14 days, 21 days, 28 days, 35 days, 42 days, 49 days or 56 days after the first administration. In some aspects, the time between the first administration and the second administration is between about 7 days and about 56 days; about 14 days and about 56 days; about 21 days and about 56 days; or about 28 days and about 56 days. In further aspects, the vaccine/composition is administered to a subject three or more times. In certain aspects, there is at least 10 days, 14 days, 21 days, 28 days, 35 days, 42 days, 49 days or 56 days between each administration of the vaccine/composition.

[1555] In some aspects, a subject for treatment according to the embodiments was previously infected with SARS CoV-2 or was previously treated with at least a first SARS CoV-2 vaccine composition. In some aspects, the subject was treated with one, two, three or more doses of a first SARS CoV-2 vaccine composition. In some aspects, the composition of the embodiments used to treat a subject is a different type of vaccine composition than the composition previously used to treat the subject. In some aspects, the subject was previously treated with a mRNA vaccine, such as BNT162 or mRNA-1273. In further aspects, the subject was previously treated with a protein subunit vaccine, such as spike protein based vaccine, e.g., NVX-CoV2373 or COVAX. In further aspects, the subject was previously treated with a viral vector vaccine, such as an adenovirus vector based vaccine, e.g., ADZ1222 or Ad26.COV-2.S. In further aspects, a subject previously treated with a vaccine composition has detectable SARS CoV-2 binding antibodies, such as SARS CoV-2 S protein-binding antibodies or SARS CoV-2 N protein-binding antibodies. In further aspects, a subject for treatment according the embodiments was treated with a first SARS CoV-2 vaccine composition at least about 3 month, 6 months, 9 months, 1 year, 1.5 years, 2 years or 3 years ago. In still further aspects, a subject for treatment according the embodiments was treated with a first SARS CoV-2 vaccine composition between about 3 months and 2 years ago or between about 6 months and 2 years ago. In some aspects, a subjects treated with a further vaccine composition of the embodiments are protected from moderate and severe COVID-19 disease in at least 80%, 85%, 90% or 95% of treated subjects. For example, the treated subjects can be protected from moderate and severe COVID-19 disease in at least 80%, 85%, 90% or 95% of treated subjects from about 2 weeks to about 1 year after administration of the further composition. In still further aspects, administering the further vaccine composition of the embodiments prevents moderate and severe COVID-19 disease in at least 80%, 85%, 90% or 95% of treated subjects from about 2 weeks to about 3 month, 6 months, 9 months, 1 year, 1.5 years, 2 years or 3 years after said administration.

[1556] In certain aspects, a method of the embodiments is further defined as a method of stimulating an antibody or CD8+ T-cell response in a subject. In some aspects, the method is defined as a method of stimulating a neutralizing antibody response in a subject. In further aspects, the method is defined as a method of stimulating a protective immune response in a subject. In yet further aspects, the method is defined as a method of stimulating TH2 directed immune response in a subject.

[1557] In further aspects, administration of a vaccine/composition of the embodiments stimulates an antibody response that produces between about 10 and about 500 coronavirus spike protein-binding antibodies for every coronavirus neutralizing antibody in the subject. For example, the administration can stimulate an antibody response that produces no more than about 200 spike protein-binding antibodies for every coronavirus neutralizing antibody. In further aspects, the administration stimulates an antibody response that produces between about 10 and about 300; about 20 and about 300; about 20 and about 200; about 30 and about 100; or about 30 and about 80 coronavirus spike protein-binding antibodies for every coronavirus neutralizing antibody. In still further aspects, administration of composition of the embodiments stimulates an antibody response in a subject that includes a ratio of spike protein-binding antibodies to coronavirus neutralizing antibodies that is with 20%, 15%, 10% or 5% of the ratio of spike protein-binding antibodies to coronavirus neutralizing antibodies found in average convalescent patient serum (from a subject who has recovered from coronavirus infection).

[1558] In yet further aspects, administration of a composition of the embodiments stimulates an antibody response that produces between about 1 and about 500 coronavirus spike protein receptor binding domain (RBD)-binding antibodies for every coronavirus neutralizing antibody in the subject. In further aspects, the administration stimulates an antibody response that produces no more than about 50 spike protein RBD-binding antibodies for every coronavirus neutralizing antibody. In still further aspects, administration stimulates an antibody response that produces between about 1 and about 200; about 2 and about 100; about 3 and about 200; about 5 and about 100; about 5 and about 50; or about 5 and about 20 spike protein RBD-binding antibodies for every coronavirus neutralizing antibody. In still further aspects, administration of composition of the embodiments stimulates an antibody response in a subject that includes a ratio of spike protein RBD-binding antibodies to coronavirus neutralizing antibodies that is with 20%, 15%, 10% or 5% of the ratio of spike protein RBD-binding antibodies to coronavirus neutralizing antibodies found in average convalescent patient serum (from a subject who has recovered from coronavirus infection).

[1559] In still further aspects, administration of a vaccine/composition of the embodiments induces essentially no increase in IL-4, IL-1β, TNF and/or IL-1β in the subject. In further aspects, the administration of a vaccine/composition of the embodiments induces essentially no increase in serum IL-4, IL-13, TNF and/or IL-1β in the subject. In some aspects, the administration of a vaccine/composition of the embodiments induces essentially no increase in IL-4, IL-13, TNF and/or IL-1β at the injection site (e.g., an intramuscular injection site) in the subject.

[1560] In still further aspects, a method of the embodiments comprises administration of a vaccine/composition of the embodiments to a human subject having a disease. In certain aspects, the subject has cardiovascular disease, kidney disease, lung disease or an autoimmune disease. In some aspects, a vaccine/composition of the embodiments is administered to a subject who is receiving anti-coagulation therapy.

[1561] According to a further aspect, the present invention also provides a method of manufacturing a composition or a vaccine, comprising the steps of:
[1562] a) optionally, adaptation of AU count of the respective sequences of component A and B according to WO2019092153A1 (claims 1 to 70), thereby modifying the retention time of the nucleic acid components on HPLC, allowing co-purification of the nucleic acid composition in step c);
[1563] b) RNA in vitro transcription step (of component A and B) using a DNA template in the presence of a cap analogue to obtain capped mRNA, preferably having a nucleic acid sequence as provided in Table 17, optionally wherein 2, 3, 4, 5, 6, 7, 8, 9, 10 or even more different RNAs are simultaneously produced in the RNA in vitro transcription step using, 3, 4, 5, 6, 7, 8, 9, 10 different DNA templates
[1564] c) Purifying the obtained capped RNA of step a) using RP-HPLC, and/or TFF, and/or Oligo(dT) purification and/or AEX, preferably using RP-HPLC and TFF;
[1565] d) Providing a first liquid composition comprising the purified capped RNA (of component A and B) of step b);
[1566] e) Providing a second liquid composition comprising at least one cationic lipid as defined herein, a neutral lipid as defined herein, a steroid or steroid analogue as defined herein, and a PEG-lipid as defined herein;
[1567] f) Introducing the first liquid composition and the second liquid composition into at least one mixing means to allow the formation of LNPs comprising capped RNA;
[1568] g) Purifying the obtained LNPs comprising capped RNA;
[1569] h) optionally, lyophilizing the purified LNPs comprising capped RNA.

[1570] Preferably, the mixing means of step e) is a T-piece connector or a microfluidic mixing device. Preferably, the purifying step f) comprises at least one step selected from precipitation step, dialysis step, filtration step, TFF step. Optionally, an enzymatic polyadenylation step may be performed after step a) or b). Optionally, further purification steps may be implemented to e.g. remove residual DNA, buffers, small RNA by-products etc. Optionally, RNA in vitro transcription is performed in the absence of a cap analog, and an enzymatic capping step is performed after RNA vitro transcription. Optionally, RNA in vitro transcription is performed in the presence of at least one modified nucleotide as defined herein.

[1571] In embodiments, step a, preferably steps a-c, more preferably all steps outlined above (a-g) are performed in an automated device for RNA in vitro transcription. Such a device may also be used to produce the composition or the vaccine. Preferably, a device as described in WO2020002598, in particular, a device as described in claims 1 to 59 and/or 68 to 76 of WO2020002598 (and FIGS. 1-18) may suitably be used.

[1572] In a further aspect, the present invention provides a method of stabilizing a pharmaceutical composition or a combination vaccine comprising lyophilizing or spray-drying the composition or vaccine to produce a stabilized composition or vaccine. Preferably, the stabilized composition or vaccine has a water content of less than about 10%, preferably a water content of between about 0.5% and 5.0%. Accordingly, the invention provides a stabilized, lyophilized composition or vaccine produced by a method of stabilizing as defined herein.

[1573] Brief Description of Lists and Tables

[1574] List A: Exemplary SARS-CoV-2 coronavirus isolates (EPI/GISAID)

[1575] List B: GenBank Accession Numbers of different SARS-CoV-2 isolates

[1576] List 1: Exemplary suitable SARS-CoV-2 antigen designs

[1577] Table 1: Preferred SARS-CoV-2 constructs (amino acid sequences and nucleic acid coding sequences)

[1578] Table 3A: Nucleic acid, preferably mRNA constructs encoding SARS-CoV-2 antigens

[1579] Table 3B: Nucleic acid, preferably mRNA constructs encoding SARS-CoV-2 antigens

[1580] Table 4: SARS-CoV-1 and SARS-associated constructs (amino acid sequences, nucleic acid coding sequences)

[1581] Table 5: Nucleic acid, preferably mRNA constructs encoding SARS-associated or SARS-CoV-1 antigens

[1582] Table 6: Preferred MERS-CoV constructs (amino acid sequences and nucleic acid coding sequences)

[1583] Table 7: Nucleic acid, preferably mRNA constructs encoding MERS-CoV antigens

[1584] Table 8: Preferred Influenza virus constructs (amino acid sequences and nucleic acid coding sequences)

[1585] Table 9: Nucleic acid, preferably mRNA constructs encoding Influenza virus antigens

[1586] Table 10: Preferred Influenza virus RNA sequences

[1587] Table 11: Preferred RSV constructs (amino acid sequences and nucleic acid coding sequences)

[1588] Table 12: Nucleic acid, preferably mRNA constructs encoding RSV antigens

[1589] Table 13: Preferred hMPV constructs (amino acid sequences and nucleic acid coding sequences)

[1590] Table 14: Nucleic acid, preferably mRNA constructs encoding hMPV antigens

[1591] Table 15: Preferred hPIV constructs (amino acid sequences and nucleic acid coding sequences)

[1592] Table 16: Nucleic acid, preferably mRNA constructs encoding hPIV antigens

[1593] Table 17: Overview of mRNA constructs used in Examples

[1594] Table 18: Overview of the nucleic acid based combination vaccines and vaccination scheme

[1595] Table A: Lipid-based carrier composition of the examples

[1596] Table 19: Overview of the nucleic acid based combination vaccines and vaccination scheme

[1597] Table 20: Overview of the nucleic acid based combination vaccines and vaccination scheme

### BRIEF DESCRIPTION OF THE DRAWINGS

[1598] FIG. 1 Combination vaccines comprising component A-1 induce humoral immune responses against SARS-CoV-2 spike protein, shown by ELISA on day 21 after first vaccination (FIG. 1 A) and by VNT-Assay on day 42 after second vaccination (FIG. 1 B). Further details provided in Example 3 and Table 19.

[1599] FIG. 2 Combination vaccines comprising component B-3a induce humoral immune responses against RSV F protein, shown by ELISA on day 21 after first vaccination (FIG. 2 A) and on day 42 after second vaccination (FIG. 2 B). Further details provided in Example 3 and Table 19.

[1600] FIG. 3 Combination vaccines comprising component B-2 induce humoral immune responses against Influenza HA (A1 California/07/09), shown by ELISA on day 21 after first vaccination (FIG. 3 A) and on day 42 after second vaccination (FIG. 3 B). Further details provided in Example 3 and Table 19.

[1601] FIG. 4 Combination vaccines comprising component A-1 induce humoral immune responses against SARS-CoV-2 spike protein, shown by ELISA on day 21 after first vaccination (FIG. 4 A) and by VNT-Assay on day 42 after second vaccination (FIG. 4 B). Further details provided in Example 4 and Table 20.

[1602] FIG. 5 Combination vaccines comprising component B-3a induce humoral immune responses against RSV F protein, shown by ELISA on day 21 after first vaccination (FIG. 5 A) and on day 42 after second vaccination (FIG. 5 B). Further details provided in Example 4 and Table 20.

[1603] FIG. 6 Combination vaccines comprising component B-3b induce humoral immune responses against hMPV F protein, shown by FACS-based Immunoassay on day 42 after second vaccination for hMPV-A1 (FIG. 6 A) and for hMPV-B1 (FIG. 6 B). Further details provided in Example 4 and Table 20.

[1604] FIG. 7 Combination vaccines comprising component B-4a induce humoral immune responses against PIV3 F protein, shown by FACS-based Immunoassay on day 42 after second vaccination. Further details provided in Example 4 and Table 20.

[1605] FIG. 8 Combination vaccines comprising component B-2 induce humoral immune responses against Influenza HA (A1 California/07/09), shown by ELISA on day 42 after second vaccination. Further details provided in Example 4 and Table 20.

[1606] ABBREVIATIONS

[1607] FLUAV: Influenza A virus

[1608] FLUBV: Influenza B virus

[1609] RSV: Human respiratory syncytial virus

[1610] HRSV-A, RSV-A: Human respiratory syncytial virus A

[1611] HPIV, hPIV: Human respirovirus (Human parainfluenzavirus)

[1612] HPIV3: Human respirovirus 3

[1613] HMPV, hMPV: Human metapneumovirus

[1614] MERS-CoV: Middle East respiratory syndrome-related coronavirus

[1615] SARS-CoV: Severe acute respiratory syndrome-related coronavirus

[1616] HCoV: Human coronavirus

[1617] Bat SARS-like CoV: Bat SARS-like coronavirus

[1618] BatCoV: Rousettus bat coronavirus

[1619] PDCoV: Porcine deltacoronavirus

[1620] PEDV: Porcine epidemic diarrhea virus

[1621] MHV: Murine hepatitis virus

### EXAMPLES

[1622] In the following, particular examples illustrating various embodiments and aspects of the invention are presented. However, the present invention shall not to be limited in scope by the specific embodiments described herein. The following preparations and examples are given to enable those skilled in the art to more clearly understand and to practice the present invention. The present invention, however, is not limited in scope by the exemplified embodiments, which are intended as illustrations of single aspects of the invention only, and methods, which are functionally equivalent are within the scope of the invention. Indeed, various modifications of the invention in addition to those described herein will become readily apparent to those skilled in the art from the foregoing description and the examples below. All such modifications fall within the scope of the appended claims.

### Example 1: Preparation of DNA and RNA Constructs, Compositions, and Vaccines

[1623] The present example provides methods of obtaining the RNA of the invention as well as methods of generating a composition or a vaccine of the invention.

[1624] 1.1. Preparation of DNA and RNA Constructs:

[1625] DNA sequences encoding different virus antigen designs were prepared and used for subsequent RNA in vitro transcription reactions. Said DNA sequences were prepared by modifying the wild type or reference encoding DNA sequences by introducing a G/C optimized or modified coding sequence (e.g., “cds opt1”) for stabilization and expression optimization. Sequences were introduced into a pUC derived DNA vector to comprise stabilizing 3′-UTR sequences and 5′-UTR sequences, additionally comprising a stretch of adenosines (e.g. A64 or A100), and optionally a histone-stem-loop (hSL) structure, and optionally a stretch of 30 cytosines (e.g. C30) (see Table 17). The obtained plasmid DNA constructs were transformed and propagated in bacteria using common protocols known in the art. Eventually, the plasmid DNA constructs were extracted, purified, and used for subsequent RNA in vitro transcription.

[1626] 1.2. RNA In Vitro Transcription from Plasmid DNA Templates:

[1627] DNA plasmids prepared according to section 1.1 were enzymatically linearized using a restriction enzyme and used for DNA dependent RNA in vitro transcription using T7 RNA polymerase in the presence of a nucleotide mixture (ATP/GTP/CTP/UTP) and cap analog (e.g. m7GpppG, m7G(5′)ppp(5′)(2′OMeA)pG or m7G(5′)ppp(5′)(2′OMeG)pG)) under suitable buffer conditions. The obtained RNA constructs were purified using RP-HPLC (PureMessenger®, CureVac AG, Tubingen, Germany; WO2008077592) and used for in vitro and in vivo experiments. The generated RNA sequences/constructs are provided in Table 17 with the encoded antigenic protein and the respective UTR elements indicated therein.

TABLE 17
Overview of mRNA constructs used in Examples

| | | SEQ ID | SEQ ID | SEQ ID |
|---|---|---|---|---|
| RNA | | NO: | NO: CDS | NO: |
| ID | Name | Protein | (gc) | RNA |
| R1 | FLUAV/H1N1/A/California/7/2009 hemagglutinin (HA) | 14178 | 14230 | 14438 |
| R2 | FLUAV/H3N2/A/Hong Kong/4801/2014 hemagglutinin (HA) | 14181 | 14233 | 14441 |
| R3 | FLUBV/H0N0/B/Brisbane/60/2008 hemagglutinin (HA) | 14182 | 14234 | 14442 |
| R4 | FLUBV/H0N0/B/Phuket/3073/2013 hemagglutinin (HA) | 14183 | 14235 | 11113 |
| R5 | FLUAV/H1N1/A/California/7/2009 neuraminidase (NA) | 14210 | 14262 | 14470 |
| R6 | FLUAV/H3N2/A/Hong Kong/4801/2014 neuraminidase (NA) | 14213 | 14265 | 14473 |
| R7 | FLUBV/H0N0/B/Brisbane/60/2008 neuraminidase (NA) | 14214 | 14266 | 14474 |
| R8 | HRSV-A/A2 fusion glycoprotein (F-del_DSCav1_mut5) | 14550 | 14560 | 14600 |
| R9 | HPIV3/Homo sapiens/PER/FLA4571/2008 fusion glycoprotein (F0) | 14612 | 14614 | 14622 |
| R10 | HPIV3/BJ/001/08 hemagglutinin-neuraminidase (HN) | 14613 | 14615 | 14623 |
| R11 | HMPV/TN/92-4 fusion glycoprotein (FO) | 14626 | 14650 | 14746 |
| R12 | MERS-CoV/MERS-CoV-Jeddah-human-1 spike protein (1-1353)(V1060P_L1061P) | 14795 | 14811 | 14875 |
| R13 | SARS-CoV/Tor2 spike protein (1-1255)(K968P_V969P) | 14910 | 14955 | 15135 |
| R14 | SARS-CoV-2/Wuhan/WIV05/2019 spike protein (1-1273)(K986P_V987P); R9515 | 10 | 137 | 163 |
| R15 | SARS-CoV-2/Wuhan/WIV05/2019 spike protein (1-1273)(K986P_V987P); R9709 | 10 | 137 | 149 |
| R16 | SARS-CoV-2/Wuhan/WIV05/2019 spike protein (1- | 22961 | 23091 | 23531 |
| | 1273)(K986P_V987P_L18F_D80A_D215G_L242del_A243del_L244clel_R2461_K4 | | | |
| | 17N_E484K_N501Y_D614G_A701V); R10384 | | | |
| R17 | SARS-CoV-2/Wuhan/WIV05/2019 spike protein (1- | 22959 | 23089 | 23529 |
| | 1273)(K986P_V987P_H69del_V70del_Y144del_N501Y_A570D_D614G_P681H_T | | | |
| | 716I_S982A_D1118H); R10357 | | | |
| R18 | FLUAV/H1N1/A/California/7/2009 hemagglutinin (HA); R8849 | 14178 | 14230 | 26949 |
| R19 | FLUAV/H3N2/A/Hong Kong/4801/2014 hemagglutinin (HA); R8853 | 14181 | 26946 | 26950 |
| R20 | FLUBV/H0N0/B/Brisbane/60/2008 hemagglutinin (HA); R8852 | 14182 | 14234 | 26951 |
| R21 | FLUBV/H0N0/B/Phuket/3073/2013 hemagglutinin (HA); R8854 | 14183 | 14235 | 26952 |
| R22 | FLUAV/H1N1/A/California/7/2009 neuraminidase (NA); R8858 | 14210 | 14262 | 26953 |
| R23 | FLUAV/H3N2/A/Hong Kong/4801/2014 neuraminidase (NA); R8856 | 14213 | 14265 | 26954 |
| R24 | FLUBV/H0N0/B/Brisbane/60/2008 neuraminidase (NA); R8860 | 14214 | 14266 | 26955 |
| R25 | HRSV-A/A2 fusion glycoprotein (F-del_DSCav1_mut5); R8898 | 14550 | 14560 | 14580 |
| R26 | HPIV3/USA/629-D01959/2007 fusion glycoprotein (variant); R10331 | 26957 | 26959 | 26962 |
| R27 | HMPV/00-1 fusion glycoprotein (variant); R10326 | 26971 | 26977 | 26984 |
| R28 | HMPV/NL/1/99 fusion glycoprotein (variant); R10329 | 26968 | 26974 | 26981 |

[1628] 1.4. Preparation of an LNP Formulated mRNA Composition:

[1629] LNPs were prepared using cationic lipids, structural lipids, a PEG-lipids, and cholesterol. Lipid solution (in ethanol) was mixed with RNA solution (aqueous buffer) using T-piece formulation as outlined below. Obtained LNPs were re-buffered in a carbohydrate buffer via dialysis, and optionally up-concentrated to a target concentration using ultracentrifugation tubes. LNP-formulated mRNA was stored at −80° C. prior to use in in vitro or in vivo experiments.

[1630] In short, lipid nanoparticles were prepared and tested according to the general procedures described in PCT Pub. Nos. WO2015199952, WO 2017004143 and WO2017075531, the full disclosures of which are incorporated herein by reference. Lipid nanoparticle (LNP)-formulated mRNA was prepared using an ionizable amino lipid (cationic lipid), phospholipid, cholesterol and a PEGylated lipid (lipids see Table A). LNPs were prepared as follows. Cationic lipid according to formula III-3 (ALC-0315), DSPC, cholesterol and PEG-lipid according to formula IVa (ALC-0159) were solubilized in ethanol at a molar ratio of approximately 47.5:10:40.8:1.7. Lipid nanoparticles (LNP) comprising compound III-3 (ALC-0315) were prepared at a ratio of mRNA to total Lipid of 0.03-0.04 w/w. Briefly, the mRNA was diluted to 0.05 to 0.2 mg/mL in 10 to 50 mM citrate buffer, pH 4. Syringe pumps were used to mix the ethanolic lipid solution with the mRNA aqueous solution at a ratio of about 1:5 to 1:3 (vol/vol) with total flow rates above 15 ml/min. The ethanol was then removed and the external buffer replaced with PBS by dialysis. Finally, the lipid nanoparticles were filtered through a 0.2 μm pore sterile filter. Lipid nanoparticle particle diameter size was 60-90 nm as determined by quasi-elastic light scattering using a Malvern Zetasizer Nano (Malvern, UK).

TABLE A
Lipid-based carrier composition of the examples

| | | Ratio | | |
|---|---|---|---|---|
| | Compounds | (mol %) | Structure | Mass |
| 1 | Cholesterol | 40.9 | [chemical structure] | 386.4 |
| 2 | 1,2-distearoyl- sn-glycero-3- phosphocholine (DSPC) | 10 | [chemical structure] | 789.6 |
| 3 | Cationic Lipid | 47.4 | [chemical structure] | 765.7 |
| 4 | PEG Lipid | 1.7 | [chemical structure] Average n = ~49 | 2010.1 |

[1631] 1.5. Preparation of Combination mRNA Vaccines:

[1632] Combination mRNA vaccines were formulated with LNPs either in a separate or co-formulated way. For separately mixed or formulated mRNA vaccines, each mRNA component was prepared and separately LNP formulated as described in Example 1.4, followed by mixing of the different LNP-formulated components. For co-formulated mRNA vaccine, the different mRNA components were firstly mixed together, followed by a co-formulation in LNPs as described in Example 1.4.

### Example 2: Vaccination of Mice with Nucleic Acid Based Combination Vaccines

[1633] Preparation of LNP Formulated mRNA Vaccine:

[1634] mRNA constructs for a combination vaccine are prepared as described in Example 1 (RNA in vitro transcription). HPLC purified mRNA is formulated with LNPs according to Example 1.4 and Example 1.5 prior to use in in vivo vaccination experiments.

[1635] Immunization:

[1636] Female BALB/c mice (6-8 weeks old) are injected intramuscularly (i.m.) with mRNA combination vaccine (respective RNA identifiers see Table 17) with doses as indicated in Table 18. As a negative control, one group of mice is vaccinated with buffer. All animals are vaccinated on day 0 and 21. Blood samples are collected on day 21 (post prime) and 42 (post boost) for the determination of antibody titers. After vaccination experiments, the efficiency of the combination vaccines is determined.

TABLE 18
Overview of the nucleic acid based combination vaccines and vaccination scheme

| | | Component A | Component B | | |
|---|---|---|---|---|---|
| | | (mRNA) | (mRNA) | Formulation | Dose |
| 1 | Combination vaccine: | R14 | R1-R7 | LNP | 5 μg |
| | SARS-CoV-2 - Influenza | | | co-formulated | |
| 2 | Combination vaccine: | R14 | R1-R7 | LNP | 5 μg |
| | SARS-CoV-2 - Influenza - RSV | | R8 | co-formulated | |
| 3 | Combination vaccine: | R14 | R8 | LNP | 5 μg |
| | SARS-CoV-2 - RSV | | | co-formulated | |
| 4 | Combination vaccine: | R14 | R12 | LNP | 5 μg |
| | SARS-CoV-2 - MERS - SARS-CoV-1 | | R13 | co-formulated | |
| 5 | Combination vaccine: | R14 | R9-10, | LNP | 5 μg |
| | SARS-CoV-2 - PIV - hMPV | | R11 | co-formulated | |
| 6 | Buffer | | | | |

[1637] Determination of IgG1 and IgG2 Antibody Titers Using ELISA:

[1638] ELISA is performed using recombinant antigenic proteins for coating. Coated plates are incubated using respective serum dilutions, and binding of specific antibodies coated protein are detected using biotinylated isotype specific anti-mouse antibodies followed by streptavidin-HRP (horse radish peroxidase) with Amplex as substrate. Endpoint titers of antibodies (IgG1, IgG2a) are measured by ELISA on day 21, and 42 post vaccinations.

[1639] Detection of Spike Protein-Specific Immune Responses (SARS-CoV-1, SARS-CoV-2, MERS-CoV):

[1640] Hela cells are transfected with 2 pg of mRNA encoding the spike protein using lipofectamine. The cells are harvested 20h post transfection, and seeded at 1×10⁵ per well into a 96 well plate. The cells are incubated with serum samples of vaccinated mice (diluted 1:50) followed by a FITC-conjugated anti-mouse IgG antibody. Cells were acquired on BD FACS Canto II using DIVA software and analyzed by FlowJo.

[1641] Intracellular Cytokine Staining:

[1642] Splenocytes from vaccinated mice are isolated according to a standard protocol known in the art. Briefly, isolated spleens are grinded through a cell strainer and washed in PBS/1% FBS followed by red blood cell lysis. After an extensive washing step with PBS/1% FBS, splenocytes are seeded into 96-well plates (2×10⁶ cells per well). Cells are stimulated with a mixture of protein specific peptide epitopes (5 pg/ml of each peptide) in the presence of 2.5 pg/ml of an anti-CD28 antibody (BD Biosciences) for 6 hours at 37° C. in the presence of a protein transport inhibitor. After stimulation, cells are washed and stained for intracellular cytokines using the Cytofix/Cytoperm reagent (BD Biosciences) according to the manufacturer's instructions. The following antibodies are used for staining: Thy1.2-FITC (1:200), CD8-APC-H7 (1:100), TNF-PE (1:100), IFNγ-APC (1:100) (eBioscience), CD4-BD Horizon V450 (1:200) (BD Biosciences) and incubated with Fcγ-block diluted 1:100. Aqua Dye is used to distinguish live/dead cells (Invitrogen). Cells are acquired using a Canto II flow cytometer (Beckton Dickinson). Flow cytometry data is analyzed using FlowJo software package (Tree Star, Inc.)

[1643] Determination of Virus Neutralization Titers:

[1644] Serum is collected for determination of neutralization titers (VNTs) detected via CPE (cytopathic effect) or via a pseudotyped particle-based assay.

[1645] Determination of HA Specific Immune Responses

[1646] Detection of an HA-specific immune response (B-cell immune response) is carried out by detecting IgG2a antibodies directed against the particular influenza virus. Therefore, blood samples is taken from the vaccinated mice three weeks after vaccination and sera is prepared. MaxiSorb plates (Nalgene Nunc International) are coated with the particular recombinant HA protein. After blocking with 1×PBS containing 0.05% Tween-20 and 1% BSA the plates are incubated with diluted mice serum (as indicated). Subsequently a biotin-coupled secondary antibody (anti-mouse-IgG2a, Pharmingen) was added. After washing, the plate was incubated with horseradish peroxidase-streptavidin, followed by addition of the Amplex UltraRed Reagent (Invitrogen) and subsequent quantification of the fluorescent product.

[1647] Determination of Virus Neutralization RSV Titers:

[1648] RSV virus neutralization titers (VNTs) are measured on serum samples using a plaque reduction neutralization test (PRNT). Diluted serum samples are incubated with RSV/A2 for 1 hour at room temperature and inoculated in duplicates onto confluent HEp-2 monolayers in 24 well plates. After one hour incubation at 37° C. in a 5% CO2 incubator, the wells are overlayed with 0.75% Methylcellulose medium. After 4 days of incubation, the overlays are removed and the cells are fixed and stained. The corresponding reciprocal neutralizing antibody titers are determined at the 60% reduction end-point of the virus control.

### Example 3: Vaccination of Mice with Nucleic Acid Based Combination Vaccines (mRNA Vaccines for SARS-CoV-2, RSV and/or Influenza)

[1649] The present example shows that combination mRNA vaccines induce strong and antigen-specific immune responses against all components of the combination vaccine (mRNA comprising at least one coding sequence encoding at least one antigenic peptide or protein selected from component A and/or from component B).

[1650] Preparation of LNP Formulated mRNA Vaccine Compositions/Combinations:

[1651] mRNA constructs for a combination vaccine were prepared as described in Example 1 (RNA in vitro transcription). HPLC purified mRNA was formulated with LNPs according to Example 1.4 and/or Example 1.5 prior to use in in vivo vaccination experiments.

[1652] Immunization:

[1653] Female BALB/c mice (6-8 weeks old) were injected intramuscularly (i.m.) with mRNA combination vaccine (respective RNA identifiers see Table 17) with doses as indicated in Table 19. As a negative control, one group of mice was vaccinated with buffer (0.9% NaCl). All animals received an injection volume of 25 μl and were vaccinated on day 0 and 21. Blood samples are collected on day 21 (post first vaccination) and 42 (post second vaccination) for the determination of antibody titers.

TABLE 19
Overview of the nucleic acid based combination vaccines and vaccination scheme

| | | Component A1 | Component B-2 | Component B-3a | | Total |
|---|---|---|---|---|---|---|
| Group | Vaccine composition: | (mRNA) | (mRNA) | (mRNA) | Formulation | Dose |
| 1 | SARS-CoV-2 mRNA vaccine | R15 | — | — | separately | 0.5 μg |
| | | | | | formulated | |
| 2 | RSV mRNA vaccine | | — | R25 | separately | 0.5 μg |
| | | | | | formulated | |
| 3 | Combination vaccine: | R15 | — | R25 | separately | 1 μg |
| | SARS-CoV-2 mRNA vaccine + | | | | formulated | (0.5 μg |
| | RSV mRNA vaccine | | | | | each) |
| 4 | Heptavalent Influenza mRNA | — | R18-R24 | — | co-formulated | 3.5 μg |
| | vaccine | | | | | (0.5 μg |
| | | | | | | each) |
| 5 | Combination vaccine: | R15 | R18-R24 | — | A-1 and B-2 | 4 μg |
| | SARS-CoV-2 mRNA vaccine + | | | | separately | (0.5 μg |
| | heptavalent Influenza mRNA | | | | formulated | each) |
| | vaccine | | | | | |
| 6 | Combination vaccine: | R15 | R18-R24 | R25 | separately | 4.5 μg |
| | SARS-CoV-2 mRNA vaccine + | | | | formulated | (0.5 μg |
| | RSV mRNA vaccine + | | | | | each) |
| | heptavalent Influenza mRNA | | | | | |
| | vaccine | | | | | |
| 7 | Control 0.9% NaC | — | — | — | — | — |

[1654] Determination of Total IgG Antibody Titers for SARS-CoV-2 and RSV Using ELISA:

[1655] SRBD or RSV-F protein specific total IgG binding antibodies were quantified using an Amplex ELISA. Samples were pre-diluted 1:5 and consecutive 1:10 dilutions were tested (8 dilutions). SARS-CoV-2 (2019-nCoV) Spike RBD-His was used for coating (1 μg/ml) or 2.5 μg/mL rec. RSV-F GP A2 (SinoBiological, Cat: 11049-V08B). Plates were thoroughly washed after each incubation step. The coating was done at 37° C. for 4-5 hours. This was followed by an overnight blocking at 4° C. Serum samples were pre-diluted 1:5 in blocking buffer on a separate uncoated plate. The titrated sera samples were added into the pre-coated plate and incubated for 2-4h at RT. Detection antibodies were added into each well (1:300) and incubated for 1-1.5h at RT. Incubation with HRP-Streptavidin (1:1000) in sterile blocking buffer (1% BSA without NaN₃) was carried out for 30 minutes. Amplex® UltraRed reagent (dissolved in DMSO; 1:200, 30% hydrogen peroxide H₂O₂ 1:2000 in substrate buffer) was added into each well. The fluorescence was measured after a minimum of 45 minutes and a maximum of 24 hours. Endpoint titers of antibodies were measured by ELISA on day 21 post prime vaccination for SARS-CoV-2 and on day 21 and 42 for RSV.

[1656] Determination of Virus Neutralization Titers for SARS-CoV-2:

[1657] Serum was collected for determination of SARS-CoV-2 neutralization titers (VNTs) detected via CPE (cytopathic effect). Serial dilutions of heat-inactivated sera (56° C. for 30 min) tested in duplicates with a starting dilution of 1:10 followed by 1:2 serial dilutions were incubated with 100 TCID₅₀ of wild type SARS-CoV-2 (strain 2019-nCov/Italy-INMI1) for 1 hour at 37° C. Every plate contained a dedicated row (8 wells) for cell control which contains only cells and medium, and a dedicated row of virus control which contain only cells and virus. Infectious virus was quantified upon incubation of 100 μl of virus-serum mixture with a confluent layer of Vero E6 cells (ATCC, Cat.1586) followed by incubation for 3 days at 37° C. and microscopical scoring for CPE formation. A back titration was performed for each run in order to verify the correct range of TCID50 of the working virus solution. VN titres were calculated according to the method described by Reed & Muench. If no neutralization was observed (MNt<10), an arbitrary value of 5 was reported. Analyses were carried out at VisMederi srl (Siena, Italy). Virus neutralization titers were measured with sera collected on day 42.

[1658] Determination of Influenza HA Specific Immune Responses (Via Hemagglutinin Inhibition Assay)

[1659] Functional anti-HA antibody titers were analyzed by hemagglutination inhibition (H1) assay. Sera were incubated with receptor destroying enzyme (RDEII, Denka Seiken) at 37° C. overnight, inactivated (56° C., 60 min). Dilutions of pre-treated sera were incubated for 45 min with 4 HAU of inactivated influenza A H1N1 California/07/09 (NIBSC Material 09/174) and 50 μl 0.5% erythrocyte solution was added. The plates were incubated for 45-60 minutes and H1 titers are determined by the highest dilution of serum that leads to the complete inhibition of agglutination.

[1660] Results:

[1661] As shown in FIG. 1 A the vaccination with mRNA encoding full length S stabilized protein (S_stab) or combination vaccine comprising mRNA encoding full length S stabilized protein (S_stab) induced high titers of Spike specific binding antibodies after a single vaccination (day 21) (FIG. 1 A: total IgG). FIG. 1 B shows the induction of functional antibodies after the second vaccination (day 42) (FIG. 1 B: Virus neutralizing antibodies VNTs). The combination of component A-1 with component B-2 (Heptavalent Influenza mRNA vaccine (group 5)) and/or B-3a (RSV mRNA vaccine (group 3), (group 6)) does not influence the induction of humoral antibody responses in a negative way. The data shows that the observed immune responses of the respective combination vaccines comprising mRNA encoding full length S stabilized protein are comparable to those observed for the monovalent vaccine group (group 1).

[1662] The induced antibody responses against RSV F protein (component B-3a) are shown in FIG. 2 A (day 21, after prime vaccination) and B (day 42, after second vaccination). All the combination vaccines comprising mRNA encoding RSV F protein induced high titers of IgG antibodies (group 3 and group 6). The data shows that the observed immune responses of the respective combination vaccines comprising mRNA encoding RSV F protein protein are comparable to those observed for the monovalent vaccine (group 2).

[1663] As shown in FIGS. 3 A and B the induction of functional antibodies against Influenza virus measured by Hemagglutinin Inhibition Assay was induced by vaccine combinations comprising the heptavalent Influenza vaccine component B-2. H1 titers were determined on day 21 after one vaccination (FIG. 3 A) and on day 42 after two vaccinations (FIG. 3 B). The data shows that the observed immune responses of the combination vaccines comprising mRNA encoding influenza antigens (group 5 and group 6) are comparable to those observed for the heptavalent influenza vaccine (group 4).

[1664] As demonstrated in the present example, the tested combination vaccines are suitable to deliver the different mRNA components to the host cells to translate the mRNA components into antigenic proteins or antigenic peptides, which induces antigen-specific immune responses against all the encoded proteins.

[1665] Summarizing the above, the data demonstrates that the combination of antigens of SARS CoV-2, Influenza virus and RSV is possible and that the combination vaccines induce strong immune responses against each of the encoded antigens. In addition to that, all components of the tested combination vaccines induce efficient immune responses which indicates that single components were not immunodominant, or that the components of the combination vaccines do not show immune-interference.

### Example 4: Vaccination of Mice with Nucleic Acid Based Combination Vaccines (mRNA Vaccines for SARS-CoV-2, RSV, Influenza, hMPV, and/or PIV3)

[1666] The present example shows that combination mRNA vaccines induce strong and antigen-specific immune responses against all components of the combination vaccine (mRNA comprising at least one coding sequence encoding at least one antigenic peptide or protein selected from component A and/or from component B). The combination vaccine induced high antibody responses against all encoded proteins, independent if co-formulated or separately mixed after LNP formulation. The present example also shows the combination of five different mRNA vaccine components (component A-1: SARS-CoV-2, component B-3a: RSV, component B-2: Influenza, heptavalent; component B-3b: hMPV (bivalent), and component B-4a: PIV). This combination vaccine includes 12 different antigens (12-valent).

[1667] Preparation of LNP Formulated mRNA Vaccine:

[1668] mRNA constructs for a combination vaccine were prepared as described in Example 1 (RNA in vitro transcription). HPLC purified mRNA was formulated with LNPs according to Example 1.4 and/or Example 1.5 prior to use in in vivo vaccination experiments.

[1669] The co-formulated 12-valent combination vaccine (see group 7, Table 20) was prepared by mixing by molarity, so equal numbers of RNA molecules were mixed (equimolar). The separately formulated 12-valent combination vaccine (see group 6, Table 20), the total amount of RNA was used and no adjustment according to molarity was performed (equal mass).

[1670] Immunization:

[1671] Female BALB/c mice (6-8 weeks old) were injected intramuscularly (i.m.) with mRNA combination vaccine (respective RNA identifiers see Table 17) with doses as indicated in Table 20. As a negative control, one group of mice was vaccinated with buffer (0.9% NaCl). All animals received 25 μl and were vaccinated on day 0 and 21. Blood samples are collected on day 7 and day 21 (post first vaccination) and 42 (post second vaccination) for the determination of antibody titers.

TABLE 20
Overview of the nucleic acid based combination vaccines and vaccination scheme

| | Vaccine | Component A | Component B-2 | Component B-3a | Component B-3b | Component B-4a | LNP | Total |
|---|---|---|---|---|---|---|---|---|
| | composition: | (mRNA) | (mRNA) | (mRNA) | (mRNA) | (mRNA) | formulation | Dose |
| 1 | SARS-CoV-2 mRNA | R15 | — | — | — | — | separately | 0.5 μg |
| | vaccine | | | | | | formulated | |
| 2 | Bivalent hMPV mRNA | — | — | — | R27+R28 | — | co-formulated | 1pg |
| | vaccine | | | | | | | |
| 3 | Combination vaccine: | R15 | — | — | R27+R28 | — | separately | 1.5pg |
| | SARS-CoV-2 mRNA | | | | | | formulated | (0.5pg |
| | vaccine +Bivalent | | | | | | | each) |
| | hMPV mRNA vaccine | | | | | | | |
| 4 | PIV3 mRNA vaccine | — | — | — | — | R26 | | 0.5pg |
| 5 | Combination vaccine: | R15 | — | — | — | R26 | separately | 1pg |
| | SARS-CoV-2 mRNA | | | | | | formulated | (0.5pg |
| | vaccine PIV3 mRNA | | | | | | | each) |
| | vaccine | | | | | | | |
| 6 | Combination vaccine: | R15 | R18-R24 | R25 | R27+R28 | R26 | separately | 6pg |
| | 12-valent cocktail | | | | | | formulated; | (0.5pg |
| | mRNA vaccine | | | | | | equal mass. | each) |
| 7 | Combination vaccine: | R15 | R18-R24 | R25 | R27+R28 | R26 | co-formulated; | 6pg |
| | 12-valent cocktail | | | | | | equimolar | |
| | mRNA vaccineL | | | | | | | |
| 8 | Control 0.9% NaCl | — | — | — | — | — | — | — |

[1672] SARS-CoV-2, Influenza and RSV-specific immune responses (VNT, total IgG and H1 titer) were analyzed as described in Example 3.

[1673] FACS-Based ELISA for Determination of PIV-3 or hMPV-A1 and hMPV-B1 Specific Immune Responses

[1674] HeLa cells were transfected with 17 pg mRNA per T75 flask of R₂₇ (R₁₀₃₂₆ (hMPV-A1 stabilized fusion protein with furin cleavage—F(19-539)PFs_GCv3.1)), R28 (R10329 (hMPV-B1 stabilized fusion protein with furin cleavage—F(19-539)_PFs_GCv3.1)), R26 (R10331 (PIV-3 fusion protein stabilized—F(19-539)DS2-Cav_GCv3.1)) using Lipofectamine 2000. Transfected cells were harvested 18-24h post lipofection and seeded in 96 V-bottom plate at 2×10⁵ cells/well The mouse serum samples collected in on day 42 were used as primary antibody followed by anti-mouse FITC-conjugated secondary antibody.

[1675] Results

[1676] As shown in FIG. 4 A the vaccination with mRNA encoding full length S stabilized protein (S_stab) alone or the combination vaccines comprising mRNA encoding full length S stabilized protein (S_stab) induced high titers of Spike specific binding antibodies after a single vaccination (day 21) (FIG. 4 A: total IgG, ELISA). FIG. 4 B shows the induction of functional antibodies after the second vaccination (d42) (FIG. 4 B: Virus neutralizing antibodies VNTs). The combination with component B-3b (hMPV, bivalent mRNA vaccine (A+D)) or B-4a (PIV-3 mRNA vaccine (A+E)) does not influence the induction of humoral antibody responses in a negative way. The data shows that the observed immune responses of the respective combination vaccines comprising mRNA encoding full length S stabilized protein are comparable to those observed for the monovalent vaccine group (group 1).

[1677] Even the 12-valent vaccine combinations (group 6 and group 7) induced high SARS-CoV-2 specific immune responses (binding antibodies and VNTs). The response of the LNP co-formulated vaccine combination (group7) was slightly higher compared to separately LNP-formulated and mixed mRNA combinations (group 6).

[1678] RSV-F specific immune responses measured via ELISA are shown in FIGS. 5 A (day 21) and B (day 42). Both 12-valent combination vaccine (group 6 and group 7) induced high titers of total IgG. The titers on day 42 (FIG. 5 B) for both groups might be even higher (indicated by the arrow, due to assay conditions). Antibody titers against combination vaccines comprising component B-3b (comprising mRNA encoding hMPV antigens) raised also slight IgG titers (group 2 and 4). This might be due to cross-immunity between F proteins of related virus strains. RSV and hMPV both are belonging to Pneumoviridae virus family.

[1679] As shown in FIGS. 6 A and B all the vaccine combinations comprising component B3-b (comprising mRNA encoding bivalent hMPV antigen (group 2, 3, 6, and 7) induced strong humoral immune responses against F protein of hMPV A1 and B1 strains (FIG. 6 A: hMPV A1, 6 B: hMPV B1, day 42). FIG. 7 demonstrates the immune responses elicited against PIV3 F protein on day 42 after first vaccination. All vaccine combinations comprising component B-4a (comprising mRNA encoding PIV3 F protein (group 4, 5, 6, and 7) induced humoral immune responses against PIV3 F protein.

[1680] As shown in FIG. 8 the induction of functional antibodies against Influenza virus measured by Hemagglutinin Inhibition Assay was induced by vaccine combinations comprises the heptavalent Influenza vaccine component B-2 (group 6 and group 7). H1 titers were determined on day 42 after two vaccinations.

[1681] As demonstrated in the present example, the tested combination vaccines are suitable to deliver the different mRNA components to the host cells to translate the mRNA components into antigenic proteins or antigenic peptides, which induces antigen-specific immune responses against all the encoded proteins.

[1682] Summarizing the above, the data demonstrates that the combination of antigens of SARS CoV-2, Influenza virus, hMPV, PIV, and RSV is possible and that the combination vaccines induce strong immune responses against each of the encoded antigens. In addition to that, all components of the tested combination vaccines induce efficient immune responses which indicates that single components were not immunodominant, or that the components of the combination vaccines do not show immune-interference.

### Example 5: Clinical Development of a Nucleic Acid Based Combination Vaccine

[1683] To demonstrate safety and efficiency of the nucleic acid based combination vaccine, a clinical trial (phase 1) is initiated. In the clinical trial, a cohort of human volunteers is intramuscularly injected for at least two times (e.g. day 0 and day 28 with a dose of 2 pg, 6 pg, or 18 pg nucleic acid based combination vaccine (formulated in LNPs according to the invention). In order to assess the safety profile of the vaccine, subjects are monitored after administration (vital signs, vaccination site tolerability assessments, hematologic analysis). The efficacy of the immunization is analyzed by determination of virus neutralizing titers (VNT) in sera from vaccinated subjects. Blood samples are collected on day 0 as baseline and after completed vaccination. Sera are analyzed for virus neutralizing antibodies.

The application's sequence listing, which the Patent Office published only in electronic form, follows.

SEQUENCE LISTING (26991 sequences)

SEQ ID NO: 1 - protein, 1273 aa, Artificial Sequence
  SARS-CoV-2/Wuhan/WIV05/2019__EPI_ISL_402128 spike protein (1-1273)
MFVFLVLLPLVSSQCVNLTTRTQLPPAYTNSFTRGVYYPDKVFRSSVLHSTQDLFLPFFSNVTWFHAIHVSGTNGTKRFDNPVLPFNDGVYFASTEKSNIIRGWIFGTTLDSKTQSLLIVNNATNVVIKVCEFQFCNDPFLGVYYHKNNKSWMESEFRVYSSANNCTFEYVSQPFLMDLEGKQGNFKNLREFVFKNIDGYFKIYSKHTPINLVRDLPQGFSALEPLVDLPIGINITRFQTLLALHRSYLTPGDSSSGWTAGAAAYYVGYLQPRTFLLKYNENGTITDAVDCALDPLSETKCTLKSFTVEKGIYQTSNFRVQPTESIVRFPNITNLCPFGEVFNATRFASVYAWNRKRISNCVADYSVLYNSASFSTFKCYGVSPTKLNDLCFTNVYADSFVIRGDEVRQIAPGQTGKIADYNYKLPDDFTGCVIAWNSNNLDSKVGGNYNYLYRLFRKSNLKPFERDISTEIYQAGSTPCNGVEGFNCYFPLQSYGFQPTNGVGYQPYRVVVLSFELLHAPATVCGPKKSTNLVKNKCVNFNFNGLTGTGVLTESNKKFLPFQQFGRDIADTTDAVRDPQTLEILDITPCSFGGVSVITPGTNTSNQVAVLYQDVNCTEVPVAIHADQLTPTWRVYSTGSNVFQTRAGCLIGAEHVNNSYECDIPIGAGICASYQTQTNSPRRARSVASQSIIAYTMSLGAENSVAYSNNSIAIPTNFTISVTTEILPVSMTKTSVDCTMYICGDSTECSNLLLQYGSFCTQLNRALTGIAVEQDKNTQEVFAQVKQIYKTPPIKDFGGFNFSQILPDPSKPSKRSFIEDLLFNKVTLADAGFIKQYGDCLGDIAARDLICAQKFNGLTVLPPLLTDEMIAQYTSALLAGTITSGWTFGAGAALQIPFAMQMAYRFNGIGVTQNVLYENQKLIANQFNSAIGKIQDSLSSTASALGKLQDVVNQNAQALNTLVKQLSSNFGAISSVLNDILSRLDKVEAEVQIDRLITGRLQSLQTYVTQQLIRAAEIRASANLAATKMSECVLGQSKRVDFCGKGYHLMSFPQSAPHGVVFLHVTYVPAQEKNFTTAPAICHDGKAHFPREGVFVSNGTHWFVTQRNFYEPQIITTDNTFVSGNCDVVIGIVNNTVYDPLQPELDSFKEELDKYFKNHTSPDVDLGDISGINASVVNIQKEIDRLNEVAKNLNESLIDLQELGKYEQYIKWPWYIWLGFIAGLIAIVMVTIMLCCMTSCCSCLKGCCSCGSCCKFDEDDSEPVLKGVKLHYT

SEQ ID NO: 2 - protein, 1269 aa, Artificial Sequence
  SARS-CoV-2/bat/Yunnan/RaTG13/2013__EPI_ISL_402131 spike protein (1-1269)
MFVFLVLLPLVSSQCVNLTTRTQLPPAYTNSSTRGVYYPDKVFRSSVLHLTQDLFLPFFSNVTWFHAIHVSGTNGIKRFDNPVLPFNDGVYFASTEKSNIIRGWIFGTTLDSKTQSLLIVNNATNVVIKVCEFQFCNDPFLGVYYHKNNKSWMESEFRVYSSANNCTFEYVSQPFLMDLEGKQGNFKNLREFVFKNIDGYFKIYSKHTPINLVRDLPPGFSALEPLVDLPIGINITRFQTLLALHRSYLTPGDSSSGWTAGAAAYYVGYLQPRTFLLKYNENGTITDAVDCALDPLSETKCTLKSFTVEKGIYQTSNFRVQPTDSIVRFPNITNLCPFGEVFNATTFASVYAWNRKRISNCVADYSVLYNSTSFSTFKCYGVSPTKLNDLCFTNVYADSFVITGDEVRQIAPGQTGKIADYNYKLPDDFTGCVIAWNSKHIDAKEGGNFNYLYRLFRKANLKPFERDISTEIYQAGSKPCNGQTGLNCYYPLYRYGFYPTDGVGHQPYRVVVLSFELLNAPATVCGPKKSTNLVKNKCVNFNFNGLTGTGVLTESNKKFLPFQQFGRDIADTTDAVRDPQTLEILDITPCSFGGVSVITPGTNASNQVAVLYQDVNCTEVPVAIHADQLTPTWRVYSTGSNVFQTRAGCLIGAEHVNNSYECDIPIGAGICASYQTQTNSRSVASQSIIAYTMSLGAENSVAYSNNSIAIPTNFTISVTTEILPVSMTKTSVDCTMYICGDSTECSNLLLQYGSFCTQLNRALTGIAVEQDKNTQEVFAQVKQIYKTPPIKDFGGFNFSQILPDPSKPSKRSFIEDLLFNKVTLADAGFIKQYGDCLGDIAARDLICAQKFNGLTVLPPLLTDEMIAQYTSALLAGTITSGWTFGAGAALQIPFAMQMAYRFNGIGVTQNVLYENQKLIANQFNSAIGKIQDSLSSTASALGKLQDVVNQNAQALNTLVKQLSSNFGAISSVLNDILSRLDKVEAEVQIDRLITGRLQSLQTYVTQQLIRAAEIRASANLAATKMSECVLGQSKRVDFCGKGYHLMSFPQSAPHGVVFLHVTYVPAQEKNFTTAPAICHDGKAHFPREGVFVSNGTHWFVTQRNFYEPQIITTDNTFVSGSCDVVIGIVNNTVYDPLQPELDSFKEELDKYFKNHTSPDVDLGDISGINASVVNIQKEIDRLNEVAKNLNESLIDLQELGKYEQYIKWPWYIWLGFIAGLIAIIMVTIMLCCMTSCCSCLKGCCSCGSCCKFDEDDSEPVLKGVKLHYT

SEQ ID NO: 3 - protein, 1273 aa, Artificial Sequence
  SARS-CoV-2/Wuhan/HBCDC-HB-01/2019__EPI_ISL_402132 spike protein (1-1273)
MFVFLVLLPLVSSQCVNLTTRTQLPPAYTNSITRGVYYPDKVFRSSVLHSTQDLFLPFFSNVTWFHAIHVSGTNGTKRFDNPVLPFNDGVYFASTEKSNIIRGWIFGTTLDSKTQSLLIVNNATNVVIKVCEFQFCNDPFLGVYYHKNNKSWMESEFRVYSSANNCTFEYVSQPFLMDLEGKQGNFKNLREFVFKNIDGYFKIYSKHTPINLVRDLPQGFSALEPLVDLPIGINITRFQTLLALHRSYLTPGDSSSGWTAGAAAYYVGYLQPRTFLLKYNENGTITDAVDCALDPLSETKCTLKSFTVEKGIYQTSNFRVQPTESIVRFPNITNLCPFGEVFNATRFASVYAWNRKRISNCVADYSVLYNSASFSTFKCYGVSPTKLNDLCFTNVYADSFVIRGDEVRQIAPGQTGKIADYNYKLPDDFTGCVIAWNSNNLDSKVGGNYNYLYRLFRKSNLKPFERDISTEIYQAGSTPCNGVEGFNCYFPLQSYGFQPTNGVGYQPYRVVVLSFELLHAPATVCGPKKSTNLVKNKCVNFNFNGLTGTGVLTESNKKFLPFQQFGRDIADTTDAVRDPQTLEILDITPCSFGGVSVITPGTNTSNQVAVLYQDVNCTEVPVAIHADQLTPTWRVYSTGSNVFQTRAGCLIGAEHVNNSYECDIPIGAGICASYQTQTNSPRRARSVASQSIIAYTMSLGAENSVAYSNNSIAIPTNFTISVTTEILPVSMTKTSVDCTMYICGDSTECSNLLLQYGSFCTQLNRALTGIAVEQDKNTQEVFAQVKQIYKTPPIKDFGGFNFSQILPDPSKPSKRSFIEDLLFNKVTLADAGFIKQYGDCLGDIAARDLICAQKFNGLTVLPPLLTDEMIAQYTSALLAGTITSGWTFGAGAALQIPFAMQMAYRFNGIGVTQNVLYENQKLIANQFNSAIGKIQDSLSSTASALGKLQDVVNQNAQALNTLVKQLSSNFGAISSVLNDILSRLDKVEAEVQIDRLITGRLQSLQTYVTQQLIRAAEIRASANLAATKMSECVLGQSKRVDFCGKGYHLMSFPQSAPHGVVFLHVTYVPAQEKNFTTAPAICHDGKAHFPREGVFVSNGTHWFVTQRNFYEPQIITTDNTFVSGNCDVVIGIVNNTVYDPLQPELDSFKEELDKYFKNHTSPDVDLGDISGINASVVNIQKEIDRLNEVAKNLNESLIDLQELGKYEQYIKWPWYIWLGFIAGLIAIVMVTIMLCCMTSCCSCLKGCCSCGSCCKFDEDDSEPVLKGVKLHYT

SEQ ID NO: 4 - protein, 1273 aa, Artificial Sequence
  SARS-CoV-2/Guangdong/20SF028/2020__EPI_ISL_403936 spike protein (1-1273)
MFVFLVLLPLVSSQCVNLTTRTQLPPAYTNSFTRGVYYPDKVFRSSVLYSTQDLFLPFFSNVTWFHAIHVSGTNGTKRFDNPVLPFNDGVYFASTEKSNIIRGWIFGTTLDSKTQSLLIVNNATNVVIKVCEFQFCNDPFLGVYYHKNNKSWMESEFRVYSSANNCTFEYVSQPFLMDLEGKQGNFKNLREFVFKNIDGYFKIYSKHTPINLVRDLPQGFSALEPLVDLPIGINITRFQTLLALHRSYLTPGDSSSGWTAGAAAYYVGYLQPRTFLLKYNENGTITDAVDCALDPLSETKCTLKSFTVEKGIYQTSNFRVQPTESIVRFPNITNLCPFGEVFNATRFASVYAWNRKRISNCVADYSVLYNSASFSTFKCYGVSPTKLNDLCFTNVYADSFVIRGDEVRQIAPGQTGKIADYNYKLPDDFTGCVIAWNSNNLDSKVGGNYNYLYRLFRKSNLKPFERDISTEIYQAGSTPCNGVEGFNCYFPLQSYGFQPTNGVGYQPYRVVVLSFELLHAPATVCGPKKSTNLVKNKCVNFNFNGLTGTGVLTESNKKFLPFQQFGRDIADTTDAVRDPQTLEILDITPCSFGGVSVITPGTNTSNQVAVLYQDVNCTEVPVAIHADQLTPTWRVYSTGSNVFQTRAGCLIGAEHVNNSYECDIPIGAGICASYQTQTNSPRRARSVASQSIIAYTMSLGAENSVAYSNNSIAIPTNFTISVTTEILPVSMTKTSVDCTMYICGDSTECSNLLLQYGSFCTQLNRALTGIAVEQDKNTQEVFAQVKQIYKTPPIKDFGGFNFSQILPDPSKPSKRSFIEDLLFNKVTLADAGFIKQYGDCLGDIAARDLICAQKFNGLTVLPPLLTDEMIAQYTSALLAGTITSGWTFGAGAALQIPFAMQMAYRFNGIGVTQNVLYENQKLIANQFNSAIGKIQDSLSSTASALGKLQDVVNQNAQALNTLVKQLSSNFGAISSVLNDILSRLDKVEAEVQIDRLITGRLQSLQTYVTQQLIRAAEIRASANLAATKMSECVLGQSKRVDFCGKGYHLMSFPQSAPHGVVFLHVTYVPAQEKNFTTAPAICHDGKAHFPREGVFVSNGTHWFVTQRNFYEPQIITTDNTFVSGNCDVVIGIVNNTVYDPLQPELDSFKEELDKYFKNHTSPDVDLGDISGINASVVNIQKEIDRLNEVAKNLNESLIDLQELGKYEQYIKWPWYIWLGFIAGLIAIVMVTIMLCCMTSCCSCLKGCCSCGSCCKFDEDDSEPVLKGVKLHYT

SEQ ID NO: 5 - protein, 1273 aa, Artificial Sequence
  SARS-CoV-2/Shenzhen/SZTH-001/2020__EPI_ISL_406592 spike protein (1-1273)
MFVFLVLLPLVSSQCVNLTTRTQLPPAYTNSFTRGVYYPDKVFRSSVLHSTQDLFLPFFSNVTWFHAIHVSGTNGTKRFDNPVLPFNDGVYFASTEKSNIIRGWIFGTTLDSKTQSLLIVNNATNVVIKVCEFQFCNDPFLGVYYHKNNKSWMESEFRVYSSANNCTFEYVSQPFLMDLEGKQGNFKNLREFVFKNIDGYFKIYSKHTPINLVRDLPQGFSALEPLVDLPIGINITRFQTLLALHRSYLTPGDSSSGWTAGAAAYYVGYLQPRTFLLKYNENGTITDAVDCALDPLSETKCTLKSFTVEKGIYQTSNFRVQPTESIVRFPNITNLCPFGEVFNATRFASVYAWNRKRISNCVADYSVLYNSASFSTFKCYGVSPTKLNDLCFTNVYADSFVIRGDEVRQIAPGQTGKIADYNYKLPDDFTGCVIAWNSNNLDSKVGGNYNYLYRLFRKSNLKPFERDISTEIYQAGSTPCNGVEGFNCYFPLQSYGFQPTNGVGYQPYRVVVLSFELLHAPATVCGPKKSTNLVKNKCVNFNFNGLTGTGVLTESNKKFLPFQQFGRDIADTTDAVRDPQTLEILDITPCSFGGVSVITPGTNTSNQVAVLYQDVNCTEVPVAIHADQLTPTWRVYSTGSNVFQTRAGCLIGAEHVNNSYECDIPIGAGICASYQTQTNSPRRARSVASQSIIAYTMSLGAENSVAYSNNSIAIPTNFTISVTTEILPVSMTKTSVDCTMYICGDSTECSNLLLQYGSFCTQLNRALTGIAVEQDKNTQEVFAQVKQIYKTPPIKDFGGFNFSQILPDPSKPSKRSFIEDLLFNKVTLADAGFIKQYGDCLGDIAARDLICAQKFNGLTVLPPLLTDEMIAQYTSALLAGTITSGWTFGAGAALQIPFAMQMAYRFNGIGVTQNVLYENQKLIANQFNSAIGKIQDSLSSTASALGKLQDVVNQNAQALNTLVKQLSSNFGAISSVLNDILSRLDKVEAEVQIDRLITGRLQSLQTYVTQQLIRAAEIRASANLAATKMSECVLGQSKRVDFCGKGYHLMSFPQSAPHGVVFLHVTYVPAQEKNFTTAPAICHDGKAHFPREGVFVSNGTHWFVTQRNFYEPQIITTDNTFVSGNCDVLIGIVNNTVYDPLQPELDSFKEELDKYFKNHTSPDVDLGDISGINASVVNIQKEIDRLNEVAKNLNESLIDLQELGKYEQYIKWPWYIWLGFIAGLIAIVMVTIMLCCMTSCCSCLKGCCSCGSCCKFDEDDSGPVLKGVKLHYT

SEQ ID NO: 6 - protein, 1273 aa, Artificial Sequence
  SARS-CoV-2/Shenzhen/SZTH-004/2020__EPI_ISL_406595 spike protein (1-1273)
MFVFLVLLPLVSSQCVNLTTRTQLPPAYTNSFTRGVYYPDKVFRSSVLHSTQDLFLPFFSNVTWFHAIHVSGTNGTKRFDNPVLPFNDGVYFASTEKSNIIRGWIFGTTLDSKTQSLLIVNNATNVVIKVCEFQFCNDPFLGVYYHKNNKSWMESEFRVYSSANNCTFEYVSQPFLMDLEGKQGNFKNLREFVFKNIDGYFKIYSKHTPINLVRDLPQGFSALEPLVDLPIGINITRFQTLLALHRSYLTPGDSSSGWTAGAAAYYVGYLQPRTFLLKYNENGTITDAVDCALDPLSETKCTLKSFTVEKGIYQTSNFRVQPTESIVRFPNITNLCPFGEVFNATRFASVYAWDRKRISNCVAYYSVLYNSASFSTFKCYGVSPTKLNDLCFTNVYADSFVIRGDEVRQIAPGQTGKIADYNYKLPDDFTGCVIAWNSNNLDSKVGGNYNYLYRLFRKSNLKPFERDISTEIYQAGSTPCNGVEGFNCYFPLQSYGFQPTNGVGYQPYRVVVLSFELLHAPATVCGPKKSTNLVKNKCVNFNFNGLTGTGVLTESNKKFLPFQQFGRDIADTTDAVRDPQTLEILDITPCSFGGVSVITPGTNTSNQVAVLYQDVNCTEVPVAIHADQLTPTWRVYSTGSNVFQTRAGCLIGAEHVNNSYECDIPIGAGICASYQTQTNSPRRARSVASQSIIAYTMSLGAENSVAYSNNSIAIPTNFTISVTTEILPVSMTKTSVDCTMYICGDSTECSNLLLQYGSFCTQLNRALTGIAVEQDKNTQEVFAQVKQIYKTPPIKDFGGFNFSQILPDPSKPSKRSFIEDLLFNKVTLADAGFIKQYGDCLGDIAARDLICAQKFNGLTVLPPLLTDEMIAQYTSALLAGTITSGWTFGAGAALQIPFAMQMAYRFNGIGVTQNVLYENQKLIANQFNSAIGKIQDSLSSTASALGKLQDVVNQNAQALNTLVKQLSSNFGAISSVLNDILSRLDKVEAEVQIDRLITGRLQSLQTYVTQQLIRAAEIRASANLAATKMSECVLGQSKRVDFCGKGYHLMSFPQSAPHGVVFLHVTYVPAQEKNFTTAPAICHDGKAHFPREGVFVSNGTHWFVTQRNFYEPQIITTDNTFVSGNCDVVIGIVNNTVYDPLQPELDSFKEELDKYFKNHTSPDVDLGDISGINASVVNIQKEIDRLNEVAKNLNESLIDLQELGKYEQYIKWPWYIWLGFIAGLIAIVMVTIMLCCMTSCCSCLKGCCSCGSCCKFDEDDSEPVLKGVKLHYT

SEQ ID NO: 7 - protein, 1273 aa, Artificial Sequence
  SARS-CoV-2/France/IDF0372/2020__EPI_ISL_406596 spike protein (1-1273)
MFVFLVLLPLVSSQCVNLTTRTQLPPAYTNSFTRGVYYPDKVFRSSVLHSTQDLFLPFFSNVTWFHAIHVSGTNGTKRFDNPVLPFNDGVYFASTEKSNIIRGWIFGTTLDSKTQSLLIVNNATNVVIKVCEFQFCNDPFLGVYYHKNNKSWMESEFRVYSSANNCTFEYVSQPFLMDLEGKQGNFKNLREFVFKNIDGYFKIYSKHTPINLVRDLPQGFSALEPLVDLPIGINITRFQTLLALHRSYLTPGDSSSGWTAGAAAYYVGYLQPRTFLLKYNENGTITDAVDCALDPLSETKCTLKSFTVEKGIYQTSNFRVQPTESIVRFPNITNLCPFGEVFNATRFASVYAWNRKRISNCVADYSFLYNSASFSTFKCYGVSPTKLNDLCFTNVYADSFVIRGDEVRQIAPGQTGKIADYNYKLPDDFTGCVIAWNSNNLDSKVGGNYNYLYRLFRKSNLKPFERDISTEIYQAGSTPCNGVEGFNCYFPLQSYGFQPTNGVGYQPYRVVVLSFELLHAPATVCGPKKSTNLVKNKCVNFNFNGLTGTGVLTESNKKFLPFQQFGRDIADTTDAVRDPQTLEILDITPCSFGGVSVITPGTNTSNQVAVLYQDVNCTEVPVAIHADQLTPTWRVYSTGSNVFQTRAGCLIGAEHVNNSYECDIPIGAGICASYQTQTNSPRRARSVASQSIIAYTMSLGAENSVAYSNNSIAIPTNFTISVTTEILPVSMTKTSVDCTMYICGDSTECSNLLLQYGSFCTQLNRALTGIAVEQDKNTQEVFAQVKQIYKTPPIKDFGGFNFSQILPDPSKPSKRSFIEDLLFNKVTLADAGFIKQYGDCLGDIAARDLICAQKFNGLTVLPPLLTDEMIAQYTSALLAGTITSGWTFGAGAALQIPFAMQMAYRFNGIGVTQNVLYENQKLIANQFNSAIGKIQDSLSSTASALGKLQDVVNQNAQALNTLVKQLSSNFGAISSVLNDILSRLDKVEAEVQIDRLITGRLQSLQTYVTQQLIRAAEIRASANLAATKMSECVLGQSKRVDFCGKGYHLMSFPQSAPHGVVFLHVTYVPAQEKNFTTAPAICHDGKAHFPREGVFVSNGTHWFVTQRNFYEPQIITTDNTFVSGNCDVVIGIVNNTVYDPLQPELDSFKEELDKYFKNHTSPDVDLGDISGINASVVNIQKEIDRLNEVAKNLNESLIDLQELGKYEQYIKWPWYIWLGFIAGLIAIVMVTIMLCCMTSCCSCLKGCCSCGSCCKFDEDDSEPVLKGVKLHYT

SEQ ID NO: 8 - protein, 1273 aa, Artificial Sequence
  SARS-CoV-2/Australia/VIC01/2020__EPI_ISL_406844 spike protein (1-1273)
MFVFLVLLPLVSSQCVNLTTRTQLPPAYTNSFTRGVYYPDKVFRSSVLHSTQDLFLPFFSNVTWFHAIHVSGTNGTKRFDNPVLPFNDGVYFASTEKSNIIRGWIFGTTLDSKTQSLLIVNNATNVVIKVCEFQFCNDPFLGVYYHKNNKSWMESEFRVYSSANNCTFEYVSQPFLMDLEGKQGNFKNLREFVFKNIDGYFKIYSKHTPINLVRDLPQGFSALEPLVDLPIGINITRFQTLLALHRRYLTPGDSSSGWTAGAAAYYVGYLQPRTFLLKYNENGTITDAVDCALDPLSETKCTLKSFTVEKGIYQTSNFRVQPTESIVRFPNITNLCPFGEVFNATRFASVYAWNRKRISNCVADYSVLYNSASFSTFKCYGVSPTKLNDLCFTNVYADSFVIRGDEVRQIAPGQTGKIADYNYKLPDDFTGCVIAWNSNNLDSKVGGNYNYLYRLFRKSNLKPFERDISTEIYQAGSTPCNGVEGFNCYFPLQSYGFQPTNGVGYQPYRVVVLSFELLHAPATVCGPKKSTNLVKNKCVNFNFNGLTGTGVLTESNKKFLPFQQFGRDIADTTDAVRDPQTLEILDITPCSFGGVSVITPGTNTSNQVAVLYQDVNCTEVPVAIHADQLTPTWRVYSTGSNVFQTRAGCLIGAEHVNNSYECDIPIGAGICASYQTQTNSPRRARSVASQSIIAYTMSLGAENSVAYSNNSIAIPTNFTISVTTEILPVSMTKTSVDCTMYICGDSTECSNLLLQYGSFCTQLNRALTGIAVEQDKNTQEVFAQVKQIYKTPPIKDFGGFNFSQILPDPSKPSKRSFIEDLLFNKVTLADAGFIKQYGDCLGDIAARDLICAQKFNGLTVLPPLLTDEMIAQYTSALLAGTITSGWTFGAGAALQIPFAMQMAYRFNGIGVTQNVLYENQKLIANQFNSAIGKIQDSLSSTASALGKLQDVVNQNAQALNTLVKQLSSNFGAISSVLNDILSRLDKVEAEVQIDRLITGRLQSLQTYVTQQLIRAAEIRASANLAATKMSECVLGQSKRVDFCGKGYHLMSFPQSAPHGVVFLHVTYVPAQEKNFTTAPAICHDGKAHFPREGVFVSNGTHWFVTQRNFYEPQIITTDNTFVSGNCDVVIGIVNNTVYDPLQPELDSFKEELDKYFKNHTSPDVDLGDISGINASVVNIQKEIDRLNEVAKNLNESLIDLQELGKYEQYIKWPWYIWLGFIAGLIAIVMVTIMLCCMTSCCSCLKGCCSCGSCCKFDEDDSEPVLKGVKLHYT

SEQ ID NO: 9 - protein, 1273 aa, Artificial Sequence
  SARS-CoV-2/Germany/BavPat1/2020__EPI_ISL_406862 spike protein (1-1273)
MFVFLVLLPLVSSQCVNLTTRTQLPPAYTNSFTRGVYYPDKVFRSSVLHSTQDLFLPFFSNVTWFHAIHVSGTNGTKRFDNPVLPFNDGVYFASTEKSNIIRGWIFGTTLDSKTQSLLIVNNATNVVIKVCEFQFCNDPFLGVYYHKNNKSWMESEFRVYSSANNCTFEYVSQPFLMDLEGKQGNFKNLREFVFKNIDGYFKIYSKHTPINLVRDLPQGFSALEPLVDLPIGINITRFQTLLALHRSYLTPGDSSSGWTAGAAAYYVGYLQPRTFLLKYNENGTITDAVDCALDPLSETKCTLKSFTVEKGIYQTSNFRVQPTESIVRFPNITNLCPFGEVFNATRFASVYAWNRKRISNCVADYSVLYNSASFSTFKCYGVSPTKLNDLCFTNVYADSFVIRGDEVRQIAPGQTGKIADYNYKLPDDFTGCVIAWNSNNLDSKVGGNYNYLYRLFRKSNLKPFERDISTEIYQAGSTPCNGVEGFNCYFPLQSYGFQPTNGVGYQPYRVVVLSFELLHAPATVCGPKKSTNLVKNKCVNFNFNGLTGTGVLTESNKKFLPFQQFGRDIADTTDAVRDPQTLEILDITPCSFGGVSVITPGTNTSNQVAVLYQGVNCTEVPVAIHADQLTPTWRVYSTGSNVFQTRAGCLIGAEHVNNSYECDIPIGAGICASYQTQTNSPRRARSVASQSIIAYTMSLGAENSVAYSNNSIAIPTNFTISVTTEILPVSMTKTSVDCTMYICGDSTECSNLLLQYGSFCTQLNRALTGIAVEQDKNTQEVFAQVKQIYKTPPIKDFGGFNFSQILPDPSKPSKRSFIEDLLFNKVTLADAGFIKQYGDCLGDIAARDLICAQKFNGLTVLPPLLTDEMIAQYTSALLAGTITSGWTFGAGAALQIPFAMQMAYRFNGIGVTQNVLYENQKLIANQFNSAIGKIQDSLSSTASALGKLQDVVNQNAQALNTLVKQLSSNFGAISSVLNDILSRLDKVEAEVQIDRLITGRLQSLQTYVTQQLIRAAEIRASANLAATKMSECVLGQSKRVDFCGKGYHLMSFPQSAPHGVVFLHVTYVPAQEKNFTTAPAICHDGKAHFPREGVFVSNGTHWFVTQRNFYEPQIITTDNTFVSGNCDVVIGIVNNTVYDPLQPELDSFKEELDKYFKNHTSPDVDLGDISGINASVVNIQKEIDRLNEVAKNLNESLIDLQELGKYEQYIKWPWYIWLGFIAGLIAIVMVTIMLCCMTSCCSCLKGCCSCGSCCKFDEDDSEPVLKGVKLHYT

SEQ ID NO: 10 - protein, 1273 aa, Artificial Sequence
  SARS-CoV-2/Wuhan/WIV05/2019__EPI_ISL_402128 spike protein (1-1273)(K986P_V987P)
MFVFLVLLPLVSSQCVNLTTRTQLPPAYTNSFTRGVYYPDKVFRSSVLHSTQDLFLPFFSNVTWFHAIHVSGTNGTKRFDNPVLPFNDGVYFASTEKSNIIRGWIFGTTLDSKTQSLLIVNNATNVVIKVCEFQFCNDPFLGVYYHKNNKSWMESEFRVYSSANNCTFEYVSQPFLMDLEGKQGNFKNLREFVFKNIDGYFKIYSKHTPINLVRDLPQGFSALEPLVDLPIGINITRFQTLLALHRSYLTPGDSSSGWTAGAAAYYVGYLQPRTFLLKYNENGTITDAVDCALDPLSETKCTLKSFTVEKGIYQTSNFRVQPTESIVRFPNITNLCPFGEVFNATRFASVYAWNRKRISNCVADYSVLYNSASFSTFKCYGVSPTKLNDLCFTNVYADSFVIRGDEVRQIAPGQTGKIADYNYKLPDDFTGCVIAWNSNNLDSKVGGNYNYLYRLFRKSNLKPFERDISTEIYQAGSTPCNGVEGFNCYFPLQSYGFQPTNGVGYQPYRVVVLSFELLHAPATVCGPKKSTNLVKNKCVNFNFNGLTGTGVLTESNKKFLPFQQFGRDIADTTDAVRDPQTLEILDITPCSFGGVSVITPGTNTSNQVAVLYQDVNCTEVPVAIHADQLTPTWRVYSTGSNVFQTRAGCLIGAEHVNNSYECDIPIGAGICASYQTQTNSPRRARSVASQSIIAYTMSLGAENSVAYSNNSIAIPTNFTISVTTEILPVSMTKTSVDCTMYICGDSTECSNLLLQYGSFCTQLNRALTGIAVEQDKNTQEVFAQVKQIYKTPPIKDFGGFNFSQILPDPSKPSKRSFIEDLLFNKVTLADAGFIKQYGDCLGDIAARDLICAQKFNGLTVLPPLLTDEMIAQYTSALLAGTITSGWTFGAGAALQIPFAMQMAYRFNGIGVTQNVLYENQKLIANQFNSAIGKIQDSLSSTASALGKLQDVVNQNAQALNTLVKQLSSNFGAISSVLNDILSRLDPPEAEVQIDRLITGRLQSLQTYVTQQLIRAAEIRASANLAATKMSECVLGQSKRVDFCGKGYHLMSFPQSAPHGVVFLHVTYVPAQEKNFTTAPAICHDGKAHFPREGVFVSNGTHWFVTQRNFYEPQIITTDNTFVSGNCDVVIGIVNNTVYDPLQPELDSFKEELDKYFKNHTSPDVDLGDISGINASVVNIQKEIDRLNEVAKNLNESLIDLQELGKYEQYIKWPWYIWLGFIAGLIAIVMVTIMLCCMTSCCSCLKGCCSCGSCCKFDEDDSEPVLKGVKLHYT

SEQ ID NO: 11 - protein, 1269 aa, Artificial Sequence
  SARS-CoV-2/bat/Yunnan/RaTG13/2013__EPI_ISL_402131 spike protein (1-1269)(K982P_V983P)
MFVFLVLLPLVSSQCVNLTTRTQLPPAYTNSSTRGVYYPDKVFRSSVLHLTQDLFLPFFSNVTWFHAIHVSGTNGIKRFDNPVLPFNDGVYFASTEKSNIIRGWIFGTTLDSKTQSLLIVNNATNVVIKVCEFQFCNDPFLGVYYHKNNKSWMESEFRVYSSANNCTFEYVSQPFLMDLEGKQGNFKNLREFVFKNIDGYFKIYSKHTPINLVRDLPPGFSALEPLVDLPIGINITRFQTLLALHRSYLTPGDSSSGWTAGAAAYYVGYLQPRTFLLKYNENGTITDAVDCALDPLSETKCTLKSFTVEKGIYQTSNFRVQPTDSIVRFPNITNLCPFGEVFNATTFASVYAWNRKRISNCVADYSVLYNSTSFSTFKCYGVSPTKLNDLCFTNVYADSFVITGDEVRQIAPGQTGKIADYNYKLPDDFTGCVIAWNSKHIDAKEGGNFNYLYRLFRKANLKPFERDISTEIYQAGSKPCNGQTGLNCYYPLYRYGFYPTDGVGHQPYRVVVLSFELLNAPATVCGPKKSTNLVKNKCVNFNFNGLTGTGVLTESNKKFLPFQQFGRDIADTTDAVRDPQTLEILDITPCSFGGVSVITPGTNASNQVAVLYQDVNCTEVPVAIHADQLTPTWRVYSTGSNVFQTRAGCLIGAEHVNNSYECDIPIGAGICASYQTQTNSRSVASQSIIAYTMSLGAENSVAYSNNSIAIPTNFTISVTTEILPVSMTKTSVDCTMYICGDSTECSNLLLQYGSFCTQLNRALTGIAVEQDKNTQEVFAQVKQIYKTPPIKDFGGFNFSQILPDPSKPSKRSFIEDLLFNKVTLADAGFIKQYGDCLGDIAARDLICAQKFNGLTVLPPLLTDEMIAQYTSALLAGTITSGWTFGAGAALQIPFAMQMAYRFNGIGVTQNVLYENQKLIANQFNSAIGKIQDSLSSTASALGKLQDVVNQNAQALNTLVKQLSSNFGAISSVLNDILSRLDPPEAEVQIDRLITGRLQSLQTYVTQQLIRAAEIRASANLAATKMSECVLGQSKRVDFCGKGYHLMSFPQSAPHGVVFLHVTYVPAQEKNFTTAPAICHDGKAHFPREGVFVSNGTHWFVTQRNFYEPQIITTDNTFVSGSCDVVIGIVNNTVYDPLQPELDSFKEELDKYFKNHTSPDVDLGDISGINASVVNIQKEIDRLNEVAKNLNESLIDLQELGKYEQYIKWPWYIWLGFIAGLIAIIMVTIMLCCMTSCCSCLKGCCSCGSCCKFDEDDSEPVLKGVKLHYT

SEQ ID NO: 12 - protein, 1273 aa, Artificial Sequence
  SARS-CoV-2/Wuhan/HBCDC-HB-01/2019__EPI_ISL_402132 spike protein (1-1273)(K986P_V987P)
MFVFLVLLPLVSSQCVNLTTRTQLPPAYTNSITRGVYYPDKVFRSSVLHSTQDLFLPFFSNVTWFHAIHVSGTNGTKRFDNPVLPFNDGVYFASTEKSNIIRGWIFGTTLDSKTQSLLIVNNATNVVIKVCEFQFCNDPFLGVYYHKNNKSWMESEFRVYSSANNCTFEYVSQPFLMDLEGKQGNFKNLREFVFKNIDGYFKIYSKHTPINLVRDLPQGFSALEPLVDLPIGINITRFQTLLALHRSYLTPGDSSSGWTAGAAAYYVGYLQPRTFLLKYNENGTITDAVDCALDPLSETKCTLKSFTVEKGIYQTSNFRVQPTESIVRFPNITNLCPFGEVFNATRFASVYAWNRKRISNCVADYSVLYNSASFSTFKCYGVSPTKLNDLCFTNVYADSFVIRGDEVRQIAPGQTGKIADYNYKLPDDFTGCVIAWNSNNLDSKVGGNYNYLYRLFRKSNLKPFERDISTEIYQAGSTPCNGVEGFNCYFPLQSYGFQPTNGVGYQPYRVVVLSFELLHAPATVCGPKKSTNLVKNKCVNFNFNGLTGTGVLTESNKKFLPFQQFGRDIADTTDAVRDPQTLEILDITPCSFGGVSVITPGTNTSNQVAVLYQDVNCTEVPVAIHADQLTPTWRVYSTGSNVFQTRAGCLIGAEHVNNSYECDIPIGAGICASYQTQTNSPRRARSVASQSIIAYTMSLGAENSVAYSNNSIAIPTNFTISVTTEILPVSMTKTSVDCTMYICGDSTECSNLLLQYGSFCTQLNRALTGIAVEQDKNTQEVFAQVKQIYKTPPIKDFGGFNFSQILPDPSKPSKRSFIEDLLFNKVTLADAGFIKQYGDCLGDIAARDLICAQKFNGLTVLPPLLTDEMIAQYTSALLAGTITSGWTFGAGAALQIPFAMQMAYRFNGIGVTQNVLYENQKLIANQFNSAIGKIQDSLSSTASALGKLQDVVNQNAQALNTLVKQLSSNFGAISSVLNDILSRLDPPEAEVQIDRLITGRLQSLQTYVTQQLIRAAEIRASANLAATKMSECVLGQSKRVDFCGKGYHLMSFPQSAPHGVVFLHVTYVPAQEKNFTTAPAICHDGKAHFPREGVFVSNGTHWFVTQRNFYEPQIITTDNTFVSGNCDVVIGIVNNTVYDPLQPELDSFKEELDKYFKNHTSPDVDLGDISGINASVVNIQKEIDRLNEVAKNLNESLIDLQELGKYEQYIKWPWYIWLGFIAGLIAIVMVTIMLCCMTSCCSCLKGCCSCGSCCKFDEDDSEPVLKGVKLHYT

SEQ ID NO: 13 - protein, 1273 aa, Artificial Sequence
  SARS-CoV-2/Guangdong/20SF028/2020__EPI_ISL_403936 spike protein (1-1273)(K986P_V987P)
MFVFLVLLPLVSSQCVNLTTRTQLPPAYTNSFTRGVYYPDKVFRSSVLYSTQDLFLPFFSNVTWFHAIHVSGTNGTKRFDNPVLPFNDGVYFASTEKSNIIRGWIFGTTLDSKTQSLLIVNNATNVVIKVCEFQFCNDPFLGVYYHKNNKSWMESEFRVYSSANNCTFEYVSQPFLMDLEGKQGNFKNLREFVFKNIDGYFKIYSKHTPINLVRDLPQGFSALEPLVDLPIGINITRFQTLLALHRSYLTPGDSSSGWTAGAAAYYVGYLQPRTFLLKYNENGTITDAVDCALDPLSETKCTLKSFTVEKGIYQTSNFRVQPTESIVRFPNITNLCPFGEVFNATRFASVYAWNRKRISNCVADYSVLYNSASFSTFKCYGVSPTKLNDLCFTNVYADSFVIRGDEVRQIAPGQTGKIADYNYKLPDDFTGCVIAWNSNNLDSKVGGNYNYLYRLFRKSNLKPFERDISTEIYQAGSTPCNGVEGFNCYFPLQSYGFQPTNGVGYQPYRVVVLSFELLHAPATVCGPKKSTNLVKNKCVNFNFNGLTGTGVLTESNKKFLPFQQFGRDIADTTDAVRDPQTLEILDITPCSFGGVSVITPGTNTSNQVAVLYQDVNCTEVPVAIHADQLTPTWRVYSTGSNVFQTRAGCLIGAEHVNNSYECDIPIGAGICASYQTQTNSPRRARSVASQSIIAYTMSLGAENSVAYSNNSIAIPTNFTISVTTEILPVSMTKTSVDCTMYICGDSTECSNLLLQYGSFCTQLNRALTGIAVEQDKNTQEVFAQVKQIYKTPPIKDFGGFNFSQILPDPSKPSKRSFIEDLLFNKVTLADAGFIKQYGDCLGDIAARDLICAQKFNGLTVLPPLLTDEMIAQYTSALLAGTITSGWTFGAGAALQIPFAMQMAYRFNGIGVTQNVLYENQKLIANQFNSAIGKIQDSLSSTASALGKLQDVVNQNAQALNTLVKQLSSNFGAISSVLNDILSRLDPPEAEVQIDRLITGRLQSLQTYVTQQLIRAAEIRASANLAATKMSECVLGQSKRVDFCGKGYHLMSFPQSAPHGVVFLHVTYVPAQEKNFTTAPAICHDGKAHFPREGVFVSNGTHWFVTQRNFYEPQIITTDNTFVSGNCDVVIGIVNNTVYDPLQPELDSFKEELDKYFKNHTSPDVDLGDISGINASVVNIQKEIDRLNEVAKNLNESLIDLQELGKYEQYIKWPWYIWLGFIAGLIAIVMVTIMLCCMTSCCSCLKGCCSCGSCCKFDEDDSEPVLKGVKLHYT

SEQ ID NO: 14 - protein, 1273 aa, Artificial Sequence
  SARS-CoV-2/Shenzhen/SZTH-001/2020__EPI_ISL_406592 spike protein (1-1273)(K986P_V987P)
MFVFLVLLPLVSSQCVNLTTRTQLPPAYTNSFTRGVYYPDKVFRSSVLHSTQDLFLPFFSNVTWFHAIHVSGTNGTKRFDNPVLPFNDGVYFASTEKSNIIRGWIFGTTLDSKTQSLLIVNNATNVVIKVCEFQFCNDPFLGVYYHKNNKSWMESEFRVYSSANNCTFEYVSQPFLMDLEGKQGNFKNLREFVFKNIDGYFKIYSKHTPINLVRDLPQGFSALEPLVDLPIGINITRFQTLLALHRSYLTPGDSSSGWTAGAAAYYVGYLQPRTFLLKYNENGTITDAVDCALDPLSETKCTLKSFTVEKGIYQTSNFRVQPTESIVRFPNITNLCPFGEVFNATRFASVYAWNRKRISNCVADYSVLYNSASFSTFKCYGVSPTKLNDLCFTNVYADSFVIRGDEVRQIAPGQTGKIADYNYKLPDDFTGCVIAWNSNNLDSKVGGNYNYLYRLFRKSNLKPFERDISTEIYQAGSTPCNGVEGFNCYFPLQSYGFQPTNGVGYQPYRVVVLSFELLHAPATVCGPKKSTNLVKNKCVNFNFNGLTGTGVLTESNKKFLPFQQFGRDIADTTDAVRDPQTLEILDITPCSFGGVSVITPGTNTSNQVAVLYQDVNCTEVPVAIHADQLTPTWRVYSTGSNVFQTRAGCLIGAEHVNNSYECDIPIGAGICASYQTQTNSPRRARSVASQSIIAYTMSLGAENSVAYSNNSIAIPTNFTISVTTEILPVSMTKTSVDCTMYICGDSTECSNLLLQYGSFCTQLNRALTGIAVEQDKNTQEVFAQVKQIYKTPPIKDFGGFNFSQILPDPSKPSKRSFIEDLLFNKVTLADAGFIKQYGDCLGDIAARDLICAQKFNGLTVLPPLLTDEMIAQYTSALLAGTITSGWTFGAGAALQIPFAMQMAYRFNGIGVTQNVLYENQKLIANQFNSAIGKIQDSLSSTASALGKLQDVVNQNAQALNTLVKQLSSNFGAISSVLNDILSRLDPPEAEVQIDRLITGRLQSLQTYVTQQLIRAAEIRASANLAATKMSECVLGQSKRVDFCGKGYHLMSFPQSAPHGVVFLHVTYVPAQEKNFTTAPAICHDGKAHFPREGVFVSNGTHWFVTQRNFYEPQIITTDNTFVSGNCDVLIGIVNNTVYDPLQPELDSFKEELDKYFKNHTSPDVDLGDISGINASVVNIQKEIDRLNEVAKNLNESLIDLQELGKYEQYIKWPWYIWLGFIAGLIAIVMVTIMLCCMTSCCSCLKGCCSCGSCCKFDEDDSGPVLKGVKLHYT

SEQ ID NO: 15 - protein, 1273 aa, Artificial Sequence
  SARS-CoV-2/Shenzhen/SZTH-004/2020__EPI_ISL_406595 spike protein (1-1273)(K986P_V987P)
MFVFLVLLPLVSSQCVNLTTRTQLPPAYTNSFTRGVYYPDKVFRSSVLHSTQDLFLPFFSNVTWFHAIHVSGTNGTKRFDNPVLPFNDGVYFASTEKSNIIRGWIFGTTLDSKTQSLLIVNNATNVVIKVCEFQFCNDPFLGVYYHKNNKSWMESEFRVYSSANNCTFEYVSQPFLMDLEGKQGNFKNLREFVFKNIDGYFKIYSKHTPINLVRDLPQGFSALEPLVDLPIGINITRFQTLLALHRSYLTPGDSSSGWTAGAAAYYVGYLQPRTFLLKYNENGTITDAVDCALDPLSETKCTLKSFTVEKGIYQTSNFRVQPTESIVRFPNITNLCPFGEVFNATRFASVYAWDRKRISNCVAYYSVLYNSASFSTFKCYGVSPTKLNDLCFTNVYADSFVIRGDEVRQIAPGQTGKIADYNYKLPDDFTGCVIAWNSNNLDSKVGGNYNYLYRLFRKSNLKPFERDISTEIYQAGSTPCNGVEGFNCYFPLQSYGFQPTNGVGYQPYRVVVLSFELLHAPATVCGPKKSTNLVKNKCVNFNFNGLTGTGVLTESNKKFLPFQQFGRDIADTTDAVRDPQTLEILDITPCSFGGVSVITPGTNTSNQVAVLYQDVNCTEVPVAIHADQLTPTWRVYSTGSNVFQTRAGCLIGAEHVNNSYECDIPIGAGICASYQTQTNSPRRARSVASQSIIAYTMSLGAENSVAYSNNSIAIPTNFTISVTTEILPVSMTKTSVDCTMYICGDSTECSNLLLQYGSFCTQLNRALTGIAVEQDKNTQEVFAQVKQIYKTPPIKDFGGFNFSQILPDPSKPSKRSFIEDLLFNKVTLADAGFIKQYGDCLGDIAARDLICAQKFNGLTVLPPLLTDEMIAQYTSALLAGTITSGWTFGAGAALQIPFAMQMAYRFNGIGVTQNVLYENQKLIANQFNSAIGKIQDSLSSTASALGKLQDVVNQNAQALNTLVKQLSSNFGAISSVLNDILSRLDPPEAEVQIDRLITGRLQSLQTYVTQQLIRAAEIRASANLAATKMSECVLGQSKRVDFCGKGYHLMSFPQSAPHGVVFLHVTYVPAQEKNFTTAPAICHDGKAHFPREGVFVSNGTHWFVTQRNFYEPQIITTDNTFVSGNCDVVIGIVNNTVYDPLQPELDSFKEELDKYFKNHTSPDVDLGDISGINASVVNIQKEIDRLNEVAKNLNESLIDLQELGKYEQYIKWPWYIWLGFIAGLIAIVMVTIMLCCMTSCCSCLKGCCSCGSCCKFDEDDSEPVLKGVKLHYT

SEQ ID NO: 16 - protein, 1273 aa, Artificial Sequence
  SARS-CoV-2/France/IDF0372/2020__EPI_ISL_406596 spike protein (1-1273)(K986P_V987P)
MFVFLVLLPLVSSQCVNLTTRTQLPPAYTNSFTRGVYYPDKVFRSSVLHSTQDLFLPFFSNVTWFHAIHVSGTNGTKRFDNPVLPFNDGVYFASTEKSNIIRGWIFGTTLDSKTQSLLIVNNATNVVIKVCEFQFCNDPFLGVYYHKNNKSWMESEFRVYSSANNCTFEYVSQPFLMDLEGKQGNFKNLREFVFKNIDGYFKIYSKHTPINLVRDLPQGFSALEPLVDLPIGINITRFQTLLALHRSYLTPGDSSSGWTAGAAAYYVGYLQPRTFLLKYNENGTITDAVDCALDPLSETKCTLKSFTVEKGIYQTSNFRVQPTESIVRFPNITNLCPFGEVFNATRFASVYAWNRKRISNCVADYSFLYNSASFSTFKCYGVSPTKLNDLCFTNVYADSFVIRGDEVRQIAPGQTGKIADYNYKLPDDFTGCVIAWNSNNLDSKVGGNYNYLYRLFRKSNLKPFERDISTEIYQAGSTPCNGVEGFNCYFPLQSYGFQPTNGVGYQPYRVVVLSFELLHAPATVCGPKKSTNLVKNKCVNFNFNGLTGTGVLTESNKKFLPFQQFGRDIADTTDAVRDPQTLEILDITPCSFGGVSVITPGTNTSNQVAVLYQDVNCTEVPVAIHADQLTPTWRVYSTGSNVFQTRAGCLIGAEHVNNSYECDIPIGAGICASYQTQTNSPRRARSVASQSIIAYTMSLGAENSVAYSNNSIAIPTNFTISVTTEILPVSMTKTSVDCTMYICGDSTECSNLLLQYGSFCTQLNRALTGIAVEQDKNTQEVFAQVKQIYKTPPIKDFGGFNFSQILPDPSKPSKRSFIEDLLFNKVTLADAGFIKQYGDCLGDIAARDLICAQKFNGLTVLPPLLTDEMIAQYTSALLAGTITSGWTFGAGAALQIPFAMQMAYRFNGIGVTQNVLYENQKLIANQFNSAIGKIQDSLSSTASALGKLQDVVNQNAQALNTLVKQLSSNFGAISSVLNDILSRLDPPEAEVQIDRLITGRLQSLQTYVTQQLIRAAEIRASANLAATKMSECVLGQSKRVDFCGKGYHLMSFPQSAPHGVVFLHVTYVPAQEKNFTTAPAICHDGKAHFPREGVFVSNGTHWFVTQRNFYEPQIITTDNTFVSGNCDVVIGIVNNTVYDPLQPELDSFKEELDKYFKNHTSPDVDLGDISGINASVVNIQKEIDRLNEVAKNLNESLIDLQELGKYEQYIKWPWYIWLGFIAGLIAIVMVTIMLCCMTSCCSCLKGCCSCGSCCKFDEDDSEPVLKGVKLHYT

SEQ ID NO: 17 - protein, 1273 aa, Artificial Sequence
  SARS-CoV-2/Australia/VIC01/2020__EPI_ISL_406844 spike protein (1-1273)(K986P_V987P)
MFVFLVLLPLVSSQCVNLTTRTQLPPAYTNSFTRGVYYPDKVFRSSVLHSTQDLFLPFFSNVTWFHAIHVSGTNGTKRFDNPVLPFNDGVYFASTEKSNIIRGWIFGTTLDSKTQSLLIVNNATNVVIKVCEFQFCNDPFLGVYYHKNNKSWMESEFRVYSSANNCTFEYVSQPFLMDLEGKQGNFKNLREFVFKNIDGYFKIYSKHTPINLVRDLPQGFSALEPLVDLPIGINITRFQTLLALHRRYLTPGDSSSGWTAGAAAYYVGYLQPRTFLLKYNENGTITDAVDCALDPLSETKCTLKSFTVEKGIYQTSNFRVQPTESIVRFPNITNLCPFGEVFNATRFASVYAWNRKRISNCVADYSVLYNSASFSTFKCYGVSPTKLNDLCFTNVYADSFVIRGDEVRQIAPGQTGKIADYNYKLPDDFTGCVIAWNSNNLDSKVGGNYNYLYRLFRKSNLKPFERDISTEIYQAGSTPCNGVEGFNCYFPLQSYGFQPTNGVGYQPYRVVVLSFELLHAPATVCGPKKSTNLVKNKCVNFNFNGLTGTGVLTESNKKFLPFQQFGRDIADTTDAVRDPQTLEILDITPCSFGGVSVITPGTNTSNQVAVLYQDVNCTEVPVAIHADQLTPTWRVYSTGSNVFQTRAGCLIGAEHVNNSYECDIPIGAGICASYQTQTNSPRRARSVASQSIIAYTMSLGAENSVAYSNNSIAIPTNFTISVTTEILPVSMTKTSVDCTMYICGDSTECSNLLLQYGSFCTQLNRALTGIAVEQDKNTQEVFAQVKQIYKTPPIKDFGGFNFSQILPDPSKPSKRSFIEDLLFNKVTLADAGFIKQYGDCLGDIAARDLICAQKFNGLTVLPPLLTDEMIAQYTSALLAGTITSGWTFGAGAALQIPFAMQMAYRFNGIGVTQNVLYENQKLIANQFNSAIGKIQDSLSSTASALGKLQDVVNQNAQALNTLVKQLSSNFGAISSVLNDILSRLDPPEAEVQIDRLITGRLQSLQTYVTQQLIRAAEIRASANLAATKMSECVLGQSKRVDFCGKGYHLMSFPQSAPHGVVFLHVTYVPAQEKNFTTAPAICHDGKAHFPREGVFVSNGTHWFVTQRNFYEPQIITTDNTFVSGNCDVVIGIVNNTVYDPLQPELDSFKEELDKYFKNHTSPDVDLGDISGINASVVNIQKEIDRLNEVAKNLNESLIDLQELGKYEQYIKWPWYIWLGFIAGLIAIVMVTIMLCCMTSCCSCLKGCCSCGSCCKFDEDDSEPVLKGVKLHYT

SEQ ID NO: 18 - protein, 1273 aa, Artificial Sequence
  SARS-CoV-2/Germany/BavPat1/2020__EPI_ISL_406862 spike protein (1-1273)(K986P_V987P)
MFVFLVLLPLVSSQCVNLTTRTQLPPAYTNSFTRGVYYPDKVFRSSVLHSTQDLFLPFFSNVTWFHAIHVSGTNGTKRFDNPVLPFNDGVYFASTEKSNIIRGWIFGTTLDSKTQSLLIVNNATNVVIKVCEFQFCNDPFLGVYYHKNNKSWMESEFRVYSSANNCTFEYVSQPFLMDLEGKQGNFKNLREFVFKNIDGYFKIYSKHTPINLVRDLPQGFSALEPLVDLPIGINITRFQTLLALHRSYLTPGDSSSGWTAGAAAYYVGYLQPRTFLLKYNENGTITDAVDCALDPLSETKCTLKSFTVEKGIYQTSNFRVQPTESIVRFPNITNLCPFGEVFNATRFASVYAWNRKRISNCVADYSVLYNSASFSTFKCYGVSPTKLNDLCFTNVYADSFVIRGDEVRQIAPGQTGKIADYNYKLPDDFTGCVIAWNSNNLDSKVGGNYNYLYRLFRKSNLKPFERDISTEIYQAGSTPCNGVEGFNCYFPLQSYGFQPTNGVGYQPYRVVVLSFELLHAPATVCGPKKSTNLVKNKCVNFNFNGLTGTGVLTESNKKFLPFQQFGRDIADTTDAVRDPQTLEILDITPCSFGGVSVITPGTNTSNQVAVLYQGVNCTEVPVAIHADQLTPTWRVYSTGSNVFQTRAGCLIGAEHVNNSYECDIPIGAGICASYQTQTNSPRRARSVASQSIIAYTMSLGAENSVAYSNNSIAIPTNFTISVTTEILPVSMTKTSVDCTMYICGDSTECSNLLLQYGSFCTQLNRALTGIAVEQDKNTQEVFAQVKQIYKTPPIKDFGGFNFSQILPDPSKPSKRSFIEDLLFNKVTLADAGFIKQYGDCLGDIAARDLICAQKFNGLTVLPPLLTDEMIAQYTSALLAGTITSGWTFGAGAALQIPFAMQMAYRFNGIGVTQNVLYENQKLIANQFNSAIGKIQDSLSSTASALGKLQDVVNQNAQALNTLVKQLSSNFGAISSVLNDILSRLDPPEAEVQIDRLITGRLQSLQTYVTQQLIRAAEIRASANLAATKMSECVLGQSKRVDFCGKGYHLMSFPQSAPHGVVFLHVTYVPAQEKNFTTAPAICHDGKAHFPREGVFVSNGTHWFVTQRNFYEPQIITTDNTFVSGNCDVVIGIVNNTVYDPLQPELDSFKEELDKYFKNHTSPDVDLGDISGINASVVNIQKEIDRLNEVAKNLNESLIDLQELGKYEQYIKWPWYIWLGFIAGLIAIVMVTIMLCCMTSCCSCLKGCCSCGSCCKFDEDDSEPVLKGVKLHYT

SEQ ID NO: 19 - protein, 1273 aa, Artificial Sequence
  SARS-CoV-2/Wuhan/WIV05/2019__EPI_ISL_402128 spike protein (1-1273)(I712C_T1077C)
MFVFLVLLPLVSSQCVNLTTRTQLPPAYTNSFTRGVYYPDKVFRSSVLHSTQDLFLPFFSNVTWFHAIHVSGTNGTKRFDNPVLPFNDGVYFASTEKSNIIRGWIFGTTLDSKTQSLLIVNNATNVVIKVCEFQFCNDPFLGVYYHKNNKSWMESEFRVYSSANNCTFEYVSQPFLMDLEGKQGNFKNLREFVFKNIDGYFKIYSKHTPINLVRDLPQGFSALEPLVDLPIGINITRFQTLLALHRSYLTPGDSSSGWTAGAAAYYVGYLQPRTFLLKYNENGTITDAVDCALDPLSETKCTLKSFTVEKGIYQTSNFRVQPTESIVRFPNITNLCPFGEVFNATRFASVYAWNRKRISNCVADYSVLYNSASFSTFKCYGVSPTKLNDLCFTNVYADSFVIRGDEVRQIAPGQTGKIADYNYKLPDDFTGCVIAWNSNNLDSKVGGNYNYLYRLFRKSNLKPFERDISTEIYQAGSTPCNGVEGFNCYFPLQSYGFQPTNGVGYQPYRVVVLSFELLHAPATVCGPKKSTNLVKNKCVNFNFNGLTGTGVLTESNKKFLPFQQFGRDIADTTDAVRDPQTLEILDITPCSFGGVSVITPGTNTSNQVAVLYQDVNCTEVPVAIHADQLTPTWRVYSTGSNVFQTRAGCLIGAEHVNNSYECDIPIGAGICASYQTQTNSPRRARSVASQSIIAYTMSLGAENSVAYSNNSCAIPTNFTISVTTEILPVSMTKTSVDCTMYICGDSTECSNLLLQYGSFCTQLNRALTGIAVEQDKNTQEVFAQVKQIYKTPPIKDFGGFNFSQILPDPSKPSKRSFIEDLLFNKVTLADAGFIKQYGDCLGDIAARDLICAQKFNGLTVLPPLLTDEMIAQYTSALLAGTITSGWTFGAGAALQIPFAMQMAYRFNGIGVTQNVLYENQKLIANQFNSAIGKIQDSLSSTASALGKLQDVVNQNAQALNTLVKQLSSNFGAISSVLNDILSRLDKVEAEVQIDRLITGRLQSLQTYVTQQLIRAAEIRASANLAATKMSECVLGQSKRVDFCGKGYHLMSFPQSAPHGVVFLHVTYVPAQEKNFTCAPAICHDGKAHFPREGVFVSNGTHWFVTQRNFYEPQIITTDNTFVSGNCDVVIGIVNNTVYDPLQPELDSFKEELDKYFKNHTSPDVDLGDISGINASVVNIQKEIDRLNEVAKNLNESLIDLQELGKYEQYIKWPWYIWLGFIAGLIAIVMVTIMLCCMTSCCSCLKGCCSCGSCCKFDEDDSEPVLKGVKLHYT

SEQ ID NO: 20 - protein, 1273 aa, Artificial Sequence
  SARS-CoV-2/Wuhan/WIV05/2019__EPI_ISL_402128 spike protein (1-1273)(I714C_Y1110C)
MFVFLVLLPLVSSQCVNLTTRTQLPPAYTNSFTRGVYYPDKVFRSSVLHSTQDLFLPFFSNVTWFHAIHVSGTNGTKRFDNPVLPFNDGVYFASTEKSNIIRGWIFGTTLDSKTQSLLIVNNATNVVIKVCEFQFCNDPFLGVYYHKNNKSWMESEFRVYSSANNCTFEYVSQPFLMDLEGKQGNFKNLREFVFKNIDGYFKIYSKHTPINLVRDLPQGFSALEPLVDLPIGINITRFQTLLALHRSYLTPGDSSSGWTAGAAAYYVGYLQPRTFLLKYNENGTITDAVDCALDPLSETKCTLKSFTVEKGIYQTSNFRVQPTESIVRFPNITNLCPFGEVFNATRFASVYAWNRKRISNCVADYSVLYNSASFSTFKCYGVSPTKLNDLCFTNVYADSFVIRGDEVRQIAPGQTGKIADYNYKLPDDFTGCVIAWNSNNLDSKVGGNYNYLYRLFRKSNLKPFERDISTEIYQAGSTPCNGVEGFNCYFPLQSYGFQPTNGVGYQPYRVVVLSFELLHAPATVCGPKKSTNLVKNKCVNFNFNGLTGTGVLTESNKKFLPFQQFGRDIADTTDAVRDPQTLEILDITPCSFGGVSVITPGTNTSNQVAVLYQDVNCTEVPVAIHADQLTPTWRVYSTGSNVFQTRAGCLIGAEHVNNSYECDIPIGAGICASYQTQTNSPRRARSVASQSIIAYTMSLGAENSVAYSNNSIACPTNFTISVTTEILPVSMTKTSVDCTMYICGDSTECSNLLLQYGSFCTQLNRALTGIAVEQDKNTQEVFAQVKQIYKTPPIKDFGGFNFSQILPDPSKPSKRSFIEDLLFNKVTLADAGFIKQYGDCLGDIAARDLICAQKFNGLTVLPPLLTDEMIAQYTSALLAGTITSGWTFGAGAALQIPFAMQMAYRFNGIGVTQNVLYENQKLIANQFNSAIGKIQDSLSSTASALGKLQDVVNQNAQALNTLVKQLSSNFGAISSVLNDILSRLDKVEAEVQIDRLITGRLQSLQTYVTQQLIRAAEIRASANLAATKMSECVLGQSKRVDFCGKGYHLMSFPQSAPHGVVFLHVTYVPAQEKNFTTAPAICHDGKAHFPREGVFVSNGTHWFVTQRNFCEPQIITTDNTFVSGNCDVVIGIVNNTVYDPLQPELDSFKEELDKYFKNHTSPDVDLGDISGINASVVNIQKEIDRLNEVAKNLNESLIDLQELGKYEQYIKWPWYIWLGFIAGLIAIVMVTIMLCCMTSCCSCLKGCCSCGSCCKFDEDDSEPVLKGVKLHYT

SEQ ID NO: 21 - protein, 1273 aa, Artificial Sequence
  SARS-CoV-2/Wuhan/WIV05/2019__EPI_ISL_402128 spike protein (1-1273)(P715C_P1069C)
MFVFLVLLPLVSSQCVNLTTRTQLPPAYTNSFTRGVYYPDKVFRSSVLHSTQDLFLPFFSNVTWFHAIHVSGTNGTKRFDNPVLPFNDGVYFASTEKSNIIRGWIFGTTLDSKTQSLLIVNNATNVVIKVCEFQFCNDPFLGVYYHKNNKSWMESEFRVYSSANNCTFEYVSQPFLMDLEGKQGNFKNLREFVFKNIDGYFKIYSKHTPINLVRDLPQGFSALEPLVDLPIGINITRFQTLLALHRSYLTPGDSSSGWTAGAAAYYVGYLQPRTFLLKYNENGTITDAVDCALDPLSETKCTLKSFTVEKGIYQTSNFRVQPTESIVRFPNITNLCPFGEVFNATRFASVYAWNRKRISNCVADYSVLYNSASFSTFKCYGVSPTKLNDLCFTNVYADSFVIRGDEVRQIAPGQTGKIADYNYKLPDDFTGCVIAWNSNNLDSKVGGNYNYLYRLFRKSNLKPFERDISTEIYQAGSTPCNGVEGFNCYFPLQSYGFQPTNGVGYQPYRVVVLSFELLHAPATVCGPKKSTNLVKNKCVNFNFNGLTGTGVLTESNKKFLPFQQFGRDIADTTDAVRDPQTLEILDITPCSFGGVSVITPGTNTSNQVAVLYQDVNCTEVPVAIHADQLTPTWRVYSTGSNVFQTRAGCLIGAEHVNNSYECDIPIGAGICASYQTQTNSPRRARSVASQSIIAYTMSLGAENSVAYSNNSIAICTNFTISVTTEILPVSMTKTSVDCTMYICGDSTECSNLLLQYGSFCTQLNRALTGIAVEQDKNTQEVFAQVKQIYKTPPIKDFGGFNFSQILPDPSKPSKRSFIEDLLFNKVTLADAGFIKQYGDCLGDIAARDLICAQKFNGLTVLPPLLTDEMIAQYTSALLAGTITSGWTFGAGAALQIPFAMQMAYRFNGIGVTQNVLYENQKLIANQFNSAIGKIQDSLSSTASALGKLQDVVNQNAQALNTLVKQLSSNFGAISSVLNDILSRLDKVEAEVQIDRLITGRLQSLQTYVTQQLIRAAEIRASANLAATKMSECVLGQSKRVDFCGKGYHLMSFPQSAPHGVVFLHVTYVCAQEKNFTTAPAICHDGKAHFPREGVFVSNGTHWFVTQRNFYEPQIITTDNTFVSGNCDVVIGIVNNTVYDPLQPELDSFKEELDKYFKNHTSPDVDLGDISGINASVVNIQKEIDRLNEVAKNLNESLIDLQELGKYEQYIKWPWYIWLGFIAGLIAIVMVTIMLCCMTSCCSCLKGCCSCGSCCKFDEDDSEPVLKGVKLHYT

SEQ ID NO: 22 - protein, 1273 aa, Artificial Sequence
  SARS-CoV-2/Wuhan/WIV05/2019__EPI_ISL_402128 spike protein (1-1273)(G889C_L1034C)
MFVFLVLLPLVSSQCVNLTTRTQLPPAYTNSFTRGVYYPDKVFRSSVLHSTQDLFLPFFSNVTWFHAIHVSGTNGTKRFDNPVLPFNDGVYFASTEKSNIIRGWIFGTTLDSKTQSLLIVNNATNVVIKVCEFQFCNDPFLGVYYHKNNKSWMESEFRVYSSANNCTFEYVSQPFLMDLEGKQGNFKNLREFVFKNIDGYFKIYSKHTPINLVRDLPQGFSALEPLVDLPIGINITRFQTLLALHRSYLTPGDSSSGWTAGAAAYYVGYLQPRTFLLKYNENGTITDAVDCALDPLSETKCTLKSFTVEKGIYQTSNFRVQPTESIVRFPNITNLCPFGEVFNATRFASVYAWNRKRISNCVADYSVLYNSASFSTFKCYGVSPTKLNDLCFTNVYADSFVIRGDEVRQIAPGQTGKIADYNYKLPDDFTGCVIAWNSNNLDSKVGGNYNYLYRLFRKSNLKPFERDISTEIYQAGSTPCNGVEGFNCYFPLQSYGFQPTNGVGYQPYRVVVLSFELLHAPATVCGPKKSTNLVKNKCVNFNFNGLTGTGVLTESNKKFLPFQQFGRDIADTTDAVRDPQTLEILDITPCSFGGVSVITPGTNTSNQVAVLYQDVNCTEVPVAIHADQLTPTWRVYSTGSNVFQTRAGCLIGAEHVNNSYECDIPIGAGICASYQTQTNSPRRARSVASQSIIAYTMSLGAENSVAYSNNSIAIPTNFTISVTTEILPVSMTKTSVDCTMYICGDSTECSNLLLQYGSFCTQLNRALTGIAVEQDKNTQEVFAQVKQIYKTPPIKDFGGFNFSQILPDPSKPSKRSFIEDLLFNKVTLADAGFIKQYGDCLGDIAARDLICAQKFNGLTVLPPLLTDEMIAQYTSALLAGTITSGWTFCAGAALQIPFAMQMAYRFNGIGVTQNVLYENQKLIANQFNSAIGKIQDSLSSTASALGKLQDVVNQNAQALNTLVKQLSSNFGAISSVLNDILSRLDKVEAEVQIDRLITGRLQSLQTYVTQQLIRAAEIRASANLAATKMSECVCGQSKRVDFCGKGYHLMSFPQSAPHGVVFLHVTYVPAQEKNFTTAPAICHDGKAHFPREGVFVSNGTHWFVTQRNFYEPQIITTDNTFVSGNCDVVIGIVNNTVYDPLQPELDSFKEELDKYFKNHTSPDVDLGDISGINASVVNIQKEIDRLNEVAKNLNESLIDLQELGKYEQYIKWPWYIWLGFIAGLIAIVMVTIMLCCMTSCCSCLKGCCSCGSCCKFDEDDSEPVLKGVKLHYT

SEQ ID NO: 23 - protein, 1273 aa, Artificial Sequence
  SARS-CoV-2/Wuhan/WIV05/2019__EPI_ISL_402128 spike protein (1-1273)(I909C_Y1047C)
MFVFLVLLPLVSSQCVNLTTRTQLPPAYTNSFTRGVYYPDKVFRSSVLHSTQDLFLPFFSNVTWFHAIHVSGTNGTKRFDNPVLPFNDGVYFASTEKSNIIRGWIFGTTLDSKTQSLLIVNNATNVVIKVCEFQFCNDPFLGVYYHKNNKSWMESEFRVYSSANNCTFEYVSQPFLMDLEGKQGNFKNLREFVFKNIDGYFKIYSKHTPINLVRDLPQGFSALEPLVDLPIGINITRFQTLLALHRSYLTPGDSSSGWTAGAAAYYVGYLQPRTFLLKYNENGTITDAVDCALDPLSETKCTLKSFTVEKGIYQTSNFRVQPTESIVRFPNITNLCPFGEVFNATRFASVYAWNRKRISNCVADYSVLYNSASFSTFKCYGVSPTKLNDLCFTNVYADSFVIRGDEVRQIAPGQTGKIADYNYKLPDDFTGCVIAWNSNNLDSKVGGNYNYLYRLFRKSNLKPFERDISTEIYQAGSTPCNGVEGFNCYFPLQSYGFQPTNGVGYQPYRVVVLSFELLHAPATVCGPKKSTNLVKNKCVNFNFNGLTGTGVLTESNKKFLPFQQFGRDIADTTDAVRDPQTLEILDITPCSFGGVSVITPGTNTSNQVAVLYQDVNCTEVPVAIHADQLTPTWRVYSTGSNVFQTRAGCLIGAEHVNNSYECDIPIGAGICASYQTQTNSPRRARSVASQSIIAYTMSLGAENSVAYSNNSIAIPTNFTISVTTEILPVSMTKTSVDCTMYICGDSTECSNLLLQYGSFCTQLNRALTGIAVEQDKNTQEVFAQVKQIYKTPPIKDFGGFNFSQILPDPSKPSKRSFIEDLLFNKVTLADAGFIKQYGDCLGDIAARDLICAQKFNGLTVLPPLLTDEMIAQYTSALLAGTITSGWTFGAGAALQIPFAMQMAYRFNGCGVTQNVLYENQKLIANQFNSAIGKIQDSLSSTASALGKLQDVVNQNAQALNTLVKQLSSNFGAISSVLNDILSRLDKVEAEVQIDRLITGRLQSLQTYVTQQLIRAAEIRASANLAATKMSECVLGQSKRVDFCGKGCHLMSFPQSAPHGVVFLHVTYVPAQEKNFTTAPAICHDGKAHFPREGVFVSNGTHWFVTQRNFYEPQIITTDNTFVSGNCDVVIGIVNNTVYDPLQPELDSFKEELDKYFKNHTSPDVDLGDISGINASVVNIQKEIDRLNEVAKNLNESLIDLQELGKYEQYIKWPWYIWLGFIAGLIAIVMVTIMLCCMTSCCSCLKGCCSCGSCCKFDEDDSEPVLKGVKLHYT

SEQ ID NO: 24 - protein, 1273 aa, Artificial Sequence
  SARS-CoV-2/Wuhan/WIV05/2019__EPI_ISL_402128 spike protein (1-1273)(Q965C_S1003C)
MFVFLVLLPLVSSQCVNLTTRTQLPPAYTNSFTRGVYYPDKVFRSSVLHSTQDLFLPFFSNVTWFHAIHVSGTNGTKRFDNPVLPFNDGVYFASTEKSNIIRGWIFGTTLDSKTQSLLIVNNATNVVIKVCEFQFCNDPFLGVYYHKNNKSWMESEFRVYSSANNCTFEYVSQPFLMDLEGKQGNFKNLREFVFKNIDGYFKIYSKHTPINLVRDLPQGFSALEPLVDLPIGINITRFQTLLALHRSYLTPGDSSSGWTAGAAAYYVGYLQPRTFLLKYNENGTITDAVDCALDPLSETKCTLKSFTVEKGIYQTSNFRVQPTESIVRFPNITNLCPFGEVFNATRFASVYAWNRKRISNCVADYSVLYNSASFSTFKCYGVSPTKLNDLCFTNVYADSFVIRGDEVRQIAPGQTGKIADYNYKLPDDFTGCVIAWNSNNLDSKVGGNYNYLYRLFRKSNLKPFERDISTEIYQAGSTPCNGVEGFNCYFPLQSYGFQPTNGVGYQPYRVVVLSFELLHAPATVCGPKKSTNLVKNKCVNFNFNGLTGTGVLTESNKKFLPFQQFGRDIADTTDAVRDPQTLEILDITPCSFGGVSVITPGTNTSNQVAVLYQDVNCTEVPVAIHADQLTPTWRVYSTGSNVFQTRAGCLIGAEHVNNSYECDIPIGAGICASYQTQTNSPRRARSVASQSIIAYTMSLGAENSVAYSNNSIAIPTNFTISVTTEILPVSMTKTSVDCTMYICGDSTECSNLLLQYGSFCTQLNRALTGIAVEQDKNTQEVFAQVKQIYKTPPIKDFGGFNFSQILPDPSKPSKRSFIEDLLFNKVTLADAGFIKQYGDCLGDIAARDLICAQKFNGLTVLPPLLTDEMIAQYTSALLAGTITSGWTFGAGAALQIPFAMQMAYRFNGIGVTQNVLYENQKLIANQFNSAIGKIQDSLSSTASALGKLQDVVNQNAQALNTLVKCLSSNFGAISSVLNDILSRLDKVEAEVQIDRLITGRLQCLQTYVTQQLIRAAEIRASANLAATKMSECVLGQSKRVDFCGKGYHLMSFPQSAPHGVVFLHVTYVPAQEKNFTTAPAICHDGKAHFPREGVFVSNGTHWFVTQRNFYEPQIITTDNTFVSGNCDVVIGIVNNTVYDPLQPELDSFKEELDKYFKNHTSPDVDLGDISGINASVVNIQKEIDRLNEVAKNLNESLIDLQELGKYEQYIKWPWYIWLGFIAGLIAIVMVTIMLCCMTSCCSCLKGCCSCGSCCKFDEDDSEPVLKGVKLHYT

SEQ ID NO: 25 - protein, 1273 aa, Artificial Sequence
  SARS-CoV-2/Wuhan/WIV05/2019__EPI_ISL_402128 spike protein (1-1273)(F970C_G999C)
MFVFLVLLPLVSSQCVNLTTRTQLPPAYTNSFTRGVYYPDKVFRSSVLHSTQDLFLPFFSNVTWFHAIHVSGTNGTKRFDNPVLPFNDGVYFASTEKSNIIRGWIFGTTLDSKTQSLLIVNNATNVVIKVCEFQFCNDPFLGVYYHKNNKSWMESEFRVYSSANNCTFEYVSQPFLMDLEGKQGNFKNLREFVFKNIDGYFKIYSKHTPINLVRDLPQGFSALEPLVDLPIGINITRFQTLLALHRSYLTPGDSSSGWTAGAAAYYVGYLQPRTFLLKYNENGTITDAVDCALDPLSETKCTLKSFTVEKGIYQTSNFRVQPTESIVRFPNITNLCPFGEVFNATRFASVYAWNRKRISNCVADYSVLYNSASFSTFKCYGVSPTKLNDLCFTNVYADSFVIRGDEVRQIAPGQTGKIADYNYKLPDDFTGCVIAWNSNNLDSKVGGNYNYLYRLFRKSNLKPFERDISTEIYQAGSTPCNGVEGFNCYFPLQSYGFQPTNGVGYQPYRVVVLSFELLHAPATVCGPKKSTNLVKNKCVNFNFNGLTGTGVLTESNKKFLPFQQFGRDIADTTDAVRDPQTLEILDITPCSFGGVSVITPGTNTSNQVAVLYQDVNCTEVPVAIHADQLTPTWRVYSTGSNVFQTRAGCLIGAEHVNNSYECDIPIGAGICASYQTQTNSPRRARSVASQSIIAYTMSLGAENSVAYSNNSIAIPTNFTISVTTEILPVSMTKTSVDCTMYICGDSTECSNLLLQYGSFCTQLNRALTGIAVEQDKNTQEVFAQVKQIYKTPPIKDFGGFNFSQILPDPSKPSKRSFIEDLLFNKVTLADAGFIKQYGDCLGDIAARDLICAQKFNGLTVLPPLLTDEMIAQYTSALLAGTITSGWTFGAGAALQIPFAMQMAYRFNGIGVTQNVLYENQKLIANQFNSAIGKIQDSLSSTASALGKLQDVVNQNAQALNTLVKQLSSNCGAISSVLNDILSRLDKVEAEVQIDRLITCRLQSLQTYVTQQLIRAAEIRASANLAATKMSECVLGQSKRVDFCGKGYHLMSFPQSAPHGVVFLHVTYVPAQEKNFTTAPAICHDGKAHFPREGVFVSNGTHWFVTQRNFYEPQIITTDNTFVSGNCDVVIGIVNNTVYDPLQPELDSFKEELDKYFKNHTSPDVDLGDISGINASVVNIQKEIDRLNEVAKNLNESLIDLQELGKYEQYIKWPWYIWLGFIAGLIAIVMVTIMLCCMTSCCSCLKGCCSCGSCCKFDEDDSEPVLKGVKLHYT

SEQ ID NO: 26 - protein, 1273 aa, Artificial Sequence
  SARS-CoV-2/Wuhan/WIV05/2019__EPI_ISL_402128 spike protein (1-1273)(A972C_R995C)
MFVFLVLLPLVSSQCVNLTTRTQLPPAYTNSFTRGVYYPDKVFRSSVLHSTQDLFLPFFSNVTWFHAIHVSGTNGTKRFDNPVLPFNDGVYFASTEKSNIIRGWIFGTTLDSKTQSLLIVNNATNVVIKVCEFQFCNDPFLGVYYHKNNKSWMESEFRVYSSANNCTFEYVSQPFLMDLEGKQGNFKNLREFVFKNIDGYFKIYSKHTPINLVRDLPQGFSALEPLVDLPIGINITRFQTLLALHRSYLTPGDSSSGWTAGAAAYYVGYLQPRTFLLKYNENGTITDAVDCALDPLSETKCTLKSFTVEKGIYQTSNFRVQPTESIVRFPNITNLCPFGEVFNATRFASVYAWNRKRISNCVADYSVLYNSASFSTFKCYGVSPTKLNDLCFTNVYADSFVIRGDEVRQIAPGQTGKIADYNYKLPDDFTGCVIAWNSNNLDSKVGGNYNYLYRLFRKSNLKPFERDISTEIYQAGSTPCNGVEGFNCYFPLQSYGFQPTNGVGYQPYRVVVLSFELLHAPATVCGPKKSTNLVKNKCVNFNFNGLTGTGVLTESNKKFLPFQQFGRDIADTTDAVRDPQTLEILDITPCSFGGVSVITPGTNTSNQVAVLYQDVNCTEVPVAIHADQLTPTWRVYSTGSNVFQTRAGCLIGAEHVNNSYECDIPIGAGICASYQTQTNSPRRARSVASQSIIAYTMSLGAENSVAYSNNSIAIPTNFTISVTTEILPVSMTKTSVDCTMYICGDSTECSNLLLQYGSFCTQLNRALTGIAVEQDKNTQEVFAQVKQIYKTPPIKDFGGFNFSQILPDPSKPSKRSFIEDLLFNKVTLADAGFIKQYGDCLGDIAARDLICAQKFNGLTVLPPLLTDEMIAQYTSALLAGTITSGWTFGAGAALQIPFAMQMAYRFNGIGVTQNVLYENQKLIANQFNSAIGKIQDSLSSTASALGKLQDVVNQNAQALNTLVKQLSSNFGCISSVLNDILSRLDKVEAEVQIDCLITGRLQSLQTYVTQQLIRAAEIRASANLAATKMSECVLGQSKRVDFCGKGYHLMSFPQSAPHGVVFLHVTYVPAQEKNFTTAPAICHDGKAHFPREGVFVSNGTHWFVTQRNFYEPQIITTDNTFVSGNCDVVIGIVNNTVYDPLQPELDSFKEELDKYFKNHTSPDVDLGDISGINASVVNIQKEIDRLNEVAKNLNESLIDLQELGKYEQYIKWPWYIWLGFIAGLIAIVMVTIMLCCMTSCCSCLKGCCSCGSCCKFDEDDSEPVLKGVKLHYT

SEQ ID NO: 27 - protein, 681 aa, Artificial Sequence
  SARS-CoV-2/Wuhan/WIV05/2019__EPI_ISL_402128 spike protein (1-681)
MFVFLVLLPLVSSQCVNLTTRTQLPPAYTNSFTRGVYYPDKVFRSSVLHSTQDLFLPFFSNVTWFHAIHVSGTNGTKRFDNPVLPFNDGVYFASTEKSNIIRGWIFGTTLDSKTQSLLIVNNATNVVIKVCEFQFCNDPFLGVYYHKNNKSWMESEFRVYSSANNCTFEYVSQPFLMDLEGKQGNFKNLREFVFKNIDGYFKIYSKHTPINLVRDLPQGFSALEPLVDLPIGINITRFQTLLALHRSYLTPGDSSSGWTAGAAAYYVGYLQPRTFLLKYNENGTITDAVDCALDPLSETKCTLKSFTVEKGIYQTSNFRVQPTESIVRFPNITNLCPFGEVFNATRFASVYAWNRKRISNCVADYSVLYNSASFSTFKCYGVSPTKLNDLCFTNVYADSFVIRGDEVRQIAPGQTGKIADYNYKLPDDFTGCVIAWNSNNLDSKVGGNYNYLYRLFRKSNLKPFERDISTEIYQAGSTPCNGVEGFNCYFPLQSYGFQPTNGVGYQPYRVVVLSFELLHAPATVCGPKKSTNLVKNKCVNFNFNGLTGTGVLTESNKKFLPFQQFGRDIADTTDAVRDPQTLEILDITPCSFGGVSVITPGTNTSNQVAVLYQDVNCTEVPVAIHADQLTPTWRVYSTGSNVFQTRAGCLIGAEHVNNSYECDIPIGAGICASYQTQTNSP

SEQ ID NO: 28 - protein, 15 aa, Artificial Sequence
  SARS-CoV-2/Wuhan/WIV05/2019__EPI_ISL_402128 spike protein (1-15)
MFVFLVLLPLVSSQC

SEQ ID NO: 29 - protein, 666 aa, Artificial Sequence
  SARS-CoV-2/Wuhan/WIV05/2019__EPI_ISL_402128 spike protein (16-681)
VNLTTRTQLPPAYTNSFTRGVYYPDKVFRSSVLHSTQDLFLPFFSNVTWFHAIHVSGTNGTKRFDNPVLPFNDGVYFASTEKSNIIRGWIFGTTLDSKTQSLLIVNNATNVVIKVCEFQFCNDPFLGVYYHKNNKSWMESEFRVYSSANNCTFEYVSQPFLMDLEGKQGNFKNLREFVFKNIDGYFKIYSKHTPINLVRDLPQGFSALEPLVDLPIGINITRFQTLLALHRSYLTPGDSSSGWTAGAAAYYVGYLQPRTFLLKYNENGTITDAVDCALDPLSETKCTLKSFTVEKGIYQTSNFRVQPTESIVRFPNITNLCPFGEVFNATRFASVYAWNRKRISNCVADYSVLYNSASFSTFKCYGVSPTKLNDLCFTNVYADSFVIRGDEVRQIAPGQTGKIADYNYKLPDDFTGCVIAWNSNNLDSKVGGNYNYLYRLFRKSNLKPFERDISTEIYQAGSTPCNGVEGFNCYFPLQSYGFQPTNGVGYQPYRVVVLSFELLHAPATVCGPKKSTNLVKNKCVNFNFNGLTGTGVLTESNKKFLPFQQFGRDIADTTDAVRDPQTLEILDITPCSFGGVSVITPGTNTSNQVAVLYQDVNCTEVPVAIHADQLTPTWRVYSTGSNVFQTRAGCLIGAEHVNNSYECDIPIGAGICASYQTQTNSP

SEQ ID NO: 30 - protein, 592 aa, Artificial Sequence
  SARS-CoV-2/Wuhan/WIV05/2019__EPI_ISL_402128 spike protein (682-1273)
RRARSVASQSIIAYTMSLGAENSVAYSNNSIAIPTNFTISVTTEILPVSMTKTSVDCTMYICGDSTECSNLLLQYGSFCTQLNRALTGIAVEQDKNTQEVFAQVKQIYKTPPIKDFGGFNFSQILPDPSKPSKRSFIEDLLFNKVTLADAGFIKQYGDCLGDIAARDLICAQKFNGLTVLPPLLTDEMIAQYTSALLAGTITSGWTFGAGAALQIPFAMQMAYRFNGIGVTQNVLYENQKLIANQFNSAIGKIQDSLSSTASALGKLQDVVNQNAQALNTLVKQLSSNFGAISSVLNDILSRLDKVEAEVQIDRLITGRLQSLQTYVTQQLIRAAEIRASANLAATKMSECVLGQSKRVDFCGKGYHLMSFPQSAPHGVVFLHVTYVPAQEKNFTTAPAICHDGKAHFPREGVFVSNGTHWFVTQRNFYEPQIITTDNTFVSGNCDVVIGIVNNTVYDPLQPELDSFKEELDKYFKNHTSPDVDLGDISGINASVVNIQKEIDRLNEVAKNLNESLIDLQELGKYEQYIKWPWYIWLGFIAGLIAIVMVTIMLCCMTSCCSCLKGCCSCGSCCKFDEDDSEPVLKGVKLHYT

SEQ ID NO: 31 - protein, 1211 aa, Artificial Sequence
  SARS-CoV-2/Wuhan/WIV05/2019__EPI_ISL_402128 spike protein (1-1211)
MFVFLVLLPLVSSQCVNLTTRTQLPPAYTNSFTRGVYYPDKVFRSSVLHSTQDLFLPFFSNVTWFHAIHVSGTNGTKRFDNPVLPFNDGVYFASTEKSNIIRGWIFGTTLDSKTQSLLIVNNATNVVIKVCEFQFCNDPFLGVYYHKNNKSWMESEFRVYSSANNCTFEYVSQPFLMDLEGKQGNFKNLREFVFKNIDGYFKIYSKHTPINLVRDLPQGFSALEPLVDLPIGINITRFQTLLALHRSYLTPGDSSSGWTAGAAAYYVGYLQPRTFLLKYNENGTITDAVDCALDPLSETKCTLKSFTVEKGIYQTSNFRVQPTESIVRFPNITNLCPFGEVFNATRFASVYAWNRKRISNCVADYSVLYNSASFSTFKCYGVSPTKLNDLCFTNVYADSFVIRGDEVRQIAPGQTGKIADYNYKLPDDFTGCVIAWNSNNLDSKVGGNYNYLYRLFRKSNLKPFERDISTEIYQAGSTPCNGVEGFNCYFPLQSYGFQPTNGVGYQPYRVVVLSFELLHAPATVCGPKKSTNLVKNKCVNFNFNGLTGTGVLTESNKKFLPFQQFGRDIADTTDAVRDPQTLEILDITPCSFGGVSVITPGTNTSNQVAVLYQDVNCTEVPVAIHADQLTPTWRVYSTGSNVFQTRAGCLIGAEHVNNSYECDIPIGAGICASYQTQTNSPRRARSVASQSIIAYTMSLGAENSVAYSNNSIAIPTNFTISVTTEILPVSMTKTSVDCTMYICGDSTECSNLLLQYGSFCTQLNRALTGIAVEQDKNTQEVFAQVKQIYKTPPIKDFGGFNFSQILPDPSKPSKRSFIEDLLFNKVTLADAGFIKQYGDCLGDIAARDLICAQKFNGLTVLPPLLTDEMIAQYTSALLAGTITSGWTFGAGAALQIPFAMQMAYRFNGIGVTQNVLYENQKLIANQFNSAIGKIQDSLSSTASALGKLQDVVNQNAQALNTLVKQLSSNFGAISSVLNDILSRLDKVEAEVQIDRLITGRLQSLQTYVTQQLIRAAEIRASANLAATKMSECVLGQSKRVDFCGKGYHLMSFPQSAPHGVVFLHVTYVPAQEKNFTTAPAICHDGKAHFPREGVFVSNGTHWFVTQRNFYEPQIITTDNTFVSGNCDVVIGIVNNTVYDPLQPELDSFKEELDKYFKNHTSPDVDLGDISGINASVVNIQKEIDRLNEVAKNLNESLIDLQELGKYEQYIK

SEQ ID NO: 32 - protein, 1207 aa, Artificial Sequence
  SARS-CoV-2/bat/Yunnan/RaTG13/2013__EPI_ISL_402131 spike protein (1-1207)
MFVFLVLLPLVSSQCVNLTTRTQLPPAYTNSSTRGVYYPDKVFRSSVLHLTQDLFLPFFSNVTWFHAIHVSGTNGIKRFDNPVLPFNDGVYFASTEKSNIIRGWIFGTTLDSKTQSLLIVNNATNVVIKVCEFQFCNDPFLGVYYHKNNKSWMESEFRVYSSANNCTFEYVSQPFLMDLEGKQGNFKNLREFVFKNIDGYFKIYSKHTPINLVRDLPPGFSALEPLVDLPIGINITRFQTLLALHRSYLTPGDSSSGWTAGAAAYYVGYLQPRTFLLKYNENGTITDAVDCALDPLSETKCTLKSFTVEKGIYQTSNFRVQPTDSIVRFPNITNLCPFGEVFNATTFASVYAWNRKRISNCVADYSVLYNSTSFSTFKCYGVSPTKLNDLCFTNVYADSFVITGDEVRQIAPGQTGKIADYNYKLPDDFTGCVIAWNSKHIDAKEGGNFNYLYRLFRKANLKPFERDISTEIYQAGSKPCNGQTGLNCYYPLYRYGFYPTDGVGHQPYRVVVLSFELLNAPATVCGPKKSTNLVKNKCVNFNFNGLTGTGVLTESNKKFLPFQQFGRDIADTTDAVRDPQTLEILDITPCSFGGVSVITPGTNASNQVAVLYQDVNCTEVPVAIHADQLTPTWRVYSTGSNVFQTRAGCLIGAEHVNNSYECDIPIGAGICASYQTQTNSRSVASQSIIAYTMSLGAENSVAYSNNSIAIPTNFTISVTTEILPVSMTKTSVDCTMYICGDSTECSNLLLQYGSFCTQLNRALTGIAVEQDKNTQEVFAQVKQIYKTPPIKDFGGFNFSQILPDPSKPSKRSFIEDLLFNKVTLADAGFIKQYGDCLGDIAARDLICAQKFNGLTVLPPLLTDEMIAQYTSALLAGTITSGWTFGAGAALQIPFAMQMAYRFNGIGVTQNVLYENQKLIANQFNSAIGKIQDSLSSTASALGKLQDVVNQNAQALNTLVKQLSSNFGAISSVLNDILSRLDKVEAEVQIDRLITGRLQSLQTYVTQQLIRAAEIRASANLAATKMSECVLGQSKRVDFCGKGYHLMSFPQSAPHGVVFLHVTYVPAQEKNFTTAPAICHDGKAHFPREGVFVSNGTHWFVTQRNFYEPQIITTDNTFVSGSCDVVIGIVNNTVYDPLQPELDSFKEELDKYFKNHTSPDVDLGDISGINASVVNIQKEIDRLNEVAKNLNESLIDLQELGKYEQYIK

SEQ ID NO: 33 - protein, 1211 aa, Artificial Sequence
  SARS-CoV-2/Wuhan/HBCDC-HB-01/2019__EPI_ISL_402132 spike protein (1-1211)
MFVFLVLLPLVSSQCVNLTTRTQLPPAYTNSITRGVYYPDKVFRSSVLHSTQDLFLPFFSNVTWFHAIHVSGTNGTKRFDNPVLPFNDGVYFASTEKSNIIRGWIFGTTLDSKTQSLLIVNNATNVVIKVCEFQFCNDPFLGVYYHKNNKSWMESEFRVYSSANNCTFEYVSQPFLMDLEGKQGNFKNLREFVFKNIDGYFKIYSKHTPINLVRDLPQGFSALEPLVDLPIGINITRFQTLLALHRSYLTPGDSSSGWTAGAAAYYVGYLQPRTFLLKYNENGTITDAVDCALDPLSETKCTLKSFTVEKGIYQTSNFRVQPTESIVRFPNITNLCPFGEVFNATRFASVYAWNRKRISNCVADYSVLYNSASFSTFKCYGVSPTKLNDLCFTNVYADSFVIRGDEVRQIAPGQTGKIADYNYKLPDDFTGCVIAWNSNNLDSKVGGNYNYLYRLFRKSNLKPFERDISTEIYQAGSTPCNGVEGFNCYFPLQSYGFQPTNGVGYQPYRVVVLSFELLHAPATVCGPKKSTNLVKNKCVNFNFNGLTGTGVLTESNKKFLPFQQFGRDIADTTDAVRDPQTLEILDITPCSFGGVSVITPGTNTSNQVAVLYQDVNCTEVPVAIHADQLTPTWRVYSTGSNVFQTRAGCLIGAEHVNNSYECDIPIGAGICASYQTQTNSPRRARSVASQSIIAYTMSLGAENSVAYSNNSIAIPTNFTISVTTEILPVSMTKTSVDCTMYICGDSTECSNLLLQYGSFCTQLNRALTGIAVEQDKNTQEVFAQVKQIYKTPPIKDFGGFNFSQILPDPSKPSKRSFIEDLLFNKVTLADAGFIKQYGDCLGDIAARDLICAQKFNGLTVLPPLLTDEMIAQYTSALLAGTITSGWTFGAGAALQIPFAMQMAYRFNGIGVTQNVLYENQKLIANQFNSAIGKIQDSLSSTASALGKLQDVVNQNAQALNTLVKQLSSNFGAISSVLNDILSRLDKVEAEVQIDRLITGRLQSLQTYVTQQLIRAAEIRASANLAATKMSECVLGQSKRVDFCGKGYHLMSFPQSAPHGVVFLHVTYVPAQEKNFTTAPAICHDGKAHFPREGVFVSNGTHWFVTQRNFYEPQIITTDNTFVSGNCDVVIGIVNNTVYDPLQPELDSFKEELDKYFKNHTSPDVDLGDISGINASVVNIQKEIDRLNEVAKNLNESLIDLQELGKYEQYIK

SEQ ID NO: 34 - protein, 1211 aa, Artificial Sequence
  SARS-CoV-2/Guangdong/20SF028/2020__EPI_ISL_403936 spike protein (1-1211)
MFVFLVLLPLVSSQCVNLTTRTQLPPAYTNSFTRGVYYPDKVFRSSVLYSTQDLFLPFFSNVTWFHAIHVSGTNGTKRFDNPVLPFNDGVYFASTEKSNIIRGWIFGTTLDSKTQSLLIVNNATNVVIKVCEFQFCNDPFLGVYYHKNNKSWMESEFRVYSSANNCTFEYVSQPFLMDLEGKQGNFKNLREFVFKNIDGYFKIYSKHTPINLVRDLPQGFSALEPLVDLPIGINITRFQTLLALHRSYLTPGDSSSGWTAGAAAYYVGYLQPRTFLLKYNENGTITDAVDCALDPLSETKCTLKSFTVEKGIYQTSNFRVQPTESIVRFPNITNLCPFGEVFNATRFASVYAWNRKRISNCVADYSVLYNSASFSTFKCYGVSPTKLNDLCFTNVYADSFVIRGDEVRQIAPGQTGKIADYNYKLPDDFTGCVIAWNSNNLDSKVGGNYNYLYRLFRKSNLKPFERDISTEIYQAGSTPCNGVEGFNCYFPLQSYGFQPTNGVGYQPYRVVVLSFELLHAPATVCGPKKSTNLVKNKCVNFNFNGLTGTGVLTESNKKFLPFQQFGRDIADTTDAVRDPQTLEILDITPCSFGGVSVITPGTNTSNQVAVLYQDVNCTEVPVAIHADQLTPTWRVYSTGSNVFQTRAGCLIGAEHVNNSYECDIPIGAGICASYQTQTNSPRRARSVASQSIIAYTMSLGAENSVAYSNNSIAIPTNFTISVTTEILPVSMTKTSVDCTMYICGDSTECSNLLLQYGSFCTQLNRALTGIAVEQDKNTQEVFAQVKQIYKTPPIKDFGGFNFSQILPDPSKPSKRSFIEDLLFNKVTLADAGFIKQYGDCLGDIAARDLICAQKFNGLTVLPPLLTDEMIAQYTSALLAGTITSGWTFGAGAALQIPFAMQMAYRFNGIGVTQNVLYENQKLIANQFNSAIGKIQDSLSSTASALGKLQDVVNQNAQALNTLVKQLSSNFGAISSVLNDILSRLDKVEAEVQIDRLITGRLQSLQTYVTQQLIRAAEIRASANLAATKMSECVLGQSKRVDFCGKGYHLMSFPQSAPHGVVFLHVTYVPAQEKNFTTAPAICHDGKAHFPREGVFVSNGTHWFVTQRNFYEPQIITTDNTFVSGNCDVVIGIVNNTVYDPLQPELDSFKEELDKYFKNHTSPDVDLGDISGINASVVNIQKEIDRLNEVAKNLNESLIDLQELGKYEQYIK

SEQ ID NO: 35 - protein, 1211 aa, Artificial Sequence
  SARS-CoV-2/Shenzhen/SZTH-001/2020__EPI_ISL_406592 spike protein (1-1211)
MFVFLVLLPLVSSQCVNLTTRTQLPPAYTNSFTRGVYYPDKVFRSSVLHSTQDLFLPFFSNVTWFHAIHVSGTNGTKRFDNPVLPFNDGVYFASTEKSNIIRGWIFGTTLDSKTQSLLIVNNATNVVIKVCEFQFCNDPFLGVYYHKNNKSWMESEFRVYSSANNCTFEYVSQPFLMDLEGKQGNFKNLREFVFKNIDGYFKIYSKHTPINLVRDLPQGFSALEPLVDLPIGINITRFQTLLALHRSYLTPGDSSSGWTAGAAAYYVGYLQPRTFLLKYNENGTITDAVDCALDPLSETKCTLKSFTVEKGIYQTSNFRVQPTESIVRFPNITNLCPFGEVFNATRFASVYAWNRKRISNCVADYSVLYNSASFSTFKCYGVSPTKLNDLCFTNVYADSFVIRGDEVRQIAPGQTGKIADYNYKLPDDFTGCVIAWNSNNLDSKVGGNYNYLYRLFRKSNLKPFERDISTEIYQAGSTPCNGVEGFNCYFPLQSYGFQPTNGVGYQPYRVVVLSFELLHAPATVCGPKKSTNLVKNKCVNFNFNGLTGTGVLTESNKKFLPFQQFGRDIADTTDAVRDPQTLEILDITPCSFGGVSVITPGTNTSNQVAVLYQDVNCTEVPVAIHADQLTPTWRVYSTGSNVFQTRAGCLIGAEHVNNSYECDIPIGAGICASYQTQTNSPRRARSVASQSIIAYTMSLGAENSVAYSNNSIAIPTNFTISVTTEILPVSMTKTSVDCTMYICGDSTECSNLLLQYGSFCTQLNRALTGIAVEQDKNTQEVFAQVKQIYKTPPIKDFGGFNFSQILPDPSKPSKRSFIEDLLFNKVTLADAGFIKQYGDCLGDIAARDLICAQKFNGLTVLPPLLTDEMIAQYTSALLAGTITSGWTFGAGAALQIPFAMQMAYRFNGIGVTQNVLYENQKLIANQFNSAIGKIQDSLSSTASALGKLQDVVNQNAQALNTLVKQLSSNFGAISSVLNDILSRLDKVEAEVQIDRLITGRLQSLQTYVTQQLIRAAEIRASANLAATKMSECVLGQSKRVDFCGKGYHLMSFPQSAPHGVVFLHVTYVPAQEKNFTTAPAICHDGKAHFPREGVFVSNGTHWFVTQRNFYEPQIITTDNTFVSGNCDVLIGIVNNTVYDPLQPELDSFKEELDKYFKNHTSPDVDLGDISGINASVVNIQKEIDRLNEVAKNLNESLIDLQELGKYEQYIK

SEQ ID NO: 36 - protein, 1211 aa, Artificial Sequence
  SARS-CoV-2/Shenzhen/SZTH-004/2020__EPI_ISL_406595 spike protein (1-1211)
MFVFLVLLPLVSSQCVNLTTRTQLPPAYTNSFTRGVYYPDKVFRSSVLHSTQDLFLPFFSNVTWFHAIHVSGTNGTKRFDNPVLPFNDGVYFASTEKSNIIRGWIFGTTLDSKTQSLLIVNNATNVVIKVCEFQFCNDPFLGVYYHKNNKSWMESEFRVYSSANNCTFEYVSQPFLMDLEGKQGNFKNLREFVFKNIDGYFKIYSKHTPINLVRDLPQGFSALEPLVDLPIGINITRFQTLLALHRSYLTPGDSSSGWTAGAAAYYVGYLQPRTFLLKYNENGTITDAVDCALDPLSETKCTLKSFTVEKGIYQTSNFRVQPTESIVRFPNITNLCPFGEVFNATRFASVYAWDRKRISNCVAYYSVLYNSASFSTFKCYGVSPTKLNDLCFTNVYADSFVIRGDEVRQIAPGQTGKIADYNYKLPDDFTGCVIAWNSNNLDSKVGGNYNYLYRLFRKSNLKPFERDISTEIYQAGSTPCNGVEGFNCYFPLQSYGFQPTNGVGYQPYRVVVLSFELLHAPATVCGPKKSTNLVKNKCVNFNFNGLTGTGVLTESNKKFLPFQQFGRDIADTTDAVRDPQTLEILDITPCSFGGVSVITPGTNTSNQVAVLYQDVNCTEVPVAIHADQLTPTWRVYSTGSNVFQTRAGCLIGAEHVNNSYECDIPIGAGICASYQTQTNSPRRARSVASQSIIAYTMSLGAENSVAYSNNSIAIPTNFTISVTTEILPVSMTKTSVDCTMYICGDSTECSNLLLQYGSFCTQLNRALTGIAVEQDKNTQEVFAQVKQIYKTPPIKDFGGFNFSQILPDPSKPSKRSFIEDLLFNKVTLADAGFIKQYGDCLGDIAARDLICAQKFNGLTVLPPLLTDEMIAQYTSALLAGTITSGWTFGAGAALQIPFAMQMAYRFNGIGVTQNVLYENQKLIANQFNSAIGKIQDSLSSTASALGKLQDVVNQNAQALNTLVKQLSSNFGAISSVLNDILSRLDKVEAEVQIDRLITGRLQSLQTYVTQQLIRAAEIRASANLAATKMSECVLGQSKRVDFCGKGYHLMSFPQSAPHGVVFLHVTYVPAQEKNFTTAPAICHDGKAHFPREGVFVSNGTHWFVTQRNFYEPQIITTDNTFVSGNCDVVIGIVNNTVYDPLQPELDSFKEELDKYFKNHTSPDVDLGDISGINASVVNIQKEIDRLNEVAKNLNESLIDLQELGKYEQYIK

SEQ ID NO: 37 - protein, 1211 aa, Artificial Sequence
  SARS-CoV-2/France/IDF0372/2020__EPI_ISL_406596 spike protein (1-1211)
MFVFLVLLPLVSSQCVNLTTRTQLPPAYTNSFTRGVYYPDKVFRSSVLHSTQDLFLPFFSNVTWFHAIHVSGTNGTKRFDNPVLPFNDGVYFASTEKSNIIRGWIFGTTLDSKTQSLLIVNNATNVVIKVCEFQFCNDPFLGVYYHKNNKSWMESEFRVYSSANNCTFEYVSQPFLMDLEGKQGNFKNLREFVFKNIDGYFKIYSKHTPINLVRDLPQGFSALEPLVDLPIGINITRFQTLLALHRSYLTPGDSSSGWTAGAAAYYVGYLQPRTFLLKYNENGTITDAVDCALDPLSETKCTLKSFTVEKGIYQTSNFRVQPTESIVRFPNITNLCPFGEVFNATRFASVYAWNRKRISNCVADYSFLYNSASFSTFKCYGVSPTKLNDLCFTNVYADSFVIRGDEVRQIAPGQTGKIADYNYKLPDDFTGCVIAWNSNNLDSKVGGNYNYLYRLFRKSNLKPFERDISTEIYQAGSTPCNGVEGFNCYFPLQSYGFQPTNGVGYQPYRVVVLSFELLHAPATVCGPKKSTNLVKNKCVNFNFNGLTGTGVLTESNKKFLPFQQFGRDIADTTDAVRDPQTLEILDITPCSFGGVSVITPGTNTSNQVAVLYQDVNCTEVPVAIHADQLTPTWRVYSTGSNVFQTRAGCLIGAEHVNNSYECDIPIGAGICASYQTQTNSPRRARSVASQSIIAYTMSLGAENSVAYSNNSIAIPTNFTISVTTEILPVSMTKTSVDCTMYICGDSTECSNLLLQYGSFCTQLNRALTGIAVEQDKNTQEVFAQVKQIYKTPPIKDFGGFNFSQILPDPSKPSKRSFIEDLLFNKVTLADAGFIKQYGDCLGDIAARDLICAQKFNGLTVLPPLLTDEMIAQYTSALLAGTITSGWTFGAGAALQIPFAMQMAYRFNGIGVTQNVLYENQKLIANQFNSAIGKIQDSLSSTASALGKLQDVVNQNAQALNTLVKQLSSNFGAISSVLNDILSRLDKVEAEVQIDRLITGRLQSLQTYVTQQLIRAAEIRASANLAATKMSECVLGQSKRVDFCGKGYHLMSFPQSAPHGVVFLHVTYVPAQEKNFTTAPAICHDGKAHFPREGVFVSNGTHWFVTQRNFYEPQIITTDNTFVSGNCDVVIGIVNNTVYDPLQPELDSFKEELDKYFKNHTSPDVDLGDISGINASVVNIQKEIDRLNEVAKNLNESLIDLQELGKYEQYIK

SEQ ID NO: 38 - protein, 1211 aa, Artificial Sequence
  SARS-CoV-2/Australia/VIC01/2020__EPI_ISL_406844 spike protein (1-1211)
MFVFLVLLPLVSSQCVNLTTRTQLPPAYTNSFTRGVYYPDKVFRSSVLHSTQDLFLPFFSNVTWFHAIHVSGTNGTKRFDNPVLPFNDGVYFASTEKSNIIRGWIFGTTLDSKTQSLLIVNNATNVVIKVCEFQFCNDPFLGVYYHKNNKSWMESEFRVYSSANNCTFEYVSQPFLMDLEGKQGNFKNLREFVFKNIDGYFKIYSKHTPINLVRDLPQGFSALEPLVDLPIGINITRFQTLLALHRRYLTPGDSSSGWTAGAAAYYVGYLQPRTFLLKYNENGTITDAVDCALDPLSETKCTLKSFTVEKGIYQTSNFRVQPTESIVRFPNITNLCPFGEVFNATRFASVYAWNRKRISNCVADYSVLYNSASFSTFKCYGVSPTKLNDLCFTNVYADSFVIRGDEVRQIAPGQTGKIADYNYKLPDDFTGCVIAWNSNNLDSKVGGNYNYLYRLFRKSNLKPFERDISTEIYQAGSTPCNGVEGFNCYFPLQSYGFQPTNGVGYQPYRVVVLSFELLHAPATVCGPKKSTNLVKNKCVNFNFNGLTGTGVLTESNKKFLPFQQFGRDIADTTDAVRDPQTLEILDITPCSFGGVSVITPGTNTSNQVAVLYQDVNCTEVPVAIHADQLTPTWRVYSTGSNVFQTRAGCLIGAEHVNNSYECDIPIGAGICASYQTQTNSPRRARSVASQSIIAYTMSLGAENSVAYSNNSIAIPTNFTISVTTEILPVSMTKTSVDCTMYICGDSTECSNLLLQYGSFCTQLNRALTGIAVEQDKNTQEVFAQVKQIYKTPPIKDFGGFNFSQILPDPSKPSKRSFIEDLLFNKVTLADAGFIKQYGDCLGDIAARDLICAQKFNGLTVLPPLLTDEMIAQYTSALLAGTITSGWTFGAGAALQIPFAMQMAYRFNGIGVTQNVLYENQKLIANQFNSAIGKIQDSLSSTASALGKLQDVVNQNAQALNTLVKQLSSNFGAISSVLNDILSRLDKVEAEVQIDRLITGRLQSLQTYVTQQLIRAAEIRASANLAATKMSECVLGQSKRVDFCGKGYHLMSFPQSAPHGVVFLHVTYVPAQEKNFTTAPAICHDGKAHFPREGVFVSNGTHWFVTQRNFYEPQIITTDNTFVSGNCDVVIGIVNNTVYDPLQPELDSFKEELDKYFKNHTSPDVDLGDISGINASVVNIQKEIDRLNEVAKNLNESLIDLQELGKYEQYIK

SEQ ID NO: 39 - protein, 1211 aa, Artificial Sequence
  SARS-CoV-2/Germany/BavPat1/2020__EPI_ISL_406862 spike protein (1-1211)
MFVFLVLLPLVSSQCVNLTTRTQLPPAYTNSFTRGVYYPDKVFRSSVLHSTQDLFLPFFSNVTWFHAIHVSGTNGTKRFDNPVLPFNDGVYFASTEKSNIIRGWIFGTTLDSKTQSLLIVNNATNVVIKVCEFQFCNDPFLGVYYHKNNKSWMESEFRVYSSANNCTFEYVSQPFLMDLEGKQGNFKNLREFVFKNIDGYFKIYSKHTPINLVRDLPQGFSALEPLVDLPIGINITRFQTLLALHRSYLTPGDSSSGWTAGAAAYYVGYLQPRTFLLKYNENGTITDAVDCALDPLSETKCTLKSFTVEKGIYQTSNFRVQPTESIVRFPNITNLCPFGEVFNATRFASVYAWNRKRISNCVADYSVLYNSASFSTFKCYGVSPTKLNDLCFTNVYADSFVIRGDEVRQIAPGQTGKIADYNYKLPDDFTGCVIAWNSNNLDSKVGGNYNYLYRLFRKSNLKPFERDISTEIYQAGSTPCNGVEGFNCYFPLQSYGFQPTNGVGYQPYRVVVLSFELLHAPATVCGPKKSTNLVKNKCVNFNFNGLTGTGVLTESNKKFLPFQQFGRDIADTTDAVRDPQTLEILDITPCSFGGVSVITPGTNTSNQVAVLYQGVNCTEVPVAIHADQLTPTWRVYSTGSNVFQTRAGCLIGAEHVNNSYECDIPIGAGICASYQTQTNSPRRARSVASQSIIAYTMSLGAENSVAYSNNSIAIPTNFTISVTTEILPVSMTKTSVDCTMYICGDSTECSNLLLQYGSFCTQLNRALTGIAVEQDKNTQEVFAQVKQIYKTPPIKDFGGFNFSQILPDPSKPSKRSFIEDLLFNKVTLADAGFIKQYGDCLGDIAARDLICAQKFNGLTVLPPLLTDEMIAQYTSALLAGTITSGWTFGAGAALQIPFAMQMAYRFNGIGVTQNVLYENQKLIANQFNSAIGKIQDSLSSTASALGKLQDVVNQNAQALNTLVKQLSSNFGAISSVLNDILSRLDKVEAEVQIDRLITGRLQSLQTYVTQQLIRAAEIRASANLAATKMSECVLGQSKRVDFCGKGYHLMSFPQSAPHGVVFLHVTYVPAQEKNFTTAPAICHDGKAHFPREGVFVSNGTHWFVTQRNFYEPQIITTDNTFVSGNCDVVIGIVNNTVYDPLQPELDSFKEELDKYFKNHTSPDVDLGDISGINASVVNIQKEIDRLNEVAKNLNESLIDLQELGKYEQYIK

SEQ ID NO: 40 - protein, 1211 aa, Artificial Sequence
  SARS-CoV-2/Wuhan/WIV05/2019__EPI_ISL_402128 spike protein (1-1211)(K986P_V987P)
MFVFLVLLPLVSSQCVNLTTRTQLPPAYTNSFTRGVYYPDKVFRSSVLHSTQDLFLPFFSNVTWFHAIHVSGTNGTKRFDNPVLPFNDGVYFASTEKSNIIRGWIFGTTLDSKTQSLLIVNNATNVVIKVCEFQFCNDPFLGVYYHKNNKSWMESEFRVYSSANNCTFEYVSQPFLMDLEGKQGNFKNLREFVFKNIDGYFKIYSKHTPINLVRDLPQGFSALEPLVDLPIGINITRFQTLLALHRSYLTPGDSSSGWTAGAAAYYVGYLQPRTFLLKYNENGTITDAVDCALDPLSETKCTLKSFTVEKGIYQTSNFRVQPTESIVRFPNITNLCPFGEVFNATRFASVYAWNRKRISNCVADYSVLYNSASFSTFKCYGVSPTKLNDLCFTNVYADSFVIRGDEVRQIAPGQTGKIADYNYKLPDDFTGCVIAWNSNNLDSKVGGNYNYLYRLFRKSNLKPFERDISTEIYQAGSTPCNGVEGFNCYFPLQSYGFQPTNGVGYQPYRVVVLSFELLHAPATVCGPKKSTNLVKNKCVNFNFNGLTGTGVLTESNKKFLPFQQFGRDIADTTDAVRDPQTLEILDITPCSFGGVSVITPGTNTSNQVAVLYQDVNCTEVPVAIHADQLTPTWRVYSTGSNVFQTRAGCLIGAEHVNNSYECDIPIGAGICASYQTQTNSPRRARSVASQSIIAYTMSLGAENSVAYSNNSIAIPTNFTISVTTEILPVSMTKTSVDCTMYICGDSTECSNLLLQYGSFCTQLNRALTGIAVEQDKNTQEVFAQVKQIYKTPPIKDFGGFNFSQILPDPSKPSKRSFIEDLLFNKVTLADAGFIKQYGDCLGDIAARDLICAQKFNGLTVLPPLLTDEMIAQYTSALLAGTITSGWTFGAGAALQIPFAMQMAYRFNGIGVTQNVLYENQKLIANQFNSAIGKIQDSLSSTASALGKLQDVVNQNAQALNTLVKQLSSNFGAISSVLNDILSRLDPPEAEVQIDRLITGRLQSLQTYVTQQLIRAAEIRASANLAATKMSECVLGQSKRVDFCGKGYHLMSFPQSAPHGVVFLHVTYVPAQEKNFTTAPAICHDGKAHFPREGVFVSNGTHWFVTQRNFYEPQIITTDNTFVSGNCDVVIGIVNNTVYDPLQPELDSFKEELDKYFKNHTSPDVDLGDISGINASVVNIQKEIDRLNEVAKNLNESLIDLQELGKYEQYIK

SEQ ID NO: 41 - protein, 1207 aa, Artificial Sequence
  SARS-CoV-2/bat/Yunnan/RaTG13/2013__EPI_ISL_402131 spike protein (1-1207)(K982P_V983P)
MFVFLVLLPLVSSQCVNLTTRTQLPPAYTNSSTRGVYYPDKVFRSSVLHLTQDLFLPFFSNVTWFHAIHVSGTNGIKRFDNPVLPFNDGVYFASTEKSNIIRGWIFGTTLDSKTQSLLIVNNATNVVIKVCEFQFCNDPFLGVYYHKNNKSWMESEFRVYSSANNCTFEYVSQPFLMDLEGKQGNFKNLREFVFKNIDGYFKIYSKHTPINLVRDLPPGFSALEPLVDLPIGINITRFQTLLALHRSYLTPGDSSSGWTAGAAAYYVGYLQPRTFLLKYNENGTITDAVDCALDPLSETKCTLKSFTVEKGIYQTSNFRVQPTDSIVRFPNITNLCPFGEVFNATTFASVYAWNRKRISNCVADYSVLYNSTSFSTFKCYGVSPTKLNDLCFTNVYADSFVITGDEVRQIAPGQTGKIADYNYKLPDDFTGCVIAWNSKHIDAKEGGNFNYLYRLFRKANLKPFERDISTEIYQAGSKPCNGQTGLNCYYPLYRYGFYPTDGVGHQPYRVVVLSFELLNAPATVCGPKKSTNLVKNKCVNFNFNGLTGTGVLTESNKKFLPFQQFGRDIADTTDAVRDPQTLEILDITPCSFGGVSVITPGTNASNQVAVLYQDVNCTEVPVAIHADQLTPTWRVYSTGSNVFQTRAGCLIGAEHVNNSYECDIPIGAGICASYQTQTNSRSVASQSIIAYTMSLGAENSVAYSNNSIAIPTNFTISVTTEILPVSMTKTSVDCTMYICGDSTECSNLLLQYGSFCTQLNRALTGIAVEQDKNTQEVFAQVKQIYKTPPIKDFGGFNFSQILPDPSKPSKRSFIEDLLFNKVTLADAGFIKQYGDCLGDIAARDLICAQKFNGLTVLPPLLTDEMIAQYTSALLAGTITSGWTFGAGAALQIPFAMQMAYRFNGIGVTQNVLYENQKLIANQFNSAIGKIQDSLSSTASALGKLQDVVNQNAQALNTLVKQLSSNFGAISSVLNDILSRLDPPEAEVQIDRLITGRLQSLQTYVTQQLIRAAEIRASANLAATKMSECVLGQSKRVDFCGKGYHLMSFPQSAPHGVVFLHVTYVPAQEKNFTTAPAICHDGKAHFPREGVFVSNGTHWFVTQRNFYEPQIITTDNTFVSGSCDVVIGIVNNTVYDPLQPELDSFKEELDKYFKNHTSPDVDLGDISGINASVVNIQKEIDRLNEVAKNLNESLIDLQELGKYEQYIK

SEQ ID NO: 42 - protein, 1211 aa, Artificial Sequence
  SARS-CoV-2/Wuhan/HBCDC-HB-01/2019__EPI_ISL_402132 spike protein (1-1211)(K986P_V987P)
MFVFLVLLPLVSSQCVNLTTRTQLPPAYTNSITRGVYYPDKVFRSSVLHSTQDLFLPFFSNVTWFHAIHVSGTNGTKRFDNPVLPFNDGVYFASTEKSNIIRGWIFGTTLDSKTQSLLIVNNATNVVIKVCEFQFCNDPFLGVYYHKNNKSWMESEFRVYSSANNCTFEYVSQPFLMDLEGKQGNFKNLREFVFKNIDGYFKIYSKHTPINLVRDLPQGFSALEPLVDLPIGINITRFQTLLALHRSYLTPGDSSSGWTAGAAAYYVGYLQPRTFLLKYNENGTITDAVDCALDPLSETKCTLKSFTVEKGIYQTSNFRVQPTESIVRFPNITNLCPFGEVFNATRFASVYAWNRKRISNCVADYSVLYNSASFSTFKCYGVSPTKLNDLCFTNVYADSFVIRGDEVRQIAPGQTGKIADYNYKLPDDFTGCVIAWNSNNLDSKVGGNYNYLYRLFRKSNLKPFERDISTEIYQAGSTPCNGVEGFNCYFPLQSYGFQPTNGVGYQPYRVVVLSFELLHAPATVCGPKKSTNLVKNKCVNFNFNGLTGTGVLTESNKKFLPFQQFGRDIADTTDAVRDPQTLEILDITPCSFGGVSVITPGTNTSNQVAVLYQDVNCTEVPVAIHADQLTPTWRVYSTGSNVFQTRAGCLIGAEHVNNSYECDIPIGAGICASYQTQTNSPRRARSVASQSIIAYTMSLGAENSVAYSNNSIAIPTNFTISVTTEILPVSMTKTSVDCTMYICGDSTECSNLLLQYGSFCTQLNRALTGIAVEQDKNTQEVFAQVKQIYKTPPIKDFGGFNFSQILPDPSKPSKRSFIEDLLFNKVTLADAGFIKQYGDCLGDIAARDLICAQKFNGLTVLPPLLTDEMIAQYTSALLAGTITSGWTFGAGAALQIPFAMQMAYRFNGIGVTQNVLYENQKLIANQFNSAIGKIQDSLSSTASALGKLQDVVNQNAQALNTLVKQLSSNFGAISSVLNDILSRLDPPEAEVQIDRLITGRLQSLQTYVTQQLIRAAEIRASANLAATKMSECVLGQSKRVDFCGKGYHLMSFPQSAPHGVVFLHVTYVPAQEKNFTTAPAICHDGKAHFPREGVFVSNGTHWFVTQRNFYEPQIITTDNTFVSGNCDVVIGIVNNTVYDPLQPELDSFKEELDKYFKNHTSPDVDLGDISGINASVVNIQKEIDRLNEVAKNLNESLIDLQELGKYEQYIK

SEQ ID NO: 43 - protein, 1211 aa, Artificial Sequence
  SARS-CoV-2/Guangdong/20SF028/2020__EPI_ISL_403936 spike protein (1-1211)(K986P_V987P)
MFVFLVLLPLVSSQCVNLTTRTQLPPAYTNSFTRGVYYPDKVFRSSVLYSTQDLFLPFFSNVTWFHAIHVSGTNGTKRFDNPVLPFNDGVYFASTEKSNIIRGWIFGTTLDSKTQSLLIVNNATNVVIKVCEFQFCNDPFLGVYYHKNNKSWMESEFRVYSSANNCTFEYVSQPFLMDLEGKQGNFKNLREFVFKNIDGYFKIYSKHTPINLVRDLPQGFSALEPLVDLPIGINITRFQTLLALHRSYLTPGDSSSGWTAGAAAYYVGYLQPRTFLLKYNENGTITDAVDCALDPLSETKCTLKSFTVEKGIYQTSNFRVQPTESIVRFPNITNLCPFGEVFNATRFASVYAWNRKRISNCVADYSVLYNSASFSTFKCYGVSPTKLNDLCFTNVYADSFVIRGDEVRQIAPGQTGKIADYNYKLPDDFTGCVIAWNSNNLDSKVGGNYNYLYRLFRKSNLKPFERDISTEIYQAGSTPCNGVEGFNCYFPLQSYGFQPTNGVGYQPYRVVVLSFELLHAPATVCGPKKSTNLVKNKCVNFNFNGLTGTGVLTESNKKFLPFQQFGRDIADTTDAVRDPQTLEILDITPCSFGGVSVITPGTNTSNQVAVLYQDVNCTEVPVAIHADQLTPTWRVYSTGSNVFQTRAGCLIGAEHVNNSYECDIPIGAGICASYQTQTNSPRRARSVASQSIIAYTMSLGAENSVAYSNNSIAIPTNFTISVTTEILPVSMTKTSVDCTMYICGDSTECSNLLLQYGSFCTQLNRALTGIAVEQDKNTQEVFAQVKQIYKTPPIKDFGGFNFSQILPDPSKPSKRSFIEDLLFNKVTLADAGFIKQYGDCLGDIAARDLICAQKFNGLTVLPPLLTDEMIAQYTSALLAGTITSGWTFGAGAALQIPFAMQMAYRFNGIGVTQNVLYENQKLIANQFNSAIGKIQDSLSSTASALGKLQDVVNQNAQALNTLVKQLSSNFGAISSVLNDILSRLDPPEAEVQIDRLITGRLQSLQTYVTQQLIRAAEIRASANLAATKMSECVLGQSKRVDFCGKGYHLMSFPQSAPHGVVFLHVTYVPAQEKNFTTAPAICHDGKAHFPREGVFVSNGTHWFVTQRNFYEPQIITTDNTFVSGNCDVVIGIVNNTVYDPLQPELDSFKEELDKYFKNHTSPDVDLGDISGINASVVNIQKEIDRLNEVAKNLNESLIDLQELGKYEQYIK

SEQ ID NO: 44 - protein, 1211 aa, Artificial Sequence
  SARS-CoV-2/Shenzhen/SZTH-001/2020__EPI_ISL_406592 spike protein (1-1211)(K986P_V987P)
MFVFLVLLPLVSSQCVNLTTRTQLPPAYTNSFTRGVYYPDKVFRSSVLHSTQDLFLPFFSNVTWFHAIHVSGTNGTKRFDNPVLPFNDGVYFASTEKSNIIRGWIFGTTLDSKTQSLLIVNNATNVVIKVCEFQFCNDPFLGVYYHKNNKSWMESEFRVYSSANNCTFEYVSQPFLMDLEGKQGNFKNLREFVFKNIDGYFKIYSKHTPINLVRDLPQGFSALEPLVDLPIGINITRFQTLLALHRSYLTPGDSSSGWTAGAAAYYVGYLQPRTFLLKYNENGTITDAVDCALDPLSETKCTLKSFTVEKGIYQTSNFRVQPTESIVRFPNITNLCPFGEVFNATRFASVYAWNRKRISNCVADYSVLYNSASFSTFKCYGVSPTKLNDLCFTNVYADSFVIRGDEVRQIAPGQTGKIADYNYKLPDDFTGCVIAWNSNNLDSKVGGNYNYLYRLFRKSNLKPFERDISTEIYQAGSTPCNGVEGFNCYFPLQSYGFQPTNGVGYQPYRVVVLSFELLHAPATVCGPKKSTNLVKNKCVNFNFNGLTGTGVLTESNKKFLPFQQFGRDIADTTDAVRDPQTLEILDITPCSFGGVSVITPGTNTSNQVAVLYQDVNCTEVPVAIHADQLTPTWRVYSTGSNVFQTRAGCLIGAEHVNNSYECDIPIGAGICASYQTQTNSPRRARSVASQSIIAYTMSLGAENSVAYSNNSIAIPTNFTISVTTEILPVSMTKTSVDCTMYICGDSTECSNLLLQYGSFCTQLNRALTGIAVEQDKNTQEVFAQVKQIYKTPPIKDFGGFNFSQILPDPSKPSKRSFIEDLLFNKVTLADAGFIKQYGDCLGDIAARDLICAQKFNGLTVLPPLLTDEMIAQYTSALLAGTITSGWTFGAGAALQIPFAMQMAYRFNGIGVTQNVLYENQKLIANQFNSAIGKIQDSLSSTASALGKLQDVVNQNAQALNTLVKQLSSNFGAISSVLNDILSRLDPPEAEVQIDRLITGRLQSLQTYVTQQLIRAAEIRASANLAATKMSECVLGQSKRVDFCGKGYHLMSFPQSAPHGVVFLHVTYVPAQEKNFTTAPAICHDGKAHFPREGVFVSNGTHWFVTQRNFYEPQIITTDNTFVSGNCDVLIGIVNNTVYDPLQPELDSFKEELDKYFKNHTSPDVDLGDISGINASVVNIQKEIDRLNEVAKNLNESLIDLQELGKYEQYIK

SEQ ID NO: 45 - protein, 1211 aa, Artificial Sequence
  SARS-CoV-2/Shenzhen/SZTH-004/2020__EPI_ISL_406595 spike protein (1-1211)(K986P_V987P)
MFVFLVLLPLVSSQCVNLTTRTQLPPAYTNSFTRGVYYPDKVFRSSVLHSTQDLFLPFFSNVTWFHAIHVSGTNGTKRFDNPVLPFNDGVYFASTEKSNIIRGWIFGTTLDSKTQSLLIVNNATNVVIKVCEFQFCNDPFLGVYYHKNNKSWMESEFRVYSSANNCTFEYVSQPFLMDLEGKQGNFKNLREFVFKNIDGYFKIYSKHTPINLVRDLPQGFSALEPLVDLPIGINITRFQTLLALHRSYLTPGDSSSGWTAGAAAYYVGYLQPRTFLLKYNENGTITDAVDCALDPLSETKCTLKSFTVEKGIYQTSNFRVQPTESIVRFPNITNLCPFGEVFNATRFASVYAWDRKRISNCVAYYSVLYNSASFSTFKCYGVSPTKLNDLCFTNVYADSFVIRGDEVRQIAPGQTGKIADYNYKLPDDFTGCVIAWNSNNLDSKVGGNYNYLYRLFRKSNLKPFERDISTEIYQAGSTPCNGVEGFNCYFPLQSYGFQPTNGVGYQPYRVVVLSFELLHAPATVCGPKKSTNLVKNKCVNFNFNGLTGTGVLTESNKKFLPFQQFGRDIADTTDAVRDPQTLEILDITPCSFGGVSVITPGTNTSNQVAVLYQDVNCTEVPVAIHADQLTPTWRVYSTGSNVFQTRAGCLIGAEHVNNSYECDIPIGAGICASYQTQTNSPRRARSVASQSIIAYTMSLGAENSVAYSNNSIAIPTNFTISVTTEILPVSMTKTSVDCTMYICGDSTECSNLLLQYGSFCTQLNRALTGIAVEQDKNTQEVFAQVKQIYKTPPIKDFGGFNFSQILPDPSKPSKRSFIEDLLFNKVTLADAGFIKQYGDCLGDIAARDLICAQKFNGLTVLPPLLTDEMIAQYTSALLAGTITSGWTFGAGAALQIPFAMQMAYRFNGIGVTQNVLYENQKLIANQFNSAIGKIQDSLSSTASALGKLQDVVNQNAQALNTLVKQLSSNFGAISSVLNDILSRLDPPEAEVQIDRLITGRLQSLQTYVTQQLIRAAEIRASANLAATKMSECVLGQSKRVDFCGKGYHLMSFPQSAPHGVVFLHVTYVPAQEKNFTTAPAICHDGKAHFPREGVFVSNGTHWFVTQRNFYEPQIITTDNTFVSGNCDVVIGIVNNTVYDPLQPELDSFKEELDKYFKNHTSPDVDLGDISGINASVVNIQKEIDRLNEVAKNLNESLIDLQELGKYEQYIK

SEQ ID NO: 46 - protein, 1211 aa, Artificial Sequence
  SARS-CoV-2/France/IDF0372/2020__EPI_ISL_406596 spike protein (1-1211)(K986P_V987P)
MFVFLVLLPLVSSQCVNLTTRTQLPPAYTNSFTRGVYYPDKVFRSSVLHSTQDLFLPFFSNVTWFHAIHVSGTNGTKRFDNPVLPFNDGVYFASTEKSNIIRGWIFGTTLDSKTQSLLIVNNATNVVIKVCEFQFCNDPFLGVYYHKNNKSWMESEFRVYSSANNCTFEYVSQPFLMDLEGKQGNFKNLREFVFKNIDGYFKIYSKHTPINLVRDLPQGFSALEPLVDLPIGINITRFQTLLALHRSYLTPGDSSSGWTAGAAAYYVGYLQPRTFLLKYNENGTITDAVDCALDPLSETKCTLKSFTVEKGIYQTSNFRVQPTESIVRFPNITNLCPFGEVFNATRFASVYAWNRKRISNCVADYSFLYNSASFSTFKCYGVSPTKLNDLCFTNVYADSFVIRGDEVRQIAPGQTGKIADYNYKLPDDFTGCVIAWNSNNLDSKVGGNYNYLYRLFRKSNLKPFERDISTEIYQAGSTPCNGVEGFNCYFPLQSYGFQPTNGVGYQPYRVVVLSFELLHAPATVCGPKKSTNLVKNKCVNFNFNGLTGTGVLTESNKKFLPFQQFGRDIADTTDAVRDPQTLEILDITPCSFGGVSVITPGTNTSNQVAVLYQDVNCTEVPVAIHADQLTPTWRVYSTGSNVFQTRAGCLIGAEHVNNSYECDIPIGAGICASYQTQTNSPRRARSVASQSIIAYTMSLGAENSVAYSNNSIAIPTNFTISVTTEILPVSMTKTSVDCTMYICGDSTECSNLLLQYGSFCTQLNRALTGIAVEQDKNTQEVFAQVKQIYKTPPIKDFGGFNFSQILPDPSKPSKRSFIEDLLFNKVTLADAGFIKQYGDCLGDIAARDLICAQKFNGLTVLPPLLTDEMIAQYTSALLAGTITSGWTFGAGAALQIPFAMQMAYRFNGIGVTQNVLYENQKLIANQFNSAIGKIQDSLSSTASALGKLQDVVNQNAQALNTLVKQLSSNFGAISSVLNDILSRLDPPEAEVQIDRLITGRLQSLQTYVTQQLIRAAEIRASANLAATKMSECVLGQSKRVDFCGKGYHLMSFPQSAPHGVVFLHVTYVPAQEKNFTTAPAICHDGKAHFPREGVFVSNGTHWFVTQRNFYEPQIITTDNTFVSGNCDVVIGIVNNTVYDPLQPELDSFKEELDKYFKNHTSPDVDLGDISGINASVVNIQKEIDRLNEVAKNLNESLIDLQELGKYEQYIK

SEQ ID NO: 47 - protein, 1211 aa, Artificial Sequence
  SARS-CoV-2/Australia/VIC01/2020__EPI_ISL_406844 spike protein (1-1211)(K986P_V987P)
MFVFLVLLPLVSSQCVNLTTRTQLPPAYTNSFTRGVYYPDKVFRSSVLHSTQDLFLPFFSNVTWFHAIHVSGTNGTKRFDNPVLPFNDGVYFASTEKSNIIRGWIFGTTLDSKTQSLLIVNNATNVVIKVCEFQFCNDPFLGVYYHKNNKSWMESEFRVYSSANNCTFEYVSQPFLMDLEGKQGNFKNLREFVFKNIDGYFKIYSKHTPINLVRDLPQGFSALEPLVDLPIGINITRFQTLLALHRRYLTPGDSSSGWTAGAAAYYVGYLQPRTFLLKYNENGTITDAVDCALDPLSETKCTLKSFTVEKGIYQTSNFRVQPTESIVRFPNITNLCPFGEVFNATRFASVYAWNRKRISNCVADYSVLYNSASFSTFKCYGVSPTKLNDLCFTNVYADSFVIRGDEVRQIAPGQTGKIADYNYKLPDDFTGCVIAWNSNNLDSKVGGNYNYLYRLFRKSNLKPFERDISTEIYQAGSTPCNGVEGFNCYFPLQSYGFQPTNGVGYQPYRVVVLSFELLHAPATVCGPKKSTNLVKNKCVNFNFNGLTGTGVLTESNKKFLPFQQFGRDIADTTDAVRDPQTLEILDITPCSFGGVSVITPGTNTSNQVAVLYQDVNCTEVPVAIHADQLTPTWRVYSTGSNVFQTRAGCLIGAEHVNNSYECDIPIGAGICASYQTQTNSPRRARSVASQSIIAYTMSLGAENSVAYSNNSIAIPTNFTISVTTEILPVSMTKTSVDCTMYICGDSTECSNLLLQYGSFCTQLNRALTGIAVEQDKNTQEVFAQVKQIYKTPPIKDFGGFNFSQILPDPSKPSKRSFIEDLLFNKVTLADAGFIKQYGDCLGDIAARDLICAQKFNGLTVLPPLLTDEMIAQYTSALLAGTITSGWTFGAGAALQIPFAMQMAYRFNGIGVTQNVLYENQKLIANQFNSAIGKIQDSLSSTASALGKLQDVVNQNAQALNTLVKQLSSNFGAISSVLNDILSRLDPPEAEVQIDRLITGRLQSLQTYVTQQLIRAAEIRASANLAATKMSECVLGQSKRVDFCGKGYHLMSFPQSAPHGVVFLHVTYVPAQEKNFTTAPAICHDGKAHFPREGVFVSNGTHWFVTQRNFYEPQIITTDNTFVSGNCDVVIGIVNNTVYDPLQPELDSFKEELDKYFKNHTSPDVDLGDISGINASVVNIQKEIDRLNEVAKNLNESLIDLQELGKYEQYIK

SEQ ID NO: 48 - protein, 1211 aa, Artificial Sequence
  SARS-CoV-2/Germany/BavPat1/2020__EPI_ISL_406862 spike protein (1-1211)(K986P_V987P)
MFVFLVLLPLVSSQCVNLTTRTQLPPAYTNSFTRGVYYPDKVFRSSVLHSTQDLFLPFFSNVTWFHAIHVSGTNGTKRFDNPVLPFNDGVYFASTEKSNIIRGWIFGTTLDSKTQSLLIVNNATNVVIKVCEFQFCNDPFLGVYYHKNNKSWMESEFRVYSSANNCTFEYVSQPFLMDLEGKQGNFKNLREFVFKNIDGYFKIYSKHTPINLVRDLPQGFSALEPLVDLPIGINITRFQTLLALHRSYLTPGDSSSGWTAGAAAYYVGYLQPRTFLLKYNENGTITDAVDCALDPLSETKCTLKSFTVEKGIYQTSNFRVQPTESIVRFPNITNLCPFGEVFNATRFASVYAWNRKRISNCVADYSVLYNSASFSTFKCYGVSPTKLNDLCFTNVYADSFVIRGDEVRQIAPGQTGKIADYNYKLPDDFTGCVIAWNSNNLDSKVGGNYNYLYRLFRKSNLKPFERDISTEIYQAGSTPCNGVEGFNCYFPLQSYGFQPTNGVGYQPYRVVVLSFELLHAPATVCGPKKSTNLVKNKCVNFNFNGLTGTGVLTESNKKFLPFQQFGRDIADTTDAVRDPQTLEILDITPCSFGGVSVITPGTNTSNQVAVLYQGVNCTEVPVAIHADQLTPTWRVYSTGSNVFQTRAGCLIGAEHVNNSYECDIPIGAGICASYQTQTNSPRRARSVASQSIIAYTMSLGAENSVAYSNNSIAIPTNFTISVTTEILPVSMTKTSVDCTMYICGDSTECSNLLLQYGSFCTQLNRALTGIAVEQDKNTQEVFAQVKQIYKTPPIKDFGGFNFSQILPDPSKPSKRSFIEDLLFNKVTLADAGFIKQYGDCLGDIAARDLICAQKFNGLTVLPPLLTDEMIAQYTSALLAGTITSGWTFGAGAALQIPFAMQMAYRFNGIGVTQNVLYENQKLIANQFNSAIGKIQDSLSSTASALGKLQDVVNQNAQALNTLVKQLSSNFGAISSVLNDILSRLDPPEAEVQIDRLITGRLQSLQTYVTQQLIRAAEIRASANLAATKMSECVLGQSKRVDFCGKGYHLMSFPQSAPHGVVFLHVTYVPAQEKNFTTAPAICHDGKAHFPREGVFVSNGTHWFVTQRNFYEPQIITTDNTFVSGNCDVVIGIVNNTVYDPLQPELDSFKEELDKYFKNHTSPDVDLGDISGINASVVNIQKEIDRLNEVAKNLNESLIDLQELGKYEQYIK

SEQ ID NO: 49 - protein, 62 aa, Artificial Sequence
  SARS-CoV-2/Wuhan/WIV05/2019__EPI_ISL_402128 spike protein (1212-1273)
WPWYIWLGFIAGLIAIVMVTIMLCCMTSCCSCLKGCCSCGSCCKFDEDDSEPVLKGVKLHYT

SEQ ID NO: 50 - protein, 62 aa, Artificial Sequence
  SARS-CoV-2/bat/Yunnan/RaTG13/2013__EPI_ISL_402131 spike protein (1208-1269)
WPWYIWLGFIAGLIAIIMVTIMLCCMTSCCSCLKGCCSCGSCCKFDEDDSEPVLKGVKLHYT

SEQ ID NO: 51 - protein, 62 aa, Artificial Sequence; identical to SEQ ID NO: 49
  SARS-CoV-2/Wuhan/HBCDC-HB-01/2019__EPI_ISL_402132 spike protein (1212-1273)

SEQ ID NO: 52 - protein, 62 aa, Artificial Sequence; identical to SEQ ID NO: 49
  SARS-CoV-2/Guangdong/20SF028/2020__EPI_ISL_403936 spike protein (1212-1273)

SEQ ID NO: 53 - protein, 62 aa, Artificial Sequence
  SARS-CoV-2/Shenzhen/SZTH-001/2020__EPI_ISL_406592 spike protein (1212-1273)
WPWYIWLGFIAGLIAIVMVTIMLCCMTSCCSCLKGCCSCGSCCKFDEDDSGPVLKGVKLHYT

SEQ ID NO: 54 - protein, 62 aa, Artificial Sequence; identical to SEQ ID NO: 49
  SARS-CoV-2/Shenzhen/SZTH-004/2020__EPI_ISL_406595 spike protein (1212-1273)

SEQ ID NO: 55 - protein, 62 aa, Artificial Sequence; identical to SEQ ID NO: 49
  SARS-CoV-2/France/IDF0372/2020__EPI_ISL_406596 spike protein (1212-1273)

SEQ ID NO: 56 - protein, 62 aa, Artificial Sequence; identical to SEQ ID NO: 49
  SARS-CoV-2/Australia/VIC01/2020__EPI_ISL_406844 spike protein (1212-1273)

SEQ ID NO: 57 - protein, 62 aa, Artificial Sequence; identical to SEQ ID NO: 49
  SARS-CoV-2/Germany/BavPat1/2020__EPI_ISL_406862 spike protein (1212-1273)

SEQ ID NO: 58 - protein, 1371 aa, Artificial Sequence
  SARS-CoV-2/Wuhan/WIV05/2019__EPI_ISL_402128 spike protein (1-1211) LumSynth construct
MFVFLVLLPLVSSQCVNLTTRTQLPPAYTNSFTRGVYYPDKVFRSSVLHSTQDLFLPFFSNVTWFHAIHVSGTNGTKRFDNPVLPFNDGVYFASTEKSNIIRGWIFGTTLDSKTQSLLIVNNATNVVIKVCEFQFCNDPFLGVYYHKNNKSWMESEFRVYSSANNCTFEYVSQPFLMDLEGKQGNFKNLREFVFKNIDGYFKIYSKHTPINLVRDLPQGFSALEPLVDLPIGINITRFQTLLALHRSYLTPGDSSSGWTAGAAAYYVGYLQPRTFLLKYNENGTITDAVDCALDPLSETKCTLKSFTVEKGIYQTSNFRVQPTESIVRFPNITNLCPFGEVFNATRFASVYAWNRKRISNCVADYSVLYNSASFSTFKCYGVSPTKLNDLCFTNVYADSFVIRGDEVRQIAPGQTGKIADYNYKLPDDFTGCVIAWNSNNLDSKVGGNYNYLYRLFRKSNLKPFERDISTEIYQAGSTPCNGVEGFNCYFPLQSYGFQPTNGVGYQPYRVVVLSFELLHAPATVCGPKKSTNLVKNKCVNFNFNGLTGTGVLTESNKKFLPFQQFGRDIADTTDAVRDPQTLEILDITPCSFGGVSVITPGTNTSNQVAVLYQDVNCTEVPVAIHADQLTPTWRVYSTGSNVFQTRAGCLIGAEHVNNSYECDIPIGAGICASYQTQTNSPRRARSVASQSIIAYTMSLGAENSVAYSNNSIAIPTNFTISVTTEILPVSMTKTSVDCTMYICGDSTECSNLLLQYGSFCTQLNRALTGIAVEQDKNTQEVFAQVKQIYKTPPIKDFGGFNFSQILPDPSKPSKRSFIEDLLFNKVTLADAGFIKQYGDCLGDIAARDLICAQKFNGLTVLPPLLTDEMIAQYTSALLAGTITSGWTFGAGAALQIPFAMQMAYRFNGIGVTQNVLYENQKLIANQFNSAIGKIQDSLSSTASALGKLQDVVNQNAQALNTLVKQLSSNFGAISSVLNDILSRLDKVEAEVQIDRLITGRLQSLQTYVTQQLIRAAEIRASANLAATKMSECVLGQSKRVDFCGKGYHLMSFPQSAPHGVVFLHVTYVPAQEKNFTTAPAICHDGKAHFPREGVFVSNGTHWFVTQRNFYEPQIITTDNTFVSGNCDVVIGIVNNTVYDPLQPELDSFKEELDKYFKNHTSPDVDLGDISGINASVVNIQKEIDRLNEVAKNLNESLIDLQELGKYEQYIKGGGSGGGQIYEGKLTAEGLRFGIVASRFNHALVDRLVEGAIDAIVRHGGREEDITLVRVPGSWEIPVAAGELARKEDIDAVIAIGVLIRGATPHFDYIASEVSKGLADLSLELRKPITFGVITADTLEQAIERAGTKHGNKGWEAALSAIEMANLFKSLR

SEQ ID NO: 59 - protein, 1367 aa, Artificial Sequence
  SARS-CoV-2/bat/Yunnan/RaTG13/2013__EPI_ISL_402131 spike protein (1-1207) LumSynth construct
MFVFLVLLPLVSSQCVNLTTRTQLPPAYTNSSTRGVYYPDKVFRSSVLHLTQDLFLPFFSNVTWFHAIHVSGTNGIKRFDNPVLPFNDGVYFASTEKSNIIRGWIFGTTLDSKTQSLLIVNNATNVVIKVCEFQFCNDPFLGVYYHKNNKSWMESEFRVYSSANNCTFEYVSQPFLMDLEGKQGNFKNLREFVFKNIDGYFKIYSKHTPINLVRDLPPGFSALEPLVDLPIGINITRFQTLLALHRSYLTPGDSSSGWTAGAAAYYVGYLQPRTFLLKYNENGTITDAVDCALDPLSETKCTLKSFTVEKGIYQTSNFRVQPTDSIVRFPNITNLCPFGEVFNATTFASVYAWNRKRISNCVADYSVLYNSTSFSTFKCYGVSPTKLNDLCFTNVYADSFVITGDEVRQIAPGQTGKIADYNYKLPDDFTGCVIAWNSKHIDAKEGGNFNYLYRLFRKANLKPFERDISTEIYQAGSKPCNGQTGLNCYYPLYRYGFYPTDGVGHQPYRVVVLSFELLNAPATVCGPKKSTNLVKNKCVNFNFNGLTGTGVLTESNKKFLPFQQFGRDIADTTDAVRDPQTLEILDITPCSFGGVSVITPGTNASNQVAVLYQDVNCTEVPVAIHADQLTPTWRVYSTGSNVFQTRAGCLIGAEHVNNSYECDIPIGAGICASYQTQTNSRSVASQSIIAYTMSLGAENSVAYSNNSIAIPTNFTISVTTEILPVSMTKTSVDCTMYICGDSTECSNLLLQYGSFCTQLNRALTGIAVEQDKNTQEVFAQVKQIYKTPPIKDFGGFNFSQILPDPSKPSKRSFIEDLLFNKVTLADAGFIKQYGDCLGDIAARDLICAQKFNGLTVLPPLLTDEMIAQYTSALLAGTITSGWTFGAGAALQIPFAMQMAYRFNGIGVTQNVLYENQKLIANQFNSAIGKIQDSLSSTASALGKLQDVVNQNAQALNTLVKQLSSNFGAISSVLNDILSRLDKVEAEVQIDRLITGRLQSLQTYVTQQLIRAAEIRASANLAATKMSECVLGQSKRVDFCGKGYHLMSFPQSAPHGVVFLHVTYVPAQEKNFTTAPAICHDGKAHFPREGVFVSNGTHWFVTQRNFYEPQIITTDNTFVSGSCDVVIGIVNNTVYDPLQPELDSFKEELDKYFKNHTSPDVDLGDISGINASVVNIQKEIDRLNEVAKNLNESLIDLQELGKYEQYIKGGGSGGGQIYEGKLTAEGLRFGIVASRFNHALVDRLVEGAIDAIVRHGGREEDITLVRVPGSWEIPVAAGELARKEDIDAVIAIGVLIRGATPHFDYIASEVSKGLADLSLELRKPITFGVITADTLEQAIERAGTKHGNKGWEAALSAIEMANLFKSLR

SEQ ID NO: 60 - protein, 1371 aa, Artificial Sequence
  SARS-CoV-2/Wuhan/HBCDC-HB-01/2019__EPI_ISL_402132 spike protein (1-1211) LumSynth construct
MFVFLVLLPLVSSQCVNLTTRTQLPPAYTNSITRGVYYPDKVFRSSVLHSTQDLFLPFFSNVTWFHAIHVSGTNGTKRFDNPVLPFNDGVYFASTEKSNIIRGWIFGTTLDSKTQSLLIVNNATNVVIKVCEFQFCNDPFLGVYYHKNNKSWMESEFRVYSSANNCTFEYVSQPFLMDLEGKQGNFKNLREFVFKNIDGYFKIYSKHTPINLVRDLPQGFSALEPLVDLPIGINITRFQTLLALHRSYLTPGDSSSGWTAGAAAYYVGYLQPRTFLLKYNENGTITDAVDCALDPLSETKCTLKSFTVEKGIYQTSNFRVQPTESIVRFPNITNLCPFGEVFNATRFASVYAWNRKRISNCVADYSVLYNSASFSTFKCYGVSPTKLNDLCFTNVYADSFVIRGDEVRQIAPGQTGKIADYNYKLPDDFTGCVIAWNSNNLDSKVGGNYNYLYRLFRKSNLKPFERDISTEIYQAGSTPCNGVEGFNCYFPLQSYGFQPTNGVGYQPYRVVVLSFELLHAPATVCGPKKSTNLVKNKCVNFNFNGLTGTGVLTESNKKFLPFQQFGRDIADTTDAVRDPQTLEILDITPCSFGGVSVITPGTNTSNQVAVLYQDVNCTEVPVAIHADQLTPTWRVYSTGSNVFQTRAGCLIGAEHVNNSYECDIPIGAGICASYQTQTNSPRRARSVASQSIIAYTMSLGAENSVAYSNNSIAIPTNFTISVTTEILPVSMTKTSVDCTMYICGDSTECSNLLLQYGSFCTQLNRALTGIAVEQDKNTQEVFAQVKQIYKTPPIKDFGGFNFSQILPDPSKPSKRSFIEDLLFNKVTLADAGFIKQYGDCLGDIAARDLICAQKFNGLTVLPPLLTDEMIAQYTSALLAGTITSGWTFGAGAALQIPFAMQMAYRFNGIGVTQNVLYENQKLIANQFNSAIGKIQDSLSSTASALGKLQDVVNQNAQALNTLVKQLSSNFGAISSVLNDILSRLDKVEAEVQIDRLITGRLQSLQTYVTQQLIRAAEIRASANLAATKMSECVLGQSKRVDFCGKGYHLMSFPQSAPHGVVFLHVTYVPAQEKNFTTAPAICHDGKAHFPREGVFVSNGTHWFVTQRNFYEPQIITTDNTFVSGNCDVVIGIVNNTVYDPLQPELDSFKEELDKYFKNHTSPDVDLGDISGINASVVNIQKEIDRLNEVAKNLNESLIDLQELGKYEQYIKGGGSGGGQIYEGKLTAEGLRFGIVASRFNHALVDRLVEGAIDAIVRHGGREEDITLVRVPGSWEIPVAAGELARKEDIDAVIAIGVLIRGATPHFDYIASEVSKGLADLSLELRKPITFGVITADTLEQAIERAGTKHGNKGWEAALSAIEMANLFKSLR

SEQ ID NO: 61 - protein, 1371 aa, Artificial Sequence
  SARS-CoV-2/Guangdong/20SF028/2020__EPI_ISL_403936 spike protein (1-1211) LumSynth construct
MFVFLVLLPLVSSQCVNLTTRTQLPPAYTNSFTRGVYYPDKVFRSSVLYSTQDLFLPFFSNVTWFHAIHVSGTNGTKRFDNPVLPFNDGVYFASTEKSNIIRGWIFGTTLDSKTQSLLIVNNATNVVIKVCEFQFCNDPFLGVYYHKNNKSWMESEFRVYSSANNCTFEYVSQPFLMDLEGKQGNFKNLREFVFKNIDGYFKIYSKHTPINLVRDLPQGFSALEPLVDLPIGINITRFQTLLALHRSYLTPGDSSSGWTAGAAAYYVGYLQPRTFLLKYNENGTITDAVDCALDPLSETKCTLKSFTVEKGIYQTSNFRVQPTESIVRFPNITNLCPFGEVFNATRFASVYAWNRKRISNCVADYSVLYNSASFSTFKCYGVSPTKLNDLCFTNVYADSFVIRGDEVRQIAPGQTGKIADYNYKLPDDFTGCVIAWNSNNLDSKVGGNYNYLYRLFRKSNLKPFERDISTEIYQAGSTPCNGVEGFNCYFPLQSYGFQPTNGVGYQPYRVVVLSFELLHAPATVCGPKKSTNLVKNKCVNFNFNGLTGTGVLTESNKKFLPFQQFGRDIADTTDAVRDPQTLEILDITPCSFGGVSVITPGTNTSNQVAVLYQDVNCTEVPVAIHADQLTPTWRVYSTGSNVFQTRAGCLIGAEHVNNSYECDIPIGAGICASYQTQTNSPRRARSVASQSIIAYTMSLGAENSVAYSNNSIAIPTNFTISVTTEILPVSMTKTSVDCTMYICGDSTECSNLLLQYGSFCTQLNRALTGIAVEQDKNTQEVFAQVKQIYKTPPIKDFGGFNFSQILPDPSKPSKRSFIEDLLFNKVTLADAGFIKQYGDCLGDIAARDLICAQKFNGLTVLPPLLTDEMIAQYTSALLAGTITSGWTFGAGAALQIPFAMQMAYRFNGIGVTQNVLYENQKLIANQFNSAIGKIQDSLSSTASALGKLQDVVNQNAQALNTLVKQLSSNFGAISSVLNDILSRLDKVEAEVQIDRLITGRLQSLQTYVTQQLIRAAEIRASANLAATKMSECVLGQSKRVDFCGKGYHLMSFPQSAPHGVVFLHVTYVPAQEKNFTTAPAICHDGKAHFPREGVFVSNGTHWFVTQRNFYEPQIITTDNTFVSGNCDVVIGIVNNTVYDPLQPELDSFKEELDKYFKNHTSPDVDLGDISGINASVVNIQKEIDRLNEVAKNLNESLIDLQELGKYEQYIKGGGSGGGQIYEGKLTAEGLRFGIVASRFNHALVDRLVEGAIDAIVRHGGREEDITLVRVPGSWEIPVAAGELARKEDIDAVIAIGVLIRGATPHFDYIASEVSKGLADLSLELRKPITFGVITADTLEQAIERAGTKHGNKGWEAALSAIEMANLFKSLR

SEQ ID NO: 62 - protein, 1371 aa, Artificial Sequence
  SARS-CoV-2/Shenzhen/SZTH-001/2020__EPI_ISL_406592 spike protein (1-1211) LumSynth construct
MFVFLVLLPLVSSQCVNLTTRTQLPPAYTNSFTRGVYYPDKVFRSSVLHSTQDLFLPFFSNVTWFHAIHVSGTNGTKRFDNPVLPFNDGVYFASTEKSNIIRGWIFGTTLDSKTQSLLIVNNATNVVIKVCEFQFCNDPFLGVYYHKNNKSWMESEFRVYSSANNCTFEYVSQPFLMDLEGKQGNFKNLREFVFKNIDGYFKIYSKHTPINLVRDLPQGFSALEPLVDLPIGINITRFQTLLALHRSYLTPGDSSSGWTAGAAAYYVGYLQPRTFLLKYNENGTITDAVDCALDPLSETKCTLKSFTVEKGIYQTSNFRVQPTESIVRFPNITNLCPFGEVFNATRFASVYAWNRKRISNCVADYSVLYNSASFSTFKCYGVSPTKLNDLCFTNVYADSFVIRGDEVRQIAPGQTGKIADYNYKLPDDFTGCVIAWNSNNLDSKVGGNYNYLYRLFRKSNLKPFERDISTEIYQAGSTPCNGVEGFNCYFPLQSYGFQPTNGVGYQPYRVVVLSFELLHAPATVCGPKKSTNLVKNKCVNFNFNGLTGTGVLTESNKKFLPFQQFGRDIADTTDAVRDPQTLEILDITPCSFGGVSVITPGTNTSNQVAVLYQDVNCTEVPVAIHADQLTPTWRVYSTGSNVFQTRAGCLIGAEHVNNSYECDIPIGAGICASYQTQTNSPRRARSVASQSIIAYTMSLGAENSVAYSNNSIAIPTNFTISVTTEILPVSMTKTSVDCTMYICGDSTECSNLLLQYGSFCTQLNRALTGIAVEQDKNTQEVFAQVKQIYKTPPIKDFGGFNFSQILPDPSKPSKRSFIEDLLFNKVTLADAGFIKQYGDCLGDIAARDLICAQKFNGLTVLPPLLTDEMIAQYTSALLAGTITSGWTFGAGAALQIPFAMQMAYRFNGIGVTQNVLYENQKLIANQFNSAIGKIQDSLSSTASALGKLQDVVNQNAQALNTLVKQLSSNFGAISSVLNDILSRLDKVEAEVQIDRLITGRLQSLQTYVTQQLIRAAEIRASANLAATKMSECVLGQSKRVDFCGKGYHLMSFPQSAPHGVVFLHVTYVPAQEKNFTTAPAICHDGKAHFPREGVFVSNGTHWFVTQRNFYEPQIITTDNTFVSGNCDVLIGIVNNTVYDPLQPELDSFKEELDKYFKNHTSPDVDLGDISGINASVVNIQKEIDRLNEVAKNLNESLIDLQELGKYEQYIKGGGSGGGQIYEGKLTAEGLRFGIVASRFNHALVDRLVEGAIDAIVRHGGREEDITLVRVPGSWEIPVAAGELARKEDIDAVIAIGVLIRGATPHFDYIASEVSKGLADLSLELRKPITFGVITADTLEQAIERAGTKHGNKGWEAALSAIEMANLFKSLR

SEQ ID NO: 63 - protein, 1371 aa, Artificial Sequence
  SARS-CoV-2/Shenzhen/SZTH-004/2020__EPI_ISL_406595 spike protein (1-1211) LumSynth construct
MFVFLVLLPLVSSQCVNLTTRTQLPPAYTNSFTRGVYYPDKVFRSSVLHSTQDLFLPFFSNVTWFHAIHVSGTNGTKRFDNPVLPFNDGVYFASTEKSNIIRGWIFGTTLDSKTQSLLIVNNATNVVIKVCEFQFCNDPFLGVYYHKNNKSWMESEFRVYSSANNCTFEYVSQPFLMDLEGKQGNFKNLREFVFKNIDGYFKIYSKHTPINLVRDLPQGFSALEPLVDLPIGINITRFQTLLALHRSYLTPGDSSSGWTAGAAAYYVGYLQPRTFLLKYNENGTITDAVDCALDPLSETKCTLKSFTVEKGIYQTSNFRVQPTESIVRFPNITNLCPFGEVFNATRFASVYAWDRKRISNCVAYYSVLYNSASFSTFKCYGVSPTKLNDLCFTNVYADSFVIRGDEVRQIAPGQTGKIADYNYKLPDDFTGCVIAWNSNNLDSKVGGNYNYLYRLFRKSNLKPFERDISTEIYQAGSTPCNGVEGFNCYFPLQSYGFQPTNGVGYQPYRVVVLSFELLHAPATVCGPKKSTNLVKNKCVNFNFNGLTGTGVLTESNKKFLPFQQFGRDIADTTDAVRDPQTLEILDITPCSFGGVSVITPGTNTSNQVAVLYQDVNCTEVPVAIHADQLTPTWRVYSTGSNVFQTRAGCLIGAEHVNNSYECDIPIGAGICASYQTQTNSPRRARSVASQSIIAYTMSLGAENSVAYSNNSIAIPTNFTISVTTEILPVSMTKTSVDCTMYICGDSTECSNLLLQYGSFCTQLNRALTGIAVEQDKNTQEVFAQVKQIYKTPPIKDFGGFNFSQILPDPSKPSKRSFIEDLLFNKVTLADAGFIKQYGDCLGDIAARDLICAQKFNGLTVLPPLLTDEMIAQYTSALLAGTITSGWTFGAGAALQIPFAMQMAYRFNGIGVTQNVLYENQKLIANQFNSAIGKIQDSLSSTASALGKLQDVVNQNAQALNTLVKQLSSNFGAISSVLNDILSRLDKVEAEVQIDRLITGRLQSLQTYVTQQLIRAAEIRASANLAATKMSECVLGQSKRVDFCGKGYHLMSFPQSAPHGVVFLHVTYVPAQEKNFTTAPAICHDGKAHFPREGVFVSNGTHWFVTQRNFYEPQIITTDNTFVSGNCDVVIGIVNNTVYDPLQPELDSFKEELDKYFKNHTSPDVDLGDISGINASVVNIQKEIDRLNEVAKNLNESLIDLQELGKYEQYIKGGGSGGGQIYEGKLTAEGLRFGIVASRFNHALVDRLVEGAIDAIVRHGGREEDITLVRVPGSWEIPVAAGELARKEDIDAVIAIGVLIRGATPHFDYIASEVSKGLADLSLELRKPITFGVITADTLEQAIERAGTKHGNKGWEAALSAIEMANLFKSLR

SEQ ID NO: 64 - protein, 1371 aa, Artificial Sequence
  SARS-CoV-2/France/IDF0372/2020__EPI_ISL_406596 spike protein (1-1211) LumSynth construct
MFVFLVLLPLVSSQCVNLTTRTQLPPAYTNSFTRGVYYPDKVFRSSVLHSTQDLFLPFFSNVTWFHAIHVSGTNGTKRFDNPVLPFNDGVYFASTEKSNIIRGWIFGTTLDSKTQSLLIVNNATNVVIKVCEFQFCNDPFLGVYYHKNNKSWMESEFRVYSSANNCTFEYVSQPFLMDLEGKQGNFKNLREFVFKNIDGYFKIYSKHTPINLVRDLPQGFSALEPLVDLPIGINITRFQTLLALHRSYLTPGDSSSGWTAGAAAYYVGYLQPRTFLLKYNENGTITDAVDCALDPLSETKCTLKSFTVEKGIYQTSNFRVQPTESIVRFPNITNLCPFGEVFNATRFASVYAWNRKRISNCVADYSFLYNSASFSTFKCYGVSPTKLNDLCFTNVYADSFVIRGDEVRQIAPGQTGKIADYNYKLPDDFTGCVIAWNSNNLDSKVGGNYNYLYRLFRKSNLKPFERDISTEIYQAGSTPCNGVEGFNCYFPLQSYGFQPTNGVGYQPYRVVVLSFELLHAPATVCGPKKSTNLVKNKCVNFNFNGLTGTGVLTESNKKFLPFQQFGRDIADTTDAVRDPQTLEILDITPCSFGGVSVITPGTNTSNQVAVLYQDVNCTEVPVAIHADQLTPTWRVYSTGSNVFQTRAGCLIGAEHVNNSYECDIPIGAGICASYQTQTNSPRRARSVASQSIIAYTMSLGAENSVAYSNNSIAIPTNFTISVTTEILPVSMTKTSVDCTMYICGDSTECSNLLLQYGSFCTQLNRALTGIAVEQDKNTQEVFAQVKQIYKTPPIKDFGGFNFSQILPDPSKPSKRSFIEDLLFNKVTLADAGFIKQYGDCLGDIAARDLICAQKFNGLTVLPPLLTDEMIAQYTSALLAGTITSGWTFGAGAALQIPFAMQMAYRFNGIGVTQNVLYENQKLIANQFNSAIGKIQDSLSSTASALGKLQDVVNQNAQALNTLVKQLSSNFGAISSVLNDILSRLDKVEAEVQIDRLITGRLQSLQTYVTQQLIRAAEIRASANLAATKMSECVLGQSKRVDFCGKGYHLMSFPQSAPHGVVFLHVTYVPAQEKNFTTAPAICHDGKAHFPREGVFVSNGTHWFVTQRNFYEPQIITTDNTFVSGNCDVVIGIVNNTVYDPLQPELDSFKEELDKYFKNHTSPDVDLGDISGINASVVNIQKEIDRLNEVAKNLNESLIDLQELGKYEQYIKGGGSGGGQIYEGKLTAEGLRFGIVASRFNHALVDRLVEGAIDAIVRHGGREEDITLVRVPGSWEIPVAAGELARKEDIDAVIAIGVLIRGATPHFDYIASEVSKGLADLSLELRKPITFGVITADTLEQAIERAGTKHGNKGWEAALSAIEMANLFKSLR

SEQ ID NO: 65 - protein, 1371 aa, Artificial Sequence
  SARS-CoV-2/Australia/VIC01/2020__EPI_ISL_406844 spike protein (1-1211) LumSynth construct
MFVFLVLLPLVSSQCVNLTTRTQLPPAYTNSFTRGVYYPDKVFRSSVLHSTQDLFLPFFSNVTWFHAIHVSGTNGTKRFDNPVLPFNDGVYFASTEKSNIIRGWIFGTTLDSKTQSLLIVNNATNVVIKVCEFQFCNDPFLGVYYHKNNKSWMESEFRVYSSANNCTFEYVSQPFLMDLEGKQGNFKNLREFVFKNIDGYFKIYSKHTPINLVRDLPQGFSALEPLVDLPIGINITRFQTLLALHRRYLTPGDSSSGWTAGAAAYYVGYLQPRTFLLKYNENGTITDAVDCALDPLSETKCTLKSFTVEKGIYQTSNFRVQPTESIVRFPNITNLCPFGEVFNATRFASVYAWNRKRISNCVADYSVLYNSASFSTFKCYGVSPTKLNDLCFTNVYADSFVIRGDEVRQIAPGQTGKIADYNYKLPDDFTGCVIAWNSNNLDSKVGGNYNYLYRLFRKSNLKPFERDISTEIYQAGSTPCNGVEGFNCYFPLQSYGFQPTNGVGYQPYRVVVLSFELLHAPATVCGPKKSTNLVKNKCVNFNFNGLTGTGVLTESNKKFLPFQQFGRDIADTTDAVRDPQTLEILDITPCSFGGVSVITPGTNTSNQVAVLYQDVNCTEVPVAIHADQLTPTWRVYSTGSNVFQTRAGCLIGAEHVNNSYECDIPIGAGICASYQTQTNSPRRARSVASQSIIAYTMSLGAENSVAYSNNSIAIPTNFTISVTTEILPVSMTKTSVDCTMYICGDSTECSNLLLQYGSFCTQLNRALTGIAVEQDKNTQEVFAQVKQIYKTPPIKDFGGFNFSQILPDPSKPSKRSFIEDLLFNKVTLADAGFIKQYGDCLGDIAARDLICAQKFNGLTVLPPLLTDEMIAQYTSALLAGTITSGWTFGAGAALQIPFAMQMAYRFNGIGVTQNVLYENQKLIANQFNSAIGKIQDSLSSTASALGKLQDVVNQNAQALNTLVKQLSSNFGAISSVLNDILSRLDKVEAEVQIDRLITGRLQSLQTYVTQQLIRAAEIRASANLAATKMSECVLGQSKRVDFCGKGYHLMSFPQSAPHGVVFLHVTYVPAQEKNFTTAPAICHDGKAHFPREGVFVSNGTHWFVTQRNFYEPQIITTDNTFVSGNCDVVIGIVNNTVYDPLQPELDSFKEELDKYFKNHTSPDVDLGDISGINASVVNIQKEIDRLNEVAKNLNESLIDLQELGKYEQYIKGGGSGGGQIYEGKLTAEGLRFGIVASRFNHALVDRLVEGAIDAIVRHGGREEDITLVRVPGSWEIPVAAGELARKEDIDAVIAIGVLIRGATPHFDYIASEVSKGLADLSLELRKPITFGVITADTLEQAIERAGTKHGNKGWEAALSAIEMANLFKSLR

SEQ ID NO: 66 - protein, 1371 aa, Artificial Sequence
  SARS-CoV-2/Germany/BavPat1/2020__EPI_ISL_406862 spike protein (1-1211) LumSynth construct
MFVFLVLLPLVSSQCVNLTTRTQLPPAYTNSFTRGVYYPDKVFRSSVLHSTQDLFLPFFSNVTWFHAIHVSGTNGTKRFDNPVLPFNDGVYFASTEKSNIIRGWIFGTTLDSKTQSLLIVNNATNVVIKVCEFQFCNDPFLGVYYHKNNKSWMESEFRVYSSANNCTFEYVSQPFLMDLEGKQGNFKNLREFVFKNIDGYFKIYSKHTPINLVRDLPQGFSALEPLVDLPIGINITRFQTLLALHRSYLTPGDSSSGWTAGAAAYYVGYLQPRTFLLKYNENGTITDAVDCALDPLSETKCTLKSFTVEKGIYQTSNFRVQPTESIVRFPNITNLCPFGEVFNATRFASVYAWNRKRISNCVADYSVLYNSASFSTFKCYGVSPTKLNDLCFTNVYADSFVIRGDEVRQIAPGQTGKIADYNYKLPDDFTGCVIAWNSNNLDSKVGGNYNYLYRLFRKSNLKPFERDISTEIYQAGSTPCNGVEGFNCYFPLQSYGFQPTNGVGYQPYRVVVLSFELLHAPATVCGPKKSTNLVKNKCVNFNFNGLTGTGVLTESNKKFLPFQQFGRDIADTTDAVRDPQTLEILDITPCSFGGVSVITPGTNTSNQVAVLYQGVNCTEVPVAIHADQLTPTWRVYSTGSNVFQTRAGCLIGAEHVNNSYECDIPIGAGICASYQTQTNSPRRARSVASQSIIAYTMSLGAENSVAYSNNSIAIPTNFTISVTTEILPVSMTKTSVDCTMYICGDSTECSNLLLQYGSFCTQLNRALTGIAVEQDKNTQEVFAQVKQIYKTPPIKDFGGFNFSQILPDPSKPSKRSFIEDLLFNKVTLADAGFIKQYGDCLGDIAARDLICAQKFNGLTVLPPLLTDEMIAQYTSALLAGTITSGWTFGAGAALQIPFAMQMAYRFNGIGVTQNVLYENQKLIANQFNSAIGKIQDSLSSTASALGKLQDVVNQNAQALNTLVKQLSSNFGAISSVLNDILSRLDKVEAEVQIDRLITGRLQSLQTYVTQQLIRAAEIRASANLAATKMSECVLGQSKRVDFCGKGYHLMSFPQSAPHGVVFLHVTYVPAQEKNFTTAPAICHDGKAHFPREGVFVSNGTHWFVTQRNFYEPQIITTDNTFVSGNCDVVIGIVNNTVYDPLQPELDSFKEELDKYFKNHTSPDVDLGDISGINASVVNIQKEIDRLNEVAKNLNESLIDLQELGKYEQYIKGGGSGGGQIYEGKLTAEGLRFGIVASRFNHALVDRLVEGAIDAIVRHGGREEDITLVRVPGSWEIPVAAGELARKEDIDAVIAIGVLIRGATPHFDYIASEVSKGLADLSLELRKPITFGVITADTLEQAIERAGTKHGNKGWEAALSAIEMANLFKSLR

SEQ ID NO: 67 - protein, 1377 aa, Artificial Sequence
  SARS-CoV-2/Wuhan/WIV05/2019__EPI_ISL_402128 spike protein (1-1211) Ferritin construct
MFVFLVLLPLVSSQCVNLTTRTQLPPAYTNSFTRGVYYPDKVFRSSVLHSTQDLFLPFFSNVTWFHAIHVSGTNGTKRFDNPVLPFNDGVYFASTEKSNIIRGWIFGTTLDSKTQSLLIVNNATNVVIKVCEFQFCNDPFLGVYYHKNNKSWMESEFRVYSSANNCTFEYVSQPFLMDLEGKQGNFKNLREFVFKNIDGYFKIYSKHTPINLVRDLPQGFSALEPLVDLPIGINITRFQTLLALHRSYLTPGDSSSGWTAGAAAYYVGYLQPRTFLLKYNENGTITDAVDCALDPLSETKCTLKSFTVEKGIYQTSNFRVQPTESIVRFPNITNLCPFGEVFNATRFASVYAWNRKRISNCVADYSVLYNSASFSTFKCYGVSPTKLNDLCFTNVYADSFVIRGDEVRQIAPGQTGKIADYNYKLPDDFTGCVIAWNSNNLDSKVGGNYNYLYRLFRKSNLKPFERDISTEIYQAGSTPCNGVEGFNCYFPLQSYGFQPTNGVGYQPYRVVVLSFELLHAPATVCGPKKSTNLVKNKCVNFNFNGLTGTGVLTESNKKFLPFQQFGRDIADTTDAVRDPQTLEILDITPCSFGGVSVITPGTNTSNQVAVLYQDVNCTEVPVAIHADQLTPTWRVYSTGSNVFQTRAGCLIGAEHVNNSYECDIPIGAGICASYQTQTNSPRRARSVASQSIIAYTMSLGAENSVAYSNNSIAIPTNFTISVTTEILPVSMTKTSVDCTMYICGDSTECSNLLLQYGSFCTQLNRALTGIAVEQDKNTQEVFAQVKQIYKTPPIKDFGGFNFSQILPDPSKPSKRSFIEDLLFNKVTLADAGFIKQYGDCLGDIAARDLICAQKFNGLTVLPPLLTDEMIAQYTSALLAGTITSGWTFGAGAALQIPFAMQMAYRFNGIGVTQNVLYENQKLIANQFNSAIGKIQDSLSSTASALGKLQDVVNQNAQALNTLVKQLSSNFGAISSVLNDILSRLDKVEAEVQIDRLITGRLQSLQTYVTQQLIRAAEIRASANLAATKMSECVLGQSKRVDFCGKGYHLMSFPQSAPHGVVFLHVTYVPAQEKNFTTAPAICHDGKAHFPREGVFVSNGTHWFVTQRNFYEPQIITTDNTFVSGNCDVVIGIVNNTVYDPLQPELDSFKEELDKYFKNHTSPDVDLGDISGINASVVNIQKEIDRLNEVAKNLNESLIDLQELGKYEQYIKGGSDIIKLLNEQVNKEMQSSNLYMSMSSWCYTHSLDGAGLFLFDHAAEEYEHAKKLIIFLNENNVPVQLTSISAPEHKFEGLTQIFQKAYEHEQHISESINNIVDHAIKSKDHATFNFLQWYVAEQHEEEVLFKDILDKIELIGNENHGLYLADQYVKGIAKSRKS

SEQ ID NO: 68 - protein, 1373 aa, Artificial Sequence
  SARS-CoV-2/bat/Yunnan/RaTG13/2013__EPI_ISL_402131 spike protein (1-1207) Ferritin construct
MFVFLVLLPLVSSQCVNLTTRTQLPPAYTNSSTRGVYYPDKVFRSSVLHLTQDLFLPFFSNVTWFHAIHVSGTNGIKRFDNPVLPFNDGVYFASTEKSNIIRGWIFGTTLDSKTQSLLIVNNATNVVIKVCEFQFCNDPFLGVYYHKNNKSWMESEFRVYSSANNCTFEYVSQPFLMDLEGKQGNFKNLREFVFKNIDGYFKIYSKHTPINLVRDLPPGFSALEPLVDLPIGINITRFQTLLALHRSYLTPGDSSSGWTAGAAAYYVGYLQPRTFLLKYNENGTITDAVDCALDPLSETKCTLKSFTVEKGIYQTSNFRVQPTDSIVRFPNITNLCPFGEVFNATTFASVYAWNRKRISNCVADYSVLYNSTSFSTFKCYGVSPTKLNDLCFTNVYADSFVITGDEVRQIAPGQTGKIADYNYKLPDDFTGCVIAWNSKHIDAKEGGNFNYLYRLFRKANLKPFERDISTEIYQAGSKPCNGQTGLNCYYPLYRYGFYPTDGVGHQPYRVVVLSFELLNAPATVCGPKKSTNLVKNKCVNFNFNGLTGTGVLTESNKKFLPFQQFGRDIADTTDAVRDPQTLEILDITPCSFGGVSVITPGTNASNQVAVLYQDVNCTEVPVAIHADQLTPTWRVYSTGSNVFQTRAGCLIGAEHVNNSYECDIPIGAGICASYQTQTNSRSVASQSIIAYTMSLGAENSVAYSNNSIAIPTNFTISVTTEILPVSMTKTSVDCTMYICGDSTECSNLLLQYGSFCTQLNRALTGIAVEQDKNTQEVFAQVKQIYKTPPIKDFGGFNFSQILPDPSKPSKRSFIEDLLFNKVTLADAGFIKQYGDCLGDIAARDLICAQKFNGLTVLPPLLTDEMIAQYTSALLAGTITSGWTFGAGAALQIPFAMQMAYRFNGIGVTQNVLYENQKLIANQFNSAIGKIQDSLSSTASALGKLQDVVNQNAQALNTLVKQLSSNFGAISSVLNDILSRLDKVEAEVQIDRLITGRLQSLQTYVTQQLIRAAEIRASANLAATKMSECVLGQSKRVDFCGKGYHLMSFPQSAPHGVVFLHVTYVPAQEKNFTTAPAICHDGKAHFPREGVFVSNGTHWFVTQRNFYEPQIITTDNTFVSGSCDVVIGIVNNTVYDPLQPELDSFKEELDKYFKNHTSPDVDLGDISGINASVVNIQKEIDRLNEVAKNLNESLIDLQELGKYEQYIKGGSDIIKLLNEQVNKEMQSSNLYMSMSSWCYTHSLDGAGLFLFDHAAEEYEHAKKLIIFLNENNVPVQLTSISAPEHKFEGLTQIFQKAYEHEQHISESINNIVDHAIKSKDHATFNFLQWYVAEQHEEEVLFKDILDKIELIGNENHGLYLADQYVKGIAKSRKS

SEQ ID NO: 69 - protein, 1377 aa, Artificial Sequence
  SARS-CoV-2/Wuhan/HBCDC-HB-01/2019__EPI_ISL_402132 spike protein (1-1211) Ferritin construct
MFVFLVLLPLVSSQCVNLTTRTQLPPAYTNSITRGVYYPDKVFRSSVLHSTQDLFLPFFSNVTWFHAIHVSGTNGTKRFDNPVLPFNDGVYFASTEKSNIIRGWIFGTTLDSKTQSLLIVNNATNVVIKVCEFQFCNDPFLGVYYHKNNKSWMESEFRVYSSANNCTFEYVSQPFLMDLEGKQGNFKNLREFVFKNIDGYFKIYSKHTPINLVRDLPQGFSALEPLVDLPIGINITRFQTLLALHRSYLTPGDSSSGWTAGAAAYYVGYLQPRTFLLKYNENGTITDAVDCALDPLSETKCTLKSFTVEKGIYQTSNFRVQPTESIVRFPNITNLCPFGEVFNATRFASVYAWNRKRISNCVADYSVLYNSASFSTFKCYGVSPTKLNDLCFTNVYADSFVIRGDEVRQIAPGQTGKIADYNYKLPDDFTGCVIAWNSNNLDSKVGGNYNYLYRLFRKSNLKPFERDISTEIYQAGSTPCNGVEGFNCYFPLQSYGFQPTNGVGYQPYRVVVLSFELLHAPATVCGPKKSTNLVKNKCVNFNFNGLTGTGVLTESNKKFLPFQQFGRDIADTTDAVRDPQTLEILDITPCSFGGVSVITPGTNTSNQVAVLYQDVNCTEVPVAIHADQLTPTWRVYSTGSNVFQTRAGCLIGAEHVNNSYECDIPIGAGICASYQTQTNSPRRARSVASQSIIAYTMSLGAENSVAYSNNSIAIPTNFTISVTTEILPVSMTKTSVDCTMYICGDSTECSNLLLQYGSFCTQLNRALTGIAVEQDKNTQEVFAQVKQIYKTPPIKDFGGFNFSQILPDPSKPSKRSFIEDLLFNKVTLADAGFIKQYGDCLGDIAARDLICAQKFNGLTVLPPLLTDEMIAQYTSALLAGTITSGWTFGAGAALQIPFAMQMAYRFNGIGVTQNVLYENQKLIANQFNSAIGKIQDSLSSTASALGKLQDVVNQNAQALNTLVKQLSSNFGAISSVLNDILSRLDKVEAEVQIDRLITGRLQSLQTYVTQQLIRAAEIRASANLAATKMSECVLGQSKRVDFCGKGYHLMSFPQSAPHGVVFLHVTYVPAQEKNFTTAPAICHDGKAHFPREGVFVSNGTHWFVTQRNFYEPQIITTDNTFVSGNCDVVIGIVNNTVYDPLQPELDSFKEELDKYFKNHTSPDVDLGDISGINASVVNIQKEIDRLNEVAKNLNESLIDLQELGKYEQYIKGGSDIIKLLNEQVNKEMQSSNLYMSMSSWCYTHSLDGAGLFLFDHAAEEYEHAKKLIIFLNENNVPVQLTSISAPEHKFEGLTQIFQKAYEHEQHISESINNIVDHAIKSKDHATFNFLQWYVAEQHEEEVLFKDILDKIELIGNENHGLYLADQYVKGIAKSRKS

SEQ ID NO: 70 - protein, 1377 aa, Artificial Sequence
  SARS-CoV-2/Guangdong/20SF028/2020__EPI_ISL_403936 spike protein (1-1211) Ferritin construct
MFVFLVLLPLVSSQCVNLTTRTQLPPAYTNSFTRGVYYPDKVFRSSVLYSTQDLFLPFFSNVTWFHAIHVSGTNGTKRFDNPVLPFNDGVYFASTEKSNIIRGWIFGTTLDSKTQSLLIVNNATNVVIKVCEFQFCNDPFLGVYYHKNNKSWMESEFRVYSSANNCTFEYVSQPFLMDLEGKQGNFKNLREFVFKNIDGYFKIYSKHTPINLVRDLPQGFSALEPLVDLPIGINITRFQTLLALHRSYLTPGDSSSGWTAGAAAYYVGYLQPRTFLLKYNENGTITDAVDCALDPLSETKCTLKSFTVEKGIYQTSNFRVQPTESIVRFPNITNLCPFGEVFNATRFASVYAWNRKRISNCVADYSVLYNSASFSTFKCYGVSPTKLNDLCFTNVYADSFVIRGDEVRQIAPGQTGKIADYNYKLPDDFTGCVIAWNSNNLDSKVGGNYNYLYRLFRKSNLKPFERDISTEIYQAGSTPCNGVEGFNCYFPLQSYGFQPTNGVGYQPYRVVVLSFELLHAPATVCGPKKSTNLVKNKCVNFNFNGLTGTGVLTESNKKFLPFQQFGRDIADTTDAVRDPQTLEILDITPCSFGGVSVITPGTNTSNQVAVLYQDVNCTEVPVAIHADQLTPTWRVYSTGSNVFQTRAGCLIGAEHVNNSYECDIPIGAGICASYQTQTNSPRRARSVASQSIIAYTMSLGAENSVAYSNNSIAIPTNFTISVTTEILPVSMTKTSVDCTMYICGDSTECSNLLLQYGSFCTQLNRALTGIAVEQDKNTQEVFAQVKQIYKTPPIKDFGGFNFSQILPDPSKPSKRSFIEDLLFNKVTLADAGFIKQYGDCLGDIAARDLICAQKFNGLTVLPPLLTDEMIAQYTSALLAGTITSGWTFGAGAALQIPFAMQMAYRFNGIGVTQNVLYENQKLIANQFNSAIGKIQDSLSSTASALGKLQDVVNQNAQALNTLVKQLSSNFGAISSVLNDILSRLDKVEAEVQIDRLITGRLQSLQTYVTQQLIRAAEIRASANLAATKMSECVLGQSKRVDFCGKGYHLMSFPQSAPHGVVFLHVTYVPAQEKNFTTAPAICHDGKAHFPREGVFVSNGTHWFVTQRNFYEPQIITTDNTFVSGNCDVVIGIVNNTVYDPLQPELDSFKEELDKYFKNHTSPDVDLGDISGINASVVNIQKEIDRLNEVAKNLNESLIDLQELGKYEQYIKGGSDIIKLLNEQVNKEMQSSNLYMSMSSWCYTHSLDGAGLFLFDHAAEEYEHAKKLIIFLNENNVPVQLTSISAPEHKFEGLTQIFQKAYEHEQHISESINNIVDHAIKSKDHATFNFLQWYVAEQHEEEVLFKDILDKIELIGNENHGLYLADQYVKGIAKSRKS

SEQ ID NO: 71 - protein, 1377 aa, Artificial Sequence
  SARS-CoV-2/Shenzhen/SZTH-001/2020__EPI_ISL_406592 spike protein (1-1211) Ferritin construct
MFVFLVLLPLVSSQCVNLTTRTQLPPAYTNSFTRGVYYPDKVFRSSVLHSTQDLFLPFFSNVTWFHAIHVSGTNGTKRFDNPVLPFNDGVYFASTEKSNIIRGWIFGTTLDSKTQSLLIVNNATNVVIKVCEFQFCNDPFLGVYYHKNNKSWMESEFRVYSSANNCTFEYVSQPFLMDLEGKQGNFKNLREFVFKNIDGYFKIYSKHTPINLVRDLPQGFSALEPLVDLPIGINITRFQTLLALHRSYLTPGDSSSGWTAGAAAYYVGYLQPRTFLLKYNENGTITDAVDCALDPLSETKCTLKSFTVEKGIYQTSNFRVQPTESIVRFPNITNLCPFGEVFNATRFASVYAWNRKRISNCVADYSVLYNSASFSTFKCYGVSPTKLNDLCFTNVYADSFVIRGDEVRQIAPGQTGKIADYNYKLPDDFTGCVIAWNSNNLDSKVGGNYNYLYRLFRKSNLKPFERDISTEIYQAGSTPCNGVEGFNCYFPLQSYGFQPTNGVGYQPYRVVVLSFELLHAPATVCGPKKSTNLVKNKCVNFNFNGLTGTGVLTESNKKFLPFQQFGRDIADTTDAVRDPQTLEILDITPCSFGGVSVITPGTNTSNQVAVLYQDVNCTEVPVAIHADQLTPTWRVYSTGSNVFQTRAGCLIGAEHVNNSYECDIPIGAGICASYQTQTNSPRRARSVASQSIIAYTMSLGAENSVAYSNNSIAIPTNFTISVTTEILPVSMTKTSVDCTMYICGDSTECSNLLLQYGSFCTQLNRALTGIAVEQDKNTQEVFAQVKQIYKTPPIKDFGGFNFSQILPDPSKPSKRSFIEDLLFNKVTLADAGFIKQYGDCLGDIAARDLICAQKFNGLTVLPPLLTDEMIAQYTSALLAGTITSGWTFGAGAALQIPFAMQMAYRFNGIGVTQNVLYENQKLIANQFNSAIGKIQDSLSSTASALGKLQDVVNQNAQALNTLVKQLSSNFGAISSVLNDILSRLDKVEAEVQIDRLITGRLQSLQTYVTQQLIRAAEIRASANLAATKMSECVLGQSKRVDFCGKGYHLMSFPQSAPHGVVFLHVTYVPAQEKNFTTAPAICHDGKAHFPREGVFVSNGTHWFVTQRNFYEPQIITTDNTFVSGNCDVLIGIVNNTVYDPLQPELDSFKEELDKYFKNHTSPDVDLGDISGINASVVNIQKEIDRLNEVAKNLNESLIDLQELGKYEQYIKGGSDIIKLLNEQVNKEMQSSNLYMSMSSWCYTHSLDGAGLFLFDHAAEEYEHAKKLIIFLNENNVPVQLTSISAPEHKFEGLTQIFQKAYEHEQHISESINNIVDHAIKSKDHATFNFLQWYVAEQHEEEVLFKDILDKIELIGNENHGLYLADQYVKGIAKSRKS

SEQ ID NO: 72 - protein, 1377 aa, Artificial Sequence
  SARS-CoV-2/Shenzhen/SZTH-004/2020__EPI_ISL_406595 spike protein (1-1211) Ferritin construct
MFVFLVLLPLVSSQCVNLTTRTQLPPAYTNSFTRGVYYPDKVFRSSVLHSTQDLFLPFFSNVTWFHAIHVSGTNGTKRFDNPVLPFNDGVYFASTEKSNIIRGWIFGTTLDSKTQSLLIVNNATNVVIKVCEFQFCNDPFLGVYYHKNNKSWMESEFRVYSSANNCTFEYVSQPFLMDLEGKQGNFKNLREFVFKNIDGYFKIYSKHTPINLVRDLPQGFSALEPLVDLPIGINITRFQTLLALHRSYLTPGDSSSGWTAGAAAYYVGYLQPRTFLLKYNENGTITDAVDCALDPLSETKCTLKSFTVEKGIYQTSNFRVQPTESIVRFPNITNLCPFGEVFNATRFASVYAWDRKRISNCVAYYSVLYNSASFSTFKCYGVSPTKLNDLCFTNVYADSFVIRGDEVRQIAPGQTGKIADYNYKLPDDFTGCVIAWNSNNLDSKVGGNYNYLYRLFRKSNLKPFERDISTEIYQAGSTPCNGVEGFNCYFPLQSYGFQPTNGVGYQPYRVVVLSFELLHAPATVCGPKKSTNLVKNKCVNFNFNGLTGTGVLTESNKKFLPFQQFGRDIADTTDAVRDPQTLEILDITPCSFGGVSVITPGTNTSNQVAVLYQDVNCTEVPVAIHADQLTPTWRVYSTGSNVFQTRAGCLIGAEHVNNSYECDIPIGAGICASYQTQTNSPRRARSVASQSIIAYTMSLGAENSVAYSNNSIAIPTNFTISVTTEILPVSMTKTSVDCTMYICGDSTECSNLLLQYGSFCTQLNRALTGIAVEQDKNTQEVFAQVKQIYKTPPIKDFGGFNFSQILPDPSKPSKRSFIEDLLFNKVTLADAGFIKQYGDCLGDIAARDLICAQKFNGLTVLPPLLTDEMIAQYTSALLAGTITSGWTFGAGAALQIPFAMQMAYRFNGIGVTQNVLYENQKLIANQFNSAIGKIQDSLSSTASALGKLQDVVNQNAQALNTLVKQLSSNFGAISSVLNDILSRLDKVEAEVQIDRLITGRLQSLQTYVTQQLIRAAEIRASANLAATKMSECVLGQSKRVDFCGKGYHLMSFPQSAPHGVVFLHVTYVPAQEKNFTTAPAICHDGKAHFPREGVFVSNGTHWFVTQRNFYEPQIITTDNTFVSGNCDVVIGIVNNTVYDPLQPELDSFKEELDKYFKNHTSPDVDLGDISGINASVVNIQKEIDRLNEVAKNLNESLIDLQELGKYEQYIKGGSDIIKLLNEQVNKEMQSSNLYMSMSSWCYTHSLDGAGLFLFDHAAEEYEHAKKLIIFLNENNVPVQLTSISAPEHKFEGLTQIFQKAYEHEQHISESINNIVDHAIKSKDHATFNFLQWYVAEQHEEEVLFKDILDKIELIGNENHGLYLADQYVKGIAKSRKS

SEQ ID NO: 73 - protein, 1377 aa, Artificial Sequence
  SARS-CoV-2/France/IDF0372/2020__EPI_ISL_406596 spike protein (1-1211) Ferritin construct
MFVFLVLLPLVSSQCVNLTTRTQLPPAYTNSFTRGVYYPDKVFRSSVLHSTQDLFLPFFSNVTWFHAIHVSGTNGTKRFDNPVLPFNDGVYFASTEKSNIIRGWIFGTTLDSKTQSLLIVNNATNVVIKVCEFQFCNDPFLGVYYHKNNKSWMESEFRVYSSANNCTFEYVSQPFLMDLEGKQGNFKNLREFVFKNIDGYFKIYSKHTPINLVRDLPQGFSALEPLVDLPIGINITRFQTLLALHRSYLTPGDSSSGWTAGAAAYYVGYLQPRTFLLKYNENGTITDAVDCALDPLSETKCTLKSFTVEKGIYQTSNFRVQPTESIVRFPNITNLCPFGEVFNATRFASVYAWNRKRISNCVADYSFLYNSASFSTFKCYGVSPTKLNDLCFTNVYADSFVIRGDEVRQIAPGQTGKIADYNYKLPDDFTGCVIAWNSNNLDSKVGGNYNYLYRLFRKSNLKPFERDISTEIYQAGSTPCNGVEGFNCYFPLQSYGFQPTNGVGYQPYRVVVLSFELLHAPATVCGPKKSTNLVKNKCVNFNFNGLTGTGVLTESNKKFLPFQQFGRDIADTTDAVRDPQTLEILDITPCSFGGVSVITPGTNTSNQVAVLYQDVNCTEVPVAIHADQLTPTWRVYSTGSNVFQTRAGCLIGAEHVNNSYECDIPIGAGICASYQTQTNSPRRARSVASQSIIAYTMSLGAENSVAYSNNSIAIPTNFTISVTTEILPVSMTKTSVDCTMYICGDSTECSNLLLQYGSFCTQLNRALTGIAVEQDKNTQEVFAQVKQIYKTPPIKDFGGFNFSQILPDPSKPSKRSFIEDLLFNKVTLADAGFIKQYGDCLGDIAARDLICAQKFNGLTVLPPLLTDEMIAQYTSALLAGTITSGWTFGAGAALQIPFAMQMAYRFNGIGVTQNVLYENQKLIANQFNSAIGKIQDSLSSTASALGKLQDVVNQNAQALNTLVKQLSSNFGAISSVLNDILSRLDKVEAEVQIDRLITGRLQSLQTYVTQQLIRAAEIRASANLAATKMSECVLGQSKRVDFCGKGYHLMSFPQSAPHGVVFLHVTYVPAQEKNFTTAPAICHDGKAHFPREGVFVSNGTHWFVTQRNFYEPQIITTDNTFVSGNCDVVIGIVNNTVYDPLQPELDSFKEELDKYFKNHTSPDVDLGDISGINASVVNIQKEIDRLNEVAKNLNESLIDLQELGKYEQYIKGGSDIIKLLNEQVNKEMQSSNLYMSMSSWCYTHSLDGAGLFLFDHAAEEYEHAKKLIIFLNENNVPVQLTSISAPEHKFEGLTQIFQKAYEHEQHISESINNIVDHAIKSKDHATFNFLQWYVAEQHEEEVLFKDILDKIELIGNENHGLYLADQYVKGIAKSRKS

SEQ ID NO: 74 - protein, 1377 aa, Artificial Sequence
  SARS-CoV-2/Australia/VIC01/2020__EPI_ISL_406844 spike protein (1-1211) Ferritin construct
MFVFLVLLPLVSSQCVNLTTRTQLPPAYTNSFTRGVYYPDKVFRSSVLHSTQDLFLPFFSNVTWFHAIHVSGTNGTKRFDNPVLPFNDGVYFASTEKSNIIRGWIFGTTLDSKTQSLLIVNNATNVVIKVCEFQFCNDPFLGVYYHKNNKSWMESEFRVYSSANNCTFEYVSQPFLMDLEGKQGNFKNLREFVFKNIDGYFKIYSKHTPINLVRDLPQGFSALEPLVDLPIGINITRFQTLLALHRRYLTPGDSSSGWTAGAAAYYVGYLQPRTFLLKYNENGTITDAVDCALDPLSETKCTLKSFTVEKGIYQTSNFRVQPTESIVRFPNITNLCPFGEVFNATRFASVYAWNRKRISNCVADYSVLYNSASFSTFKCYGVSPTKLNDLCFTNVYADSFVIRGDEVRQIAPGQTGKIADYNYKLPDDFTGCVIAWNSNNLDSKVGGNYNYLYRLFRKSNLKPFERDISTEIYQAGSTPCNGVEGFNCYFPLQSYGFQPTNGVGYQPYRVVVLSFELLHAPATVCGPKKSTNLVKNKCVNFNFNGLTGTGVLTESNKKFLPFQQFGRDIADTTDAVRDPQTLEILDITPCSFGGVSVITPGTNTSNQVAVLYQDVNCTEVPVAIHADQLTPTWRVYSTGSNVFQTRAGCLIGAEHVNNSYECDIPIGAGICASYQTQTNSPRRARSVASQSIIAYTMSLGAENSVAYSNNSIAIPTNFTISVTTEILPVSMTKTSVDCTMYICGDSTECSNLLLQYGSFCTQLNRALTGIAVEQDKNTQEVFAQVKQIYKTPPIKDFGGFNFSQILPDPSKPSKRSFIEDLLFNKVTLADAGFIKQYGDCLGDIAARDLICAQKFNGLTVLPPLLTDEMIAQYTSALLAGTITSGWTFGAGAALQIPFAMQMAYRFNGIGVTQNVLYENQKLIANQFNSAIGKIQDSLSSTASALGKLQDVVNQNAQALNTLVKQLSSNFGAISSVLNDILSRLDKVEAEVQIDRLITGRLQSLQTYVTQQLIRAAEIRASANLAATKMSECVLGQSKRVDFCGKGYHLMSFPQSAPHGVVFLHVTYVPAQEKNFTTAPAICHDGKAHFPREGVFVSNGTHWFVTQRNFYEPQIITTDNTFVSGNCDVVIGIVNNTVYDPLQPELDSFKEELDKYFKNHTSPDVDLGDISGINASVVNIQKEIDRLNEVAKNLNESLIDLQELGKYEQYIKGGSDIIKLLNEQVNKEMQSSNLYMSMSSWCYTHSLDGAGLFLFDHAAEEYEHAKKLIIFLNENNVPVQLTSISAPEHKFEGLTQIFQKAYEHEQHISESINNIVDHAIKSKDHATFNFLQWYVAEQHEEEVLFKDILDKIELIGNENHGLYLADQYVKGIAKSRKS

SEQ ID NO: 75 - protein, 1377 aa, Artificial Sequence
  SARS-CoV-2/Germany/BavPat1/2020__EPI_ISL_406862 spike protein (1-1211) Ferritin construct
MFVFLVLLPLVSSQCVNLTTRTQLPPAYTNSFTRGVYYPDKVFRSSVLHSTQDLFLPFFSNVTWFHAIHVSGTNGTKRFDNPVLPFNDGVYFASTEKSNIIRGWIFGTTLDSKTQSLLIVNNATNVVIKVCEFQFCNDPFLGVYYHKNNKSWMESEFRVYSSANNCTFEYVSQPFLMDLEGKQGNFKNLREFVFKNIDGYFKIYSKHTPINLVRDLPQGFSALEPLVDLPIGINITRFQTLLALHRSYLTPGDSSSGWTAGAAAYYVGYLQPRTFLLKYNENGTITDAVDCALDPLSETKCTLKSFTVEKGIYQTSNFRVQPTESIVRFPNITNLCPFGEVFNATRFASVYAWNRKRISNCVADYSVLYNSASFSTFKCYGVSPTKLNDLCFTNVYADSFVIRGDEVRQIAPGQTGKIADYNYKLPDDFTGCVIAWNSNNLDSKVGGNYNYLYRLFRKSNLKPFERDISTEIYQAGSTPCNGVEGFNCYFPLQSYGFQPTNGVGYQPYRVVVLSFELLHAPATVCGPKKSTNLVKNKCVNFNFNGLTGTGVLTESNKKFLPFQQFGRDIADTTDAVRDPQTLEILDITPCSFGGVSVITPGTNTSNQVAVLYQGVNCTEVPVAIHADQLTPTWRVYSTGSNVFQTRAGCLIGAEHVNNSYECDIPIGAGICASYQTQTNSPRRARSVASQSIIAYTMSLGAENSVAYSNNSIAIPTNFTISVTTEILPVSMTKTSVDCTMYICGDSTECSNLLLQYGSFCTQLNRALTGIAVEQDKNTQEVFAQVKQIYKTPPIKDFGGFNFSQILPDPSKPSKRSFIEDLLFNKVTLADAGFIKQYGDCLGDIAARDLICAQKFNGLTVLPPLLTDEMIAQYTSALLAGTITSGWTFGAGAALQIPFAMQMAYRFNGIGVTQNVLYENQKLIANQFNSAIGKIQDSLSSTASALGKLQDVVNQNAQALNTLVKQLSSNFGAISSVLNDILSRLDKVEAEVQIDRLITGRLQSLQTYVTQQLIRAAEIRASANLAATKMSECVLGQSKRVDFCGKGYHLMSFPQSAPHGVVFLHVTYVPAQEKNFTTAPAICHDGKAHFPREGVFVSNGTHWFVTQRNFYEPQIITTDNTFVSGNCDVVIGIVNNTVYDPLQPELDSFKEELDKYFKNHTSPDVDLGDISGINASVVNIQKEIDRLNEVAKNLNESLIDLQELGKYEQYIKGGSDIIKLLNEQVNKEMQSSNLYMSMSSWCYTHSLDGAGLFLFDHAAEEYEHAKKLIIFLNENNVPVQLTSISAPEHKFEGLTQIFQKAYEHEQHISESINNIVDHAIKSKDHATFNFLQWYVAEQHEEEVLFKDILDKIELIGNENHGLYLADQYVKGIAKSRKS

SEQ ID NO: 76 - protein, 1241 aa, Artificial Sequence
  SARS-CoV-2/Wuhan/WIV05/2019__EPI_ISL_402128 spike protein (1-1211) Foldon construct
MFVFLVLLPLVSSQCVNLTTRTQLPPAYTNSFTRGVYYPDKVFRSSVLHSTQDLFLPFFSNVTWFHAIHVSGTNGTKRFDNPVLPFNDGVYFASTEKSNIIRGWIFGTTLDSKTQSLLIVNNATNVVIKVCEFQFCNDPFLGVYYHKNNKSWMESEFRVYSSANNCTFEYVSQPFLMDLEGKQGNFKNLREFVFKNIDGYFKIYSKHTPINLVRDLPQGFSALEPLVDLPIGINITRFQTLLALHRSYLTPGDSSSGWTAGAAAYYVGYLQPRTFLLKYNENGTITDAVDCALDPLSETKCTLKSFTVEKGIYQTSNFRVQPTESIVRFPNITNLCPFGEVFNATRFASVYAWNRKRISNCVADYSVLYNSASFSTFKCYGVSPTKLNDLCFTNVYADSFVIRGDEVRQIAPGQTGKIADYNYKLPDDFTGCVIAWNSNNLDSKVGGNYNYLYRLFRKSNLKPFERDISTEIYQAGSTPCNGVEGFNCYFPLQSYGFQPTNGVGYQPYRVVVLSFELLHAPATVCGPKKSTNLVKNKCVNFNFNGLTGTGVLTESNKKFLPFQQFGRDIADTTDAVRDPQTLEILDITPCSFGGVSVITPGTNTSNQVAVLYQDVNCTEVPVAIHADQLTPTWRVYSTGSNVFQTRAGCLIGAEHVNNSYECDIPIGAGICASYQTQTNSPRRARSVASQSIIAYTMSLGAENSVAYSNNSIAIPTNFTISVTTEILPVSMTKTSVDCTMYICGDSTECSNLLLQYGSFCTQLNRALTGIAVEQDKNTQEVFAQVKQIYKTPPIKDFGGFNFSQILPDPSKPSKRSFIEDLLFNKVTLADAGFIKQYGDCLGDIAARDLICAQKFNGLTVLPPLLTDEMIAQYTSALLAGTITSGWTFGAGAALQIPFAMQMAYRFNGIGVTQNVLYENQKLIANQFNSAIGKIQDSLSSTASALGKLQDVVNQNAQALNTLVKQLSSNFGAISSVLNDILSRLDKVEAEVQIDRLITGRLQSLQTYVTQQLIRAAEIRASANLAATKMSECVLGQSKRVDFCGKGYHLMSFPQSAPHGVVFLHVTYVPAQEKNFTTAPAICHDGKAHFPREGVFVSNGTHWFVTQRNFYEPQIITTDNTFVSGNCDVVIGIVNNTVYDPLQPELDSFKEELDKYFKNHTSPDVDLGDISGINASVVNIQKEIDRLNEVAKNLNESLIDLQELGKYEQYIKGGSGYIPEAPRDGQAYVRKDGEWVLLSTFL

SEQ ID NO: 77 - protein, 1237 aa, Artificial Sequence
  SARS-CoV-2/bat/Yunnan/RaTG13/2013__EPI_ISL_402131 spike protein (1-1207) Foldon construct
MFVFLVLLPLVSSQCVNLTTRTQLPPAYTNSSTRGVYYPDKVFRSSVLHLTQDLFLPFFSNVTWFHAIHVSGTNGIKRFDNPVLPFNDGVYFASTEKSNIIRGWIFGTTLDSKTQSLLIVNNATNVVIKVCEFQFCNDPFLGVYYHKNNKSWMESEFRVYSSANNCTFEYVSQPFLMDLEGKQGNFKNLREFVFKNIDGYFKIYSKHTPINLVRDLPPGFSALEPLVDLPIGINITRFQTLLALHRSYLTPGDSSSGWTAGAAAYYVGYLQPRTFLLKYNENGTITDAVDCALDPLSETKCTLKSFTVEKGIYQTSNFRVQPTDSIVRFPNITNLCPFGEVFNATTFASVYAWNRKRISNCVADYSVLYNSTSFSTFKCYGVSPTKLNDLCFTNVYADSFVITGDEVRQIAPGQTGKIADYNYKLPDDFTGCVIAWNSKHIDAKEGGNFNYLYRLFRKANLKPFERDISTEIYQAGSKPCNGQTGLNCYYPLYRYGFYPTDGVGHQPYRVVVLSFELLNAPATVCGPKKSTNLVKNKCVNFNFNGLTGTGVLTESNKKFLPFQQFGRDIADTTDAVRDPQTLEILDITPCSFGGVSVITPGTNASNQVAVLYQDVNCTEVPVAIHADQLTPTWRVYSTGSNVFQTRAGCLIGAEHVNNSYECDIPIGAGICASYQTQTNSRSVASQSIIAYTMSLGAENSVAYSNNSIAIPTNFTISVTTEILPVSMTKTSVDCTMYICGDSTECSNLLLQYGSFCTQLNRALTGIAVEQDKNTQEVFAQVKQIYKTPPIKDFGGFNFSQILPDPSKPSKRSFIEDLLFNKVTLADAGFIKQYGDCLGDIAARDLICAQKFNGLTVLPPLLTDEMIAQYTSALLAGTITSGWTFGAGAALQIPFAMQMAYRFNGIGVTQNVLYENQKLIANQFNSAIGKIQDSLSSTASALGKLQDVVNQNAQALNTLVKQLSSNFGAISSVLNDILSRLDKVEAEVQIDRLITGRLQSLQTYVTQQLIRAAEIRASANLAATKMSECVLGQSKRVDFCGKGYHLMSFPQSAPHGVVFLHVTYVPAQEKNFTTAPAICHDGKAHFPREGVFVSNGTHWFVTQRNFYEPQIITTDNTFVSGSCDVVIGIVNNTVYDPLQPELDSFKEELDKYFKNHTSPDVDLGDISGINASVVNIQKEIDRLNEVAKNLNESLIDLQELGKYEQYIKGGSGYIPEAPRDGQAYVRKDGEWVLLSTFL

SEQ ID NO: 78 - protein, 1241 aa, Artificial Sequence
  SARS-CoV-2/Wuhan/HBCDC-HB-01/2019__EPI_ISL_402132 spike protein (1-1211) Foldon construct
MFVFLVLLPLVSSQCVNLTTRTQLPPAYTNSITRGVYYPDKVFRSSVLHSTQDLFLPFFSNVTWFHAIHVSGTNGTKRFDNPVLPFNDGVYFASTEKSNIIRGWIFGTTLDSKTQSLLIVNNATNVVIKVCEFQFCNDPFLGVYYHKNNKSWMESEFRVYSSANNCTFEYVSQPFLMDLEGKQGNFKNLREFVFKNIDGYFKIYSKHTPINLVRDLPQGFSALEPLVDLPIGINITRFQTLLALHRSYLTPGDSSSGWTAGAAAYYVGYLQPRTFLLKYNENGTITDAVDCALDPLSETKCTLKSFTVEKGIYQTSNFRVQPTESIVRFPNITNLCPFGEVFNATRFASVYAWNRKRISNCVADYSVLYNSASFSTFKCYGVSPTKLNDLCFTNVYADSFVIRGDEVRQIAPGQTGKIADYNYKLPDDFTGCVIAWNSNNLDSKVGGNYNYLYRLFRKSNLKPFERDISTEIYQAGSTPCNGVEGFNCYFPLQSYGFQPTNGVGYQPYRVVVLSFELLHAPATVCGPKKSTNLVKNKCVNFNFNGLTGTGVLTESNKKFLPFQQFGRDIADTTDAVRDPQTLEILDITPCSFGGVSVITPGTNTSNQVAVLYQDVNCTEVPVAIHADQLTPTWRVYSTGSNVFQTRAGCLIGAEHVNNSYECDIPIGAGICASYQTQTNSPRRARSVASQSIIAYTMSLGAENSVAYSNNSIAIPTNFTISVTTEILPVSMTKTSVDCTMYICGDSTECSNLLLQYGSFCTQLNRALTGIAVEQDKNTQEVFAQVKQIYKTPPIKDFGGFNFSQILPDPSKPSKRSFIEDLLFNKVTLADAGFIKQYGDCLGDIAARDLICAQKFNGLTVLPPLLTDEMIAQYTSALLAGTITSGWTFGAGAALQIPFAMQMAYRFNGIGVTQNVLYENQKLIANQFNSAIGKIQDSLSSTASALGKLQDVVNQNAQALNTLVKQLSSNFGAISSVLNDILSRLDKVEAEVQIDRLITGRLQSLQTYVTQQLIRAAEIRASANLAATKMSECVLGQSKRVDFCGKGYHLMSFPQSAPHGVVFLHVTYVPAQEKNFTTAPAICHDGKAHFPREGVFVSNGTHWFVTQRNFYEPQIITTDNTFVSGNCDVVIGIVNNTVYDPLQPELDSFKEELDKYFKNHTSPDVDLGDISGINASVVNIQKEIDRLNEVAKNLNESLIDLQELGKYEQYIKGGSGYIPEAPRDGQAYVRKDGEWVLLSTFL

SEQ ID NO: 79 - protein, 1241 aa, Artificial Sequence
  SARS-CoV-2/Guangdong/20SF028/2020__EPI_ISL_403936 spike protein (1-1211) Foldon construct
MFVFLVLLPLVSSQCVNLTTRTQLPPAYTNSFTRGVYYPDKVFRSSVLYSTQDLFLPFFSNVTWFHAIHVSGTNGTKRFDNPVLPFNDGVYFASTEKSNIIRGWIFGTTLDSKTQSLLIVNNATNVVIKVCEFQFCNDPFLGVYYHKNNKSWMESEFRVYSSANNCTFEYVSQPFLMDLEGKQGNFKNLREFVFKNIDGYFKIYSKHTPINLVRDLPQGFSALEPLVDLPIGINITRFQTLLALHRSYLTPGDSSSGWTAGAAAYYVGYLQPRTFLLKYNENGTITDAVDCALDPLSETKCTLKSFTVEKGIYQTSNFRVQPTESIVRFPNITNLCPFGEVFNATRFASVYAWNRKRISNCVADYSVLYNSASFSTFKCYGVSPTKLNDLCFTNVYADSFVIRGDEVRQIAPGQTGKIADYNYKLPDDFTGCVIAWNSNNLDSKVGGNYNYLYRLFRKSNLKPFERDISTEIYQAGSTPCNGVEGFNCYFPLQSYGFQPTNGVGYQPYRVVVLSFELLHAPATVCGPKKSTNLVKNKCVNFNFNGLTGTGVLTESNKKFLPFQQFGRDIADTTDAVRDPQTLEILDITPCSFGGVSVITPGTNTSNQVAVLYQDVNCTEVPVAIHADQLTPTWRVYSTGSNVFQTRAGCLIGAEHVNNSYECDIPIGAGICASYQTQTNSPRRARSVASQSIIAYTMSLGAENSVAYSNNSIAIPTNFTISVTTEILPVSMTKTSVDCTMYICGDSTECSNLLLQYGSFCTQLNRALTGIAVEQDKNTQEVFAQVKQIYKTPPIKDFGGFNFSQILPDPSKPSKRSFIEDLLFNKVTLADAGFIKQYGDCLGDIAARDLICAQKFNGLTVLPPLLTDEMIAQYTSALLAGTITSGWTFGAGAALQIPFAMQMAYRFNGIGVTQNVLYENQKLIANQFNSAIGKIQDSLSSTASALGKLQDVVNQNAQALNTLVKQLSSNFGAISSVLNDILSRLDKVEAEVQIDRLITGRLQSLQTYVTQQLIRAAEIRASANLAATKMSECVLGQSKRVDFCGKGYHLMSFPQSAPHGVVFLHVTYVPAQEKNFTTAPAICHDGKAHFPREGVFVSNGTHWFVTQRNFYEPQIITTDNTFVSGNCDVVIGIVNNTVYDPLQPELDSFKEELDKYFKNHTSPDVDLGDISGINASVVNIQKEIDRLNEVAKNLNESLIDLQELGKYEQYIKGGSGYIPEAPRDGQAYVRKDGEWVLLSTFL

SEQ ID NO: 80 - protein, 1241 aa, Artificial Sequence
  SARS-CoV-2/Shenzhen/SZTH-001/2020__EPI_ISL_406592 spike protein (1-1211) Foldon construct
MFVFLVLLPLVSSQCVNLTTRTQLPPAYTNSFTRGVYYPDKVFRSSVLHSTQDLFLPFFSNVTWFHAIHVSGTNGTKRFDNPVLPFNDGVYFASTEKSNIIRGWIFGTTLDSKTQSLLIVNNATNVVIKVCEFQFCNDPFLGVYYHKNNKSWMESEFRVYSSANNCTFEYVSQPFLMDLEGKQGNFKNLREFVFKNIDGYFKIYSKHTPINLVRDLPQGFSALEPLVDLPIGINITRFQTLLALHRSYLTPGDSSSGWTAGAAAYYVGYLQPRTFLLKYNENGTITDAVDCALDPLSETKCTLKSFTVEKGIYQTSNFRVQPTESIVRFPNITNLCPFGEVFNATRFASVYAWNRKRISNCVADYSVLYNSASFSTFKCYGVSPTKLNDLCFTNVYADSFVIRGDEVRQIAPGQTGKIADYNYKLPDDFTGCVIAWNSNNLDSKVGGNYNYLYRLFRKSNLKPFERDISTEIYQAGSTPCNGVEGFNCYFPLQSYGFQPTNGVGYQPYRVVVLSFELLHAPATVCGPKKSTNLVKNKCVNFNFNGLTGTGVLTESNKKFLPFQQFGRDIADTTDAVRDPQTLEILDITPCSFGGVSVITPGTNTSNQVAVLYQDVNCTEVPVAIHADQLTPTWRVYSTGSNVFQTRAGCLIGAEHVNNSYECDIPIGAGICASYQTQTNSPRRARSVASQSIIAYTMSLGAENSVAYSNNSIAIPTNFTISVTTEILPVSMTKTSVDCTMYICGDSTECSNLLLQYGSFCTQLNRALTGIAVEQDKNTQEVFAQVKQIYKTPPIKDFGGFNFSQILPDPSKPSKRSFIEDLLFNKVTLADAGFIKQYGDCLGDIAARDLICAQKFNGLTVLPPLLTDEMIAQYTSALLAGTITSGWTFGAGAALQIPFAMQMAYRFNGIGVTQNVLYENQKLIANQFNSAIGKIQDSLSSTASALGKLQDVVNQNAQALNTLVKQLSSNFGAISSVLNDILSRLDKVEAEVQIDRLITGRLQSLQTYVTQQLIRAAEIRASANLAATKMSECVLGQSKRVDFCGKGYHLMSFPQSAPHGVVFLHVTYVPAQEKNFTTAPAICHDGKAHFPREGVFVSNGTHWFVTQRNFYEPQIITTDNTFVSGNCDVLIGIVNNTVYDPLQPELDSFKEELDKYFKNHTSPDVDLGDISGINASVVNIQKEIDRLNEVAKNLNESLIDLQELGKYEQYIKGGSGYIPEAPRDGQAYVRKDGEWVLLSTFL

SEQ ID NO: 81 - protein, 1241 aa, Artificial Sequence
  SARS-CoV-2/Shenzhen/SZTH-004/2020__EPI_ISL_406595 spike protein (1-1211) Foldon construct
MFVFLVLLPLVSSQCVNLTTRTQLPPAYTNSFTRGVYYPDKVFRSSVLHSTQDLFLPFFSNVTWFHAIHVSGTNGTKRFDNPVLPFNDGVYFASTEKSNIIRGWIFGTTLDSKTQSLLIVNNATNVVIKVCEFQFCNDPFLGVYYHKNNKSWMESEFRVYSSANNCTFEYVSQPFLMDLEGKQGNFKNLREFVFKNIDGYFKIYSKHTPINLVRDLPQGFSALEPLVDLPIGINITRFQTLLALHRSYLTPGDSSSGWTAGAAAYYVGYLQPRTFLLKYNENGTITDAVDCALDPLSETKCTLKSFTVEKGIYQTSNFRVQPTESIVRFPNITNLCPFGEVFNATRFASVYAWDRKRISNCVAYYSVLYNSASFSTFKCYGVSPTKLNDLCFTNVYADSFVIRGDEVRQIAPGQTGKIADYNYKLPDDFTGCVIAWNSNNLDSKVGGNYNYLYRLFRKSNLKPFERDISTEIYQAGSTPCNGVEGFNCYFPLQSYGFQPTNGVGYQPYRVVVLSFELLHAPATVCGPKKSTNLVKNKCVNFNFNGLTGTGVLTESNKKFLPFQQFGRDIADTTDAVRDPQTLEILDITPCSFGGVSVITPGTNTSNQVAVLYQDVNCTEVPVAIHADQLTPTWRVYSTGSNVFQTRAGCLIGAEHVNNSYECDIPIGAGICASYQTQTNSPRRARSVASQSIIAYTMSLGAENSVAYSNNSIAIPTNFTISVTTEILPVSMTKTSVDCTMYICGDSTECSNLLLQYGSFCTQLNRALTGIAVEQDKNTQEVFAQVKQIYKTPPIKDFGGFNFSQILPDPSKPSKRSFIEDLLFNKVTLADAGFIKQYGDCLGDIAARDLICAQKFNGLTVLPPLLTDEMIAQYTSALLAGTITSGWTFGAGAALQIPFAMQMAYRFNGIGVTQNVLYENQKLIANQFNSAIGKIQDSLSSTASALGKLQDVVNQNAQALNTLVKQLSSNFGAISSVLNDILSRLDKVEAEVQIDRLITGRLQSLQTYVTQQLIRAAEIRASANLAATKMSECVLGQSKRVDFCGKGYHLMSFPQSAPHGVVFLHVTYVPAQEKNFTTAPAICHDGKAHFPREGVFVSNGTHWFVTQRNFYEPQIITTDNTFVSGNCDVVIGIVNNTVYDPLQPELDSFKEELDKYFKNHTSPDVDLGDISGINASVVNIQKEIDRLNEVAKNLNESLIDLQELGKYEQYIKGGSGYIPEAPRDGQAYVRKDGEWVLLSTFL

SEQ ID NO: 82 - protein, 1241 aa, Artificial Sequence
  SARS-CoV-2/France/IDF0372/2020__EPI_ISL_406596 spike protein (1-1211) Foldon construct
MFVFLVLLPLVSSQCVNLTTRTQLPPAYTNSFTRGVYYPDKVFRSSVLHSTQDLFLPFFSNVTWFHAIHVSGTNGTKRFDNPVLPFNDGVYFASTEKSNIIRGWIFGTTLDSKTQSLLIVNNATNVVIKVCEFQFCNDPFLGVYYHKNNKSWMESEFRVYSSANNCTFEYVSQPFLMDLEGKQGNFKNLREFVFKNIDGYFKIYSKHTPINLVRDLPQGFSALEPLVDLPIGINITRFQTLLALHRSYLTPGDSSSGWTAGAAAYYVGYLQPRTFLLKYNENGTITDAVDCALDPLSETKCTLKSFTVEKGIYQTSNFRVQPTESIVRFPNITNLCPFGEVFNATRFASVYAWNRKRISNCVADYSFLYNSASFSTFKCYGVSPTKLNDLCFTNVYADSFVIRGDEVRQIAPGQTGKIADYNYKLPDDFTGCVIAWNSNNLDSKVGGNYNYLYRLFRKSNLKPFERDISTEIYQAGSTPCNGVEGFNCYFPLQSYGFQPTNGVGYQPYRVVVLSFELLHAPATVCGPKKSTNLVKNKCVNFNFNGLTGTGVLTESNKKFLPFQQFGRDIADTTDAVRDPQTLEILDITPCSFGGVSVITPGTNTSNQVAVLYQDVNCTEVPVAIHADQLTPTWRVYSTGSNVFQTRAGCLIGAEHVNNSYECDIPIGAGICASYQTQTNSPRRARSVASQSIIAYTMSLGAENSVAYSNNSIAIPTNFTISVTTEILPVSMTKTSVDCTMYICGDSTECSNLLLQYGSFCTQLNRALTGIAVEQDKNTQEVFAQVKQIYKTPPIKDFGGFNFSQILPDPSKPSKRSFIEDLLFNKVTLADAGFIKQYGDCLGDIAARDLICAQKFNGLTVLPPLLTDEMIAQYTSALLAGTITSGWTFGAGAALQIPFAMQMAYRFNGIGVTQNVLYENQKLIANQFNSAIGKIQDSLSSTASALGKLQDVVNQNAQALNTLVKQLSSNFGAISSVLNDILSRLDKVEAEVQIDRLITGRLQSLQTYVTQQLIRAAEIRASANLAATKMSECVLGQSKRVDFCGKGYHLMSFPQSAPHGVVFLHVTYVPAQEKNFTTAPAICHDGKAHFPREGVFVSNGTHWFVTQRNFYEPQIITTDNTFVSGNCDVVIGIVNNTVYDPLQPELDSFKEELDKYFKNHTSPDVDLGDISGINASVVNIQKEIDRLNEVAKNLNESLIDLQELGKYEQYIKGGSGYIPEAPRDGQAYVRKDGEWVLLSTFL

SEQ ID NO: 83 - protein, 1241 aa, Artificial Sequence
  SARS-CoV-2/Australia/VIC01/2020__EPI_ISL_406844 spike protein (1-1211) Foldon construct
MFVFLVLLPLVSSQCVNLTTRTQLPPAYTNSFTRGVYYPDKVFRSSVLHSTQDLFLPFFSNVTWFHAIHVSGTNGTKRFDNPVLPFNDGVYFASTEKSNIIRGWIFGTTLDSKTQSLLIVNNATNVVIKVCEFQFCNDPFLGVYYHKNNKSWMESEFRVYSSANNCTFEYVSQPFLMDLEGKQGNFKNLREFVFKNIDGYFKIYSKHTPINLVRDLPQGFSALEPLVDLPIGINITRFQTLLALHRRYLTPGDSSSGWTAGAAAYYVGYLQPRTFLLKYNENGTITDAVDCALDPLSETKCTLKSFTVEKGIYQTSNFRVQPTESIVRFPNITNLCPFGEVFNATRFASVYAWNRKRISNCVADYSVLYNSASFSTFKCYGVSPTKLNDLCFTNVYADSFVIRGDEVRQIAPGQTGKIADYNYKLPDDFTGCVIAWNSNNLDSKVGGNYNYLYRLFRKSNLKPFERDISTEIYQAGSTPCNGVEGFNCYFPLQSYGFQPTNGVGYQPYRVVVLSFELLHAPATVCGPKKSTNLVKNKCVNFNFNGLTGTGVLTESNKKFLPFQQFGRDIADTTDAVRDPQTLEILDITPCSFGGVSVITPGTNTSNQVAVLYQDVNCTEVPVAIHADQLTPTWRVYSTGSNVFQTRAGCLIGAEHVNNSYECDIPIGAGICASYQTQTNSPRRARSVASQSIIAYTMSLGAENSVAYSNNSIAIPTNFTISVTTEILPVSMTKTSVDCTMYICGDSTECSNLLLQYGSFCTQLNRALTGIAVEQDKNTQEVFAQVKQIYKTPPIKDFGGFNFSQILPDPSKPSKRSFIEDLLFNKVTLADAGFIKQYGDCLGDIAARDLICAQKFNGLTVLPPLLTDEMIAQYTSALLAGTITSGWTFGAGAALQIPFAMQMAYRFNGIGVTQNVLYENQKLIANQFNSAIGKIQDSLSSTASALGKLQDVVNQNAQALNTLVKQLSSNFGAISSVLNDILSRLDKVEAEVQIDRLITGRLQSLQTYVTQQLIRAAEIRASANLAATKMSECVLGQSKRVDFCGKGYHLMSFPQSAPHGVVFLHVTYVPAQEKNFTTAPAICHDGKAHFPREGVFVSNGTHWFVTQRNFYEPQIITTDNTFVSGNCDVVIGIVNNTVYDPLQPELDSFKEELDKYFKNHTSPDVDLGDISGINASVVNIQKEIDRLNEVAKNLNESLIDLQELGKYEQYIKGGSGYIPEAPRDGQAYVRKDGEWVLLSTFL

SEQ ID NO: 84 - protein, 1241 aa, Artificial Sequence
  SARS-CoV-2/Germany/BavPat1/2020__EPI_ISL_406862 spike protein (1-1211) Foldon construct
MFVFLVLLPLVSSQCVNLTTRTQLPPAYTNSFTRGVYYPDKVFRSSVLHSTQDLFLPFFSNVTWFHAIHVSGTNGTKRFDNPVLPFNDGVYFASTEKSNIIRGWIFGTTLDSKTQSLLIVNNATNVVIKVCEFQFCNDPFLGVYYHKNNKSWMESEFRVYSSANNCTFEYVSQPFLMDLEGKQGNFKNLREFVFKNIDGYFKIYSKHTPINLVRDLPQGFSALEPLVDLPIGINITRFQTLLALHRSYLTPGDSSSGWTAGAAAYYVGYLQPRTFLLKYNENGTITDAVDCALDPLSETKCTLKSFTVEKGIYQTSNFRVQPTESIVRFPNITNLCPFGEVFNATRFASVYAWNRKRISNCVADYSVLYNSASFSTFKCYGVSPTKLNDLCFTNVYADSFVIRGDEVRQIAPGQTGKIADYNYKLPDDFTGCVIAWNSNNLDSKVGGNYNYLYRLFRKSNLKPFERDISTEIYQAGSTPCNGVEGFNCYFPLQSYGFQPTNGVGYQPYRVVVLSFELLHAPATVCGPKKSTNLVKNKCVNFNFNGLTGTGVLTESNKKFLPFQQFGRDIADTTDAVRDPQTLEILDITPCSFGGVSVITPGTNTSNQVAVLYQGVNCTEVPVAIHADQLTPTWRVYSTGSNVFQTRAGCLIGAEHVNNSYECDIPIGAGICASYQTQTNSPRRARSVASQSIIAYTMSLGAENSVAYSNNSIAIPTNFTISVTTEILPVSMTKTSVDCTMYICGDSTECSNLLLQYGSFCTQLNRALTGIAVEQDKNTQEVFAQVKQIYKTPPIKDFGGFNFSQILPDPSKPSKRSFIEDLLFNKVTLADAGFIKQYGDCLGDIAARDLICAQKFNGLTVLPPLLTDEMIAQYTSALLAGTITSGWTFGAGAALQIPFAMQMAYRFNGIGVTQNVLYENQKLIANQFNSAIGKIQDSLSSTASALGKLQDVVNQNAQALNTLVKQLSSNFGAISSVLNDILSRLDKVEAEVQIDRLITGRLQSLQTYVTQQLIRAAEIRASANLAATKMSECVLGQSKRVDFCGKGYHLMSFPQSAPHGVVFLHVTYVPAQEKNFTTAPAICHDGKAHFPREGVFVSNGTHWFVTQRNFYEPQIITTDNTFVSGNCDVVIGIVNNTVYDPLQPELDSFKEELDKYFKNHTSPDVDLGDISGINASVVNIQKEIDRLNEVAKNLNESLIDLQELGKYEQYIKGGSGYIPEAPRDGQAYVRKDGEWVLLSTFL

SEQ ID NO: 85 - protein, 1371 aa, Artificial Sequence
  SARS-CoV-2/Wuhan/WIV05/2019__EPI_ISL_402128 spike protein (1-1211)(K986P_V987P) LumSynth construct
MFVFLVLLPLVSSQCVNLTTRTQLPPAYTNSFTRGVYYPDKVFRSSVLHSTQDLFLPFFSNVTWFHAIHVSGTNGTKRFDNPVLPFNDGVYFASTEKSNIIRGWIFGTTLDSKTQSLLIVNNATNVVIKVCEFQFCNDPFLGVYYHKNNKSWMESEFRVYSSANNCTFEYVSQPFLMDLEGKQGNFKNLREFVFKNIDGYFKIYSKHTPINLVRDLPQGFSALEPLVDLPIGINITRFQTLLALHRSYLTPGDSSSGWTAGAAAYYVGYLQPRTFLLKYNENGTITDAVDCALDPLSETKCTLKSFTVEKGIYQTSNFRVQPTESIVRFPNITNLCPFGEVFNATRFASVYAWNRKRISNCVADYSVLYNSASFSTFKCYGVSPTKLNDLCFTNVYADSFVIRGDEVRQIAPGQTGKIADYNYKLPDDFTGCVIAWNSNNLDSKVGGNYNYLYRLFRKSNLKPFERDISTEIYQAGSTPCNGVEGFNCYFPLQSYGFQPTNGVGYQPYRVVVLSFELLHAPATVCGPKKSTNLVKNKCVNFNFNGLTGTGVLTESNKKFLPFQQFGRDIADTTDAVRDPQTLEILDITPCSFGGVSVITPGTNTSNQVAVLYQDVNCTEVPVAIHADQLTPTWRVYSTGSNVFQTRAGCLIGAEHVNNSYECDIPIGAGICASYQTQTNSPRRARSVASQSIIAYTMSLGAENSVAYSNNSIAIPTNFTISVTTEILPVSMTKTSVDCTMYICGDSTECSNLLLQYGSFCTQLNRALTGIAVEQDKNTQEVFAQVKQIYKTPPIKDFGGFNFSQILPDPSKPSKRSFIEDLLFNKVTLADAGFIKQYGDCLGDIAARDLICAQKFNGLTVLPPLLTDEMIAQYTSALLAGTITSGWTFGAGAALQIPFAMQMAYRFNGIGVTQNVLYENQKLIANQFNSAIGKIQDSLSSTASALGKLQDVVNQNAQALNTLVKQLSSNFGAISSVLNDILSRLDPPEAEVQIDRLITGRLQSLQTYVTQQLIRAAEIRASANLAATKMSECVLGQSKRVDFCGKGYHLMSFPQSAPHGVVFLHVTYVPAQEKNFTTAPAICHDGKAHFPREGVFVSNGTHWFVTQRNFYEPQIITTDNTFVSGNCDVVIGIVNNTVYDPLQPELDSFKEELDKYFKNHTSPDVDLGDISGINASVVNIQKEIDRLNEVAKNLNESLIDLQELGKYEQYIKGGGSGGGQIYEGKLTAEGLRFGIVASRFNHALVDRLVEGAIDAIVRHGGREEDITLVRVPGSWEIPVAAGELARKEDIDAVIAIGVLIRGATPHFDYIASEVSKGLADLSLELRKPITFGVITADTLEQAIERAGTKHGNKGWEAALSAIEMANLFKSLR

SEQ ID NO: 86 - protein, 1367 aa, Artificial Sequence
  SARS-CoV-2/bat/Yunnan/RaTG13/2013__EPI_ISL_402131 spike protein (1-1207)(K982P_V983P) LumSynth construct
MFVFLVLLPLVSSQCVNLTTRTQLPPAYTNSSTRGVYYPDKVFRSSVLHLTQDLFLPFFSNVTWFHAIHVSGTNGIKRFDNPVLPFNDGVYFASTEKSNIIRGWIFGTTLDSKTQSLLIVNNATNVVIKVCEFQFCNDPFLGVYYHKNNKSWMESEFRVYSSANNCTFEYVSQPFLMDLEGKQGNFKNLREFVFKNIDGYFKIYSKHTPINLVRDLPPGFSALEPLVDLPIGINITRFQTLLALHRSYLTPGDSSSGWTAGAAAYYVGYLQPRTFLLKYNENGTITDAVDCALDPLSETKCTLKSFTVEKGIYQTSNFRVQPTDSIVRFPNITNLCPFGEVFNATTFASVYAWNRKRISNCVADYSVLYNSTSFSTFKCYGVSPTKLNDLCFTNVYADSFVITGDEVRQIAPGQTGKIADYNYKLPDDFTGCVIAWNSKHIDAKEGGNFNYLYRLFRKANLKPFERDISTEIYQAGSKPCNGQTGLNCYYPLYRYGFYPTDGVGHQPYRVVVLSFELLNAPATVCGPKKSTNLVKNKCVNFNFNGLTGTGVLTESNKKFLPFQQFGRDIADTTDAVRDPQTLEILDITPCSFGGVSVITPGTNASNQVAVLYQDVNCTEVPVAIHADQLTPTWRVYSTGSNVFQTRAGCLIGAEHVNNSYECDIPIGAGICASYQTQTNSRSVASQSIIAYTMSLGAENSVAYSNNSIAIPTNFTISVTTEILPVSMTKTSVDCTMYICGDSTECSNLLLQYGSFCTQLNRALTGIAVEQDKNTQEVFAQVKQIYKTPPIKDFGGFNFSQILPDPSKPSKRSFIEDLLFNKVTLADAGFIKQYGDCLGDIAARDLICAQKFNGLTVLPPLLTDEMIAQYTSALLAGTITSGWTFGAGAALQIPFAMQMAYRFNGIGVTQNVLYENQKLIANQFNSAIGKIQDSLSSTASALGKLQDVVNQNAQALNTLVKQLSSNFGAISSVLNDILSRLDPPEAEVQIDRLITGRLQSLQTYVTQQLIRAAEIRASANLAATKMSECVLGQSKRVDFCGKGYHLMSFPQSAPHGVVFLHVTYVPAQEKNFTTAPAICHDGKAHFPREGVFVSNGTHWFVTQRNFYEPQIITTDNTFVSGSCDVVIGIVNNTVYDPLQPELDSFKEELDKYFKNHTSPDVDLGDISGINASVVNIQKEIDRLNEVAKNLNESLIDLQELGKYEQYIKGGGSGGGQIYEGKLTAEGLRFGIVASRFNHALVDRLVEGAIDAIVRHGGREEDITLVRVPGSWEIPVAAGELARKEDIDAVIAIGVLIRGATPHFDYIASEVSKGLADLSLELRKPITFGVITADTLEQAIERAGTKHGNKGWEAALSAIEMANLFKSLR

SEQ ID NO: 87 - protein, 1371 aa, Artificial Sequence
  SARS-CoV-2/Wuhan/HBCDC-HB-01/2019__EPI_ISL_402132 spike protein (1-1211)(K986P_V987P) LumSynth construct
MFVFLVLLPLVSSQCVNLTTRTQLPPAYTNSITRGVYYPDKVFRSSVLHSTQDLFLPFFSNVTWFHAIHVSGTNGTKRFDNPVLPFNDGVYFASTEKSNIIRGWIFGTTLDSKTQSLLIVNNATNVVIKVCEFQFCNDPFLGVYYHKNNKSWMESEFRVYSSANNCTFEYVSQPFLMDLEGKQGNFKNLREFVFKNIDGYFKIYSKHTPINLVRDLPQGFSALEPLVDLPIGINITRFQTLLALHRSYLTPGDSSSGWTAGAAAYYVGYLQPRTFLLKYNENGTITDAVDCALDPLSETKCTLKSFTVEKGIYQTSNFRVQPTESIVRFPNITNLCPFGEVFNATRFASVYAWNRKRISNCVADYSVLYNSASFSTFKCYGVSPTKLNDLCFTNVYADSFVIRGDEVRQIAPGQTGKIADYNYKLPDDFTGCVIAWNSNNLDSKVGGNYNYLYRLFRKSNLKPFERDISTEIYQAGSTPCNGVEGFNCYFPLQSYGFQPTNGVGYQPYRVVVLSFELLHAPATVCGPKKSTNLVKNKCVNFNFNGLTGTGVLTESNKKFLPFQQFGRDIADTTDAVRDPQTLEILDITPCSFGGVSVITPGTNTSNQVAVLYQDVNCTEVPVAIHADQLTPTWRVYSTGSNVFQTRAGCLIGAEHVNNSYECDIPIGAGICASYQTQTNSPRRARSVASQSIIAYTMSLGAENSVAYSNNSIAIPTNFTISVTTEILPVSMTKTSVDCTMYICGDSTECSNLLLQYGSFCTQLNRALTGIAVEQDKNTQEVFAQVKQIYKTPPIKDFGGFNFSQILPDPSKPSKRSFIEDLLFNKVTLADAGFIKQYGDCLGDIAARDLICAQKFNGLTVLPPLLTDEMIAQYTSALLAGTITSGWTFGAGAALQIPFAMQMAYRFNGIGVTQNVLYENQKLIANQFNSAIGKIQDSLSSTASALGKLQDVVNQNAQALNTLVKQLSSNFGAISSVLNDILSRLDPPEAEVQIDRLITGRLQSLQTYVTQQLIRAAEIRASANLAATKMSECVLGQSKRVDFCGKGYHLMSFPQSAPHGVVFLHVTYVPAQEKNFTTAPAICHDGKAHFPREGVFVSNGTHWFVTQRNFYEPQIITTDNTFVSGNCDVVIGIVNNTVYDPLQPELDSFKEELDKYFKNHTSPDVDLGDISGINASVVNIQKEIDRLNEVAKNLNESLIDLQELGKYEQYIKGGGSGGGQIYEGKLTAEGLRFGIVASRFNHALVDRLVEGAIDAIVRHGGREEDITLVRVPGSWEIPVAAGELARKEDIDAVIAIGVLIRGATPHFDYIASEVSKGLADLSLELRKPITFGVITADTLEQAIERAGTKHGNKGWEAALSAIEMANLFKSLR

SEQ ID NO: 88 - protein, 1371 aa, Artificial Sequence
  SARS-CoV-2/Guangdong/20SF028/2020__EPI_ISL_403936 spike protein (1-1211)(K986P_V987P) LumSynth construct
MFVFLVLLPLVSSQCVNLTTRTQLPPAYTNSFTRGVYYPDKVFRSSVLYSTQDLFLPFFSNVTWFHAIHVSGTNGTKRFDNPVLPFNDGVYFASTEKSNIIRGWIFGTTLDSKTQSLLIVNNATNVVIKVCEFQFCNDPFLGVYYHKNNKSWMESEFRVYSSANNCTFEYVSQPFLMDLEGKQGNFKNLREFVFKNIDGYFKIYSKHTPINLVRDLPQGFSALEPLVDLPIGINITRFQTLLALHRSYLTPGDSSSGWTAGAAAYYVGYLQPRTFLLKYNENGTITDAVDCALDPLSETKCTLKSFTVEKGIYQTSNFRVQPTESIVRFPNITNLCPFGEVFNATRFASVYAWNRKRISNCVADYSVLYNSASFSTFKCYGVSPTKLNDLCFTNVYADSFVIRGDEVRQIAPGQTGKIADYNYKLPDDFTGCVIAWNSNNLDSKVGGNYNYLYRLFRKSNLKPFERDISTEIYQAGSTPCNGVEGFNCYFPLQSYGFQPTNGVGYQPYRVVVLSFELLHAPATVCGPKKSTNLVKNKCVNFNFNGLTGTGVLTESNKKFLPFQQFGRDIADTTDAVRDPQTLEILDITPCSFGGVSVITPGTNTSNQVAVLYQDVNCTEVPVAIHADQLTPTWRVYSTGSNVFQTRAGCLIGAEHVNNSYECDIPIGAGICASYQTQTNSPRRARSVASQSIIAYTMSLGAENSVAYSNNSIAIPTNFTISVTTEILPVSMTKTSVDCTMYICGDSTECSNLLLQYGSFCTQLNRALTGIAVEQDKNTQEVFAQVKQIYKTPPIKDFGGFNFSQILPDPSKPSKRSFIEDLLFNKVTLADAGFIKQYGDCLGDIAARDLICAQKFNGLTVLPPLLTDEMIAQYTSALLAGTITSGWTFGAGAALQIPFAMQMAYRFNGIGVTQNVLYENQKLIANQFNSAIGKIQDSLSSTASALGKLQDVVNQNAQALNTLVKQLSSNFGAISSVLNDILSRLDPPEAEVQIDRLITGRLQSLQTYVTQQLIRAAEIRASANLAATKMSECVLGQSKRVDFCGKGYHLMSFPQSAPHGVVFLHVTYVPAQEKNFTTAPAICHDGKAHFPREGVFVSNGTHWFVTQRNFYEPQIITTDNTFVSGNCDVVIGIVNNTVYDPLQPELDSFKEELDKYFKNHTSPDVDLGDISGINASVVNIQKEIDRLNEVAKNLNESLIDLQELGKYEQYIKGGGSGGGQIYEGKLTAEGLRFGIVASRFNHALVDRLVEGAIDAIVRHGGREEDITLVRVPGSWEIPVAAGELARKEDIDAVIAIGVLIRGATPHFDYIASEVSKGLADLSLELRKPITFGVITADTLEQAIERAGTKHGNKGWEAALSAIEMANLFKSLR

SEQ ID NO: 89 - protein, 1371 aa, Artificial Sequence
  SARS-CoV-2/Shenzhen/SZTH-001/2020__EPI_ISL_406592 spike protein (1-1211)(K986P_V987P) LumSynth construct
MFVFLVLLPLVSSQCVNLTTRTQLPPAYTNSFTRGVYYPDKVFRSSVLHSTQDLFLPFFSNVTWFHAIHVSGTNGTKRFDNPVLPFNDGVYFASTEKSNIIRGWIFGTTLDSKTQSLLIVNNATNVVIKVCEFQFCNDPFLGVYYHKNNKSWMESEFRVYSSANNCTFEYVSQPFLMDLEGKQGNFKNLREFVFKNIDGYFKIYSKHTPINLVRDLPQGFSALEPLVDLPIGINITRFQTLLALHRSYLTPGDSSSGWTAGAAAYYVGYLQPRTFLLKYNENGTITDAVDCALDPLSETKCTLKSFTVEKGIYQTSNFRVQPTESIVRFPNITNLCPFGEVFNATRFASVYAWNRKRISNCVADYSVLYNSASFSTFKCYGVSPTKLNDLCFTNVYADSFVIRGDEVRQIAPGQTGKIADYNYKLPDDFTGCVIAWNSNNLDSKVGGNYNYLYRLFRKSNLKPFERDISTEIYQAGSTPCNGVEGFNCYFPLQSYGFQPTNGVGYQPYRVVVLSFELLHAPATVCGPKKSTNLVKNKCVNFNFNGLTGTGVLTESNKKFLPFQQFGRDIADTTDAVRDPQTLEILDITPCSFGGVSVITPGTNTSNQVAVLYQDVNCTEVPVAIHADQLTPTWRVYSTGSNVFQTRAGCLIGAEHVNNSYECDIPIGAGICASYQTQTNSPRRARSVASQSIIAYTMSLGAENSVAYSNNSIAIPTNFTISVTTEILPVSMTKTSVDCTMYICGDSTECSNLLLQYGSFCTQLNRALTGIAVEQDKNTQEVFAQVKQIYKTPPIKDFGGFNFSQILPDPSKPSKRSFIEDLLFNKVTLADAGFIKQYGDCLGDIAARDLICAQKFNGLTVLPPLLTDEMIAQYTSALLAGTITSGWTFGAGAALQIPFAMQMAYRFNGIGVTQNVLYENQKLIANQFNSAIGKIQDSLSSTASALGKLQDVVNQNAQALNTLVKQLSSNFGAISSVLNDILSRLDPPEAEVQIDRLITGRLQSLQTYVTQQLIRAAEIRASANLAATKMSECVLGQSKRVDFCGKGYHLMSFPQSAPHGVVFLHVTYVPAQEKNFTTAPAICHDGKAHFPREGVFVSNGTHWFVTQRNFYEPQIITTDNTFVSGNCDVLIGIVNNTVYDPLQPELDSFKEELDKYFKNHTSPDVDLGDISGINASVVNIQKEIDRLNEVAKNLNESLIDLQELGKYEQYIKGGGSGGGQIYEGKLTAEGLRFGIVASRFNHALVDRLVEGAIDAIVRHGGREEDITLVRVPGSWEIPVAAGELARKEDIDAVIAIGVLIRGATPHFDYIASEVSKGLADLSLELRKPITFGVITADTLEQAIERAGTKHGNKGWEAALSAIEMANLFKSLR

SEQ ID NO: 90 - protein, 1371 aa, Artificial Sequence
  SARS-CoV-2/Shenzhen/SZTH-004/2020__EPI_ISL_406595 spike protein (1-1211)(K986P_V987P) LumSynth construct
MFVFLVLLPLVSSQCVNLTTRTQLPPAYTNSFTRGVYYPDKVFRSSVLHSTQDLFLPFFSNVTWFHAIHVSGTNGTKRFDNPVLPFNDGVYFASTEKSNIIRGWIFGTTLDSKTQSLLIVNNATNVVIKVCEFQFCNDPFLGVYYHKNNKSWMESEFRVYSSANNCTFEYVSQPFLMDLEGKQGNFKNLREFVFKNIDGYFKIYSKHTPINLVRDLPQGFSALEPLVDLPIGINITRFQTLLALHRSYLTPGDSSSGWTAGAAAYYVGYLQPRTFLLKYNENGTITDAVDCALDPLSETKCTLKSFTVEKGIYQTSNFRVQPTESIVRFPNITNLCPFGEVFNATRFASVYAWDRKRISNCVAYYSVLYNSASFSTFKCYGVSPTKLNDLCFTNVYADSFVIRGDEVRQIAPGQTGKIADYNYKLPDDFTGCVIAWNSNNLDSKVGGNYNYLYRLFRKSNLKPFERDISTEIYQAGSTPCNGVEGFNCYFPLQSYGFQPTNGVGYQPYRVVVLSFELLHAPATVCGPKKSTNLVKNKCVNFNFNGLTGTGVLTESNKKFLPFQQFGRDIADTTDAVRDPQTLEILDITPCSFGGVSVITPGTNTSNQVAVLYQDVNCTEVPVAIHADQLTPTWRVYSTGSNVFQTRAGCLIGAEHVNNSYECDIPIGAGICASYQTQTNSPRRARSVASQSIIAYTMSLGAENSVAYSNNSIAIPTNFTISVTTEILPVSMTKTSVDCTMYICGDSTECSNLLLQYGSFCTQLNRALTGIAVEQDKNTQEVFAQVKQIYKTPPIKDFGGFNFSQILPDPSKPSKRSFIEDLLFNKVTLADAGFIKQYGDCLGDIAARDLICAQKFNGLTVLPPLLTDEMIAQYTSALLAGTITSGWTFGAGAALQIPFAMQMAYRFNGIGVTQNVLYENQKLIANQFNSAIGKIQDSLSSTASALGKLQDVVNQNAQALNTLVKQLSSNFGAISSVLNDILSRLDPPEAEVQIDRLITGRLQSLQTYVTQQLIRAAEIRASANLAATKMSECVLGQSKRVDFCGKGYHLMSFPQSAPHGVVFLHVTYVPAQEKNFTTAPAICHDGKAHFPREGVFVSNGTHWFVTQRNFYEPQIITTDNTFVSGNCDVVIGIVNNTVYDPLQPELDSFKEELDKYFKNHTSPDVDLGDISGINASVVNIQKEIDRLNEVAKNLNESLIDLQELGKYEQYIKGGGSGGGQIYEGKLTAEGLRFGIVASRFNHALVDRLVEGAIDAIVRHGGREEDITLVRVPGSWEIPVAAGELARKEDIDAVIAIGVLIRGATPHFDYIASEVSKGLADLSLELRKPITFGVITADTLEQAIERAGTKHGNKGWEAALSAIEMANLFKSLR

SEQ ID NO: 91 - protein, 1371 aa, Artificial Sequence
  SARS-CoV-2/France/IDF0372/2020__EPI_ISL_406596 spike protein (1-1211)(K986P_V987P) LumSynth construct
MFVFLVLLPLVSSQCVNLTTRTQLPPAYTNSFTRGVYYPDKVFRSSVLHSTQDLFLPFFSNVTWFHAIHVSGTNGTKRFDNPVLPFNDGVYFASTEKSNIIRGWIFGTTLDSKTQSLLIVNNATNVVIKVCEFQFCNDPFLGVYYHKNNKSWMESEFRVYSSANNCTFEYVSQPFLMDLEGKQGNFKNLREFVFKNIDGYFKIYSKHTPINLVRDLPQGFSALEPLVDLPIGINITRFQTLLALHRSYLTPGDSSSGWTAGAAAYYVGYLQPRTFLLKYNENGTITDAVDCALDPLSETKCTLKSFTVEKGIYQTSNFRVQPTESIVRFPNITNLCPFGEVFNATRFASVYAWNRKRISNCVADYSFLYNSASFSTFKCYGVSPTKLNDLCFTNVYADSFVIRGDEVRQIAPGQTGKIADYNYKLPDDFTGCVIAWNSNNLDSKVGGNYNYLYRLFRKSNLKPFERDISTEIYQAGSTPCNGVEGFNCYFPLQSYGFQPTNGVGYQPYRVVVLSFELLHAPATVCGPKKSTNLVKNKCVNFNFNGLTGTGVLTESNKKFLPFQQFGRDIADTTDAVRDPQTLEILDITPCSFGGVSVITPGTNTSNQVAVLYQDVNCTEVPVAIHADQLTPTWRVYSTGSNVFQTRAGCLIGAEHVNNSYECDIPIGAGICASYQTQTNSPRRARSVASQSIIAYTMSLGAENSVAYSNNSIAIPTNFTISVTTEILPVSMTKTSVDCTMYICGDSTECSNLLLQYGSFCTQLNRALTGIAVEQDKNTQEVFAQVKQIYKTPPIKDFGGFNFSQILPDPSKPSKRSFIEDLLFNKVTLADAGFIKQYGDCLGDIAARDLICAQKFNGLTVLPPLLTDEMIAQYTSALLAGTITSGWTFGAGAALQIPFAMQMAYRFNGIGVTQNVLYENQKLIANQFNSAIGKIQDSLSSTASALGKLQDVVNQNAQALNTLVKQLSSNFGAISSVLNDILSRLDPPEAEVQIDRLITGRLQSLQTYVTQQLIRAAEIRASANLAATKMSECVLGQSKRVDFCGKGYHLMSFPQSAPHGVVFLHVTYVPAQEKNFTTAPAICHDGKAHFPREGVFVSNGTHWFVTQRNFYEPQIITTDNTFVSGNCDVVIGIVNNTVYDPLQPELDSFKEELDKYFKNHTSPDVDLGDISGINASVVNIQKEIDRLNEVAKNLNESLIDLQELGKYEQYIKGGGSGGGQIYEGKLTAEGLRFGIVASRFNHALVDRLVEGAIDAIVRHGGREEDITLVRVPGSWEIPVAAGELARKEDIDAVIAIGVLIRGATPHFDYIASEVSKGLADLSLELRKPITFGVITADTLEQAIERAGTKHGNKGWEAALSAIEMANLFKSLR

SEQ ID NO: 92 - protein, 1371 aa, Artificial Sequence
  SARS-CoV-2/Australia/VIC01/2020__EPI_ISL_406844 spike protein (1-1211)(K986P_V987P) LumSynth construct
MFVFLVLLPLVSSQCVNLTTRTQLPPAYTNSFTRGVYYPDKVFRSSVLHSTQDLFLPFFSNVTWFHAIHVSGTNGTKRFDNPVLPFNDGVYFASTEKSNIIRGWIFGTTLDSKTQSLLIVNNATNVVIKVCEFQFCNDPFLGVYYHKNNKSWMESEFRVYSSANNCTFEYVSQPFLMDLEGKQGNFKNLREFVFKNIDGYFKIYSKHTPINLVRDLPQGFSALEPLVDLPIGINITRFQTLLALHRRYLTPGDSSSGWTAGAAAYYVGYLQPRTFLLKYNENGTITDAVDCALDPLSETKCTLKSFTVEKGIYQTSNFRVQPTESIVRFPNITNLCPFGEVFNATRFASVYAWNRKRISNCVADYSVLYNSASFSTFKCYGVSPTKLNDLCFTNVYADSFVIRGDEVRQIAPGQTGKIADYNYKLPDDFTGCVIAWNSNNLDSKVGGNYNYLYRLFRKSNLKPFERDISTEIYQAGSTPCNGVEGFNCYFPLQSYGFQPTNGVGYQPYRVVVLSFELLHAPATVCGPKKSTNLVKNKCVNFNFNGLTGTGVLTESNKKFLPFQQFGRDIADTTDAVRDPQTLEILDITPCSFGGVSVITPGTNTSNQVAVLYQDVNCTEVPVAIHADQLTPTWRVYSTGSNVFQTRAGCLIGAEHVNNSYECDIPIGAGICASYQTQTNSPRRARSVASQSIIAYTMSLGAENSVAYSNNSIAIPTNFTISVTTEILPVSMTKTSVDCTMYICGDSTECSNLLLQYGSFCTQLNRALTGIAVEQDKNTQEVFAQVKQIYKTPPIKDFGGFNFSQILPDPSKPSKRSFIEDLLFNKVTLADAGFIKQYGDCLGDIAARDLICAQKFNGLTVLPPLLTDEMIAQYTSALLAGTITSGWTFGAGAALQIPFAMQMAYRFNGIGVTQNVLYENQKLIANQFNSAIGKIQDSLSSTASALGKLQDVVNQNAQALNTLVKQLSSNFGAISSVLNDILSRLDPPEAEVQIDRLITGRLQSLQTYVTQQLIRAAEIRASANLAATKMSECVLGQSKRVDFCGKGYHLMSFPQSAPHGVVFLHVTYVPAQEKNFTTAPAICHDGKAHFPREGVFVSNGTHWFVTQRNFYEPQIITTDNTFVSGNCDVVIGIVNNTVYDPLQPELDSFKEELDKYFKNHTSPDVDLGDISGINASVVNIQKEIDRLNEVAKNLNESLIDLQELGKYEQYIKGGGSGGGQIYEGKLTAEGLRFGIVASRFNHALVDRLVEGAIDAIVRHGGREEDITLVRVPGSWEIPVAAGELARKEDIDAVIAIGVLIRGATPHFDYIASEVSKGLADLSLELRKPITFGVITADTLEQAIERAGTKHGNKGWEAALSAIEMANLFKSLR

SEQ ID NO: 93 - protein, 1371 aa, Artificial Sequence
  SARS-CoV-2/Germany/BavPat1/2020__EPI_ISL_406862 spike protein (1-1211)(K986P_V987P) LumSynth construct
MFVFLVLLPLVSSQCVNLTTRTQLPPAYTNSFTRGVYYPDKVFRSSVLHSTQDLFLPFFSNVTWFHAIHVSGTNGTKRFDNPVLPFNDGVYFASTEKSNIIRGWIFGTTLDSKTQSLLIVNNATNVVIKVCEFQFCNDPFLGVYYHKNNKSWMESEFRVYSSANNCTFEYVSQPFLMDLEGKQGNFKNLREFVFKNIDGYFKIYSKHTPINLVRDLPQGFSALEPLVDLPIGINITRFQTLLALHRSYLTPGDSSSGWTAGAAAYYVGYLQPRTFLLKYNENGTITDAVDCALDPLSETKCTLKSFTVEKGIYQTSNFRVQPTESIVRFPNITNLCPFGEVFNATRFASVYAWNRKRISNCVADYSVLYNSASFSTFKCYGVSPTKLNDLCFTNVYADSFVIRGDEVRQIAPGQTGKIADYNYKLPDDFTGCVIAWNSNNLDSKVGGNYNYLYRLFRKSNLKPFERDISTEIYQAGSTPCNGVEGFNCYFPLQSYGFQPTNGVGYQPYRVVVLSFELLHAPATVCGPKKSTNLVKNKCVNFNFNGLTGTGVLTESNKKFLPFQQFGRDIADTTDAVRDPQTLEILDITPCSFGGVSVITPGTNTSNQVAVLYQGVNCTEVPVAIHADQLTPTWRVYSTGSNVFQTRAGCLIGAEHVNNSYECDIPIGAGICASYQTQTNSPRRARSVASQSIIAYTMSLGAENSVAYSNNSIAIPTNFTISVTTEILPVSMTKTSVDCTMYICGDSTECSNLLLQYGSFCTQLNRALTGIAVEQDKNTQEVFAQVKQIYKTPPIKDFGGFNFSQILPDPSKPSKRSFIEDLLFNKVTLADAGFIKQYGDCLGDIAARDLICAQKFNGLTVLPPLLTDEMIAQYTSALLAGTITSGWTFGAGAALQIPFAMQMAYRFNGIGVTQNVLYENQKLIANQFNSAIGKIQDSLSSTASALGKLQDVVNQNAQALNTLVKQLSSNFGAISSVLNDILSRLDPPEAEVQIDRLITGRLQSLQTYVTQQLIRAAEIRASANLAATKMSECVLGQSKRVDFCGKGYHLMSFPQSAPHGVVFLHVTYVPAQEKNFTTAPAICHDGKAHFPREGVFVSNGTHWFVTQRNFYEPQIITTDNTFVSGNCDVVIGIVNNTVYDPLQPELDSFKEELDKYFKNHTSPDVDLGDISGINASVVNIQKEIDRLNEVAKNLNESLIDLQELGKYEQYIKGGGSGGGQIYEGKLTAEGLRFGIVASRFNHALVDRLVEGAIDAIVRHGGREEDITLVRVPGSWEIPVAAGELARKEDIDAVIAIGVLIRGATPHFDYIASEVSKGLADLSLELRKPITFGVITADTLEQAIERAGTKHGNKGWEAALSAIEMANLFKSLR

SEQ ID NO: 94 - protein, 1377 aa, Artificial Sequence
  SARS-CoV-2/Wuhan/WIV05/2019__EPI_ISL_402128 spike protein (1-1211)(K986P_V987P) Ferritin construct
MFVFLVLLPLVSSQCVNLTTRTQLPPAYTNSFTRGVYYPDKVFRSSVLHSTQDLFLPFFSNVTWFHAIHVSGTNGTKRFDNPVLPFNDGVYFASTEKSNIIRGWIFGTTLDSKTQSLLIVNNATNVVIKVCEFQFCNDPFLGVYYHKNNKSWMESEFRVYSSANNCTFEYVSQPFLMDLEGKQGNFKNLREFVFKNIDGYFKIYSKHTPINLVRDLPQGFSALEPLVDLPIGINITRFQTLLALHRSYLTPGDSSSGWTAGAAAYYVGYLQPRTFLLKYNENGTITDAVDCALDPLSETKCTLKSFTVEKGIYQTSNFRVQPTESIVRFPNITNLCPFGEVFNATRFASVYAWNRKRISNCVADYSVLYNSASFSTFKCYGVSPTKLNDLCFTNVYADSFVIRGDEVRQIAPGQTGKIADYNYKLPDDFTGCVIAWNSNNLDSKVGGNYNYLYRLFRKSNLKPFERDISTEIYQAGSTPCNGVEGFNCYFPLQSYGFQPTNGVGYQPYRVVVLSFELLHAPATVCGPKKSTNLVKNKCVNFNFNGLTGTGVLTESNKKFLPFQQFGRDIADTTDAVRDPQTLEILDITPCSFGGVSVITPGTNTSNQVAVLYQDVNCTEVPVAIHADQLTPTWRVYSTGSNVFQTRAGCLIGAEHVNNSYECDIPIGAGICASYQTQTNSPRRARSVASQSIIAYTMSLGAENSVAYSNNSIAIPTNFTISVTTEILPVSMTKTSVDCTMYICGDSTECSNLLLQYGSFCTQLNRALTGIAVEQDKNTQEVFAQVKQIYKTPPIKDFGGFNFSQILPDPSKPSKRSFIEDLLFNKVTLADAGFIKQYGDCLGDIAARDLICAQKFNGLTVLPPLLTDEMIAQYTSALLAGTITSGWTFGAGAALQIPFAMQMAYRFNGIGVTQNVLYENQKLIANQFNSAIGKIQDSLSSTASALGKLQDVVNQNAQALNTLVKQLSSNFGAISSVLNDILSRLDPPEAEVQIDRLITGRLQSLQTYVTQQLIRAAEIRASANLAATKMSECVLGQSKRVDFCGKGYHLMSFPQSAPHGVVFLHVTYVPAQEKNFTTAPAICHDGKAHFPREGVFVSNGTHWFVTQRNFYEPQIITTDNTFVSGNCDVVIGIVNNTVYDPLQPELDSFKEELDKYFKNHTSPDVDLGDISGINASVVNIQKEIDRLNEVAKNLNESLIDLQELGKYEQYIKGGSDIIKLLNEQVNKEMQSSNLYMSMSSWCYTHSLDGAGLFLFDHAAEEYEHAKKLIIFLNENNVPVQLTSISAPEHKFEGLTQIFQKAYEHEQHISESINNIVDHAIKSKDHATFNFLQWYVAEQHEEEVLFKDILDKIELIGNENHGLYLADQYVKGIAKSRKS

SEQ ID NO: 95 - protein, 1373 aa, Artificial Sequence
  SARS-CoV-2/bat/Yunnan/RaTG13/2013__EPI_ISL_402131 spike protein (1-1207)(K982P_V983P) Ferritin construct
MFVFLVLLPLVSSQCVNLTTRTQLPPAYTNSSTRGVYYPDKVFRSSVLHLTQDLFLPFFSNVTWFHAIHVSGTNGIKRFDNPVLPFNDGVYFASTEKSNIIRGWIFGTTLDSKTQSLLIVNNATNVVIKVCEFQFCNDPFLGVYYHKNNKSWMESEFRVYSSANNCTFEYVSQPFLMDLEGKQGNFKNLREFVFKNIDGYFKIYSKHTPINLVRDLPPGFSALEPLVDLPIGINITRFQTLLALHRSYLTPGDSSSGWTAGAAAYYVGYLQPRTFLLKYNENGTITDAVDCALDPLSETKCTLKSFTVEKGIYQTSNFRVQPTDSIVRFPNITNLCPFGEVFNATTFASVYAWNRKRISNCVADYSVLYNSTSFSTFKCYGVSPTKLNDLCFTNVYADSFVITGDEVRQIAPGQTGKIADYNYKLPDDFTGCVIAWNSKHIDAKEGGNFNYLYRLFRKANLKPFERDISTEIYQAGSKPCNGQTGLNCYYPLYRYGFYPTDGVGHQPYRVVVLSFELLNAPATVCGPKKSTNLVKNKCVNFNFNGLTGTGVLTESNKKFLPFQQFGRDIADTTDAVRDPQTLEILDITPCSFGGVSVITPGTNASNQVAVLYQDVNCTEVPVAIHADQLTPTWRVYSTGSNVFQTRAGCLIGAEHVNNSYECDIPIGAGICASYQTQTNSRSVASQSIIAYTMSLGAENSVAYSNNSIAIPTNFTISVTTEILPVSMTKTSVDCTMYICGDSTECSNLLLQYGSFCTQLNRALTGIAVEQDKNTQEVFAQVKQIYKTPPIKDFGGFNFSQILPDPSKPSKRSFIEDLLFNKVTLADAGFIKQYGDCLGDIAARDLICAQKFNGLTVLPPLLTDEMIAQYTSALLAGTITSGWTFGAGAALQIPFAMQMAYRFNGIGVTQNVLYENQKLIANQFNSAIGKIQDSLSSTASALGKLQDVVNQNAQALNTLVKQLSSNFGAISSVLNDILSRLDPPEAEVQIDRLITGRLQSLQTYVTQQLIRAAEIRASANLAATKMSECVLGQSKRVDFCGKGYHLMSFPQSAPHGVVFLHVTYVPAQEKNFTTAPAICHDGKAHFPREGVFVSNGTHWFVTQRNFYEPQIITTDNTFVSGSCDVVIGIVNNTVYDPLQPELDSFKEELDKYFKNHTSPDVDLGDISGINASVVNIQKEIDRLNEVAKNLNESLIDLQELGKYEQYIKGGSDIIKLLNEQVNKEMQSSNLYMSMSSWCYTHSLDGAGLFLFDHAAEEYEHAKKLIIFLNENNVPVQLTSISAPEHKFEGLTQIFQKAYEHEQHISESINNIVDHAIKSKDHATFNFLQWYVAEQHEEEVLFKDILDKIELIGNENHGLYLADQYVKGIAKSRKS

SEQ ID NO: 96 - protein, 1377 aa, Artificial Sequence
  SARS-CoV-2/Wuhan/HBCDC-HB-01/2019__EPI_ISL_402132 spike protein (1-1211)(K986P_V987P) Ferritin construct
MFVFLVLLPLVSSQCVNLTTRTQLPPAYTNSITRGVYYPDKVFRSSVLHSTQDLFLPFFSNVTWFHAIHVSGTNGTKRFDNPVLPFNDGVYFASTEKSNIIRGWIFGTTLDSKTQSLLIVNNATNVVIKVCEFQFCNDPFLGVYYHKNNKSWMESEFRVYSSANNCTFEYVSQPFLMDLEGKQGNFKNLREFVFKNIDGYFKIYSKHTPINLVRDLPQGFSALEPLVDLPIGINITRFQTLLALHRSYLTPGDSSSGWTAGAAAYYVGYLQPRTFLLKYNENGTITDAVDCALDPLSETKCTLKSFTVEKGIYQTSNFRVQPTESIVRFPNITNLCPFGEVFNATRFASVYAWNRKRISNCVADYSVLYNSASFSTFKCYGVSPTKLNDLCFTNVYADSFVIRGDEVRQIAPGQTGKIADYNYKLPDDFTGCVIAWNSNNLDSKVGGNYNYLYRLFRKSNLKPFERDISTEIYQAGSTPCNGVEGFNCYFPLQSYGFQPTNGVGYQPYRVVVLSFELLHAPATVCGPKKSTNLVKNKCVNFNFNGLTGTGVLTESNKKFLPFQQFGRDIADTTDAVRDPQTLEILDITPCSFGGVSVITPGTNTSNQVAVLYQDVNCTEVPVAIHADQLTPTWRVYSTGSNVFQTRAGCLIGAEHVNNSYECDIPIGAGICASYQTQTNSPRRARSVASQSIIAYTMSLGAENSVAYSNNSIAIPTNFTISVTTEILPVSMTKTSVDCTMYICGDSTECSNLLLQYGSFCTQLNRALTGIAVEQDKNTQEVFAQVKQIYKTPPIKDFGGFNFSQILPDPSKPSKRSFIEDLLFNKVTLADAGFIKQYGDCLGDIAARDLICAQKFNGLTVLPPLLTDEMIAQYTSALLAGTITSGWTFGAGAALQIPFAMQMAYRFNGIGVTQNVLYENQKLIANQFNSAIGKIQDSLSSTASALGKLQDVVNQNAQALNTLVKQLSSNFGAISSVLNDILSRLDPPEAEVQIDRLITGRLQSLQTYVTQQLIRAAEIRASANLAATKMSECVLGQSKRVDFCGKGYHLMSFPQSAPHGVVFLHVTYVPAQEKNFTTAPAICHDGKAHFPREGVFVSNGTHWFVTQRNFYEPQIITTDNTFVSGNCDVVIGIVNNTVYDPLQPELDSFKEELDKYFKNHTSPDVDLGDISGINASVVNIQKEIDRLNEVAKNLNESLIDLQELGKYEQYIKGGSDIIKLLNEQVNKEMQSSNLYMSMSSWCYTHSLDGAGLFLFDHAAEEYEHAKKLIIFLNENNVPVQLTSISAPEHKFEGLTQIFQKAYEHEQHISESINNIVDHAIKSKDHATFNFLQWYVAEQHEEEVLFKDILDKIELIGNENHGLYLADQYVKGIAKSRKS

SEQ ID NO: 97 - protein, 1377 aa, Artificial Sequence
  SARS-CoV-2/Guangdong/20SF028/2020__EPI_ISL_403936 spike protein (1-1211)(K986P_V987P) Ferritin construct
MFVFLVLLPLVSSQCVNLTTRTQLPPAYTNSFTRGVYYPDKVFRSSVLYSTQDLFLPFFSNVTWFHAIHVSGTNGTKRFDNPVLPFNDGVYFASTEKSNIIRGWIFGTTLDSKTQSLLIVNNATNVVIKVCEFQFCNDPFLGVYYHKNNKSWMESEFRVYSSANNCTFEYVSQPFLMDLEGKQGNFKNLREFVFKNIDGYFKIYSKHTPINLVRDLPQGFSALEPLVDLPIGINITRFQTLLALHRSYLTPGDSSSGWTAGAAAYYVGYLQPRTFLLKYNENGTITDAVDCALDPLSETKCTLKSFTVEKGIYQTSNFRVQPTESIVRFPNITNLCPFGEVFNATRFASVYAWNRKRISNCVADYSVLYNSASFSTFKCYGVSPTKLNDLCFTNVYADSFVIRGDEVRQIAPGQTGKIADYNYKLPDDFTGCVIAWNSNNLDSKVGGNYNYLYRLFRKSNLKPFERDISTEIYQAGSTPCNGVEGFNCYFPLQSYGFQPTNGVGYQPYRVVVLSFELLHAPATVCGPKKSTNLVKNKCVNFNFNGLTGTGVLTESNKKFLPFQQFGRDIADTTDAVRDPQTLEILDITPCSFGGVSVITPGTNTSNQVAVLYQDVNCTEVPVAIHADQLTPTWRVYSTGSNVFQTRAGCLIGAEHVNNSYECDIPIGAGICASYQTQTNSPRRARSVASQSIIAYTMSLGAENSVAYSNNSIAIPTNFTISVTTEILPVSMTKTSVDCTMYICGDSTECSNLLLQYGSFCTQLNRALTGIAVEQDKNTQEVFAQVKQIYKTPPIKDFGGFNFSQILPDPSKPSKRSFIEDLLFNKVTLADAGFIKQYGDCLGDIAARDLICAQKFNGLTVLPPLLTDEMIAQYTSALLAGTITSGWTFGAGAALQIPFAMQMAYRFNGIGVTQNVLYENQKLIANQFNSAIGKIQDSLSSTASALGKLQDVVNQNAQALNTLVKQLSSNFGAISSVLNDILSRLDPPEAEVQIDRLITGRLQSLQTYVTQQLIRAAEIRASANLAATKMSECVLGQSKRVDFCGKGYHLMSFPQSAPHGVVFLHVTYVPAQEKNFTTAPAICHDGKAHFPREGVFVSNGTHWFVTQRNFYEPQIITTDNTFVSGNCDVVIGIVNNTVYDPLQPELDSFKEELDKYFKNHTSPDVDLGDISGINASVVNIQKEIDRLNEVAKNLNESLIDLQELGKYEQYIKGGSDIIKLLNEQVNKEMQSSNLYMSMSSWCYTHSLDGAGLFLFDHAAEEYEHAKKLIIFLNENNVPVQLTSISAPEHKFEGLTQIFQKAYEHEQHISESINNIVDHAIKSKDHATFNFLQWYVAEQHEEEVLFKDILDKIELIGNENHGLYLADQYVKGIAKSRKS

SEQ ID NO: 98 - protein, 1377 aa, Artificial Sequence
  SARS-CoV-2/Shenzhen/SZTH-001/2020__EPI_ISL_406592 spike protein (1-1211)(K986P_V987P) Ferritin construct
MFVFLVLLPLVSSQCVNLTTRTQLPPAYTNSFTRGVYYPDKVFRSSVLHSTQDLFLPFFSNVTWFHAIHVSGTNGTKRFDNPVLPFNDGVYFASTEKSNIIRGWIFGTTLDSKTQSLLIVNNATNVVIKVCEFQFCNDPFLGVYYHKNNKSWMESEFRVYSSANNCTFEYVSQPFLMDLEGKQGNFKNLREFVFKNIDGYFKIYSKHTPINLVRDLPQGFSALEPLVDLPIGINITRFQTLLALHRSYLTPGDSSSGWTAGAAAYYVGYLQPRTFLLKYNENGTITDAVDCALDPLSETKCTLKSFTVEKGIYQTSNFRVQPTESIVRFPNITNLCPFGEVFNATRFASVYAWNRKRISNCVADYSVLYNSASFSTFKCYGVSPTKLNDLCFTNVYADSFVIRGDEVRQIAPGQTGKIADYNYKLPDDFTGCVIAWNSNNLDSKVGGNYNYLYRLFRKSNLKPFERDISTEIYQAGSTPCNGVEGFNCYFPLQSYGFQPTNGVGYQPYRVVVLSFELLHAPATVCGPKKSTNLVKNKCVNFNFNGLTGTGVLTESNKKFLPFQQFGRDIADTTDAVRDPQTLEILDITPCSFGGVSVITPGTNTSNQVAVLYQDVNCTEVPVAIHADQLTPTWRVYSTGSNVFQTRAGCLIGAEHVNNSYECDIPIGAGICASYQTQTNSPRRARSVASQSIIAYTMSLGAENSVAYSNNSIAIPTNFTISVTTEILPVSMTKTSVDCTMYICGDSTECSNLLLQYGSFCTQLNRALTGIAVEQDKNTQEVFAQVKQIYKTPPIKDFGGFNFSQILPDPSKPSKRSFIEDLLFNKVTLADAGFIKQYGDCLGDIAARDLICAQKFNGLTVLPPLLTDEMIAQYTSALLAGTITSGWTFGAGAALQIPFAMQMAYRFNGIGVTQNVLYENQKLIANQFNSAIGKIQDSLSSTASALGKLQDVVNQNAQALNTLVKQLSSNFGAISSVLNDILSRLDPPEAEVQIDRLITGRLQSLQTYVTQQLIRAAEIRASANLAATKMSECVLGQSKRVDFCGKGYHLMSFPQSAPHGVVFLHVTYVPAQEKNFTTAPAICHDGKAHFPREGVFVSNGTHWFVTQRNFYEPQIITTDNTFVSGNCDVLIGIVNNTVYDPLQPELDSFKEELDKYFKNHTSPDVDLGDISGINASVVNIQKEIDRLNEVAKNLNESLIDLQELGKYEQYIKGGSDIIKLLNEQVNKEMQSSNLYMSMSSWCYTHSLDGAGLFLFDHAAEEYEHAKKLIIFLNENNVPVQLTSISAPEHKFEGLTQIFQKAYEHEQHISESINNIVDHAIKSKDHATFNFLQWYVAEQHEEEVLFKDILDKIELIGNENHGLYLADQYVKGIAKSRKS

SEQ ID NO: 99 - protein, 1377 aa, Artificial Sequence
  SARS-CoV-2/Shenzhen/SZTH-004/2020__EPI_ISL_406595 spike protein (1-1211)(K986P_V987P) Ferritin construct
MFVFLVLLPLVSSQCVNLTTRTQLPPAYTNSFTRGVYYPDKVFRSSVLHSTQDLFLPFFSNVTWFHAIHVSGTNGTKRFDNPVLPFNDGVYFASTEKSNIIRGWIFGTTLDSKTQSLLIVNNATNVVIKVCEFQFCNDPFLGVYYHKNNKSWMESEFRVYSSANNCTFEYVSQPFLMDLEGKQGNFKNLREFVFKNIDGYFKIYSKHTPINLVRDLPQGFSALEPLVDLPIGINITRFQTLLALHRSYLTPGDSSSGWTAGAAAYYVGYLQPRTFLLKYNENGTITDAVDCALDPLSETKCTLKSFTVEKGIYQTSNFRVQPTESIVRFPNITNLCPFGEVFNATRFASVYAWDRKRISNCVAYYSVLYNSASFSTFKCYGVSPTKLNDLCFTNVYADSFVIRGDEVRQIAPGQTGKIADYNYKLPDDFTGCVIAWNSNNLDSKVGGNYNYLYRLFRKSNLKPFERDISTEIYQAGSTPCNGVEGFNCYFPLQSYGFQPTNGVGYQPYRVVVLSFELLHAPATVCGPKKSTNLVKNKCVNFNFNGLTGTGVLTESNKKFLPFQQFGRDIADTTDAVRDPQTLEILDITPCSFGGVSVITPGTNTSNQVAVLYQDVNCTEVPVAIHADQLTPTWRVYSTGSNVFQTRAGCLIGAEHVNNSYECDIPIGAGICASYQTQTNSPRRARSVASQSIIAYTMSLGAENSVAYSNNSIAIPTNFTISVTTEILPVSMTKTSVDCTMYICGDSTECSNLLLQYGSFCTQLNRALTGIAVEQDKNTQEVFAQVKQIYKTPPIKDFGGFNFSQILPDPSKPSKRSFIEDLLFNKVTLADAGFIKQYGDCLGDIAARDLICAQKFNGLTVLPPLLTDEMIAQYTSALLAGTITSGWTFGAGAALQIPFAMQMAYRFNGIGVTQNVLYENQKLIANQFNSAIGKIQDSLSSTASALGKLQDVVNQNAQALNTLVKQLSSNFGAISSVLNDILSRLDPPEAEVQIDRLITGRLQSLQTYVTQQLIRAAEIRASANLAATKMSECVLGQSKRVDFCGKGYHLMSFPQSAPHGVVFLHVTYVPAQEKNFTTAPAICHDGKAHFPREGVFVSNGTHWFVTQRNFYEPQIITTDNTFVSGNCDVVIGIVNNTVYDPLQPELDSFKEELDKYFKNHTSPDVDLGDISGINASVVNIQKEIDRLNEVAKNLNESLIDLQELGKYEQYIKGGSDIIKLLNEQVNKEMQSSNLYMSMSSWCYTHSLDGAGLFLFDHAAEEYEHAKKLIIFLNENNVPVQLTSISAPEHKFEGLTQIFQKAYEHEQHISESINNIVDHAIKSKDHATFNFLQWYVAEQHEEEVLFKDILDKIELIGNENHGLYLADQYVKGIAKSRKS

SEQ ID NO: 100 - protein, 1377 aa, Artificial Sequence
  SARS-CoV-2/France/IDF0372/2020__EPI_ISL_406596 spike protein (1-1211)(K986P_V987P) Ferritin construct
MFVFLVLLPLVSSQCVNLTTRTQLPPAYTNSFTRGVYYPDKVFRSSVLHSTQDLFLPFFSNVTWFHAIHVSGTNGTKRFDNPVLPFNDGVYFASTEKSNIIRGWIFGTTLDSKTQSLLIVNNATNVVIKVCEFQFCNDPFLGVYYHKNNKSWMESEFRVYSSANNCTFEYVSQPFLMDLEGKQGNFKNLREFVFKNIDGYFKIYSKHTPINLVRDLPQGFSALEPLVDLPIGINITRFQTLLALHRSYLTPGDSSSGWTAGAAAYYVGYLQPRTFLLKYNENGTITDAVDCALDPLSETKCTLKSFTVEKGIYQTSNFRVQPTESIVRFPNITNLCPFGEVFNATRFASVYAWNRKRISNCVADYSFLYNSASFSTFKCYGVSPTKLNDLCFTNVYADSFVIRGDEVRQIAPGQTGKIADYNYKLPDDFTGCVIAWNSNNLDSKVGGNYNYLYRLFRKSNLKPFERDISTEIYQAGSTPCNGVEGFNCYFPLQSYGFQPTNGVGYQPYRVVVLSFELLHAPATVCGPKKSTNLVKNKCVNFNFNGLTGTGVLTESNKKFLPFQQFGRDIADTTDAVRDPQTLEILDITPCSFGGVSVITPGTNTSNQVAVLYQDVNCTEVPVAIHADQLTPTWRVYSTGSNVFQTRAGCLIGAEHVNNSYECDIPIGAGICASYQTQTNSPRRARSVASQSIIAYTMSLGAENSVAYSNNSIAIPTNFTISVTTEILPVSMTKTSVDCTMYICGDSTECSNLLLQYGSFCTQLNRALTGIAVEQDKNTQEVFAQVKQIYKTPPIKDFGGFNFSQILPDPSKPSKRSFIEDLLFNKVTLADAGFIKQYGDCLGDIAARDLICAQKFNGLTVLPPLLTDEMIAQYTSALLAGTITSGWTFGAGAALQIPFAMQMAYRFNGIGVTQNVLYENQKLIANQFNSAIGKIQDSLSSTASALGKLQDVVNQNAQALNTLVKQLSSNFGAISSVLNDILSRLDPPEAEVQIDRLITGRLQSLQTYVTQQLIRAAEIRASANLAATKMSECVLGQSKRVDFCGKGYHLMSFPQSAPHGVVFLHVTYVPAQEKNFTTAPAICHDGKAHFPREGVFVSNGTHWFVTQRNFYEPQIITTDNTFVSGNCDVVIGIVNNTVYDPLQPELDSFKEELDKYFKNHTSPDVDLGDISGINASVVNIQKEIDRLNEVAKNLNESLIDLQELGKYEQYIKGGSDIIKLLNEQVNKEMQSSNLYMSMSSWCYTHSLDGAGLFLFDHAAEEYEHAKKLIIFLNENNVPVQLTSISAPEHKFEGLTQIFQKAYEHEQHISESINNIVDHAIKSKDHATFNFLQWYVAEQHEEEVLFKDILDKIELIGNENHGLYLADQYVKGIAKSRKS

SEQ ID NO: 101 - protein, 1377 aa, Artificial Sequence
  SARS-CoV-2/Australia/VIC01/2020__EPI_ISL_406844 spike protein (1-1211)(K986P_V987P) Ferritin construct
MFVFLVLLPLVSSQCVNLTTRTQLPPAYTNSFTRGVYYPDKVFRSSVLHSTQDLFLPFFSNVTWFHAIHVSGTNGTKRFDNPVLPFNDGVYFASTEKSNIIRGWIFGTTLDSKTQSLLIVNNATNVVIKVCEFQFCNDPFLGVYYHKNNKSWMESEFRVYSSANNCTFEYVSQPFLMDLEGKQGNFKNLREFVFKNIDGYFKIYSKHTPINLVRDLPQGFSALEPLVDLPIGINITRFQTLLALHRRYLTPGDSSSGWTAGAAAYYVGYLQPRTFLLKYNENGTITDAVDCALDPLSETKCTLKSFTVEKGIYQTSNFRVQPTESIVRFPNITNLCPFGEVFNATRFASVYAWNRKRISNCVADYSVLYNSASFSTFKCYGVSPTKLNDLCFTNVYADSFVIRGDEVRQIAPGQTGKIADYNYKLPDDFTGCVIAWNSNNLDSKVGGNYNYLYRLFRKSNLKPFERDISTEIYQAGSTPCNGVEGFNCYFPLQSYGFQPTNGVGYQPYRVVVLSFELLHAPATVCGPKKSTNLVKNKCVNFNFNGLTGTGVLTESNKKFLPFQQFGRDIADTTDAVRDPQTLEILDITPCSFGGVSVITPGTNTSNQVAVLYQDVNCTEVPVAIHADQLTPTWRVYSTGSNVFQTRAGCLIGAEHVNNSYECDIPIGAGICASYQTQTNSPRRARSVASQSIIAYTMSLGAENSVAYSNNSIAIPTNFTISVTTEILPVSMTKTSVDCTMYICGDSTECSNLLLQYGSFCTQLNRALTGIAVEQDKNTQEVFAQVKQIYKTPPIKDFGGFNFSQILPDPSKPSKRSFIEDLLFNKVTLADAGFIKQYGDCLGDIAARDLICAQKFNGLTVLPPLLTDEMIAQYTSALLAGTITSGWTFGAGAALQIPFAMQMAYRFNGIGVTQNVLYENQKLIANQFNSAIGKIQDSLSSTASALGKLQDVVNQNAQALNTLVKQLSSNFGAISSVLNDILSRLDPPEAEVQIDRLITGRLQSLQTYVTQQLIRAAEIRASANLAATKMSECVLGQSKRVDFCGKGYHLMSFPQSAPHGVVFLHVTYVPAQEKNFTTAPAICHDGKAHFPREGVFVSNGTHWFVTQRNFYEPQIITTDNTFVSGNCDVVIGIVNNTVYDPLQPELDSFKEELDKYFKNHTSPDVDLGDISGINASVVNIQKEIDRLNEVAKNLNESLIDLQELGKYEQYIKGGSDIIKLLNEQVNKEMQSSNLYMSMSSWCYTHSLDGAGLFLFDHAAEEYEHAKKLIIFLNENNVPVQLTSISAPEHKFEGLTQIFQKAYEHEQHISESINNIVDHAIKSKDHATFNFLQWYVAEQHEEEVLFKDILDKIELIGNENHGLYLADQYVKGIAKSRKS

SEQ ID NO: 102 - protein, 1377 aa, Artificial Sequence
  SARS-CoV-2/Germany/BavPat1/2020__EPI_ISL_406862 spike protein (1-1211)(K986P_V987P) Ferritin construct
MFVFLVLLPLVSSQCVNLTTRTQLPPAYTNSFTRGVYYPDKVFRSSVLHSTQDLFLPFFSNVTWFHAIHVSGTNGTKRFDNPVLPFNDGVYFASTEKSNIIRGWIFGTTLDSKTQSLLIVNNATNVVIKVCEFQFCNDPFLGVYYHKNNKSWMESEFRVYSSANNCTFEYVSQPFLMDLEGKQGNFKNLREFVFKNIDGYFKIYSKHTPINLVRDLPQGFSALEPLVDLPIGINITRFQTLLALHRSYLTPGDSSSGWTAGAAAYYVGYLQPRTFLLKYNENGTITDAVDCALDPLSETKCTLKSFTVEKGIYQTSNFRVQPTESIVRFPNITNLCPFGEVFNATRFASVYAWNRKRISNCVADYSVLYNSASFSTFKCYGVSPTKLNDLCFTNVYADSFVIRGDEVRQIAPGQTGKIADYNYKLPDDFTGCVIAWNSNNLDSKVGGNYNYLYRLFRKSNLKPFERDISTEIYQAGSTPCNGVEGFNCYFPLQSYGFQPTNGVGYQPYRVVVLSFELLHAPATVCGPKKSTNLVKNKCVNFNFNGLTGTGVLTESNKKFLPFQQFGRDIADTTDAVRDPQTLEILDITPCSFGGVSVITPGTNTSNQVAVLYQGVNCTEVPVAIHADQLTPTWRVYSTGSNVFQTRAGCLIGAEHVNNSYECDIPIGAGICASYQTQTNSPRRARSVASQSIIAYTMSLGAENSVAYSNNSIAIPTNFTISVTTEILPVSMTKTSVDCTMYICGDSTECSNLLLQYGSFCTQLNRALTGIAVEQDKNTQEVFAQVKQIYKTPPIKDFGGFNFSQILPDPSKPSKRSFIEDLLFNKVTLADAGFIKQYGDCLGDIAARDLICAQKFNGLTVLPPLLTDEMIAQYTSALLAGTITSGWTFGAGAALQIPFAMQMAYRFNGIGVTQNVLYENQKLIANQFNSAIGKIQDSLSSTASALGKLQDVVNQNAQALNTLVKQLSSNFGAISSVLNDILSRLDPPEAEVQIDRLITGRLQSLQTYVTQQLIRAAEIRASANLAATKMSECVLGQSKRVDFCGKGYHLMSFPQSAPHGVVFLHVTYVPAQEKNFTTAPAICHDGKAHFPREGVFVSNGTHWFVTQRNFYEPQIITTDNTFVSGNCDVVIGIVNNTVYDPLQPELDSFKEELDKYFKNHTSPDVDLGDISGINASVVNIQKEIDRLNEVAKNLNESLIDLQELGKYEQYIKGGSDIIKLLNEQVNKEMQSSNLYMSMSSWCYTHSLDGAGLFLFDHAAEEYEHAKKLIIFLNENNVPVQLTSISAPEHKFEGLTQIFQKAYEHEQHISESINNIVDHAIKSKDHATFNFLQWYVAEQHEEEVLFKDILDKIELIGNENHGLYLADQYVKGIAKSRKS

SEQ ID NO: 103 - protein, 1241 aa, Artificial Sequence
  SARS-CoV-2/Wuhan/WIV05/2019__EPI_ISL_402128 spike protein (1-1211)(K986P_V987P) Foldon construct
MFVFLVLLPLVSSQCVNLTTRTQLPPAYTNSFTRGVYYPDKVFRSSVLHSTQDLFLPFFSNVTWFHAIHVSGTNGTKRFDNPVLPFNDGVYFASTEKSNIIRGWIFGTTLDSKTQSLLIVNNATNVVIKVCEFQFCNDPFLGVYYHKNNKSWMESEFRVYSSANNCTFEYVSQPFLMDLEGKQGNFKNLREFVFKNIDGYFKIYSKHTPINLVRDLPQGFSALEPLVDLPIGINITRFQTLLALHRSYLTPGDSSSGWTAGAAAYYVGYLQPRTFLLKYNENGTITDAVDCALDPLSETKCTLKSFTVEKGIYQTSNFRVQPTESIVRFPNITNLCPFGEVFNATRFASVYAWNRKRISNCVADYSVLYNSASFSTFKCYGVSPTKLNDLCFTNVYADSFVIRGDEVRQIAPGQTGKIADYNYKLPDDFTGCVIAWNSNNLDSKVGGNYNYLYRLFRKSNLKPFERDISTEIYQAGSTPCNGVEGFNCYFPLQSYGFQPTNGVGYQPYRVVVLSFELLHAPATVCGPKKSTNLVKNKCVNFNFNGLTGTGVLTESNKKFLPFQQFGRDIADTTDAVRDPQTLEILDITPCSFGGVSVITPGTNTSNQVAVLYQDVNCTEVPVAIHADQLTPTWRVYSTGSNVFQTRAGCLIGAEHVNNSYECDIPIGAGICASYQTQTNSPRRARSVASQSIIAYTMSLGAENSVAYSNNSIAIPTNFTISVTTEILPVSMTKTSVDCTMYICGDSTECSNLLLQYGSFCTQLNRALTGIAVEQDKNTQEVFAQVKQIYKTPPIKDFGGFNFSQILPDPSKPSKRSFIEDLLFNKVTLADAGFIKQYGDCLGDIAARDLICAQKFNGLTVLPPLLTDEMIAQYTSALLAGTITSGWTFGAGAALQIPFAMQMAYRFNGIGVTQNVLYENQKLIANQFNSAIGKIQDSLSSTASALGKLQDVVNQNAQALNTLVKQLSSNFGAISSVLNDILSRLDPPEAEVQIDRLITGRLQSLQTYVTQQLIRAAEIRASANLAATKMSECVLGQSKRVDFCGKGYHLMSFPQSAPHGVVFLHVTYVPAQEKNFTTAPAICHDGKAHFPREGVFVSNGTHWFVTQRNFYEPQIITTDNTFVSGNCDVVIGIVNNTVYDPLQPELDSFKEELDKYFKNHTSPDVDLGDISGINASVVNIQKEIDRLNEVAKNLNESLIDLQELGKYEQYIKGGSGYIPEAPRDGQAYVRKDGEWVLLSTFL

SEQ ID NO: 104 - protein, 1237 aa, Artificial Sequence
  SARS-CoV-2/bat/Yunnan/RaTG13/2013__EPI_ISL_402131 spike protein (1-1207)(K982P_V983P) Foldon construct
MFVFLVLLPLVSSQCVNLTTRTQLPPAYTNSSTRGVYYPDKVFRSSVLHLTQDLFLPFFSNVTWFHAIHVSGTNGIKRFDNPVLPFNDGVYFASTEKSNIIRGWIFGTTLDSKTQSLLIVNNATNVVIKVCEFQFCNDPFLGVYYHKNNKSWMESEFRVYSSANNCTFEYVSQPFLMDLEGKQGNFKNLREFVFKNIDGYFKIYSKHTPINLVRDLPPGFSALEPLVDLPIGINITRFQTLLALHRSYLTPGDSSSGWTAGAAAYYVGYLQPRTFLLKYNENGTITDAVDCALDPLSETKCTLKSFTVEKGIYQTSNFRVQPTDSIVRFPNITNLCPFGEVFNATTFASVYAWNRKRISNCVADYSVLYNSTSFSTFKCYGVSPTKLNDLCFTNVYADSFVITGDEVRQIAPGQTGKIADYNYKLPDDFTGCVIAWNSKHIDAKEGGNFNYLYRLFRKANLKPFERDISTEIYQAGSKPCNGQTGLNCYYPLYRYGFYPTDGVGHQPYRVVVLSFELLNAPATVCGPKKSTNLVKNKCVNFNFNGLTGTGVLTESNKKFLPFQQFGRDIADTTDAVRDPQTLEILDITPCSFGGVSVITPGTNASNQVAVLYQDVNCTEVPVAIHADQLTPTWRVYSTGSNVFQTRAGCLIGAEHVNNSYECDIPIGAGICASYQTQTNSRSVASQSIIAYTMSLGAENSVAYSNNSIAIPTNFTISVTTEILPVSMTKTSVDCTMYICGDSTECSNLLLQYGSFCTQLNRALTGIAVEQDKNTQEVFAQVKQIYKTPPIKDFGGFNFSQILPDPSKPSKRSFIEDLLFNKVTLADAGFIKQYGDCLGDIAARDLICAQKFNGLTVLPPLLTDEMIAQYTSALLAGTITSGWTFGAGAALQIPFAMQMAYRFNGIGVTQNVLYENQKLIANQFNSAIGKIQDSLSSTASALGKLQDVVNQNAQALNTLVKQLSSNFGAISSVLNDILSRLDPPEAEVQIDRLITGRLQSLQTYVTQQLIRAAEIRASANLAATKMSECVLGQSKRVDFCGKGYHLMSFPQSAPHGVVFLHVTYVPAQEKNFTTAPAICHDGKAHFPREGVFVSNGTHWFVTQRNFYEPQIITTDNTFVSGSCDVVIGIVNNTVYDPLQPELDSFKEELDKYFKNHTSPDVDLGDISGINASVVNIQKEIDRLNEVAKNLNESLIDLQELGKYEQYIKGGSGYIPEAPRDGQAYVRKDGEWVLLSTFL

SEQ ID NO: 105 - protein, 1241 aa, Artificial Sequence
  SARS-CoV-2/Wuhan/HBCDC-HB-01/2019__EPI_ISL_402132 spike protein (1-1211)(K986P_V987P) Foldon construct
MFVFLVLLPLVSSQCVNLTTRTQLPPAYTNSITRGVYYPDKVFRSSVLHSTQDLFLPFFSNVTWFHAIHVSGTNGTKRFDNPVLPFNDGVYFASTEKSNIIRGWIFGTTLDSKTQSLLIVNNATNVVIKVCEFQFCNDPFLGVYYHKNNKSWMESEFRVYSSANNCTFEYVSQPFLMDLEGKQGNFKNLREFVFKNIDGYFKIYSKHTPINLVRDLPQGFSALEPLVDLPIGINITRFQTLLALHRSYLTPGDSSSGWTAGAAAYYVGYLQPRTFLLKYNENGTITDAVDCALDPLSETKCTLKSFTVEKGIYQTSNFRVQPTESIVRFPNITNLCPFGEVFNATRFASVYAWNRKRISNCVADYSVLYNSASFSTFKCYGVSPTKLNDLCFTNVYADSFVIRGDEVRQIAPGQTGKIADYNYKLPDDFTGCVIAWNSNNLDSKVGGNYNYLYRLFRKSNLKPFERDISTEIYQAGSTPCNGVEGFNCYFPLQSYGFQPTNGVGYQPYRVVVLSFELLHAPATVCGPKKSTNLVKNKCVNFNFNGLTGTGVLTESNKKFLPFQQFGRDIADTTDAVRDPQTLEILDITPCSFGGVSVITPGTNTSNQVAVLYQDVNCTEVPVAIHADQLTPTWRVYSTGSNVFQTRAGCLIGAEHVNNSYECDIPIGAGICASYQTQTNSPRRARSVASQSIIAYTMSLGAENSVAYSNNSIAIPTNFTISVTTEILPVSMTKTSVDCTMYICGDSTECSNLLLQYGSFCTQLNRALTGIAVEQDKNTQEVFAQVKQIYKTPPIKDFGGFNFSQILPDPSKPSKRSFIEDLLFNKVTLADAGFIKQYGDCLGDIAARDLICAQKFNGLTVLPPLLTDEMIAQYTSALLAGTITSGWTFGAGAALQIPFAMQMAYRFNGIGVTQNVLYENQKLIANQFNSAIGKIQDSLSSTASALGKLQDVVNQNAQALNTLVKQLSSNFGAISSVLNDILSRLDPPEAEVQIDRLITGRLQSLQTYVTQQLIRAAEIRASANLAATKMSECVLGQSKRVDFCGKGYHLMSFPQSAPHGVVFLHVTYVPAQEKNFTTAPAICHDGKAHFPREGVFVSNGTHWFVTQRNFYEPQIITTDNTFVSGNCDVVIGIVNNTVYDPLQPELDSFKEELDKYFKNHTSPDVDLGDISGINASVVNIQKEIDRLNEVAKNLNESLIDLQELGKYEQYIKGGSGYIPEAPRDGQAYVRKDGEWVLLSTFL

SEQ ID NO: 106 - protein, 1241 aa, Artificial Sequence
  SARS-CoV-2/Guangdong/20SF028/2020__EPI_ISL_403936 spike protein (1-1211)(K986P_V987P) Foldon construct
MFVFLVLLPLVSSQCVNLTTRTQLPPAYTNSFTRGVYYPDKVFRSSVLYSTQDLFLPFFSNVTWFHAIHVSGTNGTKRFDNPVLPFNDGVYFASTEKSNIIRGWIFGTTLDSKTQSLLIVNNATNVVIKVCEFQFCNDPFLGVYYHKNNKSWMESEFRVYSSANNCTFEYVSQPFLMDLEGKQGNFKNLREFVFKNIDGYFKIYSKHTPINLVRDLPQGFSALEPLVDLPIGINITRFQTLLALHRSYLTPGDSSSGWTAGAAAYYVGYLQPRTFLLKYNENGTITDAVDCALDPLSETKCTLKSFTVEKGIYQTSNFRVQPTESIVRFPNITNLCPFGEVFNATRFASVYAWNRKRISNCVADYSVLYNSASFSTFKCYGVSPTKLNDLCFTNVYADSFVIRGDEVRQIAPGQTGKIADYNYKLPDDFTGCVIAWNSNNLDSKVGGNYNYLYRLFRKSNLKPFERDISTEIYQAGSTPCNGVEGFNCYFPLQSYGFQPTNGVGYQPYRVVVLSFELLHAPATVCGPKKSTNLVKNKCVNFNFNGLTGTGVLTESNKKFLPFQQFGRDIADTTDAVRDPQTLEILDITPCSFGGVSVITPGTNTSNQVAVLYQDVNCTEVPVAIHADQLTPTWRVYSTGSNVFQTRAGCLIGAEHVNNSYECDIPIGAGICASYQTQTNSPRRARSVASQSIIAYTMSLGAENSVAYSNNSIAIPTNFTISVTTEILPVSMTKTSVDCTMYICGDSTECSNLLLQYGSFCTQLNRALTGIAVEQDKNTQEVFAQVKQIYKTPPIKDFGGFNFSQILPDPSKPSKRSFIEDLLFNKVTLADAGFIKQYGDCLGDIAARDLICAQKFNGLTVLPPLLTDEMIAQYTSALLAGTITSGWTFGAGAALQIPFAMQMAYRFNGIGVTQNVLYENQKLIANQFNSAIGKIQDSLSSTASALGKLQDVVNQNAQALNTLVKQLSSNFGAISSVLNDILSRLDPPEAEVQIDRLITGRLQSLQTYVTQQLIRAAEIRASANLAATKMSECVLGQSKRVDFCGKGYHLMSFPQSAPHGVVFLHVTYVPAQEKNFTTAPAICHDGKAHFPREGVFVSNGTHWFVTQRNFYEPQIITTDNTFVSGNCDVVIGIVNNTVYDPLQPELDSFKEELDKYFKNHTSPDVDLGDISGINASVVNIQKEIDRLNEVAKNLNESLIDLQELGKYEQYIKGGSGYIPEAPRDGQAYVRKDGEWVLLSTFL

SEQ ID NO: 107 - protein, 1241 aa, Artificial Sequence
  SARS-CoV-2/Shenzhen/SZTH-001/2020__EPI_ISL_406592 spike protein (1-1211)(K986P_V987P) Foldon construct
MFVFLVLLPLVSSQCVNLTTRTQLPPAYTNSFTRGVYYPDKVFRSSVLHSTQDLFLPFFSNVTWFHAIHVSGTNGTKRFDNPVLPFNDGVYFASTEKSNIIRGWIFGTTLDSKTQSLLIVNNATNVVIKVCEFQFCNDPFLGVYYHKNNKSWMESEFRVYSSANNCTFEYVSQPFLMDLEGKQGNFKNLREFVFKNIDGYFKIYSKHTPINLVRDLPQGFSALEPLVDLPIGINITRFQTLLALHRSYLTPGDSSSGWTAGAAAYYVGYLQPRTFLLKYNENGTITDAVDCALDPLSETKCTLKSFTVEKGIYQTSNFRVQPTESIVRFPNITNLCPFGEVFNATRFASVYAWNRKRISNCVADYSVLYNSASFSTFKCYGVSPTKLNDLCFTNVYADSFVIRGDEVRQIAPGQTGKIADYNYKLPDDFTGCVIAWNSNNLDSKVGGNYNYLYRLFRKSNLKPFERDISTEIYQAGSTPCNGVEGFNCYFPLQSYGFQPTNGVGYQPYRVVVLSFELLHAPATVCGPKKSTNLVKNKCVNFNFNGLTGTGVLTESNKKFLPFQQFGRDIADTTDAVRDPQTLEILDITPCSFGGVSVITPGTNTSNQVAVLYQDVNCTEVPVAIHADQLTPTWRVYSTGSNVFQTRAGCLIGAEHVNNSYECDIPIGAGICASYQTQTNSPRRARSVASQSIIAYTMSLGAENSVAYSNNSIAIPTNFTISVTTEILPVSMTKTSVDCTMYICGDSTECSNLLLQYGSFCTQLNRALTGIAVEQDKNTQEVFAQVKQIYKTPPIKDFGGFNFSQILPDPSKPSKRSFIEDLLFNKVTLADAGFIKQYGDCLGDIAARDLICAQKFNGLTVLPPLLTDEMIAQYTSALLAGTITSGWTFGAGAALQIPFAMQMAYRFNGIGVTQNVLYENQKLIANQFNSAIGKIQDSLSSTASALGKLQDVVNQNAQALNTLVKQLSSNFGAISSVLNDILSRLDPPEAEVQIDRLITGRLQSLQTYVTQQLIRAAEIRASANLAATKMSECVLGQSKRVDFCGKGYHLMSFPQSAPHGVVFLHVTYVPAQEKNFTTAPAICHDGKAHFPREGVFVSNGTHWFVTQRNFYEPQIITTDNTFVSGNCDVLIGIVNNTVYDPLQPELDSFKEELDKYFKNHTSPDVDLGDISGINASVVNIQKEIDRLNEVAKNLNESLIDLQELGKYEQYIKGGSGYIPEAPRDGQAYVRKDGEWVLLSTFL

SEQ ID NO: 108 - protein, 1241 aa, Artificial Sequence
  SARS-CoV-2/Shenzhen/SZTH-004/2020__EPI_ISL_406595 spike protein (1-1211)(K986P_V987P) Foldon construct
MFVFLVLLPLVSSQCVNLTTRTQLPPAYTNSFTRGVYYPDKVFRSSVLHSTQDLFLPFFSNVTWFHAIHVSGTNGTKRFDNPVLPFNDGVYFASTEKSNIIRGWIFGTTLDSKTQSLLIVNNATNVVIKVCEFQFCNDPFLGVYYHKNNKSWMESEFRVYSSANNCTFEYVSQPFLMDLEGKQGNFKNLREFVFKNIDGYFKIYSKHTPINLVRDLPQGFSALEPLVDLPIGINITRFQTLLALHRSYLTPGDSSSGWTAGAAAYYVGYLQPRTFLLKYNENGTITDAVDCALDPLSETKCTLKSFTVEKGIYQTSNFRVQPTESIVRFPNITNLCPFGEVFNATRFASVYAWDRKRISNCVAYYSVLYNSASFSTFKCYGVSPTKLNDLCFTNVYADSFVIRGDEVRQIAPGQTGKIADYNYKLPDDFTGCVIAWNSNNLDSKVGGNYNYLYRLFRKSNLKPFERDISTEIYQAGSTPCNGVEGFNCYFPLQSYGFQPTNGVGYQPYRVVVLSFELLHAPATVCGPKKSTNLVKNKCVNFNFNGLTGTGVLTESNKKFLPFQQFGRDIADTTDAVRDPQTLEILDITPCSFGGVSVITPGTNTSNQVAVLYQDVNCTEVPVAIHADQLTPTWRVYSTGSNVFQTRAGCLIGAEHVNNSYECDIPIGAGICASYQTQTNSPRRARSVASQSIIAYTMSLGAENSVAYSNNSIAIPTNFTISVTTEILPVSMTKTSVDCTMYICGDSTECSNLLLQYGSFCTQLNRALTGIAVEQDKNTQEVFAQVKQIYKTPPIKDFGGFNFSQILPDPSKPSKRSFIEDLLFNKVTLADAGFIKQYGDCLGDIAARDLICAQKFNGLTVLPPLLTDEMIAQYTSALLAGTITSGWTFGAGAALQIPFAMQMAYRFNGIGVTQNVLYENQKLIANQFNSAIGKIQDSLSSTASALGKLQDVVNQNAQALNTLVKQLSSNFGAISSVLNDILSRLDPPEAEVQIDRLITGRLQSLQTYVTQQLIRAAEIRASANLAATKMSECVLGQSKRVDFCGKGYHLMSFPQSAPHGVVFLHVTYVPAQEKNFTTAPAICHDGKAHFPREGVFVSNGTHWFVTQRNFYEPQIITTDNTFVSGNCDVVIGIVNNTVYDPLQPELDSFKEELDKYFKNHTSPDVDLGDISGINASVVNIQKEIDRLNEVAKNLNESLIDLQELGKYEQYIKGGSGYIPEAPRDGQAYVRKDGEWVLLSTFL

SEQ ID NO: 109 - protein, 1241 aa, Artificial Sequence
  SARS-CoV-2/France/IDF0372/2020__EPI_ISL_406596 spike protein (1-1211)(K986P_V987P) Foldon construct
MFVFLVLLPLVSSQCVNLTTRTQLPPAYTNSFTRGVYYPDKVFRSSVLHSTQDLFLPFFSNVTWFHAIHVSGTNGTKRFDNPVLPFNDGVYFASTEKSNIIRGWIFGTTLDSKTQSLLIVNNATNVVIKVCEFQFCNDPFLGVYYHKNNKSWMESEFRVYSSANNCTFEYVSQPFLMDLEGKQGNFKNLREFVFKNIDGYFKIYSKHTPINLVRDLPQGFSALEPLVDLPIGINITRFQTLLALHRSYLTPGDSSSGWTAGAAAYYVGYLQPRTFLLKYNENGTITDAVDCALDPLSETKCTLKSFTVEKGIYQTSNFRVQPTESIVRFPNITNLCPFGEVFNATRFASVYAWNRKRISNCVADYSFLYNSASFSTFKCYGVSPTKLNDLCFTNVYADSFVIRGDEVRQIAPGQTGKIADYNYKLPDDFTGCVIAWNSNNLDSKVGGNYNYLYRLFRKSNLKPFERDISTEIYQAGSTPCNGVEGFNCYFPLQSYGFQPTNGVGYQPYRVVVLSFELLHAPATVCGPKKSTNLVKNKCVNFNFNGLTGTGVLTESNKKFLPFQQFGRDIADTTDAVRDPQTLEILDITPCSFGGVSVITPGTNTSNQVAVLYQDVNCTEVPVAIHADQLTPTWRVYSTGSNVFQTRAGCLIGAEHVNNSYECDIPIGAGICASYQTQTNSPRRARSVASQSIIAYTMSLGAENSVAYSNNSIAIPTNFTISVTTEILPVSMTKTSVDCTMYICGDSTECSNLLLQYGSFCTQLNRALTGIAVEQDKNTQEVFAQVKQIYKTPPIKDFGGFNFSQILPDPSKPSKRSFIEDLLFNKVTLADAGFIKQYGDCLGDIAARDLICAQKFNGLTVLPPLLTDEMIAQYTSALLAGTITSGWTFGAGAALQIPFAMQMAYRFNGIGVTQNVLYENQKLIANQFNSAIGKIQDSLSSTASALGKLQDVVNQNAQALNTLVKQLSSNFGAISSVLNDILSRLDPPEAEVQIDRLITGRLQSLQTYVTQQLIRAAEIRASANLAATKMSECVLGQSKRVDFCGKGYHLMSFPQSAPHGVVFLHVTYVPAQEKNFTTAPAICHDGKAHFPREGVFVSNGTHWFVTQRNFYEPQIITTDNTFVSGNCDVVIGIVNNTVYDPLQPELDSFKEELDKYFKNHTSPDVDLGDISGINASVVNIQKEIDRLNEVAKNLNESLIDLQELGKYEQYIKGGSGYIPEAPRDGQAYVRKDGEWVLLSTFL

SEQ ID NO: 110 - protein, 1241 aa, Artificial Sequence
  SARS-CoV-2/Australia/VIC01/2020__EPI_ISL_406844 spike protein (1-1211)(K986P_V987P) Foldon construct
MFVFLVLLPLVSSQCVNLTTRTQLPPAYTNSFTRGVYYPDKVFRSSVLHSTQDLFLPFFSNVTWFHAIHVSGTNGTKRFDNPVLPFNDGVYFASTEKSNIIRGWIFGTTLDSKTQSLLIVNNATNVVIKVCEFQFCNDPFLGVYYHKNNKSWMESEFRVYSSANNCTFEYVSQPFLMDLEGKQGNFKNLREFVFKNIDGYFKIYSKHTPINLVRDLPQGFSALEPLVDLPIGINITRFQTLLALHRRYLTPGDSSSGWTAGAAAYYVGYLQPRTFLLKYNENGTITDAVDCALDPLSETKCTLKSFTVEKGIYQTSNFRVQPTESIVRFPNITNLCPFGEVFNATRFASVYAWNRKRISNCVADYSVLYNSASFSTFKCYGVSPTKLNDLCFTNVYADSFVIRGDEVRQIAPGQTGKIADYNYKLPDDFTGCVIAWNSNNLDSKVGGNYNYLYRLFRKSNLKPFERDISTEIYQAGSTPCNGVEGFNCYFPLQSYGFQPTNGVGYQPYRVVVLSFELLHAPATVCGPKKSTNLVKNKCVNFNFNGLTGTGVLTESNKKFLPFQQFGRDIADTTDAVRDPQTLEILDITPCSFGGVSVITPGTNTSNQVAVLYQDVNCTEVPVAIHADQLTPTWRVYSTGSNVFQTRAGCLIGAEHVNNSYECDIPIGAGICASYQTQTNSPRRARSVASQSIIAYTMSLGAENSVAYSNNSIAIPTNFTISVTTEILPVSMTKTSVDCTMYICGDSTECSNLLLQYGSFCTQLNRALTGIAVEQDKNTQEVFAQVKQIYKTPPIKDFGGFNFSQILPDPSKPSKRSFIEDLLFNKVTLADAGFIKQYGDCLGDIAARDLICAQKFNGLTVLPPLLTDEMIAQYTSALLAGTITSGWTFGAGAALQIPFAMQMAYRFNGIGVTQNVLYENQKLIANQFNSAIGKIQDSLSSTASALGKLQDVVNQNAQALNTLVKQLSSNFGAISSVLNDILSRLDPPEAEVQIDRLITGRLQSLQTYVTQQLIRAAEIRASANLAATKMSECVLGQSKRVDFCGKGYHLMSFPQSAPHGVVFLHVTYVPAQEKNFTTAPAICHDGKAHFPREGVFVSNGTHWFVTQRNFYEPQIITTDNTFVSGNCDVVIGIVNNTVYDPLQPELDSFKEELDKYFKNHTSPDVDLGDISGINASVVNIQKEIDRLNEVAKNLNESLIDLQELGKYEQYIKGGSGYIPEAPRDGQAYVRKDGEWVLLSTFL

SEQ ID NO: 111 - protein, 1241 aa, Artificial Sequence
  SARS-CoV-2/Germany/BavPat1/2020__EPI_ISL_406862 spike protein (1-1211)(K986P_V987P) Foldon construct
MFVFLVLLPLVSSQCVNLTTRTQLPPAYTNSFTRGVYYPDKVFRSSVLHSTQDLFLPFFSNVTWFHAIHVSGTNGTKRFDNPVLPFNDGVYFASTEKSNIIRGWIFGTTLDSKTQSLLIVNNATNVVIKVCEFQFCNDPFLGVYYHKNNKSWMESEFRVYSSANNCTFEYVSQPFLMDLEGKQGNFKNLREFVFKNIDGYFKIYSKHTPINLVRDLPQGFSALEPLVDLPIGINITRFQTLLALHRSYLTPGDSSSGWTAGAAAYYVGYLQPRTFLLKYNENGTITDAVDCALDPLSETKCTLKSFTVEKGIYQTSNFRVQPTESIVRFPNITNLCPFGEVFNATRFASVYAWNRKRISNCVADYSVLYNSASFSTFKCYGVSPTKLNDLCFTNVYADSFVIRGDEVRQIAPGQTGKIADYNYKLPDDFTGCVIAWNSNNLDSKVGGNYNYLYRLFRKSNLKPFERDISTEIYQAGSTPCNGVEGFNCYFPLQSYGFQPTNGVGYQPYRVVVLSFELLHAPATVCGPKKSTNLVKNKCVNFNFNGLTGTGVLTESNKKFLPFQQFGRDIADTTDAVRDPQTLEILDITPCSFGGVSVITPGTNTSNQVAVLYQGVNCTEVPVAIHADQLTPTWRVYSTGSNVFQTRAGCLIGAEHVNNSYECDIPIGAGICASYQTQTNSPRRARSVASQSIIAYTMSLGAENSVAYSNNSIAIPTNFTISVTTEILPVSMTKTSVDCTMYICGDSTECSNLLLQYGSFCTQLNRALTGIAVEQDKNTQEVFAQVKQIYKTPPIKDFGGFNFSQILPDPSKPSKRSFIEDLLFNKVTLADAGFIKQYGDCLGDIAARDLICAQKFNGLTVLPPLLTDEMIAQYTSALLAGTITSGWTFGAGAALQIPFAMQMAYRFNGIGVTQNVLYENQKLIANQFNSAIGKIQDSLSSTASALGKLQDVVNQNAQALNTLVKQLSSNFGAISSVLNDILSRLDPPEAEVQIDRLITGRLQSLQTYVTQQLIRAAEIRASANLAATKMSECVLGQSKRVDFCGKGYHLMSFPQSAPHGVVFLHVTYVPAQEKNFTTAPAICHDGKAHFPREGVFVSNGTHWFVTQRNFYEPQIITTDNTFVSGNCDVVIGIVNNTVYDPLQPELDSFKEELDKYFKNHTSPDVDLGDISGINASVVNIQKEIDRLNEVAKNLNESLIDLQELGKYEQYIKGGSGYIPEAPRDGQAYVRKDGEWVLLSTFL

SEQ ID NO: 112 - protein, 153 aa, Artificial Sequence
  Aa/VF5_ribH(C37A_N102D) Lumazine Synthase (LumSynth)
QIYEGKLTAEGLRFGIVASRFNHALVDRLVEGAIDAIVRHGGREEDITLVRVPGSWEIPVAAGELARKEDIDAVIAIGVLIRGATPHFDYIASEVSKGLADLSLELRKPITFGVITADTLEQAIERAGTKHGNKGWEAALSAIEMANLFKSLR

SEQ ID NO: 113 - protein, 163 aa, Artificial Sequence
  Hp/J99_pfr(5-167_N19Q) Ferritin
DIIKLLNEQVNKEMQSSNLYMSMSSWCYTHSLDGAGLFLFDHAAEEYEHAKKLIIFLNENNVPVQLTSISAPEHKFEGLTQIFQKAYEHEQHISESINNIVDHAIKSKDHATFNFLQWYVAEQHEEEVLFKDILDKIELIGNENHGLYLADQYVKGIAKSRKS

SEQ ID NO: 114 - protein, 27 aa, Artificial Sequence
  BPT4_wac(458-484) Foldon
GYIPEAPRDGQAYVRKDGEWVLLSTFL

SEQ ID NO: 115 - protein, 7 aa, Artificial Sequence
  Linker GGGSGGG
GGGSGGG

SEQ ID NO: 116 - RNA, 3822 nt, Artificial Sequence
  SARS-CoV-2/Wuhan/WIV05/2019__EPI_ISL_402128 spike protein CDS wt (1-1273)
auguuuguuuuucuuguuuuauugccacuagucucuagucaguguguuaaucuuacaaccagaacucaauuacccccugcauacacuaauucuuucacacgugguguuuauuacccugacaaaguuuucagauccucaguuuuacauucaacucaggacuuguucuuaccuuucuuuuccaauguuacuugguuccaugcuauacaugucucugggaccaaugguacuaagagguuugauaacccuguccuaccauuuaaugaugguguuuauuuugcuuccacugagaagucuaacauaauaagaggcuggauuuuugguacuacuuuagauucgaagacccagucccuacuuauuguuaauaacgcuacuaauguuguuauuaaagucugugaauuucaauuuuguaaugauccauuuuuggguguuuauuaccacaaaaacaacaaaaguuggauggaaagugaguucagaguuuauucuagugcgaauaauugcacuuuugaauaugucucucagccuuuucuuauggaccuugaaggaaaacaggguaauuucaaaaaucuuagggaauuuguguuuaagaauauugaugguuauuuuaaaauauauucuaagcacacgccuauuaauuuagugcgugaucucccucaggguuuuucggcuuuagaaccauugguagauuugccaauagguauuaacaucacuagguuucaaacuuuacuugcuuuacauagaaguuauuugacuccuggugauucuucuucagguuggacagcuggugcugcagcuuauuauguggguuaucuucaaccuaggacuuuucuauuaaaauauaaugaaaauggaaccauuacagaugcuguagacugugcacuugacccucucucagaaacaaaguguacguugaaauccuucacuguagaaaaaggaaucuaucaaacuucuaacuuuagaguccaaccaacagaaucuauuguuagauuuccuaauauuacaaacuugugcccuuuuggugaaguuuuuaacgccaccagauuugcaucuguuuaugcuuggaacaggaagagaaucagcaacuguguugcugauuauucuguccuauauaauuccgcaucauuuuccacuuuuaaguguuauggagugucuccuacuaaauuaaaugaucucugcuuuacuaaugucuaugcagauucauuuguaauuagaggugaugaagucagacaaaucgcuccagggcaaacuggaaagauugcugauuauaauuauaaauuaccagaugauuuuacaggcugcguuauagcuuggaauucuaacaaucuugauucuaagguuggugguaauuauaauuaccuguauagauuguuuaggaagucuaaucucaaaccuuuugagagagauauuucaacugaaaucuaucaggccgguagcacaccuuguaaugguguugaagguuuuaauuguuacuuuccuuuacaaucauaugguuuccaacccacuaaugguguugguuaccaaccauacagaguaguaguacuuucuuuugaacuucuacaugcaccagcaacuguuuguggaccuaaaaagucuacuaauuugguuaaaaacaaaugugucaauuucaacuucaaugguuuaacaggcacagguguucuuacugagucuaacaaaaaguuucugccuuuccaacaauuuggcagagacauugcugacacuacugaugcuguccgugauccacagacacuugagauucuugacauuacaccauguucuuuugguggugucaguguuauaacaccaggaacaaauacuucuaaccagguugcuguucuuuaucaggauguuaacugcacagaagucccuguugcuauucaugcagaucaacuuacuccuacuuggcguguuuauucuacagguucuaauguuuuucaaacacgugcaggcuguuuaauaggggcugaacaugucaacaacucauaugagugugacauacccauuggugcagguauaugcgcuaguuaucagacucagacuaauucuccucggcgggcacguaguguagcuagucaauccaucauugccuacacuaugucacuuggugcagaaaauucaguugcuuacucuaauaacucuauugccauacccacaaauuuuacuauuaguguuaccacagaaauucuaccagugucuaugaccaagacaucaguagauuguacaauguacauuuguggugauucaacugaaugcagcaaucuuuuguugcaauauggcaguuuuuguacacaauuaaaccgugcuuuaacuggaauagcuguugaacaagacaaaaacacccaagaaguuuuugcacaagucaaacaaauuuacaaaacaccaccaauuaaagauuuuggugguuuuaauuuuucacaaauauuaccagauccaucaaaaccaagcaagaggucauuuauugaagaucuacuuuucaacaaagugacacuugcagaugcuggcuucaucaaacaauauggugauugccuuggugauauugcugcuagagaccucauuugugcacaaaaguuuaacggccuuacuguuuugccaccuuugcucacagaugaaaugauugcucaauacacuucugcacuguuagcggguacaaucacuucugguuggaccuuuggugcaggugcugcauuacaaauaccauuugcuaugcaaauggcuuauagguuuaaugguauuggaguuacacagaauguucucuaugagaaccaaaaauugauugccaaccaauuuaauagugcuauuggcaaaauucaagacucacuuucuuccacagcaagugcacuuggaaaacuucaagauguggucaaccaaaaugcacaagcuuuaaacacgcuuguuaaacaacuuagcuccaauuuuggugcaauuucaaguguuuuaaaugauauccuuucacgucuugacaaaguugaggcugaagugcaaauugauagguugaucacaggcagacuucaaaguuugcagacauaugugacucaacaauuaauuagagcugcagaaaucagagcuucugcuaaucuugcugcuacuaaaaugucagaguguguacuuggacaaucaaaaagaguugauuuuuguggaaagggcuaucaucuuauguccuucccucagucagcaccucaugguguagucuucuugcaugugacuuaugucccugcacaagaaaagaacuucacaacugcuccugccauuugucaugauggaaaagcacacuuuccucgugaaggugucuuuguuucaaauggcacacacugguuuguaacacaaaggaauuuuuaugaaccacaaaucauuacuacagacaacacauuugugucugguaacugugauguuguaauaggaauugucaacaacacaguuuaugauccuuugcaaccugaauuagacucauucaaggaggaguuagauaaauauuuuaagaaucauacaucaccagauguugauuuaggugacaucucuggcauuaaugcuucaguuguaaacauucaaaaagaaauugaccgccucaaugagguugccaagaauuuaaaugaaucucucaucgaucuccaagaacuuggaaaguaugagcaguauauaaaauggccaugguacauuuggcuagguuuuauagcuggcuugauugccauaguaauggugacaauuaugcuuugcuguaugaccaguugcuguaguugucucaagggcuguuguucuuguggauccugcugcaaauuugaugaagacgacucugagccagugcucaaaggagucaaauuacauuacacauaa

SEQ ID NO: 117 - RNA, 3822 nt, Artificial Sequence
  SARS-CoV-2/Wuhan/WIV02/2019__EPI_ISL_402127 spike protein CDS wt (1-1273)
auguuuguuuuucuuguuuuauugccacuagucucuagucaguguguuaaucuuacaaccagaacucaauuacccccugcauacacuaauucuuucacacgugguguuuauuacccugacaaaguuuucagauccucaguuuuacauucaacucaggacuuguucuuaccuuucuuuuccaauguuacuugguuccaugcuauacaugucucugggaccaaugguacuaagagguuugauaacccuguccuaccauuuaaugaugguguuuauuuugcuuccacugagaagucuaacauaauaagaggcuggauuuuugguacuacuuuagauucgaagacccagucccuacuuauuguuaauaacgcuacuaauguuguuauuaaagucugugaauuucaauuuuguaaugauccauuuuuggguguuuauuaccacaaaaacaacaaaaguuggauggaaagugaguucagaguuuauucuagugcgaauaauugcacuuuugaauaugucucucagccuuuucuuauggaccuugaaggaaaacaggguaauuucaaaaaucuuagggaauuuguguuuaagaauauugaugguuauuuuaaaauauauucuaagcacacgccuauuaauuuagugcgugaucucccucaggguuuuucggcuuuagaaccauugguagauuugccaauagguauuaacaucacuagguuucaaacuuuacuugcuuuacauagaaguuauuugacuccuggugauucuucuucagguuggacagcuggugcugcagcuuauuauguggguuaucuucaaccuaggacuuuucuauuaaaauauaaugaaaauggaaccauuacagaugcuguagacugugcacuugacccucucucagaaacaaaguguacguugaaauccuucacuguagaaaaaggaaucuaucaaacuucuaacuuuagaguccaaccaacagaaucuauuguuagauuuccuaauauuacaaacuugugcccuuuuggugaaguuuuuaacgccaccagauuugcaucuguuuaugcuuggaacaggaagagaaucagcaacuguguugcugauuauucuguccuauauaauuccgcaucauuuuccacuuuuaaguguuauggagugucuccuacuaaauuaaaugaucucugcuuuacuaaugucuaugcagauucauuuguaauuagaggugaugaagucagacaaaucgcuccagggcaaacuggaaagauugcugauuauaauuauaaauuaccagaugauuuuacaggcugcguuauagcuuggaauucuaacaaucuugauucuaagguuggugguaauuauaauuaccuguauagauuguuuaggaagucuaaucucaaaccuuuugagagagauauuucaacugaaaucuaucaggccgguagcacaccuuguaaugguguugaagguuuuaauuguuacuuuccuuuacaaucauaugguuuccaacccacuaaugguguugguuaccaaccauacagaguaguaguacuuucuuuugaacuucuacaugcaccagcaacuguuuguggaccuaaaaagucuacuaauuugguuaaaaacaaaugugucaauuucaacuucaaugguuuaacaggcacagguguucuuacugagucuaacaaaaaguuucugccuuuccaacaauuuggcagagacauugcugacacuacugaugcuguccgugauccacagacacuugagauucuugacauuacaccauguucuuuugguggugucaguguuauaacaccaggaacaaauacuucuaaccagguugcuguucuuuaucaggauguuaacugcacagaagucccuguugcuauucaugcagaucaacuuacuccuacuuggcguguuuauucuacagguucuaauguuuuucaaacacgugcaggcuguuuaauaggggcugaacaugucaacaacucauaugagugugacauacccauuggugcagguauaugcgcuaguuaucagacucagacuaauucuccucggcgggcacguaguguagcuagucaauccaucauugccuacacuaugucacuuggugcagaaaauucaguugcuuacucuaauaacucuauugccauacccacaaauuuuacuauuaguguuaccacagaaauucuaccagugucuaugaccaagacaucaguagauuguacaauguacauuuguggugauucaacugaaugcagcaaucuuuuguugcaauauggcaguuuuuguacacaauuaaaccgugcuuuaacuggaauagcuguugaacaagacaaaaacacccaagaaguuuuugcacaagucaaacaaauuuacaaaacaccaccaauuaaagauuuuggugguuuuaauuuuucacaaauauuaccagauccaucaaaaccaagcaagaggucauuuauugaagaucuacuuuucaacaaagugacacuugcagaugcuggcuucaucaaacaauauggugauugccuuggugauauugcugcuagagaccucauuugugcacaaaaguuuaacggccuuacuguuuugccaccuuugcucacagaugaaaugauugcucaauacacuucugcacuguuagcggguacaaucacuucugguuggaccuuuggugcaggugcugcauuacaaauaccauuugcuaugcaaauggcuuauagguuuaaugguauuggaguuacacagaauguucucuaugagaaccaaaaguugauugccaaccaauuuaauagugcuauuggcaaaauucaagacucacuuucuuccacagcaagugcacuuggaaaacuucaagauguggucaaccaaaaugcacaagcuuuaaacacgcuuguuaaacaacuuagcuccaauuuuggugcaauuucaaguguuuuaaaugauauccuuucacgucuugacaaaguugaggcugaagugcaaauugauagguugaucacaggcagacuucaaaguuugcagacauaugugacucaacaauuaauuagagcugcagaaaucagagcuucugcuaaucuugcugcuacuaaaaugucagaguguguacuuggacaaucaaaaagaguugauuuuuguggaaagggcuaucaucuuauguccuucccucagucagcaccucaugguguagucuucuugcaugugacuuaugucccugcacaagaaaagaacuucacaacugcuccugccauuugucaugauggaaaagcacacuuuccucgugaaggugucuuuguuucaaauggcacacacugguuuguaacacaaaggaauuuuuaugaaccacaaaucauuacuacagacaacacauuugugucugguaacugugauguuguaauaggaauugucaacaacacaguuuaugauccuuugcaaccugaauuagacucauucaaggaggaguuagauaaauauuuuaagaaucauacaucaccagauguugauuuaggugacaucucuggcauuaaugcuucaguuguaaacauucaaaaagaaauugaccgccucaaugagguugccaagaauuuaaaugaaucucucaucgaucuccaagaacuuggaaaguaugagcaguauauaaaauggccaugguacauuuggcuagguuuuauagcuggcuugauugccauaguaauggugacaauuaugcuuugcuguaugaccaguugcuguaguugucucaagggcuguuguucuuguggauccugcugcaaauuugaugaagacgacucugagccagugcucaaaggagucaaauuacauuacacauaa

SEQ ID NO: 118 - RNA, 3810 nt, Artificial Sequence
  SARS-CoV-2/bat/Yunnan/RaTG13/2013__EPI_ISL_402131 spike protein CDS wt (1-1269)
auguuuguuuuucuuguuuuauugccacuaguuucuagucaguguguuaaucuaacaacuagaacucaguuaccuccugcauacaccaacucauccacccguggugucuauuacccugacaaaguuuucagaucuucaguuuuacauuuaacucaggauuuguuuuuaccuuucuucuccaaugugaccugguuccaugcuauacauguuucagggaccaaugguauuaaaagguuugauaacccaguucugccauucaacgauggcgucuauuuugcuuccacugagaagucuaauauaauaagaggauggauuuuugguacuaccuuagauucgaagacccagucucuacuuauuguuaauaacgcuacuaauguuguuauuaaagucugugaauuucaauuuuguaaugauccauuuuuggguguuuauuaccacaaaaacaacaaaaguuggauggaaagugaguucagaguuuacucuagugcgaauaauugcacuuuugaguaugucucucagccuuuucuuauggaccuugaaggaaaacaggguaauuucaaaaaucuuagggaauucguguuuaagaauauugaugguuauuucaaaauauauucuaaacauacgccuauuaauuuagugcgugaucuucccccugguuuuucagcuuuagaaccauugguagaucugccaauagguauuaacaucacuagguuucaaacuuuacuugcuuuacauagaagcuauuugacuccuggugauucuucuucagguuggacagcuggugcugcagcuuauuauguggguuaucuucaaccaaggacuuuucuacuaaaauauaaugagaauggaaccauuacagaugcuguagacugugcacuugacccucuuucagaaacaaaguguacguuaaaauccuucacuguugaaaaaggaauuuaucaaaccucuaacuuuagaguccaaccaacagauucuauuguuagauucccaaauauuacaaacuuauguccuuuuggugaaguuuuuaacgccaccacauucgcaucaguuuaugcuuggaacagaaagagaauuagcaacuguguugcugauuacucuguccuauauaauuccacuucauuuucuaccuuuaaauguuauggagugucuccuacuaaauuaaaugaucucugcuuuacuaauguuuaugcagacucauuugugauuacaggugaugaagucagacaaauugcgccaggacaaacuggaaagauugcugacuacaauuauaaacuaccagaugauuuuacugguuguguuauagcuuggaauucuaagcauauugaugcaaaagagggcgguaauuuuaacuaucuuuaccgucucuuuagaaaagcuaaucuuaaacccuuugagagggauaucucaacugaaauuuaccaagcaggcagcaaaccuuguaauggucaaacuggucuaaauugcuacuacccacuuuauagauauggauuuuacccuacugaugguguuggucaccaaccuuauaggguaguaguacuuucuuuugaacuucuaaaugcaccagcaacuguuuguggaccuaagaagucuacuaacuugguuaaaaauaaaugugucaauuucaacuuuaaugguuuaacuggcacagguguccucacagagucuaauaaaaaguuucuaccuuuccaacaauuugguagagacauugcagacacuacugaugccguccgugauccacagacacuugagauucuugacauuacaccauguucuuuugguggugucaguguuauaacaccuggaacaaaugccucuaaccagguugcuguucuuuaucaggauguuaacugcacagaagucccuguugcuauccaugcagaccaacuuacucccacuuggcguguuuacuccacagguucuaauguuuuucaaacacgugcagguuguuuaauaggggcugaacaugucaauaacucguaugagugugacauaccuauuggugcaggaauaugcgccaguuaucagacucaaacuaauucacguaguguggccagucaaucuauuauugccuacacuaugucacuuggugcagaaaauucaguugcuuauucuaauaacucuauugccauaccuacaaauuuuacuauuagugugaccacugaaauucuaccugugucuaugacaaagacaucgguagacuguacaauguauauuuguggugauucaacugagugcagcaaccuuuuguugcaauaugguaguuuuugcacacaauuaaaucgugcuuuaacuggaauagcuguugaacaggacaaaaauacucaagaaguuuuugcucaaguuaaacaaauuuauaagacaccaccaauuaaagauuuuggugguuucaauuuuucacaaauauuaccagauccaucaaaaccaagcaagaggucauuuauugaggauuuacuuuucaauaaagugacacuugcugaugcuggcuucaucaaacaauauggugauugccuuggugauauugcugcuagggaucuuauuugugcucaaaaguucaauggccuuacuguucugccaccuuugcucacagaugaaaugaucgcucaauacacuucugcacuauuagcagguacaaucacuucugguuggacuuuuggugcaggugcugcuuuacaaauaccauuugccaugcaaauggcuuauagguuuaaugguauuggaguuacacagaauguucucuaugagaaccaaaaauugauugccaaccaguuuaauagugcuauuggcaaaauucaagacucacuuucuucuacagcaagugcacuuggaaaacuucaagauguugucaaccaaaaugcacaagcuuuaaacacgcuuguuaaacaacuuagcuccaauuuuggagcuauuucuagcguguuaaaugauauccuuucacgucucgacaaaguugaggcugaagugcagauugacagguugaucacaggcagacuucaaagcuugcagacauaugugacucaacaauuaauuagagcugcagaaaucagagcuucugccaaucuugcugcuacuaaaaugucagaguguguacucggacaaucaaaaagaguugauuuuuguggaaaaggcuaucaucuuaugucuuucccucagucagcaccucaugguguagucuucuugcaugugacauaugucccugcacaagaaaagaacuucacaacugcuccugccauuugucaugauggaaaagcacacuuuccacgugaagguguuuucguuucaaauggcacacacugguuuguuacacaaaggaauuuuuaugaaccacaaauuauuacaacagacaacacauuugucucugguagcugugauguuguaauaggaauugucaacaacacaguuuaugauccuuugcaaccagaacuugauucauucaaggaggaguuggauaaauacuuuaaaaaucauacaucaccugauguagauuuaggugacauuucuggcauuaaugcuucaguugucaauauucaaaaggaaauugaccgccucaaugagguugccaaaaaucuaaaugaaucucucaucgaucuccaagaacuuggaaaguaugaacaguauauaaaauggccaugguacauuuggcuagguuuuauagcuggcuugauugccauaauaauggucacgauuaugcuuugcuguaugaccaguugcugcaguugucucaagggcuguuguucuugcggaucuugcugcaaauuugaugaagacgacucugagccagugcucaaaggagucaaauuacauuacacauaa

SEQ ID NO: 119 - RNA, 3822 nt, Artificial Sequence
  SARS-CoV-2/Wuhan/HBCDC-HB-01/2019__EPI_ISL_402132 spike protein CDS wt (1-1273)
auguuuguuuuucuuguuuuauugccacuagucucuagucaguguguuaaucuuacaaccagaacucaauuacccccugcauacacuaauucuaucacacgugguguuuauuacccugacaaaguuuucagauccucaguuuuacauucaacucaggacuuguucuuaccuuucuuuuccaauguuacuugguuccaugcuauacaugucucugggaccaaugguacuaagagguuugauaacccuguccuaccauuuaaugaugguguuuauuuugcuuccacugagaagucuaacauaauaagaggcuggauuuuugguacuacuuuagauucgaagacccagucccuacuuauuguuaauaacgcuacuaauguuguuauuaaagucugugaauuucaauuuuguaaugauccauuuuuggguguuuauuaccacaaaaacaacaaaaguuggauggaaagugaguucagaguuuauucuagugcgaauaauugcacuuuugaauaugucucucagccuuuucuuauggaccuugaaggaaaacaggguaauuucaaaaaucuuagggaauuuguguuuaagaauauugaugguuauuuuaaaauauauucuaagcacacgccuauuaauuuagugcgugaucucccucaggguuuuucggcuuuagaaccauugguagauuugccaauagguauuaacaucacuagguuucaaacuuuacuugcuuuacauagaaguuauuugacuccuggugauucuucuucagguuggacagcuggugcugcagcuuauuauguggguuaucuucaaccuaggacuuuucuauuaaaauauaaugaaaauggaaccauuacagaugcuguagacugugcacuugacccucucucagaaacaaaguguacguugaaauccuucacuguagaaaaaggaaucuaucaaacuucuaacuuuagaguccaaccaacagaaucuauuguuagauuuccuaauauuacaaacuugugcccuuuuggugaaguuuuuaacgccaccagauuugcaucuguuuaugcuuggaacaggaagagaaucagcaacuguguugcugauuauucuguccuauauaauuccgcaucauuuuccacuuuuaaguguuauggagugucuccuacuaaauuaaaugaucucugcuuuacuaaugucuaugcagauucauuuguaauuagaggugaugaagucagacaaaucgcuccagggcaaacuggaaagauugcugauuauaauuauaaauuaccagaugauuuuacaggcugcguuauagcuuggaauucuaacaaucuugauucuaagguuggugguaauuauaauuaccuguauagauuguuuaggaagucuaaucucaaaccuuuugagagagauauuucaacugaaaucuaucaggccgguagcacaccuuguaaugguguugaagguuuuaauuguuacuuuccuuuacaaucauaugguuuccaacccacuaaugguguugguuaccaaccauacagaguaguaguacuuucuuuugaacuucuacaugcaccagcaacuguuuguggaccuaaaaagucuacuaauuugguuaaaaacaaaugugucaauuucaacuucaaugguuuaacaggcacagguguucuuacugagucuaacaaaaaguuucugccuuuccaacaauuuggcagagacauugcugacacuacugaugcuguccgugauccacagacacuugagauucuugacauuacaccauguucuuuugguggugucaguguuauaacaccaggaacaaauacuucuaaccagguugcuguucuuuaucaggauguuaacugcacagaagucccuguugcuauucaugcagaucaacuuacuccuacuuggcguguuuauucuacagguucuaauguuuuucaaacacgugcaggcuguuuaauaggggcugaacaugucaacaacucauaugagugugacauacccauuggugcagguauaugcgcuaguuaucagacucagacuaauucuccucggcgggcacguaguguagcuagucaauccaucauugccuacacuaugucacuuggugcagaaaauucaguugcuuacucuaauaacucuauugccauacccacaaauuuuacuauuaguguuaccacagaaauucuaccagugucuaugaccaagacaucaguagauuguacaauguacauuuguggugauucaacugaaugcagcaaucuuuuguugcaauauggcaguuuuuguacacaauuaaaccgugcuuuaacuggaauagcuguugaacaagacaaaaacacccaagaaguuuuugcacaagucaaacaaauuuacaaaacaccaccaauuaaagauuuuggugguuuuaauuuuucacaaauauuaccagauccaucaaaaccaagcaagaggucauuuauugaagaucuacuuuucaacaaagugacacuugcagaugcuggcuucaucaaacaauauggugauugccuuggugauauugcugcuagagaccucauuugugcacaaaaguuuaacggccuuacuguuuugccaccuuugcucacagaugaaaugauugcucaauacacuucugcacuguuagcggguacaaucacuucugguuggaccuuuggugcaggugcugcauuacaaauaccauuugcuaugcaaauggcuuauagguuuaaugguauuggaguuacacagaauguucucuaugagaaccaaaaauugauugccaaccaauuuaauagugcuauuggcaaaauucaagacucacuuucuuccacagcaagugcacuuggaaaacuucaagauguggucaaccaaaaugcacaagcuuuaaacacgcuuguuaaacaacuuagcuccaauuuuggugcaauuucaaguguuuuaaaugauauccuuucacgucuugacaaaguugaggcugaagugcaaauugauagguugaucacaggcagacuucaaaguuugcagacauaugugacucaacaauuaauuagagcugcagaaaucagagcuucugcuaaucuugcugcuacuaaaaugucagaguguguacuuggacaaucaaaaagaguugauuuuuguggaaagggcuaucaucuuauguccuucccucagucagcaccucaugguguagucuucuugcaugugacuuaugucccugcacaagaaaagaacuucacaacugcuccugccauuugucaugauggaaaagcacacuuuccucgugaaggugucuuuguuucaaauggcacacacugguuuguaacacaaaggaauuuuuaugaaccacaaaucauuacuacagacaacacauuugugucugguaacugugauguuguaauaggaauugucaacaacacaguuuaugauccuuugcaaccugaauuagacucauucaaggaggaguuagauaaauauuuuaagaaucauacaucaccagauguugauuuaggugacaucucuggcauuaaugcuucaguuguaaacauucaaaaagaaauugaccgccucaaugagguugccaagaauuuaaaugaaucucucaucgaucuccaagaacuuggaaaguaugagcaguauauaaaauggccaugguacauuuggcuagguuuuauagcuggcuugauugccauaguaauggugacaauuaugcuuugcuguaugaccaguugcuguaguugucucaagggcuguuguucuuguggauccugcugcaaauuugaugaagacgacucugagccagugcucaaaggagucaaauuacauuacacauaa

SEQ ID NO: 120 - RNA, 3822 nt, Artificial Sequence
  SARS-CoV-2/Guangdong/20SF014/2020__EPI_ISL_403934 spike protein CDS wt (1-1273)
auguuuguuuuucuuguuuuauugccacuagucucuagucaguguguuaaucuuacaaccagaacucaauuacccccugcauacacuaauucuuucacacgugguguuuauuacccugacaaaguuuucagauccucaguuuuacauucaacucaggacuuguucuuaccuuucuuuuccaauguuacuugguuccaugcuauacaugucucugggaccaaugguacuaagagguuugauaacccuguccuaccauuuaaugaugguguuuauuuugcuuccacugagaagucuaacauaauaagaggcuggauuuuugguacuacuuuagauucgaagacccagucccuacuuauuguuaauaacgcuacuaauguuguuauuaaagucugugaauuucaauuuuguaaugauccauuuuuggguguuuauuaccacaaaaacaacaaaaguuggauggaaagugaguucagaguuuauucuagugcgaauaauugcacuuuugaauaugucucucagccuuuucuuauggaccuugaaggaaaacaggguaauuucaaaaaucuuagggaauuuguguuuaagaauauugaugguuauuuuaaaauauauucuaagcacacgccuauuaauuuagugcgugaucucccucaggguuuuucggcuuuagaaccauugguagauuugccaauagguauuaacaucacuagguuucaaacuuuacuugcuuuacauagaaguuauuugacuccuggugauucuucuucagguuggacagcuggugcugcagcuuauuauguggguuaucuucaaccuaggacuuuucuauuaaaauauaaugaaaauggaaccauuacagaugcuguagacugugcacuugacccucucucagaaacaaaguguacguugaaauccuucacuguagaaaaaggaaucuaucaaacuucuaacuuuagaguccaaccaacagaaucuauuguuagauuuccuaauauuacaaacuugugcccuuuuggugaaguuuuuaacgccaccagauuugcaucuguuuaugcuuggaacaggaagagaaucagcaacuguguugcugauuauucuguccuauauaauuccgcaucauuuuccacuuuuaaguguuauggagugucuccuacuaaauuaaaugaucucugcuuuacuaaugucuaugcagauucauuuguaauuagaggugaugaagucagacaaaucgcuccagggcaaacuggaaagauugcugauuauaauuauaaauuaccagaugauuuuacaggcugcguuauagcuuggaauucuaacaaucuugauucuaagguuggugguaauuauaauuaccuguauagauuguuuaggaagucuaaucucaaaccuuuugagagagauauuucaacugaaaucuaucaggccgguagcacaccuuguaaugguguugaagguuuuaauuguuacuuuccuuuacaaucauaugguuuccaacccacuaaugguguugguuaccaaccauacagaguaguaguacuuucuuuugaacuucuacaugcaccagcaacuguuuguggaccuaaaaagucuacuaauuugguuaaaaacaaaugugucaauuucaacuucaaugguuuaacaggcacagguguucuuacugagucuaacaaaaaguuucugccuuuccaacaauuuggcagagacauugcugacacuacugaugcuguccgugauccacagacacuugagauucuugacauuacaccauguucuuuugguggugucaguguuauaacaccaggaacaaauacuucuaaccagguugcuguucuuuaucaggauguuaacugcacagaagucccuguugcuauucaugcagaucaacuuacuccuacuuggcguguuuauucuacagguucuaauguuuuucaaacacgugcaggcuguuuaauaggggcugaacaugucaacaacucauaugagugugacauacccauuggugcaggcauaugcgcuaguuaucagacucagacuaauucuccucggcgggcacguaguguagcuagucaauccaucauugccuacacuaugucacuuggugcagaaaauucaguugcuuacucuaauaacucuauugccauacccacaaauuuuacuauuaguguuaccacagaaauucuaccagugucuaugaccaagacaucaguagauuguacaauguacauuuguggugauucaacugaaugcagcaaucuuuuguugcaauauggcaguuuuuguacacaauuaaaccgugcuuuaacuggaauagcuguugaacaagacaaaaacacccaagaaguuuuugcacaagucaaacaaauuuacaaaacaccaccaauuaaagauuuuggugguuuuaauuuuucacaaauauuaccagauccaucaaaaccaagcaagaggucauuuauugaagaucuacuuuucaacaaagugacacuugcagaugcuggcuucaucaaacaauauggugauugccuuggugauauugcugcuagagaccucauuugugcacaaaaguuuaacggccuuacuguuuugccaccuuugcucacagaugaaaugauugcucaauacacuucugcacuguuagcggguacaaucacuucugguuggaccuuuggugcaggugcugcauuacaaauaccauuugcuaugcaaauggcuuauagguuuaaugguauuggaguuacacagaauguucucuaugagaaccaaaaauugauugccaaccaauuuaauagugcuauuggcaaaauucaagacucacuuucuuccacagcaagugcacuuggaaaacuucaagauguggucaaccaaaaugcacaagcuuuaaacacgcuuguuaaacaacuuagcuccaauuuuggugcaauuucaaguguuuuaaaugauauccuuucacgucuugacaaaguugaggcugaagugcaaauugauagguugaucacaggcagacuucaaaguuugcagacauaugugacucaacaauuaauuagagcugcagaaaucagagcuucugcuaaucuugcugcuacuaaaaugucagaguguguacuuggacaaucaaaaagaguugauuuuuguggaaagggcuaucaucuuauguccuucccucagucagcaccucaugguguagucuucuugcaugugacuuaugucccugcacaagaaaagaacuucacaacugcuccugccauuugucaugauggaaaagcacacuuuccucgugaaggugucuuuguuucaaauggcacacacugguuuguaacacaaaggaauuuuuaugaaccacaaaucauuacuacagacaacacauuugugucugguaacugugauguuguaauaggaauugucaacaacacaguuuaugauccuuugcaaccugaauuagacucauucaaggaggaguuagauaaauauuuuaagaaucauacaucaccagauguugauuuaggugacaucucuggcauuaaugcuucaguuguaaacauucaaaaagaaauugaccgccucaaugagguugccaagaauuuaaaugaaucucucaucgaucuccaagaacuuggaaaguaugagcaguauauaaaauggccaugguacauuuggcuagguuuuauagcuggcuugauugccauaguaauggugacaauuaugcuuugcuguaugaccaguugcuguaguugucucaagggcuguuguucuuguggauccugcugcaaauuugaugaagacgacucugagccagugcucaaaggagucaaauuacauuacacauaa

SEQ ID NO: 121 - RNA, 3822 nt, Artificial Sequence
  SARS-CoV-2/Guangdong/20SF028/2020__EPI_ISL_403936 spike protein CDS wt (1-1273)
auguuuguuuuucuuguuuuauugccacuagucucuagucaguguguuaaucuuacaaccagaacucaauuacccccugcauacacuaauucuuucacacgugguguuuauuacccugacaaaguuuucagauccucaguuuuauauucaacucaggacuuguucuuaccuuucuuuuccaauguuacuugguuccaugcuauacaugucucugggaccaaugguacuaagagguuugauaacccuguccuaccauuuaaugaugguguuuauuuugcuuccacugagaagucuaacauaauaagaggcuggauuuuugguacuacuuuagauucgaagacccagucccuacuuauuguuaauaacgcuacuaauguuguuauuaaagucugugaauuucaauuuuguaaugauccauuuuuggguguuuauuaccacaaaaacaacaaaaguuggauggaaagugaguucagaguuuauucuagugcgaauaauugcacuuuugaauaugucucucagccuuuucuuauggaccuugaaggaaaacaggguaauuucaaaaaucuuagggaauuuguguuuaagaauauugaugguuauuuuaaaauauauucuaagcacacgccuauuaauuuagugcgugaucucccucaggguuuuucggcuuuagaaccauugguagauuugccaauagguauuaacaucacuagguuucaaacuuuacuugcuuuacauagaaguuauuugacuccuggugauucuucuucagguuggacagcuggugcugcagcuuauuauguggguuaucuucaaccuaggacuuuucuauuaaaauauaaugaaaauggaaccauuacagaugcuguagacugugcacuugacccucucucagaaacaaaguguacguugaaauccuucacuguagaaaaaggaaucuaucaaacuucuaacuuuagaguccaaccaacagaaucuauuguuagauuuccuaauauuacaaacuugugcccuuuuggugaaguuuuuaacgccaccagauuugcaucuguuuaugcuuggaacaggaagagaaucagcaacuguguugcugauuauucuguccuauauaauuccgcaucauuuuccacuuuuaaguguuauggagugucuccuacuaaauuaaaugaucucugcuuuacuaaugucuaugcagauucauuuguaauuagaggugaugaagucagacaaaucgcuccagggcaaacuggaaagauugcugauuauaauuauaaauuaccagaugauuuuacaggcugcguuauagcuuggaauucuaacaaucuugauucuaagguuggugguaauuauaauuaccuguauagauuguuuaggaagucuaaucucaaaccuuuugagagagauauuucaacugaaaucuaucaggccgguagcacaccuuguaaugguguugaagguuuuaauuguuacuuuccuuuacaaucauaugguuuccaacccacuaaugguguugguuaccaaccauacagaguaguaguacuuucuuuugaacuucuacaugcaccagcaacuguuuguggaccuaaaaagucuacuaauuugguuaaaaacaaaugugucaauuucaacuucaaugguuuaacaggcacagguguucuuacugagucuaacaaaaaguuucugccuuuccaacaauuuggcagagacauugcugacacuacugaugcuguccgugauccacagacacuugagauucuugacauuacaccauguucuuuugguggugucaguguuauaacaccaggaacaaauacuucuaaccagguugcuguucuuuaucaggauguuaacugcacagaagucccuguugcuauucaugcagaucaacuuacuccuacuuggcguguuuauucuacagguucuaauguuuuucaaacacgugcaggcuguuuaauaggggcugaacaugucaacaacucauaugagugugacauacccauuggugcagguauaugcgcuaguuaucagacucagacuaauucuccucggcgggcacguaguguagcuagucaauccaucauugccuacacuaugucacuuggugcagaaaauucaguugcuuacucuaauaacucuauugccauacccacaaauuuuacuauuaguguuaccacagaaauucuaccagugucuaugaccaagacaucaguagauuguacaauguacauuuguggugauucaacugaaugcagcaaucuuuuguugcaauauggcaguuuuuguacacaauuaaaccgugcuuuaacuggaauagcuguugaacaagacaaaaacacccaagaaguuuuugcacaagucaaacaaauuuacaaaacaccaccaauuaaagauuuuggugguuuuaauuuuucacaaauauuaccagauccaucaaaaccaagcaagaggucauuuauugaagaucuacuuuucaacaaagugacacuugcagaugcuggcuucaucaaacaauauggugauugccuuggugauauugcugcuagagaccucauuugugcacaaaaguuuaacggccuuacuguuuugccaccuuugcucacagaugaaaugauugcucaauacacuucugcacuguuagcggguacaaucacuucugguuggaccuuuggugcaggugcugcauuacaaauaccauuugcuaugcaaauggcuuauagguuuaaugguauuggaguuacacagaauguucucuaugagaaccaaaaauugauugccaaccaauuuaauagugcuauuggcaaaauucaagacucacuuucuuccacagcaagugcacuuggaaaacuucaagauguggucaaccaaaaugcacaagcuuuaaacacgcuuguuaaacaacuuagcuccaauuuuggugcaauuucaaguguuuuaaaugauauccuuucacgucuugacaaaguugaggcugaagugcaaauugauagguugaucacaggcagacuucaaaguuugcagacauaugugacucaacaauuaauuagagcugcagaaaucagagcuucugcuaaucuugcugcuacuaaaaugucagaguguguacuuggacaaucaaaaagaguugauuuuuguggaaagggcuaucaucuuauguccuucccucagucagcaccucaugguguagucuucuugcaugugacuuaugucccugcacaagaaaagaacuucacaacugcuccugccauuugucaugauggaaaagcacacuuuccucgugaaggugucuuuguuucaaauggcacacacugguuuguaacacaaaggaauuuuuaugaaccacaaaucauuacuacagacaacacauuugugucugguaacugugauguuguaauaggaauugucaacaacacaguuuaugauccuuugcaaccugaauuagacucauucaaggaggaguuagauaaauauuuuaagaaucauacaucaccagauguugauuuaggugacaucucuggcauuaaugcuucaguuguaaacauucaaaaagaaauugaccgccucaaugagguugccaagaauuuaaaugaaucucucaucgaucuccaagaacuuggaaaguaugagcaguauauaaaauggccaugguacauuuggcuagguuuuauagcuggcuugauugccauaguaauggugacaauuaugcuuugcuguaugaccaguugcuguaguugucucaagggcuguuguucuuguggauccugcugcaaauuugaugaagacgacucugagccagugcucaaaggagucaaauuacauuacacauaa

SEQ ID NO: 122 - RNA, 3822 nt, Artificial Sequence; identical to SEQ ID NO: 121
  SARS-CoV-2/Guangdong/20SF040/2020__EPI_ISL_403937 spike protein CDS wt (1-1273)

SEQ ID NO: 123 - RNA, 3822 nt, Artificial Sequence
  SARS-CoV-2/USA/IL1/2020__EPI_ISL_404253 spike protein CDS wt (1-1273)
auguuuguuuuucuuguuuuauugccacuagucucuagucaguguguuaaucuuacaaccagaacucaauuacccccugcauacacuaauucuuucacacgugguguuuauuacccugacaaaguuuucagauccucaguuuuacauucaacucaggacuuguucuuaccuuucuuuuccaauguuacuugguuccaugcuauacaugucucugggaccaaugguacuaagagguuugauaacccuguccuaccauuuaaugaugguguuuauuuugcuuccacugagaagucuaacauaauaagaggcuggauuuuugguacuacuuuagauucgaagacccagucccuacuuauuguuaauaacgcuacuaauguuguuauuaaagucugugaauuucaauuuuguaaugauccauuuuuggguguuuauuaccacaaaaacaacaaaaguuggauggaaagugaguucagaguuuauucuagugcgaauaauugcacuuuugaauaugucucucagccuuuucuuauggaccuugaaggaaaacaggguaauuucaaaaaucuuagggaauuuguguuuaagaauauugaugguuauuuuaaaauauauucuaagcacacgccuauuaauuuagugcgugaucucccucaggguuuuucggcuuuagaaccauugguagauuugccaauagguauuaacaucacuagguuucaaacuuuacuugcuuuacauagaaguuauuugacuccuggugauucuucuucagguuggacagcuggugcugcagcuuauuauguggguuaucuucaaccuaggacuuuucuauuaaaauauaaugaaaauggaaccauuacagaugcuguagacugugcacuugacccucucucagaaacaaaguguacguugaaauccuucacuguagaaaaaggaaucuaucaaacuucuaacuuuagaguccaaccaacagaaucuauuguuagauuuccuaauauuacaaacuugugcccuuuuggugaaguuuuuaacgccaccagauuugcaucuguuuaugcuuggaacaggaagagaaucagcaacuguguugcugauuauucuguccuauauaauuccgcaucauuuuccacuuuuaaguguuauggagugucuccuacuaaauuaaaugaucucugcuuuacuaaugucuaugcagauucauuuguaauuagaggugaugaagucagacaaaucgcuccagggcaaacuggaaagauugcugauuauaauuauaaauuaccagaugauuuuacaggcugcguuauagcuuggaauucuaacaaucuugauucuaagguuggugguaauuauaauuaccuguauagauuguuuaggaagucuaaucucaaaccuuuugagagagauauuucaacugaaaucuaucaggccgguagcacaccuuguaaugguguugaagguuuuaauuguuacuuuccuuuacaaucauaugguuuccaacccacuaaugguguugguuaccaaccauacagaguaguaguacuuucuuuugaacuucuacaugcaccagcaacuguuuguggaccuaaaaagucuacuaauuugguuaaaaacaaaugugucaauuucaacuucaaugguuuaacaggcacagguguucuuacugagucuaacaaaaaguuucugccuuuccaacaauuuggcagagacauugcugacacuacugaugcuguccgugauccacagacacuugagauucuugacauuacaccauguucuuuugguggugucaguguuauaacaccaggaacaaauacuucuaaccagguugcuguucuuuaucaggauguuaacugcacagaagucccuguugcuauucaugcagaucaacuuacuccuacuuggcguguuuauucuacagguucuaauguuuuucaaacacgugcaggcuguuuaauaggggcugaacaugucaacaacucauaugagugugacauacccauuggugcagguauaugcgcuaguuaucagacucagacuaauucuccucggcgggcacguaguguagcuagucaauccaucauugccuacacuaugucacuuggugcagaaaauucaguugcuuacucuaauaacucuauugccauacccacaaauuuuacuauuaguguuaccacagaaauucuaccagugucuaugaccaagacaucaguagauuguacaauguacauuuguggugauucaacugaaugcagcaaucuuuuguugcaauauggcaguuuuuguacacaauuaaaccgugcuuuaacuggaauagcuguugaacaagacaaaaacacccaagaaguuuuugcacaagucaaacaaauuuacaaaacaccaccaauuaaagauuuuggugguuuuaauuuuucacaaauauuaccagauccaucaaaaccaagcaagaggucauuuauugaagaucuacuuuucaayaaagugacacuugcagaugcuggcuucaucaaacaauauggugauugccuuggugauauugcugcuagagaccucauuugugcacaaaaguuuaacggccuuacuguuuugccaccuuugcucacagaugaaaugauugcucaauacacuucugcacuguuagcggguacaaucacuucugguuggaccuuuggugcaggugcugcauuacaaauaccauuugcuaugcaaauggcuuauagguuuaaugguauuggaguuacacagaauguucucuaugagaaccaaaaauugauugccaaccaauuuaauagugcuauuggcaaaauucaagacucacuuucuuccacagcaagugcacuuggaaaacuucaagauguggucaaccaaaaugcacaagcuuuaaacacgcuuguuaaacaacuuagcuccaauuuuggugcaauuucaaguguuuuaaaugauauccuuucacgucuugacaaaguugaggcugaagugcaaauugauagguugaucacaggcagacuucaaaguuugcagacauaugugacucaacaauuaauuagagcugcagaaaucagagcuucugcuaaucuugcugcuacuaaaaugucagaguguguacuuggacaaucaaaaagaguugauuuuuguggaaagggcuaucaucuuauguccuucccucagucagcaccucaugguguagucuucuugcaugugacuuaugucccugcacaagaaaagaacuucacaacugcuccugccauuugucaugauggaaaagcacacuuuccucgugaaggugucuuuguuucaaauggcacacacugguuuguaacacaaaggaauuuuuaugaaccacaaaucauuacuacagacaacacauuugugucugguaacugugauguuguaauaggaauugucaacaacacaguuuaugauccuuugcaaccugaauuagacucauucaaggaggaguuagauaaauauuuuaagaaucauacaucaccagauguugauuuaggugacaucucuggcauuaaugcuucaguuguaaacauucaaaaagaaauugaccgccucaaugagguugccaagaauuuaaaugaaucucucaucgaucuccaagaacuuggaaaguaugagcaguauauaaaauggccaugguacauuuggcuagguuuuauagcuggcuugauugccauaguaauggugacaauuaugcuuugcuguaugaccaguugcuguaguugucucaagggcuguuguucuuguggauccugcugcaaauuugaugaagacgacucugagccagugcucaaaggagucaaauuacauuacacauaa

SEQ ID NO: 124 - RNA, 3822 nt, Artificial Sequence
  SARS-CoV-2/USA/CA1/2020__EPI_ISL_406034 spike protein CDS wt (1-1273)
auguuuguuuuucuuguuuuauugccacuagucucuagucaguguguuaaucuuacaaccagaacucaauuacccccugcauacacuaauucuuucacacgugguguuuauuacccugacaaaguuuucagauccucaguuuuacauucaacucaggacuuguucuuaccuuucuuuuccaauguuacuugguuccaugcuauacaugucucugggaccaaugguacuaagagguuugauaacccuguccuaccauuuaaugaugguguuuauuuugcuuccacugagaagucuaacauaauaagaggcuggauuuuugguacuacuuuagauucgaagacccagucccuacuuauuguuaauaacgcuacuaauguuguuauuaaagucugugaauuucaauuuuguaaugauccauuuuuggguguuuauuaccacaaaaacaacaaaaguuggauggaaagugaguucagaguuuauucuagugcgaauaauugcacuuuugaauaugucucucagccuuuucuuauggaccuugaaggaaaacaggguaauuucaaaaaucuuagggaauuuguguuuaagaauauugaugguuauuuuaaaauauauucuaagcacacgccuauuaauuuagugcgugaucucccucaggguuuuucggcuuuagaaccauugguagauuugccaauagguauuaacaucacuagguuucaaacuuuacuugcuuuacauagaaguuauuugacuccuggugauucuucuucagguuggacagcuggugcugcagcuuauuauguggguuaucuucaaccuaggacuuuucuauuaaaauauaaugaaaauggaaccauuacagaugcuguagacugugcacuugacccucucucagaaacaaaguguacguugaaauccuucacuguagaaaaaggaaucuaucaaacuucuaacuuuagaguccaaccaacagaaucuauuguuagauuuccuaauauuacaaacuugugcccuuuuggugaaguuuuuaacgccaccagauuugcaucuguuuaugcuuggaacaggaagagaaucagcaacuguguugcugauuauucuguccuauauaauuccgcaucauuuuccacuuuuaaguguuauggagugucuccuacuaaauuaaaugaucucugcuuuacuaaugucuaugcagauucauuuguaauuagaggugaugaagucagacaaaucgcuccagggcaaacuggaaagauugcugauuauaauuauaaauuaccagaugauuuuacaggcugcguuauagcuuggaauucuaacaaucuugauucuaagguuggugguaauuauaauuaccuguauagauuguuuaggaagucuaaucucaaaccuuuugagagagauauuucaacugaaaucuaucaggccgguagcacaccuuguaaugguguugaagguuuuaauuguuacuuuccuuuacaaucauaugguuuccaacccacuaaugguguugguuaccaaccauacagaguaguaguacuuucuuuugaacuucuacaugcaccagcaacuguuuguggaccuaaaaagucuacuaauuugguuaaaaacaaaugugucaauuucaacuucaaugguuuaacaggcacagguguucuuacugagucuaacaaaaaguuucugccuuuccaacaauuuggcagagacauugcugacacuacugaugcuguccgugauccacagacacuugagauucuugacauuacaccauguucuuuugguggugucaguguuauaacaccaggaacaaauacuucuaaccagguugcuguucuuuaucaggauguuaacugcacagaagucccuguugcuauucaugcagaucaacuuacuccuacuuggcguguuuauucuacagguucuaauguuuuucaaacacgugcaggcuguuuaauaggggcugaacaugucaacaacucauaugagugugacauacccauuggugcagguauaugcgcuaguuaucagacucagacuaauucuccucggcgggcacguaguguagcuagucaauccaucauugccuacacuaugucacuuggugcagaaaauucaguugcuuacucuaauaacucuauugccauacccacaaauuuuacuauuaguguuaccacagaaauucuaccagugucuaugaccaagacaucaguagauuguacaauguacauuuguggugauucaacugaaugcagcaaucuuuuguugcaauauggcaguuuuuguacacaauuaaaccgugcuuuaacuggaauagcuguugaacaagacaaaaacacccaagaaguuuuugcacaagucaaacaaauuuacaaaacaccaccaauuaaagauuuuggugguuuuaauuuuucacaaauauuaccagauccaucaaaaccaagcaagaggucauuuauugaagaucuacuuuucaauaaagugacacuugcagaugcuggcuucaucaaacaauauggugauugccuuggugauauugcugcuagagaccucauuugugcacaaaaguuuaacggccuuacuguuuugccaccuuugcucacagaugaaaugauugcucaauacacuucugcacuguuagcggguacaaucacuucugguuggaccuuuggugcaggugcugcauuacaaauaccauuugcuaugcaaauggcuuauagguuuaaugguauuggaguuacacagaauguucucuaugagaaccaaaaauugauugccaaccaauuuaauagugcuauuggcaaaauucaagacucacuuucuuccacagcaagugcacuuggaaaacuucaagauguggucaaccaaaaugcacaagcuuuaaacacgcuuguuaaacaacuuagcuccaauuuuggugcaauuucaaguguuuuaaaugauauccuuucacgucuugacaaaguugaggcugaagugcaaauugauagguugaucacaggcagacuucaaaguuugcagacauaugugacucaacaauuaauuagagcugcagaaaucagagcuucugcuaaucuugcugcuacuaaaaugucagaguguguacuuggacaaucaaaaagaguugauuuuuguggaaagggcuaucaucuuauguccuucccucagucagcaccucaugguguagucuucuugcaugugacuuaugucccugcacaagaaaagaacuucacaacugcuccugccauuugucaugauggaaaagcacacuuuccucgugaaggugucuuuguuucaaauggcacacacugguuuguaacacaaaggaauuuuuaugaaccacaaaucauuacuacagacaacacauuugugucugguaacugugauguuguaauaggaauugucaacaacacaguuuaugauccuuugcaaccugaauuagacucauucaaggaggaguuagauaaauauuuuaagaaucauacaucaccagauguugauuuaggugacaucucuggcauuaaugcuucaguuguaaacauucaaaaagaaauugaccgccucaaugagguugccaagaauuuaaaugaaucucucaucgaucuccaagaacuuggaaaguaugagcaguauauaaaauggccaugguacauuuggcuagguuuuauagcuggcuugauugccauaguaauggugacaauuaugcuuugcuguaugaccaguugcuguaguugucucaagggcuguuguucuuguggauccugcugcaaauuugaugaagacgacucugagccagugcucaaaggagucaaauuacauuacacauaa

SEQ ID NO: 125 - RNA, 3822 nt, Artificial Sequence; identical to SEQ ID NO: 121
  SARS-CoV-2/Guangdong/20SF174/2020__EPI_ISL_406531 spike protein CDS wt (1-1273)

SEQ ID NO: 126 - RNA, 3822 nt, Artificial Sequence
  SARS-CoV-2/Shenzhen/SZTH-001/2020__EPI_ISL_406592 spike protein CDS wt (1-1273)
auguuuguuuuucuuguuuuauugccacuagucucuagucaguguguuaaucuuacaaccagaacucaauuacccccugcauacacuaauucuuucacacgugguguuuauuacccugacaaaguuuucagauccucaguuuuacauucaacucaggacuuguucuuaccuuucuuuuccaauguuacuugguuccaugcuauacaugucucugggaccaaugguacuaagagguuugauaacccuguccuaccauuuaaugaugguguuuauuuugcuuccacugagaagucuaacauaauaagaggcuggauuuuugguacuacuuuagauucgaagacccagucccuacuuauuguuaauaacgcuacuaauguuguuauuaaagucugugaauuucaauuuuguaaugauccauuuuuggguguuuauuaccacaaaaacaacaaaaguuggauggaaagugaguucagaguuuauucuagugcgaauaauugcacuuuugaauaugucucucagccuuuucuuauggaccuugaaggaaaacaggguaauuucaaaaaucuuagggaauuuguguuuaagaauauugaugguuauuuuaaaauauauucuaagcacacgccuauuaauuuagugcgugaucucccucaggguuuuucggcuuuagaaccauugguagauuugccaauagguauuaacaucacuagguuucaaacuuuacuugcuuuacauagaaguuauuugacuccuggugauucuucuucagguuggacagcuggugcugcagcuuauuauguggguuaucuucaaccuaggacuuuucuauuaaaauauaaugaaaauggaaccauuacagaugcuguagacugugcacuugacccucucucagaaacaaaguguacguugaaauccuucacuguagaaaaaggaaucuaucaaacuucuaacuuuagaguccaaccaacagaaucuauuguuagauuuccuaauauuacaaacuugugcccuuuuggugaaguuuuuaacgccaccagauuugcaucuguuuaugcuuggaacaggaagagaaucagcaacuguguugcugauuauucuguccuauauaauuccgcaucauuuuccacuuuuaaguguuauggagugucuccuacuaaauuaaaugaucucugcuuuacuaaugucuaugcagauucauuuguaauuagaggugaugaagucagacaaaucgcuccagggcaaacuggaaagauugcugauuauaauuauaaauuaccagaugauuuuacaggcugcguuauagcuuggaauucuaacaaucuugauucuaagguuggugguaauuauaauuaccuguauagauuguuuaggaagucuaaucucaaaccuuuugagagagauauuucaacugaaaucuaucaggccgguagcacaccuuguaaugguguugaagguuuuaauuguuacuuuccuuuacaaucauaugguuuccaacccacuaaugguguugguuaccaaccauacagaguaguaguacuuucuuuugaacuucuacaugcaccagcaacuguuuguggaccuaaaaagucuacuaauuugguuaaaaacaaaugugucaauuucaacuucaaugguuuaacaggcacagguguucuuacugagucuaacaaaaaguuucugccuuuccaacaauuuggcagagacauugcugacacuacugaugcuguccgugauccacagacacuugagauucuugacauuacaccauguucuuuugguggugucaguguuauaacaccaggaacaaauacuucuaaccagguugcuguucuuuaucaggauguuaacugcacagaagucccuguugcuauucaugcagaucaacuuacuccuacuuggcguguuuauucuacagguucuaauguuuuucaaacacgugcaggcuguuuaauaggggcugaacaugucaacaacucauaugagugugacauacccauuggugcagguauaugcgcuaguuaucagacucagacuaauucuccucggcgggcacguaguguagcuagucaauccaucauugccuacacuaugucacuuggugcagaaaauucaguugcuuacucuaauaacucuauugccauacccacaaauuuuacuauuaguguuaccacagaaauucuaccagugucuaugaccaagacaucaguagauuguacaauguacauuuguggugauucaacugaaugcagcaaucuuuuguugcaauauggcaguuuuuguacacaauuaaaccgugcuuuaacuggaauagcuguugaacaagacaaaaacacccaagaaguuuuugcacaagucaaacaaauuuacaaaacaccaccaauuaaagauuuuggugguuuuaauuuuucacaaauauuaccagauccaucaaaaccaagcaagaggucauuuauugaagaucuacuuuucaacaaagugacacuugcagaugcuggcuucaucaaacaauauggugauugccuuggugauauugcugcuagagaccucauuugugcacaaaaguuuaacggccuuacuguuuugccaccuuugcucacagaugaaaugauugcucaauacacuucugcacuguuagcggguacaaucacuucugguuggaccuuuggugcaggugcugcauuacaaauaccauuugcuaugcaaauggcuuauagguuuaaugguauuggaguuacacagaauguucucuaugagaaccaaaaauugauugccaaccaauuuaauagugcuauuggcaaaauucaagacucacuuucuuccacagcaagugcacuuggaaaacuucaagauguggucaaccaaaaugcacaagcuuuaaacacgcuuguuaaacaacuuagcuccaauuuuggugcaauuucaaguguuuuaaaugauauccuuucacgucuugacaaaguugaggcugaagugcaaauugauagguugaucacaggcagacuucaaaguuugcagacauaugugacucaacaauuaauuagagcugcagaaaucagagcuucugcuaaucuugcugcuacuaaaaugucagaguguguacuuggacaaucaaaaagaguugauuuuuguggaaagggcuaucaucuuauguccuucccucagucagcaccucaugguguagucuucuugcaugugacuuaugucccugcacaagaaaagaacuucacaacugcuccugccauuugucaugauggaaaagcacacuuuccucgugaaggugucuuuguuucaaauggcacacacugguuuguaacacaaaggaauuuuuaugaaccacaaaucauuacuacagacaacacauuugugucugguaacugugauguucuaauaggaauugucaacaacacaguuuaugauccuuugcaaccugaauuagacucauucaaggaggaguuagauaaauauuuuaagaaucauacaucaccagauguugauuuaggugacaucucuggcauuaaugcuucaguuguaaacauucaaaaagaaauugaccgccucaaugagguugccaagaauuuaaaugaaucucucaucgaucuccaagaacuuggaaaguaugagcaguauauaaaauggccaugguacauuuggcuagguuuuauagcuggcuugauugccauaguaauggugacaauuaugcuuugcuguaugaccaguugcuguaguugucucaagggcuguuguucuuguggauccugcugcaaauuugaugaagacgacucugggccagugcucaaaggagucaaauuacauuacacauaa

SEQ ID NO: 127 - RNA, 3822 nt, Artificial Sequence
  SARS-CoV-2/Shenzhen/SZTH-004/2020__EPI_ISL_406595 spike protein CDS wt (1-1273)
auguuuguuuuucuuguuuuauugccacuagucucuagucaguguguuaaucuuacaaccagaacucaauuacccccugcauacacuaauucuuucacacgugguguuuauuacccugacaaaguuuucagauccucaguuuuacauucaacucaggacuuguucuuaccuuucuuuuccaauguuacuugguuccaugcuauacaugucucugggaccaaugguacuaagagguuugauaacccuguccuaccauuuaaugaugguguuuauuuugcuuccacugagaagucuaacauaauaagaggcuggauuuuugguacuacuuuagauucgaagacccagucccuacuuauuguuaauaacgcuacuaauguuguuauuaaagucugugaauuucaauuuuguaaugauccauuuuuggguguuuauuaccacaaaaacaacaaaaguuggauggaaagugaguucagaguuuauucuagugcgaauaauugcacuuuugaauaugucucucagccuuuucuuauggaccuugaaggaaaacaggguaauuucaaaaaucuuagggaauuuguguuuaagaauauugaugguuauuuuaaaauauauucuaagcacacgccuauuaauuuagugcgugaucucccucaggguuuuucggcuuuagaaccauugguagauuugccaauagguauuaacaucacuagguuucaaacuuuacuugcuuuacauagaaguuauuugacuccuggugauucuucuucagguuggacagcuggugcugcagcuuauuauguggguuaucuucaaccuaggacuuuucuauuaaaauauaaugaaaauggaaccauuacagaugcuguagacugugcacuugacccucucucagaaacaaaguguacguugaaauccuucacuguagaaaaaggaaucuaucaaacuucuaacuuuagaguccaaccaacagaaucuauuguuagauuuccuaauauuacaaacuugugcccuuuuggugaaguuuuuaacgccaccagauuugcaucuguuuaugcuugggacaggaagagaaucagcaacuguguugcuuauuauucuguccuauauaauuccgcaucauuuuccacuuuuaaguguuauggagugucuccuacuaaauuaaaugaucucugcuuuacuaaugucuaugcagauucauuuguaauuagaggugaugaagucagacaaaucgcuccagggcaaacuggaaagauugcugauuauaauuauaaauuaccagaugauuuuacaggcugcguuauagcuuggaauucuaacaaucuugauucuaagguuggugguaauuauaauuaccuguauagauuguuuaggaagucuaaucucaaaccuuuugagagagauauuucaacugaaaucuaucaggccgguagcacaccuuguaaugguguugaagguuuuaauuguuacuuuccuuuacaaucauaugguuuccaacccacuaaugguguugguuaccaaccauacagaguaguaguacuuucuuuugaacuucuacaugcaccagcaacuguuuguggaccuaaaaagucuacuaauuugguuaaaaacaaaugugucaauuucaacuucaaugguuuaacaggcacagguguucuuacugagucuaacaaaaaguuucugccuuuccaacaauuuggcagagacauugcugacacuacugaugcuguccgugauccacagacacuugagauucuugacauuacaccauguucuuuugguggugucaguguuauaacaccaggaacaaauacuucuaaccagguugcuguucuuuaucaggauguuaacugcacagaagucccuguugcuauucaugcagaucaacuuacuccuacuuggcguguuuauucuacagguucuaauguuuuucaaacacgugcaggcuguuuaauaggggcugaacaugucaacaacucauaugagugugacauacccauuggugcaggcauaugcgcuaguuaucagacucagacuaauucuccucggcgggcacguaguguagcuagucaauccaucauugccuacacuaugucacuuggugcagaaaauucaguugcuuacucuaauaacucuauugccauacccacaaauuuuacuauuaguguuaccacagaaauucuaccagugucuaugaccaagacaucaguagauuguacaauguacauuuguggugauucaacugaaugcagcaaucuuuuguugcaauauggcaguuuuuguacacaauuaaaccgugcuuuaacuggaauagcuguugaacaagacaaaaacacccaagaaguuuuugcacaagucaaacaaauuuacaaaacaccaccaauuaaagauuuuggugguuuuaauuuuucacaaauauuaccagauccaucaaaaccaagcaagaggucauuuauugaagaucuacuuuucaacaaagugacacuugcagaugcuggcuucaucaaacaauauggugauugccuuggugauauugcugcuagagaccucauuugugcacaaaaguuuaacggccuuacuguuuugccaccuuugcucacagaugaaaugauugcucaauacacuucugcacuguuagcggguacaaucacuucugguuggaccuuuggugcaggugcugcauuacaaauaccauuugcuaugcaaauggcuuauagguuuaaugguauuggaguuacacagaauguucucuaugagaaccaaaaauugauugccaaccaauuuaauagugcuauuggcaaaauucaagacucacuuucuuccacagcaagugcacuuggaaaacuucaagauguggucaaccaaaaugcacaagcuuuaaacacgcuuguuaaacaacuuagcuccaauuuuggugcaauuucaaguguuuuaaaugauauccuuucacgucuugacaaaguugaggcugaagugcaaauugauagguugaucacaggcagacuucaaaguuugcagacauaugugacucaacaauuaauuagagcugcagaaaucagagcuucugcuaaucuugcugcuacuaaaaugucagaguguguacuuggacaaucaaaaagaguugauuuuuguggaaagggcuaucaucuuauguccuucccucagucagcaccucaugguguagucuucuugcaugugacuuaugucccugcacaagaaaagaacuucacaacugcuccugccauuugucaugauggaaaagcacacuuuccucgugaaggugucuuuguuucaaauggcacacacugguuuguaacacaaaggaauuuuuaugaaccacaaaucauuacuacagacaacacauuugugucugguaacugugauguuguaauaggaauugucaacaacacaguuuaugauccuuugcaaccugaauuagacucauucaaggaggaguuagauaaauauuuuaagaaucauacaucaccagauguugauuuaggugacaucucuggcauuaaugcuucaguuguaaacauucaaaaagaaauugaccgccucaaugagguugccaagaauuuaaaugaaucucucaucgaucuccaagaacuuggaaaguaugagcaguauauaaaauggccaugguacauuuggcuagguuuuauagcuggcuugauugccauaguaauggugacaauuaugcuuugcuguaugaccaguugcuguaguugucucaagggcuguuguucuuguggauccugcugcaaauuugaugaagacgacucugagccagugcucaaaggagucaaauuacauuacacauaa

SEQ ID NO: 128 - RNA, 3822 nt, Artificial Sequence
  SARS-CoV-2/France/IDF0372/2020__EPI_ISL_406596 spike protein CDS wt (1-1273)
auguuuguuuuucuuguuuuauugccacuagucucuagucaguguguuaaucuuacaaccagaacucaauuacccccugcauacacuaauucuuucacacgugguguuuauuacccugacaaaguuuucagauccucaguuuuacauucaacucaggacuuguucuuaccuuucuuuuccaauguuacuugguuccaugcuauacaugucucugggaccaaugguacuaagagguuugauaacccuguccuaccauuuaaugaugguguuuauuuugcuuccacugagaagucuaacauaauaagaggcuggauuuuugguacuacuuuagauucgaagacccagucccuacuuauuguuaauaacgcuacuaauguuguuauuaaagucugugaauuucaauuuuguaaugauccauuuuuggguguuuauuaccacaaaaacaacaaaaguuggauggaaagugaguucagaguuuauucuagugcgaauaauugcacuuuugaauaugucucucagccuuuucuuauggaccuugaaggaaaacaggguaauuucaaaaaucuuagggaauuuguguuuaagaauauugaugguuauuuuaaaauauauucuaagcacacgccuauuaauuuagugcgugaucucccucaggguuuuucggcuuuagaaccauugguagauuugccaauagguauuaacaucacuagguuucaaacuuuacuugcuuuacauagaaguuauuugacuccuggugauucuucuucagguuggacagcuggugcugcagcuuauuauguggguuaucuucaaccuaggacuuuucuauuaaaauauaaugaaaauggaaccauuacagaugcuguagacugugcacuugacccucucucagaaacaaaguguacguugaaauccuucacuguagaaaaaggaaucuaucaaacuucuaacuuuagaguccaaccaacagaaucuauuguuagauuuccuaauauuacaaacuugugcccuuuuggugaaguuuuuaacgccaccagauuugcaucuguuuaugcuuggaacaggaagagaaucagcaacuguguugcugauuauucuuuccuauauaauuccgcaucauuuuccacuuuuaaguguuauggagugucuccuacuaaauuaaaugaucucugcuuuacuaaugucuaugcagauucauuuguaauuagaggugaugaagucagacaaaucgcuccagggcaaacuggaaagauugcugauuauaauuauaaauuaccagaugauuuuacaggcugcguuauagcuuggaauucuaacaaucuugauucuaagguuggugguaauuauaauuaccuguauagauuguuuaggaagucuaaucucaaaccuuuugagagagauauuucaacugaaaucuaucaggccgguagcacaccuuguaaugguguugaagguuuuaauuguuacuuuccuuuacaaucauaugguuuccaacccacuaaugguguugguuaccaaccauacagaguaguaguacuuucuuuugaacuucuacaugcaccagcaacuguuuguggaccuaaaaagucuacuaauuugguuaaaaacaaaugugucaauuucaacuucaaugguuuaacaggcacagguguucuuacugagucuaacaaaaaguuucugccuuuccaacaauuuggcagagacauugcugacacuacugaugcuguccgugauccacagacacuugagauucuugacauuacaccauguucuuuugguggugucaguguuauaacaccaggaacaaauacuucuaaccagguugcuguucuuuaucaggauguuaacugcacagaagucccuguugcuauucaugcagaucaacuuacuccuacuuggcguguuuauucuacagguucuaauguuuuucaaacacgugcaggcuguuuaauaggggcugaacaugucaacaacucauaugagugugacauacccauuggugcagguauaugcgcuaguuaucagacucagacuaauucuccucggcgggcacguaguguagcuagucaauccaucauugccuacacuaugucacuuggugcagaaaauucaguugcuuacucuaauaacucuauugccauacccacaaauuuuacuauuaguguuaccacagaaauucuaccagugucuaugaccaagacaucaguagauuguacaauguacauuuguggugauucaacugaaugcagcaaucuuuuguugcaauauggcaguuuuuguacacaauuaaaccgugcuuuaacuggaauagcuguugaacaagacaaaaacacccaagaaguuuuugcacaagucaaacaaauuuacaaaacaccaccaauuaaagauuuuggugguuuuaauuuuucacaaauauuaccagauccaucaaaaccaagcaagaggucauuuauugaagaucuacuuuucaacaaagugacacuugcagaugcuggcuucaucaaacaauauggugauugccuuggugauauugcugcuagagaccucauuugugcacaaaaguuuaacggccuuacuguuuugccaccuuugcucacagaugaaaugauugcucaauacacuucugcacuguuagcggguacaaucacuucugguuggaccuuuggugcaggugcugcauuacaaauaccauuugcuaugcaaauggcuuauagguuuaaugguauuggaguuacacagaauguucucuaugagaaccaaaaauugauugccaaccaauuuaauagugcuauuggcaaaauucaagacucacuuucuuccacagcaagugcacuuggaaaacuucaagauguggucaaccaaaaugcacaagcuuuaaacacgcuuguuaaacaacuuagcuccaauuuuggugcaauuucaaguguuuuaaaugauauccuuucacgucuugacaaaguugaggcugaagugcaaauugauagguugaucacaggcagacuucaaaguuugcagacauaugugacucaacaauuaauuagagcugcagaaaucagagcuucugcuaaucuugcugcuacuaaaaugucagaguguguacuuggacaaucaaaaagaguugauuuuuguggaaagggcuaucaucuuauguccuucccucagucagcaccucaugguguagucuucuugcaugugacuuaugucccugcacaagaaaagaacuucacaacugcuccugccauuugucaugauggaaaagcacacuuuccucgugaaggugucuuuguuucaaauggcacacacugguuuguaacacaaaggaauuuuuaugaaccacaaaucauuacuacagacaacacauuugugucugguaacugugauguuguaauaggaauugucaacaacacaguuuaugauccuuugcaaccugaauuagacucauucaaggaggaguuagauaaauauuuuaagaaucauacaucaccagauguugauuuaggugacaucucuggcauuaaugcuucaguuguaaacauucaaaaagaaauugaccgccucaaugagguugccaagaauuuaaaugaaucucucaucgaucuccaagaacuuggaaaguaugagcaguauauaaaauggccaugguacauuuggcuagguuuuauagcuggcuugauugccauaguaauggugacaauuaugcuuugcuguaugaccaguugcuguaguugucucaagggcuguuguucuuguggauccugcugcaaauuugaugaagacgacucugagccagugcucaaaggagucaaauuacauuacacauaa

SEQ ID NO: 129 - RNA, 3822 nt, Artificial Sequence; identical to SEQ ID NO: 128
  SARS-CoV-2/France/IDF0373/2020__EPI_ISL_406597 spike protein CDS wt (1-1273)

SEQ ID NO: 130 - RNA, 3822 nt, Artificial Sequence
  SARS-CoV-2/Australia/VIC01/2020__EPI_ISL_406844 spike protein CDS wt (1-1273)
auguuuguuuuucuuguuuuauugccacuagucucuagucaguguguuaaucuuacaaccagaacucaauuacccccugcauacacuaauucuuucacacgugguguuuauuacccugacaaaguuuucagauccucaguuuuacauucaacucaggacuuguucuuaccuuucuuuuccaauguuacuugguuccaugcuauacaugucucugggaccaaugguacuaagagguuugauaacccuguccuaccauuuaaugaugguguuuauuuugcuuccacugagaagucuaacauaauaagaggcuggauuuuugguacuacuuuagauucgaagacccagucccuacuuauuguuaauaacgcuacuaauguuguuauuaaagucugugaauuucaauuuuguaaugauccauuuuuggguguuuauuaccacaaaaacaacaaaaguuggauggaaagugaguucagaguuuauucuagugcgaauaauugcacuuuugaauaugucucucagccuuuucuuauggaccuugaaggaaaacaggguaauuucaaaaaucuuagggaauuuguguuuaagaauauugaugguuauuuuaaaauauauucuaagcacacgccuauuaauuuagugcgugaucucccucaggguuuuucggcuuuagaaccauugguagauuugccaauagguauuaacaucacuagguuucaaacuuuacuugcuuuacauagaagguauuugacuccuggugauucuucuucagguuggacagcuggugcugcagcuuauuauguggguuaucuucaaccuaggacuuuucuauuaaaauauaaugaaaauggaaccauuacagaugcuguagacugugcacuugacccucucucagaaacaaaguguacguugaaauccuucacuguagaaaaaggaaucuaucaaacuucuaacuuuagaguccaaccaacagaaucuauuguuagauuuccuaauauuacaaacuugugcccuuuuggugaaguuuuuaacgccaccagauuugcaucuguuuaugcuuggaacaggaagagaaucagcaacuguguugcugauuauucuguccuauauaauuccgcaucauuuuccacuuuuaaguguuauggagugucuccuacuaaauuaaaugaucucugcuuuacuaaugucuaugcagauucauuuguaauuagaggugaugaagucagacaaaucgcuccagggcaaacuggaaagauugcugauuauaauuauaaauuaccagaugauuuuacaggcugcguuauagcuuggaauucuaacaaucuugauucuaagguuggugguaauuauaauuaccuguauagauuguuuaggaagucuaaucucaaaccuuuugagagagauauuucaacugaaaucuaucaggccgguagcacaccuuguaaugguguugaagguuuuaauuguuacuuuccuuuacaaucauaugguuuccaacccacuaaugguguugguuaccaaccauacagaguaguaguacuuucuuuugaacuucuacaugcaccagcaacuguuuguggaccuaaaaagucuacuaauuugguuaaaaacaaaugugucaauuucaacuucaaugguuuaacaggcacagguguucuuacugagucuaacaaaaaguuucugccuuuccaacaauuuggcagagacauugcugacacuacugaugcuguccgugauccacagacacuugagauucuugacauuacaccauguucuuuugguggugucaguguuauaacaccaggaacaaauacuucuaaccagguugcuguucuuuaucaggauguuaacugcacagaagucccuguugcuauucaugcagaucaacuuacuccuacuuggcguguuuauucuacagguucuaauguuuuucaaacacgugcaggcuguuuaauaggggcugaacaugucaacaacucauaugagugugacauacccauuggugcagguauaugcgcuaguuaucagacucagacuaauucuccucggcgggcacguaguguagcuagucaauccaucauugccuacacuaugucacuuggugcagaaaauucaguugcuuacucuaauaacucuauugccauacccacaaauuuuacuauuaguguuaccacagaaauucuaccagugucuaugaccaagacaucaguagauuguacaauguacauuuguggugauucaacugaaugcagcaaucuuuuguugcaauauggcaguuuuuguacacaauuaaaccgugcuuuaacuggaauagcuguugaacaagacaaaaacacccaagaaguuuuugcacaagucaaacaaauuuacaaaacaccaccaauuaaagauuuuggugguuuuaauuuuucacaaauauuaccagauccaucaaaaccaagcaagaggucauuuauugaagaucuacuuuucaacaaagugacacuugcagaugcuggcuucaucaaacaauauggugauugccuuggugauauugcugcuagagaccucauuugugcacaaaaguuuaacggccuuacuguuuugccaccuuugcucacagaugaaaugauugcucaauacacuucugcacuguuagcggguacaaucacuucugguuggaccuuuggugcaggugcugcauuacaaauaccauuugcuaugcaaauggcuuauagguuuaaugguauuggaguuacacagaauguucucuaugagaaccaaaaauugauugccaaccaauuuaauagugcuauuggcaaaauucaagacucacuuucuuccacagcaagugcacuuggaaaacuucaagauguggucaaccaaaaugcacaagcuuuaaacacgcuuguuaaacaacuuagcuccaauuuuggugcaauuucaaguguuuuaaaugauauccuuucacgucuugacaaaguugaggcugaagugcaaauugauagguugaucacaggcagacuucaaaguuugcagacauaugugacucaacaauuaauuagagcugcagaaaucagagcuucugcuaaucuugcugcuacuaaaaugucagaguguguacuuggacaaucaaaaagaguugauuuuuguggaaagggcuaucaucuuauguccuucccucagucagcaccucaugguguagucuucuugcaugugacuuaugucccugcacaagaaaagaacuucacaacugcuccugccauuugucaugauggaaaagcacacuuuccucgugaaggugucuuuguuucaaauggcacacacugguuuguaacacaaaggaauuuuuaugaaccacaaaucauuacuacagacaacacauuugugucugguaacugugauguuguaauaggaauugucaacaacacaguuuaugauccuuugcaaccugaauuagacucauucaaggaggaguuagauaaauauuuuaagaaucauacaucaccagauguugauuuaggugacaucucuggcauuaaugcuucaguuguaaacauucaaaaagaaauugaccgccucaaugagguugccaagaauuuaaaugaaucucucaucgaucuccaagaacuuggaaaguaugagcaguauauaaaauggccaugguacauuuggcuagguuuuauagcuggcuugauugccauaguaauggugacaauuaugcuuugcuguaugaccaguugcuguaguugucucaagggcuguuguucuuguggauccugcugcaaauuugaugaagacgacucugagccagugcucaaaggagucaaauuacauuacacauaa

SEQ ID NO: 131 - RNA, 3822 nt, Artificial Sequence
  SARS-CoV-2/Germany/BavPat1/2020__EPI_ISL_406862 spike protein CDS wt (1-1273)
auguuuguuuuucuuguuuuauugccacuagucucuagucaguguguuaaucuuacaaccagaacucaauuacccccugcauacacuaauucuuucacacgugguguuuauuacccugacaaaguuuucagauccucaguuuuacauucaacucaggacuuguucuuaccuuucuuuuccaauguuacuugguuccaugcuauacaugucucugggaccaaugguacuaagagguuugauaacccuguccuaccauuuaaugaugguguuuauuuugcuuccacugagaagucuaacauaauaagaggcuggauuuuugguacuacuuuagauucgaagacccagucccuacuuauuguuaauaacgcuacuaauguuguuauuaaagucugugaauuucaauuuuguaaugauccauuuuuggguguuuauuaccacaaaaacaacaaaaguuggauggaaagugaguucagaguuuauucuagugcgaauaauugcacuuuugaauaugucucucagccuuuucuuauggaccuugaaggaaaacaggguaauuucaaaaaucuuagggaauuuguguuuaagaauauugaugguuauuuuaaaauauauucuaagcacacgccuauuaauuuagugcgugaucucccucaggguuuuucggcuuuagaaccauugguagauuugccaauagguauuaacaucacuagguuucaaacuuuacuugcuuuacauagaaguuauuugacuccuggugauucuucuucagguuggacagcuggugcugcagcuuauuauguggguuaucuucaaccuaggacuuuucuauuaaaauauaaugaaaauggaaccauuacagaugcuguagacugugcacuugacccucucucagaaacaaaguguacguugaaauccuucacuguagaaaaaggaaucuaucaaacuucuaacuuuagaguccaaccaacagaaucuauuguuagauuuccuaauauuacaaacuugugcccuuuuggugaaguuuuuaacgccaccagauuugcaucuguuuaugcuuggaacaggaagagaaucagcaacuguguugcugauuauucuguccuauauaauuccgcaucauuuuccacuuuuaaguguuauggagugucuccuacuaaauuaaaugaucucugcuuuacuaaugucuaugcagauucauuuguaauuagaggugaugaagucagacaaaucgcuccagggcaaacuggaaagauugcugauuauaauuauaaauuaccagaugauuuuacaggcugcguuauagcuuggaauucuaacaaucuugauucuaagguuggugguaauuauaauuaccuguauagauuguuuaggaagucuaaucucaaaccuuuugagagagauauuucaacugaaaucuaucaggccgguagcacaccuuguaaugguguugaagguuuuaauuguuacuuuccuuuacaaucauaugguuuccaacccacuaaugguguugguuaccaaccauacagaguaguaguacuuucuuuugaacuucuacaugcaccagcaacuguuuguggaccuaaaaagucuacuaauuugguuaaaaacaaaugugucaauuucaacuucaaugguuuaacaggcacagguguucuuacugagucuaacaaaaaguuucugccuuuccaacaauuuggcagagacauugcugacacuacugaugcuguccgugauccacagacacuugagauucuugacauuacaccauguucuuuugguggugucaguguuauaacaccaggaacaaauacuucuaaccagguugcuguucuuuaucaggguguuaacugcacagaagucccuguugcuauucaugcagaucaacuuacuccuacuuggcguguuuauucuacagguucuaauguuuuucaaacacgugcaggcuguuuaauaggggcugaacaugucaacaacucauaugagugugacauacccauuggugcagguauaugcgcuaguuaucagacucagacuaauucuccucggcgggcacguaguguagcuagucaauccaucauugccuacacuaugucacuuggugcagaaaauucaguugcuuacucuaauaacucuauugccauacccacaaauuuuacuauuaguguuaccacagaaauucuaccagugucuaugaccaagacaucaguagauuguacaauguacauuuguggugauucaacugaaugcagcaaucuuuuguugcaauauggcaguuuuuguacacaauuaaaccgugcuuuaacuggaauagcuguugaacaagacaaaaacacccaagaaguuuuugcacaagucaaacaaauuuacaaaacaccaccaauuaaagauuuuggugguuuuaauuuuucacaaauauuaccagauccaucaaaaccaagcaagaggucauuuauugaagaucuacuuuucaacaaagugacacuugcagaugcuggcuucaucaaacaauauggugauugccuuggugauauugcugcuagagaccucauuugugcacaaaaguuuaacggccuuacuguuuugccaccuuugcucacagaugaaaugauugcucaauacacuucugcacuguuagcggguacaaucacuucugguuggaccuuuggugcaggugcugcauuacaaauaccauuugcuaugcaaauggcuuauagguuuaaugguauuggaguuacacagaauguucucuaugagaaccaaaaauugauugccaaccaauuuaauagugcuauuggcaaaauucaagacucacuuucuuccacagcaagugcacuuggaaaacuucaagauguggucaaccaaaaugcacaagcuuuaaacacgcuuguuaaacaacuuagcuccaauuuuggugcaauuucaaguguuuuaaaugauauccuuucacgucuugacaaaguugaggcugaagugcaaauugauagguugaucacaggcagacuucaaaguuugcagacauaugugacucaacaauuaauuagagcugcagaaaucagagcuucugcuaaucuugcugcuacuaaaaugucagaguguguacuuggacaaucaaaaagaguugauuuuuguggaaagggcuaucaucuuauguccuucccucagucagcaccucaugguguagucuucuugcaugugacuuaugucccugcacaagaaaagaacuucacaacugcuccugccauuugucaugauggaaaagcacacuuuccucgugaaggugucuuuguuucaaauggcacacacugguuuguaacacaaaggaauuuuuaugaaccacaaaucauuacuacagacaacacauuugugucugguaacugugauguuguaauaggaauugucaacaacacaguuuaugauccuuugcaaccugaauuagacucauucaaggaggaguuagauaaauauuuuaagaaucauacaucaccagauguugauuuaggugacaucucuggcauuaaugcuucaguuguaaacauucaaaaagaaauugaccgccucaaugagguugccaagaauuuaaaugaaucucucaucgaucuccaagaacuuggaaaguaugagcaguauauaaaauggccaugguacauuuggcuagguuuuauagcuggcuugauugccauaguaauggugacaauuaugcuuugcuguaugaccaguugcuguaguugucucaagggcuguuguucuuguggauccugcugcaaauuugaugaagacgacucugagccagugcucaaaggagucaaauuacauuacacauaa

SEQ ID NO: 132 - RNA, 2046 nt, Artificial Sequence
  SARS-CoV-2/Wuhan/WIV05/2019__EPI_ISL_402128 spike protein CDS wt (1-681)
auguuuguuuuucuuguuuuauugccacuagucucuagucaguguguuaaucuuacaaccagaacucaauuacccccugcauacacuaauucuuucacacgugguguuuauuacccugacaaaguuuucagauccucaguuuuacauucaacucaggacuuguucuuaccuuucuuuuccaauguuacuugguuccaugcuauacaugucucugggaccaaugguacuaagagguuugauaacccuguccuaccauuuaaugaugguguuuauuuugcuuccacugagaagucuaacauaauaagaggcuggauuuuugguacuacuuuagauucgaagacccagucccuacuuauuguuaauaacgcuacuaauguuguuauuaaagucugugaauuucaauuuuguaaugauccauuuuuggguguuuauuaccacaaaaacaacaaaaguuggauggaaagugaguucagaguuuauucuagugcgaauaauugcacuuuugaauaugucucucagccuuuucuuauggaccuugaaggaaaacaggguaauuucaaaaaucuuagggaauuuguguuuaagaauauugaugguuauuuuaaaauauauucuaagcacacgccuauuaauuuagugcgugaucucccucaggguuuuucggcuuuagaaccauugguagauuugccaauagguauuaacaucacuagguuucaaacuuuacuugcuuuacauagaaguuauuugacuccuggugauucuucuucagguuggacagcuggugcugcagcuuauuauguggguuaucuucaaccuaggacuuuucuauuaaaauauaaugaaaauggaaccauuacagaugcuguagacugugcacuugacccucucucagaaacaaaguguacguugaaauccuucacuguagaaaaaggaaucuaucaaacuucuaacuuuagaguccaaccaacagaaucuauuguuagauuuccuaauauuacaaacuugugcccuuuuggugaaguuuuuaacgccaccagauuugcaucuguuuaugcuuggaacaggaagagaaucagcaacuguguugcugauuauucuguccuauauaauuccgcaucauuuuccacuuuuaaguguuauggagugucuccuacuaaauuaaaugaucucugcuuuacuaaugucuaugcagauucauuuguaauuagaggugaugaagucagacaaaucgcuccagggcaaacuggaaagauugcugauuauaauuauaaauuaccagaugauuuuacaggcugcguuauagcuuggaauucuaacaaucuugauucuaagguuggugguaauuauaauuaccuguauagauuguuuaggaagucuaaucucaaaccuuuugagagagauauuucaacugaaaucuaucaggccgguagcacaccuuguaaugguguugaagguuuuaauuguuacuuuccuuuacaaucauaugguuuccaacccacuaaugguguugguuaccaaccauacagaguaguaguacuuucuuuugaacuucuacaugcaccagcaacuguuuguggaccuaaaaagucuacuaauuugguuaaaaacaaaugugucaauuucaacuucaaugguuuaacaggcacagguguucuuacugagucuaacaaaaaguuucugccuuuccaacaauuuggcagagacauugcugacacuacugaugcuguccgugauccacagacacuugagauucuugacauuacaccauguucuuuugguggugucaguguuauaacaccaggaacaaauacuucuaaccagguugcuguucuuuaucaggauguuaacugcacagaagucccuguugcuauucaugcagaucaacuuacuccuacuuggcguguuuauucuacagguucuaauguuuuucaaacacgugcaggcuguuuaauaggggcugaacaugucaacaacucauaugagugugacauacccauuggugcagguauaugcgcuaguuaucagacucagacuaauucuccuuaa

SEQ ID NO: 133 - RNA, 45 nt, Artificial Sequence
  SARS-CoV-2/Wuhan/WIV05/2019__EPI_ISL_402128 spike protein CDS wt (1-15)
auguuuguuuuucuuguuuuauugccacuagucucuagucagugu

SEQ ID NO: 134 - RNA, 1998 nt, Artificial Sequence
  SARS-CoV-2/Wuhan/WIV05/2019__EPI_ISL_402128 spike protein CDS wt (16-681)
guuaaucuuacaaccagaacucaauuacccccugcauacacuaauucuuucacacgugguguuuauuacccugacaaaguuuucagauccucaguuuuacauucaacucaggacuuguucuuaccuuucuuuuccaauguuacuugguuccaugcuauacaugucucugggaccaaugguacuaagagguuugauaacccuguccuaccauuuaaugaugguguuuauuuugcuuccacugagaagucuaacauaauaagaggcuggauuuuugguacuacuuuagauucgaagacccagucccuacuuauuguuaauaacgcuacuaauguuguuauuaaagucugugaauuucaauuuuguaaugauccauuuuuggguguuuauuaccacaaaaacaacaaaaguuggauggaaagugaguucagaguuuauucuagugcgaauaauugcacuuuugaauaugucucucagccuuuucuuauggaccuugaaggaaaacaggguaauuucaaaaaucuuagggaauuuguguuuaagaauauugaugguuauuuuaaaauauauucuaagcacacgccuauuaauuuagugcgugaucucccucaggguuuuucggcuuuagaaccauugguagauuugccaauagguauuaacaucacuagguuucaaacuuuacuugcuuuacauagaaguuauuugacuccuggugauucuucuucagguuggacagcuggugcugcagcuuauuauguggguuaucuucaaccuaggacuuuucuauuaaaauauaaugaaaauggaaccauuacagaugcuguagacugugcacuugacccucucucagaaacaaaguguacguugaaauccuucacuguagaaaaaggaaucuaucaaacuucuaacuuuagaguccaaccaacagaaucuauuguuagauuuccuaauauuacaaacuugugcccuuuuggugaaguuuuuaacgccaccagauuugcaucuguuuaugcuuggaacaggaagagaaucagcaacuguguugcugauuauucuguccuauauaauuccgcaucauuuuccacuuuuaaguguuauggagugucuccuacuaaauuaaaugaucucugcuuuacuaaugucuaugcagauucauuuguaauuagaggugaugaagucagacaaaucgcuccagggcaaacuggaaagauugcugauuauaauuauaaauuaccagaugauuuuacaggcugcguuauagcuuggaauucuaacaaucuugauucuaagguuggugguaauuauaauuaccuguauagauuguuuaggaagucuaaucucaaaccuuuugagagagauauuucaacugaaaucuaucaggccgguagcacaccuuguaaugguguugaagguuuuaauuguuacuuuccuuuacaaucauaugguuuccaacccacuaaugguguugguuaccaaccauacagaguaguaguacuuucuuuugaacuucuacaugcaccagcaacuguuuguggaccuaaaaagucuacuaauuugguuaaaaacaaaugugucaauuucaacuucaaugguuuaacaggcacagguguucuuacugagucuaacaaaaaguuucugccuuuccaacaauuuggcagagacauugcugacacuacugaugcuguccgugauccacagacacuugagauucuugacauuacaccauguucuuuugguggugucaguguuauaacaccaggaacaaauacuucuaaccagguugcuguucuuuaucaggauguuaacugcacagaagucccuguugcuauucaugcagaucaacuuacuccuacuuggcguguuuauucuacagguucuaauguuuuucaaacacgugcaggcuguuuaauaggggcugaacaugucaacaacucauaugagugugacauacccauuggugcagguauaugcgcuaguuaucagacucagacuaauucuccu

SEQ ID NO: 135 - RNA, 1776 nt, Artificial Sequence
  SARS-CoV-2/Wuhan/WIV05/2019__EPI_ISL_402128 spike protein CDS wt (682-1273)
cggcgggcacguaguguagcuagucaauccaucauugccuacacuaugucacuuggugcagaaaauucaguugcuuacucuaauaacucuauugccauacccacaaauuuuacuauuaguguuaccacagaaauucuaccagugucuaugaccaagacaucaguagauuguacaauguacauuuguggugauucaacugaaugcagcaaucuuuuguugcaauauggcaguuuuuguacacaauuaaaccgugcuuuaacuggaauagcuguugaacaagacaaaaacacccaagaaguuuuugcacaagucaaacaaauuuacaaaacaccaccaauuaaagauuuuggugguuuuaauuuuucacaaauauuaccagauccaucaaaaccaagcaagaggucauuuauugaagaucuacuuuucaacaaagugacacuugcagaugcuggcuucaucaaacaauauggugauugccuuggugauauugcugcuagagaccucauuugugcacaaaaguuuaacggccuuacuguuuugccaccuuugcucacagaugaaaugauugcucaauacacuucugcacuguuagcggguacaaucacuucugguuggaccuuuggugcaggugcugcauuacaaauaccauuugcuaugcaaauggcuuauagguuuaaugguauuggaguuacacagaauguucucuaugagaaccaaaaauugauugccaaccaauuuaauagugcuauuggcaaaauucaagacucacuuucuuccacagcaagugcacuuggaaaacuucaagauguggucaaccaaaaugcacaagcuuuaaacacgcuuguuaaacaacuuagcuccaauuuuggugcaauuucaaguguuuuaaaugauauccuuucacgucuugacaaaguugaggcugaagugcaaauugauagguugaucacaggcagacuucaaaguuugcagacauaugugacucaacaauuaauuagagcugcagaaaucagagcuucugcuaaucuugcugcuacuaaaaugucagaguguguacuuggacaaucaaaaagaguugauuuuuguggaaagggcuaucaucuuauguccuucccucagucagcaccucaugguguagucuucuugcaugugacuuaugucccugcacaagaaaagaacuucacaacugcuccugccauuugucaugauggaaaagcacacuuuccucgugaaggugucuuuguuucaaauggcacacacugguuuguaacacaaaggaauuuuuaugaaccacaaaucauuacuacagacaacacauuugugucugguaacugugauguuguaauaggaauugucaacaacacaguuuaugauccuuugcaaccugaauuagacucauucaaggaggaguuagauaaauauuuuaagaaucauacaucaccagauguugauuuaggugacaucucuggcauuaaugcuucaguuguaaacauucaaaaagaaauugaccgccucaaugagguugccaagaauuuaaaugaaucucucaucgaucuccaagaacuuggaaaguaugagcaguauauaaaauggccaugguacauuuggcuagguuuuauagcuggcuugauugccauaguaauggugacaauuaugcuuugcuguaugaccaguugcuguaguugucucaagggcuguuguucuuguggauccugcugcaaauuugaugaagacgacucugagccagugcucaaaggagucaaauuacauuacaca

SEQ ID NO: 136 - RNA, 3822 nt, Artificial Sequence
  SARS-CoV-2/Wuhan/WIV05/2019__EPI_ISL_402128 spike protein CDS gc (1-1273)
auguucguguuccugguccuccugccccuggugagcucccagugcgugaaccucaccacccgcacgcagcugccgcccgccuacaccaacagcuucacccggggcgucuacuaccccgacaagguguuccgcuccagcgugcugcacuccacccaggaccucuuccugcccuucuucagcaacgucacgugguuccacgccauccacguguccgggaccaacggcaccaagcgguucgacaacccggugcugcccuucaacgacggggucuacuucgcgagcaccgagaaguccaacaucauccgcggcuggaucuucgggacgacccucgacagcaagacccagucccugcugaucgugaacaacgccaccaacguggucaucaaggugugcgaguuccaguucugcaacgaccccuuccucggcguguacuaccacaagaacaacaagagcuggauggaguccgaguuccgggucuacagcuccgccaacaacugcacguucgaguacgugagccagcccuuccugauggaccuggagggcaagcaggggaacuucaagaaccuccgcgaguucguguucaagaacaucgacggcuacuucaagaucuacuccaagcacaccccgaucaaccugguccgggaccugccccagggguucagcgcccucgagccccugguggaccugcccaucggcaucaacaucacccgcuuccagacccuccuggcccugcaccgguccuaccucacgccgggggacagcagcuccggcuggaccgcgggcgccgccgccuacuacgugggguaccugcagccccgcaccuuccugcucaaguacaacgagaacggcaccaucacggacgcggucgacugcgcccuggacccccugagcgagaccaagugcacccucaaguccuucaccguggagaaggggaucuaccagacgagcaacuuccgggugcagcccaccgaguccaucguccgcuucccgaacaucaccaaccugugccccuucggcgagguguucaacgccacccgguucgccagcgucuacgccuggaaccgcaagcggaucuccaacugcguggcggacuacagcgugcuguacaacuccgccagcuucuccacguucaagugcuacggcgucagccccaccaagcucaacgaccugugcuucaccaacguguacgccgacuccuucgugauccgcggggacgagguccggcagaucgcccccggccagaccgggaagaucgccgacuacaacuacaagcugccggacgacuucacgggcugcgugaucgcguggaacagcaacaaccucgacuccaaggucgggggcaacuacaacuaccuguaccgccuguuccgcaagagcaaccucaagcccuucgagcgggacaucuccaccgagaucuaccaggccggcagcacccccugcaacgggguggagggcuucaacugcuacuucccccugcaguccuacggguuccagccgaccaacggcgugggguaccagcccuaccggguggucgugcugagcuucgagcuccugcacgcccccgccacggugugcggccccaagaaguccaccaaccuggucaagaacaagugcgugaacuucaacuucaacggccucaccgggaccggcgugcugaccgagagcaacaagaaguuccugccguuccagcaguucgggcgcgacaucgccgacacgaccgacgcgguccgcgacccccagacccuggagauccucgacaucacccccugcagcuucggcgggguguccgugaucacgccgggcaccaacaccagcaaccaggucgccgugcuguaccaggacgugaacugcaccgagguccccguggccauccacgccgaccagcugacgcccaccuggcggguguacuccaccggcagcaacgucuuccagacccgcgccgggugccucaucggcgcggagcacgugaacaacuccuacgagugcgacauccccaucggggccggcaucugcgccagcuaccagacgcagaccaacuccccgcggcgcgcccggagcguggcgucccagagcaucaucgccuacaccaugucccugggcgccgagaacagcgucgccuacuccaacaacagcaucgccauccccaccaacuucacgaucuccgugaccaccgagauccugcccgugagcaugaccaagacgagcgucgacugcaccauguacaucugcggggacuccaccgagugcagcaaccuccugcugcaguacggcuccuucugcacccagcucaaccgcgcgcugacggggaucgccguggagcaggacaagaacacccaggagguguucgcccaggucaagcagaucuacaagacgcccccgaucaaggacuucggcggguucaacuucagccagauccugcccgaccccuccaagcccagcaagcgguccuucaucgaggaccuccuguucaacaaggugacccuggccgacgccggcuucaucaagcaguacggcgacugccucggggacaucgcggcccgcgaccugaucugcgcccagaaguucaacggccugaccgugcucccgccccugcugaccgacgagaugaucgcccaguacaccagcgcccuccuggcggggaccaucacguccggcuggaccuucggggccggcgccgcccugcagauccccuucgcgaugcagauggccuaccgguucaacggcaucggggucacccagaacgugcucuacgagaaccagaagcugaucgccaaccaguucaacagcgccaucggcaagauccaggacucccugagcuccaccgccagcgcgcucgggaagcugcaggacguggucaaccagaacgcccaggcccugaacacgcucgugaagcagcuguccagcaacuucggcgccaucuccagcgugcugaacgacauccucucccgccuggacaaggucgaggccgaggugcagaucgaccggcugaucaccgggcgccuccagagccugcagaccuacgugacccagcagcugauccgggcggccgagauccgcgccagcgccaaccucgccgcgaccaagauguccgagugcguccugggccagagcaagcggguggacuucugcggcaagggguaccaccugauguccuucccccagagcgccccgcacggcguggucuuccuccacgugacguacguccccgcccaggagaagaacuucaccaccgcccccgcgaucugccacgacgggaaggcccacuucccccgcgagggcguguucguguccaacgggacccacugguucgucacgcagcggaacuucuacgagccgcagaucaucaccaccgacaacaccuucgugagcggcaacugcgacguggucaucggcaucgugaacaacacgguguacgacccccugcagcccgagcuggacuccuucaaggaggagcucgacaaguacuucaagaaccacaccagccccgacgucgaccugggggacaucuccggcaucaacgccagcguggugaacauccagaaggagaucgaccgccugaacgaggucgccaagaaccucaacgagucccugaucgaccugcaggagcucgggaaguacgagcaguacaucaaguggccgugguacaucuggcugggcuucaucgccggccugaucgcgaucgugauggugaccaucaugcucugcugcaugaccagcugcugcuccugccugaaggggugcugcagcugcggcuccugcugcaaguucgacgaggacgacagcgagcccguccugaagggggugaagcuccacuacacguga

SEQ ID NO: 137 - RNA, 3822 nt, Artificial Sequence
  SARS-CoV-2/Wuhan/WIV05/2019__EPI_ISL_402128 spike protein CDS gc (1-1273)(K986P_V987P)
auguucguguuccugguccuccugccccuggugagcucccagugcgugaaccucaccacccgcacgcagcugccgcccgccuacaccaacagcuucacccggggcgucuacuaccccgacaagguguuccgcuccagcgugcugcacuccacccaggaccucuuccugcccuucuucagcaacgucacgugguuccacgccauccacguguccgggaccaacggcaccaagcgguucgacaacccggugcugcccuucaacgacggggucuacuucgcgagcaccgagaaguccaacaucauccgcggcuggaucuucgggacgacccucgacagcaagacccagucccugcugaucgugaacaacgccaccaacguggucaucaaggugugcgaguuccaguucugcaacgaccccuuccucggcguguacuaccacaagaacaacaagagcuggauggaguccgaguuccgggucuacagcuccgccaacaacugcacguucgaguacgugagccagcccuuccugauggaccuggagggcaagcaggggaacuucaagaaccuccgcgaguucguguucaagaacaucgacggcuacuucaagaucuacuccaagcacaccccgaucaaccugguccgggaccugccccagggguucagcgcccucgagccccugguggaccugcccaucggcaucaacaucacccgcuuccagacccuccuggcccugcaccgguccuaccucacgccgggggacagcagcuccggcuggaccgcgggcgccgccgccuacuacgugggguaccugcagccccgcaccuuccugcucaaguacaacgagaacggcaccaucacggacgcggucgacugcgcccuggacccccugagcgagaccaagugcacccucaaguccuucaccguggagaaggggaucuaccagacgagcaacuuccgggugcagcccaccgaguccaucguccgcuucccgaacaucaccaaccugugccccuucggcgagguguucaacgccacccgguucgccagcgucuacgccuggaaccgcaagcggaucuccaacugcguggcggacuacagcgugcuguacaacuccgccagcuucuccacguucaagugcuacggcgucagccccaccaagcucaacgaccugugcuucaccaacguguacgccgacuccuucgugauccgcggggacgagguccggcagaucgcccccggccagaccgggaagaucgccgacuacaacuacaagcugccggacgacuucacgggcugcgugaucgcguggaacagcaacaaccucgacuccaaggucgggggcaacuacaacuaccuguaccgccuguuccgcaagagcaaccucaagcccuucgagcgggacaucuccaccgagaucuaccaggccggcagcacccccugcaacgggguggagggcuucaacugcuacuucccccugcaguccuacggguuccagccgaccaacggcgugggguaccagcccuaccggguggucgugcugagcuucgagcuccugcacgcccccgccacggugugcggccccaagaaguccaccaaccuggucaagaacaagugcgugaacuucaacuucaacggccucaccgggaccggcgugcugaccgagagcaacaagaaguuccugccguuccagcaguucgggcgcgacaucgccgacacgaccgacgcgguccgcgacccccagacccuggagauccucgacaucacccccugcagcuucggcgggguguccgugaucacgccgggcaccaacaccagcaaccaggucgccgugcuguaccaggacgugaacugcaccgagguccccguggccauccacgccgaccagcugacgcccaccuggcggguguacuccaccggcagcaacgucuuccagacccgcgccgggugccucaucggcgcggagcacgugaacaacuccuacgagugcgacauccccaucggggccggcaucugcgccagcuaccagacgcagaccaacuccccgcggcgcgcccggagcguggcgucccagagcaucaucgccuacaccaugucccugggcgccgagaacagcgucgccuacuccaacaacagcaucgccauccccaccaacuucacgaucuccgugaccaccgagauccugcccgugagcaugaccaagacgagcgucgacugcaccauguacaucugcggggacuccaccgagugcagcaaccuccugcugcaguacggcuccuucugcacccagcucaaccgcgcgcugacggggaucgccguggagcaggacaagaacacccaggagguguucgcccaggucaagcagaucuacaagacgcccccgaucaaggacuucggcggguucaacuucagccagauccugcccgaccccuccaagcccagcaagcgguccuucaucgaggaccuccuguucaacaaggugacccuggccgacgccggcuucaucaagcaguacggcgacugccucggggacaucgcggcccgcgaccugaucugcgcccagaaguucaacggccugaccgugcucccgccccugcugaccgacgagaugaucgcccaguacaccagcgcccuccuggcggggaccaucacguccggcuggaccuucggggccggcgccgcccugcagauccccuucgcgaugcagauggccuaccgguucaacggcaucggggucacccagaacgugcucuacgagaaccagaagcugaucgccaaccaguucaacagcgccaucggcaagauccaggacucccugagcuccaccgccagcgcgcucgggaagcugcaggacguggucaaccagaacgcccaggcccugaacacgcucgugaagcagcuguccagcaacuucggcgccaucuccagcgugcugaacgacauccucucccgccuggacccgcccgaggccgaggugcagaucgaccggcugaucaccgggcgccuccagagccugcagaccuacgugacccagcagcugauccgggcggccgagauccgcgccagcgccaaccucgccgcgaccaagauguccgagugcguccugggccagagcaagcggguggacuucugcggcaagggguaccaccugauguccuucccccagagcgccccgcacggcguggucuuccuccacgugacguacguccccgcccaggagaagaacuucaccaccgcccccgcgaucugccacgacgggaaggcccacuucccccgcgagggcguguucguguccaacgggacccacugguucgucacgcagcggaacuucuacgagccgcagaucaucaccaccgacaacaccuucgugagcggcaacugcgacguggucaucggcaucgugaacaacacgguguacgacccccugcagcccgagcuggacuccuucaaggaggagcucgacaaguacuucaagaaccacaccagccccgacgucgaccugggggacaucuccggcaucaacgccagcguggugaacauccagaaggagaucgaccgccugaacgaggucgccaagaaccucaacgagucccugaucgaccugcaggagcucgggaaguacgagcaguacaucaaguggccgugguacaucuggcugggcuucaucgccggccugaucgcgaucgugauggugaccaucaugcucugcugcaugaccagcugcugcuccugccugaaggggugcugcagcugcggcuccugcugcaaguucgacgaggacgacagcgagcccguccugaagggggugaagcuccacuacacguga

SEQ ID NO: 138 - RNA, 2046 nt, Artificial Sequence
  SARS-CoV-2/Wuhan/WIV05/2019__EPI_ISL_402128 spike protein CDS gc (1-681)
auguucguguuccugguccuccugccccuggugagcucccagugcgugaaccucaccacccgcacgcagcugccgcccgccuacaccaacagcuucacccggggcgucuacuaccccgacaagguguuccgcuccagcgugcugcacuccacccaggaccucuuccugcccuucuucagcaacgucacgugguuccacgccauccacguguccgggaccaacggcaccaagcgguucgacaacccggugcugcccuucaacgacggggucuacuucgcgagcaccgagaaguccaacaucauccgcggcuggaucuucgggacgacccucgacagcaagacccagucccugcugaucgugaacaacgccaccaacguggucaucaaggugugcgaguuccaguucugcaacgaccccuuccucggcguguacuaccacaagaacaacaagagcuggauggaguccgaguuccgggucuacagcuccgccaacaacugcacguucgaguacgugagccagcccuuccugauggaccuggagggcaagcaggggaacuucaagaaccuccgcgaguucguguucaagaacaucgacggcuacuucaagaucuacuccaagcacaccccgaucaaccugguccgggaccugccccagggguucagcgcccucgagccccugguggaccugcccaucggcaucaacaucacccgcuuccagacccuccuggcccugcaccgguccuaccucacgccgggggacagcagcuccggcuggaccgcgggcgccgccgccuacuacgugggguaccugcagccccgcaccuuccugcucaaguacaacgagaacggcaccaucacggacgcggucgacugcgcccuggacccccugagcgagaccaagugcacccucaaguccuucaccguggagaaggggaucuaccagacgagcaacuuccgggugcagcccaccgaguccaucguccgcuucccgaacaucaccaaccugugccccuucggcgagguguucaacgccacccgguucgccagcgucuacgccuggaaccgcaagcggaucuccaacugcguggcggacuacagcgugcuguacaacuccgccagcuucuccacguucaagugcuacggcgucagccccaccaagcucaacgaccugugcuucaccaacguguacgccgacuccuucgugauccgcggggacgagguccggcagaucgcccccggccagaccgggaagaucgccgacuacaacuacaagcugccggacgacuucacgggcugcgugaucgcguggaacagcaacaaccucgacuccaaggucgggggcaacuacaacuaccuguaccgccuguuccgcaagagcaaccucaagcccuucgagcgggacaucuccaccgagaucuaccaggccggcagcacccccugcaacgggguggagggcuucaacugcuacuucccccugcaguccuacggguuccagccgaccaacggcgugggguaccagcccuaccggguggucgugcugagcuucgagcuccugcacgcccccgccacggugugcggccccaagaaguccaccaaccuggucaagaacaagugcgugaacuucaacuucaacggccucaccgggaccggcgugcugaccgagagcaacaagaaguuccugccguuccagcaguucgggcgcgacaucgccgacacgaccgacgcgguccgcgacccccagacccuggagauccucgacaucacccccugcagcuucggcgggguguccgugaucacgccgggcaccaacaccagcaaccaggucgccgugcuguaccaggacgugaacugcaccgagguccccguggccauccacgccgaccagcugacgcccaccuggcggguguacuccaccggcagcaacgucuuccagacccgcgccgggugccucaucggcgcggagcacgugaacaacuccuacgagugcgacauccccaucggggccggcaucugcgccagcuaccagacgcagaccaacuccccguga

SEQ ID NO: 139 - RNA, 45 nt, Artificial Sequence
  SARS-CoV-2/Wuhan/WIV05/2019__EPI_ISL_402128 spike protein CDS gc (1-15)
auguucguguuccugguccuccugccccuggugagcucccagugc

SEQ ID NO: 140 - RNA, 1998 nt, Artificial Sequence
  SARS-CoV-2/Wuhan/WIV05/2019__EPI_ISL_402128 spike protein CDS gc (16-681)
gugaaccucaccacccgcacgcagcugccgcccgccuacaccaacagcuucacccggggcgucuacuaccccgacaagguguuccgcuccagcgugcugcacuccacccaggaccucuuccugcccuucuucagcaacgucacgugguuccacgccauccacguguccgggaccaacggcaccaagcgguucgacaacccggugcugcccuucaacgacggggucuacuucgcgagcaccgagaaguccaacaucauccgcggcuggaucuucgggacgacccucgacagcaagacccagucccugcugaucgugaacaacgccaccaacguggucaucaaggugugcgaguuccaguucugcaacgaccccuuccucggcguguacuaccacaagaacaacaagagcuggauggaguccgaguuccgggucuacagcuccgccaacaacugcacguucgaguacgugagccagcccuuccugauggaccuggagggcaagcaggggaacuucaagaaccuccgcgaguucguguucaagaacaucgacggcuacuucaagaucuacuccaagcacaccccgaucaaccugguccgggaccugccccagggguucagcgcccucgagccccugguggaccugcccaucggcaucaacaucacccgcuuccagacccuccuggcccugcaccgguccuaccucacgccgggggacagcagcuccggcuggaccgcgggcgccgccgccuacuacgugggguaccugcagccccgcaccuuccugcucaaguacaacgagaacggcaccaucacggacgcggucgacugcgcccuggacccccugagcgagaccaagugcacccucaaguccuucaccguggagaaggggaucuaccagacgagcaacuuccgggugcagcccaccgaguccaucguccgcuucccgaacaucaccaaccugugccccuucggcgagguguucaacgccacccgguucgccagcgucuacgccuggaaccgcaagcggaucuccaacugcguggcggacuacagcgugcuguacaacuccgccagcuucuccacguucaagugcuacggcgucagccccaccaagcucaacgaccugugcuucaccaacguguacgccgacuccuucgugauccgcggggacgagguccggcagaucgcccccggccagaccgggaagaucgccgacuacaacuacaagcugccggacgacuucacgggcugcgugaucgcguggaacagcaacaaccucgacuccaaggucgggggcaacuacaacuaccuguaccgccuguuccgcaagagcaaccucaagcccuucgagcgggacaucuccaccgagaucuaccaggccggcagcacccccugcaacgggguggagggcuucaacugcuacuucccccugcaguccuacggguuccagccgaccaacggcgugggguaccagcccuaccggguggucgugcugagcuucgagcuccugcacgcccccgccacggugugcggccccaagaaguccaccaaccuggucaagaacaagugcgugaacuucaacuucaacggccucaccgggaccggcgugcugaccgagagcaacaagaaguuccugccguuccagcaguucgggcgcgacaucgccgacacgaccgacgcgguccgcgacccccagacccuggagauccucgacaucacccccugcagcuucggcgggguguccgugaucacgccgggcaccaacaccagcaaccaggucgccgugcuguaccaggacgugaacugcaccgagguccccguggccauccacgccgaccagcugacgcccaccuggcggguguacuccaccggcagcaacgucuuccagacccgcgccgggugccucaucggcgcggagcacgugaacaacuccuacgagugcgacauccccaucggggccggcaucugcgccagcuaccagacgcagaccaacuccccg

SEQ ID NO: 141 - RNA, 1776 nt, Artificial Sequence
  SARS-CoV-2/Wuhan/WIV05/2019__EPI_ISL_402128 spike protein CDS gc (682-1273)
cggcgcgcccggagcguggcgucccagagcaucaucgccuacaccaugucccugggcgccgagaacagcgucgccuacuccaacaacagcaucgccauccccaccaacuucacgaucuccgugaccaccgagauccugcccgugagcaugaccaagacgagcgucgacugcaccauguacaucugcggggacuccaccgagugcagcaaccuccugcugcaguacggcuccuucugcacccagcucaaccgcgcgcugacggggaucgccguggagcaggacaagaacacccaggagguguucgcccaggucaagcagaucuacaagacgcccccgaucaaggacuucggcggguucaacuucagccagauccugcccgaccccuccaagcccagcaagcgguccuucaucgaggaccuccuguucaacaaggugacccuggccgacgccggcuucaucaagcaguacggcgacugccucggggacaucgcggcccgcgaccugaucugcgcccagaaguucaacggccugaccgugcucccgccccugcugaccgacgagaugaucgcccaguacaccagcgcccuccuggcggggaccaucacguccggcuggaccuucggggccggcgccgcccugcagauccccuucgcgaugcagauggccuaccgguucaacggcaucggggucacccagaacgugcucuacgagaaccagaagcugaucgccaaccaguucaacagcgccaucggcaagauccaggacucccugagcuccaccgccagcgcgcucgggaagcugcaggacguggucaaccagaacgcccaggcccugaacacgcucgugaagcagcuguccagcaacuucggcgccaucuccagcgugcugaacgacauccucucccgccuggacaaggucgaggccgaggugcagaucgaccggcugaucaccgggcgccuccagagccugcagaccuacgugacccagcagcugauccgggcggccgagauccgcgccagcgccaaccucgccgcgaccaagauguccgagugcguccugggccagagcaagcggguggacuucugcggcaagggguaccaccugauguccuucccccagagcgccccgcacggcguggucuuccuccacgugacguacguccccgcccaggagaagaacuucaccaccgcccccgcgaucugccacgacgggaaggcccacuucccccgcgagggcguguucguguccaacgggacccacugguucgucacgcagcggaacuucuacgagccgcagaucaucaccaccgacaacaccuucgugagcggcaacugcgacguggucaucggcaucgugaacaacacgguguacgacccccugcagcccgagcuggacuccuucaaggaggagcucgacaaguacuucaagaaccacaccagccccgacgucgaccugggggacaucuccggcaucaacgccagcguggugaacauccagaaggagaucgaccgccugaacgaggucgccaagaaccucaacgagucccugaucgaccugcaggagcucgggaaguacgagcaguacaucaaguggccgugguacaucuggcugggcuucaucgccggccugaucgcgaucgugauggugaccaucaugcucugcugcaugaccagcugcugcuccugccugaaggggugcugcagcugcggcuccugcugcaaguucgacgaggacgacagcgagcccguccugaagggggugaagcuccacuacacg

SEQ ID NO: 142 - RNA, 3822 nt, Artificial Sequence
  SARS-CoV-2/Wuhan/WIV05/2019__EPI_ISL_402128 spike protein CDS human (1-1273)(K986P_V987P)
auguucguguuucugguccuccuuccccugguuagcucccagugcgugaacuugaccacaagaacucaauuaccuccagccuacacuaauucuuucaccaggggcguauauuacccggacaagguguuucggucaaguguccugcacagcacacaggaucuauuccuccccuuuuucuccaacgugacuugguuucaugcuauccacguuucugggaccaauggaacaaaacgcuucgacaacccugugcugccauuuaaugauggugucuauuucgcaucgaccgagaagucaaacauuauacgaggcuggaucuuugggacuacacuugacagcaaaacccagagucuguugauugugaauaacgccacgaauguaguuaucaaggugugugaguuccaguuuugcaacgaucccuuccucggagucuacuaucauaaaaauaacaaguccuggauggagucugaguuccguguguacagcuccgcgaauaacuguacuuuugaauaugugucacaaccuuuccugauggaccuggaaggcaagcaggguaauuuuaaaaaccucagagaguucgucuuuaagaacauugauggguacuucaaaaucuacaguaagcacaccccaauaaauuuaguuagggaccugccccagggauuuagcgcucuugagccuuugguggaucugccaaucggcauuaacaucacacgguuccagacucuacucgcccugcaucgcucuuaucuuaccccgggcgacuccucaagcggguggacagcaggagccgcugcauacuauguagguuaccugcaacccagaaccuuuuugcucaaauauaaugaaaacggcacgauuacugaugccguggacugcgcucuggauccuuuaagugagacaaaguguacccugaagucuuucacugucgaaaaagggaucuaccagacauccaauuuuagggugcagccaaccgagagcauaguucgguuccccaacauuacgaaucucugcccuuuuggagagguguucaacgccacccgcuucgcgucggucuaugcauggaaucgaaagagaaucucuaacuguguggccgacuacuccguacuuuacaauucagcuaguuuuagcacauucaaaugcuauggcguuuccccaacuaagcugaacgacuuguguuuuaccaauguguacgccgauucuuucgucauuaggggugacgaagugcggcagaucgcacccgggcaaacaggaaaaaucgcugauuauaacuacaagcuaccggacgauuuuacuggcugcgucauugccuggaauagcaacaaccuggacucaaaagugggcgggaauuauaacuaccucuaucgucuguuccgcaagaguaaucuuaagccuuuugagagagauauauccaccgaaaucuaccaggcgggaagcacacccuguaacgguguugagggcuucaauugcuacuuuccacugcagucuuauggguuccaaccuaccaacggagugggcuaccagcccuauaggguagucguguugucauuugaacuccugcacgccccagcaacuguuugcggucccaaaaagaguacgaauuuagugaaaaacaagugugucaauuucaacuuuaaugggcugacaggcaccggagugcuaacugagagcaacaaaaaguuccucccuuuccagcaguuuggccgggacauugcugauaccacagacgccguacgagauccacaaacccuggagauccuugacauaacuccgugcuccuucgggggagugucuguuauuacacccgguacgaauaccucgaaccaggucgcuguguuguaccaggacgugaauuguacugaagucccuguugccauccacgcagaucagcugacaccaaccuggcgcguguauagcacaggcuccaacguguuucaaacuagagccgggugccucaucggagcugagcauguaaacaauucauacgaaugugacauucccaucggcgcggguauuugcgcaaguuaucagacccagacgaacucuccuaggcgggcccgcagcgucgcuucccagucaauaaucgccuacaccaugagccugggggcagaaaauucuguggccuacuccaacaauaguauugcuaucccaacaaacuucacuaucagcguuaccacagaaauucuucccgugucuaugacuaagaccuccgucgauuguacgauguauauaugcggcgacucaacagaguguaguaaucuguugcuccaauacggcagcuuuugcacccagcugaacagagccuuaacuggaaucgcaguggagcaggauaaaaauacacaggaaguuuucgcgcaagugaagcagauuuauaaaaccccgccuaucaaggacuuugggggauucaacuuuucgcagauucugccagaucccuccaaaccuucuaagaggagcuucaucgaggaccuacucuuuaauaagguaacucuggcugaugccgguuucauaaaacaauacggcgacugucuuggggauaucgcagcccgugacuugauuugcgcucagaaguucaacggacugaccguccugcccccacucuuaacagaugaaaugaucgcccaguauacgucagcacugcuugcuggcaccauuacgagugguuggacauuuggggccggcgcggccuugcagaucccuuucgcuaugcaaauggcauaccgguuuaauggaauaggcgugacccagaacgugcucuaugagaaucagaaacugauugccaaccaguucaacuccgcuaucgggaagauucaagacucucuaagcuccacagccucagcacugggaaaacuccaggacgucguuaaucagaacgcgcaggcccugaauacucuugugaagcaauugagcaguaacuuuggcgcuaucucuuccguacugaaugauauauuaagccgacucgacccgcccgaagccgagguccagaucgauagacugauuaccgguaggcuucagucgcugcaaacguacgugacacagcaguugauccgcgcagcugagauucgggccucagcaaaccucgccgcuaccaaaaugucugaaugcguucuggggcagaguaagagaguggacuucuguggaaaaggcuaccaccuaauguccuuuccccaaagcgcgccacauggugucguguuccugcacguuacuuaugugccggcccaggagaagaauuuuaccacagcuccugcaaucugccacgauggcaaagcccauuuccccagggaaggggucuuuguaucuaacggaacucacugguucgugacccagcgcaauuuuuacgagccacagauaauuacaacggacaacaccuucguuagcggcaauugugauguggucaucgggaucgugaacaauacuguauaugacccccuccaaccugagcuggauuccuucaaggaggaacuugacaaauacuuuaagaaccauacaucaccagauguggacuugggagauauuaguggcaucaaugccagcgucguuaacauucagaaggaaauagaccgacugaaugagguggcuaaaaacuuaaacgaaucucucaucgaccugcaggagcuugguaaguaugagcaguacauuaaauggcccugguauaucuggcugggguucauugcaggacuaaucgccauagugauggucaccaucaugcucugcuguaugacuuccugcuguucaugccugaagggcuguugcaguugugguagcugcugcaaauuugaugaagacgauuccgagccuguguugaagggcguuaagcugcacuacacauga

SEQ ID NO: 143 - RNA, 2046 nt, Artificial Sequence
  SARS-CoV-2/Wuhan/WIV05/2019__EPI_ISL_402128 spike protein CDS human (1-681)
auguucguguuucugguccuccuuccccugguuagcucccagugcgugaacuugaccacaagaacucaauuaccuccagccuacacuaauucuuucaccaggggcguauauuacccggacaagguguuucggucaaguguccugcacagcacacaggaucuauuccuccccuuuuucuccaacgugacuugguuucaugcuauccacguuucugggaccaauggaacaaaacgcuucgacaacccugugcugccauuuaaugauggugucuauuucgcaucgaccgagaagucaaacauuauacgaggcuggaucuuugggacuacacuugacagcaaaacccagagucuguugauugugaauaacgccacgaauguaguuaucaaggugugugaguuccaguuuugcaacgaucccuuccucggagucuacuaucauaaaaauaacaaguccuggauggagucugaguuccguguguacagcuccgcgaauaacuguacuuuugaauaugugucacaaccuuuccugauggaccuggaaggcaagcaggguaauuuuaaaaaccucagagaguucgucuuuaagaacauugauggguacuucaaaaucuacaguaagcacaccccaauaaauuuaguuagggaccugccccagggauuuagcgcucuugagccuuugguggaucugccaaucggcauuaacaucacacgguuccagacucuacucgcccugcaucgcucuuaucuuaccccgggcgacuccucaagcggguggacagcaggagccgcugcauacuauguagguuaccugcaacccagaaccuuuuugcucaaauauaaugaaaacggcacgauuacugaugccguggacugcgcucuggauccuuuaagugagacaaaguguacccugaagucuuucacugucgaaaaagggaucuaccagacauccaauuuuagggugcagccaaccgagagcauaguucgguuccccaacauuacgaaucucugcccuuuuggagagguguucaacgccacccgcuucgcgucggucuaugcauggaaucgaaagagaaucucuaacuguguggccgacuacuccguacuuuacaauucagcuaguuuuagcacauucaaaugcuauggcguuuccccaacuaagcugaacgacuuguguuuuaccaauguguacgccgauucuuucgucauuaggggugacgaagugcggcagaucgcacccgggcaaacaggaaaaaucgcugauuauaacuacaagcuaccggacgauuuuacuggcugcgucauugccuggaauagcaacaaccuggacucaaaagugggcgggaauuauaacuaccucuaucgucuguuccgcaagaguaaucuuaagccuuuugagagagauauauccaccgaaaucuaccaggcgggaagcacacccuguaacgguguugagggcuucaauugcuacuuuccacugcagucuuauggguuccaaccuaccaacggagugggcuaccagcccuauaggguagucguguugucauuugaacuccugcacgccccagcaacuguuugcggucccaaaaagaguacgaauuuagugaaaaacaagugugucaauuucaacuuuaaugggcugacaggcaccggagugcuaacugagagcaacaaaaaguuccucccuuuccagcaguuuggccgggacauugcugauaccacagacgccguacgagauccacaaacccuggagauccuugacauaacuccgugcuccuucgggggagugucuguuauuacacccgguacgaauaccucgaaccaggucgcuguguuguaccaggacgugaauuguacugaagucccuguugccauccacgcagaucagcugacaccaaccuggcgcguguauagcacaggcuccaacguguuucaaacuagagccgggugccucaucggagcugagcauguaaacaauucauacgaaugugacauucccaucggcgcggguauuugcgcaaguuaucagacccagacgaacucuccuuga

SEQ ID NO: 144 - RNA, 45 nt, Artificial Sequence
  SARS-CoV-2/Wuhan/WIV05/2019__EPI_ISL_402128 spike protein CDS human (1-15)
auguucguguuucugguccuccuuccccugguuagcucccagugc

SEQ ID NO: 145 - RNA, 1998 nt, Artificial Sequence
  SARS-CoV-2/Wuhan/WIV05/2019__EPI_ISL_402128 spike protein CDS human (16-681)
gugaacuugaccacaagaacucaauuaccuccagccuacacuaauucuuucaccaggggcguauauuacccggacaagguguuucggucaaguguccugcacagcacacaggaucuauuccuccccuuuuucuccaacgugacuugguuucaugcuauccacguuucugggaccaauggaacaaaacgcuucgacaacccugugcugccauuuaaugauggugucuauuucgcaucgaccgagaagucaaacauuauacgaggcuggaucuuugggacuacacuugacagcaaaacccagagucuguugauugugaauaacgccacgaauguaguuaucaaggugugugaguuccaguuuugcaacgaucccuuccucggagucuacuaucauaaaaauaacaaguccuggauggagucugaguuccguguguacagcuccgcgaauaacuguacuuuugaauaugugucacaaccuuuccugauggaccuggaaggcaagcaggguaauuuuaaaaaccucagagaguucgucuuuaagaacauugauggguacuucaaaaucuacaguaagcacaccccaauaaauuuaguuagggaccugccccagggauuuagcgcucuugagccuuugguggaucugccaaucggcauuaacaucacacgguuccagacucuacucgcccugcaucgcucuuaucuuaccccgggcgacuccucaagcggguggacagcaggagccgcugcauacuauguagguuaccugcaacccagaaccuuuuugcucaaauauaaugaaaacggcacgauuacugaugccguggacugcgcucuggauccuuuaagugagacaaaguguacccugaagucuuucacugucgaaaaagggaucuaccagacauccaauuuuagggugcagccaaccgagagcauaguucgguuccccaacauuacgaaucucugcccuuuuggagagguguucaacgccacccgcuucgcgucggucuaugcauggaaucgaaagagaaucucuaacuguguggccgacuacuccguacuuuacaauucagcuaguuuuagcacauucaaaugcuauggcguuuccccaacuaagcugaacgacuuguguuuuaccaauguguacgccgauucuuucgucauuaggggugacgaagugcggcagaucgcacccgggcaaacaggaaaaaucgcugauuauaacuacaagcuaccggacgauuuuacuggcugcgucauugccuggaauagcaacaaccuggacucaaaagugggcgggaauuauaacuaccucuaucgucuguuccgcaagaguaaucuuaagccuuuugagagagauauauccaccgaaaucuaccaggcgggaagcacacccuguaacgguguugagggcuucaauugcuacuuuccacugcagucuuauggguuccaaccuaccaacggagugggcuaccagcccuauaggguagucguguugucauuugaacuccugcacgccccagcaacuguuugcggucccaaaaagaguacgaauuuagugaaaaacaagugugucaauuucaacuuuaaugggcugacaggcaccggagugcuaacugagagcaacaaaaaguuccucccuuuccagcaguuuggccgggacauugcugauaccacagacgccguacgagauccacaaacccuggagauccuugacauaacuccgugcuccuucgggggagugucuguuauuacacccgguacgaauaccucgaaccaggucgcuguguuguaccaggacgugaauuguacugaagucccuguugccauccacgcagaucagcugacaccaaccuggcgcguguauagcacaggcuccaacguguuucaaacuagagccgggugccucaucggagcugagcauguaaacaauucauacgaaugugacauucccaucggcgcggguauuugcgcaaguuaucagacccagacgaacucuccu

SEQ ID NO: 146 - RNA, 3822 nt, Artificial Sequence
  SARS-CoV-2/Wuhan/WIV05/2019__EPI_ISL_402128 spike protein CDS gc mod (1-1273)(K986P_V987P)
auguucguguuucuggugcugcugccccugguguccagccagugugugaaccugaccaccagaacacagcugccuccagccuacaccaacagcuucaccagaggcguguacuaccccgacaagguguucagauccagcgugcugcacucuacccaggaccuguuccugccuuucuucagcaacgugaccugguuccacgccauccacguguccggcaccaauggcaccaagagauucgacaaccccgugcugcccuucaacgacgggguguacuuugccagcaccgagaaguccaacaucaucagaggcuggaucuucggcaccacacuggacagcaagacccagagccugcugaucgugaacaacgccaccaacguggucaucaaagugugcgaguuccaguucugcaacgaccccuuccugggcgucuacuaccacaagaacaacaagagcuggauggaaagcgaguuccggguguacagcagcgccaacaacugcaccuucgaguacgugucccagccuuuccugauggaccuggaaggcaagcagggcaacuucaagaaccugcgcgaguucguguucaagaacaucgacggcuacuucaaaaucuacagcaagcacaccccuaucaaccucgugcgggaucugccucagggcuucucugcucuggaaccccugguggaucugcccaucggcaucaacaucacccgguuucagacacugcuggcccugcacagaagcuaccugacaccuggcgauagcagcagcggauggacagcuggugccgccgcuuacuaugugggcuaccugcagccuagaaccuuccugcugaaguacaacgagaacggcaccaucaccgacgccguggauugugcucuggauccucugagcgagacaaagugcacccugaaguccuucaccguggaaaagggcaucuaccagaccagcaacuuccgggugcagcccaccgaauccaucgugcgguuccccaauaucaccaaucugugccccuucggcgagguguucaaugccaccagauucgccucuguguacgccuggaaccggaagcggaucagcaauugcguggccgacuacuccgugcuguacaacuccgccagcuucagcaccuucaagugcuacggcguguccccuaccaagcugaacgaccugugcuucacaaacguguacgccgacagcuucgugauccggggagaugaagugcggcagauugccccuggacagacaggcaagaucgccgacuacaacuacaagcugcccgacgacuucaccggcugugugauugccuggaacagcaacaaccuggacuccaaagucggcggcaacuacaauuaccuguaccggcuguuccggaaguccaaucugaagcccuucgagcgggacaucagcaccgaaaucuaucaggccggcagcaccccuugcaacggcguggaaggcuucaacugcuacuucccacugcaguccuacggcuuucagcccacaaauggcgugggcuaucagcccuacagagugguggugcugagcuucgaacugcugcaugcuccugccacagugugcggcccuaagaaaagcaccaaucucgugaagaacaaaugcgugaacuucaacuucaacggccugaccggcaccggcgugcugacagagagcaacaagaaguuccugccauuccagcaguuuggccgggauaucgccgauaccacagacgccguuagagauccccagacacuggaaauccuggacaucaccccaugcagcuucggcggagugucugugaucaccccuggcaccaacaccagcaaucagguggcagugcuguaccaggacgugaacuguaccgaagugcccguggccauucacgccgaucagcugacaccuacauggcggguguacuccaccggcagcaauguguuucagaccagagccggcugucugaucggagccgagcacgugaacaauagcuacgagugcgacauccccaucggcgcuggcaucugugccagcuaccagacacagacaaacagccccagacgggcuagaagcguggccagccagagcaucauugccuacacaaugucucugggcgccgagaacagcguggccuacuccaacaacucuaucgcuauccccaccaacuucaccaucagcgugaccaccgagauccugccuguguccaugaccaagaccagcguggacugcaccauguacaucugcggcgauuccaccgagugcuccaaccugcugcugcaguacggcagcuucugcacccagcugaauagagcccugacagggaucgccguggaacaggacaagaacacccaagagguguucgcccaagugaagcaaaucuacaagaccccuccuaucaaggacuucggcggcuucaauuucagccagauucugcccgauccuagcaagcccagcaagcggagcuucaucgaggaccugcuguucaacaaagugacacuggccgacgccggcuucaucaagcaguauggcgauugucugggcgacauugccgccagggaucugauuugcgcccagaaguuuaacggacugacagugcugccuccucugcugaccgaugagaugaucgcccaguacacaucugcccugcuggccggcacaaucacaagcggcuggacauuuggagcuggcgccgcucugcagauccccuuugcuaugcagauggccuaccgguucaacggcaucggagugacccagaaugugcuguacgagaaccagaagcugaucgccaaccaguucaacagcgccaucggcaagauccaggacagccugagcagcacagcaagcgcccugggaaagcugcaggacguggucaaccagaaugcccaggcacugaacacccuggucaagcagcuguccuccaacuucggcgccaucagcucugugcugaacgauauccugagcagacuggacccuccugaggccgaggugcagaucgacagacugaucacaggcagacugcagagccuccagacauacgugacccagcagcugaucagagccgccgagauuagagccucugccaaucuggccgccaccaagaugucugagugugugcugggccagagcaagagaguggacuuuugcggcaagggcuaccaccugaugagcuucccucagucugccccucacggcgugguguuucugcacgugacauaugugcccgcucaagagaagaauuucaccaccgcuccagccaucugccacgacggcaaagcccacuuuccuagagaaggcguguucguguccaacggcacccauugguucgugacacagcggaacuucuacgagccccagaucaucaccaccgacaacaccuucgugucuggcaacugcgacguugugaucggcauugugaacaauaccguguacgacccucugcagcccgagcuggacagcuucaaagaggaacuggacaaguacuuuaagaaccacacaagccccgacguggaccugggcgauaucagcggaaucaaugccagcgucgugaacauccagaaagagaucgaccggcugaacgagguggccaagaaucugaacgagagccugaucgaccugcaagaacuggggaaguacgagcaguacaucaaguggcccugguacaucuggcugggcuuuaucgccggacugauugccaucgugauggucacaaucaugcuguguugcaugaccagcugcuguagcugccugaagggcuguuguagcuguggcagcugcugcaaguucgacgaggacgauucugagcccgugcugaagggcgugaaacugcacuacaccuga

SEQ ID NO: 147 - RNA, 2046 nt, Artificial Sequence
  SARS-CoV-2/Wuhan/WIV05/2019__EPI_ISL_402128 spike protein CDS gc mod (1-681)
auguucguguuucuggugcugcugccccugguguccagccagugugugaaccugaccaccagaacacagcugccuccagccuacaccaacagcuucaccagaggcguguacuaccccgacaagguguucagauccagcgugcugcacucuacccaggaccuguuccugccuuucuucagcaacgugaccugguuccacgccauccacguguccggcaccaauggcaccaagagauucgacaaccccgugcugcccuucaacgacgggguguacuuugccagcaccgagaaguccaacaucaucagaggcuggaucuucggcaccacacuggacagcaagacccagagccugcugaucgugaacaacgccaccaacguggucaucaaagugugcgaguuccaguucugcaacgaccccuuccugggcgucuacuaccacaagaacaacaagagcuggauggaaagcgaguuccggguguacagcagcgccaacaacugcaccuucgaguacgugucccagccuuuccugauggaccuggaaggcaagcagggcaacuucaagaaccugcgcgaguucguguucaagaacaucgacggcuacuucaaaaucuacagcaagcacaccccuaucaaccucgugcgggaucugccucagggcuucucugcucuggaaccccugguggaucugcccaucggcaucaacaucacccgguuucagacacugcuggcccugcacagaagcuaccugacaccuggcgauagcagcagcggauggacagcuggugccgccgcuuacuaugugggcuaccugcagccuagaaccuuccugcugaaguacaacgagaacggcaccaucaccgacgccguggauugugcucuggauccucugagcgagacaaagugcacccugaaguccuucaccguggaaaagggcaucuaccagaccagcaacuuccgggugcagcccaccgaauccaucgugcgguuccccaauaucaccaaucugugccccuucggcgagguguucaaugccaccagauucgccucuguguacgccuggaaccggaagcggaucagcaauugcguggccgacuacuccgugcuguacaacuccgccagcuucagcaccuucaagugcuacggcguguccccuaccaagcugaacgaccugugcuucacaaacguguacgccgacagcuucgugauccggggagaugaagugcggcagauugccccuggacagacaggcaagaucgccgacuacaacuacaagcugcccgacgacuucaccggcugugugauugccuggaacagcaacaaccuggacuccaaagucggcggcaacuacaauuaccuguaccggcuguuccggaaguccaaucugaagcccuucgagcgggacaucagcaccgaaaucuaucaggccggcagcaccccuugcaacggcguggaaggcuucaacugcuacuucccacugcaguccuacggcuuucagcccacaaauggcgugggcuaucagcccuacagagugguggugcugagcuucgaacugcugcaugcuccugccacagugugcggcccuaagaaaagcaccaaucucgugaagaacaaaugcgugaacuucaacuucaacggccugaccggcaccggcgugcugacagagagcaacaagaaguuccugccauuccagcaguuuggccgggauaucgccgauaccacagacgccguuagagauccccagacacuggaaauccuggacaucaccccaugcagcuucggcggagugucugugaucaccccuggcaccaacaccagcaaucagguggcagugcuguaccaggacgugaacuguaccgaagugcccguggccauucacgccgaucagcugacaccuacauggcggguguacuccaccggcagcaauguguuucagaccagagccggcugucugaucggagccgagcacgugaacaauagcuacgagugcgacauccccaucggcgcuggcaucugugccagcuaccagacacagacaaacagccccuga

SEQ ID NO: 148 - RNA, 4094 nt, Artificial Sequence
  SARS-CoV-2/Wuhan/WIV05/2019__EPI_ISL_402128 spike protein mRNA gc (1-1273) R9488, R9492, R10161
aggagagucccgcagucggcguccagcggcucugcuuguucgugugugugucguugcaggccuuauucaagcuuaccauguucguguuccugguccuccugccccuggugagcucccagugcgugaaccucaccacccgcacgcagcugccgcccgccuacaccaacagcuucacccggggcgucuacuaccccgacaagguguuccgcuccagcgugcugcacuccacccaggaccucuuccugcccuucuucagcaacgucacgugguuccacgccauccacguguccgggaccaacggcaccaagcgguucgacaacccggugcugcccuucaacgacggggucuacuucgcgagcaccgagaaguccaacaucauccgcggcuggaucuucgggacgacccucgacagcaagacccagucccugcugaucgugaacaacgccaccaacguggucaucaaggugugcgaguuccaguucugcaacgaccccuuccucggcguguacuaccacaagaacaacaagagcuggauggaguccgaguuccgggucuacagcuccgccaacaacugcacguucgaguacgugagccagcccuuccugauggaccuggagggcaagcaggggaacuucaagaaccuccgcgaguucguguucaagaacaucgacggcuacuucaagaucuacuccaagcacaccccgaucaaccugguccgggaccugccccagggguucagcgcccucgagccccugguggaccugcccaucggcaucaacaucacccgcuuccagacccuccuggcccugcaccgguccuaccucacgccgggggacagcagcuccggcuggaccgcgggcgccgccgccuacuacgugggguaccugcagccccgcaccuuccugcucaaguacaacgagaacggcaccaucacggacgcggucgacugcgcccuggacccccugagcgagaccaagugcacccucaaguccuucaccguggagaaggggaucuaccagacgagcaacuuccgggugcagcccaccgaguccaucguccgcuucccgaacaucaccaaccugugccccuucggcgagguguucaacgccacccgguucgccagcgucuacgccuggaaccgcaagcggaucuccaacugcguggcggacuacagcgugcuguacaacuccgccagcuucuccacguucaagugcuacggcgucagccccaccaagcucaacgaccugugcuucaccaacguguacgccgacuccuucgugauccgcggggacgagguccggcagaucgcccccggccagaccgggaagaucgccgacuacaacuacaagcugccggacgacuucacgggcugcgugaucgcguggaacagcaacaaccucgacuccaaggucgggggcaacuacaacuaccuguaccgccuguuccgcaagagcaaccucaagcccuucgagcgggacaucuccaccgagaucuaccaggccggcagcacccccugcaacgggguggagggcuucaacugcuacuucccccugcaguccuacggguuccagccgaccaacggcgugggguaccagcccuaccggguggucgugcugagcuucgagcuccugcacgcccccgccacggugugcggccccaagaaguccaccaaccuggucaagaacaagugcgugaacuucaacuucaacggccucaccgggaccggcgugcugaccgagagcaacaagaaguuccugccguuccagcaguucgggcgcgacaucgccgacacgaccgacgcgguccgcgacccccagacccuggagauccucgacaucacccccugcagcuucggcgggguguccgugaucacgccgggcaccaacaccagcaaccaggucgccgugcuguaccaggacgugaacugcaccgagguccccguggccauccacgccgaccagcugacgcccaccuggcggguguacuccaccggcagcaacgucuuccagacccgcgccgggugccucaucggcgcggagcacgugaacaacuccuacgagugcgacauccccaucggggccggcaucugcgccagcuaccagacgcagaccaacuccccgcggcgcgcccggagcguggcgucccagagcaucaucgccuacaccaugucccugggcgccgagaacagcgucgccuacuccaacaacagcaucgccauccccaccaacuucacgaucuccgugaccaccgagauccugcccgugagcaugaccaagacgagcgucgacugcaccauguacaucugcggggacuccaccgagugcagcaaccuccugcugcaguacggcuccuucugcacccagcucaaccgcgcgcugacggggaucgccguggagcaggacaagaacacccaggagguguucgcccaggucaagcagaucuacaagacgcccccgaucaaggacuucggcggguucaacuucagccagauccugcccgaccccuccaagcccagcaagcgguccuucaucgaggaccuccuguucaacaaggugacccuggccgacgccggcuucaucaagcaguacggcgacugccucggggacaucgcggcccgcgaccugaucugcgcccagaaguucaacggccugaccgugcucccgccccugcugaccgacgagaugaucgcccaguacaccagcgcccuccuggcggggaccaucacguccggcuggaccuucggggccggcgccgcccugcagauccccuucgcgaugcagauggccuaccgguucaacggcaucggggucacccagaacgugcucuacgagaaccagaagcugaucgccaaccaguucaacagcgccaucggcaagauccaggacucccugagcuccaccgccagcgcgcucgggaagcugcaggacguggucaaccagaacgcccaggcccugaacacgcucgugaagcagcuguccagcaacuucggcgccaucuccagcgugcugaacgacauccucucccgccuggacaaggucgaggccgaggugcagaucgaccggcugaucaccgggcgccuccagagccugcagaccuacgugacccagcagcugauccgggcggccgagauccgcgccagcgccaaccucgccgcgaccaagauguccgagugcguccugggccagagcaagcggguggacuucugcggcaagggguaccaccugauguccuucccccagagcgccccgcacggcguggucuuccuccacgugacguacguccccgcccaggagaagaacuucaccaccgcccccgcgaucugccacgacgggaaggcccacuucccccgcgagggcguguucguguccaacgggacccacugguucgucacgcagcggaacuucuacgagccgcagaucaucaccaccgacaacaccuucgugagcggcaacugcgacguggucaucggcaucgugaacaacacgguguacgacccccugcagcccgagcuggacuccuucaaggaggagcucgacaaguacuucaagaaccacaccagccccgacgucgaccugggggacaucuccggcaucaacgccagcguggugaacauccagaaggagaucgaccgccugaacgaggucgccaagaaccucaacgagucccugaucgaccugcaggagcucgggaaguacgagcaguacaucaaguggccgugguacaucuggcugggcuucaucgccggccugaucgcgaucgugauggugaccaucaugcucugcugcaugaccagcugcugcuccugccugaaggggugcugcagcugcggcuccugcugcaaguucgacgaggacgacagcgagcccguccugaagggggugaagcuccacuacacgugaggacuagucccuguucccagagcccacuuuuuuuucuuuuuuugaaauaaaauagccugucuuucagaucucaaaggcucuuuucagagccaccaaaaaaaaaaaaaaaaaaaaaaaaaaaaaaaaaaaaaaaaaaaaaaaaaaaaaaaaaaaaaaaaaaaaaaaaaaaaaaaaaaaaaaaaaaaaaaaaaaaaa

SEQ ID NO: 149 - RNA, 4094 nt, Artificial Sequence
  SARS-CoV-2/Wuhan/WIV05/2019__EPI_ISL_402128 spike protein mRNA gc (1-1273)(K986P_V987P) R9487, R9491, R9709, R10159, R10160
aggagagucccgcagucggcguccagcggcucugcuuguucgugugugugucguugcaggccuuauucaagcuuaccauguucguguuccugguccuccugccccuggugagcucccagugcgugaaccucaccacccgcacgcagcugccgcccgccuacaccaacagcuucacccggggcgucuacuaccccgacaagguguuccgcuccagcgugcugcacuccacccaggaccucuuccugcccuucuucagcaacgucacgugguuccacgccauccacguguccgggaccaacggcaccaagcgguucgacaacccggugcugcccuucaacgacggggucuacuucgcgagcaccgagaaguccaacaucauccgcggcuggaucuucgggacgacccucgacagcaagacccagucccugcugaucgugaacaacgccaccaacguggucaucaaggugugcgaguuccaguucugcaacgaccccuuccucggcguguacuaccacaagaacaacaagagcuggauggaguccgaguuccgggucuacagcuccgccaacaacugcacguucgaguacgugagccagcccuuccugauggaccuggagggcaagcaggggaacuucaagaaccuccgcgaguucguguucaagaacaucgacggcuacuucaagaucuacuccaagcacaccccgaucaaccugguccgggaccugccccagggguucagcgcccucgagccccugguggaccugcccaucggcaucaacaucacccgcuuccagacccuccuggcccugcaccgguccuaccucacgccgggggacagcagcuccggcuggaccgcgggcgccgccgccuacuacgugggguaccugcagccccgcaccuuccugcucaaguacaacgagaacggcaccaucacggacgcggucgacugcgcccuggacccccugagcgagaccaagugcacccucaaguccuucaccguggagaaggggaucuaccagacgagcaacuuccgggugcagcccaccgaguccaucguccgcuucccgaacaucaccaaccugugccccuucggcgagguguucaacgccacccgguucgccagcgucuacgccuggaaccgcaagcggaucuccaacugcguggcggacuacagcgugcuguacaacuccgccagcuucuccacguucaagugcuacggcgucagccccaccaagcucaacgaccugugcuucaccaacguguacgccgacuccuucgugauccgcggggacgagguccggcagaucgcccccggccagaccgggaagaucgccgacuacaacuacaagcugccggacgacuucacgggcugcgugaucgcguggaacagcaacaaccucgacuccaaggucgggggcaacuacaacuaccuguaccgccuguuccgcaagagcaaccucaagcccuucgagcgggacaucuccaccgagaucuaccaggccggcagcacccccugcaacgggguggagggcuucaacugcuacuucccccugcaguccuacggguuccagccgaccaacggcgugggguaccagcccuaccggguggucgugcugagcuucgagcuccugcacgcccccgccacggugugcggccccaagaaguccaccaaccuggucaagaacaagugcgugaacuucaacuucaacggccucaccgggaccggcgugcugaccgagagcaacaagaaguuccugccguuccagcaguucgggcgcgacaucgccgacacgaccgacgcgguccgcgacccccagacccuggagauccucgacaucacccccugcagcuucggcgggguguccgugaucacgccgggcaccaacaccagcaaccaggucgccgugcuguaccaggacgugaacugcaccgagguccccguggccauccacgccgaccagcugacgcccaccuggcggguguacuccaccggcagcaacgucuuccagacccgcgccgggugccucaucggcgcggagcacgugaacaacuccuacgagugcgacauccccaucggggccggcaucugcgccagcuaccagacgcagaccaacuccccgcggcgcgcccggagcguggcgucccagagcaucaucgccuacaccaugucccugggcgccgagaacagcgucgccuacuccaacaacagcaucgccauccccaccaacuucacgaucuccgugaccaccgagauccugcccgugagcaugaccaagacgagcgucgacugcaccauguacaucugcggggacuccaccgagugcagcaaccuccugcugcaguacggcuccuucugcacccagcucaaccgcgcgcugacggggaucgccguggagcaggacaagaacacccaggagguguucgcccaggucaagcagaucuacaagacgcccccgaucaaggacuucggcggguucaacuucagccagauccugcccgaccccuccaagcccagcaagcgguccuucaucgaggaccuccuguucaacaaggugacccuggccgacgccggcuucaucaagcaguacggcgacugccucggggacaucgcggcccgcgaccugaucugcgcccagaaguucaacggccugaccgugcucccgccccugcugaccgacgagaugaucgcccaguacaccagcgcccuccuggcggggaccaucacguccggcuggaccuucggggccggcgccgcccugcagauccccuucgcgaugcagauggccuaccgguucaacggcaucggggucacccagaacgugcucuacgagaaccagaagcugaucgccaaccaguucaacagcgccaucggcaagauccaggacucccugagcuccaccgccagcgcgcucgggaagcugcaggacguggucaaccagaacgcccaggcccugaacacgcucgugaagcagcuguccagcaacuucggcgccaucuccagcgugcugaacgacauccucucccgccuggacccgcccgaggccgaggugcagaucgaccggcugaucaccgggcgccuccagagccugcagaccuacgugacccagcagcugauccgggcggccgagauccgcgccagcgccaaccucgccgcgaccaagauguccgagugcguccugggccagagcaagcggguggacuucugcggcaagggguaccaccugauguccuucccccagagcgccccgcacggcguggucuuccuccacgugacguacguccccgcccaggagaagaacuucaccaccgcccccgcgaucugccacgacgggaaggcccacuucccccgcgagggcguguucguguccaacgggacccacugguucgucacgcagcggaacuucuacgagccgcagaucaucaccaccgacaacaccuucgugagcggcaacugcgacguggucaucggcaucgugaacaacacgguguacgacccccugcagcccgagcuggacuccuucaaggaggagcucgacaaguacuucaagaaccacaccagccccgacgucgaccugggggacaucuccggcaucaacgccagcguggugaacauccagaaggagaucgaccgccugaacgaggucgccaagaaccucaacgagucccugaucgaccugcaggagcucgggaaguacgagcaguacaucaaguggccgugguacaucuggcugggcuucaucgccggccugaucgcgaucgugauggugaccaucaugcucugcugcaugaccagcugcugcuccugccugaaggggugcugcagcugcggcuccugcugcaaguucgacgaggacgacagcgagcccguccugaagggggugaagcuccacuacacgugaggacuagucccuguucccagagcccacuuuuuuuucuuuuuuugaaauaaaauagccugucuuucagaucucaaaggcucuuuucagagccaccaaaaaaaaaaaaaaaaaaaaaaaaaaaaaaaaaaaaaaaaaaaaaaaaaaaaaaaaaaaaaaaaaaaaaaaaaaaaaaaaaaaaaaaaaaaaaaaaaaaaa

SEQ ID NO: 150 - RNA, 4094 nt, Artificial Sequence
  SARS-CoV-2/Wuhan/WIV05/2019__EPI_ISL_402128 spike protein mRNA human (1-1273)(K986P_V987P) R9486, R9490
aggagagucccgcagucggcguccagcggcucugcuuguucgugugugugucguugcaggccuuauucaagcuuaccauguucguguuucugguccuccuuccccugguuagcucccagugcgugaacuugaccacaagaacucaauuaccuccagccuacacuaauucuuucaccaggggcguauauuacccggacaagguguuucggucaaguguccugcacagcacacaggaucuauuccuccccuuuuucuccaacgugacuugguuucaugcuauccacguuucugggaccaauggaacaaaacgcuucgacaacccugugcugccauuuaaugauggugucuauuucgcaucgaccgagaagucaaacauuauacgaggcuggaucuuugggacuacacuugacagcaaaacccagagucuguugauugugaauaacgccacgaauguaguuaucaaggugugugaguuccaguuuugcaacgaucccuuccucggagucuacuaucauaaaaauaacaaguccuggauggagucugaguuccguguguacagcuccgcgaauaacuguacuuuugaauaugugucacaaccuuuccugauggaccuggaaggcaagcaggguaauuuuaaaaaccucagagaguucgucuuuaagaacauugauggguacuucaaaaucuacaguaagcacaccccaauaaauuuaguuagggaccugccccagggauuuagcgcucuugagccuuugguggaucugccaaucggcauuaacaucacacgguuccagacucuacucgcccugcaucgcucuuaucuuaccccgggcgacuccucaagcggguggacagcaggagccgcugcauacuauguagguuaccugcaacccagaaccuuuuugcucaaauauaaugaaaacggcacgauuacugaugccguggacugcgcucuggauccuuuaagugagacaaaguguacccugaagucuuucacugucgaaaaagggaucuaccagacauccaauuuuagggugcagccaaccgagagcauaguucgguuccccaacauuacgaaucucugcccuuuuggagagguguucaacgccacccgcuucgcgucggucuaugcauggaaucgaaagagaaucucuaacuguguggccgacuacuccguacuuuacaauucagcuaguuuuagcacauucaaaugcuauggcguuuccccaacuaagcugaacgacuuguguuuuaccaauguguacgccgauucuuucgucauuaggggugacgaagugcggcagaucgcacccgggcaaacaggaaaaaucgcugauuauaacuacaagcuaccggacgauuuuacuggcugcgucauugccuggaauagcaacaaccuggacucaaaagugggcgggaauuauaacuaccucuaucgucuguuccgcaagaguaaucuuaagccuuuugagagagauauauccaccgaaaucuaccaggcgggaagcacacccuguaacgguguugagggcuucaauugcuacuuuccacugcagucuuauggguuccaaccuaccaacggagugggcuaccagcccuauaggguagucguguugucauuugaacuccugcacgccccagcaacuguuugcggucccaaaaagaguacgaauuuagugaaaaacaagugugucaauuucaacuuuaaugggcugacaggcaccggagugcuaacugagagcaacaaaaaguuccucccuuuccagcaguuuggccgggacauugcugauaccacagacgccguacgagauccacaaacccuggagauccuugacauaacuccgugcuccuucgggggagugucuguuauuacacccgguacgaauaccucgaaccaggucgcuguguuguaccaggacgugaauuguacugaagucccuguugccauccacgcagaucagcugacaccaaccuggcgcguguauagcacaggcuccaacguguuucaaacuagagccgggugccucaucggagcugagcauguaaacaauucauacgaaugugacauucccaucggcgcggguauuugcgcaaguuaucagacccagacgaacucuccuaggcgggcccgcagcgucgcuucccagucaauaaucgccuacaccaugagccugggggcagaaaauucuguggccuacuccaacaauaguauugcuaucccaacaaacuucacuaucagcguuaccacagaaauucuucccgugucuaugacuaagaccuccgucgauuguacgauguauauaugcggcgacucaacagaguguaguaaucuguugcuccaauacggcagcuuuugcacccagcugaacagagccuuaacuggaaucgcaguggagcaggauaaaaauacacaggaaguuuucgcgcaagugaagcagauuuauaaaaccccgccuaucaaggacuuugggggauucaacuuuucgcagauucugccagaucccuccaaaccuucuaagaggagcuucaucgaggaccuacucuuuaauaagguaacucuggcugaugccgguuucauaaaacaauacggcgacugucuuggggauaucgcagcccgugacuugauuugcgcucagaaguucaacggacugaccguccugcccccacucuuaacagaugaaaugaucgcccaguauacgucagcacugcuugcuggcaccauuacgagugguuggacauuuggggccggcgcggccuugcagaucccuuucgcuaugcaaauggcauaccgguuuaauggaauaggcgugacccagaacgugcucuaugagaaucagaaacugauugccaaccaguucaacuccgcuaucgggaagauucaagacucucuaagcuccacagccucagcacugggaaaacuccaggacgucguuaaucagaacgcgcaggcccugaauacucuugugaagcaauugagcaguaacuuuggcgcuaucucuuccguacugaaugauauauuaagccgacucgacccgcccgaagccgagguccagaucgauagacugauuaccgguaggcuucagucgcugcaaacguacgugacacagcaguugauccgcgcagcugagauucgggccucagcaaaccucgccgcuaccaaaaugucugaaugcguucuggggcagaguaagagaguggacuucuguggaaaaggcuaccaccuaauguccuuuccccaaagcgcgccacauggugucguguuccugcacguuacuuaugugccggcccaggagaagaauuuuaccacagcuccugcaaucugccacgauggcaaagcccauuuccccagggaaggggucuuuguaucuaacggaacucacugguucgugacccagcgcaauuuuuacgagccacagauaauuacaacggacaacaccuucguuagcggcaauugugauguggucaucgggaucgugaacaauacuguauaugacccccuccaaccugagcuggauuccuucaaggaggaacuugacaaauacuuuaagaaccauacaucaccagauguggacuugggagauauuaguggcaucaaugccagcgucguuaacauucagaaggaaauagaccgacugaaugagguggcuaaaaacuuaaacgaaucucucaucgaccugcaggagcuugguaaguaugagcaguacauuaaauggcccugguauaucuggcugggguucauugcaggacuaaucgccauagugauggucaccaucaugcucugcuguaugacuuccugcuguucaugccugaagggcuguugcaguugugguagcugcugcaaauuugaugaagacgauuccgagccuguguugaagggcguuaagcugcacuacacaugaggacuagucccuguucccagagcccacuuuuuuuucuuuuuuugaaauaaaauagccugucuuucagaucucaaaggcucuuuucagagccaccaaaaaaaaaaaaaaaaaaaaaaaaaaaaaaaaaaaaaaaaaaaaaaaaaaaaaaaaaaaaaaaaaaaaaaaaaaaaaaaaaaaaaaaaaaaaaaaaaaaaa

SEQ ID NO: 151 - RNA, 4094 nt, Artificial Sequence
  SARS-CoV-2/Wuhan/WIV05/2019__EPI_ISL_402128 spike protein mRNA gc mod (1-1273)(K986P_V987P) R10162
aggagagucccgcagucggcguccagcggcucugcuuguucgugugugugucguugcaggccuuauucaagcuuaccauguucguguuucuggugcugcugccccugguguccagccagugugugaaccugaccaccagaacacagcugccuccagccuacaccaacagcuucaccagaggcguguacuaccccgacaagguguucagauccagcgugcugcacucuacccaggaccuguuccugccuuucuucagcaacgugaccugguuccacgccauccacguguccggcaccaauggcaccaagagauucgacaaccccgugcugcccuucaacgacgggguguacuuugccagcaccgagaaguccaacaucaucagaggcuggaucuucggcaccacacuggacagcaagacccagagccugcugaucgugaacaacgccaccaacguggucaucaaagugugcgaguuccaguucugcaacgaccccuuccugggcgucuacuaccacaagaacaacaagagcuggauggaaagcgaguuccggguguacagcagcgccaacaacugcaccuucgaguacgugucccagccuuuccugauggaccuggaaggcaagcagggcaacuucaagaaccugcgcgaguucguguucaagaacaucgacggcuacuucaaaaucuacagcaagcacaccccuaucaaccucgugcgggaucugccucagggcuucucugcucuggaaccccugguggaucugcccaucggcaucaacaucacccgguuucagacacugcuggcccugcacagaagcuaccugacaccuggcgauagcagcagcggauggacagcuggugccgccgcuuacuaugugggcuaccugcagccuagaaccuuccugcugaaguacaacgagaacggcaccaucaccgacgccguggauugugcucuggauccucugagcgagacaaagugcacccugaaguccuucaccguggaaaagggcaucuaccagaccagcaacuuccgggugcagcccaccgaauccaucgugcgguuccccaauaucaccaaucugugccccuucggcgagguguucaaugccaccagauucgccucuguguacgccuggaaccggaagcggaucagcaauugcguggccgacuacuccgugcuguacaacuccgccagcuucagcaccuucaagugcuacggcguguccccuaccaagcugaacgaccugugcuucacaaacguguacgccgacagcuucgugauccggggagaugaagugcggcagauugccccuggacagacaggcaagaucgccgacuacaacuacaagcugcccgacgacuucaccggcugugugauugccuggaacagcaacaaccuggacuccaaagucggcggcaacuacaauuaccuguaccggcuguuccggaaguccaaucugaagcccuucgagcgggacaucagcaccgaaaucuaucaggccggcagcaccccuugcaacggcguggaaggcuucaacugcuacuucccacugcaguccuacggcuuucagcccacaaauggcgugggcuaucagcccuacagagugguggugcugagcuucgaacugcugcaugcuccugccacagugugcggcccuaagaaaagcaccaaucucgugaagaacaaaugcgugaacuucaacuucaacggccugaccggcaccggcgugcugacagagagcaacaagaaguuccugccauuccagcaguuuggccgggauaucgccgauaccacagacgccguuagagauccccagacacuggaaauccuggacaucaccccaugcagcuucggcggagugucugugaucaccccuggcaccaacaccagcaaucagguggcagugcuguaccaggacgugaacuguaccgaagugcccguggccauucacgccgaucagcugacaccuacauggcggguguacuccaccggcagcaauguguuucagaccagagccggcugucugaucggagccgagcacgugaacaauagcuacgagugcgacauccccaucggcgcuggcaucugugccagcuaccagacacagacaaacagccccagacgggcuagaagcguggccagccagagcaucauugccuacacaaugucucugggcgccgagaacagcguggccuacuccaacaacucuaucgcuauccccaccaacuucaccaucagcgugaccaccgagauccugccuguguccaugaccaagaccagcguggacugcaccauguacaucugcggcgauuccaccgagugcuccaaccugcugcugcaguacggcagcuucugcacccagcugaauagagcccugacagggaucgccguggaacaggacaagaacacccaagagguguucgcccaagugaagcaaaucuacaagaccccuccuaucaaggacuucggcggcuucaauuucagccagauucugcccgauccuagcaagcccagcaagcggagcuucaucgaggaccugcuguucaacaaagugacacuggccgacgccggcuucaucaagcaguauggcgauugucugggcgacauugccgccagggaucugauuugcgcccagaaguuuaacggacugacagugcugccuccucugcugaccgaugagaugaucgcccaguacacaucugcccugcuggccggcacaaucacaagcggcuggacauuuggagcuggcgccgcucugcagauccccuuugcuaugcagauggccuaccgguucaacggcaucggagugacccagaaugugcuguacgagaaccagaagcugaucgccaaccaguucaacagcgccaucggcaagauccaggacagccugagcagcacagcaagcgcccugggaaagcugcaggacguggucaaccagaaugcccaggcacugaacacccuggucaagcagcuguccuccaacuucggcgccaucagcucugugcugaacgauauccugagcagacuggacccuccugaggccgaggugcagaucgacagacugaucacaggcagacugcagagccuccagacauacgugacccagcagcugaucagagccgccgagauuagagccucugccaaucuggccgccaccaagaugucugagugugugcugggccagagcaagagaguggacuuuugcggcaagggcuaccaccugaugagcuucccucagucugccccucacggcgugguguuucugcacgugacauaugugcccgcucaagagaagaauuucaccaccgcuccagccaucugccacgacggcaaagcccacuuuccuagagaaggcguguucguguccaacggcacccauugguucgugacacagcggaacuucuacgagccccagaucaucaccaccgacaacaccuucgugucuggcaacugcgacguugugaucggcauugugaacaauaccguguacgacccucugcagcccgagcuggacagcuucaaagaggaacuggacaaguacuuuaagaaccacacaagccccgacguggaccugggcgauaucagcggaaucaaugccagcgucgugaacauccagaaagagaucgaccggcugaacgagguggccaagaaucugaacgagagccugaucgaccugcaagaacuggggaaguacgagcaguacaucaaguggcccugguacaucuggcugggcuuuaucgccggacugauugccaucgugauggucacaaucaugcuguguugcaugaccagcugcuguagcugccugaagggcuguuguagcuguggcagcugcugcaaguucgacgaggacgauucugagcccgugcugaagggcgugaaacugcacuacaccugaggacuagucccuguucccagagcccacuuuuuuuucuuuuuuugaaauaaaauagccugucuuucagaucucaaaggcucuuuucagagccaccaaaaaaaaaaaaaaaaaaaaaaaaaaaaaaaaaaaaaaaaaaaaaaaaaaaaaaaaaaaaaaaaaaaaaaaaaaaaaaaaaaaaaaaaaaaaaaaaaaaaa

SEQ ID NO: 152 - RNA, 2318 nt, Artificial Sequence
  SARS-CoV-2/Wuhan/WIV05/2019__EPI_ISL_402128 spike protein mRNA gc (1-681) R9489, R9493
aggagagucccgcagucggcguccagcggcucugcuuguucgugugugugucguugcaggccuuauucaagcuuaccauguucguguuccugguccuccugccccuggugagcucccagugcgugaaccucaccacccgcacgcagcugccgcccgccuacaccaacagcuucacccggggcgucuacuaccccgacaagguguuccgcuccagcgugcugcacuccacccaggaccucuuccugcccuucuucagcaacgucacgugguuccacgccauccacguguccgggaccaacggcaccaagcgguucgacaacccggugcugcccuucaacgacggggucuacuucgcgagcaccgagaaguccaacaucauccgcggcuggaucuucgggacgacccucgacagcaagacccagucccugcugaucgugaacaacgccaccaacguggucaucaaggugugcgaguuccaguucugcaacgaccccuuccucggcguguacuaccacaagaacaacaagagcuggauggaguccgaguuccgggucuacagcuccgccaacaacugcacguucgaguacgugagccagcccuuccugauggaccuggagggcaagcaggggaacuucaagaaccuccgcgaguucguguucaagaacaucgacggcuacuucaagaucuacuccaagcacaccccgaucaaccugguccgggaccugccccagggguucagcgcccucgagccccugguggaccugcccaucggcaucaacaucacccgcuuccagacccuccuggcccugcaccgguccuaccucacgccgggggacagcagcuccggcuggaccgcgggcgccgccgccuacuacgugggguaccugcagccccgcaccuuccugcucaaguacaacgagaacggcaccaucacggacgcggucgacugcgcccuggacccccugagcgagaccaagugcacccucaaguccuucaccguggagaaggggaucuaccagacgagcaacuuccgggugcagcccaccgaguccaucguccgcuucccgaacaucaccaaccugugccccuucggcgagguguucaacgccacccgguucgccagcgucuacgccuggaaccgcaagcggaucuccaacugcguggcggacuacagcgugcuguacaacuccgccagcuucuccacguucaagugcuacggcgucagccccaccaagcucaacgaccugugcuucaccaacguguacgccgacuccuucgugauccgcggggacgagguccggcagaucgcccccggccagaccgggaagaucgccgacuacaacuacaagcugccggacgacuucacgggcugcgugaucgcguggaacagcaacaaccucgacuccaaggucgggggcaacuacaacuaccuguaccgccuguuccgcaagagcaaccucaagcccuucgagcgggacaucuccaccgagaucuaccaggccggcagcacccccugcaacgggguggagggcuucaacugcuacuucccccugcaguccuacggguuccagccgaccaacggcgugggguaccagcccuaccggguggucgugcugagcuucgagcuccugcacgcccccgccacggugugcggccccaagaaguccaccaaccuggucaagaacaagugcgugaacuucaacuucaacggccucaccgggaccggcgugcugaccgagagcaacaagaaguuccugccguuccagcaguucgggcgcgacaucgccgacacgaccgacgcgguccgcgacccccagacccuggagauccucgacaucacccccugcagcuucggcgggguguccgugaucacgccgggcaccaacaccagcaaccaggucgccgugcuguaccaggacgugaacugcaccgagguccccguggccauccacgccgaccagcugacgcccaccuggcggguguacuccaccggcagcaacgucuuccagacccgcgccgggugccucaucggcgcggagcacgugaacaacuccuacgagugcgacauccccaucggggccggcaucugcgccagcuaccagacgcagaccaacuccccgugaggacuagucccuguucccagagcccacuuuuuuuucuuuuuuugaaauaaaauagccugucuuucagaucucaaaggcucuuuucagagccaccaaaaaaaaaaaaaaaaaaaaaaaaaaaaaaaaaaaaaaaaaaaaaaaaaaaaaaaaaaaaaaaaaaaaaaaaaaaaaaaaaaaaaaaaaaaaaaaaaaaaa

SEQ ID NO: 153 - RNA, 2318 nt, Artificial Sequence
  SARS-CoV-2/Wuhan/WIV05/2019__EPI_ISL_402128 spike protein mRNA human (1-681)
aggagagucccgcagucggcguccagcggcucugcuuguucgugugugugucguugcaggccuuauucaagcuuaccauguucguguuucugguccuccuuccccugguuagcucccagugcgugaacuugaccacaagaacucaauuaccuccagccuacacuaauucuuucaccaggggcguauauuacccggacaagguguuucggucaaguguccugcacagcacacaggaucuauuccuccccuuuuucuccaacgugacuugguuucaugcuauccacguuucugggaccaauggaacaaaacgcuucgacaacccugugcugccauuuaaugauggugucuauuucgcaucgaccgagaagucaaacauuauacgaggcuggaucuuugggacuacacuugacagcaaaacccagagucuguugauugugaauaacgccacgaauguaguuaucaaggugugugaguuccaguuuugcaacgaucccuuccucggagucuacuaucauaaaaauaacaaguccuggauggagucugaguuccguguguacagcuccgcgaauaacuguacuuuugaauaugugucacaaccuuuccugauggaccuggaaggcaagcaggguaauuuuaaaaaccucagagaguucgucuuuaagaacauugauggguacuucaaaaucuacaguaagcacaccccaauaaauuuaguuagggaccugccccagggauuuagcgcucuugagccuuugguggaucugccaaucggcauuaacaucacacgguuccagacucuacucgcccugcaucgcucuuaucuuaccccgggcgacuccucaagcggguggacagcaggagccgcugcauacuauguagguuaccugcaacccagaaccuuuuugcucaaauauaaugaaaacggcacgauuacugaugccguggacugcgcucuggauccuuuaagugagacaaaguguacccugaagucuuucacugucgaaaaagggaucuaccagacauccaauuuuagggugcagccaaccgagagcauaguucgguuccccaacauuacgaaucucugcccuuuuggagagguguucaacgccacccgcuucgcgucggucuaugcauggaaucgaaagagaaucucuaacuguguggccgacuacuccguacuuuacaauucagcuaguuuuagcacauucaaaugcuauggcguuuccccaacuaagcugaacgacuuguguuuuaccaauguguacgccgauucuuucgucauuaggggugacgaagugcggcagaucgcacccgggcaaacaggaaaaaucgcugauuauaacuacaagcuaccggacgauuuuacuggcugcgucauugccuggaauagcaacaaccuggacucaaaagugggcgggaauuauaacuaccucuaucgucuguuccgcaagaguaaucuuaagccuuuugagagagauauauccaccgaaaucuaccaggcgggaagcacacccuguaacgguguugagggcuucaauugcuacuuuccacugcagucuuauggguuccaaccuaccaacggagugggcuaccagcccuauaggguagucguguugucauuugaacuccugcacgccccagcaacuguuugcggucccaaaaagaguacgaauuuagugaaaaacaagugugucaauuucaacuuuaaugggcugacaggcaccggagugcuaacugagagcaacaaaaaguuccucccuuuccagcaguuuggccgggacauugcugauaccacagacgccguacgagauccacaaacccuggagauccuugacauaacuccgugcuccuucgggggagugucuguuauuacacccgguacgaauaccucgaaccaggucgcuguguuguaccaggacgugaauuguacugaagucccuguugccauccacgcagaucagcugacaccaaccuggcgcguguauagcacaggcuccaacguguuucaaacuagagccgggugccucaucggagcugagcauguaaacaauucauacgaaugugacauucccaucggcgcggguauuugcgcaaguuaucagacccagacgaacucuccuugaggacuagucccuguucccagagcccacuuuuuuuucuuuuuuugaaauaaaauagccugucuuucagaucucaaaggcucuuuucagagccaccaaaaaaaaaaaaaaaaaaaaaaaaaaaaaaaaaaaaaaaaaaaaaaaaaaaaaaaaaaaaaaaaaaaaaaaaaaaaaaaaaaaaaaaaaaaaaaaaaaaaa

SEQ ID NO: 154 - RNA, 2318 nt, Artificial Sequence
  SARS-CoV-2/Wuhan/WIV05/2019__EPI_ISL_402128 spike protein mRNA gc mod (1-681)
aggagagucccgcagucggcguccagcggcucugcuuguucgugugugugucguugcaggccuuauucaagcuuaccauguucguguuucuggugcugcugccccugguguccagccagugugugaaccugaccaccagaacacagcugccuccagccuacaccaacagcuucaccagaggcguguacuaccccgacaagguguucagauccagcgugcugcacucuacccaggaccuguuccugccuuucuucagcaacgugaccugguuccacgccauccacguguccggcaccaauggcaccaagagauucgacaaccccgugcugcccuucaacgacgggguguacuuugccagcaccgagaaguccaacaucaucagaggcuggaucuucggcaccacacuggacagcaagacccagagccugcugaucgugaacaacgccaccaacguggucaucaaagugugcgaguuccaguucugcaacgaccccuuccugggcgucuacuaccacaagaacaacaagagcuggauggaaagcgaguuccggguguacagcagcgccaacaacugcaccuucgaguacgugucccagccuuuccugauggaccuggaaggcaagcagggcaacuucaagaaccugcgcgaguucguguucaagaacaucgacggcuacuucaaaaucuacagcaagcacaccccuaucaaccucgugcgggaucugccucagggcuucucugcucuggaaccccugguggaucugcccaucggcaucaacaucacccgguuucagacacugcuggcccugcacagaagcuaccugacaccuggcgauagcagcagcggauggacagcuggugccgccgcuuacuaugugggcuaccugcagccuagaaccuuccugcugaaguacaacgagaacggcaccaucaccgacgccguggauugugcucuggauccucugagcgagacaaagugcacccugaaguccuucaccguggaaaagggcaucuaccagaccagcaacuuccgggugcagcccaccgaauccaucgugcgguuccccaauaucaccaaucugugccccuucggcgagguguucaaugccaccagauucgccucuguguacgccuggaaccggaagcggaucagcaauugcguggccgacuacuccgugcuguacaacuccgccagcuucagcaccuucaagugcuacggcguguccccuaccaagcugaacgaccugugcuucacaaacguguacgccgacagcuucgugauccggggagaugaagugcggcagauugccccuggacagacaggcaagaucgccgacuacaacuacaagcugcccgacgacuucaccggcugugugauugccuggaacagcaacaaccuggacuccaaagucggcggcaacuacaauuaccuguaccggcuguuccggaaguccaaucugaagcccuucgagcgggacaucagcaccgaaaucuaucaggccggcagcaccccuugcaacggcguggaaggcuucaacugcuacuucccacugcaguccuacggcuuucagcccacaaauggcgugggcuaucagcccuacagagugguggugcugagcuucgaacugcugcaugcuccugccacagugugcggcccuaagaaaagcaccaaucucgugaagaacaaaugcgugaacuucaacuucaacggccugaccggcaccggcgugcugacagagagcaacaagaaguuccugccauuccagcaguuuggccgggauaucgccgauaccacagacgccguuagagauccccagacacuggaaauccuggacaucaccccaugcagcuucggcggagugucugugaucaccccuggcaccaacaccagcaaucagguggcagugcuguaccaggacgugaacuguaccgaagugcccguggccauucacgccgaucagcugacaccuacauggcggguguacuccaccggcagcaauguguuucagaccagagccggcugucugaucggagccgagcacgugaacaauagcuacgagugcgacauccccaucggcgcuggcaucugugccagcuaccagacacagacaaacagccccugaggacuagucccuguucccagagcccacuuuuuuuucuuuuuuugaaauaaaauagccugucuuucagaucucaaaggcucuuuucagagccaccaaaaaaaaaaaaaaaaaaaaaaaaaaaaaaaaaaaaaaaaaaaaaaaaaaaaaaaaaaaaaaaaaaaaaaaaaaaaaaaaaaaaaaaaaaaaaaaaaaaaa

SEQ ID NO: 155 - RNA, 4094 nt, Artificial Sequence
  SARS-CoV-2/Wuhan/WIV05/2019__EPI_ISL_402128 spike protein mRNA gc (1-1273)
gggagagucccgcagucggcguccagcggcucugcuuguucgugugugugucguugcaggccuuauucaagcuuaccauguucguguuccugguccuccugccccuggugagcucccagugcgugaaccucaccacccgcacgcagcugccgcccgccuacaccaacagcuucacccggggcgucuacuaccccgacaagguguuccgcuccagcgugcugcacuccacccaggaccucuuccugcccuucuucagcaacgucacgugguuccacgccauccacguguccgggaccaacggcaccaagcgguucgacaacccggugcugcccuucaacgacggggucuacuucgcgagcaccgagaaguccaacaucauccgcggcuggaucuucgggacgacccucgacagcaagacccagucccugcugaucgugaacaacgccaccaacguggucaucaaggugugcgaguuccaguucugcaacgaccccuuccucggcguguacuaccacaagaacaacaagagcuggauggaguccgaguuccgggucuacagcuccgccaacaacugcacguucgaguacgugagccagcccuuccugauggaccuggagggcaagcaggggaacuucaagaaccuccgcgaguucguguucaagaacaucgacggcuacuucaagaucuacuccaagcacaccccgaucaaccugguccgggaccugccccagggguucagcgcccucgagccccugguggaccugcccaucggcaucaacaucacccgcuuccagacccuccuggcccugcaccgguccuaccucacgccgggggacagcagcuccggcuggaccgcgggcgccgccgccuacuacgugggguaccugcagccccgcaccuuccugcucaaguacaacgagaacggcaccaucacggacgcggucgacugcgcccuggacccccugagcgagaccaagugcacccucaaguccuucaccguggagaaggggaucuaccagacgagcaacuuccgggugcagcccaccgaguccaucguccgcuucccgaacaucaccaaccugugccccuucggcgagguguucaacgccacccgguucgccagcgucuacgccuggaaccgcaagcggaucuccaacugcguggcggacuacagcgugcuguacaacuccgccagcuucuccacguucaagugcuacggcgucagccccaccaagcucaacgaccugugcuucaccaacguguacgccgacuccuucgugauccgcggggacgagguccggcagaucgcccccggccagaccgggaagaucgccgacuacaacuacaagcugccggacgacuucacgggcugcgugaucgcguggaacagcaacaaccucgacuccaaggucgggggcaacuacaacuaccuguaccgccuguuccgcaagagcaaccucaagcccuucgagcgggacaucuccaccgagaucuaccaggccggcagcacccccugcaacgggguggagggcuucaacugcuacuucccccugcaguccuacggguuccagccgaccaacggcgugggguaccagcccuaccggguggucgugcugagcuucgagcuccugcacgcccccgccacggugugcggccccaagaaguccaccaaccuggucaagaacaagugcgugaacuucaacuucaacggccucaccgggaccggcgugcugaccgagagcaacaagaaguuccugccguuccagcaguucgggcgcgacaucgccgacacgaccgacgcgguccgcgacccccagacccuggagauccucgacaucacccccugcagcuucggcgggguguccgugaucacgccgggcaccaacaccagcaaccaggucgccgugcuguaccaggacgugaacugcaccgagguccccguggccauccacgccgaccagcugacgcccaccuggcggguguacuccaccggcagcaacgucuuccagacccgcgccgggugccucaucggcgcggagcacgugaacaacuccuacgagugcgacauccccaucggggccggcaucugcgccagcuaccagacgcagaccaacuccccgcggcgcgcccggagcguggcgucccagagcaucaucgccuacaccaugucccugggcgccgagaacagcgucgccuacuccaacaacagcaucgccauccccaccaacuucacgaucuccgugaccaccgagauccugcccgugagcaugaccaagacgagcgucgacugcaccauguacaucugcggggacuccaccgagugcagcaaccuccugcugcaguacggcuccuucugcacccagcucaaccgcgcgcugacggggaucgccguggagcaggacaagaacacccaggagguguucgcccaggucaagcagaucuacaagacgcccccgaucaaggacuucggcggguucaacuucagccagauccugcccgaccccuccaagcccagcaagcgguccuucaucgaggaccuccuguucaacaaggugacccuggccgacgccggcuucaucaagcaguacggcgacugccucggggacaucgcggcccgcgaccugaucugcgcccagaaguucaacggccugaccgugcucccgccccugcugaccgacgagaugaucgcccaguacaccagcgcccuccuggcggggaccaucacguccggcuggaccuucggggccggcgccgcccugcagauccccuucgcgaugcagauggccuaccgguucaacggcaucggggucacccagaacgugcucuacgagaaccagaagcugaucgccaaccaguucaacagcgccaucggcaagauccaggacucccugagcuccaccgccagcgcgcucgggaagcugcaggacguggucaaccagaacgcccaggcccugaacacgcucgugaagcagcuguccagcaacuucggcgccaucuccagcgugcugaacgacauccucucccgccuggacaaggucgaggccgaggugcagaucgaccggcugaucaccgggcgccuccagagccugcagaccuacgugacccagcagcugauccgggcggccgagauccgcgccagcgccaaccucgccgcgaccaagauguccgagugcguccugggccagagcaagcggguggacuucugcggcaagggguaccaccugauguccuucccccagagcgccccgcacggcguggucuuccuccacgugacguacguccccgcccaggagaagaacuucaccaccgcccccgcgaucugccacgacgggaaggcccacuucccccgcgagggcguguucguguccaacgggacccacugguucgucacgcagcggaacuucuacgagccgcagaucaucaccaccgacaacaccuucgugagcggcaacugcgacguggucaucggcaucgugaacaacacgguguacgacccccugcagcccgagcuggacuccuucaaggaggagcucgacaaguacuucaagaaccacaccagccccgacgucgaccugggggacaucuccggcaucaacgccagcguggugaacauccagaaggagaucgaccgccugaacgaggucgccaagaaccucaacgagucccugaucgaccugcaggagcucgggaaguacgagcaguacaucaaguggccgugguacaucuggcugggcuucaucgccggccugaucgcgaucgugauggugaccaucaugcucugcugcaugaccagcugcugcuccugccugaaggggugcugcagcugcggcuccugcugcaaguucgacgaggacgacagcgagcccguccugaagggggugaagcuccacuacacgugaggacuagucccuguucccagagcccacuuuuuuuucuuuuuuugaaauaaaauagccugucuuucagaucucaaaggcucuuuucagagccaccaaaaaaaaaaaaaaaaaaaaaaaaaaaaaaaaaaaaaaaaaaaaaaaaaaaaaaaaaaaaaaaaaaaaaaaaaaaaaaaaaaaaaaaaaaaaaaaaaaaaa

SEQ ID NO: 156 - RNA, 4094 nt, Artificial Sequence
  SARS-CoV-2/Wuhan/WIV05/2019__EPI_ISL_402128 spike protein mRNA gc (1-1273)(K986P_V987P)
gggagagucccgcagucggcguccagcggcucugcuuguucgugugugugucguugcaggccuuauucaagcuuaccauguucguguuccugguccuccugccccuggugagcucccagugcgugaaccucaccacccgcacgcagcugccgcccgccuacaccaacagcuucacccggggcgucuacuaccccgacaagguguuccgcuccagcgugcugcacuccacccaggaccucuuccugcccuucuucagcaacgucacgugguuccacgccauccacguguccgggaccaacggcaccaagcgguucgacaacccggugcugcccuucaacgacggggucuacuucgcgagcaccgagaaguccaacaucauccgcggcuggaucuucgggacgacccucgacagcaagacccagucccugcugaucgugaacaacgccaccaacguggucaucaaggugugcgaguuccaguucugcaacgaccccuuccucggcguguacuaccacaagaacaacaagagcuggauggaguccgaguuccgggucuacagcuccgccaacaacugcacguucgaguacgugagccagcccuuccugauggaccuggagggcaagcaggggaacuucaagaaccuccgcgaguucguguucaagaacaucgacggcuacuucaagaucuacuccaagcacaccccgaucaaccugguccgggaccugccccagggguucagcgcccucgagccccugguggaccugcccaucggcaucaacaucacccgcuuccagacccuccuggcccugcaccgguccuaccucacgccgggggacagcagcuccggcuggaccgcgggcgccgccgccuacuacgugggguaccugcagccccgcaccuuccugcucaaguacaacgagaacggcaccaucacggacgcggucgacugcgcccuggacccccugagcgagaccaagugcacccucaaguccuucaccguggagaaggggaucuaccagacgagcaacuuccgggugcagcccaccgaguccaucguccgcuucccgaacaucaccaaccugugccccuucggcgagguguucaacgccacccgguucgccagcgucuacgccuggaaccgcaagcggaucuccaacugcguggcggacuacagcgugcuguacaacuccgccagcuucuccacguucaagugcuacggcgucagccccaccaagcucaacgaccugugcuucaccaacguguacgccgacuccuucgugauccgcggggacgagguccggcagaucgcccccggccagaccgggaagaucgccgacuacaacuacaagcugccggacgacuucacgggcugcgugaucgcguggaacagcaacaaccucgacuccaaggucgggggcaacuacaacuaccuguaccgccuguuccgcaagagcaaccucaagcccuucgagcgggacaucuccaccgagaucuaccaggccggcagcacccccugcaacgggguggagggcuucaacugcuacuucccccugcaguccuacggguuccagccgaccaacggcgugggguaccagcccuaccggguggucgugcugagcuucgagcuccugcacgcccccgccacggugugcggccccaagaaguccaccaaccuggucaagaacaagugcgugaacuucaacuucaacggccucaccgggaccggcgugcugaccgagagcaacaagaaguuccugccguuccagcaguucgggcgcgacaucgccgacacgaccgacgcgguccgcgacccccagacccuggagauccucgacaucacccccugcagcuucggcgggguguccgugaucacgccgggcaccaacaccagcaaccaggucgccgugcuguaccaggacgugaacugcaccgagguccccguggccauccacgccgaccagcugacgcccaccuggcggguguacuccaccggcagcaacgucuuccagacccgcgccgggugccucaucggcgcggagcacgugaacaacuccuacgagugcgacauccccaucggggccggcaucugcgccagcuaccagacgcagaccaacuccccgcggcgcgcccggagcguggcgucccagagcaucaucgccuacaccaugucccugggcgccgagaacagcgucgccuacuccaacaacagcaucgccauccccaccaacuucacgaucuccgugaccaccgagauccugcccgugagcaugaccaagacgagcgucgacugcaccauguacaucugcggggacuccaccgagugcagcaaccuccugcugcaguacggcuccuucugcacccagcucaaccgcgcgcugacggggaucgccguggagcaggacaagaacacccaggagguguucgcccaggucaagcagaucuacaagacgcccccgaucaaggacuucggcggguucaacuucagccagauccugcccgaccccuccaagcccagcaagcgguccuucaucgaggaccuccuguucaacaaggugacccuggccgacgccggcuucaucaagcaguacggcgacugccucggggacaucgcggcccgcgaccugaucugcgcccagaaguucaacggccugaccgugcucccgccccugcugaccgacgagaugaucgcccaguacaccagcgcccuccuggcggggaccaucacguccggcuggaccuucggggccggcgccgcccugcagauccccuucgcgaugcagauggccuaccgguucaacggcaucggggucacccagaacgugcucuacgagaaccagaagcugaucgccaaccaguucaacagcgccaucggcaagauccaggacucccugagcuccaccgccagcgcgcucgggaagcugcaggacguggucaaccagaacgcccaggcccugaacacgcucgugaagcagcuguccagcaacuucggcgccaucuccagcgugcugaacgacauccucucccgccuggacccgcccgaggccgaggugcagaucgaccggcugaucaccgggcgccuccagagccugcagaccuacgugacccagcagcugauccgggcggccgagauccgcgccagcgccaaccucgccgcgaccaagauguccgagugcguccugggccagagcaagcggguggacuucugcggcaagggguaccaccugauguccuucccccagagcgccccgcacggcguggucuuccuccacgugacguacguccccgcccaggagaagaacuucaccaccgcccccgcgaucugccacgacgggaaggcccacuucccccgcgagggcguguucguguccaacgggacccacugguucgucacgcagcggaacuucuacgagccgcagaucaucaccaccgacaacaccuucgugagcggcaacugcgacguggucaucggcaucgugaacaacacgguguacgacccccugcagcccgagcuggacuccuucaaggaggagcucgacaaguacuucaagaaccacaccagccccgacgucgaccugggggacaucuccggcaucaacgccagcguggugaacauccagaaggagaucgaccgccugaacgaggucgccaagaaccucaacgagucccugaucgaccugcaggagcucgggaaguacgagcaguacaucaaguggccgugguacaucuggcugggcuucaucgccggccugaucgcgaucgugauggugaccaucaugcucugcugcaugaccagcugcugcuccugccugaaggggugcugcagcugcggcuccugcugcaaguucgacgaggacgacagcgagcccguccugaagggggugaagcuccacuacacgugaggacuagucccuguucccagagcccacuuuuuuuucuuuuuuugaaauaaaauagccugucuuucagaucucaaaggcucuuuucagagccaccaaaaaaaaaaaaaaaaaaaaaaaaaaaaaaaaaaaaaaaaaaaaaaaaaaaaaaaaaaaaaaaaaaaaaaaaaaaaaaaaaaaaaaaaaaaaaaaaaaaaa

SEQ ID NO: 157 - RNA, 4094 nt, Artificial Sequence
  SARS-CoV-2/Wuhan/WIV05/2019__EPI_ISL_402128 spike protein mRNA human (1-1273)(K986P_V987P)
gggagagucccgcagucggcguccagcggcucugcuuguucgugugugugucguugcaggccuuauucaagcuuaccauguucguguuucugguccuccuuccccugguuagcucccagugcgugaacuugaccacaagaacucaauuaccuccagccuacacuaauucuuucaccaggggcguauauuacccggacaagguguuucggucaaguguccugcacagcacacaggaucuauuccuccccuuuuucuccaacgugacuugguuucaugcuauccacguuucugggaccaauggaacaaaacgcuucgacaacccugugcugccauuuaaugauggugucuauuucgcaucgaccgagaagucaaacauuauacgaggcuggaucuuugggacuacacuugacagcaaaacccagagucuguugauugugaauaacgccacgaauguaguuaucaaggugugugaguuccaguuuugcaacgaucccuuccucggagucuacuaucauaaaaauaacaaguccuggauggagucugaguuccguguguacagcuccgcgaauaacuguacuuuugaauaugugucacaaccuuuccugauggaccuggaaggcaagcaggguaauuuuaaaaaccucagagaguucgucuuuaagaacauugauggguacuucaaaaucuacaguaagcacaccccaauaaauuuaguuagggaccugccccagggauuuagcgcucuugagccuuugguggaucugccaaucggcauuaacaucacacgguuccagacucuacucgcccugcaucgcucuuaucuuaccccgggcgacuccucaagcggguggacagcaggagccgcugcauacuauguagguuaccugcaacccagaaccuuuuugcucaaauauaaugaaaacggcacgauuacugaugccguggacugcgcucuggauccuuuaagugagacaaaguguacccugaagucuuucacugucgaaaaagggaucuaccagacauccaauuuuagggugcagccaaccgagagcauaguucgguuccccaacauuacgaaucucugcccuuuuggagagguguucaacgccacccgcuucgcgucggucuaugcauggaaucgaaagagaaucucuaacuguguggccgacuacuccguacuuuacaauucagcuaguuuuagcacauucaaaugcuauggcguuuccccaacuaagcugaacgacuuguguuuuaccaauguguacgccgauucuuucgucauuaggggugacgaagugcggcagaucgcacccgggcaaacaggaaaaaucgcugauuauaacuacaagcuaccggacgauuuuacuggcugcgucauugccuggaauagcaacaaccuggacucaaaagugggcgggaauuauaacuaccucuaucgucuguuccgcaagaguaaucuuaagccuuuugagagagauauauccaccgaaaucuaccaggcgggaagcacacccuguaacgguguugagggcuucaauugcuacuuuccacugcagucuuauggguuccaaccuaccaacggagugggcuaccagcccuauaggguagucguguugucauuugaacuccugcacgccccagcaacuguuugcggucccaaaaagaguacgaauuuagugaaaaacaagugugucaauuucaacuuuaaugggcugacaggcaccggagugcuaacugagagcaacaaaaaguuccucccuuuccagcaguuuggccgggacauugcugauaccacagacgccguacgagauccacaaacccuggagauccuugacauaacuccgugcuccuucgggggagugucuguuauuacacccgguacgaauaccucgaaccaggucgcuguguuguaccaggacgugaauuguacugaagucccuguugccauccacgcagaucagcugacaccaaccuggcgcguguauagcacaggcuccaacguguuucaaacuagagccgggugccucaucggagcugagcauguaaacaauucauacgaaugugacauucccaucggcgcggguauuugcgcaaguuaucagacccagacgaacucuccuaggcgggcccgcagcgucgcuucccagucaauaaucgccuacaccaugagccugggggcagaaaauucuguggccuacuccaacaauaguauugcuaucccaacaaacuucacuaucagcguuaccacagaaauucuucccgugucuaugacuaagaccuccgucgauuguacgauguauauaugcggcgacucaacagaguguaguaaucuguugcuccaauacggcagcuuuugcacccagcugaacagagccuuaacuggaaucgcaguggagcaggauaaaaauacacaggaaguuuucgcgcaagugaagcagauuuauaaaaccccgccuaucaaggacuuugggggauucaacuuuucgcagauucugccagaucccuccaaaccuucuaagaggagcuucaucgaggaccuacucuuuaauaagguaacucuggcugaugccgguuucauaaaacaauacggcgacugucuuggggauaucgcagcccgugacuugauuugcgcucagaaguucaacggacugaccguccugcccccacucuuaacagaugaaaugaucgcccaguauacgucagcacugcuugcuggcaccauuacgagugguuggacauuuggggccggcgcggccuugcagaucccuuucgcuaugcaaauggcauaccgguuuaauggaauaggcgugacccagaacgugcucuaugagaaucagaaacugauugccaaccaguucaacuccgcuaucgggaagauucaagacucucuaagcuccacagccucagcacugggaaaacuccaggacgucguuaaucagaacgcgcaggcccugaauacucuugugaagcaauugagcaguaacuuuggcgcuaucucuuccguacugaaugauauauuaagccgacucgacccgcccgaagccgagguccagaucgauagacugauuaccgguaggcuucagucgcugcaaacguacgugacacagcaguugauccgcgcagcugagauucgggccucagcaaaccucgccgcuaccaaaaugucugaaugcguucuggggcagaguaagagaguggacuucuguggaaaaggcuaccaccuaauguccuuuccccaaagcgcgccacauggugucguguuccugcacguuacuuaugugccggcccaggagaagaauuuuaccacagcuccugcaaucugccacgauggcaaagcccauuuccccagggaaggggucuuuguaucuaacggaacucacugguucgugacccagcgcaauuuuuacgagccacagauaauuacaacggacaacaccuucguuagcggcaauugugauguggucaucgggaucgugaacaauacuguauaugacccccuccaaccugagcuggauuccuucaaggaggaacuugacaaauacuuuaagaaccauacaucaccagauguggacuugggagauauuaguggcaucaaugccagcgucguuaacauucagaaggaaauagaccgacugaaugagguggcuaaaaacuuaaacgaaucucucaucgaccugcaggagcuugguaaguaugagcaguacauuaaauggcccugguauaucuggcugggguucauugcaggacuaaucgccauagugauggucaccaucaugcucugcuguaugacuuccugcuguucaugccugaagggcuguugcaguugugguagcugcugcaaauuugaugaagacgauuccgagccuguguugaagggcguuaagcugcacuacacaugaggacuagucccuguucccagagcccacuuuuuuuucuuuuuuugaaauaaaauagccugucuuucagaucucaaaggcucuuuucagagccaccaaaaaaaaaaaaaaaaaaaaaaaaaaaaaaaaaaaaaaaaaaaaaaaaaaaaaaaaaaaaaaaaaaaaaaaaaaaaaaaaaaaaaaaaaaaaaaaaaaaaa

SEQ ID NO: 158 - RNA, 4094 nt, Artificial Sequence
  SARS-CoV-2/Wuhan/WIV05/2019__EPI_ISL_402128 spike protein mRNA gc mod (1-1273)(K986P_V987P)
gggagagucccgcagucggcguccagcggcucugcuuguucgugugugugucguugcaggccuuauucaagcuuaccauguucguguuucuggugcugcugccccugguguccagccagugugugaaccugaccaccagaacacagcugccuccagccuacaccaacagcuucaccagaggcguguacuaccccgacaagguguucagauccagcgugcugcacucuacccaggaccuguuccugccuuucuucagcaacgugaccugguuccacgccauccacguguccggcaccaauggcaccaagagauucgacaaccccgugcugcccuucaacgacgggguguacuuugccagcaccgagaaguccaacaucaucagaggcuggaucuucggcaccacacuggacagcaagacccagagccugcugaucgugaacaacgccaccaacguggucaucaaagugugcgaguuccaguucugcaacgaccccuuccugggcgucuacuaccacaagaacaacaagagcuggauggaaagcgaguuccggguguacagcagcgccaacaacugcaccuucgaguacgugucccagccuuuccugauggaccuggaaggcaagcagggcaacuucaagaaccugcgcgaguucguguucaagaacaucgacggcuacuucaaaaucuacagcaagcacaccccuaucaaccucgugcgggaucugccucagggcuucucugcucuggaaccccugguggaucugcccaucggcaucaacaucacccgguuucagacacugcuggcccugcacagaagcuaccugacaccuggcgauagcagcagcggauggacagcuggugccgccgcuuacuaugugggcuaccugcagccuagaaccuuccugcugaaguacaacgagaacggcaccaucaccgacgccguggauugugcucuggauccucugagcgagacaaagugcacccugaaguccuucaccguggaaaagggcaucuaccagaccagcaacuuccgggugcagcccaccgaauccaucgugcgguuccccaauaucaccaaucugugccccuucggcgagguguucaaugccaccagauucgccucuguguacgccuggaaccggaagcggaucagcaauugcguggccgacuacuccgugcuguacaacuccgccagcuucagcaccuucaagugcuacggcguguccccuaccaagcugaacgaccugugcuucacaaacguguacgccgacagcuucgugauccggggagaugaagugcggcagauugccccuggacagacaggcaagaucgccgacuacaacuacaagcugcccgacgacuucaccggcugugugauugccuggaacagcaacaaccuggacuccaaagucggcggcaacuacaauuaccuguaccggcuguuccggaaguccaaucugaagcccuucgagcgggacaucagcaccgaaaucuaucaggccggcagcaccccuugcaacggcguggaaggcuucaacugcuacuucccacugcaguccuacggcuuucagcccacaaauggcgugggcuaucagcccuacagagugguggugcugagcuucgaacugcugcaugcuccugccacagugugcggcccuaagaaaagcaccaaucucgugaagaacaaaugcgugaacuucaacuucaacggccugaccggcaccggcgugcugacagagagcaacaagaaguuccugccauuccagcaguuuggccgggauaucgccgauaccacagacgccguuagagauccccagacacuggaaauccuggacaucaccccaugcagcuucggcggagugucugugaucaccccuggcaccaacaccagcaaucagguggcagugcuguaccaggacgugaacuguaccgaagugcccguggccauucacgccgaucagcugacaccuacauggcggguguacuccaccggcagcaauguguuucagaccagagccggcugucugaucggagccgagcacgugaacaauagcuacgagugcgacauccccaucggcgcuggcaucugugccagcuaccagacacagacaaacagccccagacgggcuagaagcguggccagccagagcaucauugccuacacaaugucucugggcgccgagaacagcguggccuacuccaacaacucuaucgcuauccccaccaacuucaccaucagcgugaccaccgagauccugccuguguccaugaccaagaccagcguggacugcaccauguacaucugcggcgauuccaccgagugcuccaaccugcugcugcaguacggcagcuucugcacccagcugaauagagcccugacagggaucgccguggaacaggacaagaacacccaagagguguucgcccaagugaagcaaaucuacaagaccccuccuaucaaggacuucggcggcuucaauuucagccagauucugcccgauccuagcaagcccagcaagcggagcuucaucgaggaccugcuguucaacaaagugacacuggccgacgccggcuucaucaagcaguauggcgauugucugggcgacauugccgccagggaucugauuugcgcccagaaguuuaacggacugacagugcugccuccucugcugaccgaugagaugaucgcccaguacacaucugcccugcuggccggcacaaucacaagcggcuggacauuuggagcuggcgccgcucugcagauccccuuugcuaugcagauggccuaccgguucaacggcaucggagugacccagaaugugcuguacgagaaccagaagcugaucgccaaccaguucaacagcgccaucggcaagauccaggacagccugagcagcacagcaagcgcccugggaaagcugcaggacguggucaaccagaaugcccaggcacugaacacccuggucaagcagcuguccuccaacuucggcgccaucagcucugugcugaacgauauccugagcagacuggacccuccugaggccgaggugcagaucgacagacugaucacaggcagacugcagagccuccagacauacgugacccagcagcugaucagagccgccgagauuagagccucugccaaucuggccgccaccaagaugucugagugugugcugggccagagcaagagaguggacuuuugcggcaagggcuaccaccugaugagcuucccucagucugccccucacggcgugguguuucugcacgugacauaugugcccgcucaagagaagaauuucaccaccgcuccagccaucugccacgacggcaaagcccacuuuccuagagaaggcguguucguguccaacggcacccauugguucgugacacagcggaacuucuacgagccccagaucaucaccaccgacaacaccuucgugucuggcaacugcgacguugugaucggcauugugaacaauaccguguacgacccucugcagcccgagcuggacagcuucaaagaggaacuggacaaguacuuuaagaaccacacaagccccgacguggaccugggcgauaucagcggaaucaaugccagcgucgugaacauccagaaagagaucgaccggcugaacgagguggccaagaaucugaacgagagccugaucgaccugcaagaacuggggaaguacgagcaguacaucaaguggcccugguacaucuggcugggcuuuaucgccggacugauugccaucgugauggucacaaucaugcuguguugcaugaccagcugcuguagcugccugaagggcuguuguagcuguggcagcugcugcaaguucgacgaggacgauucugagcccgugcugaagggcgugaaacugcacuacaccugaggacuagucccuguucccagagcccacuuuuuuuucuuuuuuugaaauaaaauagccugucuuucagaucucaaaggcucuuuucagagccaccaaaaaaaaaaaaaaaaaaaaaaaaaaaaaaaaaaaaaaaaaaaaaaaaaaaaaaaaaaaaaaaaaaaaaaaaaaaaaaaaaaaaaaaaaaaaaaaaaaaaa

SEQ ID NO: 159 - RNA, 2318 nt, Artificial Sequence
  SARS-CoV-2/Wuhan/WIV05/2019__EPI_ISL_402128 spike protein mRNA gc (1-681)
gggagagucccgcagucggcguccagcggcucugcuuguucgugugugugucguugcaggccuuauucaagcuuaccauguucguguuccugguccuccugccccuggugagcucccagugcgugaaccucaccacccgcacgcagcugccgcccgccuacaccaacagcuucacccggggcgucuacuaccccgacaagguguuccgcuccagcgugcugcacuccacccaggaccucuuccugcccuucuucagcaacgucacgugguuccacgccauccacguguccgggaccaacggcaccaagcgguucgacaacccggugcugcccuucaacgacggggucuacuucgcgagcaccgagaaguccaacaucauccgcggcuggaucuucgggacgacccucgacagcaagacccagucccugcugaucgugaacaacgccaccaacguggucaucaaggugugcgaguuccaguucugcaacgaccccuuccucggcguguacuaccacaagaacaacaagagcuggauggaguccgaguuccgggucuacagcuccgccaacaacugcacguucgaguacgugagccagcccuuccugauggaccuggagggcaagcaggggaacuucaagaaccuccgcgaguucguguucaagaacaucgacggcuacuucaagaucuacuccaagcacaccccgaucaaccugguccgggaccugccccagggguucagcgcccucgagccccugguggaccugcccaucggcaucaacaucacccgcuuccagacccuccuggcccugcaccgguccuaccucacgccgggggacagcagcuccggcuggaccgcgggcgccgccgccuacuacgugggguaccugcagccccgcaccuuccugcucaaguacaacgagaacggcaccaucacggacgcggucgacugcgcccuggacccccugagcgagaccaagugcacccucaaguccuucaccguggagaaggggaucuaccagacgagcaacuuccgggugcagcccaccgaguccaucguccgcuucccgaacaucaccaaccugugccccuucggcgagguguucaacgccacccgguucgccagcgucuacgccuggaaccgcaagcggaucuccaacugcguggcggacuacagcgugcuguacaacuccgccagcuucuccacguucaagugcuacggcgucagccccaccaagcucaacgaccugugcuucaccaacguguacgccgacuccuucgugauccgcggggacgagguccggcagaucgcccccggccagaccgggaagaucgccgacuacaacuacaagcugccggacgacuucacgggcugcgugaucgcguggaacagcaacaaccucgacuccaaggucgggggcaacuacaacuaccuguaccgccuguuccgcaagagcaaccucaagcccuucgagcgggacaucuccaccgagaucuaccaggccggcagcacccccugcaacgggguggagggcuucaacugcuacuucccccugcaguccuacggguuccagccgaccaacggcgugggguaccagcccuaccggguggucgugcugagcuucgagcuccugcacgcccccgccacggugugcggccccaagaaguccaccaaccuggucaagaacaagugcgugaacuucaacuucaacggccucaccgggaccggcgugcugaccgagagcaacaagaaguuccugccguuccagcaguucgggcgcgacaucgccgacacgaccgacgcgguccgcgacccccagacccuggagauccucgacaucacccccugcagcuucggcgggguguccgugaucacgccgggcaccaacaccagcaaccaggucgccgugcuguaccaggacgugaacugcaccgagguccccguggccauccacgccgaccagcugacgcccaccuggcggguguacuccaccggcagcaacgucuuccagacccgcgccgggugccucaucggcgcggagcacgugaacaacuccuacgagugcgacauccccaucggggccggcaucugcgccagcuaccagacgcagaccaacuccccgugaggacuagucccuguucccagagcccacuuuuuuuucuuuuuuugaaauaaaauagccugucuuucagaucucaaaggcucuuuucagagccaccaaaaaaaaaaaaaaaaaaaaaaaaaaaaaaaaaaaaaaaaaaaaaaaaaaaaaaaaaaaaaaaaaaaaaaaaaaaaaaaaaaaaaaaaaaaaaaaaaaaaa

SEQ ID NO: 160 - RNA, 2318 nt, Artificial Sequence
  SARS-CoV-2/Wuhan/WIV05/2019__EPI_ISL_402128 spike protein mRNA human (1-681)
gggagagucccgcagucggcguccagcggcucugcuuguucgugugugugucguugcaggccuuauucaagcuuaccauguucguguuucugguccuccuuccccugguuagcucccagugcgugaacuugaccacaagaacucaauuaccuccagccuacacuaauucuuucaccaggggcguauauuacccggacaagguguuucggucaaguguccugcacagcacacaggaucuauuccuccccuuuuucuccaacgugacuugguuucaugcuauccacguuucugggaccaauggaacaaaacgcuucgacaacccugugcugccauuuaaugauggugucuauuucgcaucgaccgagaagucaaacauuauacgaggcuggaucuuugggacuacacuugacagcaaaacccagagucuguugauugugaauaacgccacgaauguaguuaucaaggugugugaguuccaguuuugcaacgaucccuuccucggagucuacuaucauaaaaauaacaaguccuggauggagucugaguuccguguguacagcuccgcgaauaacuguacuuuugaauaugugucacaaccuuuccugauggaccuggaaggcaagcaggguaauuuuaaaaaccucagagaguucgucuuuaagaacauugauggguacuucaaaaucuacaguaagcacaccccaauaaauuuaguuagggaccugccccagggauuuagcgcucuugagccuuugguggaucugccaaucggcauuaacaucacacgguuccagacucuacucgcccugcaucgcucuuaucuuaccccgggcgacuccucaagcggguggacagcaggagccgcugcauacuauguagguuaccugcaacccagaaccuuuuugcucaaauauaaugaaaacggcacgauuacugaugccguggacugcgcucuggauccuuuaagugagacaaaguguacccugaagucuuucacugucgaaaaagggaucuaccagacauccaauuuuagggugcagccaaccgagagcauaguucgguuccccaacauuacgaaucucugcccuuuuggagagguguucaacgccacccgcuucgcgucggucuaugcauggaaucgaaagagaaucucuaacuguguggccgacuacuccguacuuuacaauucagcuaguuuuagcacauucaaaugcuauggcguuuccccaacuaagcugaacgacuuguguuuuaccaauguguacgccgauucuuucgucauuaggggugacgaagugcggcagaucgcacccgggcaaacaggaaaaaucgcugauuauaacuacaagcuaccggacgauuuuacuggcugcgucauugccuggaauagcaacaaccuggacucaaaagugggcgggaauuauaacuaccucuaucgucuguuccgcaagaguaaucuuaagccuuuugagagagauauauccaccgaaaucuaccaggcgggaagcacacccuguaacgguguugagggcuucaauugcuacuuuccacugcagucuuauggguuccaaccuaccaacggagugggcuaccagcccuauaggguagucguguugucauuugaacuccugcacgccccagcaacuguuugcggucccaaaaagaguacgaauuuagugaaaaacaagugugucaauuucaacuuuaaugggcugacaggcaccggagugcuaacugagagcaacaaaaaguuccucccuuuccagcaguuuggccgggacauugcugauaccacagacgccguacgagauccacaaacccuggagauccuugacauaacuccgugcuccuucgggggagugucuguuauuacacccgguacgaauaccucgaaccaggucgcuguguuguaccaggacgugaauuguacugaagucccuguugccauccacgcagaucagcugacaccaaccuggcgcguguauagcacaggcuccaacguguuucaaacuagagccgggugccucaucggagcugagcauguaaacaauucauacgaaugugacauucccaucggcgcggguauuugcgcaaguuaucagacccagacgaacucuccuugaggacuagucccuguucccagagcccacuuuuuuuucuuuuuuugaaauaaaauagccugucuuucagaucucaaaggcucuuuucagagccaccaaaaaaaaaaaaaaaaaaaaaaaaaaaaaaaaaaaaaaaaaaaaaaaaaaaaaaaaaaaaaaaaaaaaaaaaaaaaaaaaaaaaaaaaaaaaaaaaaaaaa

SEQ ID NO: 161 - RNA, 2318 nt, Artificial Sequence
  SARS-CoV-2/Wuhan/WIV05/2019__EPI_ISL_402128 spike protein mRNA gc mod (1-681)
gggagagucccgcagucggcguccagcggcucugcuuguucgugugugugucguugcaggccuuauucaagcuuaccauguucguguuucuggugcugcugccccugguguccagccagugugugaaccugaccaccagaacacagcugccuccagccuacaccaacagcuucaccagaggcguguacuaccccgacaagguguucagauccagcgugcugcacucuacccaggaccuguuccugccuuucuucagcaacgugaccugguuccacgccauccacguguccggcaccaauggcaccaagagauucgacaaccccgugcugcccuucaacgacgggguguacuuugccagcaccgagaaguccaacaucaucagaggcuggaucuucggcaccacacuggacagcaagacccagagccugcugaucgugaacaacgccaccaacguggucaucaaagugugcgaguuccaguucugcaacgaccccuuccugggcgucuacuaccacaagaacaacaagagcuggauggaaagcgaguuccggguguacagcagcgccaacaacugcaccuucgaguacgugucccagccuuuccugauggaccuggaaggcaagcagggcaacuucaagaaccugcgcgaguucguguucaagaacaucgacggcuacuucaaaaucuacagcaagcacaccccuaucaaccucgugcgggaucugccucagggcuucucugcucuggaaccccugguggaucugcccaucggcaucaacaucacccgguuucagacacugcuggcccugcacagaagcuaccugacaccuggcgauagcagcagcggauggacagcuggugccgccgcuuacuaugugggcuaccugcagccuagaaccuuccugcugaaguacaacgagaacggcaccaucaccgacgccguggauugugcucuggauccucugagcgagacaaagugcacccugaaguccuucaccguggaaaagggcaucuaccagaccagcaacuuccgggugcagcccaccgaauccaucgugcgguuccccaauaucaccaaucugugccccuucggcgagguguucaaugccaccagauucgccucuguguacgccuggaaccggaagcggaucagcaauugcguggccgacuacuccgugcuguacaacuccgccagcuucagcaccuucaagugcuacggcguguccccuaccaagcugaacgaccugugcuucacaaacguguacgccgacagcuucgugauccggggagaugaagugcggcagauugccccuggacagacaggcaagaucgccgacuacaacuacaagcugcccgacgacuucaccggcugugugauugccuggaacagcaacaaccuggacuccaaagucggcggcaacuacaauuaccuguaccggcuguuccggaaguccaaucugaagcccuucgagcgggacaucagcaccgaaaucuaucaggccggcagcaccccuugcaacggcguggaaggcuucaacugcuacuucccacugcaguccuacggcuuucagcccacaaauggcgugggcuaucagcccuacagagugguggugcugagcuucgaacugcugcaugcuccugccacagugugcggcccuaagaaaagcaccaaucucgugaagaacaaaugcgugaacuucaacuucaacggccugaccggcaccggcgugcugacagagagcaacaagaaguuccugccauuccagcaguuuggccgggauaucgccgauaccacagacgccguuagagauccccagacacuggaaauccuggacaucaccccaugcagcuucggcggagugucugugaucaccccuggcaccaacaccagcaaucagguggcagugcuguaccaggacgugaacuguaccgaagugcccguggccauucacgccgaucagcugacaccuacauggcggguguacuccaccggcagcaauguguuucagaccagagccggcugucugaucggagccgagcacgugaacaauagcuacgagugcgacauccccaucggcgcuggcaucugugccagcuaccagacacagacaaacagccccugaggacuagucccuguucccagagcccacuuuuuuuucuuuuuuugaaauaaaauagccugucuuucagaucucaaaggcucuuuucagagccaccaaaaaaaaaaaaaaaaaaaaaaaaaaaaaaaaaaaaaaaaaaaaaaaaaaaaaaaaaaaaaaaaaaaaaaaaaaaaaaaaaaaaaaaaaaaaaaaaaaaaa

SEQ ID NO: 162 - RNA, 4039 nt, Artificial Sequence
  SARS-CoV-2/Wuhan/WIV05/2019__EPI_ISL_402128 spike protein mRNA gc (1-1273) R9514
aggagaaagcuuaccauguucguguuccugguccuccugccccuggugagcucccagugcgugaaccucaccacccgcacgcagcugccgcccgccuacaccaacagcuucacccggggcgucuacuaccccgacaagguguuccgcuccagcgugcugcacuccacccaggaccucuuccugcccuucuucagcaacgucacgugguuccacgccauccacguguccgggaccaacggcaccaagcgguucgacaacccggugcugcccuucaacgacggggucuacuucgcgagcaccgagaaguccaacaucauccgcggcuggaucuucgggacgacccucgacagcaagacccagucccugcugaucgugaacaacgccaccaacguggucaucaaggugugcgaguuccaguucugcaacgaccccuuccucggcguguacuaccacaagaacaacaagagcuggauggaguccgaguuccgggucuacagcuccgccaacaacugcacguucgaguacgugagccagcccuuccugauggaccuggagggcaagcaggggaacuucaagaaccuccgcgaguucguguucaagaacaucgacggcuacuucaagaucuacuccaagcacaccccgaucaaccugguccgggaccugccccagggguucagcgcccucgagccccugguggaccugcccaucggcaucaacaucacccgcuuccagacccuccuggcccugcaccgguccuaccucacgccgggggacagcagcuccggcuggaccgcgggcgccgccgccuacuacgugggguaccugcagccccgcaccuuccugcucaaguacaacgagaacggcaccaucacggacgcggucgacugcgcccuggacccccugagcgagaccaagugcacccucaaguccuucaccguggagaaggggaucuaccagacgagcaacuuccgggugcagcccaccgaguccaucguccgcuucccgaacaucaccaaccugugccccuucggcgagguguucaacgccacccgguucgccagcgucuacgccuggaaccgcaagcggaucuccaacugcguggcggacuacagcgugcuguacaacuccgccagcuucuccacguucaagugcuacggcgucagccccaccaagcucaacgaccugugcuucaccaacguguacgccgacuccuucgugauccgcggggacgagguccggcagaucgcccccggccagaccgggaagaucgccgacuacaacuacaagcugccggacgacuucacgggcugcgugaucgcguggaacagcaacaaccucgacuccaaggucgggggcaacuacaacuaccuguaccgccuguuccgcaagagcaaccucaagcccuucgagcgggacaucuccaccgagaucuaccaggccggcagcacccccugcaacgggguggagggcuucaacugcuacuucccccugcaguccuacggguuccagccgaccaacggcgugggguaccagcccuaccggguggucgugcugagcuucgagcuccugcacgcccccgccacggugugcggccccaagaaguccaccaaccuggucaagaacaagugcgugaacuucaacuucaacggccucaccgggaccggcgugcugaccgagagcaacaagaaguuccugccguuccagcaguucgggcgcgacaucgccgacacgaccgacgcgguccgcgacccccagacccuggagauccucgacaucacccccugcagcuucggcgggguguccgugaucacgccgggcaccaacaccagcaaccaggucgccgugcuguaccaggacgugaacugcaccgagguccccguggccauccacgccgaccagcugacgcccaccuggcggguguacuccaccggcagcaacgucuuccagacccgcgccgggugccucaucggcgcggagcacgugaacaacuccuacgagugcgacauccccaucggggccggcaucugcgccagcuaccagacgcagaccaacuccccgcggcgcgcccggagcguggcgucccagagcaucaucgccuacaccaugucccugggcgccgagaacagcgucgccuacuccaacaacagcaucgccauccccaccaacuucacgaucuccgugaccaccgagauccugcccgugagcaugaccaagacgagcgucgacugcaccauguacaucugcggggacuccaccgagugcagcaaccuccugcugcaguacggcuccuucugcacccagcucaaccgcgcgcugacggggaucgccguggagcaggacaagaacacccaggagguguucgcccaggucaagcagaucuacaagacgcccccgaucaaggacuucggcggguucaacuucagccagauccugcccgaccccuccaagcccagcaagcgguccuucaucgaggaccuccuguucaacaaggugacccuggccgacgccggcuucaucaagcaguacggcgacugccucggggacaucgcggcccgcgaccugaucugcgcccagaaguucaacggccugaccgugcucccgccccugcugaccgacgagaugaucgcccaguacaccagcgcccuccuggcggggaccaucacguccggcuggaccuucggggccggcgccgcccugcagauccccuucgcgaugcagauggccuaccgguucaacggcaucggggucacccagaacgugcucuacgagaaccagaagcugaucgccaaccaguucaacagcgccaucggcaagauccaggacucccugagcuccaccgccagcgcgcucgggaagcugcaggacguggucaaccagaacgcccaggcccugaacacgcucgugaagcagcuguccagcaacuucggcgccaucuccagcgugcugaacgacauccucucccgccuggacaaggucgaggccgaggugcagaucgaccggcugaucaccgggcgccuccagagccugcagaccuacgugacccagcagcugauccgggcggccgagauccgcgccagcgccaaccucgccgcgaccaagauguccgagugcguccugggccagagcaagcggguggacuucugcggcaagggguaccaccugauguccuucccccagagcgccccgcacggcguggucuuccuccacgugacguacguccccgcccaggagaagaacuucaccaccgcccccgcgaucugccacgacgggaaggcccacuucccccgcgagggcguguucguguccaacgggacccacugguucgucacgcagcggaacuucuacgagccgcagaucaucaccaccgacaacaccuucgugagcggcaacugcgacguggucaucggcaucgugaacaacacgguguacgacccccugcagcccgagcuggacuccuucaaggaggagcucgacaaguacuucaagaaccacaccagccccgacgucgaccugggggacaucuccggcaucaacgccagcguggugaacauccagaaggagaucgaccgccugaacgaggucgccaagaaccucaacgagucccugaucgaccugcaggagcucgggaaguacgagcaguacaucaaguggccgugguacaucuggcugggcuucaucgccggccugaucgcgaucgugauggugaccaucaugcucugcugcaugaccagcugcugcuccugccugaaggggugcugcagcugcggcuccugcugcaaguucgacgaggacgacagcgagcccguccugaagggggugaagcuccacuacacgugaggacuaguuauaagacugacuagcccgaugggccucccaacgggcccuccuccccuccuugcaccgagauuaauaaaaaaaaaaaaaaaaaaaaaaaaaaaaaaaaaaaaaaaaaaaaaaaaaaaaaaaaaaaaaaaaugcaucccccccccccccccccccccccccccccccaaaggcucuuuucagagccaccagaauu

SEQ ID NO: 163 - RNA, 4039 nt, Artificial Sequence
  SARS-CoV-2/Wuhan/WIV05/2019__EPI_ISL_402128 spike protein mRNA gc (1-1273)(K986P_V987P) R9515, R10157
aggagaaagcuuaccauguucguguuccugguccuccugccccuggugagcucccagugcgugaaccucaccacccgcacgcagcugccgcccgccuacaccaacagcuucacccggggcgucuacuaccccgacaagguguuccgcuccagcgugcugcacuccacccaggaccucuuccugcccuucuucagcaacgucacgugguuccacgccauccacguguccgggaccaacggcaccaagcgguucgacaacccggugcugcccuucaacgacggggucuacuucgcgagcaccgagaaguccaacaucauccgcggcuggaucuucgggacgacccucgacagcaagacccagucccugcugaucgugaacaacgccaccaacguggucaucaaggugugcgaguuccaguucugcaacgaccccuuccucggcguguacuaccacaagaacaacaagagcuggauggaguccgaguuccgggucuacagcuccgccaacaacugcacguucgaguacgugagccagcccuuccugauggaccuggagggcaagcaggggaacuucaagaaccuccgcgaguucguguucaagaacaucgacggcuacuucaagaucuacuccaagcacaccccgaucaaccugguccgggaccugccccagggguucagcgcccucgagccccugguggaccugcccaucggcaucaacaucacccgcuuccagacccuccuggcccugcaccgguccuaccucacgccgggggacagcagcuccggcuggaccgcgggcgccgccgccuacuacgugggguaccugcagccccgcaccuuccugcucaaguacaacgagaacggcaccaucacggacgcggucgacugcgcccuggacccccugagcgagaccaagugcacccucaaguccuucaccguggagaaggggaucuaccagacgagcaacuuccgggugcagcccaccgaguccaucguccgcuucccgaacaucaccaaccugugccccuucggcgagguguucaacgccacccgguucgccagcgucuacgccuggaaccgcaagcggaucuccaacugcguggcggacuacagcgugcuguacaacuccgccagcuucuccacguucaagugcuacggcgucagccccaccaagcucaacgaccugugcuucaccaacguguacgccgacuccuucgugauccgcggggacgagguccggcagaucgcccccggccagaccgggaagaucgccgacuacaacuacaagcugccggacgacuucacgggcugcgugaucgcguggaacagcaacaaccucgacuccaaggucgggggcaacuacaacuaccuguaccgccuguuccgcaagagcaaccucaagcccuucgagcgggacaucuccaccgagaucuaccaggccggcagcacccccugcaacgggguggagggcuucaacugcuacuucccccugcaguccuacggguuccagccgaccaacggcgugggguaccagcccuaccggguggucgugcugagcuucgagcuccugcacgcccccgccacggugugcggccccaagaaguccaccaaccuggucaagaacaagugcgugaacuucaacuucaacggccucaccgggaccggcgugcugaccgagagcaacaagaaguuccugccguuccagcaguucgggcgcgacaucgccgacacgaccgacgcgguccgcgacccccagacccuggagauccucgacaucacccccugcagcuucggcgggguguccgugaucacgccgggcaccaacaccagcaaccaggucgccgugcuguaccaggacgugaacugcaccgagguccccguggccauccacgccgaccagcugacgcccaccuggcggguguacuccaccggcagcaacgucuuccagacccgcgccgggugccucaucggcgcggagcacgugaacaacuccuacgagugcgacauccccaucggggccggcaucugcgccagcuaccagacgcagaccaacuccccgcggcgcgcccggagcguggcgucccagagcaucaucgccuacaccaugucccugggcgccgagaacagcgucgccuacuccaacaacagcaucgccauccccaccaacuucacgaucuccgugaccaccgagauccugcccgugagcaugaccaagacgagcgucgacugcaccauguacaucugcggggacuccaccgagugcagcaaccuccugcugcaguacggcuccuucugcacccagcucaaccgcgcgcugacggggaucgccguggagcaggacaagaacacccaggagguguucgcccaggucaagcagaucuacaagacgcccccgaucaaggacuucggcggguucaacuucagccagauccugcccgaccccuccaagcccagcaagcgguccuucaucgaggaccuccuguucaacaaggugacccuggccgacgccggcuucaucaagcaguacggcgacugccucggggacaucgcggcccgcgaccugaucugcgcccagaaguucaacggccugaccgugcucccgccccugcugaccgacgagaugaucgcccaguacaccagcgcccuccuggcggggaccaucacguccggcuggaccuucggggccggcgccgcccugcagauccccuucgcgaugcagauggccuaccgguucaacggcaucggggucacccagaacgugcucuacgagaaccagaagcugaucgccaaccaguucaacagcgccaucggcaagauccaggacucccugagcuccaccgccagcgcgcucgggaagcugcaggacguggucaaccagaacgcccaggcccugaacacgcucgugaagcagcuguccagcaacuucggcgccaucuccagcgugcugaacgacauccucucccgccuggacccgcccgaggccgaggugcagaucgaccggcugaucaccgggcgccuccagagccugcagaccuacgugacccagcagcugauccgggcggccgagauccgcgccagcgccaaccucgccgcgaccaagauguccgagugcguccugggccagagcaagcggguggacuucugcggcaagggguaccaccugauguccuucccccagagcgccccgcacggcguggucuuccuccacgugacguacguccccgcccaggagaagaacuucaccaccgcccccgcgaucugccacgacgggaaggcccacuucccccgcgagggcguguucguguccaacgggacccacugguucgucacgcagcggaacuucuacgagccgcagaucaucaccaccgacaacaccuucgugagcggcaacugcgacguggucaucggcaucgugaacaacacgguguacgacccccugcagcccgagcuggacuccuucaaggaggagcucgacaaguacuucaagaaccacaccagccccgacgucgaccugggggacaucuccggcaucaacgccagcguggugaacauccagaaggagaucgaccgccugaacgaggucgccaagaaccucaacgagucccugaucgaccugcaggagcucgggaaguacgagcaguacaucaaguggccgugguacaucuggcugggcuucaucgccggccugaucgcgaucgugauggugaccaucaugcucugcugcaugaccagcugcugcuccugccugaaggggugcugcagcugcggcuccugcugcaaguucgacgaggacgacagcgagcccguccugaagggggugaagcuccacuacacgugaggacuaguuauaagacugacuagcccgaugggccucccaacgggcccuccuccccuccuugcaccgagauuaauaaaaaaaaaaaaaaaaaaaaaaaaaaaaaaaaaaaaaaaaaaaaaaaaaaaaaaaaaaaaaaaaugcaucccccccccccccccccccccccccccccccaaaggcucuuuucagagccaccagaauu

SEQ ID NO: 164 - RNA, 4039 nt, Artificial Sequence
  SARS-CoV-2/Wuhan/WIV05/2019__EPI_ISL_402128 spike protein mRNA human (1-1273)(K986P_V987P) R9517
aggagaaagcuuaccauguucguguuucugguccuccuuccccugguuagcucccagugcgugaacuugaccacaagaacucaauuaccuccagccuacacuaauucuuucaccaggggcguauauuacccggacaagguguuucggucaaguguccugcacagcacacaggaucuauuccuccccuuuuucuccaacgugacuugguuucaugcuauccacguuucugggaccaauggaacaaaacgcuucgacaacccugugcugccauuuaaugauggugucuauuucgcaucgaccgagaagucaaacauuauacgaggcuggaucuuugggacuacacuugacagcaaaacccagagucuguugauugugaauaacgccacgaauguaguuaucaaggugugugaguuccaguuuugcaacgaucccuuccucggagucuacuaucauaaaaauaacaaguccuggauggagucugaguuccguguguacagcuccgcgaauaacuguacuuuugaauaugugucacaaccuuuccugauggaccuggaaggcaagcaggguaauuuuaaaaaccucagagaguucgucuuuaagaacauugauggguacuucaaaaucuacaguaagcacaccccaauaaauuuaguuagggaccugccccagggauuuagcgcucuugagccuuugguggaucugccaaucggcauuaacaucacacgguuccagacucuacucgcccugcaucgcucuuaucuuaccccgggcgacuccucaagcggguggacagcaggagccgcugcauacuauguagguuaccugcaacccagaaccuuuuugcucaaauauaaugaaaacggcacgauuacugaugccguggacugcgcucuggauccuuuaagugagacaaaguguacccugaagucuuucacugucgaaaaagggaucuaccagacauccaauuuuagggugcagccaaccgagagcauaguucgguuccccaacauuacgaaucucugcccuuuuggagagguguucaacgccacccgcuucgcgucggucuaugcauggaaucgaaagagaaucucuaacuguguggccgacuacuccguacuuuacaauucagcuaguuuuagcacauucaaaugcuauggcguuuccccaacuaagcugaacgacuuguguuuuaccaauguguacgccgauucuuucgucauuaggggugacgaagugcggcagaucgcacccgggcaaacaggaaaaaucgcugauuauaacuacaagcuaccggacgauuuuacuggcugcgucauugccuggaauagcaacaaccuggacucaaaagugggcgggaauuauaacuaccucuaucgucuguuccgcaagaguaaucuuaagccuuuugagagagauauauccaccgaaaucuaccaggcgggaagcacacccuguaacgguguugagggcuucaauugcuacuuuccacugcagucuuauggguuccaaccuaccaacggagugggcuaccagcccuauaggguagucguguugucauuugaacuccugcacgccccagcaacuguuugcggucccaaaaagaguacgaauuuagugaaaaacaagugugucaauuucaacuuuaaugggcugacaggcaccggagugcuaacugagagcaacaaaaaguuccucccuuuccagcaguuuggccgggacauugcugauaccacagacgccguacgagauccacaaacccuggagauccuugacauaacuccgugcuccuucgggggagugucuguuauuacacccgguacgaauaccucgaaccaggucgcuguguuguaccaggacgugaauuguacugaagucccuguugccauccacgcagaucagcugacaccaaccuggcgcguguauagcacaggcuccaacguguuucaaacuagagccgggugccucaucggagcugagcauguaaacaauucauacgaaugugacauucccaucggcgcggguauuugcgcaaguuaucagacccagacgaacucuccuaggcgggcccgcagcgucgcuucccagucaauaaucgccuacaccaugagccugggggcagaaaauucuguggccuacuccaacaauaguauugcuaucccaacaaacuucacuaucagcguuaccacagaaauucuucccgugucuaugacuaagaccuccgucgauuguacgauguauauaugcggcgacucaacagaguguaguaaucuguugcuccaauacggcagcuuuugcacccagcugaacagagccuuaacuggaaucgcaguggagcaggauaaaaauacacaggaaguuuucgcgcaagugaagcagauuuauaaaaccccgccuaucaaggacuuugggggauucaacuuuucgcagauucugccagaucccuccaaaccuucuaagaggagcuucaucgaggaccuacucuuuaauaagguaacucuggcugaugccgguuucauaaaacaauacggcgacugucuuggggauaucgcagcccgugacuugauuugcgcucagaaguucaacggacugaccguccugcccccacucuuaacagaugaaaugaucgcccaguauacgucagcacugcuugcuggcaccauuacgagugguuggacauuuggggccggcgcggccuugcagaucccuuucgcuaugcaaauggcauaccgguuuaauggaauaggcgugacccagaacgugcucuaugagaaucagaaacugauugccaaccaguucaacuccgcuaucgggaagauucaagacucucuaagcuccacagccucagcacugggaaaacuccaggacgucguuaaucagaacgcgcaggcccugaauacucuugugaagcaauugagcaguaacuuuggcgcuaucucuuccguacugaaugauauauuaagccgacucgacccgcccgaagccgagguccagaucgauagacugauuaccgguaggcuucagucgcugcaaacguacgugacacagcaguugauccgcgcagcugagauucgggccucagcaaaccucgccgcuaccaaaaugucugaaugcguucuggggcagaguaagagaguggacuucuguggaaaaggcuaccaccuaauguccuuuccccaaagcgcgccacauggugucguguuccugcacguuacuuaugugccggcccaggagaagaauuuuaccacagcuccugcaaucugccacgauggcaaagcccauuuccccagggaaggggucuuuguaucuaacggaacucacugguucgugacccagcgcaauuuuuacgagccacagauaauuacaacggacaacaccuucguuagcggcaauugugauguggucaucgggaucgugaacaauacuguauaugacccccuccaaccugagcuggauuccuucaaggaggaacuugacaaauacuuuaagaaccauacaucaccagauguggacuugggagauauuaguggcaucaaugccagcgucguuaacauucagaaggaaauagaccgacugaaugagguggcuaaaaacuuaaacgaaucucucaucgaccugcaggagcuugguaaguaugagcaguacauuaaauggcccugguauaucuggcugggguucauugcaggacuaaucgccauagugauggucaccaucaugcucugcuguaugacuuccugcuguucaugccugaagggcuguugcaguugugguagcugcugcaaauuugaugaagacgauuccgagccuguguugaagggcguuaagcugcacuacacaugaggacuaguuauaagacugacuagcccgaugggccucccaacgggcccuccuccccuccuugcaccgagauuaauaaaaaaaaaaaaaaaaaaaaaaaaaaaaaaaaaaaaaaaaaaaaaaaaaaaaaaaaaaaaaaaaugcaucccccccccccccccccccccccccccccccaaaggcucuuuucagagccaccagaauu

SEQ ID NO: 165 - RNA, 4039 nt, Artificial Sequence
  SARS-CoV-2/Wuhan/WIV05/2019__EPI_ISL_402128 spike protein mRNA gc mod (1-1273)(K986P_V987P) R9519
aggagaaagcuuaccauguucguguuucuggugcugcugccccugguguccagccagugugugaaccugaccaccagaacacagcugccuccagccuacaccaacagcuucaccagaggcguguacuaccccgacaagguguucagauccagcgugcugcacucuacccaggaccuguuccugccuuucuucagcaacgugaccugguuccacgccauccacguguccggcaccaauggcaccaagagauucgacaaccccgugcugcccuucaacgacgggguguacuuugccagcaccgagaaguccaacaucaucagaggcuggaucuucggcaccacacuggacagcaagacccagagccugcugaucgugaacaacgccaccaacguggucaucaaagugugcgaguuccaguucugcaacgaccccuuccugggcgucuacuaccacaagaacaacaagagcuggauggaaagcgaguuccggguguacagcagcgccaacaacugcaccuucgaguacgugucccagccuuuccugauggaccuggaaggcaagcagggcaacuucaagaaccugcgcgaguucguguucaagaacaucgacggcuacuucaaaaucuacagcaagcacaccccuaucaaccucgugcgggaucugccucagggcuucucugcucuggaaccccugguggaucugcccaucggcaucaacaucacccgguuucagacacugcuggcccugcacagaagcuaccugacaccuggcgauagcagcagcggauggacagcuggugccgccgcuuacuaugugggcuaccugcagccuagaaccuuccugcugaaguacaacgagaacggcaccaucaccgacgccguggauugugcucuggauccucugagcgagacaaagugcacccugaaguccuucaccguggaaaagggcaucuaccagaccagcaacuuccgggugcagcccaccgaauccaucgugcgguuccccaauaucaccaaucugugccccuucggcgagguguucaaugccaccagauucgccucuguguacgccuggaaccggaagcggaucagcaauugcguggccgacuacuccgugcuguacaacuccgccagcuucagcaccuucaagugcuacggcguguccccuaccaagcugaacgaccugugcuucacaaacguguacgccgacagcuucgugauccggggagaugaagugcggcagauugccccuggacagacaggcaagaucgccgacuacaacuacaagcugcccgacgacuucaccggcugugugauugccuggaacagcaacaaccuggacuccaaagucggcggcaacuacaauuaccuguaccggcuguuccggaaguccaaucugaagcccuucgagcgggacaucagcaccgaaaucuaucaggccggcagcaccccuugcaacggcguggaaggcuucaacugcuacuucccacugcaguccuacggcuuucagcccacaaauggcgugggcuaucagcccuacagagugguggugcugagcuucgaacugcugcaugcuccugccacagugugcggcccuaagaaaagcaccaaucucgugaagaacaaaugcgugaacuucaacuucaacggccugaccggcaccggcgugcugacagagagcaacaagaaguuccugccauuccagcaguuuggccgggauaucgccgauaccacagacgccguuagagauccccagacacuggaaauccuggacaucaccccaugcagcuucggcggagugucugugaucaccccuggcaccaacaccagcaaucagguggcagugcuguaccaggacgugaacuguaccgaagugcccguggccauucacgccgaucagcugacaccuacauggcggguguacuccaccggcagcaauguguuucagaccagagccggcugucugaucggagccgagcacgugaacaauagcuacgagugcgacauccccaucggcgcuggcaucugugccagcuaccagacacagacaaacagccccagacgggcuagaagcguggccagccagagcaucauugccuacacaaugucucugggcgccgagaacagcguggccuacuccaacaacucuaucgcuauccccaccaacuucaccaucagcgugaccaccgagauccugccuguguccaugaccaagaccagcguggacugcaccauguacaucugcggcgauuccaccgagugcuccaaccugcugcugcaguacggcagcuucugcacccagcugaauagagcccugacagggaucgccguggaacaggacaagaacacccaagagguguucgcccaagugaagcaaaucuacaagaccccuccuaucaaggacuucggcggcuucaauuucagccagauucugcccgauccuagcaagcccagcaagcggagcuucaucgaggaccugcuguucaacaaagugacacuggccgacgccggcuucaucaagcaguauggcgauugucugggcgacauugccgccagggaucugauuugcgcccagaaguuuaacggacugacagugcugccuccucugcugaccgaugagaugaucgcccaguacacaucugcccugcuggccggcacaaucacaagcggcuggacauuuggagcuggcgccgcucugcagauccccuuugcuaugcagauggccuaccgguucaacggcaucggagugacccagaaugugcuguacgagaaccagaagcugaucgccaaccaguucaacagcgccaucggcaagauccaggacagccugagcagcacagcaagcgcccugggaaagcugcaggacguggucaaccagaaugcccaggcacugaacacccuggucaagcagcuguccuccaacuucggcgccaucagcucugugcugaacgauauccugagcagacuggacccuccugaggccgaggugcagaucgacagacugaucacaggcagacugcagagccuccagacauacgugacccagcagcugaucagagccgccgagauuagagccucugccaaucuggccgccaccaagaugucugagugugugcugggccagagcaagagaguggacuuuugcggcaagggcuaccaccugaugagcuucccucagucugccccucacggcgugguguuucugcacgugacauaugugcccgcucaagagaagaauuucaccaccgcuccagccaucugccacgacggcaaagcccacuuuccuagagaaggcguguucguguccaacggcacccauugguucgugacacagcggaacuucuacgagccccagaucaucaccaccgacaacaccuucgugucuggcaacugcgacguugugaucggcauugugaacaauaccguguacgacccucugcagcccgagcuggacagcuucaaagaggaacuggacaaguacuuuaagaaccacacaagccccgacguggaccugggcgauaucagcggaaucaaugccagcgucgugaacauccagaaagagaucgaccggcugaacgagguggccaagaaucugaacgagagccugaucgaccugcaagaacuggggaaguacgagcaguacaucaaguggcccugguacaucuggcugggcuuuaucgccggacugauugccaucgugauggucacaaucaugcuguguugcaugaccagcugcuguagcugccugaagggcuguuguagcuguggcagcugcugcaaguucgacgaggacgauucugagcccgugcugaagggcgugaaacugcacuacaccugaggacuaguuauaagacugacuagcccgaugggccucccaacgggcccuccuccccuccuugcaccgagauuaauaaaaaaaaaaaaaaaaaaaaaaaaaaaaaaaaaaaaaaaaaaaaaaaaaaaaaaaaaaaaaaaaugcaucccccccccccccccccccccccccccccccaaaggcucuuuucagagccaccagaauu

SEQ ID NO: 166 - RNA, 2263 nt, Artificial Sequence
  SARS-CoV-2/Wuhan/WIV05/2019__EPI_ISL_402128 spike protein mRNA gc (1-681) R9506, R9513
aggagaaagcuuaccauguucguguuccugguccuccugccccuggugagcucccagugcgugaaccucaccacccgcacgcagcugccgcccgccuacaccaacagcuucacccggggcgucuacuaccccgacaagguguuccgcuccagcgugcugcacuccacccaggaccucuuccugcccuucuucagcaacgucacgugguuccacgccauccacguguccgggaccaacggcaccaagcgguucgacaacccggugcugcccuucaacgacggggucuacuucgcgagcaccgagaaguccaacaucauccgcggcuggaucuucgggacgacccucgacagcaagacccagucccugcugaucgugaacaacgccaccaacguggucaucaaggugugcgaguuccaguucugcaacgaccccuuccucggcguguacuaccacaagaacaacaagagcuggauggaguccgaguuccgggucuacagcuccgccaacaacugcacguucgaguacgugagccagcccuuccugauggaccuggagggcaagcaggggaacuucaagaaccuccgcgaguucguguucaagaacaucgacggcuacuucaagaucuacuccaagcacaccccgaucaaccugguccgggaccugccccagggguucagcgcccucgagccccugguggaccugcccaucggcaucaacaucacccgcuuccagacccuccuggcccugcaccgguccuaccucacgccgggggacagcagcuccggcuggaccgcgggcgccgccgccuacuacgugggguaccugcagccccgcaccuuccugcucaaguacaacgagaacggcaccaucacggacgcggucgacugcgcccuggacccccugagcgagaccaagugcacccucaaguccuucaccguggagaaggggaucuaccagacgagcaacuuccgggugcagcccaccgaguccaucguccgcuucccgaacaucaccaaccugugccccuucggcgagguguucaacgccacccgguucgccagcgucuacgccuggaaccgcaagcggaucuccaacugcguggcggacuacagcgugcuguacaacuccgccagcuucuccacguucaagugcuacggcgucagccccaccaagcucaacgaccugugcuucaccaacguguacgccgacuccuucgugauccgcggggacgagguccggcagaucgcccccggccagaccgggaagaucgccgacuacaacuacaagcugccggacgacuucacgggcugcgugaucgcguggaacagcaacaaccucgacuccaaggucgggggcaacuacaacuaccuguaccgccuguuccgcaagagcaaccucaagcccuucgagcgggacaucuccaccgagaucuaccaggccggcagcacccccugcaacgggguggagggcuucaacugcuacuucccccugcaguccuacggguuccagccgaccaacggcgugggguaccagcccuaccggguggucgugcugagcuucgagcuccugcacgcccccgccacggugugcggccccaagaaguccaccaaccuggucaagaacaagugcgugaacuucaacuucaacggccucaccgggaccggcgugcugaccgagagcaacaagaaguuccugccguuccagcaguucgggcgcgacaucgccgacacgaccgacgcgguccgcgacccccagacccuggagauccucgacaucacccccugcagcuucggcgggguguccgugaucacgccgggcaccaacaccagcaaccaggucgccgugcuguaccaggacgugaacugcaccgagguccccguggccauccacgccgaccagcugacgcccaccuggcggguguacuccaccggcagcaacgucuuccagacccgcgccgggugccucaucggcgcggagcacgugaacaacuccuacgagugcgacauccccaucggggccggcaucugcgccagcuaccagacgcagaccaacuccccgugaggacuaguuauaagacugacuagcccgaugggccucccaacgggcccuccuccccuccuugcaccgagauuaauaaaaaaaaaaaaaaaaaaaaaaaaaaaaaaaaaaaaaaaaaaaaaaaaaaaaaaaaaaaaaaaaugcaucccccccccccccccccccccccccccccccaaaggcucuuuucagagccaccagaauu

SEQ ID NO: 167 - RNA, 2263 nt, Artificial Sequence
  SARS-CoV-2/Wuhan/WIV05/2019__EPI_ISL_402128 spike protein mRNA human (1-681) R9516
aggagaaagcuuaccauguucguguuucugguccuccuuccccugguuagcucccagugcgugaacuugaccacaagaacucaauuaccuccagccuacacuaauucuuucaccaggggcguauauuacccggacaagguguuucggucaaguguccugcacagcacacaggaucuauuccuccccuuuuucuccaacgugacuugguuucaugcuauccacguuucugggaccaauggaacaaaacgcuucgacaacccugugcugccauuuaaugauggugucuauuucgcaucgaccgagaagucaaacauuauacgaggcuggaucuuugggacuacacuugacagcaaaacccagagucuguugauugugaauaacgccacgaauguaguuaucaaggugugugaguuccaguuuugcaacgaucccuuccucggagucuacuaucauaaaaauaacaaguccuggauggagucugaguuccguguguacagcuccgcgaauaacuguacuuuugaauaugugucacaaccuuuccugauggaccuggaaggcaagcaggguaauuuuaaaaaccucagagaguucgucuuuaagaacauugauggguacuucaaaaucuacaguaagcacaccccaauaaauuuaguuagggaccugccccagggauuuagcgcucuugagccuuugguggaucugccaaucggcauuaacaucacacgguuccagacucuacucgcccugcaucgcucuuaucuuaccccgggcgacuccucaagcggguggacagcaggagccgcugcauacuauguagguuaccugcaacccagaaccuuuuugcucaaauauaaugaaaacggcacgauuacugaugccguggacugcgcucuggauccuuuaagugagacaaaguguacccugaagucuuucacugucgaaaaagggaucuaccagacauccaauuuuagggugcagccaaccgagagcauaguucgguuccccaacauuacgaaucucugcccuuuuggagagguguucaacgccacccgcuucgcgucggucuaugcauggaaucgaaagagaaucucuaacuguguggccgacuacuccguacuuuacaauucagcuaguuuuagcacauucaaaugcuauggcguuuccccaacuaagcugaacgacuuguguuuuaccaauguguacgccgauucuuucgucauuaggggugacgaagugcggcagaucgcacccgggcaaacaggaaaaaucgcugauuauaacuacaagcuaccggacgauuuuacuggcugcgucauugccuggaauagcaacaaccuggacucaaaagugggcgggaauuauaacuaccucuaucgucuguuccgcaagaguaaucuuaagccuuuugagagagauauauccaccgaaaucuaccaggcgggaagcacacccuguaacgguguugagggcuucaauugcuacuuuccacugcagucuuauggguuccaaccuaccaacggagugggcuaccagcccuauaggguagucguguugucauuugaacuccugcacgccccagcaacuguuugcggucccaaaaagaguacgaauuuagugaaaaacaagugugucaauuucaacuuuaaugggcugacaggcaccggagugcuaacugagagcaacaaaaaguuccucccuuuccagcaguuuggccgggacauugcugauaccacagacgccguacgagauccacaaacccuggagauccuugacauaacuccgugcuccuucgggggagugucuguuauuacacccgguacgaauaccucgaaccaggucgcuguguuguaccaggacgugaauuguacugaagucccuguugccauccacgcagaucagcugacaccaaccuggcgcguguauagcacaggcuccaacguguuucaaacuagagccgggugccucaucggagcugagcauguaaacaauucauacgaaugugacauucccaucggcgcggguauuugcgcaaguuaucagacccagacgaacucuccuugaggacuaguuauaagacugacuagcccgaugggccucccaacgggcccuccuccccuccuugcaccgagauuaauaaaaaaaaaaaaaaaaaaaaaaaaaaaaaaaaaaaaaaaaaaaaaaaaaaaaaaaaaaaaaaaaugcaucccccccccccccccccccccccccccccccaaaggcucuuuucagagccaccagaauu

SEQ ID NO: 168 - RNA, 2263 nt, Artificial Sequence
  SARS-CoV-2/Wuhan/WIV05/2019__EPI_ISL_402128 spike protein mRNA gc mod (1-681) R9518
aggagaaagcuuaccauguucguguuucuggugcugcugccccugguguccagccagugugugaaccugaccaccagaacacagcugccuccagccuacaccaacagcuucaccagaggcguguacuaccccgacaagguguucagauccagcgugcugcacucuacccaggaccuguuccugccuuucuucagcaacgugaccugguuccacgccauccacguguccggcaccaauggcaccaagagauucgacaaccccgugcugcccuucaacgacgggguguacuuugccagcaccgagaaguccaacaucaucagaggcuggaucuucggcaccacacuggacagcaagacccagagccugcugaucgugaacaacgccaccaacguggucaucaaagugugcgaguuccaguucugcaacgaccccuuccugggcgucuacuaccacaagaacaacaagagcuggauggaaagcgaguuccggguguacagcagcgccaacaacugcaccuucgaguacgugucccagccuuuccugauggaccuggaaggcaagcagggcaacuucaagaaccugcgcgaguucguguucaagaacaucgacggcuacuucaaaaucuacagcaagcacaccccuaucaaccucgugcgggaucugccucagggcuucucugcucuggaaccccugguggaucugcccaucggcaucaacaucacccgguuucagacacugcuggcccugcacagaagcuaccugacaccuggcgauagcagcagcggauggacagcuggugccgccgcuuacuaugugggcuaccugcagccuagaaccuuccugcugaaguacaacgagaacggcaccaucaccgacgccguggauugugcucuggauccucugagcgagacaaagugcacccugaaguccuucaccguggaaaagggcaucuaccagaccagcaacuuccgggugcagcccaccgaauccaucgugcgguuccccaauaucaccaaucugugccccuucggcgagguguucaaugccaccagauucgccucuguguacgccuggaaccggaagcggaucagcaauugcguggccgacuacuccgugcuguacaacuccgccagcuucagcaccuucaagugcuacggcguguccccuaccaagcugaacgaccugugcuucacaaacguguacgccgacagcuucgugauccggggagaugaagugcggcagauugccccuggacagacaggcaagaucgccgacuacaacuacaagcugcccgacgacuucaccggcugugugauugccuggaacagcaacaaccuggacuccaaagucggcggcaacuacaauuaccuguaccggcuguuccggaaguccaaucugaagcccuucgagcgggacaucagcaccgaaaucuaucaggccggcagcaccccuugcaacggcguggaaggcuucaacugcuacuucccacugcaguccuacggcuuucagcccacaaauggcgugggcuaucagcccuacagagugguggugcugagcuucgaacugcugcaugcuccugccacagugugcggcccuaagaaaagcaccaaucucgugaagaacaaaugcgugaacuucaacuucaacggccugaccggcaccggcgugcugacagagagcaacaagaaguuccugccauuccagcaguuuggccgggauaucgccgauaccacagacgccguuagagauccccagacacuggaaauccuggacaucaccccaugcagcuucggcggagugucugugaucaccccuggcaccaacaccagcaaucagguggcagugcuguaccaggacgugaacuguaccgaagugcccguggccauucacgccgaucagcugacaccuacauggcggguguacuccaccggcagcaauguguuucagaccagagccggcugucugaucggagccgagcacgugaacaauagcuacgagugcgacauccccaucggcgcuggcaucugugccagcuaccagacacagacaaacagccccugaggacuaguuauaagacugacuagcccgaugggccucccaacgggcccuccuccccuccuugcaccgagauuaauaaaaaaaaaaaaaaaaaaaaaaaaaaaaaaaaaaaaaaaaaaaaaaaaaaaaaaaaaaaaaaaaugcaucccccccccccccccccccccccccccccccaaaggcucuuuucagagccaccagaauu

SEQ ID NO: 169 - RNA, 4039 nt, Artificial Sequence
  SARS-CoV-2/Wuhan/WIV05/2019__EPI_ISL_402128 spike protein mRNA gc (1-1273)
gggagaaagcuuaccauguucguguuccugguccuccugccccuggugagcucccagugcgugaaccucaccacccgcacgcagcugccgcccgccuacaccaacagcuucacccggggcgucuacuaccccgacaagguguuccgcuccagcgugcugcacuccacccaggaccucuuccugcccuucuucagcaacgucacgugguuccacgccauccacguguccgggaccaacggcaccaagcgguucgacaacccggugcugcccuucaacgacggggucuacuucgcgagcaccgagaaguccaacaucauccgcggcuggaucuucgggacgacccucgacagcaagacccagucccugcugaucgugaacaacgccaccaacguggucaucaaggugugcgaguuccaguucugcaacgaccccuuccucggcguguacuaccacaagaacaacaagagcuggauggaguccgaguuccgggucuacagcuccgccaacaacugcacguucgaguacgugagccagcccuuccugauggaccuggagggcaagcaggggaacuucaagaaccuccgcgaguucguguucaagaacaucgacggcuacuucaagaucuacuccaagcacaccccgaucaaccugguccgggaccugccccagggguucagcgcccucgagccccugguggaccugcccaucggcaucaacaucacccgcuuccagacccuccuggcccugcaccgguccuaccucacgccgggggacagcagcuccggcuggaccgcgggcgccgccgccuacuacgugggguaccugcagccccgcaccuuccugcucaaguacaacgagaacggcaccaucacggacgcggucgacugcgcccuggacccccugagcgagaccaagugcacccucaaguccuucaccguggagaaggggaucuaccagacgagcaacuuccgggugcagcccaccgaguccaucguccgcuucccgaacaucaccaaccugugccccuucggcgagguguucaacgccacccgguucgccagcgucuacgccuggaaccgcaagcggaucuccaacugcguggcggacuacagcgugcuguacaacuccgccagcuucuccacguucaagugcuacggcgucagccccaccaagcucaacgaccugugcuucaccaacguguacgccgacuccuucgugauccgcggggacgagguccggcagaucgcccccggccagaccgggaagaucgccgacuacaacuacaagcugccggacgacuucacgggcugcgugaucgcguggaacagcaacaaccucgacuccaaggucgggggcaacuacaacuaccuguaccgccuguuccgcaagagcaaccucaagcccuucgagcgggacaucuccaccgagaucuaccaggccggcagcacccccugcaacgggguggagggcuucaacugcuacuucccccugcaguccuacggguuccagccgaccaacggcgugggguaccagcccuaccggguggucgugcugagcuucgagcuccugcacgcccccgccacggugugcggccccaagaaguccaccaaccuggucaagaacaagugcgugaacuucaacuucaacggccucaccgggaccggcgugcugaccgagagcaacaagaaguuccugccguuccagcaguucgggcgcgacaucgccgacacgaccgacgcgguccgcgacccccagacccuggagauccucgacaucacccccugcagcuucggcgggguguccgugaucacgccgggcaccaacaccagcaaccaggucgccgugcuguaccaggacgugaacugcaccgagguccccguggccauccacgccgaccagcugacgcccaccuggcggguguacuccaccggcagcaacgucuuccagacccgcgccgggugccucaucggcgcggagcacgugaacaacuccuacgagugcgacauccccaucggggccggcaucugcgccagcuaccagacgcagaccaacuccccgcggcgcgcccggagcguggcgucccagagcaucaucgccuacaccaugucccugggcgccgagaacagcgucgccuacuccaacaacagcaucgccauccccaccaacuucacgaucuccgugaccaccgagauccugcccgugagcaugaccaagacgagcgucgacugcaccauguacaucugcggggacuccaccgagugcagcaaccuccugcugcaguacggcuccuucugcacccagcucaaccgcgcgcugacggggaucgccguggagcaggacaagaacacccaggagguguucgcccaggucaagcagaucuacaagacgcccccgaucaaggacuucggcggguucaacuucagccagauccugcccgaccccuccaagcccagcaagcgguccuucaucgaggaccuccuguucaacaaggugacccuggccgacgccggcuucaucaagcaguacggcgacugccucggggacaucgcggcccgcgaccugaucugcgcccagaaguucaacggccugaccgugcucccgccccugcugaccgacgagaugaucgcccaguacaccagcgcccuccuggcggggaccaucacguccggcuggaccuucggggccggcgccgcccugcagauccccuucgcgaugcagauggccuaccgguucaacggcaucggggucacccagaacgugcucuacgagaaccagaagcugaucgccaaccaguucaacagcgccaucggcaagauccaggacucccugagcuccaccgccagcgcgcucgggaagcugcaggacguggucaaccagaacgcccaggcccugaacacgcucgugaagcagcuguccagcaacuucggcgccaucuccagcgugcugaacgacauccucucccgccuggacaaggucgaggccgaggugcagaucgaccggcugaucaccgggcgccuccagagccugcagaccuacgugacccagcagcugauccgggcggccgagauccgcgccagcgccaaccucgccgcgaccaagauguccgagugcguccugggccagagcaagcggguggacuucugcggcaagggguaccaccugauguccuucccccagagcgccccgcacggcguggucuuccuccacgugacguacguccccgcccaggagaagaacuucaccaccgcccccgcgaucugccacgacgggaaggcccacuucccccgcgagggcguguucguguccaacgggacccacugguucgucacgcagcggaacuucuacgagccgcagaucaucaccaccgacaacaccuucgugagcggcaacugcgacguggucaucggcaucgugaacaacacgguguacgacccccugcagcccgagcuggacuccuucaaggaggagcucgacaaguacuucaagaaccacaccagccccgacgucgaccugggggacaucuccggcaucaacgccagcguggugaacauccagaaggagaucgaccgccugaacgaggucgccaagaaccucaacgagucccugaucgaccugcaggagcucgggaaguacgagcaguacaucaaguggccgugguacaucuggcugggcuucaucgccggccugaucgcgaucgugauggugaccaucaugcucugcugcaugaccagcugcugcuccugccugaaggggugcugcagcugcggcuccugcugcaaguucgacgaggacgacagcgagcccguccugaagggggugaagcuccacuacacgugaggacuaguuauaagacugacuagcccgaugggccucccaacgggcccuccuccccuccuugcaccgagauuaauaaaaaaaaaaaaaaaaaaaaaaaaaaaaaaaaaaaaaaaaaaaaaaaaaaaaaaaaaaaaaaaaugcaucccccccccccccccccccccccccccccccaaaggcucuuuucagagccaccagaauu

SEQ ID NO: 170 - RNA, 4039 nt, Artificial Sequence
  SARS-CoV-2/Wuhan/WIV05/2019__EPI_ISL_402128 spike protein mRNA gc (1-1273)(K986P_V987P)
gggagaaagcuuaccauguucguguuccugguccuccugccccuggugagcucccagugcgugaaccucaccacccgcacgcagcugccgcccgccuacaccaacagcuucacccggggcgucuacuaccccgacaagguguuccgcuccagcgugcugcacuccacccaggaccucuuccugcccuucuucagcaacgucacgugguuccacgccauccacguguccgggaccaacggcaccaagcgguucgacaacccggugcugcccuucaacgacggggucuacuucgcgagcaccgagaaguccaacaucauccgcggcuggaucuucgggacgacccucgacagcaagacccagucccugcugaucgugaacaacgccaccaacguggucaucaaggugugcgaguuccaguucugcaacgaccccuuccucggcguguacuaccacaagaacaacaagagcuggauggaguccgaguuccgggucuacagcuccgccaacaacugcacguucgaguacgugagccagcccuuccugauggaccuggagggcaagcaggggaacuucaagaaccuccgcgaguucguguucaagaacaucgacggcuacuucaagaucuacuccaagcacaccccgaucaaccugguccgggaccugccccagggguucagcgcccucgagccccugguggaccugcccaucggcaucaacaucacccgcuuccagacccuccuggcccugcaccgguccuaccucacgccgggggacagcagcuccggcuggaccgcgggcgccgccgccuacuacgugggguaccugcagccccgcaccuuccugcucaaguacaacgagaacggcaccaucacggacgcggucgacugcgcccuggacccccugagcgagaccaagugcacccucaaguccuucaccguggagaaggggaucuaccagacgagcaacuuccgggugcagcccaccgaguccaucguccgcuucccgaacaucaccaaccugugccccuucggcgagguguucaacgccacccgguucgccagcgucuacgccuggaaccgcaagcggaucuccaacugcguggcggacuacagcgugcuguacaacuccgccagcuucuccacguucaagugcuacggcgucagccccaccaagcucaacgaccugugcuucaccaacguguacgccgacuccuucgugauccgcggggacgagguccggcagaucgcccccggccagaccgggaagaucgccgacuacaacuacaagcugccggacgacuucacgggcugcgugaucgcguggaacagcaacaaccucgacuccaaggucgggggcaacuacaacuaccuguaccgccuguuccgcaagagcaaccucaagcccuucgagcgggacaucuccaccgagaucuaccaggccggcagcacccccugcaacgggguggagggcuucaacugcuacuucccccugcaguccuacggguuccagccgaccaacggcgugggguaccagcccuaccggguggucgugcugagcuucgagcuccugcacgcccccgccacggugugcggccccaagaaguccaccaaccuggucaagaacaagugcgugaacuucaacuucaacggccucaccgggaccggcgugcugaccgagagcaacaagaaguuccugccguuccagcaguucgggcgcgacaucgccgacacgaccgacgcgguccgcgacccccagacccuggagauccucgacaucacccccugcagcuucggcgggguguccgugaucacgccgggcaccaacaccagcaaccaggucgccgugcuguaccaggacgugaacugcaccgagguccccguggccauccacgccgaccagcugacgcccaccuggcggguguacuccaccggcagcaacgucuuccagacccgcgccgggugccucaucggcgcggagcacgugaacaacuccuacgagugcgacauccccaucggggccggcaucugcgccagcuaccagacgcagaccaacuccccgcggcgcgcccggagcguggcgucccagagcaucaucgccuacaccaugucccugggcgccgagaacagcgucgccuacuccaacaacagcaucgccauccccaccaacuucacgaucuccgugaccaccgagauccugcccgugagcaugaccaagacgagcgucgacugcaccauguacaucugcggggacuccaccgagugcagcaaccuccugcugcaguacggcuccuucugcacccagcucaaccgcgcgcugacggggaucgccguggagcaggacaagaacacccaggagguguucgcccaggucaagcagaucuacaagacgcccccgaucaaggacuucggcggguucaacuucagccagauccugcccgaccccuccaagcccagcaagcgguccuucaucgaggaccuccuguucaacaaggugacccuggccgacgccggcuucaucaagcaguacggcgacugccucggggacaucgcggcccgcgaccugaucugcgcccagaaguucaacggccugaccgugcucccgccccugcugaccgacgagaugaucgcccaguacaccagcgcccuccuggcggggaccaucacguccggcuggaccuucggggccggcgccgcccugcagauccccuucgcgaugcagauggccuaccgguucaacggcaucggggucacccagaacgugcucuacgagaaccagaagcugaucgccaaccaguucaacagcgccaucggcaagauccaggacucccugagcuccaccgccagcgcgcucgggaagcugcaggacguggucaaccagaacgcccaggcccugaacacgcucgugaagcagcuguccagcaacuucggcgccaucuccagcgugcugaacgacauccucucccgccuggacccgcccgaggccgaggugcagaucgaccggcugaucaccgggcgccuccagagccugcagaccuacgugacccagcagcugauccgggcggccgagauccgcgccagcgccaaccucgccgcgaccaagauguccgagugcguccugggccagagcaagcggguggacuucugcggcaagggguaccaccugauguccuucccccagagcgccccgcacggcguggucuuccuccacgugacguacguccccgcccaggagaagaacuucaccaccgcccccgcgaucugccacgacgggaaggcccacuucccccgcgagggcguguucguguccaacgggacccacugguucgucacgcagcggaacuucuacgagccgcagaucaucaccaccgacaacaccuucgugagcggcaacugcgacguggucaucggcaucgugaacaacacgguguacgacccccugcagcccgagcuggacuccuucaaggaggagcucgacaaguacuucaagaaccacaccagccccgacgucgaccugggggacaucuccggcaucaacgccagcguggugaacauccagaaggagaucgaccgccugaacgaggucgccaagaaccucaacgagucccugaucgaccugcaggagcucgggaaguacgagcaguacaucaaguggccgugguacaucuggcugggcuucaucgccggccugaucgcgaucgugauggugaccaucaugcucugcugcaugaccagcugcugcuccugccugaaggggugcugcagcugcggcuccugcugcaaguucgacgaggacgacagcgagcccguccugaagggggugaagcuccacuacacgugaggacuaguuauaagacugacuagcccgaugggccucccaacgggcccuccuccccuccuugcaccgagauuaauaaaaaaaaaaaaaaaaaaaaaaaaaaaaaaaaaaaaaaaaaaaaaaaaaaaaaaaaaaaaaaaaugcaucccccccccccccccccccccccccccccccaaaggcucuuuucagagccaccagaauu

SEQ ID NO: 171 - RNA, 4039 nt, Artificial Sequence
  SARS-CoV-2/Wuhan/WIV05/2019__EPI_ISL_402128 spike protein mRNA human (1-1273)(K986P_V987P)
gggagaaagcuuaccauguucguguuucugguccuccuuccccugguuagcucccagugcgugaacuugaccacaagaacucaauuaccuccagccuacacuaauucuuucaccaggggcguauauuacccggacaagguguuucggucaaguguccugcacagcacacaggaucuauuccuccccuuuuucuccaacgugacuugguuucaugcuauccacguuucugggaccaauggaacaaaacgcuucgacaacccugugcugccauuuaaugauggugucuauuucgcaucgaccgagaagucaaacauuauacgaggcuggaucuuugggacuacacuugacagcaaaacccagagucuguugauugugaauaacgccacgaauguaguuaucaaggugugugaguuccaguuuugcaacgaucccuuccucggagucuacuaucauaaaaauaacaaguccuggauggagucugaguuccguguguacagcuccgcgaauaacuguacuuuugaauaugugucacaaccuuuccugauggaccuggaaggcaagcaggguaauuuuaaaaaccucagagaguucgucuuuaagaacauugauggguacuucaaaaucuacaguaagcacaccccaauaaauuuaguuagggaccugccccagggauuuagcgcucuugagccuuugguggaucugccaaucggcauuaacaucacacgguuccagacucuacucgcccugcaucgcucuuaucuuaccccgggcgacuccucaagcggguggacagcaggagccgcugcauacuauguagguuaccugcaacccagaaccuuuuugcucaaauauaaugaaaacggcacgauuacugaugccguggacugcgcucuggauccuuuaagugagacaaaguguacccugaagucuuucacugucgaaaaagggaucuaccagacauccaauuuuagggugcagccaaccgagagcauaguucgguuccccaacauuacgaaucucugcccuuuuggagagguguucaacgccacccgcuucgcgucggucuaugcauggaaucgaaagagaaucucuaacuguguggccgacuacuccguacuuuacaauucagcuaguuuuagcacauucaaaugcuauggcguuuccccaacuaagcugaacgacuuguguuuuaccaauguguacgccgauucuuucgucauuaggggugacgaagugcggcagaucgcacccgggcaaacaggaaaaaucgcugauuauaacuacaagcuaccggacgauuuuacuggcugcgucauugccuggaauagcaacaaccuggacucaaaagugggcgggaauuauaacuaccucuaucgucuguuccgcaagaguaaucuuaagccuuuugagagagauauauccaccgaaaucuaccaggcgggaagcacacccuguaacgguguugagggcuucaauugcuacuuuccacugcagucuuauggguuccaaccuaccaacggagugggcuaccagcccuauaggguagucguguugucauuugaacuccugcacgccccagcaacuguuugcggucccaaaaagaguacgaauuuagugaaaaacaagugugucaauuucaacuuuaaugggcugacaggcaccggagugcuaacugagagcaacaaaaaguuccucccuuuccagcaguuuggccgggacauugcugauaccacagacgccguacgagauccacaaacccuggagauccuugacauaacuccgugcuccuucgggggagugucuguuauuacacccgguacgaauaccucgaaccaggucgcuguguuguaccaggacgugaauuguacugaagucccuguugccauccacgcagaucagcugacaccaaccuggcgcguguauagcacaggcuccaacguguuucaaacuagagccgggugccucaucggagcugagcauguaaacaauucauacgaaugugacauucccaucggcgcggguauuugcgcaaguuaucagacccagacgaacucuccuaggcgggcccgcagcgucgcuucccagucaauaaucgccuacaccaugagccugggggcagaaaauucuguggccuacuccaacaauaguauugcuaucccaacaaacuucacuaucagcguuaccacagaaauucuucccgugucuaugacuaagaccuccgucgauuguacgauguauauaugcggcgacucaacagaguguaguaaucuguugcuccaauacggcagcuuuugcacccagcugaacagagccuuaacuggaaucgcaguggagcaggauaaaaauacacaggaaguuuucgcgcaagugaagcagauuuauaaaaccccgccuaucaaggacuuugggggauucaacuuuucgcagauucugccagaucccuccaaaccuucuaagaggagcuucaucgaggaccuacucuuuaauaagguaacucuggcugaugccgguuucauaaaacaauacggcgacugucuuggggauaucgcagcccgugacuugauuugcgcucagaaguucaacggacugaccguccugcccccacucuuaacagaugaaaugaucgcccaguauacgucagcacugcuugcuggcaccauuacgagugguuggacauuuggggccggcgcggccuugcagaucccuuucgcuaugcaaauggcauaccgguuuaauggaauaggcgugacccagaacgugcucuaugagaaucagaaacugauugccaaccaguucaacuccgcuaucgggaagauucaagacucucuaagcuccacagccucagcacugggaaaacuccaggacgucguuaaucagaacgcgcaggcccugaauacucuugugaagcaauugagcaguaacuuuggcgcuaucucuuccguacugaaugauauauuaagccgacucgacccgcccgaagccgagguccagaucgauagacugauuaccgguaggcuucagucgcugcaaacguacgugacacagcaguugauccgcgcagcugagauucgggccucagcaaaccucgccgcuaccaaaaugucugaaugcguucuggggcagaguaagagaguggacuucuguggaaaaggcuaccaccuaauguccuuuccccaaagcgcgccacauggugucguguuccugcacguuacuuaugugccggcccaggagaagaauuuuaccacagcuccugcaaucugccacgauggcaaagcccauuuccccagggaaggggucuuuguaucuaacggaacucacugguucgugacccagcgcaauuuuuacgagccacagauaauuacaacggacaacaccuucguuagcggcaauugugauguggucaucgggaucgugaacaauacuguauaugacccccuccaaccugagcuggauuccuucaaggaggaacuugacaaauacuuuaagaaccauacaucaccagauguggacuugggagauauuaguggcaucaaugccagcgucguuaacauucagaaggaaauagaccgacugaaugagguggcuaaaaacuuaaacgaaucucucaucgaccugcaggagcuugguaaguaugagcaguacauuaaauggcccugguauaucuggcugggguucauugcaggacuaaucgccauagugauggucaccaucaugcucugcuguaugacuuccugcuguucaugccugaagggcuguugcaguugugguagcugcugcaaauuugaugaagacgauuccgagccuguguugaagggcguuaagcugcacuacacaugaggacuaguuauaagacugacuagcccgaugggccucccaacgggcccuccuccccuccuugcaccgagauuaauaaaaaaaaaaaaaaaaaaaaaaaaaaaaaaaaaaaaaaaaaaaaaaaaaaaaaaaaaaaaaaaaugcaucccccccccccccccccccccccccccccccaaaggcucuuuucagagccaccagaauu

SEQ ID NO: 172 - RNA, 4039 nt, Artificial Sequence
  SARS-CoV-2/Wuhan/WIV05/2019__EPI_ISL_402128 spike protein mRNA gc mod (1-1273)(K986P_V987P)
gggagaaagcuuaccauguucguguuucuggugcugcugccccugguguccagccagugugugaaccugaccaccagaacacagcugccuccagccuacaccaacagcuucaccagaggcguguacuaccccgacaagguguucagauccagcgugcugcacucuacccaggaccuguuccugccuuucuucagcaacgugaccugguuccacgccauccacguguccggcaccaauggcaccaagagauucgacaaccccgugcugcccuucaacgacgggguguacuuugccagcaccgagaaguccaacaucaucagaggcuggaucuucggcaccacacuggacagcaagacccagagccugcugaucgugaacaacgccaccaacguggucaucaaagugugcgaguuccaguucugcaacgaccccuuccugggcgucuacuaccacaagaacaacaagagcuggauggaaagcgaguuccggguguacagcagcgccaacaacugcaccuucgaguacgugucccagccuuuccugauggaccuggaaggcaagcagggcaacuucaagaaccugcgcgaguucguguucaagaacaucgacggcuacuucaaaaucuacagcaagcacaccccuaucaaccucgugcgggaucugccucagggcuucucugcucuggaaccccugguggaucugcccaucggcaucaacaucacccgguuucagacacugcuggcccugcacagaagcuaccugacaccuggcgauagcagcagcggauggacagcuggugccgccgcuuacuaugugggcuaccugcagccuagaaccuuccugcugaaguacaacgagaacggcaccaucaccgacgccguggauugugcucuggauccucugagcgagacaaagugcacccugaaguccuucaccguggaaaagggcaucuaccagaccagcaacuuccgggugcagcccaccgaauccaucgugcgguuccccaauaucaccaaucugugccccuucggcgagguguucaaugccaccagauucgccucuguguacgccuggaaccggaagcggaucagcaauugcguggccgacuacuccgugcuguacaacuccgccagcuucagcaccuucaagugcuacggcguguccccuaccaagcugaacgaccugugcuucacaaacguguacgccgacagcuucgugauccggggagaugaagugcggcagauugccccuggacagacaggcaagaucgccgacuacaacuacaagcugcccgacgacuucaccggcugugugauugccuggaacagcaacaaccuggacuccaaagucggcggcaacuacaauuaccuguaccggcuguuccggaaguccaaucugaagcccuucgagcgggacaucagcaccgaaaucuaucaggccggcagcaccccuugcaacggcguggaaggcuucaacugcuacuucccacugcaguccuacggcuuucagcccacaaauggcgugggcuaucagcccuacagagugguggugcugagcuucgaacugcugcaugcuccugccacagugugcggcccuaagaaaagcaccaaucucgugaagaacaaaugcgugaacuucaacuucaacggccugaccggcaccggcgugcugacagagagcaacaagaaguuccugccauuccagcaguuuggccgggauaucgccgauaccacagacgccguuagagauccccagacacuggaaauccuggacaucaccccaugcagcuucggcggagugucugugaucaccccuggcaccaacaccagcaaucagguggcagugcuguaccaggacgugaacuguaccgaagugcccguggccauucacgccgaucagcugacaccuacauggcggguguacuccaccggcagcaauguguuucagaccagagccggcugucugaucggagccgagcacgugaacaauagcuacgagugcgacauccccaucggcgcuggcaucugugccagcuaccagacacagacaaacagccccagacgggcuagaagcguggccagccagagcaucauugccuacacaaugucucugggcgccgagaacagcguggccuacuccaacaacucuaucgcuauccccaccaacuucaccaucagcgugaccaccgagauccugccuguguccaugaccaagaccagcguggacugcaccauguacaucugcggcgauuccaccgagugcuccaaccugcugcugcaguacggcagcuucugcacccagcugaauagagcccugacagggaucgccguggaacaggacaagaacacccaagagguguucgcccaagugaagcaaaucuacaagaccccuccuaucaaggacuucggcggcuucaauuucagccagauucugcccgauccuagcaagcccagcaagcggagcuucaucgaggaccugcuguucaacaaagugacacuggccgacgccggcuucaucaagcaguauggcgauugucugggcgacauugccgccagggaucugauuugcgcccagaaguuuaacggacugacagugcugccuccucugcugaccgaugagaugaucgcccaguacacaucugcccugcuggccggcacaaucacaagcggcuggacauuuggagcuggcgccgcucugcagauccccuuugcuaugcagauggccuaccgguucaacggcaucggagugacccagaaugugcuguacgagaaccagaagcugaucgccaaccaguucaacagcgccaucggcaagauccaggacagccugagcagcacagcaagcgcccugggaaagcugcaggacguggucaaccagaaugcccaggcacugaacacccuggucaagcagcuguccuccaacuucggcgccaucagcucugugcugaacgauauccugagcagacuggacccuccugaggccgaggugcagaucgacagacugaucacaggcagacugcagagccuccagacauacgugacccagcagcugaucagagccgccgagauuagagccucugccaaucuggccgccaccaagaugucugagugugugcugggccagagcaagagaguggacuuuugcggcaagggcuaccaccugaugagcuucccucagucugccccucacggcgugguguuucugcacgugacauaugugcccgcucaagagaagaauuucaccaccgcuccagccaucugccacgacggcaaagcccacuuuccuagagaaggcguguucguguccaacggcacccauugguucgugacacagcggaacuucuacgagccccagaucaucaccaccgacaacaccuucgugucuggcaacugcgacguugugaucggcauugugaacaauaccguguacgacccucugcagcccgagcuggacagcuucaaagaggaacuggacaaguacuuuaagaaccacacaagccccgacguggaccugggcgauaucagcggaaucaaugccagcgucgugaacauccagaaagagaucgaccggcugaacgagguggccaagaaucugaacgagagccugaucgaccugcaagaacuggggaaguacgagcaguacaucaaguggcccugguacaucuggcugggcuuuaucgccggacugauugccaucgugauggucacaaucaugcuguguugcaugaccagcugcuguagcugccugaagggcuguuguagcuguggcagcugcugcaaguucgacgaggacgauucugagcccgugcugaagggcgugaaacugcacuacaccugaggacuaguuauaagacugacuagcccgaugggccucccaacgggcccuccuccccuccuugcaccgagauuaauaaaaaaaaaaaaaaaaaaaaaaaaaaaaaaaaaaaaaaaaaaaaaaaaaaaaaaaaaaaaaaaaugcaucccccccccccccccccccccccccccccccaaaggcucuuuucagagccaccagaauu

SEQ ID NO: 173 - RNA, 2263 nt, Artificial Sequence
  SARS-CoV-2/Wuhan/WIV05/2019__EPI_ISL_402128 spike protein mRNA gc (1-681)
gggagaaagcuuaccauguucguguuccugguccuccugccccuggugagcucccagugcgugaaccucaccacccgcacgcagcugccgcccgccuacaccaacagcuucacccggggcgucuacuaccccgacaagguguuccgcuccagcgugcugcacuccacccaggaccucuuccugcccuucuucagcaacgucacgugguuccacgccauccacguguccgggaccaacggcaccaagcgguucgacaacccggugcugcccuucaacgacggggucuacuucgcgagcaccgagaaguccaacaucauccgcggcuggaucuucgggacgacccucgacagcaagacccagucccugcugaucgugaacaacgccaccaacguggucaucaaggugugcgaguuccaguucugcaacgaccccuuccucggcguguacuaccacaagaacaacaagagcuggauggaguccgaguuccgggucuacagcuccgccaacaacugcacguucgaguacgugagccagcccuuccugauggaccuggagggcaagcaggggaacuucaagaaccuccgcgaguucguguucaagaacaucgacggcuacuucaagaucuacuccaagcacaccccgaucaaccugguccgggaccugccccagggguucagcgcccucgagccccugguggaccugcccaucggcaucaacaucacccgcuuccagacccuccuggcccugcaccgguccuaccucacgccgggggacagcagcuccggcuggaccgcgggcgccgccgccuacuacgugggguaccugcagccccgcaccuuccugcucaaguacaacgagaacggcaccaucacggacgcggucgacugcgcccuggacccccugagcgagaccaagugcacccucaaguccuucaccguggagaaggggaucuaccagacgagcaacuuccgggugcagcccaccgaguccaucguccgcuucccgaacaucaccaaccugugccccuucggcgagguguucaacgccacccgguucgccagcgucuacgccuggaaccgcaagcggaucuccaacugcguggcggacuacagcgugcuguacaacuccgccagcuucuccacguucaagugcuacggcgucagccccaccaagcucaacgaccugugcuucaccaacguguacgccgacuccuucgugauccgcggggacgagguccggcagaucgcccccggccagaccgggaagaucgccgacuacaacuacaagcugccggacgacuucacgggcugcgugaucgcguggaacagcaacaaccucgacuccaaggucgggggcaacuacaacuaccuguaccgccuguuccgcaagagcaaccucaagcccuucgagcgggacaucuccaccgagaucuaccaggccggcagcacccccugcaacgggguggagggcuucaacugcuacuucccccugcaguccuacggguuccagccgaccaacggcgugggguaccagcccuaccggguggucgugcugagcuucgagcuccugcacgcccccgccacggugugcggccccaagaaguccaccaaccuggucaagaacaagugcgugaacuucaacuucaacggccucaccgggaccggcgugcugaccgagagcaacaagaaguuccugccguuccagcaguucgggcgcgacaucgccgacacgaccgacgcgguccgcgacccccagacccuggagauccucgacaucacccccugcagcuucggcgggguguccgugaucacgccgggcaccaacaccagcaaccaggucgccgugcuguaccaggacgugaacugcaccgagguccccguggccauccacgccgaccagcugacgcccaccuggcggguguacuccaccggcagcaacgucuuccagacccgcgccgggugccucaucggcgcggagcacgugaacaacuccuacgagugcgacauccccaucggggccggcaucugcgccagcuaccagacgcagaccaacuccccgugaggacuaguuauaagacugacuagcccgaugggccucccaacgggcccuccuccccuccuugcaccgagauuaauaaaaaaaaaaaaaaaaaaaaaaaaaaaaaaaaaaaaaaaaaaaaaaaaaaaaaaaaaaaaaaaaugcaucccccccccccccccccccccccccccccccaaaggcucuuuucagagccaccagaauu

SEQ ID NO: 174 - RNA, 2263 nt, Artificial Sequence
  SARS-CoV-2/Wuhan/WIV05/2019__EPI_ISL_402128 spike protein mRNA human (1-681)
gggagaaagcuuaccauguucguguuucugguccuccuuccccugguuagcucccagugcgugaacuugaccacaagaacucaauuaccuccagccuacacuaauucuuucaccaggggcguauauuacccggacaagguguuucggucaaguguccugcacagcacacaggaucuauuccuccccuuuuucuccaacgugacuugguuucaugcuauccacguuucugggaccaauggaacaaaacgcuucgacaacccugugcugccauuuaaugauggugucuauuucgcaucgaccgagaagucaaacauuauacgaggcuggaucuuugggacuacacuugacagcaaaacccagagucuguugauugugaauaacgccacgaauguaguuaucaaggugugugaguuccaguuuugcaacgaucccuuccucggagucuacuaucauaaaaauaacaaguccuggauggagucugaguuccguguguacagcuccgcgaauaacuguacuuuugaauaugugucacaaccuuuccugauggaccuggaaggcaagcaggguaauuuuaaaaaccucagagaguucgucuuuaagaacauugauggguacuucaaaaucuacaguaagcacaccccaauaaauuuaguuagggaccugccccagggauuuagcgcucuugagccuuugguggaucugccaaucggcauuaacaucacacgguuccagacucuacucgcccugcaucgcucuuaucuuaccccgggcgacuccucaagcggguggacagcaggagccgcugcauacuauguagguuaccugcaacccagaaccuuuuugcucaaauauaaugaaaacggcacgauuacugaugccguggacugcgcucuggauccuuuaagugagacaaaguguacccugaagucuuucacugucgaaaaagggaucuaccagacauccaauuuuagggugcagccaaccgagagcauaguucgguuccccaacauuacgaaucucugcccuuuuggagagguguucaacgccacccgcuucgcgucggucuaugcauggaaucgaaagagaaucucuaacuguguggccgacuacuccguacuuuacaauucagcuaguuuuagcacauucaaaugcuauggcguuuccccaacuaagcugaacgacuuguguuuuaccaauguguacgccgauucuuucgucauuaggggugacgaagugcggcagaucgcacccgggcaaacaggaaaaaucgcugauuauaacuacaagcuaccggacgauuuuacuggcugcgucauugccuggaauagcaacaaccuggacucaaaagugggcgggaauuauaacuaccucuaucgucuguuccgcaagaguaaucuuaagccuuuugagagagauauauccaccgaaaucuaccaggcgggaagcacacccuguaacgguguugagggcuucaauugcuacuuuccacugcagucuuauggguuccaaccuaccaacggagugggcuaccagcccuauaggguagucguguugucauuugaacuccugcacgccccagcaacuguuugcggucccaaaaagaguacgaauuuagugaaaaacaagugugucaauuucaacuuuaaugggcugacaggcaccggagugcuaacugagagcaacaaaaaguuccucccuuuccagcaguuuggccgggacauugcugauaccacagacgccguacgagauccacaaacccuggagauccuugacauaacuccgugcuccuucgggggagugucuguuauuacacccgguacgaauaccucgaaccaggucgcuguguuguaccaggacgugaauuguacugaagucccuguugccauccacgcagaucagcugacaccaaccuggcgcguguauagcacaggcuccaacguguuucaaacuagagccgggugccucaucggagcugagcauguaaacaauucauacgaaugugacauucccaucggcgcggguauuugcgcaaguuaucagacccagacgaacucuccuugaggacuaguuauaagacugacuagcccgaugggccucccaacgggcccuccuccccuccuugcaccgagauuaauaaaaaaaaaaaaaaaaaaaaaaaaaaaaaaaaaaaaaaaaaaaaaaaaaaaaaaaaaaaaaaaaugcaucccccccccccccccccccccccccccccccaaaggcucuuuucagagccaccagaauu

SEQ ID NO: 175 - RNA, 2263 nt, Artificial Sequence
  SARS-CoV-2/Wuhan/WIV05/2019__EPI_ISL_402128 spike protein mRNA gc mod (1-681)
gggagaaagcuuaccauguucguguuucuggugcugcugccccugguguccagccagugugugaaccugaccaccagaacacagcugccuccagccuacaccaacagcuucaccagaggcguguacuaccccgacaagguguucagauccagcgugcugcacucuacccaggaccuguuccugccuuucuucagcaacgugaccugguuccacgccauccacguguccggcaccaauggcaccaagagauucgacaaccccgugcugcccuucaacgacgggguguacuuugccagcaccgagaaguccaacaucaucagaggcuggaucuucggcaccacacuggacagcaagacccagagccugcugaucgugaacaacgccaccaacguggucaucaaagugugcgaguuccaguucugcaacgaccccuuccugggcgucuacuaccacaagaacaacaagagcuggauggaaagcgaguuccggguguacagcagcgccaacaacugcaccuucgaguacgugucccagccuuuccugauggaccuggaaggcaagcagggcaacuucaagaaccugcgcgaguucguguucaagaacaucgacggcuacuucaaaaucuacagcaagcacaccccuaucaaccucgugcgggaucugccucagggcuucucugcucuggaaccccugguggaucugcccaucggcaucaacaucacccgguuucagacacugcuggcccugcacagaagcuaccugacaccuggcgauagcagcagcggauggacagcuggugccgccgcuuacuaugugggcuaccugcagccuagaaccuuccugcugaaguacaacgagaacggcaccaucaccgacgccguggauugugcucuggauccucugagcgagacaaagugcacccugaaguccuucaccguggaaaagggcaucuaccagaccagcaacuuccgggugcagcccaccgaauccaucgugcgguuccccaauaucaccaaucugugccccuucggcgagguguucaaugccaccagauucgccucuguguacgccuggaaccggaagcggaucagcaauugcguggccgacuacuccgugcuguacaacuccgccagcuucagcaccuucaagugcuacggcguguccccuaccaagcugaacgaccugugcuucacaaacguguacgccgacagcuucgugauccggggagaugaagugcggcagauugccccuggacagacaggcaagaucgccgacuacaacuacaagcugcccgacgacuucaccggcugugugauugccuggaacagcaacaaccuggacuccaaagucggcggcaacuacaauuaccuguaccggcuguuccggaaguccaaucugaagcccuucgagcgggacaucagcaccgaaaucuaucaggccggcagcaccccuugcaacggcguggaaggcuucaacugcuacuucccacugcaguccuacggcuuucagcccacaaauggcgugggcuaucagcccuacagagugguggugcugagcuucgaacugcugcaugcuccugccacagugugcggcccuaagaaaagcaccaaucucgugaagaacaaaugcgugaacuucaacuucaacggccugaccggcaccggcgugcugacagagagcaacaagaaguuccugccauuccagcaguuuggccgggauaucgccgauaccacagacgccguuagagauccccagacacuggaaauccuggacaucaccccaugcagcuucggcggagugucugugaucaccccuggcaccaacaccagcaaucagguggcagugcuguaccaggacgugaacuguaccgaagugcccguggccauucacgccgaucagcugacaccuacauggcggguguacuccaccggcagcaauguguuucagaccagagccggcugucugaucggagccgagcacgugaacaauagcuacgagugcgacauccccaucggcgcuggcaucugugccagcuaccagacacagacaaacagccccugaggacuaguuauaagacugacuagcccgaugggccucccaacgggcccuccuccccuccuugcaccgagauuaauaaaaaaaaaaaaaaaaaaaaaaaaaaaaaaaaaaaaaaaaaaaaaaaaaaaaaaaaaaaaaaaaugcaucccccccccccccccccccccccccccccccaaaggcucuuuucagagccaccagaauu

SEQ ID NO: 176 - RNA, 6 nt, Artificial Sequence
  mRNA 5'-end
gggaga

SEQ ID NO: 177 - RNA, 6 nt, Artificial Sequence
  mRNA 5'-end
aggaga

SEQ ID NO: 178 - DNA, 24 bp, Artificial Sequence
  histone stem-loop (histoneSL,hSL)
caaaggctcttttcagagccacca

SEQ ID NO: 179 - RNA, 24 nt, Artificial Sequence
  histone stem-loop (histoneSL,hSL) mRNA
caaaggcucuuuucagagccacca

SEQ ID NO: 180 - DNA, 13 bp, Artificial Sequence
  Kozak
gccgccaccatgg

SEQ ID NO: 181 - RNA, 13 nt, Artificial Sequence
  Kozak mRNA
gccgccaccaugg

SEQ ID NO: 182 - RNA, 128 nt, Artificial Sequence
  mRNA 3'-end A64-N5-C30-histoneSL-N5
aaaaaaaaaaaaaaaaaaaaaaaaaaaaaaaaaaaaaaaaaaaaaaaaaaaaaaaaaaaaaaaaugcaucccccccccccccccccccccccccccccccaaaggcucuuuucagagccaccagaauu

SEQ ID NO: 183 - RNA, 129 nt, Artificial Sequence
  mRNA 3'-end histoneSL-A100-N5
caaaggcucuuuucagagccaccaaaaaaaaaaaaaaaaaaaaaaaaaaaaaaaaaaaaaaaaaaaaaaaaaaaaaaaaaaaaaaaaaaaaaaaaaaaaaaaaaaaaaaaaaaaaaaaaaaaaagaauu

SEQ ID NO: 184 - RNA, 93 nt, Artificial Sequence
  mRNA 3'-end histoneSL-A64-N5
caaaggcucuuuucagagccaccaaaaaaaaaaaaaaaaaaaaaaaaaaaaaaaaaaaaaaaaaaaaaaaaaaaaaaaaaaaaaaaaagaauu

SEQ ID NO: 185 - RNA, 105 nt, Artificial Sequence
  mRNA 3'-end A100-N5
aaaaaaaaaaaaaaaaaaaaaaaaaaaaaaaaaaaaaaaaaaaaaaaaaaaaaaaaaaaaaaaaaaaaaaaaaaaaaaaaaaaaaaaaaaaaaaaaaaaagaauu

SEQ ID NO: 186 - RNA, 69 nt, Artificial Sequence
  mRNA 3'-end A64-N5
aaaaaaaaaaaaaaaaaaaaaaaaaaaaaaaaaaaaaaaaaaaaaaaaaaaaaaaaaaaaaaaagaauu

SEQ ID NO: 187 - RNA, 124 nt, Artificial Sequence
  mRNA 3'-end histoneSL-A100
caaaggcucuuuucagagccaccaaaaaaaaaaaaaaaaaaaaaaaaaaaaaaaaaaaaaaaaaaaaaaaaaaaaaaaaaaaaaaaaaaaaaaaaaaaaaaaaaaaaaaaaaaaaaaaaaaaaa

SEQ ID NO: 188 - RNA, 88 nt, Artificial Sequence
  mRNA 3'-end histoneSL-A64
caaaggcucuuuucagagccaccaaaaaaaaaaaaaaaaaaaaaaaaaaaaaaaaaaaaaaaaaaaaaaaaaaaaaaaaaaaaaaaaa

SEQ ID NO: 189 - RNA, 100 nt, Artificial Sequence
  mRNA 3'-end A100
aaaaaaaaaaaaaaaaaaaaaaaaaaaaaaaaaaaaaaaaaaaaaaaaaaaaaaaaaaaaaaaaaaaaaaaaaaaaaaaaaaaaaaaaaaaaaaaaaaaa

SEQ ID NO: 190 - RNA, 64 nt, Artificial Sequence
  mRNA 3'-end A64
aaaaaaaaaaaaaaaaaaaaaaaaaaaaaaaaaaaaaaaaaaaaaaaaaaaaaaaaaaaaaaaa

SEQ ID NO: 191 - RNA, 93 nt, Artificial Sequence
  mRNA 3'-end A64-histoneSL-N5
aaaaaaaaaaaaaaaaaaaaaaaaaaaaaaaaaaaaaaaaaaaaaaaaaaaaaaaaaaaaaaaacaaaggcucuuuucagagccaccagaauu

SEQ ID NO: 192 - RNA, 134 nt, Artificial Sequence
  mRNA 3'-end N6-A64-N5-C30-histoneSL-N5
auuaauaaaaaaaaaaaaaaaaaaaaaaaaaaaaaaaaaaaaaaaaaaaaaaaaaaaaaaaaaaaaaaaaugcaucccccccccccccccccccccccccccccccaaaggcucuuuucagagccaccagaauu

SEQ ID NO: 193 - RNA, 134 nt, Artificial Sequence
  mRNA 3'-end N6-A64-N5-C30-histoneSL-N5
agaucuaaaaaaaaaaaaaaaaaaaaaaaaaaaaaaaaaaaaaaaaaaaaaaaaaaaaaaaaaaaaaaaaugcaucccccccccccccccccccccccccccccccaaaggcucuuuucagagccaccagaauu

SEQ ID NO: 194 - RNA, 135 nt, Artificial Sequence
  mRNA 3'-end N6-histoneSL-A100-N5
auuaaucaaaggcucuuuucagagccaccaaaaaaaaaaaaaaaaaaaaaaaaaaaaaaaaaaaaaaaaaaaaaaaaaaaaaaaaaaaaaaaaaaaaaaaaaaaaaaaaaaaaaaaaaaaaaaaaaaaaagaauu

SEQ ID NO: 195 - RNA, 135 nt, Artificial Sequence
  mRNA 3'-end N6-histoneSL-A100-N5
agaucucaaaggcucuuuucagagccaccaaaaaaaaaaaaaaaaaaaaaaaaaaaaaaaaaaaaaaaaaaaaaaaaaaaaaaaaaaaaaaaaaaaaaaaaaaaaaaaaaaaaaaaaaaaaaaaaaaaaagaauu

SEQ ID NO: 196 - RNA, 99 nt, Artificial Sequence
  mRNA 3'-end N6-histoneSL-A64-N5
auuaaucaaaggcucuuuucagagccaccaaaaaaaaaaaaaaaaaaaaaaaaaaaaaaaaaaaaaaaaaaaaaaaaaaaaaaaaaaaaaaaaagaauu

SEQ ID NO: 197 - RNA, 99 nt, Artificial Sequence
  mRNA 3'-end N6-histoneSL-A64-N5
agaucucaaaggcucuuuucagagccaccaaaaaaaaaaaaaaaaaaaaaaaaaaaaaaaaaaaaaaaaaaaaaaaaaaaaaaaaaaaaaaaaagaauu

SEQ ID NO: 198 - RNA, 111 nt, Artificial Sequence
  mRNA 3'-end N6-A100-N5
auuaauaaaaaaaaaaaaaaaaaaaaaaaaaaaaaaaaaaaaaaaaaaaaaaaaaaaaaaaaaaaaaaaaaaaaaaaaaaaaaaaaaaaaaaaaaaaaaaaaaaaagaauu

SEQ ID NO: 199 - RNA, 111 nt, Artificial Sequence
  mRNA 3'-end N6-A100-N5
agaucuaaaaaaaaaaaaaaaaaaaaaaaaaaaaaaaaaaaaaaaaaaaaaaaaaaaaaaaaaaaaaaaaaaaaaaaaaaaaaaaaaaaaaaaaaaaaaaaaaaaagaauu

SEQ ID NO: 200 - RNA, 75 nt, Artificial Sequence
  mRNA 3'-end N6-A64-N5
auuaauaaaaaaaaaaaaaaaaaaaaaaaaaaaaaaaaaaaaaaaaaaaaaaaaaaaaaaaaaaaaaaaagaauu

SEQ ID NO: 201 - RNA, 75 nt, Artificial Sequence
  mRNA 3'-end N6-A64-N5
agaucuaaaaaaaaaaaaaaaaaaaaaaaaaaaaaaaaaaaaaaaaaaaaaaaaaaaaaaaaaaaaaaaagaauu

SEQ ID NO: 202 - RNA, 130 nt, Artificial Sequence
  mRNA 3'-end N6-histoneSL-A100
auuaaucaaaggcucuuuucagagccaccaaaaaaaaaaaaaaaaaaaaaaaaaaaaaaaaaaaaaaaaaaaaaaaaaaaaaaaaaaaaaaaaaaaaaaaaaaaaaaaaaaaaaaaaaaaaaaaaaaaaa

SEQ ID NO: 203 - RNA, 130 nt, Artificial Sequence
  mRNA 3'-end N6-histoneSL-A100
agaucucaaaggcucuuuucagagccaccaaaaaaaaaaaaaaaaaaaaaaaaaaaaaaaaaaaaaaaaaaaaaaaaaaaaaaaaaaaaaaaaaaaaaaaaaaaaaaaaaaaaaaaaaaaaaaaaaaaaa

SEQ ID NO: 204 - RNA, 94 nt, Artificial Sequence
  mRNA 3'-end N6-histoneSL-A64
auuaaucaaaggcucuuuucagagccaccaaaaaaaaaaaaaaaaaaaaaaaaaaaaaaaaaaaaaaaaaaaaaaaaaaaaaaaaaaaaaaaaa

SEQ ID NO: 205 - RNA, 94 nt, Artificial Sequence
  mRNA 3'-end N6-histoneSL-A64
agaucucaaaggcucuuuucagagccaccaaaaaaaaaaaaaaaaaaaaaaaaaaaaaaaaaaaaaaaaaaaaaaaaaaaaaaaaaaaaaaaaa

SEQ ID NO: 206 - RNA, 106 nt, Artificial Sequence
  mRNA 3'-end N6-A100
auuaauaaaaaaaaaaaaaaaaaaaaaaaaaaaaaaaaaaaaaaaaaaaaaaaaaaaaaaaaaaaaaaaaaaaaaaaaaaaaaaaaaaaaaaaaaaaaaaaaaaaa

SEQ ID NO: 207 - RNA, 106 nt, Artificial Sequence
  mRNA 3'-end N6-A100
agaucuaaaaaaaaaaaaaaaaaaaaaaaaaaaaaaaaaaaaaaaaaaaaaaaaaaaaaaaaaaaaaaaaaaaaaaaaaaaaaaaaaaaaaaaaaaaaaaaaaaaa

SEQ ID NO: 208 - RNA, 70 nt, Artificial Sequence
  mRNA 3'-end N6-A64
auuaauaaaaaaaaaaaaaaaaaaaaaaaaaaaaaaaaaaaaaaaaaaaaaaaaaaaaaaaaaaaaaaaa

SEQ ID NO: 209 - RNA, 70 nt, Artificial Sequence
  mRNA 3'-end N6-A64
agaucuaaaaaaaaaaaaaaaaaaaaaaaaaaaaaaaaaaaaaaaaaaaaaaaaaaaaaaaaaaaaaaaa

SEQ ID NO: 210 - RNA, 99 nt, Artificial Sequence
  mRNA 3'-end N6-A64-histoneSL-N5
auuaauaaaaaaaaaaaaaaaaaaaaaaaaaaaaaaaaaaaaaaaaaaaaaaaaaaaaaaaaaaaaaaaacaaaggcucuuuucagagccaccagaauu

SEQ ID NO: 211 - RNA, 99 nt, Artificial Sequence
  mRNA 3'-end N6-A64-histoneSL-N5
agaucuaaaaaaaaaaaaaaaaaaaaaaaaaaaaaaaaaaaaaaaaaaaaaaaaaaaaaaaaaaaaaaaacaaaggcucuuuucagagccaccagaauu

SEQ ID NO: 212 - RNA, 110 nt, Artificial Sequence
  mRNA 3'-end N12-A64-N5-histoneSL-N5
auuaauagaucuaaaaaaaaaaaaaaaaaaaaaaaaaaaaaaaaaaaaaaaaaaaaaaaaaaaaaaaaaaaaaaaaugcaucaaaggcucuuuucagagccaccagaauu

SEQ ID NO: 213 - RNA, 110 nt, Artificial Sequence; identical to SEQ ID NO: 212
  mRNA 3'-end N12-A64-N5-histoneSL-N5

SEQ ID NO: 214 - RNA, 99 nt, Artificial Sequence
  mRNA 3'-end A75-histoneSL
aaaaaaaaaaaaaaaaaaaaaaaaaaaaaaaaaaaaaaaaaaaaaaaaaaaaaaaaaaaaaaaaaaaaaaaaaaacaaaggcucuuuucagagccacca

SEQ ID NO: 215 - RNA, 102 nt, Artificial Sequence
  mRNA 3'-end U3-A75-histoneSL
uuuaaaaaaaaaaaaaaaaaaaaaaaaaaaaaaaaaaaaaaaaaaaaaaaaaaaaaaaaaaaaaaaaaaaaaaaaaaacaaaggcucuuuucagagccacca

SEQ ID NO: 216 - RNA, 178 nt, Artificial Sequence
  mRNA 3'-end A154-histoneSL
aaaaaaaaaaaaaaaaaaaaaaaaaaaaaaaaaaaaaaaaaaaaaaaaaaaaaaaaaaaaaaaaaaaaaaaaaaaaaaaaaaaaaaaaaaaaaaaaaaaaaaaaaaaaaaaaaaaaaaaaaaaaaaaaaaaaaaaaaaaaaaaaaaaaaaaaaacaaaggcucuuuucagagccacca

SEQ ID NO: 217 - RNA, 181 nt, Artificial Sequence
  mRNA 3'-end U3-A154-histoneSL
uuuaaaaaaaaaaaaaaaaaaaaaaaaaaaaaaaaaaaaaaaaaaaaaaaaaaaaaaaaaaaaaaaaaaaaaaaaaaaaaaaaaaaaaaaaaaaaaaaaaaaaaaaaaaaaaaaaaaaaaaaaaaaaaaaaaaaaaaaaaaaaaaaaaaaaaaaaaacaaaggcucuuuucagagccacca

SEQ ID NO: 218 - RNA, 101 nt, Artificial Sequence
  mRNA 3'-end N2-A75-histoneSL
agaaaaaaaaaaaaaaaaaaaaaaaaaaaaaaaaaaaaaaaaaaaaaaaaaaaaaaaaaaaaaaaaaaaaaaaaaaacaaaggcucuuuucagagccacca

SEQ ID NO: 219 - RNA, 99 nt, Artificial Sequence
  mRNA 3'-end histoneSL-A75
caaaggcucuuuucagagccaccaaaaaaaaaaaaaaaaaaaaaaaaaaaaaaaaaaaaaaaaaaaaaaaaaaaaaaaaaaaaaaaaaaaaaaaaaaaa

SEQ ID NO: 220 - RNA, 170 nt, Artificial Sequence
  mRNA 3'-end histoneSL-A146
caaaggcucuuuucagagccaccaaaaaaaaaaaaaaaaaaaaaaaaaaaaaaaaaaaaaaaaaaaaaaaaaaaaaaaaaaaaaaaaaaaaaaaaaaaaaaaaaaaaaaaaaaaaaaaaaaaaaaaaaaaaaaaaaaaaaaaaaaaaaaaaaaaaaaaaaaaaaaaaaaa

SEQ ID NO: 221 - RNA, 136 nt, Artificial Sequence
  mRNA 3'-end N8-A64-N5-C30-histoneSL-N5
agauuaauaaaaaaaaaaaaaaaaaaaaaaaaaaaaaaaaaaaaaaaaaaaaaaaaaaaaaaaaaaaaaaaaugcaucccccccccccccccccccccccccccccccaaaggcucuuuucagagccaccagaauu

SEQ ID NO: 222 - RNA, 131 nt, Artificial Sequence
  mRNA 3'-end N8-A64-N5-C30-histoneSL
agauuaauaaaaaaaaaaaaaaaaaaaaaaaaaaaaaaaaaaaaaaaaaaaaaaaaaaaaaaaaaaaaaaaaugcaucccccccccccccccccccccccccccccccaaaggcucuuuucagagccacca

SEQ ID NO: 223 - RNA, 105 nt, Artificial Sequence
  mRNA 3'-end N8-A64-N5-C4-histoneSL
agauuaauaaaaaaaaaaaaaaaaaaaaaaaaaaaaaaaaaaaaaaaaaaaaaaaaaaaaaaaaaaaaaaaaugcaucccccaaaggcucuuuucagagccacca

SEQ ID NO: 224 - RNA, 115 nt, Artificial Sequence
  mRNA 3'-end N8-A64-N5-C14-histoneSL
agauuaauaaaaaaaaaaaaaaaaaaaaaaaaaaaaaaaaaaaaaaaaaaaaaaaaaaaaaaaaaaaaaaaaugcaucccccccccccccccaaaggcucuuuucagagccacca

SEQ ID NO: 225 - RNA, 129 nt, Artificial Sequence
  mRNA 3'-end N6-A64-N5-C30-histoneSL
agaucuaaaaaaaaaaaaaaaaaaaaaaaaaaaaaaaaaaaaaaaaaaaaaaaaaaaaaaaaaaaaaaaaugcaucccccccccccccccccccccccccccccccaaaggcucuuuucagagccacca

SEQ ID NO: 226 - RNA, 103 nt, Artificial Sequence
  mRNA 3'-end N6-A64-N5-C4-histoneSL
agaucuaaaaaaaaaaaaaaaaaaaaaaaaaaaaaaaaaaaaaaaaaaaaaaaaaaaaaaaaaaaaaaaaugcaucccccaaaggcucuuuucagagccacca

SEQ ID NO: 227 - RNA, 113 nt, Artificial Sequence
  mRNA 3'-end N6-A64-N5-C14-histoneSL
agaucuaaaaaaaaaaaaaaaaaaaaaaaaaaaaaaaaaaaaaaaaaaaaaaaaaaaaaaaaaaaaaaaaugcaucccccccccccccccaaaggcucuuuucagagccacca

SEQ ID NO: 228 - RNA, 123 nt, Artificial Sequence
  mRNA 3'-end A64-N5-C30-histoneSL
aaaaaaaaaaaaaaaaaaaaaaaaaaaaaaaaaaaaaaaaaaaaaaaaaaaaaaaaaaaaaaaaugcaucccccccccccccccccccccccccccccccaaaggcucuuuucagagccacca

SEQ ID NO: 229 - RNA, 97 nt, Artificial Sequence
  mRNA 3'-end A64-N5-C4-histoneSL
aaaaaaaaaaaaaaaaaaaaaaaaaaaaaaaaaaaaaaaaaaaaaaaaaaaaaaaaaaaaaaaaugcaucccccaaaggcucuuuucagagccacca

SEQ ID NO: 230 - RNA, 107 nt, Artificial Sequence
  mRNA 3'-end A64-N5-C14-histoneSL
aaaaaaaaaaaaaaaaaaaaaaaaaaaaaaaaaaaaaaaaaaaaaaaaaaaaaaaaaaaaaaaaugcaucccccccccccccccaaaggcucuuuucagagccacca

SEQ ID NO: 231 - DNA, 62 bp, Artificial Sequence
  HSD17B4 5'-UTR
gtcccgcagtcggcgtccagcggctctgcttgttcgtgtgtgtgtcgttgcaggccttattc

SEQ ID NO: 232 - RNA, 62 nt, Artificial Sequence
  HSD17B4 5'-UTR
gucccgcagucggcguccagcggcucugcuuguucgugugugugucguugcaggccuuauuc

SEQ ID NO: 233 - DNA, 42 bp, Artificial Sequence
  ASAH1 5'-UTR
gcctctgctggagtccggggagtggcgttggctgctagagcg

SEQ ID NO: 234 - RNA, 42 nt, Artificial Sequence
  ASAH1 5'-UTR
gccucugcuggaguccggggaguggcguuggcugcuagagcg

SEQ ID NO: 235 - DNA, 75 bp, Artificial Sequence
  ATP5A1 5'-UTR
gcggctcggccattttgtcccagtcagtccggaggctgcggctgcagaagtaccgcctgcggagtaactgcaaag

SEQ ID NO: 236 - RNA, 75 nt, Artificial Sequence
  ATP5A1 5'-UTR
gcggcucggccauuuugucccagucaguccggaggcugcggcugcagaaguaccgccugcggaguaacugcaaag

SEQ ID NO: 237 - DNA, 54 bp, Artificial Sequence
  Mp68_(2010107E04Rik) 5'-UTR
ctttcccattctgtagcagaatttggtgttgcctgtggtcttggtcccgcggag

SEQ ID NO: 238 - RNA, 54 nt, Artificial Sequence
  Mp68_(2010107E04Rik) 5'-UTR
cuuucccauucuguagcagaauuugguguugccuguggucuuggucccgcggag

SEQ ID NO: 239 - DNA, 81 bp, Artificial Sequence
  Ndufa4 5'-UTR
gtccgctcagccaggttgcagaagcggcttagcgtgtgtcctaatcttctctctgcgtgtaggtaggcctgtgccgcaaac

SEQ ID NO: 240 - RNA, 81 nt, Artificial Sequence
  Ndufa4 5'-UTR
guccgcucagccagguugcagaagcggcuuagcguguguccuaaucuucucucugcguguagguaggccugugccgcaaac

SEQ ID NO: 241 - DNA, 108 bp, Artificial Sequence
  Nosip 5'-UTR
ctcctgtcgggcggaagtaggaggagtagagtttaaaaacagtactctttttccggttcgggacgtagttgaagcaacgacaagccggataaccgctcttgagacagg

SEQ ID NO: 242 - RNA, 108 nt, Artificial Sequence
  Nosip 5'-UTR
cuccugucgggcggaaguaggaggaguagaguuuaaaaacaguacucuuuuuccgguucgggacguaguugaagcaacgacaagccggauaaccgcucuugagacagg

SEQ ID NO: 243 - DNA, 84 bp, Artificial Sequence
  Rpl31 5'-UTR
cccgtgacccggaagttgtacggctacgcgactttccctcccacaaaccctcgcgcccttcctttcctacttgggcccggcaga

SEQ ID NO: 244 - RNA, 84 nt, Artificial Sequence
  Rpl31 5'-UTR
cccgugacccggaaguuguacggcuacgcgacuuucccucccacaaacccucgcgcccuuccuuuccuacuugggcccggcaga

SEQ ID NO: 245 - DNA, 159 bp, Artificial Sequence
  Slc7a3 5'-UTR
gggcgcttggcttgcaaggaccctgagctgcggcattgaagcacacccaacccaactcgactgaagtcagcctcactgaaccggatctgagaatcttctctctctgggcttgccagggctctccgaacctagctagcatcctcttcaattccaactaga

SEQ ID NO: 246 - RNA, 159 nt, Artificial Sequence
  Slc7a3 5'-UTR
gggcgcuuggcuugcaaggacccugagcugcggcauugaagcacacccaacccaacucgacugaagucagccucacugaaccggaucugagaaucuucucucucugggcuugccagggcucuccgaaccuagcuagcauccucuucaauuccaacuaga

SEQ ID NO: 247 - DNA, 102 bp, Artificial Sequence
  TUBB4B 5'-UTR
atataagcgttggcggagcgtcggttgtagcactctgcgcgcccgctcttctgctgctgtttgtctacttcctcctgcttccccgccgccgccgccgccatc

SEQ ID NO: 248 - RNA, 102 nt, Artificial Sequence
  TUBB4B 5'-UTR
auauaagcguuggcggagcgucgguuguagcacucugcgcgcccgcucuucugcugcuguuugucuacuuccuccugcuuccccgccgccgccgccgccauc

SEQ ID NO: 249 - DNA, 222 bp, Artificial Sequence
  Ubqln2 5'-UTR
cggagacggcctgcaggacctgctctctcagccctcagccgaggcctacgccgagccgagtgcgcagccgacgaccgggaggagccgcagccttcaactctgaggtactgtgatccgcgctgcccgccgggccgccccagtccgctgctgcggcacctccttccctcgcgccctcttcgctcgccagcgccttccctgtgagcctgcgtcaccgcggccgcc

SEQ ID NO: 250 - RNA, 222 nt, Artificial Sequence
  Ubqln2 5'-UTR
cggagacggccugcaggaccugcucucucagcccucagccgaggccuacgccgagccgagugcgcagccgacgaccgggaggagccgcagccuucaacucugagguacugugauccgcgcugcccgccgggccgccccaguccgcugcugcggcaccuccuucccucgcgcccucuucgcucgccagcgccuucccugugagccugcgucaccgcggccgcc

SEQ ID NO: 251 - DNA, 42 bp, Artificial Sequence
  RPL32_(32L4,32L3) 5'-UTR
ggcgctgcctacggaggtggcagccatctccttctcggcatc

SEQ ID NO: 252 - RNA, 42 nt, Artificial Sequence
  RPL32_(32L4,32L3) 5'-UTR
ggcgcugccuacggagguggcagccaucuccuucucggcauc

SEQ ID NO: 253 - DNA, 57 bp, Artificial Sequence
  PSMB3 3'-UTR
ccctgttcccagagcccacttttttttctttttttgaaataaaatagcctgtctttc

SEQ ID NO: 254 - RNA, 57 nt, Artificial Sequence
  PSMB3 3'-UTR
cccuguucccagagcccacuuuuuuuucuuuuuuugaaauaaaauagccugucuuuc

SEQ ID NO: 255 - DNA, 121 bp, Artificial Sequence
  CASP1 3'-UTR
aataaggaaactgtatgaatgtctgtgggcaggaagtgaagagatccttctgtaaaggtttttggaattatgtctgctgaataataaacttttttgaaataataaatctggtagaaaaatg

SEQ ID NO: 256 - RNA, 121 nt, Artificial Sequence
  CASP1 3'-UTR
aauaaggaaacuguaugaaugucugugggcaggaagugaagagauccuucuguaaagguuuuuggaauuaugucugcugaauaauaaacuuuuuugaaauaauaaaucugguagaaaaaug

SEQ ID NO: 257 - DNA, 137 bp, Artificial Sequence
  COX6B1 3'-UTR
actggctgcatctccctttcctctgtcctccatccttctcccaggatggtgaagggggacctggtacccagtgatccccaccccaggatcctaaatcatgacttacctgctaataaaaactcattggaaaagtgaga

SEQ ID NO: 258 - RNA, 137 nt, Artificial Sequence
  COX6B1 3'-UTR
acuggcugcaucucccuuuccucuguccuccauccuucucccaggauggugaagggggaccugguacccagugauccccaccccaggauccuaaaucaugacuuaccugcuaauaaaaacucauuggaaaagugaga

SEQ ID NO: 259 - DNA, 353 bp, Artificial Sequence
  Gnas 3'-UTR
gaagggaacacccaaatttaattcagccttaagcacaattaattaagagtgaaacgtaattgtacaagcagttggtcacccaccatagggcatgatcaacaccgcaacctttcctttttcccccagtgattctgaaaaacccctcttcccttcagcttgcttagatgttccaaatttagtaagcttaaggcggcctacagaagaaaaagaaaaaaaaggccacaaaagttccctctcactttcagtaaataaaataaaagcagcaacagaaataaagaaataaatgaaattcaaaatgaaataaatattgtgttgtgcagcattaaaaaatcaataaaaattaaaaatgagca

SEQ ID NO: 260 - RNA, 353 nt, Artificial Sequence
  Gnas 3'-UTR
gaagggaacacccaaauuuaauucagccuuaagcacaauuaauuaagagugaaacguaauuguacaagcaguuggucacccaccauagggcaugaucaacaccgcaaccuuuccuuuuucccccagugauucugaaaaaccccucuucccuucagcuugcuuagauguuccaaauuuaguaagcuuaaggcggccuacagaagaaaaagaaaaaaaaggccacaaaaguucccucucacuuucaguaaauaaaauaaaagcagcaacagaaauaaagaaauaaaugaaauucaaaaugaaauaaauauuguguugugcagcauuaaaaaaucaauaaaaauuaaaaaugagca

SEQ ID NO: 261 - DNA, 133 bp, Artificial Sequence
  Ndufa1 3'-UTR
ggaagcattttcctggctgattaaaagaaattactcagctatggtcatctgttcctgttagaaggctatgcagcatattatatactatgcgcatgttatgaaatgcataataaaaaattttaaaaaatctaaa

SEQ ID NO: 262 - RNA, 133 nt, Artificial Sequence
  Ndufa1 3'-UTR
ggaagcauuuuccuggcugauuaaaagaaauuacucagcuauggucaucuguuccuguuagaaggcuaugcagcauauuauauacuaugcgcauguuaugaaaugcauaauaaaaaauuuuaaaaaaucuaaa

SEQ ID NO: 263 - DNA, 70 bp, Artificial Sequence
  RPS9 3'-UTR
gtccacctgtccctcctgggctgctggattgtctcgttttcctgccaaataaacaggatcagcgctttac

SEQ ID NO: 264 - RNA, 70 nt, Artificial Sequence
  RPS9 3'-UTR
guccaccugucccuccugggcugcuggauugucucguuuuccugccaaauaaacaggaucagcgcuuuac

SEQ ID NO: 265 - DNA, 187 bp, Artificial Sequence
  ALB7 3'-UTR
gcatcacatttaaaagcatctcagcctaccatgagaataagagaaagaaaatgaagatcaatagcttattcatctctttttctttttcgttggtgtaaagccaacaccctgtctaaaaaacataaatttctttaatcattttgcctcttttctctgtgcttcaattaataaaaaatggaaagaacct

SEQ ID NO: 266 - RNA, 187 nt, Artificial Sequence
  ALB7 3'-UTR
gcaucacauuuaaaagcaucucagccuaccaugagaauaagagaaagaaaaugaagaucaauagcuuauucaucucuuuuucuuuuucguugguguaaagccaacacccugucuaaaaaacauaaauuucuuuaaucauuuugccucuuuucucugugcuucaauuaauaaaaaauggaaagaaccu

SEQ ID NO: 267 - DNA, 44 bp, Artificial Sequence
  muag 3'-UTR
gcccgatgggcctcccaacgggccctcctcccctccttgcaccg

SEQ ID NO: 268 - RNA, 44 nt, Artificial Sequence
  muag 3'-UTR
gcccgaugggccucccaacgggcccuccuccccuccuugcaccg

SEQ ID NO: 269 - protein, 14 aa, Artificial Sequence
  carrier peptide CR12C
CRRRRRRRRRRRRC

SEQ ID NO: 270 - protein, 13 aa, Artificial Sequence
  carrier peptide CR12
CRRRRRRRRRRRR

SEQ ID NO: 271 - protein, 14 aa, Artificial Sequence
  carrier peptide WR12C
WRRRRRRRRRRRRC

SEQ ID NO: 272 - protein, 18 aa, Artificial Sequence
  carrier peptide CH6R4H6C
CHHHHHHRRRRHHHHHHC

SEQ ID NO: 273 - protein, 18 aa, Artificial Sequence
  carrier peptide CGH5R4H5GC
CGHHHHHRRRRHHHHHGC

SEQ ID NO: 274 - protein, 1273 aa, Artificial Sequence; identical to SEQ ID NO: 1
  SARS-CoV-2/Wuhan/WIV05/2019__EPI_ISL_402128 spike protein (1-1273)

SEQ ID NO: 275 - protein, 1269 aa, Artificial Sequence; identical to SEQ ID NO: 2
  SARS-CoV-2/bat/Yunnan/RaTG13/2013__EPI_ISL_402131 spike protein (1-1269)

SEQ ID NO: 276 - protein, 1273 aa, Artificial Sequence; identical to SEQ ID NO: 3
  SARS-CoV-2/Wuhan/HBCDC-HB-01/2019__EPI_ISL_402132 spike protein (1-1273)

SEQ ID NO: 277 - protein, 1273 aa, Artificial Sequence; identical to SEQ ID NO: 4
  SARS-CoV-2/Guangdong/20SF028/2020__EPI_ISL_403936 spike protein (1-1273)

SEQ ID NO: 278 - protein, 1273 aa, Artificial Sequence; identical to SEQ ID NO: 5
  SARS-CoV-2/Shenzhen/SZTH-001/2020__EPI_ISL_406592 spike protein (1-1273)

SEQ ID NO: 279 - protein, 1273 aa, Artificial Sequence; identical to SEQ ID NO: 6
  SARS-CoV-2/Shenzhen/SZTH-004/2020__EPI_ISL_406595 spike protein (1-1273)

SEQ ID NO: 280 - protein, 1273 aa, Artificial Sequence; identical to SEQ ID NO: 7
  SARS-CoV-2/France/IDF0372/2020__EPI_ISL_406596 spike protein (1-1273)

SEQ ID NO: 281 - protein, 1273 aa, Artificial Sequence; identical to SEQ ID NO: 8
  SARS-CoV-2/Australia/VIC01/2020__EPI_ISL_406844 spike protein (1-1273)

SEQ ID NO: 282 - protein, 1273 aa, Artificial Sequence; identical to SEQ ID NO: 9
  SARS-CoV-2/Germany/BavPat1/2020__EPI_ISL_406862 spike protein (1-1273)

SEQ ID NO: 283 - protein, 1273 aa, Artificial Sequence
  SARS-CoV-2/Wuhan/HBCDC-HB-02/2020__EPI_ISL_412978 spike protein (1-1273)
MFVFLVLLPLVSSQCVNLTTRTQLPPAYTNSFTRGVYYPDKVFRSSVLHSTQDLFLPFFSNVTWFHAIHVSGTNGTKRFDNPVLPFNDGVYFASTEKSNIIRGWIFGTTLDSKTQSLLIVNNATNVVIKVCEFQFCNDPFLGVYYHKNNKSWMESEFRVYSSANNCTFEYVSQPFLMDLEGKQGNFKNLREFVFKNIDGYFKIYSKHTPINLVRDLPQGFSALEPLVDLPIGINITRFQTLLALHRSYLTPGDSSSGWTAGAAAYYVGYLQPRTFLLKYNENGTITDAVDCALDPLSETKCTLKSFTVEKGIYQTSNFRVQPTESIVRFPNITNLCPFGEVFNATRFASVYAWNRKRISNCVADYSVLYNSASFSTFKCYGVSPTKLNDLCFTNVYADSFVIRGDEVRQIAPGQTGKIADYNYKLPDDFTGCVIAWNSNNLDSKVGGNYNYLYRLFRKSNLKPFERDISTEIYQAGSTPCNGVEGFNCYFPLQSYGFQPTNGVGYQPYRVVVLSFELLHAPATVCGPKKSTNLVKNKCVNFNFNGLTGTGVLTESNKKFLPFQQFGRDIADTTDAVRDPQTLEILDITPCSFGGVSVITPGTNTSNQVAVLYQDVNCTEVPVAIHADQLTPTWRVYSTGSNVFQTRAGCLIGAEHVNNSYECDIPIGAGICASYQTQTNSPRRARSVASQSIIAYTMSLGAENSVAYSNNSIAIPTNFTISVTTEILPVSMTKTSVDCTMYICGDSTECSNFLLQYGSFCTQLNRALTGIAVEQDKNTQEVFAQVKQIYKTPPIKDFGGFNFSQILPDPSKPSKRSFIEDLLFNKVTLADAGFIKQYGDCLGDIAARDLICAQKFNGLTVLPPLLTDEMIAQYTSALLAGTITSGWTFGAGAALQIPFAMQMAYRFNGIGVTQNVLYENQKLIANQFNSAIGKIQDSLSSTASALGKLQDVVNQNAQALNTLVKQLSSNFGAISSVLNDILSRLDKVEAEVQIDRLITGRLQSLQTYVTQQLIRAAEIRASANLAATKMSECVLGQSKRVDFCGKGYHLMSFPQSAPHGVVFLHVTYVPAQEKNFTTAPAICHDGKAHFPREGVFVSNGTHWFVTQRNFYEPQIITTDNTFVSGNCDVVIGIVNNTVYDPLQPELDSFKEELDKYFKNHTSPDVDLGDISGINASVVNIQKEIDRLNEVAKNLNESLIDLQELGKYEQYIKWPWYIWLGFIAGLIAIVMVTIMLCCMTSCCSCLKGCCSCGSCCKFDEDDSEPVLKGVKLHYT

SEQ ID NO: 284 - protein, 1273 aa, Artificial Sequence
  SARS-CoV-2/Australia/QLD02/2020__EPI_ISL_407896 spike protein (1-1273)
MFVFLVLLPLVSSQCVNLTTRTQLPPAYTNSFTRGVYYPDKVFRSSVLHSTQDLFLPFFSNVTWFHAIHVSGTNGTKRFDNPVLPFNDGVYFASTEKSNIIRGWIFGTTLDSKTQSLLIVNNATNVVIKVCEFQFCNDPFLGVYYHKNNKSWMESEFRVYSSANNCTFEYVSQPFLMDLEGKQGNFKNLREFVFKNIDGYFKIYSKHTPINLVRDLPQGFSALEPLVDLPIGINITRFQTLLALHRSYLTPGDSSSGWTAGAAAYYVGYLQPRTFLLKYNENGTITDAVDCALDPLSETKCTLKSFTVEKGIYQTSNFRVQPTESIVRFPNITNLCPFGEVFNATRFASVYAWNRKRISNCVADYSVLYNSASFSTFKCYGVSPTKLNDLCFTNVYADSFVIRGDEVRQIAPGQTGKIADYNYKLPDDFTGCVIAWNSNNLDSKVGGNYNYLYRLFRKSNLKPFERDISTEIYQAGSTPCNGVEGFNCYFPLQSYGFQPTNGVGYQPYRVVVLSFELLHAPATVCGPKKSTNLVKNKCVNFNFNGLTGTGVLTESNKKFLPFQQFGRDIADTTDAVRDPQTLEILDITPCSFGGVSVITPGTNTSNQVAVLYQDVNCTEVPVAIHADQLTPTWRVYSTGSNVFQTRAGCLIGAEHVNNSYECDIPIGAGICASYQTQTNSPRRARSVASQSIIAYTMSLGAENSVAYSNNSIAIPTNFTISVTTEILPVSMTKTSVDCTMYICGDSTECSNLLLQYGSFCTQLNRALTGIAVEQDKNTQEVFAQVKQIYKTPPIKDFGGFNFSQILPDPSKPSKRSFIEDLLFNKVTLADAGFIKQYGDCLGDIAARDLICAQKFNGLTVLPPLLTDEMIAQYTSALLAGTITSGWTFGAGAALQIPFAMQMAYRFNGIGVTQNVLYENQKLIANQFNSAIGKIQDSLSSTASALGKLQDVVNQNAQALNTLVKQLSSNFGAISSVLNDILSRLDKVEAEVQIDRLITGRLQSLQTYVTQQLIRAAEIRASANLAATKMSECVLGQSKRVDFCGKGYHLMSFPQSAPHGVVFLHVTYVPAQEKNFTTAPAICHDGKAHFPREGVFVSNGTHWFVTQRNFYEPQIITTDNTFVSGNCDVVIGIVNNTVYDPLQLELDSFKEELDKYFKNHTSPDVDLGDISGINASVVNIQKEIDRLNEVAKNLNESLIDLQELGKYEQYIKWPWYIWLGFIAGLIAIVMVTIMLCCMTSCCSCLKGCCSCGSCCKFDEDDSEPVLKGVKLHYT

SEQ ID NO: 285 - protein, 1273 aa, Artificial Sequence
  SARS-CoV-2/India/1-31/2020__EPI_ISL_413523 spike protein (1-1273)
MFVFLVLLPLVSSQCVNLTTRTQLPPAYTNSFTRGVYYPDKVFRSSVLHSTQDLFLPFFSNVTWFHAIHVSGTNGTKRFDNPVLPFNDGVYFASTEKSNIIRGWIFGTTLDSKTQSLLIVNNATNVVIKVCEFQFCNDPFLGVYYHKNNKSWMESEFRVYSSANNCTFEYVSQPFLMDLEGKQGNFKNLREFVFKNIDGYFKIYSKHTPINLVRDLPQGFSALEPLVDLPIGINITRFQTLLALHRSYLTPGDSSSGWTAGAAAYYVGYLQPRTFLLKYNENGTITDAVDCALDPLSETKCTLKSFTVEKGIYQTSNFRVQPTESIVRFPNITNLCPFGEVFNATRFASVYAWNRKRISNCVADYSVLYNSASFSTFKCYGVSPTKLNDLCFTNVYADSFVIRGDEVRQIAPGQTGKIADYNYKLPDDFTGCVIAWNSNNLDSKVGGNYNYLYRLFRKSNLKPFERDISTEIYQAGSTPCNGVEGFNCYFPLQSYGFQPTNGVGYQPYRVVVLSFELLHAPATVCGPKKSTNLVKNKCVNFNFNGLTGTGVLTESNKKFLPFQQFGRDIADTTDAVRDPQTLEILDITPCSFGGVSVITPGTNTSNQVAVLYQDVNCTEVPVAIHADQLTPTWRVYSTGSNVFQTRAGCLIGAEHVNNSYECDIPIGAGICASYQTQTNSPRRARSVASQSIIAYTMSLGAENSVAYSNNSIAIPTNFTISVTTEILPVSMTKTSVDCTMYICGDSTECSNLLLQYGSFCTQLNRALTGIAVEQDKNTQEVFAQVKQIYKTPPIKDFGGFNFSQILPDPSKPSKRSFIEDLLFNKVTLADAGFIKQYGDCLGDIAARDLICAQKFNGLTVLPPLLTDEMIAQYTSALLAGTITSGWTFGAGAALQIPFAMQMAYRFNGIGVTQNVLYENQKLIANQFNSVIGKIQDSLSSTASALGKLQDVVNQNAQALNTLVKQLSSNFGAISSVLNDILSRLDKVEAEVQIDRLITGRLQSLQTYVTQQLIRAAEIRASANLAATKMSECVLGQSKRVDFCGKGYHLMSFPQSAPHGVVFLHVTYVPAQEKNFTTAPAICHDGKAHFPREGVFVSNGTHWFVTQRNFYEPQIITTDNTFVSGNCDVVIGIVNNTVYDPLQPELDSFKEELDKYFKNHTSPDVDLGDISGINASVVNIQKEIDRLNEVAKNLNESLIDLQELGKYEQYIKWPWYIWLGFIAGLIAIVMVTIMLCCMTSCCSCLKGCCSCGSCCKFDEDDSEPVLKGVKLHYT

SEQ ID NO: 286 - protein, 1273 aa, Artificial Sequence
  SARS-CoV-2/Guangdong/GD2020087-P0008/2020__EPI_ISL_413863 spike protein (1-1273)
MFVFLVLLPLVSSQCVNLTTRTQLPPAYTNSFTRGVYYPDKVFRSSVLHSTQDLFLPFFSNVTWFHAIHVSGTNGTKRFDNPVLPFNDGVYFASTEKSNIIRGWIFGTTLDSKTQSLLIVNNATNVVIKVCEFQFCNDPFLGVYYHKNNKSWMESEFRVYSSANNCTFEYVSQPFLMDLEGKQGNFKNLREFVFKNIDGYFKIYSKHTPINLVRDLPQGFSALEPLVDLPIGINITRFQTLLALHRSYLTPGDSSSGWTAGAAAYYVGYLQPRTFLLKYNENGTITDAVDCALDPLSETKCTLKSFTVEKGIYQTSNFRVQPTESIVRFPNITNLCPFGEVFNATRFASVYAWNRKRISNCVADYSVLYNSASFSTFKCYGVSPTKLNDLCFTNVYADSFVIRGDEVREIAPGQTGKIADYNYKLPDDFTGCVIAWNSNNLDSKVGGNYNYLYRLFRKSNLKPFERDISTEIYQAGSTPCNGVEGFNCYFPLQSYGFQPTNGVGYQPYRVVVLSFELLHAPATVCGPKKSTNLVKNKCVNFNFNGLTGTGVLTESNKKFLPFQQFGRDIADTTDAVRDPQTLEILDITPCSFGGVSVITPGTNTSNQVAVLYQDVNCTEVPVAIHADQLTPTWRVYSTGSNVFQTRAGCLIGAEHVNNSYECDIPIGAGICASYQTQTNSPRRARSVASQSIIAYTMSLGAENSVAYSNNSIAIPTNFTISVTTEILPVSMTKTSVDCTMYICGDSTECSNLLLQYGSFCTQLNRALTGIAVEQDKNTQEVFAQVKQIYKTPPIKDFGGFNFSQILPDPSKPSKRSFIEDLLFNKVTLADAGFIKQYGDCLGDIAARDLICAQKFNGLTVLPPLLTDEMIAQYTSALLAGTITSGWTFGAGAALQIPFAMQMAYRFNGIGVTQNVLYENQKLIANQFNSAIGKIQDSLSSTASALGKLQDVVNQNAQALNTLVKQLSSNFGAISSVLNDILSRLDKVEAEVQIDRLITGRLQSLQTYVTQQLIRAAEIRASANLAATKMSECVLGQSKRVDFCGKGYHLMSFPQSAPHGVVFLHVTYVPAQEKNFTTAPAICHDGKAHFPREGVFVSNGTHWFVTQRNFYEPQIITTDNTFVSGNCDVVIGIVNNTVYDPLQPELDSFKEELDKYFKNHTSPDVDLGDISGINASVVNIQKEIDRLNEVAKNLNESLIDLQELGKYEQYIKWPWYIWLGFIAGLIAIVMVTIMLCCMTSCCSCLKGCCSCGSCCKFDEDDSEPVLKGVKLHYT

SEQ ID NO: 287 - protein, 1273 aa, Artificial Sequence
  SARS-CoV-2/Sweden/01/2020__EPI_ISL_411951 spike protein (1-1273)
MFVFLVLLPLVSSQCVNLTTRTQLPPAYTNSFTRGVYYPDKVFRSSVLHSTQDLFLPFFSNVTWFHAIHVSGTNGTKRFDNPVLPFNDGVYFASTEKSNIIRGWIFGTTLDSKTQSLLIVNNATNVVIKVCEFQFCNDPFLGVYYHKNNKSWMESEFRVYSSANNCTFEYVSQPFLMDLEGKQGNFKNLREFVFKNIDGYFKIYSKHTPINLVRDLPQGFSALEPLVDLPIGINITRFQTLLALHRSYLTPGDSSSGWTAGAAAYYVGYLQPRTFLLKYNENGTITDAVDCALDPLSETKCTLKSFTVEKGIYQTSNFRVQPTESIVRFPNITNLCPFGEVFNATRFASVYAWNRKRISNCVADYSVLYNSASFSTFKCYGVSPTKLNDLCFTNVYADSFVIRGDEVRQIAPGQTGKIADYNYKLPDDFTGCVIAWNSNNLDSKVGGNYNYLYRLFRKSNLKPFERDISTEIYQAGSTPCNGVEGFNCYFPLQSYGFQPTNGVGYQPYRVVVLSFELLHAPATVCGPKKSTNLVKNKCVNFNFNGLTGTGVLTESNKKFLPFQQFGRDIADTTDAVRDPQTLEILDITPCSFGGVSVITPGTNTSNQVAVLYQDVNCTEVPVAIHADQLTPTWRVYSTGSNVFQTRAGCLIGAEHVNNSYECDIPIGAGICASYQTQTNSPRRARSVASQSIIAYTMSLGAENSVAYSNNSIAIPTNFTISVTTEILPVSMTKTSVDCTMYICGDSTECSNLLLQYGSFCTQLNRALTGIAVEQDKNTQEVFAQVKQIYKTPPIKDCGGFNFSQILPDPSKPSKRSFIEDLLFNKVTLADAGFIKQYGDCLGDIAARDLICAQKFNGLTVLPPLLTDEMIAQYTSALLAGTITSGWTFGAGAALQIPFAMQMAYRFNGIGVTQNVLYENQKLIANQFNSAIGKIQDSLSSTASALGKLQDVVNQNAQALNTLVKQLSSNFGAISSVLNDILSRLDKVEAEVQIDRLITGRLQSLQTYVTQQLIRAAEIRASANLAATKMSECVLGQSKRVDFCGKGYHLMSFPQSAPHGVVFLHVTYVPAQEKNFTTAPAICHDGKAHFPREGVFVSNGTHWFVTQRNFYEPQIITTDNTFVSGNCDVVIGIVNNTVYDPLQPELDSFKEELDKYFKNHTSPDVDLGDISGINASVVNIQKEIDRLNEVAKNLNESLIDLQELGKYEQYIKWPWYIWLGFIAGLIAIVMVTIMLCCMTSCCSCLKGCCSCGSCCKFDEDDSEPVLKGVKLHYT

SEQ ID NO: 288 - protein, 1273 aa, Artificial Sequence
  SARS-CoV-2/Tianmen/HBCDC-HB-07/2020__EPI_ISL_412983 spike protein (1-1273)
MFVFLVLLPLVSSQCVNLTTRTQLPPAYTNSFTRGVYYPDKVFRSSVLHSTQDLFLPFFSNVTWFHAIHVSGTNGTKRFDNPVLPFNDGVYFASTEKSNIIRGWIFGTTLDSKTQSLLIVNNATNVVIKVCEFQFCNDPFLGVYYHKNNKSWMESEFRVYSSANNCTFEYVSQPFLMDLEGKQGNFKNLREFVFKNIDGYFKIYSKHTPINLVRDLPQGFSALEPLVDLPIGINITRFQTLLALHRSYLTPGDSSSGWTAGAAAYYVGYLQPRTFLLKYNENGTITDAVDCALDPLSETKCTLKSFTVEKGIYQTSNFRVQPTESIVRFPNITNLCPFGEVFNATRFASVYAWNRKRISNCVADYSVLYNSASFSTFKCYGVSPTKLNDLCFTNVYADSFVIRGDEVRQIAPGQTGKIADYNYKLPDDFTGCVIAWNSNNLDSKVGGNYNYLYRLFRKSNLKPFERDISTEIYQAGSTPCNGVEGFNCYFPLQSYGFQPTNGVGYQPYRVVVLSFELLHAPATVCGPKKSTNLVKNKCVNFNFNGLTGTGVLTESNKKFLPFQQFGRDIADTTDAVRDPQTLEILDITPCSFGGVSVITPGTNTSNQVAVLYQDLNCTEVPVAIHADQLTPTWRVYSTGSNVFQTRAGCLIGAEHVNNSYECDIPIGAGICASYQTQTNSPRRARSVASQSIIAYTMSLGAENSVAYSNNSIAIPTNFTISVTTEILPVSMTKTSVDCTMYICGDSTECSNLLLQYGSFCTQLNRALTGIAVEQDKNTQEVFAQVKQIYKTPPIKDFGGFNFSQILPDPSKPSKRSFIEDLLFNKVTLADAGFIKQYGDCLGDIAARDLICAQKFNGLTVLPPLLTDEMIAQYTSALLAGTITSGWTFGAGAALQIPFAMQMAYRFNGIGVTQNVLYENQKLIANQFNSAIGKIQDSLSSTASALGKLQDVVNQNAQALNTLVKQLSSNFGAISSVLNDILSRLDKVEAEVQIDRLITGRLQSLQTYVTQQLIRAAEIRASANLAATKMSECVLGQSKRVDFCGKGYHLMSFPQSAPHGVVFLHVTYVPAQEKNFTTAPAICHDGKAHFPREGVFVSNGTHWFVTQRNFYEPQIITTDNTFVSGNCDVVIGIVNNTVYDPLQPELDSFKEELDKYFKNHTSPDVDLGDISGINASVVNIQKEIDRLNEVAKNLNESLIDLQELGKYEQYIKWPWYIWLGFIAGLIAIVMVTIMLCCMTSCCSCLKGCCSCGSCCKFDEDDSEPVLKGVKLHYT

SEQ ID NO: 289 - protein, 1273 aa, Artificial Sequence
  SARS-CoV-2/Hong Kong/case42_VM20002493/2020__EPI_ISL_414527 spike protein (1-1273)
MFVFLVLLPLVSSQCVNLTTRTQLPPAYTNSFTRGVYYPDKVFRSSVLHSTQDLFLPFFSNVTWFHAIHVSGTNGTKRFDNPVLPFNDGVYFASTEKSNIIRGWIFGTTLDSKTQSLLIVNNATNVVIKVCEFQFCNDPFLGVYYHKNNKSWMESEFRVYSSANNCTFEYVSQPFLMDLEGKQGNFKNLREFVFKNIDGYFKIYSKHTPINLVRDLPQGFSALEPLVDLPIGINITRFQTLLALHRSYLTPGDSSSGWTAGAAAYYVGYLQPRTFLLKYNENGTITDAVDCALDPLSETKCTLKSFTVEKGIYQTSNFRVQPTESIVRFPNITNLCPFGEVFNATRFASVYAWNRKRISNCVADYSVLYNSASFSTFKCYGVSPTKLNDLCFTNVYADSFVIRGDEVRQIAPGQTGKIADYNYKLPDDFTGCVIAWNSNNLDSKVGGNYNYLYRLFRKSNLKPFERDISTEIYQAGSTPCNGVEGFNCYFPLQSYGFQPTNGVGYQPYRVVVLSFELLHAPATVCGPKKSTNLVKNKCVNFNFNGLTGTGVLTESNKKFLPFQQFGRDIADTTDAVRDPQTLEILDITPCSFGGVSVITPGTNTSNQVAVLYQDVNCTEVPVAIHADQLTPTWRVYSTGSNVFQTRAGCLIGAEHVNNSYECDIPIGAGICASYQTQTNSPRRARSVASQSIIAYTMSLGAENSVAYSNNSIAIPTNFAISVTTEILPVSMTKTSVDCTMYICGDSTECSNLLLQYGSFCTQLNRALTGIAVEQDKNTQEVFAQVKQIYKTPPIKDFGGFNFSQILPDPSKPSKRSFIEDLLFNKVTLADAGFIKQYGDCLGDIAARDLICAQKFNGLTVLPPLLTDEMIAQYTSALLAGTITSGWTFGAGAALQIPFAMQMAYRFNGIGVTQNVLYENQKLIANQFNSAIGKIQDSLSSTASALGKLQDVVNQNAQALNTLVKQLSSNFGAISSVLNDILSRLDKVEAEVQIDRLITGRLQSLQTYVTQQLIRAAEIRASANLAATKMSECVLGQSKRVDFCGKGYHLMSFPQSAPHGVVFLHVTYVPAQEKNFTTAPAICHDGKAHFPREGVFVSNGTHWFVTQRNFYEPQIITTDNTFVSGNCDVVIGIVNNTVYDPLQPELDSFKEELDKYFKNHTSPDVDLGDISGINASVVNIQKEIDRLNEVAKNLNESLIDLQELGKYEQYIKWPWYIWLGFIAGLIAIVMVTIMLCCMTSCCSCLKGCCSCGSCCKFDEDDSEPVLKGVKLHYT

SEQ ID NO: 290 - protein, 1273 aa, Artificial Sequence
  SARS-CoV-2/USA/CruiseA-23/2020__EPI_ISL_414482 spike protein (1-1273)
MFVFLVLLPLVSSQCVNLTTRTQLPPAYTNSFTRGVYYPDKVFRSSVLHSTQDLFLPFFSNVTWFHAIHVSGTNGTKRFDNPVLPFNDGVYFASTEKSNIIRGWIFGTTLDSKTQSLLIVNNATNVVIKVCEFQFCNDPFLGVYYHKNNKSWMESEFRVYSSANNCTFEYVSQPFLMDLEVKQGNFKNLREFVFKNIDGYFKIYSKHTPINLVRDLPQGFSALEPLVDLPIGINITRFQTLLALHRSYLTPGDSSSGWTAGAAAYYVGYLQPRTFLLKYNENGTITDAVDCALDPLSETKCTLKSFTVEKGIYQTSNFRVQPTESIVRFPNITNLCPFGEVFNATRFASVYAWNRKRISNCVADYSVLYNSASFSTFKCYGVSPTKLNDLCFTNVYADSFVIRGDEVRQIAPGQTGKIADYNYKLPDDFTGCVIAWNSNNLDSKVGGNYNYLYRLFRKSNLKPFERDISTEIYQAGSTPCNGVEGFNCYFPLQSYGFQPTNGVGYQPYRVVVLSFELLHAPATVCGPKKSTNLVKNKCVNFNFNGLTGTGVLTESNKKFLPFQQFGRDIADTTDAVRDPQTLEILDITPCSFGGVSVITPGTNTSNQVAVLYQDVNCTEVPVAIHADQLTPTWRVYSTGSNVFQTRAGCLIGAEHVNNSYECDIPIGAGICASYQTQTNSPRRARSVASQSIIAYTMSLGAENSVAYSNNSIAIPTNFTISVTTEILPVSMTKTSVDCTMYICGDSTECSNLLLQYGSFCTQLNRALTGIAVEQDKNTQEVFAQVKQIYKTPPIKDFGGFNFSQILPDPSKPSKRSFIEDLLFNKVTLADAGFIKQYGDCLGDIAARDLICAQKFNGLTVLPPLLTDEMIAQYTSALLAGTITSGWTFGAGAALQIPFAMQMAYRFNGIGVTQNVLYENQKLIANQFNSAIGKIQDSLSSTASALGKLQDVVNQNAQALNTLVKQLSSNFGAISSVLNDILSRLDKVEAEVQIDRLITGRLQSLQTYVTQQLIRAAEIRASANLAATKMSECVLGQSKRVDFCGKGYHLMSFPQSAPHGVVFLHVTYVPAQEKNFTTAPAICHDGKAHFPREGVFVSNGTHWFVTQRNFYEPQIITTDNTFVSGNCDVVIGIVNNTVYDPLQPELDSFKEELDKYFKNHTSPDVDLGDISGINASVVNIQKEIDRLNEVAKNLNESLIDLQELGKYEQYIKWPWYIWLGFIAGLIAIVMVTIMLCCMTSCCSCLKGCCSCGSCCKFDEDDSEPVLKGVKLHYT

SEQ ID NO: 291 - protein, 1273 aa, Artificial Sequence
  SARS-CoV-2/Hong Kong/case85_VM20002868/2020__EPI_ISL_414519 spike protein (1-1273)
MFVFLVLVPLVSSQCVNLTTRTQLPPAYTNSFTRGVYYPDKVFRSSVLHSTQDLFLPFFSNVTWFHAIHVSGTNGTKRFDNPVLPFNDGVYFASTEKSNIIRGWIFGTTLDSKTQSLLIVNNATNVVIKVCEFQFCNDPFLGVYYHKNNKSWMESEFRVYSSANNCTFEYVSQPFLMDLEGKQGNFKNLREFVFKNIDGYFKIYSKHTPINLVRDLPQGFSALEPLVDLPIGINITRFQTLLALHRSYLTPGDSSSGWTAGAAAYYVGYLQPRTFLLKYNENGTITDAVDCALDPLSETKCTLKSFTVEKGIYQTSNFRVQPTESIVRFPNITNLCPFGEVFNATRFASVYAWNRKRISNCVADYSVLYNSASFSTFKCYGVSPTKLNDLCFTNVYADSFVIRGDEVRQIAPGQTGKIADYNYKLPDDFTGCVIAWNSNNLDSKVGGNYNYLYRLFRKSNLKPFERDISTEIYQAGSTPCNGVEGFNCYFPLQSYGFQPTNGVGYQPYRVVVLSFELLHAPATVCGPKKSTNLVKNKCVNFNFNGLTGTGVLTESNKKFLPFQQFGRDIADTTDAVRDPQTLEILDITPCSFGGVSVITPGTNTSNQVAVLYQDVNCTEVPVAIHADQLTPTWRVYSTGSNVFQTRAGCLIGAEHVNNSYECDIPIGAGICASYQTQTNSPRRARSVASQSIIAYTMSLGAENSVAYSNNSIAIPTNFTISVTTEILPVSMTKTSVDCTMYICGDSTECSNLLLQYGSFCTQLNRALTGIAVEQDKNTQEVFAQVKQIYKTPPIKDFGGFNFSQILPDPSKPSKRSFIEDLLFNKVTLADAGFIKQYGDCLGDIAARDLICAQKFNGLTVLPPLLTDEMIAQYTSALLAGTITSGWTFGAGAALQIPFAMQMAYRFNGIGVTQNVLYENQKLIANQFNSAIGKIQDSLSSTASALGKLQDVVNQNAQALNTLVKQLSSNFGAISSVLNDILSRLDKVEAEVQIDRLITGRLQSLQTYVTQQLIRAAEIRASANLAATKMSECVLGQSKRVDFCGKGYHLMSFPQSAPHGVVFLHVTYVPAQEKNFTTAPAICHDGKAHFPREGVFVSNGTHWFVTQRNFYEPQIITTDNTFVSGNCDVVIGIVNNTVYDPLQPELDSFKEELDKYFKNHTSPDVDLGDISGINASVVNIQKEIDRLNEVAKNLNESLIDLQELGKYEQYIKWPWYIWLGFIAGLIAIVMVTIMLCCMTSCCSCLKGCCSCGSCCKFDEDDSEPVLKGVKLHYT

SEQ ID NO: 292 - protein, 1273 aa, Artificial Sequence
  SARS-CoV-2/England/200990660/2020__EPI_ISL_414523 spike protein (1-1273)
MFVFLVLLPLVSSQCVNLTTRTQLPPAYTNSFTRGVYYPDKVFRSSVLHSTQDLFLPFFSNVTWFHAIHVSGTNGTKRFDNPVLPFNDGVYFASTEKSNIIRGWIFGTTLDSKTQSLLIVNNATNVVIKVCEFQFCNDPFLGVYYHKNNKSWMESEFRVYSSANNCTFEYVSQPFLMDLEGKQGNFKNLREFVFKNIDGYFKIYSKHTPINLVRDLPQGFSALEPLVDLPIGINITRFQTLLALHRSYLTPGDSSSGWTAGAAAYYVGYLQPRTFLLKYNENGTITDAVDCALDPLSETKCTLKSFTVEKGIYQTSNFRVQPTESIVRFPNITNLCPFGEVFNATRFASVYAWNRKRISNCVADYSVLYNSASFSTFKCYGVSPTKLNDLCFTNVYADSFVIRGDEVRQIAPGQTGKIADYNYKLPDDFTGCVIAWNSNNLDSKVGGNYNYLYRLFRKSNLKPFERDISTEIYQAGSTPCNGVEGFNCYFPLQSYGFQPTNGVGYQPYRVVVLSFELLHAPATVCGPKKSTNLVKNKCVNFNFNGLTGTGVLTESNKKFLPFQQFGRDIADTTDAVRDPQTLEILDITPCSFGGVSVITPGTNTSNQVAVLYQGVNCTEVPVAIHADQLTPTWRVYSTGSNVFQTRAGCLIGAEHVNNSYECDIPIGAGICASYQTQTNSPRRARSVASQSIIAYTMSLGAENSVAYSNNSIAIPTNFTISVTTEILPVSMTKTSVDCTMYICGDSTECSNLLLQYGSFCTQLNRALTGIAVEQDKNTQEVFAQVKQIYKTPPIKDFGGFNFSQILPDPSKPSKRSFIEDLLFNKVTLADAGFIKQYGDCLGDIAARDLICAQKFNGLTVLPPLLTDEMIAQYTSALLAGTITSGWTFGAGAALQIPFAMQMAYRFNGIGVTQNVLYENQKLIANQFNSAIGKIQDSLSSTASALGKLQDVVNQNAQALNTLVKQLSSNFGAISSVLNDILSRLDKVEAEVQIDRLITGRLQSLQTYVTQQLIRAAEIRASANLAATKMSECVLGQSKRVDFCGKGYHLMSFPQSAPHGVVFLHVTYVPAQEKNFTTAPAICHDGKAHFPREGVFVSNGTHWFVTQRNFYEPQIITTDNTFVSGNCDVVIGIVNNTVYDPLQPELDSFKEELDKYFKNHTSPDVDLGDISGINASVVNIQKEIDRLNEVAKNLNESLIDLQELGKYEQYIKWPWYIWLGFIAGLIAIVMVTIMLCCMTSCCSCLKGCCSCGSCCKFDEDDSELVLKGVKLHYT

SEQ ID NO: 293 - protein, 1273 aa, Artificial Sequence
  SARS-CoV-2/Australia/NSW09/2020__EPI_ISL_413595 spike protein (1-1273)
MFVFLVLLPLVSSQCVNLTTRTQLPPAYTNSFTRGVYYPDKVFRSSVLHSTQDLFLPFFSNVTWFHAIHVSGTNGTKRFDNPVLPFNDGVYFASTEKSNIIRGWIFGTTLDSKTQSLLIVNNATNVVIKVCEFQFCNDPFLGVYYHKNNKSWMESEFRVYSSANNCTFEYVSQPFLMDLEGKQGNFKNLREFVFKNIDGYFKIYSKHTPINLVRDLPQGFSALEPLVDLPIGINITRFQTLLALHRSYLTPGDSSSGWTAGAAAYYVGYLQPRTFLLKYNENGTITDAVDCALDPLSETKCTLKSFTVEKGIYQTSNFRVQPTESIVRFPNITNLCPFGEVFNATRFASVYAWNRKRISNCVADYSVLYNSASFSTFKCYGVSPTKLNDLCFTNVYADSFVIRGDEVRQIAPGQTGKIADYNYKLPDDFTGCVIAWNSNNLDSKVGGNYNYLYRLFRKSNLKPFERDISTEIYQAGSTPCNGVEGFNCYFPLQSYGFQPTNGVGYQPYRVVVLSFELLHAPATVCGPKKSTNLVKNKCVNFNFNGLTGTGVLTESNKKFLPFQQFGRDIADTTDAVRDPQTLEILDITPCSFGGVSVITPGTNTSNQVAVLYQDVNCTEVPVAIHADQLTPTWRVYSTGSNVFQTRAGCLIGAEHVNNSYECDIPIGAGICASYQTQTNSPRRARSVASQSIIAYTMSLGAENSVAYSNNSIAIPTNFTISVTTEILPVSMTKTSVDCTMYICGDSTECSNLLLQYGSFCTQLNRALTGIAVEQDKNTQEVFAQVKQIYKTPPIKDFGGFNFSQILPDPSKPSKRSFIEDLLFNKVTLADAGFIKQYGDCLGDIAARDLICAQKFNGLTVLPPLLTDEMIAQYTSALLAGTITSGWTFGAGAALQIPFAMQMAYRFNGIGVTQNVLYENQKLIANQFNSAIGKIQDSLSFTASALGKLQDVVNQNAQALNTLVKQLSSNFGAISSVLNDILSRLDKVEAEVQIDRLITGRLQSLQTYVTQQLIRAAEIRASANLAATKMSECVLGQSKRVDFCGKGYHLMSFPQSAPHGVVFLHVTYVPAQEKNFTTAPAICHDGKAHFPREGVFVSNGTHWFVTQRNFYEPQIITTDNTFVSGNCDVVIGIVNNTVYDPLQPELDSFKEELDKYFKNHTSPDVDLGDISGINASVVNIQKEIDRLNEVAKNLNESLIDLQELGKYEQYIKWPWYIWLGFIAGLIAIVMVTIMLCCMTSCCSCLKGCCSCGSCCKFDEDDSEPVLKGVKLHYT

SEQ ID NO: 294 - protein, 1273 aa, Artificial Sequence
  SARS-CoV-2/Australia/NSW10/2020__EPI_ISL_413596 spike protein (1-1273)
MFVFLVLLPLVSSQCVNLTTRTQLPPAYTNSFTRGVYYPDKVFRSSVLHSTQDLFLPFFSNVTWFHAIHVSGTNGTKRFDNPVLPFNDGVYFASTEKSNIIRGWIFGTTLDSKTQSLLIVNNATNVVIKVCEFQFCNDPFLGVYYHKNNKSWMESEFRVYSSANNCTFEYVSQPFLMDLEGKQGNFKNLREFVFKNIDGYFKIYSKHTPINLVRDLPQGFSALEPLVDLPIGINITRFQTLLALHRSYLTPGDSSSGWTAGAAAYYVGYLQPRTFLLKYNENGTITDAVDCALDPLSETKCTLKSFTVEKGIYQTSNFRVQPTESIVRFPNITNLCPFGEVFNATRFASVYAWNRKRISNCVADYSVLYNSASFSTFKCYGVSPTKLNDLCFTNVYADSFVIRGDEVRQIAPGQTGKIADYNYKLPDDFTGCVIAWNSNNLDSKVGGNYNYLYRLFRKSNLKPFERDISTEIYQAGSTPCNGVEGFNCYFPLQSYGFQPTNGVGYQPYRVVVLSFELLHAPATVCGPKKSTNLVKNKCVNFNFNGLTGTGVLTESNKKFLPFQQFGRDIADTTDAVRDPQTLEILDITPCSFGGVSVITPGTNTSNQVAVLYQDVNCTEVPVAIHADQLTPTWRVYSTGSNVFQTRAGCLIGAEHVNNSYECDIPIGAGICASYQTQTNSPRRARSVASQSIIAYTMSLGAENSVAYSNNSIAIPTNFTISVTTEILPVSMTKTSVDCTMYICGDSTECSNLLLQYGSFCTQLNRALTGIAVEQDKNTQEVFAQVKQIYKTPPIKDFGGFNFSQILPDPSKPSKRSFIEDLLFNKVTLADAGFIKQYGDCLGDIAARDLICAQKFNGLTVLPPLLTDEMIAQYTSALLAGTITSGWTFGAGAALQIPFAMQMAYRFNGIGVTQNVLYENQKLIANQFNSAIGKIQDSLSSTASALGKLQDVVNQNAQALNTLVKQLSSNFGAISSVLNDILSRLDKVEAEVQIDRLITGRLQSLQTYVTQQLIRAAEIRASANLAATKMSECVLGQSKRVDFCGKGYHLMSFPQSAPHGVVFLHVTYVPAQEKNFTTAPAICHDGKAHFPREGVFVSNGTHWFVTQRNFYEPQIITTDNTFVSGNCDVVIGIVNNTVYDPLQPELDSFKEELDKYFKNHTSPDVDLGDISGINASVVNIQKEIDRLNEVAKNLNESLIDLQELGKYEQYIKWPWYIWLGFIAGLIAIVMVTIMLCCMTSCCSCLKGCCSCGSCFKFDEDDSEPVLKGVKLHYT

SEQ ID NO: 295 - protein, 1273 aa, Artificial Sequence
  SARS-CoV-2/Switzerland/1000477797/2020__EPI_ISL_413023 spike protein (1-1273)
MFVFLVLLPLVSSQCVNLTTRTQLPPAYTNSFTRGVYYPDKVFRSSVLHSTQDLFLPFFSNVTWFHAIHVSGTNGTKRFDNPVLPFNDGVYFASTEKSNIIRGWIFGTTLDSKTQSLLIVNNATNVVIKVCEFQFCNDPFLGVYYHKNNKSWMESEFRVYSSANNCTFEYVSQPFLMDLEGKQGNFKNLREFVFKNIDGYFNIYSKHTPINLVRDLPQGFSALEPLVDLPIGINITRFQTLLALHRSYLTPGDSSSGWTAGAAAYYVGYLQPRTFLLKYNENGTITDAVDCALDPLSETKCTLKSFTVEKGIYQTSNFRVQPTESIVRFPNITNLCPFGEVFNATRFASVYAWNRKRISNCVADYSVLYNSASFSTFKCYGVSPTKLNDLCFTNVYADSFVIRGDEVRQIAPGQTGKIADYNYKLPDDFTGCVIAWNSNNLDSKVGGNYNYLYRLFRKSNLKPFERDISTEIYQAGSTPCNGVEGFNCYFPLQSYGFQPTNGVGYQPYRVVVLSFELLHAPATVCGPKKSTNLVKNKCVNFNFNGLTGTGVLTESNKKFLPFQQFGRDIADTTDAVRDPQTLEILDITPCSFGGVSVITPGTNTSNQVAVLYQGVNCTEVPVAIHADQLTPTWRVYSTGSNVFQTRAGCLIGAEHVNNSYECDIPIGAGICASYQTQTNSPRRARSVASQSIIAYTMSLGAENSVAYSNNSIAIPTNFTISVTTEILPVSMTKTSVDCTMYICGDSTECSNLLLQYGSFCTQLNRALTGIAVEQDKNTQEVFAQVKQIYKTPPIKDFGGFNFSQILPDPSKPSKRSFIEDLLFNKVTLADAGFIKQYGDCLGDIAARDLICAQKFNGLTVLPPLLTDEMIAQYTSALLAGTITSGWTFGAGAALQIPFAMQMAYRFNGIGVTQNVLYENQKLIANQFNSAIGKIQDSLSSTASALGKLQDVVNQNAQALNTLVKQLSSNFGAISSVLNDILSRLDKVEAEVQIDRLITGRLQSLQTYVTQQLIRAAEIRASANLAATKMSECVLGQSKRVDFCGKGYHLMSFPQSAPHGVVFLHVTYVPAQEKNFTTAPAICHDGKAHFPREGVFVSNGTHWFVTQRNFYEPQIITTDNTFVSGNCDVVIGIVNNTVYDPLQPELDSFKEELDKYFKNHTSPDVDLGDISGINASVVNIQKEIDRLNEVAKNLNESLIDLQELGKYEQYIKWPWYIWLGFIAGLIAIVMVTIMLCCMTSCCSCLKGCCSCGSCCKFDEDDSEPVLKGVKLHYT

SEQ ID NO: 296 - protein, 1273 aa, Artificial Sequence
  SARS-CoV-2/Belgium/BA-02291/2020__EPI_ISL_415159 spike protein (1-1273)
MFVFLVLLPLVSSQCVNLTTRTQLPPAYTNSFTRGVYYPDKVFRSSVLHSTQDLFLPFFSNVTWFHAIHVSGTNGTKRFDNPVLPFNDGVYFASTEKSNIIRGWIFGTTLDSKTQSLLIVNNATNVVIKVCEFQFCNDPFLGVYYHKNNKSWMESEFRVYSSANNCTFEYVSQPFLMDLEGKQGNFKNLREFVFKNIDGYFKIYSKHTPINLVRDLPQGFSALEPLVDLPIGINITRFQTLLALHRSYLTPGDSSSGWTAGAAAYYVGYLQPRTFLLKYNENGTITDAVDCALDPLSETKCTLKSFTVEKGIYQTSNFRVQPTESIVRFPNITNLCPFGEVFNATRFASVYAWNRKRISNCVADYSVLYNSASFSTFKCYGVSPTKLNDLCFTNVYADSFVIRGDEVRQIAPGQTGKIADYNYKLPDDFTGCVIAWNSNNLDSKVGGNYNYLYRLFRRSNLKPFERDISTEIYQAGSTPCNGVEGFNCYFPLQSYGFQPTNGVGYQPYRVVVLSFELLPAPATVCGPKKSTNLVKNKCVNFNFNGLTGTGVLTESNKKFLPFQQFGRDIADTTDAVRDPQTLEILDITPCSFGGVSVITPGTNTSNQVAVLYQGVNCTEVPVAIHADQLTPTWRVYSTGSNVFQTRAGCLIGAEHVNNSYECDIPIGAGICASYQTQTNSPRRARSVASQSIIAYTMSLGAENSVAYSNNSIAIPTNFTISVTTEILPVSMTKTSVDCTMYICGDSTECSNLLLQYGSFCTQLNRALTGIAVEQDKNTQEVFAQVKQIYKTPPIKDFGGFNFSQILPDPSKPSKRSFIEDLLFNKVTLADAGFIKQYGDCLGDIAARDLICAQKFNGLTVLPPLLTDEMIAQYTSALLAGTITSGWTFGAGAALQIPFAMQMAYRFNGIGVTQNVLYENQKLIANQFNSAIGKIQDSLSSAAPALGKLQDVVNQNAQALNTLVKQLSSNFGAISSVLNDILSRLDKVEAEVQIDRLITGRLQSLQTYVTQQLIRAAEIRASANLAATKMSECVLGQSKRVDFCGKGYHLMSFPQSAPHGVVFLHVTYVPAQEKNFTTAPAICHDGKAHFPREGVFVSNGTHWFVTQRNFYEPQIITTDNTFVSGNCDVVIGIVNNTVYDPLQPELDSFKEELDKYFKNHTSPDVDLGDISGINASVVNIQKEIDRLNEVAKNLNESLIDLQELGKYEQYIKWPWYIWLGFIAGLIAIVMVTIMLCCMTSCCSCLKGCCSCGSCCKFDEDDSEPVLKGVKLHYT

SEQ ID NO: 297 - protein, 1273 aa, Artificial Sequence
  SARS-CoV-2/USA/WA8-UW5/2020__EPI_ISL_413486 spike protein (1-1273)
MFVFLVLLPLVSSQCVNLTTRTQLPPAYTNSFTRGVYYPDKVFRSSVLHSTQDLFLPFFSNVTWFHAIHVSGTNGTKRFDNPVLPFNDGVYFASTEKSNIIRGWIFGTTLDSKTQSLLIVNNATNVVIKVCEFQFCNDPFLGVYYHKNNKSWMESEFRVYSSANNCTFEYVSQPFLMDLEGKQGNFKNLREFVFKNIDGYFKIYSKHTPINLVRDLPQGFSALEPLVDLPIGINITRFQTLLALHRSYLTPGDSSSGWTAGAAAYYVGYLQPRTFLLKYNENGTITDAVDCALDPLSETKCTLKSFTVEKGIYQTSNFRVQPTESIVRFPNITNLCPFGEVFNATRFASVYAWNRKRISNCVADYSVLYNSASFSTFKCYGVSPTKLNDLCFTNVYADSFVIRGDEVRQIAPGQTGKIADYNYKLPDDFTGCVIAWNSNNLDSKVGGNYNYLYRLFRKSNLKPFERDISTEIYQAGSTPCNGVEGFNCYFPLQSYGFQPTNGVGYQPYRVVVLSFELLHAPATVCGPKKSTNLVKNKCVNFNFNGLTGTGVLTESNKKFLPFQQFGRDIADTTDAVRDPQTLEILDITPCSFGGVSVITPGTNTSNQVAVLYQDVNCTEVPVAIHADQLTPTWRVYSTGSNVFQTRAGCLIGAEYVNNSYECDIPIGAGICASYQTQTNSPRRARSVASQSIIAYTMSLGAENSVAYSNNSIAIPTNFTISVTTEILPVSMTKTSVDCTMYICGDSTECSNLLLQYGSFCTQLNRALTGIAVEQDKNTQEVFAQVKQIYKTPPIKDFGGFNFSQILPDPSKPSKRSFIEDLLFNKVTLADAGFIKQYGDCLGDIAARDLICAQKFNGLTVLPPLLTDEMIAQYTSALLAGTITSGWTFGAGAALQIPFAMQMAYRFNGIGVTQNVLYENQKLIANQFNSAIGKIQDSLSSTASALGKLQDVVNQNAQALNTLVKQLSSNFGAISSVLNDILSRLDKVEAEVQIDRLITGRLQSLQTYVTQQLIRAAEIRASANLAATKMSECVLGQSKRVDFCGKGYHLMSFPQSAPHGVVFLHVTYVPAQEKNFTTAPAICHDGKAHFPREGVFVSNGTHWFVTQRNFYEPQIITTDNTFVSGNCDVVIGIVNNTVYDPLQPELDSFKEELDKYFKNHTSPDVDLGDISGINASVVNIQKEIDRLNEVAKNLNESLIDLQELGKYEQYIKWPWYIWLGFIAGLIAIVMVTIMLCCMTSCCSCLKGCCSCGSCCKFDEDDSEPVLKGVKLHYT

SEQ ID NO: 298 - protein, 1273 aa, Artificial Sequence
  SARS-CoV-2/England/20102000506/2020__EPI_ISL_415147 spike protein (1-1273)
MFVFLVLLPLVSSQCVNLTTRTQLPPAYTNSFTRGVYYPDKVFRSSVLHSTQDLFLPFFSNVTWFHAIHVSGTNGTKRFDNPVLPFNDGVYFASTEKSNIIRGWIFGTTLDSKTQSLLIVNNATNVVIKVCEFQFCNDPFLGVYYHKNNKSWMESEFRVYSSANNCTFEYVSQPFLMDLEGKQGNFKNLREFVFKNIDGYFKIYSKHTPINLVRDLPQGFSALEPLVDLPIGINITRFQTLLALHRSYLTPGDSSSGWTAGAAAYYVGYLQPRTFLLKYNENGTITDAVDCALDPLSETKCTLKSFTVEKGIYQTSNFRVQPTESIVRFPNITNLCPFGEVFNATRFASVYAWNRKRISNCVADYSVLYNSASFSTFKCYGVSPTKLNDLCFTNVYADSFVIRGDEVRQIAPGQTGKIADYNYKLPDDFTGCVIAWNSNNLDSKVGGNYNYLYRLFRKSNLKPFERDISTEIYQAGSTPCNGVEGFNCYFPLQSYGFQPTNGVGYQPYRVVVLSFELLHAPATVCGPKKSTNLVKNKCVNFNFNGLTGTGVLTESNKKFLPFQQFGRDIADTTDAVRDPQTLEILDITPCSFGGVSVITPGTNTSNQVAVLYQGVNCTEVPVAIHADQLTPTWRVYSTGSNVFQTRAGCLIGAEHVNNSYECDIPIGAGICASYQTQTNSPRRARSVASQSIIAYTMSLGAENSVAYSNNSIAIPTNFTISVTTEILPVSMTKTSVDCTMYICGDSTECSNLLLQYGSFCTQLNRALTGIAVEQDKNTQEVFAQVKQIYKTPPIKDFGGFNFSQILPDPSKPSKRSFIEDLLFNKVTLADAGFIKQYGYCLGDIAARDLICAQKFNGLTVLPPLLTDEMIAQYTSALLAGTITSGWTFGAGAALQIPFAMQMAYRFNGIGVTQNVLYENQKLIANQFNSAIGKIQDSLSSTASALGKLQDVVNQNAQALNTLVKQLSSNFGAISSVLNDILSRLDKVEAEVQIDRLITGRLQSLQTYVTQQLIRAAEIRASANLAATKMSECVLGQSKRVDFCGKGYHLMSFPQSAPHGVVFLHVTYVPAQEKNFTTAPAICHDGKAHFPREGVFVSNGTHWFVTQRNFYEPQIITTDNTFVSGNCDVVIGIVNNTVYDPLQPELDSFKEELDKYFKNHTSPDVDLGDISGINASVVNIQKEIDRLNEVAKNLNESLIDLQELGKYEQYIKWPWYIWLGFIAGLIAIVMVTIMLCCMTSCCSCLKGCCSCGSCCKFDEDDSEPVLKGVKLHYT

SEQ ID NO: 299 - protein, 1273 aa, Artificial Sequence
  SARS-CoV-2/Belgium/VAG-03013/2020__EPI_ISL_415155 spike protein (1-1273)
MFVFLVLLPLVSSQCVNLTTRTQLPPAYTNSFTRGVYYPDKVFRSSVLHSTQDLFLPFFSNVTWFHAIHVSGTNGTKRFDNPVLPFNDGVYFASTEKSNIIRGWIFGTTLDSKTQSLLIVNNATNVVIKVCEFQFCNDPFLGVYYHKNNKSWMESEFRVYSSANNCTFEYVSQPFLMDLEGKQGNFKNLREFVFKNIDGYFKIYSKHTPINLVRDLPQGFSALEPLVDLPIGINITRFQTLLALHRSYLTPGDSSSGWTAGAAAYYVGYLQPRTFLLKYNENGTITDAVDCALDPLSETKCTLKSFTVEKGIYQTSNFRVQPTESIVRFPNITNLCPFGEVFNATRFASVYAWNRKRISNCVADYSVLYNSASFSTFKCYGVSPTKLNDLCFTNVYADSFVIRGDEVRQIAPGQTGKIADYNYKLPDDFTGCVIAWNSNNLDSKVGGNYNYLYRLFRKSNLKPFERDISTEIYQAGSTPCNGVEGFNCYFPLQSYGFQPTNGVGYQPYRVVVLSFELLHAPATVCGPKKSTNLVKNKCVNFNFNGLTGTGVLTESNKKFLPFQQFGRDIADTTDAVRDPQTLEILDITPCSFGGVSVITPGTNTSNQVAVLYQGVNCTEVPVAIHADQLTPTWRVYSTGSNVFQTRAGCLIGAEHVNNSYECDIPIGAGICASYQTQTNSPRRARSVASQSIIAYTMSLGAENSVAYSNNSIAIPTNFTISVTTEILPVSMTKTSVDCTMYICGDSTECSNLLLQYGSFCTQLNRALTGIAVEQDKNTQEVFAQVKQIYKTPPIKDFGGFNFSQILPDPSKPSKRSFIEDLLFNKVTLADAGFIKQYGDCLGDIAARDLICAQKFNGLTVLPPLLTDEMIAQYTSALLAGTITSGWTFGAGAALQIPFAMQMAYRFNGIGVTQNVLYENQKLIANQFNSAIGKIQDSLSSTATALGKLQDVVNQNAQALNTLVKQLSSNFGAISSVLNDILSRLDKVEAEVQIDRLITGRLQSLQTYVTQQLIRAAEIRASANLAATKMSECVLGQSKRVDFCGKGYHLMSFPQSAPHGVVFLHVTYVPAQEKNFTTAPAICHDGKAHFPREGVFVSNGTHWFVTQRNFYEPQIITTDNTFVSGNCDVVIGIVNNTVYDPLQPELDSFKEELDKYFKNHTSPDVDLGDISGINASVVNIQKEIDRLNEVAKNLNESLIDLQELGKYEQYIKWPWYIWLGFIAGLIAIVMVTIMLCCMTSCCSCLKGCCSCGSCCKFDEDDSEPVLKGVKLHYT

SEQ ID NO: 300 - protein, 1273 aa, Artificial Sequence
  SARS-CoV-2/Belgium/BC-03016/2020__EPI_ISL_415157 spike protein (1-1273)
MFVFLVLLPLVSSQCVNLTTRTQLPPAYTNSFTRGVYYPDKVFRSSVLHSTQDLFLPFFSNVTWFHAIHVSGTNGTKRFDNPVLPFNDGVYFASTEKSNIIRGWIFGTTLDSKTQSLLIVNNATNVVIKVCEFQFCNDPFLGVYYHKNNKSWMESEFRVYSSANNCTFEYVSQPFLMDLEGKQGNFKNLREFVFKNIDGYFKIYSKHTPINLVRDLPQGFSALEPLVDLPIGINITRFQTLLALHRSYLTPGDSSSGWTAGAAAYYVGYLQPRTFLLKYNENGTITDAVDCALDPLSETKCTLKSFTVEKGIYQTSNFRVQPTESIVRFPNITNLCPFGEVFNATRFASVYAWNRKRISNCVADYSVLYNSASFSTFKCYGVSPTKLNDLCFTNVYADSFVIRGDEVRQIAPGQTGKIADYNYKLPDDFTGCVIAWNSNNLDSKVGGNYNYLYRLFRKSNLKPFERDISTEIYQAGSTPCNGVEGFNCYFPLQSYGFQPTNGVGYQPYRVVVLSFELLHAPATVCGPKKSTNLVKNKCVNFNFNGLTGTGVLTESNKKFLPFQQFGRDIADTTDAVRDPQTLEILDITPCSFGGVSVITPGTNTSNQVAVLYQGVNCTEVPVAIHADQLTPTWRVYSTGSNVFQTRAGCLIGAEHVNNSYECDIPIGAGICASYQTQTNSPRRARSVASQSIIAYTMSLGAENSVAYSNNSIAIPTNFTISVTTEILPVSMTKTSVDCTMYICGDSTECSNLLLQYGSFCTQLNRALTGIAVEQDKNTQEVFAQVKQIYKTPPIKDFGGFNFSQILPDPSKPSKRSFIEDLLFNKVTLADAGFIKQYGDCLGDIAARDLICAQKFNGLTVLPPLLTDEMIAQYTSALLAGTITSGWTFGAGAALQIPFAMQMAYRFNGIGVTQNVLYENQKLIANQFNSAIGKIQDSLSSTAPALGKLQDVVNQNAQALNTLVKQLSSNFGAISSVLNDILSRLDKVEAEVQIDRLITGRLQSLQTYVTQQLIRAAEIRASANLAATKMSECVLGQSKRVDFCGKGYHLMSFPQSAPHGVVFLHVTYVPAQEKNFTTAPAICHDGKAHFPREGVFVSNGTHWFVTQRNFYEPQIITTDNTFVSGNCDVVIGIVNNTVYDPLQPELDSFKEELDKYFKNHTSPDVDLGDISGINASVVNIQKEIDRLNEVAKNLNESLIDLQELGKYEQYIKWPWYIWLGFIAGLIAIVMVTIMLCCMTSCCSCLKGCCSCGSCCKFDEDDSEPVLKGVKLHYT

SEQ ID NO: 301 - protein, 1273 aa, Artificial Sequence
  SARS-CoV-2/Germany/BavPat3/2020__EPI_ISL_414521 spike protein (1-1273)
MFVFLVLLPLVSSQCVNLTTRTQLPPAYTNSFTRGVYYPDKVFRSSVLHSTQDLFLPFFSNVTWFHAIHVSGTNGTKRFDNPVLPFNDGVYFASTEKSNIIRGWIFGTTLDSKTQSLLIVNNATNVVIKVCEFQFCNDPFLGVYYHKNNKSWMESEFRVYSSANNCTFEYVSQPFLMDLEGKQGNFKNLREFVFKNIDGYFKIYSKHTPINLVRDLPQGFSALEPLVDLPIGINITRFQTLLALHRSYLTPGDSSSGWTAGAAAYYVGYLQPRTFLLKYNENGTITDAVDCALDPLSETKCTLKSFTVEKGIYQTSNFRVQPTESIVRFPNITNLCPFGEVFNATRFASVYAWNRKRISNCVADYSVLYNSASFSTFKCYGVSPTKLNDLCFTNVYADSFVIRGDEVRQIAPGQTGKIADYNYKLPDDFTGCVIAWNSNNLDSKVGGNYNYLYRLFRKSNLKPFERDISTEIYQAGSTPCNGVEGFNCYFPLQSYGFQPTNGVGYQPYRVVVLSFELLHAPATVCGPKKSTNLVKNKCVNFNFNGLTGTGVLTESNKKFLPFQQFGRDIADTTDAVRDPQTLEILDITPCSFGGVSVITPGTNTSNQVAVLYQDVNCTEVPVAIHADQLTPTWRVYSTGSNVFQTRAGCLIGAEHVNNSYECDIPIGAGICASYQTQTNSPRRARSVASQSIIAYTMSLGAENSVAYSNNSIAIPTNFTISVTTEILPVSMTKTSVDCTMYICGDSTECSNLLLQYGSFCTQLNRALTGIAVEQDKNTQQVFAQVKQIYKTPPIKDFGGFNFSQILPDPSKPSKRSFIEDLLFNKVTLADAGFIKQYGDCLGDIAARDLICAQKFNGLTVLPPLLTDEMIAQYTSALLAGTITSGWTFGAGAALQIPFAMQMAYRFNGIGVTQNVLYENQKLIANQFNSAIGKIQDSLSSTASALGKLQDVVNQNAQALNTLVKQLSSNFGAISSVLNDILSRLDKVEAEVQIDRLITGRLQSLQTYVTQQLIRAAEIRASANLAATKMSECVLGQSKRVDFCGKGYHLMSFPQSAPHGVVFLHVTYVPAQEKNFTTAPAICHDGKAHFPREGVFVSNGTHWFVTQRNFYEPQIITTDNTFVSGNCDVVIGIVNNTVYDPLQPELDSFKEELDKYFKNHTSPDVDLGDISGINASVVNIQKEIDRLNEVAKNLNESLIDLQELGKYEQYIKWPWYIWLGFIAGLIAIVMVTIMLCCMTSCCSCLKGCCSCGSCCKFDEDDSEPVLKGVKLHYT

SEQ ID NO: 302 - protein, 1273 aa, Artificial Sequence
  SARS-CoV-2/France/HF1805/2020__EPI_ISL_414628 spike protein (1-1273)
MFVFLVLLPLVSSQCVNLTTRTQLPPAYTNSFTRGVYYPDKVFRSSVLHSTQDLFLPFFSNVTWFHAIHVSGTNGTKRFDNPVLPFNDGVYFASTEKSNIIRGWIFGTTLDSKTQSLLIVNNATNVVIKVCEFQFCNDPFLGVYYHKNNKSWMESEFRVYSSANNCTFEYVSQPFLMDLEGKQGNFKNLREFVFKNIDGYFKIYSKHTPINLVRDLPQGFSALEPLVDLPIGINITRFQTLLALHRSYLTPGDSSSGWTAGAAAYYVGYLQPRTFLLKYNENGTITDAVDCALDPLSETKCTLKSFTVEKGIYQTSNFRVQPTESIVRFPNITNLCPFGEVFNATRFASVYAWNRKRISNCVADYSVLYNSASFSTFKCYGVSPTKLNDLCFTNVYADSFVIRGDEVRQIAPGQTGKIADYNYKLPDDFTGCVIAWNSNNLDSKVGGNYNYLYRLFRKSNLKPFERDISTEIYQAGSTPCNGVEGFNCYFPLQSYGFQPTNGVGYQPYRVVVLSFELLHAPATVCGPKKSTNLVKNKCVNFNFNGLTGTGVLTESNKKFLPFQQFGRDIADTTDAVRDPQTLEILDITPCSFGGVSVITPGTNTSNQVAVLYQGVNCTEVPVAIHADQLTPTWRVYSTGSNVFQTRAGCLIGAEHVNNSYECDIPIGAGICASYQTQTNSPRRARSVASQSIIAYTMSLGAENSVAYSNNSIAIPTNFTISVTTEILPVSMTKTSVDCTMYICGDSTECSNLLLQYGSFCTQLNRALTGIAVEQDKNTQEVFAQVKQIYKTPPIKDFGGFNFSQILPDPSKPSKRSFIEDLLFNKVTLADAGFIKQYGDCLGDIAARDLICAQKFNGLTVLPPLLTDEMIAQYTSALLAGTITSGWTFGAGAALQIPFAMQMAYRFNGIGVTQNVLYENQKLIANQFNSAIGKIQDSLSSTASALGKLQDVVNQNAQALNTLVKQLSSNFGAISSVLNDILSRLDKVEAEVQIDRLITGRLQSLQTYVTQQLIRAAEIRASANLAATKMSECVLGQSKRVDFCGKGYHLMSFPQSAPHGVVFLHVTYVPAQEKNFTTAPAICHDGKAHFPREGVFVSNGTHWFVTQRNFYEPQIITTDNTFVSGNCDVVIGVVNNTVYDPLQPELDSFKEELDKYFKNHTSPDVDLGDISGINASVVNIQKEIDRLNEVAKNLNESLIDLQELGKYEQYIKWPWYIWLGFIAGLIAIVMVTIMLCCMTSCCSCLKGCCSCGSCCKFDEDDSEPVLKGVKLHYT

SEQ ID NO: 303 - protein, 1273 aa, Artificial Sequence
  SARS-CoV-2/Netherlands/ZuidHolland_9/2020__EPI_ISL_414445 spike protein (1-1273)
MFVFLVLLPLVSSQCVNLTTRTQLPPAYTNSFTRGVYYPDKVFRSSVLHSTQDLFLPFFSNVTWFHAIHVSGTNGTKRFDNPVLPFNDGVYFASTEKSNIIRGWIFGTTLDSKTQSLLIVNNATNVVIKVCEFQFCNDPFLGVYYHKNNKSWMESEFRVYSSANNCTFEYVSQPFLMDLEGKQGNFKNLREFVFKNIDGYFKIYSKHTPINLVRDLPQGFSALEPLVDLPIGINITRFQTLLALHRSYLTPGDSSSGWTAGAAAYYVGYLQPRTFLLKYNENGTITDAVDCALDPLSETKCTLKSFTVEKGIYQTSNFRVQPTESIVRFPNITNLCPFGEVFNATRFASVYAWNRKRISNCVADYSVLYNSASFSTFKCYGVSPTKLNDLCFTNVYADSFVIRGDEVRQIAPGQTGKIADYNYKLPDDFTGCVIAWNSNNLDSKVGGNYNYLYRLFRKSNLKPFERDISTEIYQAGSTPCNGVEGFNCYFPLQSYGFQPTNGVGYQPYRVVVLSFELLHAPATVCGPKKSTNLVKNKCVNFNFNGLTGTGVLTESNKKFLPFQQFGRDIADTTDAVRDPQTLEILDITPCSFGGVSVITPGTNTSNQVAVLYQGVNCTEVPVAIHADQLTPTWRVYSTGSNVFQTRAGCLIGAEHVNNSYECDIPIGAGICASYQTQTNSPRRARSVASQSIIAYTMSLGAENSVAYSNNSIAIPTNFTISVTTEILPVSMTKTSVDCTMYICGDSTECSNLLLQYGSFCTQLNRALTGIAVEQDKNTQEVFAQVKQIYKTPPIKDFGGFNFSQILPDPSKPSKRSFIEDLLFNKVTLADAGFIKQYGDCLGDIAARDLICVQKFNGLTVLPPLLTDEMIAQYTSALLAGTITSGWTFGAGAALQIPFAMQMAYRFNGIGVTQNVLYENQKLIANQFNSAIGKIQDSLSSTASALGKLQDVVNQNAQALNTLVKQLSSNFGAISSVLNDILSRLDKVEAEVQIDRLITGRLQSLQTYVTQQLIRAAEIRASANLAATKMSECVLGQSKRVDFCGKGYHLMSFPQSAPHGVVFLHVTYVPAQEKNFTTAPAICHDGKAHFPREGVFVSNGTHWFVTQRNFYEPQIITTDNTFVSGNCDVVIGIVNNTVYDPLQPELDSFKEELDKYFKNHTSPDVDLGDISGINASVVNIQKEIDRLNEVAKNLNESLIDLQELGKYEQYIKWPWYIWLGFIAGLIAIVMVTIMLCCMTSCCSCLKGCCSCGSCCKFDEDDSEPVLKGVKLHYT

SEQ ID NO: 304 - protein, 1273 aa, Artificial Sequence
  SARS-CoV-2/Finland/FIN03032020A/2020__EPI_ISL_413602 spike protein (1-1273)
MFVFLVLLPLVSSQCVNLTTRTQLPPAYTNSFTRGVYYPDKVFRSSVLHSTQDLFLPFFSNVTWFHAIHVSGTNGTKRFDNPVLPFNDGVYFASTEKSNIIRGWIFGTTLDSKTQSLLIVNNATNVVIKVCEFQFCNDPFLGVYYHKNNKSWMESEFRVYSSANNCTFEYVSQPFLMDLEGKQGNFKNLREFVFKNIDGYFKIYSKHTPINLVRDLPQGFSALEPLVDLPIGINITRFQTLLALHRSYLTPGDSSSGWTAGAAAYYVGYLQPRTFLLKYNENGTITDAVDCALDPLSETKCTLKSFTVEKGIYQTSNFRVQPTESIVRFPNITNLCPFGEVFNATRFASVYAWNRKRISNCVADYSVLYNSASFSTFKCYGVSPTKLNDLCFTNVYADSFVIRGDEVRQIAPGQTGKIADYNYKLPDDFTGCVISWNSNNLDSKVGGNYNYLYRLFRKSNLKPFERDISTEIYQAGSTPCNGVEGFNCYFPLQSYGFQPTNGVGYQPYRVVVLSFELLHAPATVCGPKKSTNLVKNKCVNFNFNGLTGTGVLTESNKKFLPFQQFGRDIADTTDAVRDPQTLEILDITPCSFGGVSVITPGTNTSNQVAVLYQGVNCTEVPVAIHADQLTPTWRVYSTGSNVFQTRAGCLIGAEHVNNSYECDIPIGAGICASYQTQTNSPRRARSVASQSIIAYTMSLGAENSVAYSNNSIAIPTNFTISVTTEILPVSMTKTSVDCTMYICGDSTECSNLLLQYGSFCTQLNRALTGIAVEQDKNTQEVFAQVKQIYKTPPIKDFGGFNFSQILPDPSKPSKRSFIEDLLFNKVTLADAGFIKQYGDCLGDIAARDLICAQKFNGLTVLPPLLTDEMIAQYTSALLAGTITSGWTFGAGAALQIPFAMQMAYRFNGIGVTQNVLYENQKLIANQFNSAIGKIQDSLSSTASALGKLQDVVNQNAQALNTLVKQLSSNFGAISSVLNDILSRLDKVEAEVQIDRLITGRLQSLQTYVTQQLIRAAEIRASANLAATKMSECVLGQSKRVDFCGKGYHLMSFPQSAPHGVVFLHVTYVPAQEKNFTTAPAICHDGKAHFPREGVFVSNGTHWFVTQRNFYEPQIITTDNTFVSGNCDVVIGIVNNTVYDPLQPELDSFKEELDKYFKNHTSPDVDLGDISGINASVVNIQKEIDRLNEVAKNLNESLIDLQELGKYEQYIKWPWYIWLGFIAGLIAIVMVTIMLCCMTSCCSCLKGCCSCGSCCKFDEDDSEPVLKGVKLHYT

SEQ ID NO: 305 - protein, 1273 aa, Artificial Sequence
  SARS-CoV-2/France/GE1977/2020__EPI_ISL_414632 spike protein (1-1273)
MFVFLVLLPLVSSQCVNLTTRTQLPPAYTNSFTRGVYYPDKVFRSSVLHSTQDLFLPFFSNVTWFHAIHVSGTNGTKRFDNPVLPFNDGVYFASTEKSNIIRGWIFGTTLDSKTQSLLIVNNATNVVIKVCEFQFCNDPFLGVYYHKNNKSWMESEFRVYSSANNCTFEYVSQPFLMDLEGKQGNFKNLREFVFKNIDGYFKIYSKHTPINLVRDLPQGFSALEPLVDLPIGINITRFQTLLALHRSYLTPGDSSSGWTAGAAAYYVGYLQPRTFLLKYNENGTITDAVDCALDPLSETKCTLKSFTVEKGIYQTSNFRVQPTESIVRFPNITNLCPFGEVFNATRFASVYAWNRKRISNCVADYSVLYNSASFSTFKCYGVSPTKLNDLCFTNVYADSFVIRGDEVRQIAPGQTGKIADYNYKLPDDFTGCVIAWNSNNLDSKVGGNYNYLYRLFRKSNLKPFERDISTEIYQAGSTPCNGVEGFNCYFPLQSYGFQPTNGVGYQPYRVVVLSFELLHAPATVCGPKKSTNLVKNKCVNFNFNGLTGTGVLTESNKKFLPFQQFGRDIADTTDAVRDPQTLEILDITPCSFGGVSVITPGTNTSNQVAVLYQGVNCTEVPVAIHADQLTPTWRVYSTGSNVFQTRAGCLIGAEHVNNSYECDIPIGAGICASYQTQTNSPRRARSVASQSIIAYTMSLGAENSVAYSNNSIAIPTNFTISVTTEILPVSMTKTSVDCTMYICGDSTECSNLLLQYGSFCTQLNRALTGIAVEQDKNTQEVFAQVKQIYKTPPIKDFGGFNFSQILPDPSKPSKRSFIEDLLFNKVTLADAGFIKQYGDCLGDIAARDLICAQKFNGLTVLPPLLTDEMIAQYTSALLAGTITSGWTFGAGAALQIPFAMQMAYRFNGIGVTQNVLYENQKLIANQFNSAIGKIQDSLFSTASALGKLQDVVNQNAQALNTLVKQLSSNFGAISSVLNDILSRLDKVEAEVQIDRLITGRLQSLQTYVTQQLIRAAEIRASANLAATKMSECVLGQSKRVDFCGKGYHLMSFPQSAPHGVVFLHVTYVPAQEKNFTTAPAICHDGKAHFPREGVFVSNGTHWFVTQRNFYEPQIITTDNTFVSGNCDVVIGIVNNTVYDPLQPELDSFKEELDKYFKNHTSPDVDLGDISGINASVVNIQKEIDRLNEVAKNLNESLIDLQELGKYEQYIKWPWYIWLGFIAGLIAIVMVTIMLCCMTSCCSCLKGCCSCGSCCKFDEDDSEPVLKGVKLHYT

SEQ ID NO: 306 - protein, 1273 aa, Artificial Sequence
  SARS-CoV-2/Finland/FIN-313/2020__EPI_ISL_414641 spike protein (1-1273)
MFVFLVLLPLVSSQCVNLTTRTQLPPAYTNSFTRGVYYPDKVFRSSVLHSTQDLFLPFFSNVTWFHAIHVSGTNGTKRFDNPVLPFNDGVYFASTEKSNIIRGWIFGTTLDSKTQSLLIVNNATNVVIKVCEFQFCNDPFLGVYYHKNNKSWMESEFRVYSSANNCTFEYVSQPFLMDLEGKQGNFKNLREFVFKNIDGYFKIYSKHTPINLVRDLPQGFSALEPLVDLPIGINITRFKTLLALHRSYLTPGDSSSGWTAGAAAYYVGYLQPRTFLLKYNENGTITDAVDCALDPLSETKCTLKSFTVEKGIYQTSNFRVQPTESIVRFPNITNLCPFGEVFNATRFASVYAWNRKRISNCVADYSVLYNSASFSTFKCYGVSPTKLNDLCFTNVYADSFVIRGDEVRQIAPGQTGKIADYNYKLPDDFTGCVIAWNSNNLDSKVGGNYNYLYRLFRKSNLKPFERDISTEIYQAGSTPCNGVEGFNCYFPLQSYGFQPTNGVGYQPYRVVVLSFELLHAPATVCGPKKSTNLVKNKCVNFNFNGLTGTGVLTESNKKFLPFQQFGRDIADTTDAVRDPQTLEILDITPCSFGGVSVITPGTNTSNQVAVLYQGVNCTEVPVAIHADQLTPTWRVYSTGSNVFQTRAGCLIGAEHVNNSYECDIPIGAGICASYQTQTNSPRRARSVASQSIIAYTMSLGAENSVAYSNNSIAIPTNFTISVTTEILPVSMTKTSVDCTMYICGDSTECSNLLLQYGSFCTQLNRALTGIAVEQDKNTQEVFAQVKQIYKTPPIKDFGGFNFSQILPDPSKPSKRSFIEDLLFNKVTLADAGFIKQYGDCLGDIAARDLICAQKFNGLTVLPPLLTDEMIAQYTSALLAGTITSGWTFGAGAALQIPFAMQMAYRFNGIGVTQNVLYENQKLIANQFNSAIGKIQDSLSSTASALGKLQDVVNQNAQALNTLVKQLSSNFGAISSVLNDILSRLDKVEAEVQIDRLITGRLQSLQTYVTQQLIRAAEIRASANLAATKMSECVLGQSKRVDFCGKGYHLMSFPQSAPHGVVFLHVTYVPAQEKNFTTAPAICHDGKAHFPREGVFVSNGTHWFVTQRNFYEPQIITTDNTFVSGNCDVVIGIVNNTVYDPLQPELDSFKEELDKYFKNHTSPDVDLGDISGINASVVNIQKEIDRLNEVAKNLNESLIDLQELGKYEQYIKWPWYIWLGFIAGLIAIVMVTIMLCCMTSCCSCLKGCCSCGSCCKFDEDDSEPVLKGVKLHYT

SEQ ID NO: 307 - protein, 1273 aa, Artificial Sequence
  SARS-CoV-2/Netherlands/ZuidHolland_2/2020__EPI_ISL_414556 spike protein (1-1273)
MFVFLVLLPLVSSQCVNLTTRTQLPPAYTNSFTRGVYYPDKVFRSSVLHSTQDLFLPFFSNVTWFHAIHVSGTNGTKRFDNPVLPFNDGVYFASTEKSNIIRGWIFGTTLDSKTQSLLIVNNATNVVIKVCEFQFCNDPFLGVYYHKNNKSWMESEFRVYSSANNCTFEYVSQPFLMDLEGKQGNFKNLREFVFKNIDGYFKIYSKHTPINLVRDLPQGFSALEPLVDLPIGINITRFQTLLALHRSYLTPGDSSSGWTAGAAAYYVGYLQPRTFLLKYNENGTITDAVDCALDPLSETKCTLKSFTVEKGIYQTSNFRVQPTESIVRFPNITNLCPFGEVFNATRFASVYAWNRKRISNCVADYSVLYNSASFSTFKCYGVSPTKLNDLCFTNVYADSFVIRGDEVRQIAPGQTGKIADYNYKLPDDFTGCVIAWNSNNLDSKVGGNYNYLYRLFRKSNLKPFERDISTEIYQAGSTPCNGVEGFNCYFPLQSYGFQPTNGVGYQPYRVVVLSFELLHAPATVCGPKKSTNLVKNKCVNFNFNGLTGTGVLTESNKKFLPFQQFGRDIADTTDAVRDPQTLEILDITPCSFGGVSVITPGTNTSNQVAVLYQGVNCTEVPVAIHADQLTPTWRVYSTGSNVFQTRAGCLIGAEHVNNSYECDIPIGAGICASYQTQTNSPRRARSVASQSIIAYTMSLGAENSVAYSNNSIAIPTNFTISVTTEILPVSMTKTSVDCTMYICGDSTECSNLLLQYGSFCTQLNRALTGIALEQDKNTQEVFAQVKQIYKTPPIKDFGGFNFSQILPDPSKPSKRSFIEDLLFNKVTLADAGFIKQYGDCLGDIAARDLICAQKFNGLTVLPPLLTDEMIAQYTSALLAGTITSGWTFGAGAALQIPFAMQMAYRFNGIGVTQNVLYENQKLIANQFNSAIGKIQDSLSSTASALGKLQDVVNQNAQALNTLVKQLSSNFGAISSVLNDILSRLDKVEAEVQIDRLITGRLQSLQTYVTQQLIRAAEIRASANLAATKMSECVLGQSKRVDFCGKGYHLMSFPQSAPHGVVFLHVTYVPAQEKNFTTAPAICHDGKAHFPREGVFVSNGTHWFVTQRNFYEPQIITTDNTFVSGNCDVVIGIVNNTVYDPLQPELDSFKEELDKYFKNHTSPDVDLGDISGINASVVNIQKEIDRLNEVAKNLNESLIDLQELGKYEQYIKWPWYIWLGFIAGLIAIVMVTIMLCCMTSCCSCLKGCCSCGSCCKFDEDDSEPVLKGVKLHYT

SEQ ID NO: 308 - protein, 1273 aa, Artificial Sequence
  SARS-CoV-2/USA/WA-UW31/2020__EPI_ISL_414618 spike protein (1-1273)
MFVFLVLLPLVSSQCVNLTTRTQLPPAYTNSFTRGVYYPDKVFRSSVLHSTQDLFLPFFSNVTWFHAIHVSGTNGTKRFDNPVLPFNDGVYFASTEKSNIIRGWIFGTTLDSKTQSLLIVNNATNVVIKVCEFQFCNDPFLGVYYHKNNKSWMESEFRVYSSANNCTFEYVSQPFLMDLEGKQGNFKNLREFVFKNIDGYFKIYSKHTPINLVRDLPQGFSALEPLVDLPIGINITRFQTLLALHRSYLTPGDSSSGWTAGAAAYYVGYLQPRTFLLKYNENGTITDAVDCALDPLSETKCTLKSFTVEKGIYQTSNFRVQPTESIVRFPNITNLCPFGEVFNATRFASVYAWNRKRISNCVADYSVLYNSASFSTFKCYGVSPTKLNDLCFTNVYADSFVIRGDEVRQIAPGQTGKIADYNYKLPDDFTGCVIAWNSNNLDSKVGGNYNYLYRLFRKSNLKPFERDISTEIYQAGSTPCNGAEGFNCYFPLQSYGFQPTNGVGYQPYRVVVLSFELLHAPATVCGPKKSTNLVKNKCVNFNFNGLTGTGVLTESNKKFLPFQQFGRDIADTTDAVRDPQTLEILDITPCSFGGVSVITPGTNTSNQVAVLYQDVNCTEVPVAIHADQLTPTWRVYSTGSNVFQTRAGCLIGAEHVNNSYECDIPIGAGICASYQTQTNSPRRARSVASQSIIAYTMSLGAENSVAYSNNSIAIPTNFTISVTTEILPVSMTKTSVDCTMYICGDSTECSNLLLQYGSFCTQLNRALTGIAVEQDKNTQEVFAQVKQIYKTPPIKDFGGFNFSQILPDPSKPSKRSFIEDLLFNKVTLADAGFIKQYGDCLGDIAARDLICAQKFNGLTVLPPLLTDEMIAQYTSALLAGTITSGWTFGAGAALQIPFAMQMAYRFNGIGVTQNVLYENQKLIANQFNSAIGKIQDSLSSTASALGKLQDVVNQNAQALNTLVKQLSSNFGAISSVLNDILSRLDKVEAEVQIDRLITGRLQSLQTYVTQQLIRAAEIRASANLAATKMSECVLGQSKRVDFCGKGYHLMSFPQSAPHGVVFLHVTYVPAQEKNFTTAPAICHDGKAHFPREGVFVSNGTHWFVTQRNFYEPQIITTDNTFVSGNCDVVIGIVNNTVYDPLQPELDSFKEELDKYFKNHTSPDVDLGDISGINASVVNIQKEIDRLNEVAKNLNESLIDLQELGKYEQYIKWPWYIWLGFIAGLIAIVMVTIMLCCMTSCCSCLKGCCSCGSCCKFDEDDSEPVLKGVKLHYT

SEQ ID NO: 309 - protein, 1273 aa, Artificial Sequence
  SARS-CoV-2/South Korea/SNU01/2020__EPI_ISL_411929 spike protein (1-1273)
MFVFLVLLPLVSSQCVNLTTRTQLPPAYTNSFTRGVYYPDKVFRSSVLHSTQDLFLPFFSNVTWFHAIHVSGTNGTKRFDNPVLPFNDGVYFASTEKSNIIRGWIFGTTLDSKTQSLLIVNNATNVVIKVCEFQFCNDPFLGVYYHKNNKSWMESEFRVYSSANNCTFEYVSQPFLMDLEGKQGNFKNLREFVFKNIDGYFKIYSKHTPINLVRDLPQGFWALEPLVDLPIGINITRFQTLLALHRSYLTPGDSSSGWTAGAAAYYVGYLQPRTFLLKYNENGTITDAVDCALDPLSETKCTLKSFTVEKGIYQTSNFRVQPTESIVRFPNITNLCPFGEVFNATRFASVYAWNRKRISNCVADYSVLYNSASFSTFKCYGVSPTKLNDLCFTNVYADSFVIRGDEVRQIAPGQTGKIADYNYKLPDDFTGCVIAWNSNNLDSKVGGNYNYLYRLFRKSNLKPFERDISTEIYQAGSTPCNGVEGFNCYFPLQSYGFQPTNGVGYQPYRVVVLSFELLHAPATVCGPKKSTNLVKNKCVNFNFNGLTGTGVLTESNKKFLPFQQFGRDIADTTDAVRDPQTLEILDITPCSFGGVSVITPGTNTSNQVAVLYQDVNCTEVPVAIHADQLTPTWRVYSTGSNVFQTRAGCLIGAEHVNNSYECDIPIGAGICASYQTQTNSPRRARSVASQSIIAYTMSLGAENSVAYSNNSIAIPTNFTISVTTEILPVSMTKTSVDCTMYICGDSTECSNLLLQYGSFCTQLNRALTGIAVEQDKNTQEVFAQVKQIYKTPPIKDFGGFNFSQILPDPSKPSKRSFIEDLLFNKVTLADAGFIKQYGDCLGDIAARDLICAQKFNGLTVLPPLLTDEMIAQYTSALLAGTITSGWTFGAGAALQIPFAMQMAYRFNGIGVTQNVLYENQKLIANQFNSAIGKIQDSLSSTASALGKLQDVVNQNAQALNTLVKQLSSNFGAISSVLNDILSRLDKVEAEVQIDRLITGRLQSLQTYVTQQLIRAAEIRASANLAATKMSECVLGQSKRVDFCGKGYHLMSFPQSAPHGVVFLHVTYVPAQEKNFTTAPAICHDGKAHFPREGVFVSNGTHWFVTQRNFYEPQIITTDNTFVSGNCDVVIGIVNNTVYDPLQPELDSFKEELDKYFKNHTSPDVDLGDISGINASVVNIQKEIDRLNEVAKNLNESLIDLQELGKYEQYIKWPWYIWLGFIAGLIAIVMVTIMLCCMTSCCSCLKGCCSCGSCCKFDEDDSEPVLKGVKLHYT

SEQ ID NO: 310 - protein, 1273 aa, Artificial Sequence
  SARS-CoV-2/China/WF0004/2020__EPI_ISL_413694 spike protein (1-1273)
MFVFLVLLPLVSSQCVNLTTRTQLPPAYTNSFTRGVYYPDKVFRSSVLHSTQDLFLPFFSNVTWFHAIHVSGTNGTKRFDNPVLPFNDGVYFASTEKSNIIRGWIFGTTLDSKTQSLLIVNNATNVVIKVCEFQFCNDPFLGVYYHKNNKSWTESEFRVYSSANNCTFEYVSQPFLMDLEGKQGNFKNLREFVFKNIDGYFKIYSKHTPINLVRDLPQGFSALEPLVDLPIGINITRFQTLLALHRSYLTPGDSSSGWTAGAAAYYVGYLQPRTFLLKYNENGTITDAVDCALDPLSETKCTLKSFTVEKGIYQTSNFRVQPTESIVRFPNITNLCPFGEVFNATRFASVYAWNRKRISNCVADYSVLYNSASFSTFKCYGVSPTKLNDLCFTNVYADSFVIRGDEVRQIAPGQTGKIADYNYKLPDDFTGCVIAWNSNNLDSKVGGNYNYLYRLFRKSNLKPFERDISTEIYQAGSTPCNGVEGFNCYFPLQSYGFQPTNGVGYQPYRVVVLSFELLHAPATVCGPKKSTNLVKNKCVNFNFNGLTGTGVLTESNKKFLPFQQFGRDIADTTDAVRDPQTLEILDITPCSFGGVSVITPGTNTSNQVAVLYQDVNCTEVPVAIHADQLTPTWRVYSTGSNVFQTRAGCLIGAEHVNNSYECDIPIGAGICASYQTQTNSPRRARSVASQSIIAYTMSLGAENSVAYSNNSIAIPTNFTISVTTEILPVSMTKTSVDCTMYICGDSTECSNLLLQYGSFCTQLNRALTGIAVEQDKNTQEVFAQVKQIYKTPPIKDFGGFNFSQILPDPSKPSKRSFIEDLLFNKVTLADAGFIKQYGDCLGDIAARDLICAQKFNGLTVLPPLLTDEMIAQYTSALLAGTITSGWTFGAGAALQIPFAMQMAYRFNGIGVTQNVLYENQKLIANQFNSAIGKIQDSLSSTASALGKLQDVVNQNAQALNTLVKQLSSNFGAISSVLNDILSRLDKVEAEVQIDRLITGRLQSLQTYVTQQLIRAAEIRASANLAATKMSECVLGQSKRFDFCGKGYHLMSFPQSAPHGVVFLHVTYVPAQEKNFTTAPAICHDGKAHFPREGVFVSNGTHWFVTQRNFYEPQIITTDNTFVSGNCDVVIGIVNNTVYDPLQPELDSFKEELDKYFKNHTSPDVDLGDISGINASVVNIQKEIDRLNEVAKNLNESLIDLQELGKYEQYIKWPWYIWLGFIAGLIAIVMVTIMLCCMTSCCSCLKGCCSCGSCCKFDEDDSEPVLKGVKLHYT

SEQ ID NO: 311 - protein, 1273 aa, Artificial Sequence
  SARS-CoV-2/China/WF0028/2020__EPI_ISL_413791 spike protein (1-1273)
MFVFLVLLPLVSSQCVNLTTRTQLPPAYTNSFTRGVYYPDKVFRSSVLHSTQDLFLPFFSNVTWFHAIHVSGTNGTKRFDNPVLPFNDGVYFASTEKSNIIRGWIFGTTLDSKTQSLLIVNNATNVVIKVCEFQFCNDPFLGVYYHKNNKSWMESEFRVYSSANNCTFEYVSQPFLMDLEGKQGNFKNLREFVFKNIDGYFKIYSKHTPINLVRDLPQGFSALEPLVDLPIGINITRFQTLLALHRSYLTPGDSSSGWTAGAAAYYVGYLQPRTFLLKYNENGTITDAVDCALDPLSETKCTLKSFTVEKGIYQTSNFRVQPTESIVRFPNITNLCPFGEVFNATRFASVYAWNRKRISNCVADYSVLYNSASFSTFKCYGVSPTKLNDLCFTNVYADSFVIRGDEVRQIAPGQTGKIADYNYKLPDDFTGCVIAWNSNNLDSKVGGNYNYLYRLFRKSNLKPFERDISTEIYQAGSTPCNGVEGFNCYFPLQSYGFQPTNGVGYQPYRVVVLSFELLHAPATVCGPKKSTNLVKNKCVNFNFNGLTGTGVLTESNKKFLPFQQFGRDIADTTDAVRDPQTLEILDITPCSFGGVSVITPGTNTSNQVAVLYQDVNCTEVPVAIHADQLTPTWRVYSTGSNVFQTRAGCLIGAEHVNNSYECDIPIGAGICASYQTQTNSPRRARSVASQSIIAYTMSLGAENSVAYSNNSIAIPTNFTISVTTEILPVSMTKTSVDCTMYICGDSTECSNLLLQYGSFCTQLNRALTGIAVEQDKNTQEVFAQVKQIYKTPPIKDFGGFNFSQILPDPSKPSKRSFIEDLLFNKVTLADAGFIKQYGDCLGDIAARDLICAQKFNGLTVLPPLLTDEMIAQYTSALLAGTITSGWTFGAGAALQIPFAMQMAYRFNGIGVTQNVLYENQKLIANQFNSAIGKIQDSLSSTASALGKLQDVVNQNAQALNTLVKQLSSNFGAISSVLNDILSRLDKVEAEVQIDRLITGRLQSLQTYVTQQLIRAAEIRASANLAATKMSECVLGQSKRVDFCGKGYHLMSFPQSAPHGVVFLHVTYVPAQEKNFTTAPAICHDGKAHFPREGVFVSNGTHWFVTQRNFYEPQIITTDNTFVSGNCDVVIGIVNNTVYDPLQPELESFKEELDKYFKNHTSPDVDLGDISGINASVVNIQKEIDRLNEVAKNLNESLIDLQELGKYEQYIKWPWYIWLGFIAGLIAIVMVTIMLCCMTSCCSCLKGCCSCGSCCKFDEDDSEPVLKGVKLHYT

SEQ ID NO: 312 - protein, 1273 aa, Artificial Sequence
  SARS-CoV-2/2019-nCoV/USA-CruiseA-18/2020__MT159716.1 spike protein (1-1273)
MFVFLVLLPLVSSQCVNLTTRTQLPPAYTNSFTRGVYYPDKVFRSSVLHSTQDLFLPFFSNVTWFHAIHVSGTNGTKRFDNPVLPFNDGVYFASTEKSNIIRGWIFGTTLDSKTQSLLIVNNATNVVIKVCEFQFCNDPFLGVYYHKNNKSWMESELRVYSSANNCTFEYVSQPFLMDLEGKQGNFKNLREFVFKNIDGYFKIYSKHTPINLVRDLPQGFSALEPLVDLPIGINITRFQTLLALHRSYLTPGDSSSGWTAGAAAYYVGYLQPRTFLLKYNENGTITDAVDCALDPLSETKCTLKSFTVEKGIYQTSNFRVQPTESIVRFPNITNLCPFGEVFNATRFASVYAWNRKRISNCVADYSVLYNSASFSTFKCYGVSPTKLNDLCFTNVYADSFVIRGDEVRQIAPGQTGKIADYNYKLPDDFTGCVIAWNSNNLDSKVGGNYNYLYRLFRKSNLKPFERDISTEIYQAGSTPCNGVEGFNCYFPLQSYGFQPTNGVGYQPYRVVVLSFELLHAPATVCGPKKSTNLVKNKCVNFNFNGLTGTGVLTESNKKFLPFQQFGRDIADTTDAVRDPQTLEILDITPCSFGGVSVITPGTNTSNQVAVLYQDVNCTEVPVAIHADQLTPTWRVYSTGSNVFQTRAGCLIGAEHVNNSYECDIPIGAGICASYQTQTNSPRRARSVASQSIIAYTMSLGAENSVAYSNNSIAIPTNFTISVTTEILPVSMTKTSVDCTMYICGDSTECSNLLLQYGSFCTQLNRALTGIAVEQDKNTQEVFAQVKQIYKTPPIKDFGGFNFSQILPDPSKPSKRSFIEDLLFNKVTLADAGFIKQYGDCLGDIAARDLICAQKFNGLTVLPPLLTDEMIAQYTSALLAGTITSGWTFGAGAALQIPFAMQMAYRFNGIGVTQNVLYENQKLIANQFNSAIGKIQDSLSSTASALGKLQDVVNQNAQALNTLVKQLSSNFGAISSVLNDILSRLDKVEAEVQIDRLITGRLQSLQTYVTQQLIRAAEIRASANLAATKMSECVLGQSKRVDFCGKGYHLMSFPQSAPHGVVFLHVTYVPAQEKNFTTAPAICHDGKAHFPREGVFVSNGTHWFVTQRNFYEPQIITTDNTFVSGNCDVVIGIVNNTVYDPLQPELDSFKEELDKYFKNHTSPDVDLGDISGINASVVNIQKEIDRLNEVAKNLNESLIDLQELGKYEQYIKWPWYIWLGFIAGLIAIVMVTIMLCCMTSCCSCLKGCCSCGSCCKFDEDDSEPVLKGVKLHYT

SEQ ID NO: 313 - protein, 1273 aa, Artificial Sequence
  SARS-CoV-2/SARS-CoV-2/Yunnan-01/human/2020/CHN__MT049951.1 spike protein (1-1273)
MFVFLVLLPLVSSQCVNLTTRTQLPPANTNSFTRGVYYPDKVFRSSVLHSTQDLFLPFFSNVTWFHAIHVSGTNGTKRFDNPVLPFNDGVYFASTEKSNIIRGWIFGTTLDSKTQSLLIVNNATNVVIKVCEFQFCNDPFLGVYYHKNNKSWMESEFRVYSSANNCTFEYVSQPFLMDLEGKQGNFKNLREFVFKNIDGYFKIYSKHTPINLVRDLPQGFSALEPLVDLPIGINITRFQTLLALHRSYLTPGDSSSGWTAGAAAYYVGYLQPRTFLLKYNENGTITDAVDCALDPLSETKCTLKSFTVEKGIYQTSNFRVQPTESIVRFPNITNLCPFGEVFNATRFASVYAWNRKRISNCVADYSVLYNSASFSTFKCYGVSPTKLNDLCFTNVYADSFVIRGDEVRQIAPGQTGKIADYNYKLPDDFTGCVIAWNSNNLDSKVGGNYNYLYRLFRKSNLKPFERDISTEIYQAGSTPCNGVEGFNCYFPLQSYGFQPTNGVGYQPYRVVVLSFELLHAPATVCGPKKSTNLVKNKCVNFNFNGLTGTGVLTESNKKFLPFQQFGRDIADTTDAVRDPQTLEILDITPCSFGGVSVITPGTNTSNQVAVLYQDVNCTEVPVAIHADQLTPTWRVYSTGSNVFQTRAGCLIGAEHVNNSYECDIPIGAGICASYQTQTNSPRRARSVASQSIIAYTMSLGAENSVAYSNNSIAIPTNFTISVTTEILPVSMTKTSVDCTMYICGDSTECSNLLLQYGSFCTQLNRALTGIAVEQDKNTQEVFAQVKQIYKTPPIKDFGGFNFSQILPDPSKPSKRSFIEDLLFNKVTLADAGFIKQYGDCLGDIAARDLICAQKFNGLTVLPPLLTDEMIAQYTSALLAGTITSGWTFGAGAALQIPFAMQMAYRFNGIGVTQNVLYENQKLIANQFNSAIGKIQDSLSSTASALGKLQDVVNQNAQALNTLVKQLSSNFGAISSVLNDILSRLDKVEAEVQIDRLITGRLQSLQTYVTQQLIRAAEIRASANLAATKMSECVLGQSKRVDFCGKGYHLMSFPQSAPHGVVFLHVTYVPAQEKNFTTAPAICHDGKAHFPREGVFVSNGTHWFVTQRNFYEPQIITTDNTFVSGNCDVVIGIVNNTVYDPLQPELDSFKEELDKYFKNHTSPDVDLGDISGINASVVNIQKEIDRLNEVAKNLNESLIDLQELGKYEQYIKWPWYIWLGFIAGLIAIVMVTIMLCCMTSCCSCLKGCCSCGSCCKFDEDDSEPVLKGVKLHYT

SEQ ID NO: 314 - protein, 1273 aa, Artificial Sequence
  SARS-CoV-2/USA/WA-UW292/2020__EPI_ISL_418077 spike protein (1-1273)
MFVFLVLLPLVSSQCVNLTTRTQLPPAYTNSFTRGVYYPDKVFRSSVLHSTQDLFLPFFSNVTWFHAIHVSGTNGTKRFDNPVLPFNDGVYFASTEKSNIIRGWIFGTTLDSKTQSLLIVNNATNVVIKVCEFQFCNDPFLGVYYHKNNKSWMESEFRVYSSANNCTFEYVSQPFLMDLEGKQGNFKNLREFVFKNIDGYFKIYSKHTPINLVRDLPQGFSALEPLVDLPIGINITRFQTLLALHRSYLTPGDSSSGWTAGAAAYYVGYLQPRTFLLKYNENGTITDAVDCALDPLSETKCTLKSFTVEKGIYQTSNFRVQPTESIVRFPNITNLCPFGEVFNATRFASVYAWNRKRISNCVADYSVLYNSASFSTFKCYGVSPTKLNDLCFTNVYADSFVIRGDEVRQIAPGQTGKIADYNYKLPDDFTGCVIAWNSNNLDSKVGGNYNYLYRLFRKSNLKPFERDISTEIYQASSTPCNGVEGFNCYFPLQSYGFQPTNGVGYQPYRVVVLSFELLHAPATVCGPKKSTNLVKNKCVNFNFNGLTGTGVLTESNKKFLPFQQFGRDIADTTDAVRDPQTLEILDITPCSFGGVSVITPGTNTSNQVAVLYQDVNCTEVPVAIHADQLTPTWRVYSTGSNVFQTRAGCLIGAEHVNNSYECDIPIGAGICASYQTQTNSPRRARSVASQSIIAYTMSLGAENSVAYSNNSIAIPTNFTISVTTEILPVSMTKTSVDCTMYICGDSTECSNLLLQYGSFCTQLNRALTGIAVEQDKNTQEVFAQVKQIYKTPPIKDFGGFNFSQILPDPSKPSKRSFIEDLLFNKVTLADAGFIKQYGDCLGDIAARDLICAQKFNGLTVLPPLLTDEMIAQYTSALLAGTITSGWTFGAGAALQIPFAMQMAYRFNGIGVTQNVLYENQKLIANQFNSAIGKIQDSLSSTASALGKLQDVVNQNAQALNTLVKQLSSNFGAISSVLNDILSRLDKVEAEVQIDRLITGRLQSLQTYVTQQLIRAAEIRASANLAATKMSECVLGQSKRVDFCGKGYHLMSFPQSAPHGVVFLHVTYVPAQEKNFTTAPAICHDGKAHFPREGVFVSNGTHWFVTQRNFYEPQIITTDNTFVSGNCDVVIGIVNNTVYDPLQPELDSFKEELDKYFKNHTSPDVDLGDISGINASVVNIQKEIDRLNEVAKNLNESLIDLQELGKYEQYIKWPWYIWLGFIAGLIAIVMVTIMLCCMTSCCSCLKGCCSCGSCCKFDEDDSEPVLKGVKLHYT

SEQ ID NO: 315 - protein, 1273 aa, Artificial Sequence
  SARS-CoV-2/Iceland/192/2020__EPI_ISL_417819 spike protein (1-1273)
MFVFFVLLPLVSSQCVNLTTRTQLPPAYTNSFTRGVYYPDKVFRSSVLHSTQDLFLPFFSNVTWFHAIHVSGTNGTKRFDNPVLPFNDGVYFASTEKSNIIRGWIFGTTLDSKTQSLLIVNNATNVVIKVCEFQFCNDPFLGVYYHKNNKSWMESEFRVYSSANNCTFEYVSQPFLMDLEGKQGNFKNLREFVFKNIDGYFKIYSKHTPINLVRDLPQGFSALEPLVDLPIGINITRFQTLLALHRSYLTPGDSSSGWTAGAAAYYVGYLQPRTFLLKYNENGTITDAVDCALDPLSETKCTLKSFTVEKGIYQTSNFRVQPTESIVRFPNITNLCPFGEVFNATRFASVYAWNRKRISNCVADYSVLYNSASFSTFKCYGVSPTKLNDLCFTNVYADSFVIRGDEVRQIAPGQTGKIADYNYKLPDDFTGCVIAWNSNNLDSKVGGNYNYLYRLFRKSNLKPFERDISTEIYQAGSTPCNGVEGFNCYFPLQSYGFQPTNGVGYQPYRVVVLSFELLHAPATVCGPKKSTNLVKNKCVNFNFNGLTGTGVLTESNKKFLPFQQFGRDIADTTDAVRDPQTLEILDITPCSFGGVSVITPGTNTSNQVAVLYQGVNCTEVPVAIHADQLTPTWRVYSTGSNVFQTRAGCLIGAEHVNNSYECDIPIGAGICASYQTQTNSPRRARSVASQSIIAYTMSLGAENSVAYSNNSIAIPTNFTISVTTEILPVSMTKTSVDCTMYICGDSTECSNLLLQYGSFCTQLNRALTGIAVEQDKNTQEVFAQVKQIYKTPPIKDFGGFNFSQILPDPSKPSKRSFIEDLLFNKVTLADAGFIKQYGDCLGDIAARDLICAQKFNGLTVLPPLLTDEMIAQYTSALLAGTITSGWTFGAGAALQIPFAMQMAYRFNGIGVTQNVLYENQKLIANQFNSAIGKIQDSLSSTASALGKLQDVVNQNAQALNTLVKQLSSNFGAISSVLNDILSRLDKVEAEVQIDRLITGRLQSLQTYVTQQLIRAAEIRASANLAATKMSECVLGQSKRVDFCGKGYHLMSFPQSAPHGVVFLHVTYVPAQEKNFTTAPAICHDGKAHFPREGVFVSNGTHWFVTQRNFYEPQIITTDNTFVSGNCDVVIGIVNNTVYDPLQPELDSFKEELDKYFKNHTSPDVDLGDISGINASVVNIQKEIDRLNEVAKNLNESLIDLQELGKYEQYIKWPWYIWLGFIAGLIAIVMVTIMLCCMTSCCSCLKGCCSCGSCCKFDEDDSEPVLKGVKLHYT

SEQ ID NO: 316 - protein, 1273 aa, Artificial Sequence
  SARS-CoV-2/Belgium/ULG-6939/2020__EPI_ISL_417020 spike protein (1-1273)
MFVFLVLLPLVSSQCVNLTTRTQLPPAYTNSFTRGVYYPDKVFRSSVLHSTQDLFLPFFSNVTWFHAIHVSGTNGTKRFDNPVLPFNDGVYFASTEKSNIIRGWIFGTTLDSKTQSLLIVNNATNVVIKVCEFQFCNDPFLGVYYHKNNKSWMESEFRVYSSANNCTFEYVSQPFLMDLEGKQGNFKNLREFVFKNIDGYFKIYSKHTPINLVRDLPQGFSALEPLVDLPIGINITRFQTLLALHRSYLTPGDSSSGWTAGAAAYYVGYLQPRTFLLKYNENGTITDAVDCALDPLSETKCTLKSFTVEKGIYQTSNFRVQPTESIVRFPNITNLCPFGEVFNATRFASVYAWNRKRISNCVADYSVLYNSASFSTFKCYGVSPTKLNDLCFTNVYADSFVIRGDEVRQIAPGQTGKIADYNYKLPDDFTGCVIAWNSNNLDSKVGGNYNYLYRLFRKSNLKPFERDISTEIYQAGSTPCNGVEGFNCYFPLQSYGFQPTNGVGYQPYRVVVLSFELLHAPATVCGPKKSTNLVKNKCVNFNFNGLTGTGVLTESNKKFLPFQQFGRDIADTTDAVRDPQTLEILDITPCSFGGVSVITPGTNTSNQVAVLYQGVNCTEVPVAIHADQLTPTWRVYSTGSNVFQTRAGCLIGAEHVNNSYECDIPIGAGICASYQTQTNSPRRARSVASQSIIAYTMSLGAENSVVYSNNSIAIPTNFTISVTTEILPVSMTKTSVDCTMYICGDSTECSNLLLQYGSFCTQLNRALTGIAVEQDKNTQEVFAQVKQIYKTPPIKDFGGFNFSQILPDPSKPSKRSFIEDLLFNKVTLADAGFIKQYGDCLGDIAARDLICAQKFNGLTVLPPLLTDEMIAQYTSALLAGTITSGWTFGAGAALQIPFAMQMAYRFNGIGVTQNVLYENQKLIANQFNSAIGKIQDSLSSTASALGKLQDVVNQNAQALNTLVKQLSSNFGAISSVLNDILSRLDKVEAEVQIDRLITGRLQSLQTYVTQQLIRAAEIRASANLAATKMSECVLGQSKRVDFCGKGYHLMSFPQSAPHGVVFLHVTYVPAQEKNFTTAPAICHDGKAHFPREGVFVSNGTHWFVTQRNFYEPQIITTDNTFVSGNCDVVIGIVNNTVYDPLQPELDSFKEELDKYFKNHTSPDVDLGDISGINASVVNIQKEIDRLNEVAKNLNESLIDLQELGKYEQYIKWPWYIWLGFIAGLIAIVMVTIMLCCMTSCCSCLKGCCSCGSCCKFDEDDSEPVLKGVKLHYT

SEQ ID NO: 317 - protein, 1273 aa, Artificial Sequence
  SARS-CoV-2/France/HF2496/2020__EPI_ISL_418231 spike protein (1-1273)
MFVFLVLLPLVSSQCVNLTTRTQLPPAYTNSFTRGVYYPDKVFRSSVLHSTQDLFLPFFSNVTWFHAIHVSGTNGTKRFDNPVLPFNDGVYFASTEKSNIIRGWIFGTTLDSKTQSLLIVNNATNVVIKVCEFQFCNDPFLGVYYHKNNKSWMESEFRVYSSANNCTFEYVSQPFLMDLEGKQGNFKNLREFVFKNIDGYFKIYSKHTPINLVRDLPQGFSALEPLVDLPIGINITRFQTLLALHRSYLTPGDSSSGWTAGAAAYYVGYLQPRTFLLKYNENGTITDAVDCALDPLSETKCTLKSFTVEKGIYQTSNFRVQPTESIVRFPNITNLCPFGEVFNATRFASVYAWNRKRISNCVADYSVLYNSASFSTFKCYGVSPTKLNDLCFTNVYADSFVIRGDEVRQIAPGQTGKIADYNYKLPDDFTGCVIAWNSNNLDSKVGGNYNYLYRLFRKSNLKPFERDISTEIYQAGSTPCNGVEGFNCYFPLQSYGFQPTNGVGYQPYRVVVLSFELLHAPATVCGPKKSTNLVKNKCVNFNFNGLTGTGVLTESNKKFLPFQQFGRDIADTTDAVRDPQTLEILDITPCSFGGVSVITPGTNTSNQVAVLYQGVNCTEVPVAIHADQLTPTWRVYSTGSNVFQTRAGCLIGAEHVNNSYECDIPIGAGICASYQTQTNSPRRARSVASQSIIAYTMSLGAENSVAYSNNSIAIPTNFTISVTTEILPVSMTKTSVDCTMYICGDSTECSNLLLQYGSFCTQLNRALTGIAVEQDKNTQEVFAQVKQIYKTPPIKDFGGFNFSQILPDPSKPSKRSFIEDLLFNKVTLADAGFIKQYGDCLGDIVARDLICAQKFNGLTVLPPLLTDEMIAQYTSALLAGTITSGWTFGAGAALQIPFAMQMAYRFNGIGVTQNVLYENQKLIANQFNSAIGKIQDSLSSTASALGKLQDVVNQNAQALNTLVKQLSSNFGAISSVLNDILSRLDKVEAEVQIDRLITGRLQSLQTYVTQQLIRAAEIRASANLAATKMSECVLGQSKRVDFCGKGYHLMSFPQSAPHGVVFLHVTYVPAQEKNFTTAPAICHDGKAHFPREGVFVSNGTHWFVTQRNFYEPQIITTDNTFVSGNCDVVIGIVNNTVYDPLQPELDSFKEELDKYFKNHTSPDVDLGDISGINASVVNIQKEIDRLNEVAKNLNESLIDLQELGKYEQYIKWPWYIWLGFIAGLIAIVMVTIMLCCMTSCCSCLKGCCSCGSCCKFDEDDSEPVLKGVKLHYT

SEQ ID NO: 318 - protein, 1273 aa, Artificial Sequence
  SARS-CoV-2/USA/WA-UW291/2020__EPI_ISL_418076 spike protein (1-1273)
MFVFLVLLPLVSSQCVNLTTRTQLPPAYTNSFTRGVYYPDKVFRSSVLHSTQDLFLPFFSNVTWFHAIHVSGTNGTKRFDNPVLPFNDGVYFASTEKSNIIRGWIFGTTLDSKTQSLLIVNNATNVVIKVCEFQFCNDPFLGVYYHKNNKSWMESEFRVYSSANNCTFEYVSQPFLMDLEGKQGNFKNLREFVFKNIDGYFKIYSKHTPINLVRDLPQGFSALEPLVDLPIGINITRFQTLLALHRSYLTPGDSSSGWTAGAAAYYVGYLQPRTFLLKYNENGTITDAVDCALDPLSETKCTLKSFTVEKGIYQTSNFRVQPTESIVRFPNITNLCPFGEVFNATRFASVYAWNRKRISNCVADYSVLYNSASFSTFKCYGVSPTKLNDLCFTNVYADSFVIRGDEVRQIAPGQTGKIADYNYKLPDDFTGCVIAWNSNNLDSKVGGNYNYLYRLFRKSNLKPFERDISTEIYQAGSTPCNGVEGFNCYFPLQSYGFQPTNGVGYQPYRVVVLSFELLHAPATVCGPKKSTNLVKNKCVNFNFNGLTGTGVLTESNKKFLPFQQFGRDIADTTDAVRDPQTLEILDITPCSFGGVSVITPGTNTSNQVAVLYQGVNCTEVPVAIHADQLTPTWRVYSTGSNVFQTRAGCLIGAEHVNNSYECDIPIGAGICASYQTQTNSPRRARSVASQSIIAYTMSLGAENSVAYSNNSIAIPTNFTISVTTEILPVSMTKTSVDCTMYICGDSTECSNLLLQYGSFCTQLNRALTGIAVEQDKNTQEVFAQVKQIYKTPPIKDFGGFNFSQILPDPSKPSKRSFIEDLLFNKVTLADAGFIKQYGDCLGDIAARDLICAQKFNGLTVLPPLLTDEMIAQYTSALLAGTITSGWTFGAGAALQIPFAMQMAYRFNGIGVTQNVLYENQKLIANQFNSAIGKIQYSLSSTASALGKLQDVVNQNAQALNTLVKQLSSNFGAISSVLNDILSRLDKVEAEVQIDRLITGRLQSLQTYVTQQLIRAAEIRASANLAATKMSECVLGQSKRVDFCGKGYHLMSFPQSAPHGVVFLHVTYVPAQEKNFTTAPAICHDGKAHFPREGVFVSNGTHWFVTQRNFYEPQIITTDNTFVSGNCDVVIGIVNNTVYDPLQPELDSFKEELDKYFKNHTSPDVDLGDISGINASVVNIQKEIDRLNEVAKNLNESLIDLQELGKYEQYIKWPWYIWLGFIAGLIAIVMVTIMLCCMTSCCSCLKGCCSCGSCCKFDEDDSEPVLKGVKLHYT

SEQ ID NO: 319 - protein, 1273 aa, Artificial Sequence
  SARS-CoV-2/Portugal/PT0034/2020__EPI_ISL_418019 spike protein (1-1273)
MFVFLVLLPLVSSQCVNLTTRTQLPPAYTNSFTRGVYYPDKVFRSSVLHSTQDLFLPFFSNVTWFHAIHVSGTNGTKRFDNPVLPFNDGVYFASTEKSNIIRGWIFGTTLDSKTQSLLIVNNATNVVIKVCEFQFCNDPFLGVYYHKNNKSWMESEFRVYSSANNCTFEYVSQPFLMDLEGKQGNFKNLREFVFKNIDGYFKIYSKHTPINLVRDLPQGFSALEPLVDLPIGINITRFQTLLALHRSYLTPGDSSSGWTAGAAAYYVGYLQPRTFLLKYNENGTITDAVDCALDPLSETKCTLKSFTVEKGIYQTSNFRVQPTESIVRFPNITNLCPFGEVFNATRFASVYAWNRKRISNCVADYSVLYNSASFSTFKCYGVSPTKLNDLCFTNVYADSFVIRGDEVRQIAPGQTGKIADYNYKLPDDFTGCVIAWNSNNLDSKVGGNYNYLYRLFRKSNLKPFERDISTEIYQAGSTPCNGVEGFNCYFPLQSYGFQPTNGVGYQPYRVVVLSFELLHAPATVCGPKKSTNLVKNKCVNFNFNGLTGTGVLTESNKKFLPFQQFGRDIADTTDAVRDPQTLEILDITPCSFGGVSVITPGTNTSNQVAVLYQGVNCTEVPVAIHADQLTPTWRVYSTGSNVFQTRAGCLIGAEHVNNSYECDIPIGAGICASYQTQTNSPRRARSVASQSIIAYTMSLGAENSVAYSNNSIAIPTNFTISVTTEILPVSMTKTSVDCTMYICGDSTECSNLLLQYGSFCTQLNRALTGIAVEQDKNTQEVFAQVKQIYKTPPIKDFGGFNFSQILPDPSKPSKRSFIEDLLFNKVTLADAGFIKQYGDCLGDIAARDLICAQKFNGLTVLPPLLTDEMIAQYTSALLAGTITSGWTFGAGAALQIPFAMQMAYRFNGIGVTQNVLYENQKLIANQFNSAIGKIQDSLSSTASALGKLQDVVNQNAQALNTLVKQLSSNFGAISSVLNDILSRLDKVEAEVQIDRLITGRLQSLQTYVTQQLIRAAEIRASANLAATKMSECVLGQSKRVDFCGKGYHLMSFPQSAPHGVVFLHVTYVPAQEKNFTTAPAICHDGKAHFPREGVFVSNGTHWFVTQRNFYEPQIITTDNTFVSGNCDVVIGIVNNTVYDPLQPELDSFKEELDKYFKNHTSPDVDLGDISGINASVVNIQKEIDRLNEVAKNLNESLIDLQELGKYEQYIKWPWYIWLGFIAGLIAIVMVTIMLCCITSCCSCLKGCCSCGSCCKFDEDDSEPVLKGVKLHYT

SEQ ID NO: 320 - protein, 1273 aa, Artificial Sequence
  SARS-CoV-2/Iceland/202/2020__EPI_ISL_417750 spike protein (1-1273)
MFVFLVLLPLVSSQCVNLTTRTQLPPAYTNSFTRGVYYPDKVFRSSVLHSTQDLFLPFFSNVTWFHAIHVSGTNGTKRFDNPVLPFNDGVYFASTEKSNIIRGWIFGTTLDSKTQSLLIVNNATNVVIKVCEFQFCNDPFLGVYYHKNNKSWMESEFRVYSSANNCTFEYVSQPFLMDLEGKQGNFKNLREFVFKNIDGYFKIYSKHTPINLVRDLPQGFSALEPLVDLPIGINITRFQTLLALHRSYLTPGDSSSGWTAGAAAYYVGYLQPRTFLLKYNENGTITDAVDCALDPLSETKCTLKSFTVEKGIYQTSNFRVQPTESIVRFPNITNLCPFGEVFNATRFASVYAWNRKRISNCVADYSVLYNSASFSTFKCYGVSPTKLNDLCFTNVYADSFVIRGDEVRQIAPGQTGKIADYNYKLPDDFTGCVIAWNSNNLDSKVGGNYNYLYRLFRKSNLKPFERDISTEIYQAGSTPCNGVEGFNCYFPLQSYGFQPTNGVGYQPYRVVVLSFELLHAPATVCGPKKSTNLVKNKCVNFNFNGLTGTGVLTESNKKFLPFQQFGRDIADTTDAVRDPQTLEILDITPCSFGGVSVITPGTNTSNQVAVLYQDVNCTEVPVAIHADQLTPTWRVYSTGSNVFQTRAGCLIGAEHVNNSYECDIPIGAGICASYQTQTNSPRRARSVASQSIIAYTMSLGAENSVAYSNNSIAIPTNFTISVTTEILPVSMTKTSVDCTMYICGDSTECSNLLLQYGSFCTQLNRALTGIAVEQDKNTQEVFAQVKQIYKTPPIKDFGGFNFSQILPDPSKPSKRSFIEDLLFNKVTLADAGFIKQYGDCLGDIAARDLICAQKFNGLTVLPPLLTDEMIAQYTSALLAGTITSGWTFGAGAALQIPFAMQMAYRFNGIGVTQNVLYENQKLIANQFNSAIGKIQDSLSSTASALGKLQDVVNQNAQALNTLVKQLSSNFGAISSVLNDILSRLDKVEAEVQIDRLITGRLQSLQTYVTQQLIRAAEIRASANLAATKMSECVLGQSKRVDFCGKGYHLMSFPQSAPHGVVFLHVTYVPAQEKNFTTAPAICHDGKAHFPREGVFVSNGTHWFVTQRNFYEPQIITTDNTFVSGNCDVVIGIVNNTVYDPLQPELDSFKEELDKYFKNHTSPDVDLGDIPGINASVVNIQKEIDRLNEVAKNLNESLIDLQELGKYEQYIKWPWYIWLGFIAGLIAIVMVTIMLCCMTSCCSCLKGCCSCGSCCKFDEDDSEPVLKGVKLHYT

SEQ ID NO: 321 - protein, 1273 aa, Artificial Sequence
  SARS-CoV-2/USA/WA-UW261/2020__EPI_ISL_418046 spike protein (1-1273)
MFVFLVLLPLVSSQCVNLTTRTQLPPAYTNSFTRGVYYPDKVFRSSVLHSTQDLFLPFFSNVTWFHAIHVSGTNGTKRFDNPVLPFNDGVYFASTEKSNIIRGWIFGTTLDSKTQSLLIVNNATNVVIKVCEFQFCNDPFLGVYYHKNNKSWMESEFRVYSSANNCTFEYVSQPFLMDLEGKQGNFKNLREFVFKNIDGYFKIYSKHTPINLVRDLPQGFSALEPLVDLPIGINITRFQTLLALHRSYLTPGDSSSGWTAGAAAYYVGYLQPRTFLLKYNENGTITDAVDCALDPLSETKCTLKSFTVEKGIYQTSNFRVQPTESIVRFPNITNLCPFGEVFNATRFTSVYAWNRKRISNCVADYSVLYNSASFSTFKCYGVSPTKLNDLCFTNVYADSFVIRGDEVRQIAPGQTGKIADYNYKLPDDFTGCVIAWNSNNLDSKVGGNYNYLYRLFRKSNLKPFERDISTEIYQAGSTPCNGVEGFNCYFPLQSYGFQPTNGVGYQPYRVVVLSFELLHAPATVCGPKKSTNLVKNKCVNFNFNGLTGTGVLTESNKKFLPFQQFGRDIADTTDAVRDPQTLEILDITPCSFGGVSVITPGTNTSNQVAVLYQDVNCTEVPVAIHADQLTPTWRVYSTGSNVFQTRAGCLIGAEHVNNSYECDIPIGAGICASYQTQTNSPRRARSVASQSIIAYTMSLGAENSVAYSNNSIAIPTNFTISVTTEILPVSMTKTSVDCTMYICGDSTECSNLLLQYGSFCTQLNRALTGIAVEQDKNTQEVFAQVKQIYKTPPIKDFGGFNFSQILPDPSKPSKRSFIEDLLFNKVTLADAGFIKQYGDCLGDIAARDLICAQKFNGLTVLPPLLTDEMIAQYTSALLAGTITSGWTFGAGAALQIPFAMQMAYRFNGIGVTQNVLYENQKLIANQFNSAIGKIQDSLSSTASALGKLQDVVNQNAQALNTLVKQLSSNFGAISSVLNDILSRLDKVEAEVQIDRLITGRLQSLQTYVTQQLIRAAEIRASANLAATKMSECVLGQSKRVDFCGKGYHLMSFPQSAPHGVVFLHVTYVPAQEKNFTTAPAICHDGKAHFPREGVFVSNGTHWFVTQRNFYEPQIITTDNTFVSGNCDVVIGIVNNTVYDPLQPELDSFKEELDKYFKNHTSPDVDLGDISGINASVVNIQKEIDRLNEVAKNLNESLIDLQELGKYEQYIKWPWYIWLGFIAGLIAIVMVTIMLCCMTSCCSCLKGCCSCGSCCKFDEDDSEPVLKGVKLHYT

SEQ ID NO: 322 - protein, 1273 aa, Artificial Sequence
  SARS-CoV-2/Portugal/PT0035/2020__EPI_ISL_418020 spike protein (1-1273)
MFVFLVLLPLVSSQCVNLTTRTQLPPAYTNSFTRGVYYPDKVFRSSVLHSTQDLFLPFFSNVTWFHAIHVSGTNGTKRFDNPVLPFNDGVYFASTEKSNIIRGWIFGTTLDSKTQSLLIVNNATNVVIKVCEFQFCNDPFLGVYYHKNNKSWMESEFRVYSSANNCTFEYVSQPFLMDLEGKQGNFKNLREFVFKNIDGYFKIYSKHTPINLVRDLPQGFSALEPLVDLPIGINITRFQTLLALHRSYLTPGDSSSGWTAGAAAYYVGYLQPRTFLLKYNENGTITDAVDCALDPLSETKCTLKSFTVEKGIYQTSNFRVQPTESIVRFPNITNLCPFGEVFNATRFASVYAWNRKRISNCVADYSVLYNSASFSTFKCYGVSPTKLNDLCFTNVYADSFVIRGDEVRQIAPGQTGKIADYNYKLPDDFTGCVIAWNSNNLDSKVGGNYNYLYRLFRKSNLKPFERDISTEIYQAGSTPCNGVEGFNCYFPLQSYGFQPTNGVGYQPYRVVVLSFELLHAPATVCGPKKSTNLVKNKCVNFNFNGLTGTGVLTESNKKFLPFQQFGRDIADTTDAVRDPQTLEILDITPCSFGGVSVITPGTNTSNQVAVLYQDVNCTEVPVAIHADQLTPTWRVYSTGSNVFQTRAGCLIGAEHVNNSYECDIPIGAGICASYQTQTNSPRRARSVASQSIIAYTMSLGAENSVAYSNNSIAIPTNFTISVTTEILPVSMTKTSVDCTMYICGDSTECSNLLLQYGSFCTQLNRALTGIAVEQDKNTQEVFAQVKQIYKTPPIKDFGGFNFSQILPDPSKPSKRSFIEDLLFNKVTLADAGFIKQYGDCLGDISARDLICAQKFNGLTVLPPLLTDEMIAQYTSALLAGTITSGWTFGAGAALQIPFAMQMAYRFNGIGVTQNVLYENQKLIANQFNSAIGKIQDSLSSTASALGKLQDVVNQNAQALNTLVKQLSSNFGAISSVLNDILSRLDKVEAEVQIDRLITGRLQSLQTYVTQQLIRAAEIRASANLAATKMSECVLGQSKRVDFCGKGYHLMSFPQSAPHGVVFLHVTYVPAQEKNFTTAPAICHDGKAHFPREGVFVSNGTHWFVTQRNFYEPQIITTDNTFVSGNCDVVIGIVNNTVYDPLQPELDSFKEELDKYFKNHTSPDVDLGDISGINASVVNIQKEIDRLNEVAKNLNESLIDLQELGKYEQYIKWPWYIWLGFIAGLIAIVMVTIMLCCMTSCCSCLKGCCSCGSCCKFDEDDSEPVLKGVKLHYT

SEQ ID NO: 323 - protein, 1273 aa, Artificial Sequence
  SARS-CoV-2/USA/NY-NYUMC7/2020__EPI_ISL_418192 spike protein (1-1273)
MFVFLVLLPLVSSQCVNLTTRTQLPPAYTNSFTRGVYYPDKVFRSSVLHSTQDLFLPFFSNVTWFHAIHVSGTNGTKRFDNPVLPFNDGVYFASTEKSNIIRGWIFGTTLDSKTQSLLIVNNATNVVIKVCEFQFCNDPFLGVYHHKNNKSWMESEFRVYSSANNCTFEYVSQPFLMDLEGKQGNFKNLREFVFKNIDGYFKIYSKHTPINLVRDLPQGFSALEPLVDLPIGINITRFQTLLALHRSYLTPGDSSSGWTAGAAAYYVGYLQPRTFLLKYNENGTITDAVDCALDPLSETKCTLKSFTVEKGIYQTSNFRVQPTESIVRFPNITNLCPFGEVFNATRFASVYAWNRKRISNCVADYSVLYNSASFSTFKCYGVSPTKLNDLCFTNVYADSFVIRGDEVRQIAPGQTGKIADYNYKLPDDFTGCVIAWNSNNLDSKVGGNYNYLYRLFRKSNLKPFERDISTEIYQAGSTPCNGVEGFNCYFPLQSYGFQPTNGVGYQPYRVVVLSFELLHAPATVCGPKKSTNLVKNKCVNFNFNGLTGTGVLTESNKKFLPFQQFGRDIADTTDAVRDPQTLEILDITPCSFGGVSVITPGTNTSNQVAVLYQGVNCTEVPVAIHADQLTPTWRVYSTGSNVFQTRAGCLIGAEHVNNSYECDIPIGAGICASYQTQTNSPRRARSVASQSIIAYTMSLGAENSVAYSNNSIAIPTNFTISVTTEILPVSMTKTSVDCTMYICGDSTECSNLLLQYGSFCTQLNRALTGIAVEQDKNTQEVFAQVKQIYKTPPIKDFGGFNFSQILPDPSKPSKRSFIEDLLFNKVTLADAGFIKQYGDCLGDIAARDLICAQKFNGLTVLPPLLTDEMIAQYTSALLAGTITSGWTFGAGAALQIPFAMQMAYRFNGIGVTQNVLYENQKLIANQFNSAIGKIQDSLSSTASALGKLQDVVNQNAQALNTLVKQLSSNFGAISSVLNDILSRLDKVEAEVQIDRLITGRLQSLQTYVTQQLIRAAEIRASANLAATKMSECVLGQSKRVDFCGKGYHLMSFPQSAPHGVVFLHVTYVPAQEKNFTTAPAICHDGKAHFPREGVFVSNGTHWFVTQRNFYEPQIITTDNTFVSGNCDVVIGIVNNTVYDPLQPELDSFKEELDKYFKNHTSPDVDLGDISGINASVVNIQKEIDRLNEVAKNLNESLIDLQELGKYEQYIKWPWYIWLGFIAGLIAIVMVTIMLCCMTSCCSCLKGCCSCGSCCKFDEDDSEPVLKGVKLHYT

SEQ ID NO: 324 - protein, 1273 aa, Artificial Sequence
  SARS-CoV-2/Iceland/189/2020__EPI_ISL_417709 spike protein (1-1273)
MFVFLVLLPLVSSQCVNLTTRTQLPPAYTNSFTRGVYYPDKVFRSSVLHSTQDLFLPFFSNVTWFHAIHVSGTNGTKRFDNPVLPFNDGVYFASTEKSNIIRGWIFGTTLDSKTQSLLIVNNATNVVIKVCEFQFCNDPFLGVYYHKNNKSWMESEFRVYSSANNCTFEYVSQPFLMDLEGKQGNFKNLREFVFKNIDGYFKIYSKHTPINLVRDLPQGFSALEPLVDLPIGINITRFQTLLALHRSYLTPGDSSSGWTAGAAAYYVGYLQPRTFLLKYNENGTITDAVDCALDPLSETKCTLKSFTVEKGIYQTSNFRVQPTESIVRFPNITNLCPFGEVFNATRFASVYAWNRKRISNCVADYSVLYNSASFSTFKCYGVSPTKLNDLCFTNVYADSFVIRGDEVRQIAPGQTGKIADYNYKLPDDFTGCVIAWNSNNLDSKVGGNYNYLYRLFRKSNLKPFERDISTEIYQAGSTPCNGVEGFNCYFPLQSYGFQPTNGVGYQPYRVVVLSFELLHAPATVCGPKKSTNLVKNKCVNFNFNGLTGTGVLTESNKKFLPFQQFGRDIADTTDAVRDPQTLEILDITPCSFGGVSVITPGTNTSNQVAVLYQGVNCTEVPVAIHADQLTPTWRVYSTGSNVFQTRAGCLIGAEHVNNSYECDIPIGAGICASYQTQTNSPRRARSVASQSIIAYTMSLGAENSVAYSNNSIAIPTNFTISVTTEILPVSMTKTSVDCTMYICGDSTECSNLLLQYGSFCTQLNRALTGIAVEQDKNTQEVFAQVKQIYKTPPIKDFGGFNFSQILPDPSKPSKRSFIEDLLFNKVTLADAGFTKQYGDCLGDIAARDLICAQKFNGLTVLPPLLTDEMIAQYTSALLAGTITSGWTFGAGAALQIPFAMQMAYRFNGIGVTQNVLYENQKLIANQFNSAIGKIQDSLSSTASALGKLQDVVNQNAQALNTLVKQLSSNFGAISSVLNDILSRLDKVEAEVQIDRLITGRLQSLQTYVTQQLIRAAEIRASANLAATKMSECVLGQSKRVDFCGKGYHLMSFPQSAPHGVVFLHVTYVPAQEKNFTTAPAICHDGKAHFPREGVFVSNGTHWFVTQRNFYEPQIITTDNTFVSGNCDVVIGIVNNTVYDPLQPELDSFKEELDKYFKNHTSPDVDLGDISGINASVVNIQKEIDRLNEVAKNLNESLIDLQELGKYEQYIKWPWYIWLGFIAGLIAIVMVTIMLCCMTSCCSCLKGCCSCGSCCKFDEDDSEPVLKGVKLHYT

SEQ ID NO: 325 - protein, 1273 aa, Artificial Sequence
  SARS-CoV-2/Australia/NSW56/2020__EPI_ISL_417408 spike protein (1-1273)
MFVFLVLLPLVSSQCVNLTTRTQLPPAYTNSFTRGVYYPDKVFRSSVLHSTQDLFLPFFSNVTWFHAIHVSGTNGTKRFDNPVLPFNDGVYFASTEKSNIIRGWIFGTTLDSKTQSLLIVNNATNVVIKVCEFQFCNDPFLGVYYHKNNKSWMESEFRVYSSANNCTFEYVSQPFLMDLEGKQGNFKNLREFVFKNIDGYFKIYSKHTPINLVRDLPQGFSALEPLVDLPIGINITRFQTLLALHRSYLTPGDSSSGWTAGAAAYYVGYLQPRTFLLKYNENGTITDAVDCALDPLSETKCTLKSFTVEKGIYQTSNFRVQPTESIVRFPNITNLCPFGEVFNATRFASVYAWNRKRISNCVADYSVLYNSASFSTFKCYGVSPTKLNDLCFTNVYADSFVIRGDEVRQIAPGQTGKIADYNYKLPDDFTGCVIAWNSNNLDSKVGGNYNYLYRLFRKSNLKPFERDISTEIYQAGSTPCNGVEGFNCYFPLQSYGFQPTNGVGYQPYRVVVLSFELLHAPATVCGPKKSTNLVKNKCVNFNFNGLTGTGVLTESNKKFLPFQQFGRDIADTTDAVRDPQTLEILDITPCSFGGVSVITPGTNTSNQVAVLYQDVNCTEVPVAIHADQLTPTWRVYSTGSNVFQTRAGCLIGAEHVNNSYECDIPIGAGICASYQTQTNSPRRARSVASQSIIAYTMSLGAENSVAYSNNSIAIPTNFTISVTTEILPVSMTKTSVDCTMYICGDSTECSNLLLQYGSFCTQLNRALTGIAVEQDKNTQEVFAQVKQIYKTPPIKDFGGFNFSQILPDSSKPSKRSFIEDLLFNKVTLADAGFIKQYGDCLGDIAARDLICAQKFNGLTVLPPLLTDEMIAQYTSALLAGTITSGWTFGAGAALQIPFAMQMAYRFNGIGVTQNVLYENQKLIANQFNSAIGKIQDSLSSTASALGKLQDVVNQNAQALNTLVKQLSSNFGAISSVLNDILSRLDKVEAEVQIDRLITGRLQSLQTYVTQQLIRAAEIRASANLAATKMSECVLGQSKRVDFCGKGYHLMSFPQSAPHGVVFLHVTYVPAQEKNFTTAPAICHDGKAHFPREGVFVSNGTHWFVTQRNFYEPQIITTDNTFVSGNCDVVIGIVNNTVYDPLQPELDSFKEELDKYFKNHTSPDVDLGDISGINASVVNIQKEIDRLNEVAKNLNESLIDLQELGKYEQYIKWPWYIWLGFIAGLIAIVMVTIMLCCMTSCCSCLKGCCSCGSCCKFDEDDSEPVLKGVKLHYT

SEQ ID NO: 326 - protein, 1273 aa, Artificial Sequence
  SARS-CoV-2/Iceland/280/2020__EPI_ISL_417608 spike protein (1-1273)
MFVFLVLLPLVSSQCVNLTTRTQLPPAYTNSFTRGVYYPDKVFRSSVLHSTQDLFLPFFSNVTWFHAIHVSGTNGTKRFDNPVLPFNDGVYFASTEKSNIIRGWIFGTTLDSKTQSLLIVNNATNVVIKVCEFQFCNDPFLGVYYHKNNKSWMESEFRVYSSANNCTFEYVSQPFLMDLEGKQGNFKNLREFVFKNIDGYFKIYSKHTPINLVRDLPQGFSALEPLVDLPIGINITRFQTLLALHRSYLTPGDSSSGWTAGAAAYYVGYLQPRTFLLKYNENGTITDAVDCALDPLSETKCTLKSFTVEKGIYQTSNFRVQPTESIVRFPNITNLCPFGEVFNATRFASVYAWNRKRISNCVADYSVLYNSASFSTFKCYGVSPTKLNDLCFTNVYADSFVIRGDEVRQIAPGQTGKIADYNYKLPDDFTGCVIAWNSNNLDSKVGGNYNYLYRLFRKSNLKPFERDISTEIYQAGSTPCNGVEGFNCYFPLQSYGFQPTNGVGYQPYRVVVLSFELLHAPATVCGPKKSTNLVKNKCVNFNFNGLTGTGVLTESNKKFLPFQQFGRDIADTTDAVRDPQTLEILDITPCSFGGVSVITPGTNTSNQVAVLYQGVNCTEVPVAIHADQLTPTWRVYSTGSNVFQTRAGCLIGAEHVNNSYECDIPIGAGICASYHTQTNSPRRARSVASQSIIAYTMSLGAENSVAYSNNSIAIPTNFTISVTTEILPVSMTKTSVDCTMYICGDSTECSNLLLQYGSFCTQLNRALTGIAVEQDKNTQEVFAQVKQIYKTPPIKDFGGFNFSQILPDPSKPSKRSFIEDLLFNKVTLADAGFIKQYGDCLGDIAARDLICAQKFNGLTVLPPLLTDEMIAQYTSALLAGTITSGWTFGAGAALQIPFAMQMAYRFNGIGVTQNVLYENQKLIANQFNSAIGKIQDSLSSTASALGKLQDVVNQNAQALNTLVKQLSSNFGAISSVLNDILSRLDKVEAEVQIDRLITGRLQSLQTYVTQQLIRAAEIRASANLAATKMSECVLGQSKRVDFCGKGYHLMSFPQSAPHGVVFLHVTYVPAQEKNFTTAPAICHDGKAHFPREGVFVSNGTHWFVTQRNFYEPQIITTDNTFVSGNCDVVIGIVNNTVYDPLQPELDSFKEELDKYFKNHTSPDVDLGDISGINASVVNIQKEIDRLNEVAKNLNESLIDLQELGKYEQYIKWPWYIWLGFIAGLIAIVMVTIMLCCMTSCCSCLKGCCSCGSCCKFDEDDSEPVLKGVKLHYT

SEQ ID NO: 327 - protein, 1273 aa, Artificial Sequence
  SARS-CoV-2/Iceland/247/2020__EPI_ISL_417575 spike protein (1-1273)
MFVFLVLLPLVSSQCVNLTTRTQLPPAYTNSFTRGVYYPDKVFRSSVLHSTQDLFLPFFSNVTWFHAIHVSGTNGTKRFDNPVLPFNDGVYFASTEKSNIIRGWIFGTTLDSKTQSLLIVNNATNVVIKVCEFQFCNDPFLGVYYHKNNKSWMESEFRVYSSANNCTFEYVSQPFLMDLEGKQGNFKNLREFVFKNIDGYFKIYSKHTPINLVRDLPQGFSALEPLVDLPIGINITRFQTLLALHRSYLTPGDSSSGWTAGAAAYYVGYLQPRTFLLKYNENGTITDAVDCALDPLSETKCTLKSFTVEKGIYQTSNFRVQPTESIVRFPNITNLCPFGEVFNATRFASVYAWNRKRISNCVADYSVLYNSASFSTFKCYGVSPTKLNDLCFTNVYADSFVIRGDEVRQIAPGQTGKIADYNYKLPDDFTGCVIAWNSNNLDSKVGGNYNYLYRLFRKSNLKPFERDISTEIYQAGSTPCNGVEGFNCYFPLQSYGFQPTNGVGYQPYRVVVLSFELLHAPATVCGPKKSTNLVKNKCVNFNFNGLTGTGVLTESNKKFLPFQQFGRDIADTTDAVRDPQTLEILDITPCSFGGVSVITPGTNTSNQVAVLYQGVNCTEVPVAIHADQLTPTWRVYSTGSNVFQTRAGCLIGAEHVNNSYECDIPIGAGICASYQTQTNSPRRARSVASQSIIAYTMSLGAENSVAYSNNSIAIPTNFTISVTTEILPVSMTKTSVDCTMYICGDSTECSNLLLQYGSFCTQLNRALTGIAVEQDKNTQEVFAQVKQIYKTPPIKDFGGFNFSQILPDPSKPSKRSFIEDLLFNKVTLADAGFIKQYGDCLGDIAARDLICAQKFNGLTVLPPLLTDEMIAQYTSALLAGTITSGWTFGAGAALQIPFAMQMAYRFNGIGVTQNVLYENQKLIANQFNSAIGKIQDSLSSTASALGKLQDVVNQNAQALNTLVKQLSSNFGAISSVLNDILSRLDKVEAEVQIDRLITGRLQSLQTYVTQQLIRAAEIRASANLAATKMSECVLGQSKRVDFCGKGYHLMSFPQSAPHGVVFLHVTYVPAQEKNFTTAPAICHDGKAHFPREGVFVSNGTHWFVTQRNFYEPQIITTDNTFVSGNCDVVIGIVNNTVYDPLQPELDSFKEELDKYFKNHTSPDVDLGDISGINASVVNIQKEIDRLNEVAKNLNESLIDLQELGKYEQYIKWPWYIWLGFIAGLIAIVIVTIMLCCMTSCCSCLKGCCSCGSCCKFDEDDSEPVLKGVKLHYT

SEQ ID NO: 328 - protein, 1273 aa, Artificial Sequence
  SARS-CoV-2/Iceland/238/2020__EPI_ISL_417566 spike protein (1-1273)
MFVFLVLLPLVSSQCVNLTTRTQLPPAYTNSFTRGVYYPDKVFRSSVLHSTQDLFLPFFSNVTWFHAIHVSGTNGTKRFDNPVLPFNDGVYFASTEKSNIIRGWIFGTTLDSKTQSLLIVNNATNVVIKVCEFQFCNDPFLGVYYHKNNKSWMESEFRVYSSANNCTFEYVSQPFLMDLEGKQGNFKNLREFVFKNIDGYFKIYSKHTPINLVRDLPQGFSALEPLVDLPIGINITRFQTLLALHRSYLTPGDSSSGWTAGAAAYYVGYLQPRTFLLKYNENGTITDAVDCALDPLSETKCTLKSFTVEKGIYQTSNFRVQPTESIVRFPNITNLCPFGEVFNATRFASVYAWNRKRISNCVADYSVLYNSASFSTFKCYGVSPTKLNDLCFTNVYADSFVIRGDEVRQIAPGQTGKIADYNYKLPDDFTGCVIAWNSNNLDSKVGGNYNYLYRLFRKSNLKPFERDISTEIYQAGSTPCNGVEGFNCYFPLQSYGFQPTNGVGYQPYRVVVLSFELLHAPATVCGPKKSTNLVKNKCVNFNFNGLTGTGVLTESNKKFLPFQQFGRDIADTTDAVRDPQTLEILDITPCSFGGVSVITPGTNTSNQVAVLYQGVNCTEVPVAIHADQLTPTWRVYSTGSNVFQTRAGCLIGAEHVNNSYECDIPIGAGICASYQTQTNSPRRARSVASQSIIAYTMSLGAENSVAYSNNSIAIPTNFTISVTTEILPVSMTKTSVDCTMYICGDSTECSNLLLQYGSFCTQLNRALTGIAVEQDKNTQEVFAQVKQIYKTPPIKDFGGFNFSQILPDPSKPSKRSFIEDLLFNKVTLADVGFIKQYGDCLGDIAARDLICAQKFNGLTVLPPLLTDEMIAQYTSALLAGTITSGWTFGAGAALQIPFAMQMAYRFNGIGVTQNVLYENQKLIANQFNSAIGKIQDSLSSTASALGKLQDVVNQNAQALNTLVKQLSSNFGAISSVLNDILSRLDKVEAEVQIDRLITGRLQSLQTYVTQQLIRAAEIRASANLAATKMSECVLGQSKRVDFCGKGYHLMSFPQSAPHGVVFLHVTYVPAQEKNFTTAPAICHDGKAHFPREGVFVSNGTHWFVTQRNFYEPQIITTDNTFVSGNCDVVIGIVNNTVYDPLQPELDSFKEELDKYFKNHTSPDVDLGDISGINASVVNIQKEIDRLNEVAKNLNESLIDLQELGKYEQYIKWPWYIWLGFIAGLIAIVMVTIMLCCMTSCCSCLKGCCSCGSCCKFDEDDSEPVLKGVKLHYT

SEQ ID NO: 329 - protein, 1273 aa, Artificial Sequence
  SARS-CoV-2/Greece/16/2020__EPI_ISL_418265 spike protein (1-1273)
MFVFLVLLPLVSSQCVNLTTRTQLPPAYTNSFTRGVYYPDKVFRSSVLHSTQDLFLPFFSNVTWFHAIHVSGTNGTKRFDNPVLPFNDGVYFASTEKSNIIRGWIFGTTLDSKTQSLLIVNNATNVVIKVCEFQFCNDPFLGVYYHKNNKSWMESEFRVYSSANNCTFEYVSQPFLMDLEGKQGNFKNLREFVFKNVDGYFKIYSKHTPINLVRDLPQGFSALEPLVDLPIGINITRFQTLLALHRSYLTPGDSSSGWTAGAAAYYVGYLQPRTFLLKYNENGTITDAVDCALDPLSETKCTLKSFTVEKGIYQTSNFRVQPTESIVRFPNITNLCPFGEVFNATRFASVYAWNRKRISNCVADYSVLYNSASFSTFKCYGVSPTKLNDLCFTNVYADSFVIRGDEVRQIAPGQTGKIADYNYKLPDDFTGCVIAWNSNNLDSKVGGNYNYLYRLFRKSNLKPFERDISTEIYQAGSTPCNGVEGFNCYFPLQSYGFQPTNGVGYQPYRVVVLSFELLHAPATVCGPKKSTNLVKNKCVNFNFNGLTGTGVLTESNKKFLPFQQFGRDIADTTDAVRDPQTLEILDITPCSFGGVSVITPGTNTSNQVAVLYQDVNCTEVPVAIHADQLTPTWRVYSTGSNVFQTRAGCLIGAEHVNNSYECDIPIGAGICASYQTQTNSPRRARSVASQSIIAYTMSLGAENSVAYSNNSIAIPTNFTISVTTEILPVSMTKTSVDCTMYICGDSTECSNLLLQYGSFCTQLNRALTGIAVEQDKNTQEVFAQVKQIYKTPPIKDFGGFNFSQILPDPSKPSKRSFIEDLLFNKVTLADAGFIKQYGDCLGDIAARDLICAQKFNGLTVLPPLLTDEMIAQYTSALLAGTITSGWTFGAGAALQIPFAMQMAYRFNGIGVTQNVLYENQKLIANQFNSAIGKIQDSLSSTASALGKLQDVVNQNAQALNTLVKQLSSNFGAISSVLNDILSRLDKVEAEVQIDRLITGRLQSLQTYVTQQLIRAAEIRASANLAATKMSECVLGQSKRVDFCGKGYHLMSFPQSAPHGVVFLHVTYVPAQEKNFTTAPAICHDGKAHFPREGVFVSNGTHWFVTQRNFYEPQIITTDNTFVSGNCDVVIGIVNNTVYDPLQPELDSFKEELDKYFKNHTSPDVDLGDISGINASVVNIQKEIDRLNEVAKNLNESLIDLQELGKYEQYIKWPWYIWLGFIAGLIAIVMVTIMLCCMTSCCSCLKGCCSCGSCCKFDEDDSEPVLKGVKLHYT

SEQ ID NO: 330 - protein, 1273 aa, Artificial Sequence
  SARS-CoV-2/Iceland/319/2020__EPI_ISL_417648 spike protein (1-1273)
MFVFLVLLPLVSSQCVNLTTRTQLPPAYTNSFTRGVYYPDKVFRSSVLHSTQDLFLPFFSNVTWFHAIHVSGTNGTKRFDNPVLPFNDGVYFASTEKSNIIRGWIFGTTLDSKTQSLLIVNNATNVVIKVCEFQFCNDPFLGVYYHKNNKSWMESEFRVYSSANNCTFEYVSQPFLIDLEGKQGNFKNLREFVFKNIDGYFKIYSKHTPINLVRDLPQGFSALEPLVDLPIGINITRFQTLLALHRSYLTPGDSSSGWTAGAAAYYVGYLQPRTFLLKYNENGTITDAVDCALDPLSETKCTLKSFTVEKGIYQTSNFRVQPTESIVRFPNITNLCPFGEVFNATRFASVYAWNRKRISNCVADYSVLYNSASFSTFKCYGVSPTKLNDLCFTNVYADSFVIRGDEVRQIAPGQTGKIADYNYKLPDDFTGCVIAWNSNNLDSKVGGNYNYLYRLFRKSNLKPFERDISTEIYQAGSTPCNGVEGFNCYFPLQSYGFQPTNGVGYQPYRVVVLSFELLHAPATVCGPKKSTNLVKNKCVNFNFNGLTGTGVLTESNKKFLPFQQFGRDIADTTDAVRDPQTLEILDITPCSFGGVSVITPGTNTSNQVAVLYQGVNCTEVPVAIHADQLTPTWRVYSTGSNVFQTRAGCLIGAEHVNNSYECDIPIGAGICASYQTQTNSPRRARSVASQSIIAYTMSLGAENSVAYSNNSIAIPTNFTISVTTEILPVSMTKTSVDCTMYICGDSTECSNLLLQYGSFCTQLNRALTGIAVEQDKNTQEVFAQVKQIYKTPPIKDFGGFNFSQILPDPSKPSKRSFIEDLLFNKVTLADAGFIKQYGDCLGDIAARDLICAQKFNGLTVLPPLLTDEMIAQYTSALLAGTITSGWTFGAGAALQIPFAMQMAYRFNGIGVTQNVLYENQKLIANQFNSAIGKIQDSLSSTASALGKLQDVVNQNAQALNTLVKQLSSNFGAISSVLNDILSRLDKVEAEVQIDRLITGRLQSLQTYVTQQLIRAAEIRASANLAATKMSECVLGQSKRVDFCGKGYHLMSFPQSAPHGVVFLHVTYVPAQEKNFTTAPAICHDGKAHFPREGVFVSNGTHWFVTQRNFYEPQIITTDNTFVSGNCDVVIGIVNNTVYDPLQPELDSFKEELDKYFKNHTSPDVDLGDISGINASVVNIQKEIDRLNEVAKNLNESLIDLQELGKYEQYIKWPWYIWLGFIAGLIAIVMVTIMLCCMTSCCSCLKGCCSCGSCCKFDEDDSEPVLKGVKLHYT

SEQ ID NO: 331 - protein, 1273 aa, Artificial Sequence
  SARS-CoV-2/Congo/94/2020__EPI_ISL_417947 spike protein (1-1273)
MFVFLVLLPLVSSQCVNLTTRTQLPPAYTNSFTRGVYYPDKVFRSSVLHSTQDLFLPFFSNVTWFHAIHVSGTNGTKRFDNPVLPFNDGVYFASTEKSNIIRGWIFGTTLDSKTQSLLIVNNATNVVIKVCEFQFCNDPFLGVYYHKNNKSWMESEFRVYSSANNCTFEYVSQPFLMDLEGKQGNFKNLREFVFKNIDGYFKIYSKHTPINLVRDLPQGFSALEPLVDLPIGINITRFQTLLALHRSYLTPGDSSSGWTAGAAAYYVGYLQPRTFLLKYNENGTITDAVDCALDPLSETKCTLKSFTVEKGIYQTSNFRVQPTESIVRFPNITNLCPFGEVFNATRFASVYAWNRKRISNCVADYSVLYNSASFSTFKCYGVSPTKLNDLCFTNVYADSFVIRGDEVRQIAPGQTGKIADYNYKLPDDFTGCVIAWNSNNLDSKVGGNYNYLYRLFRKSNLKPFERDISTEIYQAGSTPCNGVEGFNCYFPLQSYGFQPTNGVGYQPYRVVVLSFELLHAPATVCGPKKSTNLVKNKCVNFNFNGLTGTGVLTESNKKFLPFQQFGRDIADTTDAVRDPQTLEILDITPCSFGGVSVITPGTNTSNQVAVLYQGVNCTEVPVAIHADQLTPTWRVYSTGSNVFQTRAGCLIGAEHVNNSYECDIPIGAGICASYQTQTNSPRRARSVASQSIIAYTMSLGAENSVAYSNNSIAIPTNFTISVTTEILPVSMTKTSVDCTMYICGDSTECSNLLLQYGSFCTQLNRALTGIAVEQDKNTQEVFAQVKQIYKTPPIKDFGGFNFSQILPDPSKPSKRSFIEDILFNKVTLADAGFIKQYGDCLGDIAARDLICAQKFNGLTVLPPLLTDEMIAQYTSALLAGTITSGWTFGAGAALQIPFAMQMAYRFNGIGVTQNVLYENQKLIANQFNSAIGKIQDSLSSTASALGKLQDVVNQNAQALNTLVKQLSSNFGAISSVLNDILSRLDKVEAEVQIDRLITGRLQSLQTYVTQQLIRAAEIRASANLAATKMSECVLGQSKRVDFCGKGYHLMSFPQSAPHGVVFLHVTYVPAQEKNFTTAPAICHDGKAHFPREGVFVSNGTHWFVTQRNFYEPQIITTDNTFVSGNCDVVIGIVNNTVYDPLQPELDSFKEELDKYFKNHTSPDVDLGDISGINASVVNIQKEIDRLNEVAKNLNESLIDLQELGKYEQYIKWPWYIWLGFIAGLIAIVMVTIMLCCMTSCCSCLKGCCSCGSCCKFDEDDSEPVLKGVKLHYT

SEQ ID NO: 332 - protein, 1273 aa, Artificial Sequence
  SARS-CoV-2/Congo/158/2020__EPI_ISL_417950 spike protein (1-1273)
MFVFLVLLPLVSSQCVNLTTRTQLPPAYTNSFTRGVYYPDKVFRSSVLHSTQDLFLPFFSNVTWFHAIHVSGTNGTKRFDNPVLPFNDGVYFASTEKSNIIRGWIFGTTLDSKTQSLLIVNNATNVVIKVCEFQFCNDPFLGVYYHKNNKSWMESEFRVYSSANNCTFEYVSQPFLMDLEGKQGNFKNLREFVFKNIDGYFKIYSKHTPINLVRDLPQGFSALEPLVDLPIGINITRFQTLLALHRSYLTPGDSSSGWTAGAAAYYVGYLQPRTFLLKYNENGTITDAVDCALDPLSETKCTLKSFTVEKGIYQTSNFRVQPTESIVRFPNITNLCPFGEVFNATRFASVYAWNRKRISNCVADYSVLYNSASFSTFKCYGVSPTKLNDLCFTNVYADSFVIRGDEVRQIAPGQTGKIADYNYKLPDDFTGCVIAWNSNNLDSKVGGNYNYLYRLFRKSNLKPFERDISTEIYQAGSTPCNGVEGFNCYFPLQSYGFQPTNGVGYQPYRVVVLSFELLHAPATVCGPKKSTNLVKNKCVNFNFNGLTGTGVLTESNKKFLPFQQFGRDIADTTDAVRDPQTLEILDITPCSFGGVSVITPGTNTSNQVAVLYQDVNCTEVPVAIHADQLTPTWRVYSTGSNVFQTRAGCLIGAEHVNNSYECDIPIGAGICASYQTQTNSPRRARSVASQSIIAYTMSLGAENSVAYSNNSIAIPTNFTISVTTEILPVSMTKTSVDCTMYICGDSTECSNLLLQYGSFCTQLNRALTGIAVEQDKNTQEVFAQVKQIYKTPPIKDFGGFNFSQILPDPSKPSKRSFIEDLLFNKVTLADAGFIKQYGDCLGDIAARDLICAQKFNGLTVLPPLLTDEMIAQYTSALLAGTITSGWTFGAGAALQIPFAMQMAYRFNGIGVTQNVLYENQKLIANQFNSAIGKIQDSLSSTASALGKLQDVVNQNAQALNTLVKQLSSNFGAISSVLNDILSRLDKVEAEVQIDRLITGRLQSLQTYVTQQLIRAAEIRASANLAATKMSECVLGQSKRVDFCGKGYHLMSFPQSAPHGVVFLHVTYVPAQEKNFTTAPAICHDGKAHFPREGVFVSNGTHWFVTQRNFYEPQIITTDNTFLSGNCDVVIGIVNNTVYDPLQPELDSFKEELDKYFKNHTSPDVDLGDISGINASVVNIQKEIDRLNEVAKNLNESLIDLQELGKYEQYIKWPWYIWLGFIAGLIAIVMVTIMLCCMTSCCSCLKGCCSCGSCCKFDEDDSEPVLKGVKLHYT

SEQ ID NO: 333 - protein, 1273 aa, Artificial Sequence
  SARS-CoV-2/USA/UT-00034/2020__EPI_ISL_417977 spike protein (1-1273)
MFVFLVLLPLVSSQCVNLTTRTQLPPAYTNSFTRGVYYPDKVFRSSVLHSTQDLFLPFFSNVTWFHAIHVSGTNGTKRFDNPVLPFNDGVYFASTEKSNIIRGWIFGTTLDSKTQSLLIVNNATNVVIKVCEFQFCNDPFLGVYYYKNNKSWMESEFRVYSSANNCTFEYVSQPFLMDLEGKQGNFKNLREFVFKNIDGYFKIYSKHTPINLVRDLPQGFSALEPLVDLPIGINITRFQTLLALHRSYLTPGDSSSGWTAGAAAYYVGYLQPRTFLLKYNENGTITDAVDCALDPLSETKCTLKSFTVEKGIYQTSNFRVQPTESIVRFPNITNLCPFGEVFNATRFASVYAWNRKRISNCVADYSVLYNSASFSTFKCYGVSPTKLNDLCFTNVYADSFVIRGDEVRQIAPGQTGKIADYNYKLPDDFTGCVIAWNSNNLDSKVGGNYNYLYRLFRKSNLKPFERDISTEIYQAGSTPCNGVEGFNCYFPLQSYGFQPTNGVGYQPYRVVVLSFELLHAPATVCGPKKSTNLVKNKCVNFNFNGLTGTGVLTESNKKFLPFQQFGRDIADTTDAVRDPQTLEILDITPCSFGGVSVITPGTNTSNQVAVLYQGVNCTEVPVAIHADQLTPTWRVYSTGSNVFQTRAGCLIGAEHVNNSYECDIPIGAGICASYQTQTNSPRRARSVASQSIIAYTMSLGAENSVAYSNNSIAIPTNFTISVTTEILPVSMTKTSVDCTMYICGDSTECSNLLLQYGSFCTQLNRALTGIAVEQDKNTQEVFAQVKQIYKTPPIKDFGGFNFSQILPDPSKPSKRSFIEDLLFNKVTLADAGFIKQYGDCLGDIAARDLICAQKFNGLTVLPPLLTDEMIAQYTSALLAGTITSGWTFGAGAALQIPFAMQMAYRFNGIGVTQNVLYENQKLIANQFNSAIGKIQDSLSSTASALGKLQDVVNQNAQALNTLVKQLSSNFGAISSVLNDILSRLDKVEAEVQIDRLITGRLQSLQTYVTQQLIRAAEIRASANLAATKMSECVLGQSKRVDFCGKGYHLMSFPQSAPHGVVFLHVTYVPAQEKNFTTAPAICHDGKAHFPREGVFVSNGTHWFVTQRNFYEPQIITTDNTFVSGNCDVVIGIVNNTVYDPLQPELDSFKEELDKYFKNHTSPDVDLGDISGINASVVNIQKEIDRLNEVAKNLNESLIDLQELGKYEQYIKWPWYIWLGFIAGLIAIVMVTIMLCCMTSCCSCLKGCCSCGSCCKFDEDDSEPVLKGVKLHYT

SEQ ID NO: 334 - protein, 1273 aa, Artificial Sequence
  SARS-CoV-2/USA/UT-00033/2020__EPI_ISL_417976 spike protein (1-1273)
MFVFLVLLPLVSSQCVNLTTRTQLPPAYTNSFTRGVYYPDKVFRSSVLHSTQDLFLPFFSNVTWFHAIHVSGTNGTKRFDNPVLPFNDGVYFASTEKSNIIRGWIFGTTLDSKTQSLLIVNNATNVVIKVCEFQFCNDPFLGVYYHKNNKSWMESEFRVYSSANNCTFEYVSQPFLMDLEGKQGNFKNLREFVFKNIDGYFKIYSKHTPINLVRDLPQGFSALEPLVDLPIGINITRFQTLLALHRSYLTPGDSSSGLTAGAAAYYVGYLQPRTFLLKYNENGTITDAVDCALDPLSETKCTLKSFTVEKGIYQTSNFRVQPTESIVRFPNITNLCPFGEVFNATRFASVYAWNRKRISNCVADYSVLYNSASFSTFKCYGVSPTKLNDLCFTNVYADSFVIRGDEVRQIAPGQTGKIADYNYKLPDDFTGCVIAWNSNNLDSKVGGNYNYLYRLFRKSNLKPFERDISTEIYQAGSTPCNGVEGFNCYFPLQSYGFQPTNGVGYQPYRVVVLSFELLHAPATVCGPKKSTNLVKNKCVNFNFNGLTGTGVLTESNKKFLPFQQFGRDIADTTDAVRDPQTLEILDITPCSFGGVSVITPGTNTSNQVAVLYQGVNCTEVPVAIHADQLTPTWRVYSTGSNVFQTRAGCLIGAEHVNNSYECDIPIGAGICASYQTQTNSPRRARSVASQSIIAYTMSLGAENSVAYSNNSIAIPTNFTISVTTEILPVSMTKTSVDCTMYICGDSTECSNLLLQYGSFCTQLNRALTGIAVEQDKNTQEVFAQVKQIYKTPPIKDFGGFNFSQILPDPSKPSKRSFIEDLLFNKVTLADAGFIKQYGDCLGDIAARDLICAQKFNGLTVLPPLLTDEMIAQYTSALLAGTITSGWTFGAGAALQIPFAMQMAYRFNGIGVTQNVLYENQKLIANQFNSAIGKIQDSLSSTASALGKLQDVVNQNAQALNTLVKQLSSNFGAISSVLNDILSRLDKVEAEVQIDRLITGRLQSLQTYVTQQLIRAAEIRASANLAATKMSECVLGQSKRVDFCGKGYHLMSFPQSAPHGVVFLHVTYVPAQEKNFTTAPAICHDGKAHFPREGVFVSNGTHWFVTQRNFYEPQIITTDNTFVSGNCDVVIGIVNNTVYDPLQPELDSFKEELDKYFKNHTSPDVDLGDISGINASVVNIQKEIDRLNEVAKNLNESLIDLQELGKYEQYIKWPWYIWLGFIAGLIAIVMVTIMLCCMTSCCSCLKGCCSCGSCCKFDEDDSEPVLKGVKLHYT

SEQ ID NO: 335 - protein, 1273 aa, Artificial Sequence
  SARS-CoV-2/USA/WI-13/2020__EPI_ISL_417516 spike protein (1-1273)
MFVFLVLLPLVSSQCVNLTTRTQLPPAYTNSFTRGVYYPDKVFRSSVLHSTQDLFLPFFSNVTWFHAIHVSGTNGTKRFDNPVLPFNDGVYFASTEKSNIIRGWIFGTTLDSKTQSLLIVNNATNVVIKVCEFQFCNDPFLGVYYHKNNKSWMESEFRVYSSANNCTFEYVSQPFLMDLEGKQGNFKNLREFVFKNIDGYFKIYSKHTPINLVRDLPQGFSALEPLVDLPIGINITRFQTLLALHRSYLTPGDSSSGWTAGAAAYYVGYLQPRTFLLKYNENGTITDAVDCALDPLSETKCTLKSFTVEKGIYQTSNFRVLPTESIVRFPNITNLCPFGEVFNATRFASVYAWNRKRISNCVADYSVLYNSASFSTFKCYGVSPTKLNDLCFTNVYADSFVIRGDEVRQIAPGQTGKIADYNYKLPDDFTGCVIAWNSNNLDSKVGGNYNYLYRLFRKSNLKPFERDISTEIYQAGSTPCNGVEGFNCYFPLQSYGFQPTNGVGYQPYRVVVLSFELLHAPATVCGPKKSTNLVKNKCVNFNFNGLTGTGVLTESNKKFLPFQQFGRDIADTTDAVRDPQTLEILDITPCSFGGVSVITPGTNTSNQVAVLYQGVNCTEVPVAIHADQLTPTWRVYSTGSNVFQTRAGCLIGAEHVNNSYECDIPIGAGICASYQTQTNSPRRARSVASQSIIAYTMSLGAENSVAYSNNSIAIPTNFTISVTTEILPVSMTKTSVDCTMYICGDSTECSNLLLQYGSFCTQLNRALTGIAVEQDKNTQEVFAQVKQIYKTPPIKDFGGFNFSQILPDPSKPSKRSFIEDLLFNKVTLADAGFIKQYGDCLGDIAARDLICAQKFNGLTVLPPLLTDEMIAQYTSALLAGTITSGWTFGAGAALQIPFAMQMAYRFNGIGVTQNVLYENQKLIANQFNSAIGKIQDSLSSTASALGKLQDVVNQNAQALNTLVKQLSSNFGAISSVLNDILSRLDKVEAEVQIDRLITGRLQSLQTYVTQQLIRAAEIRASANLAATKMSECVLGQSKRVDFCGKGYHLMSFPQSAPHGVVFLHVTYVPAQEKNFTTAPAICHDGKAHFPREGVFVSNGTHWFVTQRNFYEPQIITTDNTFVSGNCDVVIGIVNNTVYDPLQPELDSFKEELDKYFKNHTSPDVDLGDISGINASVVNIQKEIDRLNEVAKNLNESLIDLQELGKYEQYIKWPWYIWLGFIAGLIAIVMVTIMLCCMTSCCSCLKGCCSCGSCCKFDEDDSEPVLKGVKLHYT

SEQ ID NO: 336 - protein, 1272 aa, Artificial Sequence
  SARS-CoV-2/India/1-27/2020__EPI_ISL_413522 spike protein (1-1272)
MFVFLVLLPLVSSQCVNLTTRTQLPPAYTNSFTRGVYYPDKVFRSSVLHSTQDLFLPFFSNVTWFHAIHVSGTNGTKRFDNPVLPFNDGVYFASTEKSNIIRGWIFGTTLDSKTQSLLIVNNATNVVIKVCEFQFCNDPFLGVYHKNNKSWMESEFRVYSSANNCTFEYVSQPFLMDLEGKQGNFKNLREFVFKNIDGYFKIYSKHTPINLVRDLPQGFSALEPLVDLPIGINITRFQTLLALHRSYLTPGDSSSGWTAGAAAYYVGYLQPRTFLLKYNENGTITDAVDCALDPLSETKCTLKSFTVEKGIYQTSNFRVQPTESIVRFPNITNLCPFGEVFNATRFASVYAWNRKRISNCVADYSVLYNSASFSTFKCYGVSPTKLNDLCFTNVYADSFVIRGDEVIQIAPGQTGKIADYNYKLPDDFTGCVIAWNSNNLDSKVGGNYNYLYRLFRKSNLKPFERDISTEIYQAGSTPCNGVEGFNCYFPLQSYGFQPTNGVGYQPYRVVVLSFELLHAPATVCGPKKSTNLVKNKCVNFNFNGLTGTGVLTESNKKFLPFQQFGRDIADTTDAVRDPQTLEILDITPCSFGGVSVITPGTNTSNQVAVLYQDVNCTEVPVAIHADQLTPTWRVYSTGSNVFQTRAGCLIGAEHVNNSYECDIPIGAGICASYQTQTNSPRRARSVASQSIIAYTMSLGAENSVAYSNNSIAIPTNFTISVTTEILPVSMTKTSVDCTMYICGDSTECSNLLLQYGSFCTQLNRALTGIAVEQDKNTQEVFAQVKQIYKTPPIKDFGGFNFSQILPDPSKPSKRSFIEDLLFNKVTLADAGFIKQYGDCLGDIAARDLICAQKFNGLTVLPPLLTDEMIAQYTSALLAGTITSGWTFGAGAALQIPFAMQMAYRFNGIGVTQNVLYENQKLIANQFNSAIGKIQDSLSSTASALGKLQDVVNQNAQALNTLVKQLSSNFGAISSVLNDILSRLDKVEAEVQIDRLITGRLQSLQTYVTQQLIRAAEIRASANLAATKMSECVLGQSKRVDFCGKGYHLMSFPQSAPHGVVFLHVTYVPAQEKNFTTAPAICHDGKAHFPREGVFVSNGTHWFVTQRNFYEPQIITTDNTFVSGNCDVVIGIVNNTVYDPLQPELDSFKEELDKYFKNHTSPDVDLGDISGINASVVNIQKEIDRLNEVAKNLNESLIDLQELGKYEQYIKWPWYIWLGFIAGLIAIVMVTIMLCCMTSCCSCLKGCCSCGSCCKFDEDDSEPVLKGVKLHYT

SEQ ID NO: 337 - protein, 1267 aa, Artificial Sequence
  SARS-CoV-2/pangolin/Guangxi/P4L/2017__EPI_ISL_410538 spike protein (1-1267)
MFVFLFVLPLVSSQCVNLTTRTGIPPGYTNSSTRGVYYPDKVFRSSILHLTQDLFLPFFSNVTWFNTINYQGGFKKFDNPVLPFNDGVYFASTEKSNIIRGWIFGTTLDARTQSLLIVNNATNVVIKVCEFQFCTDPFLGVYYHNNNKTWVENEFRVYSSANNCTFEYISQPFLMDLEGKQGNFKNLREFVFKNVDGYFKIYSKHTPIDLVRDLPRGFAALEPLVDLPIGINITRFQTLLALHRSYLTPGNLESGWTTGAAAYYVGYLQQRTFLLSYNQNGTITDAVDCSLDPLSETKCTLKSLTVEKGIYQTSNFRVQPTISIVRFPNITNLCPFGEVFNASKFASVYAWNRKRISNCVADYSVLYNSTSFSTFKCYGVSPTKLNDLCFTNVYADSFVVKGDEVRQIAPGQTGVIADYNYKLPDDFTGCVIAWNSVKQDALTGGNYGYLYRLFRKSKLKPFERDISTEIYQAGSTPCNGQVGLNCYYPLERYGFHPTTGVNYQPFRVVVLSFELLNGPATVCGPKLSTTLVKDKCVNFNFNGLTGTGVLTTSKKQFLPFQQFGRDISDTTDAVRDPQTLEILDITPCSFGGVSVITPGTNTSNQVAVLYQDVNCTEVPMAIHAEQLTPAWRVYSAGANVFQTRAGCLVGAEHVNNSYECDIPVGAGICASYHSMSSLRSVNQRSIIAYTMSLGAENSVAYSNNSIAIPTNFTISVTTEILPVSMTKTSVDCTMYICGDSIECSNLLLQYGSFCTQLNRALTGIAVEQDKNTQEVFAQVKQIYKTPPIKDFGGFNFSQILPDPSKPSKRSFIEDLLFNKVTLADAGFIKQYGDCLGDIAARDLICAQKFNGLTVLPPLLTDEMIAQYTSALLAGTITSGWTFGAGAALQIPFAMQMAYRFNGIGVTQNVLYENQKLIANQFNSAIGKIQDSLSSTASALGKLQDVVNQNAQALNTLVKQLSSNFGAISSVLNDILSRLDKVEAEVQIDRLITGRLQSLQTYVTQQLIRAAEIRASANLAATKMSECVLGQSKRVDFCGKGYHLMSFPQSAPHGVVFLHVTYVPAQEKNFTTAPAICHEGKAHFPREGVFVSNGTHWFITQRNFYEPQIITTDNTFVSGSCDVVIGIVNNTVYDPLQPELDSFKEELDKYFKNHTSPDVDLGDISGINASVVNIQKEIDRLNEVAKNLNESPIDLQELGKYEQYIKWPWYIWLGFIAGLIAIIMVTIMLCCMTSCCSCLKGCCSCGSCCKFDEDDSEPVLKGVKLHYT

SEQ ID NO: 338 - protein, 1267 aa, Artificial Sequence
  SARS-CoV-2/pangolin/Guangxi/P5L/2017__EPI_ISL_410540 spike protein (1-1267)
MFVFLFVLPLVSSQCVNLTTRTGIPPGYTNSSTRGVYYPDKVFRSSILHLTQDLFLPFFSNVTWFNTINYQGGFKKFDNPVLPFNDGVYFASTEKSNIIRGWIFGTTLDARTQSLLIVNNATNVVIKVCEFQFCTDPFLGVYYHNNNKTWVENEFRVYSSANNCTFEYISQPFLMDLEGKQGNFKNLREFVFKNVDGYFKIYSKHTPIDLVRDLPRGFAALEPLVDLPIGINITRFQTLLALHRSYLTPGKLESGWTTGAAAYYVGYLQQRTFLLSYNQNGTITDAVDCSLDPLSETKCTLKSLTVEKGIYQTSNFRVQPTISIVRFPNITNLCPFGEVFNASKFASVYAWNRKRISNCVADYSVLYNSTSFSTFKCYGVSPTKLNDLCFTNVYADSFVVKGDEVRQIAPGQTGVIADYNYKLPDDFTGCVIAWNSVKQDALTGGNYGYLYRLFRKSKLKPFERDISTEIYQAGSTPCNGQVGLNCYYPLERYGFHPTTGVNYQPFRVVVLSFELLNGPATVCGPKLSTTLVKDKCVNFNFNGLTGTGVLTTSKKQFLPFQQFGRDISDTTDAVRDPQTLEILDITPCSFGGVSVITPGTNTSNQVAVLYQDVNCTEVPMAIHAEQLTPAWRVYSAGANVFQTRAGCLVGAEHVNNSYECDIPVGAGICASYHSMSSFRSVNQRSIIAYTMSLGAENSVAYSNNSIAIPTNFTISVTTEILPVSMTKTSVDCTMYICGDSIECSNLLLQYGSFCTQLNRALTGIAVEQDKNTQEVFAQVKQIYKTPPIKDFGGFNFSQILPDPSKPSKRSFIEDLLFNKVTLADAGFIKQYGDCLGDIAARDLICAQKFNGLTVLPPLLTDEMIAQYTSALLAGTITSGWTFGAGAALQIPFAMQMAYRFNGIGVTQNVLYENQKLIANQFNSAIGKIQDSLSSTASALGKLQDVVNQNAQALNTLVKQLSSNFGAISSVLNDILSRLDKVEAEVQIDRLITGRLQSLQTYVTQQLIRAAEIRASANLAATKMSECVLGQSKRVDFCGKGYHLMSFPQSAPHGVVFLHVTYVPAQEKNFTTAPAICHEGKAHFPREGVFVSNGTHWFITQRNFYEPQIITTDNTFVSGSCDVVIGIVNNTVYDPLQPELDSFKEELDKYFKNHTSPDVDLGDISGINASVVNIQKEIDRLNEVAKNLNESLIDLQELGKYEQYIKWPWYIWLGFIAGLIAIIMVTIMLCCMTSCCSCLKGCCSCGSCCKFDEDDSEPVLKGVKLHYT

SEQ ID NO: 339 - protein, 1267 aa, Artificial Sequence
  SARS-CoV-2/pangolin/Guangxi/P5E/2017__EPI_ISL_410541 spike protein (1-1267)
MFVFLFVLPLVSSQCVNLTTRTGIPPGYTNSSTRGVYYPDKVFRSSILHLTQDLFLPFFSNVTWFNTITYQGGSKKFDNPVLPFNDGVYFASTEKSNIIRGWIFGTTLDARTQSLLIVNNATNVVIKVCEFQFCTDPFLGVYYHNNNKTWVENEFRVYSSANNCTFEYISQPFLMDLEGKQGNFKNLREFVFKNVDGYFKIYSKHTPIDLVRDLPRGFAALEPLVDLPIGINITRFQTLLALHRSYLTPGKLESGWTTGAAAYYVGYLQQRTFLLSYNQNGTITDAVDCSLDPLSETKCTLKSLTVEKGIYQTSNFRVQPTISIVRFPNITNLCPFGEVFNASKFASVYAWNRKRISNCVADYSVLYNSTSFSTFKCYGVSPTKLNDLCFTNVYADSFVVKGDEVRQIAPGQTGVIADYNYKLPDDFTGCVIAWNSVKQDALTGDNYGYLYRLFRKSKLKPFERDISTEIYQAGSTPCNGQVGLNCYYPLERYGFHPTTGVNYQPFRVVVLSFELLNGPATVCGPKLSTTLVKDKCVNFNFNGLTGTGVLTTSKKQFLPFQQFGRDISDTTDAVRDPQTLEILDITPCSFGGVSVITPGTNTSNQVAVLYQDVNCTEVPMAIHAEQLTPAWRVYSAGANVFQTRAGCLVGAEHVNNSYECDIPVGAGICASYHSMSSFRSVNQRSIIAYTMSLGAENSVAYSNNSIAIPTNFTISVTTEILPVSMTKTSVDCTMYICGDSIECSNLLLQYGSFCTQLNRALTGIAVEQDKNTQEVFAQVKQIYKTPPIKDFGGFNFSQILPDPSKPSKRSFIEDLLFNKVTLADAGFIKQYGDCLGDIAARDLICAQKFNGLTVLPPLLTDEMIAQYTSALLAGTITSGWTFGAGAALQIPFAMQMAYRFNGIGVTQNVLYENQKLIANQFNSAIGKIQDSLSSTASALGKLQDVVNQNAQALNTLVKQLSSNFGAISSVLNDILSRLDKVEAEVQIDRLITGRLQSLQTYVTQQLIRAAEIRASANLAATKMSECVLGQSKRVDFCGKGYHLMSFPQSAPHGVVFLHVTYVPAQEKNFTTAPAICHEGKAHFPREGVFVSNGTHWFITQRNFYEPQIITTDNTFVSGSCDVVIGIVNNTVYDPLQPELDSFKEELDKYFKNHTSPDVDLGDISGINASVVNIQKEIDRLNEVAKNLNESLIDLQELGKYEQYIKWPWYIWLGFIAGLIAIIMVTIMLCCMTSCCSCLKGCCSCGSCCKFDEDDSEPVLKGVKLHYT

SEQ ID NO: 340 - protein, 1265 aa, Artificial Sequence
  SARS-CoV-2/pangolin/Guangxi/P1E/2017__EPI_ISL_410539 spike protein (1-1265)
MFVFLFVLPLVSSQCVNLTTRTGIQPGYTNSSTRGVYYPDKVFRSSILHLTQDLFLPFFSNVTWFNTINYQGGFKKFDNPVLPFNDGVYFASTEKSNIIRGWIFGTTLDARTQSLLIVNNATNVVIKVCEFQFCTDPFLGVYYHNNNKTWVENEFRVYSSANNCTFEYISQPFLMDLEGKQGNFKNLREFVFKNVDGYFKIYSKHTPIDLVRDLPRGFAALEPLVDLPIGINITRFQTLLALHRSYLTPGKLESGWTTGAAAYYVGYLQQRTFLLSYNQNGTITDAVDCSLDPLSETKCTLKSLTVEKGIYQTSNFRVQPTISIVRFPNITNLCPFGEVFNASKFASVYAWNRKRISNCVADYSVLYNSTSFSTFKCYGVSPTKLNDLCFTNVYADSFVVKGDEVRQIAPGQTGVIADYNYKLPDDFTGCVIAWNSVKQDALTGGNYLYRLFRKSKLKPFERDISTEIYQAGSTPCNGQVGLNCYYPLERYGFHPTTGVNYQPFRVVVLSFELLNGPATVCGPKLSTTLVKDKCVNFNFNGLTGTGVLTTSKKQFLPFQQFGRDISDTTDAVRDPQTLEILDITPCSFGGVSVITPGTNTSNQVAVLYQDVNCTEVPMAIHAEQLTPAWRVYSAGANVFQTRAGCLVGAEHVNNSYECDIPVGAGICASYHSMSSLRSVNQRSIIAYTMSLGAENSVAYSNNSIAIPTNFTISVTTEILPVSMTKTSVDCTMYICGDSIECSNLLLQYGSFCTQLNRALTGIAVEQDKNTQEVFAQVKQIYKTPPIKDFGGFNFSQILPDPSKPSKRSFIEDLLFNKVTLADAGFIKQYGDCLGDIAARDLICAQKFNGLTVLPPLLTDEMIAQYTSALLAGTITSGWTFGAGAALQIPFAMQMAYRFNGIGVTQNVLYENQKLIANQFNSAIGKIQDSLSSTASALGKLQDVVNQNAQALNTLVKQLSSNFGAISSVLNDILSRLDKVEAEVQIDRLITGRLQSLQTYVTQQLIRAAEIRASANLAATKMSECVLGQSKRVDFCGKGYHLMSFPQSAPHGVVFLHVTYVPAQEKNFTTAPAICHEGKAHFPREGVFVSNGTHWFITQRNFYEPQIITTDNTFVSGSCDVVIGIVNNTVYDPLQPELDSFKEELDKYFKNHTSPDVDLGDISGINASVVNIQKEIDRLNEVAKNLNESLIDLQELGKYEQYIKWPWYIWLGFIAGLIAIIMVTIMLCCMTSCCSCLKGCCSCGSCCKFDEDDSEPVLKGVKLHYT

SEQ ID NO: 341 - protein, 1273 aa, Artificial Sequence; identical to SEQ ID NO: 10
  SARS-CoV-2/Wuhan/WIV05/2019__EPI_ISL_402128 spike protein (1-1273)(K986P_V987P)

SEQ ID NO: 342 - protein, 1269 aa, Artificial Sequence; identical to SEQ ID NO: 11
  SARS-CoV-2/bat/Yunnan/RaTG13/2013__EPI_ISL_402131 spike protein (1-1269)(K982P_V983P)

SEQ ID NO: 343 - protein, 1273 aa, Artificial Sequence; identical to SEQ ID NO: 12
  SARS-CoV-2/Wuhan/HBCDC-HB-01/2019__EPI_ISL_402132 spike protein (1-1273)(K986P_V987P)

SEQ ID NO: 344 - protein, 1273 aa, Artificial Sequence; identical to SEQ ID NO: 13
  SARS-CoV-2/Guangdong/20SF028/2020__EPI_ISL_403936 spike protein (1-1273)(K986P_V987P)

SEQ ID NO: 345 - protein, 1273 aa, Artificial Sequence; identical to SEQ ID NO: 14
  SARS-CoV-2/Shenzhen/SZTH-001/2020__EPI_ISL_406592 spike protein (1-1273)(K986P_V987P)

SEQ ID NO: 346 - protein, 1273 aa, Artificial Sequence; identical to SEQ ID NO: 15
  SARS-CoV-2/Shenzhen/SZTH-004/2020__EPI_ISL_406595 spike protein (1-1273)(K986P_V987P)

SEQ ID NO: 347 - protein, 1273 aa, Artificial Sequence; identical to SEQ ID NO: 16
  SARS-CoV-2/France/IDF0372/2020__EPI_ISL_406596 spike protein (1-1273)(K986P_V987P)

SEQ ID NO: 348 - protein, 1273 aa, Artificial Sequence; identical to SEQ ID NO: 17
  SARS-CoV-2/Australia/VIC01/2020__EPI_ISL_406844 spike protein (1-1273)(K986P_V987P)

SEQ ID NO: 349 - protein, 1273 aa, Artificial Sequence; identical to SEQ ID NO: 18
  SARS-CoV-2/Germany/BavPat1/2020__EPI_ISL_406862 spike protein (1-1273)(K986P_V987P)

SEQ ID NO: 350 - protein, 1273 aa, Artificial Sequence
  SARS-CoV-2/Wuhan/HBCDC-HB-02/2020__EPI_ISL_412978 spike protein (1-1273)(K986P_V987P)
MFVFLVLLPLVSSQCVNLTTRTQLPPAYTNSFTRGVYYPDKVFRSSVLHSTQDLFLPFFSNVTWFHAIHVSGTNGTKRFDNPVLPFNDGVYFASTEKSNIIRGWIFGTTLDSKTQSLLIVNNATNVVIKVCEFQFCNDPFLGVYYHKNNKSWMESEFRVYSSANNCTFEYVSQPFLMDLEGKQGNFKNLREFVFKNIDGYFKIYSKHTPINLVRDLPQGFSALEPLVDLPIGINITRFQTLLALHRSYLTPGDSSSGWTAGAAAYYVGYLQPRTFLLKYNENGTITDAVDCALDPLSETKCTLKSFTVEKGIYQTSNFRVQPTESIVRFPNITNLCPFGEVFNATRFASVYAWNRKRISNCVADYSVLYNSASFSTFKCYGVSPTKLNDLCFTNVYADSFVIRGDEVRQIAPGQTGKIADYNYKLPDDFTGCVIAWNSNNLDSKVGGNYNYLYRLFRKSNLKPFERDISTEIYQAGSTPCNGVEGFNCYFPLQSYGFQPTNGVGYQPYRVVVLSFELLHAPATVCGPKKSTNLVKNKCVNFNFNGLTGTGVLTESNKKFLPFQQFGRDIADTTDAVRDPQTLEILDITPCSFGGVSVITPGTNTSNQVAVLYQDVNCTEVPVAIHADQLTPTWRVYSTGSNVFQTRAGCLIGAEHVNNSYECDIPIGAGICASYQTQTNSPRRARSVASQSIIAYTMSLGAENSVAYSNNSIAIPTNFTISVTTEILPVSMTKTSVDCTMYICGDSTECSNFLLQYGSFCTQLNRALTGIAVEQDKNTQEVFAQVKQIYKTPPIKDFGGFNFSQILPDPSKPSKRSFIEDLLFNKVTLADAGFIKQYGDCLGDIAARDLICAQKFNGLTVLPPLLTDEMIAQYTSALLAGTITSGWTFGAGAALQIPFAMQMAYRFNGIGVTQNVLYENQKLIANQFNSAIGKIQDSLSSTASALGKLQDVVNQNAQALNTLVKQLSSNFGAISSVLNDILSRLDPPEAEVQIDRLITGRLQSLQTYVTQQLIRAAEIRASANLAATKMSECVLGQSKRVDFCGKGYHLMSFPQSAPHGVVFLHVTYVPAQEKNFTTAPAICHDGKAHFPREGVFVSNGTHWFVTQRNFYEPQIITTDNTFVSGNCDVVIGIVNNTVYDPLQPELDSFKEELDKYFKNHTSPDVDLGDISGINASVVNIQKEIDRLNEVAKNLNESLIDLQELGKYEQYIKWPWYIWLGFIAGLIAIVMVTIMLCCMTSCCSCLKGCCSCGSCCKFDEDDSEPVLKGVKLHYT

SEQ ID NO: 351 - protein, 1273 aa, Artificial Sequence
  SARS-CoV-2/Australia/QLD02/2020__EPI_ISL_407896 spike protein (1-1273)(K986P_V987P)
MFVFLVLLPLVSSQCVNLTTRTQLPPAYTNSFTRGVYYPDKVFRSSVLHSTQDLFLPFFSNVTWFHAIHVSGTNGTKRFDNPVLPFNDGVYFASTEKSNIIRGWIFGTTLDSKTQSLLIVNNATNVVIKVCEFQFCNDPFLGVYYHKNNKSWMESEFRVYSSANNCTFEYVSQPFLMDLEGKQGNFKNLREFVFKNIDGYFKIYSKHTPINLVRDLPQGFSALEPLVDLPIGINITRFQTLLALHRSYLTPGDSSSGWTAGAAAYYVGYLQPRTFLLKYNENGTITDAVDCALDPLSETKCTLKSFTVEKGIYQTSNFRVQPTESIVRFPNITNLCPFGEVFNATRFASVYAWNRKRISNCVADYSVLYNSASFSTFKCYGVSPTKLNDLCFTNVYADSFVIRGDEVRQIAPGQTGKIADYNYKLPDDFTGCVIAWNSNNLDSKVGGNYNYLYRLFRKSNLKPFERDISTEIYQAGSTPCNGVEGFNCYFPLQSYGFQPTNGVGYQPYRVVVLSFELLHAPATVCGPKKSTNLVKNKCVNFNFNGLTGTGVLTESNKKFLPFQQFGRDIADTTDAVRDPQTLEILDITPCSFGGVSVITPGTNTSNQVAVLYQDVNCTEVPVAIHADQLTPTWRVYSTGSNVFQTRAGCLIGAEHVNNSYECDIPIGAGICASYQTQTNSPRRARSVASQSIIAYTMSLGAENSVAYSNNSIAIPTNFTISVTTEILPVSMTKTSVDCTMYICGDSTECSNLLLQYGSFCTQLNRALTGIAVEQDKNTQEVFAQVKQIYKTPPIKDFGGFNFSQILPDPSKPSKRSFIEDLLFNKVTLADAGFIKQYGDCLGDIAARDLICAQKFNGLTVLPPLLTDEMIAQYTSALLAGTITSGWTFGAGAALQIPFAMQMAYRFNGIGVTQNVLYENQKLIANQFNSAIGKIQDSLSSTASALGKLQDVVNQNAQALNTLVKQLSSNFGAISSVLNDILSRLDPPEAEVQIDRLITGRLQSLQTYVTQQLIRAAEIRASANLAATKMSECVLGQSKRVDFCGKGYHLMSFPQSAPHGVVFLHVTYVPAQEKNFTTAPAICHDGKAHFPREGVFVSNGTHWFVTQRNFYEPQIITTDNTFVSGNCDVVIGIVNNTVYDPLQLELDSFKEELDKYFKNHTSPDVDLGDISGINASVVNIQKEIDRLNEVAKNLNESLIDLQELGKYEQYIKWPWYIWLGFIAGLIAIVMVTIMLCCMTSCCSCLKGCCSCGSCCKFDEDDSEPVLKGVKLHYT

SEQ ID NO: 352 - protein, 1273 aa, Artificial Sequence
  SARS-CoV-2/India/1-31/2020__EPI_ISL_413523 spike protein (1-1273)(K986P_V987P)
MFVFLVLLPLVSSQCVNLTTRTQLPPAYTNSFTRGVYYPDKVFRSSVLHSTQDLFLPFFSNVTWFHAIHVSGTNGTKRFDNPVLPFNDGVYFASTEKSNIIRGWIFGTTLDSKTQSLLIVNNATNVVIKVCEFQFCNDPFLGVYYHKNNKSWMESEFRVYSSANNCTFEYVSQPFLMDLEGKQGNFKNLREFVFKNIDGYFKIYSKHTPINLVRDLPQGFSALEPLVDLPIGINITRFQTLLALHRSYLTPGDSSSGWTAGAAAYYVGYLQPRTFLLKYNENGTITDAVDCALDPLSETKCTLKSFTVEKGIYQTSNFRVQPTESIVRFPNITNLCPFGEVFNATRFASVYAWNRKRISNCVADYSVLYNSASFSTFKCYGVSPTKLNDLCFTNVYADSFVIRGDEVRQIAPGQTGKIADYNYKLPDDFTGCVIAWNSNNLDSKVGGNYNYLYRLFRKSNLKPFERDISTEIYQAGSTPCNGVEGFNCYFPLQSYGFQPTNGVGYQPYRVVVLSFELLHAPATVCGPKKSTNLVKNKCVNFNFNGLTGTGVLTESNKKFLPFQQFGRDIADTTDAVRDPQTLEILDITPCSFGGVSVITPGTNTSNQVAVLYQDVNCTEVPVAIHADQLTPTWRVYSTGSNVFQTRAGCLIGAEHVNNSYECDIPIGAGICASYQTQTNSPRRARSVASQSIIAYTMSLGAENSVAYSNNSIAIPTNFTISVTTEILPVSMTKTSVDCTMYICGDSTECSNLLLQYGSFCTQLNRALTGIAVEQDKNTQEVFAQVKQIYKTPPIKDFGGFNFSQILPDPSKPSKRSFIEDLLFNKVTLADAGFIKQYGDCLGDIAARDLICAQKFNGLTVLPPLLTDEMIAQYTSALLAGTITSGWTFGAGAALQIPFAMQMAYRFNGIGVTQNVLYENQKLIANQFNSVIGKIQDSLSSTASALGKLQDVVNQNAQALNTLVKQLSSNFGAISSVLNDILSRLDPPEAEVQIDRLITGRLQSLQTYVTQQLIRAAEIRASANLAATKMSECVLGQSKRVDFCGKGYHLMSFPQSAPHGVVFLHVTYVPAQEKNFTTAPAICHDGKAHFPREGVFVSNGTHWFVTQRNFYEPQIITTDNTFVSGNCDVVIGIVNNTVYDPLQPELDSFKEELDKYFKNHTSPDVDLGDISGINASVVNIQKEIDRLNEVAKNLNESLIDLQELGKYEQYIKWPWYIWLGFIAGLIAIVMVTIMLCCMTSCCSCLKGCCSCGSCCKFDEDDSEPVLKGVKLHYT

SEQ ID NO: 353 - protein, 1273 aa, Artificial Sequence
  SARS-CoV-2/Guangdong/GD2020087-P0008/2020__EPI_ISL_413863 spike protein (1-1273)(K986P_V987P)
MFVFLVLLPLVSSQCVNLTTRTQLPPAYTNSFTRGVYYPDKVFRSSVLHSTQDLFLPFFSNVTWFHAIHVSGTNGTKRFDNPVLPFNDGVYFASTEKSNIIRGWIFGTTLDSKTQSLLIVNNATNVVIKVCEFQFCNDPFLGVYYHKNNKSWMESEFRVYSSANNCTFEYVSQPFLMDLEGKQGNFKNLREFVFKNIDGYFKIYSKHTPINLVRDLPQGFSALEPLVDLPIGINITRFQTLLALHRSYLTPGDSSSGWTAGAAAYYVGYLQPRTFLLKYNENGTITDAVDCALDPLSETKCTLKSFTVEKGIYQTSNFRVQPTESIVRFPNITNLCPFGEVFNATRFASVYAWNRKRISNCVADYSVLYNSASFSTFKCYGVSPTKLNDLCFTNVYADSFVIRGDEVREIAPGQTGKIADYNYKLPDDFTGCVIAWNSNNLDSKVGGNYNYLYRLFRKSNLKPFERDISTEIYQAGSTPCNGVEGFNCYFPLQSYGFQPTNGVGYQPYRVVVLSFELLHAPATVCGPKKSTNLVKNKCVNFNFNGLTGTGVLTESNKKFLPFQQFGRDIADTTDAVRDPQTLEILDITPCSFGGVSVITPGTNTSNQVAVLYQDVNCTEVPVAIHADQLTPTWRVYSTGSNVFQTRAGCLIGAEHVNNSYECDIPIGAGICASYQTQTNSPRRARSVASQSIIAYTMSLGAENSVAYSNNSIAIPTNFTISVTTEILPVSMTKTSVDCTMYICGDSTECSNLLLQYGSFCTQLNRALTGIAVEQDKNTQEVFAQVKQIYKTPPIKDFGGFNFSQILPDPSKPSKRSFIEDLLFNKVTLADAGFIKQYGDCLGDIAARDLICAQKFNGLTVLPPLLTDEMIAQYTSALLAGTITSGWTFGAGAALQIPFAMQMAYRFNGIGVTQNVLYENQKLIANQFNSAIGKIQDSLSSTASALGKLQDVVNQNAQALNTLVKQLSSNFGAISSVLNDILSRLDPPEAEVQIDRLITGRLQSLQTYVTQQLIRAAEIRASANLAATKMSECVLGQSKRVDFCGKGYHLMSFPQSAPHGVVFLHVTYVPAQEKNFTTAPAICHDGKAHFPREGVFVSNGTHWFVTQRNFYEPQIITTDNTFVSGNCDVVIGIVNNTVYDPLQPELDSFKEELDKYFKNHTSPDVDLGDISGINASVVNIQKEIDRLNEVAKNLNESLIDLQELGKYEQYIKWPWYIWLGFIAGLIAIVMVTIMLCCMTSCCSCLKGCCSCGSCCKFDEDDSEPVLKGVKLHYT

SEQ ID NO: 354 - protein, 1273 aa, Artificial Sequence
  SARS-CoV-2/Sweden/01/2020__EPI_ISL_411951 spike protein (1-1273)(K986P_V987P)
MFVFLVLLPLVSSQCVNLTTRTQLPPAYTNSFTRGVYYPDKVFRSSVLHSTQDLFLPFFSNVTWFHAIHVSGTNGTKRFDNPVLPFNDGVYFASTEKSNIIRGWIFGTTLDSKTQSLLIVNNATNVVIKVCEFQFCNDPFLGVYYHKNNKSWMESEFRVYSSANNCTFEYVSQPFLMDLEGKQGNFKNLREFVFKNIDGYFKIYSKHTPINLVRDLPQGFSALEPLVDLPIGINITRFQTLLALHRSYLTPGDSSSGWTAGAAAYYVGYLQPRTFLLKYNENGTITDAVDCALDPLSETKCTLKSFTVEKGIYQTSNFRVQPTESIVRFPNITNLCPFGEVFNATRFASVYAWNRKRISNCVADYSVLYNSASFSTFKCYGVSPTKLNDLCFTNVYADSFVIRGDEVRQIAPGQTGKIADYNYKLPDDFTGCVIAWNSNNLDSKVGGNYNYLYRLFRKSNLKPFERDISTEIYQAGSTPCNGVEGFNCYFPLQSYGFQPTNGVGYQPYRVVVLSFELLHAPATVCGPKKSTNLVKNKCVNFNFNGLTGTGVLTESNKKFLPFQQFGRDIADTTDAVRDPQTLEILDITPCSFGGVSVITPGTNTSNQVAVLYQDVNCTEVPVAIHADQLTPTWRVYSTGSNVFQTRAGCLIGAEHVNNSYECDIPIGAGICASYQTQTNSPRRARSVASQSIIAYTMSLGAENSVAYSNNSIAIPTNFTISVTTEILPVSMTKTSVDCTMYICGDSTECSNLLLQYGSFCTQLNRALTGIAVEQDKNTQEVFAQVKQIYKTPPIKDCGGFNFSQILPDPSKPSKRSFIEDLLFNKVTLADAGFIKQYGDCLGDIAARDLICAQKFNGLTVLPPLLTDEMIAQYTSALLAGTITSGWTFGAGAALQIPFAMQMAYRFNGIGVTQNVLYENQKLIANQFNSAIGKIQDSLSSTASALGKLQDVVNQNAQALNTLVKQLSSNFGAISSVLNDILSRLDPPEAEVQIDRLITGRLQSLQTYVTQQLIRAAEIRASANLAATKMSECVLGQSKRVDFCGKGYHLMSFPQSAPHGVVFLHVTYVPAQEKNFTTAPAICHDGKAHFPREGVFVSNGTHWFVTQRNFYEPQIITTDNTFVSGNCDVVIGIVNNTVYDPLQPELDSFKEELDKYFKNHTSPDVDLGDISGINASVVNIQKEIDRLNEVAKNLNESLIDLQELGKYEQYIKWPWYIWLGFIAGLIAIVMVTIMLCCMTSCCSCLKGCCSCGSCCKFDEDDSEPVLKGVKLHYT

SEQ ID NO: 355 - protein, 1273 aa, Artificial Sequence
  SARS-CoV-2/Tianmen/HBCDC-HB-07/2020__EPI_ISL_412983 spike protein (1-1273)(K986P_V987P)
MFVFLVLLPLVSSQCVNLTTRTQLPPAYTNSFTRGVYYPDKVFRSSVLHSTQDLFLPFFSNVTWFHAIHVSGTNGTKRFDNPVLPFNDGVYFASTEKSNIIRGWIFGTTLDSKTQSLLIVNNATNVVIKVCEFQFCNDPFLGVYYHKNNKSWMESEFRVYSSANNCTFEYVSQPFLMDLEGKQGNFKNLREFVFKNIDGYFKIYSKHTPINLVRDLPQGFSALEPLVDLPIGINITRFQTLLALHRSYLTPGDSSSGWTAGAAAYYVGYLQPRTFLLKYNENGTITDAVDCALDPLSETKCTLKSFTVEKGIYQTSNFRVQPTESIVRFPNITNLCPFGEVFNATRFASVYAWNRKRISNCVADYSVLYNSASFSTFKCYGVSPTKLNDLCFTNVYADSFVIRGDEVRQIAPGQTGKIADYNYKLPDDFTGCVIAWNSNNLDSKVGGNYNYLYRLFRKSNLKPFERDISTEIYQAGSTPCNGVEGFNCYFPLQSYGFQPTNGVGYQPYRVVVLSFELLHAPATVCGPKKSTNLVKNKCVNFNFNGLTGTGVLTESNKKFLPFQQFGRDIADTTDAVRDPQTLEILDITPCSFGGVSVITPGTNTSNQVAVLYQDLNCTEVPVAIHADQLTPTWRVYSTGSNVFQTRAGCLIGAEHVNNSYECDIPIGAGICASYQTQTNSPRRARSVASQSIIAYTMSLGAENSVAYSNNSIAIPTNFTISVTTEILPVSMTKTSVDCTMYICGDSTECSNLLLQYGSFCTQLNRALTGIAVEQDKNTQEVFAQVKQIYKTPPIKDFGGFNFSQILPDPSKPSKRSFIEDLLFNKVTLADAGFIKQYGDCLGDIAARDLICAQKFNGLTVLPPLLTDEMIAQYTSALLAGTITSGWTFGAGAALQIPFAMQMAYRFNGIGVTQNVLYENQKLIANQFNSAIGKIQDSLSSTASALGKLQDVVNQNAQALNTLVKQLSSNFGAISSVLNDILSRLDPPEAEVQIDRLITGRLQSLQTYVTQQLIRAAEIRASANLAATKMSECVLGQSKRVDFCGKGYHLMSFPQSAPHGVVFLHVTYVPAQEKNFTTAPAICHDGKAHFPREGVFVSNGTHWFVTQRNFYEPQIITTDNTFVSGNCDVVIGIVNNTVYDPLQPELDSFKEELDKYFKNHTSPDVDLGDISGINASVVNIQKEIDRLNEVAKNLNESLIDLQELGKYEQYIKWPWYIWLGFIAGLIAIVMVTIMLCCMTSCCSCLKGCCSCGSCCKFDEDDSEPVLKGVKLHYT

SEQ ID NO: 356 - protein, 1273 aa, Artificial Sequence
  SARS-CoV-2/Hong Kong/case42_VM20002493/2020__EPI_ISL_414527 spike protein (1-1273)(K986P_V987P)
MFVFLVLLPLVSSQCVNLTTRTQLPPAYTNSFTRGVYYPDKVFRSSVLHSTQDLFLPFFSNVTWFHAIHVSGTNGTKRFDNPVLPFNDGVYFASTEKSNIIRGWIFGTTLDSKTQSLLIVNNATNVVIKVCEFQFCNDPFLGVYYHKNNKSWMESEFRVYSSANNCTFEYVSQPFLMDLEGKQGNFKNLREFVFKNIDGYFKIYSKHTPINLVRDLPQGFSALEPLVDLPIGINITRFQTLLALHRSYLTPGDSSSGWTAGAAAYYVGYLQPRTFLLKYNENGTITDAVDCALDPLSETKCTLKSFTVEKGIYQTSNFRVQPTESIVRFPNITNLCPFGEVFNATRFASVYAWNRKRISNCVADYSVLYNSASFSTFKCYGVSPTKLNDLCFTNVYADSFVIRGDEVRQIAPGQTGKIADYNYKLPDDFTGCVIAWNSNNLDSKVGGNYNYLYRLFRKSNLKPFERDISTEIYQAGSTPCNGVEGFNCYFPLQSYGFQPTNGVGYQPYRVVVLSFELLHAPATVCGPKKSTNLVKNKCVNFNFNGLTGTGVLTESNKKFLPFQQFGRDIADTTDAVRDPQTLEILDITPCSFGGVSVITPGTNTSNQVAVLYQDVNCTEVPVAIHADQLTPTWRVYSTGSNVFQTRAGCLIGAEHVNNSYECDIPIGAGICASYQTQTNSPRRARSVASQSIIAYTMSLGAENSVAYSNNSIAIPTNFAISVTTEILPVSMTKTSVDCTMYICGDSTECSNLLLQYGSFCTQLNRALTGIAVEQDKNTQEVFAQVKQIYKTPPIKDFGGFNFSQILPDPSKPSKRSFIEDLLFNKVTLADAGFIKQYGDCLGDIAARDLICAQKFNGLTVLPPLLTDEMIAQYTSALLAGTITSGWTFGAGAALQIPFAMQMAYRFNGIGVTQNVLYENQKLIANQFNSAIGKIQDSLSSTASALGKLQDVVNQNAQALNTLVKQLSSNFGAISSVLNDILSRLDPPEAEVQIDRLITGRLQSLQTYVTQQLIRAAEIRASANLAATKMSECVLGQSKRVDFCGKGYHLMSFPQSAPHGVVFLHVTYVPAQEKNFTTAPAICHDGKAHFPREGVFVSNGTHWFVTQRNFYEPQIITTDNTFVSGNCDVVIGIVNNTVYDPLQPELDSFKEELDKYFKNHTSPDVDLGDISGINASVVNIQKEIDRLNEVAKNLNESLIDLQELGKYEQYIKWPWYIWLGFIAGLIAIVMVTIMLCCMTSCCSCLKGCCSCGSCCKFDEDDSEPVLKGVKLHYT

SEQ ID NO: 357 - protein, 1273 aa, Artificial Sequence
  SARS-CoV-2/USA/CruiseA-23/2020__EPI_ISL_414482 spike protein (1-1273)(K986P_V987P)
MFVFLVLLPLVSSQCVNLTTRTQLPPAYTNSFTRGVYYPDKVFRSSVLHSTQDLFLPFFSNVTWFHAIHVSGTNGTKRFDNPVLPFNDGVYFASTEKSNIIRGWIFGTTLDSKTQSLLIVNNATNVVIKVCEFQFCNDPFLGVYYHKNNKSWMESEFRVYSSANNCTFEYVSQPFLMDLEVKQGNFKNLREFVFKNIDGYFKIYSKHTPINLVRDLPQGFSALEPLVDLPIGINITRFQTLLALHRSYLTPGDSSSGWTAGAAAYYVGYLQPRTFLLKYNENGTITDAVDCALDPLSETKCTLKSFTVEKGIYQTSNFRVQPTESIVRFPNITNLCPFGEVFNATRFASVYAWNRKRISNCVADYSVLYNSASFSTFKCYGVSPTKLNDLCFTNVYADSFVIRGDEVRQIAPGQTGKIADYNYKLPDDFTGCVIAWNSNNLDSKVGGNYNYLYRLFRKSNLKPFERDISTEIYQAGSTPCNGVEGFNCYFPLQSYGFQPTNGVGYQPYRVVVLSFELLHAPATVCGPKKSTNLVKNKCVNFNFNGLTGTGVLTESNKKFLPFQQFGRDIADTTDAVRDPQTLEILDITPCSFGGVSVITPGTNTSNQVAVLYQDVNCTEVPVAIHADQLTPTWRVYSTGSNVFQTRAGCLIGAEHVNNSYECDIPIGAGICASYQTQTNSPRRARSVASQSIIAYTMSLGAENSVAYSNNSIAIPTNFTISVTTEILPVSMTKTSVDCTMYICGDSTECSNLLLQYGSFCTQLNRALTGIAVEQDKNTQEVFAQVKQIYKTPPIKDFGGFNFSQILPDPSKPSKRSFIEDLLFNKVTLADAGFIKQYGDCLGDIAARDLICAQKFNGLTVLPPLLTDEMIAQYTSALLAGTITSGWTFGAGAALQIPFAMQMAYRFNGIGVTQNVLYENQKLIANQFNSAIGKIQDSLSSTASALGKLQDVVNQNAQALNTLVKQLSSNFGAISSVLNDILSRLDPPEAEVQIDRLITGRLQSLQTYVTQQLIRAAEIRASANLAATKMSECVLGQSKRVDFCGKGYHLMSFPQSAPHGVVFLHVTYVPAQEKNFTTAPAICHDGKAHFPREGVFVSNGTHWFVTQRNFYEPQIITTDNTFVSGNCDVVIGIVNNTVYDPLQPELDSFKEELDKYFKNHTSPDVDLGDISGINASVVNIQKEIDRLNEVAKNLNESLIDLQELGKYEQYIKWPWYIWLGFIAGLIAIVMVTIMLCCMTSCCSCLKGCCSCGSCCKFDEDDSEPVLKGVKLHYT

SEQ ID NO: 358 - protein, 1273 aa, Artificial Sequence
  SARS-CoV-2/Hong Kong/case85_VM20002868/2020__EPI_ISL_414519 spike protein (1-1273)(K986P_V987P)
MFVFLVLVPLVSSQCVNLTTRTQLPPAYTNSFTRGVYYPDKVFRSSVLHSTQDLFLPFFSNVTWFHAIHVSGTNGTKRFDNPVLPFNDGVYFASTEKSNIIRGWIFGTTLDSKTQSLLIVNNATNVVIKVCEFQFCNDPFLGVYYHKNNKSWMESEFRVYSSANNCTFEYVSQPFLMDLEGKQGNFKNLREFVFKNIDGYFKIYSKHTPINLVRDLPQGFSALEPLVDLPIGINITRFQTLLALHRSYLTPGDSSSGWTAGAAAYYVGYLQPRTFLLKYNENGTITDAVDCALDPLSETKCTLKSFTVEKGIYQTSNFRVQPTESIVRFPNITNLCPFGEVFNATRFASVYAWNRKRISNCVADYSVLYNSASFSTFKCYGVSPTKLNDLCFTNVYADSFVIRGDEVRQIAPGQTGKIADYNYKLPDDFTGCVIAWNSNNLDSKVGGNYNYLYRLFRKSNLKPFERDISTEIYQAGSTPCNGVEGFNCYFPLQSYGFQPTNGVGYQPYRVVVLSFELLHAPATVCGPKKSTNLVKNKCVNFNFNGLTGTGVLTESNKKFLPFQQFGRDIADTTDAVRDPQTLEILDITPCSFGGVSVITPGTNTSNQVAVLYQDVNCTEVPVAIHADQLTPTWRVYSTGSNVFQTRAGCLIGAEHVNNSYECDIPIGAGICASYQTQTNSPRRARSVASQSIIAYTMSLGAENSVAYSNNSIAIPTNFTISVTTEILPVSMTKTSVDCTMYICGDSTECSNLLLQYGSFCTQLNRALTGIAVEQDKNTQEVFAQVKQIYKTPPIKDFGGFNFSQILPDPSKPSKRSFIEDLLFNKVTLADAGFIKQYGDCLGDIAARDLICAQKFNGLTVLPPLLTDEMIAQYTSALLAGTITSGWTFGAGAALQIPFAMQMAYRFNGIGVTQNVLYENQKLIANQFNSAIGKIQDSLSSTASALGKLQDVVNQNAQALNTLVKQLSSNFGAISSVLNDILSRLDPPEAEVQIDRLITGRLQSLQTYVTQQLIRAAEIRASANLAATKMSECVLGQSKRVDFCGKGYHLMSFPQSAPHGVVFLHVTYVPAQEKNFTTAPAICHDGKAHFPREGVFVSNGTHWFVTQRNFYEPQIITTDNTFVSGNCDVVIGIVNNTVYDPLQPELDSFKEELDKYFKNHTSPDVDLGDISGINASVVNIQKEIDRLNEVAKNLNESLIDLQELGKYEQYIKWPWYIWLGFIAGLIAIVMVTIMLCCMTSCCSCLKGCCSCGSCCKFDEDDSEPVLKGVKLHYT

SEQ ID NO: 359 - protein, 1273 aa, Artificial Sequence
  SARS-CoV-2/England/200990660/2020__EPI_ISL_414523 spike protein (1-1273)(K986P_V987P)
MFVFLVLLPLVSSQCVNLTTRTQLPPAYTNSFTRGVYYPDKVFRSSVLHSTQDLFLPFFSNVTWFHAIHVSGTNGTKRFDNPVLPFNDGVYFASTEKSNIIRGWIFGTTLDSKTQSLLIVNNATNVVIKVCEFQFCNDPFLGVYYHKNNKSWMESEFRVYSSANNCTFEYVSQPFLMDLEGKQGNFKNLREFVFKNIDGYFKIYSKHTPINLVRDLPQGFSALEPLVDLPIGINITRFQTLLALHRSYLTPGDSSSGWTAGAAAYYVGYLQPRTFLLKYNENGTITDAVDCALDPLSETKCTLKSFTVEKGIYQTSNFRVQPTESIVRFPNITNLCPFGEVFNATRFASVYAWNRKRISNCVADYSVLYNSASFSTFKCYGVSPTKLNDLCFTNVYADSFVIRGDEVRQIAPGQTGKIADYNYKLPDDFTGCVIAWNSNNLDSKVGGNYNYLYRLFRKSNLKPFERDISTEIYQAGSTPCNGVEGFNCYFPLQSYGFQPTNGVGYQPYRVVVLSFELLHAPATVCGPKKSTNLVKNKCVNFNFNGLTGTGVLTESNKKFLPFQQFGRDIADTTDAVRDPQTLEILDITPCSFGGVSVITPGTNTSNQVAVLYQGVNCTEVPVAIHADQLTPTWRVYSTGSNVFQTRAGCLIGAEHVNNSYECDIPIGAGICASYQTQTNSPRRARSVASQSIIAYTMSLGAENSVAYSNNSIAIPTNFTISVTTEILPVSMTKTSVDCTMYICGDSTECSNLLLQYGSFCTQLNRALTGIAVEQDKNTQEVFAQVKQIYKTPPIKDFGGFNFSQILPDPSKPSKRSFIEDLLFNKVTLADAGFIKQYGDCLGDIAARDLICAQKFNGLTVLPPLLTDEMIAQYTSALLAGTITSGWTFGAGAALQIPFAMQMAYRFNGIGVTQNVLYENQKLIANQFNSAIGKIQDSLSSTASALGKLQDVVNQNAQALNTLVKQLSSNFGAISSVLNDILSRLDPPEAEVQIDRLITGRLQSLQTYVTQQLIRAAEIRASANLAATKMSECVLGQSKRVDFCGKGYHLMSFPQSAPHGVVFLHVTYVPAQEKNFTTAPAICHDGKAHFPREGVFVSNGTHWFVTQRNFYEPQIITTDNTFVSGNCDVVIGIVNNTVYDPLQPELDSFKEELDKYFKNHTSPDVDLGDISGINASVVNIQKEIDRLNEVAKNLNESLIDLQELGKYEQYIKWPWYIWLGFIAGLIAIVMVTIMLCCMTSCCSCLKGCCSCGSCCKFDEDDSELVLKGVKLHYT

SEQ ID NO: 360 - protein, 1273 aa, Artificial Sequence
  SARS-CoV-2/Australia/NSW09/2020__EPI_ISL_413595 spike protein (1-1273)(K986P_V987P)
MFVFLVLLPLVSSQCVNLTTRTQLPPAYTNSFTRGVYYPDKVFRSSVLHSTQDLFLPFFSNVTWFHAIHVSGTNGTKRFDNPVLPFNDGVYFASTEKSNIIRGWIFGTTLDSKTQSLLIVNNATNVVIKVCEFQFCNDPFLGVYYHKNNKSWMESEFRVYSSANNCTFEYVSQPFLMDLEGKQGNFKNLREFVFKNIDGYFKIYSKHTPINLVRDLPQGFSALEPLVDLPIGINITRFQTLLALHRSYLTPGDSSSGWTAGAAAYYVGYLQPRTFLLKYNENGTITDAVDCALDPLSETKCTLKSFTVEKGIYQTSNFRVQPTESIVRFPNITNLCPFGEVFNATRFASVYAWNRKRISNCVADYSVLYNSASFSTFKCYGVSPTKLNDLCFTNVYADSFVIRGDEVRQIAPGQTGKIADYNYKLPDDFTGCVIAWNSNNLDSKVGGNYNYLYRLFRKSNLKPFERDISTEIYQAGSTPCNGVEGFNCYFPLQSYGFQPTNGVGYQPYRVVVLSFELLHAPATVCGPKKSTNLVKNKCVNFNFNGLTGTGVLTESNKKFLPFQQFGRDIADTTDAVRDPQTLEILDITPCSFGGVSVITPGTNTSNQVAVLYQDVNCTEVPVAIHADQLTPTWRVYSTGSNVFQTRAGCLIGAEHVNNSYECDIPIGAGICASYQTQTNSPRRARSVASQSIIAYTMSLGAENSVAYSNNSIAIPTNFTISVTTEILPVSMTKTSVDCTMYICGDSTECSNLLLQYGSFCTQLNRALTGIAVEQDKNTQEVFAQVKQIYKTPPIKDFGGFNFSQILPDPSKPSKRSFIEDLLFNKVTLADAGFIKQYGDCLGDIAARDLICAQKFNGLTVLPPLLTDEMIAQYTSALLAGTITSGWTFGAGAALQIPFAMQMAYRFNGIGVTQNVLYENQKLIANQFNSAIGKIQDSLSFTASALGKLQDVVNQNAQALNTLVKQLSSNFGAISSVLNDILSRLDPPEAEVQIDRLITGRLQSLQTYVTQQLIRAAEIRASANLAATKMSECVLGQSKRVDFCGKGYHLMSFPQSAPHGVVFLHVTYVPAQEKNFTTAPAICHDGKAHFPREGVFVSNGTHWFVTQRNFYEPQIITTDNTFVSGNCDVVIGIVNNTVYDPLQPELDSFKEELDKYFKNHTSPDVDLGDISGINASVVNIQKEIDRLNEVAKNLNESLIDLQELGKYEQYIKWPWYIWLGFIAGLIAIVMVTIMLCCMTSCCSCLKGCCSCGSCCKFDEDDSEPVLKGVKLHYT

SEQ ID NO: 361 - protein, 1273 aa, Artificial Sequence
  SARS-CoV-2/Australia/NSW10/2020__EPI_ISL_413596 spike protein (1-1273)(K986P_V987P)
MFVFLVLLPLVSSQCVNLTTRTQLPPAYTNSFTRGVYYPDKVFRSSVLHSTQDLFLPFFSNVTWFHAIHVSGTNGTKRFDNPVLPFNDGVYFASTEKSNIIRGWIFGTTLDSKTQSLLIVNNATNVVIKVCEFQFCNDPFLGVYYHKNNKSWMESEFRVYSSANNCTFEYVSQPFLMDLEGKQGNFKNLREFVFKNIDGYFKIYSKHTPINLVRDLPQGFSALEPLVDLPIGINITRFQTLLALHRSYLTPGDSSSGWTAGAAAYYVGYLQPRTFLLKYNENGTITDAVDCALDPLSETKCTLKSFTVEKGIYQTSNFRVQPTESIVRFPNITNLCPFGEVFNATRFASVYAWNRKRISNCVADYSVLYNSASFSTFKCYGVSPTKLNDLCFTNVYADSFVIRGDEVRQIAPGQTGKIADYNYKLPDDFTGCVIAWNSNNLDSKVGGNYNYLYRLFRKSNLKPFERDISTEIYQAGSTPCNGVEGFNCYFPLQSYGFQPTNGVGYQPYRVVVLSFELLHAPATVCGPKKSTNLVKNKCVNFNFNGLTGTGVLTESNKKFLPFQQFGRDIADTTDAVRDPQTLEILDITPCSFGGVSVITPGTNTSNQVAVLYQDVNCTEVPVAIHADQLTPTWRVYSTGSNVFQTRAGCLIGAEHVNNSYECDIPIGAGICASYQTQTNSPRRARSVASQSIIAYTMSLGAENSVAYSNNSIAIPTNFTISVTTEILPVSMTKTSVDCTMYICGDSTECSNLLLQYGSFCTQLNRALTGIAVEQDKNTQEVFAQVKQIYKTPPIKDFGGFNFSQILPDPSKPSKRSFIEDLLFNKVTLADAGFIKQYGDCLGDIAARDLICAQKFNGLTVLPPLLTDEMIAQYTSALLAGTITSGWTFGAGAALQIPFAMQMAYRFNGIGVTQNVLYENQKLIANQFNSAIGKIQDSLSSTASALGKLQDVVNQNAQALNTLVKQLSSNFGAISSVLNDILSRLDPPEAEVQIDRLITGRLQSLQTYVTQQLIRAAEIRASANLAATKMSECVLGQSKRVDFCGKGYHLMSFPQSAPHGVVFLHVTYVPAQEKNFTTAPAICHDGKAHFPREGVFVSNGTHWFVTQRNFYEPQIITTDNTFVSGNCDVVIGIVNNTVYDPLQPELDSFKEELDKYFKNHTSPDVDLGDISGINASVVNIQKEIDRLNEVAKNLNESLIDLQELGKYEQYIKWPWYIWLGFIAGLIAIVMVTIMLCCMTSCCSCLKGCCSCGSCFKFDEDDSEPVLKGVKLHYT

SEQ ID NO: 362 - protein, 1273 aa, Artificial Sequence
  SARS-CoV-2/Switzerland/1000477797/2020__EPI_ISL_413023 spike protein (1-1273)(K986P_V987P)
MFVFLVLLPLVSSQCVNLTTRTQLPPAYTNSFTRGVYYPDKVFRSSVLHSTQDLFLPFFSNVTWFHAIHVSGTNGTKRFDNPVLPFNDGVYFASTEKSNIIRGWIFGTTLDSKTQSLLIVNNATNVVIKVCEFQFCNDPFLGVYYHKNNKSWMESEFRVYSSANNCTFEYVSQPFLMDLEGKQGNFKNLREFVFKNIDGYFNIYSKHTPINLVRDLPQGFSALEPLVDLPIGINITRFQTLLALHRSYLTPGDSSSGWTAGAAAYYVGYLQPRTFLLKYNENGTITDAVDCALDPLSETKCTLKSFTVEKGIYQTSNFRVQPTESIVRFPNITNLCPFGEVFNATRFASVYAWNRKRISNCVADYSVLYNSASFSTFKCYGVSPTKLNDLCFTNVYADSFVIRGDEVRQIAPGQTGKIADYNYKLPDDFTGCVIAWNSNNLDSKVGGNYNYLYRLFRKSNLKPFERDISTEIYQAGSTPCNGVEGFNCYFPLQSYGFQPTNGVGYQPYRVVVLSFELLHAPATVCGPKKSTNLVKNKCVNFNFNGLTGTGVLTESNKKFLPFQQFGRDIADTTDAVRDPQTLEILDITPCSFGGVSVITPGTNTSNQVAVLYQGVNCTEVPVAIHADQLTPTWRVYSTGSNVFQTRAGCLIGAEHVNNSYECDIPIGAGICASYQTQTNSPRRARSVASQSIIAYTMSLGAENSVAYSNNSIAIPTNFTISVTTEILPVSMTKTSVDCTMYICGDSTECSNLLLQYGSFCTQLNRALTGIAVEQDKNTQEVFAQVKQIYKTPPIKDFGGFNFSQILPDPSKPSKRSFIEDLLFNKVTLADAGFIKQYGDCLGDIAARDLICAQKFNGLTVLPPLLTDEMIAQYTSALLAGTITSGWTFGAGAALQIPFAMQMAYRFNGIGVTQNVLYENQKLIANQFNSAIGKIQDSLSSTASALGKLQDVVNQNAQALNTLVKQLSSNFGAISSVLNDILSRLDPPEAEVQIDRLITGRLQSLQTYVTQQLIRAAEIRASANLAATKMSECVLGQSKRVDFCGKGYHLMSFPQSAPHGVVFLHVTYVPAQEKNFTTAPAICHDGKAHFPREGVFVSNGTHWFVTQRNFYEPQIITTDNTFVSGNCDVVIGIVNNTVYDPLQPELDSFKEELDKYFKNHTSPDVDLGDISGINASVVNIQKEIDRLNEVAKNLNESLIDLQELGKYEQYIKWPWYIWLGFIAGLIAIVMVTIMLCCMTSCCSCLKGCCSCGSCCKFDEDDSEPVLKGVKLHYT

SEQ ID NO: 363 - protein, 1273 aa, Artificial Sequence
  SARS-CoV-2/Belgium/BA-02291/2020__EPI_ISL_415159 spike protein (1-1273)(K986P_V987P)
MFVFLVLLPLVSSQCVNLTTRTQLPPAYTNSFTRGVYYPDKVFRSSVLHSTQDLFLPFFSNVTWFHAIHVSGTNGTKRFDNPVLPFNDGVYFASTEKSNIIRGWIFGTTLDSKTQSLLIVNNATNVVIKVCEFQFCNDPFLGVYYHKNNKSWMESEFRVYSSANNCTFEYVSQPFLMDLEGKQGNFKNLREFVFKNIDGYFKIYSKHTPINLVRDLPQGFSALEPLVDLPIGINITRFQTLLALHRSYLTPGDSSSGWTAGAAAYYVGYLQPRTFLLKYNENGTITDAVDCALDPLSETKCTLKSFTVEKGIYQTSNFRVQPTESIVRFPNITNLCPFGEVFNATRFASVYAWNRKRISNCVADYSVLYNSASFSTFKCYGVSPTKLNDLCFTNVYADSFVIRGDEVRQIAPGQTGKIADYNYKLPDDFTGCVIAWNSNNLDSKVGGNYNYLYRLFRRSNLKPFERDISTEIYQAGSTPCNGVEGFNCYFPLQSYGFQPTNGVGYQPYRVVVLSFELLPAPATVCGPKKSTNLVKNKCVNFNFNGLTGTGVLTESNKKFLPFQQFGRDIADTTDAVRDPQTLEILDITPCSFGGVSVITPGTNTSNQVAVLYQGVNCTEVPVAIHADQLTPTWRVYSTGSNVFQTRAGCLIGAEHVNNSYECDIPIGAGICASYQTQTNSPRRARSVASQSIIAYTMSLGAENSVAYSNNSIAIPTNFTISVTTEILPVSMTKTSVDCTMYICGDSTECSNLLLQYGSFCTQLNRALTGIAVEQDKNTQEVFAQVKQIYKTPPIKDFGGFNFSQILPDPSKPSKRSFIEDLLFNKVTLADAGFIKQYGDCLGDIAARDLICAQKFNGLTVLPPLLTDEMIAQYTSALLAGTITSGWTFGAGAALQIPFAMQMAYRFNGIGVTQNVLYENQKLIANQFNSAIGKIQDSLSSAAPALGKLQDVVNQNAQALNTLVKQLSSNFGAISSVLNDILSRLDPPEAEVQIDRLITGRLQSLQTYVTQQLIRAAEIRASANLAATKMSECVLGQSKRVDFCGKGYHLMSFPQSAPHGVVFLHVTYVPAQEKNFTTAPAICHDGKAHFPREGVFVSNGTHWFVTQRNFYEPQIITTDNTFVSGNCDVVIGIVNNTVYDPLQPELDSFKEELDKYFKNHTSPDVDLGDISGINASVVNIQKEIDRLNEVAKNLNESLIDLQELGKYEQYIKWPWYIWLGFIAGLIAIVMVTIMLCCMTSCCSCLKGCCSCGSCCKFDEDDSEPVLKGVKLHYT

SEQ ID NO: 364 - protein, 1273 aa, Artificial Sequence
  SARS-CoV-2/USA/WA8-UW5/2020__EPI_ISL_413486 spike protein (1-1273)(K986P_V987P)
MFVFLVLLPLVSSQCVNLTTRTQLPPAYTNSFTRGVYYPDKVFRSSVLHSTQDLFLPFFSNVTWFHAIHVSGTNGTKRFDNPVLPFNDGVYFASTEKSNIIRGWIFGTTLDSKTQSLLIVNNATNVVIKVCEFQFCNDPFLGVYYHKNNKSWMESEFRVYSSANNCTFEYVSQPFLMDLEGKQGNFKNLREFVFKNIDGYFKIYSKHTPINLVRDLPQGFSALEPLVDLPIGINITRFQTLLALHRSYLTPGDSSSGWTAGAAAYYVGYLQPRTFLLKYNENGTITDAVDCALDPLSETKCTLKSFTVEKGIYQTSNFRVQPTESIVRFPNITNLCPFGEVFNATRFASVYAWNRKRISNCVADYSVLYNSASFSTFKCYGVSPTKLNDLCFTNVYADSFVIRGDEVRQIAPGQTGKIADYNYKLPDDFTGCVIAWNSNNLDSKVGGNYNYLYRLFRKSNLKPFERDISTEIYQAGSTPCNGVEGFNCYFPLQSYGFQPTNGVGYQPYRVVVLSFELLHAPATVCGPKKSTNLVKNKCVNFNFNGLTGTGVLTESNKKFLPFQQFGRDIADTTDAVRDPQTLEILDITPCSFGGVSVITPGTNTSNQVAVLYQDVNCTEVPVAIHADQLTPTWRVYSTGSNVFQTRAGCLIGAEYVNNSYECDIPIGAGICASYQTQTNSPRRARSVASQSIIAYTMSLGAENSVAYSNNSIAIPTNFTISVTTEILPVSMTKTSVDCTMYICGDSTECSNLLLQYGSFCTQLNRALTGIAVEQDKNTQEVFAQVKQIYKTPPIKDFGGFNFSQILPDPSKPSKRSFIEDLLFNKVTLADAGFIKQYGDCLGDIAARDLICAQKFNGLTVLPPLLTDEMIAQYTSALLAGTITSGWTFGAGAALQIPFAMQMAYRFNGIGVTQNVLYENQKLIANQFNSAIGKIQDSLSSTASALGKLQDVVNQNAQALNTLVKQLSSNFGAISSVLNDILSRLDPPEAEVQIDRLITGRLQSLQTYVTQQLIRAAEIRASANLAATKMSECVLGQSKRVDFCGKGYHLMSFPQSAPHGVVFLHVTYVPAQEKNFTTAPAICHDGKAHFPREGVFVSNGTHWFVTQRNFYEPQIITTDNTFVSGNCDVVIGIVNNTVYDPLQPELDSFKEELDKYFKNHTSPDVDLGDISGINASVVNIQKEIDRLNEVAKNLNESLIDLQELGKYEQYIKWPWYIWLGFIAGLIAIVMVTIMLCCMTSCCSCLKGCCSCGSCCKFDEDDSEPVLKGVKLHYT

SEQ ID NO: 365 - protein, 1273 aa, Artificial Sequence
  SARS-CoV-2/England/20102000506/2020__EPI_ISL_415147 spike protein (1-1273)(K986P_V987P)
MFVFLVLLPLVSSQCVNLTTRTQLPPAYTNSFTRGVYYPDKVFRSSVLHSTQDLFLPFFSNVTWFHAIHVSGTNGTKRFDNPVLPFNDGVYFASTEKSNIIRGWIFGTTLDSKTQSLLIVNNATNVVIKVCEFQFCNDPFLGVYYHKNNKSWMESEFRVYSSANNCTFEYVSQPFLMDLEGKQGNFKNLREFVFKNIDGYFKIYSKHTPINLVRDLPQGFSALEPLVDLPIGINITRFQTLLALHRSYLTPGDSSSGWTAGAAAYYVGYLQPRTFLLKYNENGTITDAVDCALDPLSETKCTLKSFTVEKGIYQTSNFRVQPTESIVRFPNITNLCPFGEVFNATRFASVYAWNRKRISNCVADYSVLYNSASFSTFKCYGVSPTKLNDLCFTNVYADSFVIRGDEVRQIAPGQTGKIADYNYKLPDDFTGCVIAWNSNNLDSKVGGNYNYLYRLFRKSNLKPFERDISTEIYQAGSTPCNGVEGFNCYFPLQSYGFQPTNGVGYQPYRVVVLSFELLHAPATVCGPKKSTNLVKNKCVNFNFNGLTGTGVLTESNKKFLPFQQFGRDIADTTDAVRDPQTLEILDITPCSFGGVSVITPGTNTSNQVAVLYQGVNCTEVPVAIHADQLTPTWRVYSTGSNVFQTRAGCLIGAEHVNNSYECDIPIGAGICASYQTQTNSPRRARSVASQSIIAYTMSLGAENSVAYSNNSIAIPTNFTISVTTEILPVSMTKTSVDCTMYICGDSTECSNLLLQYGSFCTQLNRALTGIAVEQDKNTQEVFAQVKQIYKTPPIKDFGGFNFSQILPDPSKPSKRSFIEDLLFNKVTLADAGFIKQYGYCLGDIAARDLICAQKFNGLTVLPPLLTDEMIAQYTSALLAGTITSGWTFGAGAALQIPFAMQMAYRFNGIGVTQNVLYENQKLIANQFNSAIGKIQDSLSSTASALGKLQDVVNQNAQALNTLVKQLSSNFGAISSVLNDILSRLDPPEAEVQIDRLITGRLQSLQTYVTQQLIRAAEIRASANLAATKMSECVLGQSKRVDFCGKGYHLMSFPQSAPHGVVFLHVTYVPAQEKNFTTAPAICHDGKAHFPREGVFVSNGTHWFVTQRNFYEPQIITTDNTFVSGNCDVVIGIVNNTVYDPLQPELDSFKEELDKYFKNHTSPDVDLGDISGINASVVNIQKEIDRLNEVAKNLNESLIDLQELGKYEQYIKWPWYIWLGFIAGLIAIVMVTIMLCCMTSCCSCLKGCCSCGSCCKFDEDDSEPVLKGVKLHYT

SEQ ID NO: 366 - protein, 1273 aa, Artificial Sequence
  SARS-CoV-2/Belgium/VAG-03013/2020__EPI_ISL_415155 spike protein (1-1273)(K986P_V987P)
MFVFLVLLPLVSSQCVNLTTRTQLPPAYTNSFTRGVYYPDKVFRSSVLHSTQDLFLPFFSNVTWFHAIHVSGTNGTKRFDNPVLPFNDGVYFASTEKSNIIRGWIFGTTLDSKTQSLLIVNNATNVVIKVCEFQFCNDPFLGVYYHKNNKSWMESEFRVYSSANNCTFEYVSQPFLMDLEGKQGNFKNLREFVFKNIDGYFKIYSKHTPINLVRDLPQGFSALEPLVDLPIGINITRFQTLLALHRSYLTPGDSSSGWTAGAAAYYVGYLQPRTFLLKYNENGTITDAVDCALDPLSETKCTLKSFTVEKGIYQTSNFRVQPTESIVRFPNITNLCPFGEVFNATRFASVYAWNRKRISNCVADYSVLYNSASFSTFKCYGVSPTKLNDLCFTNVYADSFVIRGDEVRQIAPGQTGKIADYNYKLPDDFTGCVIAWNSNNLDSKVGGNYNYLYRLFRKSNLKPFERDISTEIYQAGSTPCNGVEGFNCYFPLQSYGFQPTNGVGYQPYRVVVLSFELLHAPATVCGPKKSTNLVKNKCVNFNFNGLTGTGVLTESNKKFLPFQQFGRDIADTTDAVRDPQTLEILDITPCSFGGVSVITPGTNTSNQVAVLYQGVNCTEVPVAIHADQLTPTWRVYSTGSNVFQTRAGCLIGAEHVNNSYECDIPIGAGICASYQTQTNSPRRARSVASQSIIAYTMSLGAENSVAYSNNSIAIPTNFTISVTTEILPVSMTKTSVDCTMYICGDSTECSNLLLQYGSFCTQLNRALTGIAVEQDKNTQEVFAQVKQIYKTPPIKDFGGFNFSQILPDPSKPSKRSFIEDLLFNKVTLADAGFIKQYGDCLGDIAARDLICAQKFNGLTVLPPLLTDEMIAQYTSALLAGTITSGWTFGAGAALQIPFAMQMAYRFNGIGVTQNVLYENQKLIANQFNSAIGKIQDSLSSTATALGKLQDVVNQNAQALNTLVKQLSSNFGAISSVLNDILSRLDPPEAEVQIDRLITGRLQSLQTYVTQQLIRAAEIRASANLAATKMSECVLGQSKRVDFCGKGYHLMSFPQSAPHGVVFLHVTYVPAQEKNFTTAPAICHDGKAHFPREGVFVSNGTHWFVTQRNFYEPQIITTDNTFVSGNCDVVIGIVNNTVYDPLQPELDSFKEELDKYFKNHTSPDVDLGDISGINASVVNIQKEIDRLNEVAKNLNESLIDLQELGKYEQYIKWPWYIWLGFIAGLIAIVMVTIMLCCMTSCCSCLKGCCSCGSCCKFDEDDSEPVLKGVKLHYT

SEQ ID NO: 367 - protein, 1273 aa, Artificial Sequence
  SARS-CoV-2/Belgium/BC-03016/2020__EPI_ISL_415157 spike protein (1-1273)(K986P_V987P)
MFVFLVLLPLVSSQCVNLTTRTQLPPAYTNSFTRGVYYPDKVFRSSVLHSTQDLFLPFFSNVTWFHAIHVSGTNGTKRFDNPVLPFNDGVYFASTEKSNIIRGWIFGTTLDSKTQSLLIVNNATNVVIKVCEFQFCNDPFLGVYYHKNNKSWMESEFRVYSSANNCTFEYVSQPFLMDLEGKQGNFKNLREFVFKNIDGYFKIYSKHTPINLVRDLPQGFSALEPLVDLPIGINITRFQTLLALHRSYLTPGDSSSGWTAGAAAYYVGYLQPRTFLLKYNENGTITDAVDCALDPLSETKCTLKSFTVEKGIYQTSNFRVQPTESIVRFPNITNLCPFGEVFNATRFASVYAWNRKRISNCVADYSVLYNSASFSTFKCYGVSPTKLNDLCFTNVYADSFVIRGDEVRQIAPGQTGKIADYNYKLPDDFTGCVIAWNSNNLDSKVGGNYNYLYRLFRKSNLKPFERDISTEIYQAGSTPCNGVEGFNCYFPLQSYGFQPTNGVGYQPYRVVVLSFELLHAPATVCGPKKSTNLVKNKCVNFNFNGLTGTGVLTESNKKFLPFQQFGRDIADTTDAVRDPQTLEILDITPCSFGGVSVITPGTNTSNQVAVLYQGVNCTEVPVAIHADQLTPTWRVYSTGSNVFQTRAGCLIGAEHVNNSYECDIPIGAGICASYQTQTNSPRRARSVASQSIIAYTMSLGAENSVAYSNNSIAIPTNFTISVTTEILPVSMTKTSVDCTMYICGDSTECSNLLLQYGSFCTQLNRALTGIAVEQDKNTQEVFAQVKQIYKTPPIKDFGGFNFSQILPDPSKPSKRSFIEDLLFNKVTLADAGFIKQYGDCLGDIAARDLICAQKFNGLTVLPPLLTDEMIAQYTSALLAGTITSGWTFGAGAALQIPFAMQMAYRFNGIGVTQNVLYENQKLIANQFNSAIGKIQDSLSSTAPALGKLQDVVNQNAQALNTLVKQLSSNFGAISSVLNDILSRLDPPEAEVQIDRLITGRLQSLQTYVTQQLIRAAEIRASANLAATKMSECVLGQSKRVDFCGKGYHLMSFPQSAPHGVVFLHVTYVPAQEKNFTTAPAICHDGKAHFPREGVFVSNGTHWFVTQRNFYEPQIITTDNTFVSGNCDVVIGIVNNTVYDPLQPELDSFKEELDKYFKNHTSPDVDLGDISGINASVVNIQKEIDRLNEVAKNLNESLIDLQELGKYEQYIKWPWYIWLGFIAGLIAIVMVTIMLCCMTSCCSCLKGCCSCGSCCKFDEDDSEPVLKGVKLHYT

SEQ ID NO: 368 - protein, 1273 aa, Artificial Sequence
  SARS-CoV-2/Germany/BavPat3/2020__EPI_ISL_414521 spike protein (1-1273)(K986P_V987P)
MFVFLVLLPLVSSQCVNLTTRTQLPPAYTNSFTRGVYYPDKVFRSSVLHSTQDLFLPFFSNVTWFHAIHVSGTNGTKRFDNPVLPFNDGVYFASTEKSNIIRGWIFGTTLDSKTQSLLIVNNATNVVIKVCEFQFCNDPFLGVYYHKNNKSWMESEFRVYSSANNCTFEYVSQPFLMDLEGKQGNFKNLREFVFKNIDGYFKIYSKHTPINLVRDLPQGFSALEPLVDLPIGINITRFQTLLALHRSYLTPGDSSSGWTAGAAAYYVGYLQPRTFLLKYNENGTITDAVDCALDPLSETKCTLKSFTVEKGIYQTSNFRVQPTESIVRFPNITNLCPFGEVFNATRFASVYAWNRKRISNCVADYSVLYNSASFSTFKCYGVSPTKLNDLCFTNVYADSFVIRGDEVRQIAPGQTGKIADYNYKLPDDFTGCVIAWNSNNLDSKVGGNYNYLYRLFRKSNLKPFERDISTEIYQAGSTPCNGVEGFNCYFPLQSYGFQPTNGVGYQPYRVVVLSFELLHAPATVCGPKKSTNLVKNKCVNFNFNGLTGTGVLTESNKKFLPFQQFGRDIADTTDAVRDPQTLEILDITPCSFGGVSVITPGTNTSNQVAVLYQDVNCTEVPVAIHADQLTPTWRVYSTGSNVFQTRAGCLIGAEHVNNSYECDIPIGAGICASYQTQTNSPRRARSVASQSIIAYTMSLGAENSVAYSNNSIAIPTNFTISVTTEILPVSMTKTSVDCTMYICGDSTECSNLLLQYGSFCTQLNRALTGIAVEQDKNTQQVFAQVKQIYKTPPIKDFGGFNFSQILPDPSKPSKRSFIEDLLFNKVTLADAGFIKQYGDCLGDIAARDLICAQKFNGLTVLPPLLTDEMIAQYTSALLAGTITSGWTFGAGAALQIPFAMQMAYRFNGIGVTQNVLYENQKLIANQFNSAIGKIQDSLSSTASALGKLQDVVNQNAQALNTLVKQLSSNFGAISSVLNDILSRLDPPEAEVQIDRLITGRLQSLQTYVTQQLIRAAEIRASANLAATKMSECVLGQSKRVDFCGKGYHLMSFPQSAPHGVVFLHVTYVPAQEKNFTTAPAICHDGKAHFPREGVFVSNGTHWFVTQRNFYEPQIITTDNTFVSGNCDVVIGIVNNTVYDPLQPELDSFKEELDKYFKNHTSPDVDLGDISGINASVVNIQKEIDRLNEVAKNLNESLIDLQELGKYEQYIKWPWYIWLGFIAGLIAIVMVTIMLCCMTSCCSCLKGCCSCGSCCKFDEDDSEPVLKGVKLHYT

SEQ ID NO: 369 - protein, 1273 aa, Artificial Sequence
  SARS-CoV-2/France/HF1805/2020__EPI_ISL_414628 spike protein (1-1273)(K986P_V987P)
MFVFLVLLPLVSSQCVNLTTRTQLPPAYTNSFTRGVYYPDKVFRSSVLHSTQDLFLPFFSNVTWFHAIHVSGTNGTKRFDNPVLPFNDGVYFASTEKSNIIRGWIFGTTLDSKTQSLLIVNNATNVVIKVCEFQFCNDPFLGVYYHKNNKSWMESEFRVYSSANNCTFEYVSQPFLMDLEGKQGNFKNLREFVFKNIDGYFKIYSKHTPINLVRDLPQGFSALEPLVDLPIGINITRFQTLLALHRSYLTPGDSSSGWTAGAAAYYVGYLQPRTFLLKYNENGTITDAVDCALDPLSETKCTLKSFTVEKGIYQTSNFRVQPTESIVRFPNITNLCPFGEVFNATRFASVYAWNRKRISNCVADYSVLYNSASFSTFKCYGVSPTKLNDLCFTNVYADSFVIRGDEVRQIAPGQTGKIADYNYKLPDDFTGCVIAWNSNNLDSKVGGNYNYLYRLFRKSNLKPFERDISTEIYQAGSTPCNGVEGFNCYFPLQSYGFQPTNGVGYQPYRVVVLSFELLHAPATVCGPKKSTNLVKNKCVNFNFNGLTGTGVLTESNKKFLPFQQFGRDIADTTDAVRDPQTLEILDITPCSFGGVSVITPGTNTSNQVAVLYQGVNCTEVPVAIHADQLTPTWRVYSTGSNVFQTRAGCLIGAEHVNNSYECDIPIGAGICASYQTQTNSPRRARSVASQSIIAYTMSLGAENSVAYSNNSIAIPTNFTISVTTEILPVSMTKTSVDCTMYICGDSTECSNLLLQYGSFCTQLNRALTGIAVEQDKNTQEVFAQVKQIYKTPPIKDFGGFNFSQILPDPSKPSKRSFIEDLLFNKVTLADAGFIKQYGDCLGDIAARDLICAQKFNGLTVLPPLLTDEMIAQYTSALLAGTITSGWTFGAGAALQIPFAMQMAYRFNGIGVTQNVLYENQKLIANQFNSAIGKIQDSLSSTASALGKLQDVVNQNAQALNTLVKQLSSNFGAISSVLNDILSRLDPPEAEVQIDRLITGRLQSLQTYVTQQLIRAAEIRASANLAATKMSECVLGQSKRVDFCGKGYHLMSFPQSAPHGVVFLHVTYVPAQEKNFTTAPAICHDGKAHFPREGVFVSNGTHWFVTQRNFYEPQIITTDNTFVSGNCDVVIGVVNNTVYDPLQPELDSFKEELDKYFKNHTSPDVDLGDISGINASVVNIQKEIDRLNEVAKNLNESLIDLQELGKYEQYIKWPWYIWLGFIAGLIAIVMVTIMLCCMTSCCSCLKGCCSCGSCCKFDEDDSEPVLKGVKLHYT

SEQ ID NO: 370 - protein, 1273 aa, Artificial Sequence
  SARS-CoV-2/Netherlands/ZuidHolland_9/2020__EPI_ISL_414445 spike protein (1-1273)(K986P_V987P)
MFVFLVLLPLVSSQCVNLTTRTQLPPAYTNSFTRGVYYPDKVFRSSVLHSTQDLFLPFFSNVTWFHAIHVSGTNGTKRFDNPVLPFNDGVYFASTEKSNIIRGWIFGTTLDSKTQSLLIVNNATNVVIKVCEFQFCNDPFLGVYYHKNNKSWMESEFRVYSSANNCTFEYVSQPFLMDLEGKQGNFKNLREFVFKNIDGYFKIYSKHTPINLVRDLPQGFSALEPLVDLPIGINITRFQTLLALHRSYLTPGDSSSGWTAGAAAYYVGYLQPRTFLLKYNENGTITDAVDCALDPLSETKCTLKSFTVEKGIYQTSNFRVQPTESIVRFPNITNLCPFGEVFNATRFASVYAWNRKRISNCVADYSVLYNSASFSTFKCYGVSPTKLNDLCFTNVYADSFVIRGDEVRQIAPGQTGKIADYNYKLPDDFTGCVIAWNSNNLDSKVGGNYNYLYRLFRKSNLKPFERDISTEIYQAGSTPCNGVEGFNCYFPLQSYGFQPTNGVGYQPYRVVVLSFELLHAPATVCGPKKSTNLVKNKCVNFNFNGLTGTGVLTESNKKFLPFQQFGRDIADTTDAVRDPQTLEILDITPCSFGGVSVITPGTNTSNQVAVLYQGVNCTEVPVAIHADQLTPTWRVYSTGSNVFQTRAGCLIGAEHVNNSYECDIPIGAGICASYQTQTNSPRRARSVASQSIIAYTMSLGAENSVAYSNNSIAIPTNFTISVTTEILPVSMTKTSVDCTMYICGDSTECSNLLLQYGSFCTQLNRALTGIAVEQDKNTQEVFAQVKQIYKTPPIKDFGGFNFSQILPDPSKPSKRSFIEDLLFNKVTLADAGFIKQYGDCLGDIAARDLICVQKFNGLTVLPPLLTDEMIAQYTSALLAGTITSGWTFGAGAALQIPFAMQMAYRFNGIGVTQNVLYENQKLIANQFNSAIGKIQDSLSSTASALGKLQDVVNQNAQALNTLVKQLSSNFGAISSVLNDILSRLDPPEAEVQIDRLITGRLQSLQTYVTQQLIRAAEIRASANLAATKMSECVLGQSKRVDFCGKGYHLMSFPQSAPHGVVFLHVTYVPAQEKNFTTAPAICHDGKAHFPREGVFVSNGTHWFVTQRNFYEPQIITTDNTFVSGNCDVVIGIVNNTVYDPLQPELDSFKEELDKYFKNHTSPDVDLGDISGINASVVNIQKEIDRLNEVAKNLNESLIDLQELGKYEQYIKWPWYIWLGFIAGLIAIVMVTIMLCCMTSCCSCLKGCCSCGSCCKFDEDDSEPVLKGVKLHYT

SEQ ID NO: 371 - protein, 1273 aa, Artificial Sequence
  SARS-CoV-2/Finland/FIN03032020A/2020__EPI_ISL_413602 spike protein (1-1273)(K986P_V987P)
MFVFLVLLPLVSSQCVNLTTRTQLPPAYTNSFTRGVYYPDKVFRSSVLHSTQDLFLPFFSNVTWFHAIHVSGTNGTKRFDNPVLPFNDGVYFASTEKSNIIRGWIFGTTLDSKTQSLLIVNNATNVVIKVCEFQFCNDPFLGVYYHKNNKSWMESEFRVYSSANNCTFEYVSQPFLMDLEGKQGNFKNLREFVFKNIDGYFKIYSKHTPINLVRDLPQGFSALEPLVDLPIGINITRFQTLLALHRSYLTPGDSSSGWTAGAAAYYVGYLQPRTFLLKYNENGTITDAVDCALDPLSETKCTLKSFTVEKGIYQTSNFRVQPTESIVRFPNITNLCPFGEVFNATRFASVYAWNRKRISNCVADYSVLYNSASFSTFKCYGVSPTKLNDLCFTNVYADSFVIRGDEVRQIAPGQTGKIADYNYKLPDDFTGCVISWNSNNLDSKVGGNYNYLYRLFRKSNLKPFERDISTEIYQAGSTPCNGVEGFNCYFPLQSYGFQPTNGVGYQPYRVVVLSFELLHAPATVCGPKKSTNLVKNKCVNFNFNGLTGTGVLTESNKKFLPFQQFGRDIADTTDAVRDPQTLEILDITPCSFGGVSVITPGTNTSNQVAVLYQGVNCTEVPVAIHADQLTPTWRVYSTGSNVFQTRAGCLIGAEHVNNSYECDIPIGAGICASYQTQTNSPRRARSVASQSIIAYTMSLGAENSVAYSNNSIAIPTNFTISVTTEILPVSMTKTSVDCTMYICGDSTECSNLLLQYGSFCTQLNRALTGIAVEQDKNTQEVFAQVKQIYKTPPIKDFGGFNFSQILPDPSKPSKRSFIEDLLFNKVTLADAGFIKQYGDCLGDIAARDLICAQKFNGLTVLPPLLTDEMIAQYTSALLAGTITSGWTFGAGAALQIPFAMQMAYRFNGIGVTQNVLYENQKLIANQFNSAIGKIQDSLSSTASALGKLQDVVNQNAQALNTLVKQLSSNFGAISSVLNDILSRLDPPEAEVQIDRLITGRLQSLQTYVTQQLIRAAEIRASANLAATKMSECVLGQSKRVDFCGKGYHLMSFPQSAPHGVVFLHVTYVPAQEKNFTTAPAICHDGKAHFPREGVFVSNGTHWFVTQRNFYEPQIITTDNTFVSGNCDVVIGIVNNTVYDPLQPELDSFKEELDKYFKNHTSPDVDLGDISGINASVVNIQKEIDRLNEVAKNLNESLIDLQELGKYEQYIKWPWYIWLGFIAGLIAIVMVTIMLCCMTSCCSCLKGCCSCGSCCKFDEDDSEPVLKGVKLHYT

SEQ ID NO: 372 - protein, 1273 aa, Artificial Sequence
  SARS-CoV-2/France/GE1977/2020__EPI_ISL_414632 spike protein (1-1273)(K986P_V987P)
MFVFLVLLPLVSSQCVNLTTRTQLPPAYTNSFTRGVYYPDKVFRSSVLHSTQDLFLPFFSNVTWFHAIHVSGTNGTKRFDNPVLPFNDGVYFASTEKSNIIRGWIFGTTLDSKTQSLLIVNNATNVVIKVCEFQFCNDPFLGVYYHKNNKSWMESEFRVYSSANNCTFEYVSQPFLMDLEGKQGNFKNLREFVFKNIDGYFKIYSKHTPINLVRDLPQGFSALEPLVDLPIGINITRFQTLLALHRSYLTPGDSSSGWTAGAAAYYVGYLQPRTFLLKYNENGTITDAVDCALDPLSETKCTLKSFTVEKGIYQTSNFRVQPTESIVRFPNITNLCPFGEVFNATRFASVYAWNRKRISNCVADYSVLYNSASFSTFKCYGVSPTKLNDLCFTNVYADSFVIRGDEVRQIAPGQTGKIADYNYKLPDDFTGCVIAWNSNNLDSKVGGNYNYLYRLFRKSNLKPFERDISTEIYQAGSTPCNGVEGFNCYFPLQSYGFQPTNGVGYQPYRVVVLSFELLHAPATVCGPKKSTNLVKNKCVNFNFNGLTGTGVLTESNKKFLPFQQFGRDIADTTDAVRDPQTLEILDITPCSFGGVSVITPGTNTSNQVAVLYQGVNCTEVPVAIHADQLTPTWRVYSTGSNVFQTRAGCLIGAEHVNNSYECDIPIGAGICASYQTQTNSPRRARSVASQSIIAYTMSLGAENSVAYSNNSIAIPTNFTISVTTEILPVSMTKTSVDCTMYICGDSTECSNLLLQYGSFCTQLNRALTGIAVEQDKNTQEVFAQVKQIYKTPPIKDFGGFNFSQILPDPSKPSKRSFIEDLLFNKVTLADAGFIKQYGDCLGDIAARDLICAQKFNGLTVLPPLLTDEMIAQYTSALLAGTITSGWTFGAGAALQIPFAMQMAYRFNGIGVTQNVLYENQKLIANQFNSAIGKIQDSLFSTASALGKLQDVVNQNAQALNTLVKQLSSNFGAISSVLNDILSRLDPPEAEVQIDRLITGRLQSLQTYVTQQLIRAAEIRASANLAATKMSECVLGQSKRVDFCGKGYHLMSFPQSAPHGVVFLHVTYVPAQEKNFTTAPAICHDGKAHFPREGVFVSNGTHWFVTQRNFYEPQIITTDNTFVSGNCDVVIGIVNNTVYDPLQPELDSFKEELDKYFKNHTSPDVDLGDISGINASVVNIQKEIDRLNEVAKNLNESLIDLQELGKYEQYIKWPWYIWLGFIAGLIAIVMVTIMLCCMTSCCSCLKGCCSCGSCCKFDEDDSEPVLKGVKLHYT

SEQ ID NO: 373 - protein, 1273 aa, Artificial Sequence
  SARS-CoV-2/Finland/FIN-313/2020__EPI_ISL_414641 spike protein (1-1273)(K986P_V987P)
MFVFLVLLPLVSSQCVNLTTRTQLPPAYTNSFTRGVYYPDKVFRSSVLHSTQDLFLPFFSNVTWFHAIHVSGTNGTKRFDNPVLPFNDGVYFASTEKSNIIRGWIFGTTLDSKTQSLLIVNNATNVVIKVCEFQFCNDPFLGVYYHKNNKSWMESEFRVYSSANNCTFEYVSQPFLMDLEGKQGNFKNLREFVFKNIDGYFKIYSKHTPINLVRDLPQGFSALEPLVDLPIGINITRFKTLLALHRSYLTPGDSSSGWTAGAAAYYVGYLQPRTFLLKYNENGTITDAVDCALDPLSETKCTLKSFTVEKGIYQTSNFRVQPTESIVRFPNITNLCPFGEVFNATRFASVYAWNRKRISNCVADYSVLYNSASFSTFKCYGVSPTKLNDLCFTNVYADSFVIRGDEVRQIAPGQTGKIADYNYKLPDDFTGCVIAWNSNNLDSKVGGNYNYLYRLFRKSNLKPFERDISTEIYQAGSTPCNGVEGFNCYFPLQSYGFQPTNGVGYQPYRVVVLSFELLHAPATVCGPKKSTNLVKNKCVNFNFNGLTGTGVLTESNKKFLPFQQFGRDIADTTDAVRDPQTLEILDITPCSFGGVSVITPGTNTSNQVAVLYQGVNCTEVPVAIHADQLTPTWRVYSTGSNVFQTRAGCLIGAEHVNNSYECDIPIGAGICASYQTQTNSPRRARSVASQSIIAYTMSLGAENSVAYSNNSIAIPTNFTISVTTEILPVSMTKTSVDCTMYICGDSTECSNLLLQYGSFCTQLNRALTGIAVEQDKNTQEVFAQVKQIYKTPPIKDFGGFNFSQILPDPSKPSKRSFIEDLLFNKVTLADAGFIKQYGDCLGDIAARDLICAQKFNGLTVLPPLLTDEMIAQYTSALLAGTITSGWTFGAGAALQIPFAMQMAYRFNGIGVTQNVLYENQKLIANQFNSAIGKIQDSLSSTASALGKLQDVVNQNAQALNTLVKQLSSNFGAISSVLNDILSRLDPPEAEVQIDRLITGRLQSLQTYVTQQLIRAAEIRASANLAATKMSECVLGQSKRVDFCGKGYHLMSFPQSAPHGVVFLHVTYVPAQEKNFTTAPAICHDGKAHFPREGVFVSNGTHWFVTQRNFYEPQIITTDNTFVSGNCDVVIGIVNNTVYDPLQPELDSFKEELDKYFKNHTSPDVDLGDISGINASVVNIQKEIDRLNEVAKNLNESLIDLQELGKYEQYIKWPWYIWLGFIAGLIAIVMVTIMLCCMTSCCSCLKGCCSCGSCCKFDEDDSEPVLKGVKLHYT

SEQ ID NO: 374 - protein, 1273 aa, Artificial Sequence
  SARS-CoV-2/Netherlands/ZuidHolland_2/2020__EPI_ISL_414556 spike protein (1-1273)(K986P_V987P)
MFVFLVLLPLVSSQCVNLTTRTQLPPAYTNSFTRGVYYPDKVFRSSVLHSTQDLFLPFFSNVTWFHAIHVSGTNGTKRFDNPVLPFNDGVYFASTEKSNIIRGWIFGTTLDSKTQSLLIVNNATNVVIKVCEFQFCNDPFLGVYYHKNNKSWMESEFRVYSSANNCTFEYVSQPFLMDLEGKQGNFKNLREFVFKNIDGYFKIYSKHTPINLVRDLPQGFSALEPLVDLPIGINITRFQTLLALHRSYLTPGDSSSGWTAGAAAYYVGYLQPRTFLLKYNENGTITDAVDCALDPLSETKCTLKSFTVEKGIYQTSNFRVQPTESIVRFPNITNLCPFGEVFNATRFASVYAWNRKRISNCVADYSVLYNSASFSTFKCYGVSPTKLNDLCFTNVYADSFVIRGDEVRQIAPGQTGKIADYNYKLPDDFTGCVIAWNSNNLDSKVGGNYNYLYRLFRKSNLKPFERDISTEIYQAGSTPCNGVEGFNCYFPLQSYGFQPTNGVGYQPYRVVVLSFELLHAPATVCGPKKSTNLVKNKCVNFNFNGLTGTGVLTESNKKFLPFQQFGRDIADTTDAVRDPQTLEILDITPCSFGGVSVITPGTNTSNQVAVLYQGVNCTEVPVAIHADQLTPTWRVYSTGSNVFQTRAGCLIGAEHVNNSYECDIPIGAGICASYQTQTNSPRRARSVASQSIIAYTMSLGAENSVAYSNNSIAIPTNFTISVTTEILPVSMTKTSVDCTMYICGDSTECSNLLLQYGSFCTQLNRALTGIALEQDKNTQEVFAQVKQIYKTPPIKDFGGFNFSQILPDPSKPSKRSFIEDLLFNKVTLADAGFIKQYGDCLGDIAARDLICAQKFNGLTVLPPLLTDEMIAQYTSALLAGTITSGWTFGAGAALQIPFAMQMAYRFNGIGVTQNVLYENQKLIANQFNSAIGKIQDSLSSTASALGKLQDVVNQNAQALNTLVKQLSSNFGAISSVLNDILSRLDPPEAEVQIDRLITGRLQSLQTYVTQQLIRAAEIRASANLAATKMSECVLGQSKRVDFCGKGYHLMSFPQSAPHGVVFLHVTYVPAQEKNFTTAPAICHDGKAHFPREGVFVSNGTHWFVTQRNFYEPQIITTDNTFVSGNCDVVIGIVNNTVYDPLQPELDSFKEELDKYFKNHTSPDVDLGDISGINASVVNIQKEIDRLNEVAKNLNESLIDLQELGKYEQYIKWPWYIWLGFIAGLIAIVMVTIMLCCMTSCCSCLKGCCSCGSCCKFDEDDSEPVLKGVKLHYT

SEQ ID NO: 375 - protein, 1273 aa, Artificial Sequence
  SARS-CoV-2/USA/WA-UW31/2020__EPI_ISL_414618 spike protein (1-1273)(K986P_V987P)
MFVFLVLLPLVSSQCVNLTTRTQLPPAYTNSFTRGVYYPDKVFRSSVLHSTQDLFLPFFSNVTWFHAIHVSGTNGTKRFDNPVLPFNDGVYFASTEKSNIIRGWIFGTTLDSKTQSLLIVNNATNVVIKVCEFQFCNDPFLGVYYHKNNKSWMESEFRVYSSANNCTFEYVSQPFLMDLEGKQGNFKNLREFVFKNIDGYFKIYSKHTPINLVRDLPQGFSALEPLVDLPIGINITRFQTLLALHRSYLTPGDSSSGWTAGAAAYYVGYLQPRTFLLKYNENGTITDAVDCALDPLSETKCTLKSFTVEKGIYQTSNFRVQPTESIVRFPNITNLCPFGEVFNATRFASVYAWNRKRISNCVADYSVLYNSASFSTFKCYGVSPTKLNDLCFTNVYADSFVIRGDEVRQIAPGQTGKIADYNYKLPDDFTGCVIAWNSNNLDSKVGGNYNYLYRLFRKSNLKPFERDISTEIYQAGSTPCNGAEGFNCYFPLQSYGFQPTNGVGYQPYRVVVLSFELLHAPATVCGPKKSTNLVKNKCVNFNFNGLTGTGVLTESNKKFLPFQQFGRDIADTTDAVRDPQTLEILDITPCSFGGVSVITPGTNTSNQVAVLYQDVNCTEVPVAIHADQLTPTWRVYSTGSNVFQTRAGCLIGAEHVNNSYECDIPIGAGICASYQTQTNSPRRARSVASQSIIAYTMSLGAENSVAYSNNSIAIPTNFTISVTTEILPVSMTKTSVDCTMYICGDSTECSNLLLQYGSFCTQLNRALTGIAVEQDKNTQEVFAQVKQIYKTPPIKDFGGFNFSQILPDPSKPSKRSFIEDLLFNKVTLADAGFIKQYGDCLGDIAARDLICAQKFNGLTVLPPLLTDEMIAQYTSALLAGTITSGWTFGAGAALQIPFAMQMAYRFNGIGVTQNVLYENQKLIANQFNSAIGKIQDSLSSTASALGKLQDVVNQNAQALNTLVKQLSSNFGAISSVLNDILSRLDPPEAEVQIDRLITGRLQSLQTYVTQQLIRAAEIRASANLAATKMSECVLGQSKRVDFCGKGYHLMSFPQSAPHGVVFLHVTYVPAQEKNFTTAPAICHDGKAHFPREGVFVSNGTHWFVTQRNFYEPQIITTDNTFVSGNCDVVIGIVNNTVYDPLQPELDSFKEELDKYFKNHTSPDVDLGDISGINASVVNIQKEIDRLNEVAKNLNESLIDLQELGKYEQYIKWPWYIWLGFIAGLIAIVMVTIMLCCMTSCCSCLKGCCSCGSCCKFDEDDSEPVLKGVKLHYT

SEQ ID NO: 376 - protein, 1273 aa, Artificial Sequence
  SARS-CoV-2/South Korea/SNU01/2020__EPI_ISL_411929 spike protein (1-1273)(K986P_V987P)
MFVFLVLLPLVSSQCVNLTTRTQLPPAYTNSFTRGVYYPDKVFRSSVLHSTQDLFLPFFSNVTWFHAIHVSGTNGTKRFDNPVLPFNDGVYFASTEKSNIIRGWIFGTTLDSKTQSLLIVNNATNVVIKVCEFQFCNDPFLGVYYHKNNKSWMESEFRVYSSANNCTFEYVSQPFLMDLEGKQGNFKNLREFVFKNIDGYFKIYSKHTPINLVRDLPQGFWALEPLVDLPIGINITRFQTLLALHRSYLTPGDSSSGWTAGAAAYYVGYLQPRTFLLKYNENGTITDAVDCALDPLSETKCTLKSFTVEKGIYQTSNFRVQPTESIVRFPNITNLCPFGEVFNATRFASVYAWNRKRISNCVADYSVLYNSASFSTFKCYGVSPTKLNDLCFTNVYADSFVIRGDEVRQIAPGQTGKIADYNYKLPDDFTGCVIAWNSNNLDSKVGGNYNYLYRLFRKSNLKPFERDISTEIYQAGSTPCNGVEGFNCYFPLQSYGFQPTNGVGYQPYRVVVLSFELLHAPATVCGPKKSTNLVKNKCVNFNFNGLTGTGVLTESNKKFLPFQQFGRDIADTTDAVRDPQTLEILDITPCSFGGVSVITPGTNTSNQVAVLYQDVNCTEVPVAIHADQLTPTWRVYSTGSNVFQTRAGCLIGAEHVNNSYECDIPIGAGICASYQTQTNSPRRARSVASQSIIAYTMSLGAENSVAYSNNSIAIPTNFTISVTTEILPVSMTKTSVDCTMYICGDSTECSNLLLQYGSFCTQLNRALTGIAVEQDKNTQEVFAQVKQIYKTPPIKDFGGFNFSQILPDPSKPSKRSFIEDLLFNKVTLADAGFIKQYGDCLGDIAARDLICAQKFNGLTVLPPLLTDEMIAQYTSALLAGTITSGWTFGAGAALQIPFAMQMAYRFNGIGVTQNVLYENQKLIANQFNSAIGKIQDSLSSTASALGKLQDVVNQNAQALNTLVKQLSSNFGAISSVLNDILSRLDPPEAEVQIDRLITGRLQSLQTYVTQQLIRAAEIRASANLAATKMSECVLGQSKRVDFCGKGYHLMSFPQSAPHGVVFLHVTYVPAQEKNFTTAPAICHDGKAHFPREGVFVSNGTHWFVTQRNFYEPQIITTDNTFVSGNCDVVIGIVNNTVYDPLQPELDSFKEELDKYFKNHTSPDVDLGDISGINASVVNIQKEIDRLNEVAKNLNESLIDLQELGKYEQYIKWPWYIWLGFIAGLIAIVMVTIMLCCMTSCCSCLKGCCSCGSCCKFDEDDSEPVLKGVKLHYT

SEQ ID NO: 377 - protein, 1273 aa, Artificial Sequence
  SARS-CoV-2/China/WF0004/2020__EPI_ISL_413694 spike protein (1-1273)(K986P_V987P)
MFVFLVLLPLVSSQCVNLTTRTQLPPAYTNSFTRGVYYPDKVFRSSVLHSTQDLFLPFFSNVTWFHAIHVSGTNGTKRFDNPVLPFNDGVYFASTEKSNIIRGWIFGTTLDSKTQSLLIVNNATNVVIKVCEFQFCNDPFLGVYYHKNNKSWTESEFRVYSSANNCTFEYVSQPFLMDLEGKQGNFKNLREFVFKNIDGYFKIYSKHTPINLVRDLPQGFSALEPLVDLPIGINITRFQTLLALHRSYLTPGDSSSGWTAGAAAYYVGYLQPRTFLLKYNENGTITDAVDCALDPLSETKCTLKSFTVEKGIYQTSNFRVQPTESIVRFPNITNLCPFGEVFNATRFASVYAWNRKRISNCVADYSVLYNSASFSTFKCYGVSPTKLNDLCFTNVYADSFVIRGDEVRQIAPGQTGKIADYNYKLPDDFTGCVIAWNSNNLDSKVGGNYNYLYRLFRKSNLKPFERDISTEIYQAGSTPCNGVEGFNCYFPLQSYGFQPTNGVGYQPYRVVVLSFELLHAPATVCGPKKSTNLVKNKCVNFNFNGLTGTGVLTESNKKFLPFQQFGRDIADTTDAVRDPQTLEILDITPCSFGGVSVITPGTNTSNQVAVLYQDVNCTEVPVAIHADQLTPTWRVYSTGSNVFQTRAGCLIGAEHVNNSYECDIPIGAGICASYQTQTNSPRRARSVASQSIIAYTMSLGAENSVAYSNNSIAIPTNFTISVTTEILPVSMTKTSVDCTMYICGDSTECSNLLLQYGSFCTQLNRALTGIAVEQDKNTQEVFAQVKQIYKTPPIKDFGGFNFSQILPDPSKPSKRSFIEDLLFNKVTLADAGFIKQYGDCLGDIAARDLICAQKFNGLTVLPPLLTDEMIAQYTSALLAGTITSGWTFGAGAALQIPFAMQMAYRFNGIGVTQNVLYENQKLIANQFNSAIGKIQDSLSSTASALGKLQDVVNQNAQALNTLVKQLSSNFGAISSVLNDILSRLDPPEAEVQIDRLITGRLQSLQTYVTQQLIRAAEIRASANLAATKMSECVLGQSKRFDFCGKGYHLMSFPQSAPHGVVFLHVTYVPAQEKNFTTAPAICHDGKAHFPREGVFVSNGTHWFVTQRNFYEPQIITTDNTFVSGNCDVVIGIVNNTVYDPLQPELDSFKEELDKYFKNHTSPDVDLGDISGINASVVNIQKEIDRLNEVAKNLNESLIDLQELGKYEQYIKWPWYIWLGFIAGLIAIVMVTIMLCCMTSCCSCLKGCCSCGSCCKFDEDDSEPVLKGVKLHYT

SEQ ID NO: 378 - protein, 1273 aa, Artificial Sequence
  SARS-CoV-2/China/WF0028/2020__EPI_ISL_413791 spike protein (1-1273)(K986P_V987P)
MFVFLVLLPLVSSQCVNLTTRTQLPPAYTNSFTRGVYYPDKVFRSSVLHSTQDLFLPFFSNVTWFHAIHVSGTNGTKRFDNPVLPFNDGVYFASTEKSNIIRGWIFGTTLDSKTQSLLIVNNATNVVIKVCEFQFCNDPFLGVYYHKNNKSWMESEFRVYSSANNCTFEYVSQPFLMDLEGKQGNFKNLREFVFKNIDGYFKIYSKHTPINLVRDLPQGFSALEPLVDLPIGINITRFQTLLALHRSYLTPGDSSSGWTAGAAAYYVGYLQPRTFLLKYNENGTITDAVDCALDPLSETKCTLKSFTVEKGIYQTSNFRVQPTESIVRFPNITNLCPFGEVFNATRFASVYAWNRKRISNCVADYSVLYNSASFSTFKCYGVSPTKLNDLCFTNVYADSFVIRGDEVRQIAPGQTGKIADYNYKLPDDFTGCVIAWNSNNLDSKVGGNYNYLYRLFRKSNLKPFERDISTEIYQAGSTPCNGVEGFNCYFPLQSYGFQPTNGVGYQPYRVVVLSFELLHAPATVCGPKKSTNLVKNKCVNFNFNGLTGTGVLTESNKKFLPFQQFGRDIADTTDAVRDPQTLEILDITPCSFGGVSVITPGTNTSNQVAVLYQDVNCTEVPVAIHADQLTPTWRVYSTGSNVFQTRAGCLIGAEHVNNSYECDIPIGAGICASYQTQTNSPRRARSVASQSIIAYTMSLGAENSVAYSNNSIAIPTNFTISVTTEILPVSMTKTSVDCTMYICGDSTECSNLLLQYGSFCTQLNRALTGIAVEQDKNTQEVFAQVKQIYKTPPIKDFGGFNFSQILPDPSKPSKRSFIEDLLFNKVTLADAGFIKQYGDCLGDIAARDLICAQKFNGLTVLPPLLTDEMIAQYTSALLAGTITSGWTFGAGAALQIPFAMQMAYRFNGIGVTQNVLYENQKLIANQFNSAIGKIQDSLSSTASALGKLQDVVNQNAQALNTLVKQLSSNFGAISSVLNDILSRLDPPEAEVQIDRLITGRLQSLQTYVTQQLIRAAEIRASANLAATKMSECVLGQSKRVDFCGKGYHLMSFPQSAPHGVVFLHVTYVPAQEKNFTTAPAICHDGKAHFPREGVFVSNGTHWFVTQRNFYEPQIITTDNTFVSGNCDVVIGIVNNTVYDPLQPELESFKEELDKYFKNHTSPDVDLGDISGINASVVNIQKEIDRLNEVAKNLNESLIDLQELGKYEQYIKWPWYIWLGFIAGLIAIVMVTIMLCCMTSCCSCLKGCCSCGSCCKFDEDDSEPVLKGVKLHYT

SEQ ID NO: 379 - protein, 1273 aa, Artificial Sequence
  SARS-CoV-2/2019-nCoV/USA-CruiseA-18/2020__MT159716.1 spike protein (1-1273)(K986P_V987P)
MFVFLVLLPLVSSQCVNLTTRTQLPPAYTNSFTRGVYYPDKVFRSSVLHSTQDLFLPFFSNVTWFHAIHVSGTNGTKRFDNPVLPFNDGVYFASTEKSNIIRGWIFGTTLDSKTQSLLIVNNATNVVIKVCEFQFCNDPFLGVYYHKNNKSWMESELRVYSSANNCTFEYVSQPFLMDLEGKQGNFKNLREFVFKNIDGYFKIYSKHTPINLVRDLPQGFSALEPLVDLPIGINITRFQTLLALHRSYLTPGDSSSGWTAGAAAYYVGYLQPRTFLLKYNENGTITDAVDCALDPLSETKCTLKSFTVEKGIYQTSNFRVQPTESIVRFPNITNLCPFGEVFNATRFASVYAWNRKRISNCVADYSVLYNSASFSTFKCYGVSPTKLNDLCFTNVYADSFVIRGDEVRQIAPGQTGKIADYNYKLPDDFTGCVIAWNSNNLDSKVGGNYNYLYRLFRKSNLKPFERDISTEIYQAGSTPCNGVEGFNCYFPLQSYGFQPTNGVGYQPYRVVVLSFELLHAPATVCGPKKSTNLVKNKCVNFNFNGLTGTGVLTESNKKFLPFQQFGRDIADTTDAVRDPQTLEILDITPCSFGGVSVITPGTNTSNQVAVLYQDVNCTEVPVAIHADQLTPTWRVYSTGSNVFQTRAGCLIGAEHVNNSYECDIPIGAGICASYQTQTNSPRRARSVASQSIIAYTMSLGAENSVAYSNNSIAIPTNFTISVTTEILPVSMTKTSVDCTMYICGDSTECSNLLLQYGSFCTQLNRALTGIAVEQDKNTQEVFAQVKQIYKTPPIKDFGGFNFSQILPDPSKPSKRSFIEDLLFNKVTLADAGFIKQYGDCLGDIAARDLICAQKFNGLTVLPPLLTDEMIAQYTSALLAGTITSGWTFGAGAALQIPFAMQMAYRFNGIGVTQNVLYENQKLIANQFNSAIGKIQDSLSSTASALGKLQDVVNQNAQALNTLVKQLSSNFGAISSVLNDILSRLDPPEAEVQIDRLITGRLQSLQTYVTQQLIRAAEIRASANLAATKMSECVLGQSKRVDFCGKGYHLMSFPQSAPHGVVFLHVTYVPAQEKNFTTAPAICHDGKAHFPREGVFVSNGTHWFVTQRNFYEPQIITTDNTFVSGNCDVVIGIVNNTVYDPLQPELDSFKEELDKYFKNHTSPDVDLGDISGINASVVNIQKEIDRLNEVAKNLNESLIDLQELGKYEQYIKWPWYIWLGFIAGLIAIVMVTIMLCCMTSCCSCLKGCCSCGSCCKFDEDDSEPVLKGVKLHYT

SEQ ID NO: 380 - protein, 1273 aa, Artificial Sequence
  SARS-CoV-2/SARS-CoV-2/Yunnan-01/human/2020/CHN__MT049951.1 spike protein (1-1273)(K986P_V987P)
MFVFLVLLPLVSSQCVNLTTRTQLPPANTNSFTRGVYYPDKVFRSSVLHSTQDLFLPFFSNVTWFHAIHVSGTNGTKRFDNPVLPFNDGVYFASTEKSNIIRGWIFGTTLDSKTQSLLIVNNATNVVIKVCEFQFCNDPFLGVYYHKNNKSWMESEFRVYSSANNCTFEYVSQPFLMDLEGKQGNFKNLREFVFKNIDGYFKIYSKHTPINLVRDLPQGFSALEPLVDLPIGINITRFQTLLALHRSYLTPGDSSSGWTAGAAAYYVGYLQPRTFLLKYNENGTITDAVDCALDPLSETKCTLKSFTVEKGIYQTSNFRVQPTESIVRFPNITNLCPFGEVFNATRFASVYAWNRKRISNCVADYSVLYNSASFSTFKCYGVSPTKLNDLCFTNVYADSFVIRGDEVRQIAPGQTGKIADYNYKLPDDFTGCVIAWNSNNLDSKVGGNYNYLYRLFRKSNLKPFERDISTEIYQAGSTPCNGVEGFNCYFPLQSYGFQPTNGVGYQPYRVVVLSFELLHAPATVCGPKKSTNLVKNKCVNFNFNGLTGTGVLTESNKKFLPFQQFGRDIADTTDAVRDPQTLEILDITPCSFGGVSVITPGTNTSNQVAVLYQDVNCTEVPVAIHADQLTPTWRVYSTGSNVFQTRAGCLIGAEHVNNSYECDIPIGAGICASYQTQTNSPRRARSVASQSIIAYTMSLGAENSVAYSNNSIAIPTNFTISVTTEILPVSMTKTSVDCTMYICGDSTECSNLLLQYGSFCTQLNRALTGIAVEQDKNTQEVFAQVKQIYKTPPIKDFGGFNFSQILPDPSKPSKRSFIEDLLFNKVTLADAGFIKQYGDCLGDIAARDLICAQKFNGLTVLPPLLTDEMIAQYTSALLAGTITSGWTFGAGAALQIPFAMQMAYRFNGIGVTQNVLYENQKLIANQFNSAIGKIQDSLSSTASALGKLQDVVNQNAQALNTLVKQLSSNFGAISSVLNDILSRLDPPEAEVQIDRLITGRLQSLQTYVTQQLIRAAEIRASANLAATKMSECVLGQSKRVDFCGKGYHLMSFPQSAPHGVVFLHVTYVPAQEKNFTTAPAICHDGKAHFPREGVFVSNGTHWFVTQRNFYEPQIITTDNTFVSGNCDVVIGIVNNTVYDPLQPELDSFKEELDKYFKNHTSPDVDLGDISGINASVVNIQKEIDRLNEVAKNLNESLIDLQELGKYEQYIKWPWYIWLGFIAGLIAIVMVTIMLCCMTSCCSCLKGCCSCGSCCKFDEDDSEPVLKGVKLHYT

SEQ ID NO: 381 - protein, 1273 aa, Artificial Sequence
  SARS-CoV-2/USA/WA-UW292/2020__EPI_ISL_418077 spike protein (1-1273)(K986P_V987P)
MFVFLVLLPLVSSQCVNLTTRTQLPPAYTNSFTRGVYYPDKVFRSSVLHSTQDLFLPFFSNVTWFHAIHVSGTNGTKRFDNPVLPFNDGVYFASTEKSNIIRGWIFGTTLDSKTQSLLIVNNATNVVIKVCEFQFCNDPFLGVYYHKNNKSWMESEFRVYSSANNCTFEYVSQPFLMDLEGKQGNFKNLREFVFKNIDGYFKIYSKHTPINLVRDLPQGFSALEPLVDLPIGINITRFQTLLALHRSYLTPGDSSSGWTAGAAAYYVGYLQPRTFLLKYNENGTITDAVDCALDPLSETKCTLKSFTVEKGIYQTSNFRVQPTESIVRFPNITNLCPFGEVFNATRFASVYAWNRKRISNCVADYSVLYNSASFSTFKCYGVSPTKLNDLCFTNVYADSFVIRGDEVRQIAPGQTGKIADYNYKLPDDFTGCVIAWNSNNLDSKVGGNYNYLYRLFRKSNLKPFERDISTEIYQASSTPCNGVEGFNCYFPLQSYGFQPTNGVGYQPYRVVVLSFELLHAPATVCGPKKSTNLVKNKCVNFNFNGLTGTGVLTESNKKFLPFQQFGRDIADTTDAVRDPQTLEILDITPCSFGGVSVITPGTNTSNQVAVLYQDVNCTEVPVAIHADQLTPTWRVYSTGSNVFQTRAGCLIGAEHVNNSYECDIPIGAGICASYQTQTNSPRRARSVASQSIIAYTMSLGAENSVAYSNNSIAIPTNFTISVTTEILPVSMTKTSVDCTMYICGDSTECSNLLLQYGSFCTQLNRALTGIAVEQDKNTQEVFAQVKQIYKTPPIKDFGGFNFSQILPDPSKPSKRSFIEDLLFNKVTLADAGFIKQYGDCLGDIAARDLICAQKFNGLTVLPPLLTDEMIAQYTSALLAGTITSGWTFGAGAALQIPFAMQMAYRFNGIGVTQNVLYENQKLIANQFNSAIGKIQDSLSSTASALGKLQDVVNQNAQALNTLVKQLSSNFGAISSVLNDILSRLDPPEAEVQIDRLITGRLQSLQTYVTQQLIRAAEIRASANLAATKMSECVLGQSKRVDFCGKGYHLMSFPQSAPHGVVFLHVTYVPAQEKNFTTAPAICHDGKAHFPREGVFVSNGTHWFVTQRNFYEPQIITTDNTFVSGNCDVVIGIVNNTVYDPLQPELDSFKEELDKYFKNHTSPDVDLGDISGINASVVNIQKEIDRLNEVAKNLNESLIDLQELGKYEQYIKWPWYIWLGFIAGLIAIVMVTIMLCCMTSCCSCLKGCCSCGSCCKFDEDDSEPVLKGVKLHYT

SEQ ID NO: 382 - protein, 1273 aa, Artificial Sequence
  SARS-CoV-2/Iceland/192/2020__EPI_ISL_417819 spike protein (1-1273)(K986P_V987P)
MFVFFVLLPLVSSQCVNLTTRTQLPPAYTNSFTRGVYYPDKVFRSSVLHSTQDLFLPFFSNVTWFHAIHVSGTNGTKRFDNPVLPFNDGVYFASTEKSNIIRGWIFGTTLDSKTQSLLIVNNATNVVIKVCEFQFCNDPFLGVYYHKNNKSWMESEFRVYSSANNCTFEYVSQPFLMDLEGKQGNFKNLREFVFKNIDGYFKIYSKHTPINLVRDLPQGFSALEPLVDLPIGINITRFQTLLALHRSYLTPGDSSSGWTAGAAAYYVGYLQPRTFLLKYNENGTITDAVDCALDPLSETKCTLKSFTVEKGIYQTSNFRVQPTESIVRFPNITNLCPFGEVFNATRFASVYAWNRKRISNCVADYSVLYNSASFSTFKCYGVSPTKLNDLCFTNVYADSFVIRGDEVRQIAPGQTGKIADYNYKLPDDFTGCVIAWNSNNLDSKVGGNYNYLYRLFRKSNLKPFERDISTEIYQAGSTPCNGVEGFNCYFPLQSYGFQPTNGVGYQPYRVVVLSFELLHAPATVCGPKKSTNLVKNKCVNFNFNGLTGTGVLTESNKKFLPFQQFGRDIADTTDAVRDPQTLEILDITPCSFGGVSVITPGTNTSNQVAVLYQGVNCTEVPVAIHADQLTPTWRVYSTGSNVFQTRAGCLIGAEHVNNSYECDIPIGAGICASYQTQTNSPRRARSVASQSIIAYTMSLGAENSVAYSNNSIAIPTNFTISVTTEILPVSMTKTSVDCTMYICGDSTECSNLLLQYGSFCTQLNRALTGIAVEQDKNTQEVFAQVKQIYKTPPIKDFGGFNFSQILPDPSKPSKRSFIEDLLFNKVTLADAGFIKQYGDCLGDIAARDLICAQKFNGLTVLPPLLTDEMIAQYTSALLAGTITSGWTFGAGAALQIPFAMQMAYRFNGIGVTQNVLYENQKLIANQFNSAIGKIQDSLSSTASALGKLQDVVNQNAQALNTLVKQLSSNFGAISSVLNDILSRLDPPEAEVQIDRLITGRLQSLQTYVTQQLIRAAEIRASANLAATKMSECVLGQSKRVDFCGKGYHLMSFPQSAPHGVVFLHVTYVPAQEKNFTTAPAICHDGKAHFPREGVFVSNGTHWFVTQRNFYEPQIITTDNTFVSGNCDVVIGIVNNTVYDPLQPELDSFKEELDKYFKNHTSPDVDLGDISGINASVVNIQKEIDRLNEVAKNLNESLIDLQELGKYEQYIKWPWYIWLGFIAGLIAIVMVTIMLCCMTSCCSCLKGCCSCGSCCKFDEDDSEPVLKGVKLHYT

SEQ ID NO: 383 - protein, 1273 aa, Artificial Sequence
  SARS-CoV-2/Belgium/ULG-6939/2020__EPI_ISL_417020 spike protein (1-1273)(K986P_V987P)
MFVFLVLLPLVSSQCVNLTTRTQLPPAYTNSFTRGVYYPDKVFRSSVLHSTQDLFLPFFSNVTWFHAIHVSGTNGTKRFDNPVLPFNDGVYFASTEKSNIIRGWIFGTTLDSKTQSLLIVNNATNVVIKVCEFQFCNDPFLGVYYHKNNKSWMESEFRVYSSANNCTFEYVSQPFLMDLEGKQGNFKNLREFVFKNIDGYFKIYSKHTPINLVRDLPQGFSALEPLVDLPIGINITRFQTLLALHRSYLTPGDSSSGWTAGAAAYYVGYLQPRTFLLKYNENGTITDAVDCALDPLSETKCTLKSFTVEKGIYQTSNFRVQPTESIVRFPNITNLCPFGEVFNATRFASVYAWNRKRISNCVADYSVLYNSASFSTFKCYGVSPTKLNDLCFTNVYADSFVIRGDEVRQIAPGQTGKIADYNYKLPDDFTGCVIAWNSNNLDSKVGGNYNYLYRLFRKSNLKPFERDISTEIYQAGSTPCNGVEGFNCYFPLQSYGFQPTNGVGYQPYRVVVLSFELLHAPATVCGPKKSTNLVKNKCVNFNFNGLTGTGVLTESNKKFLPFQQFGRDIADTTDAVRDPQTLEILDITPCSFGGVSVITPGTNTSNQVAVLYQGVNCTEVPVAIHADQLTPTWRVYSTGSNVFQTRAGCLIGAEHVNNSYECDIPIGAGICASYQTQTNSPRRARSVASQSIIAYTMSLGAENSVVYSNNSIAIPTNFTISVTTEILPVSMTKTSVDCTMYICGDSTECSNLLLQYGSFCTQLNRALTGIAVEQDKNTQEVFAQVKQIYKTPPIKDFGGFNFSQILPDPSKPSKRSFIEDLLFNKVTLADAGFIKQYGDCLGDIAARDLICAQKFNGLTVLPPLLTDEMIAQYTSALLAGTITSGWTFGAGAALQIPFAMQMAYRFNGIGVTQNVLYENQKLIANQFNSAIGKIQDSLSSTASALGKLQDVVNQNAQALNTLVKQLSSNFGAISSVLNDILSRLDPPEAEVQIDRLITGRLQSLQTYVTQQLIRAAEIRASANLAATKMSECVLGQSKRVDFCGKGYHLMSFPQSAPHGVVFLHVTYVPAQEKNFTTAPAICHDGKAHFPREGVFVSNGTHWFVTQRNFYEPQIITTDNTFVSGNCDVVIGIVNNTVYDPLQPELDSFKEELDKYFKNHTSPDVDLGDISGINASVVNIQKEIDRLNEVAKNLNESLIDLQELGKYEQYIKWPWYIWLGFIAGLIAIVMVTIMLCCMTSCCSCLKGCCSCGSCCKFDEDDSEPVLKGVKLHYT

SEQ ID NO: 384 - protein, 1273 aa, Artificial Sequence
  SARS-CoV-2/France/HF2496/2020__EPI_ISL_418231 spike protein (1-1273)(K986P_V987P)
MFVFLVLLPLVSSQCVNLTTRTQLPPAYTNSFTRGVYYPDKVFRSSVLHSTQDLFLPFFSNVTWFHAIHVSGTNGTKRFDNPVLPFNDGVYFASTEKSNIIRGWIFGTTLDSKTQSLLIVNNATNVVIKVCEFQFCNDPFLGVYYHKNNKSWMESEFRVYSSANNCTFEYVSQPFLMDLEGKQGNFKNLREFVFKNIDGYFKIYSKHTPINLVRDLPQGFSALEPLVDLPIGINITRFQTLLALHRSYLTPGDSSSGWTAGAAAYYVGYLQPRTFLLKYNENGTITDAVDCALDPLSETKCTLKSFTVEKGIYQTSNFRVQPTESIVRFPNITNLCPFGEVFNATRFASVYAWNRKRISNCVADYSVLYNSASFSTFKCYGVSPTKLNDLCFTNVYADSFVIRGDEVRQIAPGQTGKIADYNYKLPDDFTGCVIAWNSNNLDSKVGGNYNYLYRLFRKSNLKPFERDISTEIYQAGSTPCNGVEGFNCYFPLQSYGFQPTNGVGYQPYRVVVLSFELLHAPATVCGPKKSTNLVKNKCVNFNFNGLTGTGVLTESNKKFLPFQQFGRDIADTTDAVRDPQTLEILDITPCSFGGVSVITPGTNTSNQVAVLYQGVNCTEVPVAIHADQLTPTWRVYSTGSNVFQTRAGCLIGAEHVNNSYECDIPIGAGICASYQTQTNSPRRARSVASQSIIAYTMSLGAENSVAYSNNSIAIPTNFTISVTTEILPVSMTKTSVDCTMYICGDSTECSNLLLQYGSFCTQLNRALTGIAVEQDKNTQEVFAQVKQIYKTPPIKDFGGFNFSQILPDPSKPSKRSFIEDLLFNKVTLADAGFIKQYGDCLGDIVARDLICAQKFNGLTVLPPLLTDEMIAQYTSALLAGTITSGWTFGAGAALQIPFAMQMAYRFNGIGVTQNVLYENQKLIANQFNSAIGKIQDSLSSTASALGKLQDVVNQNAQALNTLVKQLSSNFGAISSVLNDILSRLDPPEAEVQIDRLITGRLQSLQTYVTQQLIRAAEIRASANLAATKMSECVLGQSKRVDFCGKGYHLMSFPQSAPHGVVFLHVTYVPAQEKNFTTAPAICHDGKAHFPREGVFVSNGTHWFVTQRNFYEPQIITTDNTFVSGNCDVVIGIVNNTVYDPLQPELDSFKEELDKYFKNHTSPDVDLGDISGINASVVNIQKEIDRLNEVAKNLNESLIDLQELGKYEQYIKWPWYIWLGFIAGLIAIVMVTIMLCCMTSCCSCLKGCCSCGSCCKFDEDDSEPVLKGVKLHYT

SEQ ID NO: 385 - protein, 1273 aa, Artificial Sequence
  SARS-CoV-2/USA/WA-UW291/2020__EPI_ISL_418076 spike protein (1-1273)(K986P_V987P)
MFVFLVLLPLVSSQCVNLTTRTQLPPAYTNSFTRGVYYPDKVFRSSVLHSTQDLFLPFFSNVTWFHAIHVSGTNGTKRFDNPVLPFNDGVYFASTEKSNIIRGWIFGTTLDSKTQSLLIVNNATNVVIKVCEFQFCNDPFLGVYYHKNNKSWMESEFRVYSSANNCTFEYVSQPFLMDLEGKQGNFKNLREFVFKNIDGYFKIYSKHTPINLVRDLPQGFSALEPLVDLPIGINITRFQTLLALHRSYLTPGDSSSGWTAGAAAYYVGYLQPRTFLLKYNENGTITDAVDCALDPLSETKCTLKSFTVEKGIYQTSNFRVQPTESIVRFPNITNLCPFGEVFNATRFASVYAWNRKRISNCVADYSVLYNSASFSTFKCYGVSPTKLNDLCFTNVYADSFVIRGDEVRQIAPGQTGKIADYNYKLPDDFTGCVIAWNSNNLDSKVGGNYNYLYRLFRKSNLKPFERDISTEIYQAGSTPCNGVEGFNCYFPLQSYGFQPTNGVGYQPYRVVVLSFELLHAPATVCGPKKSTNLVKNKCVNFNFNGLTGTGVLTESNKKFLPFQQFGRDIADTTDAVRDPQTLEILDITPCSFGGVSVITPGTNTSNQVAVLYQGVNCTEVPVAIHADQLTPTWRVYSTGSNVFQTRAGCLIGAEHVNNSYECDIPIGAGICASYQTQTNSPRRARSVASQSIIAYTMSLGAENSVAYSNNSIAIPTNFTISVTTEILPVSMTKTSVDCTMYICGDSTECSNLLLQYGSFCTQLNRALTGIAVEQDKNTQEVFAQVKQIYKTPPIKDFGGFNFSQILPDPSKPSKRSFIEDLLFNKVTLADAGFIKQYGDCLGDIAARDLICAQKFNGLTVLPPLLTDEMIAQYTSALLAGTITSGWTFGAGAALQIPFAMQMAYRFNGIGVTQNVLYENQKLIANQFNSAIGKIQYSLSSTASALGKLQDVVNQNAQALNTLVKQLSSNFGAISSVLNDILSRLDPPEAEVQIDRLITGRLQSLQTYVTQQLIRAAEIRASANLAATKMSECVLGQSKRVDFCGKGYHLMSFPQSAPHGVVFLHVTYVPAQEKNFTTAPAICHDGKAHFPREGVFVSNGTHWFVTQRNFYEPQIITTDNTFVSGNCDVVIGIVNNTVYDPLQPELDSFKEELDKYFKNHTSPDVDLGDISGINASVVNIQKEIDRLNEVAKNLNESLIDLQELGKYEQYIKWPWYIWLGFIAGLIAIVMVTIMLCCMTSCCSCLKGCCSCGSCCKFDEDDSEPVLKGVKLHYT

SEQ ID NO: 386 - protein, 1273 aa, Artificial Sequence
  SARS-CoV-2/Portugal/PT0034/2020__EPI_ISL_418019 spike protein (1-1273)(K986P_V987P)
MFVFLVLLPLVSSQCVNLTTRTQLPPAYTNSFTRGVYYPDKVFRSSVLHSTQDLFLPFFSNVTWFHAIHVSGTNGTKRFDNPVLPFNDGVYFASTEKSNIIRGWIFGTTLDSKTQSLLIVNNATNVVIKVCEFQFCNDPFLGVYYHKNNKSWMESEFRVYSSANNCTFEYVSQPFLMDLEGKQGNFKNLREFVFKNIDGYFKIYSKHTPINLVRDLPQGFSALEPLVDLPIGINITRFQTLLALHRSYLTPGDSSSGWTAGAAAYYVGYLQPRTFLLKYNENGTITDAVDCALDPLSETKCTLKSFTVEKGIYQTSNFRVQPTESIVRFPNITNLCPFGEVFNATRFASVYAWNRKRISNCVADYSVLYNSASFSTFKCYGVSPTKLNDLCFTNVYADSFVIRGDEVRQIAPGQTGKIADYNYKLPDDFTGCVIAWNSNNLDSKVGGNYNYLYRLFRKSNLKPFERDISTEIYQAGSTPCNGVEGFNCYFPLQSYGFQPTNGVGYQPYRVVVLSFELLHAPATVCGPKKSTNLVKNKCVNFNFNGLTGTGVLTESNKKFLPFQQFGRDIADTTDAVRDPQTLEILDITPCSFGGVSVITPGTNTSNQVAVLYQGVNCTEVPVAIHADQLTPTWRVYSTGSNVFQTRAGCLIGAEHVNNSYECDIPIGAGICASYQTQTNSPRRARSVASQSIIAYTMSLGAENSVAYSNNSIAIPTNFTISVTTEILPVSMTKTSVDCTMYICGDSTECSNLLLQYGSFCTQLNRALTGIAVEQDKNTQEVFAQVKQIYKTPPIKDFGGFNFSQILPDPSKPSKRSFIEDLLFNKVTLADAGFIKQYGDCLGDIAARDLICAQKFNGLTVLPPLLTDEMIAQYTSALLAGTITSGWTFGAGAALQIPFAMQMAYRFNGIGVTQNVLYENQKLIANQFNSAIGKIQDSLSSTASALGKLQDVVNQNAQALNTLVKQLSSNFGAISSVLNDILSRLDPPEAEVQIDRLITGRLQSLQTYVTQQLIRAAEIRASANLAATKMSECVLGQSKRVDFCGKGYHLMSFPQSAPHGVVFLHVTYVPAQEKNFTTAPAICHDGKAHFPREGVFVSNGTHWFVTQRNFYEPQIITTDNTFVSGNCDVVIGIVNNTVYDPLQPELDSFKEELDKYFKNHTSPDVDLGDISGINASVVNIQKEIDRLNEVAKNLNESLIDLQELGKYEQYIKWPWYIWLGFIAGLIAIVMVTIMLCCITSCCSCLKGCCSCGSCCKFDEDDSEPVLKGVKLHYT

SEQ ID NO: 387 - protein, 1273 aa, Artificial Sequence
  SARS-CoV-2/Iceland/202/2020__EPI_ISL_417750 spike protein (1-1273)(K986P_V987P)
MFVFLVLLPLVSSQCVNLTTRTQLPPAYTNSFTRGVYYPDKVFRSSVLHSTQDLFLPFFSNVTWFHAIHVSGTNGTKRFDNPVLPFNDGVYFASTEKSNIIRGWIFGTTLDSKTQSLLIVNNATNVVIKVCEFQFCNDPFLGVYYHKNNKSWMESEFRVYSSANNCTFEYVSQPFLMDLEGKQGNFKNLREFVFKNIDGYFKIYSKHTPINLVRDLPQGFSALEPLVDLPIGINITRFQTLLALHRSYLTPGDSSSGWTAGAAAYYVGYLQPRTFLLKYNENGTITDAVDCALDPLSETKCTLKSFTVEKGIYQTSNFRVQPTESIVRFPNITNLCPFGEVFNATRFASVYAWNRKRISNCVADYSVLYNSASFSTFKCYGVSPTKLNDLCFTNVYADSFVIRGDEVRQIAPGQTGKIADYNYKLPDDFTGCVIAWNSNNLDSKVGGNYNYLYRLFRKSNLKPFERDISTEIYQAGSTPCNGVEGFNCYFPLQSYGFQPTNGVGYQPYRVVVLSFELLHAPATVCGPKKSTNLVKNKCVNFNFNGLTGTGVLTESNKKFLPFQQFGRDIADTTDAVRDPQTLEILDITPCSFGGVSVITPGTNTSNQVAVLYQDVNCTEVPVAIHADQLTPTWRVYSTGSNVFQTRAGCLIGAEHVNNSYECDIPIGAGICASYQTQTNSPRRARSVASQSIIAYTMSLGAENSVAYSNNSIAIPTNFTISVTTEILPVSMTKTSVDCTMYICGDSTECSNLLLQYGSFCTQLNRALTGIAVEQDKNTQEVFAQVKQIYKTPPIKDFGGFNFSQILPDPSKPSKRSFIEDLLFNKVTLADAGFIKQYGDCLGDIAARDLICAQKFNGLTVLPPLLTDEMIAQYTSALLAGTITSGWTFGAGAALQIPFAMQMAYRFNGIGVTQNVLYENQKLIANQFNSAIGKIQDSLSSTASALGKLQDVVNQNAQALNTLVKQLSSNFGAISSVLNDILSRLDPPEAEVQIDRLITGRLQSLQTYVTQQLIRAAEIRASANLAATKMSECVLGQSKRVDFCGKGYHLMSFPQSAPHGVVFLHVTYVPAQEKNFTTAPAICHDGKAHFPREGVFVSNGTHWFVTQRNFYEPQIITTDNTFVSGNCDVVIGIVNNTVYDPLQPELDSFKEELDKYFKNHTSPDVDLGDIPGINASVVNIQKEIDRLNEVAKNLNESLIDLQELGKYEQYIKWPWYIWLGFIAGLIAIVMVTIMLCCMTSCCSCLKGCCSCGSCCKFDEDDSEPVLKGVKLHYT

SEQ ID NO: 388 - protein, 1273 aa, Artificial Sequence
  SARS-CoV-2/USA/WA-UW261/2020__EPI_ISL_418046 spike protein (1-1273)(K986P_V987P)
MFVFLVLLPLVSSQCVNLTTRTQLPPAYTNSFTRGVYYPDKVFRSSVLHSTQDLFLPFFSNVTWFHAIHVSGTNGTKRFDNPVLPFNDGVYFASTEKSNIIRGWIFGTTLDSKTQSLLIVNNATNVVIKVCEFQFCNDPFLGVYYHKNNKSWMESEFRVYSSANNCTFEYVSQPFLMDLEGKQGNFKNLREFVFKNIDGYFKIYSKHTPINLVRDLPQGFSALEPLVDLPIGINITRFQTLLALHRSYLTPGDSSSGWTAGAAAYYVGYLQPRTFLLKYNENGTITDAVDCALDPLSETKCTLKSFTVEKGIYQTSNFRVQPTESIVRFPNITNLCPFGEVFNATRFTSVYAWNRKRISNCVADYSVLYNSASFSTFKCYGVSPTKLNDLCFTNVYADSFVIRGDEVRQIAPGQTGKIADYNYKLPDDFTGCVIAWNSNNLDSKVGGNYNYLYRLFRKSNLKPFERDISTEIYQAGSTPCNGVEGFNCYFPLQSYGFQPTNGVGYQPYRVVVLSFELLHAPATVCGPKKSTNLVKNKCVNFNFNGLTGTGVLTESNKKFLPFQQFGRDIADTTDAVRDPQTLEILDITPCSFGGVSVITPGTNTSNQVAVLYQDVNCTEVPVAIHADQLTPTWRVYSTGSNVFQTRAGCLIGAEHVNNSYECDIPIGAGICASYQTQTNSPRRARSVASQSIIAYTMSLGAENSVAYSNNSIAIPTNFTISVTTEILPVSMTKTSVDCTMYICGDSTECSNLLLQYGSFCTQLNRALTGIAVEQDKNTQEVFAQVKQIYKTPPIKDFGGFNFSQILPDPSKPSKRSFIEDLLFNKVTLADAGFIKQYGDCLGDIAARDLICAQKFNGLTVLPPLLTDEMIAQYTSALLAGTITSGWTFGAGAALQIPFAMQMAYRFNGIGVTQNVLYENQKLIANQFNSAIGKIQDSLSSTASALGKLQDVVNQNAQALNTLVKQLSSNFGAISSVLNDILSRLDPPEAEVQIDRLITGRLQSLQTYVTQQLIRAAEIRASANLAATKMSECVLGQSKRVDFCGKGYHLMSFPQSAPHGVVFLHVTYVPAQEKNFTTAPAICHDGKAHFPREGVFVSNGTHWFVTQRNFYEPQIITTDNTFVSGNCDVVIGIVNNTVYDPLQPELDSFKEELDKYFKNHTSPDVDLGDISGINASVVNIQKEIDRLNEVAKNLNESLIDLQELGKYEQYIKWPWYIWLGFIAGLIAIVMVTIMLCCMTSCCSCLKGCCSCGSCCKFDEDDSEPVLKGVKLHYT

SEQ ID NO: 389 - protein, 1273 aa, Artificial Sequence
  SARS-CoV-2/Portugal/PT0035/2020__EPI_ISL_418020 spike protein (1-1273)(K986P_V987P)
MFVFLVLLPLVSSQCVNLTTRTQLPPAYTNSFTRGVYYPDKVFRSSVLHSTQDLFLPFFSNVTWFHAIHVSGTNGTKRFDNPVLPFNDGVYFASTEKSNIIRGWIFGTTLDSKTQSLLIVNNATNVVIKVCEFQFCNDPFLGVYYHKNNKSWMESEFRVYSSANNCTFEYVSQPFLMDLEGKQGNFKNLREFVFKNIDGYFKIYSKHTPINLVRDLPQGFSALEPLVDLPIGINITRFQTLLALHRSYLTPGDSSSGWTAGAAAYYVGYLQPRTFLLKYNENGTITDAVDCALDPLSETKCTLKSFTVEKGIYQTSNFRVQPTESIVRFPNITNLCPFGEVFNATRFASVYAWNRKRISNCVADYSVLYNSASFSTFKCYGVSPTKLNDLCFTNVYADSFVIRGDEVRQIAPGQTGKIADYNYKLPDDFTGCVIAWNSNNLDSKVGGNYNYLYRLFRKSNLKPFERDISTEIYQAGSTPCNGVEGFNCYFPLQSYGFQPTNGVGYQPYRVVVLSFELLHAPATVCGPKKSTNLVKNKCVNFNFNGLTGTGVLTESNKKFLPFQQFGRDIADTTDAVRDPQTLEILDITPCSFGGVSVITPGTNTSNQVAVLYQDVNCTEVPVAIHADQLTPTWRVYSTGSNVFQTRAGCLIGAEHVNNSYECDIPIGAGICASYQTQTNSPRRARSVASQSIIAYTMSLGAENSVAYSNNSIAIPTNFTISVTTEILPVSMTKTSVDCTMYICGDSTECSNLLLQYGSFCTQLNRALTGIAVEQDKNTQEVFAQVKQIYKTPPIKDFGGFNFSQILPDPSKPSKRSFIEDLLFNKVTLADAGFIKQYGDCLGDISARDLICAQKFNGLTVLPPLLTDEMIAQYTSALLAGTITSGWTFGAGAALQIPFAMQMAYRFNGIGVTQNVLYENQKLIANQFNSAIGKIQDSLSSTASALGKLQDVVNQNAQALNTLVKQLSSNFGAISSVLNDILSRLDPPEAEVQIDRLITGRLQSLQTYVTQQLIRAAEIRASANLAATKMSECVLGQSKRVDFCGKGYHLMSFPQSAPHGVVFLHVTYVPAQEKNFTTAPAICHDGKAHFPREGVFVSNGTHWFVTQRNFYEPQIITTDNTFVSGNCDVVIGIVNNTVYDPLQPELDSFKEELDKYFKNHTSPDVDLGDISGINASVVNIQKEIDRLNEVAKNLNESLIDLQELGKYEQYIKWPWYIWLGFIAGLIAIVMVTIMLCCMTSCCSCLKGCCSCGSCCKFDEDDSEPVLKGVKLHYT

SEQ ID NO: 390 - protein, 1273 aa, Artificial Sequence
  SARS-CoV-2/USA/NY-NYUMC7/2020__EPI_ISL_418192 spike protein (1-1273)(K986P_V987P)
MFVFLVLLPLVSSQCVNLTTRTQLPPAYTNSFTRGVYYPDKVFRSSVLHSTQDLFLPFFSNVTWFHAIHVSGTNGTKRFDNPVLPFNDGVYFASTEKSNIIRGWIFGTTLDSKTQSLLIVNNATNVVIKVCEFQFCNDPFLGVYHHKNNKSWMESEFRVYSSANNCTFEYVSQPFLMDLEGKQGNFKNLREFVFKNIDGYFKIYSKHTPINLVRDLPQGFSALEPLVDLPIGINITRFQTLLALHRSYLTPGDSSSGWTAGAAAYYVGYLQPRTFLLKYNENGTITDAVDCALDPLSETKCTLKSFTVEKGIYQTSNFRVQPTESIVRFPNITNLCPFGEVFNATRFASVYAWNRKRISNCVADYSVLYNSASFSTFKCYGVSPTKLNDLCFTNVYADSFVIRGDEVRQIAPGQTGKIADYNYKLPDDFTGCVIAWNSNNLDSKVGGNYNYLYRLFRKSNLKPFERDISTEIYQAGSTPCNGVEGFNCYFPLQSYGFQPTNGVGYQPYRVVVLSFELLHAPATVCGPKKSTNLVKNKCVNFNFNGLTGTGVLTESNKKFLPFQQFGRDIADTTDAVRDPQTLEILDITPCSFGGVSVITPGTNTSNQVAVLYQGVNCTEVPVAIHADQLTPTWRVYSTGSNVFQTRAGCLIGAEHVNNSYECDIPIGAGICASYQTQTNSPRRARSVASQSIIAYTMSLGAENSVAYSNNSIAIPTNFTISVTTEILPVSMTKTSVDCTMYICGDSTECSNLLLQYGSFCTQLNRALTGIAVEQDKNTQEVFAQVKQIYKTPPIKDFGGFNFSQILPDPSKPSKRSFIEDLLFNKVTLADAGFIKQYGDCLGDIAARDLICAQKFNGLTVLPPLLTDEMIAQYTSALLAGTITSGWTFGAGAALQIPFAMQMAYRFNGIGVTQNVLYENQKLIANQFNSAIGKIQDSLSSTASALGKLQDVVNQNAQALNTLVKQLSSNFGAISSVLNDILSRLDPPEAEVQIDRLITGRLQSLQTYVTQQLIRAAEIRASANLAATKMSECVLGQSKRVDFCGKGYHLMSFPQSAPHGVVFLHVTYVPAQEKNFTTAPAICHDGKAHFPREGVFVSNGTHWFVTQRNFYEPQIITTDNTFVSGNCDVVIGIVNNTVYDPLQPELDSFKEELDKYFKNHTSPDVDLGDISGINASVVNIQKEIDRLNEVAKNLNESLIDLQELGKYEQYIKWPWYIWLGFIAGLIAIVMVTIMLCCMTSCCSCLKGCCSCGSCCKFDEDDSEPVLKGVKLHYT

SEQ ID NO: 391 - protein, 1273 aa, Artificial Sequence
  SARS-CoV-2/Iceland/189/2020__EPI_ISL_417709 spike protein (1-1273)(K986P_V987P)
MFVFLVLLPLVSSQCVNLTTRTQLPPAYTNSFTRGVYYPDKVFRSSVLHSTQDLFLPFFSNVTWFHAIHVSGTNGTKRFDNPVLPFNDGVYFASTEKSNIIRGWIFGTTLDSKTQSLLIVNNATNVVIKVCEFQFCNDPFLGVYYHKNNKSWMESEFRVYSSANNCTFEYVSQPFLMDLEGKQGNFKNLREFVFKNIDGYFKIYSKHTPINLVRDLPQGFSALEPLVDLPIGINITRFQTLLALHRSYLTPGDSSSGWTAGAAAYYVGYLQPRTFLLKYNENGTITDAVDCALDPLSETKCTLKSFTVEKGIYQTSNFRVQPTESIVRFPNITNLCPFGEVFNATRFASVYAWNRKRISNCVADYSVLYNSASFSTFKCYGVSPTKLNDLCFTNVYADSFVIRGDEVRQIAPGQTGKIADYNYKLPDDFTGCVIAWNSNNLDSKVGGNYNYLYRLFRKSNLKPFERDISTEIYQAGSTPCNGVEGFNCYFPLQSYGFQPTNGVGYQPYRVVVLSFELLHAPATVCGPKKSTNLVKNKCVNFNFNGLTGTGVLTESNKKFLPFQQFGRDIADTTDAVRDPQTLEILDITPCSFGGVSVITPGTNTSNQVAVLYQGVNCTEVPVAIHADQLTPTWRVYSTGSNVFQTRAGCLIGAEHVNNSYECDIPIGAGICASYQTQTNSPRRARSVASQSIIAYTMSLGAENSVAYSNNSIAIPTNFTISVTTEILPVSMTKTSVDCTMYICGDSTECSNLLLQYGSFCTQLNRALTGIAVEQDKNTQEVFAQVKQIYKTPPIKDFGGFNFSQILPDPSKPSKRSFIEDLLFNKVTLADAGFTKQYGDCLGDIAARDLICAQKFNGLTVLPPLLTDEMIAQYTSALLAGTITSGWTFGAGAALQIPFAMQMAYRFNGIGVTQNVLYENQKLIANQFNSAIGKIQDSLSSTASALGKLQDVVNQNAQALNTLVKQLSSNFGAISSVLNDILSRLDPPEAEVQIDRLITGRLQSLQTYVTQQLIRAAEIRASANLAATKMSECVLGQSKRVDFCGKGYHLMSFPQSAPHGVVFLHVTYVPAQEKNFTTAPAICHDGKAHFPREGVFVSNGTHWFVTQRNFYEPQIITTDNTFVSGNCDVVIGIVNNTVYDPLQPELDSFKEELDKYFKNHTSPDVDLGDISGINASVVNIQKEIDRLNEVAKNLNESLIDLQELGKYEQYIKWPWYIWLGFIAGLIAIVMVTIMLCCMTSCCSCLKGCCSCGSCCKFDEDDSEPVLKGVKLHYT

SEQ ID NO: 392 - protein, 1273 aa, Artificial Sequence
  SARS-CoV-2/Australia/NSW56/2020__EPI_ISL_417408 spike protein (1-1273)(K986P_V987P)
MFVFLVLLPLVSSQCVNLTTRTQLPPAYTNSFTRGVYYPDKVFRSSVLHSTQDLFLPFFSNVTWFHAIHVSGTNGTKRFDNPVLPFNDGVYFASTEKSNIIRGWIFGTTLDSKTQSLLIVNNATNVVIKVCEFQFCNDPFLGVYYHKNNKSWMESEFRVYSSANNCTFEYVSQPFLMDLEGKQGNFKNLREFVFKNIDGYFKIYSKHTPINLVRDLPQGFSALEPLVDLPIGINITRFQTLLALHRSYLTPGDSSSGWTAGAAAYYVGYLQPRTFLLKYNENGTITDAVDCALDPLSETKCTLKSFTVEKGIYQTSNFRVQPTESIVRFPNITNLCPFGEVFNATRFASVYAWNRKRISNCVADYSVLYNSASFSTFKCYGVSPTKLNDLCFTNVYADSFVIRGDEVRQIAPGQTGKIADYNYKLPDDFTGCVIAWNSNNLDSKVGGNYNYLYRLFRKSNLKPFERDISTEIYQAGSTPCNGVEGFNCYFPLQSYGFQPTNGVGYQPYRVVVLSFELLHAPATVCGPKKSTNLVKNKCVNFNFNGLTGTGVLTESNKKFLPFQQFGRDIADTTDAVRDPQTLEILDITPCSFGGVSVITPGTNTSNQVAVLYQDVNCTEVPVAIHADQLTPTWRVYSTGSNVFQTRAGCLIGAEHVNNSYECDIPIGAGICASYQTQTNSPRRARSVASQSIIAYTMSLGAENSVAYSNNSIAIPTNFTISVTTEILPVSMTKTSVDCTMYICGDSTECSNLLLQYGSFCTQLNRALTGIAVEQDKNTQEVFAQVKQIYKTPPIKDFGGFNFSQILPDSSKPSKRSFIEDLLFNKVTLADAGFIKQYGDCLGDIAARDLICAQKFNGLTVLPPLLTDEMIAQYTSALLAGTITSGWTFGAGAALQIPFAMQMAYRFNGIGVTQNVLYENQKLIANQFNSAIGKIQDSLSSTASALGKLQDVVNQNAQALNTLVKQLSSNFGAISSVLNDILSRLDPPEAEVQIDRLITGRLQSLQTYVTQQLIRAAEIRASANLAATKMSECVLGQSKRVDFCGKGYHLMSFPQSAPHGVVFLHVTYVPAQEKNFTTAPAICHDGKAHFPREGVFVSNGTHWFVTQRNFYEPQIITTDNTFVSGNCDVVIGIVNNTVYDPLQPELDSFKEELDKYFKNHTSPDVDLGDISGINASVVNIQKEIDRLNEVAKNLNESLIDLQELGKYEQYIKWPWYIWLGFIAGLIAIVMVTIMLCCMTSCCSCLKGCCSCGSCCKFDEDDSEPVLKGVKLHYT

SEQ ID NO: 393 - protein, 1273 aa, Artificial Sequence
  SARS-CoV-2/Iceland/280/2020__EPI_ISL_417608 spike protein (1-1273)(K986P_V987P)
MFVFLVLLPLVSSQCVNLTTRTQLPPAYTNSFTRGVYYPDKVFRSSVLHSTQDLFLPFFSNVTWFHAIHVSGTNGTKRFDNPVLPFNDGVYFASTEKSNIIRGWIFGTTLDSKTQSLLIVNNATNVVIKVCEFQFCNDPFLGVYYHKNNKSWMESEFRVYSSANNCTFEYVSQPFLMDLEGKQGNFKNLREFVFKNIDGYFKIYSKHTPINLVRDLPQGFSALEPLVDLPIGINITRFQTLLALHRSYLTPGDSSSGWTAGAAAYYVGYLQPRTFLLKYNENGTITDAVDCALDPLSETKCTLKSFTVEKGIYQTSNFRVQPTESIVRFPNITNLCPFGEVFNATRFASVYAWNRKRISNCVADYSVLYNSASFSTFKCYGVSPTKLNDLCFTNVYADSFVIRGDEVRQIAPGQTGKIADYNYKLPDDFTGCVIAWNSNNLDSKVGGNYNYLYRLFRKSNLKPFERDISTEIYQAGSTPCNGVEGFNCYFPLQSYGFQPTNGVGYQPYRVVVLSFELLHAPATVCGPKKSTNLVKNKCVNFNFNGLTGTGVLTESNKKFLPFQQFGRDIADTTDAVRDPQTLEILDITPCSFGGVSVITPGTNTSNQVAVLYQGVNCTEVPVAIHADQLTPTWRVYSTGSNVFQTRAGCLIGAEHVNNSYECDIPIGAGICASYHTQTNSPRRARSVASQSIIAYTMSLGAENSVAYSNNSIAIPTNFTISVTTEILPVSMTKTSVDCTMYICGDSTECSNLLLQYGSFCTQLNRALTGIAVEQDKNTQEVFAQVKQIYKTPPIKDFGGFNFSQILPDPSKPSKRSFIEDLLFNKVTLADAGFIKQYGDCLGDIAARDLICAQKFNGLTVLPPLLTDEMIAQYTSALLAGTITSGWTFGAGAALQIPFAMQMAYRFNGIGVTQNVLYENQKLIANQFNSAIGKIQDSLSSTASALGKLQDVVNQNAQALNTLVKQLSSNFGAISSVLNDILSRLDPPEAEVQIDRLITGRLQSLQTYVTQQLIRAAEIRASANLAATKMSECVLGQSKRVDFCGKGYHLMSFPQSAPHGVVFLHVTYVPAQEKNFTTAPAICHDGKAHFPREGVFVSNGTHWFVTQRNFYEPQIITTDNTFVSGNCDVVIGIVNNTVYDPLQPELDSFKEELDKYFKNHTSPDVDLGDISGINASVVNIQKEIDRLNEVAKNLNESLIDLQELGKYEQYIKWPWYIWLGFIAGLIAIVMVTIMLCCMTSCCSCLKGCCSCGSCCKFDEDDSEPVLKGVKLHYT

SEQ ID NO: 394 - protein, 1273 aa, Artificial Sequence
  SARS-CoV-2/Iceland/247/2020__EPI_ISL_417575 spike protein (1-1273)(K986P_V987P)
MFVFLVLLPLVSSQCVNLTTRTQLPPAYTNSFTRGVYYPDKVFRSSVLHSTQDLFLPFFSNVTWFHAIHVSGTNGTKRFDNPVLPFNDGVYFASTEKSNIIRGWIFGTTLDSKTQSLLIVNNATNVVIKVCEFQFCNDPFLGVYYHKNNKSWMESEFRVYSSANNCTFEYVSQPFLMDLEGKQGNFKNLREFVFKNIDGYFKIYSKHTPINLVRDLPQGFSALEPLVDLPIGINITRFQTLLALHRSYLTPGDSSSGWTAGAAAYYVGYLQPRTFLLKYNENGTITDAVDCALDPLSETKCTLKSFTVEKGIYQTSNFRVQPTESIVRFPNITNLCPFGEVFNATRFASVYAWNRKRISNCVADYSVLYNSASFSTFKCYGVSPTKLNDLCFTNVYADSFVIRGDEVRQIAPGQTGKIADYNYKLPDDFTGCVIAWNSNNLDSKVGGNYNYLYRLFRKSNLKPFERDISTEIYQAGSTPCNGVEGFNCYFPLQSYGFQPTNGVGYQPYRVVVLSFELLHAPATVCGPKKSTNLVKNKCVNFNFNGLTGTGVLTESNKKFLPFQQFGRDIADTTDAVRDPQTLEILDITPCSFGGVSVITPGTNTSNQVAVLYQGVNCTEVPVAIHADQLTPTWRVYSTGSNVFQTRAGCLIGAEHVNNSYECDIPIGAGICASYQTQTNSPRRARSVASQSIIAYTMSLGAENSVAYSNNSIAIPTNFTISVTTEILPVSMTKTSVDCTMYICGDSTECSNLLLQYGSFCTQLNRALTGIAVEQDKNTQEVFAQVKQIYKTPPIKDFGGFNFSQILPDPSKPSKRSFIEDLLFNKVTLADAGFIKQYGDCLGDIAARDLICAQKFNGLTVLPPLLTDEMIAQYTSALLAGTITSGWTFGAGAALQIPFAMQMAYRFNGIGVTQNVLYENQKLIANQFNSAIGKIQDSLSSTASALGKLQDVVNQNAQALNTLVKQLSSNFGAISSVLNDILSRLDPPEAEVQIDRLITGRLQSLQTYVTQQLIRAAEIRASANLAATKMSECVLGQSKRVDFCGKGYHLMSFPQSAPHGVVFLHVTYVPAQEKNFTTAPAICHDGKAHFPREGVFVSNGTHWFVTQRNFYEPQIITTDNTFVSGNCDVVIGIVNNTVYDPLQPELDSFKEELDKYFKNHTSPDVDLGDISGINASVVNIQKEIDRLNEVAKNLNESLIDLQELGKYEQYIKWPWYIWLGFIAGLIAIVIVTIMLCCMTSCCSCLKGCCSCGSCCKFDEDDSEPVLKGVKLHYT

SEQ ID NO: 395 - protein, 1273 aa, Artificial Sequence
  SARS-CoV-2/Iceland/238/2020__EPI_ISL_417566 spike protein (1-1273)(K986P_V987P)
MFVFLVLLPLVSSQCVNLTTRTQLPPAYTNSFTRGVYYPDKVFRSSVLHSTQDLFLPFFSNVTWFHAIHVSGTNGTKRFDNPVLPFNDGVYFASTEKSNIIRGWIFGTTLDSKTQSLLIVNNATNVVIKVCEFQFCNDPFLGVYYHKNNKSWMESEFRVYSSANNCTFEYVSQPFLMDLEGKQGNFKNLREFVFKNIDGYFKIYSKHTPINLVRDLPQGFSALEPLVDLPIGINITRFQTLLALHRSYLTPGDSSSGWTAGAAAYYVGYLQPRTFLLKYNENGTITDAVDCALDPLSETKCTLKSFTVEKGIYQTSNFRVQPTESIVRFPNITNLCPFGEVFNATRFASVYAWNRKRISNCVADYSVLYNSASFSTFKCYGVSPTKLNDLCFTNVYADSFVIRGDEVRQIAPGQTGKIADYNYKLPDDFTGCVIAWNSNNLDSKVGGNYNYLYRLFRKSNLKPFERDISTEIYQAGSTPCNGVEGFNCYFPLQSYGFQPTNGVGYQPYRVVVLSFELLHAPATVCGPKKSTNLVKNKCVNFNFNGLTGTGVLTESNKKFLPFQQFGRDIADTTDAVRDPQTLEILDITPCSFGGVSVITPGTNTSNQVAVLYQGVNCTEVPVAIHADQLTPTWRVYSTGSNVFQTRAGCLIGAEHVNNSYECDIPIGAGICASYQTQTNSPRRARSVASQSIIAYTMSLGAENSVAYSNNSIAIPTNFTISVTTEILPVSMTKTSVDCTMYICGDSTECSNLLLQYGSFCTQLNRALTGIAVEQDKNTQEVFAQVKQIYKTPPIKDFGGFNFSQILPDPSKPSKRSFIEDLLFNKVTLADVGFIKQYGDCLGDIAARDLICAQKFNGLTVLPPLLTDEMIAQYTSALLAGTITSGWTFGAGAALQIPFAMQMAYRFNGIGVTQNVLYENQKLIANQFNSAIGKIQDSLSSTASALGKLQDVVNQNAQALNTLVKQLSSNFGAISSVLNDILSRLDPPEAEVQIDRLITGRLQSLQTYVTQQLIRAAEIRASANLAATKMSECVLGQSKRVDFCGKGYHLMSFPQSAPHGVVFLHVTYVPAQEKNFTTAPAICHDGKAHFPREGVFVSNGTHWFVTQRNFYEPQIITTDNTFVSGNCDVVIGIVNNTVYDPLQPELDSFKEELDKYFKNHTSPDVDLGDISGINASVVNIQKEIDRLNEVAKNLNESLIDLQELGKYEQYIKWPWYIWLGFIAGLIAIVMVTIMLCCMTSCCSCLKGCCSCGSCCKFDEDDSEPVLKGVKLHYT

SEQ ID NO: 396 - protein, 1273 aa, Artificial Sequence
  SARS-CoV-2/Greece/16/2020__EPI_ISL_418265 spike protein (1-1273)(K986P_V987P)
MFVFLVLLPLVSSQCVNLTTRTQLPPAYTNSFTRGVYYPDKVFRSSVLHSTQDLFLPFFSNVTWFHAIHVSGTNGTKRFDNPVLPFNDGVYFASTEKSNIIRGWIFGTTLDSKTQSLLIVNNATNVVIKVCEFQFCNDPFLGVYYHKNNKSWMESEFRVYSSANNCTFEYVSQPFLMDLEGKQGNFKNLREFVFKNVDGYFKIYSKHTPINLVRDLPQGFSALEPLVDLPIGINITRFQTLLALHRSYLTPGDSSSGWTAGAAAYYVGYLQPRTFLLKYNENGTITDAVDCALDPLSETKCTLKSFTVEKGIYQTSNFRVQPTESIVRFPNITNLCPFGEVFNATRFASVYAWNRKRISNCVADYSVLYNSASFSTFKCYGVSPTKLNDLCFTNVYADSFVIRGDEVRQIAPGQTGKIADYNYKLPDDFTGCVIAWNSNNLDSKVGGNYNYLYRLFRKSNLKPFERDISTEIYQAGSTPCNGVEGFNCYFPLQSYGFQPTNGVGYQPYRVVVLSFELLHAPATVCGPKKSTNLVKNKCVNFNFNGLTGTGVLTESNKKFLPFQQFGRDIADTTDAVRDPQTLEILDITPCSFGGVSVITPGTNTSNQVAVLYQDVNCTEVPVAIHADQLTPTWRVYSTGSNVFQTRAGCLIGAEHVNNSYECDIPIGAGICASYQTQTNSPRRARSVASQSIIAYTMSLGAENSVAYSNNSIAIPTNFTISVTTEILPVSMTKTSVDCTMYICGDSTECSNLLLQYGSFCTQLNRALTGIAVEQDKNTQEVFAQVKQIYKTPPIKDFGGFNFSQILPDPSKPSKRSFIEDLLFNKVTLADAGFIKQYGDCLGDIAARDLICAQKFNGLTVLPPLLTDEMIAQYTSALLAGTITSGWTFGAGAALQIPFAMQMAYRFNGIGVTQNVLYENQKLIANQFNSAIGKIQDSLSSTASALGKLQDVVNQNAQALNTLVKQLSSNFGAISSVLNDILSRLDPPEAEVQIDRLITGRLQSLQTYVTQQLIRAAEIRASANLAATKMSECVLGQSKRVDFCGKGYHLMSFPQSAPHGVVFLHVTYVPAQEKNFTTAPAICHDGKAHFPREGVFVSNGTHWFVTQRNFYEPQIITTDNTFVSGNCDVVIGIVNNTVYDPLQPELDSFKEELDKYFKNHTSPDVDLGDISGINASVVNIQKEIDRLNEVAKNLNESLIDLQELGKYEQYIKWPWYIWLGFIAGLIAIVMVTIMLCCMTSCCSCLKGCCSCGSCCKFDEDDSEPVLKGVKLHYT

SEQ ID NO: 397 - protein, 1273 aa, Artificial Sequence
  SARS-CoV-2/Iceland/319/2020__EPI_ISL_417648 spike protein (1-1273)(K986P_V987P)
MFVFLVLLPLVSSQCVNLTTRTQLPPAYTNSFTRGVYYPDKVFRSSVLHSTQDLFLPFFSNVTWFHAIHVSGTNGTKRFDNPVLPFNDGVYFASTEKSNIIRGWIFGTTLDSKTQSLLIVNNATNVVIKVCEFQFCNDPFLGVYYHKNNKSWMESEFRVYSSANNCTFEYVSQPFLIDLEGKQGNFKNLREFVFKNIDGYFKIYSKHTPINLVRDLPQGFSALEPLVDLPIGINITRFQTLLALHRSYLTPGDSSSGWTAGAAAYYVGYLQPRTFLLKYNENGTITDAVDCALDPLSETKCTLKSFTVEKGIYQTSNFRVQPTESIVRFPNITNLCPFGEVFNATRFASVYAWNRKRISNCVADYSVLYNSASFSTFKCYGVSPTKLNDLCFTNVYADSFVIRGDEVRQIAPGQTGKIADYNYKLPDDFTGCVIAWNSNNLDSKVGGNYNYLYRLFRKSNLKPFERDISTEIYQAGSTPCNGVEGFNCYFPLQSYGFQPTNGVGYQPYRVVVLSFELLHAPATVCGPKKSTNLVKNKCVNFNFNGLTGTGVLTESNKKFLPFQQFGRDIADTTDAVRDPQTLEILDITPCSFGGVSVITPGTNTSNQVAVLYQGVNCTEVPVAIHADQLTPTWRVYSTGSNVFQTRAGCLIGAEHVNNSYECDIPIGAGICASYQTQTNSPRRARSVASQSIIAYTMSLGAENSVAYSNNSIAIPTNFTISVTTEILPVSMTKTSVDCTMYICGDSTECSNLLLQYGSFCTQLNRALTGIAVEQDKNTQEVFAQVKQIYKTPPIKDFGGFNFSQILPDPSKPSKRSFIEDLLFNKVTLADAGFIKQYGDCLGDIAARDLICAQKFNGLTVLPPLLTDEMIAQYTSALLAGTITSGWTFGAGAALQIPFAMQMAYRFNGIGVTQNVLYENQKLIANQFNSAIGKIQDSLSSTASALGKLQDVVNQNAQALNTLVKQLSSNFGAISSVLNDILSRLDPPEAEVQIDRLITGRLQSLQTYVTQQLIRAAEIRASANLAATKMSECVLGQSKRVDFCGKGYHLMSFPQSAPHGVVFLHVTYVPAQEKNFTTAPAICHDGKAHFPREGVFVSNGTHWFVTQRNFYEPQIITTDNTFVSGNCDVVIGIVNNTVYDPLQPELDSFKEELDKYFKNHTSPDVDLGDISGINASVVNIQKEIDRLNEVAKNLNESLIDLQELGKYEQYIKWPWYIWLGFIAGLIAIVMVTIMLCCMTSCCSCLKGCCSCGSCCKFDEDDSEPVLKGVKLHYT

SEQ ID NO: 398 - protein, 1273 aa, Artificial Sequence
  SARS-CoV-2/Congo/94/2020__EPI_ISL_417947 spike protein (1-1273)(K986P_V987P)
MFVFLVLLPLVSSQCVNLTTRTQLPPAYTNSFTRGVYYPDKVFRSSVLHSTQDLFLPFFSNVTWFHAIHVSGTNGTKRFDNPVLPFNDGVYFASTEKSNIIRGWIFGTTLDSKTQSLLIVNNATNVVIKVCEFQFCNDPFLGVYYHKNNKSWMESEFRVYSSANNCTFEYVSQPFLMDLEGKQGNFKNLREFVFKNIDGYFKIYSKHTPINLVRDLPQGFSALEPLVDLPIGINITRFQTLLALHRSYLTPGDSSSGWTAGAAAYYVGYLQPRTFLLKYNENGTITDAVDCALDPLSETKCTLKSFTVEKGIYQTSNFRVQPTESIVRFPNITNLCPFGEVFNATRFASVYAWNRKRISNCVADYSVLYNSASFSTFKCYGVSPTKLNDLCFTNVYADSFVIRGDEVRQIAPGQTGKIADYNYKLPDDFTGCVIAWNSNNLDSKVGGNYNYLYRLFRKSNLKPFERDISTEIYQAGSTPCNGVEGFNCYFPLQSYGFQPTNGVGYQPYRVVVLSFELLHAPATVCGPKKSTNLVKNKCVNFNFNGLTGTGVLTESNKKFLPFQQFGRDIADTTDAVRDPQTLEILDITPCSFGGVSVITPGTNTSNQVAVLYQGVNCTEVPVAIHADQLTPTWRVYSTGSNVFQTRAGCLIGAEHVNNSYECDIPIGAGICASYQTQTNSPRRARSVASQSIIAYTMSLGAENSVAYSNNSIAIPTNFTISVTTEILPVSMTKTSVDCTMYICGDSTECSNLLLQYGSFCTQLNRALTGIAVEQDKNTQEVFAQVKQIYKTPPIKDFGGFNFSQILPDPSKPSKRSFIEDILFNKVTLADAGFIKQYGDCLGDIAARDLICAQKFNGLTVLPPLLTDEMIAQYTSALLAGTITSGWTFGAGAALQIPFAMQMAYRFNGIGVTQNVLYENQKLIANQFNSAIGKIQDSLSSTASALGKLQDVVNQNAQALNTLVKQLSSNFGAISSVLNDILSRLDPPEAEVQIDRLITGRLQSLQTYVTQQLIRAAEIRASANLAATKMSECVLGQSKRVDFCGKGYHLMSFPQSAPHGVVFLHVTYVPAQEKNFTTAPAICHDGKAHFPREGVFVSNGTHWFVTQRNFYEPQIITTDNTFVSGNCDVVIGIVNNTVYDPLQPELDSFKEELDKYFKNHTSPDVDLGDISGINASVVNIQKEIDRLNEVAKNLNESLIDLQELGKYEQYIKWPWYIWLGFIAGLIAIVMVTIMLCCMTSCCSCLKGCCSCGSCCKFDEDDSEPVLKGVKLHYT

SEQ ID NO: 399 - protein, 1273 aa, Artificial Sequence
  SARS-CoV-2/Congo/158/2020__EPI_ISL_417950 spike protein (1-1273)(K986P_V987P)
MFVFLVLLPLVSSQCVNLTTRTQLPPAYTNSFTRGVYYPDKVFRSSVLHSTQDLFLPFFSNVTWFHAIHVSGTNGTKRFDNPVLPFNDGVYFASTEKSNIIRGWIFGTTLDSKTQSLLIVNNATNVVIKVCEFQFCNDPFLGVYYHKNNKSWMESEFRVYSSANNCTFEYVSQPFLMDLEGKQGNFKNLREFVFKNIDGYFKIYSKHTPINLVRDLPQGFSALEPLVDLPIGINITRFQTLLALHRSYLTPGDSSSGWTAGAAAYYVGYLQPRTFLLKYNENGTITDAVDCALDPLSETKCTLKSFTVEKGIYQTSNFRVQPTESIVRFPNITNLCPFGEVFNATRFASVYAWNRKRISNCVADYSVLYNSASFSTFKCYGVSPTKLNDLCFTNVYADSFVIRGDEVRQIAPGQTGKIADYNYKLPDDFTGCVIAWNSNNLDSKVGGNYNYLYRLFRKSNLKPFERDISTEIYQAGSTPCNGVEGFNCYFPLQSYGFQPTNGVGYQPYRVVVLSFELLHAPATVCGPKKSTNLVKNKCVNFNFNGLTGTGVLTESNKKFLPFQQFGRDIADTTDAVRDPQTLEILDITPCSFGGVSVITPGTNTSNQVAVLYQDVNCTEVPVAIHADQLTPTWRVYSTGSNVFQTRAGCLIGAEHVNNSYECDIPIGAGICASYQTQTNSPRRARSVASQSIIAYTMSLGAENSVAYSNNSIAIPTNFTISVTTEILPVSMTKTSVDCTMYICGDSTECSNLLLQYGSFCTQLNRALTGIAVEQDKNTQEVFAQVKQIYKTPPIKDFGGFNFSQILPDPSKPSKRSFIEDLLFNKVTLADAGFIKQYGDCLGDIAARDLICAQKFNGLTVLPPLLTDEMIAQYTSALLAGTITSGWTFGAGAALQIPFAMQMAYRFNGIGVTQNVLYENQKLIANQFNSAIGKIQDSLSSTASALGKLQDVVNQNAQALNTLVKQLSSNFGAISSVLNDILSRLDPPEAEVQIDRLITGRLQSLQTYVTQQLIRAAEIRASANLAATKMSECVLGQSKRVDFCGKGYHLMSFPQSAPHGVVFLHVTYVPAQEKNFTTAPAICHDGKAHFPREGVFVSNGTHWFVTQRNFYEPQIITTDNTFLSGNCDVVIGIVNNTVYDPLQPELDSFKEELDKYFKNHTSPDVDLGDISGINASVVNIQKEIDRLNEVAKNLNESLIDLQELGKYEQYIKWPWYIWLGFIAGLIAIVMVTIMLCCMTSCCSCLKGCCSCGSCCKFDEDDSEPVLKGVKLHYT

SEQ ID NO: 400 - protein, 1273 aa, Artificial Sequence
  SARS-CoV-2/USA/UT-00034/2020__EPI_ISL_417977 spike protein (1-1273)(K986P_V987P)
MFVFLVLLPLVSSQCVNLTTRTQLPPAYTNSFTRGVYYPDKVFRSSVLHSTQDLFLPFFSNVTWFHAIHVSGTNGTKRFDNPVLPFNDGVYFASTEKSNIIRGWIFGTTLDSKTQSLLIVNNATNVVIKVCEFQFCNDPFLGVYYYKNNKSWMESEFRVYSSANNCTFEYVSQPFLMDLEGKQGNFKNLREFVFKNIDGYFKIYSKHTPINLVRDLPQGFSALEPLVDLPIGINITRFQTLLALHRSYLTPGDSSSGWTAGAAAYYVGYLQPRTFLLKYNENGTITDAVDCALDPLSETKCTLKSFTVEKGIYQTSNFRVQPTESIVRFPNITNLCPFGEVFNATRFASVYAWNRKRISNCVADYSVLYNSASFSTFKCYGVSPTKLNDLCFTNVYADSFVIRGDEVRQIAPGQTGKIADYNYKLPDDFTGCVIAWNSNNLDSKVGGNYNYLYRLFRKSNLKPFERDISTEIYQAGSTPCNGVEGFNCYFPLQSYGFQPTNGVGYQPYRVVVLSFELLHAPATVCGPKKSTNLVKNKCVNFNFNGLTGTGVLTESNKKFLPFQQFGRDIADTTDAVRDPQTLEILDITPCSFGGVSVITPGTNTSNQVAVLYQGVNCTEVPVAIHADQLTPTWRVYSTGSNVFQTRAGCLIGAEHVNNSYECDIPIGAGICASYQTQTNSPRRARSVASQSIIAYTMSLGAENSVAYSNNSIAIPTNFTISVTTEILPVSMTKTSVDCTMYICGDSTECSNLLLQYGSFCTQLNRALTGIAVEQDKNTQEVFAQVKQIYKTPPIKDFGGFNFSQILPDPSKPSKRSFIEDLLFNKVTLADAGFIKQYGDCLGDIAARDLICAQKFNGLTVLPPLLTDEMIAQYTSALLAGTITSGWTFGAGAALQIPFAMQMAYRFNGIGVTQNVLYENQKLIANQFNSAIGKIQDSLSSTASALGKLQDVVNQNAQALNTLVKQLSSNFGAISSVLNDILSRLDPPEAEVQIDRLITGRLQSLQTYVTQQLIRAAEIRASANLAATKMSECVLGQSKRVDFCGKGYHLMSFPQSAPHGVVFLHVTYVPAQEKNFTTAPAICHDGKAHFPREGVFVSNGTHWFVTQRNFYEPQIITTDNTFVSGNCDVVIGIVNNTVYDPLQPELDSFKEELDKYFKNHTSPDVDLGDISGINASVVNIQKEIDRLNEVAKNLNESLIDLQELGKYEQYIKWPWYIWLGFIAGLIAIVMVTIMLCCMTSCCSCLKGCCSCGSCCKFDEDDSEPVLKGVKLHYT

SEQ ID NO: 401 - protein, 1273 aa, Artificial Sequence
  SARS-CoV-2/USA/UT-00033/2020__EPI_ISL_417976 spike protein (1-1273)(K986P_V987P)
MFVFLVLLPLVSSQCVNLTTRTQLPPAYTNSFTRGVYYPDKVFRSSVLHSTQDLFLPFFSNVTWFHAIHVSGTNGTKRFDNPVLPFNDGVYFASTEKSNIIRGWIFGTTLDSKTQSLLIVNNATNVVIKVCEFQFCNDPFLGVYYHKNNKSWMESEFRVYSSANNCTFEYVSQPFLMDLEGKQGNFKNLREFVFKNIDGYFKIYSKHTPINLVRDLPQGFSALEPLVDLPIGINITRFQTLLALHRSYLTPGDSSSGLTAGAAAYYVGYLQPRTFLLKYNENGTITDAVDCALDPLSETKCTLKSFTVEKGIYQTSNFRVQPTESIVRFPNITNLCPFGEVFNATRFASVYAWNRKRISNCVADYSVLYNSASFSTFKCYGVSPTKLNDLCFTNVYADSFVIRGDEVRQIAPGQTGKIADYNYKLPDDFTGCVIAWNSNNLDSKVGGNYNYLYRLFRKSNLKPFERDISTEIYQAGSTPCNGVEGFNCYFPLQSYGFQPTNGVGYQPYRVVVLSFELLHAPATVCGPKKSTNLVKNKCVNFNFNGLTGTGVLTESNKKFLPFQQFGRDIADTTDAVRDPQTLEILDITPCSFGGVSVITPGTNTSNQVAVLYQGVNCTEVPVAIHADQLTPTWRVYSTGSNVFQTRAGCLIGAEHVNNSYECDIPIGAGICASYQTQTNSPRRARSVASQSIIAYTMSLGAENSVAYSNNSIAIPTNFTISVTTEILPVSMTKTSVDCTMYICGDSTECSNLLLQYGSFCTQLNRALTGIAVEQDKNTQEVFAQVKQIYKTPPIKDFGGFNFSQILPDPSKPSKRSFIEDLLFNKVTLADAGFIKQYGDCLGDIAARDLICAQKFNGLTVLPPLLTDEMIAQYTSALLAGTITSGWTFGAGAALQIPFAMQMAYRFNGIGVTQNVLYENQKLIANQFNSAIGKIQDSLSSTASALGKLQDVVNQNAQALNTLVKQLSSNFGAISSVLNDILSRLDPPEAEVQIDRLITGRLQSLQTYVTQQLIRAAEIRASANLAATKMSECVLGQSKRVDFCGKGYHLMSFPQSAPHGVVFLHVTYVPAQEKNFTTAPAICHDGKAHFPREGVFVSNGTHWFVTQRNFYEPQIITTDNTFVSGNCDVVIGIVNNTVYDPLQPELDSFKEELDKYFKNHTSPDVDLGDISGINASVVNIQKEIDRLNEVAKNLNESLIDLQELGKYEQYIKWPWYIWLGFIAGLIAIVMVTIMLCCMTSCCSCLKGCCSCGSCCKFDEDDSEPVLKGVKLHYT

SEQ ID NO: 402 - protein, 1273 aa, Artificial Sequence
  SARS-CoV-2/USA/WI-13/2020__EPI_ISL_417516 spike protein (1-1273)(K986P_V987P)
MFVFLVLLPLVSSQCVNLTTRTQLPPAYTNSFTRGVYYPDKVFRSSVLHSTQDLFLPFFSNVTWFHAIHVSGTNGTKRFDNPVLPFNDGVYFASTEKSNIIRGWIFGTTLDSKTQSLLIVNNATNVVIKVCEFQFCNDPFLGVYYHKNNKSWMESEFRVYSSANNCTFEYVSQPFLMDLEGKQGNFKNLREFVFKNIDGYFKIYSKHTPINLVRDLPQGFSALEPLVDLPIGINITRFQTLLALHRSYLTPGDSSSGWTAGAAAYYVGYLQPRTFLLKYNENGTITDAVDCALDPLSETKCTLKSFTVEKGIYQTSNFRVLPTESIVRFPNITNLCPFGEVFNATRFASVYAWNRKRISNCVADYSVLYNSASFSTFKCYGVSPTKLNDLCFTNVYADSFVIRGDEVRQIAPGQTGKIADYNYKLPDDFTGCVIAWNSNNLDSKVGGNYNYLYRLFRKSNLKPFERDISTEIYQAGSTPCNGVEGFNCYFPLQSYGFQPTNGVGYQPYRVVVLSFELLHAPATVCGPKKSTNLVKNKCVNFNFNGLTGTGVLTESNKKFLPFQQFGRDIADTTDAVRDPQTLEILDITPCSFGGVSVITPGTNTSNQVAVLYQGVNCTEVPVAIHADQLTPTWRVYSTGSNVFQTRAGCLIGAEHVNNSYECDIPIGAGICASYQTQTNSPRRARSVASQSIIAYTMSLGAENSVAYSNNSIAIPTNFTISVTTEILPVSMTKTSVDCTMYICGDSTECSNLLLQYGSFCTQLNRALTGIAVEQDKNTQEVFAQVKQIYKTPPIKDFGGFNFSQILPDPSKPSKRSFIEDLLFNKVTLADAGFIKQYGDCLGDIAARDLICAQKFNGLTVLPPLLTDEMIAQYTSALLAGTITSGWTFGAGAALQIPFAMQMAYRFNGIGVTQNVLYENQKLIANQFNSAIGKIQDSLSSTASALGKLQDVVNQNAQALNTLVKQLSSNFGAISSVLNDILSRLDPPEAEVQIDRLITGRLQSLQTYVTQQLIRAAEIRASANLAATKMSECVLGQSKRVDFCGKGYHLMSFPQSAPHGVVFLHVTYVPAQEKNFTTAPAICHDGKAHFPREGVFVSNGTHWFVTQRNFYEPQIITTDNTFVSGNCDVVIGIVNNTVYDPLQPELDSFKEELDKYFKNHTSPDVDLGDISGINASVVNIQKEIDRLNEVAKNLNESLIDLQELGKYEQYIKWPWYIWLGFIAGLIAIVMVTIMLCCMTSCCSCLKGCCSCGSCCKFDEDDSEPVLKGVKLHYT

SEQ ID NO: 403 - protein, 1272 aa, Artificial Sequence
  SARS-CoV-2/India/1-27/2020__EPI_ISL_413522 spike protein (1-1272)(K985P_V986P)
MFVFLVLLPLVSSQCVNLTTRTQLPPAYTNSFTRGVYYPDKVFRSSVLHSTQDLFLPFFSNVTWFHAIHVSGTNGTKRFDNPVLPFNDGVYFASTEKSNIIRGWIFGTTLDSKTQSLLIVNNATNVVIKVCEFQFCNDPFLGVYHKNNKSWMESEFRVYSSANNCTFEYVSQPFLMDLEGKQGNFKNLREFVFKNIDGYFKIYSKHTPINLVRDLPQGFSALEPLVDLPIGINITRFQTLLALHRSYLTPGDSSSGWTAGAAAYYVGYLQPRTFLLKYNENGTITDAVDCALDPLSETKCTLKSFTVEKGIYQTSNFRVQPTESIVRFPNITNLCPFGEVFNATRFASVYAWNRKRISNCVADYSVLYNSASFSTFKCYGVSPTKLNDLCFTNVYADSFVIRGDEVIQIAPGQTGKIADYNYKLPDDFTGCVIAWNSNNLDSKVGGNYNYLYRLFRKSNLKPFERDISTEIYQAGSTPCNGVEGFNCYFPLQSYGFQPTNGVGYQPYRVVVLSFELLHAPATVCGPKKSTNLVKNKCVNFNFNGLTGTGVLTESNKKFLPFQQFGRDIADTTDAVRDPQTLEILDITPCSFGGVSVITPGTNTSNQVAVLYQDVNCTEVPVAIHADQLTPTWRVYSTGSNVFQTRAGCLIGAEHVNNSYECDIPIGAGICASYQTQTNSPRRARSVASQSIIAYTMSLGAENSVAYSNNSIAIPTNFTISVTTEILPVSMTKTSVDCTMYICGDSTECSNLLLQYGSFCTQLNRALTGIAVEQDKNTQEVFAQVKQIYKTPPIKDFGGFNFSQILPDPSKPSKRSFIEDLLFNKVTLADAGFIKQYGDCLGDIAARDLICAQKFNGLTVLPPLLTDEMIAQYTSALLAGTITSGWTFGAGAALQIPFAMQMAYRFNGIGVTQNVLYENQKLIANQFNSAIGKIQDSLSSTASALGKLQDVVNQNAQALNTLVKQLSSNFGAISSVLNDILSRLDPPEAEVQIDRLITGRLQSLQTYVTQQLIRAAEIRASANLAATKMSECVLGQSKRVDFCGKGYHLMSFPQSAPHGVVFLHVTYVPAQEKNFTTAPAICHDGKAHFPREGVFVSNGTHWFVTQRNFYEPQIITTDNTFVSGNCDVVIGIVNNTVYDPLQPELDSFKEELDKYFKNHTSPDVDLGDISGINASVVNIQKEIDRLNEVAKNLNESLIDLQELGKYEQYIKWPWYIWLGFIAGLIAIVMVTIMLCCMTSCCSCLKGCCSCGSCCKFDEDDSEPVLKGVKLHYT

SEQ ID NO: 404 - protein, 1267 aa, Artificial Sequence
  SARS-CoV-2/pangolin/Guangxi/P4L/2017__EPI_ISL_410538 spike protein (1-1267)(K980P_V981P)
MFVFLFVLPLVSSQCVNLTTRTGIPPGYTNSSTRGVYYPDKVFRSSILHLTQDLFLPFFSNVTWFNTINYQGGFKKFDNPVLPFNDGVYFASTEKSNIIRGWIFGTTLDARTQSLLIVNNATNVVIKVCEFQFCTDPFLGVYYHNNNKTWVENEFRVYSSANNCTFEYISQPFLMDLEGKQGNFKNLREFVFKNVDGYFKIYSKHTPIDLVRDLPRGFAALEPLVDLPIGINITRFQTLLALHRSYLTPGNLESGWTTGAAAYYVGYLQQRTFLLSYNQNGTITDAVDCSLDPLSETKCTLKSLTVEKGIYQTSNFRVQPTISIVRFPNITNLCPFGEVFNASKFASVYAWNRKRISNCVADYSVLYNSTSFSTFKCYGVSPTKLNDLCFTNVYADSFVVKGDEVRQIAPGQTGVIADYNYKLPDDFTGCVIAWNSVKQDALTGGNYGYLYRLFRKSKLKPFERDISTEIYQAGSTPCNGQVGLNCYYPLERYGFHPTTGVNYQPFRVVVLSFELLNGPATVCGPKLSTTLVKDKCVNFNFNGLTGTGVLTTSKKQFLPFQQFGRDISDTTDAVRDPQTLEILDITPCSFGGVSVITPGTNTSNQVAVLYQDVNCTEVPMAIHAEQLTPAWRVYSAGANVFQTRAGCLVGAEHVNNSYECDIPVGAGICASYHSMSSLRSVNQRSIIAYTMSLGAENSVAYSNNSIAIPTNFTISVTTEILPVSMTKTSVDCTMYICGDSIECSNLLLQYGSFCTQLNRALTGIAVEQDKNTQEVFAQVKQIYKTPPIKDFGGFNFSQILPDPSKPSKRSFIEDLLFNKVTLADAGFIKQYGDCLGDIAARDLICAQKFNGLTVLPPLLTDEMIAQYTSALLAGTITSGWTFGAGAALQIPFAMQMAYRFNGIGVTQNVLYENQKLIANQFNSAIGKIQDSLSSTASALGKLQDVVNQNAQALNTLVKQLSSNFGAISSVLNDILSRLDPPEAEVQIDRLITGRLQSLQTYVTQQLIRAAEIRASANLAATKMSECVLGQSKRVDFCGKGYHLMSFPQSAPHGVVFLHVTYVPAQEKNFTTAPAICHEGKAHFPREGVFVSNGTHWFITQRNFYEPQIITTDNTFVSGSCDVVIGIVNNTVYDPLQPELDSFKEELDKYFKNHTSPDVDLGDISGINASVVNIQKEIDRLNEVAKNLNESPIDLQELGKYEQYIKWPWYIWLGFIAGLIAIIMVTIMLCCMTSCCSCLKGCCSCGSCCKFDEDDSEPVLKGVKLHYT

SEQ ID NO: 405 - protein, 1267 aa, Artificial Sequence
  SARS-CoV-2/pangolin/Guangxi/P5L/2017__EPI_ISL_410540 spike protein (1-1267)(K980P_V981P)
MFVFLFVLPLVSSQCVNLTTRTGIPPGYTNSSTRGVYYPDKVFRSSILHLTQDLFLPFFSNVTWFNTINYQGGFKKFDNPVLPFNDGVYFASTEKSNIIRGWIFGTTLDARTQSLLIVNNATNVVIKVCEFQFCTDPFLGVYYHNNNKTWVENEFRVYSSANNCTFEYISQPFLMDLEGKQGNFKNLREFVFKNVDGYFKIYSKHTPIDLVRDLPRGFAALEPLVDLPIGINITRFQTLLALHRSYLTPGKLESGWTTGAAAYYVGYLQQRTFLLSYNQNGTITDAVDCSLDPLSETKCTLKSLTVEKGIYQTSNFRVQPTISIVRFPNITNLCPFGEVFNASKFASVYAWNRKRISNCVADYSVLYNSTSFSTFKCYGVSPTKLNDLCFTNVYADSFVVKGDEVRQIAPGQTGVIADYNYKLPDDFTGCVIAWNSVKQDALTGGNYGYLYRLFRKSKLKPFERDISTEIYQAGSTPCNGQVGLNCYYPLERYGFHPTTGVNYQPFRVVVLSFELLNGPATVCGPKLSTTLVKDKCVNFNFNGLTGTGVLTTSKKQFLPFQQFGRDISDTTDAVRDPQTLEILDITPCSFGGVSVITPGTNTSNQVAVLYQDVNCTEVPMAIHAEQLTPAWRVYSAGANVFQTRAGCLVGAEHVNNSYECDIPVGAGICASYHSMSSFRSVNQRSIIAYTMSLGAENSVAYSNNSIAIPTNFTISVTTEILPVSMTKTSVDCTMYICGDSIECSNLLLQYGSFCTQLNRALTGIAVEQDKNTQEVFAQVKQIYKTPPIKDFGGFNFSQILPDPSKPSKRSFIEDLLFNKVTLADAGFIKQYGDCLGDIAARDLICAQKFNGLTVLPPLLTDEMIAQYTSALLAGTITSGWTFGAGAALQIPFAMQMAYRFNGIGVTQNVLYENQKLIANQFNSAIGKIQDSLSSTASALGKLQDVVNQNAQALNTLVKQLSSNFGAISSVLNDILSRLDPPEAEVQIDRLITGRLQSLQTYVTQQLIRAAEIRASANLAATKMSECVLGQSKRVDFCGKGYHLMSFPQSAPHGVVFLHVTYVPAQEKNFTTAPAICHEGKAHFPREGVFVSNGTHWFITQRNFYEPQIITTDNTFVSGSCDVVIGIVNNTVYDPLQPELDSFKEELDKYFKNHTSPDVDLGDISGINASVVNIQKEIDRLNEVAKNLNESLIDLQELGKYEQYIKWPWYIWLGFIAGLIAIIMVTIMLCCMTSCCSCLKGCCSCGSCCKFDEDDSEPVLKGVKLHYT

SEQ ID NO: 406 - protein, 1267 aa, Artificial Sequence
  SARS-CoV-2/pangolin/Guangxi/P5E/2017__EPI_ISL_410541 spike protein (1-1267)(K980P_V981P)
MFVFLFVLPLVSSQCVNLTTRTGIPPGYTNSSTRGVYYPDKVFRSSILHLTQDLFLPFFSNVTWFNTITYQGGSKKFDNPVLPFNDGVYFASTEKSNIIRGWIFGTTLDARTQSLLIVNNATNVVIKVCEFQFCTDPFLGVYYHNNNKTWVENEFRVYSSANNCTFEYISQPFLMDLEGKQGNFKNLREFVFKNVDGYFKIYSKHTPIDLVRDLPRGFAALEPLVDLPIGINITRFQTLLALHRSYLTPGKLESGWTTGAAAYYVGYLQQRTFLLSYNQNGTITDAVDCSLDPLSETKCTLKSLTVEKGIYQTSNFRVQPTISIVRFPNITNLCPFGEVFNASKFASVYAWNRKRISNCVADYSVLYNSTSFSTFKCYGVSPTKLNDLCFTNVYADSFVVKGDEVRQIAPGQTGVIADYNYKLPDDFTGCVIAWNSVKQDALTGDNYGYLYRLFRKSKLKPFERDISTEIYQAGSTPCNGQVGLNCYYPLERYGFHPTTGVNYQPFRVVVLSFELLNGPATVCGPKLSTTLVKDKCVNFNFNGLTGTGVLTTSKKQFLPFQQFGRDISDTTDAVRDPQTLEILDITPCSFGGVSVITPGTNTSNQVAVLYQDVNCTEVPMAIHAEQLTPAWRVYSAGANVFQTRAGCLVGAEHVNNSYECDIPVGAGICASYHSMSSFRSVNQRSIIAYTMSLGAENSVAYSNNSIAIPTNFTISVTTEILPVSMTKTSVDCTMYICGDSIECSNLLLQYGSFCTQLNRALTGIAVEQDKNTQEVFAQVKQIYKTPPIKDFGGFNFSQILPDPSKPSKRSFIEDLLFNKVTLADAGFIKQYGDCLGDIAARDLICAQKFNGLTVLPPLLTDEMIAQYTSALLAGTITSGWTFGAGAALQIPFAMQMAYRFNGIGVTQNVLYENQKLIANQFNSAIGKIQDSLSSTASALGKLQDVVNQNAQALNTLVKQLSSNFGAISSVLNDILSRLDPPEAEVQIDRLITGRLQSLQTYVTQQLIRAAEIRASANLAATKMSECVLGQSKRVDFCGKGYHLMSFPQSAPHGVVFLHVTYVPAQEKNFTTAPAICHEGKAHFPREGVFVSNGTHWFITQRNFYEPQIITTDNTFVSGSCDVVIGIVNNTVYDPLQPELDSFKEELDKYFKNHTSPDVDLGDISGINASVVNIQKEIDRLNEVAKNLNESLIDLQELGKYEQYIKWPWYIWLGFIAGLIAIIMVTIMLCCMTSCCSCLKGCCSCGSCCKFDEDDSEPVLKGVKLHYT

SEQ ID NO: 407 - protein, 1265 aa, Artificial Sequence
  SARS-CoV-2/pangolin/Guangxi/P1E/2017__EPI_ISL_410539 spike protein (1-1265)(K978P_V979P)
MFVFLFVLPLVSSQCVNLTTRTGIQPGYTNSSTRGVYYPDKVFRSSILHLTQDLFLPFFSNVTWFNTINYQGGFKKFDNPVLPFNDGVYFASTEKSNIIRGWIFGTTLDARTQSLLIVNNATNVVIKVCEFQFCTDPFLGVYYHNNNKTWVENEFRVYSSANNCTFEYISQPFLMDLEGKQGNFKNLREFVFKNVDGYFKIYSKHTPIDLVRDLPRGFAALEPLVDLPIGINITRFQTLLALHRSYLTPGKLESGWTTGAAAYYVGYLQQRTFLLSYNQNGTITDAVDCSLDPLSETKCTLKSLTVEKGIYQTSNFRVQPTISIVRFPNITNLCPFGEVFNASKFASVYAWNRKRISNCVADYSVLYNSTSFSTFKCYGVSPTKLNDLCFTNVYADSFVVKGDEVRQIAPGQTGVIADYNYKLPDDFTGCVIAWNSVKQDALTGGNYLYRLFRKSKLKPFERDISTEIYQAGSTPCNGQVGLNCYYPLERYGFHPTTGVNYQPFRVVVLSFELLNGPATVCGPKLSTTLVKDKCVNFNFNGLTGTGVLTTSKKQFLPFQQFGRDISDTTDAVRDPQTLEILDITPCSFGGVSVITPGTNTSNQVAVLYQDVNCTEVPMAIHAEQLTPAWRVYSAGANVFQTRAGCLVGAEHVNNSYECDIPVGAGICASYHSMSSLRSVNQRSIIAYTMSLGAENSVAYSNNSIAIPTNFTISVTTEILPVSMTKTSVDCTMYICGDSIECSNLLLQYGSFCTQLNRALTGIAVEQDKNTQEVFAQVKQIYKTPPIKDFGGFNFSQILPDPSKPSKRSFIEDLLFNKVTLADAGFIKQYGDCLGDIAARDLICAQKFNGLTVLPPLLTDEMIAQYTSALLAGTITSGWTFGAGAALQIPFAMQMAYRFNGIGVTQNVLYENQKLIANQFNSAIGKIQDSLSSTASALGKLQDVVNQNAQALNTLVKQLSSNFGAISSVLNDILSRLDPPEAEVQIDRLITGRLQSLQTYVTQQLIRAAEIRASANLAATKMSECVLGQSKRVDFCGKGYHLMSFPQSAPHGVVFLHVTYVPAQEKNFTTAPAICHEGKAHFPREGVFVSNGTHWFITQRNFYEPQIITTDNTFVSGSCDVVIGIVNNTVYDPLQPELDSFKEELDKYFKNHTSPDVDLGDISGINASVVNIQKEIDRLNEVAKNLNESLIDLQELGKYEQYIKWPWYIWLGFIAGLIAIIMVTIMLCCMTSCCSCLKGCCSCGSCCKFDEDDSEPVLKGVKLHYT

SEQ ID NO: 408 - protein, 1273 aa, Artificial Sequence
  SARS-CoV-2/Wuhan/WIV05/2019__EPI_ISL_402128 spike protein (1-1273)(K986P_V987P_T887W_A1020W)
MFVFLVLLPLVSSQCVNLTTRTQLPPAYTNSFTRGVYYPDKVFRSSVLHSTQDLFLPFFSNVTWFHAIHVSGTNGTKRFDNPVLPFNDGVYFASTEKSNIIRGWIFGTTLDSKTQSLLIVNNATNVVIKVCEFQFCNDPFLGVYYHKNNKSWMESEFRVYSSANNCTFEYVSQPFLMDLEGKQGNFKNLREFVFKNIDGYFKIYSKHTPINLVRDLPQGFSALEPLVDLPIGINITRFQTLLALHRSYLTPGDSSSGWTAGAAAYYVGYLQPRTFLLKYNENGTITDAVDCALDPLSETKCTLKSFTVEKGIYQTSNFRVQPTESIVRFPNITNLCPFGEVFNATRFASVYAWNRKRISNCVADYSVLYNSASFSTFKCYGVSPTKLNDLCFTNVYADSFVIRGDEVRQIAPGQTGKIADYNYKLPDDFTGCVIAWNSNNLDSKVGGNYNYLYRLFRKSNLKPFERDISTEIYQAGSTPCNGVEGFNCYFPLQSYGFQPTNGVGYQPYRVVVLSFELLHAPATVCGPKKSTNLVKNKCVNFNFNGLTGTGVLTESNKKFLPFQQFGRDIADTTDAVRDPQTLEILDITPCSFGGVSVITPGTNTSNQVAVLYQDVNCTEVPVAIHADQLTPTWRVYSTGSNVFQTRAGCLIGAEHVNNSYECDIPIGAGICASYQTQTNSPRRARSVASQSIIAYTMSLGAENSVAYSNNSIAIPTNFTISVTTEILPVSMTKTSVDCTMYICGDSTECSNLLLQYGSFCTQLNRALTGIAVEQDKNTQEVFAQVKQIYKTPPIKDFGGFNFSQILPDPSKPSKRSFIEDLLFNKVTLADAGFIKQYGDCLGDIAARDLICAQKFNGLTVLPPLLTDEMIAQYTSALLAGTITSGWWFGAGAALQIPFAMQMAYRFNGIGVTQNVLYENQKLIANQFNSAIGKIQDSLSSTASALGKLQDVVNQNAQALNTLVKQLSSNFGAISSVLNDILSRLDPPEAEVQIDRLITGRLQSLQTYVTQQLIRAAEIRWSANLAATKMSECVLGQSKRVDFCGKGYHLMSFPQSAPHGVVFLHVTYVPAQEKNFTTAPAICHDGKAHFPREGVFVSNGTHWFVTQRNFYEPQIITTDNTFVSGNCDVVIGIVNNTVYDPLQPELDSFKEELDKYFKNHTSPDVDLGDISGINASVVNIQKEIDRLNEVAKNLNESLIDLQELGKYEQYIKWPWYIWLGFIAGLIAIVMVTIMLCCMTSCCSCLKGCCSCGSCCKFDEDDSEPVLKGVKLHYT

SEQ ID NO: 409 - protein, 1269 aa, Artificial Sequence
  SARS-CoV-2/bat/Yunnan/RaTG13/2013__EPI_ISL_402131 spike protein (1-1269)(K982P_V983P_T883W_A1016W)
MFVFLVLLPLVSSQCVNLTTRTQLPPAYTNSSTRGVYYPDKVFRSSVLHLTQDLFLPFFSNVTWFHAIHVSGTNGIKRFDNPVLPFNDGVYFASTEKSNIIRGWIFGTTLDSKTQSLLIVNNATNVVIKVCEFQFCNDPFLGVYYHKNNKSWMESEFRVYSSANNCTFEYVSQPFLMDLEGKQGNFKNLREFVFKNIDGYFKIYSKHTPINLVRDLPPGFSALEPLVDLPIGINITRFQTLLALHRSYLTPGDSSSGWTAGAAAYYVGYLQPRTFLLKYNENGTITDAVDCALDPLSETKCTLKSFTVEKGIYQTSNFRVQPTDSIVRFPNITNLCPFGEVFNATTFASVYAWNRKRISNCVADYSVLYNSTSFSTFKCYGVSPTKLNDLCFTNVYADSFVITGDEVRQIAPGQTGKIADYNYKLPDDFTGCVIAWNSKHIDAKEGGNFNYLYRLFRKANLKPFERDISTEIYQAGSKPCNGQTGLNCYYPLYRYGFYPTDGVGHQPYRVVVLSFELLNAPATVCGPKKSTNLVKNKCVNFNFNGLTGTGVLTESNKKFLPFQQFGRDIADTTDAVRDPQTLEILDITPCSFGGVSVITPGTNASNQVAVLYQDVNCTEVPVAIHADQLTPTWRVYSTGSNVFQTRAGCLIGAEHVNNSYECDIPIGAGICASYQTQTNSRSVASQSIIAYTMSLGAENSVAYSNNSIAIPTNFTISVTTEILPVSMTKTSVDCTMYICGDSTECSNLLLQYGSFCTQLNRALTGIAVEQDKNTQEVFAQVKQIYKTPPIKDFGGFNFSQILPDPSKPSKRSFIEDLLFNKVTLADAGFIKQYGDCLGDIAARDLICAQKFNGLTVLPPLLTDEMIAQYTSALLAGTITSGWWFGAGAALQIPFAMQMAYRFNGIGVTQNVLYENQKLIANQFNSAIGKIQDSLSSTASALGKLQDVVNQNAQALNTLVKQLSSNFGAISSVLNDILSRLDPPEAEVQIDRLITGRLQSLQTYVTQQLIRAAEIRWSANLAATKMSECVLGQSKRVDFCGKGYHLMSFPQSAPHGVVFLHVTYVPAQEKNFTTAPAICHDGKAHFPREGVFVSNGTHWFVTQRNFYEPQIITTDNTFVSGSCDVVIGIVNNTVYDPLQPELDSFKEELDKYFKNHTSPDVDLGDISGINASVVNIQKEIDRLNEVAKNLNESLIDLQELGKYEQYIKWPWYIWLGFIAGLIAIIMVTIMLCCMTSCCSCLKGCCSCGSCCKFDEDDSEPVLKGVKLHYT

SEQ ID NO: 410 - protein, 1273 aa, Artificial Sequence
  SARS-CoV-2/Wuhan/HBCDC-HB-01/2019__EPI_ISL_402132 spike protein (1-1273)(K986P_V987P_T887W_A1020W)
MFVFLVLLPLVSSQCVNLTTRTQLPPAYTNSITRGVYYPDKVFRSSVLHSTQDLFLPFFSNVTWFHAIHVSGTNGTKRFDNPVLPFNDGVYFASTEKSNIIRGWIFGTTLDSKTQSLLIVNNATNVVIKVCEFQFCNDPFLGVYYHKNNKSWMESEFRVYSSANNCTFEYVSQPFLMDLEGKQGNFKNLREFVFKNIDGYFKIYSKHTPINLVRDLPQGFSALEPLVDLPIGINITRFQTLLALHRSYLTPGDSSSGWTAGAAAYYVGYLQPRTFLLKYNENGTITDAVDCALDPLSETKCTLKSFTVEKGIYQTSNFRVQPTESIVRFPNITNLCPFGEVFNATRFASVYAWNRKRISNCVADYSVLYNSASFSTFKCYGVSPTKLNDLCFTNVYADSFVIRGDEVRQIAPGQTGKIADYNYKLPDDFTGCVIAWNSNNLDSKVGGNYNYLYRLFRKSNLKPFERDISTEIYQAGSTPCNGVEGFNCYFPLQSYGFQPTNGVGYQPYRVVVLSFELLHAPATVCGPKKSTNLVKNKCVNFNFNGLTGTGVLTESNKKFLPFQQFGRDIADTTDAVRDPQTLEILDITPCSFGGVSVITPGTNTSNQVAVLYQDVNCTEVPVAIHADQLTPTWRVYSTGSNVFQTRAGCLIGAEHVNNSYECDIPIGAGICASYQTQTNSPRRARSVASQSIIAYTMSLGAENSVAYSNNSIAIPTNFTISVTTEILPVSMTKTSVDCTMYICGDSTECSNLLLQYGSFCTQLNRALTGIAVEQDKNTQEVFAQVKQIYKTPPIKDFGGFNFSQILPDPSKPSKRSFIEDLLFNKVTLADAGFIKQYGDCLGDIAARDLICAQKFNGLTVLPPLLTDEMIAQYTSALLAGTITSGWWFGAGAALQIPFAMQMAYRFNGIGVTQNVLYENQKLIANQFNSAIGKIQDSLSSTASALGKLQDVVNQNAQALNTLVKQLSSNFGAISSVLNDILSRLDPPEAEVQIDRLITGRLQSLQTYVTQQLIRAAEIRWSANLAATKMSECVLGQSKRVDFCGKGYHLMSFPQSAPHGVVFLHVTYVPAQEKNFTTAPAICHDGKAHFPREGVFVSNGTHWFVTQRNFYEPQIITTDNTFVSGNCDVVIGIVNNTVYDPLQPELDSFKEELDKYFKNHTSPDVDLGDISGINASVVNIQKEIDRLNEVAKNLNESLIDLQELGKYEQYIKWPWYIWLGFIAGLIAIVMVTIMLCCMTSCCSCLKGCCSCGSCCKFDEDDSEPVLKGVKLHYT

SEQ ID NO: 411 - protein, 1273 aa, Artificial Sequence
  SARS-CoV-2/Guangdong/20SF028/2020__EPI_ISL_403936 spike protein (1-1273)(K986P_V987P_T887W_A1020W)
MFVFLVLLPLVSSQCVNLTTRTQLPPAYTNSFTRGVYYPDKVFRSSVLYSTQDLFLPFFSNVTWFHAIHVSGTNGTKRFDNPVLPFNDGVYFASTEKSNIIRGWIFGTTLDSKTQSLLIVNNATNVVIKVCEFQFCNDPFLGVYYHKNNKSWMESEFRVYSSANNCTFEYVSQPFLMDLEGKQGNFKNLREFVFKNIDGYFKIYSKHTPINLVRDLPQGFSALEPLVDLPIGINITRFQTLLALHRSYLTPGDSSSGWTAGAAAYYVGYLQPRTFLLKYNENGTITDAVDCALDPLSETKCTLKSFTVEKGIYQTSNFRVQPTESIVRFPNITNLCPFGEVFNATRFASVYAWNRKRISNCVADYSVLYNSASFSTFKCYGVSPTKLNDLCFTNVYADSFVIRGDEVRQIAPGQTGKIADYNYKLPDDFTGCVIAWNSNNLDSKVGGNYNYLYRLFRKSNLKPFERDISTEIYQAGSTPCNGVEGFNCYFPLQSYGFQPTNGVGYQPYRVVVLSFELLHAPATVCGPKKSTNLVKNKCVNFNFNGLTGTGVLTESNKKFLPFQQFGRDIADTTDAVRDPQTLEILDITPCSFGGVSVITPGTNTSNQVAVLYQDVNCTEVPVAIHADQLTPTWRVYSTGSNVFQTRAGCLIGAEHVNNSYECDIPIGAGICASYQTQTNSPRRARSVASQSIIAYTMSLGAENSVAYSNNSIAIPTNFTISVTTEILPVSMTKTSVDCTMYICGDSTECSNLLLQYGSFCTQLNRALTGIAVEQDKNTQEVFAQVKQIYKTPPIKDFGGFNFSQILPDPSKPSKRSFIEDLLFNKVTLADAGFIKQYGDCLGDIAARDLICAQKFNGLTVLPPLLTDEMIAQYTSALLAGTITSGWWFGAGAALQIPFAMQMAYRFNGIGVTQNVLYENQKLIANQFNSAIGKIQDSLSSTASALGKLQDVVNQNAQALNTLVKQLSSNFGAISSVLNDILSRLDPPEAEVQIDRLITGRLQSLQTYVTQQLIRAAEIRWSANLAATKMSECVLGQSKRVDFCGKGYHLMSFPQSAPHGVVFLHVTYVPAQEKNFTTAPAICHDGKAHFPREGVFVSNGTHWFVTQRNFYEPQIITTDNTFVSGNCDVVIGIVNNTVYDPLQPELDSFKEELDKYFKNHTSPDVDLGDISGINASVVNIQKEIDRLNEVAKNLNESLIDLQELGKYEQYIKWPWYIWLGFIAGLIAIVMVTIMLCCMTSCCSCLKGCCSCGSCCKFDEDDSEPVLKGVKLHYT

SEQ ID NO: 412 - protein, 1273 aa, Artificial Sequence
  SARS-CoV-2/Shenzhen/SZTH-001/2020__EPI_ISL_406592 spike protein (1-1273)(K986P_V987P_T887W_A1020W)
MFVFLVLLPLVSSQCVNLTTRTQLPPAYTNSFTRGVYYPDKVFRSSVLHSTQDLFLPFFSNVTWFHAIHVSGTNGTKRFDNPVLPFNDGVYFASTEKSNIIRGWIFGTTLDSKTQSLLIVNNATNVVIKVCEFQFCNDPFLGVYYHKNNKSWMESEFRVYSSANNCTFEYVSQPFLMDLEGKQGNFKNLREFVFKNIDGYFKIYSKHTPINLVRDLPQGFSALEPLVDLPIGINITRFQTLLALHRSYLTPGDSSSGWTAGAAAYYVGYLQPRTFLLKYNENGTITDAVDCALDPLSETKCTLKSFTVEKGIYQTSNFRVQPTESIVRFPNITNLCPFGEVFNATRFASVYAWNRKRISNCVADYSVLYNSASFSTFKCYGVSPTKLNDLCFTNVYADSFVIRGDEVRQIAPGQTGKIADYNYKLPDDFTGCVIAWNSNNLDSKVGGNYNYLYRLFRKSNLKPFERDISTEIYQAGSTPCNGVEGFNCYFPLQSYGFQPTNGVGYQPYRVVVLSFELLHAPATVCGPKKSTNLVKNKCVNFNFNGLTGTGVLTESNKKFLPFQQFGRDIADTTDAVRDPQTLEILDITPCSFGGVSVITPGTNTSNQVAVLYQDVNCTEVPVAIHADQLTPTWRVYSTGSNVFQTRAGCLIGAEHVNNSYECDIPIGAGICASYQTQTNSPRRARSVASQSIIAYTMSLGAENSVAYSNNSIAIPTNFTISVTTEILPVSMTKTSVDCTMYICGDSTECSNLLLQYGSFCTQLNRALTGIAVEQDKNTQEVFAQVKQIYKTPPIKDFGGFNFSQILPDPSKPSKRSFIEDLLFNKVTLADAGFIKQYGDCLGDIAARDLICAQKFNGLTVLPPLLTDEMIAQYTSALLAGTITSGWWFGAGAALQIPFAMQMAYRFNGIGVTQNVLYENQKLIANQFNSAIGKIQDSLSSTASALGKLQDVVNQNAQALNTLVKQLSSNFGAISSVLNDILSRLDPPEAEVQIDRLITGRLQSLQTYVTQQLIRAAEIRWSANLAATKMSECVLGQSKRVDFCGKGYHLMSFPQSAPHGVVFLHVTYVPAQEKNFTTAPAICHDGKAHFPREGVFVSNGTHWFVTQRNFYEPQIITTDNTFVSGNCDVLIGIVNNTVYDPLQPELDSFKEELDKYFKNHTSPDVDLGDISGINASVVNIQKEIDRLNEVAKNLNESLIDLQELGKYEQYIKWPWYIWLGFIAGLIAIVMVTIMLCCMTSCCSCLKGCCSCGSCCKFDEDDSGPVLKGVKLHYT

SEQ ID NO: 413 - protein, 1273 aa, Artificial Sequence
  SARS-CoV-2/Shenzhen/SZTH-004/2020__EPI_ISL_406595 spike protein (1-1273)(K986P_V987P_T887W_A1020W)
MFVFLVLLPLVSSQCVNLTTRTQLPPAYTNSFTRGVYYPDKVFRSSVLHSTQDLFLPFFSNVTWFHAIHVSGTNGTKRFDNPVLPFNDGVYFASTEKSNIIRGWIFGTTLDSKTQSLLIVNNATNVVIKVCEFQFCNDPFLGVYYHKNNKSWMESEFRVYSSANNCTFEYVSQPFLMDLEGKQGNFKNLREFVFKNIDGYFKIYSKHTPINLVRDLPQGFSALEPLVDLPIGINITRFQTLLALHRSYLTPGDSSSGWTAGAAAYYVGYLQPRTFLLKYNENGTITDAVDCALDPLSETKCTLKSFTVEKGIYQTSNFRVQPTESIVRFPNITNLCPFGEVFNATRFASVYAWDRKRISNCVAYYSVLYNSASFSTFKCYGVSPTKLNDLCFTNVYADSFVIRGDEVRQIAPGQTGKIADYNYKLPDDFTGCVIAWNSNNLDSKVGGNYNYLYRLFRKSNLKPFERDISTEIYQAGSTPCNGVEGFNCYFPLQSYGFQPTNGVGYQPYRVVVLSFELLHAPATVCGPKKSTNLVKNKCVNFNFNGLTGTGVLTESNKKFLPFQQFGRDIADTTDAVRDPQTLEILDITPCSFGGVSVITPGTNTSNQVAVLYQDVNCTEVPVAIHADQLTPTWRVYSTGSNVFQTRAGCLIGAEHVNNSYECDIPIGAGICASYQTQTNSPRRARSVASQSIIAYTMSLGAENSVAYSNNSIAIPTNFTISVTTEILPVSMTKTSVDCTMYICGDSTECSNLLLQYGSFCTQLNRALTGIAVEQDKNTQEVFAQVKQIYKTPPIKDFGGFNFSQILPDPSKPSKRSFIEDLLFNKVTLADAGFIKQYGDCLGDIAARDLICAQKFNGLTVLPPLLTDEMIAQYTSALLAGTITSGWWFGAGAALQIPFAMQMAYRFNGIGVTQNVLYENQKLIANQFNSAIGKIQDSLSSTASALGKLQDVVNQNAQALNTLVKQLSSNFGAISSVLNDILSRLDPPEAEVQIDRLITGRLQSLQTYVTQQLIRAAEIRWSANLAATKMSECVLGQSKRVDFCGKGYHLMSFPQSAPHGVVFLHVTYVPAQEKNFTTAPAICHDGKAHFPREGVFVSNGTHWFVTQRNFYEPQIITTDNTFVSGNCDVVIGIVNNTVYDPLQPELDSFKEELDKYFKNHTSPDVDLGDISGINASVVNIQKEIDRLNEVAKNLNESLIDLQELGKYEQYIKWPWYIWLGFIAGLIAIVMVTIMLCCMTSCCSCLKGCCSCGSCCKFDEDDSEPVLKGVKLHYT

SEQ ID NO: 414 - protein, 1273 aa, Artificial Sequence
  SARS-CoV-2/France/IDF0372/2020__EPI_ISL_406596 spike protein (1-1273)(K986P_V987P_T887W_A1020W)
MFVFLVLLPLVSSQCVNLTTRTQLPPAYTNSFTRGVYYPDKVFRSSVLHSTQDLFLPFFSNVTWFHAIHVSGTNGTKRFDNPVLPFNDGVYFASTEKSNIIRGWIFGTTLDSKTQSLLIVNNATNVVIKVCEFQFCNDPFLGVYYHKNNKSWMESEFRVYSSANNCTFEYVSQPFLMDLEGKQGNFKNLREFVFKNIDGYFKIYSKHTPINLVRDLPQGFSALEPLVDLPIGINITRFQTLLALHRSYLTPGDSSSGWTAGAAAYYVGYLQPRTFLLKYNENGTITDAVDCALDPLSETKCTLKSFTVEKGIYQTSNFRVQPTESIVRFPNITNLCPFGEVFNATRFASVYAWNRKRISNCVADYSFLYNSASFSTFKCYGVSPTKLNDLCFTNVYADSFVIRGDEVRQIAPGQTGKIADYNYKLPDDFTGCVIAWNSNNLDSKVGGNYNYLYRLFRKSNLKPFERDISTEIYQAGSTPCNGVEGFNCYFPLQSYGFQPTNGVGYQPYRVVVLSFELLHAPATVCGPKKSTNLVKNKCVNFNFNGLTGTGVLTESNKKFLPFQQFGRDIADTTDAVRDPQTLEILDITPCSFGGVSVITPGTNTSNQVAVLYQDVNCTEVPVAIHADQLTPTWRVYSTGSNVFQTRAGCLIGAEHVNNSYECDIPIGAGICASYQTQTNSPRRARSVASQSIIAYTMSLGAENSVAYSNNSIAIPTNFTISVTTEILPVSMTKTSVDCTMYICGDSTECSNLLLQYGSFCTQLNRALTGIAVEQDKNTQEVFAQVKQIYKTPPIKDFGGFNFSQILPDPSKPSKRSFIEDLLFNKVTLADAGFIKQYGDCLGDIAARDLICAQKFNGLTVLPPLLTDEMIAQYTSALLAGTITSGWWFGAGAALQIPFAMQMAYRFNGIGVTQNVLYENQKLIANQFNSAIGKIQDSLSSTASALGKLQDVVNQNAQALNTLVKQLSSNFGAISSVLNDILSRLDPPEAEVQIDRLITGRLQSLQTYVTQQLIRAAEIRWSANLAATKMSECVLGQSKRVDFCGKGYHLMSFPQSAPHGVVFLHVTYVPAQEKNFTTAPAICHDGKAHFPREGVFVSNGTHWFVTQRNFYEPQIITTDNTFVSGNCDVVIGIVNNTVYDPLQPELDSFKEELDKYFKNHTSPDVDLGDISGINASVVNIQKEIDRLNEVAKNLNESLIDLQELGKYEQYIKWPWYIWLGFIAGLIAIVMVTIMLCCMTSCCSCLKGCCSCGSCCKFDEDDSEPVLKGVKLHYT

SEQ ID NO: 415 - protein, 1273 aa, Artificial Sequence
  SARS-CoV-2/Australia/VIC01/2020__EPI_ISL_406844 spike protein (1-1273)(K986P_V987P_T887W_A1020W)
MFVFLVLLPLVSSQCVNLTTRTQLPPAYTNSFTRGVYYPDKVFRSSVLHSTQDLFLPFFSNVTWFHAIHVSGTNGTKRFDNPVLPFNDGVYFASTEKSNIIRGWIFGTTLDSKTQSLLIVNNATNVVIKVCEFQFCNDPFLGVYYHKNNKSWMESEFRVYSSANNCTFEYVSQPFLMDLEGKQGNFKNLREFVFKNIDGYFKIYSKHTPINLVRDLPQGFSALEPLVDLPIGINITRFQTLLALHRRYLTPGDSSSGWTAGAAAYYVGYLQPRTFLLKYNENGTITDAVDCALDPLSETKCTLKSFTVEKGIYQTSNFRVQPTESIVRFPNITNLCPFGEVFNATRFASVYAWNRKRISNCVADYSVLYNSASFSTFKCYGVSPTKLNDLCFTNVYADSFVIRGDEVRQIAPGQTGKIADYNYKLPDDFTGCVIAWNSNNLDSKVGGNYNYLYRLFRKSNLKPFERDISTEIYQAGSTPCNGVEGFNCYFPLQSYGFQPTNGVGYQPYRVVVLSFELLHAPATVCGPKKSTNLVKNKCVNFNFNGLTGTGVLTESNKKFLPFQQFGRDIADTTDAVRDPQTLEILDITPCSFGGVSVITPGTNTSNQVAVLYQDVNCTEVPVAIHADQLTPTWRVYSTGSNVFQTRAGCLIGAEHVNNSYECDIPIGAGICASYQTQTNSPRRARSVASQSIIAYTMSLGAENSVAYSNNSIAIPTNFTISVTTEILPVSMTKTSVDCTMYICGDSTECSNLLLQYGSFCTQLNRALTGIAVEQDKNTQEVFAQVKQIYKTPPIKDFGGFNFSQILPDPSKPSKRSFIEDLLFNKVTLADAGFIKQYGDCLGDIAARDLICAQKFNGLTVLPPLLTDEMIAQYTSALLAGTITSGWWFGAGAALQIPFAMQMAYRFNGIGVTQNVLYENQKLIANQFNSAIGKIQDSLSSTASALGKLQDVVNQNAQALNTLVKQLSSNFGAISSVLNDILSRLDPPEAEVQIDRLITGRLQSLQTYVTQQLIRAAEIRWSANLAATKMSECVLGQSKRVDFCGKGYHLMSFPQSAPHGVVFLHVTYVPAQEKNFTTAPAICHDGKAHFPREGVFVSNGTHWFVTQRNFYEPQIITTDNTFVSGNCDVVIGIVNNTVYDPLQPELDSFKEELDKYFKNHTSPDVDLGDISGINASVVNIQKEIDRLNEVAKNLNESLIDLQELGKYEQYIKWPWYIWLGFIAGLIAIVMVTIMLCCMTSCCSCLKGCCSCGSCCKFDEDDSEPVLKGVKLHYT

SEQ ID NO: 416 - protein, 1273 aa, Artificial Sequence
  SARS-CoV-2/Germany/BavPat1/2020__EPI_ISL_406862 spike protein (1-1273)(K986P_V987P_T887W_A1020W)
MFVFLVLLPLVSSQCVNLTTRTQLPPAYTNSFTRGVYYPDKVFRSSVLHSTQDLFLPFFSNVTWFHAIHVSGTNGTKRFDNPVLPFNDGVYFASTEKSNIIRGWIFGTTLDSKTQSLLIVNNATNVVIKVCEFQFCNDPFLGVYYHKNNKSWMESEFRVYSSANNCTFEYVSQPFLMDLEGKQGNFKNLREFVFKNIDGYFKIYSKHTPINLVRDLPQGFSALEPLVDLPIGINITRFQTLLALHRSYLTPGDSSSGWTAGAAAYYVGYLQPRTFLLKYNENGTITDAVDCALDPLSETKCTLKSFTVEKGIYQTSNFRVQPTESIVRFPNITNLCPFGEVFNATRFASVYAWNRKRISNCVADYSVLYNSASFSTFKCYGVSPTKLNDLCFTNVYADSFVIRGDEVRQIAPGQTGKIADYNYKLPDDFTGCVIAWNSNNLDSKVGGNYNYLYRLFRKSNLKPFERDISTEIYQAGSTPCNGVEGFNCYFPLQSYGFQPTNGVGYQPYRVVVLSFELLHAPATVCGPKKSTNLVKNKCVNFNFNGLTGTGVLTESNKKFLPFQQFGRDIADTTDAVRDPQTLEILDITPCSFGGVSVITPGTNTSNQVAVLYQGVNCTEVPVAIHADQLTPTWRVYSTGSNVFQTRAGCLIGAEHVNNSYECDIPIGAGICASYQTQTNSPRRARSVASQSIIAYTMSLGAENSVAYSNNSIAIPTNFTISVTTEILPVSMTKTSVDCTMYICGDSTECSNLLLQYGSFCTQLNRALTGIAVEQDKNTQEVFAQVKQIYKTPPIKDFGGFNFSQILPDPSKPSKRSFIEDLLFNKVTLADAGFIKQYGDCLGDIAARDLICAQKFNGLTVLPPLLTDEMIAQYTSALLAGTITSGWWFGAGAALQIPFAMQMAYRFNGIGVTQNVLYENQKLIANQFNSAIGKIQDSLSSTASALGKLQDVVNQNAQALNTLVKQLSSNFGAISSVLNDILSRLDPPEAEVQIDRLITGRLQSLQTYVTQQLIRAAEIRWSANLAATKMSECVLGQSKRVDFCGKGYHLMSFPQSAPHGVVFLHVTYVPAQEKNFTTAPAICHDGKAHFPREGVFVSNGTHWFVTQRNFYEPQIITTDNTFVSGNCDVVIGIVNNTVYDPLQPELDSFKEELDKYFKNHTSPDVDLGDISGINASVVNIQKEIDRLNEVAKNLNESLIDLQELGKYEQYIKWPWYIWLGFIAGLIAIVMVTIMLCCMTSCCSCLKGCCSCGSCCKFDEDDSEPVLKGVKLHYT

SEQ ID NO: 417 - protein, 1273 aa, Artificial Sequence
  SARS-CoV-2/Wuhan/HBCDC-HB-02/2020__EPI_ISL_412978 spike protein (1-1273)(K986P_V987P_T887W_A1020W)
MFVFLVLLPLVSSQCVNLTTRTQLPPAYTNSFTRGVYYPDKVFRSSVLHSTQDLFLPFFSNVTWFHAIHVSGTNGTKRFDNPVLPFNDGVYFASTEKSNIIRGWIFGTTLDSKTQSLLIVNNATNVVIKVCEFQFCNDPFLGVYYHKNNKSWMESEFRVYSSANNCTFEYVSQPFLMDLEGKQGNFKNLREFVFKNIDGYFKIYSKHTPINLVRDLPQGFSALEPLVDLPIGINITRFQTLLALHRSYLTPGDSSSGWTAGAAAYYVGYLQPRTFLLKYNENGTITDAVDCALDPLSETKCTLKSFTVEKGIYQTSNFRVQPTESIVRFPNITNLCPFGEVFNATRFASVYAWNRKRISNCVADYSVLYNSASFSTFKCYGVSPTKLNDLCFTNVYADSFVIRGDEVRQIAPGQTGKIADYNYKLPDDFTGCVIAWNSNNLDSKVGGNYNYLYRLFRKSNLKPFERDISTEIYQAGSTPCNGVEGFNCYFPLQSYGFQPTNGVGYQPYRVVVLSFELLHAPATVCGPKKSTNLVKNKCVNFNFNGLTGTGVLTESNKKFLPFQQFGRDIADTTDAVRDPQTLEILDITPCSFGGVSVITPGTNTSNQVAVLYQDVNCTEVPVAIHADQLTPTWRVYSTGSNVFQTRAGCLIGAEHVNNSYECDIPIGAGICASYQTQTNSPRRARSVASQSIIAYTMSLGAENSVAYSNNSIAIPTNFTISVTTEILPVSMTKTSVDCTMYICGDSTECSNFLLQYGSFCTQLNRALTGIAVEQDKNTQEVFAQVKQIYKTPPIKDFGGFNFSQILPDPSKPSKRSFIEDLLFNKVTLADAGFIKQYGDCLGDIAARDLICAQKFNGLTVLPPLLTDEMIAQYTSALLAGTITSGWWFGAGAALQIPFAMQMAYRFNGIGVTQNVLYENQKLIANQFNSAIGKIQDSLSSTASALGKLQDVVNQNAQALNTLVKQLSSNFGAISSVLNDILSRLDPPEAEVQIDRLITGRLQSLQTYVTQQLIRAAEIRWSANLAATKMSECVLGQSKRVDFCGKGYHLMSFPQSAPHGVVFLHVTYVPAQEKNFTTAPAICHDGKAHFPREGVFVSNGTHWFVTQRNFYEPQIITTDNTFVSGNCDVVIGIVNNTVYDPLQPELDSFKEELDKYFKNHTSPDVDLGDISGINASVVNIQKEIDRLNEVAKNLNESLIDLQELGKYEQYIKWPWYIWLGFIAGLIAIVMVTIMLCCMTSCCSCLKGCCSCGSCCKFDEDDSEPVLKGVKLHYT

SEQ ID NO: 418 - protein, 1273 aa, Artificial Sequence
  SARS-CoV-2/Australia/QLD02/2020__EPI_ISL_407896 spike protein (1-1273)(K986P_V987P_T887W_A1020W)
MFVFLVLLPLVSSQCVNLTTRTQLPPAYTNSFTRGVYYPDKVFRSSVLHSTQDLFLPFFSNVTWFHAIHVSGTNGTKRFDNPVLPFNDGVYFASTEKSNIIRGWIFGTTLDSKTQSLLIVNNATNVVIKVCEFQFCNDPFLGVYYHKNNKSWMESEFRVYSSANNCTFEYVSQPFLMDLEGKQGNFKNLREFVFKNIDGYFKIYSKHTPINLVRDLPQGFSALEPLVDLPIGINITRFQTLLALHRSYLTPGDSSSGWTAGAAAYYVGYLQPRTFLLKYNENGTITDAVDCALDPLSETKCTLKSFTVEKGIYQTSNFRVQPTESIVRFPNITNLCPFGEVFNATRFASVYAWNRKRISNCVADYSVLYNSASFSTFKCYGVSPTKLNDLCFTNVYADSFVIRGDEVRQIAPGQTGKIADYNYKLPDDFTGCVIAWNSNNLDSKVGGNYNYLYRLFRKSNLKPFERDISTEIYQAGSTPCNGVEGFNCYFPLQSYGFQPTNGVGYQPYRVVVLSFELLHAPATVCGPKKSTNLVKNKCVNFNFNGLTGTGVLTESNKKFLPFQQFGRDIADTTDAVRDPQTLEILDITPCSFGGVSVITPGTNTSNQVAVLYQDVNCTEVPVAIHADQLTPTWRVYSTGSNVFQTRAGCLIGAEHVNNSYECDIPIGAGICASYQTQTNSPRRARSVASQSIIAYTMSLGAENSVAYSNNSIAIPTNFTISVTTEILPVSMTKTSVDCTMYICGDSTECSNLLLQYGSFCTQLNRALTGIAVEQDKNTQEVFAQVKQIYKTPPIKDFGGFNFSQILPDPSKPSKRSFIEDLLFNKVTLADAGFIKQYGDCLGDIAARDLICAQKFNGLTVLPPLLTDEMIAQYTSALLAGTITSGWWFGAGAALQIPFAMQMAYRFNGIGVTQNVLYENQKLIANQFNSAIGKIQDSLSSTASALGKLQDVVNQNAQALNTLVKQLSSNFGAISSVLNDILSRLDPPEAEVQIDRLITGRLQSLQTYVTQQLIRAAEIRWSANLAATKMSECVLGQSKRVDFCGKGYHLMSFPQSAPHGVVFLHVTYVPAQEKNFTTAPAICHDGKAHFPREGVFVSNGTHWFVTQRNFYEPQIITTDNTFVSGNCDVVIGIVNNTVYDPLQLELDSFKEELDKYFKNHTSPDVDLGDISGINASVVNIQKEIDRLNEVAKNLNESLIDLQELGKYEQYIKWPWYIWLGFIAGLIAIVMVTIMLCCMTSCCSCLKGCCSCGSCCKFDEDDSEPVLKGVKLHYT

SEQ ID NO: 419 - protein, 1273 aa, Artificial Sequence
  SARS-CoV-2/India/1-31/2020__EPI_ISL_413523 spike protein (1-1273)(K986P_V987P_T887W_A1020W)
MFVFLVLLPLVSSQCVNLTTRTQLPPAYTNSFTRGVYYPDKVFRSSVLHSTQDLFLPFFSNVTWFHAIHVSGTNGTKRFDNPVLPFNDGVYFASTEKSNIIRGWIFGTTLDSKTQSLLIVNNATNVVIKVCEFQFCNDPFLGVYYHKNNKSWMESEFRVYSSANNCTFEYVSQPFLMDLEGKQGNFKNLREFVFKNIDGYFKIYSKHTPINLVRDLPQGFSALEPLVDLPIGINITRFQTLLALHRSYLTPGDSSSGWTAGAAAYYVGYLQPRTFLLKYNENGTITDAVDCALDPLSETKCTLKSFTVEKGIYQTSNFRVQPTESIVRFPNITNLCPFGEVFNATRFASVYAWNRKRISNCVADYSVLYNSASFSTFKCYGVSPTKLNDLCFTNVYADSFVIRGDEVRQIAPGQTGKIADYNYKLPDDFTGCVIAWNSNNLDSKVGGNYNYLYRLFRKSNLKPFERDISTEIYQAGSTPCNGVEGFNCYFPLQSYGFQPTNGVGYQPYRVVVLSFELLHAPATVCGPKKSTNLVKNKCVNFNFNGLTGTGVLTESNKKFLPFQQFGRDIADTTDAVRDPQTLEILDITPCSFGGVSVITPGTNTSNQVAVLYQDVNCTEVPVAIHADQLTPTWRVYSTGSNVFQTRAGCLIGAEHVNNSYECDIPIGAGICASYQTQTNSPRRARSVASQSIIAYTMSLGAENSVAYSNNSIAIPTNFTISVTTEILPVSMTKTSVDCTMYICGDSTECSNLLLQYGSFCTQLNRALTGIAVEQDKNTQEVFAQVKQIYKTPPIKDFGGFNFSQILPDPSKPSKRSFIEDLLFNKVTLADAGFIKQYGDCLGDIAARDLICAQKFNGLTVLPPLLTDEMIAQYTSALLAGTITSGWWFGAGAALQIPFAMQMAYRFNGIGVTQNVLYENQKLIANQFNSVIGKIQDSLSSTASALGKLQDVVNQNAQALNTLVKQLSSNFGAISSVLNDILSRLDPPEAEVQIDRLITGRLQSLQTYVTQQLIRAAEIRWSANLAATKMSECVLGQSKRVDFCGKGYHLMSFPQSAPHGVVFLHVTYVPAQEKNFTTAPAICHDGKAHFPREGVFVSNGTHWFVTQRNFYEPQIITTDNTFVSGNCDVVIGIVNNTVYDPLQPELDSFKEELDKYFKNHTSPDVDLGDISGINASVVNIQKEIDRLNEVAKNLNESLIDLQELGKYEQYIKWPWYIWLGFIAGLIAIVMVTIMLCCMTSCCSCLKGCCSCGSCCKFDEDDSEPVLKGVKLHYT

SEQ ID NO: 420 - protein, 1273 aa, Artificial Sequence
  SARS-CoV-2/Guangdong/GD2020087-P0008/2020__EPI_ISL_413863 spike protein (1-1273)(K986P_V987P_T887W_A1020W)
MFVFLVLLPLVSSQCVNLTTRTQLPPAYTNSFTRGVYYPDKVFRSSVLHSTQDLFLPFFSNVTWFHAIHVSGTNGTKRFDNPVLPFNDGVYFASTEKSNIIRGWIFGTTLDSKTQSLLIVNNATNVVIKVCEFQFCNDPFLGVYYHKNNKSWMESEFRVYSSANNCTFEYVSQPFLMDLEGKQGNFKNLREFVFKNIDGYFKIYSKHTPINLVRDLPQGFSALEPLVDLPIGINITRFQTLLALHRSYLTPGDSSSGWTAGAAAYYVGYLQPRTFLLKYNENGTITDAVDCALDPLSETKCTLKSFTVEKGIYQTSNFRVQPTESIVRFPNITNLCPFGEVFNATRFASVYAWNRKRISNCVADYSVLYNSASFSTFKCYGVSPTKLNDLCFTNVYADSFVIRGDEVREIAPGQTGKIADYNYKLPDDFTGCVIAWNSNNLDSKVGGNYNYLYRLFRKSNLKPFERDISTEIYQAGSTPCNGVEGFNCYFPLQSYGFQPTNGVGYQPYRVVVLSFELLHAPATVCGPKKSTNLVKNKCVNFNFNGLTGTGVLTESNKKFLPFQQFGRDIADTTDAVRDPQTLEILDITPCSFGGVSVITPGTNTSNQVAVLYQDVNCTEVPVAIHADQLTPTWRVYSTGSNVFQTRAGCLIGAEHVNNSYECDIPIGAGICASYQTQTNSPRRARSVASQSIIAYTMSLGAENSVAYSNNSIAIPTNFTISVTTEILPVSMTKTSVDCTMYICGDSTECSNLLLQYGSFCTQLNRALTGIAVEQDKNTQEVFAQVKQIYKTPPIKDFGGFNFSQILPDPSKPSKRSFIEDLLFNKVTLADAGFIKQYGDCLGDIAARDLICAQKFNGLTVLPPLLTDEMIAQYTSALLAGTITSGWWFGAGAALQIPFAMQMAYRFNGIGVTQNVLYENQKLIANQFNSAIGKIQDSLSSTASALGKLQDVVNQNAQALNTLVKQLSSNFGAISSVLNDILSRLDPPEAEVQIDRLITGRLQSLQTYVTQQLIRAAEIRWSANLAATKMSECVLGQSKRVDFCGKGYHLMSFPQSAPHGVVFLHVTYVPAQEKNFTTAPAICHDGKAHFPREGVFVSNGTHWFVTQRNFYEPQIITTDNTFVSGNCDVVIGIVNNTVYDPLQPELDSFKEELDKYFKNHTSPDVDLGDISGINASVVNIQKEIDRLNEVAKNLNESLIDLQELGKYEQYIKWPWYIWLGFIAGLIAIVMVTIMLCCMTSCCSCLKGCCSCGSCCKFDEDDSEPVLKGVKLHYT

SEQ ID NO: 421 - protein, 1273 aa, Artificial Sequence
  SARS-CoV-2/Sweden/01/2020__EPI_ISL_411951 spike protein (1-1273)(K986P_V987P_T887W_A1020W)
MFVFLVLLPLVSSQCVNLTTRTQLPPAYTNSFTRGVYYPDKVFRSSVLHSTQDLFLPFFSNVTWFHAIHVSGTNGTKRFDNPVLPFNDGVYFASTEKSNIIRGWIFGTTLDSKTQSLLIVNNATNVVIKVCEFQFCNDPFLGVYYHKNNKSWMESEFRVYSSANNCTFEYVSQPFLMDLEGKQGNFKNLREFVFKNIDGYFKIYSKHTPINLVRDLPQGFSALEPLVDLPIGINITRFQTLLALHRSYLTPGDSSSGWTAGAAAYYVGYLQPRTFLLKYNENGTITDAVDCALDPLSETKCTLKSFTVEKGIYQTSNFRVQPTESIVRFPNITNLCPFGEVFNATRFASVYAWNRKRISNCVADYSVLYNSASFSTFKCYGVSPTKLNDLCFTNVYADSFVIRGDEVRQIAPGQTGKIADYNYKLPDDFTGCVIAWNSNNLDSKVGGNYNYLYRLFRKSNLKPFERDISTEIYQAGSTPCNGVEGFNCYFPLQSYGFQPTNGVGYQPYRVVVLSFELLHAPATVCGPKKSTNLVKNKCVNFNFNGLTGTGVLTESNKKFLPFQQFGRDIADTTDAVRDPQTLEILDITPCSFGGVSVITPGTNTSNQVAVLYQDVNCTEVPVAIHADQLTPTWRVYSTGSNVFQTRAGCLIGAEHVNNSYECDIPIGAGICASYQTQTNSPRRARSVASQSIIAYTMSLGAENSVAYSNNSIAIPTNFTISVTTEILPVSMTKTSVDCTMYICGDSTECSNLLLQYGSFCTQLNRALTGIAVEQDKNTQEVFAQVKQIYKTPPIKDCGGFNFSQILPDPSKPSKRSFIEDLLFNKVTLADAGFIKQYGDCLGDIAARDLICAQKFNGLTVLPPLLTDEMIAQYTSALLAGTITSGWWFGAGAALQIPFAMQMAYRFNGIGVTQNVLYENQKLIANQFNSAIGKIQDSLSSTASALGKLQDVVNQNAQALNTLVKQLSSNFGAISSVLNDILSRLDPPEAEVQIDRLITGRLQSLQTYVTQQLIRAAEIRWSANLAATKMSECVLGQSKRVDFCGKGYHLMSFPQSAPHGVVFLHVTYVPAQEKNFTTAPAICHDGKAHFPREGVFVSNGTHWFVTQRNFYEPQIITTDNTFVSGNCDVVIGIVNNTVYDPLQPELDSFKEELDKYFKNHTSPDVDLGDISGINASVVNIQKEIDRLNEVAKNLNESLIDLQELGKYEQYIKWPWYIWLGFIAGLIAIVMVTIMLCCMTSCCSCLKGCCSCGSCCKFDEDDSEPVLKGVKLHYT

SEQ ID NO: 422 - protein, 1273 aa, Artificial Sequence
  SARS-CoV-2/Tianmen/HBCDC-HB-07/2020__EPI_ISL_412983 spike protein (1-1273)(K986P_V987P_T887W_A1020W)
MFVFLVLLPLVSSQCVNLTTRTQLPPAYTNSFTRGVYYPDKVFRSSVLHSTQDLFLPFFSNVTWFHAIHVSGTNGTKRFDNPVLPFNDGVYFASTEKSNIIRGWIFGTTLDSKTQSLLIVNNATNVVIKVCEFQFCNDPFLGVYYHKNNKSWMESEFRVYSSANNCTFEYVSQPFLMDLEGKQGNFKNLREFVFKNIDGYFKIYSKHTPINLVRDLPQGFSALEPLVDLPIGINITRFQTLLALHRSYLTPGDSSSGWTAGAAAYYVGYLQPRTFLLKYNENGTITDAVDCALDPLSETKCTLKSFTVEKGIYQTSNFRVQPTESIVRFPNITNLCPFGEVFNATRFASVYAWNRKRISNCVADYSVLYNSASFSTFKCYGVSPTKLNDLCFTNVYADSFVIRGDEVRQIAPGQTGKIADYNYKLPDDFTGCVIAWNSNNLDSKVGGNYNYLYRLFRKSNLKPFERDISTEIYQAGSTPCNGVEGFNCYFPLQSYGFQPTNGVGYQPYRVVVLSFELLHAPATVCGPKKSTNLVKNKCVNFNFNGLTGTGVLTESNKKFLPFQQFGRDIADTTDAVRDPQTLEILDITPCSFGGVSVITPGTNTSNQVAVLYQDLNCTEVPVAIHADQLTPTWRVYSTGSNVFQTRAGCLIGAEHVNNSYECDIPIGAGICASYQTQTNSPRRARSVASQSIIAYTMSLGAENSVAYSNNSIAIPTNFTISVTTEILPVSMTKTSVDCTMYICGDSTECSNLLLQYGSFCTQLNRALTGIAVEQDKNTQEVFAQVKQIYKTPPIKDFGGFNFSQILPDPSKPSKRSFIEDLLFNKVTLADAGFIKQYGDCLGDIAARDLICAQKFNGLTVLPPLLTDEMIAQYTSALLAGTITSGWWFGAGAALQIPFAMQMAYRFNGIGVTQNVLYENQKLIANQFNSAIGKIQDSLSSTASALGKLQDVVNQNAQALNTLVKQLSSNFGAISSVLNDILSRLDPPEAEVQIDRLITGRLQSLQTYVTQQLIRAAEIRWSANLAATKMSECVLGQSKRVDFCGKGYHLMSFPQSAPHGVVFLHVTYVPAQEKNFTTAPAICHDGKAHFPREGVFVSNGTHWFVTQRNFYEPQIITTDNTFVSGNCDVVIGIVNNTVYDPLQPELDSFKEELDKYFKNHTSPDVDLGDISGINASVVNIQKEIDRLNEVAKNLNESLIDLQELGKYEQYIKWPWYIWLGFIAGLIAIVMVTIMLCCMTSCCSCLKGCCSCGSCCKFDEDDSEPVLKGVKLHYT

SEQ ID NO: 423 - protein, 1273 aa, Artificial Sequence
  SARS-CoV-2/Hong Kong/case42_VM20002493/2020__EPI_ISL_414527 spike protein (1-1273)(K986P_V987P_T887W_A1020W)
MFVFLVLLPLVSSQCVNLTTRTQLPPAYTNSFTRGVYYPDKVFRSSVLHSTQDLFLPFFSNVTWFHAIHVSGTNGTKRFDNPVLPFNDGVYFASTEKSNIIRGWIFGTTLDSKTQSLLIVNNATNVVIKVCEFQFCNDPFLGVYYHKNNKSWMESEFRVYSSANNCTFEYVSQPFLMDLEGKQGNFKNLREFVFKNIDGYFKIYSKHTPINLVRDLPQGFSALEPLVDLPIGINITRFQTLLALHRSYLTPGDSSSGWTAGAAAYYVGYLQPRTFLLKYNENGTITDAVDCALDPLSETKCTLKSFTVEKGIYQTSNFRVQPTESIVRFPNITNLCPFGEVFNATRFASVYAWNRKRISNCVADYSVLYNSASFSTFKCYGVSPTKLNDLCFTNVYADSFVIRGDEVRQIAPGQTGKIADYNYKLPDDFTGCVIAWNSNNLDSKVGGNYNYLYRLFRKSNLKPFERDISTEIYQAGSTPCNGVEGFNCYFPLQSYGFQPTNGVGYQPYRVVVLSFELLHAPATVCGPKKSTNLVKNKCVNFNFNGLTGTGVLTESNKKFLPFQQFGRDIADTTDAVRDPQTLEILDITPCSFGGVSVITPGTNTSNQVAVLYQDVNCTEVPVAIHADQLTPTWRVYSTGSNVFQTRAGCLIGAEHVNNSYECDIPIGAGICASYQTQTNSPRRARSVASQSIIAYTMSLGAENSVAYSNNSIAIPTNFAISVTTEILPVSMTKTSVDCTMYICGDSTECSNLLLQYGSFCTQLNRALTGIAVEQDKNTQEVFAQVKQIYKTPPIKDFGGFNFSQILPDPSKPSKRSFIEDLLFNKVTLADAGFIKQYGDCLGDIAARDLICAQKFNGLTVLPPLLTDEMIAQYTSALLAGTITSGWWFGAGAALQIPFAMQMAYRFNGIGVTQNVLYENQKLIANQFNSAIGKIQDSLSSTASALGKLQDVVNQNAQALNTLVKQLSSNFGAISSVLNDILSRLDPPEAEVQIDRLITGRLQSLQTYVTQQLIRAAEIRWSANLAATKMSECVLGQSKRVDFCGKGYHLMSFPQSAPHGVVFLHVTYVPAQEKNFTTAPAICHDGKAHFPREGVFVSNGTHWFVTQRNFYEPQIITTDNTFVSGNCDVVIGIVNNTVYDPLQPELDSFKEELDKYFKNHTSPDVDLGDISGINASVVNIQKEIDRLNEVAKNLNESLIDLQELGKYEQYIKWPWYIWLGFIAGLIAIVMVTIMLCCMTSCCSCLKGCCSCGSCCKFDEDDSEPVLKGVKLHYT

SEQ ID NO: 424 - protein, 1273 aa, Artificial Sequence
  SARS-CoV-2/USA/CruiseA-23/2020__EPI_ISL_414482 spike protein (1-1273)(K986P_V987P_T887W_A1020W)
MFVFLVLLPLVSSQCVNLTTRTQLPPAYTNSFTRGVYYPDKVFRSSVLHSTQDLFLPFFSNVTWFHAIHVSGTNGTKRFDNPVLPFNDGVYFASTEKSNIIRGWIFGTTLDSKTQSLLIVNNATNVVIKVCEFQFCNDPFLGVYYHKNNKSWMESEFRVYSSANNCTFEYVSQPFLMDLEVKQGNFKNLREFVFKNIDGYFKIYSKHTPINLVRDLPQGFSALEPLVDLPIGINITRFQTLLALHRSYLTPGDSSSGWTAGAAAYYVGYLQPRTFLLKYNENGTITDAVDCALDPLSETKCTLKSFTVEKGIYQTSNFRVQPTESIVRFPNITNLCPFGEVFNATRFASVYAWNRKRISNCVADYSVLYNSASFSTFKCYGVSPTKLNDLCFTNVYADSFVIRGDEVRQIAPGQTGKIADYNYKLPDDFTGCVIAWNSNNLDSKVGGNYNYLYRLFRKSNLKPFERDISTEIYQAGSTPCNGVEGFNCYFPLQSYGFQPTNGVGYQPYRVVVLSFELLHAPATVCGPKKSTNLVKNKCVNFNFNGLTGTGVLTESNKKFLPFQQFGRDIADTTDAVRDPQTLEILDITPCSFGGVSVITPGTNTSNQVAVLYQDVNCTEVPVAIHADQLTPTWRVYSTGSNVFQTRAGCLIGAEHVNNSYECDIPIGAGICASYQTQTNSPRRARSVASQSIIAYTMSLGAENSVAYSNNSIAIPTNFTISVTTEILPVSMTKTSVDCTMYICGDSTECSNLLLQYGSFCTQLNRALTGIAVEQDKNTQEVFAQVKQIYKTPPIKDFGGFNFSQILPDPSKPSKRSFIEDLLFNKVTLADAGFIKQYGDCLGDIAARDLICAQKFNGLTVLPPLLTDEMIAQYTSALLAGTITSGWWFGAGAALQIPFAMQMAYRFNGIGVTQNVLYENQKLIANQFNSAIGKIQDSLSSTASALGKLQDVVNQNAQALNTLVKQLSSNFGAISSVLNDILSRLDPPEAEVQIDRLITGRLQSLQTYVTQQLIRAAEIRWSANLAATKMSECVLGQSKRVDFCGKGYHLMSFPQSAPHGVVFLHVTYVPAQEKNFTTAPAICHDGKAHFPREGVFVSNGTHWFVTQRNFYEPQIITTDNTFVSGNCDVVIGIVNNTVYDPLQPELDSFKEELDKYFKNHTSPDVDLGDISGINASVVNIQKEIDRLNEVAKNLNESLIDLQELGKYEQYIKWPWYIWLGFIAGLIAIVMVTIMLCCMTSCCSCLKGCCSCGSCCKFDEDDSEPVLKGVKLHYT

SEQ ID NO: 425 - protein, 1273 aa, Artificial Sequence
  SARS-CoV-2/Hong Kong/case85_VM20002868/2020__EPI_ISL_414519 spike protein (1-1273)(K986P_V987P_T887W_A1020W)
MFVFLVLVPLVSSQCVNLTTRTQLPPAYTNSFTRGVYYPDKVFRSSVLHSTQDLFLPFFSNVTWFHAIHVSGTNGTKRFDNPVLPFNDGVYFASTEKSNIIRGWIFGTTLDSKTQSLLIVNNATNVVIKVCEFQFCNDPFLGVYYHKNNKSWMESEFRVYSSANNCTFEYVSQPFLMDLEGKQGNFKNLREFVFKNIDGYFKIYSKHTPINLVRDLPQGFSALEPLVDLPIGINITRFQTLLALHRSYLTPGDSSSGWTAGAAAYYVGYLQPRTFLLKYNENGTITDAVDCALDPLSETKCTLKSFTVEKGIYQTSNFRVQPTESIVRFPNITNLCPFGEVFNATRFASVYAWNRKRISNCVADYSVLYNSASFSTFKCYGVSPTKLNDLCFTNVYADSFVIRGDEVRQIAPGQTGKIADYNYKLPDDFTGCVIAWNSNNLDSKVGGNYNYLYRLFRKSNLKPFERDISTEIYQAGSTPCNGVEGFNCYFPLQSYGFQPTNGVGYQPYRVVVLSFELLHAPATVCGPKKSTNLVKNKCVNFNFNGLTGTGVLTESNKKFLPFQQFGRDIADTTDAVRDPQTLEILDITPCSFGGVSVITPGTNTSNQVAVLYQDVNCTEVPVAIHADQLTPTWRVYSTGSNVFQTRAGCLIGAEHVNNSYECDIPIGAGICASYQTQTNSPRRARSVASQSIIAYTMSLGAENSVAYSNNSIAIPTNFTISVTTEILPVSMTKTSVDCTMYICGDSTECSNLLLQYGSFCTQLNRALTGIAVEQDKNTQEVFAQVKQIYKTPPIKDFGGFNFSQILPDPSKPSKRSFIEDLLFNKVTLADAGFIKQYGDCLGDIAARDLICAQKFNGLTVLPPLLTDEMIAQYTSALLAGTITSGWWFGAGAALQIPFAMQMAYRFNGIGVTQNVLYENQKLIANQFNSAIGKIQDSLSSTASALGKLQDVVNQNAQALNTLVKQLSSNFGAISSVLNDILSRLDPPEAEVQIDRLITGRLQSLQTYVTQQLIRAAEIRWSANLAATKMSECVLGQSKRVDFCGKGYHLMSFPQSAPHGVVFLHVTYVPAQEKNFTTAPAICHDGKAHFPREGVFVSNGTHWFVTQRNFYEPQIITTDNTFVSGNCDVVIGIVNNTVYDPLQPELDSFKEELDKYFKNHTSPDVDLGDISGINASVVNIQKEIDRLNEVAKNLNESLIDLQELGKYEQYIKWPWYIWLGFIAGLIAIVMVTIMLCCMTSCCSCLKGCCSCGSCCKFDEDDSEPVLKGVKLHYT

SEQ ID NO: 426 - protein, 1273 aa, Artificial Sequence
  SARS-CoV-2/England/200990660/2020__EPI_ISL_414523 spike protein (1-1273)(K986P_V987P_T887W_A1020W)
MFVFLVLLPLVSSQCVNLTTRTQLPPAYTNSFTRGVYYPDKVFRSSVLHSTQDLFLPFFSNVTWFHAIHVSGTNGTKRFDNPVLPFNDGVYFASTEKSNIIRGWIFGTTLDSKTQSLLIVNNATNVVIKVCEFQFCNDPFLGVYYHKNNKSWMESEFRVYSSANNCTFEYVSQPFLMDLEGKQGNFKNLREFVFKNIDGYFKIYSKHTPINLVRDLPQGFSALEPLVDLPIGINITRFQTLLALHRSYLTPGDSSSGWTAGAAAYYVGYLQPRTFLLKYNENGTITDAVDCALDPLSETKCTLKSFTVEKGIYQTSNFRVQPTESIVRFPNITNLCPFGEVFNATRFASVYAWNRKRISNCVADYSVLYNSASFSTFKCYGVSPTKLNDLCFTNVYADSFVIRGDEVRQIAPGQTGKIADYNYKLPDDFTGCVIAWNSNNLDSKVGGNYNYLYRLFRKSNLKPFERDISTEIYQAGSTPCNGVEGFNCYFPLQSYGFQPTNGVGYQPYRVVVLSFELLHAPATVCGPKKSTNLVKNKCVNFNFNGLTGTGVLTESNKKFLPFQQFGRDIADTTDAVRDPQTLEILDITPCSFGGVSVITPGTNTSNQVAVLYQGVNCTEVPVAIHADQLTPTWRVYSTGSNVFQTRAGCLIGAEHVNNSYECDIPIGAGICASYQTQTNSPRRARSVASQSIIAYTMSLGAENSVAYSNNSIAIPTNFTISVTTEILPVSMTKTSVDCTMYICGDSTECSNLLLQYGSFCTQLNRALTGIAVEQDKNTQEVFAQVKQIYKTPPIKDFGGFNFSQILPDPSKPSKRSFIEDLLFNKVTLADAGFIKQYGDCLGDIAARDLICAQKFNGLTVLPPLLTDEMIAQYTSALLAGTITSGWWFGAGAALQIPFAMQMAYRFNGIGVTQNVLYENQKLIANQFNSAIGKIQDSLSSTASALGKLQDVVNQNAQALNTLVKQLSSNFGAISSVLNDILSRLDPPEAEVQIDRLITGRLQSLQTYVTQQLIRAAEIRWSANLAATKMSECVLGQSKRVDFCGKGYHLMSFPQSAPHGVVFLHVTYVPAQEKNFTTAPAICHDGKAHFPREGVFVSNGTHWFVTQRNFYEPQIITTDNTFVSGNCDVVIGIVNNTVYDPLQPELDSFKEELDKYFKNHTSPDVDLGDISGINASVVNIQKEIDRLNEVAKNLNESLIDLQELGKYEQYIKWPWYIWLGFIAGLIAIVMVTIMLCCMTSCCSCLKGCCSCGSCCKFDEDDSELVLKGVKLHYT

SEQ ID NO: 427 - protein, 1273 aa, Artificial Sequence
  SARS-CoV-2/Australia/NSW09/2020__EPI_ISL_413595 spike protein (1-1273)(K986P_V987P_T887W_A1020W)
MFVFLVLLPLVSSQCVNLTTRTQLPPAYTNSFTRGVYYPDKVFRSSVLHSTQDLFLPFFSNVTWFHAIHVSGTNGTKRFDNPVLPFNDGVYFASTEKSNIIRGWIFGTTLDSKTQSLLIVNNATNVVIKVCEFQFCNDPFLGVYYHKNNKSWMESEFRVYSSANNCTFEYVSQPFLMDLEGKQGNFKNLREFVFKNIDGYFKIYSKHTPINLVRDLPQGFSALEPLVDLPIGINITRFQTLLALHRSYLTPGDSSSGWTAGAAAYYVGYLQPRTFLLKYNENGTITDAVDCALDPLSETKCTLKSFTVEKGIYQTSNFRVQPTESIVRFPNITNLCPFGEVFNATRFASVYAWNRKRISNCVADYSVLYNSASFSTFKCYGVSPTKLNDLCFTNVYADSFVIRGDEVRQIAPGQTGKIADYNYKLPDDFTGCVIAWNSNNLDSKVGGNYNYLYRLFRKSNLKPFERDISTEIYQAGSTPCNGVEGFNCYFPLQSYGFQPTNGVGYQPYRVVVLSFELLHAPATVCGPKKSTNLVKNKCVNFNFNGLTGTGVLTESNKKFLPFQQFGRDIADTTDAVRDPQTLEILDITPCSFGGVSVITPGTNTSNQVAVLYQDVNCTEVPVAIHADQLTPTWRVYSTGSNVFQTRAGCLIGAEHVNNSYECDIPIGAGICASYQTQTNSPRRARSVASQSIIAYTMSLGAENSVAYSNNSIAIPTNFTISVTTEILPVSMTKTSVDCTMYICGDSTECSNLLLQYGSFCTQLNRALTGIAVEQDKNTQEVFAQVKQIYKTPPIKDFGGFNFSQILPDPSKPSKRSFIEDLLFNKVTLADAGFIKQYGDCLGDIAARDLICAQKFNGLTVLPPLLTDEMIAQYTSALLAGTITSGWWFGAGAALQIPFAMQMAYRFNGIGVTQNVLYENQKLIANQFNSAIGKIQDSLSFTASALGKLQDVVNQNAQALNTLVKQLSSNFGAISSVLNDILSRLDPPEAEVQIDRLITGRLQSLQTYVTQQLIRAAEIRWSANLAATKMSECVLGQSKRVDFCGKGYHLMSFPQSAPHGVVFLHVTYVPAQEKNFTTAPAICHDGKAHFPREGVFVSNGTHWFVTQRNFYEPQIITTDNTFVSGNCDVVIGIVNNTVYDPLQPELDSFKEELDKYFKNHTSPDVDLGDISGINASVVNIQKEIDRLNEVAKNLNESLIDLQELGKYEQYIKWPWYIWLGFIAGLIAIVMVTIMLCCMTSCCSCLKGCCSCGSCCKFDEDDSEPVLKGVKLHYT

SEQ ID NO: 428 - protein, 1273 aa, Artificial Sequence
  SARS-CoV-2/Australia/NSW10/2020__EPI_ISL_413596 spike protein (1-1273)(K986P_V987P_T887W_A1020W)
MFVFLVLLPLVSSQCVNLTTRTQLPPAYTNSFTRGVYYPDKVFRSSVLHSTQDLFLPFFSNVTWFHAIHVSGTNGTKRFDNPVLPFNDGVYFASTEKSNIIRGWIFGTTLDSKTQSLLIVNNATNVVIKVCEFQFCNDPFLGVYYHKNNKSWMESEFRVYSSANNCTFEYVSQPFLMDLEGKQGNFKNLREFVFKNIDGYFKIYSKHTPINLVRDLPQGFSALEPLVDLPIGINITRFQTLLALHRSYLTPGDSSSGWTAGAAAYYVGYLQPRTFLLKYNENGTITDAVDCALDPLSETKCTLKSFTVEKGIYQTSNFRVQPTESIVRFPNITNLCPFGEVFNATRFASVYAWNRKRISNCVADYSVLYNSASFSTFKCYGVSPTKLNDLCFTNVYADSFVIRGDEVRQIAPGQTGKIADYNYKLPDDFTGCVIAWNSNNLDSKVGGNYNYLYRLFRKSNLKPFERDISTEIYQAGSTPCNGVEGFNCYFPLQSYGFQPTNGVGYQPYRVVVLSFELLHAPATVCGPKKSTNLVKNKCVNFNFNGLTGTGVLTESNKKFLPFQQFGRDIADTTDAVRDPQTLEILDITPCSFGGVSVITPGTNTSNQVAVLYQDVNCTEVPVAIHADQLTPTWRVYSTGSNVFQTRAGCLIGAEHVNNSYECDIPIGAGICASYQTQTNSPRRARSVASQSIIAYTMSLGAENSVAYSNNSIAIPTNFTISVTTEILPVSMTKTSVDCTMYICGDSTECSNLLLQYGSFCTQLNRALTGIAVEQDKNTQEVFAQVKQIYKTPPIKDFGGFNFSQILPDPSKPSKRSFIEDLLFNKVTLADAGFIKQYGDCLGDIAARDLICAQKFNGLTVLPPLLTDEMIAQYTSALLAGTITSGWWFGAGAALQIPFAMQMAYRFNGIGVTQNVLYENQKLIANQFNSAIGKIQDSLSSTASALGKLQDVVNQNAQALNTLVKQLSSNFGAISSVLNDILSRLDPPEAEVQIDRLITGRLQSLQTYVTQQLIRAAEIRWSANLAATKMSECVLGQSKRVDFCGKGYHLMSFPQSAPHGVVFLHVTYVPAQEKNFTTAPAICHDGKAHFPREGVFVSNGTHWFVTQRNFYEPQIITTDNTFVSGNCDVVIGIVNNTVYDPLQPELDSFKEELDKYFKNHTSPDVDLGDISGINASVVNIQKEIDRLNEVAKNLNESLIDLQELGKYEQYIKWPWYIWLGFIAGLIAIVMVTIMLCCMTSCCSCLKGCCSCGSCFKFDEDDSEPVLKGVKLHYT

SEQ ID NO: 429 - protein, 1273 aa, Artificial Sequence
  SARS-CoV-2/Switzerland/1000477797/2020__EPI_ISL_413023 spike protein (1-1273)(K986P_V987P_T887W_A1020W)
MFVFLVLLPLVSSQCVNLTTRTQLPPAYTNSFTRGVYYPDKVFRSSVLHSTQDLFLPFFSNVTWFHAIHVSGTNGTKRFDNPVLPFNDGVYFASTEKSNIIRGWIFGTTLDSKTQSLLIVNNATNVVIKVCEFQFCNDPFLGVYYHKNNKSWMESEFRVYSSANNCTFEYVSQPFLMDLEGKQGNFKNLREFVFKNIDGYFNIYSKHTPINLVRDLPQGFSALEPLVDLPIGINITRFQTLLALHRSYLTPGDSSSGWTAGAAAYYVGYLQPRTFLLKYNENGTITDAVDCALDPLSETKCTLKSFTVEKGIYQTSNFRVQPTESIVRFPNITNLCPFGEVFNATRFASVYAWNRKRISNCVADYSVLYNSASFSTFKCYGVSPTKLNDLCFTNVYADSFVIRGDEVRQIAPGQTGKIADYNYKLPDDFTGCVIAWNSNNLDSKVGGNYNYLYRLFRKSNLKPFERDISTEIYQAGSTPCNGVEGFNCYFPLQSYGFQPTNGVGYQPYRVVVLSFELLHAPATVCGPKKSTNLVKNKCVNFNFNGLTGTGVLTESNKKFLPFQQFGRDIADTTDAVRDPQTLEILDITPCSFGGVSVITPGTNTSNQVAVLYQGVNCTEVPVAIHADQLTPTWRVYSTGSNVFQTRAGCLIGAEHVNNSYECDIPIGAGICASYQTQTNSPRRARSVASQSIIAYTMSLGAENSVAYSNNSIAIPTNFTISVTTEILPVSMTKTSVDCTMYICGDSTECSNLLLQYGSFCTQLNRALTGIAVEQDKNTQEVFAQVKQIYKTPPIKDFGGFNFSQILPDPSKPSKRSFIEDLLFNKVTLADAGFIKQYGDCLGDIAARDLICAQKFNGLTVLPPLLTDEMIAQYTSALLAGTITSGWWFGAGAALQIPFAMQMAYRFNGIGVTQNVLYENQKLIANQFNSAIGKIQDSLSSTASALGKLQDVVNQNAQALNTLVKQLSSNFGAISSVLNDILSRLDPPEAEVQIDRLITGRLQSLQTYVTQQLIRAAEIRWSANLAATKMSECVLGQSKRVDFCGKGYHLMSFPQSAPHGVVFLHVTYVPAQEKNFTTAPAICHDGKAHFPREGVFVSNGTHWFVTQRNFYEPQIITTDNTFVSGNCDVVIGIVNNTVYDPLQPELDSFKEELDKYFKNHTSPDVDLGDISGINASVVNIQKEIDRLNEVAKNLNESLIDLQELGKYEQYIKWPWYIWLGFIAGLIAIVMVTIMLCCMTSCCSCLKGCCSCGSCCKFDEDDSEPVLKGVKLHYT

SEQ ID NO: 430 - protein, 1273 aa, Artificial Sequence
  SARS-CoV-2/Belgium/BA-02291/2020__EPI_ISL_415159 spike protein (1-1273)(K986P_V987P_T887W_A1020W)
MFVFLVLLPLVSSQCVNLTTRTQLPPAYTNSFTRGVYYPDKVFRSSVLHSTQDLFLPFFSNVTWFHAIHVSGTNGTKRFDNPVLPFNDGVYFASTEKSNIIRGWIFGTTLDSKTQSLLIVNNATNVVIKVCEFQFCNDPFLGVYYHKNNKSWMESEFRVYSSANNCTFEYVSQPFLMDLEGKQGNFKNLREFVFKNIDGYFKIYSKHTPINLVRDLPQGFSALEPLVDLPIGINITRFQTLLALHRSYLTPGDSSSGWTAGAAAYYVGYLQPRTFLLKYNENGTITDAVDCALDPLSETKCTLKSFTVEKGIYQTSNFRVQPTESIVRFPNITNLCPFGEVFNATRFASVYAWNRKRISNCVADYSVLYNSASFSTFKCYGVSPTKLNDLCFTNVYADSFVIRGDEVRQIAPGQTGKIADYNYKLPDDFTGCVIAWNSNNLDSKVGGNYNYLYRLFRRSNLKPFERDISTEIYQAGSTPCNGVEGFNCYFPLQSYGFQPTNGVGYQPYRVVVLSFELLPAPATVCGPKKSTNLVKNKCVNFNFNGLTGTGVLTESNKKFLPFQQFGRDIADTTDAVRDPQTLEILDITPCSFGGVSVITPGTNTSNQVAVLYQGVNCTEVPVAIHADQLTPTWRVYSTGSNVFQTRAGCLIGAEHVNNSYECDIPIGAGICASYQTQTNSPRRARSVASQSIIAYTMSLGAENSVAYSNNSIAIPTNFTISVTTEILPVSMTKTSVDCTMYICGDSTECSNLLLQYGSFCTQLNRALTGIAVEQDKNTQEVFAQVKQIYKTPPIKDFGGFNFSQILPDPSKPSKRSFIEDLLFNKVTLADAGFIKQYGDCLGDIAARDLICAQKFNGLTVLPPLLTDEMIAQYTSALLAGTITSGWWFGAGAALQIPFAMQMAYRFNGIGVTQNVLYENQKLIANQFNSAIGKIQDSLSSAAPALGKLQDVVNQNAQALNTLVKQLSSNFGAISSVLNDILSRLDPPEAEVQIDRLITGRLQSLQTYVTQQLIRAAEIRWSANLAATKMSECVLGQSKRVDFCGKGYHLMSFPQSAPHGVVFLHVTYVPAQEKNFTTAPAICHDGKAHFPREGVFVSNGTHWFVTQRNFYEPQIITTDNTFVSGNCDVVIGIVNNTVYDPLQPELDSFKEELDKYFKNHTSPDVDLGDISGINASVVNIQKEIDRLNEVAKNLNESLIDLQELGKYEQYIKWPWYIWLGFIAGLIAIVMVTIMLCCMTSCCSCLKGCCSCGSCCKFDEDDSEPVLKGVKLHYT

SEQ ID NO: 431 - protein, 1273 aa, Artificial Sequence
  SARS-CoV-2/USA/WA8-UW5/2020__EPI_ISL_413486 spike protein (1-1273)(K986P_V987P_T887W_A1020W)
MFVFLVLLPLVSSQCVNLTTRTQLPPAYTNSFTRGVYYPDKVFRSSVLHSTQDLFLPFFSNVTWFHAIHVSGTNGTKRFDNPVLPFNDGVYFASTEKSNIIRGWIFGTTLDSKTQSLLIVNNATNVVIKVCEFQFCNDPFLGVYYHKNNKSWMESEFRVYSSANNCTFEYVSQPFLMDLEGKQGNFKNLREFVFKNIDGYFKIYSKHTPINLVRDLPQGFSALEPLVDLPIGINITRFQTLLALHRSYLTPGDSSSGWTAGAAAYYVGYLQPRTFLLKYNENGTITDAVDCALDPLSETKCTLKSFTVEKGIYQTSNFRVQPTESIVRFPNITNLCPFGEVFNATRFASVYAWNRKRISNCVADYSVLYNSASFSTFKCYGVSPTKLNDLCFTNVYADSFVIRGDEVRQIAPGQTGKIADYNYKLPDDFTGCVIAWNSNNLDSKVGGNYNYLYRLFRKSNLKPFERDISTEIYQAGSTPCNGVEGFNCYFPLQSYGFQPTNGVGYQPYRVVVLSFELLHAPATVCGPKKSTNLVKNKCVNFNFNGLTGTGVLTESNKKFLPFQQFGRDIADTTDAVRDPQTLEILDITPCSFGGVSVITPGTNTSNQVAVLYQDVNCTEVPVAIHADQLTPTWRVYSTGSNVFQTRAGCLIGAEYVNNSYECDIPIGAGICASYQTQTNSPRRARSVASQSIIAYTMSLGAENSVAYSNNSIAIPTNFTISVTTEILPVSMTKTSVDCTMYICGDSTECSNLLLQYGSFCTQLNRALTGIAVEQDKNTQEVFAQVKQIYKTPPIKDFGGFNFSQILPDPSKPSKRSFIEDLLFNKVTLADAGFIKQYGDCLGDIAARDLICAQKFNGLTVLPPLLTDEMIAQYTSALLAGTITSGWWFGAGAALQIPFAMQMAYRFNGIGVTQNVLYENQKLIANQFNSAIGKIQDSLSSTASALGKLQDVVNQNAQALNTLVKQLSSNFGAISSVLNDILSRLDPPEAEVQIDRLITGRLQSLQTYVTQQLIRAAEIRWSANLAATKMSECVLGQSKRVDFCGKGYHLMSFPQSAPHGVVFLHVTYVPAQEKNFTTAPAICHDGKAHFPREGVFVSNGTHWFVTQRNFYEPQIITTDNTFVSGNCDVVIGIVNNTVYDPLQPELDSFKEELDKYFKNHTSPDVDLGDISGINASVVNIQKEIDRLNEVAKNLNESLIDLQELGKYEQYIKWPWYIWLGFIAGLIAIVMVTIMLCCMTSCCSCLKGCCSCGSCCKFDEDDSEPVLKGVKLHYT

SEQ ID NO: 432 - protein, 1273 aa, Artificial Sequence
  SARS-CoV-2/England/20102000506/2020__EPI_ISL_415147 spike protein (1-1273)(K986P_V987P_T887W_A1020W)
MFVFLVLLPLVSSQCVNLTTRTQLPPAYTNSFTRGVYYPDKVFRSSVLHSTQDLFLPFFSNVTWFHAIHVSGTNGTKRFDNPVLPFNDGVYFASTEKSNIIRGWIFGTTLDSKTQSLLIVNNATNVVIKVCEFQFCNDPFLGVYYHKNNKSWMESEFRVYSSANNCTFEYVSQPFLMDLEGKQGNFKNLREFVFKNIDGYFKIYSKHTPINLVRDLPQGFSALEPLVDLPIGINITRFQTLLALHRSYLTPGDSSSGWTAGAAAYYVGYLQPRTFLLKYNENGTITDAVDCALDPLSETKCTLKSFTVEKGIYQTSNFRVQPTESIVRFPNITNLCPFGEVFNATRFASVYAWNRKRISNCVADYSVLYNSASFSTFKCYGVSPTKLNDLCFTNVYADSFVIRGDEVRQIAPGQTGKIADYNYKLPDDFTGCVIAWNSNNLDSKVGGNYNYLYRLFRKSNLKPFERDISTEIYQAGSTPCNGVEGFNCYFPLQSYGFQPTNGVGYQPYRVVVLSFELLHAPATVCGPKKSTNLVKNKCVNFNFNGLTGTGVLTESNKKFLPFQQFGRDIADTTDAVRDPQTLEILDITPCSFGGVSVITPGTNTSNQVAVLYQGVNCTEVPVAIHADQLTPTWRVYSTGSNVFQTRAGCLIGAEHVNNSYECDIPIGAGICASYQTQTNSPRRARSVASQSIIAYTMSLGAENSVAYSNNSIAIPTNFTISVTTEILPVSMTKTSVDCTMYICGDSTECSNLLLQYGSFCTQLNRALTGIAVEQDKNTQEVFAQVKQIYKTPPIKDFGGFNFSQILPDPSKPSKRSFIEDLLFNKVTLADAGFIKQYGYCLGDIAARDLICAQKFNGLTVLPPLLTDEMIAQYTSALLAGTITSGWWFGAGAALQIPFAMQMAYRFNGIGVTQNVLYENQKLIANQFNSAIGKIQDSLSSTASALGKLQDVVNQNAQALNTLVKQLSSNFGAISSVLNDILSRLDPPEAEVQIDRLITGRLQSLQTYVTQQLIRAAEIRWSANLAATKMSECVLGQSKRVDFCGKGYHLMSFPQSAPHGVVFLHVTYVPAQEKNFTTAPAICHDGKAHFPREGVFVSNGTHWFVTQRNFYEPQIITTDNTFVSGNCDVVIGIVNNTVYDPLQPELDSFKEELDKYFKNHTSPDVDLGDISGINASVVNIQKEIDRLNEVAKNLNESLIDLQELGKYEQYIKWPWYIWLGFIAGLIAIVMVTIMLCCMTSCCSCLKGCCSCGSCCKFDEDDSEPVLKGVKLHYT

SEQ ID NO: 433 - protein, 1273 aa, Artificial Sequence
  SARS-CoV-2/Belgium/VAG-03013/2020__EPI_ISL_415155 spike protein (1-1273)(K986P_V987P_T887W_A1020W)
MFVFLVLLPLVSSQCVNLTTRTQLPPAYTNSFTRGVYYPDKVFRSSVLHSTQDLFLPFFSNVTWFHAIHVSGTNGTKRFDNPVLPFNDGVYFASTEKSNIIRGWIFGTTLDSKTQSLLIVNNATNVVIKVCEFQFCNDPFLGVYYHKNNKSWMESEFRVYSSANNCTFEYVSQPFLMDLEGKQGNFKNLREFVFKNIDGYFKIYSKHTPINLVRDLPQGFSALEPLVDLPIGINITRFQTLLALHRSYLTPGDSSSGWTAGAAAYYVGYLQPRTFLLKYNENGTITDAVDCALDPLSETKCTLKSFTVEKGIYQTSNFRVQPTESIVRFPNITNLCPFGEVFNATRFASVYAWNRKRISNCVADYSVLYNSASFSTFKCYGVSPTKLNDLCFTNVYADSFVIRGDEVRQIAPGQTGKIADYNYKLPDDFTGCVIAWNSNNLDSKVGGNYNYLYRLFRKSNLKPFERDISTEIYQAGSTPCNGVEGFNCYFPLQSYGFQPTNGVGYQPYRVVVLSFELLHAPATVCGPKKSTNLVKNKCVNFNFNGLTGTGVLTESNKKFLPFQQFGRDIADTTDAVRDPQTLEILDITPCSFGGVSVITPGTNTSNQVAVLYQGVNCTEVPVAIHADQLTPTWRVYSTGSNVFQTRAGCLIGAEHVNNSYECDIPIGAGICASYQTQTNSPRRARSVASQSIIAYTMSLGAENSVAYSNNSIAIPTNFTISVTTEILPVSMTKTSVDCTMYICGDSTECSNLLLQYGSFCTQLNRALTGIAVEQDKNTQEVFAQVKQIYKTPPIKDFGGFNFSQILPDPSKPSKRSFIEDLLFNKVTLADAGFIKQYGDCLGDIAARDLICAQKFNGLTVLPPLLTDEMIAQYTSALLAGTITSGWWFGAGAALQIPFAMQMAYRFNGIGVTQNVLYENQKLIANQFNSAIGKIQDSLSSTATALGKLQDVVNQNAQALNTLVKQLSSNFGAISSVLNDILSRLDPPEAEVQIDRLITGRLQSLQTYVTQQLIRAAEIRWSANLAATKMSECVLGQSKRVDFCGKGYHLMSFPQSAPHGVVFLHVTYVPAQEKNFTTAPAICHDGKAHFPREGVFVSNGTHWFVTQRNFYEPQIITTDNTFVSGNCDVVIGIVNNTVYDPLQPELDSFKEELDKYFKNHTSPDVDLGDISGINASVVNIQKEIDRLNEVAKNLNESLIDLQELGKYEQYIKWPWYIWLGFIAGLIAIVMVTIMLCCMTSCCSCLKGCCSCGSCCKFDEDDSEPVLKGVKLHYT

SEQ ID NO: 434 - protein, 1273 aa, Artificial Sequence
  SARS-CoV-2/Belgium/BC-03016/2020__EPI_ISL_415157 spike protein (1-1273)(K986P_V987P_T887W_A1020W)
MFVFLVLLPLVSSQCVNLTTRTQLPPAYTNSFTRGVYYPDKVFRSSVLHSTQDLFLPFFSNVTWFHAIHVSGTNGTKRFDNPVLPFNDGVYFASTEKSNIIRGWIFGTTLDSKTQSLLIVNNATNVVIKVCEFQFCNDPFLGVYYHKNNKSWMESEFRVYSSANNCTFEYVSQPFLMDLEGKQGNFKNLREFVFKNIDGYFKIYSKHTPINLVRDLPQGFSALEPLVDLPIGINITRFQTLLALHRSYLTPGDSSSGWTAGAAAYYVGYLQPRTFLLKYNENGTITDAVDCALDPLSETKCTLKSFTVEKGIYQTSNFRVQPTESIVRFPNITNLCPFGEVFNATRFASVYAWNRKRISNCVADYSVLYNSASFSTFKCYGVSPTKLNDLCFTNVYADSFVIRGDEVRQIAPGQTGKIADYNYKLPDDFTGCVIAWNSNNLDSKVGGNYNYLYRLFRKSNLKPFERDISTEIYQAGSTPCNGVEGFNCYFPLQSYGFQPTNGVGYQPYRVVVLSFELLHAPATVCGPKKSTNLVKNKCVNFNFNGLTGTGVLTESNKKFLPFQQFGRDIADTTDAVRDPQTLEILDITPCSFGGVSVITPGTNTSNQVAVLYQGVNCTEVPVAIHADQLTPTWRVYSTGSNVFQTRAGCLIGAEHVNNSYECDIPIGAGICASYQTQTNSPRRARSVASQSIIAYTMSLGAENSVAYSNNSIAIPTNFTISVTTEILPVSMTKTSVDCTMYICGDSTECSNLLLQYGSFCTQLNRALTGIAVEQDKNTQEVFAQVKQIYKTPPIKDFGGFNFSQILPDPSKPSKRSFIEDLLFNKVTLADAGFIKQYGDCLGDIAARDLICAQKFNGLTVLPPLLTDEMIAQYTSALLAGTITSGWWFGAGAALQIPFAMQMAYRFNGIGVTQNVLYENQKLIANQFNSAIGKIQDSLSSTAPALGKLQDVVNQNAQALNTLVKQLSSNFGAISSVLNDILSRLDPPEAEVQIDRLITGRLQSLQTYVTQQLIRAAEIRWSANLAATKMSECVLGQSKRVDFCGKGYHLMSFPQSAPHGVVFLHVTYVPAQEKNFTTAPAICHDGKAHFPREGVFVSNGTHWFVTQRNFYEPQIITTDNTFVSGNCDVVIGIVNNTVYDPLQPELDSFKEELDKYFKNHTSPDVDLGDISGINASVVNIQKEIDRLNEVAKNLNESLIDLQELGKYEQYIKWPWYIWLGFIAGLIAIVMVTIMLCCMTSCCSCLKGCCSCGSCCKFDEDDSEPVLKGVKLHYT

SEQ ID NO: 435 - protein, 1273 aa, Artificial Sequence
  SARS-CoV-2/Germany/BavPat3/2020__EPI_ISL_414521 spike protein (1-1273)(K986P_V987P_T887W_A1020W)
MFVFLVLLPLVSSQCVNLTTRTQLPPAYTNSFTRGVYYPDKVFRSSVLHSTQDLFLPFFSNVTWFHAIHVSGTNGTKRFDNPVLPFNDGVYFASTEKSNIIRGWIFGTTLDSKTQSLLIVNNATNVVIKVCEFQFCNDPFLGVYYHKNNKSWMESEFRVYSSANNCTFEYVSQPFLMDLEGKQGNFKNLREFVFKNIDGYFKIYSKHTPINLVRDLPQGFSALEPLVDLPIGINITRFQTLLALHRSYLTPGDSSSGWTAGAAAYYVGYLQPRTFLLKYNENGTITDAVDCALDPLSETKCTLKSFTVEKGIYQTSNFRVQPTESIVRFPNITNLCPFGEVFNATRFASVYAWNRKRISNCVADYSVLYNSASFSTFKCYGVSPTKLNDLCFTNVYADSFVIRGDEVRQIAPGQTGKIADYNYKLPDDFTGCVIAWNSNNLDSKVGGNYNYLYRLFRKSNLKPFERDISTEIYQAGSTPCNGVEGFNCYFPLQSYGFQPTNGVGYQPYRVVVLSFELLHAPATVCGPKKSTNLVKNKCVNFNFNGLTGTGVLTESNKKFLPFQQFGRDIADTTDAVRDPQTLEILDITPCSFGGVSVITPGTNTSNQVAVLYQDVNCTEVPVAIHADQLTPTWRVYSTGSNVFQTRAGCLIGAEHVNNSYECDIPIGAGICASYQTQTNSPRRARSVASQSIIAYTMSLGAENSVAYSNNSIAIPTNFTISVTTEILPVSMTKTSVDCTMYICGDSTECSNLLLQYGSFCTQLNRALTGIAVEQDKNTQQVFAQVKQIYKTPPIKDFGGFNFSQILPDPSKPSKRSFIEDLLFNKVTLADAGFIKQYGDCLGDIAARDLICAQKFNGLTVLPPLLTDEMIAQYTSALLAGTITSGWWFGAGAALQIPFAMQMAYRFNGIGVTQNVLYENQKLIANQFNSAIGKIQDSLSSTASALGKLQDVVNQNAQALNTLVKQLSSNFGAISSVLNDILSRLDPPEAEVQIDRLITGRLQSLQTYVTQQLIRAAEIRWSANLAATKMSECVLGQSKRVDFCGKGYHLMSFPQSAPHGVVFLHVTYVPAQEKNFTTAPAICHDGKAHFPREGVFVSNGTHWFVTQRNFYEPQIITTDNTFVSGNCDVVIGIVNNTVYDPLQPELDSFKEELDKYFKNHTSPDVDLGDISGINASVVNIQKEIDRLNEVAKNLNESLIDLQELGKYEQYIKWPWYIWLGFIAGLIAIVMVTIMLCCMTSCCSCLKGCCSCGSCCKFDEDDSEPVLKGVKLHYT

SEQ ID NO: 436 - protein, 1273 aa, Artificial Sequence
  SARS-CoV-2/France/HF1805/2020__EPI_ISL_414628 spike protein (1-1273)(K986P_V987P_T887W_A1020W)
MFVFLVLLPLVSSQCVNLTTRTQLPPAYTNSFTRGVYYPDKVFRSSVLHSTQDLFLPFFSNVTWFHAIHVSGTNGTKRFDNPVLPFNDGVYFASTEKSNIIRGWIFGTTLDSKTQSLLIVNNATNVVIKVCEFQFCNDPFLGVYYHKNNKSWMESEFRVYSSANNCTFEYVSQPFLMDLEGKQGNFKNLREFVFKNIDGYFKIYSKHTPINLVRDLPQGFSALEPLVDLPIGINITRFQTLLALHRSYLTPGDSSSGWTAGAAAYYVGYLQPRTFLLKYNENGTITDAVDCALDPLSETKCTLKSFTVEKGIYQTSNFRVQPTESIVRFPNITNLCPFGEVFNATRFASVYAWNRKRISNCVADYSVLYNSASFSTFKCYGVSPTKLNDLCFTNVYADSFVIRGDEVRQIAPGQTGKIADYNYKLPDDFTGCVIAWNSNNLDSKVGGNYNYLYRLFRKSNLKPFERDISTEIYQAGSTPCNGVEGFNCYFPLQSYGFQPTNGVGYQPYRVVVLSFELLHAPATVCGPKKSTNLVKNKCVNFNFNGLTGTGVLTESNKKFLPFQQFGRDIADTTDAVRDPQTLEILDITPCSFGGVSVITPGTNTSNQVAVLYQGVNCTEVPVAIHADQLTPTWRVYSTGSNVFQTRAGCLIGAEHVNNSYECDIPIGAGICASYQTQTNSPRRARSVASQSIIAYTMSLGAENSVAYSNNSIAIPTNFTISVTTEILPVSMTKTSVDCTMYICGDSTECSNLLLQYGSFCTQLNRALTGIAVEQDKNTQEVFAQVKQIYKTPPIKDFGGFNFSQILPDPSKPSKRSFIEDLLFNKVTLADAGFIKQYGDCLGDIAARDLICAQKFNGLTVLPPLLTDEMIAQYTSALLAGTITSGWWFGAGAALQIPFAMQMAYRFNGIGVTQNVLYENQKLIANQFNSAIGKIQDSLSSTASALGKLQDVVNQNAQALNTLVKQLSSNFGAISSVLNDILSRLDPPEAEVQIDRLITGRLQSLQTYVTQQLIRAAEIRWSANLAATKMSECVLGQSKRVDFCGKGYHLMSFPQSAPHGVVFLHVTYVPAQEKNFTTAPAICHDGKAHFPREGVFVSNGTHWFVTQRNFYEPQIITTDNTFVSGNCDVVIGVVNNTVYDPLQPELDSFKEELDKYFKNHTSPDVDLGDISGINASVVNIQKEIDRLNEVAKNLNESLIDLQELGKYEQYIKWPWYIWLGFIAGLIAIVMVTIMLCCMTSCCSCLKGCCSCGSCCKFDEDDSEPVLKGVKLHYT

SEQ ID NO: 437 - protein, 1273 aa, Artificial Sequence
  SARS-CoV-2/Netherlands/ZuidHolland_9/2020__EPI_ISL_414445 spike protein (1-1273)(K986P_V987P_T887W_A1020W)
MFVFLVLLPLVSSQCVNLTTRTQLPPAYTNSFTRGVYYPDKVFRSSVLHSTQDLFLPFFSNVTWFHAIHVSGTNGTKRFDNPVLPFNDGVYFASTEKSNIIRGWIFGTTLDSKTQSLLIVNNATNVVIKVCEFQFCNDPFLGVYYHKNNKSWMESEFRVYSSANNCTFEYVSQPFLMDLEGKQGNFKNLREFVFKNIDGYFKIYSKHTPINLVRDLPQGFSALEPLVDLPIGINITRFQTLLALHRSYLTPGDSSSGWTAGAAAYYVGYLQPRTFLLKYNENGTITDAVDCALDPLSETKCTLKSFTVEKGIYQTSNFRVQPTESIVRFPNITNLCPFGEVFNATRFASVYAWNRKRISNCVADYSVLYNSASFSTFKCYGVSPTKLNDLCFTNVYADSFVIRGDEVRQIAPGQTGKIADYNYKLPDDFTGCVIAWNSNNLDSKVGGNYNYLYRLFRKSNLKPFERDISTEIYQAGSTPCNGVEGFNCYFPLQSYGFQPTNGVGYQPYRVVVLSFELLHAPATVCGPKKSTNLVKNKCVNFNFNGLTGTGVLTESNKKFLPFQQFGRDIADTTDAVRDPQTLEILDITPCSFGGVSVITPGTNTSNQVAVLYQGVNCTEVPVAIHADQLTPTWRVYSTGSNVFQTRAGCLIGAEHVNNSYECDIPIGAGICASYQTQTNSPRRARSVASQSIIAYTMSLGAENSVAYSNNSIAIPTNFTISVTTEILPVSMTKTSVDCTMYICGDSTECSNLLLQYGSFCTQLNRALTGIAVEQDKNTQEVFAQVKQIYKTPPIKDFGGFNFSQILPDPSKPSKRSFIEDLLFNKVTLADAGFIKQYGDCLGDIAARDLICVQKFNGLTVLPPLLTDEMIAQYTSALLAGTITSGWWFGAGAALQIPFAMQMAYRFNGIGVTQNVLYENQKLIANQFNSAIGKIQDSLSSTASALGKLQDVVNQNAQALNTLVKQLSSNFGAISSVLNDILSRLDPPEAEVQIDRLITGRLQSLQTYVTQQLIRAAEIRWSANLAATKMSECVLGQSKRVDFCGKGYHLMSFPQSAPHGVVFLHVTYVPAQEKNFTTAPAICHDGKAHFPREGVFVSNGTHWFVTQRNFYEPQIITTDNTFVSGNCDVVIGIVNNTVYDPLQPELDSFKEELDKYFKNHTSPDVDLGDISGINASVVNIQKEIDRLNEVAKNLNESLIDLQELGKYEQYIKWPWYIWLGFIAGLIAIVMVTIMLCCMTSCCSCLKGCCSCGSCCKFDEDDSEPVLKGVKLHYT

SEQ ID NO: 438 - protein, 1273 aa, Artificial Sequence
  SARS-CoV-2/Finland/FIN03032020A/2020__EPI_ISL_413602 spike protein (1-1273)(K986P_V987P_T887W_A1020W)
MFVFLVLLPLVSSQCVNLTTRTQLPPAYTNSFTRGVYYPDKVFRSSVLHSTQDLFLPFFSNVTWFHAIHVSGTNGTKRFDNPVLPFNDGVYFASTEKSNIIRGWIFGTTLDSKTQSLLIVNNATNVVIKVCEFQFCNDPFLGVYYHKNNKSWMESEFRVYSSANNCTFEYVSQPFLMDLEGKQGNFKNLREFVFKNIDGYFKIYSKHTPINLVRDLPQGFSALEPLVDLPIGINITRFQTLLALHRSYLTPGDSSSGWTAGAAAYYVGYLQPRTFLLKYNENGTITDAVDCALDPLSETKCTLKSFTVEKGIYQTSNFRVQPTESIVRFPNITNLCPFGEVFNATRFASVYAWNRKRISNCVADYSVLYNSASFSTFKCYGVSPTKLNDLCFTNVYADSFVIRGDEVRQIAPGQTGKIADYNYKLPDDFTGCVISWNSNNLDSKVGGNYNYLYRLFRKSNLKPFERDISTEIYQAGSTPCNGVEGFNCYFPLQSYGFQPTNGVGYQPYRVVVLSFELLHAPATVCGPKKSTNLVKNKCVNFNFNGLTGTGVLTESNKKFLPFQQFGRDIADTTDAVRDPQTLEILDITPCSFGGVSVITPGTNTSNQVAVLYQGVNCTEVPVAIHADQLTPTWRVYSTGSNVFQTRAGCLIGAEHVNNSYECDIPIGAGICASYQTQTNSPRRARSVASQSIIAYTMSLGAENSVAYSNNSIAIPTNFTISVTTEILPVSMTKTSVDCTMYICGDSTECSNLLLQYGSFCTQLNRALTGIAVEQDKNTQEVFAQVKQIYKTPPIKDFGGFNFSQILPDPSKPSKRSFIEDLLFNKVTLADAGFIKQYGDCLGDIAARDLICAQKFNGLTVLPPLLTDEMIAQYTSALLAGTITSGWWFGAGAALQIPFAMQMAYRFNGIGVTQNVLYENQKLIANQFNSAIGKIQDSLSSTASALGKLQDVVNQNAQALNTLVKQLSSNFGAISSVLNDILSRLDPPEAEVQIDRLITGRLQSLQTYVTQQLIRAAEIRWSANLAATKMSECVLGQSKRVDFCGKGYHLMSFPQSAPHGVVFLHVTYVPAQEKNFTTAPAICHDGKAHFPREGVFVSNGTHWFVTQRNFYEPQIITTDNTFVSGNCDVVIGIVNNTVYDPLQPELDSFKEELDKYFKNHTSPDVDLGDISGINASVVNIQKEIDRLNEVAKNLNESLIDLQELGKYEQYIKWPWYIWLGFIAGLIAIVMVTIMLCCMTSCCSCLKGCCSCGSCCKFDEDDSEPVLKGVKLHYT

SEQ ID NO: 439 - protein, 1273 aa, Artificial Sequence
  SARS-CoV-2/France/GE1977/2020__EPI_ISL_414632 spike protein (1-1273)(K986P_V987P_T887W_A1020W)
MFVFLVLLPLVSSQCVNLTTRTQLPPAYTNSFTRGVYYPDKVFRSSVLHSTQDLFLPFFSNVTWFHAIHVSGTNGTKRFDNPVLPFNDGVYFASTEKSNIIRGWIFGTTLDSKTQSLLIVNNATNVVIKVCEFQFCNDPFLGVYYHKNNKSWMESEFRVYSSANNCTFEYVSQPFLMDLEGKQGNFKNLREFVFKNIDGYFKIYSKHTPINLVRDLPQGFSALEPLVDLPIGINITRFQTLLALHRSYLTPGDSSSGWTAGAAAYYVGYLQPRTFLLKYNENGTITDAVDCALDPLSETKCTLKSFTVEKGIYQTSNFRVQPTESIVRFPNITNLCPFGEVFNATRFASVYAWNRKRISNCVADYSVLYNSASFSTFKCYGVSPTKLNDLCFTNVYADSFVIRGDEVRQIAPGQTGKIADYNYKLPDDFTGCVIAWNSNNLDSKVGGNYNYLYRLFRKSNLKPFERDISTEIYQAGSTPCNGVEGFNCYFPLQSYGFQPTNGVGYQPYRVVVLSFELLHAPATVCGPKKSTNLVKNKCVNFNFNGLTGTGVLTESNKKFLPFQQFGRDIADTTDAVRDPQTLEILDITPCSFGGVSVITPGTNTSNQVAVLYQGVNCTEVPVAIHADQLTPTWRVYSTGSNVFQTRAGCLIGAEHVNNSYECDIPIGAGICASYQTQTNSPRRARSVASQSIIAYTMSLGAENSVAYSNNSIAIPTNFTISVTTEILPVSMTKTSVDCTMYICGDSTECSNLLLQYGSFCTQLNRALTGIAVEQDKNTQEVFAQVKQIYKTPPIKDFGGFNFSQILPDPSKPSKRSFIEDLLFNKVTLADAGFIKQYGDCLGDIAARDLICAQKFNGLTVLPPLLTDEMIAQYTSALLAGTITSGWWFGAGAALQIPFAMQMAYRFNGIGVTQNVLYENQKLIANQFNSAIGKIQDSLFSTASALGKLQDVVNQNAQALNTLVKQLSSNFGAISSVLNDILSRLDPPEAEVQIDRLITGRLQSLQTYVTQQLIRAAEIRWSANLAATKMSECVLGQSKRVDFCGKGYHLMSFPQSAPHGVVFLHVTYVPAQEKNFTTAPAICHDGKAHFPREGVFVSNGTHWFVTQRNFYEPQIITTDNTFVSGNCDVVIGIVNNTVYDPLQPELDSFKEELDKYFKNHTSPDVDLGDISGINASVVNIQKEIDRLNEVAKNLNESLIDLQELGKYEQYIKWPWYIWLGFIAGLIAIVMVTIMLCCMTSCCSCLKGCCSCGSCCKFDEDDSEPVLKGVKLHYT

SEQ ID NO: 440 - protein, 1273 aa, Artificial Sequence
  SARS-CoV-2/Finland/FIN-313/2020__EPI_ISL_414641 spike protein (1-1273)(K986P_V987P_T887W_A1020W)
MFVFLVLLPLVSSQCVNLTTRTQLPPAYTNSFTRGVYYPDKVFRSSVLHSTQDLFLPFFSNVTWFHAIHVSGTNGTKRFDNPVLPFNDGVYFASTEKSNIIRGWIFGTTLDSKTQSLLIVNNATNVVIKVCEFQFCNDPFLGVYYHKNNKSWMESEFRVYSSANNCTFEYVSQPFLMDLEGKQGNFKNLREFVFKNIDGYFKIYSKHTPINLVRDLPQGFSALEPLVDLPIGINITRFKTLLALHRSYLTPGDSSSGWTAGAAAYYVGYLQPRTFLLKYNENGTITDAVDCALDPLSETKCTLKSFTVEKGIYQTSNFRVQPTESIVRFPNITNLCPFGEVFNATRFASVYAWNRKRISNCVADYSVLYNSASFSTFKCYGVSPTKLNDLCFTNVYADSFVIRGDEVRQIAPGQTGKIADYNYKLPDDFTGCVIAWNSNNLDSKVGGNYNYLYRLFRKSNLKPFERDISTEIYQAGSTPCNGVEGFNCYFPLQSYGFQPTNGVGYQPYRVVVLSFELLHAPATVCGPKKSTNLVKNKCVNFNFNGLTGTGVLTESNKKFLPFQQFGRDIADTTDAVRDPQTLEILDITPCSFGGVSVITPGTNTSNQVAVLYQGVNCTEVPVAIHADQLTPTWRVYSTGSNVFQTRAGCLIGAEHVNNSYECDIPIGAGICASYQTQTNSPRRARSVASQSIIAYTMSLGAENSVAYSNNSIAIPTNFTISVTTEILPVSMTKTSVDCTMYICGDSTECSNLLLQYGSFCTQLNRALTGIAVEQDKNTQEVFAQVKQIYKTPPIKDFGGFNFSQILPDPSKPSKRSFIEDLLFNKVTLADAGFIKQYGDCLGDIAARDLICAQKFNGLTVLPPLLTDEMIAQYTSALLAGTITSGWWFGAGAALQIPFAMQMAYRFNGIGVTQNVLYENQKLIANQFNSAIGKIQDSLSSTASALGKLQDVVNQNAQALNTLVKQLSSNFGAISSVLNDILSRLDPPEAEVQIDRLITGRLQSLQTYVTQQLIRAAEIRWSANLAATKMSECVLGQSKRVDFCGKGYHLMSFPQSAPHGVVFLHVTYVPAQEKNFTTAPAICHDGKAHFPREGVFVSNGTHWFVTQRNFYEPQIITTDNTFVSGNCDVVIGIVNNTVYDPLQPELDSFKEELDKYFKNHTSPDVDLGDISGINASVVNIQKEIDRLNEVAKNLNESLIDLQELGKYEQYIKWPWYIWLGFIAGLIAIVMVTIMLCCMTSCCSCLKGCCSCGSCCKFDEDDSEPVLKGVKLHYT

SEQ ID NO: 441 - protein, 1273 aa, Artificial Sequence
  SARS-CoV-2/Netherlands/ZuidHolland_2/2020__EPI_ISL_414556 spike protein (1-1273)(K986P_V987P_T887W_A1020W)
MFVFLVLLPLVSSQCVNLTTRTQLPPAYTNSFTRGVYYPDKVFRSSVLHSTQDLFLPFFSNVTWFHAIHVSGTNGTKRFDNPVLPFNDGVYFASTEKSNIIRGWIFGTTLDSKTQSLLIVNNATNVVIKVCEFQFCNDPFLGVYYHKNNKSWMESEFRVYSSANNCTFEYVSQPFLMDLEGKQGNFKNLREFVFKNIDGYFKIYSKHTPINLVRDLPQGFSALEPLVDLPIGINITRFQTLLALHRSYLTPGDSSSGWTAGAAAYYVGYLQPRTFLLKYNENGTITDAVDCALDPLSETKCTLKSFTVEKGIYQTSNFRVQPTESIVRFPNITNLCPFGEVFNATRFASVYAWNRKRISNCVADYSVLYNSASFSTFKCYGVSPTKLNDLCFTNVYADSFVIRGDEVRQIAPGQTGKIADYNYKLPDDFTGCVIAWNSNNLDSKVGGNYNYLYRLFRKSNLKPFERDISTEIYQAGSTPCNGVEGFNCYFPLQSYGFQPTNGVGYQPYRVVVLSFELLHAPATVCGPKKSTNLVKNKCVNFNFNGLTGTGVLTESNKKFLPFQQFGRDIADTTDAVRDPQTLEILDITPCSFGGVSVITPGTNTSNQVAVLYQGVNCTEVPVAIHADQLTPTWRVYSTGSNVFQTRAGCLIGAEHVNNSYECDIPIGAGICASYQTQTNSPRRARSVASQSIIAYTMSLGAENSVAYSNNSIAIPTNFTISVTTEILPVSMTKTSVDCTMYICGDSTECSNLLLQYGSFCTQLNRALTGIALEQDKNTQEVFAQVKQIYKTPPIKDFGGFNFSQILPDPSKPSKRSFIEDLLFNKVTLADAGFIKQYGDCLGDIAARDLICAQKFNGLTVLPPLLTDEMIAQYTSALLAGTITSGWWFGAGAALQIPFAMQMAYRFNGIGVTQNVLYENQKLIANQFNSAIGKIQDSLSSTASALGKLQDVVNQNAQALNTLVKQLSSNFGAISSVLNDILSRLDPPEAEVQIDRLITGRLQSLQTYVTQQLIRAAEIRWSANLAATKMSECVLGQSKRVDFCGKGYHLMSFPQSAPHGVVFLHVTYVPAQEKNFTTAPAICHDGKAHFPREGVFVSNGTHWFVTQRNFYEPQIITTDNTFVSGNCDVVIGIVNNTVYDPLQPELDSFKEELDKYFKNHTSPDVDLGDISGINASVVNIQKEIDRLNEVAKNLNESLIDLQELGKYEQYIKWPWYIWLGFIAGLIAIVMVTIMLCCMTSCCSCLKGCCSCGSCCKFDEDDSEPVLKGVKLHYT

SEQ ID NO: 442 - protein, 1273 aa, Artificial Sequence
  SARS-CoV-2/USA/WA-UW31/2020__EPI_ISL_414618 spike protein (1-1273)(K986P_V987P_T887W_A1020W)
MFVFLVLLPLVSSQCVNLTTRTQLPPAYTNSFTRGVYYPDKVFRSSVLHSTQDLFLPFFSNVTWFHAIHVSGTNGTKRFDNPVLPFNDGVYFASTEKSNIIRGWIFGTTLDSKTQSLLIVNNATNVVIKVCEFQFCNDPFLGVYYHKNNKSWMESEFRVYSSANNCTFEYVSQPFLMDLEGKQGNFKNLREFVFKNIDGYFKIYSKHTPINLVRDLPQGFSALEPLVDLPIGINITRFQTLLALHRSYLTPGDSSSGWTAGAAAYYVGYLQPRTFLLKYNENGTITDAVDCALDPLSETKCTLKSFTVEKGIYQTSNFRVQPTESIVRFPNITNLCPFGEVFNATRFASVYAWNRKRISNCVADYSVLYNSASFSTFKCYGVSPTKLNDLCFTNVYADSFVIRGDEVRQIAPGQTGKIADYNYKLPDDFTGCVIAWNSNNLDSKVGGNYNYLYRLFRKSNLKPFERDISTEIYQAGSTPCNGAEGFNCYFPLQSYGFQPTNGVGYQPYRVVVLSFELLHAPATVCGPKKSTNLVKNKCVNFNFNGLTGTGVLTESNKKFLPFQQFGRDIADTTDAVRDPQTLEILDITPCSFGGVSVITPGTNTSNQVAVLYQDVNCTEVPVAIHADQLTPTWRVYSTGSNVFQTRAGCLIGAEHVNNSYECDIPIGAGICASYQTQTNSPRRARSVASQSIIAYTMSLGAENSVAYSNNSIAIPTNFTISVTTEILPVSMTKTSVDCTMYICGDSTECSNLLLQYGSFCTQLNRALTGIAVEQDKNTQEVFAQVKQIYKTPPIKDFGGFNFSQILPDPSKPSKRSFIEDLLFNKVTLADAGFIKQYGDCLGDIAARDLICAQKFNGLTVLPPLLTDEMIAQYTSALLAGTITSGWWFGAGAALQIPFAMQMAYRFNGIGVTQNVLYENQKLIANQFNSAIGKIQDSLSSTASALGKLQDVVNQNAQALNTLVKQLSSNFGAISSVLNDILSRLDPPEAEVQIDRLITGRLQSLQTYVTQQLIRAAEIRWSANLAATKMSECVLGQSKRVDFCGKGYHLMSFPQSAPHGVVFLHVTYVPAQEKNFTTAPAICHDGKAHFPREGVFVSNGTHWFVTQRNFYEPQIITTDNTFVSGNCDVVIGIVNNTVYDPLQPELDSFKEELDKYFKNHTSPDVDLGDISGINASVVNIQKEIDRLNEVAKNLNESLIDLQELGKYEQYIKWPWYIWLGFIAGLIAIVMVTIMLCCMTSCCSCLKGCCSCGSCCKFDEDDSEPVLKGVKLHYT

SEQ ID NO: 443 - protein, 1273 aa, Artificial Sequence
  SARS-CoV-2/South Korea/SNU01/2020__EPI_ISL_411929 spike protein (1-1273)(K986P_V987P_T887W_A1020W)
MFVFLVLLPLVSSQCVNLTTRTQLPPAYTNSFTRGVYYPDKVFRSSVLHSTQDLFLPFFSNVTWFHAIHVSGTNGTKRFDNPVLPFNDGVYFASTEKSNIIRGWIFGTTLDSKTQSLLIVNNATNVVIKVCEFQFCNDPFLGVYYHKNNKSWMESEFRVYSSANNCTFEYVSQPFLMDLEGKQGNFKNLREFVFKNIDGYFKIYSKHTPINLVRDLPQGFWALEPLVDLPIGINITRFQTLLALHRSYLTPGDSSSGWTAGAAAYYVGYLQPRTFLLKYNENGTITDAVDCALDPLSETKCTLKSFTVEKGIYQTSNFRVQPTESIVRFPNITNLCPFGEVFNATRFASVYAWNRKRISNCVADYSVLYNSASFSTFKCYGVSPTKLNDLCFTNVYADSFVIRGDEVRQIAPGQTGKIADYNYKLPDDFTGCVIAWNSNNLDSKVGGNYNYLYRLFRKSNLKPFERDISTEIYQAGSTPCNGVEGFNCYFPLQSYGFQPTNGVGYQPYRVVVLSFELLHAPATVCGPKKSTNLVKNKCVNFNFNGLTGTGVLTESNKKFLPFQQFGRDIADTTDAVRDPQTLEILDITPCSFGGVSVITPGTNTSNQVAVLYQDVNCTEVPVAIHADQLTPTWRVYSTGSNVFQTRAGCLIGAEHVNNSYECDIPIGAGICASYQTQTNSPRRARSVASQSIIAYTMSLGAENSVAYSNNSIAIPTNFTISVTTEILPVSMTKTSVDCTMYICGDSTECSNLLLQYGSFCTQLNRALTGIAVEQDKNTQEVFAQVKQIYKTPPIKDFGGFNFSQILPDPSKPSKRSFIEDLLFNKVTLADAGFIKQYGDCLGDIAARDLICAQKFNGLTVLPPLLTDEMIAQYTSALLAGTITSGWWFGAGAALQIPFAMQMAYRFNGIGVTQNVLYENQKLIANQFNSAIGKIQDSLSSTASALGKLQDVVNQNAQALNTLVKQLSSNFGAISSVLNDILSRLDPPEAEVQIDRLITGRLQSLQTYVTQQLIRAAEIRWSANLAATKMSECVLGQSKRVDFCGKGYHLMSFPQSAPHGVVFLHVTYVPAQEKNFTTAPAICHDGKAHFPREGVFVSNGTHWFVTQRNFYEPQIITTDNTFVSGNCDVVIGIVNNTVYDPLQPELDSFKEELDKYFKNHTSPDVDLGDISGINASVVNIQKEIDRLNEVAKNLNESLIDLQELGKYEQYIKWPWYIWLGFIAGLIAIVMVTIMLCCMTSCCSCLKGCCSCGSCCKFDEDDSEPVLKGVKLHYT

SEQ ID NO: 444 - protein, 1273 aa, Artificial Sequence
  SARS-CoV-2/China/WF0004/2020__EPI_ISL_413694 spike protein (1-1273)(K986P_V987P_T887W_A1020W)
MFVFLVLLPLVSSQCVNLTTRTQLPPAYTNSFTRGVYYPDKVFRSSVLHSTQDLFLPFFSNVTWFHAIHVSGTNGTKRFDNPVLPFNDGVYFASTEKSNIIRGWIFGTTLDSKTQSLLIVNNATNVVIKVCEFQFCNDPFLGVYYHKNNKSWTESEFRVYSSANNCTFEYVSQPFLMDLEGKQGNFKNLREFVFKNIDGYFKIYSKHTPINLVRDLPQGFSALEPLVDLPIGINITRFQTLLALHRSYLTPGDSSSGWTAGAAAYYVGYLQPRTFLLKYNENGTITDAVDCALDPLSETKCTLKSFTVEKGIYQTSNFRVQPTESIVRFPNITNLCPFGEVFNATRFASVYAWNRKRISNCVADYSVLYNSASFSTFKCYGVSPTKLNDLCFTNVYADSFVIRGDEVRQIAPGQTGKIADYNYKLPDDFTGCVIAWNSNNLDSKVGGNYNYLYRLFRKSNLKPFERDISTEIYQAGSTPCNGVEGFNCYFPLQSYGFQPTNGVGYQPYRVVVLSFELLHAPATVCGPKKSTNLVKNKCVNFNFNGLTGTGVLTESNKKFLPFQQFGRDIADTTDAVRDPQTLEILDITPCSFGGVSVITPGTNTSNQVAVLYQDVNCTEVPVAIHADQLTPTWRVYSTGSNVFQTRAGCLIGAEHVNNSYECDIPIGAGICASYQTQTNSPRRARSVASQSIIAYTMSLGAENSVAYSNNSIAIPTNFTISVTTEILPVSMTKTSVDCTMYICGDSTECSNLLLQYGSFCTQLNRALTGIAVEQDKNTQEVFAQVKQIYKTPPIKDFGGFNFSQILPDPSKPSKRSFIEDLLFNKVTLADAGFIKQYGDCLGDIAARDLICAQKFNGLTVLPPLLTDEMIAQYTSALLAGTITSGWWFGAGAALQIPFAMQMAYRFNGIGVTQNVLYENQKLIANQFNSAIGKIQDSLSSTASALGKLQDVVNQNAQALNTLVKQLSSNFGAISSVLNDILSRLDPPEAEVQIDRLITGRLQSLQTYVTQQLIRAAEIRWSANLAATKMSECVLGQSKRFDFCGKGYHLMSFPQSAPHGVVFLHVTYVPAQEKNFTTAPAICHDGKAHFPREGVFVSNGTHWFVTQRNFYEPQIITTDNTFVSGNCDVVIGIVNNTVYDPLQPELDSFKEELDKYFKNHTSPDVDLGDISGINASVVNIQKEIDRLNEVAKNLNESLIDLQELGKYEQYIKWPWYIWLGFIAGLIAIVMVTIMLCCMTSCCSCLKGCCSCGSCCKFDEDDSEPVLKGVKLHYT

SEQ ID NO: 445 - protein, 1273 aa, Artificial Sequence
  SARS-CoV-2/China/WF0028/2020__EPI_ISL_413791 spike protein (1-1273)(K986P_V987P_T887W_A1020W)
MFVFLVLLPLVSSQCVNLTTRTQLPPAYTNSFTRGVYYPDKVFRSSVLHSTQDLFLPFFSNVTWFHAIHVSGTNGTKRFDNPVLPFNDGVYFASTEKSNIIRGWIFGTTLDSKTQSLLIVNNATNVVIKVCEFQFCNDPFLGVYYHKNNKSWMESEFRVYSSANNCTFEYVSQPFLMDLEGKQGNFKNLREFVFKNIDGYFKIYSKHTPINLVRDLPQGFSALEPLVDLPIGINITRFQTLLALHRSYLTPGDSSSGWTAGAAAYYVGYLQPRTFLLKYNENGTITDAVDCALDPLSETKCTLKSFTVEKGIYQTSNFRVQPTESIVRFPNITNLCPFGEVFNATRFASVYAWNRKRISNCVADYSVLYNSASFSTFKCYGVSPTKLNDLCFTNVYADSFVIRGDEVRQIAPGQTGKIADYNYKLPDDFTGCVIAWNSNNLDSKVGGNYNYLYRLFRKSNLKPFERDISTEIYQAGSTPCNGVEGFNCYFPLQSYGFQPTNGVGYQPYRVVVLSFELLHAPATVCGPKKSTNLVKNKCVNFNFNGLTGTGVLTESNKKFLPFQQFGRDIADTTDAVRDPQTLEILDITPCSFGGVSVITPGTNTSNQVAVLYQDVNCTEVPVAIHADQLTPTWRVYSTGSNVFQTRAGCLIGAEHVNNSYECDIPIGAGICASYQTQTNSPRRARSVASQSIIAYTMSLGAENSVAYSNNSIAIPTNFTISVTTEILPVSMTKTSVDCTMYICGDSTECSNLLLQYGSFCTQLNRALTGIAVEQDKNTQEVFAQVKQIYKTPPIKDFGGFNFSQILPDPSKPSKRSFIEDLLFNKVTLADAGFIKQYGDCLGDIAARDLICAQKFNGLTVLPPLLTDEMIAQYTSALLAGTITSGWWFGAGAALQIPFAMQMAYRFNGIGVTQNVLYENQKLIANQFNSAIGKIQDSLSSTASALGKLQDVVNQNAQALNTLVKQLSSNFGAISSVLNDILSRLDPPEAEVQIDRLITGRLQSLQTYVTQQLIRAAEIRWSANLAATKMSECVLGQSKRVDFCGKGYHLMSFPQSAPHGVVFLHVTYVPAQEKNFTTAPAICHDGKAHFPREGVFVSNGTHWFVTQRNFYEPQIITTDNTFVSGNCDVVIGIVNNTVYDPLQPELESFKEELDKYFKNHTSPDVDLGDISGINASVVNIQKEIDRLNEVAKNLNESLIDLQELGKYEQYIKWPWYIWLGFIAGLIAIVMVTIMLCCMTSCCSCLKGCCSCGSCCKFDEDDSEPVLKGVKLHYT

SEQ ID NO: 446 - protein, 1273 aa, Artificial Sequence
  SARS-CoV-2/2019-nCoV/USA-CruiseA-18/2020__MT159716.1 spike protein (1-1273)(K986P_V987P_T887W_A1020W)
MFVFLVLLPLVSSQCVNLTTRTQLPPAYTNSFTRGVYYPDKVFRSSVLHSTQDLFLPFFSNVTWFHAIHVSGTNGTKRFDNPVLPFNDGVYFASTEKSNIIRGWIFGTTLDSKTQSLLIVNNATNVVIKVCEFQFCNDPFLGVYYHKNNKSWMESELRVYSSANNCTFEYVSQPFLMDLEGKQGNFKNLREFVFKNIDGYFKIYSKHTPINLVRDLPQGFSALEPLVDLPIGINITRFQTLLALHRSYLTPGDSSSGWTAGAAAYYVGYLQPRTFLLKYNENGTITDAVDCALDPLSETKCTLKSFTVEKGIYQTSNFRVQPTESIVRFPNITNLCPFGEVFNATRFASVYAWNRKRISNCVADYSVLYNSASFSTFKCYGVSPTKLNDLCFTNVYADSFVIRGDEVRQIAPGQTGKIADYNYKLPDDFTGCVIAWNSNNLDSKVGGNYNYLYRLFRKSNLKPFERDISTEIYQAGSTPCNGVEGFNCYFPLQSYGFQPTNGVGYQPYRVVVLSFELLHAPATVCGPKKSTNLVKNKCVNFNFNGLTGTGVLTESNKKFLPFQQFGRDIADTTDAVRDPQTLEILDITPCSFGGVSVITPGTNTSNQVAVLYQDVNCTEVPVAIHADQLTPTWRVYSTGSNVFQTRAGCLIGAEHVNNSYECDIPIGAGICASYQTQTNSPRRARSVASQSIIAYTMSLGAENSVAYSNNSIAIPTNFTISVTTEILPVSMTKTSVDCTMYICGDSTECSNLLLQYGSFCTQLNRALTGIAVEQDKNTQEVFAQVKQIYKTPPIKDFGGFNFSQILPDPSKPSKRSFIEDLLFNKVTLADAGFIKQYGDCLGDIAARDLICAQKFNGLTVLPPLLTDEMIAQYTSALLAGTITSGWWFGAGAALQIPFAMQMAYRFNGIGVTQNVLYENQKLIANQFNSAIGKIQDSLSSTASALGKLQDVVNQNAQALNTLVKQLSSNFGAISSVLNDILSRLDPPEAEVQIDRLITGRLQSLQTYVTQQLIRAAEIRWSANLAATKMSECVLGQSKRVDFCGKGYHLMSFPQSAPHGVVFLHVTYVPAQEKNFTTAPAICHDGKAHFPREGVFVSNGTHWFVTQRNFYEPQIITTDNTFVSGNCDVVIGIVNNTVYDPLQPELDSFKEELDKYFKNHTSPDVDLGDISGINASVVNIQKEIDRLNEVAKNLNESLIDLQELGKYEQYIKWPWYIWLGFIAGLIAIVMVTIMLCCMTSCCSCLKGCCSCGSCCKFDEDDSEPVLKGVKLHYT

SEQ ID NO: 447 - protein, 1273 aa, Artificial Sequence
  SARS-CoV-2/SARS-CoV-2/Yunnan-01/human/2020/CHN__MT049951.1 spike protein (1-1273)(K986P_V987P_T887W_A1020W)
MFVFLVLLPLVSSQCVNLTTRTQLPPANTNSFTRGVYYPDKVFRSSVLHSTQDLFLPFFSNVTWFHAIHVSGTNGTKRFDNPVLPFNDGVYFASTEKSNIIRGWIFGTTLDSKTQSLLIVNNATNVVIKVCEFQFCNDPFLGVYYHKNNKSWMESEFRVYSSANNCTFEYVSQPFLMDLEGKQGNFKNLREFVFKNIDGYFKIYSKHTPINLVRDLPQGFSALEPLVDLPIGINITRFQTLLALHRSYLTPGDSSSGWTAGAAAYYVGYLQPRTFLLKYNENGTITDAVDCALDPLSETKCTLKSFTVEKGIYQTSNFRVQPTESIVRFPNITNLCPFGEVFNATRFASVYAWNRKRISNCVADYSVLYNSASFSTFKCYGVSPTKLNDLCFTNVYADSFVIRGDEVRQIAPGQTGKIADYNYKLPDDFTGCVIAWNSNNLDSKVGGNYNYLYRLFRKSNLKPFERDISTEIYQAGSTPCNGVEGFNCYFPLQSYGFQPTNGVGYQPYRVVVLSFELLHAPATVCGPKKSTNLVKNKCVNFNFNGLTGTGVLTESNKKFLPFQQFGRDIADTTDAVRDPQTLEILDITPCSFGGVSVITPGTNTSNQVAVLYQDVNCTEVPVAIHADQLTPTWRVYSTGSNVFQTRAGCLIGAEHVNNSYECDIPIGAGICASYQTQTNSPRRARSVASQSIIAYTMSLGAENSVAYSNNSIAIPTNFTISVTTEILPVSMTKTSVDCTMYICGDSTECSNLLLQYGSFCTQLNRALTGIAVEQDKNTQEVFAQVKQIYKTPPIKDFGGFNFSQILPDPSKPSKRSFIEDLLFNKVTLADAGFIKQYGDCLGDIAARDLICAQKFNGLTVLPPLLTDEMIAQYTSALLAGTITSGWWFGAGAALQIPFAMQMAYRFNGIGVTQNVLYENQKLIANQFNSAIGKIQDSLSSTASALGKLQDVVNQNAQALNTLVKQLSSNFGAISSVLNDILSRLDPPEAEVQIDRLITGRLQSLQTYVTQQLIRAAEIRWSANLAATKMSECVLGQSKRVDFCGKGYHLMSFPQSAPHGVVFLHVTYVPAQEKNFTTAPAICHDGKAHFPREGVFVSNGTHWFVTQRNFYEPQIITTDNTFVSGNCDVVIGIVNNTVYDPLQPELDSFKEELDKYFKNHTSPDVDLGDISGINASVVNIQKEIDRLNEVAKNLNESLIDLQELGKYEQYIKWPWYIWLGFIAGLIAIVMVTIMLCCMTSCCSCLKGCCSCGSCCKFDEDDSEPVLKGVKLHYT

SEQ ID NO: 448 - protein, 1273 aa, Artificial Sequence
  SARS-CoV-2/USA/WA-UW292/2020__EPI_ISL_418077 spike protein (1-1273)(K986P_V987P_T887W_A1020W)
MFVFLVLLPLVSSQCVNLTTRTQLPPAYTNSFTRGVYYPDKVFRSSVLHSTQDLFLPFFSNVTWFHAIHVSGTNGTKRFDNPVLPFNDGVYFASTEKSNIIRGWIFGTTLDSKTQSLLIVNNATNVVIKVCEFQFCNDPFLGVYYHKNNKSWMESEFRVYSSANNCTFEYVSQPFLMDLEGKQGNFKNLREFVFKNIDGYFKIYSKHTPINLVRDLPQGFSALEPLVDLPIGINITRFQTLLALHRSYLTPGDSSSGWTAGAAAYYVGYLQPRTFLLKYNENGTITDAVDCALDPLSETKCTLKSFTVEKGIYQTSNFRVQPTESIVRFPNITNLCPFGEVFNATRFASVYAWNRKRISNCVADYSVLYNSASFSTFKCYGVSPTKLNDLCFTNVYADSFVIRGDEVRQIAPGQTGKIADYNYKLPDDFTGCVIAWNSNNLDSKVGGNYNYLYRLFRKSNLKPFERDISTEIYQASSTPCNGVEGFNCYFPLQSYGFQPTNGVGYQPYRVVVLSFELLHAPATVCGPKKSTNLVKNKCVNFNFNGLTGTGVLTESNKKFLPFQQFGRDIADTTDAVRDPQTLEILDITPCSFGGVSVITPGTNTSNQVAVLYQDVNCTEVPVAIHADQLTPTWRVYSTGSNVFQTRAGCLIGAEHVNNSYECDIPIGAGICASYQTQTNSPRRARSVASQSIIAYTMSLGAENSVAYSNNSIAIPTNFTISVTTEILPVSMTKTSVDCTMYICGDSTECSNLLLQYGSFCTQLNRALTGIAVEQDKNTQEVFAQVKQIYKTPPIKDFGGFNFSQILPDPSKPSKRSFIEDLLFNKVTLADAGFIKQYGDCLGDIAARDLICAQKFNGLTVLPPLLTDEMIAQYTSALLAGTITSGWWFGAGAALQIPFAMQMAYRFNGIGVTQNVLYENQKLIANQFNSAIGKIQDSLSSTASALGKLQDVVNQNAQALNTLVKQLSSNFGAISSVLNDILSRLDPPEAEVQIDRLITGRLQSLQTYVTQQLIRAAEIRWSANLAATKMSECVLGQSKRVDFCGKGYHLMSFPQSAPHGVVFLHVTYVPAQEKNFTTAPAICHDGKAHFPREGVFVSNGTHWFVTQRNFYEPQIITTDNTFVSGNCDVVIGIVNNTVYDPLQPELDSFKEELDKYFKNHTSPDVDLGDISGINASVVNIQKEIDRLNEVAKNLNESLIDLQELGKYEQYIKWPWYIWLGFIAGLIAIVMVTIMLCCMTSCCSCLKGCCSCGSCCKFDEDDSEPVLKGVKLHYT

SEQ ID NO: 449 - protein, 1273 aa, Artificial Sequence
  SARS-CoV-2/Iceland/192/2020__EPI_ISL_417819 spike protein (1-1273)(K986P_V987P_T887W_A1020W)
MFVFFVLLPLVSSQCVNLTTRTQLPPAYTNSFTRGVYYPDKVFRSSVLHSTQDLFLPFFSNVTWFHAIHVSGTNGTKRFDNPVLPFNDGVYFASTEKSNIIRGWIFGTTLDSKTQSLLIVNNATNVVIKVCEFQFCNDPFLGVYYHKNNKSWMESEFRVYSSANNCTFEYVSQPFLMDLEGKQGNFKNLREFVFKNIDGYFKIYSKHTPINLVRDLPQGFSALEPLVDLPIGINITRFQTLLALHRSYLTPGDSSSGWTAGAAAYYVGYLQPRTFLLKYNENGTITDAVDCALDPLSETKCTLKSFTVEKGIYQTSNFRVQPTESIVRFPNITNLCPFGEVFNATRFASVYAWNRKRISNCVADYSVLYNSASFSTFKCYGVSPTKLNDLCFTNVYADSFVIRGDEVRQIAPGQTGKIADYNYKLPDDFTGCVIAWNSNNLDSKVGGNYNYLYRLFRKSNLKPFERDISTEIYQAGSTPCNGVEGFNCYFPLQSYGFQPTNGVGYQPYRVVVLSFELLHAPATVCGPKKSTNLVKNKCVNFNFNGLTGTGVLTESNKKFLPFQQFGRDIADTTDAVRDPQTLEILDITPCSFGGVSVITPGTNTSNQVAVLYQGVNCTEVPVAIHADQLTPTWRVYSTGSNVFQTRAGCLIGAEHVNNSYECDIPIGAGICASYQTQTNSPRRARSVASQSIIAYTMSLGAENSVAYSNNSIAIPTNFTISVTTEILPVSMTKTSVDCTMYICGDSTECSNLLLQYGSFCTQLNRALTGIAVEQDKNTQEVFAQVKQIYKTPPIKDFGGFNFSQILPDPSKPSKRSFIEDLLFNKVTLADAGFIKQYGDCLGDIAARDLICAQKFNGLTVLPPLLTDEMIAQYTSALLAGTITSGWWFGAGAALQIPFAMQMAYRFNGIGVTQNVLYENQKLIANQFNSAIGKIQDSLSSTASALGKLQDVVNQNAQALNTLVKQLSSNFGAISSVLNDILSRLDPPEAEVQIDRLITGRLQSLQTYVTQQLIRAAEIRWSANLAATKMSECVLGQSKRVDFCGKGYHLMSFPQSAPHGVVFLHVTYVPAQEKNFTTAPAICHDGKAHFPREGVFVSNGTHWFVTQRNFYEPQIITTDNTFVSGNCDVVIGIVNNTVYDPLQPELDSFKEELDKYFKNHTSPDVDLGDISGINASVVNIQKEIDRLNEVAKNLNESLIDLQELGKYEQYIKWPWYIWLGFIAGLIAIVMVTIMLCCMTSCCSCLKGCCSCGSCCKFDEDDSEPVLKGVKLHYT

SEQ ID NO: 450 - protein, 1273 aa, Artificial Sequence
  SARS-CoV-2/Belgium/ULG-6939/2020__EPI_ISL_417020 spike protein (1-1273)(K986P_V987P_T887W_A1020W)
MFVFLVLLPLVSSQCVNLTTRTQLPPAYTNSFTRGVYYPDKVFRSSVLHSTQDLFLPFFSNVTWFHAIHVSGTNGTKRFDNPVLPFNDGVYFASTEKSNIIRGWIFGTTLDSKTQSLLIVNNATNVVIKVCEFQFCNDPFLGVYYHKNNKSWMESEFRVYSSANNCTFEYVSQPFLMDLEGKQGNFKNLREFVFKNIDGYFKIYSKHTPINLVRDLPQGFSALEPLVDLPIGINITRFQTLLALHRSYLTPGDSSSGWTAGAAAYYVGYLQPRTFLLKYNENGTITDAVDCALDPLSETKCTLKSFTVEKGIYQTSNFRVQPTESIVRFPNITNLCPFGEVFNATRFASVYAWNRKRISNCVADYSVLYNSASFSTFKCYGVSPTKLNDLCFTNVYADSFVIRGDEVRQIAPGQTGKIADYNYKLPDDFTGCVIAWNSNNLDSKVGGNYNYLYRLFRKSNLKPFERDISTEIYQAGSTPCNGVEGFNCYFPLQSYGFQPTNGVGYQPYRVVVLSFELLHAPATVCGPKKSTNLVKNKCVNFNFNGLTGTGVLTESNKKFLPFQQFGRDIADTTDAVRDPQTLEILDITPCSFGGVSVITPGTNTSNQVAVLYQGVNCTEVPVAIHADQLTPTWRVYSTGSNVFQTRAGCLIGAEHVNNSYECDIPIGAGICASYQTQTNSPRRARSVASQSIIAYTMSLGAENSVVYSNNSIAIPTNFTISVTTEILPVSMTKTSVDCTMYICGDSTECSNLLLQYGSFCTQLNRALTGIAVEQDKNTQEVFAQVKQIYKTPPIKDFGGFNFSQILPDPSKPSKRSFIEDLLFNKVTLADAGFIKQYGDCLGDIAARDLICAQKFNGLTVLPPLLTDEMIAQYTSALLAGTITSGWWFGAGAALQIPFAMQMAYRFNGIGVTQNVLYENQKLIANQFNSAIGKIQDSLSSTASALGKLQDVVNQNAQALNTLVKQLSSNFGAISSVLNDILSRLDPPEAEVQIDRLITGRLQSLQTYVTQQLIRAAEIRWSANLAATKMSECVLGQSKRVDFCGKGYHLMSFPQSAPHGVVFLHVTYVPAQEKNFTTAPAICHDGKAHFPREGVFVSNGTHWFVTQRNFYEPQIITTDNTFVSGNCDVVIGIVNNTVYDPLQPELDSFKEELDKYFKNHTSPDVDLGDISGINASVVNIQKEIDRLNEVAKNLNESLIDLQELGKYEQYIKWPWYIWLGFIAGLIAIVMVTIMLCCMTSCCSCLKGCCSCGSCCKFDEDDSEPVLKGVKLHYT

SEQ ID NO: 451 - protein, 1273 aa, Artificial Sequence
  SARS-CoV-2/France/HF2496/2020__EPI_ISL_418231 spike protein (1-1273)(K986P_V987P_T887W_A1020W)
MFVFLVLLPLVSSQCVNLTTRTQLPPAYTNSFTRGVYYPDKVFRSSVLHSTQDLFLPFFSNVTWFHAIHVSGTNGTKRFDNPVLPFNDGVYFASTEKSNIIRGWIFGTTLDSKTQSLLIVNNATNVVIKVCEFQFCNDPFLGVYYHKNNKSWMESEFRVYSSANNCTFEYVSQPFLMDLEGKQGNFKNLREFVFKNIDGYFKIYSKHTPINLVRDLPQGFSALEPLVDLPIGINITRFQTLLALHRSYLTPGDSSSGWTAGAAAYYVGYLQPRTFLLKYNENGTITDAVDCALDPLSETKCTLKSFTVEKGIYQTSNFRVQPTESIVRFPNITNLCPFGEVFNATRFASVYAWNRKRISNCVADYSVLYNSASFSTFKCYGVSPTKLNDLCFTNVYADSFVIRGDEVRQIAPGQTGKIADYNYKLPDDFTGCVIAWNSNNLDSKVGGNYNYLYRLFRKSNLKPFERDISTEIYQAGSTPCNGVEGFNCYFPLQSYGFQPTNGVGYQPYRVVVLSFELLHAPATVCGPKKSTNLVKNKCVNFNFNGLTGTGVLTESNKKFLPFQQFGRDIADTTDAVRDPQTLEILDITPCSFGGVSVITPGTNTSNQVAVLYQGVNCTEVPVAIHADQLTPTWRVYSTGSNVFQTRAGCLIGAEHVNNSYECDIPIGAGICASYQTQTNSPRRARSVASQSIIAYTMSLGAENSVAYSNNSIAIPTNFTISVTTEILPVSMTKTSVDCTMYICGDSTECSNLLLQYGSFCTQLNRALTGIAVEQDKNTQEVFAQVKQIYKTPPIKDFGGFNFSQILPDPSKPSKRSFIEDLLFNKVTLADAGFIKQYGDCLGDIVARDLICAQKFNGLTVLPPLLTDEMIAQYTSALLAGTITSGWWFGAGAALQIPFAMQMAYRFNGIGVTQNVLYENQKLIANQFNSAIGKIQDSLSSTASALGKLQDVVNQNAQALNTLVKQLSSNFGAISSVLNDILSRLDPPEAEVQIDRLITGRLQSLQTYVTQQLIRAAEIRWSANLAATKMSECVLGQSKRVDFCGKGYHLMSFPQSAPHGVVFLHVTYVPAQEKNFTTAPAICHDGKAHFPREGVFVSNGTHWFVTQRNFYEPQIITTDNTFVSGNCDVVIGIVNNTVYDPLQPELDSFKEELDKYFKNHTSPDVDLGDISGINASVVNIQKEIDRLNEVAKNLNESLIDLQELGKYEQYIKWPWYIWLGFIAGLIAIVMVTIMLCCMTSCCSCLKGCCSCGSCCKFDEDDSEPVLKGVKLHYT

SEQ ID NO: 452 - protein, 1273 aa, Artificial Sequence
  SARS-CoV-2/USA/WA-UW291/2020__EPI_ISL_418076 spike protein (1-1273)(K986P_V987P_T887W_A1020W)
MFVFLVLLPLVSSQCVNLTTRTQLPPAYTNSFTRGVYYPDKVFRSSVLHSTQDLFLPFFSNVTWFHAIHVSGTNGTKRFDNPVLPFNDGVYFASTEKSNIIRGWIFGTTLDSKTQSLLIVNNATNVVIKVCEFQFCNDPFLGVYYHKNNKSWMESEFRVYSSANNCTFEYVSQPFLMDLEGKQGNFKNLREFVFKNIDGYFKIYSKHTPINLVRDLPQGFSALEPLVDLPIGINITRFQTLLALHRSYLTPGDSSSGWTAGAAAYYVGYLQPRTFLLKYNENGTITDAVDCALDPLSETKCTLKSFTVEKGIYQTSNFRVQPTESIVRFPNITNLCPFGEVFNATRFASVYAWNRKRISNCVADYSVLYNSASFSTFKCYGVSPTKLNDLCFTNVYADSFVIRGDEVRQIAPGQTGKIADYNYKLPDDFTGCVIAWNSNNLDSKVGGNYNYLYRLFRKSNLKPFERDISTEIYQAGSTPCNGVEGFNCYFPLQSYGFQPTNGVGYQPYRVVVLSFELLHAPATVCGPKKSTNLVKNKCVNFNFNGLTGTGVLTESNKKFLPFQQFGRDIADTTDAVRDPQTLEILDITPCSFGGVSVITPGTNTSNQVAVLYQGVNCTEVPVAIHADQLTPTWRVYSTGSNVFQTRAGCLIGAEHVNNSYECDIPIGAGICASYQTQTNSPRRARSVASQSIIAYTMSLGAENSVAYSNNSIAIPTNFTISVTTEILPVSMTKTSVDCTMYICGDSTECSNLLLQYGSFCTQLNRALTGIAVEQDKNTQEVFAQVKQIYKTPPIKDFGGFNFSQILPDPSKPSKRSFIEDLLFNKVTLADAGFIKQYGDCLGDIAARDLICAQKFNGLTVLPPLLTDEMIAQYTSALLAGTITSGWWFGAGAALQIPFAMQMAYRFNGIGVTQNVLYENQKLIANQFNSAIGKIQYSLSSTASALGKLQDVVNQNAQALNTLVKQLSSNFGAISSVLNDILSRLDPPEAEVQIDRLITGRLQSLQTYVTQQLIRAAEIRWSANLAATKMSECVLGQSKRVDFCGKGYHLMSFPQSAPHGVVFLHVTYVPAQEKNFTTAPAICHDGKAHFPREGVFVSNGTHWFVTQRNFYEPQIITTDNTFVSGNCDVVIGIVNNTVYDPLQPELDSFKEELDKYFKNHTSPDVDLGDISGINASVVNIQKEIDRLNEVAKNLNESLIDLQELGKYEQYIKWPWYIWLGFIAGLIAIVMVTIMLCCMTSCCSCLKGCCSCGSCCKFDEDDSEPVLKGVKLHYT

SEQ ID NO: 453 - protein, 1273 aa, Artificial Sequence
  SARS-CoV-2/Portugal/PT0034/2020__EPI_ISL_418019 spike protein (1-1273)(K986P_V987P_T887W_A1020W)
MFVFLVLLPLVSSQCVNLTTRTQLPPAYTNSFTRGVYYPDKVFRSSVLHSTQDLFLPFFSNVTWFHAIHVSGTNGTKRFDNPVLPFNDGVYFASTEKSNIIRGWIFGTTLDSKTQSLLIVNNATNVVIKVCEFQFCNDPFLGVYYHKNNKSWMESEFRVYSSANNCTFEYVSQPFLMDLEGKQGNFKNLREFVFKNIDGYFKIYSKHTPINLVRDLPQGFSALEPLVDLPIGINITRFQTLLALHRSYLTPGDSSSGWTAGAAAYYVGYLQPRTFLLKYNENGTITDAVDCALDPLSETKCTLKSFTVEKGIYQTSNFRVQPTESIVRFPNITNLCPFGEVFNATRFASVYAWNRKRISNCVADYSVLYNSASFSTFKCYGVSPTKLNDLCFTNVYADSFVIRGDEVRQIAPGQTGKIADYNYKLPDDFTGCVIAWNSNNLDSKVGGNYNYLYRLFRKSNLKPFERDISTEIYQAGSTPCNGVEGFNCYFPLQSYGFQPTNGVGYQPYRVVVLSFELLHAPATVCGPKKSTNLVKNKCVNFNFNGLTGTGVLTESNKKFLPFQQFGRDIADTTDAVRDPQTLEILDITPCSFGGVSVITPGTNTSNQVAVLYQGVNCTEVPVAIHADQLTPTWRVYSTGSNVFQTRAGCLIGAEHVNNSYECDIPIGAGICASYQTQTNSPRRARSVASQSIIAYTMSLGAENSVAYSNNSIAIPTNFTISVTTEILPVSMTKTSVDCTMYICGDSTECSNLLLQYGSFCTQLNRALTGIAVEQDKNTQEVFAQVKQIYKTPPIKDFGGFNFSQILPDPSKPSKRSFIEDLLFNKVTLADAGFIKQYGDCLGDIAARDLICAQKFNGLTVLPPLLTDEMIAQYTSALLAGTITSGWWFGAGAALQIPFAMQMAYRFNGIGVTQNVLYENQKLIANQFNSAIGKIQDSLSSTASALGKLQDVVNQNAQALNTLVKQLSSNFGAISSVLNDILSRLDPPEAEVQIDRLITGRLQSLQTYVTQQLIRAAEIRWSANLAATKMSECVLGQSKRVDFCGKGYHLMSFPQSAPHGVVFLHVTYVPAQEKNFTTAPAICHDGKAHFPREGVFVSNGTHWFVTQRNFYEPQIITTDNTFVSGNCDVVIGIVNNTVYDPLQPELDSFKEELDKYFKNHTSPDVDLGDISGINASVVNIQKEIDRLNEVAKNLNESLIDLQELGKYEQYIKWPWYIWLGFIAGLIAIVMVTIMLCCITSCCSCLKGCCSCGSCCKFDEDDSEPVLKGVKLHYT

SEQ ID NO: 454 - protein, 1273 aa, Artificial Sequence
  SARS-CoV-2/Iceland/202/2020__EPI_ISL_417750 spike protein (1-1273)(K986P_V987P_T887W_A1020W)
MFVFLVLLPLVSSQCVNLTTRTQLPPAYTNSFTRGVYYPDKVFRSSVLHSTQDLFLPFFSNVTWFHAIHVSGTNGTKRFDNPVLPFNDGVYFASTEKSNIIRGWIFGTTLDSKTQSLLIVNNATNVVIKVCEFQFCNDPFLGVYYHKNNKSWMESEFRVYSSANNCTFEYVSQPFLMDLEGKQGNFKNLREFVFKNIDGYFKIYSKHTPINLVRDLPQGFSALEPLVDLPIGINITRFQTLLALHRSYLTPGDSSSGWTAGAAAYYVGYLQPRTFLLKYNENGTITDAVDCALDPLSETKCTLKSFTVEKGIYQTSNFRVQPTESIVRFPNITNLCPFGEVFNATRFASVYAWNRKRISNCVADYSVLYNSASFSTFKCYGVSPTKLNDLCFTNVYADSFVIRGDEVRQIAPGQTGKIADYNYKLPDDFTGCVIAWNSNNLDSKVGGNYNYLYRLFRKSNLKPFERDISTEIYQAGSTPCNGVEGFNCYFPLQSYGFQPTNGVGYQPYRVVVLSFELLHAPATVCGPKKSTNLVKNKCVNFNFNGLTGTGVLTESNKKFLPFQQFGRDIADTTDAVRDPQTLEILDITPCSFGGVSVITPGTNTSNQVAVLYQDVNCTEVPVAIHADQLTPTWRVYSTGSNVFQTRAGCLIGAEHVNNSYECDIPIGAGICASYQTQTNSPRRARSVASQSIIAYTMSLGAENSVAYSNNSIAIPTNFTISVTTEILPVSMTKTSVDCTMYICGDSTECSNLLLQYGSFCTQLNRALTGIAVEQDKNTQEVFAQVKQIYKTPPIKDFGGFNFSQILPDPSKPSKRSFIEDLLFNKVTLADAGFIKQYGDCLGDIAARDLICAQKFNGLTVLPPLLTDEMIAQYTSALLAGTITSGWWFGAGAALQIPFAMQMAYRFNGIGVTQNVLYENQKLIANQFNSAIGKIQDSLSSTASALGKLQDVVNQNAQALNTLVKQLSSNFGAISSVLNDILSRLDPPEAEVQIDRLITGRLQSLQTYVTQQLIRAAEIRWSANLAATKMSECVLGQSKRVDFCGKGYHLMSFPQSAPHGVVFLHVTYVPAQEKNFTTAPAICHDGKAHFPREGVFVSNGTHWFVTQRNFYEPQIITTDNTFVSGNCDVVIGIVNNTVYDPLQPELDSFKEELDKYFKNHTSPDVDLGDIPGINASVVNIQKEIDRLNEVAKNLNESLIDLQELGKYEQYIKWPWYIWLGFIAGLIAIVMVTIMLCCMTSCCSCLKGCCSCGSCCKFDEDDSEPVLKGVKLHYT

SEQ ID NO: 455 - protein, 1273 aa, Artificial Sequence
  SARS-CoV-2/USA/WA-UW261/2020__EPI_ISL_418046 spike protein (1-1273)(K986P_V987P_T887W_A1020W)
MFVFLVLLPLVSSQCVNLTTRTQLPPAYTNSFTRGVYYPDKVFRSSVLHSTQDLFLPFFSNVTWFHAIHVSGTNGTKRFDNPVLPFNDGVYFASTEKSNIIRGWIFGTTLDSKTQSLLIVNNATNVVIKVCEFQFCNDPFLGVYYHKNNKSWMESEFRVYSSANNCTFEYVSQPFLMDLEGKQGNFKNLREFVFKNIDGYFKIYSKHTPINLVRDLPQGFSALEPLVDLPIGINITRFQTLLALHRSYLTPGDSSSGWTAGAAAYYVGYLQPRTFLLKYNENGTITDAVDCALDPLSETKCTLKSFTVEKGIYQTSNFRVQPTESIVRFPNITNLCPFGEVFNATRFTSVYAWNRKRISNCVADYSVLYNSASFSTFKCYGVSPTKLNDLCFTNVYADSFVIRGDEVRQIAPGQTGKIADYNYKLPDDFTGCVIAWNSNNLDSKVGGNYNYLYRLFRKSNLKPFERDISTEIYQAGSTPCNGVEGFNCYFPLQSYGFQPTNGVGYQPYRVVVLSFELLHAPATVCGPKKSTNLVKNKCVNFNFNGLTGTGVLTESNKKFLPFQQFGRDIADTTDAVRDPQTLEILDITPCSFGGVSVITPGTNTSNQVAVLYQDVNCTEVPVAIHADQLTPTWRVYSTGSNVFQTRAGCLIGAEHVNNSYECDIPIGAGICASYQTQTNSPRRARSVASQSIIAYTMSLGAENSVAYSNNSIAIPTNFTISVTTEILPVSMTKTSVDCTMYICGDSTECSNLLLQYGSFCTQLNRALTGIAVEQDKNTQEVFAQVKQIYKTPPIKDFGGFNFSQILPDPSKPSKRSFIEDLLFNKVTLADAGFIKQYGDCLGDIAARDLICAQKFNGLTVLPPLLTDEMIAQYTSALLAGTITSGWWFGAGAALQIPFAMQMAYRFNGIGVTQNVLYENQKLIANQFNSAIGKIQDSLSSTASALGKLQDVVNQNAQALNTLVKQLSSNFGAISSVLNDILSRLDPPEAEVQIDRLITGRLQSLQTYVTQQLIRAAEIRWSANLAATKMSECVLGQSKRVDFCGKGYHLMSFPQSAPHGVVFLHVTYVPAQEKNFTTAPAICHDGKAHFPREGVFVSNGTHWFVTQRNFYEPQIITTDNTFVSGNCDVVIGIVNNTVYDPLQPELDSFKEELDKYFKNHTSPDVDLGDISGINASVVNIQKEIDRLNEVAKNLNESLIDLQELGKYEQYIKWPWYIWLGFIAGLIAIVMVTIMLCCMTSCCSCLKGCCSCGSCCKFDEDDSEPVLKGVKLHYT

SEQ ID NO: 456 - protein, 1273 aa, Artificial Sequence
  SARS-CoV-2/Portugal/PT0035/2020__EPI_ISL_418020 spike protein (1-1273)(K986P_V987P_T887W_A1020W)
MFVFLVLLPLVSSQCVNLTTRTQLPPAYTNSFTRGVYYPDKVFRSSVLHSTQDLFLPFFSNVTWFHAIHVSGTNGTKRFDNPVLPFNDGVYFASTEKSNIIRGWIFGTTLDSKTQSLLIVNNATNVVIKVCEFQFCNDPFLGVYYHKNNKSWMESEFRVYSSANNCTFEYVSQPFLMDLEGKQGNFKNLREFVFKNIDGYFKIYSKHTPINLVRDLPQGFSALEPLVDLPIGINITRFQTLLALHRSYLTPGDSSSGWTAGAAAYYVGYLQPRTFLLKYNENGTITDAVDCALDPLSETKCTLKSFTVEKGIYQTSNFRVQPTESIVRFPNITNLCPFGEVFNATRFASVYAWNRKRISNCVADYSVLYNSASFSTFKCYGVSPTKLNDLCFTNVYADSFVIRGDEVRQIAPGQTGKIADYNYKLPDDFTGCVIAWNSNNLDSKVGGNYNYLYRLFRKSNLKPFERDISTEIYQAGSTPCNGVEGFNCYFPLQSYGFQPTNGVGYQPYRVVVLSFELLHAPATVCGPKKSTNLVKNKCVNFNFNGLTGTGVLTESNKKFLPFQQFGRDIADTTDAVRDPQTLEILDITPCSFGGVSVITPGTNTSNQVAVLYQDVNCTEVPVAIHADQLTPTWRVYSTGSNVFQTRAGCLIGAEHVNNSYECDIPIGAGICASYQTQTNSPRRARSVASQSIIAYTMSLGAENSVAYSNNSIAIPTNFTISVTTEILPVSMTKTSVDCTMYICGDSTECSNLLLQYGSFCTQLNRALTGIAVEQDKNTQEVFAQVKQIYKTPPIKDFGGFNFSQILPDPSKPSKRSFIEDLLFNKVTLADAGFIKQYGDCLGDISARDLICAQKFNGLTVLPPLLTDEMIAQYTSALLAGTITSGWWFGAGAALQIPFAMQMAYRFNGIGVTQNVLYENQKLIANQFNSAIGKIQDSLSSTASALGKLQDVVNQNAQALNTLVKQLSSNFGAISSVLNDILSRLDPPEAEVQIDRLITGRLQSLQTYVTQQLIRAAEIRWSANLAATKMSECVLGQSKRVDFCGKGYHLMSFPQSAPHGVVFLHVTYVPAQEKNFTTAPAICHDGKAHFPREGVFVSNGTHWFVTQRNFYEPQIITTDNTFVSGNCDVVIGIVNNTVYDPLQPELDSFKEELDKYFKNHTSPDVDLGDISGINASVVNIQKEIDRLNEVAKNLNESLIDLQELGKYEQYIKWPWYIWLGFIAGLIAIVMVTIMLCCMTSCCSCLKGCCSCGSCCKFDEDDSEPVLKGVKLHYT

SEQ ID NO: 457 - protein, 1273 aa, Artificial Sequence
  SARS-CoV-2/USA/NY-NYUMC7/2020__EPI_ISL_418192 spike protein (1-1273)(K986P_V987P_T887W_A1020W)
MFVFLVLLPLVSSQCVNLTTRTQLPPAYTNSFTRGVYYPDKVFRSSVLHSTQDLFLPFFSNVTWFHAIHVSGTNGTKRFDNPVLPFNDGVYFASTEKSNIIRGWIFGTTLDSKTQSLLIVNNATNVVIKVCEFQFCNDPFLGVYHHKNNKSWMESEFRVYSSANNCTFEYVSQPFLMDLEGKQGNFKNLREFVFKNIDGYFKIYSKHTPINLVRDLPQGFSALEPLVDLPIGINITRFQTLLALHRSYLTPGDSSSGWTAGAAAYYVGYLQPRTFLLKYNENGTITDAVDCALDPLSETKCTLKSFTVEKGIYQTSNFRVQPTESIVRFPNITNLCPFGEVFNATRFASVYAWNRKRISNCVADYSVLYNSASFSTFKCYGVSPTKLNDLCFTNVYADSFVIRGDEVRQIAPGQTGKIADYNYKLPDDFTGCVIAWNSNNLDSKVGGNYNYLYRLFRKSNLKPFERDISTEIYQAGSTPCNGVEGFNCYFPLQSYGFQPTNGVGYQPYRVVVLSFELLHAPATVCGPKKSTNLVKNKCVNFNFNGLTGTGVLTESNKKFLPFQQFGRDIADTTDAVRDPQTLEILDITPCSFGGVSVITPGTNTSNQVAVLYQGVNCTEVPVAIHADQLTPTWRVYSTGSNVFQTRAGCLIGAEHVNNSYECDIPIGAGICASYQTQTNSPRRARSVASQSIIAYTMSLGAENSVAYSNNSIAIPTNFTISVTTEILPVSMTKTSVDCTMYICGDSTECSNLLLQYGSFCTQLNRALTGIAVEQDKNTQEVFAQVKQIYKTPPIKDFGGFNFSQILPDPSKPSKRSFIEDLLFNKVTLADAGFIKQYGDCLGDIAARDLICAQKFNGLTVLPPLLTDEMIAQYTSALLAGTITSGWWFGAGAALQIPFAMQMAYRFNGIGVTQNVLYENQKLIANQFNSAIGKIQDSLSSTASALGKLQDVVNQNAQALNTLVKQLSSNFGAISSVLNDILSRLDPPEAEVQIDRLITGRLQSLQTYVTQQLIRAAEIRWSANLAATKMSECVLGQSKRVDFCGKGYHLMSFPQSAPHGVVFLHVTYVPAQEKNFTTAPAICHDGKAHFPREGVFVSNGTHWFVTQRNFYEPQIITTDNTFVSGNCDVVIGIVNNTVYDPLQPELDSFKEELDKYFKNHTSPDVDLGDISGINASVVNIQKEIDRLNEVAKNLNESLIDLQELGKYEQYIKWPWYIWLGFIAGLIAIVMVTIMLCCMTSCCSCLKGCCSCGSCCKFDEDDSEPVLKGVKLHYT

SEQ ID NO: 458 - protein, 1273 aa, Artificial Sequence
  SARS-CoV-2/Iceland/189/2020__EPI_ISL_417709 spike protein (1-1273)(K986P_V987P_T887W_A1020W)
MFVFLVLLPLVSSQCVNLTTRTQLPPAYTNSFTRGVYYPDKVFRSSVLHSTQDLFLPFFSNVTWFHAIHVSGTNGTKRFDNPVLPFNDGVYFASTEKSNIIRGWIFGTTLDSKTQSLLIVNNATNVVIKVCEFQFCNDPFLGVYYHKNNKSWMESEFRVYSSANNCTFEYVSQPFLMDLEGKQGNFKNLREFVFKNIDGYFKIYSKHTPINLVRDLPQGFSALEPLVDLPIGINITRFQTLLALHRSYLTPGDSSSGWTAGAAAYYVGYLQPRTFLLKYNENGTITDAVDCALDPLSETKCTLKSFTVEKGIYQTSNFRVQPTESIVRFPNITNLCPFGEVFNATRFASVYAWNRKRISNCVADYSVLYNSASFSTFKCYGVSPTKLNDLCFTNVYADSFVIRGDEVRQIAPGQTGKIADYNYKLPDDFTGCVIAWNSNNLDSKVGGNYNYLYRLFRKSNLKPFERDISTEIYQAGSTPCNGVEGFNCYFPLQSYGFQPTNGVGYQPYRVVVLSFELLHAPATVCGPKKSTNLVKNKCVNFNFNGLTGTGVLTESNKKFLPFQQFGRDIADTTDAVRDPQTLEILDITPCSFGGVSVITPGTNTSNQVAVLYQGVNCTEVPVAIHADQLTPTWRVYSTGSNVFQTRAGCLIGAEHVNNSYECDIPIGAGICASYQTQTNSPRRARSVASQSIIAYTMSLGAENSVAYSNNSIAIPTNFTISVTTEILPVSMTKTSVDCTMYICGDSTECSNLLLQYGSFCTQLNRALTGIAVEQDKNTQEVFAQVKQIYKTPPIKDFGGFNFSQILPDPSKPSKRSFIEDLLFNKVTLADAGFTKQYGDCLGDIAARDLICAQKFNGLTVLPPLLTDEMIAQYTSALLAGTITSGWWFGAGAALQIPFAMQMAYRFNGIGVTQNVLYENQKLIANQFNSAIGKIQDSLSSTASALGKLQDVVNQNAQALNTLVKQLSSNFGAISSVLNDILSRLDPPEAEVQIDRLITGRLQSLQTYVTQQLIRAAEIRWSANLAATKMSECVLGQSKRVDFCGKGYHLMSFPQSAPHGVVFLHVTYVPAQEKNFTTAPAICHDGKAHFPREGVFVSNGTHWFVTQRNFYEPQIITTDNTFVSGNCDVVIGIVNNTVYDPLQPELDSFKEELDKYFKNHTSPDVDLGDISGINASVVNIQKEIDRLNEVAKNLNESLIDLQELGKYEQYIKWPWYIWLGFIAGLIAIVMVTIMLCCMTSCCSCLKGCCSCGSCCKFDEDDSEPVLKGVKLHYT

SEQ ID NO: 459 - protein, 1273 aa, Artificial Sequence
  SARS-CoV-2/Australia/NSW56/2020__EPI_ISL_417408 spike protein (1-1273)(K986P_V987P_T887W_A1020W)
MFVFLVLLPLVSSQCVNLTTRTQLPPAYTNSFTRGVYYPDKVFRSSVLHSTQDLFLPFFSNVTWFHAIHVSGTNGTKRFDNPVLPFNDGVYFASTEKSNIIRGWIFGTTLDSKTQSLLIVNNATNVVIKVCEFQFCNDPFLGVYYHKNNKSWMESEFRVYSSANNCTFEYVSQPFLMDLEGKQGNFKNLREFVFKNIDGYFKIYSKHTPINLVRDLPQGFSALEPLVDLPIGINITRFQTLLALHRSYLTPGDSSSGWTAGAAAYYVGYLQPRTFLLKYNENGTITDAVDCALDPLSETKCTLKSFTVEKGIYQTSNFRVQPTESIVRFPNITNLCPFGEVFNATRFASVYAWNRKRISNCVADYSVLYNSASFSTFKCYGVSPTKLNDLCFTNVYADSFVIRGDEVRQIAPGQTGKIADYNYKLPDDFTGCVIAWNSNNLDSKVGGNYNYLYRLFRKSNLKPFERDISTEIYQAGSTPCNGVEGFNCYFPLQSYGFQPTNGVGYQPYRVVVLSFELLHAPATVCGPKKSTNLVKNKCVNFNFNGLTGTGVLTESNKKFLPFQQFGRDIADTTDAVRDPQTLEILDITPCSFGGVSVITPGTNTSNQVAVLYQDVNCTEVPVAIHADQLTPTWRVYSTGSNVFQTRAGCLIGAEHVNNSYECDIPIGAGICASYQTQTNSPRRARSVASQSIIAYTMSLGAENSVAYSNNSIAIPTNFTISVTTEILPVSMTKTSVDCTMYICGDSTECSNLLLQYGSFCTQLNRALTGIAVEQDKNTQEVFAQVKQIYKTPPIKDFGGFNFSQILPDSSKPSKRSFIEDLLFNKVTLADAGFIKQYGDCLGDIAARDLICAQKFNGLTVLPPLLTDEMIAQYTSALLAGTITSGWWFGAGAALQIPFAMQMAYRFNGIGVTQNVLYENQKLIANQFNSAIGKIQDSLSSTASALGKLQDVVNQNAQALNTLVKQLSSNFGAISSVLNDILSRLDPPEAEVQIDRLITGRLQSLQTYVTQQLIRAAEIRWSANLAATKMSECVLGQSKRVDFCGKGYHLMSFPQSAPHGVVFLHVTYVPAQEKNFTTAPAICHDGKAHFPREGVFVSNGTHWFVTQRNFYEPQIITTDNTFVSGNCDVVIGIVNNTVYDPLQPELDSFKEELDKYFKNHTSPDVDLGDISGINASVVNIQKEIDRLNEVAKNLNESLIDLQELGKYEQYIKWPWYIWLGFIAGLIAIVMVTIMLCCMTSCCSCLKGCCSCGSCCKFDEDDSEPVLKGVKLHYT

SEQ ID NO: 460 - protein, 1273 aa, Artificial Sequence
  SARS-CoV-2/Iceland/280/2020__EPI_ISL_417608 spike protein (1-1273)(K986P_V987P_T887W_A1020W)
MFVFLVLLPLVSSQCVNLTTRTQLPPAYTNSFTRGVYYPDKVFRSSVLHSTQDLFLPFFSNVTWFHAIHVSGTNGTKRFDNPVLPFNDGVYFASTEKSNIIRGWIFGTTLDSKTQSLLIVNNATNVVIKVCEFQFCNDPFLGVYYHKNNKSWMESEFRVYSSANNCTFEYVSQPFLMDLEGKQGNFKNLREFVFKNIDGYFKIYSKHTPINLVRDLPQGFSALEPLVDLPIGINITRFQTLLALHRSYLTPGDSSSGWTAGAAAYYVGYLQPRTFLLKYNENGTITDAVDCALDPLSETKCTLKSFTVEKGIYQTSNFRVQPTESIVRFPNITNLCPFGEVFNATRFASVYAWNRKRISNCVADYSVLYNSASFSTFKCYGVSPTKLNDLCFTNVYADSFVIRGDEVRQIAPGQTGKIADYNYKLPDDFTGCVIAWNSNNLDSKVGGNYNYLYRLFRKSNLKPFERDISTEIYQAGSTPCNGVEGFNCYFPLQSYGFQPTNGVGYQPYRVVVLSFELLHAPATVCGPKKSTNLVKNKCVNFNFNGLTGTGVLTESNKKFLPFQQFGRDIADTTDAVRDPQTLEILDITPCSFGGVSVITPGTNTSNQVAVLYQGVNCTEVPVAIHADQLTPTWRVYSTGSNVFQTRAGCLIGAEHVNNSYECDIPIGAGICASYHTQTNSPRRARSVASQSIIAYTMSLGAENSVAYSNNSIAIPTNFTISVTTEILPVSMTKTSVDCTMYICGDSTECSNLLLQYGSFCTQLNRALTGIAVEQDKNTQEVFAQVKQIYKTPPIKDFGGFNFSQILPDPSKPSKRSFIEDLLFNKVTLADAGFIKQYGDCLGDIAARDLICAQKFNGLTVLPPLLTDEMIAQYTSALLAGTITSGWWFGAGAALQIPFAMQMAYRFNGIGVTQNVLYENQKLIANQFNSAIGKIQDSLSSTASALGKLQDVVNQNAQALNTLVKQLSSNFGAISSVLNDILSRLDPPEAEVQIDRLITGRLQSLQTYVTQQLIRAAEIRWSANLAATKMSECVLGQSKRVDFCGKGYHLMSFPQSAPHGVVFLHVTYVPAQEKNFTTAPAICHDGKAHFPREGVFVSNGTHWFVTQRNFYEPQIITTDNTFVSGNCDVVIGIVNNTVYDPLQPELDSFKEELDKYFKNHTSPDVDLGDISGINASVVNIQKEIDRLNEVAKNLNESLIDLQELGKYEQYIKWPWYIWLGFIAGLIAIVMVTIMLCCMTSCCSCLKGCCSCGSCCKFDEDDSEPVLKGVKLHYT

SEQ ID NO: 461 - protein, 1273 aa, Artificial Sequence
  SARS-CoV-2/Iceland/247/2020__EPI_ISL_417575 spike protein (1-1273)(K986P_V987P_T887W_A1020W)
MFVFLVLLPLVSSQCVNLTTRTQLPPAYTNSFTRGVYYPDKVFRSSVLHSTQDLFLPFFSNVTWFHAIHVSGTNGTKRFDNPVLPFNDGVYFASTEKSNIIRGWIFGTTLDSKTQSLLIVNNATNVVIKVCEFQFCNDPFLGVYYHKNNKSWMESEFRVYSSANNCTFEYVSQPFLMDLEGKQGNFKNLREFVFKNIDGYFKIYSKHTPINLVRDLPQGFSALEPLVDLPIGINITRFQTLLALHRSYLTPGDSSSGWTAGAAAYYVGYLQPRTFLLKYNENGTITDAVDCALDPLSETKCTLKSFTVEKGIYQTSNFRVQPTESIVRFPNITNLCPFGEVFNATRFASVYAWNRKRISNCVADYSVLYNSASFSTFKCYGVSPTKLNDLCFTNVYADSFVIRGDEVRQIAPGQTGKIADYNYKLPDDFTGCVIAWNSNNLDSKVGGNYNYLYRLFRKSNLKPFERDISTEIYQAGSTPCNGVEGFNCYFPLQSYGFQPTNGVGYQPYRVVVLSFELLHAPATVCGPKKSTNLVKNKCVNFNFNGLTGTGVLTESNKKFLPFQQFGRDIADTTDAVRDPQTLEILDITPCSFGGVSVITPGTNTSNQVAVLYQGVNCTEVPVAIHADQLTPTWRVYSTGSNVFQTRAGCLIGAEHVNNSYECDIPIGAGICASYQTQTNSPRRARSVASQSIIAYTMSLGAENSVAYSNNSIAIPTNFTISVTTEILPVSMTKTSVDCTMYICGDSTECSNLLLQYGSFCTQLNRALTGIAVEQDKNTQEVFAQVKQIYKTPPIKDFGGFNFSQILPDPSKPSKRSFIEDLLFNKVTLADAGFIKQYGDCLGDIAARDLICAQKFNGLTVLPPLLTDEMIAQYTSALLAGTITSGWWFGAGAALQIPFAMQMAYRFNGIGVTQNVLYENQKLIANQFNSAIGKIQDSLSSTASALGKLQDVVNQNAQALNTLVKQLSSNFGAISSVLNDILSRLDPPEAEVQIDRLITGRLQSLQTYVTQQLIRAAEIRWSANLAATKMSECVLGQSKRVDFCGKGYHLMSFPQSAPHGVVFLHVTYVPAQEKNFTTAPAICHDGKAHFPREGVFVSNGTHWFVTQRNFYEPQIITTDNTFVSGNCDVVIGIVNNTVYDPLQPELDSFKEELDKYFKNHTSPDVDLGDISGINASVVNIQKEIDRLNEVAKNLNESLIDLQELGKYEQYIKWPWYIWLGFIAGLIAIVIVTIMLCCMTSCCSCLKGCCSCGSCCKFDEDDSEPVLKGVKLHYT

SEQ ID NO: 462 - protein, 1273 aa, Artificial Sequence
  SARS-CoV-2/Iceland/238/2020__EPI_ISL_417566 spike protein (1-1273)(K986P_V987P_T887W_A1020W)
MFVFLVLLPLVSSQCVNLTTRTQLPPAYTNSFTRGVYYPDKVFRSSVLHSTQDLFLPFFSNVTWFHAIHVSGTNGTKRFDNPVLPFNDGVYFASTEKSNIIRGWIFGTTLDSKTQSLLIVNNATNVVIKVCEFQFCNDPFLGVYYHKNNKSWMESEFRVYSSANNCTFEYVSQPFLMDLEGKQGNFKNLREFVFKNIDGYFKIYSKHTPINLVRDLPQGFSALEPLVDLPIGINITRFQTLLALHRSYLTPGDSSSGWTAGAAAYYVGYLQPRTFLLKYNENGTITDAVDCALDPLSETKCTLKSFTVEKGIYQTSNFRVQPTESIVRFPNITNLCPFGEVFNATRFASVYAWNRKRISNCVADYSVLYNSASFSTFKCYGVSPTKLNDLCFTNVYADSFVIRGDEVRQIAPGQTGKIADYNYKLPDDFTGCVIAWNSNNLDSKVGGNYNYLYRLFRKSNLKPFERDISTEIYQAGSTPCNGVEGFNCYFPLQSYGFQPTNGVGYQPYRVVVLSFELLHAPATVCGPKKSTNLVKNKCVNFNFNGLTGTGVLTESNKKFLPFQQFGRDIADTTDAVRDPQTLEILDITPCSFGGVSVITPGTNTSNQVAVLYQGVNCTEVPVAIHADQLTPTWRVYSTGSNVFQTRAGCLIGAEHVNNSYECDIPIGAGICASYQTQTNSPRRARSVASQSIIAYTMSLGAENSVAYSNNSIAIPTNFTISVTTEILPVSMTKTSVDCTMYICGDSTECSNLLLQYGSFCTQLNRALTGIAVEQDKNTQEVFAQVKQIYKTPPIKDFGGFNFSQILPDPSKPSKRSFIEDLLFNKVTLADVGFIKQYGDCLGDIAARDLICAQKFNGLTVLPPLLTDEMIAQYTSALLAGTITSGWWFGAGAALQIPFAMQMAYRFNGIGVTQNVLYENQKLIANQFNSAIGKIQDSLSSTASALGKLQDVVNQNAQALNTLVKQLSSNFGAISSVLNDILSRLDPPEAEVQIDRLITGRLQSLQTYVTQQLIRAAEIRWSANLAATKMSECVLGQSKRVDFCGKGYHLMSFPQSAPHGVVFLHVTYVPAQEKNFTTAPAICHDGKAHFPREGVFVSNGTHWFVTQRNFYEPQIITTDNTFVSGNCDVVIGIVNNTVYDPLQPELDSFKEELDKYFKNHTSPDVDLGDISGINASVVNIQKEIDRLNEVAKNLNESLIDLQELGKYEQYIKWPWYIWLGFIAGLIAIVMVTIMLCCMTSCCSCLKGCCSCGSCCKFDEDDSEPVLKGVKLHYT

SEQ ID NO: 463 - protein, 1273 aa, Artificial Sequence
  SARS-CoV-2/Greece/16/2020__EPI_ISL_418265 spike protein (1-1273)(K986P_V987P_T887W_A1020W)
MFVFLVLLPLVSSQCVNLTTRTQLPPAYTNSFTRGVYYPDKVFRSSVLHSTQDLFLPFFSNVTWFHAIHVSGTNGTKRFDNPVLPFNDGVYFASTEKSNIIRGWIFGTTLDSKTQSLLIVNNATNVVIKVCEFQFCNDPFLGVYYHKNNKSWMESEFRVYSSANNCTFEYVSQPFLMDLEGKQGNFKNLREFVFKNVDGYFKIYSKHTPINLVRDLPQGFSALEPLVDLPIGINITRFQTLLALHRSYLTPGDSSSGWTAGAAAYYVGYLQPRTFLLKYNENGTITDAVDCALDPLSETKCTLKSFTVEKGIYQTSNFRVQPTESIVRFPNITNLCPFGEVFNATRFASVYAWNRKRISNCVADYSVLYNSASFSTFKCYGVSPTKLNDLCFTNVYADSFVIRGDEVRQIAPGQTGKIADYNYKLPDDFTGCVIAWNSNNLDSKVGGNYNYLYRLFRKSNLKPFERDISTEIYQAGSTPCNGVEGFNCYFPLQSYGFQPTNGVGYQPYRVVVLSFELLHAPATVCGPKKSTNLVKNKCVNFNFNGLTGTGVLTESNKKFLPFQQFGRDIADTTDAVRDPQTLEILDITPCSFGGVSVITPGTNTSNQVAVLYQDVNCTEVPVAIHADQLTPTWRVYSTGSNVFQTRAGCLIGAEHVNNSYECDIPIGAGICASYQTQTNSPRRARSVASQSIIAYTMSLGAENSVAYSNNSIAIPTNFTISVTTEILPVSMTKTSVDCTMYICGDSTECSNLLLQYGSFCTQLNRALTGIAVEQDKNTQEVFAQVKQIYKTPPIKDFGGFNFSQILPDPSKPSKRSFIEDLLFNKVTLADAGFIKQYGDCLGDIAARDLICAQKFNGLTVLPPLLTDEMIAQYTSALLAGTITSGWWFGAGAALQIPFAMQMAYRFNGIGVTQNVLYENQKLIANQFNSAIGKIQDSLSSTASALGKLQDVVNQNAQALNTLVKQLSSNFGAISSVLNDILSRLDPPEAEVQIDRLITGRLQSLQTYVTQQLIRAAEIRWSANLAATKMSECVLGQSKRVDFCGKGYHLMSFPQSAPHGVVFLHVTYVPAQEKNFTTAPAICHDGKAHFPREGVFVSNGTHWFVTQRNFYEPQIITTDNTFVSGNCDVVIGIVNNTVYDPLQPELDSFKEELDKYFKNHTSPDVDLGDISGINASVVNIQKEIDRLNEVAKNLNESLIDLQELGKYEQYIKWPWYIWLGFIAGLIAIVMVTIMLCCMTSCCSCLKGCCSCGSCCKFDEDDSEPVLKGVKLHYT

SEQ ID NO: 464 - protein, 1273 aa, Artificial Sequence
  SARS-CoV-2/Iceland/319/2020__EPI_ISL_417648 spike protein (1-1273)(K986P_V987P_T887W_A1020W)
MFVFLVLLPLVSSQCVNLTTRTQLPPAYTNSFTRGVYYPDKVFRSSVLHSTQDLFLPFFSNVTWFHAIHVSGTNGTKRFDNPVLPFNDGVYFASTEKSNIIRGWIFGTTLDSKTQSLLIVNNATNVVIKVCEFQFCNDPFLGVYYHKNNKSWMESEFRVYSSANNCTFEYVSQPFLIDLEGKQGNFKNLREFVFKNIDGYFKIYSKHTPINLVRDLPQGFSALEPLVDLPIGINITRFQTLLALHRSYLTPGDSSSGWTAGAAAYYVGYLQPRTFLLKYNENGTITDAVDCALDPLSETKCTLKSFTVEKGIYQTSNFRVQPTESIVRFPNITNLCPFGEVFNATRFASVYAWNRKRISNCVADYSVLYNSASFSTFKCYGVSPTKLNDLCFTNVYADSFVIRGDEVRQIAPGQTGKIADYNYKLPDDFTGCVIAWNSNNLDSKVGGNYNYLYRLFRKSNLKPFERDISTEIYQAGSTPCNGVEGFNCYFPLQSYGFQPTNGVGYQPYRVVVLSFELLHAPATVCGPKKSTNLVKNKCVNFNFNGLTGTGVLTESNKKFLPFQQFGRDIADTTDAVRDPQTLEILDITPCSFGGVSVITPGTNTSNQVAVLYQGVNCTEVPVAIHADQLTPTWRVYSTGSNVFQTRAGCLIGAEHVNNSYECDIPIGAGICASYQTQTNSPRRARSVASQSIIAYTMSLGAENSVAYSNNSIAIPTNFTISVTTEILPVSMTKTSVDCTMYICGDSTECSNLLLQYGSFCTQLNRALTGIAVEQDKNTQEVFAQVKQIYKTPPIKDFGGFNFSQILPDPSKPSKRSFIEDLLFNKVTLADAGFIKQYGDCLGDIAARDLICAQKFNGLTVLPPLLTDEMIAQYTSALLAGTITSGWWFGAGAALQIPFAMQMAYRFNGIGVTQNVLYENQKLIANQFNSAIGKIQDSLSSTASALGKLQDVVNQNAQALNTLVKQLSSNFGAISSVLNDILSRLDPPEAEVQIDRLITGRLQSLQTYVTQQLIRAAEIRWSANLAATKMSECVLGQSKRVDFCGKGYHLMSFPQSAPHGVVFLHVTYVPAQEKNFTTAPAICHDGKAHFPREGVFVSNGTHWFVTQRNFYEPQIITTDNTFVSGNCDVVIGIVNNTVYDPLQPELDSFKEELDKYFKNHTSPDVDLGDISGINASVVNIQKEIDRLNEVAKNLNESLIDLQELGKYEQYIKWPWYIWLGFIAGLIAIVMVTIMLCCMTSCCSCLKGCCSCGSCCKFDEDDSEPVLKGVKLHYT

SEQ ID NO: 465 - protein, 1273 aa, Artificial Sequence
  SARS-CoV-2/Congo/94/2020__EPI_ISL_417947 spike protein (1-1273)(K986P_V987P_T887W_A1020W)
MFVFLVLLPLVSSQCVNLTTRTQLPPAYTNSFTRGVYYPDKVFRSSVLHSTQDLFLPFFSNVTWFHAIHVSGTNGTKRFDNPVLPFNDGVYFASTEKSNIIRGWIFGTTLDSKTQSLLIVNNATNVVIKVCEFQFCNDPFLGVYYHKNNKSWMESEFRVYSSANNCTFEYVSQPFLMDLEGKQGNFKNLREFVFKNIDGYFKIYSKHTPINLVRDLPQGFSALEPLVDLPIGINITRFQTLLALHRSYLTPGDSSSGWTAGAAAYYVGYLQPRTFLLKYNENGTITDAVDCALDPLSETKCTLKSFTVEKGIYQTSNFRVQPTESIVRFPNITNLCPFGEVFNATRFASVYAWNRKRISNCVADYSVLYNSASFSTFKCYGVSPTKLNDLCFTNVYADSFVIRGDEVRQIAPGQTGKIADYNYKLPDDFTGCVIAWNSNNLDSKVGGNYNYLYRLFRKSNLKPFERDISTEIYQAGSTPCNGVEGFNCYFPLQSYGFQPTNGVGYQPYRVVVLSFELLHAPATVCGPKKSTNLVKNKCVNFNFNGLTGTGVLTESNKKFLPFQQFGRDIADTTDAVRDPQTLEILDITPCSFGGVSVITPGTNTSNQVAVLYQGVNCTEVPVAIHADQLTPTWRVYSTGSNVFQTRAGCLIGAEHVNNSYECDIPIGAGICASYQTQTNSPRRARSVASQSIIAYTMSLGAENSVAYSNNSIAIPTNFTISVTTEILPVSMTKTSVDCTMYICGDSTECSNLLLQYGSFCTQLNRALTGIAVEQDKNTQEVFAQVKQIYKTPPIKDFGGFNFSQILPDPSKPSKRSFIEDILFNKVTLADAGFIKQYGDCLGDIAARDLICAQKFNGLTVLPPLLTDEMIAQYTSALLAGTITSGWWFGAGAALQIPFAMQMAYRFNGIGVTQNVLYENQKLIANQFNSAIGKIQDSLSSTASALGKLQDVVNQNAQALNTLVKQLSSNFGAISSVLNDILSRLDPPEAEVQIDRLITGRLQSLQTYVTQQLIRAAEIRWSANLAATKMSECVLGQSKRVDFCGKGYHLMSFPQSAPHGVVFLHVTYVPAQEKNFTTAPAICHDGKAHFPREGVFVSNGTHWFVTQRNFYEPQIITTDNTFVSGNCDVVIGIVNNTVYDPLQPELDSFKEELDKYFKNHTSPDVDLGDISGINASVVNIQKEIDRLNEVAKNLNESLIDLQELGKYEQYIKWPWYIWLGFIAGLIAIVMVTIMLCCMTSCCSCLKGCCSCGSCCKFDEDDSEPVLKGVKLHYT

SEQ ID NO: 466 - protein, 1273 aa, Artificial Sequence
  SARS-CoV-2/Congo/158/2020__EPI_ISL_417950 spike protein (1-1273)(K986P_V987P_T887W_A1020W)
MFVFLVLLPLVSSQCVNLTTRTQLPPAYTNSFTRGVYYPDKVFRSSVLHSTQDLFLPFFSNVTWFHAIHVSGTNGTKRFDNPVLPFNDGVYFASTEKSNIIRGWIFGTTLDSKTQSLLIVNNATNVVIKVCEFQFCNDPFLGVYYHKNNKSWMESEFRVYSSANNCTFEYVSQPFLMDLEGKQGNFKNLREFVFKNIDGYFKIYSKHTPINLVRDLPQGFSALEPLVDLPIGINITRFQTLLALHRSYLTPGDSSSGWTAGAAAYYVGYLQPRTFLLKYNENGTITDAVDCALDPLSETKCTLKSFTVEKGIYQTSNFRVQPTESIVRFPNITNLCPFGEVFNATRFASVYAWNRKRISNCVADYSVLYNSASFSTFKCYGVSPTKLNDLCFTNVYADSFVIRGDEVRQIAPGQTGKIADYNYKLPDDFTGCVIAWNSNNLDSKVGGNYNYLYRLFRKSNLKPFERDISTEIYQAGSTPCNGVEGFNCYFPLQSYGFQPTNGVGYQPYRVVVLSFELLHAPATVCGPKKSTNLVKNKCVNFNFNGLTGTGVLTESNKKFLPFQQFGRDIADTTDAVRDPQTLEILDITPCSFGGVSVITPGTNTSNQVAVLYQDVNCTEVPVAIHADQLTPTWRVYSTGSNVFQTRAGCLIGAEHVNNSYECDIPIGAGICASYQTQTNSPRRARSVASQSIIAYTMSLGAENSVAYSNNSIAIPTNFTISVTTEILPVSMTKTSVDCTMYICGDSTECSNLLLQYGSFCTQLNRALTGIAVEQDKNTQEVFAQVKQIYKTPPIKDFGGFNFSQILPDPSKPSKRSFIEDLLFNKVTLADAGFIKQYGDCLGDIAARDLICAQKFNGLTVLPPLLTDEMIAQYTSALLAGTITSGWWFGAGAALQIPFAMQMAYRFNGIGVTQNVLYENQKLIANQFNSAIGKIQDSLSSTASALGKLQDVVNQNAQALNTLVKQLSSNFGAISSVLNDILSRLDPPEAEVQIDRLITGRLQSLQTYVTQQLIRAAEIRWSANLAATKMSECVLGQSKRVDFCGKGYHLMSFPQSAPHGVVFLHVTYVPAQEKNFTTAPAICHDGKAHFPREGVFVSNGTHWFVTQRNFYEPQIITTDNTFLSGNCDVVIGIVNNTVYDPLQPELDSFKEELDKYFKNHTSPDVDLGDISGINASVVNIQKEIDRLNEVAKNLNESLIDLQELGKYEQYIKWPWYIWLGFIAGLIAIVMVTIMLCCMTSCCSCLKGCCSCGSCCKFDEDDSEPVLKGVKLHYT

SEQ ID NO: 467 - protein, 1273 aa, Artificial Sequence
  SARS-CoV-2/USA/UT-00034/2020__EPI_ISL_417977 spike protein (1-1273)(K986P_V987P_T887W_A1020W)
MFVFLVLLPLVSSQCVNLTTRTQLPPAYTNSFTRGVYYPDKVFRSSVLHSTQDLFLPFFSNVTWFHAIHVSGTNGTKRFDNPVLPFNDGVYFASTEKSNIIRGWIFGTTLDSKTQSLLIVNNATNVVIKVCEFQFCNDPFLGVYYYKNNKSWMESEFRVYSSANNCTFEYVSQPFLMDLEGKQGNFKNLREFVFKNIDGYFKIYSKHTPINLVRDLPQGFSALEPLVDLPIGINITRFQTLLALHRSYLTPGDSSSGWTAGAAAYYVGYLQPRTFLLKYNENGTITDAVDCALDPLSETKCTLKSFTVEKGIYQTSNFRVQPTESIVRFPNITNLCPFGEVFNATRFASVYAWNRKRISNCVADYSVLYNSASFSTFKCYGVSPTKLNDLCFTNVYADSFVIRGDEVRQIAPGQTGKIADYNYKLPDDFTGCVIAWNSNNLDSKVGGNYNYLYRLFRKSNLKPFERDISTEIYQAGSTPCNGVEGFNCYFPLQSYGFQPTNGVGYQPYRVVVLSFELLHAPATVCGPKKSTNLVKNKCVNFNFNGLTGTGVLTESNKKFLPFQQFGRDIADTTDAVRDPQTLEILDITPCSFGGVSVITPGTNTSNQVAVLYQGVNCTEVPVAIHADQLTPTWRVYSTGSNVFQTRAGCLIGAEHVNNSYECDIPIGAGICASYQTQTNSPRRARSVASQSIIAYTMSLGAENSVAYSNNSIAIPTNFTISVTTEILPVSMTKTSVDCTMYICGDSTECSNLLLQYGSFCTQLNRALTGIAVEQDKNTQEVFAQVKQIYKTPPIKDFGGFNFSQILPDPSKPSKRSFIEDLLFNKVTLADAGFIKQYGDCLGDIAARDLICAQKFNGLTVLPPLLTDEMIAQYTSALLAGTITSGWWFGAGAALQIPFAMQMAYRFNGIGVTQNVLYENQKLIANQFNSAIGKIQDSLSSTASALGKLQDVVNQNAQALNTLVKQLSSNFGAISSVLNDILSRLDPPEAEVQIDRLITGRLQSLQTYVTQQLIRAAEIRWSANLAATKMSECVLGQSKRVDFCGKGYHLMSFPQSAPHGVVFLHVTYVPAQEKNFTTAPAICHDGKAHFPREGVFVSNGTHWFVTQRNFYEPQIITTDNTFVSGNCDVVIGIVNNTVYDPLQPELDSFKEELDKYFKNHTSPDVDLGDISGINASVVNIQKEIDRLNEVAKNLNESLIDLQELGKYEQYIKWPWYIWLGFIAGLIAIVMVTIMLCCMTSCCSCLKGCCSCGSCCKFDEDDSEPVLKGVKLHYT

SEQ ID NO: 468 - protein, 1273 aa, Artificial Sequence
  SARS-CoV-2/USA/UT-00033/2020__EPI_ISL_417976 spike protein (1-1273)(K986P_V987P_T887W_A1020W)
MFVFLVLLPLVSSQCVNLTTRTQLPPAYTNSFTRGVYYPDKVFRSSVLHSTQDLFLPFFSNVTWFHAIHVSGTNGTKRFDNPVLPFNDGVYFASTEKSNIIRGWIFGTTLDSKTQSLLIVNNATNVVIKVCEFQFCNDPFLGVYYHKNNKSWMESEFRVYSSANNCTFEYVSQPFLMDLEGKQGNFKNLREFVFKNIDGYFKIYSKHTPINLVRDLPQGFSALEPLVDLPIGINITRFQTLLALHRSYLTPGDSSSGLTAGAAAYYVGYLQPRTFLLKYNENGTITDAVDCALDPLSETKCTLKSFTVEKGIYQTSNFRVQPTESIVRFPNITNLCPFGEVFNATRFASVYAWNRKRISNCVADYSVLYNSASFSTFKCYGVSPTKLNDLCFTNVYADSFVIRGDEVRQIAPGQTGKIADYNYKLPDDFTGCVIAWNSNNLDSKVGGNYNYLYRLFRKSNLKPFERDISTEIYQAGSTPCNGVEGFNCYFPLQSYGFQPTNGVGYQPYRVVVLSFELLHAPATVCGPKKSTNLVKNKCVNFNFNGLTGTGVLTESNKKFLPFQQFGRDIADTTDAVRDPQTLEILDITPCSFGGVSVITPGTNTSNQVAVLYQGVNCTEVPVAIHADQLTPTWRVYSTGSNVFQTRAGCLIGAEHVNNSYECDIPIGAGICASYQTQTNSPRRARSVASQSIIAYTMSLGAENSVAYSNNSIAIPTNFTISVTTEILPVSMTKTSVDCTMYICGDSTECSNLLLQYGSFCTQLNRALTGIAVEQDKNTQEVFAQVKQIYKTPPIKDFGGFNFSQILPDPSKPSKRSFIEDLLFNKVTLADAGFIKQYGDCLGDIAARDLICAQKFNGLTVLPPLLTDEMIAQYTSALLAGTITSGWWFGAGAALQIPFAMQMAYRFNGIGVTQNVLYENQKLIANQFNSAIGKIQDSLSSTASALGKLQDVVNQNAQALNTLVKQLSSNFGAISSVLNDILSRLDPPEAEVQIDRLITGRLQSLQTYVTQQLIRAAEIRWSANLAATKMSECVLGQSKRVDFCGKGYHLMSFPQSAPHGVVFLHVTYVPAQEKNFTTAPAICHDGKAHFPREGVFVSNGTHWFVTQRNFYEPQIITTDNTFVSGNCDVVIGIVNNTVYDPLQPELDSFKEELDKYFKNHTSPDVDLGDISGINASVVNIQKEIDRLNEVAKNLNESLIDLQELGKYEQYIKWPWYIWLGFIAGLIAIVMVTIMLCCMTSCCSCLKGCCSCGSCCKFDEDDSEPVLKGVKLHYT

SEQ ID NO: 469 - protein, 1273 aa, Artificial Sequence
  SARS-CoV-2/USA/WI-13/2020__EPI_ISL_417516 spike protein (1-1273)(K986P_V987P_T887W_A1020W)
MFVFLVLLPLVSSQCVNLTTRTQLPPAYTNSFTRGVYYPDKVFRSSVLHSTQDLFLPFFSNVTWFHAIHVSGTNGTKRFDNPVLPFNDGVYFASTEKSNIIRGWIFGTTLDSKTQSLLIVNNATNVVIKVCEFQFCNDPFLGVYYHKNNKSWMESEFRVYSSANNCTFEYVSQPFLMDLEGKQGNFKNLREFVFKNIDGYFKIYSKHTPINLVRDLPQGFSALEPLVDLPIGINITRFQTLLALHRSYLTPGDSSSGWTAGAAAYYVGYLQPRTFLLKYNENGTITDAVDCALDPLSETKCTLKSFTVEKGIYQTSNFRVLPTESIVRFPNITNLCPFGEVFNATRFASVYAWNRKRISNCVADYSVLYNSASFSTFKCYGVSPTKLNDLCFTNVYADSFVIRGDEVRQIAPGQTGKIADYNYKLPDDFTGCVIAWNSNNLDSKVGGNYNYLYRLFRKSNLKPFERDISTEIYQAGSTPCNGVEGFNCYFPLQSYGFQPTNGVGYQPYRVVVLSFELLHAPATVCGPKKSTNLVKNKCVNFNFNGLTGTGVLTESNKKFLPFQQFGRDIADTTDAVRDPQTLEILDITPCSFGGVSVITPGTNTSNQVAVLYQGVNCTEVPVAIHADQLTPTWRVYSTGSNVFQTRAGCLIGAEHVNNSYECDIPIGAGICASYQTQTNSPRRARSVASQSIIAYTMSLGAENSVAYSNNSIAIPTNFTISVTTEILPVSMTKTSVDCTMYICGDSTECSNLLLQYGSFCTQLNRALTGIAVEQDKNTQEVFAQVKQIYKTPPIKDFGGFNFSQILPDPSKPSKRSFIEDLLFNKVTLADAGFIKQYGDCLGDIAARDLICAQKFNGLTVLPPLLTDEMIAQYTSALLAGTITSGWWFGAGAALQIPFAMQMAYRFNGIGVTQNVLYENQKLIANQFNSAIGKIQDSLSSTASALGKLQDVVNQNAQALNTLVKQLSSNFGAISSVLNDILSRLDPPEAEVQIDRLITGRLQSLQTYVTQQLIRAAEIRWSANLAATKMSECVLGQSKRVDFCGKGYHLMSFPQSAPHGVVFLHVTYVPAQEKNFTTAPAICHDGKAHFPREGVFVSNGTHWFVTQRNFYEPQIITTDNTFVSGNCDVVIGIVNNTVYDPLQPELDSFKEELDKYFKNHTSPDVDLGDISGINASVVNIQKEIDRLNEVAKNLNESLIDLQELGKYEQYIKWPWYIWLGFIAGLIAIVMVTIMLCCMTSCCSCLKGCCSCGSCCKFDEDDSEPVLKGVKLHYT

SEQ ID NO: 470 - protein, 1272 aa, Artificial Sequence
  SARS-CoV-2/India/1-27/2020__EPI_ISL_413522 spike protein (1-1272)(K985P_V986P_T886W_A1019W)
MFVFLVLLPLVSSQCVNLTTRTQLPPAYTNSFTRGVYYPDKVFRSSVLHSTQDLFLPFFSNVTWFHAIHVSGTNGTKRFDNPVLPFNDGVYFASTEKSNIIRGWIFGTTLDSKTQSLLIVNNATNVVIKVCEFQFCNDPFLGVYHKNNKSWMESEFRVYSSANNCTFEYVSQPFLMDLEGKQGNFKNLREFVFKNIDGYFKIYSKHTPINLVRDLPQGFSALEPLVDLPIGINITRFQTLLALHRSYLTPGDSSSGWTAGAAAYYVGYLQPRTFLLKYNENGTITDAVDCALDPLSETKCTLKSFTVEKGIYQTSNFRVQPTESIVRFPNITNLCPFGEVFNATRFASVYAWNRKRISNCVADYSVLYNSASFSTFKCYGVSPTKLNDLCFTNVYADSFVIRGDEVIQIAPGQTGKIADYNYKLPDDFTGCVIAWNSNNLDSKVGGNYNYLYRLFRKSNLKPFERDISTEIYQAGSTPCNGVEGFNCYFPLQSYGFQPTNGVGYQPYRVVVLSFELLHAPATVCGPKKSTNLVKNKCVNFNFNGLTGTGVLTESNKKFLPFQQFGRDIADTTDAVRDPQTLEILDITPCSFGGVSVITPGTNTSNQVAVLYQDVNCTEVPVAIHADQLTPTWRVYSTGSNVFQTRAGCLIGAEHVNNSYECDIPIGAGICASYQTQTNSPRRARSVASQSIIAYTMSLGAENSVAYSNNSIAIPTNFTISVTTEILPVSMTKTSVDCTMYICGDSTECSNLLLQYGSFCTQLNRALTGIAVEQDKNTQEVFAQVKQIYKTPPIKDFGGFNFSQILPDPSKPSKRSFIEDLLFNKVTLADAGFIKQYGDCLGDIAARDLICAQKFNGLTVLPPLLTDEMIAQYTSALLAGTITSGWWFGAGAALQIPFAMQMAYRFNGIGVTQNVLYENQKLIANQFNSAIGKIQDSLSSTASALGKLQDVVNQNAQALNTLVKQLSSNFGAISSVLNDILSRLDPPEAEVQIDRLITGRLQSLQTYVTQQLIRAAEIRWSANLAATKMSECVLGQSKRVDFCGKGYHLMSFPQSAPHGVVFLHVTYVPAQEKNFTTAPAICHDGKAHFPREGVFVSNGTHWFVTQRNFYEPQIITTDNTFVSGNCDVVIGIVNNTVYDPLQPELDSFKEELDKYFKNHTSPDVDLGDISGINASVVNIQKEIDRLNEVAKNLNESLIDLQELGKYEQYIKWPWYIWLGFIAGLIAIVMVTIMLCCMTSCCSCLKGCCSCGSCCKFDEDDSEPVLKGVKLHYT

SEQ ID NO: 471 - protein, 1267 aa, Artificial Sequence
  SARS-CoV-2/pangolin/Guangxi/P4L/2017__EPI_ISL_410538 spike protein (1-1267)(K980P_V981P_T881W_A1014W)
MFVFLFVLPLVSSQCVNLTTRTGIPPGYTNSSTRGVYYPDKVFRSSILHLTQDLFLPFFSNVTWFNTINYQGGFKKFDNPVLPFNDGVYFASTEKSNIIRGWIFGTTLDARTQSLLIVNNATNVVIKVCEFQFCTDPFLGVYYHNNNKTWVENEFRVYSSANNCTFEYISQPFLMDLEGKQGNFKNLREFVFKNVDGYFKIYSKHTPIDLVRDLPRGFAALEPLVDLPIGINITRFQTLLALHRSYLTPGNLESGWTTGAAAYYVGYLQQRTFLLSYNQNGTITDAVDCSLDPLSETKCTLKSLTVEKGIYQTSNFRVQPTISIVRFPNITNLCPFGEVFNASKFASVYAWNRKRISNCVADYSVLYNSTSFSTFKCYGVSPTKLNDLCFTNVYADSFVVKGDEVRQIAPGQTGVIADYNYKLPDDFTGCVIAWNSVKQDALTGGNYGYLYRLFRKSKLKPFERDISTEIYQAGSTPCNGQVGLNCYYPLERYGFHPTTGVNYQPFRVVVLSFELLNGPATVCGPKLSTTLVKDKCVNFNFNGLTGTGVLTTSKKQFLPFQQFGRDISDTTDAVRDPQTLEILDITPCSFGGVSVITPGTNTSNQVAVLYQDVNCTEVPMAIHAEQLTPAWRVYSAGANVFQTRAGCLVGAEHVNNSYECDIPVGAGICASYHSMSSLRSVNQRSIIAYTMSLGAENSVAYSNNSIAIPTNFTISVTTEILPVSMTKTSVDCTMYICGDSIECSNLLLQYGSFCTQLNRALTGIAVEQDKNTQEVFAQVKQIYKTPPIKDFGGFNFSQILPDPSKPSKRSFIEDLLFNKVTLADAGFIKQYGDCLGDIAARDLICAQKFNGLTVLPPLLTDEMIAQYTSALLAGTITSGWWFGAGAALQIPFAMQMAYRFNGIGVTQNVLYENQKLIANQFNSAIGKIQDSLSSTASALGKLQDVVNQNAQALNTLVKQLSSNFGAISSVLNDILSRLDPPEAEVQIDRLITGRLQSLQTYVTQQLIRAAEIRWSANLAATKMSECVLGQSKRVDFCGKGYHLMSFPQSAPHGVVFLHVTYVPAQEKNFTTAPAICHEGKAHFPREGVFVSNGTHWFITQRNFYEPQIITTDNTFVSGSCDVVIGIVNNTVYDPLQPELDSFKEELDKYFKNHTSPDVDLGDISGINASVVNIQKEIDRLNEVAKNLNESPIDLQELGKYEQYIKWPWYIWLGFIAGLIAIIMVTIMLCCMTSCCSCLKGCCSCGSCCKFDEDDSEPVLKGVKLHYT

SEQ ID NO: 472 - protein, 1267 aa, Artificial Sequence
  SARS-CoV-2/pangolin/Guangxi/P5L/2017__EPI_ISL_410540 spike protein (1-1267)(K980P_V981P_T881W_A1014W)
MFVFLFVLPLVSSQCVNLTTRTGIPPGYTNSSTRGVYYPDKVFRSSILHLTQDLFLPFFSNVTWFNTINYQGGFKKFDNPVLPFNDGVYFASTEKSNIIRGWIFGTTLDARTQSLLIVNNATNVVIKVCEFQFCTDPFLGVYYHNNNKTWVENEFRVYSSANNCTFEYISQPFLMDLEGKQGNFKNLREFVFKNVDGYFKIYSKHTPIDLVRDLPRGFAALEPLVDLPIGINITRFQTLLALHRSYLTPGKLESGWTTGAAAYYVGYLQQRTFLLSYNQNGTITDAVDCSLDPLSETKCTLKSLTVEKGIYQTSNFRVQPTISIVRFPNITNLCPFGEVFNASKFASVYAWNRKRISNCVADYSVLYNSTSFSTFKCYGVSPTKLNDLCFTNVYADSFVVKGDEVRQIAPGQTGVIADYNYKLPDDFTGCVIAWNSVKQDALTGGNYGYLYRLFRKSKLKPFERDISTEIYQAGSTPCNGQVGLNCYYPLERYGFHPTTGVNYQPFRVVVLSFELLNGPATVCGPKLSTTLVKDKCVNFNFNGLTGTGVLTTSKKQFLPFQQFGRDISDTTDAVRDPQTLEILDITPCSFGGVSVITPGTNTSNQVAVLYQDVNCTEVPMAIHAEQLTPAWRVYSAGANVFQTRAGCLVGAEHVNNSYECDIPVGAGICASYHSMSSFRSVNQRSIIAYTMSLGAENSVAYSNNSIAIPTNFTISVTTEILPVSMTKTSVDCTMYICGDSIECSNLLLQYGSFCTQLNRALTGIAVEQDKNTQEVFAQVKQIYKTPPIKDFGGFNFSQILPDPSKPSKRSFIEDLLFNKVTLADAGFIKQYGDCLGDIAARDLICAQKFNGLTVLPPLLTDEMIAQYTSALLAGTITSGWWFGAGAALQIPFAMQMAYRFNGIGVTQNVLYENQKLIANQFNSAIGKIQDSLSSTASALGKLQDVVNQNAQALNTLVKQLSSNFGAISSVLNDILSRLDPPEAEVQIDRLITGRLQSLQTYVTQQLIRAAEIRWSANLAATKMSECVLGQSKRVDFCGKGYHLMSFPQSAPHGVVFLHVTYVPAQEKNFTTAPAICHEGKAHFPREGVFVSNGTHWFITQRNFYEPQIITTDNTFVSGSCDVVIGIVNNTVYDPLQPELDSFKEELDKYFKNHTSPDVDLGDISGINASVVNIQKEIDRLNEVAKNLNESLIDLQELGKYEQYIKWPWYIWLGFIAGLIAIIMVTIMLCCMTSCCSCLKGCCSCGSCCKFDEDDSEPVLKGVKLHYT

SEQ ID NO: 473 - protein, 1267 aa, Artificial Sequence
  SARS-CoV-2/pangolin/Guangxi/P5E/2017__EPI_ISL_410541 spike protein (1-1267)(K980P_V981P_T881W_A1014W)
MFVFLFVLPLVSSQCVNLTTRTGIPPGYTNSSTRGVYYPDKVFRSSILHLTQDLFLPFFSNVTWFNTITYQGGSKKFDNPVLPFNDGVYFASTEKSNIIRGWIFGTTLDARTQSLLIVNNATNVVIKVCEFQFCTDPFLGVYYHNNNKTWVENEFRVYSSANNCTFEYISQPFLMDLEGKQGNFKNLREFVFKNVDGYFKIYSKHTPIDLVRDLPRGFAALEPLVDLPIGINITRFQTLLALHRSYLTPGKLESGWTTGAAAYYVGYLQQRTFLLSYNQNGTITDAVDCSLDPLSETKCTLKSLTVEKGIYQTSNFRVQPTISIVRFPNITNLCPFGEVFNASKFASVYAWNRKRISNCVADYSVLYNSTSFSTFKCYGVSPTKLNDLCFTNVYADSFVVKGDEVRQIAPGQTGVIADYNYKLPDDFTGCVIAWNSVKQDALTGDNYGYLYRLFRKSKLKPFERDISTEIYQAGSTPCNGQVGLNCYYPLERYGFHPTTGVNYQPFRVVVLSFELLNGPATVCGPKLSTTLVKDKCVNFNFNGLTGTGVLTTSKKQFLPFQQFGRDISDTTDAVRDPQTLEILDITPCSFGGVSVITPGTNTSNQVAVLYQDVNCTEVPMAIHAEQLTPAWRVYSAGANVFQTRAGCLVGAEHVNNSYECDIPVGAGICASYHSMSSFRSVNQRSIIAYTMSLGAENSVAYSNNSIAIPTNFTISVTTEILPVSMTKTSVDCTMYICGDSIECSNLLLQYGSFCTQLNRALTGIAVEQDKNTQEVFAQVKQIYKTPPIKDFGGFNFSQILPDPSKPSKRSFIEDLLFNKVTLADAGFIKQYGDCLGDIAARDLICAQKFNGLTVLPPLLTDEMIAQYTSALLAGTITSGWWFGAGAALQIPFAMQMAYRFNGIGVTQNVLYENQKLIANQFNSAIGKIQDSLSSTASALGKLQDVVNQNAQALNTLVKQLSSNFGAISSVLNDILSRLDPPEAEVQIDRLITGRLQSLQTYVTQQLIRAAEIRWSANLAATKMSECVLGQSKRVDFCGKGYHLMSFPQSAPHGVVFLHVTYVPAQEKNFTTAPAICHEGKAHFPREGVFVSNGTHWFITQRNFYEPQIITTDNTFVSGSCDVVIGIVNNTVYDPLQPELDSFKEELDKYFKNHTSPDVDLGDISGINASVVNIQKEIDRLNEVAKNLNESLIDLQELGKYEQYIKWPWYIWLGFIAGLIAIIMVTIMLCCMTSCCSCLKGCCSCGSCCKFDEDDSEPVLKGVKLHYT

SEQ ID NO: 474 - protein, 1265 aa, Artificial Sequence
  SARS-CoV-2/pangolin/Guangxi/P1E/2017__EPI_ISL_410539 spike protein (1-1265)(K978P_V979P_T879W_A1012W)
MFVFLFVLPLVSSQCVNLTTRTGIQPGYTNSSTRGVYYPDKVFRSSILHLTQDLFLPFFSNVTWFNTINYQGGFKKFDNPVLPFNDGVYFASTEKSNIIRGWIFGTTLDARTQSLLIVNNATNVVIKVCEFQFCTDPFLGVYYHNNNKTWVENEFRVYSSANNCTFEYISQPFLMDLEGKQGNFKNLREFVFKNVDGYFKIYSKHTPIDLVRDLPRGFAALEPLVDLPIGINITRFQTLLALHRSYLTPGKLESGWTTGAAAYYVGYLQQRTFLLSYNQNGTITDAVDCSLDPLSETKCTLKSLTVEKGIYQTSNFRVQPTISIVRFPNITNLCPFGEVFNASKFASVYAWNRKRISNCVADYSVLYNSTSFSTFKCYGVSPTKLNDLCFTNVYADSFVVKGDEVRQIAPGQTGVIADYNYKLPDDFTGCVIAWNSVKQDALTGGNYLYRLFRKSKLKPFERDISTEIYQAGSTPCNGQVGLNCYYPLERYGFHPTTGVNYQPFRVVVLSFELLNGPATVCGPKLSTTLVKDKCVNFNFNGLTGTGVLTTSKKQFLPFQQFGRDISDTTDAVRDPQTLEILDITPCSFGGVSVITPGTNTSNQVAVLYQDVNCTEVPMAIHAEQLTPAWRVYSAGANVFQTRAGCLVGAEHVNNSYECDIPVGAGICASYHSMSSLRSVNQRSIIAYTMSLGAENSVAYSNNSIAIPTNFTISVTTEILPVSMTKTSVDCTMYICGDSIECSNLLLQYGSFCTQLNRALTGIAVEQDKNTQEVFAQVKQIYKTPPIKDFGGFNFSQILPDPSKPSKRSFIEDLLFNKVTLADAGFIKQYGDCLGDIAARDLICAQKFNGLTVLPPLLTDEMIAQYTSALLAGTITSGWWFGAGAALQIPFAMQMAYRFNGIGVTQNVLYENQKLIANQFNSAIGKIQDSLSSTASALGKLQDVVNQNAQALNTLVKQLSSNFGAISSVLNDILSRLDPPEAEVQIDRLITGRLQSLQTYVTQQLIRAAEIRWSANLAATKMSECVLGQSKRVDFCGKGYHLMSFPQSAPHGVVFLHVTYVPAQEKNFTTAPAICHEGKAHFPREGVFVSNGTHWFITQRNFYEPQIITTDNTFVSGSCDVVIGIVNNTVYDPLQPELDSFKEELDKYFKNHTSPDVDLGDISGINASVVNIQKEIDRLNEVAKNLNESLIDLQELGKYEQYIKWPWYIWLGFIAGLIAIIMVTIMLCCMTSCCSCLKGCCSCGSCCKFDEDDSEPVLKGVKLHYT

SEQ ID NO: 475 - protein, 1273 aa, Artificial Sequence
  SARS-CoV-2/Wuhan/WIV05/2019__EPI_ISL_402128 spike protein (1-1273)(K986P_V987P_P1069F)
MFVFLVLLPLVSSQCVNLTTRTQLPPAYTNSFTRGVYYPDKVFRSSVLHSTQDLFLPFFSNVTWFHAIHVSGTNGTKRFDNPVLPFNDGVYFASTEKSNIIRGWIFGTTLDSKTQSLLIVNNATNVVIKVCEFQFCNDPFLGVYYHKNNKSWMESEFRVYSSANNCTFEYVSQPFLMDLEGKQGNFKNLREFVFKNIDGYFKIYSKHTPINLVRDLPQGFSALEPLVDLPIGINITRFQTLLALHRSYLTPGDSSSGWTAGAAAYYVGYLQPRTFLLKYNENGTITDAVDCALDPLSETKCTLKSFTVEKGIYQTSNFRVQPTESIVRFPNITNLCPFGEVFNATRFASVYAWNRKRISNCVADYSVLYNSASFSTFKCYGVSPTKLNDLCFTNVYADSFVIRGDEVRQIAPGQTGKIADYNYKLPDDFTGCVIAWNSNNLDSKVGGNYNYLYRLFRKSNLKPFERDISTEIYQAGSTPCNGVEGFNCYFPLQSYGFQPTNGVGYQPYRVVVLSFELLHAPATVCGPKKSTNLVKNKCVNFNFNGLTGTGVLTESNKKFLPFQQFGRDIADTTDAVRDPQTLEILDITPCSFGGVSVITPGTNTSNQVAVLYQDVNCTEVPVAIHADQLTPTWRVYSTGSNVFQTRAGCLIGAEHVNNSYECDIPIGAGICASYQTQTNSPRRARSVASQSIIAYTMSLGAENSVAYSNNSIAIPTNFTISVTTEILPVSMTKTSVDCTMYICGDSTECSNLLLQYGSFCTQLNRALTGIAVEQDKNTQEVFAQVKQIYKTPPIKDFGGFNFSQILPDPSKPSKRSFIEDLLFNKVTLADAGFIKQYGDCLGDIAARDLICAQKFNGLTVLPPLLTDEMIAQYTSALLAGTITSGWTFGAGAALQIPFAMQMAYRFNGIGVTQNVLYENQKLIANQFNSAIGKIQDSLSSTASALGKLQDVVNQNAQALNTLVKQLSSNFGAISSVLNDILSRLDPPEAEVQIDRLITGRLQSLQTYVTQQLIRAAEIRASANLAATKMSECVLGQSKRVDFCGKGYHLMSFPQSAPHGVVFLHVTYVFAQEKNFTTAPAICHDGKAHFPREGVFVSNGTHWFVTQRNFYEPQIITTDNTFVSGNCDVVIGIVNNTVYDPLQPELDSFKEELDKYFKNHTSPDVDLGDISGINASVVNIQKEIDRLNEVAKNLNESLIDLQELGKYEQYIKWPWYIWLGFIAGLIAIVMVTIMLCCMTSCCSCLKGCCSCGSCCKFDEDDSEPVLKGVKLHYT

SEQ ID NO: 476 - protein, 1269 aa, Artificial Sequence
  SARS-CoV-2/bat/Yunnan/RaTG13/2013__EPI_ISL_402131 spike protein (1-1269)(K982P_V983P_P1065F)
MFVFLVLLPLVSSQCVNLTTRTQLPPAYTNSSTRGVYYPDKVFRSSVLHLTQDLFLPFFSNVTWFHAIHVSGTNGIKRFDNPVLPFNDGVYFASTEKSNIIRGWIFGTTLDSKTQSLLIVNNATNVVIKVCEFQFCNDPFLGVYYHKNNKSWMESEFRVYSSANNCTFEYVSQPFLMDLEGKQGNFKNLREFVFKNIDGYFKIYSKHTPINLVRDLPPGFSALEPLVDLPIGINITRFQTLLALHRSYLTPGDSSSGWTAGAAAYYVGYLQPRTFLLKYNENGTITDAVDCALDPLSETKCTLKSFTVEKGIYQTSNFRVQPTDSIVRFPNITNLCPFGEVFNATTFASVYAWNRKRISNCVADYSVLYNSTSFSTFKCYGVSPTKLNDLCFTNVYADSFVITGDEVRQIAPGQTGKIADYNYKLPDDFTGCVIAWNSKHIDAKEGGNFNYLYRLFRKANLKPFERDISTEIYQAGSKPCNGQTGLNCYYPLYRYGFYPTDGVGHQPYRVVVLSFELLNAPATVCGPKKSTNLVKNKCVNFNFNGLTGTGVLTESNKKFLPFQQFGRDIADTTDAVRDPQTLEILDITPCSFGGVSVITPGTNASNQVAVLYQDVNCTEVPVAIHADQLTPTWRVYSTGSNVFQTRAGCLIGAEHVNNSYECDIPIGAGICASYQTQTNSRSVASQSIIAYTMSLGAENSVAYSNNSIAIPTNFTISVTTEILPVSMTKTSVDCTMYICGDSTECSNLLLQYGSFCTQLNRALTGIAVEQDKNTQEVFAQVKQIYKTPPIKDFGGFNFSQILPDPSKPSKRSFIEDLLFNKVTLADAGFIKQYGDCLGDIAARDLICAQKFNGLTVLPPLLTDEMIAQYTSALLAGTITSGWTFGAGAALQIPFAMQMAYRFNGIGVTQNVLYENQKLIANQFNSAIGKIQDSLSSTASALGKLQDVVNQNAQALNTLVKQLSSNFGAISSVLNDILSRLDPPEAEVQIDRLITGRLQSLQTYVTQQLIRAAEIRASANLAATKMSECVLGQSKRVDFCGKGYHLMSFPQSAPHGVVFLHVTYVFAQEKNFTTAPAICHDGKAHFPREGVFVSNGTHWFVTQRNFYEPQIITTDNTFVSGSCDVVIGIVNNTVYDPLQPELDSFKEELDKYFKNHTSPDVDLGDISGINASVVNIQKEIDRLNEVAKNLNESLIDLQELGKYEQYIKWPWYIWLGFIAGLIAIIMVTIMLCCMTSCCSCLKGCCSCGSCCKFDEDDSEPVLKGVKLHYT

SEQ ID NO: 477 - protein, 1273 aa, Artificial Sequence
  SARS-CoV-2/Wuhan/HBCDC-HB-01/2019__EPI_ISL_402132 spike protein (1-1273)(K986P_V987P_P1069F)
MFVFLVLLPLVSSQCVNLTTRTQLPPAYTNSITRGVYYPDKVFRSSVLHSTQDLFLPFFSNVTWFHAIHVSGTNGTKRFDNPVLPFNDGVYFASTEKSNIIRGWIFGTTLDSKTQSLLIVNNATNVVIKVCEFQFCNDPFLGVYYHKNNKSWMESEFRVYSSANNCTFEYVSQPFLMDLEGKQGNFKNLREFVFKNIDGYFKIYSKHTPINLVRDLPQGFSALEPLVDLPIGINITRFQTLLALHRSYLTPGDSSSGWTAGAAAYYVGYLQPRTFLLKYNENGTITDAVDCALDPLSETKCTLKSFTVEKGIYQTSNFRVQPTESIVRFPNITNLCPFGEVFNATRFASVYAWNRKRISNCVADYSVLYNSASFSTFKCYGVSPTKLNDLCFTNVYADSFVIRGDEVRQIAPGQTGKIADYNYKLPDDFTGCVIAWNSNNLDSKVGGNYNYLYRLFRKSNLKPFERDISTEIYQAGSTPCNGVEGFNCYFPLQSYGFQPTNGVGYQPYRVVVLSFELLHAPATVCGPKKSTNLVKNKCVNFNFNGLTGTGVLTESNKKFLPFQQFGRDIADTTDAVRDPQTLEILDITPCSFGGVSVITPGTNTSNQVAVLYQDVNCTEVPVAIHADQLTPTWRVYSTGSNVFQTRAGCLIGAEHVNNSYECDIPIGAGICASYQTQTNSPRRARSVASQSIIAYTMSLGAENSVAYSNNSIAIPTNFTISVTTEILPVSMTKTSVDCTMYICGDSTECSNLLLQYGSFCTQLNRALTGIAVEQDKNTQEVFAQVKQIYKTPPIKDFGGFNFSQILPDPSKPSKRSFIEDLLFNKVTLADAGFIKQYGDCLGDIAARDLICAQKFNGLTVLPPLLTDEMIAQYTSALLAGTITSGWTFGAGAALQIPFAMQMAYRFNGIGVTQNVLYENQKLIANQFNSAIGKIQDSLSSTASALGKLQDVVNQNAQALNTLVKQLSSNFGAISSVLNDILSRLDPPEAEVQIDRLITGRLQSLQTYVTQQLIRAAEIRASANLAATKMSECVLGQSKRVDFCGKGYHLMSFPQSAPHGVVFLHVTYVFAQEKNFTTAPAICHDGKAHFPREGVFVSNGTHWFVTQRNFYEPQIITTDNTFVSGNCDVVIGIVNNTVYDPLQPELDSFKEELDKYFKNHTSPDVDLGDISGINASVVNIQKEIDRLNEVAKNLNESLIDLQELGKYEQYIKWPWYIWLGFIAGLIAIVMVTIMLCCMTSCCSCLKGCCSCGSCCKFDEDDSEPVLKGVKLHYT

SEQ ID NO: 478 - protein, 1273 aa, Artificial Sequence
  SARS-CoV-2/Guangdong/20SF028/2020__EPI_ISL_403936 spike protein (1-1273)(K986P_V987P_P1069F)
MFVFLVLLPLVSSQCVNLTTRTQLPPAYTNSFTRGVYYPDKVFRSSVLYSTQDLFLPFFSNVTWFHAIHVSGTNGTKRFDNPVLPFNDGVYFASTEKSNIIRGWIFGTTLDSKTQSLLIVNNATNVVIKVCEFQFCNDPFLGVYYHKNNKSWMESEFRVYSSANNCTFEYVSQPFLMDLEGKQGNFKNLREFVFKNIDGYFKIYSKHTPINLVRDLPQGFSALEPLVDLPIGINITRFQTLLALHRSYLTPGDSSSGWTAGAAAYYVGYLQPRTFLLKYNENGTITDAVDCALDPLSETKCTLKSFTVEKGIYQTSNFRVQPTESIVRFPNITNLCPFGEVFNATRFASVYAWNRKRISNCVADYSVLYNSASFSTFKCYGVSPTKLNDLCFTNVYADSFVIRGDEVRQIAPGQTGKIADYNYKLPDDFTGCVIAWNSNNLDSKVGGNYNYLYRLFRKSNLKPFERDISTEIYQAGSTPCNGVEGFNCYFPLQSYGFQPTNGVGYQPYRVVVLSFELLHAPATVCGPKKSTNLVKNKCVNFNFNGLTGTGVLTESNKKFLPFQQFGRDIADTTDAVRDPQTLEILDITPCSFGGVSVITPGTNTSNQVAVLYQDVNCTEVPVAIHADQLTPTWRVYSTGSNVFQTRAGCLIGAEHVNNSYECDIPIGAGICASYQTQTNSPRRARSVASQSIIAYTMSLGAENSVAYSNNSIAIPTNFTISVTTEILPVSMTKTSVDCTMYICGDSTECSNLLLQYGSFCTQLNRALTGIAVEQDKNTQEVFAQVKQIYKTPPIKDFGGFNFSQILPDPSKPSKRSFIEDLLFNKVTLADAGFIKQYGDCLGDIAARDLICAQKFNGLTVLPPLLTDEMIAQYTSALLAGTITSGWTFGAGAALQIPFAMQMAYRFNGIGVTQNVLYENQKLIANQFNSAIGKIQDSLSSTASALGKLQDVVNQNAQALNTLVKQLSSNFGAISSVLNDILSRLDPPEAEVQIDRLITGRLQSLQTYVTQQLIRAAEIRASANLAATKMSECVLGQSKRVDFCGKGYHLMSFPQSAPHGVVFLHVTYVFAQEKNFTTAPAICHDGKAHFPREGVFVSNGTHWFVTQRNFYEPQIITTDNTFVSGNCDVVIGIVNNTVYDPLQPELDSFKEELDKYFKNHTSPDVDLGDISGINASVVNIQKEIDRLNEVAKNLNESLIDLQELGKYEQYIKWPWYIWLGFIAGLIAIVMVTIMLCCMTSCCSCLKGCCSCGSCCKFDEDDSEPVLKGVKLHYT

SEQ ID NO: 479 - protein, 1273 aa, Artificial Sequence
  SARS-CoV-2/Shenzhen/SZTH-001/2020__EPI_ISL_406592 spike protein (1-1273)(K986P_V987P_P1069F)
MFVFLVLLPLVSSQCVNLTTRTQLPPAYTNSFTRGVYYPDKVFRSSVLHSTQDLFLPFFSNVTWFHAIHVSGTNGTKRFDNPVLPFNDGVYFASTEKSNIIRGWIFGTTLDSKTQSLLIVNNATNVVIKVCEFQFCNDPFLGVYYHKNNKSWMESEFRVYSSANNCTFEYVSQPFLMDLEGKQGNFKNLREFVFKNIDGYFKIYSKHTPINLVRDLPQGFSALEPLVDLPIGINITRFQTLLALHRSYLTPGDSSSGWTAGAAAYYVGYLQPRTFLLKYNENGTITDAVDCALDPLSETKCTLKSFTVEKGIYQTSNFRVQPTESIVRFPNITNLCPFGEVFNATRFASVYAWNRKRISNCVADYSVLYNSASFSTFKCYGVSPTKLNDLCFTNVYADSFVIRGDEVRQIAPGQTGKIADYNYKLPDDFTGCVIAWNSNNLDSKVGGNYNYLYRLFRKSNLKPFERDISTEIYQAGSTPCNGVEGFNCYFPLQSYGFQPTNGVGYQPYRVVVLSFELLHAPATVCGPKKSTNLVKNKCVNFNFNGLTGTGVLTESNKKFLPFQQFGRDIADTTDAVRDPQTLEILDITPCSFGGVSVITPGTNTSNQVAVLYQDVNCTEVPVAIHADQLTPTWRVYSTGSNVFQTRAGCLIGAEHVNNSYECDIPIGAGICASYQTQTNSPRRARSVASQSIIAYTMSLGAENSVAYSNNSIAIPTNFTISVTTEILPVSMTKTSVDCTMYICGDSTECSNLLLQYGSFCTQLNRALTGIAVEQDKNTQEVFAQVKQIYKTPPIKDFGGFNFSQILPDPSKPSKRSFIEDLLFNKVTLADAGFIKQYGDCLGDIAARDLICAQKFNGLTVLPPLLTDEMIAQYTSALLAGTITSGWTFGAGAALQIPFAMQMAYRFNGIGVTQNVLYENQKLIANQFNSAIGKIQDSLSSTASALGKLQDVVNQNAQALNTLVKQLSSNFGAISSVLNDILSRLDPPEAEVQIDRLITGRLQSLQTYVTQQLIRAAEIRASANLAATKMSECVLGQSKRVDFCGKGYHLMSFPQSAPHGVVFLHVTYVFAQEKNFTTAPAICHDGKAHFPREGVFVSNGTHWFVTQRNFYEPQIITTDNTFVSGNCDVLIGIVNNTVYDPLQPELDSFKEELDKYFKNHTSPDVDLGDISGINASVVNIQKEIDRLNEVAKNLNESLIDLQELGKYEQYIKWPWYIWLGFIAGLIAIVMVTIMLCCMTSCCSCLKGCCSCGSCCKFDEDDSGPVLKGVKLHYT

SEQ ID NO: 480 - protein, 1273 aa, Artificial Sequence
  SARS-CoV-2/Shenzhen/SZTH-004/2020__EPI_ISL_406595 spike protein (1-1273)(K986P_V987P_P1069F)
MFVFLVLLPLVSSQCVNLTTRTQLPPAYTNSFTRGVYYPDKVFRSSVLHSTQDLFLPFFSNVTWFHAIHVSGTNGTKRFDNPVLPFNDGVYFASTEKSNIIRGWIFGTTLDSKTQSLLIVNNATNVVIKVCEFQFCNDPFLGVYYHKNNKSWMESEFRVYSSANNCTFEYVSQPFLMDLEGKQGNFKNLREFVFKNIDGYFKIYSKHTPINLVRDLPQGFSALEPLVDLPIGINITRFQTLLALHRSYLTPGDSSSGWTAGAAAYYVGYLQPRTFLLKYNENGTITDAVDCALDPLSETKCTLKSFTVEKGIYQTSNFRVQPTESIVRFPNITNLCPFGEVFNATRFASVYAWDRKRISNCVAYYSVLYNSASFSTFKCYGVSPTKLNDLCFTNVYADSFVIRGDEVRQIAPGQTGKIADYNYKLPDDFTGCVIAWNSNNLDSKVGGNYNYLYRLFRKSNLKPFERDISTEIYQAGSTPCNGVEGFNCYFPLQSYGFQPTNGVGYQPYRVVVLSFELLHAPATVCGPKKSTNLVKNKCVNFNFNGLTGTGVLTESNKKFLPFQQFGRDIADTTDAVRDPQTLEILDITPCSFGGVSVITPGTNTSNQVAVLYQDVNCTEVPVAIHADQLTPTWRVYSTGSNVFQTRAGCLIGAEHVNNSYECDIPIGAGICASYQTQTNSPRRARSVASQSIIAYTMSLGAENSVAYSNNSIAIPTNFTISVTTEILPVSMTKTSVDCTMYICGDSTECSNLLLQYGSFCTQLNRALTGIAVEQDKNTQEVFAQVKQIYKTPPIKDFGGFNFSQILPDPSKPSKRSFIEDLLFNKVTLADAGFIKQYGDCLGDIAARDLICAQKFNGLTVLPPLLTDEMIAQYTSALLAGTITSGWTFGAGAALQIPFAMQMAYRFNGIGVTQNVLYENQKLIANQFNSAIGKIQDSLSSTASALGKLQDVVNQNAQALNTLVKQLSSNFGAISSVLNDILSRLDPPEAEVQIDRLITGRLQSLQTYVTQQLIRAAEIRASANLAATKMSECVLGQSKRVDFCGKGYHLMSFPQSAPHGVVFLHVTYVFAQEKNFTTAPAICHDGKAHFPREGVFVSNGTHWFVTQRNFYEPQIITTDNTFVSGNCDVVIGIVNNTVYDPLQPELDSFKEELDKYFKNHTSPDVDLGDISGINASVVNIQKEIDRLNEVAKNLNESLIDLQELGKYEQYIKWPWYIWLGFIAGLIAIVMVTIMLCCMTSCCSCLKGCCSCGSCCKFDEDDSEPVLKGVKLHYT

SEQ ID NO: 481 - protein, 1273 aa, Artificial Sequence
  SARS-CoV-2/France/IDF0372/2020__EPI_ISL_406596 spike protein (1-1273)(K986P_V987P_P1069F)
MFVFLVLLPLVSSQCVNLTTRTQLPPAYTNSFTRGVYYPDKVFRSSVLHSTQDLFLPFFSNVTWFHAIHVSGTNGTKRFDNPVLPFNDGVYFASTEKSNIIRGWIFGTTLDSKTQSLLIVNNATNVVIKVCEFQFCNDPFLGVYYHKNNKSWMESEFRVYSSANNCTFEYVSQPFLMDLEGKQGNFKNLREFVFKNIDGYFKIYSKHTPINLVRDLPQGFSALEPLVDLPIGINITRFQTLLALHRSYLTPGDSSSGWTAGAAAYYVGYLQPRTFLLKYNENGTITDAVDCALDPLSETKCTLKSFTVEKGIYQTSNFRVQPTESIVRFPNITNLCPFGEVFNATRFASVYAWNRKRISNCVADYSFLYNSASFSTFKCYGVSPTKLNDLCFTNVYADSFVIRGDEVRQIAPGQTGKIADYNYKLPDDFTGCVIAWNSNNLDSKVGGNYNYLYRLFRKSNLKPFERDISTEIYQAGSTPCNGVEGFNCYFPLQSYGFQPTNGVGYQPYRVVVLSFELLHAPATVCGPKKSTNLVKNKCVNFNFNGLTGTGVLTESNKKFLPFQQFGRDIADTTDAVRDPQTLEILDITPCSFGGVSVITPGTNTSNQVAVLYQDVNCTEVPVAIHADQLTPTWRVYSTGSNVFQTRAGCLIGAEHVNNSYECDIPIGAGICASYQTQTNSPRRARSVASQSIIAYTMSLGAENSVAYSNNSIAIPTNFTISVTTEILPVSMTKTSVDCTMYICGDSTECSNLLLQYGSFCTQLNRALTGIAVEQDKNTQEVFAQVKQIYKTPPIKDFGGFNFSQILPDPSKPSKRSFIEDLLFNKVTLADAGFIKQYGDCLGDIAARDLICAQKFNGLTVLPPLLTDEMIAQYTSALLAGTITSGWTFGAGAALQIPFAMQMAYRFNGIGVTQNVLYENQKLIANQFNSAIGKIQDSLSSTASALGKLQDVVNQNAQALNTLVKQLSSNFGAISSVLNDILSRLDPPEAEVQIDRLITGRLQSLQTYVTQQLIRAAEIRASANLAATKMSECVLGQSKRVDFCGKGYHLMSFPQSAPHGVVFLHVTYVFAQEKNFTTAPAICHDGKAHFPREGVFVSNGTHWFVTQRNFYEPQIITTDNTFVSGNCDVVIGIVNNTVYDPLQPELDSFKEELDKYFKNHTSPDVDLGDISGINASVVNIQKEIDRLNEVAKNLNESLIDLQELGKYEQYIKWPWYIWLGFIAGLIAIVMVTIMLCCMTSCCSCLKGCCSCGSCCKFDEDDSEPVLKGVKLHYT

SEQ ID NO: 482 - protein, 1273 aa, Artificial Sequence
  SARS-CoV-2/Australia/VIC01/2020__EPI_ISL_406844 spike protein (1-1273)(K986P_V987P_P1069F)
MFVFLVLLPLVSSQCVNLTTRTQLPPAYTNSFTRGVYYPDKVFRSSVLHSTQDLFLPFFSNVTWFHAIHVSGTNGTKRFDNPVLPFNDGVYFASTEKSNIIRGWIFGTTLDSKTQSLLIVNNATNVVIKVCEFQFCNDPFLGVYYHKNNKSWMESEFRVYSSANNCTFEYVSQPFLMDLEGKQGNFKNLREFVFKNIDGYFKIYSKHTPINLVRDLPQGFSALEPLVDLPIGINITRFQTLLALHRRYLTPGDSSSGWTAGAAAYYVGYLQPRTFLLKYNENGTITDAVDCALDPLSETKCTLKSFTVEKGIYQTSNFRVQPTESIVRFPNITNLCPFGEVFNATRFASVYAWNRKRISNCVADYSVLYNSASFSTFKCYGVSPTKLNDLCFTNVYADSFVIRGDEVRQIAPGQTGKIADYNYKLPDDFTGCVIAWNSNNLDSKVGGNYNYLYRLFRKSNLKPFERDISTEIYQAGSTPCNGVEGFNCYFPLQSYGFQPTNGVGYQPYRVVVLSFELLHAPATVCGPKKSTNLVKNKCVNFNFNGLTGTGVLTESNKKFLPFQQFGRDIADTTDAVRDPQTLEILDITPCSFGGVSVITPGTNTSNQVAVLYQDVNCTEVPVAIHADQLTPTWRVYSTGSNVFQTRAGCLIGAEHVNNSYECDIPIGAGICASYQTQTNSPRRARSVASQSIIAYTMSLGAENSVAYSNNSIAIPTNFTISVTTEILPVSMTKTSVDCTMYICGDSTECSNLLLQYGSFCTQLNRALTGIAVEQDKNTQEVFAQVKQIYKTPPIKDFGGFNFSQILPDPSKPSKRSFIEDLLFNKVTLADAGFIKQYGDCLGDIAARDLICAQKFNGLTVLPPLLTDEMIAQYTSALLAGTITSGWTFGAGAALQIPFAMQMAYRFNGIGVTQNVLYENQKLIANQFNSAIGKIQDSLSSTASALGKLQDVVNQNAQALNTLVKQLSSNFGAISSVLNDILSRLDPPEAEVQIDRLITGRLQSLQTYVTQQLIRAAEIRASANLAATKMSECVLGQSKRVDFCGKGYHLMSFPQSAPHGVVFLHVTYVFAQEKNFTTAPAICHDGKAHFPREGVFVSNGTHWFVTQRNFYEPQIITTDNTFVSGNCDVVIGIVNNTVYDPLQPELDSFKEELDKYFKNHTSPDVDLGDISGINASVVNIQKEIDRLNEVAKNLNESLIDLQELGKYEQYIKWPWYIWLGFIAGLIAIVMVTIMLCCMTSCCSCLKGCCSCGSCCKFDEDDSEPVLKGVKLHYT

SEQ ID NO: 483 - protein, 1273 aa, Artificial Sequence
  SARS-CoV-2/Germany/BavPat1/2020__EPI_ISL_406862 spike protein (1-1273)(K986P_V987P_P1069F)
MFVFLVLLPLVSSQCVNLTTRTQLPPAYTNSFTRGVYYPDKVFRSSVLHSTQDLFLPFFSNVTWFHAIHVSGTNGTKRFDNPVLPFNDGVYFASTEKSNIIRGWIFGTTLDSKTQSLLIVNNATNVVIKVCEFQFCNDPFLGVYYHKNNKSWMESEFRVYSSANNCTFEYVSQPFLMDLEGKQGNFKNLREFVFKNIDGYFKIYSKHTPINLVRDLPQGFSALEPLVDLPIGINITRFQTLLALHRSYLTPGDSSSGWTAGAAAYYVGYLQPRTFLLKYNENGTITDAVDCALDPLSETKCTLKSFTVEKGIYQTSNFRVQPTESIVRFPNITNLCPFGEVFNATRFASVYAWNRKRISNCVADYSVLYNSASFSTFKCYGVSPTKLNDLCFTNVYADSFVIRGDEVRQIAPGQTGKIADYNYKLPDDFTGCVIAWNSNNLDSKVGGNYNYLYRLFRKSNLKPFERDISTEIYQAGSTPCNGVEGFNCYFPLQSYGFQPTNGVGYQPYRVVVLSFELLHAPATVCGPKKSTNLVKNKCVNFNFNGLTGTGVLTESNKKFLPFQQFGRDIADTTDAVRDPQTLEILDITPCSFGGVSVITPGTNTSNQVAVLYQGVNCTEVPVAIHADQLTPTWRVYSTGSNVFQTRAGCLIGAEHVNNSYECDIPIGAGICASYQTQTNSPRRARSVASQSIIAYTMSLGAENSVAYSNNSIAIPTNFTISVTTEILPVSMTKTSVDCTMYICGDSTECSNLLLQYGSFCTQLNRALTGIAVEQDKNTQEVFAQVKQIYKTPPIKDFGGFNFSQILPDPSKPSKRSFIEDLLFNKVTLADAGFIKQYGDCLGDIAARDLICAQKFNGLTVLPPLLTDEMIAQYTSALLAGTITSGWTFGAGAALQIPFAMQMAYRFNGIGVTQNVLYENQKLIANQFNSAIGKIQDSLSSTASALGKLQDVVNQNAQALNTLVKQLSSNFGAISSVLNDILSRLDPPEAEVQIDRLITGRLQSLQTYVTQQLIRAAEIRASANLAATKMSECVLGQSKRVDFCGKGYHLMSFPQSAPHGVVFLHVTYVFAQEKNFTTAPAICHDGKAHFPREGVFVSNGTHWFVTQRNFYEPQIITTDNTFVSGNCDVVIGIVNNTVYDPLQPELDSFKEELDKYFKNHTSPDVDLGDISGINASVVNIQKEIDRLNEVAKNLNESLIDLQELGKYEQYIKWPWYIWLGFIAGLIAIVMVTIMLCCMTSCCSCLKGCCSCGSCCKFDEDDSEPVLKGVKLHYT

SEQ ID NO: 484 - protein, 1273 aa, Artificial Sequence
  SARS-CoV-2/Wuhan/HBCDC-HB-02/2020__EPI_ISL_412978 spike protein (1-1273)(K986P_V987P_P1069F)
MFVFLVLLPLVSSQCVNLTTRTQLPPAYTNSFTRGVYYPDKVFRSSVLHSTQDLFLPFFSNVTWFHAIHVSGTNGTKRFDNPVLPFNDGVYFASTEKSNIIRGWIFGTTLDSKTQSLLIVNNATNVVIKVCEFQFCNDPFLGVYYHKNNKSWMESEFRVYSSANNCTFEYVSQPFLMDLEGKQGNFKNLREFVFKNIDGYFKIYSKHTPINLVRDLPQGFSALEPLVDLPIGINITRFQTLLALHRSYLTPGDSSSGWTAGAAAYYVGYLQPRTFLLKYNENGTITDAVDCALDPLSETKCTLKSFTVEKGIYQTSNFRVQPTESIVRFPNITNLCPFGEVFNATRFASVYAWNRKRISNCVADYSVLYNSASFSTFKCYGVSPTKLNDLCFTNVYADSFVIRGDEVRQIAPGQTGKIADYNYKLPDDFTGCVIAWNSNNLDSKVGGNYNYLYRLFRKSNLKPFERDISTEIYQAGSTPCNGVEGFNCYFPLQSYGFQPTNGVGYQPYRVVVLSFELLHAPATVCGPKKSTNLVKNKCVNFNFNGLTGTGVLTESNKKFLPFQQFGRDIADTTDAVRDPQTLEILDITPCSFGGVSVITPGTNTSNQVAVLYQDVNCTEVPVAIHADQLTPTWRVYSTGSNVFQTRAGCLIGAEHVNNSYECDIPIGAGICASYQTQTNSPRRARSVASQSIIAYTMSLGAENSVAYSNNSIAIPTNFTISVTTEILPVSMTKTSVDCTMYICGDSTECSNFLLQYGSFCTQLNRALTGIAVEQDKNTQEVFAQVKQIYKTPPIKDFGGFNFSQILPDPSKPSKRSFIEDLLFNKVTLADAGFIKQYGDCLGDIAARDLICAQKFNGLTVLPPLLTDEMIAQYTSALLAGTITSGWTFGAGAALQIPFAMQMAYRFNGIGVTQNVLYENQKLIANQFNSAIGKIQDSLSSTASALGKLQDVVNQNAQALNTLVKQLSSNFGAISSVLNDILSRLDPPEAEVQIDRLITGRLQSLQTYVTQQLIRAAEIRASANLAATKMSECVLGQSKRVDFCGKGYHLMSFPQSAPHGVVFLHVTYVFAQEKNFTTAPAICHDGKAHFPREGVFVSNGTHWFVTQRNFYEPQIITTDNTFVSGNCDVVIGIVNNTVYDPLQPELDSFKEELDKYFKNHTSPDVDLGDISGINASVVNIQKEIDRLNEVAKNLNESLIDLQELGKYEQYIKWPWYIWLGFIAGLIAIVMVTIMLCCMTSCCSCLKGCCSCGSCCKFDEDDSEPVLKGVKLHYT

SEQ ID NO: 485 - protein, 1273 aa, Artificial Sequence
  SARS-CoV-2/Australia/QLD02/2020__EPI_ISL_407896 spike protein (1-1273)(K986P_V987P_P1069F)
MFVFLVLLPLVSSQCVNLTTRTQLPPAYTNSFTRGVYYPDKVFRSSVLHSTQDLFLPFFSNVTWFHAIHVSGTNGTKRFDNPVLPFNDGVYFASTEKSNIIRGWIFGTTLDSKTQSLLIVNNATNVVIKVCEFQFCNDPFLGVYYHKNNKSWMESEFRVYSSANNCTFEYVSQPFLMDLEGKQGNFKNLREFVFKNIDGYFKIYSKHTPINLVRDLPQGFSALEPLVDLPIGINITRFQTLLALHRSYLTPGDSSSGWTAGAAAYYVGYLQPRTFLLKYNENGTITDAVDCALDPLSETKCTLKSFTVEKGIYQTSNFRVQPTESIVRFPNITNLCPFGEVFNATRFASVYAWNRKRISNCVADYSVLYNSASFSTFKCYGVSPTKLNDLCFTNVYADSFVIRGDEVRQIAPGQTGKIADYNYKLPDDFTGCVIAWNSNNLDSKVGGNYNYLYRLFRKSNLKPFERDISTEIYQAGSTPCNGVEGFNCYFPLQSYGFQPTNGVGYQPYRVVVLSFELLHAPATVCGPKKSTNLVKNKCVNFNFNGLTGTGVLTESNKKFLPFQQFGRDIADTTDAVRDPQTLEILDITPCSFGGVSVITPGTNTSNQVAVLYQDVNCTEVPVAIHADQLTPTWRVYSTGSNVFQTRAGCLIGAEHVNNSYECDIPIGAGICASYQTQTNSPRRARSVASQSIIAYTMSLGAENSVAYSNNSIAIPTNFTISVTTEILPVSMTKTSVDCTMYICGDSTECSNLLLQYGSFCTQLNRALTGIAVEQDKNTQEVFAQVKQIYKTPPIKDFGGFNFSQILPDPSKPSKRSFIEDLLFNKVTLADAGFIKQYGDCLGDIAARDLICAQKFNGLTVLPPLLTDEMIAQYTSALLAGTITSGWTFGAGAALQIPFAMQMAYRFNGIGVTQNVLYENQKLIANQFNSAIGKIQDSLSSTASALGKLQDVVNQNAQALNTLVKQLSSNFGAISSVLNDILSRLDPPEAEVQIDRLITGRLQSLQTYVTQQLIRAAEIRASANLAATKMSECVLGQSKRVDFCGKGYHLMSFPQSAPHGVVFLHVTYVFAQEKNFTTAPAICHDGKAHFPREGVFVSNGTHWFVTQRNFYEPQIITTDNTFVSGNCDVVIGIVNNTVYDPLQLELDSFKEELDKYFKNHTSPDVDLGDISGINASVVNIQKEIDRLNEVAKNLNESLIDLQELGKYEQYIKWPWYIWLGFIAGLIAIVMVTIMLCCMTSCCSCLKGCCSCGSCCKFDEDDSEPVLKGVKLHYT

SEQ ID NO: 486 - protein, 1273 aa, Artificial Sequence
  SARS-CoV-2/India/1-31/2020__EPI_ISL_413523 spike protein (1-1273)(K986P_V987P_P1069F)
MFVFLVLLPLVSSQCVNLTTRTQLPPAYTNSFTRGVYYPDKVFRSSVLHSTQDLFLPFFSNVTWFHAIHVSGTNGTKRFDNPVLPFNDGVYFASTEKSNIIRGWIFGTTLDSKTQSLLIVNNATNVVIKVCEFQFCNDPFLGVYYHKNNKSWMESEFRVYSSANNCTFEYVSQPFLMDLEGKQGNFKNLREFVFKNIDGYFKIYSKHTPINLVRDLPQGFSALEPLVDLPIGINITRFQTLLALHRSYLTPGDSSSGWTAGAAAYYVGYLQPRTFLLKYNENGTITDAVDCALDPLSETKCTLKSFTVEKGIYQTSNFRVQPTESIVRFPNITNLCPFGEVFNATRFASVYAWNRKRISNCVADYSVLYNSASFSTFKCYGVSPTKLNDLCFTNVYADSFVIRGDEVRQIAPGQTGKIADYNYKLPDDFTGCVIAWNSNNLDSKVGGNYNYLYRLFRKSNLKPFERDISTEIYQAGSTPCNGVEGFNCYFPLQSYGFQPTNGVGYQPYRVVVLSFELLHAPATVCGPKKSTNLVKNKCVNFNFNGLTGTGVLTESNKKFLPFQQFGRDIADTTDAVRDPQTLEILDITPCSFGGVSVITPGTNTSNQVAVLYQDVNCTEVPVAIHADQLTPTWRVYSTGSNVFQTRAGCLIGAEHVNNSYECDIPIGAGICASYQTQTNSPRRARSVASQSIIAYTMSLGAENSVAYSNNSIAIPTNFTISVTTEILPVSMTKTSVDCTMYICGDSTECSNLLLQYGSFCTQLNRALTGIAVEQDKNTQEVFAQVKQIYKTPPIKDFGGFNFSQILPDPSKPSKRSFIEDLLFNKVTLADAGFIKQYGDCLGDIAARDLICAQKFNGLTVLPPLLTDEMIAQYTSALLAGTITSGWTFGAGAALQIPFAMQMAYRFNGIGVTQNVLYENQKLIANQFNSVIGKIQDSLSSTASALGKLQDVVNQNAQALNTLVKQLSSNFGAISSVLNDILSRLDPPEAEVQIDRLITGRLQSLQTYVTQQLIRAAEIRASANLAATKMSECVLGQSKRVDFCGKGYHLMSFPQSAPHGVVFLHVTYVFAQEKNFTTAPAICHDGKAHFPREGVFVSNGTHWFVTQRNFYEPQIITTDNTFVSGNCDVVIGIVNNTVYDPLQPELDSFKEELDKYFKNHTSPDVDLGDISGINASVVNIQKEIDRLNEVAKNLNESLIDLQELGKYEQYIKWPWYIWLGFIAGLIAIVMVTIMLCCMTSCCSCLKGCCSCGSCCKFDEDDSEPVLKGVKLHYT

SEQ ID NO: 487 - protein, 1273 aa, Artificial Sequence
  SARS-CoV-2/Guangdong/GD2020087-P0008/2020__EPI_ISL_413863 spike protein (1-1273)(K986P_V987P_P1069F)
MFVFLVLLPLVSSQCVNLTTRTQLPPAYTNSFTRGVYYPDKVFRSSVLHSTQDLFLPFFSNVTWFHAIHVSGTNGTKRFDNPVLPFNDGVYFASTEKSNIIRGWIFGTTLDSKTQSLLIVNNATNVVIKVCEFQFCNDPFLGVYYHKNNKSWMESEFRVYSSANNCTFEYVSQPFLMDLEGKQGNFKNLREFVFKNIDGYFKIYSKHTPINLVRDLPQGFSALEPLVDLPIGINITRFQTLLALHRSYLTPGDSSSGWTAGAAAYYVGYLQPRTFLLKYNENGTITDAVDCALDPLSETKCTLKSFTVEKGIYQTSNFRVQPTESIVRFPNITNLCPFGEVFNATRFASVYAWNRKRISNCVADYSVLYNSASFSTFKCYGVSPTKLNDLCFTNVYADSFVIRGDEVREIAPGQTGKIADYNYKLPDDFTGCVIAWNSNNLDSKVGGNYNYLYRLFRKSNLKPFERDISTEIYQAGSTPCNGVEGFNCYFPLQSYGFQPTNGVGYQPYRVVVLSFELLHAPATVCGPKKSTNLVKNKCVNFNFNGLTGTGVLTESNKKFLPFQQFGRDIADTTDAVRDPQTLEILDITPCSFGGVSVITPGTNTSNQVAVLYQDVNCTEVPVAIHADQLTPTWRVYSTGSNVFQTRAGCLIGAEHVNNSYECDIPIGAGICASYQTQTNSPRRARSVASQSIIAYTMSLGAENSVAYSNNSIAIPTNFTISVTTEILPVSMTKTSVDCTMYICGDSTECSNLLLQYGSFCTQLNRALTGIAVEQDKNTQEVFAQVKQIYKTPPIKDFGGFNFSQILPDPSKPSKRSFIEDLLFNKVTLADAGFIKQYGDCLGDIAARDLICAQKFNGLTVLPPLLTDEMIAQYTSALLAGTITSGWTFGAGAALQIPFAMQMAYRFNGIGVTQNVLYENQKLIANQFNSAIGKIQDSLSSTASALGKLQDVVNQNAQALNTLVKQLSSNFGAISSVLNDILSRLDPPEAEVQIDRLITGRLQSLQTYVTQQLIRAAEIRASANLAATKMSECVLGQSKRVDFCGKGYHLMSFPQSAPHGVVFLHVTYVFAQEKNFTTAPAICHDGKAHFPREGVFVSNGTHWFVTQRNFYEPQIITTDNTFVSGNCDVVIGIVNNTVYDPLQPELDSFKEELDKYFKNHTSPDVDLGDISGINASVVNIQKEIDRLNEVAKNLNESLIDLQELGKYEQYIKWPWYIWLGFIAGLIAIVMVTIMLCCMTSCCSCLKGCCSCGSCCKFDEDDSEPVLKGVKLHYT

SEQ ID NO: 488 - protein, 1273 aa, Artificial Sequence
  SARS-CoV-2/Sweden/01/2020__EPI_ISL_411951 spike protein (1-1273)(K986P_V987P_P1069F)
MFVFLVLLPLVSSQCVNLTTRTQLPPAYTNSFTRGVYYPDKVFRSSVLHSTQDLFLPFFSNVTWFHAIHVSGTNGTKRFDNPVLPFNDGVYFASTEKSNIIRGWIFGTTLDSKTQSLLIVNNATNVVIKVCEFQFCNDPFLGVYYHKNNKSWMESEFRVYSSANNCTFEYVSQPFLMDLEGKQGNFKNLREFVFKNIDGYFKIYSKHTPINLVRDLPQGFSALEPLVDLPIGINITRFQTLLALHRSYLTPGDSSSGWTAGAAAYYVGYLQPRTFLLKYNENGTITDAVDCALDPLSETKCTLKSFTVEKGIYQTSNFRVQPTESIVRFPNITNLCPFGEVFNATRFASVYAWNRKRISNCVADYSVLYNSASFSTFKCYGVSPTKLNDLCFTNVYADSFVIRGDEVRQIAPGQTGKIADYNYKLPDDFTGCVIAWNSNNLDSKVGGNYNYLYRLFRKSNLKPFERDISTEIYQAGSTPCNGVEGFNCYFPLQSYGFQPTNGVGYQPYRVVVLSFELLHAPATVCGPKKSTNLVKNKCVNFNFNGLTGTGVLTESNKKFLPFQQFGRDIADTTDAVRDPQTLEILDITPCSFGGVSVITPGTNTSNQVAVLYQDVNCTEVPVAIHADQLTPTWRVYSTGSNVFQTRAGCLIGAEHVNNSYECDIPIGAGICASYQTQTNSPRRARSVASQSIIAYTMSLGAENSVAYSNNSIAIPTNFTISVTTEILPVSMTKTSVDCTMYICGDSTECSNLLLQYGSFCTQLNRALTGIAVEQDKNTQEVFAQVKQIYKTPPIKDCGGFNFSQILPDPSKPSKRSFIEDLLFNKVTLADAGFIKQYGDCLGDIAARDLICAQKFNGLTVLPPLLTDEMIAQYTSALLAGTITSGWTFGAGAALQIPFAMQMAYRFNGIGVTQNVLYENQKLIANQFNSAIGKIQDSLSSTASALGKLQDVVNQNAQALNTLVKQLSSNFGAISSVLNDILSRLDPPEAEVQIDRLITGRLQSLQTYVTQQLIRAAEIRASANLAATKMSECVLGQSKRVDFCGKGYHLMSFPQSAPHGVVFLHVTYVFAQEKNFTTAPAICHDGKAHFPREGVFVSNGTHWFVTQRNFYEPQIITTDNTFVSGNCDVVIGIVNNTVYDPLQPELDSFKEELDKYFKNHTSPDVDLGDISGINASVVNIQKEIDRLNEVAKNLNESLIDLQELGKYEQYIKWPWYIWLGFIAGLIAIVMVTIMLCCMTSCCSCLKGCCSCGSCCKFDEDDSEPVLKGVKLHYT

SEQ ID NO: 489 - protein, 1273 aa, Artificial Sequence
  SARS-CoV-2/Tianmen/HBCDC-HB-07/2020__EPI_ISL_412983 spike protein (1-1273)(K986P_V987P_P1069F)
MFVFLVLLPLVSSQCVNLTTRTQLPPAYTNSFTRGVYYPDKVFRSSVLHSTQDLFLPFFSNVTWFHAIHVSGTNGTKRFDNPVLPFNDGVYFASTEKSNIIRGWIFGTTLDSKTQSLLIVNNATNVVIKVCEFQFCNDPFLGVYYHKNNKSWMESEFRVYSSANNCTFEYVSQPFLMDLEGKQGNFKNLREFVFKNIDGYFKIYSKHTPINLVRDLPQGFSALEPLVDLPIGINITRFQTLLALHRSYLTPGDSSSGWTAGAAAYYVGYLQPRTFLLKYNENGTITDAVDCALDPLSETKCTLKSFTVEKGIYQTSNFRVQPTESIVRFPNITNLCPFGEVFNATRFASVYAWNRKRISNCVADYSVLYNSASFSTFKCYGVSPTKLNDLCFTNVYADSFVIRGDEVRQIAPGQTGKIADYNYKLPDDFTGCVIAWNSNNLDSKVGGNYNYLYRLFRKSNLKPFERDISTEIYQAGSTPCNGVEGFNCYFPLQSYGFQPTNGVGYQPYRVVVLSFELLHAPATVCGPKKSTNLVKNKCVNFNFNGLTGTGVLTESNKKFLPFQQFGRDIADTTDAVRDPQTLEILDITPCSFGGVSVITPGTNTSNQVAVLYQDLNCTEVPVAIHADQLTPTWRVYSTGSNVFQTRAGCLIGAEHVNNSYECDIPIGAGICASYQTQTNSPRRARSVASQSIIAYTMSLGAENSVAYSNNSIAIPTNFTISVTTEILPVSMTKTSVDCTMYICGDSTECSNLLLQYGSFCTQLNRALTGIAVEQDKNTQEVFAQVKQIYKTPPIKDFGGFNFSQILPDPSKPSKRSFIEDLLFNKVTLADAGFIKQYGDCLGDIAARDLICAQKFNGLTVLPPLLTDEMIAQYTSALLAGTITSGWTFGAGAALQIPFAMQMAYRFNGIGVTQNVLYENQKLIANQFNSAIGKIQDSLSSTASALGKLQDVVNQNAQALNTLVKQLSSNFGAISSVLNDILSRLDPPEAEVQIDRLITGRLQSLQTYVTQQLIRAAEIRASANLAATKMSECVLGQSKRVDFCGKGYHLMSFPQSAPHGVVFLHVTYVFAQEKNFTTAPAICHDGKAHFPREGVFVSNGTHWFVTQRNFYEPQIITTDNTFVSGNCDVVIGIVNNTVYDPLQPELDSFKEELDKYFKNHTSPDVDLGDISGINASVVNIQKEIDRLNEVAKNLNESLIDLQELGKYEQYIKWPWYIWLGFIAGLIAIVMVTIMLCCMTSCCSCLKGCCSCGSCCKFDEDDSEPVLKGVKLHYT

SEQ ID NO: 490 - protein, 1273 aa, Artificial Sequence
  SARS-CoV-2/Hong Kong/case42_VM20002493/2020__EPI_ISL_414527 spike protein (1-1273)(K986P_V987P_P1069F)
MFVFLVLLPLVSSQCVNLTTRTQLPPAYTNSFTRGVYYPDKVFRSSVLHSTQDLFLPFFSNVTWFHAIHVSGTNGTKRFDNPVLPFNDGVYFASTEKSNIIRGWIFGTTLDSKTQSLLIVNNATNVVIKVCEFQFCNDPFLGVYYHKNNKSWMESEFRVYSSANNCTFEYVSQPFLMDLEGKQGNFKNLREFVFKNIDGYFKIYSKHTPINLVRDLPQGFSALEPLVDLPIGINITRFQTLLALHRSYLTPGDSSSGWTAGAAAYYVGYLQPRTFLLKYNENGTITDAVDCALDPLSETKCTLKSFTVEKGIYQTSNFRVQPTESIVRFPNITNLCPFGEVFNATRFASVYAWNRKRISNCVADYSVLYNSASFSTFKCYGVSPTKLNDLCFTNVYADSFVIRGDEVRQIAPGQTGKIADYNYKLPDDFTGCVIAWNSNNLDSKVGGNYNYLYRLFRKSNLKPFERDISTEIYQAGSTPCNGVEGFNCYFPLQSYGFQPTNGVGYQPYRVVVLSFELLHAPATVCGPKKSTNLVKNKCVNFNFNGLTGTGVLTESNKKFLPFQQFGRDIADTTDAVRDPQTLEILDITPCSFGGVSVITPGTNTSNQVAVLYQDVNCTEVPVAIHADQLTPTWRVYSTGSNVFQTRAGCLIGAEHVNNSYECDIPIGAGICASYQTQTNSPRRARSVASQSIIAYTMSLGAENSVAYSNNSIAIPTNFAISVTTEILPVSMTKTSVDCTMYICGDSTECSNLLLQYGSFCTQLNRALTGIAVEQDKNTQEVFAQVKQIYKTPPIKDFGGFNFSQILPDPSKPSKRSFIEDLLFNKVTLADAGFIKQYGDCLGDIAARDLICAQKFNGLTVLPPLLTDEMIAQYTSALLAGTITSGWTFGAGAALQIPFAMQMAYRFNGIGVTQNVLYENQKLIANQFNSAIGKIQDSLSSTASALGKLQDVVNQNAQALNTLVKQLSSNFGAISSVLNDILSRLDPPEAEVQIDRLITGRLQSLQTYVTQQLIRAAEIRASANLAATKMSECVLGQSKRVDFCGKGYHLMSFPQSAPHGVVFLHVTYVFAQEKNFTTAPAICHDGKAHFPREGVFVSNGTHWFVTQRNFYEPQIITTDNTFVSGNCDVVIGIVNNTVYDPLQPELDSFKEELDKYFKNHTSPDVDLGDISGINASVVNIQKEIDRLNEVAKNLNESLIDLQELGKYEQYIKWPWYIWLGFIAGLIAIVMVTIMLCCMTSCCSCLKGCCSCGSCCKFDEDDSEPVLKGVKLHYT

SEQ ID NO: 491 - protein, 1273 aa, Artificial Sequence
  SARS-CoV-2/USA/CruiseA-23/2020__EPI_ISL_414482 spike protein (1-1273)(K986P_V987P_P1069F)
MFVFLVLLPLVSSQCVNLTTRTQLPPAYTNSFTRGVYYPDKVFRSSVLHSTQDLFLPFFSNVTWFHAIHVSGTNGTKRFDNPVLPFNDGVYFASTEKSNIIRGWIFGTTLDSKTQSLLIVNNATNVVIKVCEFQFCNDPFLGVYYHKNNKSWMESEFRVYSSANNCTFEYVSQPFLMDLEVKQGNFKNLREFVFKNIDGYFKIYSKHTPINLVRDLPQGFSALEPLVDLPIGINITRFQTLLALHRSYLTPGDSSSGWTAGAAAYYVGYLQPRTFLLKYNENGTITDAVDCALDPLSETKCTLKSFTVEKGIYQTSNFRVQPTESIVRFPNITNLCPFGEVFNATRFASVYAWNRKRISNCVADYSVLYNSASFSTFKCYGVSPTKLNDLCFTNVYADSFVIRGDEVRQIAPGQTGKIADYNYKLPDDFTGCVIAWNSNNLDSKVGGNYNYLYRLFRKSNLKPFERDISTEIYQAGSTPCNGVEGFNCYFPLQSYGFQPTNGVGYQPYRVVVLSFELLHAPATVCGPKKSTNLVKNKCVNFNFNGLTGTGVLTESNKKFLPFQQFGRDIADTTDAVRDPQTLEILDITPCSFGGVSVITPGTNTSNQVAVLYQDVNCTEVPVAIHADQLTPTWRVYSTGSNVFQTRAGCLIGAEHVNNSYECDIPIGAGICASYQTQTNSPRRARSVASQSIIAYTMSLGAENSVAYSNNSIAIPTNFTISVTTEILPVSMTKTSVDCTMYICGDSTECSNLLLQYGSFCTQLNRALTGIAVEQDKNTQEVFAQVKQIYKTPPIKDFGGFNFSQILPDPSKPSKRSFIEDLLFNKVTLADAGFIKQYGDCLGDIAARDLICAQKFNGLTVLPPLLTDEMIAQYTSALLAGTITSGWTFGAGAALQIPFAMQMAYRFNGIGVTQNVLYENQKLIANQFNSAIGKIQDSLSSTASALGKLQDVVNQNAQALNTLVKQLSSNFGAISSVLNDILSRLDPPEAEVQIDRLITGRLQSLQTYVTQQLIRAAEIRASANLAATKMSECVLGQSKRVDFCGKGYHLMSFPQSAPHGVVFLHVTYVFAQEKNFTTAPAICHDGKAHFPREGVFVSNGTHWFVTQRNFYEPQIITTDNTFVSGNCDVVIGIVNNTVYDPLQPELDSFKEELDKYFKNHTSPDVDLGDISGINASVVNIQKEIDRLNEVAKNLNESLIDLQELGKYEQYIKWPWYIWLGFIAGLIAIVMVTIMLCCMTSCCSCLKGCCSCGSCCKFDEDDSEPVLKGVKLHYT

SEQ ID NO: 492 - protein, 1273 aa, Artificial Sequence
  SARS-CoV-2/Hong Kong/case85_VM20002868/2020__EPI_ISL_414519 spike protein (1-1273)(K986P_V987P_P1069F)
MFVFLVLVPLVSSQCVNLTTRTQLPPAYTNSFTRGVYYPDKVFRSSVLHSTQDLFLPFFSNVTWFHAIHVSGTNGTKRFDNPVLPFNDGVYFASTEKSNIIRGWIFGTTLDSKTQSLLIVNNATNVVIKVCEFQFCNDPFLGVYYHKNNKSWMESEFRVYSSANNCTFEYVSQPFLMDLEGKQGNFKNLREFVFKNIDGYFKIYSKHTPINLVRDLPQGFSALEPLVDLPIGINITRFQTLLALHRSYLTPGDSSSGWTAGAAAYYVGYLQPRTFLLKYNENGTITDAVDCALDPLSETKCTLKSFTVEKGIYQTSNFRVQPTESIVRFPNITNLCPFGEVFNATRFASVYAWNRKRISNCVADYSVLYNSASFSTFKCYGVSPTKLNDLCFTNVYADSFVIRGDEVRQIAPGQTGKIADYNYKLPDDFTGCVIAWNSNNLDSKVGGNYNYLYRLFRKSNLKPFERDISTEIYQAGSTPCNGVEGFNCYFPLQSYGFQPTNGVGYQPYRVVVLSFELLHAPATVCGPKKSTNLVKNKCVNFNFNGLTGTGVLTESNKKFLPFQQFGRDIADTTDAVRDPQTLEILDITPCSFGGVSVITPGTNTSNQVAVLYQDVNCTEVPVAIHADQLTPTWRVYSTGSNVFQTRAGCLIGAEHVNNSYECDIPIGAGICASYQTQTNSPRRARSVASQSIIAYTMSLGAENSVAYSNNSIAIPTNFTISVTTEILPVSMTKTSVDCTMYICGDSTECSNLLLQYGSFCTQLNRALTGIAVEQDKNTQEVFAQVKQIYKTPPIKDFGGFNFSQILPDPSKPSKRSFIEDLLFNKVTLADAGFIKQYGDCLGDIAARDLICAQKFNGLTVLPPLLTDEMIAQYTSALLAGTITSGWTFGAGAALQIPFAMQMAYRFNGIGVTQNVLYENQKLIANQFNSAIGKIQDSLSSTASALGKLQDVVNQNAQALNTLVKQLSSNFGAISSVLNDILSRLDPPEAEVQIDRLITGRLQSLQTYVTQQLIRAAEIRASANLAATKMSECVLGQSKRVDFCGKGYHLMSFPQSAPHGVVFLHVTYVFAQEKNFTTAPAICHDGKAHFPREGVFVSNGTHWFVTQRNFYEPQIITTDNTFVSGNCDVVIGIVNNTVYDPLQPELDSFKEELDKYFKNHTSPDVDLGDISGINASVVNIQKEIDRLNEVAKNLNESLIDLQELGKYEQYIKWPWYIWLGFIAGLIAIVMVTIMLCCMTSCCSCLKGCCSCGSCCKFDEDDSEPVLKGVKLHYT

SEQ ID NO: 493 - protein, 1273 aa, Artificial Sequence
  SARS-CoV-2/England/200990660/2020__EPI_ISL_414523 spike protein (1-1273)(K986P_V987P_P1069F)
MFVFLVLLPLVSSQCVNLTTRTQLPPAYTNSFTRGVYYPDKVFRSSVLHSTQDLFLPFFSNVTWFHAIHVSGTNGTKRFDNPVLPFNDGVYFASTEKSNIIRGWIFGTTLDSKTQSLLIVNNATNVVIKVCEFQFCNDPFLGVYYHKNNKSWMESEFRVYSSANNCTFEYVSQPFLMDLEGKQGNFKNLREFVFKNIDGYFKIYSKHTPINLVRDLPQGFSALEPLVDLPIGINITRFQTLLALHRSYLTPGDSSSGWTAGAAAYYVGYLQPRTFLLKYNENGTITDAVDCALDPLSETKCTLKSFTVEKGIYQTSNFRVQPTESIVRFPNITNLCPFGEVFNATRFASVYAWNRKRISNCVADYSVLYNSASFSTFKCYGVSPTKLNDLCFTNVYADSFVIRGDEVRQIAPGQTGKIADYNYKLPDDFTGCVIAWNSNNLDSKVGGNYNYLYRLFRKSNLKPFERDISTEIYQAGSTPCNGVEGFNCYFPLQSYGFQPTNGVGYQPYRVVVLSFELLHAPATVCGPKKSTNLVKNKCVNFNFNGLTGTGVLTESNKKFLPFQQFGRDIADTTDAVRDPQTLEILDITPCSFGGVSVITPGTNTSNQVAVLYQGVNCTEVPVAIHADQLTPTWRVYSTGSNVFQTRAGCLIGAEHVNNSYECDIPIGAGICASYQTQTNSPRRARSVASQSIIAYTMSLGAENSVAYSNNSIAIPTNFTISVTTEILPVSMTKTSVDCTMYICGDSTECSNLLLQYGSFCTQLNRALTGIAVEQDKNTQEVFAQVKQIYKTPPIKDFGGFNFSQILPDPSKPSKRSFIEDLLFNKVTLADAGFIKQYGDCLGDIAARDLICAQKFNGLTVLPPLLTDEMIAQYTSALLAGTITSGWTFGAGAALQIPFAMQMAYRFNGIGVTQNVLYENQKLIANQFNSAIGKIQDSLSSTASALGKLQDVVNQNAQALNTLVKQLSSNFGAISSVLNDILSRLDPPEAEVQIDRLITGRLQSLQTYVTQQLIRAAEIRASANLAATKMSECVLGQSKRVDFCGKGYHLMSFPQSAPHGVVFLHVTYVFAQEKNFTTAPAICHDGKAHFPREGVFVSNGTHWFVTQRNFYEPQIITTDNTFVSGNCDVVIGIVNNTVYDPLQPELDSFKEELDKYFKNHTSPDVDLGDISGINASVVNIQKEIDRLNEVAKNLNESLIDLQELGKYEQYIKWPWYIWLGFIAGLIAIVMVTIMLCCMTSCCSCLKGCCSCGSCCKFDEDDSELVLKGVKLHYT

SEQ ID NO: 494 - protein, 1273 aa, Artificial Sequence
  SARS-CoV-2/Australia/NSW09/2020__EPI_ISL_413595 spike protein (1-1273)(K986P_V987P_P1069F)
MFVFLVLLPLVSSQCVNLTTRTQLPPAYTNSFTRGVYYPDKVFRSSVLHSTQDLFLPFFSNVTWFHAIHVSGTNGTKRFDNPVLPFNDGVYFASTEKSNIIRGWIFGTTLDSKTQSLLIVNNATNVVIKVCEFQFCNDPFLGVYYHKNNKSWMESEFRVYSSANNCTFEYVSQPFLMDLEGKQGNFKNLREFVFKNIDGYFKIYSKHTPINLVRDLPQGFSALEPLVDLPIGINITRFQTLLALHRSYLTPGDSSSGWTAGAAAYYVGYLQPRTFLLKYNENGTITDAVDCALDPLSETKCTLKSFTVEKGIYQTSNFRVQPTESIVRFPNITNLCPFGEVFNATRFASVYAWNRKRISNCVADYSVLYNSASFSTFKCYGVSPTKLNDLCFTNVYADSFVIRGDEVRQIAPGQTGKIADYNYKLPDDFTGCVIAWNSNNLDSKVGGNYNYLYRLFRKSNLKPFERDISTEIYQAGSTPCNGVEGFNCYFPLQSYGFQPTNGVGYQPYRVVVLSFELLHAPATVCGPKKSTNLVKNKCVNFNFNGLTGTGVLTESNKKFLPFQQFGRDIADTTDAVRDPQTLEILDITPCSFGGVSVITPGTNTSNQVAVLYQDVNCTEVPVAIHADQLTPTWRVYSTGSNVFQTRAGCLIGAEHVNNSYECDIPIGAGICASYQTQTNSPRRARSVASQSIIAYTMSLGAENSVAYSNNSIAIPTNFTISVTTEILPVSMTKTSVDCTMYICGDSTECSNLLLQYGSFCTQLNRALTGIAVEQDKNTQEVFAQVKQIYKTPPIKDFGGFNFSQILPDPSKPSKRSFIEDLLFNKVTLADAGFIKQYGDCLGDIAARDLICAQKFNGLTVLPPLLTDEMIAQYTSALLAGTITSGWTFGAGAALQIPFAMQMAYRFNGIGVTQNVLYENQKLIANQFNSAIGKIQDSLSFTASALGKLQDVVNQNAQALNTLVKQLSSNFGAISSVLNDILSRLDPPEAEVQIDRLITGRLQSLQTYVTQQLIRAAEIRASANLAATKMSECVLGQSKRVDFCGKGYHLMSFPQSAPHGVVFLHVTYVFAQEKNFTTAPAICHDGKAHFPREGVFVSNGTHWFVTQRNFYEPQIITTDNTFVSGNCDVVIGIVNNTVYDPLQPELDSFKEELDKYFKNHTSPDVDLGDISGINASVVNIQKEIDRLNEVAKNLNESLIDLQELGKYEQYIKWPWYIWLGFIAGLIAIVMVTIMLCCMTSCCSCLKGCCSCGSCCKFDEDDSEPVLKGVKLHYT

SEQ ID NO: 495 - protein, 1273 aa, Artificial Sequence
  SARS-CoV-2/Australia/NSW10/2020__EPI_ISL_413596 spike protein (1-1273)(K986P_V987P_P1069F)
MFVFLVLLPLVSSQCVNLTTRTQLPPAYTNSFTRGVYYPDKVFRSSVLHSTQDLFLPFFSNVTWFHAIHVSGTNGTKRFDNPVLPFNDGVYFASTEKSNIIRGWIFGTTLDSKTQSLLIVNNATNVVIKVCEFQFCNDPFLGVYYHKNNKSWMESEFRVYSSANNCTFEYVSQPFLMDLEGKQGNFKNLREFVFKNIDGYFKIYSKHTPINLVRDLPQGFSALEPLVDLPIGINITRFQTLLALHRSYLTPGDSSSGWTAGAAAYYVGYLQPRTFLLKYNENGTITDAVDCALDPLSETKCTLKSFTVEKGIYQTSNFRVQPTESIVRFPNITNLCPFGEVFNATRFASVYAWNRKRISNCVADYSVLYNSASFSTFKCYGVSPTKLNDLCFTNVYADSFVIRGDEVRQIAPGQTGKIADYNYKLPDDFTGCVIAWNSNNLDSKVGGNYNYLYRLFRKSNLKPFERDISTEIYQAGSTPCNGVEGFNCYFPLQSYGFQPTNGVGYQPYRVVVLSFELLHAPATVCGPKKSTNLVKNKCVNFNFNGLTGTGVLTESNKKFLPFQQFGRDIADTTDAVRDPQTLEILDITPCSFGGVSVITPGTNTSNQVAVLYQDVNCTEVPVAIHADQLTPTWRVYSTGSNVFQTRAGCLIGAEHVNNSYECDIPIGAGICASYQTQTNSPRRARSVASQSIIAYTMSLGAENSVAYSNNSIAIPTNFTISVTTEILPVSMTKTSVDCTMYICGDSTECSNLLLQYGSFCTQLNRALTGIAVEQDKNTQEVFAQVKQIYKTPPIKDFGGFNFSQILPDPSKPSKRSFIEDLLFNKVTLADAGFIKQYGDCLGDIAARDLICAQKFNGLTVLPPLLTDEMIAQYTSALLAGTITSGWTFGAGAALQIPFAMQMAYRFNGIGVTQNVLYENQKLIANQFNSAIGKIQDSLSSTASALGKLQDVVNQNAQALNTLVKQLSSNFGAISSVLNDILSRLDPPEAEVQIDRLITGRLQSLQTYVTQQLIRAAEIRASANLAATKMSECVLGQSKRVDFCGKGYHLMSFPQSAPHGVVFLHVTYVFAQEKNFTTAPAICHDGKAHFPREGVFVSNGTHWFVTQRNFYEPQIITTDNTFVSGNCDVVIGIVNNTVYDPLQPELDSFKEELDKYFKNHTSPDVDLGDISGINASVVNIQKEIDRLNEVAKNLNESLIDLQELGKYEQYIKWPWYIWLGFIAGLIAIVMVTIMLCCMTSCCSCLKGCCSCGSCFKFDEDDSEPVLKGVKLHYT

SEQ ID NO: 496 - protein, 1273 aa, Artificial Sequence
  SARS-CoV-2/Switzerland/1000477797/2020__EPI_ISL_413023 spike protein (1-1273)(K986P_V987P_P1069F)
MFVFLVLLPLVSSQCVNLTTRTQLPPAYTNSFTRGVYYPDKVFRSSVLHSTQDLFLPFFSNVTWFHAIHVSGTNGTKRFDNPVLPFNDGVYFASTEKSNIIRGWIFGTTLDSKTQSLLIVNNATNVVIKVCEFQFCNDPFLGVYYHKNNKSWMESEFRVYSSANNCTFEYVSQPFLMDLEGKQGNFKNLREFVFKNIDGYFNIYSKHTPINLVRDLPQGFSALEPLVDLPIGINITRFQTLLALHRSYLTPGDSSSGWTAGAAAYYVGYLQPRTFLLKYNENGTITDAVDCALDPLSETKCTLKSFTVEKGIYQTSNFRVQPTESIVRFPNITNLCPFGEVFNATRFASVYAWNRKRISNCVADYSVLYNSASFSTFKCYGVSPTKLNDLCFTNVYADSFVIRGDEVRQIAPGQTGKIADYNYKLPDDFTGCVIAWNSNNLDSKVGGNYNYLYRLFRKSNLKPFERDISTEIYQAGSTPCNGVEGFNCYFPLQSYGFQPTNGVGYQPYRVVVLSFELLHAPATVCGPKKSTNLVKNKCVNFNFNGLTGTGVLTESNKKFLPFQQFGRDIADTTDAVRDPQTLEILDITPCSFGGVSVITPGTNTSNQVAVLYQGVNCTEVPVAIHADQLTPTWRVYSTGSNVFQTRAGCLIGAEHVNNSYECDIPIGAGICASYQTQTNSPRRARSVASQSIIAYTMSLGAENSVAYSNNSIAIPTNFTISVTTEILPVSMTKTSVDCTMYICGDSTECSNLLLQYGSFCTQLNRALTGIAVEQDKNTQEVFAQVKQIYKTPPIKDFGGFNFSQILPDPSKPSKRSFIEDLLFNKVTLADAGFIKQYGDCLGDIAARDLICAQKFNGLTVLPPLLTDEMIAQYTSALLAGTITSGWTFGAGAALQIPFAMQMAYRFNGIGVTQNVLYENQKLIANQFNSAIGKIQDSLSSTASALGKLQDVVNQNAQALNTLVKQLSSNFGAISSVLNDILSRLDPPEAEVQIDRLITGRLQSLQTYVTQQLIRAAEIRASANLAATKMSECVLGQSKRVDFCGKGYHLMSFPQSAPHGVVFLHVTYVFAQEKNFTTAPAICHDGKAHFPREGVFVSNGTHWFVTQRNFYEPQIITTDNTFVSGNCDVVIGIVNNTVYDPLQPELDSFKEELDKYFKNHTSPDVDLGDISGINASVVNIQKEIDRLNEVAKNLNESLIDLQELGKYEQYIKWPWYIWLGFIAGLIAIVMVTIMLCCMTSCCSCLKGCCSCGSCCKFDEDDSEPVLKGVKLHYT

SEQ ID NO: 497 - protein, 1273 aa, Artificial Sequence
  SARS-CoV-2/Belgium/BA-02291/2020__EPI_ISL_415159 spike protein (1-1273)(K986P_V987P_P1069F)
MFVFLVLLPLVSSQCVNLTTRTQLPPAYTNSFTRGVYYPDKVFRSSVLHSTQDLFLPFFSNVTWFHAIHVSGTNGTKRFDNPVLPFNDGVYFASTEKSNIIRGWIFGTTLDSKTQSLLIVNNATNVVIKVCEFQFCNDPFLGVYYHKNNKSWMESEFRVYSSANNCTFEYVSQPFLMDLEGKQGNFKNLREFVFKNIDGYFKIYSKHTPINLVRDLPQGFSALEPLVDLPIGINITRFQTLLALHRSYLTPGDSSSGWTAGAAAYYVGYLQPRTFLLKYNENGTITDAVDCALDPLSETKCTLKSFTVEKGIYQTSNFRVQPTESIVRFPNITNLCPFGEVFNATRFASVYAWNRKRISNCVADYSVLYNSASFSTFKCYGVSPTKLNDLCFTNVYADSFVIRGDEVRQIAPGQTGKIADYNYKLPDDFTGCVIAWNSNNLDSKVGGNYNYLYRLFRRSNLKPFERDISTEIYQAGSTPCNGVEGFNCYFPLQSYGFQPTNGVGYQPYRVVVLSFELLPAPATVCGPKKSTNLVKNKCVNFNFNGLTGTGVLTESNKKFLPFQQFGRDIADTTDAVRDPQTLEILDITPCSFGGVSVITPGTNTSNQVAVLYQGVNCTEVPVAIHADQLTPTWRVYSTGSNVFQTRAGCLIGAEHVNNSYECDIPIGAGICASYQTQTNSPRRARSVASQSIIAYTMSLGAENSVAYSNNSIAIPTNFTISVTTEILPVSMTKTSVDCTMYICGDSTECSNLLLQYGSFCTQLNRALTGIAVEQDKNTQEVFAQVKQIYKTPPIKDFGGFNFSQILPDPSKPSKRSFIEDLLFNKVTLADAGFIKQYGDCLGDIAARDLICAQKFNGLTVLPPLLTDEMIAQYTSALLAGTITSGWTFGAGAALQIPFAMQMAYRFNGIGVTQNVLYENQKLIANQFNSAIGKIQDSLSSAAPALGKLQDVVNQNAQALNTLVKQLSSNFGAISSVLNDILSRLDPPEAEVQIDRLITGRLQSLQTYVTQQLIRAAEIRASANLAATKMSECVLGQSKRVDFCGKGYHLMSFPQSAPHGVVFLHVTYVFAQEKNFTTAPAICHDGKAHFPREGVFVSNGTHWFVTQRNFYEPQIITTDNTFVSGNCDVVIGIVNNTVYDPLQPELDSFKEELDKYFKNHTSPDVDLGDISGINASVVNIQKEIDRLNEVAKNLNESLIDLQELGKYEQYIKWPWYIWLGFIAGLIAIVMVTIMLCCMTSCCSCLKGCCSCGSCCKFDEDDSEPVLKGVKLHYT

SEQ ID NO: 498 - protein, 1273 aa, Artificial Sequence
  SARS-CoV-2/USA/WA8-UW5/2020__EPI_ISL_413486 spike protein (1-1273)(K986P_V987P_P1069F)
MFVFLVLLPLVSSQCVNLTTRTQLPPAYTNSFTRGVYYPDKVFRSSVLHSTQDLFLPFFSNVTWFHAIHVSGTNGTKRFDNPVLPFNDGVYFASTEKSNIIRGWIFGTTLDSKTQSLLIVNNATNVVIKVCEFQFCNDPFLGVYYHKNNKSWMESEFRVYSSANNCTFEYVSQPFLMDLEGKQGNFKNLREFVFKNIDGYFKIYSKHTPINLVRDLPQGFSALEPLVDLPIGINITRFQTLLALHRSYLTPGDSSSGWTAGAAAYYVGYLQPRTFLLKYNENGTITDAVDCALDPLSETKCTLKSFTVEKGIYQTSNFRVQPTESIVRFPNITNLCPFGEVFNATRFASVYAWNRKRISNCVADYSVLYNSASFSTFKCYGVSPTKLNDLCFTNVYADSFVIRGDEVRQIAPGQTGKIADYNYKLPDDFTGCVIAWNSNNLDSKVGGNYNYLYRLFRKSNLKPFERDISTEIYQAGSTPCNGVEGFNCYFPLQSYGFQPTNGVGYQPYRVVVLSFELLHAPATVCGPKKSTNLVKNKCVNFNFNGLTGTGVLTESNKKFLPFQQFGRDIADTTDAVRDPQTLEILDITPCSFGGVSVITPGTNTSNQVAVLYQDVNCTEVPVAIHADQLTPTWRVYSTGSNVFQTRAGCLIGAEYVNNSYECDIPIGAGICASYQTQTNSPRRARSVASQSIIAYTMSLGAENSVAYSNNSIAIPTNFTISVTTEILPVSMTKTSVDCTMYICGDSTECSNLLLQYGSFCTQLNRALTGIAVEQDKNTQEVFAQVKQIYKTPPIKDFGGFNFSQILPDPSKPSKRSFIEDLLFNKVTLADAGFIKQYGDCLGDIAARDLICAQKFNGLTVLPPLLTDEMIAQYTSALLAGTITSGWTFGAGAALQIPFAMQMAYRFNGIGVTQNVLYENQKLIANQFNSAIGKIQDSLSSTASALGKLQDVVNQNAQALNTLVKQLSSNFGAISSVLNDILSRLDPPEAEVQIDRLITGRLQSLQTYVTQQLIRAAEIRASANLAATKMSECVLGQSKRVDFCGKGYHLMSFPQSAPHGVVFLHVTYVFAQEKNFTTAPAICHDGKAHFPREGVFVSNGTHWFVTQRNFYEPQIITTDNTFVSGNCDVVIGIVNNTVYDPLQPELDSFKEELDKYFKNHTSPDVDLGDISGINASVVNIQKEIDRLNEVAKNLNESLIDLQELGKYEQYIKWPWYIWLGFIAGLIAIVMVTIMLCCMTSCCSCLKGCCSCGSCCKFDEDDSEPVLKGVKLHYT

SEQ ID NO: 499 - protein, 1273 aa, Artificial Sequence
  SARS-CoV-2/England/20102000506/2020__EPI_ISL_415147 spike protein (1-1273)(K986P_V987P_P1069F)
MFVFLVLLPLVSSQCVNLTTRTQLPPAYTNSFTRGVYYPDKVFRSSVLHSTQDLFLPFFSNVTWFHAIHVSGTNGTKRFDNPVLPFNDGVYFASTEKSNIIRGWIFGTTLDSKTQSLLIVNNATNVVIKVCEFQFCNDPFLGVYYHKNNKSWMESEFRVYSSANNCTFEYVSQPFLMDLEGKQGNFKNLREFVFKNIDGYFKIYSKHTPINLVRDLPQGFSALEPLVDLPIGINITRFQTLLALHRSYLTPGDSSSGWTAGAAAYYVGYLQPRTFLLKYNENGTITDAVDCALDPLSETKCTLKSFTVEKGIYQTSNFRVQPTESIVRFPNITNLCPFGEVFNATRFASVYAWNRKRISNCVADYSVLYNSASFSTFKCYGVSPTKLNDLCFTNVYADSFVIRGDEVRQIAPGQTGKIADYNYKLPDDFTGCVIAWNSNNLDSKVGGNYNYLYRLFRKSNLKPFERDISTEIYQAGSTPCNGVEGFNCYFPLQSYGFQPTNGVGYQPYRVVVLSFELLHAPATVCGPKKSTNLVKNKCVNFNFNGLTGTGVLTESNKKFLPFQQFGRDIADTTDAVRDPQTLEILDITPCSFGGVSVITPGTNTSNQVAVLYQGVNCTEVPVAIHADQLTPTWRVYSTGSNVFQTRAGCLIGAEHVNNSYECDIPIGAGICASYQTQTNSPRRARSVASQSIIAYTMSLGAENSVAYSNNSIAIPTNFTISVTTEILPVSMTKTSVDCTMYICGDSTECSNLLLQYGSFCTQLNRALTGIAVEQDKNTQEVFAQVKQIYKTPPIKDFGGFNFSQILPDPSKPSKRSFIEDLLFNKVTLADAGFIKQYGYCLGDIAARDLICAQKFNGLTVLPPLLTDEMIAQYTSALLAGTITSGWTFGAGAALQIPFAMQMAYRFNGIGVTQNVLYENQKLIANQFNSAIGKIQDSLSSTASALGKLQDVVNQNAQALNTLVKQLSSNFGAISSVLNDILSRLDPPEAEVQIDRLITGRLQSLQTYVTQQLIRAAEIRASANLAATKMSECVLGQSKRVDFCGKGYHLMSFPQSAPHGVVFLHVTYVFAQEKNFTTAPAICHDGKAHFPREGVFVSNGTHWFVTQRNFYEPQIITTDNTFVSGNCDVVIGIVNNTVYDPLQPELDSFKEELDKYFKNHTSPDVDLGDISGINASVVNIQKEIDRLNEVAKNLNESLIDLQELGKYEQYIKWPWYIWLGFIAGLIAIVMVTIMLCCMTSCCSCLKGCCSCGSCCKFDEDDSEPVLKGVKLHYT

SEQ ID NO: 500 - protein, 1273 aa, Artificial Sequence
  SARS-CoV-2/Belgium/VAG-03013/2020__EPI_ISL_415155 spike protein (1-1273)(K986P_V987P_P1069F)
MFVFLVLLPLVSSQCVNLTTRTQLPPAYTNSFTRGVYYPDKVFRSSVLHSTQDLFLPFFSNVTWFHAIHVSGTNGTKRFDNPVLPFNDGVYFASTEKSNIIRGWIFGTTLDSKTQSLLIVNNATNVVIKVCEFQFCNDPFLGVYYHKNNKSWMESEFRVYSSANNCTFEYVSQPFLMDLEGKQGNFKNLREFVFKNIDGYFKIYSKHTPINLVRDLPQGFSALEPLVDLPIGINITRFQTLLALHRSYLTPGDSSSGWTAGAAAYYVGYLQPRTFLLKYNENGTITDAVDCALDPLSETKCTLKSFTVEKGIYQTSNFRVQPTESIVRFPNITNLCPFGEVFNATRFASVYAWNRKRISNCVADYSVLYNSASFSTFKCYGVSPTKLNDLCFTNVYADSFVIRGDEVRQIAPGQTGKIADYNYKLPDDFTGCVIAWNSNNLDSKVGGNYNYLYRLFRKSNLKPFERDISTEIYQAGSTPCNGVEGFNCYFPLQSYGFQPTNGVGYQPYRVVVLSFELLHAPATVCGPKKSTNLVKNKCVNFNFNGLTGTGVLTESNKKFLPFQQFGRDIADTTDAVRDPQTLEILDITPCSFGGVSVITPGTNTSNQVAVLYQGVNCTEVPVAIHADQLTPTWRVYSTGSNVFQTRAGCLIGAEHVNNSYECDIPIGAGICASYQTQTNSPRRARSVASQSIIAYTMSLGAENSVAYSNNSIAIPTNFTISVTTEILPVSMTKTSVDCTMYICGDSTECSNLLLQYGSFCTQLNRALTGIAVEQDKNTQEVFAQVKQIYKTPPIKDFGGFNFSQILPDPSKPSKRSFIEDLLFNKVTLADAGFIKQYGDCLGDIAARDLICAQKFNGLTVLPPLLTDEMIAQYTSALLAGTITSGWTFGAGAALQIPFAMQMAYRFNGIGVTQNVLYENQKLIANQFNSAIGKIQDSLSSTATALGKLQDVVNQNAQALNTLVKQLSSNFGAISSVLNDILSRLDPPEAEVQIDRLITGRLQSLQTYVTQQLIRAAEIRASANLAATKMSECVLGQSKRVDFCGKGYHLMSFPQSAPHGVVFLHVTYVFAQEKNFTTAPAICHDGKAHFPREGVFVSNGTHWFVTQRNFYEPQIITTDNTFVSGNCDVVIGIVNNTVYDPLQPELDSFKEELDKYFKNHTSPDVDLGDISGINASVVNIQKEIDRLNEVAKNLNESLIDLQELGKYEQYIKWPWYIWLGFIAGLIAIVMVTIMLCCMTSCCSCLKGCCSCGSCCKFDEDDSEPVLKGVKLHYT

SEQ ID NO: 501 - protein, 1273 aa, Artificial Sequence
  SARS-CoV-2/Belgium/BC-03016/2020__EPI_ISL_415157 spike protein (1-1273)(K986P_V987P_P1069F)
MFVFLVLLPLVSSQCVNLTTRTQLPPAYTNSFTRGVYYPDKVFRSSVLHSTQDLFLPFFSNVTWFHAIHVSGTNGTKRFDNPVLPFNDGVYFASTEKSNIIRGWIFGTTLDSKTQSLLIVNNATNVVIKVCEFQFCNDPFLGVYYHKNNKSWMESEFRVYSSANNCTFEYVSQPFLMDLEGKQGNFKNLREFVFKNIDGYFKIYSKHTPINLVRDLPQGFSALEPLVDLPIGINITRFQTLLALHRSYLTPGDSSSGWTAGAAAYYVGYLQPRTFLLKYNENGTITDAVDCALDPLSETKCTLKSFTVEKGIYQTSNFRVQPTESIVRFPNITNLCPFGEVFNATRFASVYAWNRKRISNCVADYSVLYNSASFSTFKCYGVSPTKLNDLCFTNVYADSFVIRGDEVRQIAPGQTGKIADYNYKLPDDFTGCVIAWNSNNLDSKVGGNYNYLYRLFRKSNLKPFERDISTEIYQAGSTPCNGVEGFNCYFPLQSYGFQPTNGVGYQPYRVVVLSFELLHAPATVCGPKKSTNLVKNKCVNFNFNGLTGTGVLTESNKKFLPFQQFGRDIADTTDAVRDPQTLEILDITPCSFGGVSVITPGTNTSNQVAVLYQGVNCTEVPVAIHADQLTPTWRVYSTGSNVFQTRAGCLIGAEHVNNSYECDIPIGAGICASYQTQTNSPRRARSVASQSIIAYTMSLGAENSVAYSNNSIAIPTNFTISVTTEILPVSMTKTSVDCTMYICGDSTECSNLLLQYGSFCTQLNRALTGIAVEQDKNTQEVFAQVKQIYKTPPIKDFGGFNFSQILPDPSKPSKRSFIEDLLFNKVTLADAGFIKQYGDCLGDIAARDLICAQKFNGLTVLPPLLTDEMIAQYTSALLAGTITSGWTFGAGAALQIPFAMQMAYRFNGIGVTQNVLYENQKLIANQFNSAIGKIQDSLSSTAPALGKLQDVVNQNAQALNTLVKQLSSNFGAISSVLNDILSRLDPPEAEVQIDRLITGRLQSLQTYVTQQLIRAAEIRASANLAATKMSECVLGQSKRVDFCGKGYHLMSFPQSAPHGVVFLHVTYVFAQEKNFTTAPAICHDGKAHFPREGVFVSNGTHWFVTQRNFYEPQIITTDNTFVSGNCDVVIGIVNNTVYDPLQPELDSFKEELDKYFKNHTSPDVDLGDISGINASVVNIQKEIDRLNEVAKNLNESLIDLQELGKYEQYIKWPWYIWLGFIAGLIAIVMVTIMLCCMTSCCSCLKGCCSCGSCCKFDEDDSEPVLKGVKLHYT

SEQ ID NO: 502 - protein, 1273 aa, Artificial Sequence
  SARS-CoV-2/Germany/BavPat3/2020__EPI_ISL_414521 spike protein (1-1273)(K986P_V987P_P1069F)
MFVFLVLLPLVSSQCVNLTTRTQLPPAYTNSFTRGVYYPDKVFRSSVLHSTQDLFLPFFSNVTWFHAIHVSGTNGTKRFDNPVLPFNDGVYFASTEKSNIIRGWIFGTTLDSKTQSLLIVNNATNVVIKVCEFQFCNDPFLGVYYHKNNKSWMESEFRVYSSANNCTFEYVSQPFLMDLEGKQGNFKNLREFVFKNIDGYFKIYSKHTPINLVRDLPQGFSALEPLVDLPIGINITRFQTLLALHRSYLTPGDSSSGWTAGAAAYYVGYLQPRTFLLKYNENGTITDAVDCALDPLSETKCTLKSFTVEKGIYQTSNFRVQPTESIVRFPNITNLCPFGEVFNATRFASVYAWNRKRISNCVADYSVLYNSASFSTFKCYGVSPTKLNDLCFTNVYADSFVIRGDEVRQIAPGQTGKIADYNYKLPDDFTGCVIAWNSNNLDSKVGGNYNYLYRLFRKSNLKPFERDISTEIYQAGSTPCNGVEGFNCYFPLQSYGFQPTNGVGYQPYRVVVLSFELLHAPATVCGPKKSTNLVKNKCVNFNFNGLTGTGVLTESNKKFLPFQQFGRDIADTTDAVRDPQTLEILDITPCSFGGVSVITPGTNTSNQVAVLYQDVNCTEVPVAIHADQLTPTWRVYSTGSNVFQTRAGCLIGAEHVNNSYECDIPIGAGICASYQTQTNSPRRARSVASQSIIAYTMSLGAENSVAYSNNSIAIPTNFTISVTTEILPVSMTKTSVDCTMYICGDSTECSNLLLQYGSFCTQLNRALTGIAVEQDKNTQQVFAQVKQIYKTPPIKDFGGFNFSQILPDPSKPSKRSFIEDLLFNKVTLADAGFIKQYGDCLGDIAARDLICAQKFNGLTVLPPLLTDEMIAQYTSALLAGTITSGWTFGAGAALQIPFAMQMAYRFNGIGVTQNVLYENQKLIANQFNSAIGKIQDSLSSTASALGKLQDVVNQNAQALNTLVKQLSSNFGAISSVLNDILSRLDPPEAEVQIDRLITGRLQSLQTYVTQQLIRAAEIRASANLAATKMSECVLGQSKRVDFCGKGYHLMSFPQSAPHGVVFLHVTYVFAQEKNFTTAPAICHDGKAHFPREGVFVSNGTHWFVTQRNFYEPQIITTDNTFVSGNCDVVIGIVNNTVYDPLQPELDSFKEELDKYFKNHTSPDVDLGDISGINASVVNIQKEIDRLNEVAKNLNESLIDLQELGKYEQYIKWPWYIWLGFIAGLIAIVMVTIMLCCMTSCCSCLKGCCSCGSCCKFDEDDSEPVLKGVKLHYT

SEQ ID NO: 503 - protein, 1273 aa, Artificial Sequence
  SARS-CoV-2/France/HF1805/2020__EPI_ISL_414628 spike protein (1-1273)(K986P_V987P_P1069F)
MFVFLVLLPLVSSQCVNLTTRTQLPPAYTNSFTRGVYYPDKVFRSSVLHSTQDLFLPFFSNVTWFHAIHVSGTNGTKRFDNPVLPFNDGVYFASTEKSNIIRGWIFGTTLDSKTQSLLIVNNATNVVIKVCEFQFCNDPFLGVYYHKNNKSWMESEFRVYSSANNCTFEYVSQPFLMDLEGKQGNFKNLREFVFKNIDGYFKIYSKHTPINLVRDLPQGFSALEPLVDLPIGINITRFQTLLALHRSYLTPGDSSSGWTAGAAAYYVGYLQPRTFLLKYNENGTITDAVDCALDPLSETKCTLKSFTVEKGIYQTSNFRVQPTESIVRFPNITNLCPFGEVFNATRFASVYAWNRKRISNCVADYSVLYNSASFSTFKCYGVSPTKLNDLCFTNVYADSFVIRGDEVRQIAPGQTGKIADYNYKLPDDFTGCVIAWNSNNLDSKVGGNYNYLYRLFRKSNLKPFERDISTEIYQAGSTPCNGVEGFNCYFPLQSYGFQPTNGVGYQPYRVVVLSFELLHAPATVCGPKKSTNLVKNKCVNFNFNGLTGTGVLTESNKKFLPFQQFGRDIADTTDAVRDPQTLEILDITPCSFGGVSVITPGTNTSNQVAVLYQGVNCTEVPVAIHADQLTPTWRVYSTGSNVFQTRAGCLIGAEHVNNSYECDIPIGAGICASYQTQTNSPRRARSVASQSIIAYTMSLGAENSVAYSNNSIAIPTNFTISVTTEILPVSMTKTSVDCTMYICGDSTECSNLLLQYGSFCTQLNRALTGIAVEQDKNTQEVFAQVKQIYKTPPIKDFGGFNFSQILPDPSKPSKRSFIEDLLFNKVTLADAGFIKQYGDCLGDIAARDLICAQKFNGLTVLPPLLTDEMIAQYTSALLAGTITSGWTFGAGAALQIPFAMQMAYRFNGIGVTQNVLYENQKLIANQFNSAIGKIQDSLSSTASALGKLQDVVNQNAQALNTLVKQLSSNFGAISSVLNDILSRLDPPEAEVQIDRLITGRLQSLQTYVTQQLIRAAEIRASANLAATKMSECVLGQSKRVDFCGKGYHLMSFPQSAPHGVVFLHVTYVFAQEKNFTTAPAICHDGKAHFPREGVFVSNGTHWFVTQRNFYEPQIITTDNTFVSGNCDVVIGVVNNTVYDPLQPELDSFKEELDKYFKNHTSPDVDLGDISGINASVVNIQKEIDRLNEVAKNLNESLIDLQELGKYEQYIKWPWYIWLGFIAGLIAIVMVTIMLCCMTSCCSCLKGCCSCGSCCKFDEDDSEPVLKGVKLHYT

SEQ ID NO: 504 - protein, 1273 aa, Artificial Sequence
  SARS-CoV-2/Netherlands/ZuidHolland_9/2020__EPI_ISL_414445 spike protein (1-1273)(K986P_V987P_P1069F)
MFVFLVLLPLVSSQCVNLTTRTQLPPAYTNSFTRGVYYPDKVFRSSVLHSTQDLFLPFFSNVTWFHAIHVSGTNGTKRFDNPVLPFNDGVYFASTEKSNIIRGWIFGTTLDSKTQSLLIVNNATNVVIKVCEFQFCNDPFLGVYYHKNNKSWMESEFRVYSSANNCTFEYVSQPFLMDLEGKQGNFKNLREFVFKNIDGYFKIYSKHTPINLVRDLPQGFSALEPLVDLPIGINITRFQTLLALHRSYLTPGDSSSGWTAGAAAYYVGYLQPRTFLLKYNENGTITDAVDCALDPLSETKCTLKSFTVEKGIYQTSNFRVQPTESIVRFPNITNLCPFGEVFNATRFASVYAWNRKRISNCVADYSVLYNSASFSTFKCYGVSPTKLNDLCFTNVYADSFVIRGDEVRQIAPGQTGKIADYNYKLPDDFTGCVIAWNSNNLDSKVGGNYNYLYRLFRKSNLKPFERDISTEIYQAGSTPCNGVEGFNCYFPLQSYGFQPTNGVGYQPYRVVVLSFELLHAPATVCGPKKSTNLVKNKCVNFNFNGLTGTGVLTESNKKFLPFQQFGRDIADTTDAVRDPQTLEILDITPCSFGGVSVITPGTNTSNQVAVLYQGVNCTEVPVAIHADQLTPTWRVYSTGSNVFQTRAGCLIGAEHVNNSYECDIPIGAGICASYQTQTNSPRRARSVASQSIIAYTMSLGAENSVAYSNNSIAIPTNFTISVTTEILPVSMTKTSVDCTMYICGDSTECSNLLLQYGSFCTQLNRALTGIAVEQDKNTQEVFAQVKQIYKTPPIKDFGGFNFSQILPDPSKPSKRSFIEDLLFNKVTLADAGFIKQYGDCLGDIAARDLICVQKFNGLTVLPPLLTDEMIAQYTSALLAGTITSGWTFGAGAALQIPFAMQMAYRFNGIGVTQNVLYENQKLIANQFNSAIGKIQDSLSSTASALGKLQDVVNQNAQALNTLVKQLSSNFGAISSVLNDILSRLDPPEAEVQIDRLITGRLQSLQTYVTQQLIRAAEIRASANLAATKMSECVLGQSKRVDFCGKGYHLMSFPQSAPHGVVFLHVTYVFAQEKNFTTAPAICHDGKAHFPREGVFVSNGTHWFVTQRNFYEPQIITTDNTFVSGNCDVVIGIVNNTVYDPLQPELDSFKEELDKYFKNHTSPDVDLGDISGINASVVNIQKEIDRLNEVAKNLNESLIDLQELGKYEQYIKWPWYIWLGFIAGLIAIVMVTIMLCCMTSCCSCLKGCCSCGSCCKFDEDDSEPVLKGVKLHYT

SEQ ID NO: 505 - protein, 1273 aa, Artificial Sequence
  SARS-CoV-2/Finland/FIN03032020A/2020__EPI_ISL_413602 spike protein (1-1273)(K986P_V987P_P1069F)
MFVFLVLLPLVSSQCVNLTTRTQLPPAYTNSFTRGVYYPDKVFRSSVLHSTQDLFLPFFSNVTWFHAIHVSGTNGTKRFDNPVLPFNDGVYFASTEKSNIIRGWIFGTTLDSKTQSLLIVNNATNVVIKVCEFQFCNDPFLGVYYHKNNKSWMESEFRVYSSANNCTFEYVSQPFLMDLEGKQGNFKNLREFVFKNIDGYFKIYSKHTPINLVRDLPQGFSALEPLVDLPIGINITRFQTLLALHRSYLTPGDSSSGWTAGAAAYYVGYLQPRTFLLKYNENGTITDAVDCALDPLSETKCTLKSFTVEKGIYQTSNFRVQPTESIVRFPNITNLCPFGEVFNATRFASVYAWNRKRISNCVADYSVLYNSASFSTFKCYGVSPTKLNDLCFTNVYADSFVIRGDEVRQIAPGQTGKIADYNYKLPDDFTGCVISWNSNNLDSKVGGNYNYLYRLFRKSNLKPFERDISTEIYQAGSTPCNGVEGFNCYFPLQSYGFQPTNGVGYQPYRVVVLSFELLHAPATVCGPKKSTNLVKNKCVNFNFNGLTGTGVLTESNKKFLPFQQFGRDIADTTDAVRDPQTLEILDITPCSFGGVSVITPGTNTSNQVAVLYQGVNCTEVPVAIHADQLTPTWRVYSTGSNVFQTRAGCLIGAEHVNNSYECDIPIGAGICASYQTQTNSPRRARSVASQSIIAYTMSLGAENSVAYSNNSIAIPTNFTISVTTEILPVSMTKTSVDCTMYICGDSTECSNLLLQYGSFCTQLNRALTGIAVEQDKNTQEVFAQVKQIYKTPPIKDFGGFNFSQILPDPSKPSKRSFIEDLLFNKVTLADAGFIKQYGDCLGDIAARDLICAQKFNGLTVLPPLLTDEMIAQYTSALLAGTITSGWTFGAGAALQIPFAMQMAYRFNGIGVTQNVLYENQKLIANQFNSAIGKIQDSLSSTASALGKLQDVVNQNAQALNTLVKQLSSNFGAISSVLNDILSRLDPPEAEVQIDRLITGRLQSLQTYVTQQLIRAAEIRASANLAATKMSECVLGQSKRVDFCGKGYHLMSFPQSAPHGVVFLHVTYVFAQEKNFTTAPAICHDGKAHFPREGVFVSNGTHWFVTQRNFYEPQIITTDNTFVSGNCDVVIGIVNNTVYDPLQPELDSFKEELDKYFKNHTSPDVDLGDISGINASVVNIQKEIDRLNEVAKNLNESLIDLQELGKYEQYIKWPWYIWLGFIAGLIAIVMVTIMLCCMTSCCSCLKGCCSCGSCCKFDEDDSEPVLKGVKLHYT

SEQ ID NO: 506 - protein, 1273 aa, Artificial Sequence
  SARS-CoV-2/France/GE1977/2020__EPI_ISL_414632 spike protein (1-1273)(K986P_V987P_P1069F)
MFVFLVLLPLVSSQCVNLTTRTQLPPAYTNSFTRGVYYPDKVFRSSVLHSTQDLFLPFFSNVTWFHAIHVSGTNGTKRFDNPVLPFNDGVYFASTEKSNIIRGWIFGTTLDSKTQSLLIVNNATNVVIKVCEFQFCNDPFLGVYYHKNNKSWMESEFRVYSSANNCTFEYVSQPFLMDLEGKQGNFKNLREFVFKNIDGYFKIYSKHTPINLVRDLPQGFSALEPLVDLPIGINITRFQTLLALHRSYLTPGDSSSGWTAGAAAYYVGYLQPRTFLLKYNENGTITDAVDCALDPLSETKCTLKSFTVEKGIYQTSNFRVQPTESIVRFPNITNLCPFGEVFNATRFASVYAWNRKRISNCVADYSVLYNSASFSTFKCYGVSPTKLNDLCFTNVYADSFVIRGDEVRQIAPGQTGKIADYNYKLPDDFTGCVIAWNSNNLDSKVGGNYNYLYRLFRKSNLKPFERDISTEIYQAGSTPCNGVEGFNCYFPLQSYGFQPTNGVGYQPYRVVVLSFELLHAPATVCGPKKSTNLVKNKCVNFNFNGLTGTGVLTESNKKFLPFQQFGRDIADTTDAVRDPQTLEILDITPCSFGGVSVITPGTNTSNQVAVLYQGVNCTEVPVAIHADQLTPTWRVYSTGSNVFQTRAGCLIGAEHVNNSYECDIPIGAGICASYQTQTNSPRRARSVASQSIIAYTMSLGAENSVAYSNNSIAIPTNFTISVTTEILPVSMTKTSVDCTMYICGDSTECSNLLLQYGSFCTQLNRALTGIAVEQDKNTQEVFAQVKQIYKTPPIKDFGGFNFSQILPDPSKPSKRSFIEDLLFNKVTLADAGFIKQYGDCLGDIAARDLICAQKFNGLTVLPPLLTDEMIAQYTSALLAGTITSGWTFGAGAALQIPFAMQMAYRFNGIGVTQNVLYENQKLIANQFNSAIGKIQDSLFSTASALGKLQDVVNQNAQALNTLVKQLSSNFGAISSVLNDILSRLDPPEAEVQIDRLITGRLQSLQTYVTQQLIRAAEIRASANLAATKMSECVLGQSKRVDFCGKGYHLMSFPQSAPHGVVFLHVTYVFAQEKNFTTAPAICHDGKAHFPREGVFVSNGTHWFVTQRNFYEPQIITTDNTFVSGNCDVVIGIVNNTVYDPLQPELDSFKEELDKYFKNHTSPDVDLGDISGINASVVNIQKEIDRLNEVAKNLNESLIDLQELGKYEQYIKWPWYIWLGFIAGLIAIVMVTIMLCCMTSCCSCLKGCCSCGSCCKFDEDDSEPVLKGVKLHYT

SEQ ID NO: 507 - protein, 1273 aa, Artificial Sequence
  SARS-CoV-2/Finland/FIN-313/2020__EPI_ISL_414641 spike protein (1-1273)(K986P_V987P_P1069F)
MFVFLVLLPLVSSQCVNLTTRTQLPPAYTNSFTRGVYYPDKVFRSSVLHSTQDLFLPFFSNVTWFHAIHVSGTNGTKRFDNPVLPFNDGVYFASTEKSNIIRGWIFGTTLDSKTQSLLIVNNATNVVIKVCEFQFCNDPFLGVYYHKNNKSWMESEFRVYSSANNCTFEYVSQPFLMDLEGKQGNFKNLREFVFKNIDGYFKIYSKHTPINLVRDLPQGFSALEPLVDLPIGINITRFKTLLALHRSYLTPGDSSSGWTAGAAAYYVGYLQPRTFLLKYNENGTITDAVDCALDPLSETKCTLKSFTVEKGIYQTSNFRVQPTESIVRFPNITNLCPFGEVFNATRFASVYAWNRKRISNCVADYSVLYNSASFSTFKCYGVSPTKLNDLCFTNVYADSFVIRGDEVRQIAPGQTGKIADYNYKLPDDFTGCVIAWNSNNLDSKVGGNYNYLYRLFRKSNLKPFERDISTEIYQAGSTPCNGVEGFNCYFPLQSYGFQPTNGVGYQPYRVVVLSFELLHAPATVCGPKKSTNLVKNKCVNFNFNGLTGTGVLTESNKKFLPFQQFGRDIADTTDAVRDPQTLEILDITPCSFGGVSVITPGTNTSNQVAVLYQGVNCTEVPVAIHADQLTPTWRVYSTGSNVFQTRAGCLIGAEHVNNSYECDIPIGAGICASYQTQTNSPRRARSVASQSIIAYTMSLGAENSVAYSNNSIAIPTNFTISVTTEILPVSMTKTSVDCTMYICGDSTECSNLLLQYGSFCTQLNRALTGIAVEQDKNTQEVFAQVKQIYKTPPIKDFGGFNFSQILPDPSKPSKRSFIEDLLFNKVTLADAGFIKQYGDCLGDIAARDLICAQKFNGLTVLPPLLTDEMIAQYTSALLAGTITSGWTFGAGAALQIPFAMQMAYRFNGIGVTQNVLYENQKLIANQFNSAIGKIQDSLSSTASALGKLQDVVNQNAQALNTLVKQLSSNFGAISSVLNDILSRLDPPEAEVQIDRLITGRLQSLQTYVTQQLIRAAEIRASANLAATKMSECVLGQSKRVDFCGKGYHLMSFPQSAPHGVVFLHVTYVFAQEKNFTTAPAICHDGKAHFPREGVFVSNGTHWFVTQRNFYEPQIITTDNTFVSGNCDVVIGIVNNTVYDPLQPELDSFKEELDKYFKNHTSPDVDLGDISGINASVVNIQKEIDRLNEVAKNLNESLIDLQELGKYEQYIKWPWYIWLGFIAGLIAIVMVTIMLCCMTSCCSCLKGCCSCGSCCKFDEDDSEPVLKGVKLHYT

SEQ ID NO: 508 - protein, 1273 aa, Artificial Sequence
  SARS-CoV-2/Netherlands/ZuidHolland_2/2020__EPI_ISL_414556 spike protein (1-1273)(K986P_V987P_P1069F)
MFVFLVLLPLVSSQCVNLTTRTQLPPAYTNSFTRGVYYPDKVFRSSVLHSTQDLFLPFFSNVTWFHAIHVSGTNGTKRFDNPVLPFNDGVYFASTEKSNIIRGWIFGTTLDSKTQSLLIVNNATNVVIKVCEFQFCNDPFLGVYYHKNNKSWMESEFRVYSSANNCTFEYVSQPFLMDLEGKQGNFKNLREFVFKNIDGYFKIYSKHTPINLVRDLPQGFSALEPLVDLPIGINITRFQTLLALHRSYLTPGDSSSGWTAGAAAYYVGYLQPRTFLLKYNENGTITDAVDCALDPLSETKCTLKSFTVEKGIYQTSNFRVQPTESIVRFPNITNLCPFGEVFNATRFASVYAWNRKRISNCVADYSVLYNSASFSTFKCYGVSPTKLNDLCFTNVYADSFVIRGDEVRQIAPGQTGKIADYNYKLPDDFTGCVIAWNSNNLDSKVGGNYNYLYRLFRKSNLKPFERDISTEIYQAGSTPCNGVEGFNCYFPLQSYGFQPTNGVGYQPYRVVVLSFELLHAPATVCGPKKSTNLVKNKCVNFNFNGLTGTGVLTESNKKFLPFQQFGRDIADTTDAVRDPQTLEILDITPCSFGGVSVITPGTNTSNQVAVLYQGVNCTEVPVAIHADQLTPTWRVYSTGSNVFQTRAGCLIGAEHVNNSYECDIPIGAGICASYQTQTNSPRRARSVASQSIIAYTMSLGAENSVAYSNNSIAIPTNFTISVTTEILPVSMTKTSVDCTMYICGDSTECSNLLLQYGSFCTQLNRALTGIALEQDKNTQEVFAQVKQIYKTPPIKDFGGFNFSQILPDPSKPSKRSFIEDLLFNKVTLADAGFIKQYGDCLGDIAARDLICAQKFNGLTVLPPLLTDEMIAQYTSALLAGTITSGWTFGAGAALQIPFAMQMAYRFNGIGVTQNVLYENQKLIANQFNSAIGKIQDSLSSTASALGKLQDVVNQNAQALNTLVKQLSSNFGAISSVLNDILSRLDPPEAEVQIDRLITGRLQSLQTYVTQQLIRAAEIRASANLAATKMSECVLGQSKRVDFCGKGYHLMSFPQSAPHGVVFLHVTYVFAQEKNFTTAPAICHDGKAHFPREGVFVSNGTHWFVTQRNFYEPQIITTDNTFVSGNCDVVIGIVNNTVYDPLQPELDSFKEELDKYFKNHTSPDVDLGDISGINASVVNIQKEIDRLNEVAKNLNESLIDLQELGKYEQYIKWPWYIWLGFIAGLIAIVMVTIMLCCMTSCCSCLKGCCSCGSCCKFDEDDSEPVLKGVKLHYT

SEQ ID NO: 509 - protein, 1273 aa, Artificial Sequence
  SARS-CoV-2/USA/WA-UW31/2020__EPI_ISL_414618 spike protein (1-1273)(K986P_V987P_P1069F)
MFVFLVLLPLVSSQCVNLTTRTQLPPAYTNSFTRGVYYPDKVFRSSVLHSTQDLFLPFFSNVTWFHAIHVSGTNGTKRFDNPVLPFNDGVYFASTEKSNIIRGWIFGTTLDSKTQSLLIVNNATNVVIKVCEFQFCNDPFLGVYYHKNNKSWMESEFRVYSSANNCTFEYVSQPFLMDLEGKQGNFKNLREFVFKNIDGYFKIYSKHTPINLVRDLPQGFSALEPLVDLPIGINITRFQTLLALHRSYLTPGDSSSGWTAGAAAYYVGYLQPRTFLLKYNENGTITDAVDCALDPLSETKCTLKSFTVEKGIYQTSNFRVQPTESIVRFPNITNLCPFGEVFNATRFASVYAWNRKRISNCVADYSVLYNSASFSTFKCYGVSPTKLNDLCFTNVYADSFVIRGDEVRQIAPGQTGKIADYNYKLPDDFTGCVIAWNSNNLDSKVGGNYNYLYRLFRKSNLKPFERDISTEIYQAGSTPCNGAEGFNCYFPLQSYGFQPTNGVGYQPYRVVVLSFELLHAPATVCGPKKSTNLVKNKCVNFNFNGLTGTGVLTESNKKFLPFQQFGRDIADTTDAVRDPQTLEILDITPCSFGGVSVITPGTNTSNQVAVLYQDVNCTEVPVAIHADQLTPTWRVYSTGSNVFQTRAGCLIGAEHVNNSYECDIPIGAGICASYQTQTNSPRRARSVASQSIIAYTMSLGAENSVAYSNNSIAIPTNFTISVTTEILPVSMTKTSVDCTMYICGDSTECSNLLLQYGSFCTQLNRALTGIAVEQDKNTQEVFAQVKQIYKTPPIKDFGGFNFSQILPDPSKPSKRSFIEDLLFNKVTLADAGFIKQYGDCLGDIAARDLICAQKFNGLTVLPPLLTDEMIAQYTSALLAGTITSGWTFGAGAALQIPFAMQMAYRFNGIGVTQNVLYENQKLIANQFNSAIGKIQDSLSSTASALGKLQDVVNQNAQALNTLVKQLSSNFGAISSVLNDILSRLDPPEAEVQIDRLITGRLQSLQTYVTQQLIRAAEIRASANLAATKMSECVLGQSKRVDFCGKGYHLMSFPQSAPHGVVFLHVTYVFAQEKNFTTAPAICHDGKAHFPREGVFVSNGTHWFVTQRNFYEPQIITTDNTFVSGNCDVVIGIVNNTVYDPLQPELDSFKEELDKYFKNHTSPDVDLGDISGINASVVNIQKEIDRLNEVAKNLNESLIDLQELGKYEQYIKWPWYIWLGFIAGLIAIVMVTIMLCCMTSCCSCLKGCCSCGSCCKFDEDDSEPVLKGVKLHYT

SEQ ID NO: 510 - protein, 1273 aa, Artificial Sequence
  SARS-CoV-2/South Korea/SNU01/2020__EPI_ISL_411929 spike protein (1-1273)(K986P_V987P_P1069F)
MFVFLVLLPLVSSQCVNLTTRTQLPPAYTNSFTRGVYYPDKVFRSSVLHSTQDLFLPFFSNVTWFHAIHVSGTNGTKRFDNPVLPFNDGVYFASTEKSNIIRGWIFGTTLDSKTQSLLIVNNATNVVIKVCEFQFCNDPFLGVYYHKNNKSWMESEFRVYSSANNCTFEYVSQPFLMDLEGKQGNFKNLREFVFKNIDGYFKIYSKHTPINLVRDLPQGFWALEPLVDLPIGINITRFQTLLALHRSYLTPGDSSSGWTAGAAAYYVGYLQPRTFLLKYNENGTITDAVDCALDPLSETKCTLKSFTVEKGIYQTSNFRVQPTESIVRFPNITNLCPFGEVFNATRFASVYAWNRKRISNCVADYSVLYNSASFSTFKCYGVSPTKLNDLCFTNVYADSFVIRGDEVRQIAPGQTGKIADYNYKLPDDFTGCVIAWNSNNLDSKVGGNYNYLYRLFRKSNLKPFERDISTEIYQAGSTPCNGVEGFNCYFPLQSYGFQPTNGVGYQPYRVVVLSFELLHAPATVCGPKKSTNLVKNKCVNFNFNGLTGTGVLTESNKKFLPFQQFGRDIADTTDAVRDPQTLEILDITPCSFGGVSVITPGTNTSNQVAVLYQDVNCTEVPVAIHADQLTPTWRVYSTGSNVFQTRAGCLIGAEHVNNSYECDIPIGAGICASYQTQTNSPRRARSVASQSIIAYTMSLGAENSVAYSNNSIAIPTNFTISVTTEILPVSMTKTSVDCTMYICGDSTECSNLLLQYGSFCTQLNRALTGIAVEQDKNTQEVFAQVKQIYKTPPIKDFGGFNFSQILPDPSKPSKRSFIEDLLFNKVTLADAGFIKQYGDCLGDIAARDLICAQKFNGLTVLPPLLTDEMIAQYTSALLAGTITSGWTFGAGAALQIPFAMQMAYRFNGIGVTQNVLYENQKLIANQFNSAIGKIQDSLSSTASALGKLQDVVNQNAQALNTLVKQLSSNFGAISSVLNDILSRLDPPEAEVQIDRLITGRLQSLQTYVTQQLIRAAEIRASANLAATKMSECVLGQSKRVDFCGKGYHLMSFPQSAPHGVVFLHVTYVFAQEKNFTTAPAICHDGKAHFPREGVFVSNGTHWFVTQRNFYEPQIITTDNTFVSGNCDVVIGIVNNTVYDPLQPELDSFKEELDKYFKNHTSPDVDLGDISGINASVVNIQKEIDRLNEVAKNLNESLIDLQELGKYEQYIKWPWYIWLGFIAGLIAIVMVTIMLCCMTSCCSCLKGCCSCGSCCKFDEDDSEPVLKGVKLHYT

SEQ ID NO: 511 - protein, 1273 aa, Artificial Sequence
  SARS-CoV-2/China/WF0004/2020__EPI_ISL_413694 spike protein (1-1273)(K986P_V987P_P1069F)
MFVFLVLLPLVSSQCVNLTTRTQLPPAYTNSFTRGVYYPDKVFRSSVLHSTQDLFLPFFSNVTWFHAIHVSGTNGTKRFDNPVLPFNDGVYFASTEKSNIIRGWIFGTTLDSKTQSLLIVNNATNVVIKVCEFQFCNDPFLGVYYHKNNKSWTESEFRVYSSANNCTFEYVSQPFLMDLEGKQGNFKNLREFVFKNIDGYFKIYSKHTPINLVRDLPQGFSALEPLVDLPIGINITRFQTLLALHRSYLTPGDSSSGWTAGAAAYYVGYLQPRTFLLKYNENGTITDAVDCALDPLSETKCTLKSFTVEKGIYQTSNFRVQPTESIVRFPNITNLCPFGEVFNATRFASVYAWNRKRISNCVADYSVLYNSASFSTFKCYGVSPTKLNDLCFTNVYADSFVIRGDEVRQIAPGQTGKIADYNYKLPDDFTGCVIAWNSNNLDSKVGGNYNYLYRLFRKSNLKPFERDISTEIYQAGSTPCNGVEGFNCYFPLQSYGFQPTNGVGYQPYRVVVLSFELLHAPATVCGPKKSTNLVKNKCVNFNFNGLTGTGVLTESNKKFLPFQQFGRDIADTTDAVRDPQTLEILDITPCSFGGVSVITPGTNTSNQVAVLYQDVNCTEVPVAIHADQLTPTWRVYSTGSNVFQTRAGCLIGAEHVNNSYECDIPIGAGICASYQTQTNSPRRARSVASQSIIAYTMSLGAENSVAYSNNSIAIPTNFTISVTTEILPVSMTKTSVDCTMYICGDSTECSNLLLQYGSFCTQLNRALTGIAVEQDKNTQEVFAQVKQIYKTPPIKDFGGFNFSQILPDPSKPSKRSFIEDLLFNKVTLADAGFIKQYGDCLGDIAARDLICAQKFNGLTVLPPLLTDEMIAQYTSALLAGTITSGWTFGAGAALQIPFAMQMAYRFNGIGVTQNVLYENQKLIANQFNSAIGKIQDSLSSTASALGKLQDVVNQNAQALNTLVKQLSSNFGAISSVLNDILSRLDPPEAEVQIDRLITGRLQSLQTYVTQQLIRAAEIRASANLAATKMSECVLGQSKRFDFCGKGYHLMSFPQSAPHGVVFLHVTYVFAQEKNFTTAPAICHDGKAHFPREGVFVSNGTHWFVTQRNFYEPQIITTDNTFVSGNCDVVIGIVNNTVYDPLQPELDSFKEELDKYFKNHTSPDVDLGDISGINASVVNIQKEIDRLNEVAKNLNESLIDLQELGKYEQYIKWPWYIWLGFIAGLIAIVMVTIMLCCMTSCCSCLKGCCSCGSCCKFDEDDSEPVLKGVKLHYT

SEQ ID NO: 512 - protein, 1273 aa, Artificial Sequence
  SARS-CoV-2/China/WF0028/2020__EPI_ISL_413791 spike protein (1-1273)(K986P_V987P_P1069F)
MFVFLVLLPLVSSQCVNLTTRTQLPPAYTNSFTRGVYYPDKVFRSSVLHSTQDLFLPFFSNVTWFHAIHVSGTNGTKRFDNPVLPFNDGVYFASTEKSNIIRGWIFGTTLDSKTQSLLIVNNATNVVIKVCEFQFCNDPFLGVYYHKNNKSWMESEFRVYSSANNCTFEYVSQPFLMDLEGKQGNFKNLREFVFKNIDGYFKIYSKHTPINLVRDLPQGFSALEPLVDLPIGINITRFQTLLALHRSYLTPGDSSSGWTAGAAAYYVGYLQPRTFLLKYNENGTITDAVDCALDPLSETKCTLKSFTVEKGIYQTSNFRVQPTESIVRFPNITNLCPFGEVFNATRFASVYAWNRKRISNCVADYSVLYNSASFSTFKCYGVSPTKLNDLCFTNVYADSFVIRGDEVRQIAPGQTGKIADYNYKLPDDFTGCVIAWNSNNLDSKVGGNYNYLYRLFRKSNLKPFERDISTEIYQAGSTPCNGVEGFNCYFPLQSYGFQPTNGVGYQPYRVVVLSFELLHAPATVCGPKKSTNLVKNKCVNFNFNGLTGTGVLTESNKKFLPFQQFGRDIADTTDAVRDPQTLEILDITPCSFGGVSVITPGTNTSNQVAVLYQDVNCTEVPVAIHADQLTPTWRVYSTGSNVFQTRAGCLIGAEHVNNSYECDIPIGAGICASYQTQTNSPRRARSVASQSIIAYTMSLGAENSVAYSNNSIAIPTNFTISVTTEILPVSMTKTSVDCTMYICGDSTECSNLLLQYGSFCTQLNRALTGIAVEQDKNTQEVFAQVKQIYKTPPIKDFGGFNFSQILPDPSKPSKRSFIEDLLFNKVTLADAGFIKQYGDCLGDIAARDLICAQKFNGLTVLPPLLTDEMIAQYTSALLAGTITSGWTFGAGAALQIPFAMQMAYRFNGIGVTQNVLYENQKLIANQFNSAIGKIQDSLSSTASALGKLQDVVNQNAQALNTLVKQLSSNFGAISSVLNDILSRLDPPEAEVQIDRLITGRLQSLQTYVTQQLIRAAEIRASANLAATKMSECVLGQSKRVDFCGKGYHLMSFPQSAPHGVVFLHVTYVFAQEKNFTTAPAICHDGKAHFPREGVFVSNGTHWFVTQRNFYEPQIITTDNTFVSGNCDVVIGIVNNTVYDPLQPELESFKEELDKYFKNHTSPDVDLGDISGINASVVNIQKEIDRLNEVAKNLNESLIDLQELGKYEQYIKWPWYIWLGFIAGLIAIVMVTIMLCCMTSCCSCLKGCCSCGSCCKFDEDDSEPVLKGVKLHYT

SEQ ID NO: 513 - protein, 1273 aa, Artificial Sequence
  SARS-CoV-2/2019-nCoV/USA-CruiseA-18/2020__MT159716.1 spike protein (1-1273)(K986P_V987P_P1069F)
MFVFLVLLPLVSSQCVNLTTRTQLPPAYTNSFTRGVYYPDKVFRSSVLHSTQDLFLPFFSNVTWFHAIHVSGTNGTKRFDNPVLPFNDGVYFASTEKSNIIRGWIFGTTLDSKTQSLLIVNNATNVVIKVCEFQFCNDPFLGVYYHKNNKSWMESELRVYSSANNCTFEYVSQPFLMDLEGKQGNFKNLREFVFKNIDGYFKIYSKHTPINLVRDLPQGFSALEPLVDLPIGINITRFQTLLALHRSYLTPGDSSSGWTAGAAAYYVGYLQPRTFLLKYNENGTITDAVDCALDPLSETKCTLKSFTVEKGIYQTSNFRVQPTESIVRFPNITNLCPFGEVFNATRFASVYAWNRKRISNCVADYSVLYNSASFSTFKCYGVSPTKLNDLCFTNVYADSFVIRGDEVRQIAPGQTGKIADYNYKLPDDFTGCVIAWNSNNLDSKVGGNYNYLYRLFRKSNLKPFERDISTEIYQAGSTPCNGVEGFNCYFPLQSYGFQPTNGVGYQPYRVVVLSFELLHAPATVCGPKKSTNLVKNKCVNFNFNGLTGTGVLTESNKKFLPFQQFGRDIADTTDAVRDPQTLEILDITPCSFGGVSVITPGTNTSNQVAVLYQDVNCTEVPVAIHADQLTPTWRVYSTGSNVFQTRAGCLIGAEHVNNSYECDIPIGAGICASYQTQTNSPRRARSVASQSIIAYTMSLGAENSVAYSNNSIAIPTNFTISVTTEILPVSMTKTSVDCTMYICGDSTECSNLLLQYGSFCTQLNRALTGIAVEQDKNTQEVFAQVKQIYKTPPIKDFGGFNFSQILPDPSKPSKRSFIEDLLFNKVTLADAGFIKQYGDCLGDIAARDLICAQKFNGLTVLPPLLTDEMIAQYTSALLAGTITSGWTFGAGAALQIPFAMQMAYRFNGIGVTQNVLYENQKLIANQFNSAIGKIQDSLSSTASALGKLQDVVNQNAQALNTLVKQLSSNFGAISSVLNDILSRLDPPEAEVQIDRLITGRLQSLQTYVTQQLIRAAEIRASANLAATKMSECVLGQSKRVDFCGKGYHLMSFPQSAPHGVVFLHVTYVFAQEKNFTTAPAICHDGKAHFPREGVFVSNGTHWFVTQRNFYEPQIITTDNTFVSGNCDVVIGIVNNTVYDPLQPELDSFKEELDKYFKNHTSPDVDLGDISGINASVVNIQKEIDRLNEVAKNLNESLIDLQELGKYEQYIKWPWYIWLGFIAGLIAIVMVTIMLCCMTSCCSCLKGCCSCGSCCKFDEDDSEPVLKGVKLHYT

SEQ ID NO: 514 - protein, 1273 aa, Artificial Sequence
  SARS-CoV-2/SARS-CoV-2/Yunnan-01/human/2020/CHN__MT049951.1 spike protein (1-1273)(K986P_V987P_P1069F)
MFVFLVLLPLVSSQCVNLTTRTQLPPANTNSFTRGVYYPDKVFRSSVLHSTQDLFLPFFSNVTWFHAIHVSGTNGTKRFDNPVLPFNDGVYFASTEKSNIIRGWIFGTTLDSKTQSLLIVNNATNVVIKVCEFQFCNDPFLGVYYHKNNKSWMESEFRVYSSANNCTFEYVSQPFLMDLEGKQGNFKNLREFVFKNIDGYFKIYSKHTPINLVRDLPQGFSALEPLVDLPIGINITRFQTLLALHRSYLTPGDSSSGWTAGAAAYYVGYLQPRTFLLKYNENGTITDAVDCALDPLSETKCTLKSFTVEKGIYQTSNFRVQPTESIVRFPNITNLCPFGEVFNATRFASVYAWNRKRISNCVADYSVLYNSASFSTFKCYGVSPTKLNDLCFTNVYADSFVIRGDEVRQIAPGQTGKIADYNYKLPDDFTGCVIAWNSNNLDSKVGGNYNYLYRLFRKSNLKPFERDISTEIYQAGSTPCNGVEGFNCYFPLQSYGFQPTNGVGYQPYRVVVLSFELLHAPATVCGPKKSTNLVKNKCVNFNFNGLTGTGVLTESNKKFLPFQQFGRDIADTTDAVRDPQTLEILDITPCSFGGVSVITPGTNTSNQVAVLYQDVNCTEVPVAIHADQLTPTWRVYSTGSNVFQTRAGCLIGAEHVNNSYECDIPIGAGICASYQTQTNSPRRARSVASQSIIAYTMSLGAENSVAYSNNSIAIPTNFTISVTTEILPVSMTKTSVDCTMYICGDSTECSNLLLQYGSFCTQLNRALTGIAVEQDKNTQEVFAQVKQIYKTPPIKDFGGFNFSQILPDPSKPSKRSFIEDLLFNKVTLADAGFIKQYGDCLGDIAARDLICAQKFNGLTVLPPLLTDEMIAQYTSALLAGTITSGWTFGAGAALQIPFAMQMAYRFNGIGVTQNVLYENQKLIANQFNSAIGKIQDSLSSTASALGKLQDVVNQNAQALNTLVKQLSSNFGAISSVLNDILSRLDPPEAEVQIDRLITGRLQSLQTYVTQQLIRAAEIRASANLAATKMSECVLGQSKRVDFCGKGYHLMSFPQSAPHGVVFLHVTYVFAQEKNFTTAPAICHDGKAHFPREGVFVSNGTHWFVTQRNFYEPQIITTDNTFVSGNCDVVIGIVNNTVYDPLQPELDSFKEELDKYFKNHTSPDVDLGDISGINASVVNIQKEIDRLNEVAKNLNESLIDLQELGKYEQYIKWPWYIWLGFIAGLIAIVMVTIMLCCMTSCCSCLKGCCSCGSCCKFDEDDSEPVLKGVKLHYT

SEQ ID NO: 515 - protein, 1273 aa, Artificial Sequence
  SARS-CoV-2/USA/WA-UW292/2020__EPI_ISL_418077 spike protein (1-1273)(K986P_V987P_P1069F)
MFVFLVLLPLVSSQCVNLTTRTQLPPAYTNSFTRGVYYPDKVFRSSVLHSTQDLFLPFFSNVTWFHAIHVSGTNGTKRFDNPVLPFNDGVYFASTEKSNIIRGWIFGTTLDSKTQSLLIVNNATNVVIKVCEFQFCNDPFLGVYYHKNNKSWMESEFRVYSSANNCTFEYVSQPFLMDLEGKQGNFKNLREFVFKNIDGYFKIYSKHTPINLVRDLPQGFSALEPLVDLPIGINITRFQTLLALHRSYLTPGDSSSGWTAGAAAYYVGYLQPRTFLLKYNENGTITDAVDCALDPLSETKCTLKSFTVEKGIYQTSNFRVQPTESIVRFPNITNLCPFGEVFNATRFASVYAWNRKRISNCVADYSVLYNSASFSTFKCYGVSPTKLNDLCFTNVYADSFVIRGDEVRQIAPGQTGKIADYNYKLPDDFTGCVIAWNSNNLDSKVGGNYNYLYRLFRKSNLKPFERDISTEIYQASSTPCNGVEGFNCYFPLQSYGFQPTNGVGYQPYRVVVLSFELLHAPATVCGPKKSTNLVKNKCVNFNFNGLTGTGVLTESNKKFLPFQQFGRDIADTTDAVRDPQTLEILDITPCSFGGVSVITPGTNTSNQVAVLYQDVNCTEVPVAIHADQLTPTWRVYSTGSNVFQTRAGCLIGAEHVNNSYECDIPIGAGICASYQTQTNSPRRARSVASQSIIAYTMSLGAENSVAYSNNSIAIPTNFTISVTTEILPVSMTKTSVDCTMYICGDSTECSNLLLQYGSFCTQLNRALTGIAVEQDKNTQEVFAQVKQIYKTPPIKDFGGFNFSQILPDPSKPSKRSFIEDLLFNKVTLADAGFIKQYGDCLGDIAARDLICAQKFNGLTVLPPLLTDEMIAQYTSALLAGTITSGWTFGAGAALQIPFAMQMAYRFNGIGVTQNVLYENQKLIANQFNSAIGKIQDSLSSTASALGKLQDVVNQNAQALNTLVKQLSSNFGAISSVLNDILSRLDPPEAEVQIDRLITGRLQSLQTYVTQQLIRAAEIRASANLAATKMSECVLGQSKRVDFCGKGYHLMSFPQSAPHGVVFLHVTYVFAQEKNFTTAPAICHDGKAHFPREGVFVSNGTHWFVTQRNFYEPQIITTDNTFVSGNCDVVIGIVNNTVYDPLQPELDSFKEELDKYFKNHTSPDVDLGDISGINASVVNIQKEIDRLNEVAKNLNESLIDLQELGKYEQYIKWPWYIWLGFIAGLIAIVMVTIMLCCMTSCCSCLKGCCSCGSCCKFDEDDSEPVLKGVKLHYT

SEQ ID NO: 516 - protein, 1273 aa, Artificial Sequence
  SARS-CoV-2/Iceland/192/2020__EPI_ISL_417819 spike protein (1-1273)(K986P_V987P_P1069F)
MFVFFVLLPLVSSQCVNLTTRTQLPPAYTNSFTRGVYYPDKVFRSSVLHSTQDLFLPFFSNVTWFHAIHVSGTNGTKRFDNPVLPFNDGVYFASTEKSNIIRGWIFGTTLDSKTQSLLIVNNATNVVIKVCEFQFCNDPFLGVYYHKNNKSWMESEFRVYSSANNCTFEYVSQPFLMDLEGKQGNFKNLREFVFKNIDGYFKIYSKHTPINLVRDLPQGFSALEPLVDLPIGINITRFQTLLALHRSYLTPGDSSSGWTAGAAAYYVGYLQPRTFLLKYNENGTITDAVDCALDPLSETKCTLKSFTVEKGIYQTSNFRVQPTESIVRFPNITNLCPFGEVFNATRFASVYAWNRKRISNCVADYSVLYNSASFSTFKCYGVSPTKLNDLCFTNVYADSFVIRGDEVRQIAPGQTGKIADYNYKLPDDFTGCVIAWNSNNLDSKVGGNYNYLYRLFRKSNLKPFERDISTEIYQAGSTPCNGVEGFNCYFPLQSYGFQPTNGVGYQPYRVVVLSFELLHAPATVCGPKKSTNLVKNKCVNFNFNGLTGTGVLTESNKKFLPFQQFGRDIADTTDAVRDPQTLEILDITPCSFGGVSVITPGTNTSNQVAVLYQGVNCTEVPVAIHADQLTPTWRVYSTGSNVFQTRAGCLIGAEHVNNSYECDIPIGAGICASYQTQTNSPRRARSVASQSIIAYTMSLGAENSVAYSNNSIAIPTNFTISVTTEILPVSMTKTSVDCTMYICGDSTECSNLLLQYGSFCTQLNRALTGIAVEQDKNTQEVFAQVKQIYKTPPIKDFGGFNFSQILPDPSKPSKRSFIEDLLFNKVTLADAGFIKQYGDCLGDIAARDLICAQKFNGLTVLPPLLTDEMIAQYTSALLAGTITSGWTFGAGAALQIPFAMQMAYRFNGIGVTQNVLYENQKLIANQFNSAIGKIQDSLSSTASALGKLQDVVNQNAQALNTLVKQLSSNFGAISSVLNDILSRLDPPEAEVQIDRLITGRLQSLQTYVTQQLIRAAEIRASANLAATKMSECVLGQSKRVDFCGKGYHLMSFPQSAPHGVVFLHVTYVFAQEKNFTTAPAICHDGKAHFPREGVFVSNGTHWFVTQRNFYEPQIITTDNTFVSGNCDVVIGIVNNTVYDPLQPELDSFKEELDKYFKNHTSPDVDLGDISGINASVVNIQKEIDRLNEVAKNLNESLIDLQELGKYEQYIKWPWYIWLGFIAGLIAIVMVTIMLCCMTSCCSCLKGCCSCGSCCKFDEDDSEPVLKGVKLHYT

SEQ ID NO: 517 - protein, 1273 aa, Artificial Sequence
  SARS-CoV-2/Belgium/ULG-6939/2020__EPI_ISL_417020 spike protein (1-1273)(K986P_V987P_P1069F)
MFVFLVLLPLVSSQCVNLTTRTQLPPAYTNSFTRGVYYPDKVFRSSVLHSTQDLFLPFFSNVTWFHAIHVSGTNGTKRFDNPVLPFNDGVYFASTEKSNIIRGWIFGTTLDSKTQSLLIVNNATNVVIKVCEFQFCNDPFLGVYYHKNNKSWMESEFRVYSSANNCTFEYVSQPFLMDLEGKQGNFKNLREFVFKNIDGYFKIYSKHTPINLVRDLPQGFSALEPLVDLPIGINITRFQTLLALHRSYLTPGDSSSGWTAGAAAYYVGYLQPRTFLLKYNENGTITDAVDCALDPLSETKCTLKSFTVEKGIYQTSNFRVQPTESIVRFPNITNLCPFGEVFNATRFASVYAWNRKRISNCVADYSVLYNSASFSTFKCYGVSPTKLNDLCFTNVYADSFVIRGDEVRQIAPGQTGKIADYNYKLPDDFTGCVIAWNSNNLDSKVGGNYNYLYRLFRKSNLKPFERDISTEIYQAGSTPCNGVEGFNCYFPLQSYGFQPTNGVGYQPYRVVVLSFELLHAPATVCGPKKSTNLVKNKCVNFNFNGLTGTGVLTESNKKFLPFQQFGRDIADTTDAVRDPQTLEILDITPCSFGGVSVITPGTNTSNQVAVLYQGVNCTEVPVAIHADQLTPTWRVYSTGSNVFQTRAGCLIGAEHVNNSYECDIPIGAGICASYQTQTNSPRRARSVASQSIIAYTMSLGAENSVVYSNNSIAIPTNFTISVTTEILPVSMTKTSVDCTMYICGDSTECSNLLLQYGSFCTQLNRALTGIAVEQDKNTQEVFAQVKQIYKTPPIKDFGGFNFSQILPDPSKPSKRSFIEDLLFNKVTLADAGFIKQYGDCLGDIAARDLICAQKFNGLTVLPPLLTDEMIAQYTSALLAGTITSGWTFGAGAALQIPFAMQMAYRFNGIGVTQNVLYENQKLIANQFNSAIGKIQDSLSSTASALGKLQDVVNQNAQALNTLVKQLSSNFGAISSVLNDILSRLDPPEAEVQIDRLITGRLQSLQTYVTQQLIRAAEIRASANLAATKMSECVLGQSKRVDFCGKGYHLMSFPQSAPHGVVFLHVTYVFAQEKNFTTAPAICHDGKAHFPREGVFVSNGTHWFVTQRNFYEPQIITTDNTFVSGNCDVVIGIVNNTVYDPLQPELDSFKEELDKYFKNHTSPDVDLGDISGINASVVNIQKEIDRLNEVAKNLNESLIDLQELGKYEQYIKWPWYIWLGFIAGLIAIVMVTIMLCCMTSCCSCLKGCCSCGSCCKFDEDDSEPVLKGVKLHYT

SEQ ID NO: 518 - protein, 1273 aa, Artificial Sequence
  SARS-CoV-2/France/HF2496/2020__EPI_ISL_418231 spike protein (1-1273)(K986P_V987P_P1069F)
MFVFLVLLPLVSSQCVNLTTRTQLPPAYTNSFTRGVYYPDKVFRSSVLHSTQDLFLPFFSNVTWFHAIHVSGTNGTKRFDNPVLPFNDGVYFASTEKSNIIRGWIFGTTLDSKTQSLLIVNNATNVVIKVCEFQFCNDPFLGVYYHKNNKSWMESEFRVYSSANNCTFEYVSQPFLMDLEGKQGNFKNLREFVFKNIDGYFKIYSKHTPINLVRDLPQGFSALEPLVDLPIGINITRFQTLLALHRSYLTPGDSSSGWTAGAAAYYVGYLQPRTFLLKYNENGTITDAVDCALDPLSETKCTLKSFTVEKGIYQTSNFRVQPTESIVRFPNITNLCPFGEVFNATRFASVYAWNRKRISNCVADYSVLYNSASFSTFKCYGVSPTKLNDLCFTNVYADSFVIRGDEVRQIAPGQTGKIADYNYKLPDDFTGCVIAWNSNNLDSKVGGNYNYLYRLFRKSNLKPFERDISTEIYQAGSTPCNGVEGFNCYFPLQSYGFQPTNGVGYQPYRVVVLSFELLHAPATVCGPKKSTNLVKNKCVNFNFNGLTGTGVLTESNKKFLPFQQFGRDIADTTDAVRDPQTLEILDITPCSFGGVSVITPGTNTSNQVAVLYQGVNCTEVPVAIHADQLTPTWRVYSTGSNVFQTRAGCLIGAEHVNNSYECDIPIGAGICASYQTQTNSPRRARSVASQSIIAYTMSLGAENSVAYSNNSIAIPTNFTISVTTEILPVSMTKTSVDCTMYICGDSTECSNLLLQYGSFCTQLNRALTGIAVEQDKNTQEVFAQVKQIYKTPPIKDFGGFNFSQILPDPSKPSKRSFIEDLLFNKVTLADAGFIKQYGDCLGDIVARDLICAQKFNGLTVLPPLLTDEMIAQYTSALLAGTITSGWTFGAGAALQIPFAMQMAYRFNGIGVTQNVLYENQKLIANQFNSAIGKIQDSLSSTASALGKLQDVVNQNAQALNTLVKQLSSNFGAISSVLNDILSRLDPPEAEVQIDRLITGRLQSLQTYVTQQLIRAAEIRASANLAATKMSECVLGQSKRVDFCGKGYHLMSFPQSAPHGVVFLHVTYVFAQEKNFTTAPAICHDGKAHFPREGVFVSNGTHWFVTQRNFYEPQIITTDNTFVSGNCDVVIGIVNNTVYDPLQPELDSFKEELDKYFKNHTSPDVDLGDISGINASVVNIQKEIDRLNEVAKNLNESLIDLQELGKYEQYIKWPWYIWLGFIAGLIAIVMVTIMLCCMTSCCSCLKGCCSCGSCCKFDEDDSEPVLKGVKLHYT

SEQ ID NO: 519 - protein, 1273 aa, Artificial Sequence
  SARS-CoV-2/USA/WA-UW291/2020__EPI_ISL_418076 spike protein (1-1273)(K986P_V987P_P1069F)
MFVFLVLLPLVSSQCVNLTTRTQLPPAYTNSFTRGVYYPDKVFRSSVLHSTQDLFLPFFSNVTWFHAIHVSGTNGTKRFDNPVLPFNDGVYFASTEKSNIIRGWIFGTTLDSKTQSLLIVNNATNVVIKVCEFQFCNDPFLGVYYHKNNKSWMESEFRVYSSANNCTFEYVSQPFLMDLEGKQGNFKNLREFVFKNIDGYFKIYSKHTPINLVRDLPQGFSALEPLVDLPIGINITRFQTLLALHRSYLTPGDSSSGWTAGAAAYYVGYLQPRTFLLKYNENGTITDAVDCALDPLSETKCTLKSFTVEKGIYQTSNFRVQPTESIVRFPNITNLCPFGEVFNATRFASVYAWNRKRISNCVADYSVLYNSASFSTFKCYGVSPTKLNDLCFTNVYADSFVIRGDEVRQIAPGQTGKIADYNYKLPDDFTGCVIAWNSNNLDSKVGGNYNYLYRLFRKSNLKPFERDISTEIYQAGSTPCNGVEGFNCYFPLQSYGFQPTNGVGYQPYRVVVLSFELLHAPATVCGPKKSTNLVKNKCVNFNFNGLTGTGVLTESNKKFLPFQQFGRDIADTTDAVRDPQTLEILDITPCSFGGVSVITPGTNTSNQVAVLYQGVNCTEVPVAIHADQLTPTWRVYSTGSNVFQTRAGCLIGAEHVNNSYECDIPIGAGICASYQTQTNSPRRARSVASQSIIAYTMSLGAENSVAYSNNSIAIPTNFTISVTTEILPVSMTKTSVDCTMYICGDSTECSNLLLQYGSFCTQLNRALTGIAVEQDKNTQEVFAQVKQIYKTPPIKDFGGFNFSQILPDPSKPSKRSFIEDLLFNKVTLADAGFIKQYGDCLGDIAARDLICAQKFNGLTVLPPLLTDEMIAQYTSALLAGTITSGWTFGAGAALQIPFAMQMAYRFNGIGVTQNVLYENQKLIANQFNSAIGKIQYSLSSTASALGKLQDVVNQNAQALNTLVKQLSSNFGAISSVLNDILSRLDPPEAEVQIDRLITGRLQSLQTYVTQQLIRAAEIRASANLAATKMSECVLGQSKRVDFCGKGYHLMSFPQSAPHGVVFLHVTYVFAQEKNFTTAPAICHDGKAHFPREGVFVSNGTHWFVTQRNFYEPQIITTDNTFVSGNCDVVIGIVNNTVYDPLQPELDSFKEELDKYFKNHTSPDVDLGDISGINASVVNIQKEIDRLNEVAKNLNESLIDLQELGKYEQYIKWPWYIWLGFIAGLIAIVMVTIMLCCMTSCCSCLKGCCSCGSCCKFDEDDSEPVLKGVKLHYT

SEQ ID NO: 520 - protein, 1273 aa, Artificial Sequence
  SARS-CoV-2/Portugal/PT0034/2020__EPI_ISL_418019 spike protein (1-1273)(K986P_V987P_P1069F)
MFVFLVLLPLVSSQCVNLTTRTQLPPAYTNSFTRGVYYPDKVFRSSVLHSTQDLFLPFFSNVTWFHAIHVSGTNGTKRFDNPVLPFNDGVYFASTEKSNIIRGWIFGTTLDSKTQSLLIVNNATNVVIKVCEFQFCNDPFLGVYYHKNNKSWMESEFRVYSSANNCTFEYVSQPFLMDLEGKQGNFKNLREFVFKNIDGYFKIYSKHTPINLVRDLPQGFSALEPLVDLPIGINITRFQTLLALHRSYLTPGDSSSGWTAGAAAYYVGYLQPRTFLLKYNENGTITDAVDCALDPLSETKCTLKSFTVEKGIYQTSNFRVQPTESIVRFPNITNLCPFGEVFNATRFASVYAWNRKRISNCVADYSVLYNSASFSTFKCYGVSPTKLNDLCFTNVYADSFVIRGDEVRQIAPGQTGKIADYNYKLPDDFTGCVIAWNSNNLDSKVGGNYNYLYRLFRKSNLKPFERDISTEIYQAGSTPCNGVEGFNCYFPLQSYGFQPTNGVGYQPYRVVVLSFELLHAPATVCGPKKSTNLVKNKCVNFNFNGLTGTGVLTESNKKFLPFQQFGRDIADTTDAVRDPQTLEILDITPCSFGGVSVITPGTNTSNQVAVLYQGVNCTEVPVAIHADQLTPTWRVYSTGSNVFQTRAGCLIGAEHVNNSYECDIPIGAGICASYQTQTNSPRRARSVASQSIIAYTMSLGAENSVAYSNNSIAIPTNFTISVTTEILPVSMTKTSVDCTMYICGDSTECSNLLLQYGSFCTQLNRALTGIAVEQDKNTQEVFAQVKQIYKTPPIKDFGGFNFSQILPDPSKPSKRSFIEDLLFNKVTLADAGFIKQYGDCLGDIAARDLICAQKFNGLTVLPPLLTDEMIAQYTSALLAGTITSGWTFGAGAALQIPFAMQMAYRFNGIGVTQNVLYENQKLIANQFNSAIGKIQDSLSSTASALGKLQDVVNQNAQALNTLVKQLSSNFGAISSVLNDILSRLDPPEAEVQIDRLITGRLQSLQTYVTQQLIRAAEIRASANLAATKMSECVLGQSKRVDFCGKGYHLMSFPQSAPHGVVFLHVTYVFAQEKNFTTAPAICHDGKAHFPREGVFVSNGTHWFVTQRNFYEPQIITTDNTFVSGNCDVVIGIVNNTVYDPLQPELDSFKEELDKYFKNHTSPDVDLGDISGINASVVNIQKEIDRLNEVAKNLNESLIDLQELGKYEQYIKWPWYIWLGFIAGLIAIVMVTIMLCCITSCCSCLKGCCSCGSCCKFDEDDSEPVLKGVKLHYT

SEQ ID NO: 521 - protein, 1273 aa, Artificial Sequence
  SARS-CoV-2/Iceland/202/2020__EPI_ISL_417750 spike protein (1-1273)(K986P_V987P_P1069F)
MFVFLVLLPLVSSQCVNLTTRTQLPPAYTNSFTRGVYYPDKVFRSSVLHSTQDLFLPFFSNVTWFHAIHVSGTNGTKRFDNPVLPFNDGVYFASTEKSNIIRGWIFGTTLDSKTQSLLIVNNATNVVIKVCEFQFCNDPFLGVYYHKNNKSWMESEFRVYSSANNCTFEYVSQPFLMDLEGKQGNFKNLREFVFKNIDGYFKIYSKHTPINLVRDLPQGFSALEPLVDLPIGINITRFQTLLALHRSYLTPGDSSSGWTAGAAAYYVGYLQPRTFLLKYNENGTITDAVDCALDPLSETKCTLKSFTVEKGIYQTSNFRVQPTESIVRFPNITNLCPFGEVFNATRFASVYAWNRKRISNCVADYSVLYNSASFSTFKCYGVSPTKLNDLCFTNVYADSFVIRGDEVRQIAPGQTGKIADYNYKLPDDFTGCVIAWNSNNLDSKVGGNYNYLYRLFRKSNLKPFERDISTEIYQAGSTPCNGVEGFNCYFPLQSYGFQPTNGVGYQPYRVVVLSFELLHAPATVCGPKKSTNLVKNKCVNFNFNGLTGTGVLTESNKKFLPFQQFGRDIADTTDAVRDPQTLEILDITPCSFGGVSVITPGTNTSNQVAVLYQDVNCTEVPVAIHADQLTPTWRVYSTGSNVFQTRAGCLIGAEHVNNSYECDIPIGAGICASYQTQTNSPRRARSVASQSIIAYTMSLGAENSVAYSNNSIAIPTNFTISVTTEILPVSMTKTSVDCTMYICGDSTECSNLLLQYGSFCTQLNRALTGIAVEQDKNTQEVFAQVKQIYKTPPIKDFGGFNFSQILPDPSKPSKRSFIEDLLFNKVTLADAGFIKQYGDCLGDIAARDLICAQKFNGLTVLPPLLTDEMIAQYTSALLAGTITSGWTFGAGAALQIPFAMQMAYRFNGIGVTQNVLYENQKLIANQFNSAIGKIQDSLSSTASALGKLQDVVNQNAQALNTLVKQLSSNFGAISSVLNDILSRLDPPEAEVQIDRLITGRLQSLQTYVTQQLIRAAEIRASANLAATKMSECVLGQSKRVDFCGKGYHLMSFPQSAPHGVVFLHVTYVFAQEKNFTTAPAICHDGKAHFPREGVFVSNGTHWFVTQRNFYEPQIITTDNTFVSGNCDVVIGIVNNTVYDPLQPELDSFKEELDKYFKNHTSPDVDLGDIPGINASVVNIQKEIDRLNEVAKNLNESLIDLQELGKYEQYIKWPWYIWLGFIAGLIAIVMVTIMLCCMTSCCSCLKGCCSCGSCCKFDEDDSEPVLKGVKLHYT

SEQ ID NO: 522 - protein, 1273 aa, Artificial Sequence
  SARS-CoV-2/USA/WA-UW261/2020__EPI_ISL_418046 spike protein (1-1273)(K986P_V987P_P1069F)
MFVFLVLLPLVSSQCVNLTTRTQLPPAYTNSFTRGVYYPDKVFRSSVLHSTQDLFLPFFSNVTWFHAIHVSGTNGTKRFDNPVLPFNDGVYFASTEKSNIIRGWIFGTTLDSKTQSLLIVNNATNVVIKVCEFQFCNDPFLGVYYHKNNKSWMESEFRVYSSANNCTFEYVSQPFLMDLEGKQGNFKNLREFVFKNIDGYFKIYSKHTPINLVRDLPQGFSALEPLVDLPIGINITRFQTLLALHRSYLTPGDSSSGWTAGAAAYYVGYLQPRTFLLKYNENGTITDAVDCALDPLSETKCTLKSFTVEKGIYQTSNFRVQPTESIVRFPNITNLCPFGEVFNATRFTSVYAWNRKRISNCVADYSVLYNSASFSTFKCYGVSPTKLNDLCFTNVYADSFVIRGDEVRQIAPGQTGKIADYNYKLPDDFTGCVIAWNSNNLDSKVGGNYNYLYRLFRKSNLKPFERDISTEIYQAGSTPCNGVEGFNCYFPLQSYGFQPTNGVGYQPYRVVVLSFELLHAPATVCGPKKSTNLVKNKCVNFNFNGLTGTGVLTESNKKFLPFQQFGRDIADTTDAVRDPQTLEILDITPCSFGGVSVITPGTNTSNQVAVLYQDVNCTEVPVAIHADQLTPTWRVYSTGSNVFQTRAGCLIGAEHVNNSYECDIPIGAGICASYQTQTNSPRRARSVASQSIIAYTMSLGAENSVAYSNNSIAIPTNFTISVTTEILPVSMTKTSVDCTMYICGDSTECSNLLLQYGSFCTQLNRALTGIAVEQDKNTQEVFAQVKQIYKTPPIKDFGGFNFSQILPDPSKPSKRSFIEDLLFNKVTLADAGFIKQYGDCLGDIAARDLICAQKFNGLTVLPPLLTDEMIAQYTSALLAGTITSGWTFGAGAALQIPFAMQMAYRFNGIGVTQNVLYENQKLIANQFNSAIGKIQDSLSSTASALGKLQDVVNQNAQALNTLVKQLSSNFGAISSVLNDILSRLDPPEAEVQIDRLITGRLQSLQTYVTQQLIRAAEIRASANLAATKMSECVLGQSKRVDFCGKGYHLMSFPQSAPHGVVFLHVTYVFAQEKNFTTAPAICHDGKAHFPREGVFVSNGTHWFVTQRNFYEPQIITTDNTFVSGNCDVVIGIVNNTVYDPLQPELDSFKEELDKYFKNHTSPDVDLGDISGINASVVNIQKEIDRLNEVAKNLNESLIDLQELGKYEQYIKWPWYIWLGFIAGLIAIVMVTIMLCCMTSCCSCLKGCCSCGSCCKFDEDDSEPVLKGVKLHYT

SEQ ID NO: 523 - protein, 1273 aa, Artificial Sequence
  SARS-CoV-2/Portugal/PT0035/2020__EPI_ISL_418020 spike protein (1-1273)(K986P_V987P_P1069F)
MFVFLVLLPLVSSQCVNLTTRTQLPPAYTNSFTRGVYYPDKVFRSSVLHSTQDLFLPFFSNVTWFHAIHVSGTNGTKRFDNPVLPFNDGVYFASTEKSNIIRGWIFGTTLDSKTQSLLIVNNATNVVIKVCEFQFCNDPFLGVYYHKNNKSWMESEFRVYSSANNCTFEYVSQPFLMDLEGKQGNFKNLREFVFKNIDGYFKIYSKHTPINLVRDLPQGFSALEPLVDLPIGINITRFQTLLALHRSYLTPGDSSSGWTAGAAAYYVGYLQPRTFLLKYNENGTITDAVDCALDPLSETKCTLKSFTVEKGIYQTSNFRVQPTESIVRFPNITNLCPFGEVFNATRFASVYAWNRKRISNCVADYSVLYNSASFSTFKCYGVSPTKLNDLCFTNVYADSFVIRGDEVRQIAPGQTGKIADYNYKLPDDFTGCVIAWNSNNLDSKVGGNYNYLYRLFRKSNLKPFERDISTEIYQAGSTPCNGVEGFNCYFPLQSYGFQPTNGVGYQPYRVVVLSFELLHAPATVCGPKKSTNLVKNKCVNFNFNGLTGTGVLTESNKKFLPFQQFGRDIADTTDAVRDPQTLEILDITPCSFGGVSVITPGTNTSNQVAVLYQDVNCTEVPVAIHADQLTPTWRVYSTGSNVFQTRAGCLIGAEHVNNSYECDIPIGAGICASYQTQTNSPRRARSVASQSIIAYTMSLGAENSVAYSNNSIAIPTNFTISVTTEILPVSMTKTSVDCTMYICGDSTECSNLLLQYGSFCTQLNRALTGIAVEQDKNTQEVFAQVKQIYKTPPIKDFGGFNFSQILPDPSKPSKRSFIEDLLFNKVTLADAGFIKQYGDCLGDISARDLICAQKFNGLTVLPPLLTDEMIAQYTSALLAGTITSGWTFGAGAALQIPFAMQMAYRFNGIGVTQNVLYENQKLIANQFNSAIGKIQDSLSSTASALGKLQDVVNQNAQALNTLVKQLSSNFGAISSVLNDILSRLDPPEAEVQIDRLITGRLQSLQTYVTQQLIRAAEIRASANLAATKMSECVLGQSKRVDFCGKGYHLMSFPQSAPHGVVFLHVTYVFAQEKNFTTAPAICHDGKAHFPREGVFVSNGTHWFVTQRNFYEPQIITTDNTFVSGNCDVVIGIVNNTVYDPLQPELDSFKEELDKYFKNHTSPDVDLGDISGINASVVNIQKEIDRLNEVAKNLNESLIDLQELGKYEQYIKWPWYIWLGFIAGLIAIVMVTIMLCCMTSCCSCLKGCCSCGSCCKFDEDDSEPVLKGVKLHYT

SEQ ID NO: 524 - protein, 1273 aa, Artificial Sequence
  SARS-CoV-2/USA/NY-NYUMC7/2020__EPI_ISL_418192 spike protein (1-1273)(K986P_V987P_P1069F)
MFVFLVLLPLVSSQCVNLTTRTQLPPAYTNSFTRGVYYPDKVFRSSVLHSTQDLFLPFFSNVTWFHAIHVSGTNGTKRFDNPVLPFNDGVYFASTEKSNIIRGWIFGTTLDSKTQSLLIVNNATNVVIKVCEFQFCNDPFLGVYHHKNNKSWMESEFRVYSSANNCTFEYVSQPFLMDLEGKQGNFKNLREFVFKNIDGYFKIYSKHTPINLVRDLPQGFSALEPLVDLPIGINITRFQTLLALHRSYLTPGDSSSGWTAGAAAYYVGYLQPRTFLLKYNENGTITDAVDCALDPLSETKCTLKSFTVEKGIYQTSNFRVQPTESIVRFPNITNLCPFGEVFNATRFASVYAWNRKRISNCVADYSVLYNSASFSTFKCYGVSPTKLNDLCFTNVYADSFVIRGDEVRQIAPGQTGKIADYNYKLPDDFTGCVIAWNSNNLDSKVGGNYNYLYRLFRKSNLKPFERDISTEIYQAGSTPCNGVEGFNCYFPLQSYGFQPTNGVGYQPYRVVVLSFELLHAPATVCGPKKSTNLVKNKCVNFNFNGLTGTGVLTESNKKFLPFQQFGRDIADTTDAVRDPQTLEILDITPCSFGGVSVITPGTNTSNQVAVLYQGVNCTEVPVAIHADQLTPTWRVYSTGSNVFQTRAGCLIGAEHVNNSYECDIPIGAGICASYQTQTNSPRRARSVASQSIIAYTMSLGAENSVAYSNNSIAIPTNFTISVTTEILPVSMTKTSVDCTMYICGDSTECSNLLLQYGSFCTQLNRALTGIAVEQDKNTQEVFAQVKQIYKTPPIKDFGGFNFSQILPDPSKPSKRSFIEDLLFNKVTLADAGFIKQYGDCLGDIAARDLICAQKFNGLTVLPPLLTDEMIAQYTSALLAGTITSGWTFGAGAALQIPFAMQMAYRFNGIGVTQNVLYENQKLIANQFNSAIGKIQDSLSSTASALGKLQDVVNQNAQALNTLVKQLSSNFGAISSVLNDILSRLDPPEAEVQIDRLITGRLQSLQTYVTQQLIRAAEIRASANLAATKMSECVLGQSKRVDFCGKGYHLMSFPQSAPHGVVFLHVTYVFAQEKNFTTAPAICHDGKAHFPREGVFVSNGTHWFVTQRNFYEPQIITTDNTFVSGNCDVVIGIVNNTVYDPLQPELDSFKEELDKYFKNHTSPDVDLGDISGINASVVNIQKEIDRLNEVAKNLNESLIDLQELGKYEQYIKWPWYIWLGFIAGLIAIVMVTIMLCCMTSCCSCLKGCCSCGSCCKFDEDDSEPVLKGVKLHYT

SEQ ID NO: 525 - protein, 1273 aa, Artificial Sequence
  SARS-CoV-2/Iceland/189/2020__EPI_ISL_417709 spike protein (1-1273)(K986P_V987P_P1069F)
MFVFLVLLPLVSSQCVNLTTRTQLPPAYTNSFTRGVYYPDKVFRSSVLHSTQDLFLPFFSNVTWFHAIHVSGTNGTKRFDNPVLPFNDGVYFASTEKSNIIRGWIFGTTLDSKTQSLLIVNNATNVVIKVCEFQFCNDPFLGVYYHKNNKSWMESEFRVYSSANNCTFEYVSQPFLMDLEGKQGNFKNLREFVFKNIDGYFKIYSKHTPINLVRDLPQGFSALEPLVDLPIGINITRFQTLLALHRSYLTPGDSSSGWTAGAAAYYVGYLQPRTFLLKYNENGTITDAVDCALDPLSETKCTLKSFTVEKGIYQTSNFRVQPTESIVRFPNITNLCPFGEVFNATRFASVYAWNRKRISNCVADYSVLYNSASFSTFKCYGVSPTKLNDLCFTNVYADSFVIRGDEVRQIAPGQTGKIADYNYKLPDDFTGCVIAWNSNNLDSKVGGNYNYLYRLFRKSNLKPFERDISTEIYQAGSTPCNGVEGFNCYFPLQSYGFQPTNGVGYQPYRVVVLSFELLHAPATVCGPKKSTNLVKNKCVNFNFNGLTGTGVLTESNKKFLPFQQFGRDIADTTDAVRDPQTLEILDITPCSFGGVSVITPGTNTSNQVAVLYQGVNCTEVPVAIHADQLTPTWRVYSTGSNVFQTRAGCLIGAEHVNNSYECDIPIGAGICASYQTQTNSPRRARSVASQSIIAYTMSLGAENSVAYSNNSIAIPTNFTISVTTEILPVSMTKTSVDCTMYICGDSTECSNLLLQYGSFCTQLNRALTGIAVEQDKNTQEVFAQVKQIYKTPPIKDFGGFNFSQILPDPSKPSKRSFIEDLLFNKVTLADAGFTKQYGDCLGDIAARDLICAQKFNGLTVLPPLLTDEMIAQYTSALLAGTITSGWTFGAGAALQIPFAMQMAYRFNGIGVTQNVLYENQKLIANQFNSAIGKIQDSLSSTASALGKLQDVVNQNAQALNTLVKQLSSNFGAISSVLNDILSRLDPPEAEVQIDRLITGRLQSLQTYVTQQLIRAAEIRASANLAATKMSECVLGQSKRVDFCGKGYHLMSFPQSAPHGVVFLHVTYVFAQEKNFTTAPAICHDGKAHFPREGVFVSNGTHWFVTQRNFYEPQIITTDNTFVSGNCDVVIGIVNNTVYDPLQPELDSFKEELDKYFKNHTSPDVDLGDISGINASVVNIQKEIDRLNEVAKNLNESLIDLQELGKYEQYIKWPWYIWLGFIAGLIAIVMVTIMLCCMTSCCSCLKGCCSCGSCCKFDEDDSEPVLKGVKLHYT

SEQ ID NO: 526 - protein, 1273 aa, Artificial Sequence
  SARS-CoV-2/Australia/NSW56/2020__EPI_ISL_417408 spike protein (1-1273)(K986P_V987P_P1069F)
MFVFLVLLPLVSSQCVNLTTRTQLPPAYTNSFTRGVYYPDKVFRSSVLHSTQDLFLPFFSNVTWFHAIHVSGTNGTKRFDNPVLPFNDGVYFASTEKSNIIRGWIFGTTLDSKTQSLLIVNNATNVVIKVCEFQFCNDPFLGVYYHKNNKSWMESEFRVYSSANNCTFEYVSQPFLMDLEGKQGNFKNLREFVFKNIDGYFKIYSKHTPINLVRDLPQGFSALEPLVDLPIGINITRFQTLLALHRSYLTPGDSSSGWTAGAAAYYVGYLQPRTFLLKYNENGTITDAVDCALDPLSETKCTLKSFTVEKGIYQTSNFRVQPTESIVRFPNITNLCPFGEVFNATRFASVYAWNRKRISNCVADYSVLYNSASFSTFKCYGVSPTKLNDLCFTNVYADSFVIRGDEVRQIAPGQTGKIADYNYKLPDDFTGCVIAWNSNNLDSKVGGNYNYLYRLFRKSNLKPFERDISTEIYQAGSTPCNGVEGFNCYFPLQSYGFQPTNGVGYQPYRVVVLSFELLHAPATVCGPKKSTNLVKNKCVNFNFNGLTGTGVLTESNKKFLPFQQFGRDIADTTDAVRDPQTLEILDITPCSFGGVSVITPGTNTSNQVAVLYQDVNCTEVPVAIHADQLTPTWRVYSTGSNVFQTRAGCLIGAEHVNNSYECDIPIGAGICASYQTQTNSPRRARSVASQSIIAYTMSLGAENSVAYSNNSIAIPTNFTISVTTEILPVSMTKTSVDCTMYICGDSTECSNLLLQYGSFCTQLNRALTGIAVEQDKNTQEVFAQVKQIYKTPPIKDFGGFNFSQILPDSSKPSKRSFIEDLLFNKVTLADAGFIKQYGDCLGDIAARDLICAQKFNGLTVLPPLLTDEMIAQYTSALLAGTITSGWTFGAGAALQIPFAMQMAYRFNGIGVTQNVLYENQKLIANQFNSAIGKIQDSLSSTASALGKLQDVVNQNAQALNTLVKQLSSNFGAISSVLNDILSRLDPPEAEVQIDRLITGRLQSLQTYVTQQLIRAAEIRASANLAATKMSECVLGQSKRVDFCGKGYHLMSFPQSAPHGVVFLHVTYVFAQEKNFTTAPAICHDGKAHFPREGVFVSNGTHWFVTQRNFYEPQIITTDNTFVSGNCDVVIGIVNNTVYDPLQPELDSFKEELDKYFKNHTSPDVDLGDISGINASVVNIQKEIDRLNEVAKNLNESLIDLQELGKYEQYIKWPWYIWLGFIAGLIAIVMVTIMLCCMTSCCSCLKGCCSCGSCCKFDEDDSEPVLKGVKLHYT

SEQ ID NO: 527 - protein, 1273 aa, Artificial Sequence
  SARS-CoV-2/Iceland/280/2020__EPI_ISL_417608 spike protein (1-1273)(K986P_V987P_P1069F)
MFVFLVLLPLVSSQCVNLTTRTQLPPAYTNSFTRGVYYPDKVFRSSVLHSTQDLFLPFFSNVTWFHAIHVSGTNGTKRFDNPVLPFNDGVYFASTEKSNIIRGWIFGTTLDSKTQSLLIVNNATNVVIKVCEFQFCNDPFLGVYYHKNNKSWMESEFRVYSSANNCTFEYVSQPFLMDLEGKQGNFKNLREFVFKNIDGYFKIYSKHTPINLVRDLPQGFSALEPLVDLPIGINITRFQTLLALHRSYLTPGDSSSGWTAGAAAYYVGYLQPRTFLLKYNENGTITDAVDCALDPLSETKCTLKSFTVEKGIYQTSNFRVQPTESIVRFPNITNLCPFGEVFNATRFASVYAWNRKRISNCVADYSVLYNSASFSTFKCYGVSPTKLNDLCFTNVYADSFVIRGDEVRQIAPGQTGKIADYNYKLPDDFTGCVIAWNSNNLDSKVGGNYNYLYRLFRKSNLKPFERDISTEIYQAGSTPCNGVEGFNCYFPLQSYGFQPTNGVGYQPYRVVVLSFELLHAPATVCGPKKSTNLVKNKCVNFNFNGLTGTGVLTESNKKFLPFQQFGRDIADTTDAVRDPQTLEILDITPCSFGGVSVITPGTNTSNQVAVLYQGVNCTEVPVAIHADQLTPTWRVYSTGSNVFQTRAGCLIGAEHVNNSYECDIPIGAGICASYHTQTNSPRRARSVASQSIIAYTMSLGAENSVAYSNNSIAIPTNFTISVTTEILPVSMTKTSVDCTMYICGDSTECSNLLLQYGSFCTQLNRALTGIAVEQDKNTQEVFAQVKQIYKTPPIKDFGGFNFSQILPDPSKPSKRSFIEDLLFNKVTLADAGFIKQYGDCLGDIAARDLICAQKFNGLTVLPPLLTDEMIAQYTSALLAGTITSGWTFGAGAALQIPFAMQMAYRFNGIGVTQNVLYENQKLIANQFNSAIGKIQDSLSSTASALGKLQDVVNQNAQALNTLVKQLSSNFGAISSVLNDILSRLDPPEAEVQIDRLITGRLQSLQTYVTQQLIRAAEIRASANLAATKMSECVLGQSKRVDFCGKGYHLMSFPQSAPHGVVFLHVTYVFAQEKNFTTAPAICHDGKAHFPREGVFVSNGTHWFVTQRNFYEPQIITTDNTFVSGNCDVVIGIVNNTVYDPLQPELDSFKEELDKYFKNHTSPDVDLGDISGINASVVNIQKEIDRLNEVAKNLNESLIDLQELGKYEQYIKWPWYIWLGFIAGLIAIVMVTIMLCCMTSCCSCLKGCCSCGSCCKFDEDDSEPVLKGVKLHYT

SEQ ID NO: 528 - protein, 1273 aa, Artificial Sequence
  SARS-CoV-2/Iceland/247/2020__EPI_ISL_417575 spike protein (1-1273)(K986P_V987P_P1069F)
MFVFLVLLPLVSSQCVNLTTRTQLPPAYTNSFTRGVYYPDKVFRSSVLHSTQDLFLPFFSNVTWFHAIHVSGTNGTKRFDNPVLPFNDGVYFASTEKSNIIRGWIFGTTLDSKTQSLLIVNNATNVVIKVCEFQFCNDPFLGVYYHKNNKSWMESEFRVYSSANNCTFEYVSQPFLMDLEGKQGNFKNLREFVFKNIDGYFKIYSKHTPINLVRDLPQGFSALEPLVDLPIGINITRFQTLLALHRSYLTPGDSSSGWTAGAAAYYVGYLQPRTFLLKYNENGTITDAVDCALDPLSETKCTLKSFTVEKGIYQTSNFRVQPTESIVRFPNITNLCPFGEVFNATRFASVYAWNRKRISNCVADYSVLYNSASFSTFKCYGVSPTKLNDLCFTNVYADSFVIRGDEVRQIAPGQTGKIADYNYKLPDDFTGCVIAWNSNNLDSKVGGNYNYLYRLFRKSNLKPFERDISTEIYQAGSTPCNGVEGFNCYFPLQSYGFQPTNGVGYQPYRVVVLSFELLHAPATVCGPKKSTNLVKNKCVNFNFNGLTGTGVLTESNKKFLPFQQFGRDIADTTDAVRDPQTLEILDITPCSFGGVSVITPGTNTSNQVAVLYQGVNCTEVPVAIHADQLTPTWRVYSTGSNVFQTRAGCLIGAEHVNNSYECDIPIGAGICASYQTQTNSPRRARSVASQSIIAYTMSLGAENSVAYSNNSIAIPTNFTISVTTEILPVSMTKTSVDCTMYICGDSTECSNLLLQYGSFCTQLNRALTGIAVEQDKNTQEVFAQVKQIYKTPPIKDFGGFNFSQILPDPSKPSKRSFIEDLLFNKVTLADAGFIKQYGDCLGDIAARDLICAQKFNGLTVLPPLLTDEMIAQYTSALLAGTITSGWTFGAGAALQIPFAMQMAYRFNGIGVTQNVLYENQKLIANQFNSAIGKIQDSLSSTASALGKLQDVVNQNAQALNTLVKQLSSNFGAISSVLNDILSRLDPPEAEVQIDRLITGRLQSLQTYVTQQLIRAAEIRASANLAATKMSECVLGQSKRVDFCGKGYHLMSFPQSAPHGVVFLHVTYVFAQEKNFTTAPAICHDGKAHFPREGVFVSNGTHWFVTQRNFYEPQIITTDNTFVSGNCDVVIGIVNNTVYDPLQPELDSFKEELDKYFKNHTSPDVDLGDISGINASVVNIQKEIDRLNEVAKNLNESLIDLQELGKYEQYIKWPWYIWLGFIAGLIAIVIVTIMLCCMTSCCSCLKGCCSCGSCCKFDEDDSEPVLKGVKLHYT

SEQ ID NO: 529 - protein, 1273 aa, Artificial Sequence
  SARS-CoV-2/Iceland/238/2020__EPI_ISL_417566 spike protein (1-1273)(K986P_V987P_P1069F)
MFVFLVLLPLVSSQCVNLTTRTQLPPAYTNSFTRGVYYPDKVFRSSVLHSTQDLFLPFFSNVTWFHAIHVSGTNGTKRFDNPVLPFNDGVYFASTEKSNIIRGWIFGTTLDSKTQSLLIVNNATNVVIKVCEFQFCNDPFLGVYYHKNNKSWMESEFRVYSSANNCTFEYVSQPFLMDLEGKQGNFKNLREFVFKNIDGYFKIYSKHTPINLVRDLPQGFSALEPLVDLPIGINITRFQTLLALHRSYLTPGDSSSGWTAGAAAYYVGYLQPRTFLLKYNENGTITDAVDCALDPLSETKCTLKSFTVEKGIYQTSNFRVQPTESIVRFPNITNLCPFGEVFNATRFASVYAWNRKRISNCVADYSVLYNSASFSTFKCYGVSPTKLNDLCFTNVYADSFVIRGDEVRQIAPGQTGKIADYNYKLPDDFTGCVIAWNSNNLDSKVGGNYNYLYRLFRKSNLKPFERDISTEIYQAGSTPCNGVEGFNCYFPLQSYGFQPTNGVGYQPYRVVVLSFELLHAPATVCGPKKSTNLVKNKCVNFNFNGLTGTGVLTESNKKFLPFQQFGRDIADTTDAVRDPQTLEILDITPCSFGGVSVITPGTNTSNQVAVLYQGVNCTEVPVAIHADQLTPTWRVYSTGSNVFQTRAGCLIGAEHVNNSYECDIPIGAGICASYQTQTNSPRRARSVASQSIIAYTMSLGAENSVAYSNNSIAIPTNFTISVTTEILPVSMTKTSVDCTMYICGDSTECSNLLLQYGSFCTQLNRALTGIAVEQDKNTQEVFAQVKQIYKTPPIKDFGGFNFSQILPDPSKPSKRSFIEDLLFNKVTLADVGFIKQYGDCLGDIAARDLICAQKFNGLTVLPPLLTDEMIAQYTSALLAGTITSGWTFGAGAALQIPFAMQMAYRFNGIGVTQNVLYENQKLIANQFNSAIGKIQDSLSSTASALGKLQDVVNQNAQALNTLVKQLSSNFGAISSVLNDILSRLDPPEAEVQIDRLITGRLQSLQTYVTQQLIRAAEIRASANLAATKMSECVLGQSKRVDFCGKGYHLMSFPQSAPHGVVFLHVTYVFAQEKNFTTAPAICHDGKAHFPREGVFVSNGTHWFVTQRNFYEPQIITTDNTFVSGNCDVVIGIVNNTVYDPLQPELDSFKEELDKYFKNHTSPDVDLGDISGINASVVNIQKEIDRLNEVAKNLNESLIDLQELGKYEQYIKWPWYIWLGFIAGLIAIVMVTIMLCCMTSCCSCLKGCCSCGSCCKFDEDDSEPVLKGVKLHYT

SEQ ID NO: 530 - protein, 1273 aa, Artificial Sequence
  SARS-CoV-2/Greece/16/2020__EPI_ISL_418265 spike protein (1-1273)(K986P_V987P_P1069F)
MFVFLVLLPLVSSQCVNLTTRTQLPPAYTNSFTRGVYYPDKVFRSSVLHSTQDLFLPFFSNVTWFHAIHVSGTNGTKRFDNPVLPFNDGVYFASTEKSNIIRGWIFGTTLDSKTQSLLIVNNATNVVIKVCEFQFCNDPFLGVYYHKNNKSWMESEFRVYSSANNCTFEYVSQPFLMDLEGKQGNFKNLREFVFKNVDGYFKIYSKHTPINLVRDLPQGFSALEPLVDLPIGINITRFQTLLALHRSYLTPGDSSSGWTAGAAAYYVGYLQPRTFLLKYNENGTITDAVDCALDPLSETKCTLKSFTVEKGIYQTSNFRVQPTESIVRFPNITNLCPFGEVFNATRFASVYAWNRKRISNCVADYSVLYNSASFSTFKCYGVSPTKLNDLCFTNVYADSFVIRGDEVRQIAPGQTGKIADYNYKLPDDFTGCVIAWNSNNLDSKVGGNYNYLYRLFRKSNLKPFERDISTEIYQAGSTPCNGVEGFNCYFPLQSYGFQPTNGVGYQPYRVVVLSFELLHAPATVCGPKKSTNLVKNKCVNFNFNGLTGTGVLTESNKKFLPFQQFGRDIADTTDAVRDPQTLEILDITPCSFGGVSVITPGTNTSNQVAVLYQDVNCTEVPVAIHADQLTPTWRVYSTGSNVFQTRAGCLIGAEHVNNSYECDIPIGAGICASYQTQTNSPRRARSVASQSIIAYTMSLGAENSVAYSNNSIAIPTNFTISVTTEILPVSMTKTSVDCTMYICGDSTECSNLLLQYGSFCTQLNRALTGIAVEQDKNTQEVFAQVKQIYKTPPIKDFGGFNFSQILPDPSKPSKRSFIEDLLFNKVTLADAGFIKQYGDCLGDIAARDLICAQKFNGLTVLPPLLTDEMIAQYTSALLAGTITSGWTFGAGAALQIPFAMQMAYRFNGIGVTQNVLYENQKLIANQFNSAIGKIQDSLSSTASALGKLQDVVNQNAQALNTLVKQLSSNFGAISSVLNDILSRLDPPEAEVQIDRLITGRLQSLQTYVTQQLIRAAEIRASANLAATKMSECVLGQSKRVDFCGKGYHLMSFPQSAPHGVVFLHVTYVFAQEKNFTTAPAICHDGKAHFPREGVFVSNGTHWFVTQRNFYEPQIITTDNTFVSGNCDVVIGIVNNTVYDPLQPELDSFKEELDKYFKNHTSPDVDLGDISGINASVVNIQKEIDRLNEVAKNLNESLIDLQELGKYEQYIKWPWYIWLGFIAGLIAIVMVTIMLCCMTSCCSCLKGCCSCGSCCKFDEDDSEPVLKGVKLHYT

SEQ ID NO: 531 - protein, 1273 aa, Artificial Sequence
  SARS-CoV-2/Iceland/319/2020__EPI_ISL_417648 spike protein (1-1273)(K986P_V987P_P1069F)
MFVFLVLLPLVSSQCVNLTTRTQLPPAYTNSFTRGVYYPDKVFRSSVLHSTQDLFLPFFSNVTWFHAIHVSGTNGTKRFDNPVLPFNDGVYFASTEKSNIIRGWIFGTTLDSKTQSLLIVNNATNVVIKVCEFQFCNDPFLGVYYHKNNKSWMESEFRVYSSANNCTFEYVSQPFLIDLEGKQGNFKNLREFVFKNIDGYFKIYSKHTPINLVRDLPQGFSALEPLVDLPIGINITRFQTLLALHRSYLTPGDSSSGWTAGAAAYYVGYLQPRTFLLKYNENGTITDAVDCALDPLSETKCTLKSFTVEKGIYQTSNFRVQPTESIVRFPNITNLCPFGEVFNATRFASVYAWNRKRISNCVADYSVLYNSASFSTFKCYGVSPTKLNDLCFTNVYADSFVIRGDEVRQIAPGQTGKIADYNYKLPDDFTGCVIAWNSNNLDSKVGGNYNYLYRLFRKSNLKPFERDISTEIYQAGSTPCNGVEGFNCYFPLQSYGFQPTNGVGYQPYRVVVLSFELLHAPATVCGPKKSTNLVKNKCVNFNFNGLTGTGVLTESNKKFLPFQQFGRDIADTTDAVRDPQTLEILDITPCSFGGVSVITPGTNTSNQVAVLYQGVNCTEVPVAIHADQLTPTWRVYSTGSNVFQTRAGCLIGAEHVNNSYECDIPIGAGICASYQTQTNSPRRARSVASQSIIAYTMSLGAENSVAYSNNSIAIPTNFTISVTTEILPVSMTKTSVDCTMYICGDSTECSNLLLQYGSFCTQLNRALTGIAVEQDKNTQEVFAQVKQIYKTPPIKDFGGFNFSQILPDPSKPSKRSFIEDLLFNKVTLADAGFIKQYGDCLGDIAARDLICAQKFNGLTVLPPLLTDEMIAQYTSALLAGTITSGWTFGAGAALQIPFAMQMAYRFNGIGVTQNVLYENQKLIANQFNSAIGKIQDSLSSTASALGKLQDVVNQNAQALNTLVKQLSSNFGAISSVLNDILSRLDPPEAEVQIDRLITGRLQSLQTYVTQQLIRAAEIRASANLAATKMSECVLGQSKRVDFCGKGYHLMSFPQSAPHGVVFLHVTYVFAQEKNFTTAPAICHDGKAHFPREGVFVSNGTHWFVTQRNFYEPQIITTDNTFVSGNCDVVIGIVNNTVYDPLQPELDSFKEELDKYFKNHTSPDVDLGDISGINASVVNIQKEIDRLNEVAKNLNESLIDLQELGKYEQYIKWPWYIWLGFIAGLIAIVMVTIMLCCMTSCCSCLKGCCSCGSCCKFDEDDSEPVLKGVKLHYT

SEQ ID NO: 532 - protein, 1273 aa, Artificial Sequence
  SARS-CoV-2/Congo/94/2020__EPI_ISL_417947 spike protein (1-1273)(K986P_V987P_P1069F)
MFVFLVLLPLVSSQCVNLTTRTQLPPAYTNSFTRGVYYPDKVFRSSVLHSTQDLFLPFFSNVTWFHAIHVSGTNGTKRFDNPVLPFNDGVYFASTEKSNIIRGWIFGTTLDSKTQSLLIVNNATNVVIKVCEFQFCNDPFLGVYYHKNNKSWMESEFRVYSSANNCTFEYVSQPFLMDLEGKQGNFKNLREFVFKNIDGYFKIYSKHTPINLVRDLPQGFSALEPLVDLPIGINITRFQTLLALHRSYLTPGDSSSGWTAGAAAYYVGYLQPRTFLLKYNENGTITDAVDCALDPLSETKCTLKSFTVEKGIYQTSNFRVQPTESIVRFPNITNLCPFGEVFNATRFASVYAWNRKRISNCVADYSVLYNSASFSTFKCYGVSPTKLNDLCFTNVYADSFVIRGDEVRQIAPGQTGKIADYNYKLPDDFTGCVIAWNSNNLDSKVGGNYNYLYRLFRKSNLKPFERDISTEIYQAGSTPCNGVEGFNCYFPLQSYGFQPTNGVGYQPYRVVVLSFELLHAPATVCGPKKSTNLVKNKCVNFNFNGLTGTGVLTESNKKFLPFQQFGRDIADTTDAVRDPQTLEILDITPCSFGGVSVITPGTNTSNQVAVLYQGVNCTEVPVAIHADQLTPTWRVYSTGSNVFQTRAGCLIGAEHVNNSYECDIPIGAGICASYQTQTNSPRRARSVASQSIIAYTMSLGAENSVAYSNNSIAIPTNFTISVTTEILPVSMTKTSVDCTMYICGDSTECSNLLLQYGSFCTQLNRALTGIAVEQDKNTQEVFAQVKQIYKTPPIKDFGGFNFSQILPDPSKPSKRSFIEDILFNKVTLADAGFIKQYGDCLGDIAARDLICAQKFNGLTVLPPLLTDEMIAQYTSALLAGTITSGWTFGAGAALQIPFAMQMAYRFNGIGVTQNVLYENQKLIANQFNSAIGKIQDSLSSTASALGKLQDVVNQNAQALNTLVKQLSSNFGAISSVLNDILSRLDPPEAEVQIDRLITGRLQSLQTYVTQQLIRAAEIRASANLAATKMSECVLGQSKRVDFCGKGYHLMSFPQSAPHGVVFLHVTYVFAQEKNFTTAPAICHDGKAHFPREGVFVSNGTHWFVTQRNFYEPQIITTDNTFVSGNCDVVIGIVNNTVYDPLQPELDSFKEELDKYFKNHTSPDVDLGDISGINASVVNIQKEIDRLNEVAKNLNESLIDLQELGKYEQYIKWPWYIWLGFIAGLIAIVMVTIMLCCMTSCCSCLKGCCSCGSCCKFDEDDSEPVLKGVKLHYT

SEQ ID NO: 533 - protein, 1273 aa, Artificial Sequence
  SARS-CoV-2/Congo/158/2020__EPI_ISL_417950 spike protein (1-1273)(K986P_V987P_P1069F)
MFVFLVLLPLVSSQCVNLTTRTQLPPAYTNSFTRGVYYPDKVFRSSVLHSTQDLFLPFFSNVTWFHAIHVSGTNGTKRFDNPVLPFNDGVYFASTEKSNIIRGWIFGTTLDSKTQSLLIVNNATNVVIKVCEFQFCNDPFLGVYYHKNNKSWMESEFRVYSSANNCTFEYVSQPFLMDLEGKQGNFKNLREFVFKNIDGYFKIYSKHTPINLVRDLPQGFSALEPLVDLPIGINITRFQTLLALHRSYLTPGDSSSGWTAGAAAYYVGYLQPRTFLLKYNENGTITDAVDCALDPLSETKCTLKSFTVEKGIYQTSNFRVQPTESIVRFPNITNLCPFGEVFNATRFASVYAWNRKRISNCVADYSVLYNSASFSTFKCYGVSPTKLNDLCFTNVYADSFVIRGDEVRQIAPGQTGKIADYNYKLPDDFTGCVIAWNSNNLDSKVGGNYNYLYRLFRKSNLKPFERDISTEIYQAGSTPCNGVEGFNCYFPLQSYGFQPTNGVGYQPYRVVVLSFELLHAPATVCGPKKSTNLVKNKCVNFNFNGLTGTGVLTESNKKFLPFQQFGRDIADTTDAVRDPQTLEILDITPCSFGGVSVITPGTNTSNQVAVLYQDVNCTEVPVAIHADQLTPTWRVYSTGSNVFQTRAGCLIGAEHVNNSYECDIPIGAGICASYQTQTNSPRRARSVASQSIIAYTMSLGAENSVAYSNNSIAIPTNFTISVTTEILPVSMTKTSVDCTMYICGDSTECSNLLLQYGSFCTQLNRALTGIAVEQDKNTQEVFAQVKQIYKTPPIKDFGGFNFSQILPDPSKPSKRSFIEDLLFNKVTLADAGFIKQYGDCLGDIAARDLICAQKFNGLTVLPPLLTDEMIAQYTSALLAGTITSGWTFGAGAALQIPFAMQMAYRFNGIGVTQNVLYENQKLIANQFNSAIGKIQDSLSSTASALGKLQDVVNQNAQALNTLVKQLSSNFGAISSVLNDILSRLDPPEAEVQIDRLITGRLQSLQTYVTQQLIRAAEIRASANLAATKMSECVLGQSKRVDFCGKGYHLMSFPQSAPHGVVFLHVTYVFAQEKNFTTAPAICHDGKAHFPREGVFVSNGTHWFVTQRNFYEPQIITTDNTFLSGNCDVVIGIVNNTVYDPLQPELDSFKEELDKYFKNHTSPDVDLGDISGINASVVNIQKEIDRLNEVAKNLNESLIDLQELGKYEQYIKWPWYIWLGFIAGLIAIVMVTIMLCCMTSCCSCLKGCCSCGSCCKFDEDDSEPVLKGVKLHYT

SEQ ID NO: 534 - protein, 1273 aa, Artificial Sequence
  SARS-CoV-2/USA/UT-00034/2020__EPI_ISL_417977 spike protein (1-1273)(K986P_V987P_P1069F)
MFVFLVLLPLVSSQCVNLTTRTQLPPAYTNSFTRGVYYPDKVFRSSVLHSTQDLFLPFFSNVTWFHAIHVSGTNGTKRFDNPVLPFNDGVYFASTEKSNIIRGWIFGTTLDSKTQSLLIVNNATNVVIKVCEFQFCNDPFLGVYYYKNNKSWMESEFRVYSSANNCTFEYVSQPFLMDLEGKQGNFKNLREFVFKNIDGYFKIYSKHTPINLVRDLPQGFSALEPLVDLPIGINITRFQTLLALHRSYLTPGDSSSGWTAGAAAYYVGYLQPRTFLLKYNENGTITDAVDCALDPLSETKCTLKSFTVEKGIYQTSNFRVQPTESIVRFPNITNLCPFGEVFNATRFASVYAWNRKRISNCVADYSVLYNSASFSTFKCYGVSPTKLNDLCFTNVYADSFVIRGDEVRQIAPGQTGKIADYNYKLPDDFTGCVIAWNSNNLDSKVGGNYNYLYRLFRKSNLKPFERDISTEIYQAGSTPCNGVEGFNCYFPLQSYGFQPTNGVGYQPYRVVVLSFELLHAPATVCGPKKSTNLVKNKCVNFNFNGLTGTGVLTESNKKFLPFQQFGRDIADTTDAVRDPQTLEILDITPCSFGGVSVITPGTNTSNQVAVLYQGVNCTEVPVAIHADQLTPTWRVYSTGSNVFQTRAGCLIGAEHVNNSYECDIPIGAGICASYQTQTNSPRRARSVASQSIIAYTMSLGAENSVAYSNNSIAIPTNFTISVTTEILPVSMTKTSVDCTMYICGDSTECSNLLLQYGSFCTQLNRALTGIAVEQDKNTQEVFAQVKQIYKTPPIKDFGGFNFSQILPDPSKPSKRSFIEDLLFNKVTLADAGFIKQYGDCLGDIAARDLICAQKFNGLTVLPPLLTDEMIAQYTSALLAGTITSGWTFGAGAALQIPFAMQMAYRFNGIGVTQNVLYENQKLIANQFNSAIGKIQDSLSSTASALGKLQDVVNQNAQALNTLVKQLSSNFGAISSVLNDILSRLDPPEAEVQIDRLITGRLQSLQTYVTQQLIRAAEIRASANLAATKMSECVLGQSKRVDFCGKGYHLMSFPQSAPHGVVFLHVTYVFAQEKNFTTAPAICHDGKAHFPREGVFVSNGTHWFVTQRNFYEPQIITTDNTFVSGNCDVVIGIVNNTVYDPLQPELDSFKEELDKYFKNHTSPDVDLGDISGINASVVNIQKEIDRLNEVAKNLNESLIDLQELGKYEQYIKWPWYIWLGFIAGLIAIVMVTIMLCCMTSCCSCLKGCCSCGSCCKFDEDDSEPVLKGVKLHYT

SEQ ID NO: 535 - protein, 1273 aa, Artificial Sequence
  SARS-CoV-2/USA/UT-00033/2020__EPI_ISL_417976 spike protein (1-1273)(K986P_V987P_P1069F)
MFVFLVLLPLVSSQCVNLTTRTQLPPAYTNSFTRGVYYPDKVFRSSVLHSTQDLFLPFFSNVTWFHAIHVSGTNGTKRFDNPVLPFNDGVYFASTEKSNIIRGWIFGTTLDSKTQSLLIVNNATNVVIKVCEFQFCNDPFLGVYYHKNNKSWMESEFRVYSSANNCTFEYVSQPFLMDLEGKQGNFKNLREFVFKNIDGYFKIYSKHTPINLVRDLPQGFSALEPLVDLPIGINITRFQTLLALHRSYLTPGDSSSGLTAGAAAYYVGYLQPRTFLLKYNENGTITDAVDCALDPLSETKCTLKSFTVEKGIYQTSNFRVQPTESIVRFPNITNLCPFGEVFNATRFASVYAWNRKRISNCVADYSVLYNSASFSTFKCYGVSPTKLNDLCFTNVYADSFVIRGDEVRQIAPGQTGKIADYNYKLPDDFTGCVIAWNSNNLDSKVGGNYNYLYRLFRKSNLKPFERDISTEIYQAGSTPCNGVEGFNCYFPLQSYGFQPTNGVGYQPYRVVVLSFELLHAPATVCGPKKSTNLVKNKCVNFNFNGLTGTGVLTESNKKFLPFQQFGRDIADTTDAVRDPQTLEILDITPCSFGGVSVITPGTNTSNQVAVLYQGVNCTEVPVAIHADQLTPTWRVYSTGSNVFQTRAGCLIGAEHVNNSYECDIPIGAGICASYQTQTNSPRRARSVASQSIIAYTMSLGAENSVAYSNNSIAIPTNFTISVTTEILPVSMTKTSVDCTMYICGDSTECSNLLLQYGSFCTQLNRALTGIAVEQDKNTQEVFAQVKQIYKTPPIKDFGGFNFSQILPDPSKPSKRSFIEDLLFNKVTLADAGFIKQYGDCLGDIAARDLICAQKFNGLTVLPPLLTDEMIAQYTSALLAGTITSGWTFGAGAALQIPFAMQMAYRFNGIGVTQNVLYENQKLIANQFNSAIGKIQDSLSSTASALGKLQDVVNQNAQALNTLVKQLSSNFGAISSVLNDILSRLDPPEAEVQIDRLITGRLQSLQTYVTQQLIRAAEIRASANLAATKMSECVLGQSKRVDFCGKGYHLMSFPQSAPHGVVFLHVTYVFAQEKNFTTAPAICHDGKAHFPREGVFVSNGTHWFVTQRNFYEPQIITTDNTFVSGNCDVVIGIVNNTVYDPLQPELDSFKEELDKYFKNHTSPDVDLGDISGINASVVNIQKEIDRLNEVAKNLNESLIDLQELGKYEQYIKWPWYIWLGFIAGLIAIVMVTIMLCCMTSCCSCLKGCCSCGSCCKFDEDDSEPVLKGVKLHYT

SEQ ID NO: 536 - protein, 1273 aa, Artificial Sequence
  SARS-CoV-2/USA/WI-13/2020__EPI_ISL_417516 spike protein (1-1273)(K986P_V987P_P1069F)
MFVFLVLLPLVSSQCVNLTTRTQLPPAYTNSFTRGVYYPDKVFRSSVLHSTQDLFLPFFSNVTWFHAIHVSGTNGTKRFDNPVLPFNDGVYFASTEKSNIIRGWIFGTTLDSKTQSLLIVNNATNVVIKVCEFQFCNDPFLGVYYHKNNKSWMESEFRVYSSANNCTFEYVSQPFLMDLEGKQGNFKNLREFVFKNIDGYFKIYSKHTPINLVRDLPQGFSALEPLVDLPIGINITRFQTLLALHRSYLTPGDSSSGWTAGAAAYYVGYLQPRTFLLKYNENGTITDAVDCALDPLSETKCTLKSFTVEKGIYQTSNFRVLPTESIVRFPNITNLCPFGEVFNATRFASVYAWNRKRISNCVADYSVLYNSASFSTFKCYGVSPTKLNDLCFTNVYADSFVIRGDEVRQIAPGQTGKIADYNYKLPDDFTGCVIAWNSNNLDSKVGGNYNYLYRLFRKSNLKPFERDISTEIYQAGSTPCNGVEGFNCYFPLQSYGFQPTNGVGYQPYRVVVLSFELLHAPATVCGPKKSTNLVKNKCVNFNFNGLTGTGVLTESNKKFLPFQQFGRDIADTTDAVRDPQTLEILDITPCSFGGVSVITPGTNTSNQVAVLYQGVNCTEVPVAIHADQLTPTWRVYSTGSNVFQTRAGCLIGAEHVNNSYECDIPIGAGICASYQTQTNSPRRARSVASQSIIAYTMSLGAENSVAYSNNSIAIPTNFTISVTTEILPVSMTKTSVDCTMYICGDSTECSNLLLQYGSFCTQLNRALTGIAVEQDKNTQEVFAQVKQIYKTPPIKDFGGFNFSQILPDPSKPSKRSFIEDLLFNKVTLADAGFIKQYGDCLGDIAARDLICAQKFNGLTVLPPLLTDEMIAQYTSALLAGTITSGWTFGAGAALQIPFAMQMAYRFNGIGVTQNVLYENQKLIANQFNSAIGKIQDSLSSTASALGKLQDVVNQNAQALNTLVKQLSSNFGAISSVLNDILSRLDPPEAEVQIDRLITGRLQSLQTYVTQQLIRAAEIRASANLAATKMSECVLGQSKRVDFCGKGYHLMSFPQSAPHGVVFLHVTYVFAQEKNFTTAPAICHDGKAHFPREGVFVSNGTHWFVTQRNFYEPQIITTDNTFVSGNCDVVIGIVNNTVYDPLQPELDSFKEELDKYFKNHTSPDVDLGDISGINASVVNIQKEIDRLNEVAKNLNESLIDLQELGKYEQYIKWPWYIWLGFIAGLIAIVMVTIMLCCMTSCCSCLKGCCSCGSCCKFDEDDSEPVLKGVKLHYT

SEQ ID NO: 537 - protein, 1272 aa, Artificial Sequence
  SARS-CoV-2/India/1-27/2020__EPI_ISL_413522 spike protein (1-1272)(K985P_V986P_P1068F)
MFVFLVLLPLVSSQCVNLTTRTQLPPAYTNSFTRGVYYPDKVFRSSVLHSTQDLFLPFFSNVTWFHAIHVSGTNGTKRFDNPVLPFNDGVYFASTEKSNIIRGWIFGTTLDSKTQSLLIVNNATNVVIKVCEFQFCNDPFLGVYHKNNKSWMESEFRVYSSANNCTFEYVSQPFLMDLEGKQGNFKNLREFVFKNIDGYFKIYSKHTPINLVRDLPQGFSALEPLVDLPIGINITRFQTLLALHRSYLTPGDSSSGWTAGAAAYYVGYLQPRTFLLKYNENGTITDAVDCALDPLSETKCTLKSFTVEKGIYQTSNFRVQPTESIVRFPNITNLCPFGEVFNATRFASVYAWNRKRISNCVADYSVLYNSASFSTFKCYGVSPTKLNDLCFTNVYADSFVIRGDEVIQIAPGQTGKIADYNYKLPDDFTGCVIAWNSNNLDSKVGGNYNYLYRLFRKSNLKPFERDISTEIYQAGSTPCNGVEGFNCYFPLQSYGFQPTNGVGYQPYRVVVLSFELLHAPATVCGPKKSTNLVKNKCVNFNFNGLTGTGVLTESNKKFLPFQQFGRDIADTTDAVRDPQTLEILDITPCSFGGVSVITPGTNTSNQVAVLYQDVNCTEVPVAIHADQLTPTWRVYSTGSNVFQTRAGCLIGAEHVNNSYECDIPIGAGICASYQTQTNSPRRARSVASQSIIAYTMSLGAENSVAYSNNSIAIPTNFTISVTTEILPVSMTKTSVDCTMYICGDSTECSNLLLQYGSFCTQLNRALTGIAVEQDKNTQEVFAQVKQIYKTPPIKDFGGFNFSQILPDPSKPSKRSFIEDLLFNKVTLADAGFIKQYGDCLGDIAARDLICAQKFNGLTVLPPLLTDEMIAQYTSALLAGTITSGWTFGAGAALQIPFAMQMAYRFNGIGVTQNVLYENQKLIANQFNSAIGKIQDSLSSTASALGKLQDVVNQNAQALNTLVKQLSSNFGAISSVLNDILSRLDPPEAEVQIDRLITGRLQSLQTYVTQQLIRAAEIRASANLAATKMSECVLGQSKRVDFCGKGYHLMSFPQSAPHGVVFLHVTYVFAQEKNFTTAPAICHDGKAHFPREGVFVSNGTHWFVTQRNFYEPQIITTDNTFVSGNCDVVIGIVNNTVYDPLQPELDSFKEELDKYFKNHTSPDVDLGDISGINASVVNIQKEIDRLNEVAKNLNESLIDLQELGKYEQYIKWPWYIWLGFIAGLIAIVMVTIMLCCMTSCCSCLKGCCSCGSCCKFDEDDSEPVLKGVKLHYT

SEQ ID NO: 538 - protein, 1267 aa, Artificial Sequence
  SARS-CoV-2/pangolin/Guangxi/P4L/2017__EPI_ISL_410538 spike protein (1-1267)(K980P_V981P_P1063F)
MFVFLFVLPLVSSQCVNLTTRTGIPPGYTNSSTRGVYYPDKVFRSSILHLTQDLFLPFFSNVTWFNTINYQGGFKKFDNPVLPFNDGVYFASTEKSNIIRGWIFGTTLDARTQSLLIVNNATNVVIKVCEFQFCTDPFLGVYYHNNNKTWVENEFRVYSSANNCTFEYISQPFLMDLEGKQGNFKNLREFVFKNVDGYFKIYSKHTPIDLVRDLPRGFAALEPLVDLPIGINITRFQTLLALHRSYLTPGNLESGWTTGAAAYYVGYLQQRTFLLSYNQNGTITDAVDCSLDPLSETKCTLKSLTVEKGIYQTSNFRVQPTISIVRFPNITNLCPFGEVFNASKFASVYAWNRKRISNCVADYSVLYNSTSFSTFKCYGVSPTKLNDLCFTNVYADSFVVKGDEVRQIAPGQTGVIADYNYKLPDDFTGCVIAWNSVKQDALTGGNYGYLYRLFRKSKLKPFERDISTEIYQAGSTPCNGQVGLNCYYPLERYGFHPTTGVNYQPFRVVVLSFELLNGPATVCGPKLSTTLVKDKCVNFNFNGLTGTGVLTTSKKQFLPFQQFGRDISDTTDAVRDPQTLEILDITPCSFGGVSVITPGTNTSNQVAVLYQDVNCTEVPMAIHAEQLTPAWRVYSAGANVFQTRAGCLVGAEHVNNSYECDIPVGAGICASYHSMSSLRSVNQRSIIAYTMSLGAENSVAYSNNSIAIPTNFTISVTTEILPVSMTKTSVDCTMYICGDSIECSNLLLQYGSFCTQLNRALTGIAVEQDKNTQEVFAQVKQIYKTPPIKDFGGFNFSQILPDPSKPSKRSFIEDLLFNKVTLADAGFIKQYGDCLGDIAARDLICAQKFNGLTVLPPLLTDEMIAQYTSALLAGTITSGWTFGAGAALQIPFAMQMAYRFNGIGVTQNVLYENQKLIANQFNSAIGKIQDSLSSTASALGKLQDVVNQNAQALNTLVKQLSSNFGAISSVLNDILSRLDPPEAEVQIDRLITGRLQSLQTYVTQQLIRAAEIRASANLAATKMSECVLGQSKRVDFCGKGYHLMSFPQSAPHGVVFLHVTYVFAQEKNFTTAPAICHEGKAHFPREGVFVSNGTHWFITQRNFYEPQIITTDNTFVSGSCDVVIGIVNNTVYDPLQPELDSFKEELDKYFKNHTSPDVDLGDISGINASVVNIQKEIDRLNEVAKNLNESPIDLQELGKYEQYIKWPWYIWLGFIAGLIAIIMVTIMLCCMTSCCSCLKGCCSCGSCCKFDEDDSEPVLKGVKLHYT

SEQ ID NO: 539 - protein, 1267 aa, Artificial Sequence
  SARS-CoV-2/pangolin/Guangxi/P5L/2017__EPI_ISL_410540 spike protein (1-1267)(K980P_V981P_P1063F)
MFVFLFVLPLVSSQCVNLTTRTGIPPGYTNSSTRGVYYPDKVFRSSILHLTQDLFLPFFSNVTWFNTINYQGGFKKFDNPVLPFNDGVYFASTEKSNIIRGWIFGTTLDARTQSLLIVNNATNVVIKVCEFQFCTDPFLGVYYHNNNKTWVENEFRVYSSANNCTFEYISQPFLMDLEGKQGNFKNLREFVFKNVDGYFKIYSKHTPIDLVRDLPRGFAALEPLVDLPIGINITRFQTLLALHRSYLTPGKLESGWTTGAAAYYVGYLQQRTFLLSYNQNGTITDAVDCSLDPLSETKCTLKSLTVEKGIYQTSNFRVQPTISIVRFPNITNLCPFGEVFNASKFASVYAWNRKRISNCVADYSVLYNSTSFSTFKCYGVSPTKLNDLCFTNVYADSFVVKGDEVRQIAPGQTGVIADYNYKLPDDFTGCVIAWNSVKQDALTGGNYGYLYRLFRKSKLKPFERDISTEIYQAGSTPCNGQVGLNCYYPLERYGFHPTTGVNYQPFRVVVLSFELLNGPATVCGPKLSTTLVKDKCVNFNFNGLTGTGVLTTSKKQFLPFQQFGRDISDTTDAVRDPQTLEILDITPCSFGGVSVITPGTNTSNQVAVLYQDVNCTEVPMAIHAEQLTPAWRVYSAGANVFQTRAGCLVGAEHVNNSYECDIPVGAGICASYHSMSSFRSVNQRSIIAYTMSLGAENSVAYSNNSIAIPTNFTISVTTEILPVSMTKTSVDCTMYICGDSIECSNLLLQYGSFCTQLNRALTGIAVEQDKNTQEVFAQVKQIYKTPPIKDFGGFNFSQILPDPSKPSKRSFIEDLLFNKVTLADAGFIKQYGDCLGDIAARDLICAQKFNGLTVLPPLLTDEMIAQYTSALLAGTITSGWTFGAGAALQIPFAMQMAYRFNGIGVTQNVLYENQKLIANQFNSAIGKIQDSLSSTASALGKLQDVVNQNAQALNTLVKQLSSNFGAISSVLNDILSRLDPPEAEVQIDRLITGRLQSLQTYVTQQLIRAAEIRASANLAATKMSECVLGQSKRVDFCGKGYHLMSFPQSAPHGVVFLHVTYVFAQEKNFTTAPAICHEGKAHFPREGVFVSNGTHWFITQRNFYEPQIITTDNTFVSGSCDVVIGIVNNTVYDPLQPELDSFKEELDKYFKNHTSPDVDLGDISGINASVVNIQKEIDRLNEVAKNLNESLIDLQELGKYEQYIKWPWYIWLGFIAGLIAIIMVTIMLCCMTSCCSCLKGCCSCGSCCKFDEDDSEPVLKGVKLHYT

SEQ ID NO: 540 - protein, 1267 aa, Artificial Sequence
  SARS-CoV-2/pangolin/Guangxi/P5E/2017__EPI_ISL_410541 spike protein (1-1267)(K980P_V981P_P1063F)
MFVFLFVLPLVSSQCVNLTTRTGIPPGYTNSSTRGVYYPDKVFRSSILHLTQDLFLPFFSNVTWFNTITYQGGSKKFDNPVLPFNDGVYFASTEKSNIIRGWIFGTTLDARTQSLLIVNNATNVVIKVCEFQFCTDPFLGVYYHNNNKTWVENEFRVYSSANNCTFEYISQPFLMDLEGKQGNFKNLREFVFKNVDGYFKIYSKHTPIDLVRDLPRGFAALEPLVDLPIGINITRFQTLLALHRSYLTPGKLESGWTTGAAAYYVGYLQQRTFLLSYNQNGTITDAVDCSLDPLSETKCTLKSLTVEKGIYQTSNFRVQPTISIVRFPNITNLCPFGEVFNASKFASVYAWNRKRISNCVADYSVLYNSTSFSTFKCYGVSPTKLNDLCFTNVYADSFVVKGDEVRQIAPGQTGVIADYNYKLPDDFTGCVIAWNSVKQDALTGDNYGYLYRLFRKSKLKPFERDISTEIYQAGSTPCNGQVGLNCYYPLERYGFHPTTGVNYQPFRVVVLSFELLNGPATVCGPKLSTTLVKDKCVNFNFNGLTGTGVLTTSKKQFLPFQQFGRDISDTTDAVRDPQTLEILDITPCSFGGVSVITPGTNTSNQVAVLYQDVNCTEVPMAIHAEQLTPAWRVYSAGANVFQTRAGCLVGAEHVNNSYECDIPVGAGICASYHSMSSFRSVNQRSIIAYTMSLGAENSVAYSNNSIAIPTNFTISVTTEILPVSMTKTSVDCTMYICGDSIECSNLLLQYGSFCTQLNRALTGIAVEQDKNTQEVFAQVKQIYKTPPIKDFGGFNFSQILPDPSKPSKRSFIEDLLFNKVTLADAGFIKQYGDCLGDIAARDLICAQKFNGLTVLPPLLTDEMIAQYTSALLAGTITSGWTFGAGAALQIPFAMQMAYRFNGIGVTQNVLYENQKLIANQFNSAIGKIQDSLSSTASALGKLQDVVNQNAQALNTLVKQLSSNFGAISSVLNDILSRLDPPEAEVQIDRLITGRLQSLQTYVTQQLIRAAEIRASANLAATKMSECVLGQSKRVDFCGKGYHLMSFPQSAPHGVVFLHVTYVFAQEKNFTTAPAICHEGKAHFPREGVFVSNGTHWFITQRNFYEPQIITTDNTFVSGSCDVVIGIVNNTVYDPLQPELDSFKEELDKYFKNHTSPDVDLGDISGINASVVNIQKEIDRLNEVAKNLNESLIDLQELGKYEQYIKWPWYIWLGFIAGLIAIIMVTIMLCCMTSCCSCLKGCCSCGSCCKFDEDDSEPVLKGVKLHYT

SEQ ID NO: 541 - protein, 1265 aa, Artificial Sequence
  SARS-CoV-2/pangolin/Guangxi/P1E/2017__EPI_ISL_410539 spike protein (1-1265)(K978P_V979P_P1061F)
MFVFLFVLPLVSSQCVNLTTRTGIQPGYTNSSTRGVYYPDKVFRSSILHLTQDLFLPFFSNVTWFNTINYQGGFKKFDNPVLPFNDGVYFASTEKSNIIRGWIFGTTLDARTQSLLIVNNATNVVIKVCEFQFCTDPFLGVYYHNNNKTWVENEFRVYSSANNCTFEYISQPFLMDLEGKQGNFKNLREFVFKNVDGYFKIYSKHTPIDLVRDLPRGFAALEPLVDLPIGINITRFQTLLALHRSYLTPGKLESGWTTGAAAYYVGYLQQRTFLLSYNQNGTITDAVDCSLDPLSETKCTLKSLTVEKGIYQTSNFRVQPTISIVRFPNITNLCPFGEVFNASKFASVYAWNRKRISNCVADYSVLYNSTSFSTFKCYGVSPTKLNDLCFTNVYADSFVVKGDEVRQIAPGQTGVIADYNYKLPDDFTGCVIAWNSVKQDALTGGNYLYRLFRKSKLKPFERDISTEIYQAGSTPCNGQVGLNCYYPLERYGFHPTTGVNYQPFRVVVLSFELLNGPATVCGPKLSTTLVKDKCVNFNFNGLTGTGVLTTSKKQFLPFQQFGRDISDTTDAVRDPQTLEILDITPCSFGGVSVITPGTNTSNQVAVLYQDVNCTEVPMAIHAEQLTPAWRVYSAGANVFQTRAGCLVGAEHVNNSYECDIPVGAGICASYHSMSSLRSVNQRSIIAYTMSLGAENSVAYSNNSIAIPTNFTISVTTEILPVSMTKTSVDCTMYICGDSIECSNLLLQYGSFCTQLNRALTGIAVEQDKNTQEVFAQVKQIYKTPPIKDFGGFNFSQILPDPSKPSKRSFIEDLLFNKVTLADAGFIKQYGDCLGDIAARDLICAQKFNGLTVLPPLLTDEMIAQYTSALLAGTITSGWTFGAGAALQIPFAMQMAYRFNGIGVTQNVLYENQKLIANQFNSAIGKIQDSLSSTASALGKLQDVVNQNAQALNTLVKQLSSNFGAISSVLNDILSRLDPPEAEVQIDRLITGRLQSLQTYVTQQLIRAAEIRASANLAATKMSECVLGQSKRVDFCGKGYHLMSFPQSAPHGVVFLHVTYVFAQEKNFTTAPAICHEGKAHFPREGVFVSNGTHWFITQRNFYEPQIITTDNTFVSGSCDVVIGIVNNTVYDPLQPELDSFKEELDKYFKNHTSPDVDLGDISGINASVVNIQKEIDRLNEVAKNLNESLIDLQELGKYEQYIKWPWYIWLGFIAGLIAIIMVTIMLCCMTSCCSCLKGCCSCGSCCKFDEDDSEPVLKGVKLHYT

SEQ ID NO: 542 - protein, 1273 aa, Artificial Sequence
  SARS-CoV-2/Wuhan/WIV05/2019__EPI_ISL_402128 spike protein (1-1273)(K986P_V987P_ H1048Q_H1064N_ H1083N_H1101N)
MFVFLVLLPLVSSQCVNLTTRTQLPPAYTNSFTRGVYYPDKVFRSSVLHSTQDLFLPFFSNVTWFHAIHVSGTNGTKRFDNPVLPFNDGVYFASTEKSNIIRGWIFGTTLDSKTQSLLIVNNATNVVIKVCEFQFCNDPFLGVYYHKNNKSWMESEFRVYSSANNCTFEYVSQPFLMDLEGKQGNFKNLREFVFKNIDGYFKIYSKHTPINLVRDLPQGFSALEPLVDLPIGINITRFQTLLALHRSYLTPGDSSSGWTAGAAAYYVGYLQPRTFLLKYNENGTITDAVDCALDPLSETKCTLKSFTVEKGIYQTSNFRVQPTESIVRFPNITNLCPFGEVFNATRFASVYAWNRKRISNCVADYSVLYNSASFSTFKCYGVSPTKLNDLCFTNVYADSFVIRGDEVRQIAPGQTGKIADYNYKLPDDFTGCVIAWNSNNLDSKVGGNYNYLYRLFRKSNLKPFERDISTEIYQAGSTPCNGVEGFNCYFPLQSYGFQPTNGVGYQPYRVVVLSFELLHAPATVCGPKKSTNLVKNKCVNFNFNGLTGTGVLTESNKKFLPFQQFGRDIADTTDAVRDPQTLEILDITPCSFGGVSVITPGTNTSNQVAVLYQDVNCTEVPVAIHADQLTPTWRVYSTGSNVFQTRAGCLIGAEHVNNSYECDIPIGAGICASYQTQTNSPRRARSVASQSIIAYTMSLGAENSVAYSNNSIAIPTNFTISVTTEILPVSMTKTSVDCTMYICGDSTECSNLLLQYGSFCTQLNRALTGIAVEQDKNTQEVFAQVKQIYKTPPIKDFGGFNFSQILPDPSKPSKRSFIEDLLFNKVTLADAGFIKQYGDCLGDIAARDLICAQKFNGLTVLPPLLTDEMIAQYTSALLAGTITSGWTFGAGAALQIPFAMQMAYRFNGIGVTQNVLYENQKLIANQFNSAIGKIQDSLSSTASALGKLQDVVNQNAQALNTLVKQLSSNFGAISSVLNDILSRLDPPEAEVQIDRLITGRLQSLQTYVTQQLIRAAEIRASANLAATKMSECVLGQSKRVDFCGKGYQLMSFPQSAPHGVVFLNVTYVPAQEKNFTTAPAICNDGKAHFPREGVFVSNGTNWFVTQRNFYEPQIITTDNTFVSGNCDVVIGIVNNTVYDPLQPELDSFKEELDKYFKNHTSPDVDLGDISGINASVVNIQKEIDRLNEVAKNLNESLIDLQELGKYEQYIKWPWYIWLGFIAGLIAIVMVTIMLCCMTSCCSCLKGCCSCGSCCKFDEDDSEPVLKGVKLHYT

SEQ ID NO: 543 - protein, 1269 aa, Artificial Sequence
  SARS-CoV-2/bat/Yunnan/RaTG13/2013__EPI_ISL_402131 spike protein (1-1269)(K982P_V983P_ H1044Q_H1060N_ H1079N_H1097N)
MFVFLVLLPLVSSQCVNLTTRTQLPPAYTNSSTRGVYYPDKVFRSSVLHLTQDLFLPFFSNVTWFHAIHVSGTNGIKRFDNPVLPFNDGVYFASTEKSNIIRGWIFGTTLDSKTQSLLIVNNATNVVIKVCEFQFCNDPFLGVYYHKNNKSWMESEFRVYSSANNCTFEYVSQPFLMDLEGKQGNFKNLREFVFKNIDGYFKIYSKHTPINLVRDLPPGFSALEPLVDLPIGINITRFQTLLALHRSYLTPGDSSSGWTAGAAAYYVGYLQPRTFLLKYNENGTITDAVDCALDPLSETKCTLKSFTVEKGIYQTSNFRVQPTDSIVRFPNITNLCPFGEVFNATTFASVYAWNRKRISNCVADYSVLYNSTSFSTFKCYGVSPTKLNDLCFTNVYADSFVITGDEVRQIAPGQTGKIADYNYKLPDDFTGCVIAWNSKHIDAKEGGNFNYLYRLFRKANLKPFERDISTEIYQAGSKPCNGQTGLNCYYPLYRYGFYPTDGVGHQPYRVVVLSFELLNAPATVCGPKKSTNLVKNKCVNFNFNGLTGTGVLTESNKKFLPFQQFGRDIADTTDAVRDPQTLEILDITPCSFGGVSVITPGTNASNQVAVLYQDVNCTEVPVAIHADQLTPTWRVYSTGSNVFQTRAGCLIGAEHVNNSYECDIPIGAGICASYQTQTNSRSVASQSIIAYTMSLGAENSVAYSNNSIAIPTNFTISVTTEILPVSMTKTSVDCTMYICGDSTECSNLLLQYGSFCTQLNRALTGIAVEQDKNTQEVFAQVKQIYKTPPIKDFGGFNFSQILPDPSKPSKRSFIEDLLFNKVTLADAGFIKQYGDCLGDIAARDLICAQKFNGLTVLPPLLTDEMIAQYTSALLAGTITSGWTFGAGAALQIPFAMQMAYRFNGIGVTQNVLYENQKLIANQFNSAIGKIQDSLSSTASALGKLQDVVNQNAQALNTLVKQLSSNFGAISSVLNDILSRLDPPEAEVQIDRLITGRLQSLQTYVTQQLIRAAEIRASANLAATKMSECVLGQSKRVDFCGKGYQLMSFPQSAPHGVVFLNVTYVPAQEKNFTTAPAICNDGKAHFPREGVFVSNGTNWFVTQRNFYEPQIITTDNTFVSGSCDVVIGIVNNTVYDPLQPELDSFKEELDKYFKNHTSPDVDLGDISGINASVVNIQKEIDRLNEVAKNLNESLIDLQELGKYEQYIKWPWYIWLGFIAGLIAIIMVTIMLCCMTSCCSCLKGCCSCGSCCKFDEDDSEPVLKGVKLHYT

SEQ ID NO: 544 - protein, 1273 aa, Artificial Sequence
  SARS-CoV-2/Wuhan/HBCDC-HB-01/2019__EPI_ISL_402132 spike protein (1-1273)(K986P_V987P_ H1048Q_H1064N_ H1083N_H1101N)
MFVFLVLLPLVSSQCVNLTTRTQLPPAYTNSITRGVYYPDKVFRSSVLHSTQDLFLPFFSNVTWFHAIHVSGTNGTKRFDNPVLPFNDGVYFASTEKSNIIRGWIFGTTLDSKTQSLLIVNNATNVVIKVCEFQFCNDPFLGVYYHKNNKSWMESEFRVYSSANNCTFEYVSQPFLMDLEGKQGNFKNLREFVFKNIDGYFKIYSKHTPINLVRDLPQGFSALEPLVDLPIGINITRFQTLLALHRSYLTPGDSSSGWTAGAAAYYVGYLQPRTFLLKYNENGTITDAVDCALDPLSETKCTLKSFTVEKGIYQTSNFRVQPTESIVRFPNITNLCPFGEVFNATRFASVYAWNRKRISNCVADYSVLYNSASFSTFKCYGVSPTKLNDLCFTNVYADSFVIRGDEVRQIAPGQTGKIADYNYKLPDDFTGCVIAWNSNNLDSKVGGNYNYLYRLFRKSNLKPFERDISTEIYQAGSTPCNGVEGFNCYFPLQSYGFQPTNGVGYQPYRVVVLSFELLHAPATVCGPKKSTNLVKNKCVNFNFNGLTGTGVLTESNKKFLPFQQFGRDIADTTDAVRDPQTLEILDITPCSFGGVSVITPGTNTSNQVAVLYQDVNCTEVPVAIHADQLTPTWRVYSTGSNVFQTRAGCLIGAEHVNNSYECDIPIGAGICASYQTQTNSPRRARSVASQSIIAYTMSLGAENSVAYSNNSIAIPTNFTISVTTEILPVSMTKTSVDCTMYICGDSTECSNLLLQYGSFCTQLNRALTGIAVEQDKNTQEVFAQVKQIYKTPPIKDFGGFNFSQILPDPSKPSKRSFIEDLLFNKVTLADAGFIKQYGDCLGDIAARDLICAQKFNGLTVLPPLLTDEMIAQYTSALLAGTITSGWTFGAGAALQIPFAMQMAYRFNGIGVTQNVLYENQKLIANQFNSAIGKIQDSLSSTASALGKLQDVVNQNAQALNTLVKQLSSNFGAISSVLNDILSRLDPPEAEVQIDRLITGRLQSLQTYVTQQLIRAAEIRASANLAATKMSECVLGQSKRVDFCGKGYQLMSFPQSAPHGVVFLNVTYVPAQEKNFTTAPAICNDGKAHFPREGVFVSNGTNWFVTQRNFYEPQIITTDNTFVSGNCDVVIGIVNNTVYDPLQPELDSFKEELDKYFKNHTSPDVDLGDISGINASVVNIQKEIDRLNEVAKNLNESLIDLQELGKYEQYIKWPWYIWLGFIAGLIAIVMVTIMLCCMTSCCSCLKGCCSCGSCCKFDEDDSEPVLKGVKLHYT

SEQ ID NO: 545 - protein, 1273 aa, Artificial Sequence
  SARS-CoV-2/Guangdong/20SF028/2020__EPI_ISL_403936 spike protein (1-1273)(K986P_V987P_ H1048Q_H1064N_ H1083N_H1101N)
MFVFLVLLPLVSSQCVNLTTRTQLPPAYTNSFTRGVYYPDKVFRSSVLYSTQDLFLPFFSNVTWFHAIHVSGTNGTKRFDNPVLPFNDGVYFASTEKSNIIRGWIFGTTLDSKTQSLLIVNNATNVVIKVCEFQFCNDPFLGVYYHKNNKSWMESEFRVYSSANNCTFEYVSQPFLMDLEGKQGNFKNLREFVFKNIDGYFKIYSKHTPINLVRDLPQGFSALEPLVDLPIGINITRFQTLLALHRSYLTPGDSSSGWTAGAAAYYVGYLQPRTFLLKYNENGTITDAVDCALDPLSETKCTLKSFTVEKGIYQTSNFRVQPTESIVRFPNITNLCPFGEVFNATRFASVYAWNRKRISNCVADYSVLYNSASFSTFKCYGVSPTKLNDLCFTNVYADSFVIRGDEVRQIAPGQTGKIADYNYKLPDDFTGCVIAWNSNNLDSKVGGNYNYLYRLFRKSNLKPFERDISTEIYQAGSTPCNGVEGFNCYFPLQSYGFQPTNGVGYQPYRVVVLSFELLHAPATVCGPKKSTNLVKNKCVNFNFNGLTGTGVLTESNKKFLPFQQFGRDIADTTDAVRDPQTLEILDITPCSFGGVSVITPGTNTSNQVAVLYQDVNCTEVPVAIHADQLTPTWRVYSTGSNVFQTRAGCLIGAEHVNNSYECDIPIGAGICASYQTQTNSPRRARSVASQSIIAYTMSLGAENSVAYSNNSIAIPTNFTISVTTEILPVSMTKTSVDCTMYICGDSTECSNLLLQYGSFCTQLNRALTGIAVEQDKNTQEVFAQVKQIYKTPPIKDFGGFNFSQILPDPSKPSKRSFIEDLLFNKVTLADAGFIKQYGDCLGDIAARDLICAQKFNGLTVLPPLLTDEMIAQYTSALLAGTITSGWTFGAGAALQIPFAMQMAYRFNGIGVTQNVLYENQKLIANQFNSAIGKIQDSLSSTASALGKLQDVVNQNAQALNTLVKQLSSNFGAISSVLNDILSRLDPPEAEVQIDRLITGRLQSLQTYVTQQLIRAAEIRASANLAATKMSECVLGQSKRVDFCGKGYQLMSFPQSAPHGVVFLNVTYVPAQEKNFTTAPAICNDGKAHFPREGVFVSNGTNWFVTQRNFYEPQIITTDNTFVSGNCDVVIGIVNNTVYDPLQPELDSFKEELDKYFKNHTSPDVDLGDISGINASVVNIQKEIDRLNEVAKNLNESLIDLQELGKYEQYIKWPWYIWLGFIAGLIAIVMVTIMLCCMTSCCSCLKGCCSCGSCCKFDEDDSEPVLKGVKLHYT

SEQ ID NO: 546 - protein, 1273 aa, Artificial Sequence
  SARS-CoV-2/Shenzhen/SZTH-001/2020__EPI_ISL_406592 spike protein (1-1273)(K986P_V987P_ H1048Q_H1064N_ H1083N_H1101N)
MFVFLVLLPLVSSQCVNLTTRTQLPPAYTNSFTRGVYYPDKVFRSSVLHSTQDLFLPFFSNVTWFHAIHVSGTNGTKRFDNPVLPFNDGVYFASTEKSNIIRGWIFGTTLDSKTQSLLIVNNATNVVIKVCEFQFCNDPFLGVYYHKNNKSWMESEFRVYSSANNCTFEYVSQPFLMDLEGKQGNFKNLREFVFKNIDGYFKIYSKHTPINLVRDLPQGFSALEPLVDLPIGINITRFQTLLALHRSYLTPGDSSSGWTAGAAAYYVGYLQPRTFLLKYNENGTITDAVDCALDPLSETKCTLKSFTVEKGIYQTSNFRVQPTESIVRFPNITNLCPFGEVFNATRFASVYAWNRKRISNCVADYSVLYNSASFSTFKCYGVSPTKLNDLCFTNVYADSFVIRGDEVRQIAPGQTGKIADYNYKLPDDFTGCVIAWNSNNLDSKVGGNYNYLYRLFRKSNLKPFERDISTEIYQAGSTPCNGVEGFNCYFPLQSYGFQPTNGVGYQPYRVVVLSFELLHAPATVCGPKKSTNLVKNKCVNFNFNGLTGTGVLTESNKKFLPFQQFGRDIADTTDAVRDPQTLEILDITPCSFGGVSVITPGTNTSNQVAVLYQDVNCTEVPVAIHADQLTPTWRVYSTGSNVFQTRAGCLIGAEHVNNSYECDIPIGAGICASYQTQTNSPRRARSVASQSIIAYTMSLGAENSVAYSNNSIAIPTNFTISVTTEILPVSMTKTSVDCTMYICGDSTECSNLLLQYGSFCTQLNRALTGIAVEQDKNTQEVFAQVKQIYKTPPIKDFGGFNFSQILPDPSKPSKRSFIEDLLFNKVTLADAGFIKQYGDCLGDIAARDLICAQKFNGLTVLPPLLTDEMIAQYTSALLAGTITSGWTFGAGAALQIPFAMQMAYRFNGIGVTQNVLYENQKLIANQFNSAIGKIQDSLSSTASALGKLQDVVNQNAQALNTLVKQLSSNFGAISSVLNDILSRLDPPEAEVQIDRLITGRLQSLQTYVTQQLIRAAEIRASANLAATKMSECVLGQSKRVDFCGKGYQLMSFPQSAPHGVVFLNVTYVPAQEKNFTTAPAICNDGKAHFPREGVFVSNGTNWFVTQRNFYEPQIITTDNTFVSGNCDVLIGIVNNTVYDPLQPELDSFKEELDKYFKNHTSPDVDLGDISGINASVVNIQKEIDRLNEVAKNLNESLIDLQELGKYEQYIKWPWYIWLGFIAGLIAIVMVTIMLCCMTSCCSCLKGCCSCGSCCKFDEDDSGPVLKGVKLHYT

SEQ ID NO: 547 - protein, 1273 aa, Artificial Sequence
  SARS-CoV-2/Shenzhen/SZTH-004/2020__EPI_ISL_406595 spike protein (1-1273)(K986P_V987P_ H1048Q_H1064N_ H1083N_H1101N)
MFVFLVLLPLVSSQCVNLTTRTQLPPAYTNSFTRGVYYPDKVFRSSVLHSTQDLFLPFFSNVTWFHAIHVSGTNGTKRFDNPVLPFNDGVYFASTEKSNIIRGWIFGTTLDSKTQSLLIVNNATNVVIKVCEFQFCNDPFLGVYYHKNNKSWMESEFRVYSSANNCTFEYVSQPFLMDLEGKQGNFKNLREFVFKNIDGYFKIYSKHTPINLVRDLPQGFSALEPLVDLPIGINITRFQTLLALHRSYLTPGDSSSGWTAGAAAYYVGYLQPRTFLLKYNENGTITDAVDCALDPLSETKCTLKSFTVEKGIYQTSNFRVQPTESIVRFPNITNLCPFGEVFNATRFASVYAWDRKRISNCVAYYSVLYNSASFSTFKCYGVSPTKLNDLCFTNVYADSFVIRGDEVRQIAPGQTGKIADYNYKLPDDFTGCVIAWNSNNLDSKVGGNYNYLYRLFRKSNLKPFERDISTEIYQAGSTPCNGVEGFNCYFPLQSYGFQPTNGVGYQPYRVVVLSFELLHAPATVCGPKKSTNLVKNKCVNFNFNGLTGTGVLTESNKKFLPFQQFGRDIADTTDAVRDPQTLEILDITPCSFGGVSVITPGTNTSNQVAVLYQDVNCTEVPVAIHADQLTPTWRVYSTGSNVFQTRAGCLIGAEHVNNSYECDIPIGAGICASYQTQTNSPRRARSVASQSIIAYTMSLGAENSVAYSNNSIAIPTNFTISVTTEILPVSMTKTSVDCTMYICGDSTECSNLLLQYGSFCTQLNRALTGIAVEQDKNTQEVFAQVKQIYKTPPIKDFGGFNFSQILPDPSKPSKRSFIEDLLFNKVTLADAGFIKQYGDCLGDIAARDLICAQKFNGLTVLPPLLTDEMIAQYTSALLAGTITSGWTFGAGAALQIPFAMQMAYRFNGIGVTQNVLYENQKLIANQFNSAIGKIQDSLSSTASALGKLQDVVNQNAQALNTLVKQLSSNFGAISSVLNDILSRLDPPEAEVQIDRLITGRLQSLQTYVTQQLIRAAEIRASANLAATKMSECVLGQSKRVDFCGKGYQLMSFPQSAPHGVVFLNVTYVPAQEKNFTTAPAICNDGKAHFPREGVFVSNGTNWFVTQRNFYEPQIITTDNTFVSGNCDVVIGIVNNTVYDPLQPELDSFKEELDKYFKNHTSPDVDLGDISGINASVVNIQKEIDRLNEVAKNLNESLIDLQELGKYEQYIKWPWYIWLGFIAGLIAIVMVTIMLCCMTSCCSCLKGCCSCGSCCKFDEDDSEPVLKGVKLHYT

SEQ ID NO: 548 - protein, 1273 aa, Artificial Sequence
  SARS-CoV-2/France/IDF0372/2020__EPI_ISL_406596 spike protein (1-1273)(K986P_V987P_ H1048Q_H1064N_ H1083N_H1101N)
MFVFLVLLPLVSSQCVNLTTRTQLPPAYTNSFTRGVYYPDKVFRSSVLHSTQDLFLPFFSNVTWFHAIHVSGTNGTKRFDNPVLPFNDGVYFASTEKSNIIRGWIFGTTLDSKTQSLLIVNNATNVVIKVCEFQFCNDPFLGVYYHKNNKSWMESEFRVYSSANNCTFEYVSQPFLMDLEGKQGNFKNLREFVFKNIDGYFKIYSKHTPINLVRDLPQGFSALEPLVDLPIGINITRFQTLLALHRSYLTPGDSSSGWTAGAAAYYVGYLQPRTFLLKYNENGTITDAVDCALDPLSETKCTLKSFTVEKGIYQTSNFRVQPTESIVRFPNITNLCPFGEVFNATRFASVYAWNRKRISNCVADYSFLYNSASFSTFKCYGVSPTKLNDLCFTNVYADSFVIRGDEVRQIAPGQTGKIADYNYKLPDDFTGCVIAWNSNNLDSKVGGNYNYLYRLFRKSNLKPFERDISTEIYQAGSTPCNGVEGFNCYFPLQSYGFQPTNGVGYQPYRVVVLSFELLHAPATVCGPKKSTNLVKNKCVNFNFNGLTGTGVLTESNKKFLPFQQFGRDIADTTDAVRDPQTLEILDITPCSFGGVSVITPGTNTSNQVAVLYQDVNCTEVPVAIHADQLTPTWRVYSTGSNVFQTRAGCLIGAEHVNNSYECDIPIGAGICASYQTQTNSPRRARSVASQSIIAYTMSLGAENSVAYSNNSIAIPTNFTISVTTEILPVSMTKTSVDCTMYICGDSTECSNLLLQYGSFCTQLNRALTGIAVEQDKNTQEVFAQVKQIYKTPPIKDFGGFNFSQILPDPSKPSKRSFIEDLLFNKVTLADAGFIKQYGDCLGDIAARDLICAQKFNGLTVLPPLLTDEMIAQYTSALLAGTITSGWTFGAGAALQIPFAMQMAYRFNGIGVTQNVLYENQKLIANQFNSAIGKIQDSLSSTASALGKLQDVVNQNAQALNTLVKQLSSNFGAISSVLNDILSRLDPPEAEVQIDRLITGRLQSLQTYVTQQLIRAAEIRASANLAATKMSECVLGQSKRVDFCGKGYQLMSFPQSAPHGVVFLNVTYVPAQEKNFTTAPAICNDGKAHFPREGVFVSNGTNWFVTQRNFYEPQIITTDNTFVSGNCDVVIGIVNNTVYDPLQPELDSFKEELDKYFKNHTSPDVDLGDISGINASVVNIQKEIDRLNEVAKNLNESLIDLQELGKYEQYIKWPWYIWLGFIAGLIAIVMVTIMLCCMTSCCSCLKGCCSCGSCCKFDEDDSEPVLKGVKLHYT

SEQ ID NO: 549 - protein, 1273 aa, Artificial Sequence
  SARS-CoV-2/Australia/VIC01/2020__EPI_ISL_406844 spike protein (1-1273)(K986P_V987P_ H1048Q_H1064N_ H1083N_H1101N)
MFVFLVLLPLVSSQCVNLTTRTQLPPAYTNSFTRGVYYPDKVFRSSVLHSTQDLFLPFFSNVTWFHAIHVSGTNGTKRFDNPVLPFNDGVYFASTEKSNIIRGWIFGTTLDSKTQSLLIVNNATNVVIKVCEFQFCNDPFLGVYYHKNNKSWMESEFRVYSSANNCTFEYVSQPFLMDLEGKQGNFKNLREFVFKNIDGYFKIYSKHTPINLVRDLPQGFSALEPLVDLPIGINITRFQTLLALHRRYLTPGDSSSGWTAGAAAYYVGYLQPRTFLLKYNENGTITDAVDCALDPLSETKCTLKSFTVEKGIYQTSNFRVQPTESIVRFPNITNLCPFGEVFNATRFASVYAWNRKRISNCVADYSVLYNSASFSTFKCYGVSPTKLNDLCFTNVYADSFVIRGDEVRQIAPGQTGKIADYNYKLPDDFTGCVIAWNSNNLDSKVGGNYNYLYRLFRKSNLKPFERDISTEIYQAGSTPCNGVEGFNCYFPLQSYGFQPTNGVGYQPYRVVVLSFELLHAPATVCGPKKSTNLVKNKCVNFNFNGLTGTGVLTESNKKFLPFQQFGRDIADTTDAVRDPQTLEILDITPCSFGGVSVITPGTNTSNQVAVLYQDVNCTEVPVAIHADQLTPTWRVYSTGSNVFQTRAGCLIGAEHVNNSYECDIPIGAGICASYQTQTNSPRRARSVASQSIIAYTMSLGAENSVAYSNNSIAIPTNFTISVTTEILPVSMTKTSVDCTMYICGDSTECSNLLLQYGSFCTQLNRALTGIAVEQDKNTQEVFAQVKQIYKTPPIKDFGGFNFSQILPDPSKPSKRSFIEDLLFNKVTLADAGFIKQYGDCLGDIAARDLICAQKFNGLTVLPPLLTDEMIAQYTSALLAGTITSGWTFGAGAALQIPFAMQMAYRFNGIGVTQNVLYENQKLIANQFNSAIGKIQDSLSSTASALGKLQDVVNQNAQALNTLVKQLSSNFGAISSVLNDILSRLDPPEAEVQIDRLITGRLQSLQTYVTQQLIRAAEIRASANLAATKMSECVLGQSKRVDFCGKGYQLMSFPQSAPHGVVFLNVTYVPAQEKNFTTAPAICNDGKAHFPREGVFVSNGTNWFVTQRNFYEPQIITTDNTFVSGNCDVVIGIVNNTVYDPLQPELDSFKEELDKYFKNHTSPDVDLGDISGINASVVNIQKEIDRLNEVAKNLNESLIDLQELGKYEQYIKWPWYIWLGFIAGLIAIVMVTIMLCCMTSCCSCLKGCCSCGSCCKFDEDDSEPVLKGVKLHYT

SEQ ID NO: 550 - protein, 1273 aa, Artificial Sequence
  SARS-CoV-2/Germany/BavPat1/2020__EPI_ISL_406862 spike protein (1-1273)(K986P_V987P_ H1048Q_H1064N_ H1083N_H1101N)
MFVFLVLLPLVSSQCVNLTTRTQLPPAYTNSFTRGVYYPDKVFRSSVLHSTQDLFLPFFSNVTWFHAIHVSGTNGTKRFDNPVLPFNDGVYFASTEKSNIIRGWIFGTTLDSKTQSLLIVNNATNVVIKVCEFQFCNDPFLGVYYHKNNKSWMESEFRVYSSANNCTFEYVSQPFLMDLEGKQGNFKNLREFVFKNIDGYFKIYSKHTPINLVRDLPQGFSALEPLVDLPIGINITRFQTLLALHRSYLTPGDSSSGWTAGAAAYYVGYLQPRTFLLKYNENGTITDAVDCALDPLSETKCTLKSFTVEKGIYQTSNFRVQPTESIVRFPNITNLCPFGEVFNATRFASVYAWNRKRISNCVADYSVLYNSASFSTFKCYGVSPTKLNDLCFTNVYADSFVIRGDEVRQIAPGQTGKIADYNYKLPDDFTGCVIAWNSNNLDSKVGGNYNYLYRLFRKSNLKPFERDISTEIYQAGSTPCNGVEGFNCYFPLQSYGFQPTNGVGYQPYRVVVLSFELLHAPATVCGPKKSTNLVKNKCVNFNFNGLTGTGVLTESNKKFLPFQQFGRDIADTTDAVRDPQTLEILDITPCSFGGVSVITPGTNTSNQVAVLYQGVNCTEVPVAIHADQLTPTWRVYSTGSNVFQTRAGCLIGAEHVNNSYECDIPIGAGICASYQTQTNSPRRARSVASQSIIAYTMSLGAENSVAYSNNSIAIPTNFTISVTTEILPVSMTKTSVDCTMYICGDSTECSNLLLQYGSFCTQLNRALTGIAVEQDKNTQEVFAQVKQIYKTPPIKDFGGFNFSQILPDPSKPSKRSFIEDLLFNKVTLADAGFIKQYGDCLGDIAARDLICAQKFNGLTVLPPLLTDEMIAQYTSALLAGTITSGWTFGAGAALQIPFAMQMAYRFNGIGVTQNVLYENQKLIANQFNSAIGKIQDSLSSTASALGKLQDVVNQNAQALNTLVKQLSSNFGAISSVLNDILSRLDPPEAEVQIDRLITGRLQSLQTYVTQQLIRAAEIRASANLAATKMSECVLGQSKRVDFCGKGYQLMSFPQSAPHGVVFLNVTYVPAQEKNFTTAPAICNDGKAHFPREGVFVSNGTNWFVTQRNFYEPQIITTDNTFVSGNCDVVIGIVNNTVYDPLQPELDSFKEELDKYFKNHTSPDVDLGDISGINASVVNIQKEIDRLNEVAKNLNESLIDLQELGKYEQYIKWPWYIWLGFIAGLIAIVMVTIMLCCMTSCCSCLKGCCSCGSCCKFDEDDSEPVLKGVKLHYT

SEQ ID NO: 551 - protein, 1273 aa, Artificial Sequence
  SARS-CoV-2/Wuhan/HBCDC-HB-02/2020__EPI_ISL_412978 spike protein (1-1273)(K986P_V987P_ H1048Q_H1064N_ H1083N_H1101N)
MFVFLVLLPLVSSQCVNLTTRTQLPPAYTNSFTRGVYYPDKVFRSSVLHSTQDLFLPFFSNVTWFHAIHVSGTNGTKRFDNPVLPFNDGVYFASTEKSNIIRGWIFGTTLDSKTQSLLIVNNATNVVIKVCEFQFCNDPFLGVYYHKNNKSWMESEFRVYSSANNCTFEYVSQPFLMDLEGKQGNFKNLREFVFKNIDGYFKIYSKHTPINLVRDLPQGFSALEPLVDLPIGINITRFQTLLALHRSYLTPGDSSSGWTAGAAAYYVGYLQPRTFLLKYNENGTITDAVDCALDPLSETKCTLKSFTVEKGIYQTSNFRVQPTESIVRFPNITNLCPFGEVFNATRFASVYAWNRKRISNCVADYSVLYNSASFSTFKCYGVSPTKLNDLCFTNVYADSFVIRGDEVRQIAPGQTGKIADYNYKLPDDFTGCVIAWNSNNLDSKVGGNYNYLYRLFRKSNLKPFERDISTEIYQAGSTPCNGVEGFNCYFPLQSYGFQPTNGVGYQPYRVVVLSFELLHAPATVCGPKKSTNLVKNKCVNFNFNGLTGTGVLTESNKKFLPFQQFGRDIADTTDAVRDPQTLEILDITPCSFGGVSVITPGTNTSNQVAVLYQDVNCTEVPVAIHADQLTPTWRVYSTGSNVFQTRAGCLIGAEHVNNSYECDIPIGAGICASYQTQTNSPRRARSVASQSIIAYTMSLGAENSVAYSNNSIAIPTNFTISVTTEILPVSMTKTSVDCTMYICGDSTECSNFLLQYGSFCTQLNRALTGIAVEQDKNTQEVFAQVKQIYKTPPIKDFGGFNFSQILPDPSKPSKRSFIEDLLFNKVTLADAGFIKQYGDCLGDIAARDLICAQKFNGLTVLPPLLTDEMIAQYTSALLAGTITSGWTFGAGAALQIPFAMQMAYRFNGIGVTQNVLYENQKLIANQFNSAIGKIQDSLSSTASALGKLQDVVNQNAQALNTLVKQLSSNFGAISSVLNDILSRLDPPEAEVQIDRLITGRLQSLQTYVTQQLIRAAEIRASANLAATKMSECVLGQSKRVDFCGKGYQLMSFPQSAPHGVVFLNVTYVPAQEKNFTTAPAICNDGKAHFPREGVFVSNGTNWFVTQRNFYEPQIITTDNTFVSGNCDVVIGIVNNTVYDPLQPELDSFKEELDKYFKNHTSPDVDLGDISGINASVVNIQKEIDRLNEVAKNLNESLIDLQELGKYEQYIKWPWYIWLGFIAGLIAIVMVTIMLCCMTSCCSCLKGCCSCGSCCKFDEDDSEPVLKGVKLHYT

SEQ ID NO: 552 - protein, 1273 aa, Artificial Sequence
  SARS-CoV-2/Australia/QLD02/2020__EPI_ISL_407896 spike protein (1-1273)(K986P_V987P_ H1048Q_H1064N_ H1083N_H1101N)
MFVFLVLLPLVSSQCVNLTTRTQLPPAYTNSFTRGVYYPDKVFRSSVLHSTQDLFLPFFSNVTWFHAIHVSGTNGTKRFDNPVLPFNDGVYFASTEKSNIIRGWIFGTTLDSKTQSLLIVNNATNVVIKVCEFQFCNDPFLGVYYHKNNKSWMESEFRVYSSANNCTFEYVSQPFLMDLEGKQGNFKNLREFVFKNIDGYFKIYSKHTPINLVRDLPQGFSALEPLVDLPIGINITRFQTLLALHRSYLTPGDSSSGWTAGAAAYYVGYLQPRTFLLKYNENGTITDAVDCALDPLSETKCTLKSFTVEKGIYQTSNFRVQPTESIVRFPNITNLCPFGEVFNATRFASVYAWNRKRISNCVADYSVLYNSASFSTFKCYGVSPTKLNDLCFTNVYADSFVIRGDEVRQIAPGQTGKIADYNYKLPDDFTGCVIAWNSNNLDSKVGGNYNYLYRLFRKSNLKPFERDISTEIYQAGSTPCNGVEGFNCYFPLQSYGFQPTNGVGYQPYRVVVLSFELLHAPATVCGPKKSTNLVKNKCVNFNFNGLTGTGVLTESNKKFLPFQQFGRDIADTTDAVRDPQTLEILDITPCSFGGVSVITPGTNTSNQVAVLYQDVNCTEVPVAIHADQLTPTWRVYSTGSNVFQTRAGCLIGAEHVNNSYECDIPIGAGICASYQTQTNSPRRARSVASQSIIAYTMSLGAENSVAYSNNSIAIPTNFTISVTTEILPVSMTKTSVDCTMYICGDSTECSNLLLQYGSFCTQLNRALTGIAVEQDKNTQEVFAQVKQIYKTPPIKDFGGFNFSQILPDPSKPSKRSFIEDLLFNKVTLADAGFIKQYGDCLGDIAARDLICAQKFNGLTVLPPLLTDEMIAQYTSALLAGTITSGWTFGAGAALQIPFAMQMAYRFNGIGVTQNVLYENQKLIANQFNSAIGKIQDSLSSTASALGKLQDVVNQNAQALNTLVKQLSSNFGAISSVLNDILSRLDPPEAEVQIDRLITGRLQSLQTYVTQQLIRAAEIRASANLAATKMSECVLGQSKRVDFCGKGYQLMSFPQSAPHGVVFLNVTYVPAQEKNFTTAPAICNDGKAHFPREGVFVSNGTNWFVTQRNFYEPQIITTDNTFVSGNCDVVIGIVNNTVYDPLQLELDSFKEELDKYFKNHTSPDVDLGDISGINASVVNIQKEIDRLNEVAKNLNESLIDLQELGKYEQYIKWPWYIWLGFIAGLIAIVMVTIMLCCMTSCCSCLKGCCSCGSCCKFDEDDSEPVLKGVKLHYT

SEQ ID NO: 553 - protein, 1273 aa, Artificial Sequence
  SARS-CoV-2/India/1-31/2020__EPI_ISL_413523 spike protein (1-1273)(K986P_V987P_ H1048Q_H1064N_ H1083N_H1101N)
MFVFLVLLPLVSSQCVNLTTRTQLPPAYTNSFTRGVYYPDKVFRSSVLHSTQDLFLPFFSNVTWFHAIHVSGTNGTKRFDNPVLPFNDGVYFASTEKSNIIRGWIFGTTLDSKTQSLLIVNNATNVVIKVCEFQFCNDPFLGVYYHKNNKSWMESEFRVYSSANNCTFEYVSQPFLMDLEGKQGNFKNLREFVFKNIDGYFKIYSKHTPINLVRDLPQGFSALEPLVDLPIGINITRFQTLLALHRSYLTPGDSSSGWTAGAAAYYVGYLQPRTFLLKYNENGTITDAVDCALDPLSETKCTLKSFTVEKGIYQTSNFRVQPTESIVRFPNITNLCPFGEVFNATRFASVYAWNRKRISNCVADYSVLYNSASFSTFKCYGVSPTKLNDLCFTNVYADSFVIRGDEVRQIAPGQTGKIADYNYKLPDDFTGCVIAWNSNNLDSKVGGNYNYLYRLFRKSNLKPFERDISTEIYQAGSTPCNGVEGFNCYFPLQSYGFQPTNGVGYQPYRVVVLSFELLHAPATVCGPKKSTNLVKNKCVNFNFNGLTGTGVLTESNKKFLPFQQFGRDIADTTDAVRDPQTLEILDITPCSFGGVSVITPGTNTSNQVAVLYQDVNCTEVPVAIHADQLTPTWRVYSTGSNVFQTRAGCLIGAEHVNNSYECDIPIGAGICASYQTQTNSPRRARSVASQSIIAYTMSLGAENSVAYSNNSIAIPTNFTISVTTEILPVSMTKTSVDCTMYICGDSTECSNLLLQYGSFCTQLNRALTGIAVEQDKNTQEVFAQVKQIYKTPPIKDFGGFNFSQILPDPSKPSKRSFIEDLLFNKVTLADAGFIKQYGDCLGDIAARDLICAQKFNGLTVLPPLLTDEMIAQYTSALLAGTITSGWTFGAGAALQIPFAMQMAYRFNGIGVTQNVLYENQKLIANQFNSVIGKIQDSLSSTASALGKLQDVVNQNAQALNTLVKQLSSNFGAISSVLNDILSRLDPPEAEVQIDRLITGRLQSLQTYVTQQLIRAAEIRASANLAATKMSECVLGQSKRVDFCGKGYQLMSFPQSAPHGVVFLNVTYVPAQEKNFTTAPAICNDGKAHFPREGVFVSNGTNWFVTQRNFYEPQIITTDNTFVSGNCDVVIGIVNNTVYDPLQPELDSFKEELDKYFKNHTSPDVDLGDISGINASVVNIQKEIDRLNEVAKNLNESLIDLQELGKYEQYIKWPWYIWLGFIAGLIAIVMVTIMLCCMTSCCSCLKGCCSCGSCCKFDEDDSEPVLKGVKLHYT

SEQ ID NO: 554 - protein, 1273 aa, Artificial Sequence
  SARS-CoV-2/Guangdong/GD2020087-P0008/2020__EPI_ISL_413863 spike protein (1-1273)(K986P_V987P_ H1048Q_H1064N_ H1083N_H1101N)
MFVFLVLLPLVSSQCVNLTTRTQLPPAYTNSFTRGVYYPDKVFRSSVLHSTQDLFLPFFSNVTWFHAIHVSGTNGTKRFDNPVLPFNDGVYFASTEKSNIIRGWIFGTTLDSKTQSLLIVNNATNVVIKVCEFQFCNDPFLGVYYHKNNKSWMESEFRVYSSANNCTFEYVSQPFLMDLEGKQGNFKNLREFVFKNIDGYFKIYSKHTPINLVRDLPQGFSALEPLVDLPIGINITRFQTLLALHRSYLTPGDSSSGWTAGAAAYYVGYLQPRTFLLKYNENGTITDAVDCALDPLSETKCTLKSFTVEKGIYQTSNFRVQPTESIVRFPNITNLCPFGEVFNATRFASVYAWNRKRISNCVADYSVLYNSASFSTFKCYGVSPTKLNDLCFTNVYADSFVIRGDEVREIAPGQTGKIADYNYKLPDDFTGCVIAWNSNNLDSKVGGNYNYLYRLFRKSNLKPFERDISTEIYQAGSTPCNGVEGFNCYFPLQSYGFQPTNGVGYQPYRVVVLSFELLHAPATVCGPKKSTNLVKNKCVNFNFNGLTGTGVLTESNKKFLPFQQFGRDIADTTDAVRDPQTLEILDITPCSFGGVSVITPGTNTSNQVAVLYQDVNCTEVPVAIHADQLTPTWRVYSTGSNVFQTRAGCLIGAEHVNNSYECDIPIGAGICASYQTQTNSPRRARSVASQSIIAYTMSLGAENSVAYSNNSIAIPTNFTISVTTEILPVSMTKTSVDCTMYICGDSTECSNLLLQYGSFCTQLNRALTGIAVEQDKNTQEVFAQVKQIYKTPPIKDFGGFNFSQILPDPSKPSKRSFIEDLLFNKVTLADAGFIKQYGDCLGDIAARDLICAQKFNGLTVLPPLLTDEMIAQYTSALLAGTITSGWTFGAGAALQIPFAMQMAYRFNGIGVTQNVLYENQKLIANQFNSAIGKIQDSLSSTASALGKLQDVVNQNAQALNTLVKQLSSNFGAISSVLNDILSRLDPPEAEVQIDRLITGRLQSLQTYVTQQLIRAAEIRASANLAATKMSECVLGQSKRVDFCGKGYQLMSFPQSAPHGVVFLNVTYVPAQEKNFTTAPAICNDGKAHFPREGVFVSNGTNWFVTQRNFYEPQIITTDNTFVSGNCDVVIGIVNNTVYDPLQPELDSFKEELDKYFKNHTSPDVDLGDISGINASVVNIQKEIDRLNEVAKNLNESLIDLQELGKYEQYIKWPWYIWLGFIAGLIAIVMVTIMLCCMTSCCSCLKGCCSCGSCCKFDEDDSEPVLKGVKLHYT

SEQ ID NO: 555 - protein, 1273 aa, Artificial Sequence
  SARS-CoV-2/Sweden/01/2020__EPI_ISL_411951 spike protein (1-1273)(K986P_V987P_ H1048Q_H1064N_ H1083N_H1101N)
MFVFLVLLPLVSSQCVNLTTRTQLPPAYTNSFTRGVYYPDKVFRSSVLHSTQDLFLPFFSNVTWFHAIHVSGTNGTKRFDNPVLPFNDGVYFASTEKSNIIRGWIFGTTLDSKTQSLLIVNNATNVVIKVCEFQFCNDPFLGVYYHKNNKSWMESEFRVYSSANNCTFEYVSQPFLMDLEGKQGNFKNLREFVFKNIDGYFKIYSKHTPINLVRDLPQGFSALEPLVDLPIGINITRFQTLLALHRSYLTPGDSSSGWTAGAAAYYVGYLQPRTFLLKYNENGTITDAVDCALDPLSETKCTLKSFTVEKGIYQTSNFRVQPTESIVRFPNITNLCPFGEVFNATRFASVYAWNRKRISNCVADYSVLYNSASFSTFKCYGVSPTKLNDLCFTNVYADSFVIRGDEVRQIAPGQTGKIADYNYKLPDDFTGCVIAWNSNNLDSKVGGNYNYLYRLFRKSNLKPFERDISTEIYQAGSTPCNGVEGFNCYFPLQSYGFQPTNGVGYQPYRVVVLSFELLHAPATVCGPKKSTNLVKNKCVNFNFNGLTGTGVLTESNKKFLPFQQFGRDIADTTDAVRDPQTLEILDITPCSFGGVSVITPGTNTSNQVAVLYQDVNCTEVPVAIHADQLTPTWRVYSTGSNVFQTRAGCLIGAEHVNNSYECDIPIGAGICASYQTQTNSPRRARSVASQSIIAYTMSLGAENSVAYSNNSIAIPTNFTISVTTEILPVSMTKTSVDCTMYICGDSTECSNLLLQYGSFCTQLNRALTGIAVEQDKNTQEVFAQVKQIYKTPPIKDCGGFNFSQILPDPSKPSKRSFIEDLLFNKVTLADAGFIKQYGDCLGDIAARDLICAQKFNGLTVLPPLLTDEMIAQYTSALLAGTITSGWTFGAGAALQIPFAMQMAYRFNGIGVTQNVLYENQKLIANQFNSAIGKIQDSLSSTASALGKLQDVVNQNAQALNTLVKQLSSNFGAISSVLNDILSRLDPPEAEVQIDRLITGRLQSLQTYVTQQLIRAAEIRASANLAATKMSECVLGQSKRVDFCGKGYQLMSFPQSAPHGVVFLNVTYVPAQEKNFTTAPAICNDGKAHFPREGVFVSNGTNWFVTQRNFYEPQIITTDNTFVSGNCDVVIGIVNNTVYDPLQPELDSFKEELDKYFKNHTSPDVDLGDISGINASVVNIQKEIDRLNEVAKNLNESLIDLQELGKYEQYIKWPWYIWLGFIAGLIAIVMVTIMLCCMTSCCSCLKGCCSCGSCCKFDEDDSEPVLKGVKLHYT

SEQ ID NO: 556 - protein, 1273 aa, Artificial Sequence
  SARS-CoV-2/Tianmen/HBCDC-HB-07/2020__EPI_ISL_412983 spike protein (1-1273)(K986P_V987P_ H1048Q_H1064N_ H1083N_H1101N)
MFVFLVLLPLVSSQCVNLTTRTQLPPAYTNSFTRGVYYPDKVFRSSVLHSTQDLFLPFFSNVTWFHAIHVSGTNGTKRFDNPVLPFNDGVYFASTEKSNIIRGWIFGTTLDSKTQSLLIVNNATNVVIKVCEFQFCNDPFLGVYYHKNNKSWMESEFRVYSSANNCTFEYVSQPFLMDLEGKQGNFKNLREFVFKNIDGYFKIYSKHTPINLVRDLPQGFSALEPLVDLPIGINITRFQTLLALHRSYLTPGDSSSGWTAGAAAYYVGYLQPRTFLLKYNENGTITDAVDCALDPLSETKCTLKSFTVEKGIYQTSNFRVQPTESIVRFPNITNLCPFGEVFNATRFASVYAWNRKRISNCVADYSVLYNSASFSTFKCYGVSPTKLNDLCFTNVYADSFVIRGDEVRQIAPGQTGKIADYNYKLPDDFTGCVIAWNSNNLDSKVGGNYNYLYRLFRKSNLKPFERDISTEIYQAGSTPCNGVEGFNCYFPLQSYGFQPTNGVGYQPYRVVVLSFELLHAPATVCGPKKSTNLVKNKCVNFNFNGLTGTGVLTESNKKFLPFQQFGRDIADTTDAVRDPQTLEILDITPCSFGGVSVITPGTNTSNQVAVLYQDLNCTEVPVAIHADQLTPTWRVYSTGSNVFQTRAGCLIGAEHVNNSYECDIPIGAGICASYQTQTNSPRRARSVASQSIIAYTMSLGAENSVAYSNNSIAIPTNFTISVTTEILPVSMTKTSVDCTMYICGDSTECSNLLLQYGSFCTQLNRALTGIAVEQDKNTQEVFAQVKQIYKTPPIKDFGGFNFSQILPDPSKPSKRSFIEDLLFNKVTLADAGFIKQYGDCLGDIAARDLICAQKFNGLTVLPPLLTDEMIAQYTSALLAGTITSGWTFGAGAALQIPFAMQMAYRFNGIGVTQNVLYENQKLIANQFNSAIGKIQDSLSSTASALGKLQDVVNQNAQALNTLVKQLSSNFGAISSVLNDILSRLDPPEAEVQIDRLITGRLQSLQTYVTQQLIRAAEIRASANLAATKMSECVLGQSKRVDFCGKGYQLMSFPQSAPHGVVFLNVTYVPAQEKNFTTAPAICNDGKAHFPREGVFVSNGTNWFVTQRNFYEPQIITTDNTFVSGNCDVVIGIVNNTVYDPLQPELDSFKEELDKYFKNHTSPDVDLGDISGINASVVNIQKEIDRLNEVAKNLNESLIDLQELGKYEQYIKWPWYIWLGFIAGLIAIVMVTIMLCCMTSCCSCLKGCCSCGSCCKFDEDDSEPVLKGVKLHYT

SEQ ID NO: 557 - protein, 1273 aa, Artificial Sequence
  SARS-CoV-2/Hong Kong/case42_VM20002493/2020__EPI_ISL_414527 spike protein (1-1273)(K986P_V987P_ H1048Q_H1064N_ H1083N_H1101N)
MFVFLVLLPLVSSQCVNLTTRTQLPPAYTNSFTRGVYYPDKVFRSSVLHSTQDLFLPFFSNVTWFHAIHVSGTNGTKRFDNPVLPFNDGVYFASTEKSNIIRGWIFGTTLDSKTQSLLIVNNATNVVIKVCEFQFCNDPFLGVYYHKNNKSWMESEFRVYSSANNCTFEYVSQPFLMDLEGKQGNFKNLREFVFKNIDGYFKIYSKHTPINLVRDLPQGFSALEPLVDLPIGINITRFQTLLALHRSYLTPGDSSSGWTAGAAAYYVGYLQPRTFLLKYNENGTITDAVDCALDPLSETKCTLKSFTVEKGIYQTSNFRVQPTESIVRFPNITNLCPFGEVFNATRFASVYAWNRKRISNCVADYSVLYNSASFSTFKCYGVSPTKLNDLCFTNVYADSFVIRGDEVRQIAPGQTGKIADYNYKLPDDFTGCVIAWNSNNLDSKVGGNYNYLYRLFRKSNLKPFERDISTEIYQAGSTPCNGVEGFNCYFPLQSYGFQPTNGVGYQPYRVVVLSFELLHAPATVCGPKKSTNLVKNKCVNFNFNGLTGTGVLTESNKKFLPFQQFGRDIADTTDAVRDPQTLEILDITPCSFGGVSVITPGTNTSNQVAVLYQDVNCTEVPVAIHADQLTPTWRVYSTGSNVFQTRAGCLIGAEHVNNSYECDIPIGAGICASYQTQTNSPRRARSVASQSIIAYTMSLGAENSVAYSNNSIAIPTNFAISVTTEILPVSMTKTSVDCTMYICGDSTECSNLLLQYGSFCTQLNRALTGIAVEQDKNTQEVFAQVKQIYKTPPIKDFGGFNFSQILPDPSKPSKRSFIEDLLFNKVTLADAGFIKQYGDCLGDIAARDLICAQKFNGLTVLPPLLTDEMIAQYTSALLAGTITSGWTFGAGAALQIPFAMQMAYRFNGIGVTQNVLYENQKLIANQFNSAIGKIQDSLSSTASALGKLQDVVNQNAQALNTLVKQLSSNFGAISSVLNDILSRLDPPEAEVQIDRLITGRLQSLQTYVTQQLIRAAEIRASANLAATKMSECVLGQSKRVDFCGKGYQLMSFPQSAPHGVVFLNVTYVPAQEKNFTTAPAICNDGKAHFPREGVFVSNGTNWFVTQRNFYEPQIITTDNTFVSGNCDVVIGIVNNTVYDPLQPELDSFKEELDKYFKNHTSPDVDLGDISGINASVVNIQKEIDRLNEVAKNLNESLIDLQELGKYEQYIKWPWYIWLGFIAGLIAIVMVTIMLCCMTSCCSCLKGCCSCGSCCKFDEDDSEPVLKGVKLHYT

SEQ ID NO: 558 - protein, 1273 aa, Artificial Sequence
  SARS-CoV-2/USA/CruiseA-23/2020__EPI_ISL_414482 spike protein (1-1273)(K986P_V987P_ H1048Q_H1064N_ H1083N_H1101N)
MFVFLVLLPLVSSQCVNLTTRTQLPPAYTNSFTRGVYYPDKVFRSSVLHSTQDLFLPFFSNVTWFHAIHVSGTNGTKRFDNPVLPFNDGVYFASTEKSNIIRGWIFGTTLDSKTQSLLIVNNATNVVIKVCEFQFCNDPFLGVYYHKNNKSWMESEFRVYSSANNCTFEYVSQPFLMDLEVKQGNFKNLREFVFKNIDGYFKIYSKHTPINLVRDLPQGFSALEPLVDLPIGINITRFQTLLALHRSYLTPGDSSSGWTAGAAAYYVGYLQPRTFLLKYNENGTITDAVDCALDPLSETKCTLKSFTVEKGIYQTSNFRVQPTESIVRFPNITNLCPFGEVFNATRFASVYAWNRKRISNCVADYSVLYNSASFSTFKCYGVSPTKLNDLCFTNVYADSFVIRGDEVRQIAPGQTGKIADYNYKLPDDFTGCVIAWNSNNLDSKVGGNYNYLYRLFRKSNLKPFERDISTEIYQAGSTPCNGVEGFNCYFPLQSYGFQPTNGVGYQPYRVVVLSFELLHAPATVCGPKKSTNLVKNKCVNFNFNGLTGTGVLTESNKKFLPFQQFGRDIADTTDAVRDPQTLEILDITPCSFGGVSVITPGTNTSNQVAVLYQDVNCTEVPVAIHADQLTPTWRVYSTGSNVFQTRAGCLIGAEHVNNSYECDIPIGAGICASYQTQTNSPRRARSVASQSIIAYTMSLGAENSVAYSNNSIAIPTNFTISVTTEILPVSMTKTSVDCTMYICGDSTECSNLLLQYGSFCTQLNRALTGIAVEQDKNTQEVFAQVKQIYKTPPIKDFGGFNFSQILPDPSKPSKRSFIEDLLFNKVTLADAGFIKQYGDCLGDIAARDLICAQKFNGLTVLPPLLTDEMIAQYTSALLAGTITSGWTFGAGAALQIPFAMQMAYRFNGIGVTQNVLYENQKLIANQFNSAIGKIQDSLSSTASALGKLQDVVNQNAQALNTLVKQLSSNFGAISSVLNDILSRLDPPEAEVQIDRLITGRLQSLQTYVTQQLIRAAEIRASANLAATKMSECVLGQSKRVDFCGKGYQLMSFPQSAPHGVVFLNVTYVPAQEKNFTTAPAICNDGKAHFPREGVFVSNGTNWFVTQRNFYEPQIITTDNTFVSGNCDVVIGIVNNTVYDPLQPELDSFKEELDKYFKNHTSPDVDLGDISGINASVVNIQKEIDRLNEVAKNLNESLIDLQELGKYEQYIKWPWYIWLGFIAGLIAIVMVTIMLCCMTSCCSCLKGCCSCGSCCKFDEDDSEPVLKGVKLHYT

SEQ ID NO: 559 - protein, 1273 aa, Artificial Sequence
  SARS-CoV-2/Hong Kong/case85_VM20002868/2020__EPI_ISL_414519 spike protein (1-1273)(K986P_V987P_ H1048Q_H1064N_ H1083N_H1101N)
MFVFLVLVPLVSSQCVNLTTRTQLPPAYTNSFTRGVYYPDKVFRSSVLHSTQDLFLPFFSNVTWFHAIHVSGTNGTKRFDNPVLPFNDGVYFASTEKSNIIRGWIFGTTLDSKTQSLLIVNNATNVVIKVCEFQFCNDPFLGVYYHKNNKSWMESEFRVYSSANNCTFEYVSQPFLMDLEGKQGNFKNLREFVFKNIDGYFKIYSKHTPINLVRDLPQGFSALEPLVDLPIGINITRFQTLLALHRSYLTPGDSSSGWTAGAAAYYVGYLQPRTFLLKYNENGTITDAVDCALDPLSETKCTLKSFTVEKGIYQTSNFRVQPTESIVRFPNITNLCPFGEVFNATRFASVYAWNRKRISNCVADYSVLYNSASFSTFKCYGVSPTKLNDLCFTNVYADSFVIRGDEVRQIAPGQTGKIADYNYKLPDDFTGCVIAWNSNNLDSKVGGNYNYLYRLFRKSNLKPFERDISTEIYQAGSTPCNGVEGFNCYFPLQSYGFQPTNGVGYQPYRVVVLSFELLHAPATVCGPKKSTNLVKNKCVNFNFNGLTGTGVLTESNKKFLPFQQFGRDIADTTDAVRDPQTLEILDITPCSFGGVSVITPGTNTSNQVAVLYQDVNCTEVPVAIHADQLTPTWRVYSTGSNVFQTRAGCLIGAEHVNNSYECDIPIGAGICASYQTQTNSPRRARSVASQSIIAYTMSLGAENSVAYSNNSIAIPTNFTISVTTEILPVSMTKTSVDCTMYICGDSTECSNLLLQYGSFCTQLNRALTGIAVEQDKNTQEVFAQVKQIYKTPPIKDFGGFNFSQILPDPSKPSKRSFIEDLLFNKVTLADAGFIKQYGDCLGDIAARDLICAQKFNGLTVLPPLLTDEMIAQYTSALLAGTITSGWTFGAGAALQIPFAMQMAYRFNGIGVTQNVLYENQKLIANQFNSAIGKIQDSLSSTASALGKLQDVVNQNAQALNTLVKQLSSNFGAISSVLNDILSRLDPPEAEVQIDRLITGRLQSLQTYVTQQLIRAAEIRASANLAATKMSECVLGQSKRVDFCGKGYQLMSFPQSAPHGVVFLNVTYVPAQEKNFTTAPAICNDGKAHFPREGVFVSNGTNWFVTQRNFYEPQIITTDNTFVSGNCDVVIGIVNNTVYDPLQPELDSFKEELDKYFKNHTSPDVDLGDISGINASVVNIQKEIDRLNEVAKNLNESLIDLQELGKYEQYIKWPWYIWLGFIAGLIAIVMVTIMLCCMTSCCSCLKGCCSCGSCCKFDEDDSEPVLKGVKLHYT

SEQ ID NO: 560 - protein, 1273 aa, Artificial Sequence
  SARS-CoV-2/England/200990660/2020__EPI_ISL_414523 spike protein (1-1273)(K986P_V987P_ H1048Q_H1064N_ H1083N_H1101N)
MFVFLVLLPLVSSQCVNLTTRTQLPPAYTNSFTRGVYYPDKVFRSSVLHSTQDLFLPFFSNVTWFHAIHVSGTNGTKRFDNPVLPFNDGVYFASTEKSNIIRGWIFGTTLDSKTQSLLIVNNATNVVIKVCEFQFCNDPFLGVYYHKNNKSWMESEFRVYSSANNCTFEYVSQPFLMDLEGKQGNFKNLREFVFKNIDGYFKIYSKHTPINLVRDLPQGFSALEPLVDLPIGINITRFQTLLALHRSYLTPGDSSSGWTAGAAAYYVGYLQPRTFLLKYNENGTITDAVDCALDPLSETKCTLKSFTVEKGIYQTSNFRVQPTESIVRFPNITNLCPFGEVFNATRFASVYAWNRKRISNCVADYSVLYNSASFSTFKCYGVSPTKLNDLCFTNVYADSFVIRGDEVRQIAPGQTGKIADYNYKLPDDFTGCVIAWNSNNLDSKVGGNYNYLYRLFRKSNLKPFERDISTEIYQAGSTPCNGVEGFNCYFPLQSYGFQPTNGVGYQPYRVVVLSFELLHAPATVCGPKKSTNLVKNKCVNFNFNGLTGTGVLTESNKKFLPFQQFGRDIADTTDAVRDPQTLEILDITPCSFGGVSVITPGTNTSNQVAVLYQGVNCTEVPVAIHADQLTPTWRVYSTGSNVFQTRAGCLIGAEHVNNSYECDIPIGAGICASYQTQTNSPRRARSVASQSIIAYTMSLGAENSVAYSNNSIAIPTNFTISVTTEILPVSMTKTSVDCTMYICGDSTECSNLLLQYGSFCTQLNRALTGIAVEQDKNTQEVFAQVKQIYKTPPIKDFGGFNFSQILPDPSKPSKRSFIEDLLFNKVTLADAGFIKQYGDCLGDIAARDLICAQKFNGLTVLPPLLTDEMIAQYTSALLAGTITSGWTFGAGAALQIPFAMQMAYRFNGIGVTQNVLYENQKLIANQFNSAIGKIQDSLSSTASALGKLQDVVNQNAQALNTLVKQLSSNFGAISSVLNDILSRLDPPEAEVQIDRLITGRLQSLQTYVTQQLIRAAEIRASANLAATKMSECVLGQSKRVDFCGKGYQLMSFPQSAPHGVVFLNVTYVPAQEKNFTTAPAICNDGKAHFPREGVFVSNGTNWFVTQRNFYEPQIITTDNTFVSGNCDVVIGIVNNTVYDPLQPELDSFKEELDKYFKNHTSPDVDLGDISGINASVVNIQKEIDRLNEVAKNLNESLIDLQELGKYEQYIKWPWYIWLGFIAGLIAIVMVTIMLCCMTSCCSCLKGCCSCGSCCKFDEDDSELVLKGVKLHYT

SEQ ID NO: 561 - protein, 1273 aa, Artificial Sequence
  SARS-CoV-2/Australia/NSW09/2020__EPI_ISL_413595 spike protein (1-1273)(K986P_V987P_ H1048Q_H1064N_ H1083N_H1101N)
MFVFLVLLPLVSSQCVNLTTRTQLPPAYTNSFTRGVYYPDKVFRSSVLHSTQDLFLPFFSNVTWFHAIHVSGTNGTKRFDNPVLPFNDGVYFASTEKSNIIRGWIFGTTLDSKTQSLLIVNNATNVVIKVCEFQFCNDPFLGVYYHKNNKSWMESEFRVYSSANNCTFEYVSQPFLMDLEGKQGNFKNLREFVFKNIDGYFKIYSKHTPINLVRDLPQGFSALEPLVDLPIGINITRFQTLLALHRSYLTPGDSSSGWTAGAAAYYVGYLQPRTFLLKYNENGTITDAVDCALDPLSETKCTLKSFTVEKGIYQTSNFRVQPTESIVRFPNITNLCPFGEVFNATRFASVYAWNRKRISNCVADYSVLYNSASFSTFKCYGVSPTKLNDLCFTNVYADSFVIRGDEVRQIAPGQTGKIADYNYKLPDDFTGCVIAWNSNNLDSKVGGNYNYLYRLFRKSNLKPFERDISTEIYQAGSTPCNGVEGFNCYFPLQSYGFQPTNGVGYQPYRVVVLSFELLHAPATVCGPKKSTNLVKNKCVNFNFNGLTGTGVLTESNKKFLPFQQFGRDIADTTDAVRDPQTLEILDITPCSFGGVSVITPGTNTSNQVAVLYQDVNCTEVPVAIHADQLTPTWRVYSTGSNVFQTRAGCLIGAEHVNNSYECDIPIGAGICASYQTQTNSPRRARSVASQSIIAYTMSLGAENSVAYSNNSIAIPTNFTISVTTEILPVSMTKTSVDCTMYICGDSTECSNLLLQYGSFCTQLNRALTGIAVEQDKNTQEVFAQVKQIYKTPPIKDFGGFNFSQILPDPSKPSKRSFIEDLLFNKVTLADAGFIKQYGDCLGDIAARDLICAQKFNGLTVLPPLLTDEMIAQYTSALLAGTITSGWTFGAGAALQIPFAMQMAYRFNGIGVTQNVLYENQKLIANQFNSAIGKIQDSLSFTASALGKLQDVVNQNAQALNTLVKQLSSNFGAISSVLNDILSRLDPPEAEVQIDRLITGRLQSLQTYVTQQLIRAAEIRASANLAATKMSECVLGQSKRVDFCGKGYQLMSFPQSAPHGVVFLNVTYVPAQEKNFTTAPAICNDGKAHFPREGVFVSNGTNWFVTQRNFYEPQIITTDNTFVSGNCDVVIGIVNNTVYDPLQPELDSFKEELDKYFKNHTSPDVDLGDISGINASVVNIQKEIDRLNEVAKNLNESLIDLQELGKYEQYIKWPWYIWLGFIAGLIAIVMVTIMLCCMTSCCSCLKGCCSCGSCCKFDEDDSEPVLKGVKLHYT

SEQ ID NO: 562 - protein, 1273 aa, Artificial Sequence
  SARS-CoV-2/Australia/NSW10/2020__EPI_ISL_413596 spike protein (1-1273)(K986P_V987P_ H1048Q_H1064N_ H1083N_H1101N)
MFVFLVLLPLVSSQCVNLTTRTQLPPAYTNSFTRGVYYPDKVFRSSVLHSTQDLFLPFFSNVTWFHAIHVSGTNGTKRFDNPVLPFNDGVYFASTEKSNIIRGWIFGTTLDSKTQSLLIVNNATNVVIKVCEFQFCNDPFLGVYYHKNNKSWMESEFRVYSSANNCTFEYVSQPFLMDLEGKQGNFKNLREFVFKNIDGYFKIYSKHTPINLVRDLPQGFSALEPLVDLPIGINITRFQTLLALHRSYLTPGDSSSGWTAGAAAYYVGYLQPRTFLLKYNENGTITDAVDCALDPLSETKCTLKSFTVEKGIYQTSNFRVQPTESIVRFPNITNLCPFGEVFNATRFASVYAWNRKRISNCVADYSVLYNSASFSTFKCYGVSPTKLNDLCFTNVYADSFVIRGDEVRQIAPGQTGKIADYNYKLPDDFTGCVIAWNSNNLDSKVGGNYNYLYRLFRKSNLKPFERDISTEIYQAGSTPCNGVEGFNCYFPLQSYGFQPTNGVGYQPYRVVVLSFELLHAPATVCGPKKSTNLVKNKCVNFNFNGLTGTGVLTESNKKFLPFQQFGRDIADTTDAVRDPQTLEILDITPCSFGGVSVITPGTNTSNQVAVLYQDVNCTEVPVAIHADQLTPTWRVYSTGSNVFQTRAGCLIGAEHVNNSYECDIPIGAGICASYQTQTNSPRRARSVASQSIIAYTMSLGAENSVAYSNNSIAIPTNFTISVTTEILPVSMTKTSVDCTMYICGDSTECSNLLLQYGSFCTQLNRALTGIAVEQDKNTQEVFAQVKQIYKTPPIKDFGGFNFSQILPDPSKPSKRSFIEDLLFNKVTLADAGFIKQYGDCLGDIAARDLICAQKFNGLTVLPPLLTDEMIAQYTSALLAGTITSGWTFGAGAALQIPFAMQMAYRFNGIGVTQNVLYENQKLIANQFNSAIGKIQDSLSSTASALGKLQDVVNQNAQALNTLVKQLSSNFGAISSVLNDILSRLDPPEAEVQIDRLITGRLQSLQTYVTQQLIRAAEIRASANLAATKMSECVLGQSKRVDFCGKGYQLMSFPQSAPHGVVFLNVTYVPAQEKNFTTAPAICNDGKAHFPREGVFVSNGTNWFVTQRNFYEPQIITTDNTFVSGNCDVVIGIVNNTVYDPLQPELDSFKEELDKYFKNHTSPDVDLGDISGINASVVNIQKEIDRLNEVAKNLNESLIDLQELGKYEQYIKWPWYIWLGFIAGLIAIVMVTIMLCCMTSCCSCLKGCCSCGSCFKFDEDDSEPVLKGVKLHYT

SEQ ID NO: 563 - protein, 1273 aa, Artificial Sequence
  SARS-CoV-2/Switzerland/1000477797/2020__EPI_ISL_413023 spike protein (1-1273)(K986P_V987P_ H1048Q_H1064N_ H1083N_H1101N)
MFVFLVLLPLVSSQCVNLTTRTQLPPAYTNSFTRGVYYPDKVFRSSVLHSTQDLFLPFFSNVTWFHAIHVSGTNGTKRFDNPVLPFNDGVYFASTEKSNIIRGWIFGTTLDSKTQSLLIVNNATNVVIKVCEFQFCNDPFLGVYYHKNNKSWMESEFRVYSSANNCTFEYVSQPFLMDLEGKQGNFKNLREFVFKNIDGYFNIYSKHTPINLVRDLPQGFSALEPLVDLPIGINITRFQTLLALHRSYLTPGDSSSGWTAGAAAYYVGYLQPRTFLLKYNENGTITDAVDCALDPLSETKCTLKSFTVEKGIYQTSNFRVQPTESIVRFPNITNLCPFGEVFNATRFASVYAWNRKRISNCVADYSVLYNSASFSTFKCYGVSPTKLNDLCFTNVYADSFVIRGDEVRQIAPGQTGKIADYNYKLPDDFTGCVIAWNSNNLDSKVGGNYNYLYRLFRKSNLKPFERDISTEIYQAGSTPCNGVEGFNCYFPLQSYGFQPTNGVGYQPYRVVVLSFELLHAPATVCGPKKSTNLVKNKCVNFNFNGLTGTGVLTESNKKFLPFQQFGRDIADTTDAVRDPQTLEILDITPCSFGGVSVITPGTNTSNQVAVLYQGVNCTEVPVAIHADQLTPTWRVYSTGSNVFQTRAGCLIGAEHVNNSYECDIPIGAGICASYQTQTNSPRRARSVASQSIIAYTMSLGAENSVAYSNNSIAIPTNFTISVTTEILPVSMTKTSVDCTMYICGDSTECSNLLLQYGSFCTQLNRALTGIAVEQDKNTQEVFAQVKQIYKTPPIKDFGGFNFSQILPDPSKPSKRSFIEDLLFNKVTLADAGFIKQYGDCLGDIAARDLICAQKFNGLTVLPPLLTDEMIAQYTSALLAGTITSGWTFGAGAALQIPFAMQMAYRFNGIGVTQNVLYENQKLIANQFNSAIGKIQDSLSSTASALGKLQDVVNQNAQALNTLVKQLSSNFGAISSVLNDILSRLDPPEAEVQIDRLITGRLQSLQTYVTQQLIRAAEIRASANLAATKMSECVLGQSKRVDFCGKGYQLMSFPQSAPHGVVFLNVTYVPAQEKNFTTAPAICNDGKAHFPREGVFVSNGTNWFVTQRNFYEPQIITTDNTFVSGNCDVVIGIVNNTVYDPLQPELDSFKEELDKYFKNHTSPDVDLGDISGINASVVNIQKEIDRLNEVAKNLNESLIDLQELGKYEQYIKWPWYIWLGFIAGLIAIVMVTIMLCCMTSCCSCLKGCCSCGSCCKFDEDDSEPVLKGVKLHYT

SEQ ID NO: 564 - protein, 1273 aa, Artificial Sequence
  SARS-CoV-2/Belgium/BA-02291/2020__EPI_ISL_415159 spike protein (1-1273)(K986P_V987P_ H1048Q_H1064N_ H1083N_H1101N)
MFVFLVLLPLVSSQCVNLTTRTQLPPAYTNSFTRGVYYPDKVFRSSVLHSTQDLFLPFFSNVTWFHAIHVSGTNGTKRFDNPVLPFNDGVYFASTEKSNIIRGWIFGTTLDSKTQSLLIVNNATNVVIKVCEFQFCNDPFLGVYYHKNNKSWMESEFRVYSSANNCTFEYVSQPFLMDLEGKQGNFKNLREFVFKNIDGYFKIYSKHTPINLVRDLPQGFSALEPLVDLPIGINITRFQTLLALHRSYLTPGDSSSGWTAGAAAYYVGYLQPRTFLLKYNENGTITDAVDCALDPLSETKCTLKSFTVEKGIYQTSNFRVQPTESIVRFPNITNLCPFGEVFNATRFASVYAWNRKRISNCVADYSVLYNSASFSTFKCYGVSPTKLNDLCFTNVYADSFVIRGDEVRQIAPGQTGKIADYNYKLPDDFTGCVIAWNSNNLDSKVGGNYNYLYRLFRRSNLKPFERDISTEIYQAGSTPCNGVEGFNCYFPLQSYGFQPTNGVGYQPYRVVVLSFELLPAPATVCGPKKSTNLVKNKCVNFNFNGLTGTGVLTESNKKFLPFQQFGRDIADTTDAVRDPQTLEILDITPCSFGGVSVITPGTNTSNQVAVLYQGVNCTEVPVAIHADQLTPTWRVYSTGSNVFQTRAGCLIGAEHVNNSYECDIPIGAGICASYQTQTNSPRRARSVASQSIIAYTMSLGAENSVAYSNNSIAIPTNFTISVTTEILPVSMTKTSVDCTMYICGDSTECSNLLLQYGSFCTQLNRALTGIAVEQDKNTQEVFAQVKQIYKTPPIKDFGGFNFSQILPDPSKPSKRSFIEDLLFNKVTLADAGFIKQYGDCLGDIAARDLICAQKFNGLTVLPPLLTDEMIAQYTSALLAGTITSGWTFGAGAALQIPFAMQMAYRFNGIGVTQNVLYENQKLIANQFNSAIGKIQDSLSSAAPALGKLQDVVNQNAQALNTLVKQLSSNFGAISSVLNDILSRLDPPEAEVQIDRLITGRLQSLQTYVTQQLIRAAEIRASANLAATKMSECVLGQSKRVDFCGKGYQLMSFPQSAPHGVVFLNVTYVPAQEKNFTTAPAICNDGKAHFPREGVFVSNGTNWFVTQRNFYEPQIITTDNTFVSGNCDVVIGIVNNTVYDPLQPELDSFKEELDKYFKNHTSPDVDLGDISGINASVVNIQKEIDRLNEVAKNLNESLIDLQELGKYEQYIKWPWYIWLGFIAGLIAIVMVTIMLCCMTSCCSCLKGCCSCGSCCKFDEDDSEPVLKGVKLHYT

SEQ ID NO: 565 - protein, 1273 aa, Artificial Sequence
  SARS-CoV-2/USA/WA8-UW5/2020__EPI_ISL_413486 spike protein (1-1273)(K986P_V987P_ H1048Q_H1064N_ H1083N_H1101N)
MFVFLVLLPLVSSQCVNLTTRTQLPPAYTNSFTRGVYYPDKVFRSSVLHSTQDLFLPFFSNVTWFHAIHVSGTNGTKRFDNPVLPFNDGVYFASTEKSNIIRGWIFGTTLDSKTQSLLIVNNATNVVIKVCEFQFCNDPFLGVYYHKNNKSWMESEFRVYSSANNCTFEYVSQPFLMDLEGKQGNFKNLREFVFKNIDGYFKIYSKHTPINLVRDLPQGFSALEPLVDLPIGINITRFQTLLALHRSYLTPGDSSSGWTAGAAAYYVGYLQPRTFLLKYNENGTITDAVDCALDPLSETKCTLKSFTVEKGIYQTSNFRVQPTESIVRFPNITNLCPFGEVFNATRFASVYAWNRKRISNCVADYSVLYNSASFSTFKCYGVSPTKLNDLCFTNVYADSFVIRGDEVRQIAPGQTGKIADYNYKLPDDFTGCVIAWNSNNLDSKVGGNYNYLYRLFRKSNLKPFERDISTEIYQAGSTPCNGVEGFNCYFPLQSYGFQPTNGVGYQPYRVVVLSFELLHAPATVCGPKKSTNLVKNKCVNFNFNGLTGTGVLTESNKKFLPFQQFGRDIADTTDAVRDPQTLEILDITPCSFGGVSVITPGTNTSNQVAVLYQDVNCTEVPVAIHADQLTPTWRVYSTGSNVFQTRAGCLIGAEYVNNSYECDIPIGAGICASYQTQTNSPRRARSVASQSIIAYTMSLGAENSVAYSNNSIAIPTNFTISVTTEILPVSMTKTSVDCTMYICGDSTECSNLLLQYGSFCTQLNRALTGIAVEQDKNTQEVFAQVKQIYKTPPIKDFGGFNFSQILPDPSKPSKRSFIEDLLFNKVTLADAGFIKQYGDCLGDIAARDLICAQKFNGLTVLPPLLTDEMIAQYTSALLAGTITSGWTFGAGAALQIPFAMQMAYRFNGIGVTQNVLYENQKLIANQFNSAIGKIQDSLSSTASALGKLQDVVNQNAQALNTLVKQLSSNFGAISSVLNDILSRLDPPEAEVQIDRLITGRLQSLQTYVTQQLIRAAEIRASANLAATKMSECVLGQSKRVDFCGKGYQLMSFPQSAPHGVVFLNVTYVPAQEKNFTTAPAICNDGKAHFPREGVFVSNGTNWFVTQRNFYEPQIITTDNTFVSGNCDVVIGIVNNTVYDPLQPELDSFKEELDKYFKNHTSPDVDLGDISGINASVVNIQKEIDRLNEVAKNLNESLIDLQELGKYEQYIKWPWYIWLGFIAGLIAIVMVTIMLCCMTSCCSCLKGCCSCGSCCKFDEDDSEPVLKGVKLHYT

SEQ ID NO: 566 - protein, 1273 aa, Artificial Sequence
  SARS-CoV-2/England/20102000506/2020__EPI_ISL_415147 spike protein (1-1273)(K986P_V987P_ H1048Q_H1064N_ H1083N_H1101N)
MFVFLVLLPLVSSQCVNLTTRTQLPPAYTNSFTRGVYYPDKVFRSSVLHSTQDLFLPFFSNVTWFHAIHVSGTNGTKRFDNPVLPFNDGVYFASTEKSNIIRGWIFGTTLDSKTQSLLIVNNATNVVIKVCEFQFCNDPFLGVYYHKNNKSWMESEFRVYSSANNCTFEYVSQPFLMDLEGKQGNFKNLREFVFKNIDGYFKIYSKHTPINLVRDLPQGFSALEPLVDLPIGINITRFQTLLALHRSYLTPGDSSSGWTAGAAAYYVGYLQPRTFLLKYNENGTITDAVDCALDPLSETKCTLKSFTVEKGIYQTSNFRVQPTESIVRFPNITNLCPFGEVFNATRFASVYAWNRKRISNCVADYSVLYNSASFSTFKCYGVSPTKLNDLCFTNVYADSFVIRGDEVRQIAPGQTGKIADYNYKLPDDFTGCVIAWNSNNLDSKVGGNYNYLYRLFRKSNLKPFERDISTEIYQAGSTPCNGVEGFNCYFPLQSYGFQPTNGVGYQPYRVVVLSFELLHAPATVCGPKKSTNLVKNKCVNFNFNGLTGTGVLTESNKKFLPFQQFGRDIADTTDAVRDPQTLEILDITPCSFGGVSVITPGTNTSNQVAVLYQGVNCTEVPVAIHADQLTPTWRVYSTGSNVFQTRAGCLIGAEHVNNSYECDIPIGAGICASYQTQTNSPRRARSVASQSIIAYTMSLGAENSVAYSNNSIAIPTNFTISVTTEILPVSMTKTSVDCTMYICGDSTECSNLLLQYGSFCTQLNRALTGIAVEQDKNTQEVFAQVKQIYKTPPIKDFGGFNFSQILPDPSKPSKRSFIEDLLFNKVTLADAGFIKQYGYCLGDIAARDLICAQKFNGLTVLPPLLTDEMIAQYTSALLAGTITSGWTFGAGAALQIPFAMQMAYRFNGIGVTQNVLYENQKLIANQFNSAIGKIQDSLSSTASALGKLQDVVNQNAQALNTLVKQLSSNFGAISSVLNDILSRLDPPEAEVQIDRLITGRLQSLQTYVTQQLIRAAEIRASANLAATKMSECVLGQSKRVDFCGKGYQLMSFPQSAPHGVVFLNVTYVPAQEKNFTTAPAICNDGKAHFPREGVFVSNGTNWFVTQRNFYEPQIITTDNTFVSGNCDVVIGIVNNTVYDPLQPELDSFKEELDKYFKNHTSPDVDLGDISGINASVVNIQKEIDRLNEVAKNLNESLIDLQELGKYEQYIKWPWYIWLGFIAGLIAIVMVTIMLCCMTSCCSCLKGCCSCGSCCKFDEDDSEPVLKGVKLHYT

SEQ ID NO: 567 - protein, 1273 aa, Artificial Sequence
  SARS-CoV-2/Belgium/VAG-03013/2020__EPI_ISL_415155 spike protein (1-1273)(K986P_V987P_ H1048Q_H1064N_ H1083N_H1101N)
MFVFLVLLPLVSSQCVNLTTRTQLPPAYTNSFTRGVYYPDKVFRSSVLHSTQDLFLPFFSNVTWFHAIHVSGTNGTKRFDNPVLPFNDGVYFASTEKSNIIRGWIFGTTLDSKTQSLLIVNNATNVVIKVCEFQFCNDPFLGVYYHKNNKSWMESEFRVYSSANNCTFEYVSQPFLMDLEGKQGNFKNLREFVFKNIDGYFKIYSKHTPINLVRDLPQGFSALEPLVDLPIGINITRFQTLLALHRSYLTPGDSSSGWTAGAAAYYVGYLQPRTFLLKYNENGTITDAVDCALDPLSETKCTLKSFTVEKGIYQTSNFRVQPTESIVRFPNITNLCPFGEVFNATRFASVYAWNRKRISNCVADYSVLYNSASFSTFKCYGVSPTKLNDLCFTNVYADSFVIRGDEVRQIAPGQTGKIADYNYKLPDDFTGCVIAWNSNNLDSKVGGNYNYLYRLFRKSNLKPFERDISTEIYQAGSTPCNGVEGFNCYFPLQSYGFQPTNGVGYQPYRVVVLSFELLHAPATVCGPKKSTNLVKNKCVNFNFNGLTGTGVLTESNKKFLPFQQFGRDIADTTDAVRDPQTLEILDITPCSFGGVSVITPGTNTSNQVAVLYQGVNCTEVPVAIHADQLTPTWRVYSTGSNVFQTRAGCLIGAEHVNNSYECDIPIGAGICASYQTQTNSPRRARSVASQSIIAYTMSLGAENSVAYSNNSIAIPTNFTISVTTEILPVSMTKTSVDCTMYICGDSTECSNLLLQYGSFCTQLNRALTGIAVEQDKNTQEVFAQVKQIYKTPPIKDFGGFNFSQILPDPSKPSKRSFIEDLLFNKVTLADAGFIKQYGDCLGDIAARDLICAQKFNGLTVLPPLLTDEMIAQYTSALLAGTITSGWTFGAGAALQIPFAMQMAYRFNGIGVTQNVLYENQKLIANQFNSAIGKIQDSLSSTATALGKLQDVVNQNAQALNTLVKQLSSNFGAISSVLNDILSRLDPPEAEVQIDRLITGRLQSLQTYVTQQLIRAAEIRASANLAATKMSECVLGQSKRVDFCGKGYQLMSFPQSAPHGVVFLNVTYVPAQEKNFTTAPAICNDGKAHFPREGVFVSNGTNWFVTQRNFYEPQIITTDNTFVSGNCDVVIGIVNNTVYDPLQPELDSFKEELDKYFKNHTSPDVDLGDISGINASVVNIQKEIDRLNEVAKNLNESLIDLQELGKYEQYIKWPWYIWLGFIAGLIAIVMVTIMLCCMTSCCSCLKGCCSCGSCCKFDEDDSEPVLKGVKLHYT

SEQ ID NO: 568 - protein, 1273 aa, Artificial Sequence
  SARS-CoV-2/Belgium/BC-03016/2020__EPI_ISL_415157 spike protein (1-1273)(K986P_V987P_ H1048Q_H1064N_ H1083N_H1101N)
MFVFLVLLPLVSSQCVNLTTRTQLPPAYTNSFTRGVYYPDKVFRSSVLHSTQDLFLPFFSNVTWFHAIHVSGTNGTKRFDNPVLPFNDGVYFASTEKSNIIRGWIFGTTLDSKTQSLLIVNNATNVVIKVCEFQFCNDPFLGVYYHKNNKSWMESEFRVYSSANNCTFEYVSQPFLMDLEGKQGNFKNLREFVFKNIDGYFKIYSKHTPINLVRDLPQGFSALEPLVDLPIGINITRFQTLLALHRSYLTPGDSSSGWTAGAAAYYVGYLQPRTFLLKYNENGTITDAVDCALDPLSETKCTLKSFTVEKGIYQTSNFRVQPTESIVRFPNITNLCPFGEVFNATRFASVYAWNRKRISNCVADYSVLYNSASFSTFKCYGVSPTKLNDLCFTNVYADSFVIRGDEVRQIAPGQTGKIADYNYKLPDDFTGCVIAWNSNNLDSKVGGNYNYLYRLFRKSNLKPFERDISTEIYQAGSTPCNGVEGFNCYFPLQSYGFQPTNGVGYQPYRVVVLSFELLHAPATVCGPKKSTNLVKNKCVNFNFNGLTGTGVLTESNKKFLPFQQFGRDIADTTDAVRDPQTLEILDITPCSFGGVSVITPGTNTSNQVAVLYQGVNCTEVPVAIHADQLTPTWRVYSTGSNVFQTRAGCLIGAEHVNNSYECDIPIGAGICASYQTQTNSPRRARSVASQSIIAYTMSLGAENSVAYSNNSIAIPTNFTISVTTEILPVSMTKTSVDCTMYICGDSTECSNLLLQYGSFCTQLNRALTGIAVEQDKNTQEVFAQVKQIYKTPPIKDFGGFNFSQILPDPSKPSKRSFIEDLLFNKVTLADAGFIKQYGDCLGDIAARDLICAQKFNGLTVLPPLLTDEMIAQYTSALLAGTITSGWTFGAGAALQIPFAMQMAYRFNGIGVTQNVLYENQKLIANQFNSAIGKIQDSLSSTAPALGKLQDVVNQNAQALNTLVKQLSSNFGAISSVLNDILSRLDPPEAEVQIDRLITGRLQSLQTYVTQQLIRAAEIRASANLAATKMSECVLGQSKRVDFCGKGYQLMSFPQSAPHGVVFLNVTYVPAQEKNFTTAPAICNDGKAHFPREGVFVSNGTNWFVTQRNFYEPQIITTDNTFVSGNCDVVIGIVNNTVYDPLQPELDSFKEELDKYFKNHTSPDVDLGDISGINASVVNIQKEIDRLNEVAKNLNESLIDLQELGKYEQYIKWPWYIWLGFIAGLIAIVMVTIMLCCMTSCCSCLKGCCSCGSCCKFDEDDSEPVLKGVKLHYT

SEQ ID NO: 569 - protein, 1273 aa, Artificial Sequence
  SARS-CoV-2/Germany/BavPat3/2020__EPI_ISL_414521 spike protein (1-1273)(K986P_V987P_ H1048Q_H1064N_ H1083N_H1101N)
MFVFLVLLPLVSSQCVNLTTRTQLPPAYTNSFTRGVYYPDKVFRSSVLHSTQDLFLPFFSNVTWFHAIHVSGTNGTKRFDNPVLPFNDGVYFASTEKSNIIRGWIFGTTLDSKTQSLLIVNNATNVVIKVCEFQFCNDPFLGVYYHKNNKSWMESEFRVYSSANNCTFEYVSQPFLMDLEGKQGNFKNLREFVFKNIDGYFKIYSKHTPINLVRDLPQGFSALEPLVDLPIGINITRFQTLLALHRSYLTPGDSSSGWTAGAAAYYVGYLQPRTFLLKYNENGTITDAVDCALDPLSETKCTLKSFTVEKGIYQTSNFRVQPTESIVRFPNITNLCPFGEVFNATRFASVYAWNRKRISNCVADYSVLYNSASFSTFKCYGVSPTKLNDLCFTNVYADSFVIRGDEVRQIAPGQTGKIADYNYKLPDDFTGCVIAWNSNNLDSKVGGNYNYLYRLFRKSNLKPFERDISTEIYQAGSTPCNGVEGFNCYFPLQSYGFQPTNGVGYQPYRVVVLSFELLHAPATVCGPKKSTNLVKNKCVNFNFNGLTGTGVLTESNKKFLPFQQFGRDIADTTDAVRDPQTLEILDITPCSFGGVSVITPGTNTSNQVAVLYQDVNCTEVPVAIHADQLTPTWRVYSTGSNVFQTRAGCLIGAEHVNNSYECDIPIGAGICASYQTQTNSPRRARSVASQSIIAYTMSLGAENSVAYSNNSIAIPTNFTISVTTEILPVSMTKTSVDCTMYICGDSTECSNLLLQYGSFCTQLNRALTGIAVEQDKNTQQVFAQVKQIYKTPPIKDFGGFNFSQILPDPSKPSKRSFIEDLLFNKVTLADAGFIKQYGDCLGDIAARDLICAQKFNGLTVLPPLLTDEMIAQYTSALLAGTITSGWTFGAGAALQIPFAMQMAYRFNGIGVTQNVLYENQKLIANQFNSAIGKIQDSLSSTASALGKLQDVVNQNAQALNTLVKQLSSNFGAISSVLNDILSRLDPPEAEVQIDRLITGRLQSLQTYVTQQLIRAAEIRASANLAATKMSECVLGQSKRVDFCGKGYQLMSFPQSAPHGVVFLNVTYVPAQEKNFTTAPAICNDGKAHFPREGVFVSNGTNWFVTQRNFYEPQIITTDNTFVSGNCDVVIGIVNNTVYDPLQPELDSFKEELDKYFKNHTSPDVDLGDISGINASVVNIQKEIDRLNEVAKNLNESLIDLQELGKYEQYIKWPWYIWLGFIAGLIAIVMVTIMLCCMTSCCSCLKGCCSCGSCCKFDEDDSEPVLKGVKLHYT

SEQ ID NO: 570 - protein, 1273 aa, Artificial Sequence
  SARS-CoV-2/France/HF1805/2020__EPI_ISL_414628 spike protein (1-1273)(K986P_V987P_ H1048Q_H1064N_ H1083N_H1101N)
MFVFLVLLPLVSSQCVNLTTRTQLPPAYTNSFTRGVYYPDKVFRSSVLHSTQDLFLPFFSNVTWFHAIHVSGTNGTKRFDNPVLPFNDGVYFASTEKSNIIRGWIFGTTLDSKTQSLLIVNNATNVVIKVCEFQFCNDPFLGVYYHKNNKSWMESEFRVYSSANNCTFEYVSQPFLMDLEGKQGNFKNLREFVFKNIDGYFKIYSKHTPINLVRDLPQGFSALEPLVDLPIGINITRFQTLLALHRSYLTPGDSSSGWTAGAAAYYVGYLQPRTFLLKYNENGTITDAVDCALDPLSETKCTLKSFTVEKGIYQTSNFRVQPTESIVRFPNITNLCPFGEVFNATRFASVYAWNRKRISNCVADYSVLYNSASFSTFKCYGVSPTKLNDLCFTNVYADSFVIRGDEVRQIAPGQTGKIADYNYKLPDDFTGCVIAWNSNNLDSKVGGNYNYLYRLFRKSNLKPFERDISTEIYQAGSTPCNGVEGFNCYFPLQSYGFQPTNGVGYQPYRVVVLSFELLHAPATVCGPKKSTNLVKNKCVNFNFNGLTGTGVLTESNKKFLPFQQFGRDIADTTDAVRDPQTLEILDITPCSFGGVSVITPGTNTSNQVAVLYQGVNCTEVPVAIHADQLTPTWRVYSTGSNVFQTRAGCLIGAEHVNNSYECDIPIGAGICASYQTQTNSPRRARSVASQSIIAYTMSLGAENSVAYSNNSIAIPTNFTISVTTEILPVSMTKTSVDCTMYICGDSTECSNLLLQYGSFCTQLNRALTGIAVEQDKNTQEVFAQVKQIYKTPPIKDFGGFNFSQILPDPSKPSKRSFIEDLLFNKVTLADAGFIKQYGDCLGDIAARDLICAQKFNGLTVLPPLLTDEMIAQYTSALLAGTITSGWTFGAGAALQIPFAMQMAYRFNGIGVTQNVLYENQKLIANQFNSAIGKIQDSLSSTASALGKLQDVVNQNAQALNTLVKQLSSNFGAISSVLNDILSRLDPPEAEVQIDRLITGRLQSLQTYVTQQLIRAAEIRASANLAATKMSECVLGQSKRVDFCGKGYQLMSFPQSAPHGVVFLNVTYVPAQEKNFTTAPAICNDGKAHFPREGVFVSNGTNWFVTQRNFYEPQIITTDNTFVSGNCDVVIGVVNNTVYDPLQPELDSFKEELDKYFKNHTSPDVDLGDISGINASVVNIQKEIDRLNEVAKNLNESLIDLQELGKYEQYIKWPWYIWLGFIAGLIAIVMVTIMLCCMTSCCSCLKGCCSCGSCCKFDEDDSEPVLKGVKLHYT

SEQ ID NO: 571 - protein, 1273 aa, Artificial Sequence
  SARS-CoV-2/Netherlands/ZuidHolland_9/2020__EPI_ISL_414445 spike protein (1-1273)(K986P_V987P_ H1048Q_H1064N_ H1083N_H1101N)
MFVFLVLLPLVSSQCVNLTTRTQLPPAYTNSFTRGVYYPDKVFRSSVLHSTQDLFLPFFSNVTWFHAIHVSGTNGTKRFDNPVLPFNDGVYFASTEKSNIIRGWIFGTTLDSKTQSLLIVNNATNVVIKVCEFQFCNDPFLGVYYHKNNKSWMESEFRVYSSANNCTFEYVSQPFLMDLEGKQGNFKNLREFVFKNIDGYFKIYSKHTPINLVRDLPQGFSALEPLVDLPIGINITRFQTLLALHRSYLTPGDSSSGWTAGAAAYYVGYLQPRTFLLKYNENGTITDAVDCALDPLSETKCTLKSFTVEKGIYQTSNFRVQPTESIVRFPNITNLCPFGEVFNATRFASVYAWNRKRISNCVADYSVLYNSASFSTFKCYGVSPTKLNDLCFTNVYADSFVIRGDEVRQIAPGQTGKIADYNYKLPDDFTGCVIAWNSNNLDSKVGGNYNYLYRLFRKSNLKPFERDISTEIYQAGSTPCNGVEGFNCYFPLQSYGFQPTNGVGYQPYRVVVLSFELLHAPATVCGPKKSTNLVKNKCVNFNFNGLTGTGVLTESNKKFLPFQQFGRDIADTTDAVRDPQTLEILDITPCSFGGVSVITPGTNTSNQVAVLYQGVNCTEVPVAIHADQLTPTWRVYSTGSNVFQTRAGCLIGAEHVNNSYECDIPIGAGICASYQTQTNSPRRARSVASQSIIAYTMSLGAENSVAYSNNSIAIPTNFTISVTTEILPVSMTKTSVDCTMYICGDSTECSNLLLQYGSFCTQLNRALTGIAVEQDKNTQEVFAQVKQIYKTPPIKDFGGFNFSQILPDPSKPSKRSFIEDLLFNKVTLADAGFIKQYGDCLGDIAARDLICVQKFNGLTVLPPLLTDEMIAQYTSALLAGTITSGWTFGAGAALQIPFAMQMAYRFNGIGVTQNVLYENQKLIANQFNSAIGKIQDSLSSTASALGKLQDVVNQNAQALNTLVKQLSSNFGAISSVLNDILSRLDPPEAEVQIDRLITGRLQSLQTYVTQQLIRAAEIRASANLAATKMSECVLGQSKRVDFCGKGYQLMSFPQSAPHGVVFLNVTYVPAQEKNFTTAPAICNDGKAHFPREGVFVSNGTNWFVTQRNFYEPQIITTDNTFVSGNCDVVIGIVNNTVYDPLQPELDSFKEELDKYFKNHTSPDVDLGDISGINASVVNIQKEIDRLNEVAKNLNESLIDLQELGKYEQYIKWPWYIWLGFIAGLIAIVMVTIMLCCMTSCCSCLKGCCSCGSCCKFDEDDSEPVLKGVKLHYT

SEQ ID NO: 572 - protein, 1273 aa, Artificial Sequence
  SARS-CoV-2/Finland/FIN03032020A/2020__EPI_ISL_413602 spike protein (1-1273)(K986P_V987P_ H1048Q_H1064N_ H1083N_H1101N)
MFVFLVLLPLVSSQCVNLTTRTQLPPAYTNSFTRGVYYPDKVFRSSVLHSTQDLFLPFFSNVTWFHAIHVSGTNGTKRFDNPVLPFNDGVYFASTEKSNIIRGWIFGTTLDSKTQSLLIVNNATNVVIKVCEFQFCNDPFLGVYYHKNNKSWMESEFRVYSSANNCTFEYVSQPFLMDLEGKQGNFKNLREFVFKNIDGYFKIYSKHTPINLVRDLPQGFSALEPLVDLPIGINITRFQTLLALHRSYLTPGDSSSGWTAGAAAYYVGYLQPRTFLLKYNENGTITDAVDCALDPLSETKCTLKSFTVEKGIYQTSNFRVQPTESIVRFPNITNLCPFGEVFNATRFASVYAWNRKRISNCVADYSVLYNSASFSTFKCYGVSPTKLNDLCFTNVYADSFVIRGDEVRQIAPGQTGKIADYNYKLPDDFTGCVISWNSNNLDSKVGGNYNYLYRLFRKSNLKPFERDISTEIYQAGSTPCNGVEGFNCYFPLQSYGFQPTNGVGYQPYRVVVLSFELLHAPATVCGPKKSTNLVKNKCVNFNFNGLTGTGVLTESNKKFLPFQQFGRDIADTTDAVRDPQTLEILDITPCSFGGVSVITPGTNTSNQVAVLYQGVNCTEVPVAIHADQLTPTWRVYSTGSNVFQTRAGCLIGAEHVNNSYECDIPIGAGICASYQTQTNSPRRARSVASQSIIAYTMSLGAENSVAYSNNSIAIPTNFTISVTTEILPVSMTKTSVDCTMYICGDSTECSNLLLQYGSFCTQLNRALTGIAVEQDKNTQEVFAQVKQIYKTPPIKDFGGFNFSQILPDPSKPSKRSFIEDLLFNKVTLADAGFIKQYGDCLGDIAARDLICAQKFNGLTVLPPLLTDEMIAQYTSALLAGTITSGWTFGAGAALQIPFAMQMAYRFNGIGVTQNVLYENQKLIANQFNSAIGKIQDSLSSTASALGKLQDVVNQNAQALNTLVKQLSSNFGAISSVLNDILSRLDPPEAEVQIDRLITGRLQSLQTYVTQQLIRAAEIRASANLAATKMSECVLGQSKRVDFCGKGYQLMSFPQSAPHGVVFLNVTYVPAQEKNFTTAPAICNDGKAHFPREGVFVSNGTNWFVTQRNFYEPQIITTDNTFVSGNCDVVIGIVNNTVYDPLQPELDSFKEELDKYFKNHTSPDVDLGDISGINASVVNIQKEIDRLNEVAKNLNESLIDLQELGKYEQYIKWPWYIWLGFIAGLIAIVMVTIMLCCMTSCCSCLKGCCSCGSCCKFDEDDSEPVLKGVKLHYT

SEQ ID NO: 573 - protein, 1273 aa, Artificial Sequence
  SARS-CoV-2/France/GE1977/2020__EPI_ISL_414632 spike protein (1-1273)(K986P_V987P_ H1048Q_H1064N_ H1083N_H1101N)
MFVFLVLLPLVSSQCVNLTTRTQLPPAYTNSFTRGVYYPDKVFRSSVLHSTQDLFLPFFSNVTWFHAIHVSGTNGTKRFDNPVLPFNDGVYFASTEKSNIIRGWIFGTTLDSKTQSLLIVNNATNVVIKVCEFQFCNDPFLGVYYHKNNKSWMESEFRVYSSANNCTFEYVSQPFLMDLEGKQGNFKNLREFVFKNIDGYFKIYSKHTPINLVRDLPQGFSALEPLVDLPIGINITRFQTLLALHRSYLTPGDSSSGWTAGAAAYYVGYLQPRTFLLKYNENGTITDAVDCALDPLSETKCTLKSFTVEKGIYQTSNFRVQPTESIVRFPNITNLCPFGEVFNATRFASVYAWNRKRISNCVADYSVLYNSASFSTFKCYGVSPTKLNDLCFTNVYADSFVIRGDEVRQIAPGQTGKIADYNYKLPDDFTGCVIAWNSNNLDSKVGGNYNYLYRLFRKSNLKPFERDISTEIYQAGSTPCNGVEGFNCYFPLQSYGFQPTNGVGYQPYRVVVLSFELLHAPATVCGPKKSTNLVKNKCVNFNFNGLTGTGVLTESNKKFLPFQQFGRDIADTTDAVRDPQTLEILDITPCSFGGVSVITPGTNTSNQVAVLYQGVNCTEVPVAIHADQLTPTWRVYSTGSNVFQTRAGCLIGAEHVNNSYECDIPIGAGICASYQTQTNSPRRARSVASQSIIAYTMSLGAENSVAYSNNSIAIPTNFTISVTTEILPVSMTKTSVDCTMYICGDSTECSNLLLQYGSFCTQLNRALTGIAVEQDKNTQEVFAQVKQIYKTPPIKDFGGFNFSQILPDPSKPSKRSFIEDLLFNKVTLADAGFIKQYGDCLGDIAARDLICAQKFNGLTVLPPLLTDEMIAQYTSALLAGTITSGWTFGAGAALQIPFAMQMAYRFNGIGVTQNVLYENQKLIANQFNSAIGKIQDSLFSTASALGKLQDVVNQNAQALNTLVKQLSSNFGAISSVLNDILSRLDPPEAEVQIDRLITGRLQSLQTYVTQQLIRAAEIRASANLAATKMSECVLGQSKRVDFCGKGYQLMSFPQSAPHGVVFLNVTYVPAQEKNFTTAPAICNDGKAHFPREGVFVSNGTNWFVTQRNFYEPQIITTDNTFVSGNCDVVIGIVNNTVYDPLQPELDSFKEELDKYFKNHTSPDVDLGDISGINASVVNIQKEIDRLNEVAKNLNESLIDLQELGKYEQYIKWPWYIWLGFIAGLIAIVMVTIMLCCMTSCCSCLKGCCSCGSCCKFDEDDSEPVLKGVKLHYT

SEQ ID NO: 574 - protein, 1273 aa, Artificial Sequence
  SARS-CoV-2/Finland/FIN-313/2020__EPI_ISL_414641 spike protein (1-1273)(K986P_V987P_ H1048Q_H1064N_ H1083N_H1101N)
MFVFLVLLPLVSSQCVNLTTRTQLPPAYTNSFTRGVYYPDKVFRSSVLHSTQDLFLPFFSNVTWFHAIHVSGTNGTKRFDNPVLPFNDGVYFASTEKSNIIRGWIFGTTLDSKTQSLLIVNNATNVVIKVCEFQFCNDPFLGVYYHKNNKSWMESEFRVYSSANNCTFEYVSQPFLMDLEGKQGNFKNLREFVFKNIDGYFKIYSKHTPINLVRDLPQGFSALEPLVDLPIGINITRFKTLLALHRSYLTPGDSSSGWTAGAAAYYVGYLQPRTFLLKYNENGTITDAVDCALDPLSETKCTLKSFTVEKGIYQTSNFRVQPTESIVRFPNITNLCPFGEVFNATRFASVYAWNRKRISNCVADYSVLYNSASFSTFKCYGVSPTKLNDLCFTNVYADSFVIRGDEVRQIAPGQTGKIADYNYKLPDDFTGCVIAWNSNNLDSKVGGNYNYLYRLFRKSNLKPFERDISTEIYQAGSTPCNGVEGFNCYFPLQSYGFQPTNGVGYQPYRVVVLSFELLHAPATVCGPKKSTNLVKNKCVNFNFNGLTGTGVLTESNKKFLPFQQFGRDIADTTDAVRDPQTLEILDITPCSFGGVSVITPGTNTSNQVAVLYQGVNCTEVPVAIHADQLTPTWRVYSTGSNVFQTRAGCLIGAEHVNNSYECDIPIGAGICASYQTQTNSPRRARSVASQSIIAYTMSLGAENSVAYSNNSIAIPTNFTISVTTEILPVSMTKTSVDCTMYICGDSTECSNLLLQYGSFCTQLNRALTGIAVEQDKNTQEVFAQVKQIYKTPPIKDFGGFNFSQILPDPSKPSKRSFIEDLLFNKVTLADAGFIKQYGDCLGDIAARDLICAQKFNGLTVLPPLLTDEMIAQYTSALLAGTITSGWTFGAGAALQIPFAMQMAYRFNGIGVTQNVLYENQKLIANQFNSAIGKIQDSLSSTASALGKLQDVVNQNAQALNTLVKQLSSNFGAISSVLNDILSRLDPPEAEVQIDRLITGRLQSLQTYVTQQLIRAAEIRASANLAATKMSECVLGQSKRVDFCGKGYQLMSFPQSAPHGVVFLNVTYVPAQEKNFTTAPAICNDGKAHFPREGVFVSNGTNWFVTQRNFYEPQIITTDNTFVSGNCDVVIGIVNNTVYDPLQPELDSFKEELDKYFKNHTSPDVDLGDISGINASVVNIQKEIDRLNEVAKNLNESLIDLQELGKYEQYIKWPWYIWLGFIAGLIAIVMVTIMLCCMTSCCSCLKGCCSCGSCCKFDEDDSEPVLKGVKLHYT

SEQ ID NO: 575 - protein, 1273 aa, Artificial Sequence
  SARS-CoV-2/Netherlands/ZuidHolland_2/2020__EPI_ISL_414556 spike protein (1-1273)(K986P_V987P_ H1048Q_H1064N_ H1083N_H1101N)
MFVFLVLLPLVSSQCVNLTTRTQLPPAYTNSFTRGVYYPDKVFRSSVLHSTQDLFLPFFSNVTWFHAIHVSGTNGTKRFDNPVLPFNDGVYFASTEKSNIIRGWIFGTTLDSKTQSLLIVNNATNVVIKVCEFQFCNDPFLGVYYHKNNKSWMESEFRVYSSANNCTFEYVSQPFLMDLEGKQGNFKNLREFVFKNIDGYFKIYSKHTPINLVRDLPQGFSALEPLVDLPIGINITRFQTLLALHRSYLTPGDSSSGWTAGAAAYYVGYLQPRTFLLKYNENGTITDAVDCALDPLSETKCTLKSFTVEKGIYQTSNFRVQPTESIVRFPNITNLCPFGEVFNATRFASVYAWNRKRISNCVADYSVLYNSASFSTFKCYGVSPTKLNDLCFTNVYADSFVIRGDEVRQIAPGQTGKIADYNYKLPDDFTGCVIAWNSNNLDSKVGGNYNYLYRLFRKSNLKPFERDISTEIYQAGSTPCNGVEGFNCYFPLQSYGFQPTNGVGYQPYRVVVLSFELLHAPATVCGPKKSTNLVKNKCVNFNFNGLTGTGVLTESNKKFLPFQQFGRDIADTTDAVRDPQTLEILDITPCSFGGVSVITPGTNTSNQVAVLYQGVNCTEVPVAIHADQLTPTWRVYSTGSNVFQTRAGCLIGAEHVNNSYECDIPIGAGICASYQTQTNSPRRARSVASQSIIAYTMSLGAENSVAYSNNSIAIPTNFTISVTTEILPVSMTKTSVDCTMYICGDSTECSNLLLQYGSFCTQLNRALTGIALEQDKNTQEVFAQVKQIYKTPPIKDFGGFNFSQILPDPSKPSKRSFIEDLLFNKVTLADAGFIKQYGDCLGDIAARDLICAQKFNGLTVLPPLLTDEMIAQYTSALLAGTITSGWTFGAGAALQIPFAMQMAYRFNGIGVTQNVLYENQKLIANQFNSAIGKIQDSLSSTASALGKLQDVVNQNAQALNTLVKQLSSNFGAISSVLNDILSRLDPPEAEVQIDRLITGRLQSLQTYVTQQLIRAAEIRASANLAATKMSECVLGQSKRVDFCGKGYQLMSFPQSAPHGVVFLNVTYVPAQEKNFTTAPAICNDGKAHFPREGVFVSNGTNWFVTQRNFYEPQIITTDNTFVSGNCDVVIGIVNNTVYDPLQPELDSFKEELDKYFKNHTSPDVDLGDISGINASVVNIQKEIDRLNEVAKNLNESLIDLQELGKYEQYIKWPWYIWLGFIAGLIAIVMVTIMLCCMTSCCSCLKGCCSCGSCCKFDEDDSEPVLKGVKLHYT

SEQ ID NO: 576 - protein, 1273 aa, Artificial Sequence
  SARS-CoV-2/USA/WA-UW31/2020__EPI_ISL_414618 spike protein (1-1273)(K986P_V987P_ H1048Q_H1064N_ H1083N_H1101N)
MFVFLVLLPLVSSQCVNLTTRTQLPPAYTNSFTRGVYYPDKVFRSSVLHSTQDLFLPFFSNVTWFHAIHVSGTNGTKRFDNPVLPFNDGVYFASTEKSNIIRGWIFGTTLDSKTQSLLIVNNATNVVIKVCEFQFCNDPFLGVYYHKNNKSWMESEFRVYSSANNCTFEYVSQPFLMDLEGKQGNFKNLREFVFKNIDGYFKIYSKHTPINLVRDLPQGFSALEPLVDLPIGINITRFQTLLALHRSYLTPGDSSSGWTAGAAAYYVGYLQPRTFLLKYNENGTITDAVDCALDPLSETKCTLKSFTVEKGIYQTSNFRVQPTESIVRFPNITNLCPFGEVFNATRFASVYAWNRKRISNCVADYSVLYNSASFSTFKCYGVSPTKLNDLCFTNVYADSFVIRGDEVRQIAPGQTGKIADYNYKLPDDFTGCVIAWNSNNLDSKVGGNYNYLYRLFRKSNLKPFERDISTEIYQAGSTPCNGAEGFNCYFPLQSYGFQPTNGVGYQPYRVVVLSFELLHAPATVCGPKKSTNLVKNKCVNFNFNGLTGTGVLTESNKKFLPFQQFGRDIADTTDAVRDPQTLEILDITPCSFGGVSVITPGTNTSNQVAVLYQDVNCTEVPVAIHADQLTPTWRVYSTGSNVFQTRAGCLIGAEHVNNSYECDIPIGAGICASYQTQTNSPRRARSVASQSIIAYTMSLGAENSVAYSNNSIAIPTNFTISVTTEILPVSMTKTSVDCTMYICGDSTECSNLLLQYGSFCTQLNRALTGIAVEQDKNTQEVFAQVKQIYKTPPIKDFGGFNFSQILPDPSKPSKRSFIEDLLFNKVTLADAGFIKQYGDCLGDIAARDLICAQKFNGLTVLPPLLTDEMIAQYTSALLAGTITSGWTFGAGAALQIPFAMQMAYRFNGIGVTQNVLYENQKLIANQFNSAIGKIQDSLSSTASALGKLQDVVNQNAQALNTLVKQLSSNFGAISSVLNDILSRLDPPEAEVQIDRLITGRLQSLQTYVTQQLIRAAEIRASANLAATKMSECVLGQSKRVDFCGKGYQLMSFPQSAPHGVVFLNVTYVPAQEKNFTTAPAICNDGKAHFPREGVFVSNGTNWFVTQRNFYEPQIITTDNTFVSGNCDVVIGIVNNTVYDPLQPELDSFKEELDKYFKNHTSPDVDLGDISGINASVVNIQKEIDRLNEVAKNLNESLIDLQELGKYEQYIKWPWYIWLGFIAGLIAIVMVTIMLCCMTSCCSCLKGCCSCGSCCKFDEDDSEPVLKGVKLHYT

SEQ ID NO: 577 - protein, 1273 aa, Artificial Sequence
  SARS-CoV-2/South Korea/SNU01/2020__EPI_ISL_411929 spike protein (1-1273)(K986P_V987P_ H1048Q_H1064N_ H1083N_H1101N)
MFVFLVLLPLVSSQCVNLTTRTQLPPAYTNSFTRGVYYPDKVFRSSVLHSTQDLFLPFFSNVTWFHAIHVSGTNGTKRFDNPVLPFNDGVYFASTEKSNIIRGWIFGTTLDSKTQSLLIVNNATNVVIKVCEFQFCNDPFLGVYYHKNNKSWMESEFRVYSSANNCTFEYVSQPFLMDLEGKQGNFKNLREFVFKNIDGYFKIYSKHTPINLVRDLPQGFWALEPLVDLPIGINITRFQTLLALHRSYLTPGDSSSGWTAGAAAYYVGYLQPRTFLLKYNENGTITDAVDCALDPLSETKCTLKSFTVEKGIYQTSNFRVQPTESIVRFPNITNLCPFGEVFNATRFASVYAWNRKRISNCVADYSVLYNSASFSTFKCYGVSPTKLNDLCFTNVYADSFVIRGDEVRQIAPGQTGKIADYNYKLPDDFTGCVIAWNSNNLDSKVGGNYNYLYRLFRKSNLKPFERDISTEIYQAGSTPCNGVEGFNCYFPLQSYGFQPTNGVGYQPYRVVVLSFELLHAPATVCGPKKSTNLVKNKCVNFNFNGLTGTGVLTESNKKFLPFQQFGRDIADTTDAVRDPQTLEILDITPCSFGGVSVITPGTNTSNQVAVLYQDVNCTEVPVAIHADQLTPTWRVYSTGSNVFQTRAGCLIGAEHVNNSYECDIPIGAGICASYQTQTNSPRRARSVASQSIIAYTMSLGAENSVAYSNNSIAIPTNFTISVTTEILPVSMTKTSVDCTMYICGDSTECSNLLLQYGSFCTQLNRALTGIAVEQDKNTQEVFAQVKQIYKTPPIKDFGGFNFSQILPDPSKPSKRSFIEDLLFNKVTLADAGFIKQYGDCLGDIAARDLICAQKFNGLTVLPPLLTDEMIAQYTSALLAGTITSGWTFGAGAALQIPFAMQMAYRFNGIGVTQNVLYENQKLIANQFNSAIGKIQDSLSSTASALGKLQDVVNQNAQALNTLVKQLSSNFGAISSVLNDILSRLDPPEAEVQIDRLITGRLQSLQTYVTQQLIRAAEIRASANLAATKMSECVLGQSKRVDFCGKGYQLMSFPQSAPHGVVFLNVTYVPAQEKNFTTAPAICNDGKAHFPREGVFVSNGTNWFVTQRNFYEPQIITTDNTFVSGNCDVVIGIVNNTVYDPLQPELDSFKEELDKYFKNHTSPDVDLGDISGINASVVNIQKEIDRLNEVAKNLNESLIDLQELGKYEQYIKWPWYIWLGFIAGLIAIVMVTIMLCCMTSCCSCLKGCCSCGSCCKFDEDDSEPVLKGVKLHYT

SEQ ID NO: 578 - protein, 1273 aa, Artificial Sequence
  SARS-CoV-2/China/WF0004/2020__EPI_ISL_413694 spike protein (1-1273)(K986P_V987P_ H1048Q_H1064N_ H1083N_H1101N)
MFVFLVLLPLVSSQCVNLTTRTQLPPAYTNSFTRGVYYPDKVFRSSVLHSTQDLFLPFFSNVTWFHAIHVSGTNGTKRFDNPVLPFNDGVYFASTEKSNIIRGWIFGTTLDSKTQSLLIVNNATNVVIKVCEFQFCNDPFLGVYYHKNNKSWTESEFRVYSSANNCTFEYVSQPFLMDLEGKQGNFKNLREFVFKNIDGYFKIYSKHTPINLVRDLPQGFSALEPLVDLPIGINITRFQTLLALHRSYLTPGDSSSGWTAGAAAYYVGYLQPRTFLLKYNENGTITDAVDCALDPLSETKCTLKSFTVEKGIYQTSNFRVQPTESIVRFPNITNLCPFGEVFNATRFASVYAWNRKRISNCVADYSVLYNSASFSTFKCYGVSPTKLNDLCFTNVYADSFVIRGDEVRQIAPGQTGKIADYNYKLPDDFTGCVIAWNSNNLDSKVGGNYNYLYRLFRKSNLKPFERDISTEIYQAGSTPCNGVEGFNCYFPLQSYGFQPTNGVGYQPYRVVVLSFELLHAPATVCGPKKSTNLVKNKCVNFNFNGLTGTGVLTESNKKFLPFQQFGRDIADTTDAVRDPQTLEILDITPCSFGGVSVITPGTNTSNQVAVLYQDVNCTEVPVAIHADQLTPTWRVYSTGSNVFQTRAGCLIGAEHVNNSYECDIPIGAGICASYQTQTNSPRRARSVASQSIIAYTMSLGAENSVAYSNNSIAIPTNFTISVTTEILPVSMTKTSVDCTMYICGDSTECSNLLLQYGSFCTQLNRALTGIAVEQDKNTQEVFAQVKQIYKTPPIKDFGGFNFSQILPDPSKPSKRSFIEDLLFNKVTLADAGFIKQYGDCLGDIAARDLICAQKFNGLTVLPPLLTDEMIAQYTSALLAGTITSGWTFGAGAALQIPFAMQMAYRFNGIGVTQNVLYENQKLIANQFNSAIGKIQDSLSSTASALGKLQDVVNQNAQALNTLVKQLSSNFGAISSVLNDILSRLDPPEAEVQIDRLITGRLQSLQTYVTQQLIRAAEIRASANLAATKMSECVLGQSKRFDFCGKGYQLMSFPQSAPHGVVFLNVTYVPAQEKNFTTAPAICNDGKAHFPREGVFVSNGTNWFVTQRNFYEPQIITTDNTFVSGNCDVVIGIVNNTVYDPLQPELDSFKEELDKYFKNHTSPDVDLGDISGINASVVNIQKEIDRLNEVAKNLNESLIDLQELGKYEQYIKWPWYIWLGFIAGLIAIVMVTIMLCCMTSCCSCLKGCCSCGSCCKFDEDDSEPVLKGVKLHYT

SEQ ID NO: 579 - protein, 1273 aa, Artificial Sequence
  SARS-CoV-2/China/WF0028/2020__EPI_ISL_413791 spike protein (1-1273)(K986P_V987P_ H1048Q_H1064N_ H1083N_H1101N)
MFVFLVLLPLVSSQCVNLTTRTQLPPAYTNSFTRGVYYPDKVFRSSVLHSTQDLFLPFFSNVTWFHAIHVSGTNGTKRFDNPVLPFNDGVYFASTEKSNIIRGWIFGTTLDSKTQSLLIVNNATNVVIKVCEFQFCNDPFLGVYYHKNNKSWMESEFRVYSSANNCTFEYVSQPFLMDLEGKQGNFKNLREFVFKNIDGYFKIYSKHTPINLVRDLPQGFSALEPLVDLPIGINITRFQTLLALHRSYLTPGDSSSGWTAGAAAYYVGYLQPRTFLLKYNENGTITDAVDCALDPLSETKCTLKSFTVEKGIYQTSNFRVQPTESIVRFPNITNLCPFGEVFNATRFASVYAWNRKRISNCVADYSVLYNSASFSTFKCYGVSPTKLNDLCFTNVYADSFVIRGDEVRQIAPGQTGKIADYNYKLPDDFTGCVIAWNSNNLDSKVGGNYNYLYRLFRKSNLKPFERDISTEIYQAGSTPCNGVEGFNCYFPLQSYGFQPTNGVGYQPYRVVVLSFELLHAPATVCGPKKSTNLVKNKCVNFNFNGLTGTGVLTESNKKFLPFQQFGRDIADTTDAVRDPQTLEILDITPCSFGGVSVITPGTNTSNQVAVLYQDVNCTEVPVAIHADQLTPTWRVYSTGSNVFQTRAGCLIGAEHVNNSYECDIPIGAGICASYQTQTNSPRRARSVASQSIIAYTMSLGAENSVAYSNNSIAIPTNFTISVTTEILPVSMTKTSVDCTMYICGDSTECSNLLLQYGSFCTQLNRALTGIAVEQDKNTQEVFAQVKQIYKTPPIKDFGGFNFSQILPDPSKPSKRSFIEDLLFNKVTLADAGFIKQYGDCLGDIAARDLICAQKFNGLTVLPPLLTDEMIAQYTSALLAGTITSGWTFGAGAALQIPFAMQMAYRFNGIGVTQNVLYENQKLIANQFNSAIGKIQDSLSSTASALGKLQDVVNQNAQALNTLVKQLSSNFGAISSVLNDILSRLDPPEAEVQIDRLITGRLQSLQTYVTQQLIRAAEIRASANLAATKMSECVLGQSKRVDFCGKGYQLMSFPQSAPHGVVFLNVTYVPAQEKNFTTAPAICNDGKAHFPREGVFVSNGTNWFVTQRNFYEPQIITTDNTFVSGNCDVVIGIVNNTVYDPLQPELESFKEELDKYFKNHTSPDVDLGDISGINASVVNIQKEIDRLNEVAKNLNESLIDLQELGKYEQYIKWPWYIWLGFIAGLIAIVMVTIMLCCMTSCCSCLKGCCSCGSCCKFDEDDSEPVLKGVKLHYT

SEQ ID NO: 580 - protein, 1273 aa, Artificial Sequence
  SARS-CoV-2/2019-nCoV/USA-CruiseA-18/2020__MT159716.1 spike protein (1-1273)(K986P_V987P_ H1048Q_H1064N_ H1083N_H1101N)
MFVFLVLLPLVSSQCVNLTTRTQLPPAYTNSFTRGVYYPDKVFRSSVLHSTQDLFLPFFSNVTWFHAIHVSGTNGTKRFDNPVLPFNDGVYFASTEKSNIIRGWIFGTTLDSKTQSLLIVNNATNVVIKVCEFQFCNDPFLGVYYHKNNKSWMESELRVYSSANNCTFEYVSQPFLMDLEGKQGNFKNLREFVFKNIDGYFKIYSKHTPINLVRDLPQGFSALEPLVDLPIGINITRFQTLLALHRSYLTPGDSSSGWTAGAAAYYVGYLQPRTFLLKYNENGTITDAVDCALDPLSETKCTLKSFTVEKGIYQTSNFRVQPTESIVRFPNITNLCPFGEVFNATRFASVYAWNRKRISNCVADYSVLYNSASFSTFKCYGVSPTKLNDLCFTNVYADSFVIRGDEVRQIAPGQTGKIADYNYKLPDDFTGCVIAWNSNNLDSKVGGNYNYLYRLFRKSNLKPFERDISTEIYQAGSTPCNGVEGFNCYFPLQSYGFQPTNGVGYQPYRVVVLSFELLHAPATVCGPKKSTNLVKNKCVNFNFNGLTGTGVLTESNKKFLPFQQFGRDIADTTDAVRDPQTLEILDITPCSFGGVSVITPGTNTSNQVAVLYQDVNCTEVPVAIHADQLTPTWRVYSTGSNVFQTRAGCLIGAEHVNNSYECDIPIGAGICASYQTQTNSPRRARSVASQSIIAYTMSLGAENSVAYSNNSIAIPTNFTISVTTEILPVSMTKTSVDCTMYICGDSTECSNLLLQYGSFCTQLNRALTGIAVEQDKNTQEVFAQVKQIYKTPPIKDFGGFNFSQILPDPSKPSKRSFIEDLLFNKVTLADAGFIKQYGDCLGDIAARDLICAQKFNGLTVLPPLLTDEMIAQYTSALLAGTITSGWTFGAGAALQIPFAMQMAYRFNGIGVTQNVLYENQKLIANQFNSAIGKIQDSLSSTASALGKLQDVVNQNAQALNTLVKQLSSNFGAISSVLNDILSRLDPPEAEVQIDRLITGRLQSLQTYVTQQLIRAAEIRASANLAATKMSECVLGQSKRVDFCGKGYQLMSFPQSAPHGVVFLNVTYVPAQEKNFTTAPAICNDGKAHFPREGVFVSNGTNWFVTQRNFYEPQIITTDNTFVSGNCDVVIGIVNNTVYDPLQPELDSFKEELDKYFKNHTSPDVDLGDISGINASVVNIQKEIDRLNEVAKNLNESLIDLQELGKYEQYIKWPWYIWLGFIAGLIAIVMVTIMLCCMTSCCSCLKGCCSCGSCCKFDEDDSEPVLKGVKLHYT

SEQ ID NO: 581 - protein, 1273 aa, Artificial Sequence
  SARS-CoV-2/SARS-CoV-2/Yunnan-01/human/2020/CHN__MT049951.1 spike protein (1-1273)(K986P_V987P_ H1048Q_H1064N_ H1083N_H1101N)
MFVFLVLLPLVSSQCVNLTTRTQLPPANTNSFTRGVYYPDKVFRSSVLHSTQDLFLPFFSNVTWFHAIHVSGTNGTKRFDNPVLPFNDGVYFASTEKSNIIRGWIFGTTLDSKTQSLLIVNNATNVVIKVCEFQFCNDPFLGVYYHKNNKSWMESEFRVYSSANNCTFEYVSQPFLMDLEGKQGNFKNLREFVFKNIDGYFKIYSKHTPINLVRDLPQGFSALEPLVDLPIGINITRFQTLLALHRSYLTPGDSSSGWTAGAAAYYVGYLQPRTFLLKYNENGTITDAVDCALDPLSETKCTLKSFTVEKGIYQTSNFRVQPTESIVRFPNITNLCPFGEVFNATRFASVYAWNRKRISNCVADYSVLYNSASFSTFKCYGVSPTKLNDLCFTNVYADSFVIRGDEVRQIAPGQTGKIADYNYKLPDDFTGCVIAWNSNNLDSKVGGNYNYLYRLFRKSNLKPFERDISTEIYQAGSTPCNGVEGFNCYFPLQSYGFQPTNGVGYQPYRVVVLSFELLHAPATVCGPKKSTNLVKNKCVNFNFNGLTGTGVLTESNKKFLPFQQFGRDIADTTDAVRDPQTLEILDITPCSFGGVSVITPGTNTSNQVAVLYQDVNCTEVPVAIHADQLTPTWRVYSTGSNVFQTRAGCLIGAEHVNNSYECDIPIGAGICASYQTQTNSPRRARSVASQSIIAYTMSLGAENSVAYSNNSIAIPTNFTISVTTEILPVSMTKTSVDCTMYICGDSTECSNLLLQYGSFCTQLNRALTGIAVEQDKNTQEVFAQVKQIYKTPPIKDFGGFNFSQILPDPSKPSKRSFIEDLLFNKVTLADAGFIKQYGDCLGDIAARDLICAQKFNGLTVLPPLLTDEMIAQYTSALLAGTITSGWTFGAGAALQIPFAMQMAYRFNGIGVTQNVLYENQKLIANQFNSAIGKIQDSLSSTASALGKLQDVVNQNAQALNTLVKQLSSNFGAISSVLNDILSRLDPPEAEVQIDRLITGRLQSLQTYVTQQLIRAAEIRASANLAATKMSECVLGQSKRVDFCGKGYQLMSFPQSAPHGVVFLNVTYVPAQEKNFTTAPAICNDGKAHFPREGVFVSNGTNWFVTQRNFYEPQIITTDNTFVSGNCDVVIGIVNNTVYDPLQPELDSFKEELDKYFKNHTSPDVDLGDISGINASVVNIQKEIDRLNEVAKNLNESLIDLQELGKYEQYIKWPWYIWLGFIAGLIAIVMVTIMLCCMTSCCSCLKGCCSCGSCCKFDEDDSEPVLKGVKLHYT

SEQ ID NO: 582 - protein, 1273 aa, Artificial Sequence
  SARS-CoV-2/USA/WA-UW292/2020__EPI_ISL_418077 spike protein (1-1273)(K986P_V987P_ H1048Q_H1064N_ H1083N_H1101N)
MFVFLVLLPLVSSQCVNLTTRTQLPPAYTNSFTRGVYYPDKVFRSSVLHSTQDLFLPFFSNVTWFHAIHVSGTNGTKRFDNPVLPFNDGVYFASTEKSNIIRGWIFGTTLDSKTQSLLIVNNATNVVIKVCEFQFCNDPFLGVYYHKNNKSWMESEFRVYSSANNCTFEYVSQPFLMDLEGKQGNFKNLREFVFKNIDGYFKIYSKHTPINLVRDLPQGFSALEPLVDLPIGINITRFQTLLALHRSYLTPGDSSSGWTAGAAAYYVGYLQPRTFLLKYNENGTITDAVDCALDPLSETKCTLKSFTVEKGIYQTSNFRVQPTESIVRFPNITNLCPFGEVFNATRFASVYAWNRKRISNCVADYSVLYNSASFSTFKCYGVSPTKLNDLCFTNVYADSFVIRGDEVRQIAPGQTGKIADYNYKLPDDFTGCVIAWNSNNLDSKVGGNYNYLYRLFRKSNLKPFERDISTEIYQASSTPCNGVEGFNCYFPLQSYGFQPTNGVGYQPYRVVVLSFELLHAPATVCGPKKSTNLVKNKCVNFNFNGLTGTGVLTESNKKFLPFQQFGRDIADTTDAVRDPQTLEILDITPCSFGGVSVITPGTNTSNQVAVLYQDVNCTEVPVAIHADQLTPTWRVYSTGSNVFQTRAGCLIGAEHVNNSYECDIPIGAGICASYQTQTNSPRRARSVASQSIIAYTMSLGAENSVAYSNNSIAIPTNFTISVTTEILPVSMTKTSVDCTMYICGDSTECSNLLLQYGSFCTQLNRALTGIAVEQDKNTQEVFAQVKQIYKTPPIKDFGGFNFSQILPDPSKPSKRSFIEDLLFNKVTLADAGFIKQYGDCLGDIAARDLICAQKFNGLTVLPPLLTDEMIAQYTSALLAGTITSGWTFGAGAALQIPFAMQMAYRFNGIGVTQNVLYENQKLIANQFNSAIGKIQDSLSSTASALGKLQDVVNQNAQALNTLVKQLSSNFGAISSVLNDILSRLDPPEAEVQIDRLITGRLQSLQTYVTQQLIRAAEIRASANLAATKMSECVLGQSKRVDFCGKGYQLMSFPQSAPHGVVFLNVTYVPAQEKNFTTAPAICNDGKAHFPREGVFVSNGTNWFVTQRNFYEPQIITTDNTFVSGNCDVVIGIVNNTVYDPLQPELDSFKEELDKYFKNHTSPDVDLGDISGINASVVNIQKEIDRLNEVAKNLNESLIDLQELGKYEQYIKWPWYIWLGFIAGLIAIVMVTIMLCCMTSCCSCLKGCCSCGSCCKFDEDDSEPVLKGVKLHYT

SEQ ID NO: 583 - protein, 1273 aa, Artificial Sequence
  SARS-CoV-2/Iceland/192/2020__EPI_ISL_417819 spike protein (1-1273)(K986P_V987P_ H1048Q_H1064N_ H1083N_H1101N)
MFVFFVLLPLVSSQCVNLTTRTQLPPAYTNSFTRGVYYPDKVFRSSVLHSTQDLFLPFFSNVTWFHAIHVSGTNGTKRFDNPVLPFNDGVYFASTEKSNIIRGWIFGTTLDSKTQSLLIVNNATNVVIKVCEFQFCNDPFLGVYYHKNNKSWMESEFRVYSSANNCTFEYVSQPFLMDLEGKQGNFKNLREFVFKNIDGYFKIYSKHTPINLVRDLPQGFSALEPLVDLPIGINITRFQTLLALHRSYLTPGDSSSGWTAGAAAYYVGYLQPRTFLLKYNENGTITDAVDCALDPLSETKCTLKSFTVEKGIYQTSNFRVQPTESIVRFPNITNLCPFGEVFNATRFASVYAWNRKRISNCVADYSVLYNSASFSTFKCYGVSPTKLNDLCFTNVYADSFVIRGDEVRQIAPGQTGKIADYNYKLPDDFTGCVIAWNSNNLDSKVGGNYNYLYRLFRKSNLKPFERDISTEIYQAGSTPCNGVEGFNCYFPLQSYGFQPTNGVGYQPYRVVVLSFELLHAPATVCGPKKSTNLVKNKCVNFNFNGLTGTGVLTESNKKFLPFQQFGRDIADTTDAVRDPQTLEILDITPCSFGGVSVITPGTNTSNQVAVLYQGVNCTEVPVAIHADQLTPTWRVYSTGSNVFQTRAGCLIGAEHVNNSYECDIPIGAGICASYQTQTNSPRRARSVASQSIIAYTMSLGAENSVAYSNNSIAIPTNFTISVTTEILPVSMTKTSVDCTMYICGDSTECSNLLLQYGSFCTQLNRALTGIAVEQDKNTQEVFAQVKQIYKTPPIKDFGGFNFSQILPDPSKPSKRSFIEDLLFNKVTLADAGFIKQYGDCLGDIAARDLICAQKFNGLTVLPPLLTDEMIAQYTSALLAGTITSGWTFGAGAALQIPFAMQMAYRFNGIGVTQNVLYENQKLIANQFNSAIGKIQDSLSSTASALGKLQDVVNQNAQALNTLVKQLSSNFGAISSVLNDILSRLDPPEAEVQIDRLITGRLQSLQTYVTQQLIRAAEIRASANLAATKMSECVLGQSKRVDFCGKGYQLMSFPQSAPHGVVFLNVTYVPAQEKNFTTAPAICNDGKAHFPREGVFVSNGTNWFVTQRNFYEPQIITTDNTFVSGNCDVVIGIVNNTVYDPLQPELDSFKEELDKYFKNHTSPDVDLGDISGINASVVNIQKEIDRLNEVAKNLNESLIDLQELGKYEQYIKWPWYIWLGFIAGLIAIVMVTIMLCCMTSCCSCLKGCCSCGSCCKFDEDDSEPVLKGVKLHYT

SEQ ID NO: 584 - protein, 1273 aa, Artificial Sequence
  SARS-CoV-2/Belgium/ULG-6939/2020__EPI_ISL_417020 spike protein (1-1273)(K986P_V987P_ H1048Q_H1064N_ H1083N_H1101N)
MFVFLVLLPLVSSQCVNLTTRTQLPPAYTNSFTRGVYYPDKVFRSSVLHSTQDLFLPFFSNVTWFHAIHVSGTNGTKRFDNPVLPFNDGVYFASTEKSNIIRGWIFGTTLDSKTQSLLIVNNATNVVIKVCEFQFCNDPFLGVYYHKNNKSWMESEFRVYSSANNCTFEYVSQPFLMDLEGKQGNFKNLREFVFKNIDGYFKIYSKHTPINLVRDLPQGFSALEPLVDLPIGINITRFQTLLALHRSYLTPGDSSSGWTAGAAAYYVGYLQPRTFLLKYNENGTITDAVDCALDPLSETKCTLKSFTVEKGIYQTSNFRVQPTESIVRFPNITNLCPFGEVFNATRFASVYAWNRKRISNCVADYSVLYNSASFSTFKCYGVSPTKLNDLCFTNVYADSFVIRGDEVRQIAPGQTGKIADYNYKLPDDFTGCVIAWNSNNLDSKVGGNYNYLYRLFRKSNLKPFERDISTEIYQAGSTPCNGVEGFNCYFPLQSYGFQPTNGVGYQPYRVVVLSFELLHAPATVCGPKKSTNLVKNKCVNFNFNGLTGTGVLTESNKKFLPFQQFGRDIADTTDAVRDPQTLEILDITPCSFGGVSVITPGTNTSNQVAVLYQGVNCTEVPVAIHADQLTPTWRVYSTGSNVFQTRAGCLIGAEHVNNSYECDIPIGAGICASYQTQTNSPRRARSVASQSIIAYTMSLGAENSVVYSNNSIAIPTNFTISVTTEILPVSMTKTSVDCTMYICGDSTECSNLLLQYGSFCTQLNRALTGIAVEQDKNTQEVFAQVKQIYKTPPIKDFGGFNFSQILPDPSKPSKRSFIEDLLFNKVTLADAGFIKQYGDCLGDIAARDLICAQKFNGLTVLPPLLTDEMIAQYTSALLAGTITSGWTFGAGAALQIPFAMQMAYRFNGIGVTQNVLYENQKLIANQFNSAIGKIQDSLSSTASALGKLQDVVNQNAQALNTLVKQLSSNFGAISSVLNDILSRLDPPEAEVQIDRLITGRLQSLQTYVTQQLIRAAEIRASANLAATKMSECVLGQSKRVDFCGKGYQLMSFPQSAPHGVVFLNVTYVPAQEKNFTTAPAICNDGKAHFPREGVFVSNGTNWFVTQRNFYEPQIITTDNTFVSGNCDVVIGIVNNTVYDPLQPELDSFKEELDKYFKNHTSPDVDLGDISGINASVVNIQKEIDRLNEVAKNLNESLIDLQELGKYEQYIKWPWYIWLGFIAGLIAIVMVTIMLCCMTSCCSCLKGCCSCGSCCKFDEDDSEPVLKGVKLHYT

SEQ ID NO: 585 - protein, 1273 aa, Artificial Sequence
  SARS-CoV-2/France/HF2496/2020__EPI_ISL_418231 spike protein (1-1273)(K986P_V987P_ H1048Q_H1064N_ H1083N_H1101N)
MFVFLVLLPLVSSQCVNLTTRTQLPPAYTNSFTRGVYYPDKVFRSSVLHSTQDLFLPFFSNVTWFHAIHVSGTNGTKRFDNPVLPFNDGVYFASTEKSNIIRGWIFGTTLDSKTQSLLIVNNATNVVIKVCEFQFCNDPFLGVYYHKNNKSWMESEFRVYSSANNCTFEYVSQPFLMDLEGKQGNFKNLREFVFKNIDGYFKIYSKHTPINLVRDLPQGFSALEPLVDLPIGINITRFQTLLALHRSYLTPGDSSSGWTAGAAAYYVGYLQPRTFLLKYNENGTITDAVDCALDPLSETKCTLKSFTVEKGIYQTSNFRVQPTESIVRFPNITNLCPFGEVFNATRFASVYAWNRKRISNCVADYSVLYNSASFSTFKCYGVSPTKLNDLCFTNVYADSFVIRGDEVRQIAPGQTGKIADYNYKLPDDFTGCVIAWNSNNLDSKVGGNYNYLYRLFRKSNLKPFERDISTEIYQAGSTPCNGVEGFNCYFPLQSYGFQPTNGVGYQPYRVVVLSFELLHAPATVCGPKKSTNLVKNKCVNFNFNGLTGTGVLTESNKKFLPFQQFGRDIADTTDAVRDPQTLEILDITPCSFGGVSVITPGTNTSNQVAVLYQGVNCTEVPVAIHADQLTPTWRVYSTGSNVFQTRAGCLIGAEHVNNSYECDIPIGAGICASYQTQTNSPRRARSVASQSIIAYTMSLGAENSVAYSNNSIAIPTNFTISVTTEILPVSMTKTSVDCTMYICGDSTECSNLLLQYGSFCTQLNRALTGIAVEQDKNTQEVFAQVKQIYKTPPIKDFGGFNFSQILPDPSKPSKRSFIEDLLFNKVTLADAGFIKQYGDCLGDIVARDLICAQKFNGLTVLPPLLTDEMIAQYTSALLAGTITSGWTFGAGAALQIPFAMQMAYRFNGIGVTQNVLYENQKLIANQFNSAIGKIQDSLSSTASALGKLQDVVNQNAQALNTLVKQLSSNFGAISSVLNDILSRLDPPEAEVQIDRLITGRLQSLQTYVTQQLIRAAEIRASANLAATKMSECVLGQSKRVDFCGKGYQLMSFPQSAPHGVVFLNVTYVPAQEKNFTTAPAICNDGKAHFPREGVFVSNGTNWFVTQRNFYEPQIITTDNTFVSGNCDVVIGIVNNTVYDPLQPELDSFKEELDKYFKNHTSPDVDLGDISGINASVVNIQKEIDRLNEVAKNLNESLIDLQELGKYEQYIKWPWYIWLGFIAGLIAIVMVTIMLCCMTSCCSCLKGCCSCGSCCKFDEDDSEPVLKGVKLHYT

SEQ ID NO: 586 - protein, 1273 aa, Artificial Sequence
  SARS-CoV-2/USA/WA-UW291/2020__EPI_ISL_418076 spike protein (1-1273)(K986P_V987P_ H1048Q_H1064N_ H1083N_H1101N)
MFVFLVLLPLVSSQCVNLTTRTQLPPAYTNSFTRGVYYPDKVFRSSVLHSTQDLFLPFFSNVTWFHAIHVSGTNGTKRFDNPVLPFNDGVYFASTEKSNIIRGWIFGTTLDSKTQSLLIVNNATNVVIKVCEFQFCNDPFLGVYYHKNNKSWMESEFRVYSSANNCTFEYVSQPFLMDLEGKQGNFKNLREFVFKNIDGYFKIYSKHTPINLVRDLPQGFSALEPLVDLPIGINITRFQTLLALHRSYLTPGDSSSGWTAGAAAYYVGYLQPRTFLLKYNENGTITDAVDCALDPLSETKCTLKSFTVEKGIYQTSNFRVQPTESIVRFPNITNLCPFGEVFNATRFASVYAWNRKRISNCVADYSVLYNSASFSTFKCYGVSPTKLNDLCFTNVYADSFVIRGDEVRQIAPGQTGKIADYNYKLPDDFTGCVIAWNSNNLDSKVGGNYNYLYRLFRKSNLKPFERDISTEIYQAGSTPCNGVEGFNCYFPLQSYGFQPTNGVGYQPYRVVVLSFELLHAPATVCGPKKSTNLVKNKCVNFNFNGLTGTGVLTESNKKFLPFQQFGRDIADTTDAVRDPQTLEILDITPCSFGGVSVITPGTNTSNQVAVLYQGVNCTEVPVAIHADQLTPTWRVYSTGSNVFQTRAGCLIGAEHVNNSYECDIPIGAGICASYQTQTNSPRRARSVASQSIIAYTMSLGAENSVAYSNNSIAIPTNFTISVTTEILPVSMTKTSVDCTMYICGDSTECSNLLLQYGSFCTQLNRALTGIAVEQDKNTQEVFAQVKQIYKTPPIKDFGGFNFSQILPDPSKPSKRSFIEDLLFNKVTLADAGFIKQYGDCLGDIAARDLICAQKFNGLTVLPPLLTDEMIAQYTSALLAGTITSGWTFGAGAALQIPFAMQMAYRFNGIGVTQNVLYENQKLIANQFNSAIGKIQYSLSSTASALGKLQDVVNQNAQALNTLVKQLSSNFGAISSVLNDILSRLDPPEAEVQIDRLITGRLQSLQTYVTQQLIRAAEIRASANLAATKMSECVLGQSKRVDFCGKGYQLMSFPQSAPHGVVFLNVTYVPAQEKNFTTAPAICNDGKAHFPREGVFVSNGTNWFVTQRNFYEPQIITTDNTFVSGNCDVVIGIVNNTVYDPLQPELDSFKEELDKYFKNHTSPDVDLGDISGINASVVNIQKEIDRLNEVAKNLNESLIDLQELGKYEQYIKWPWYIWLGFIAGLIAIVMVTIMLCCMTSCCSCLKGCCSCGSCCKFDEDDSEPVLKGVKLHYT

SEQ ID NO: 587 - protein, 1273 aa, Artificial Sequence
  SARS-CoV-2/Portugal/PT0034/2020__EPI_ISL_418019 spike protein (1-1273)(K986P_V987P_ H1048Q_H1064N_ H1083N_H1101N)
MFVFLVLLPLVSSQCVNLTTRTQLPPAYTNSFTRGVYYPDKVFRSSVLHSTQDLFLPFFSNVTWFHAIHVSGTNGTKRFDNPVLPFNDGVYFASTEKSNIIRGWIFGTTLDSKTQSLLIVNNATNVVIKVCEFQFCNDPFLGVYYHKNNKSWMESEFRVYSSANNCTFEYVSQPFLMDLEGKQGNFKNLREFVFKNIDGYFKIYSKHTPINLVRDLPQGFSALEPLVDLPIGINITRFQTLLALHRSYLTPGDSSSGWTAGAAAYYVGYLQPRTFLLKYNENGTITDAVDCALDPLSETKCTLKSFTVEKGIYQTSNFRVQPTESIVRFPNITNLCPFGEVFNATRFASVYAWNRKRISNCVADYSVLYNSASFSTFKCYGVSPTKLNDLCFTNVYADSFVIRGDEVRQIAPGQTGKIADYNYKLPDDFTGCVIAWNSNNLDSKVGGNYNYLYRLFRKSNLKPFERDISTEIYQAGSTPCNGVEGFNCYFPLQSYGFQPTNGVGYQPYRVVVLSFELLHAPATVCGPKKSTNLVKNKCVNFNFNGLTGTGVLTESNKKFLPFQQFGRDIADTTDAVRDPQTLEILDITPCSFGGVSVITPGTNTSNQVAVLYQGVNCTEVPVAIHADQLTPTWRVYSTGSNVFQTRAGCLIGAEHVNNSYECDIPIGAGICASYQTQTNSPRRARSVASQSIIAYTMSLGAENSVAYSNNSIAIPTNFTISVTTEILPVSMTKTSVDCTMYICGDSTECSNLLLQYGSFCTQLNRALTGIAVEQDKNTQEVFAQVKQIYKTPPIKDFGGFNFSQILPDPSKPSKRSFIEDLLFNKVTLADAGFIKQYGDCLGDIAARDLICAQKFNGLTVLPPLLTDEMIAQYTSALLAGTITSGWTFGAGAALQIPFAMQMAYRFNGIGVTQNVLYENQKLIANQFNSAIGKIQDSLSSTASALGKLQDVVNQNAQALNTLVKQLSSNFGAISSVLNDILSRLDPPEAEVQIDRLITGRLQSLQTYVTQQLIRAAEIRASANLAATKMSECVLGQSKRVDFCGKGYQLMSFPQSAPHGVVFLNVTYVPAQEKNFTTAPAICNDGKAHFPREGVFVSNGTNWFVTQRNFYEPQIITTDNTFVSGNCDVVIGIVNNTVYDPLQPELDSFKEELDKYFKNHTSPDVDLGDISGINASVVNIQKEIDRLNEVAKNLNESLIDLQELGKYEQYIKWPWYIWLGFIAGLIAIVMVTIMLCCITSCCSCLKGCCSCGSCCKFDEDDSEPVLKGVKLHYT

SEQ ID NO: 588 - protein, 1273 aa, Artificial Sequence
  SARS-CoV-2/Iceland/202/2020__EPI_ISL_417750 spike protein (1-1273)(K986P_V987P_ H1048Q_H1064N_ H1083N_H1101N)
MFVFLVLLPLVSSQCVNLTTRTQLPPAYTNSFTRGVYYPDKVFRSSVLHSTQDLFLPFFSNVTWFHAIHVSGTNGTKRFDNPVLPFNDGVYFASTEKSNIIRGWIFGTTLDSKTQSLLIVNNATNVVIKVCEFQFCNDPFLGVYYHKNNKSWMESEFRVYSSANNCTFEYVSQPFLMDLEGKQGNFKNLREFVFKNIDGYFKIYSKHTPINLVRDLPQGFSALEPLVDLPIGINITRFQTLLALHRSYLTPGDSSSGWTAGAAAYYVGYLQPRTFLLKYNENGTITDAVDCALDPLSETKCTLKSFTVEKGIYQTSNFRVQPTESIVRFPNITNLCPFGEVFNATRFASVYAWNRKRISNCVADYSVLYNSASFSTFKCYGVSPTKLNDLCFTNVYADSFVIRGDEVRQIAPGQTGKIADYNYKLPDDFTGCVIAWNSNNLDSKVGGNYNYLYRLFRKSNLKPFERDISTEIYQAGSTPCNGVEGFNCYFPLQSYGFQPTNGVGYQPYRVVVLSFELLHAPATVCGPKKSTNLVKNKCVNFNFNGLTGTGVLTESNKKFLPFQQFGRDIADTTDAVRDPQTLEILDITPCSFGGVSVITPGTNTSNQVAVLYQDVNCTEVPVAIHADQLTPTWRVYSTGSNVFQTRAGCLIGAEHVNNSYECDIPIGAGICASYQTQTNSPRRARSVASQSIIAYTMSLGAENSVAYSNNSIAIPTNFTISVTTEILPVSMTKTSVDCTMYICGDSTECSNLLLQYGSFCTQLNRALTGIAVEQDKNTQEVFAQVKQIYKTPPIKDFGGFNFSQILPDPSKPSKRSFIEDLLFNKVTLADAGFIKQYGDCLGDIAARDLICAQKFNGLTVLPPLLTDEMIAQYTSALLAGTITSGWTFGAGAALQIPFAMQMAYRFNGIGVTQNVLYENQKLIANQFNSAIGKIQDSLSSTASALGKLQDVVNQNAQALNTLVKQLSSNFGAISSVLNDILSRLDPPEAEVQIDRLITGRLQSLQTYVTQQLIRAAEIRASANLAATKMSECVLGQSKRVDFCGKGYQLMSFPQSAPHGVVFLNVTYVPAQEKNFTTAPAICNDGKAHFPREGVFVSNGTNWFVTQRNFYEPQIITTDNTFVSGNCDVVIGIVNNTVYDPLQPELDSFKEELDKYFKNHTSPDVDLGDIPGINASVVNIQKEIDRLNEVAKNLNESLIDLQELGKYEQYIKWPWYIWLGFIAGLIAIVMVTIMLCCMTSCCSCLKGCCSCGSCCKFDEDDSEPVLKGVKLHYT

SEQ ID NO: 589 - protein, 1273 aa, Artificial Sequence
  SARS-CoV-2/USA/WA-UW261/2020__EPI_ISL_418046 spike protein (1-1273)(K986P_V987P_ H1048Q_H1064N_ H1083N_H1101N)
MFVFLVLLPLVSSQCVNLTTRTQLPPAYTNSFTRGVYYPDKVFRSSVLHSTQDLFLPFFSNVTWFHAIHVSGTNGTKRFDNPVLPFNDGVYFASTEKSNIIRGWIFGTTLDSKTQSLLIVNNATNVVIKVCEFQFCNDPFLGVYYHKNNKSWMESEFRVYSSANNCTFEYVSQPFLMDLEGKQGNFKNLREFVFKNIDGYFKIYSKHTPINLVRDLPQGFSALEPLVDLPIGINITRFQTLLALHRSYLTPGDSSSGWTAGAAAYYVGYLQPRTFLLKYNENGTITDAVDCALDPLSETKCTLKSFTVEKGIYQTSNFRVQPTESIVRFPNITNLCPFGEVFNATRFTSVYAWNRKRISNCVADYSVLYNSASFSTFKCYGVSPTKLNDLCFTNVYADSFVIRGDEVRQIAPGQTGKIADYNYKLPDDFTGCVIAWNSNNLDSKVGGNYNYLYRLFRKSNLKPFERDISTEIYQAGSTPCNGVEGFNCYFPLQSYGFQPTNGVGYQPYRVVVLSFELLHAPATVCGPKKSTNLVKNKCVNFNFNGLTGTGVLTESNKKFLPFQQFGRDIADTTDAVRDPQTLEILDITPCSFGGVSVITPGTNTSNQVAVLYQDVNCTEVPVAIHADQLTPTWRVYSTGSNVFQTRAGCLIGAEHVNNSYECDIPIGAGICASYQTQTNSPRRARSVASQSIIAYTMSLGAENSVAYSNNSIAIPTNFTISVTTEILPVSMTKTSVDCTMYICGDSTECSNLLLQYGSFCTQLNRALTGIAVEQDKNTQEVFAQVKQIYKTPPIKDFGGFNFSQILPDPSKPSKRSFIEDLLFNKVTLADAGFIKQYGDCLGDIAARDLICAQKFNGLTVLPPLLTDEMIAQYTSALLAGTITSGWTFGAGAALQIPFAMQMAYRFNGIGVTQNVLYENQKLIANQFNSAIGKIQDSLSSTASALGKLQDVVNQNAQALNTLVKQLSSNFGAISSVLNDILSRLDPPEAEVQIDRLITGRLQSLQTYVTQQLIRAAEIRASANLAATKMSECVLGQSKRVDFCGKGYQLMSFPQSAPHGVVFLNVTYVPAQEKNFTTAPAICNDGKAHFPREGVFVSNGTNWFVTQRNFYEPQIITTDNTFVSGNCDVVIGIVNNTVYDPLQPELDSFKEELDKYFKNHTSPDVDLGDISGINASVVNIQKEIDRLNEVAKNLNESLIDLQELGKYEQYIKWPWYIWLGFIAGLIAIVMVTIMLCCMTSCCSCLKGCCSCGSCCKFDEDDSEPVLKGVKLHYT

SEQ ID NO: 590 - protein, 1273 aa, Artificial Sequence
  SARS-CoV-2/Portugal/PT0035/2020__EPI_ISL_418020 spike protein (1-1273)(K986P_V987P_ H1048Q_H1064N_ H1083N_H1101N)
MFVFLVLLPLVSSQCVNLTTRTQLPPAYTNSFTRGVYYPDKVFRSSVLHSTQDLFLPFFSNVTWFHAIHVSGTNGTKRFDNPVLPFNDGVYFASTEKSNIIRGWIFGTTLDSKTQSLLIVNNATNVVIKVCEFQFCNDPFLGVYYHKNNKSWMESEFRVYSSANNCTFEYVSQPFLMDLEGKQGNFKNLREFVFKNIDGYFKIYSKHTPINLVRDLPQGFSALEPLVDLPIGINITRFQTLLALHRSYLTPGDSSSGWTAGAAAYYVGYLQPRTFLLKYNENGTITDAVDCALDPLSETKCTLKSFTVEKGIYQTSNFRVQPTESIVRFPNITNLCPFGEVFNATRFASVYAWNRKRISNCVADYSVLYNSASFSTFKCYGVSPTKLNDLCFTNVYADSFVIRGDEVRQIAPGQTGKIADYNYKLPDDFTGCVIAWNSNNLDSKVGGNYNYLYRLFRKSNLKPFERDISTEIYQAGSTPCNGVEGFNCYFPLQSYGFQPTNGVGYQPYRVVVLSFELLHAPATVCGPKKSTNLVKNKCVNFNFNGLTGTGVLTESNKKFLPFQQFGRDIADTTDAVRDPQTLEILDITPCSFGGVSVITPGTNTSNQVAVLYQDVNCTEVPVAIHADQLTPTWRVYSTGSNVFQTRAGCLIGAEHVNNSYECDIPIGAGICASYQTQTNSPRRARSVASQSIIAYTMSLGAENSVAYSNNSIAIPTNFTISVTTEILPVSMTKTSVDCTMYICGDSTECSNLLLQYGSFCTQLNRALTGIAVEQDKNTQEVFAQVKQIYKTPPIKDFGGFNFSQILPDPSKPSKRSFIEDLLFNKVTLADAGFIKQYGDCLGDISARDLICAQKFNGLTVLPPLLTDEMIAQYTSALLAGTITSGWTFGAGAALQIPFAMQMAYRFNGIGVTQNVLYENQKLIANQFNSAIGKIQDSLSSTASALGKLQDVVNQNAQALNTLVKQLSSNFGAISSVLNDILSRLDPPEAEVQIDRLITGRLQSLQTYVTQQLIRAAEIRASANLAATKMSECVLGQSKRVDFCGKGYQLMSFPQSAPHGVVFLNVTYVPAQEKNFTTAPAICNDGKAHFPREGVFVSNGTNWFVTQRNFYEPQIITTDNTFVSGNCDVVIGIVNNTVYDPLQPELDSFKEELDKYFKNHTSPDVDLGDISGINASVVNIQKEIDRLNEVAKNLNESLIDLQELGKYEQYIKWPWYIWLGFIAGLIAIVMVTIMLCCMTSCCSCLKGCCSCGSCCKFDEDDSEPVLKGVKLHYT

SEQ ID NO: 591 - protein, 1273 aa, Artificial Sequence
  SARS-CoV-2/USA/NY-NYUMC7/2020__EPI_ISL_418192 spike protein (1-1273)(K986P_V987P_ H1048Q_H1064N_ H1083N_H1101N)
MFVFLVLLPLVSSQCVNLTTRTQLPPAYTNSFTRGVYYPDKVFRSSVLHSTQDLFLPFFSNVTWFHAIHVSGTNGTKRFDNPVLPFNDGVYFASTEKSNIIRGWIFGTTLDSKTQSLLIVNNATNVVIKVCEFQFCNDPFLGVYHHKNNKSWMESEFRVYSSANNCTFEYVSQPFLMDLEGKQGNFKNLREFVFKNIDGYFKIYSKHTPINLVRDLPQGFSALEPLVDLPIGINITRFQTLLALHRSYLTPGDSSSGWTAGAAAYYVGYLQPRTFLLKYNENGTITDAVDCALDPLSETKCTLKSFTVEKGIYQTSNFRVQPTESIVRFPNITNLCPFGEVFNATRFASVYAWNRKRISNCVADYSVLYNSASFSTFKCYGVSPTKLNDLCFTNVYADSFVIRGDEVRQIAPGQTGKIADYNYKLPDDFTGCVIAWNSNNLDSKVGGNYNYLYRLFRKSNLKPFERDISTEIYQAGSTPCNGVEGFNCYFPLQSYGFQPTNGVGYQPYRVVVLSFELLHAPATVCGPKKSTNLVKNKCVNFNFNGLTGTGVLTESNKKFLPFQQFGRDIADTTDAVRDPQTLEILDITPCSFGGVSVITPGTNTSNQVAVLYQGVNCTEVPVAIHADQLTPTWRVYSTGSNVFQTRAGCLIGAEHVNNSYECDIPIGAGICASYQTQTNSPRRARSVASQSIIAYTMSLGAENSVAYSNNSIAIPTNFTISVTTEILPVSMTKTSVDCTMYICGDSTECSNLLLQYGSFCTQLNRALTGIAVEQDKNTQEVFAQVKQIYKTPPIKDFGGFNFSQILPDPSKPSKRSFIEDLLFNKVTLADAGFIKQYGDCLGDIAARDLICAQKFNGLTVLPPLLTDEMIAQYTSALLAGTITSGWTFGAGAALQIPFAMQMAYRFNGIGVTQNVLYENQKLIANQFNSAIGKIQDSLSSTASALGKLQDVVNQNAQALNTLVKQLSSNFGAISSVLNDILSRLDPPEAEVQIDRLITGRLQSLQTYVTQQLIRAAEIRASANLAATKMSECVLGQSKRVDFCGKGYQLMSFPQSAPHGVVFLNVTYVPAQEKNFTTAPAICNDGKAHFPREGVFVSNGTNWFVTQRNFYEPQIITTDNTFVSGNCDVVIGIVNNTVYDPLQPELDSFKEELDKYFKNHTSPDVDLGDISGINASVVNIQKEIDRLNEVAKNLNESLIDLQELGKYEQYIKWPWYIWLGFIAGLIAIVMVTIMLCCMTSCCSCLKGCCSCGSCCKFDEDDSEPVLKGVKLHYT

SEQ ID NO: 592 - protein, 1273 aa, Artificial Sequence
  SARS-CoV-2/Iceland/189/2020__EPI_ISL_417709 spike protein (1-1273)(K986P_V987P_ H1048Q_H1064N_ H1083N_H1101N)
MFVFLVLLPLVSSQCVNLTTRTQLPPAYTNSFTRGVYYPDKVFRSSVLHSTQDLFLPFFSNVTWFHAIHVSGTNGTKRFDNPVLPFNDGVYFASTEKSNIIRGWIFGTTLDSKTQSLLIVNNATNVVIKVCEFQFCNDPFLGVYYHKNNKSWMESEFRVYSSANNCTFEYVSQPFLMDLEGKQGNFKNLREFVFKNIDGYFKIYSKHTPINLVRDLPQGFSALEPLVDLPIGINITRFQTLLALHRSYLTPGDSSSGWTAGAAAYYVGYLQPRTFLLKYNENGTITDAVDCALDPLSETKCTLKSFTVEKGIYQTSNFRVQPTESIVRFPNITNLCPFGEVFNATRFASVYAWNRKRISNCVADYSVLYNSASFSTFKCYGVSPTKLNDLCFTNVYADSFVIRGDEVRQIAPGQTGKIADYNYKLPDDFTGCVIAWNSNNLDSKVGGNYNYLYRLFRKSNLKPFERDISTEIYQAGSTPCNGVEGFNCYFPLQSYGFQPTNGVGYQPYRVVVLSFELLHAPATVCGPKKSTNLVKNKCVNFNFNGLTGTGVLTESNKKFLPFQQFGRDIADTTDAVRDPQTLEILDITPCSFGGVSVITPGTNTSNQVAVLYQGVNCTEVPVAIHADQLTPTWRVYSTGSNVFQTRAGCLIGAEHVNNSYECDIPIGAGICASYQTQTNSPRRARSVASQSIIAYTMSLGAENSVAYSNNSIAIPTNFTISVTTEILPVSMTKTSVDCTMYICGDSTECSNLLLQYGSFCTQLNRALTGIAVEQDKNTQEVFAQVKQIYKTPPIKDFGGFNFSQILPDPSKPSKRSFIEDLLFNKVTLADAGFTKQYGDCLGDIAARDLICAQKFNGLTVLPPLLTDEMIAQYTSALLAGTITSGWTFGAGAALQIPFAMQMAYRFNGIGVTQNVLYENQKLIANQFNSAIGKIQDSLSSTASALGKLQDVVNQNAQALNTLVKQLSSNFGAISSVLNDILSRLDPPEAEVQIDRLITGRLQSLQTYVTQQLIRAAEIRASANLAATKMSECVLGQSKRVDFCGKGYQLMSFPQSAPHGVVFLNVTYVPAQEKNFTTAPAICNDGKAHFPREGVFVSNGTNWFVTQRNFYEPQIITTDNTFVSGNCDVVIGIVNNTVYDPLQPELDSFKEELDKYFKNHTSPDVDLGDISGINASVVNIQKEIDRLNEVAKNLNESLIDLQELGKYEQYIKWPWYIWLGFIAGLIAIVMVTIMLCCMTSCCSCLKGCCSCGSCCKFDEDDSEPVLKGVKLHYT

SEQ ID NO: 593 - protein, 1273 aa, Artificial Sequence
  SARS-CoV-2/Australia/NSW56/2020__EPI_ISL_417408 spike protein (1-1273)(K986P_V987P_ H1048Q_H1064N_ H1083N_H1101N)
MFVFLVLLPLVSSQCVNLTTRTQLPPAYTNSFTRGVYYPDKVFRSSVLHSTQDLFLPFFSNVTWFHAIHVSGTNGTKRFDNPVLPFNDGVYFASTEKSNIIRGWIFGTTLDSKTQSLLIVNNATNVVIKVCEFQFCNDPFLGVYYHKNNKSWMESEFRVYSSANNCTFEYVSQPFLMDLEGKQGNFKNLREFVFKNIDGYFKIYSKHTPINLVRDLPQGFSALEPLVDLPIGINITRFQTLLALHRSYLTPGDSSSGWTAGAAAYYVGYLQPRTFLLKYNENGTITDAVDCALDPLSETKCTLKSFTVEKGIYQTSNFRVQPTESIVRFPNITNLCPFGEVFNATRFASVYAWNRKRISNCVADYSVLYNSASFSTFKCYGVSPTKLNDLCFTNVYADSFVIRGDEVRQIAPGQTGKIADYNYKLPDDFTGCVIAWNSNNLDSKVGGNYNYLYRLFRKSNLKPFERDISTEIYQAGSTPCNGVEGFNCYFPLQSYGFQPTNGVGYQPYRVVVLSFELLHAPATVCGPKKSTNLVKNKCVNFNFNGLTGTGVLTESNKKFLPFQQFGRDIADTTDAVRDPQTLEILDITPCSFGGVSVITPGTNTSNQVAVLYQDVNCTEVPVAIHADQLTPTWRVYSTGSNVFQTRAGCLIGAEHVNNSYECDIPIGAGICASYQTQTNSPRRARSVASQSIIAYTMSLGAENSVAYSNNSIAIPTNFTISVTTEILPVSMTKTSVDCTMYICGDSTECSNLLLQYGSFCTQLNRALTGIAVEQDKNTQEVFAQVKQIYKTPPIKDFGGFNFSQILPDSSKPSKRSFIEDLLFNKVTLADAGFIKQYGDCLGDIAARDLICAQKFNGLTVLPPLLTDEMIAQYTSALLAGTITSGWTFGAGAALQIPFAMQMAYRFNGIGVTQNVLYENQKLIANQFNSAIGKIQDSLSSTASALGKLQDVVNQNAQALNTLVKQLSSNFGAISSVLNDILSRLDPPEAEVQIDRLITGRLQSLQTYVTQQLIRAAEIRASANLAATKMSECVLGQSKRVDFCGKGYQLMSFPQSAPHGVVFLNVTYVPAQEKNFTTAPAICNDGKAHFPREGVFVSNGTNWFVTQRNFYEPQIITTDNTFVSGNCDVVIGIVNNTVYDPLQPELDSFKEELDKYFKNHTSPDVDLGDISGINASVVNIQKEIDRLNEVAKNLNESLIDLQELGKYEQYIKWPWYIWLGFIAGLIAIVMVTIMLCCMTSCCSCLKGCCSCGSCCKFDEDDSEPVLKGVKLHYT

SEQ ID NO: 594 - protein, 1273 aa, Artificial Sequence
  SARS-CoV-2/Iceland/280/2020__EPI_ISL_417608 spike protein (1-1273)(K986P_V987P_ H1048Q_H1064N_ H1083N_H1101N)
MFVFLVLLPLVSSQCVNLTTRTQLPPAYTNSFTRGVYYPDKVFRSSVLHSTQDLFLPFFSNVTWFHAIHVSGTNGTKRFDNPVLPFNDGVYFASTEKSNIIRGWIFGTTLDSKTQSLLIVNNATNVVIKVCEFQFCNDPFLGVYYHKNNKSWMESEFRVYSSANNCTFEYVSQPFLMDLEGKQGNFKNLREFVFKNIDGYFKIYSKHTPINLVRDLPQGFSALEPLVDLPIGINITRFQTLLALHRSYLTPGDSSSGWTAGAAAYYVGYLQPRTFLLKYNENGTITDAVDCALDPLSETKCTLKSFTVEKGIYQTSNFRVQPTESIVRFPNITNLCPFGEVFNATRFASVYAWNRKRISNCVADYSVLYNSASFSTFKCYGVSPTKLNDLCFTNVYADSFVIRGDEVRQIAPGQTGKIADYNYKLPDDFTGCVIAWNSNNLDSKVGGNYNYLYRLFRKSNLKPFERDISTEIYQAGSTPCNGVEGFNCYFPLQSYGFQPTNGVGYQPYRVVVLSFELLHAPATVCGPKKSTNLVKNKCVNFNFNGLTGTGVLTESNKKFLPFQQFGRDIADTTDAVRDPQTLEILDITPCSFGGVSVITPGTNTSNQVAVLYQGVNCTEVPVAIHADQLTPTWRVYSTGSNVFQTRAGCLIGAEHVNNSYECDIPIGAGICASYHTQTNSPRRARSVASQSIIAYTMSLGAENSVAYSNNSIAIPTNFTISVTTEILPVSMTKTSVDCTMYICGDSTECSNLLLQYGSFCTQLNRALTGIAVEQDKNTQEVFAQVKQIYKTPPIKDFGGFNFSQILPDPSKPSKRSFIEDLLFNKVTLADAGFIKQYGDCLGDIAARDLICAQKFNGLTVLPPLLTDEMIAQYTSALLAGTITSGWTFGAGAALQIPFAMQMAYRFNGIGVTQNVLYENQKLIANQFNSAIGKIQDSLSSTASALGKLQDVVNQNAQALNTLVKQLSSNFGAISSVLNDILSRLDPPEAEVQIDRLITGRLQSLQTYVTQQLIRAAEIRASANLAATKMSECVLGQSKRVDFCGKGYQLMSFPQSAPHGVVFLNVTYVPAQEKNFTTAPAICNDGKAHFPREGVFVSNGTNWFVTQRNFYEPQIITTDNTFVSGNCDVVIGIVNNTVYDPLQPELDSFKEELDKYFKNHTSPDVDLGDISGINASVVNIQKEIDRLNEVAKNLNESLIDLQELGKYEQYIKWPWYIWLGFIAGLIAIVMVTIMLCCMTSCCSCLKGCCSCGSCCKFDEDDSEPVLKGVKLHYT

SEQ ID NO: 595 - protein, 1273 aa, Artificial Sequence
  SARS-CoV-2/Iceland/247/2020__EPI_ISL_417575 spike protein (1-1273)(K986P_V987P_ H1048Q_H1064N_ H1083N_H1101N)
MFVFLVLLPLVSSQCVNLTTRTQLPPAYTNSFTRGVYYPDKVFRSSVLHSTQDLFLPFFSNVTWFHAIHVSGTNGTKRFDNPVLPFNDGVYFASTEKSNIIRGWIFGTTLDSKTQSLLIVNNATNVVIKVCEFQFCNDPFLGVYYHKNNKSWMESEFRVYSSANNCTFEYVSQPFLMDLEGKQGNFKNLREFVFKNIDGYFKIYSKHTPINLVRDLPQGFSALEPLVDLPIGINITRFQTLLALHRSYLTPGDSSSGWTAGAAAYYVGYLQPRTFLLKYNENGTITDAVDCALDPLSETKCTLKSFTVEKGIYQTSNFRVQPTESIVRFPNITNLCPFGEVFNATRFASVYAWNRKRISNCVADYSVLYNSASFSTFKCYGVSPTKLNDLCFTNVYADSFVIRGDEVRQIAPGQTGKIADYNYKLPDDFTGCVIAWNSNNLDSKVGGNYNYLYRLFRKSNLKPFERDISTEIYQAGSTPCNGVEGFNCYFPLQSYGFQPTNGVGYQPYRVVVLSFELLHAPATVCGPKKSTNLVKNKCVNFNFNGLTGTGVLTESNKKFLPFQQFGRDIADTTDAVRDPQTLEILDITPCSFGGVSVITPGTNTSNQVAVLYQGVNCTEVPVAIHADQLTPTWRVYSTGSNVFQTRAGCLIGAEHVNNSYECDIPIGAGICASYQTQTNSPRRARSVASQSIIAYTMSLGAENSVAYSNNSIAIPTNFTISVTTEILPVSMTKTSVDCTMYICGDSTECSNLLLQYGSFCTQLNRALTGIAVEQDKNTQEVFAQVKQIYKTPPIKDFGGFNFSQILPDPSKPSKRSFIEDLLFNKVTLADAGFIKQYGDCLGDIAARDLICAQKFNGLTVLPPLLTDEMIAQYTSALLAGTITSGWTFGAGAALQIPFAMQMAYRFNGIGVTQNVLYENQKLIANQFNSAIGKIQDSLSSTASALGKLQDVVNQNAQALNTLVKQLSSNFGAISSVLNDILSRLDPPEAEVQIDRLITGRLQSLQTYVTQQLIRAAEIRASANLAATKMSECVLGQSKRVDFCGKGYQLMSFPQSAPHGVVFLNVTYVPAQEKNFTTAPAICNDGKAHFPREGVFVSNGTNWFVTQRNFYEPQIITTDNTFVSGNCDVVIGIVNNTVYDPLQPELDSFKEELDKYFKNHTSPDVDLGDISGINASVVNIQKEIDRLNEVAKNLNESLIDLQELGKYEQYIKWPWYIWLGFIAGLIAIVIVTIMLCCMTSCCSCLKGCCSCGSCCKFDEDDSEPVLKGVKLHYT

SEQ ID NO: 596 - protein, 1273 aa, Artificial Sequence
  SARS-CoV-2/Iceland/238/2020__EPI_ISL_417566 spike protein (1-1273)(K986P_V987P_ H1048Q_H1064N_ H1083N_H1101N)
MFVFLVLLPLVSSQCVNLTTRTQLPPAYTNSFTRGVYYPDKVFRSSVLHSTQDLFLPFFSNVTWFHAIHVSGTNGTKRFDNPVLPFNDGVYFASTEKSNIIRGWIFGTTLDSKTQSLLIVNNATNVVIKVCEFQFCNDPFLGVYYHKNNKSWMESEFRVYSSANNCTFEYVSQPFLMDLEGKQGNFKNLREFVFKNIDGYFKIYSKHTPINLVRDLPQGFSALEPLVDLPIGINITRFQTLLALHRSYLTPGDSSSGWTAGAAAYYVGYLQPRTFLLKYNENGTITDAVDCALDPLSETKCTLKSFTVEKGIYQTSNFRVQPTESIVRFPNITNLCPFGEVFNATRFASVYAWNRKRISNCVADYSVLYNSASFSTFKCYGVSPTKLNDLCFTNVYADSFVIRGDEVRQIAPGQTGKIADYNYKLPDDFTGCVIAWNSNNLDSKVGGNYNYLYRLFRKSNLKPFERDISTEIYQAGSTPCNGVEGFNCYFPLQSYGFQPTNGVGYQPYRVVVLSFELLHAPATVCGPKKSTNLVKNKCVNFNFNGLTGTGVLTESNKKFLPFQQFGRDIADTTDAVRDPQTLEILDITPCSFGGVSVITPGTNTSNQVAVLYQGVNCTEVPVAIHADQLTPTWRVYSTGSNVFQTRAGCLIGAEHVNNSYECDIPIGAGICASYQTQTNSPRRARSVASQSIIAYTMSLGAENSVAYSNNSIAIPTNFTISVTTEILPVSMTKTSVDCTMYICGDSTECSNLLLQYGSFCTQLNRALTGIAVEQDKNTQEVFAQVKQIYKTPPIKDFGGFNFSQILPDPSKPSKRSFIEDLLFNKVTLADVGFIKQYGDCLGDIAARDLICAQKFNGLTVLPPLLTDEMIAQYTSALLAGTITSGWTFGAGAALQIPFAMQMAYRFNGIGVTQNVLYENQKLIANQFNSAIGKIQDSLSSTASALGKLQDVVNQNAQALNTLVKQLSSNFGAISSVLNDILSRLDPPEAEVQIDRLITGRLQSLQTYVTQQLIRAAEIRASANLAATKMSECVLGQSKRVDFCGKGYQLMSFPQSAPHGVVFLNVTYVPAQEKNFTTAPAICNDGKAHFPREGVFVSNGTNWFVTQRNFYEPQIITTDNTFVSGNCDVVIGIVNNTVYDPLQPELDSFKEELDKYFKNHTSPDVDLGDISGINASVVNIQKEIDRLNEVAKNLNESLIDLQELGKYEQYIKWPWYIWLGFIAGLIAIVMVTIMLCCMTSCCSCLKGCCSCGSCCKFDEDDSEPVLKGVKLHYT

SEQ ID NO: 597 - protein, 1273 aa, Artificial Sequence
  SARS-CoV-2/Greece/16/2020__EPI_ISL_418265 spike protein (1-1273)(K986P_V987P_ H1048Q_H1064N_ H1083N_H1101N)
MFVFLVLLPLVSSQCVNLTTRTQLPPAYTNSFTRGVYYPDKVFRSSVLHSTQDLFLPFFSNVTWFHAIHVSGTNGTKRFDNPVLPFNDGVYFASTEKSNIIRGWIFGTTLDSKTQSLLIVNNATNVVIKVCEFQFCNDPFLGVYYHKNNKSWMESEFRVYSSANNCTFEYVSQPFLMDLEGKQGNFKNLREFVFKNVDGYFKIYSKHTPINLVRDLPQGFSALEPLVDLPIGINITRFQTLLALHRSYLTPGDSSSGWTAGAAAYYVGYLQPRTFLLKYNENGTITDAVDCALDPLSETKCTLKSFTVEKGIYQTSNFRVQPTESIVRFPNITNLCPFGEVFNATRFASVYAWNRKRISNCVADYSVLYNSASFSTFKCYGVSPTKLNDLCFTNVYADSFVIRGDEVRQIAPGQTGKIADYNYKLPDDFTGCVIAWNSNNLDSKVGGNYNYLYRLFRKSNLKPFERDISTEIYQAGSTPCNGVEGFNCYFPLQSYGFQPTNGVGYQPYRVVVLSFELLHAPATVCGPKKSTNLVKNKCVNFNFNGLTGTGVLTESNKKFLPFQQFGRDIADTTDAVRDPQTLEILDITPCSFGGVSVITPGTNTSNQVAVLYQDVNCTEVPVAIHADQLTPTWRVYSTGSNVFQTRAGCLIGAEHVNNSYECDIPIGAGICASYQTQTNSPRRARSVASQSIIAYTMSLGAENSVAYSNNSIAIPTNFTISVTTEILPVSMTKTSVDCTMYICGDSTECSNLLLQYGSFCTQLNRALTGIAVEQDKNTQEVFAQVKQIYKTPPIKDFGGFNFSQILPDPSKPSKRSFIEDLLFNKVTLADAGFIKQYGDCLGDIAARDLICAQKFNGLTVLPPLLTDEMIAQYTSALLAGTITSGWTFGAGAALQIPFAMQMAYRFNGIGVTQNVLYENQKLIANQFNSAIGKIQDSLSSTASALGKLQDVVNQNAQALNTLVKQLSSNFGAISSVLNDILSRLDPPEAEVQIDRLITGRLQSLQTYVTQQLIRAAEIRASANLAATKMSECVLGQSKRVDFCGKGYQLMSFPQSAPHGVVFLNVTYVPAQEKNFTTAPAICNDGKAHFPREGVFVSNGTNWFVTQRNFYEPQIITTDNTFVSGNCDVVIGIVNNTVYDPLQPELDSFKEELDKYFKNHTSPDVDLGDISGINASVVNIQKEIDRLNEVAKNLNESLIDLQELGKYEQYIKWPWYIWLGFIAGLIAIVMVTIMLCCMTSCCSCLKGCCSCGSCCKFDEDDSEPVLKGVKLHYT

SEQ ID NO: 598 - protein, 1273 aa, Artificial Sequence
  SARS-CoV-2/Iceland/319/2020__EPI_ISL_417648 spike protein (1-1273)(K986P_V987P_ H1048Q_H1064N_ H1083N_H1101N)
MFVFLVLLPLVSSQCVNLTTRTQLPPAYTNSFTRGVYYPDKVFRSSVLHSTQDLFLPFFSNVTWFHAIHVSGTNGTKRFDNPVLPFNDGVYFASTEKSNIIRGWIFGTTLDSKTQSLLIVNNATNVVIKVCEFQFCNDPFLGVYYHKNNKSWMESEFRVYSSANNCTFEYVSQPFLIDLEGKQGNFKNLREFVFKNIDGYFKIYSKHTPINLVRDLPQGFSALEPLVDLPIGINITRFQTLLALHRSYLTPGDSSSGWTAGAAAYYVGYLQPRTFLLKYNENGTITDAVDCALDPLSETKCTLKSFTVEKGIYQTSNFRVQPTESIVRFPNITNLCPFGEVFNATRFASVYAWNRKRISNCVADYSVLYNSASFSTFKCYGVSPTKLNDLCFTNVYADSFVIRGDEVRQIAPGQTGKIADYNYKLPDDFTGCVIAWNSNNLDSKVGGNYNYLYRLFRKSNLKPFERDISTEIYQAGSTPCNGVEGFNCYFPLQSYGFQPTNGVGYQPYRVVVLSFELLHAPATVCGPKKSTNLVKNKCVNFNFNGLTGTGVLTESNKKFLPFQQFGRDIADTTDAVRDPQTLEILDITPCSFGGVSVITPGTNTSNQVAVLYQGVNCTEVPVAIHADQLTPTWRVYSTGSNVFQTRAGCLIGAEHVNNSYECDIPIGAGICASYQTQTNSPRRARSVASQSIIAYTMSLGAENSVAYSNNSIAIPTNFTISVTTEILPVSMTKTSVDCTMYICGDSTECSNLLLQYGSFCTQLNRALTGIAVEQDKNTQEVFAQVKQIYKTPPIKDFGGFNFSQILPDPSKPSKRSFIEDLLFNKVTLADAGFIKQYGDCLGDIAARDLICAQKFNGLTVLPPLLTDEMIAQYTSALLAGTITSGWTFGAGAALQIPFAMQMAYRFNGIGVTQNVLYENQKLIANQFNSAIGKIQDSLSSTASALGKLQDVVNQNAQALNTLVKQLSSNFGAISSVLNDILSRLDPPEAEVQIDRLITGRLQSLQTYVTQQLIRAAEIRASANLAATKMSECVLGQSKRVDFCGKGYQLMSFPQSAPHGVVFLNVTYVPAQEKNFTTAPAICNDGKAHFPREGVFVSNGTNWFVTQRNFYEPQIITTDNTFVSGNCDVVIGIVNNTVYDPLQPELDSFKEELDKYFKNHTSPDVDLGDISGINASVVNIQKEIDRLNEVAKNLNESLIDLQELGKYEQYIKWPWYIWLGFIAGLIAIVMVTIMLCCMTSCCSCLKGCCSCGSCCKFDEDDSEPVLKGVKLHYT

SEQ ID NO: 599 - protein, 1273 aa, Artificial Sequence
  SARS-CoV-2/Congo/94/2020__EPI_ISL_417947 spike protein (1-1273)(K986P_V987P_ H1048Q_H1064N_ H1083N_H1101N)
MFVFLVLLPLVSSQCVNLTTRTQLPPAYTNSFTRGVYYPDKVFRSSVLHSTQDLFLPFFSNVTWFHAIHVSGTNGTKRFDNPVLPFNDGVYFASTEKSNIIRGWIFGTTLDSKTQSLLIVNNATNVVIKVCEFQFCNDPFLGVYYHKNNKSWMESEFRVYSSANNCTFEYVSQPFLMDLEGKQGNFKNLREFVFKNIDGYFKIYSKHTPINLVRDLPQGFSALEPLVDLPIGINITRFQTLLALHRSYLTPGDSSSGWTAGAAAYYVGYLQPRTFLLKYNENGTITDAVDCALDPLSETKCTLKSFTVEKGIYQTSNFRVQPTESIVRFPNITNLCPFGEVFNATRFASVYAWNRKRISNCVADYSVLYNSASFSTFKCYGVSPTKLNDLCFTNVYADSFVIRGDEVRQIAPGQTGKIADYNYKLPDDFTGCVIAWNSNNLDSKVGGNYNYLYRLFRKSNLKPFERDISTEIYQAGSTPCNGVEGFNCYFPLQSYGFQPTNGVGYQPYRVVVLSFELLHAPATVCGPKKSTNLVKNKCVNFNFNGLTGTGVLTESNKKFLPFQQFGRDIADTTDAVRDPQTLEILDITPCSFGGVSVITPGTNTSNQVAVLYQGVNCTEVPVAIHADQLTPTWRVYSTGSNVFQTRAGCLIGAEHVNNSYECDIPIGAGICASYQTQTNSPRRARSVASQSIIAYTMSLGAENSVAYSNNSIAIPTNFTISVTTEILPVSMTKTSVDCTMYICGDSTECSNLLLQYGSFCTQLNRALTGIAVEQDKNTQEVFAQVKQIYKTPPIKDFGGFNFSQILPDPSKPSKRSFIEDILFNKVTLADAGFIKQYGDCLGDIAARDLICAQKFNGLTVLPPLLTDEMIAQYTSALLAGTITSGWTFGAGAALQIPFAMQMAYRFNGIGVTQNVLYENQKLIANQFNSAIGKIQDSLSSTASALGKLQDVVNQNAQALNTLVKQLSSNFGAISSVLNDILSRLDPPEAEVQIDRLITGRLQSLQTYVTQQLIRAAEIRASANLAATKMSECVLGQSKRVDFCGKGYQLMSFPQSAPHGVVFLNVTYVPAQEKNFTTAPAICNDGKAHFPREGVFVSNGTNWFVTQRNFYEPQIITTDNTFVSGNCDVVIGIVNNTVYDPLQPELDSFKEELDKYFKNHTSPDVDLGDISGINASVVNIQKEIDRLNEVAKNLNESLIDLQELGKYEQYIKWPWYIWLGFIAGLIAIVMVTIMLCCMTSCCSCLKGCCSCGSCCKFDEDDSEPVLKGVKLHYT

SEQ ID NO: 600 - protein, 1273 aa, Artificial Sequence
  SARS-CoV-2/Congo/158/2020__EPI_ISL_417950 spike protein (1-1273)(K986P_V987P_ H1048Q_H1064N_ H1083N_H1101N)
MFVFLVLLPLVSSQCVNLTTRTQLPPAYTNSFTRGVYYPDKVFRSSVLHSTQDLFLPFFSNVTWFHAIHVSGTNGTKRFDNPVLPFNDGVYFASTEKSNIIRGWIFGTTLDSKTQSLLIVNNATNVVIKVCEFQFCNDPFLGVYYHKNNKSWMESEFRVYSSANNCTFEYVSQPFLMDLEGKQGNFKNLREFVFKNIDGYFKIYSKHTPINLVRDLPQGFSALEPLVDLPIGINITRFQTLLALHRSYLTPGDSSSGWTAGAAAYYVGYLQPRTFLLKYNENGTITDAVDCALDPLSETKCTLKSFTVEKGIYQTSNFRVQPTESIVRFPNITNLCPFGEVFNATRFASVYAWNRKRISNCVADYSVLYNSASFSTFKCYGVSPTKLNDLCFTNVYADSFVIRGDEVRQIAPGQTGKIADYNYKLPDDFTGCVIAWNSNNLDSKVGGNYNYLYRLFRKSNLKPFERDISTEIYQAGSTPCNGVEGFNCYFPLQSYGFQPTNGVGYQPYRVVVLSFELLHAPATVCGPKKSTNLVKNKCVNFNFNGLTGTGVLTESNKKFLPFQQFGRDIADTTDAVRDPQTLEILDITPCSFGGVSVITPGTNTSNQVAVLYQDVNCTEVPVAIHADQLTPTWRVYSTGSNVFQTRAGCLIGAEHVNNSYECDIPIGAGICASYQTQTNSPRRARSVASQSIIAYTMSLGAENSVAYSNNSIAIPTNFTISVTTEILPVSMTKTSVDCTMYICGDSTECSNLLLQYGSFCTQLNRALTGIAVEQDKNTQEVFAQVKQIYKTPPIKDFGGFNFSQILPDPSKPSKRSFIEDLLFNKVTLADAGFIKQYGDCLGDIAARDLICAQKFNGLTVLPPLLTDEMIAQYTSALLAGTITSGWTFGAGAALQIPFAMQMAYRFNGIGVTQNVLYENQKLIANQFNSAIGKIQDSLSSTASALGKLQDVVNQNAQALNTLVKQLSSNFGAISSVLNDILSRLDPPEAEVQIDRLITGRLQSLQTYVTQQLIRAAEIRASANLAATKMSECVLGQSKRVDFCGKGYQLMSFPQSAPHGVVFLNVTYVPAQEKNFTTAPAICNDGKAHFPREGVFVSNGTNWFVTQRNFYEPQIITTDNTFLSGNCDVVIGIVNNTVYDPLQPELDSFKEELDKYFKNHTSPDVDLGDISGINASVVNIQKEIDRLNEVAKNLNESLIDLQELGKYEQYIKWPWYIWLGFIAGLIAIVMVTIMLCCMTSCCSCLKGCCSCGSCCKFDEDDSEPVLKGVKLHYT

SEQ ID NO: 601 - protein, 1273 aa, Artificial Sequence
  SARS-CoV-2/USA/UT-00034/2020__EPI_ISL_417977 spike protein (1-1273)(K986P_V987P_ H1048Q_H1064N_ H1083N_H1101N)
MFVFLVLLPLVSSQCVNLTTRTQLPPAYTNSFTRGVYYPDKVFRSSVLHSTQDLFLPFFSNVTWFHAIHVSGTNGTKRFDNPVLPFNDGVYFASTEKSNIIRGWIFGTTLDSKTQSLLIVNNATNVVIKVCEFQFCNDPFLGVYYYKNNKSWMESEFRVYSSANNCTFEYVSQPFLMDLEGKQGNFKNLREFVFKNIDGYFKIYSKHTPINLVRDLPQGFSALEPLVDLPIGINITRFQTLLALHRSYLTPGDSSSGWTAGAAAYYVGYLQPRTFLLKYNENGTITDAVDCALDPLSETKCTLKSFTVEKGIYQTSNFRVQPTESIVRFPNITNLCPFGEVFNATRFASVYAWNRKRISNCVADYSVLYNSASFSTFKCYGVSPTKLNDLCFTNVYADSFVIRGDEVRQIAPGQTGKIADYNYKLPDDFTGCVIAWNSNNLDSKVGGNYNYLYRLFRKSNLKPFERDISTEIYQAGSTPCNGVEGFNCYFPLQSYGFQPTNGVGYQPYRVVVLSFELLHAPATVCGPKKSTNLVKNKCVNFNFNGLTGTGVLTESNKKFLPFQQFGRDIADTTDAVRDPQTLEILDITPCSFGGVSVITPGTNTSNQVAVLYQGVNCTEVPVAIHADQLTPTWRVYSTGSNVFQTRAGCLIGAEHVNNSYECDIPIGAGICASYQTQTNSPRRARSVASQSIIAYTMSLGAENSVAYSNNSIAIPTNFTISVTTEILPVSMTKTSVDCTMYICGDSTECSNLLLQYGSFCTQLNRALTGIAVEQDKNTQEVFAQVKQIYKTPPIKDFGGFNFSQILPDPSKPSKRSFIEDLLFNKVTLADAGFIKQYGDCLGDIAARDLICAQKFNGLTVLPPLLTDEMIAQYTSALLAGTITSGWTFGAGAALQIPFAMQMAYRFNGIGVTQNVLYENQKLIANQFNSAIGKIQDSLSSTASALGKLQDVVNQNAQALNTLVKQLSSNFGAISSVLNDILSRLDPPEAEVQIDRLITGRLQSLQTYVTQQLIRAAEIRASANLAATKMSECVLGQSKRVDFCGKGYQLMSFPQSAPHGVVFLNVTYVPAQEKNFTTAPAICNDGKAHFPREGVFVSNGTNWFVTQRNFYEPQIITTDNTFVSGNCDVVIGIVNNTVYDPLQPELDSFKEELDKYFKNHTSPDVDLGDISGINASVVNIQKEIDRLNEVAKNLNESLIDLQELGKYEQYIKWPWYIWLGFIAGLIAIVMVTIMLCCMTSCCSCLKGCCSCGSCCKFDEDDSEPVLKGVKLHYT

SEQ ID NO: 602 - protein, 1273 aa, Artificial Sequence
  SARS-CoV-2/USA/UT-00033/2020__EPI_ISL_417976 spike protein (1-1273)(K986P_V987P_ H1048Q_H1064N_ H1083N_H1101N)
MFVFLVLLPLVSSQCVNLTTRTQLPPAYTNSFTRGVYYPDKVFRSSVLHSTQDLFLPFFSNVTWFHAIHVSGTNGTKRFDNPVLPFNDGVYFASTEKSNIIRGWIFGTTLDSKTQSLLIVNNATNVVIKVCEFQFCNDPFLGVYYHKNNKSWMESEFRVYSSANNCTFEYVSQPFLMDLEGKQGNFKNLREFVFKNIDGYFKIYSKHTPINLVRDLPQGFSALEPLVDLPIGINITRFQTLLALHRSYLTPGDSSSGLTAGAAAYYVGYLQPRTFLLKYNENGTITDAVDCALDPLSETKCTLKSFTVEKGIYQTSNFRVQPTESIVRFPNITNLCPFGEVFNATRFASVYAWNRKRISNCVADYSVLYNSASFSTFKCYGVSPTKLNDLCFTNVYADSFVIRGDEVRQIAPGQTGKIADYNYKLPDDFTGCVIAWNSNNLDSKVGGNYNYLYRLFRKSNLKPFERDISTEIYQAGSTPCNGVEGFNCYFPLQSYGFQPTNGVGYQPYRVVVLSFELLHAPATVCGPKKSTNLVKNKCVNFNFNGLTGTGVLTESNKKFLPFQQFGRDIADTTDAVRDPQTLEILDITPCSFGGVSVITPGTNTSNQVAVLYQGVNCTEVPVAIHADQLTPTWRVYSTGSNVFQTRAGCLIGAEHVNNSYECDIPIGAGICASYQTQTNSPRRARSVASQSIIAYTMSLGAENSVAYSNNSIAIPTNFTISVTTEILPVSMTKTSVDCTMYICGDSTECSNLLLQYGSFCTQLNRALTGIAVEQDKNTQEVFAQVKQIYKTPPIKDFGGFNFSQILPDPSKPSKRSFIEDLLFNKVTLADAGFIKQYGDCLGDIAARDLICAQKFNGLTVLPPLLTDEMIAQYTSALLAGTITSGWTFGAGAALQIPFAMQMAYRFNGIGVTQNVLYENQKLIANQFNSAIGKIQDSLSSTASALGKLQDVVNQNAQALNTLVKQLSSNFGAISSVLNDILSRLDPPEAEVQIDRLITGRLQSLQTYVTQQLIRAAEIRASANLAATKMSECVLGQSKRVDFCGKGYQLMSFPQSAPHGVVFLNVTYVPAQEKNFTTAPAICNDGKAHFPREGVFVSNGTNWFVTQRNFYEPQIITTDNTFVSGNCDVVIGIVNNTVYDPLQPELDSFKEELDKYFKNHTSPDVDLGDISGINASVVNIQKEIDRLNEVAKNLNESLIDLQELGKYEQYIKWPWYIWLGFIAGLIAIVMVTIMLCCMTSCCSCLKGCCSCGSCCKFDEDDSEPVLKGVKLHYT

SEQ ID NO: 603 - protein, 1273 aa, Artificial Sequence
  SARS-CoV-2/USA/WI-13/2020__EPI_ISL_417516 spike protein (1-1273)(K986P_V987P_ H1048Q_H1064N_ H1083N_H1101N)
MFVFLVLLPLVSSQCVNLTTRTQLPPAYTNSFTRGVYYPDKVFRSSVLHSTQDLFLPFFSNVTWFHAIHVSGTNGTKRFDNPVLPFNDGVYFASTEKSNIIRGWIFGTTLDSKTQSLLIVNNATNVVIKVCEFQFCNDPFLGVYYHKNNKSWMESEFRVYSSANNCTFEYVSQPFLMDLEGKQGNFKNLREFVFKNIDGYFKIYSKHTPINLVRDLPQGFSALEPLVDLPIGINITRFQTLLALHRSYLTPGDSSSGWTAGAAAYYVGYLQPRTFLLKYNENGTITDAVDCALDPLSETKCTLKSFTVEKGIYQTSNFRVLPTESIVRFPNITNLCPFGEVFNATRFASVYAWNRKRISNCVADYSVLYNSASFSTFKCYGVSPTKLNDLCFTNVYADSFVIRGDEVRQIAPGQTGKIADYNYKLPDDFTGCVIAWNSNNLDSKVGGNYNYLYRLFRKSNLKPFERDISTEIYQAGSTPCNGVEGFNCYFPLQSYGFQPTNGVGYQPYRVVVLSFELLHAPATVCGPKKSTNLVKNKCVNFNFNGLTGTGVLTESNKKFLPFQQFGRDIADTTDAVRDPQTLEILDITPCSFGGVSVITPGTNTSNQVAVLYQGVNCTEVPVAIHADQLTPTWRVYSTGSNVFQTRAGCLIGAEHVNNSYECDIPIGAGICASYQTQTNSPRRARSVASQSIIAYTMSLGAENSVAYSNNSIAIPTNFTISVTTEILPVSMTKTSVDCTMYICGDSTECSNLLLQYGSFCTQLNRALTGIAVEQDKNTQEVFAQVKQIYKTPPIKDFGGFNFSQILPDPSKPSKRSFIEDLLFNKVTLADAGFIKQYGDCLGDIAARDLICAQKFNGLTVLPPLLTDEMIAQYTSALLAGTITSGWTFGAGAALQIPFAMQMAYRFNGIGVTQNVLYENQKLIANQFNSAIGKIQDSLSSTASALGKLQDVVNQNAQALNTLVKQLSSNFGAISSVLNDILSRLDPPEAEVQIDRLITGRLQSLQTYVTQQLIRAAEIRASANLAATKMSECVLGQSKRVDFCGKGYQLMSFPQSAPHGVVFLNVTYVPAQEKNFTTAPAICNDGKAHFPREGVFVSNGTNWFVTQRNFYEPQIITTDNTFVSGNCDVVIGIVNNTVYDPLQPELDSFKEELDKYFKNHTSPDVDLGDISGINASVVNIQKEIDRLNEVAKNLNESLIDLQELGKYEQYIKWPWYIWLGFIAGLIAIVMVTIMLCCMTSCCSCLKGCCSCGSCCKFDEDDSEPVLKGVKLHYT

SEQ ID NO: 604 - protein, 1272 aa, Artificial Sequence
  SARS-CoV-2/India/1-27/2020__EPI_ISL_413522 spike protein (1-1272)(K985P_V986P_ H1047Q_H1063N_ H1082N_H1100N)
MFVFLVLLPLVSSQCVNLTTRTQLPPAYTNSFTRGVYYPDKVFRSSVLHSTQDLFLPFFSNVTWFHAIHVSGTNGTKRFDNPVLPFNDGVYFASTEKSNIIRGWIFGTTLDSKTQSLLIVNNATNVVIKVCEFQFCNDPFLGVYHKNNKSWMESEFRVYSSANNCTFEYVSQPFLMDLEGKQGNFKNLREFVFKNIDGYFKIYSKHTPINLVRDLPQGFSALEPLVDLPIGINITRFQTLLALHRSYLTPGDSSSGWTAGAAAYYVGYLQPRTFLLKYNENGTITDAVDCALDPLSETKCTLKSFTVEKGIYQTSNFRVQPTESIVRFPNITNLCPFGEVFNATRFASVYAWNRKRISNCVADYSVLYNSASFSTFKCYGVSPTKLNDLCFTNVYADSFVIRGDEVIQIAPGQTGKIADYNYKLPDDFTGCVIAWNSNNLDSKVGGNYNYLYRLFRKSNLKPFERDISTEIYQAGSTPCNGVEGFNCYFPLQSYGFQPTNGVGYQPYRVVVLSFELLHAPATVCGPKKSTNLVKNKCVNFNFNGLTGTGVLTESNKKFLPFQQFGRDIADTTDAVRDPQTLEILDITPCSFGGVSVITPGTNTSNQVAVLYQDVNCTEVPVAIHADQLTPTWRVYSTGSNVFQTRAGCLIGAEHVNNSYECDIPIGAGICASYQTQTNSPRRARSVASQSIIAYTMSLGAENSVAYSNNSIAIPTNFTISVTTEILPVSMTKTSVDCTMYICGDSTECSNLLLQYGSFCTQLNRALTGIAVEQDKNTQEVFAQVKQIYKTPPIKDFGGFNFSQILPDPSKPSKRSFIEDLLFNKVTLADAGFIKQYGDCLGDIAARDLICAQKFNGLTVLPPLLTDEMIAQYTSALLAGTITSGWTFGAGAALQIPFAMQMAYRFNGIGVTQNVLYENQKLIANQFNSAIGKIQDSLSSTASALGKLQDVVNQNAQALNTLVKQLSSNFGAISSVLNDILSRLDPPEAEVQIDRLITGRLQSLQTYVTQQLIRAAEIRASANLAATKMSECVLGQSKRVDFCGKGYQLMSFPQSAPHGVVFLNVTYVPAQEKNFTTAPAICNDGKAHFPREGVFVSNGTNWFVTQRNFYEPQIITTDNTFVSGNCDVVIGIVNNTVYDPLQPELDSFKEELDKYFKNHTSPDVDLGDISGINASVVNIQKEIDRLNEVAKNLNESLIDLQELGKYEQYIKWPWYIWLGFIAGLIAIVMVTIMLCCMTSCCSCLKGCCSCGSCCKFDEDDSEPVLKGVKLHYT

SEQ ID NO: 605 - protein, 1267 aa, Artificial Sequence
  SARS-CoV-2/pangolin/Guangxi/P4L/2017__EPI_ISL_410538 spike protein (1-1267)(K980P_V981P_ H1042Q_H1058N_ H1077N_H1095N)
MFVFLFVLPLVSSQCVNLTTRTGIPPGYTNSSTRGVYYPDKVFRSSILHLTQDLFLPFFSNVTWFNTINYQGGFKKFDNPVLPFNDGVYFASTEKSNIIRGWIFGTTLDARTQSLLIVNNATNVVIKVCEFQFCTDPFLGVYYHNNNKTWVENEFRVYSSANNCTFEYISQPFLMDLEGKQGNFKNLREFVFKNVDGYFKIYSKHTPIDLVRDLPRGFAALEPLVDLPIGINITRFQTLLALHRSYLTPGNLESGWTTGAAAYYVGYLQQRTFLLSYNQNGTITDAVDCSLDPLSETKCTLKSLTVEKGIYQTSNFRVQPTISIVRFPNITNLCPFGEVFNASKFASVYAWNRKRISNCVADYSVLYNSTSFSTFKCYGVSPTKLNDLCFTNVYADSFVVKGDEVRQIAPGQTGVIADYNYKLPDDFTGCVIAWNSVKQDALTGGNYGYLYRLFRKSKLKPFERDISTEIYQAGSTPCNGQVGLNCYYPLERYGFHPTTGVNYQPFRVVVLSFELLNGPATVCGPKLSTTLVKDKCVNFNFNGLTGTGVLTTSKKQFLPFQQFGRDISDTTDAVRDPQTLEILDITPCSFGGVSVITPGTNTSNQVAVLYQDVNCTEVPMAIHAEQLTPAWRVYSAGANVFQTRAGCLVGAEHVNNSYECDIPVGAGICASYHSMSSLRSVNQRSIIAYTMSLGAENSVAYSNNSIAIPTNFTISVTTEILPVSMTKTSVDCTMYICGDSIECSNLLLQYGSFCTQLNRALTGIAVEQDKNTQEVFAQVKQIYKTPPIKDFGGFNFSQILPDPSKPSKRSFIEDLLFNKVTLADAGFIKQYGDCLGDIAARDLICAQKFNGLTVLPPLLTDEMIAQYTSALLAGTITSGWTFGAGAALQIPFAMQMAYRFNGIGVTQNVLYENQKLIANQFNSAIGKIQDSLSSTASALGKLQDVVNQNAQALNTLVKQLSSNFGAISSVLNDILSRLDPPEAEVQIDRLITGRLQSLQTYVTQQLIRAAEIRASANLAATKMSECVLGQSKRVDFCGKGYQLMSFPQSAPHGVVFLNVTYVPAQEKNFTTAPAICNEGKAHFPREGVFVSNGTNWFITQRNFYEPQIITTDNTFVSGSCDVVIGIVNNTVYDPLQPELDSFKEELDKYFKNHTSPDVDLGDISGINASVVNIQKEIDRLNEVAKNLNESPIDLQELGKYEQYIKWPWYIWLGFIAGLIAIIMVTIMLCCMTSCCSCLKGCCSCGSCCKFDEDDSEPVLKGVKLHYT

SEQ ID NO: 606 - protein, 1267 aa, Artificial Sequence
  SARS-CoV-2/pangolin/Guangxi/P5L/2017__EPI_ISL_410540 spike protein (1-1267)(K980P_V981P_ H1042Q_H1058N_ H1077N_H1095N)
MFVFLFVLPLVSSQCVNLTTRTGIPPGYTNSSTRGVYYPDKVFRSSILHLTQDLFLPFFSNVTWFNTINYQGGFKKFDNPVLPFNDGVYFASTEKSNIIRGWIFGTTLDARTQSLLIVNNATNVVIKVCEFQFCTDPFLGVYYHNNNKTWVENEFRVYSSANNCTFEYISQPFLMDLEGKQGNFKNLREFVFKNVDGYFKIYSKHTPIDLVRDLPRGFAALEPLVDLPIGINITRFQTLLALHRSYLTPGKLESGWTTGAAAYYVGYLQQRTFLLSYNQNGTITDAVDCSLDPLSETKCTLKSLTVEKGIYQTSNFRVQPTISIVRFPNITNLCPFGEVFNASKFASVYAWNRKRISNCVADYSVLYNSTSFSTFKCYGVSPTKLNDLCFTNVYADSFVVKGDEVRQIAPGQTGVIADYNYKLPDDFTGCVIAWNSVKQDALTGGNYGYLYRLFRKSKLKPFERDISTEIYQAGSTPCNGQVGLNCYYPLERYGFHPTTGVNYQPFRVVVLSFELLNGPATVCGPKLSTTLVKDKCVNFNFNGLTGTGVLTTSKKQFLPFQQFGRDISDTTDAVRDPQTLEILDITPCSFGGVSVITPGTNTSNQVAVLYQDVNCTEVPMAIHAEQLTPAWRVYSAGANVFQTRAGCLVGAEHVNNSYECDIPVGAGICASYHSMSSFRSVNQRSIIAYTMSLGAENSVAYSNNSIAIPTNFTISVTTEILPVSMTKTSVDCTMYICGDSIECSNLLLQYGSFCTQLNRALTGIAVEQDKNTQEVFAQVKQIYKTPPIKDFGGFNFSQILPDPSKPSKRSFIEDLLFNKVTLADAGFIKQYGDCLGDIAARDLICAQKFNGLTVLPPLLTDEMIAQYTSALLAGTITSGWTFGAGAALQIPFAMQMAYRFNGIGVTQNVLYENQKLIANQFNSAIGKIQDSLSSTASALGKLQDVVNQNAQALNTLVKQLSSNFGAISSVLNDILSRLDPPEAEVQIDRLITGRLQSLQTYVTQQLIRAAEIRASANLAATKMSECVLGQSKRVDFCGKGYQLMSFPQSAPHGVVFLNVTYVPAQEKNFTTAPAICNEGKAHFPREGVFVSNGTNWFITQRNFYEPQIITTDNTFVSGSCDVVIGIVNNTVYDPLQPELDSFKEELDKYFKNHTSPDVDLGDISGINASVVNIQKEIDRLNEVAKNLNESLIDLQELGKYEQYIKWPWYIWLGFIAGLIAIIMVTIMLCCMTSCCSCLKGCCSCGSCCKFDEDDSEPVLKGVKLHYT

SEQ ID NO: 607 - protein, 1267 aa, Artificial Sequence
  SARS-CoV-2/pangolin/Guangxi/P5E/2017__EPI_ISL_410541 spike protein (1-1267)(K980P_V981P_ H1042Q_H1058N_ H1077N_H1095N)
MFVFLFVLPLVSSQCVNLTTRTGIPPGYTNSSTRGVYYPDKVFRSSILHLTQDLFLPFFSNVTWFNTITYQGGSKKFDNPVLPFNDGVYFASTEKSNIIRGWIFGTTLDARTQSLLIVNNATNVVIKVCEFQFCTDPFLGVYYHNNNKTWVENEFRVYSSANNCTFEYISQPFLMDLEGKQGNFKNLREFVFKNVDGYFKIYSKHTPIDLVRDLPRGFAALEPLVDLPIGINITRFQTLLALHRSYLTPGKLESGWTTGAAAYYVGYLQQRTFLLSYNQNGTITDAVDCSLDPLSETKCTLKSLTVEKGIYQTSNFRVQPTISIVRFPNITNLCPFGEVFNASKFASVYAWNRKRISNCVADYSVLYNSTSFSTFKCYGVSPTKLNDLCFTNVYADSFVVKGDEVRQIAPGQTGVIADYNYKLPDDFTGCVIAWNSVKQDALTGDNYGYLYRLFRKSKLKPFERDISTEIYQAGSTPCNGQVGLNCYYPLERYGFHPTTGVNYQPFRVVVLSFELLNGPATVCGPKLSTTLVKDKCVNFNFNGLTGTGVLTTSKKQFLPFQQFGRDISDTTDAVRDPQTLEILDITPCSFGGVSVITPGTNTSNQVAVLYQDVNCTEVPMAIHAEQLTPAWRVYSAGANVFQTRAGCLVGAEHVNNSYECDIPVGAGICASYHSMSSFRSVNQRSIIAYTMSLGAENSVAYSNNSIAIPTNFTISVTTEILPVSMTKTSVDCTMYICGDSIECSNLLLQYGSFCTQLNRALTGIAVEQDKNTQEVFAQVKQIYKTPPIKDFGGFNFSQILPDPSKPSKRSFIEDLLFNKVTLADAGFIKQYGDCLGDIAARDLICAQKFNGLTVLPPLLTDEMIAQYTSALLAGTITSGWTFGAGAALQIPFAMQMAYRFNGIGVTQNVLYENQKLIANQFNSAIGKIQDSLSSTASALGKLQDVVNQNAQALNTLVKQLSSNFGAISSVLNDILSRLDPPEAEVQIDRLITGRLQSLQTYVTQQLIRAAEIRASANLAATKMSECVLGQSKRVDFCGKGYQLMSFPQSAPHGVVFLNVTYVPAQEKNFTTAPAICNEGKAHFPREGVFVSNGTNWFITQRNFYEPQIITTDNTFVSGSCDVVIGIVNNTVYDPLQPELDSFKEELDKYFKNHTSPDVDLGDISGINASVVNIQKEIDRLNEVAKNLNESLIDLQELGKYEQYIKWPWYIWLGFIAGLIAIIMVTIMLCCMTSCCSCLKGCCSCGSCCKFDEDDSEPVLKGVKLHYT

SEQ ID NO: 608 - protein, 1265 aa, Artificial Sequence
  SARS-CoV-2/pangolin/Guangxi/P1E/2017__EPI_ISL_410539 spike protein (1-1265)(K978P_V979P_ H1040Q_H1056N_ H1075N_H1093N)
MFVFLFVLPLVSSQCVNLTTRTGIQPGYTNSSTRGVYYPDKVFRSSILHLTQDLFLPFFSNVTWFNTINYQGGFKKFDNPVLPFNDGVYFASTEKSNIIRGWIFGTTLDARTQSLLIVNNATNVVIKVCEFQFCTDPFLGVYYHNNNKTWVENEFRVYSSANNCTFEYISQPFLMDLEGKQGNFKNLREFVFKNVDGYFKIYSKHTPIDLVRDLPRGFAALEPLVDLPIGINITRFQTLLALHRSYLTPGKLESGWTTGAAAYYVGYLQQRTFLLSYNQNGTITDAVDCSLDPLSETKCTLKSLTVEKGIYQTSNFRVQPTISIVRFPNITNLCPFGEVFNASKFASVYAWNRKRISNCVADYSVLYNSTSFSTFKCYGVSPTKLNDLCFTNVYADSFVVKGDEVRQIAPGQTGVIADYNYKLPDDFTGCVIAWNSVKQDALTGGNYLYRLFRKSKLKPFERDISTEIYQAGSTPCNGQVGLNCYYPLERYGFHPTTGVNYQPFRVVVLSFELLNGPATVCGPKLSTTLVKDKCVNFNFNGLTGTGVLTTSKKQFLPFQQFGRDISDTTDAVRDPQTLEILDITPCSFGGVSVITPGTNTSNQVAVLYQDVNCTEVPMAIHAEQLTPAWRVYSAGANVFQTRAGCLVGAEHVNNSYECDIPVGAGICASYHSMSSLRSVNQRSIIAYTMSLGAENSVAYSNNSIAIPTNFTISVTTEILPVSMTKTSVDCTMYICGDSIECSNLLLQYGSFCTQLNRALTGIAVEQDKNTQEVFAQVKQIYKTPPIKDFGGFNFSQILPDPSKPSKRSFIEDLLFNKVTLADAGFIKQYGDCLGDIAARDLICAQKFNGLTVLPPLLTDEMIAQYTSALLAGTITSGWTFGAGAALQIPFAMQMAYRFNGIGVTQNVLYENQKLIANQFNSAIGKIQDSLSSTASALGKLQDVVNQNAQALNTLVKQLSSNFGAISSVLNDILSRLDPPEAEVQIDRLITGRLQSLQTYVTQQLIRAAEIRASANLAATKMSECVLGQSKRVDFCGKGYQLMSFPQSAPHGVVFLNVTYVPAQEKNFTTAPAICNEGKAHFPREGVFVSNGTNWFITQRNFYEPQIITTDNTFVSGSCDVVIGIVNNTVYDPLQPELDSFKEELDKYFKNHTSPDVDLGDISGINASVVNIQKEIDRLNEVAKNLNESLIDLQELGKYEQYIKWPWYIWLGFIAGLIAIIMVTIMLCCMTSCCSCLKGCCSCGSCCKFDEDDSEPVLKGVKLHYT

SEQ ID NO: 609 - protein, 1273 aa, Artificial Sequence; identical to SEQ ID NO: 19
  SARS-CoV-2/Wuhan/WIV05/2019__EPI_ISL_402128 spike protein (1-1273)(I712C_T1077C)

SEQ ID NO: 610 - protein, 1269 aa, Artificial Sequence
  SARS-CoV-2/bat/Yunnan/RaTG13/2013__EPI_ISL_402131 spike protein (1-1269)(I708C_T1073C)
MFVFLVLLPLVSSQCVNLTTRTQLPPAYTNSSTRGVYYPDKVFRSSVLHLTQDLFLPFFSNVTWFHAIHVSGTNGIKRFDNPVLPFNDGVYFASTEKSNIIRGWIFGTTLDSKTQSLLIVNNATNVVIKVCEFQFCNDPFLGVYYHKNNKSWMESEFRVYSSANNCTFEYVSQPFLMDLEGKQGNFKNLREFVFKNIDGYFKIYSKHTPINLVRDLPPGFSALEPLVDLPIGINITRFQTLLALHRSYLTPGDSSSGWTAGAAAYYVGYLQPRTFLLKYNENGTITDAVDCALDPLSETKCTLKSFTVEKGIYQTSNFRVQPTDSIVRFPNITNLCPFGEVFNATTFASVYAWNRKRISNCVADYSVLYNSTSFSTFKCYGVSPTKLNDLCFTNVYADSFVITGDEVRQIAPGQTGKIADYNYKLPDDFTGCVIAWNSKHIDAKEGGNFNYLYRLFRKANLKPFERDISTEIYQAGSKPCNGQTGLNCYYPLYRYGFYPTDGVGHQPYRVVVLSFELLNAPATVCGPKKSTNLVKNKCVNFNFNGLTGTGVLTESNKKFLPFQQFGRDIADTTDAVRDPQTLEILDITPCSFGGVSVITPGTNASNQVAVLYQDVNCTEVPVAIHADQLTPTWRVYSTGSNVFQTRAGCLIGAEHVNNSYECDIPIGAGICASYQTQTNSRSVASQSIIAYTMSLGAENSVAYSNNSCAIPTNFTISVTTEILPVSMTKTSVDCTMYICGDSTECSNLLLQYGSFCTQLNRALTGIAVEQDKNTQEVFAQVKQIYKTPPIKDFGGFNFSQILPDPSKPSKRSFIEDLLFNKVTLADAGFIKQYGDCLGDIAARDLICAQKFNGLTVLPPLLTDEMIAQYTSALLAGTITSGWTFGAGAALQIPFAMQMAYRFNGIGVTQNVLYENQKLIANQFNSAIGKIQDSLSSTASALGKLQDVVNQNAQALNTLVKQLSSNFGAISSVLNDILSRLDKVEAEVQIDRLITGRLQSLQTYVTQQLIRAAEIRASANLAATKMSECVLGQSKRVDFCGKGYHLMSFPQSAPHGVVFLHVTYVPAQEKNFTCAPAICHDGKAHFPREGVFVSNGTHWFVTQRNFYEPQIITTDNTFVSGSCDVVIGIVNNTVYDPLQPELDSFKEELDKYFKNHTSPDVDLGDISGINASVVNIQKEIDRLNEVAKNLNESLIDLQELGKYEQYIKWPWYIWLGFIAGLIAIIMVTIMLCCMTSCCSCLKGCCSCGSCCKFDEDDSEPVLKGVKLHYT

SEQ ID NO: 611 - protein, 1273 aa, Artificial Sequence
  SARS-CoV-2/Wuhan/HBCDC-HB-01/2019__EPI_ISL_402132 spike protein (1-1273)(I712C_T1077C)
MFVFLVLLPLVSSQCVNLTTRTQLPPAYTNSITRGVYYPDKVFRSSVLHSTQDLFLPFFSNVTWFHAIHVSGTNGTKRFDNPVLPFNDGVYFASTEKSNIIRGWIFGTTLDSKTQSLLIVNNATNVVIKVCEFQFCNDPFLGVYYHKNNKSWMESEFRVYSSANNCTFEYVSQPFLMDLEGKQGNFKNLREFVFKNIDGYFKIYSKHTPINLVRDLPQGFSALEPLVDLPIGINITRFQTLLALHRSYLTPGDSSSGWTAGAAAYYVGYLQPRTFLLKYNENGTITDAVDCALDPLSETKCTLKSFTVEKGIYQTSNFRVQPTESIVRFPNITNLCPFGEVFNATRFASVYAWNRKRISNCVADYSVLYNSASFSTFKCYGVSPTKLNDLCFTNVYADSFVIRGDEVRQIAPGQTGKIADYNYKLPDDFTGCVIAWNSNNLDSKVGGNYNYLYRLFRKSNLKPFERDISTEIYQAGSTPCNGVEGFNCYFPLQSYGFQPTNGVGYQPYRVVVLSFELLHAPATVCGPKKSTNLVKNKCVNFNFNGLTGTGVLTESNKKFLPFQQFGRDIADTTDAVRDPQTLEILDITPCSFGGVSVITPGTNTSNQVAVLYQDVNCTEVPVAIHADQLTPTWRVYSTGSNVFQTRAGCLIGAEHVNNSYECDIPIGAGICASYQTQTNSPRRARSVASQSIIAYTMSLGAENSVAYSNNSCAIPTNFTISVTTEILPVSMTKTSVDCTMYICGDSTECSNLLLQYGSFCTQLNRALTGIAVEQDKNTQEVFAQVKQIYKTPPIKDFGGFNFSQILPDPSKPSKRSFIEDLLFNKVTLADAGFIKQYGDCLGDIAARDLICAQKFNGLTVLPPLLTDEMIAQYTSALLAGTITSGWTFGAGAALQIPFAMQMAYRFNGIGVTQNVLYENQKLIANQFNSAIGKIQDSLSSTASALGKLQDVVNQNAQALNTLVKQLSSNFGAISSVLNDILSRLDKVEAEVQIDRLITGRLQSLQTYVTQQLIRAAEIRASANLAATKMSECVLGQSKRVDFCGKGYHLMSFPQSAPHGVVFLHVTYVPAQEKNFTCAPAICHDGKAHFPREGVFVSNGTHWFVTQRNFYEPQIITTDNTFVSGNCDVVIGIVNNTVYDPLQPELDSFKEELDKYFKNHTSPDVDLGDISGINASVVNIQKEIDRLNEVAKNLNESLIDLQELGKYEQYIKWPWYIWLGFIAGLIAIVMVTIMLCCMTSCCSCLKGCCSCGSCCKFDEDDSEPVLKGVKLHYT

SEQ ID NO: 612 - protein, 1273 aa, Artificial Sequence
  SARS-CoV-2/Guangdong/20SF028/2020__EPI_ISL_403936 spike protein (1-1273)(I712C_T1077C)
MFVFLVLLPLVSSQCVNLTTRTQLPPAYTNSFTRGVYYPDKVFRSSVLYSTQDLFLPFFSNVTWFHAIHVSGTNGTKRFDNPVLPFNDGVYFASTEKSNIIRGWIFGTTLDSKTQSLLIVNNATNVVIKVCEFQFCNDPFLGVYYHKNNKSWMESEFRVYSSANNCTFEYVSQPFLMDLEGKQGNFKNLREFVFKNIDGYFKIYSKHTPINLVRDLPQGFSALEPLVDLPIGINITRFQTLLALHRSYLTPGDSSSGWTAGAAAYYVGYLQPRTFLLKYNENGTITDAVDCALDPLSETKCTLKSFTVEKGIYQTSNFRVQPTESIVRFPNITNLCPFGEVFNATRFASVYAWNRKRISNCVADYSVLYNSASFSTFKCYGVSPTKLNDLCFTNVYADSFVIRGDEVRQIAPGQTGKIADYNYKLPDDFTGCVIAWNSNNLDSKVGGNYNYLYRLFRKSNLKPFERDISTEIYQAGSTPCNGVEGFNCYFPLQSYGFQPTNGVGYQPYRVVVLSFELLHAPATVCGPKKSTNLVKNKCVNFNFNGLTGTGVLTESNKKFLPFQQFGRDIADTTDAVRDPQTLEILDITPCSFGGVSVITPGTNTSNQVAVLYQDVNCTEVPVAIHADQLTPTWRVYSTGSNVFQTRAGCLIGAEHVNNSYECDIPIGAGICASYQTQTNSPRRARSVASQSIIAYTMSLGAENSVAYSNNSCAIPTNFTISVTTEILPVSMTKTSVDCTMYICGDSTECSNLLLQYGSFCTQLNRALTGIAVEQDKNTQEVFAQVKQIYKTPPIKDFGGFNFSQILPDPSKPSKRSFIEDLLFNKVTLADAGFIKQYGDCLGDIAARDLICAQKFNGLTVLPPLLTDEMIAQYTSALLAGTITSGWTFGAGAALQIPFAMQMAYRFNGIGVTQNVLYENQKLIANQFNSAIGKIQDSLSSTASALGKLQDVVNQNAQALNTLVKQLSSNFGAISSVLNDILSRLDKVEAEVQIDRLITGRLQSLQTYVTQQLIRAAEIRASANLAATKMSECVLGQSKRVDFCGKGYHLMSFPQSAPHGVVFLHVTYVPAQEKNFTCAPAICHDGKAHFPREGVFVSNGTHWFVTQRNFYEPQIITTDNTFVSGNCDVVIGIVNNTVYDPLQPELDSFKEELDKYFKNHTSPDVDLGDISGINASVVNIQKEIDRLNEVAKNLNESLIDLQELGKYEQYIKWPWYIWLGFIAGLIAIVMVTIMLCCMTSCCSCLKGCCSCGSCCKFDEDDSEPVLKGVKLHYT

SEQ ID NO: 613 - protein, 1273 aa, Artificial Sequence
  SARS-CoV-2/Shenzhen/SZTH-001/2020__EPI_ISL_406592 spike protein (1-1273)(I712C_T1077C)
MFVFLVLLPLVSSQCVNLTTRTQLPPAYTNSFTRGVYYPDKVFRSSVLHSTQDLFLPFFSNVTWFHAIHVSGTNGTKRFDNPVLPFNDGVYFASTEKSNIIRGWIFGTTLDSKTQSLLIVNNATNVVIKVCEFQFCNDPFLGVYYHKNNKSWMESEFRVYSSANNCTFEYVSQPFLMDLEGKQGNFKNLREFVFKNIDGYFKIYSKHTPINLVRDLPQGFSALEPLVDLPIGINITRFQTLLALHRSYLTPGDSSSGWTAGAAAYYVGYLQPRTFLLKYNENGTITDAVDCALDPLSETKCTLKSFTVEKGIYQTSNFRVQPTESIVRFPNITNLCPFGEVFNATRFASVYAWNRKRISNCVADYSVLYNSASFSTFKCYGVSPTKLNDLCFTNVYADSFVIRGDEVRQIAPGQTGKIADYNYKLPDDFTGCVIAWNSNNLDSKVGGNYNYLYRLFRKSNLKPFERDISTEIYQAGSTPCNGVEGFNCYFPLQSYGFQPTNGVGYQPYRVVVLSFELLHAPATVCGPKKSTNLVKNKCVNFNFNGLTGTGVLTESNKKFLPFQQFGRDIADTTDAVRDPQTLEILDITPCSFGGVSVITPGTNTSNQVAVLYQDVNCTEVPVAIHADQLTPTWRVYSTGSNVFQTRAGCLIGAEHVNNSYECDIPIGAGICASYQTQTNSPRRARSVASQSIIAYTMSLGAENSVAYSNNSCAIPTNFTISVTTEILPVSMTKTSVDCTMYICGDSTECSNLLLQYGSFCTQLNRALTGIAVEQDKNTQEVFAQVKQIYKTPPIKDFGGFNFSQILPDPSKPSKRSFIEDLLFNKVTLADAGFIKQYGDCLGDIAARDLICAQKFNGLTVLPPLLTDEMIAQYTSALLAGTITSGWTFGAGAALQIPFAMQMAYRFNGIGVTQNVLYENQKLIANQFNSAIGKIQDSLSSTASALGKLQDVVNQNAQALNTLVKQLSSNFGAISSVLNDILSRLDKVEAEVQIDRLITGRLQSLQTYVTQQLIRAAEIRASANLAATKMSECVLGQSKRVDFCGKGYHLMSFPQSAPHGVVFLHVTYVPAQEKNFTCAPAICHDGKAHFPREGVFVSNGTHWFVTQRNFYEPQIITTDNTFVSGNCDVLIGIVNNTVYDPLQPELDSFKEELDKYFKNHTSPDVDLGDISGINASVVNIQKEIDRLNEVAKNLNESLIDLQELGKYEQYIKWPWYIWLGFIAGLIAIVMVTIMLCCMTSCCSCLKGCCSCGSCCKFDEDDSGPVLKGVKLHYT

SEQ ID NO: 614 - protein, 1273 aa, Artificial Sequence
  SARS-CoV-2/Shenzhen/SZTH-004/2020__EPI_ISL_406595 spike protein (1-1273)(I712C_T1077C)
MFVFLVLLPLVSSQCVNLTTRTQLPPAYTNSFTRGVYYPDKVFRSSVLHSTQDLFLPFFSNVTWFHAIHVSGTNGTKRFDNPVLPFNDGVYFASTEKSNIIRGWIFGTTLDSKTQSLLIVNNATNVVIKVCEFQFCNDPFLGVYYHKNNKSWMESEFRVYSSANNCTFEYVSQPFLMDLEGKQGNFKNLREFVFKNIDGYFKIYSKHTPINLVRDLPQGFSALEPLVDLPIGINITRFQTLLALHRSYLTPGDSSSGWTAGAAAYYVGYLQPRTFLLKYNENGTITDAVDCALDPLSETKCTLKSFTVEKGIYQTSNFRVQPTESIVRFPNITNLCPFGEVFNATRFASVYAWDRKRISNCVAYYSVLYNSASFSTFKCYGVSPTKLNDLCFTNVYADSFVIRGDEVRQIAPGQTGKIADYNYKLPDDFTGCVIAWNSNNLDSKVGGNYNYLYRLFRKSNLKPFERDISTEIYQAGSTPCNGVEGFNCYFPLQSYGFQPTNGVGYQPYRVVVLSFELLHAPATVCGPKKSTNLVKNKCVNFNFNGLTGTGVLTESNKKFLPFQQFGRDIADTTDAVRDPQTLEILDITPCSFGGVSVITPGTNTSNQVAVLYQDVNCTEVPVAIHADQLTPTWRVYSTGSNVFQTRAGCLIGAEHVNNSYECDIPIGAGICASYQTQTNSPRRARSVASQSIIAYTMSLGAENSVAYSNNSCAIPTNFTISVTTEILPVSMTKTSVDCTMYICGDSTECSNLLLQYGSFCTQLNRALTGIAVEQDKNTQEVFAQVKQIYKTPPIKDFGGFNFSQILPDPSKPSKRSFIEDLLFNKVTLADAGFIKQYGDCLGDIAARDLICAQKFNGLTVLPPLLTDEMIAQYTSALLAGTITSGWTFGAGAALQIPFAMQMAYRFNGIGVTQNVLYENQKLIANQFNSAIGKIQDSLSSTASALGKLQDVVNQNAQALNTLVKQLSSNFGAISSVLNDILSRLDKVEAEVQIDRLITGRLQSLQTYVTQQLIRAAEIRASANLAATKMSECVLGQSKRVDFCGKGYHLMSFPQSAPHGVVFLHVTYVPAQEKNFTCAPAICHDGKAHFPREGVFVSNGTHWFVTQRNFYEPQIITTDNTFVSGNCDVVIGIVNNTVYDPLQPELDSFKEELDKYFKNHTSPDVDLGDISGINASVVNIQKEIDRLNEVAKNLNESLIDLQELGKYEQYIKWPWYIWLGFIAGLIAIVMVTIMLCCMTSCCSCLKGCCSCGSCCKFDEDDSEPVLKGVKLHYT

SEQ ID NO: 615 - protein, 1273 aa, Artificial Sequence
  SARS-CoV-2/France/IDF0372/2020__EPI_ISL_406596 spike protein (1-1273)(I712C_T1077C)
MFVFLVLLPLVSSQCVNLTTRTQLPPAYTNSFTRGVYYPDKVFRSSVLHSTQDLFLPFFSNVTWFHAIHVSGTNGTKRFDNPVLPFNDGVYFASTEKSNIIRGWIFGTTLDSKTQSLLIVNNATNVVIKVCEFQFCNDPFLGVYYHKNNKSWMESEFRVYSSANNCTFEYVSQPFLMDLEGKQGNFKNLREFVFKNIDGYFKIYSKHTPINLVRDLPQGFSALEPLVDLPIGINITRFQTLLALHRSYLTPGDSSSGWTAGAAAYYVGYLQPRTFLLKYNENGTITDAVDCALDPLSETKCTLKSFTVEKGIYQTSNFRVQPTESIVRFPNITNLCPFGEVFNATRFASVYAWNRKRISNCVADYSFLYNSASFSTFKCYGVSPTKLNDLCFTNVYADSFVIRGDEVRQIAPGQTGKIADYNYKLPDDFTGCVIAWNSNNLDSKVGGNYNYLYRLFRKSNLKPFERDISTEIYQAGSTPCNGVEGFNCYFPLQSYGFQPTNGVGYQPYRVVVLSFELLHAPATVCGPKKSTNLVKNKCVNFNFNGLTGTGVLTESNKKFLPFQQFGRDIADTTDAVRDPQTLEILDITPCSFGGVSVITPGTNTSNQVAVLYQDVNCTEVPVAIHADQLTPTWRVYSTGSNVFQTRAGCLIGAEHVNNSYECDIPIGAGICASYQTQTNSPRRARSVASQSIIAYTMSLGAENSVAYSNNSCAIPTNFTISVTTEILPVSMTKTSVDCTMYICGDSTECSNLLLQYGSFCTQLNRALTGIAVEQDKNTQEVFAQVKQIYKTPPIKDFGGFNFSQILPDPSKPSKRSFIEDLLFNKVTLADAGFIKQYGDCLGDIAARDLICAQKFNGLTVLPPLLTDEMIAQYTSALLAGTITSGWTFGAGAALQIPFAMQMAYRFNGIGVTQNVLYENQKLIANQFNSAIGKIQDSLSSTASALGKLQDVVNQNAQALNTLVKQLSSNFGAISSVLNDILSRLDKVEAEVQIDRLITGRLQSLQTYVTQQLIRAAEIRASANLAATKMSECVLGQSKRVDFCGKGYHLMSFPQSAPHGVVFLHVTYVPAQEKNFTCAPAICHDGKAHFPREGVFVSNGTHWFVTQRNFYEPQIITTDNTFVSGNCDVVIGIVNNTVYDPLQPELDSFKEELDKYFKNHTSPDVDLGDISGINASVVNIQKEIDRLNEVAKNLNESLIDLQELGKYEQYIKWPWYIWLGFIAGLIAIVMVTIMLCCMTSCCSCLKGCCSCGSCCKFDEDDSEPVLKGVKLHYT

SEQ ID NO: 616 - protein, 1273 aa, Artificial Sequence
  SARS-CoV-2/Australia/VIC01/2020__EPI_ISL_406844 spike protein (1-1273)(I712C_T1077C)
MFVFLVLLPLVSSQCVNLTTRTQLPPAYTNSFTRGVYYPDKVFRSSVLHSTQDLFLPFFSNVTWFHAIHVSGTNGTKRFDNPVLPFNDGVYFASTEKSNIIRGWIFGTTLDSKTQSLLIVNNATNVVIKVCEFQFCNDPFLGVYYHKNNKSWMESEFRVYSSANNCTFEYVSQPFLMDLEGKQGNFKNLREFVFKNIDGYFKIYSKHTPINLVRDLPQGFSALEPLVDLPIGINITRFQTLLALHRRYLTPGDSSSGWTAGAAAYYVGYLQPRTFLLKYNENGTITDAVDCALDPLSETKCTLKSFTVEKGIYQTSNFRVQPTESIVRFPNITNLCPFGEVFNATRFASVYAWNRKRISNCVADYSVLYNSASFSTFKCYGVSPTKLNDLCFTNVYADSFVIRGDEVRQIAPGQTGKIADYNYKLPDDFTGCVIAWNSNNLDSKVGGNYNYLYRLFRKSNLKPFERDISTEIYQAGSTPCNGVEGFNCYFPLQSYGFQPTNGVGYQPYRVVVLSFELLHAPATVCGPKKSTNLVKNKCVNFNFNGLTGTGVLTESNKKFLPFQQFGRDIADTTDAVRDPQTLEILDITPCSFGGVSVITPGTNTSNQVAVLYQDVNCTEVPVAIHADQLTPTWRVYSTGSNVFQTRAGCLIGAEHVNNSYECDIPIGAGICASYQTQTNSPRRARSVASQSIIAYTMSLGAENSVAYSNNSCAIPTNFTISVTTEILPVSMTKTSVDCTMYICGDSTECSNLLLQYGSFCTQLNRALTGIAVEQDKNTQEVFAQVKQIYKTPPIKDFGGFNFSQILPDPSKPSKRSFIEDLLFNKVTLADAGFIKQYGDCLGDIAARDLICAQKFNGLTVLPPLLTDEMIAQYTSALLAGTITSGWTFGAGAALQIPFAMQMAYRFNGIGVTQNVLYENQKLIANQFNSAIGKIQDSLSSTASALGKLQDVVNQNAQALNTLVKQLSSNFGAISSVLNDILSRLDKVEAEVQIDRLITGRLQSLQTYVTQQLIRAAEIRASANLAATKMSECVLGQSKRVDFCGKGYHLMSFPQSAPHGVVFLHVTYVPAQEKNFTCAPAICHDGKAHFPREGVFVSNGTHWFVTQRNFYEPQIITTDNTFVSGNCDVVIGIVNNTVYDPLQPELDSFKEELDKYFKNHTSPDVDLGDISGINASVVNIQKEIDRLNEVAKNLNESLIDLQELGKYEQYIKWPWYIWLGFIAGLIAIVMVTIMLCCMTSCCSCLKGCCSCGSCCKFDEDDSEPVLKGVKLHYT

SEQ ID NO: 617 - protein, 1273 aa, Artificial Sequence
  SARS-CoV-2/Germany/BavPat1/2020__EPI_ISL_406862 spike protein (1-1273)(I712C_T1077C)
MFVFLVLLPLVSSQCVNLTTRTQLPPAYTNSFTRGVYYPDKVFRSSVLHSTQDLFLPFFSNVTWFHAIHVSGTNGTKRFDNPVLPFNDGVYFASTEKSNIIRGWIFGTTLDSKTQSLLIVNNATNVVIKVCEFQFCNDPFLGVYYHKNNKSWMESEFRVYSSANNCTFEYVSQPFLMDLEGKQGNFKNLREFVFKNIDGYFKIYSKHTPINLVRDLPQGFSALEPLVDLPIGINITRFQTLLALHRSYLTPGDSSSGWTAGAAAYYVGYLQPRTFLLKYNENGTITDAVDCALDPLSETKCTLKSFTVEKGIYQTSNFRVQPTESIVRFPNITNLCPFGEVFNATRFASVYAWNRKRISNCVADYSVLYNSASFSTFKCYGVSPTKLNDLCFTNVYADSFVIRGDEVRQIAPGQTGKIADYNYKLPDDFTGCVIAWNSNNLDSKVGGNYNYLYRLFRKSNLKPFERDISTEIYQAGSTPCNGVEGFNCYFPLQSYGFQPTNGVGYQPYRVVVLSFELLHAPATVCGPKKSTNLVKNKCVNFNFNGLTGTGVLTESNKKFLPFQQFGRDIADTTDAVRDPQTLEILDITPCSFGGVSVITPGTNTSNQVAVLYQGVNCTEVPVAIHADQLTPTWRVYSTGSNVFQTRAGCLIGAEHVNNSYECDIPIGAGICASYQTQTNSPRRARSVASQSIIAYTMSLGAENSVAYSNNSCAIPTNFTISVTTEILPVSMTKTSVDCTMYICGDSTECSNLLLQYGSFCTQLNRALTGIAVEQDKNTQEVFAQVKQIYKTPPIKDFGGFNFSQILPDPSKPSKRSFIEDLLFNKVTLADAGFIKQYGDCLGDIAARDLICAQKFNGLTVLPPLLTDEMIAQYTSALLAGTITSGWTFGAGAALQIPFAMQMAYRFNGIGVTQNVLYENQKLIANQFNSAIGKIQDSLSSTASALGKLQDVVNQNAQALNTLVKQLSSNFGAISSVLNDILSRLDKVEAEVQIDRLITGRLQSLQTYVTQQLIRAAEIRASANLAATKMSECVLGQSKRVDFCGKGYHLMSFPQSAPHGVVFLHVTYVPAQEKNFTCAPAICHDGKAHFPREGVFVSNGTHWFVTQRNFYEPQIITTDNTFVSGNCDVVIGIVNNTVYDPLQPELDSFKEELDKYFKNHTSPDVDLGDISGINASVVNIQKEIDRLNEVAKNLNESLIDLQELGKYEQYIKWPWYIWLGFIAGLIAIVMVTIMLCCMTSCCSCLKGCCSCGSCCKFDEDDSEPVLKGVKLHYT

SEQ ID NO: 618 - protein, 1273 aa, Artificial Sequence
  SARS-CoV-2/Wuhan/HBCDC-HB-02/2020__EPI_ISL_412978 spike protein (1-1273)(I712C_T1077C)
MFVFLVLLPLVSSQCVNLTTRTQLPPAYTNSFTRGVYYPDKVFRSSVLHSTQDLFLPFFSNVTWFHAIHVSGTNGTKRFDNPVLPFNDGVYFASTEKSNIIRGWIFGTTLDSKTQSLLIVNNATNVVIKVCEFQFCNDPFLGVYYHKNNKSWMESEFRVYSSANNCTFEYVSQPFLMDLEGKQGNFKNLREFVFKNIDGYFKIYSKHTPINLVRDLPQGFSALEPLVDLPIGINITRFQTLLALHRSYLTPGDSSSGWTAGAAAYYVGYLQPRTFLLKYNENGTITDAVDCALDPLSETKCTLKSFTVEKGIYQTSNFRVQPTESIVRFPNITNLCPFGEVFNATRFASVYAWNRKRISNCVADYSVLYNSASFSTFKCYGVSPTKLNDLCFTNVYADSFVIRGDEVRQIAPGQTGKIADYNYKLPDDFTGCVIAWNSNNLDSKVGGNYNYLYRLFRKSNLKPFERDISTEIYQAGSTPCNGVEGFNCYFPLQSYGFQPTNGVGYQPYRVVVLSFELLHAPATVCGPKKSTNLVKNKCVNFNFNGLTGTGVLTESNKKFLPFQQFGRDIADTTDAVRDPQTLEILDITPCSFGGVSVITPGTNTSNQVAVLYQDVNCTEVPVAIHADQLTPTWRVYSTGSNVFQTRAGCLIGAEHVNNSYECDIPIGAGICASYQTQTNSPRRARSVASQSIIAYTMSLGAENSVAYSNNSCAIPTNFTISVTTEILPVSMTKTSVDCTMYICGDSTECSNFLLQYGSFCTQLNRALTGIAVEQDKNTQEVFAQVKQIYKTPPIKDFGGFNFSQILPDPSKPSKRSFIEDLLFNKVTLADAGFIKQYGDCLGDIAARDLICAQKFNGLTVLPPLLTDEMIAQYTSALLAGTITSGWTFGAGAALQIPFAMQMAYRFNGIGVTQNVLYENQKLIANQFNSAIGKIQDSLSSTASALGKLQDVVNQNAQALNTLVKQLSSNFGAISSVLNDILSRLDKVEAEVQIDRLITGRLQSLQTYVTQQLIRAAEIRASANLAATKMSECVLGQSKRVDFCGKGYHLMSFPQSAPHGVVFLHVTYVPAQEKNFTCAPAICHDGKAHFPREGVFVSNGTHWFVTQRNFYEPQIITTDNTFVSGNCDVVIGIVNNTVYDPLQPELDSFKEELDKYFKNHTSPDVDLGDISGINASVVNIQKEIDRLNEVAKNLNESLIDLQELGKYEQYIKWPWYIWLGFIAGLIAIVMVTIMLCCMTSCCSCLKGCCSCGSCCKFDEDDSEPVLKGVKLHYT

SEQ ID NO: 619 - protein, 1273 aa, Artificial Sequence
  SARS-CoV-2/Australia/QLD02/2020__EPI_ISL_407896 spike protein (1-1273)(I712C_T1077C)
MFVFLVLLPLVSSQCVNLTTRTQLPPAYTNSFTRGVYYPDKVFRSSVLHSTQDLFLPFFSNVTWFHAIHVSGTNGTKRFDNPVLPFNDGVYFASTEKSNIIRGWIFGTTLDSKTQSLLIVNNATNVVIKVCEFQFCNDPFLGVYYHKNNKSWMESEFRVYSSANNCTFEYVSQPFLMDLEGKQGNFKNLREFVFKNIDGYFKIYSKHTPINLVRDLPQGFSALEPLVDLPIGINITRFQTLLALHRSYLTPGDSSSGWTAGAAAYYVGYLQPRTFLLKYNENGTITDAVDCALDPLSETKCTLKSFTVEKGIYQTSNFRVQPTESIVRFPNITNLCPFGEVFNATRFASVYAWNRKRISNCVADYSVLYNSASFSTFKCYGVSPTKLNDLCFTNVYADSFVIRGDEVRQIAPGQTGKIADYNYKLPDDFTGCVIAWNSNNLDSKVGGNYNYLYRLFRKSNLKPFERDISTEIYQAGSTPCNGVEGFNCYFPLQSYGFQPTNGVGYQPYRVVVLSFELLHAPATVCGPKKSTNLVKNKCVNFNFNGLTGTGVLTESNKKFLPFQQFGRDIADTTDAVRDPQTLEILDITPCSFGGVSVITPGTNTSNQVAVLYQDVNCTEVPVAIHADQLTPTWRVYSTGSNVFQTRAGCLIGAEHVNNSYECDIPIGAGICASYQTQTNSPRRARSVASQSIIAYTMSLGAENSVAYSNNSCAIPTNFTISVTTEILPVSMTKTSVDCTMYICGDSTECSNLLLQYGSFCTQLNRALTGIAVEQDKNTQEVFAQVKQIYKTPPIKDFGGFNFSQILPDPSKPSKRSFIEDLLFNKVTLADAGFIKQYGDCLGDIAARDLICAQKFNGLTVLPPLLTDEMIAQYTSALLAGTITSGWTFGAGAALQIPFAMQMAYRFNGIGVTQNVLYENQKLIANQFNSAIGKIQDSLSSTASALGKLQDVVNQNAQALNTLVKQLSSNFGAISSVLNDILSRLDKVEAEVQIDRLITGRLQSLQTYVTQQLIRAAEIRASANLAATKMSECVLGQSKRVDFCGKGYHLMSFPQSAPHGVVFLHVTYVPAQEKNFTCAPAICHDGKAHFPREGVFVSNGTHWFVTQRNFYEPQIITTDNTFVSGNCDVVIGIVNNTVYDPLQLELDSFKEELDKYFKNHTSPDVDLGDISGINASVVNIQKEIDRLNEVAKNLNESLIDLQELGKYEQYIKWPWYIWLGFIAGLIAIVMVTIMLCCMTSCCSCLKGCCSCGSCCKFDEDDSEPVLKGVKLHYT

SEQ ID NO: 620 - protein, 1273 aa, Artificial Sequence
  SARS-CoV-2/India/1-31/2020__EPI_ISL_413523 spike protein (1-1273)(I712C_T1077C)
MFVFLVLLPLVSSQCVNLTTRTQLPPAYTNSFTRGVYYPDKVFRSSVLHSTQDLFLPFFSNVTWFHAIHVSGTNGTKRFDNPVLPFNDGVYFASTEKSNIIRGWIFGTTLDSKTQSLLIVNNATNVVIKVCEFQFCNDPFLGVYYHKNNKSWMESEFRVYSSANNCTFEYVSQPFLMDLEGKQGNFKNLREFVFKNIDGYFKIYSKHTPINLVRDLPQGFSALEPLVDLPIGINITRFQTLLALHRSYLTPGDSSSGWTAGAAAYYVGYLQPRTFLLKYNENGTITDAVDCALDPLSETKCTLKSFTVEKGIYQTSNFRVQPTESIVRFPNITNLCPFGEVFNATRFASVYAWNRKRISNCVADYSVLYNSASFSTFKCYGVSPTKLNDLCFTNVYADSFVIRGDEVRQIAPGQTGKIADYNYKLPDDFTGCVIAWNSNNLDSKVGGNYNYLYRLFRKSNLKPFERDISTEIYQAGSTPCNGVEGFNCYFPLQSYGFQPTNGVGYQPYRVVVLSFELLHAPATVCGPKKSTNLVKNKCVNFNFNGLTGTGVLTESNKKFLPFQQFGRDIADTTDAVRDPQTLEILDITPCSFGGVSVITPGTNTSNQVAVLYQDVNCTEVPVAIHADQLTPTWRVYSTGSNVFQTRAGCLIGAEHVNNSYECDIPIGAGICASYQTQTNSPRRARSVASQSIIAYTMSLGAENSVAYSNNSCAIPTNFTISVTTEILPVSMTKTSVDCTMYICGDSTECSNLLLQYGSFCTQLNRALTGIAVEQDKNTQEVFAQVKQIYKTPPIKDFGGFNFSQILPDPSKPSKRSFIEDLLFNKVTLADAGFIKQYGDCLGDIAARDLICAQKFNGLTVLPPLLTDEMIAQYTSALLAGTITSGWTFGAGAALQIPFAMQMAYRFNGIGVTQNVLYENQKLIANQFNSVIGKIQDSLSSTASALGKLQDVVNQNAQALNTLVKQLSSNFGAISSVLNDILSRLDKVEAEVQIDRLITGRLQSLQTYVTQQLIRAAEIRASANLAATKMSECVLGQSKRVDFCGKGYHLMSFPQSAPHGVVFLHVTYVPAQEKNFTCAPAICHDGKAHFPREGVFVSNGTHWFVTQRNFYEPQIITTDNTFVSGNCDVVIGIVNNTVYDPLQPELDSFKEELDKYFKNHTSPDVDLGDISGINASVVNIQKEIDRLNEVAKNLNESLIDLQELGKYEQYIKWPWYIWLGFIAGLIAIVMVTIMLCCMTSCCSCLKGCCSCGSCCKFDEDDSEPVLKGVKLHYT

SEQ ID NO: 621 - protein, 1273 aa, Artificial Sequence
  SARS-CoV-2/Guangdong/GD2020087-P0008/2020__EPI_ISL_413863 spike protein (1-1273)(I712C_T1077C)
MFVFLVLLPLVSSQCVNLTTRTQLPPAYTNSFTRGVYYPDKVFRSSVLHSTQDLFLPFFSNVTWFHAIHVSGTNGTKRFDNPVLPFNDGVYFASTEKSNIIRGWIFGTTLDSKTQSLLIVNNATNVVIKVCEFQFCNDPFLGVYYHKNNKSWMESEFRVYSSANNCTFEYVSQPFLMDLEGKQGNFKNLREFVFKNIDGYFKIYSKHTPINLVRDLPQGFSALEPLVDLPIGINITRFQTLLALHRSYLTPGDSSSGWTAGAAAYYVGYLQPRTFLLKYNENGTITDAVDCALDPLSETKCTLKSFTVEKGIYQTSNFRVQPTESIVRFPNITNLCPFGEVFNATRFASVYAWNRKRISNCVADYSVLYNSASFSTFKCYGVSPTKLNDLCFTNVYADSFVIRGDEVREIAPGQTGKIADYNYKLPDDFTGCVIAWNSNNLDSKVGGNYNYLYRLFRKSNLKPFERDISTEIYQAGSTPCNGVEGFNCYFPLQSYGFQPTNGVGYQPYRVVVLSFELLHAPATVCGPKKSTNLVKNKCVNFNFNGLTGTGVLTESNKKFLPFQQFGRDIADTTDAVRDPQTLEILDITPCSFGGVSVITPGTNTSNQVAVLYQDVNCTEVPVAIHADQLTPTWRVYSTGSNVFQTRAGCLIGAEHVNNSYECDIPIGAGICASYQTQTNSPRRARSVASQSIIAYTMSLGAENSVAYSNNSCAIPTNFTISVTTEILPVSMTKTSVDCTMYICGDSTECSNLLLQYGSFCTQLNRALTGIAVEQDKNTQEVFAQVKQIYKTPPIKDFGGFNFSQILPDPSKPSKRSFIEDLLFNKVTLADAGFIKQYGDCLGDIAARDLICAQKFNGLTVLPPLLTDEMIAQYTSALLAGTITSGWTFGAGAALQIPFAMQMAYRFNGIGVTQNVLYENQKLIANQFNSAIGKIQDSLSSTASALGKLQDVVNQNAQALNTLVKQLSSNFGAISSVLNDILSRLDKVEAEVQIDRLITGRLQSLQTYVTQQLIRAAEIRASANLAATKMSECVLGQSKRVDFCGKGYHLMSFPQSAPHGVVFLHVTYVPAQEKNFTCAPAICHDGKAHFPREGVFVSNGTHWFVTQRNFYEPQIITTDNTFVSGNCDVVIGIVNNTVYDPLQPELDSFKEELDKYFKNHTSPDVDLGDISGINASVVNIQKEIDRLNEVAKNLNESLIDLQELGKYEQYIKWPWYIWLGFIAGLIAIVMVTIMLCCMTSCCSCLKGCCSCGSCCKFDEDDSEPVLKGVKLHYT

SEQ ID NO: 622 - protein, 1273 aa, Artificial Sequence
  SARS-CoV-2/Sweden/01/2020__EPI_ISL_411951 spike protein (1-1273)(I712C_T1077C)
MFVFLVLLPLVSSQCVNLTTRTQLPPAYTNSFTRGVYYPDKVFRSSVLHSTQDLFLPFFSNVTWFHAIHVSGTNGTKRFDNPVLPFNDGVYFASTEKSNIIRGWIFGTTLDSKTQSLLIVNNATNVVIKVCEFQFCNDPFLGVYYHKNNKSWMESEFRVYSSANNCTFEYVSQPFLMDLEGKQGNFKNLREFVFKNIDGYFKIYSKHTPINLVRDLPQGFSALEPLVDLPIGINITRFQTLLALHRSYLTPGDSSSGWTAGAAAYYVGYLQPRTFLLKYNENGTITDAVDCALDPLSETKCTLKSFTVEKGIYQTSNFRVQPTESIVRFPNITNLCPFGEVFNATRFASVYAWNRKRISNCVADYSVLYNSASFSTFKCYGVSPTKLNDLCFTNVYADSFVIRGDEVRQIAPGQTGKIADYNYKLPDDFTGCVIAWNSNNLDSKVGGNYNYLYRLFRKSNLKPFERDISTEIYQAGSTPCNGVEGFNCYFPLQSYGFQPTNGVGYQPYRVVVLSFELLHAPATVCGPKKSTNLVKNKCVNFNFNGLTGTGVLTESNKKFLPFQQFGRDIADTTDAVRDPQTLEILDITPCSFGGVSVITPGTNTSNQVAVLYQDVNCTEVPVAIHADQLTPTWRVYSTGSNVFQTRAGCLIGAEHVNNSYECDIPIGAGICASYQTQTNSPRRARSVASQSIIAYTMSLGAENSVAYSNNSCAIPTNFTISVTTEILPVSMTKTSVDCTMYICGDSTECSNLLLQYGSFCTQLNRALTGIAVEQDKNTQEVFAQVKQIYKTPPIKDCGGFNFSQILPDPSKPSKRSFIEDLLFNKVTLADAGFIKQYGDCLGDIAARDLICAQKFNGLTVLPPLLTDEMIAQYTSALLAGTITSGWTFGAGAALQIPFAMQMAYRFNGIGVTQNVLYENQKLIANQFNSAIGKIQDSLSSTASALGKLQDVVNQNAQALNTLVKQLSSNFGAISSVLNDILSRLDKVEAEVQIDRLITGRLQSLQTYVTQQLIRAAEIRASANLAATKMSECVLGQSKRVDFCGKGYHLMSFPQSAPHGVVFLHVTYVPAQEKNFTCAPAICHDGKAHFPREGVFVSNGTHWFVTQRNFYEPQIITTDNTFVSGNCDVVIGIVNNTVYDPLQPELDSFKEELDKYFKNHTSPDVDLGDISGINASVVNIQKEIDRLNEVAKNLNESLIDLQELGKYEQYIKWPWYIWLGFIAGLIAIVMVTIMLCCMTSCCSCLKGCCSCGSCCKFDEDDSEPVLKGVKLHYT

SEQ ID NO: 623 - protein, 1273 aa, Artificial Sequence
  SARS-CoV-2/Tianmen/HBCDC-HB-07/2020__EPI_ISL_412983 spike protein (1-1273)(I712C_T1077C)
MFVFLVLLPLVSSQCVNLTTRTQLPPAYTNSFTRGVYYPDKVFRSSVLHSTQDLFLPFFSNVTWFHAIHVSGTNGTKRFDNPVLPFNDGVYFASTEKSNIIRGWIFGTTLDSKTQSLLIVNNATNVVIKVCEFQFCNDPFLGVYYHKNNKSWMESEFRVYSSANNCTFEYVSQPFLMDLEGKQGNFKNLREFVFKNIDGYFKIYSKHTPINLVRDLPQGFSALEPLVDLPIGINITRFQTLLALHRSYLTPGDSSSGWTAGAAAYYVGYLQPRTFLLKYNENGTITDAVDCALDPLSETKCTLKSFTVEKGIYQTSNFRVQPTESIVRFPNITNLCPFGEVFNATRFASVYAWNRKRISNCVADYSVLYNSASFSTFKCYGVSPTKLNDLCFTNVYADSFVIRGDEVRQIAPGQTGKIADYNYKLPDDFTGCVIAWNSNNLDSKVGGNYNYLYRLFRKSNLKPFERDISTEIYQAGSTPCNGVEGFNCYFPLQSYGFQPTNGVGYQPYRVVVLSFELLHAPATVCGPKKSTNLVKNKCVNFNFNGLTGTGVLTESNKKFLPFQQFGRDIADTTDAVRDPQTLEILDITPCSFGGVSVITPGTNTSNQVAVLYQDLNCTEVPVAIHADQLTPTWRVYSTGSNVFQTRAGCLIGAEHVNNSYECDIPIGAGICASYQTQTNSPRRARSVASQSIIAYTMSLGAENSVAYSNNSCAIPTNFTISVTTEILPVSMTKTSVDCTMYICGDSTECSNLLLQYGSFCTQLNRALTGIAVEQDKNTQEVFAQVKQIYKTPPIKDFGGFNFSQILPDPSKPSKRSFIEDLLFNKVTLADAGFIKQYGDCLGDIAARDLICAQKFNGLTVLPPLLTDEMIAQYTSALLAGTITSGWTFGAGAALQIPFAMQMAYRFNGIGVTQNVLYENQKLIANQFNSAIGKIQDSLSSTASALGKLQDVVNQNAQALNTLVKQLSSNFGAISSVLNDILSRLDKVEAEVQIDRLITGRLQSLQTYVTQQLIRAAEIRASANLAATKMSECVLGQSKRVDFCGKGYHLMSFPQSAPHGVVFLHVTYVPAQEKNFTCAPAICHDGKAHFPREGVFVSNGTHWFVTQRNFYEPQIITTDNTFVSGNCDVVIGIVNNTVYDPLQPELDSFKEELDKYFKNHTSPDVDLGDISGINASVVNIQKEIDRLNEVAKNLNESLIDLQELGKYEQYIKWPWYIWLGFIAGLIAIVMVTIMLCCMTSCCSCLKGCCSCGSCCKFDEDDSEPVLKGVKLHYT

SEQ ID NO: 624 - protein, 1273 aa, Artificial Sequence
  SARS-CoV-2/Hong Kong/case42_VM20002493/2020__EPI_ISL_414527 spike protein (1-1273)(I712C_T1077C)
MFVFLVLLPLVSSQCVNLTTRTQLPPAYTNSFTRGVYYPDKVFRSSVLHSTQDLFLPFFSNVTWFHAIHVSGTNGTKRFDNPVLPFNDGVYFASTEKSNIIRGWIFGTTLDSKTQSLLIVNNATNVVIKVCEFQFCNDPFLGVYYHKNNKSWMESEFRVYSSANNCTFEYVSQPFLMDLEGKQGNFKNLREFVFKNIDGYFKIYSKHTPINLVRDLPQGFSALEPLVDLPIGINITRFQTLLALHRSYLTPGDSSSGWTAGAAAYYVGYLQPRTFLLKYNENGTITDAVDCALDPLSETKCTLKSFTVEKGIYQTSNFRVQPTESIVRFPNITNLCPFGEVFNATRFASVYAWNRKRISNCVADYSVLYNSASFSTFKCYGVSPTKLNDLCFTNVYADSFVIRGDEVRQIAPGQTGKIADYNYKLPDDFTGCVIAWNSNNLDSKVGGNYNYLYRLFRKSNLKPFERDISTEIYQAGSTPCNGVEGFNCYFPLQSYGFQPTNGVGYQPYRVVVLSFELLHAPATVCGPKKSTNLVKNKCVNFNFNGLTGTGVLTESNKKFLPFQQFGRDIADTTDAVRDPQTLEILDITPCSFGGVSVITPGTNTSNQVAVLYQDVNCTEVPVAIHADQLTPTWRVYSTGSNVFQTRAGCLIGAEHVNNSYECDIPIGAGICASYQTQTNSPRRARSVASQSIIAYTMSLGAENSVAYSNNSCAIPTNFAISVTTEILPVSMTKTSVDCTMYICGDSTECSNLLLQYGSFCTQLNRALTGIAVEQDKNTQEVFAQVKQIYKTPPIKDFGGFNFSQILPDPSKPSKRSFIEDLLFNKVTLADAGFIKQYGDCLGDIAARDLICAQKFNGLTVLPPLLTDEMIAQYTSALLAGTITSGWTFGAGAALQIPFAMQMAYRFNGIGVTQNVLYENQKLIANQFNSAIGKIQDSLSSTASALGKLQDVVNQNAQALNTLVKQLSSNFGAISSVLNDILSRLDKVEAEVQIDRLITGRLQSLQTYVTQQLIRAAEIRASANLAATKMSECVLGQSKRVDFCGKGYHLMSFPQSAPHGVVFLHVTYVPAQEKNFTCAPAICHDGKAHFPREGVFVSNGTHWFVTQRNFYEPQIITTDNTFVSGNCDVVIGIVNNTVYDPLQPELDSFKEELDKYFKNHTSPDVDLGDISGINASVVNIQKEIDRLNEVAKNLNESLIDLQELGKYEQYIKWPWYIWLGFIAGLIAIVMVTIMLCCMTSCCSCLKGCCSCGSCCKFDEDDSEPVLKGVKLHYT

SEQ ID NO: 625 - protein, 1273 aa, Artificial Sequence
  SARS-CoV-2/USA/CruiseA-23/2020__EPI_ISL_414482 spike protein (1-1273)(I712C_T1077C)
MFVFLVLLPLVSSQCVNLTTRTQLPPAYTNSFTRGVYYPDKVFRSSVLHSTQDLFLPFFSNVTWFHAIHVSGTNGTKRFDNPVLPFNDGVYFASTEKSNIIRGWIFGTTLDSKTQSLLIVNNATNVVIKVCEFQFCNDPFLGVYYHKNNKSWMESEFRVYSSANNCTFEYVSQPFLMDLEVKQGNFKNLREFVFKNIDGYFKIYSKHTPINLVRDLPQGFSALEPLVDLPIGINITRFQTLLALHRSYLTPGDSSSGWTAGAAAYYVGYLQPRTFLLKYNENGTITDAVDCALDPLSETKCTLKSFTVEKGIYQTSNFRVQPTESIVRFPNITNLCPFGEVFNATRFASVYAWNRKRISNCVADYSVLYNSASFSTFKCYGVSPTKLNDLCFTNVYADSFVIRGDEVRQIAPGQTGKIADYNYKLPDDFTGCVIAWNSNNLDSKVGGNYNYLYRLFRKSNLKPFERDISTEIYQAGSTPCNGVEGFNCYFPLQSYGFQPTNGVGYQPYRVVVLSFELLHAPATVCGPKKSTNLVKNKCVNFNFNGLTGTGVLTESNKKFLPFQQFGRDIADTTDAVRDPQTLEILDITPCSFGGVSVITPGTNTSNQVAVLYQDVNCTEVPVAIHADQLTPTWRVYSTGSNVFQTRAGCLIGAEHVNNSYECDIPIGAGICASYQTQTNSPRRARSVASQSIIAYTMSLGAENSVAYSNNSCAIPTNFTISVTTEILPVSMTKTSVDCTMYICGDSTECSNLLLQYGSFCTQLNRALTGIAVEQDKNTQEVFAQVKQIYKTPPIKDFGGFNFSQILPDPSKPSKRSFIEDLLFNKVTLADAGFIKQYGDCLGDIAARDLICAQKFNGLTVLPPLLTDEMIAQYTSALLAGTITSGWTFGAGAALQIPFAMQMAYRFNGIGVTQNVLYENQKLIANQFNSAIGKIQDSLSSTASALGKLQDVVNQNAQALNTLVKQLSSNFGAISSVLNDILSRLDKVEAEVQIDRLITGRLQSLQTYVTQQLIRAAEIRASANLAATKMSECVLGQSKRVDFCGKGYHLMSFPQSAPHGVVFLHVTYVPAQEKNFTCAPAICHDGKAHFPREGVFVSNGTHWFVTQRNFYEPQIITTDNTFVSGNCDVVIGIVNNTVYDPLQPELDSFKEELDKYFKNHTSPDVDLGDISGINASVVNIQKEIDRLNEVAKNLNESLIDLQELGKYEQYIKWPWYIWLGFIAGLIAIVMVTIMLCCMTSCCSCLKGCCSCGSCCKFDEDDSEPVLKGVKLHYT

SEQ ID NO: 626 - protein, 1273 aa, Artificial Sequence
  SARS-CoV-2/Hong Kong/case85_VM20002868/2020__EPI_ISL_414519 spike protein (1-1273)(I712C_T1077C)
MFVFLVLVPLVSSQCVNLTTRTQLPPAYTNSFTRGVYYPDKVFRSSVLHSTQDLFLPFFSNVTWFHAIHVSGTNGTKRFDNPVLPFNDGVYFASTEKSNIIRGWIFGTTLDSKTQSLLIVNNATNVVIKVCEFQFCNDPFLGVYYHKNNKSWMESEFRVYSSANNCTFEYVSQPFLMDLEGKQGNFKNLREFVFKNIDGYFKIYSKHTPINLVRDLPQGFSALEPLVDLPIGINITRFQTLLALHRSYLTPGDSSSGWTAGAAAYYVGYLQPRTFLLKYNENGTITDAVDCALDPLSETKCTLKSFTVEKGIYQTSNFRVQPTESIVRFPNITNLCPFGEVFNATRFASVYAWNRKRISNCVADYSVLYNSASFSTFKCYGVSPTKLNDLCFTNVYADSFVIRGDEVRQIAPGQTGKIADYNYKLPDDFTGCVIAWNSNNLDSKVGGNYNYLYRLFRKSNLKPFERDISTEIYQAGSTPCNGVEGFNCYFPLQSYGFQPTNGVGYQPYRVVVLSFELLHAPATVCGPKKSTNLVKNKCVNFNFNGLTGTGVLTESNKKFLPFQQFGRDIADTTDAVRDPQTLEILDITPCSFGGVSVITPGTNTSNQVAVLYQDVNCTEVPVAIHADQLTPTWRVYSTGSNVFQTRAGCLIGAEHVNNSYECDIPIGAGICASYQTQTNSPRRARSVASQSIIAYTMSLGAENSVAYSNNSCAIPTNFTISVTTEILPVSMTKTSVDCTMYICGDSTECSNLLLQYGSFCTQLNRALTGIAVEQDKNTQEVFAQVKQIYKTPPIKDFGGFNFSQILPDPSKPSKRSFIEDLLFNKVTLADAGFIKQYGDCLGDIAARDLICAQKFNGLTVLPPLLTDEMIAQYTSALLAGTITSGWTFGAGAALQIPFAMQMAYRFNGIGVTQNVLYENQKLIANQFNSAIGKIQDSLSSTASALGKLQDVVNQNAQALNTLVKQLSSNFGAISSVLNDILSRLDKVEAEVQIDRLITGRLQSLQTYVTQQLIRAAEIRASANLAATKMSECVLGQSKRVDFCGKGYHLMSFPQSAPHGVVFLHVTYVPAQEKNFTCAPAICHDGKAHFPREGVFVSNGTHWFVTQRNFYEPQIITTDNTFVSGNCDVVIGIVNNTVYDPLQPELDSFKEELDKYFKNHTSPDVDLGDISGINASVVNIQKEIDRLNEVAKNLNESLIDLQELGKYEQYIKWPWYIWLGFIAGLIAIVMVTIMLCCMTSCCSCLKGCCSCGSCCKFDEDDSEPVLKGVKLHYT

SEQ ID NO: 627 - protein, 1273 aa, Artificial Sequence
  SARS-CoV-2/England/200990660/2020__EPI_ISL_414523 spike protein (1-1273)(I712C_T1077C)
MFVFLVLLPLVSSQCVNLTTRTQLPPAYTNSFTRGVYYPDKVFRSSVLHSTQDLFLPFFSNVTWFHAIHVSGTNGTKRFDNPVLPFNDGVYFASTEKSNIIRGWIFGTTLDSKTQSLLIVNNATNVVIKVCEFQFCNDPFLGVYYHKNNKSWMESEFRVYSSANNCTFEYVSQPFLMDLEGKQGNFKNLREFVFKNIDGYFKIYSKHTPINLVRDLPQGFSALEPLVDLPIGINITRFQTLLALHRSYLTPGDSSSGWTAGAAAYYVGYLQPRTFLLKYNENGTITDAVDCALDPLSETKCTLKSFTVEKGIYQTSNFRVQPTESIVRFPNITNLCPFGEVFNATRFASVYAWNRKRISNCVADYSVLYNSASFSTFKCYGVSPTKLNDLCFTNVYADSFVIRGDEVRQIAPGQTGKIADYNYKLPDDFTGCVIAWNSNNLDSKVGGNYNYLYRLFRKSNLKPFERDISTEIYQAGSTPCNGVEGFNCYFPLQSYGFQPTNGVGYQPYRVVVLSFELLHAPATVCGPKKSTNLVKNKCVNFNFNGLTGTGVLTESNKKFLPFQQFGRDIADTTDAVRDPQTLEILDITPCSFGGVSVITPGTNTSNQVAVLYQGVNCTEVPVAIHADQLTPTWRVYSTGSNVFQTRAGCLIGAEHVNNSYECDIPIGAGICASYQTQTNSPRRARSVASQSIIAYTMSLGAENSVAYSNNSCAIPTNFTISVTTEILPVSMTKTSVDCTMYICGDSTECSNLLLQYGSFCTQLNRALTGIAVEQDKNTQEVFAQVKQIYKTPPIKDFGGFNFSQILPDPSKPSKRSFIEDLLFNKVTLADAGFIKQYGDCLGDIAARDLICAQKFNGLTVLPPLLTDEMIAQYTSALLAGTITSGWTFGAGAALQIPFAMQMAYRFNGIGVTQNVLYENQKLIANQFNSAIGKIQDSLSSTASALGKLQDVVNQNAQALNTLVKQLSSNFGAISSVLNDILSRLDKVEAEVQIDRLITGRLQSLQTYVTQQLIRAAEIRASANLAATKMSECVLGQSKRVDFCGKGYHLMSFPQSAPHGVVFLHVTYVPAQEKNFTCAPAICHDGKAHFPREGVFVSNGTHWFVTQRNFYEPQIITTDNTFVSGNCDVVIGIVNNTVYDPLQPELDSFKEELDKYFKNHTSPDVDLGDISGINASVVNIQKEIDRLNEVAKNLNESLIDLQELGKYEQYIKWPWYIWLGFIAGLIAIVMVTIMLCCMTSCCSCLKGCCSCGSCCKFDEDDSELVLKGVKLHYT

SEQ ID NO: 628 - protein, 1273 aa, Artificial Sequence
  SARS-CoV-2/Australia/NSW09/2020__EPI_ISL_413595 spike protein (1-1273)(I712C_T1077C)
MFVFLVLLPLVSSQCVNLTTRTQLPPAYTNSFTRGVYYPDKVFRSSVLHSTQDLFLPFFSNVTWFHAIHVSGTNGTKRFDNPVLPFNDGVYFASTEKSNIIRGWIFGTTLDSKTQSLLIVNNATNVVIKVCEFQFCNDPFLGVYYHKNNKSWMESEFRVYSSANNCTFEYVSQPFLMDLEGKQGNFKNLREFVFKNIDGYFKIYSKHTPINLVRDLPQGFSALEPLVDLPIGINITRFQTLLALHRSYLTPGDSSSGWTAGAAAYYVGYLQPRTFLLKYNENGTITDAVDCALDPLSETKCTLKSFTVEKGIYQTSNFRVQPTESIVRFPNITNLCPFGEVFNATRFASVYAWNRKRISNCVADYSVLYNSASFSTFKCYGVSPTKLNDLCFTNVYADSFVIRGDEVRQIAPGQTGKIADYNYKLPDDFTGCVIAWNSNNLDSKVGGNYNYLYRLFRKSNLKPFERDISTEIYQAGSTPCNGVEGFNCYFPLQSYGFQPTNGVGYQPYRVVVLSFELLHAPATVCGPKKSTNLVKNKCVNFNFNGLTGTGVLTESNKKFLPFQQFGRDIADTTDAVRDPQTLEILDITPCSFGGVSVITPGTNTSNQVAVLYQDVNCTEVPVAIHADQLTPTWRVYSTGSNVFQTRAGCLIGAEHVNNSYECDIPIGAGICASYQTQTNSPRRARSVASQSIIAYTMSLGAENSVAYSNNSCAIPTNFTISVTTEILPVSMTKTSVDCTMYICGDSTECSNLLLQYGSFCTQLNRALTGIAVEQDKNTQEVFAQVKQIYKTPPIKDFGGFNFSQILPDPSKPSKRSFIEDLLFNKVTLADAGFIKQYGDCLGDIAARDLICAQKFNGLTVLPPLLTDEMIAQYTSALLAGTITSGWTFGAGAALQIPFAMQMAYRFNGIGVTQNVLYENQKLIANQFNSAIGKIQDSLSFTASALGKLQDVVNQNAQALNTLVKQLSSNFGAISSVLNDILSRLDKVEAEVQIDRLITGRLQSLQTYVTQQLIRAAEIRASANLAATKMSECVLGQSKRVDFCGKGYHLMSFPQSAPHGVVFLHVTYVPAQEKNFTCAPAICHDGKAHFPREGVFVSNGTHWFVTQRNFYEPQIITTDNTFVSGNCDVVIGIVNNTVYDPLQPELDSFKEELDKYFKNHTSPDVDLGDISGINASVVNIQKEIDRLNEVAKNLNESLIDLQELGKYEQYIKWPWYIWLGFIAGLIAIVMVTIMLCCMTSCCSCLKGCCSCGSCCKFDEDDSEPVLKGVKLHYT

SEQ ID NO: 629 - protein, 1273 aa, Artificial Sequence
  SARS-CoV-2/Australia/NSW10/2020__EPI_ISL_413596 spike protein (1-1273)(I712C_T1077C)
MFVFLVLLPLVSSQCVNLTTRTQLPPAYTNSFTRGVYYPDKVFRSSVLHSTQDLFLPFFSNVTWFHAIHVSGTNGTKRFDNPVLPFNDGVYFASTEKSNIIRGWIFGTTLDSKTQSLLIVNNATNVVIKVCEFQFCNDPFLGVYYHKNNKSWMESEFRVYSSANNCTFEYVSQPFLMDLEGKQGNFKNLREFVFKNIDGYFKIYSKHTPINLVRDLPQGFSALEPLVDLPIGINITRFQTLLALHRSYLTPGDSSSGWTAGAAAYYVGYLQPRTFLLKYNENGTITDAVDCALDPLSETKCTLKSFTVEKGIYQTSNFRVQPTESIVRFPNITNLCPFGEVFNATRFASVYAWNRKRISNCVADYSVLYNSASFSTFKCYGVSPTKLNDLCFTNVYADSFVIRGDEVRQIAPGQTGKIADYNYKLPDDFTGCVIAWNSNNLDSKVGGNYNYLYRLFRKSNLKPFERDISTEIYQAGSTPCNGVEGFNCYFPLQSYGFQPTNGVGYQPYRVVVLSFELLHAPATVCGPKKSTNLVKNKCVNFNFNGLTGTGVLTESNKKFLPFQQFGRDIADTTDAVRDPQTLEILDITPCSFGGVSVITPGTNTSNQVAVLYQDVNCTEVPVAIHADQLTPTWRVYSTGSNVFQTRAGCLIGAEHVNNSYECDIPIGAGICASYQTQTNSPRRARSVASQSIIAYTMSLGAENSVAYSNNSCAIPTNFTISVTTEILPVSMTKTSVDCTMYICGDSTECSNLLLQYGSFCTQLNRALTGIAVEQDKNTQEVFAQVKQIYKTPPIKDFGGFNFSQILPDPSKPSKRSFIEDLLFNKVTLADAGFIKQYGDCLGDIAARDLICAQKFNGLTVLPPLLTDEMIAQYTSALLAGTITSGWTFGAGAALQIPFAMQMAYRFNGIGVTQNVLYENQKLIANQFNSAIGKIQDSLSSTASALGKLQDVVNQNAQALNTLVKQLSSNFGAISSVLNDILSRLDKVEAEVQIDRLITGRLQSLQTYVTQQLIRAAEIRASANLAATKMSECVLGQSKRVDFCGKGYHLMSFPQSAPHGVVFLHVTYVPAQEKNFTCAPAICHDGKAHFPREGVFVSNGTHWFVTQRNFYEPQIITTDNTFVSGNCDVVIGIVNNTVYDPLQPELDSFKEELDKYFKNHTSPDVDLGDISGINASVVNIQKEIDRLNEVAKNLNESLIDLQELGKYEQYIKWPWYIWLGFIAGLIAIVMVTIMLCCMTSCCSCLKGCCSCGSCFKFDEDDSEPVLKGVKLHYT

SEQ ID NO: 630 - protein, 1273 aa, Artificial Sequence
  SARS-CoV-2/Switzerland/1000477797/2020__EPI_ISL_413023 spike protein (1-1273)(I712C_T1077C)
MFVFLVLLPLVSSQCVNLTTRTQLPPAYTNSFTRGVYYPDKVFRSSVLHSTQDLFLPFFSNVTWFHAIHVSGTNGTKRFDNPVLPFNDGVYFASTEKSNIIRGWIFGTTLDSKTQSLLIVNNATNVVIKVCEFQFCNDPFLGVYYHKNNKSWMESEFRVYSSANNCTFEYVSQPFLMDLEGKQGNFKNLREFVFKNIDGYFNIYSKHTPINLVRDLPQGFSALEPLVDLPIGINITRFQTLLALHRSYLTPGDSSSGWTAGAAAYYVGYLQPRTFLLKYNENGTITDAVDCALDPLSETKCTLKSFTVEKGIYQTSNFRVQPTESIVRFPNITNLCPFGEVFNATRFASVYAWNRKRISNCVADYSVLYNSASFSTFKCYGVSPTKLNDLCFTNVYADSFVIRGDEVRQIAPGQTGKIADYNYKLPDDFTGCVIAWNSNNLDSKVGGNYNYLYRLFRKSNLKPFERDISTEIYQAGSTPCNGVEGFNCYFPLQSYGFQPTNGVGYQPYRVVVLSFELLHAPATVCGPKKSTNLVKNKCVNFNFNGLTGTGVLTESNKKFLPFQQFGRDIADTTDAVRDPQTLEILDITPCSFGGVSVITPGTNTSNQVAVLYQGVNCTEVPVAIHADQLTPTWRVYSTGSNVFQTRAGCLIGAEHVNNSYECDIPIGAGICASYQTQTNSPRRARSVASQSIIAYTMSLGAENSVAYSNNSCAIPTNFTISVTTEILPVSMTKTSVDCTMYICGDSTECSNLLLQYGSFCTQLNRALTGIAVEQDKNTQEVFAQVKQIYKTPPIKDFGGFNFSQILPDPSKPSKRSFIEDLLFNKVTLADAGFIKQYGDCLGDIAARDLICAQKFNGLTVLPPLLTDEMIAQYTSALLAGTITSGWTFGAGAALQIPFAMQMAYRFNGIGVTQNVLYENQKLIANQFNSAIGKIQDSLSSTASALGKLQDVVNQNAQALNTLVKQLSSNFGAISSVLNDILSRLDKVEAEVQIDRLITGRLQSLQTYVTQQLIRAAEIRASANLAATKMSECVLGQSKRVDFCGKGYHLMSFPQSAPHGVVFLHVTYVPAQEKNFTCAPAICHDGKAHFPREGVFVSNGTHWFVTQRNFYEPQIITTDNTFVSGNCDVVIGIVNNTVYDPLQPELDSFKEELDKYFKNHTSPDVDLGDISGINASVVNIQKEIDRLNEVAKNLNESLIDLQELGKYEQYIKWPWYIWLGFIAGLIAIVMVTIMLCCMTSCCSCLKGCCSCGSCCKFDEDDSEPVLKGVKLHYT

SEQ ID NO: 631 - protein, 1273 aa, Artificial Sequence
  SARS-CoV-2/Belgium/BA-02291/2020__EPI_ISL_415159 spike protein (1-1273)(I712C_T1077C)
MFVFLVLLPLVSSQCVNLTTRTQLPPAYTNSFTRGVYYPDKVFRSSVLHSTQDLFLPFFSNVTWFHAIHVSGTNGTKRFDNPVLPFNDGVYFASTEKSNIIRGWIFGTTLDSKTQSLLIVNNATNVVIKVCEFQFCNDPFLGVYYHKNNKSWMESEFRVYSSANNCTFEYVSQPFLMDLEGKQGNFKNLREFVFKNIDGYFKIYSKHTPINLVRDLPQGFSALEPLVDLPIGINITRFQTLLALHRSYLTPGDSSSGWTAGAAAYYVGYLQPRTFLLKYNENGTITDAVDCALDPLSETKCTLKSFTVEKGIYQTSNFRVQPTESIVRFPNITNLCPFGEVFNATRFASVYAWNRKRISNCVADYSVLYNSASFSTFKCYGVSPTKLNDLCFTNVYADSFVIRGDEVRQIAPGQTGKIADYNYKLPDDFTGCVIAWNSNNLDSKVGGNYNYLYRLFRRSNLKPFERDISTEIYQAGSTPCNGVEGFNCYFPLQSYGFQPTNGVGYQPYRVVVLSFELLPAPATVCGPKKSTNLVKNKCVNFNFNGLTGTGVLTESNKKFLPFQQFGRDIADTTDAVRDPQTLEILDITPCSFGGVSVITPGTNTSNQVAVLYQGVNCTEVPVAIHADQLTPTWRVYSTGSNVFQTRAGCLIGAEHVNNSYECDIPIGAGICASYQTQTNSPRRARSVASQSIIAYTMSLGAENSVAYSNNSCAIPTNFTISVTTEILPVSMTKTSVDCTMYICGDSTECSNLLLQYGSFCTQLNRALTGIAVEQDKNTQEVFAQVKQIYKTPPIKDFGGFNFSQILPDPSKPSKRSFIEDLLFNKVTLADAGFIKQYGDCLGDIAARDLICAQKFNGLTVLPPLLTDEMIAQYTSALLAGTITSGWTFGAGAALQIPFAMQMAYRFNGIGVTQNVLYENQKLIANQFNSAIGKIQDSLSSAAPALGKLQDVVNQNAQALNTLVKQLSSNFGAISSVLNDILSRLDKVEAEVQIDRLITGRLQSLQTYVTQQLIRAAEIRASANLAATKMSECVLGQSKRVDFCGKGYHLMSFPQSAPHGVVFLHVTYVPAQEKNFTCAPAICHDGKAHFPREGVFVSNGTHWFVTQRNFYEPQIITTDNTFVSGNCDVVIGIVNNTVYDPLQPELDSFKEELDKYFKNHTSPDVDLGDISGINASVVNIQKEIDRLNEVAKNLNESLIDLQELGKYEQYIKWPWYIWLGFIAGLIAIVMVTIMLCCMTSCCSCLKGCCSCGSCCKFDEDDSEPVLKGVKLHYT

SEQ ID NO: 632 - protein, 1273 aa, Artificial Sequence
  SARS-CoV-2/USA/WA8-UW5/2020__EPI_ISL_413486 spike protein (1-1273)(I712C_T1077C)
MFVFLVLLPLVSSQCVNLTTRTQLPPAYTNSFTRGVYYPDKVFRSSVLHSTQDLFLPFFSNVTWFHAIHVSGTNGTKRFDNPVLPFNDGVYFASTEKSNIIRGWIFGTTLDSKTQSLLIVNNATNVVIKVCEFQFCNDPFLGVYYHKNNKSWMESEFRVYSSANNCTFEYVSQPFLMDLEGKQGNFKNLREFVFKNIDGYFKIYSKHTPINLVRDLPQGFSALEPLVDLPIGINITRFQTLLALHRSYLTPGDSSSGWTAGAAAYYVGYLQPRTFLLKYNENGTITDAVDCALDPLSETKCTLKSFTVEKGIYQTSNFRVQPTESIVRFPNITNLCPFGEVFNATRFASVYAWNRKRISNCVADYSVLYNSASFSTFKCYGVSPTKLNDLCFTNVYADSFVIRGDEVRQIAPGQTGKIADYNYKLPDDFTGCVIAWNSNNLDSKVGGNYNYLYRLFRKSNLKPFERDISTEIYQAGSTPCNGVEGFNCYFPLQSYGFQPTNGVGYQPYRVVVLSFELLHAPATVCGPKKSTNLVKNKCVNFNFNGLTGTGVLTESNKKFLPFQQFGRDIADTTDAVRDPQTLEILDITPCSFGGVSVITPGTNTSNQVAVLYQDVNCTEVPVAIHADQLTPTWRVYSTGSNVFQTRAGCLIGAEYVNNSYECDIPIGAGICASYQTQTNSPRRARSVASQSIIAYTMSLGAENSVAYSNNSCAIPTNFTISVTTEILPVSMTKTSVDCTMYICGDSTECSNLLLQYGSFCTQLNRALTGIAVEQDKNTQEVFAQVKQIYKTPPIKDFGGFNFSQILPDPSKPSKRSFIEDLLFNKVTLADAGFIKQYGDCLGDIAARDLICAQKFNGLTVLPPLLTDEMIAQYTSALLAGTITSGWTFGAGAALQIPFAMQMAYRFNGIGVTQNVLYENQKLIANQFNSAIGKIQDSLSSTASALGKLQDVVNQNAQALNTLVKQLSSNFGAISSVLNDILSRLDKVEAEVQIDRLITGRLQSLQTYVTQQLIRAAEIRASANLAATKMSECVLGQSKRVDFCGKGYHLMSFPQSAPHGVVFLHVTYVPAQEKNFTCAPAICHDGKAHFPREGVFVSNGTHWFVTQRNFYEPQIITTDNTFVSGNCDVVIGIVNNTVYDPLQPELDSFKEELDKYFKNHTSPDVDLGDISGINASVVNIQKEIDRLNEVAKNLNESLIDLQELGKYEQYIKWPWYIWLGFIAGLIAIVMVTIMLCCMTSCCSCLKGCCSCGSCCKFDEDDSEPVLKGVKLHYT

SEQ ID NO: 633 - protein, 1273 aa, Artificial Sequence
  SARS-CoV-2/England/20102000506/2020__EPI_ISL_415147 spike protein (1-1273)(I712C_T1077C)
MFVFLVLLPLVSSQCVNLTTRTQLPPAYTNSFTRGVYYPDKVFRSSVLHSTQDLFLPFFSNVTWFHAIHVSGTNGTKRFDNPVLPFNDGVYFASTEKSNIIRGWIFGTTLDSKTQSLLIVNNATNVVIKVCEFQFCNDPFLGVYYHKNNKSWMESEFRVYSSANNCTFEYVSQPFLMDLEGKQGNFKNLREFVFKNIDGYFKIYSKHTPINLVRDLPQGFSALEPLVDLPIGINITRFQTLLALHRSYLTPGDSSSGWTAGAAAYYVGYLQPRTFLLKYNENGTITDAVDCALDPLSETKCTLKSFTVEKGIYQTSNFRVQPTESIVRFPNITNLCPFGEVFNATRFASVYAWNRKRISNCVADYSVLYNSASFSTFKCYGVSPTKLNDLCFTNVYADSFVIRGDEVRQIAPGQTGKIADYNYKLPDDFTGCVIAWNSNNLDSKVGGNYNYLYRLFRKSNLKPFERDISTEIYQAGSTPCNGVEGFNCYFPLQSYGFQPTNGVGYQPYRVVVLSFELLHAPATVCGPKKSTNLVKNKCVNFNFNGLTGTGVLTESNKKFLPFQQFGRDIADTTDAVRDPQTLEILDITPCSFGGVSVITPGTNTSNQVAVLYQGVNCTEVPVAIHADQLTPTWRVYSTGSNVFQTRAGCLIGAEHVNNSYECDIPIGAGICASYQTQTNSPRRARSVASQSIIAYTMSLGAENSVAYSNNSCAIPTNFTISVTTEILPVSMTKTSVDCTMYICGDSTECSNLLLQYGSFCTQLNRALTGIAVEQDKNTQEVFAQVKQIYKTPPIKDFGGFNFSQILPDPSKPSKRSFIEDLLFNKVTLADAGFIKQYGYCLGDIAARDLICAQKFNGLTVLPPLLTDEMIAQYTSALLAGTITSGWTFGAGAALQIPFAMQMAYRFNGIGVTQNVLYENQKLIANQFNSAIGKIQDSLSSTASALGKLQDVVNQNAQALNTLVKQLSSNFGAISSVLNDILSRLDKVEAEVQIDRLITGRLQSLQTYVTQQLIRAAEIRASANLAATKMSECVLGQSKRVDFCGKGYHLMSFPQSAPHGVVFLHVTYVPAQEKNFTCAPAICHDGKAHFPREGVFVSNGTHWFVTQRNFYEPQIITTDNTFVSGNCDVVIGIVNNTVYDPLQPELDSFKEELDKYFKNHTSPDVDLGDISGINASVVNIQKEIDRLNEVAKNLNESLIDLQELGKYEQYIKWPWYIWLGFIAGLIAIVMVTIMLCCMTSCCSCLKGCCSCGSCCKFDEDDSEPVLKGVKLHYT

SEQ ID NO: 634 - protein, 1273 aa, Artificial Sequence
  SARS-CoV-2/Belgium/VAG-03013/2020__EPI_ISL_415155 spike protein (1-1273)(I712C_T1077C)
MFVFLVLLPLVSSQCVNLTTRTQLPPAYTNSFTRGVYYPDKVFRSSVLHSTQDLFLPFFSNVTWFHAIHVSGTNGTKRFDNPVLPFNDGVYFASTEKSNIIRGWIFGTTLDSKTQSLLIVNNATNVVIKVCEFQFCNDPFLGVYYHKNNKSWMESEFRVYSSANNCTFEYVSQPFLMDLEGKQGNFKNLREFVFKNIDGYFKIYSKHTPINLVRDLPQGFSALEPLVDLPIGINITRFQTLLALHRSYLTPGDSSSGWTAGAAAYYVGYLQPRTFLLKYNENGTITDAVDCALDPLSETKCTLKSFTVEKGIYQTSNFRVQPTESIVRFPNITNLCPFGEVFNATRFASVYAWNRKRISNCVADYSVLYNSASFSTFKCYGVSPTKLNDLCFTNVYADSFVIRGDEVRQIAPGQTGKIADYNYKLPDDFTGCVIAWNSNNLDSKVGGNYNYLYRLFRKSNLKPFERDISTEIYQAGSTPCNGVEGFNCYFPLQSYGFQPTNGVGYQPYRVVVLSFELLHAPATVCGPKKSTNLVKNKCVNFNFNGLTGTGVLTESNKKFLPFQQFGRDIADTTDAVRDPQTLEILDITPCSFGGVSVITPGTNTSNQVAVLYQGVNCTEVPVAIHADQLTPTWRVYSTGSNVFQTRAGCLIGAEHVNNSYECDIPIGAGICASYQTQTNSPRRARSVASQSIIAYTMSLGAENSVAYSNNSCAIPTNFTISVTTEILPVSMTKTSVDCTMYICGDSTECSNLLLQYGSFCTQLNRALTGIAVEQDKNTQEVFAQVKQIYKTPPIKDFGGFNFSQILPDPSKPSKRSFIEDLLFNKVTLADAGFIKQYGDCLGDIAARDLICAQKFNGLTVLPPLLTDEMIAQYTSALLAGTITSGWTFGAGAALQIPFAMQMAYRFNGIGVTQNVLYENQKLIANQFNSAIGKIQDSLSSTATALGKLQDVVNQNAQALNTLVKQLSSNFGAISSVLNDILSRLDKVEAEVQIDRLITGRLQSLQTYVTQQLIRAAEIRASANLAATKMSECVLGQSKRVDFCGKGYHLMSFPQSAPHGVVFLHVTYVPAQEKNFTCAPAICHDGKAHFPREGVFVSNGTHWFVTQRNFYEPQIITTDNTFVSGNCDVVIGIVNNTVYDPLQPELDSFKEELDKYFKNHTSPDVDLGDISGINASVVNIQKEIDRLNEVAKNLNESLIDLQELGKYEQYIKWPWYIWLGFIAGLIAIVMVTIMLCCMTSCCSCLKGCCSCGSCCKFDEDDSEPVLKGVKLHYT

SEQ ID NO: 635 - protein, 1273 aa, Artificial Sequence
  SARS-CoV-2/Belgium/BC-03016/2020__EPI_ISL_415157 spike protein (1-1273)(I712C_T1077C)
MFVFLVLLPLVSSQCVNLTTRTQLPPAYTNSFTRGVYYPDKVFRSSVLHSTQDLFLPFFSNVTWFHAIHVSGTNGTKRFDNPVLPFNDGVYFASTEKSNIIRGWIFGTTLDSKTQSLLIVNNATNVVIKVCEFQFCNDPFLGVYYHKNNKSWMESEFRVYSSANNCTFEYVSQPFLMDLEGKQGNFKNLREFVFKNIDGYFKIYSKHTPINLVRDLPQGFSALEPLVDLPIGINITRFQTLLALHRSYLTPGDSSSGWTAGAAAYYVGYLQPRTFLLKYNENGTITDAVDCALDPLSETKCTLKSFTVEKGIYQTSNFRVQPTESIVRFPNITNLCPFGEVFNATRFASVYAWNRKRISNCVADYSVLYNSASFSTFKCYGVSPTKLNDLCFTNVYADSFVIRGDEVRQIAPGQTGKIADYNYKLPDDFTGCVIAWNSNNLDSKVGGNYNYLYRLFRKSNLKPFERDISTEIYQAGSTPCNGVEGFNCYFPLQSYGFQPTNGVGYQPYRVVVLSFELLHAPATVCGPKKSTNLVKNKCVNFNFNGLTGTGVLTESNKKFLPFQQFGRDIADTTDAVRDPQTLEILDITPCSFGGVSVITPGTNTSNQVAVLYQGVNCTEVPVAIHADQLTPTWRVYSTGSNVFQTRAGCLIGAEHVNNSYECDIPIGAGICASYQTQTNSPRRARSVASQSIIAYTMSLGAENSVAYSNNSCAIPTNFTISVTTEILPVSMTKTSVDCTMYICGDSTECSNLLLQYGSFCTQLNRALTGIAVEQDKNTQEVFAQVKQIYKTPPIKDFGGFNFSQILPDPSKPSKRSFIEDLLFNKVTLADAGFIKQYGDCLGDIAARDLICAQKFNGLTVLPPLLTDEMIAQYTSALLAGTITSGWTFGAGAALQIPFAMQMAYRFNGIGVTQNVLYENQKLIANQFNSAIGKIQDSLSSTAPALGKLQDVVNQNAQALNTLVKQLSSNFGAISSVLNDILSRLDKVEAEVQIDRLITGRLQSLQTYVTQQLIRAAEIRASANLAATKMSECVLGQSKRVDFCGKGYHLMSFPQSAPHGVVFLHVTYVPAQEKNFTCAPAICHDGKAHFPREGVFVSNGTHWFVTQRNFYEPQIITTDNTFVSGNCDVVIGIVNNTVYDPLQPELDSFKEELDKYFKNHTSPDVDLGDISGINASVVNIQKEIDRLNEVAKNLNESLIDLQELGKYEQYIKWPWYIWLGFIAGLIAIVMVTIMLCCMTSCCSCLKGCCSCGSCCKFDEDDSEPVLKGVKLHYT

SEQ ID NO: 636 - protein, 1273 aa, Artificial Sequence
  SARS-CoV-2/Germany/BavPat3/2020__EPI_ISL_414521 spike protein (1-1273)(I712C_T1077C)
MFVFLVLLPLVSSQCVNLTTRTQLPPAYTNSFTRGVYYPDKVFRSSVLHSTQDLFLPFFSNVTWFHAIHVSGTNGTKRFDNPVLPFNDGVYFASTEKSNIIRGWIFGTTLDSKTQSLLIVNNATNVVIKVCEFQFCNDPFLGVYYHKNNKSWMESEFRVYSSANNCTFEYVSQPFLMDLEGKQGNFKNLREFVFKNIDGYFKIYSKHTPINLVRDLPQGFSALEPLVDLPIGINITRFQTLLALHRSYLTPGDSSSGWTAGAAAYYVGYLQPRTFLLKYNENGTITDAVDCALDPLSETKCTLKSFTVEKGIYQTSNFRVQPTESIVRFPNITNLCPFGEVFNATRFASVYAWNRKRISNCVADYSVLYNSASFSTFKCYGVSPTKLNDLCFTNVYADSFVIRGDEVRQIAPGQTGKIADYNYKLPDDFTGCVIAWNSNNLDSKVGGNYNYLYRLFRKSNLKPFERDISTEIYQAGSTPCNGVEGFNCYFPLQSYGFQPTNGVGYQPYRVVVLSFELLHAPATVCGPKKSTNLVKNKCVNFNFNGLTGTGVLTESNKKFLPFQQFGRDIADTTDAVRDPQTLEILDITPCSFGGVSVITPGTNTSNQVAVLYQDVNCTEVPVAIHADQLTPTWRVYSTGSNVFQTRAGCLIGAEHVNNSYECDIPIGAGICASYQTQTNSPRRARSVASQSIIAYTMSLGAENSVAYSNNSCAIPTNFTISVTTEILPVSMTKTSVDCTMYICGDSTECSNLLLQYGSFCTQLNRALTGIAVEQDKNTQQVFAQVKQIYKTPPIKDFGGFNFSQILPDPSKPSKRSFIEDLLFNKVTLADAGFIKQYGDCLGDIAARDLICAQKFNGLTVLPPLLTDEMIAQYTSALLAGTITSGWTFGAGAALQIPFAMQMAYRFNGIGVTQNVLYENQKLIANQFNSAIGKIQDSLSSTASALGKLQDVVNQNAQALNTLVKQLSSNFGAISSVLNDILSRLDKVEAEVQIDRLITGRLQSLQTYVTQQLIRAAEIRASANLAATKMSECVLGQSKRVDFCGKGYHLMSFPQSAPHGVVFLHVTYVPAQEKNFTCAPAICHDGKAHFPREGVFVSNGTHWFVTQRNFYEPQIITTDNTFVSGNCDVVIGIVNNTVYDPLQPELDSFKEELDKYFKNHTSPDVDLGDISGINASVVNIQKEIDRLNEVAKNLNESLIDLQELGKYEQYIKWPWYIWLGFIAGLIAIVMVTIMLCCMTSCCSCLKGCCSCGSCCKFDEDDSEPVLKGVKLHYT

SEQ ID NO: 637 - protein, 1273 aa, Artificial Sequence
  SARS-CoV-2/France/HF1805/2020__EPI_ISL_414628 spike protein (1-1273)(I712C_T1077C)
MFVFLVLLPLVSSQCVNLTTRTQLPPAYTNSFTRGVYYPDKVFRSSVLHSTQDLFLPFFSNVTWFHAIHVSGTNGTKRFDNPVLPFNDGVYFASTEKSNIIRGWIFGTTLDSKTQSLLIVNNATNVVIKVCEFQFCNDPFLGVYYHKNNKSWMESEFRVYSSANNCTFEYVSQPFLMDLEGKQGNFKNLREFVFKNIDGYFKIYSKHTPINLVRDLPQGFSALEPLVDLPIGINITRFQTLLALHRSYLTPGDSSSGWTAGAAAYYVGYLQPRTFLLKYNENGTITDAVDCALDPLSETKCTLKSFTVEKGIYQTSNFRVQPTESIVRFPNITNLCPFGEVFNATRFASVYAWNRKRISNCVADYSVLYNSASFSTFKCYGVSPTKLNDLCFTNVYADSFVIRGDEVRQIAPGQTGKIADYNYKLPDDFTGCVIAWNSNNLDSKVGGNYNYLYRLFRKSNLKPFERDISTEIYQAGSTPCNGVEGFNCYFPLQSYGFQPTNGVGYQPYRVVVLSFELLHAPATVCGPKKSTNLVKNKCVNFNFNGLTGTGVLTESNKKFLPFQQFGRDIADTTDAVRDPQTLEILDITPCSFGGVSVITPGTNTSNQVAVLYQGVNCTEVPVAIHADQLTPTWRVYSTGSNVFQTRAGCLIGAEHVNNSYECDIPIGAGICASYQTQTNSPRRARSVASQSIIAYTMSLGAENSVAYSNNSCAIPTNFTISVTTEILPVSMTKTSVDCTMYICGDSTECSNLLLQYGSFCTQLNRALTGIAVEQDKNTQEVFAQVKQIYKTPPIKDFGGFNFSQILPDPSKPSKRSFIEDLLFNKVTLADAGFIKQYGDCLGDIAARDLICAQKFNGLTVLPPLLTDEMIAQYTSALLAGTITSGWTFGAGAALQIPFAMQMAYRFNGIGVTQNVLYENQKLIANQFNSAIGKIQDSLSSTASALGKLQDVVNQNAQALNTLVKQLSSNFGAISSVLNDILSRLDKVEAEVQIDRLITGRLQSLQTYVTQQLIRAAEIRASANLAATKMSECVLGQSKRVDFCGKGYHLMSFPQSAPHGVVFLHVTYVPAQEKNFTCAPAICHDGKAHFPREGVFVSNGTHWFVTQRNFYEPQIITTDNTFVSGNCDVVIGVVNNTVYDPLQPELDSFKEELDKYFKNHTSPDVDLGDISGINASVVNIQKEIDRLNEVAKNLNESLIDLQELGKYEQYIKWPWYIWLGFIAGLIAIVMVTIMLCCMTSCCSCLKGCCSCGSCCKFDEDDSEPVLKGVKLHYT

SEQ ID NO: 638 - protein, 1273 aa, Artificial Sequence
  SARS-CoV-2/Netherlands/ZuidHolland_9/2020__EPI_ISL_414445 spike protein (1-1273)(I712C_T1077C)
MFVFLVLLPLVSSQCVNLTTRTQLPPAYTNSFTRGVYYPDKVFRSSVLHSTQDLFLPFFSNVTWFHAIHVSGTNGTKRFDNPVLPFNDGVYFASTEKSNIIRGWIFGTTLDSKTQSLLIVNNATNVVIKVCEFQFCNDPFLGVYYHKNNKSWMESEFRVYSSANNCTFEYVSQPFLMDLEGKQGNFKNLREFVFKNIDGYFKIYSKHTPINLVRDLPQGFSALEPLVDLPIGINITRFQTLLALHRSYLTPGDSSSGWTAGAAAYYVGYLQPRTFLLKYNENGTITDAVDCALDPLSETKCTLKSFTVEKGIYQTSNFRVQPTESIVRFPNITNLCPFGEVFNATRFASVYAWNRKRISNCVADYSVLYNSASFSTFKCYGVSPTKLNDLCFTNVYADSFVIRGDEVRQIAPGQTGKIADYNYKLPDDFTGCVIAWNSNNLDSKVGGNYNYLYRLFRKSNLKPFERDISTEIYQAGSTPCNGVEGFNCYFPLQSYGFQPTNGVGYQPYRVVVLSFELLHAPATVCGPKKSTNLVKNKCVNFNFNGLTGTGVLTESNKKFLPFQQFGRDIADTTDAVRDPQTLEILDITPCSFGGVSVITPGTNTSNQVAVLYQGVNCTEVPVAIHADQLTPTWRVYSTGSNVFQTRAGCLIGAEHVNNSYECDIPIGAGICASYQTQTNSPRRARSVASQSIIAYTMSLGAENSVAYSNNSCAIPTNFTISVTTEILPVSMTKTSVDCTMYICGDSTECSNLLLQYGSFCTQLNRALTGIAVEQDKNTQEVFAQVKQIYKTPPIKDFGGFNFSQILPDPSKPSKRSFIEDLLFNKVTLADAGFIKQYGDCLGDIAARDLICVQKFNGLTVLPPLLTDEMIAQYTSALLAGTITSGWTFGAGAALQIPFAMQMAYRFNGIGVTQNVLYENQKLIANQFNSAIGKIQDSLSSTASALGKLQDVVNQNAQALNTLVKQLSSNFGAISSVLNDILSRLDKVEAEVQIDRLITGRLQSLQTYVTQQLIRAAEIRASANLAATKMSECVLGQSKRVDFCGKGYHLMSFPQSAPHGVVFLHVTYVPAQEKNFTCAPAICHDGKAHFPREGVFVSNGTHWFVTQRNFYEPQIITTDNTFVSGNCDVVIGIVNNTVYDPLQPELDSFKEELDKYFKNHTSPDVDLGDISGINASVVNIQKEIDRLNEVAKNLNESLIDLQELGKYEQYIKWPWYIWLGFIAGLIAIVMVTIMLCCMTSCCSCLKGCCSCGSCCKFDEDDSEPVLKGVKLHYT

SEQ ID NO: 639 - protein, 1273 aa, Artificial Sequence
  SARS-CoV-2/Finland/FIN03032020A/2020__EPI_ISL_413602 spike protein (1-1273)(I712C_T1077C)
MFVFLVLLPLVSSQCVNLTTRTQLPPAYTNSFTRGVYYPDKVFRSSVLHSTQDLFLPFFSNVTWFHAIHVSGTNGTKRFDNPVLPFNDGVYFASTEKSNIIRGWIFGTTLDSKTQSLLIVNNATNVVIKVCEFQFCNDPFLGVYYHKNNKSWMESEFRVYSSANNCTFEYVSQPFLMDLEGKQGNFKNLREFVFKNIDGYFKIYSKHTPINLVRDLPQGFSALEPLVDLPIGINITRFQTLLALHRSYLTPGDSSSGWTAGAAAYYVGYLQPRTFLLKYNENGTITDAVDCALDPLSETKCTLKSFTVEKGIYQTSNFRVQPTESIVRFPNITNLCPFGEVFNATRFASVYAWNRKRISNCVADYSVLYNSASFSTFKCYGVSPTKLNDLCFTNVYADSFVIRGDEVRQIAPGQTGKIADYNYKLPDDFTGCVISWNSNNLDSKVGGNYNYLYRLFRKSNLKPFERDISTEIYQAGSTPCNGVEGFNCYFPLQSYGFQPTNGVGYQPYRVVVLSFELLHAPATVCGPKKSTNLVKNKCVNFNFNGLTGTGVLTESNKKFLPFQQFGRDIADTTDAVRDPQTLEILDITPCSFGGVSVITPGTNTSNQVAVLYQGVNCTEVPVAIHADQLTPTWRVYSTGSNVFQTRAGCLIGAEHVNNSYECDIPIGAGICASYQTQTNSPRRARSVASQSIIAYTMSLGAENSVAYSNNSCAIPTNFTISVTTEILPVSMTKTSVDCTMYICGDSTECSNLLLQYGSFCTQLNRALTGIAVEQDKNTQEVFAQVKQIYKTPPIKDFGGFNFSQILPDPSKPSKRSFIEDLLFNKVTLADAGFIKQYGDCLGDIAARDLICAQKFNGLTVLPPLLTDEMIAQYTSALLAGTITSGWTFGAGAALQIPFAMQMAYRFNGIGVTQNVLYENQKLIANQFNSAIGKIQDSLSSTASALGKLQDVVNQNAQALNTLVKQLSSNFGAISSVLNDILSRLDKVEAEVQIDRLITGRLQSLQTYVTQQLIRAAEIRASANLAATKMSECVLGQSKRVDFCGKGYHLMSFPQSAPHGVVFLHVTYVPAQEKNFTCAPAICHDGKAHFPREGVFVSNGTHWFVTQRNFYEPQIITTDNTFVSGNCDVVIGIVNNTVYDPLQPELDSFKEELDKYFKNHTSPDVDLGDISGINASVVNIQKEIDRLNEVAKNLNESLIDLQELGKYEQYIKWPWYIWLGFIAGLIAIVMVTIMLCCMTSCCSCLKGCCSCGSCCKFDEDDSEPVLKGVKLHYT

SEQ ID NO: 640 - protein, 1273 aa, Artificial Sequence
  SARS-CoV-2/France/GE1977/2020__EPI_ISL_414632 spike protein (1-1273)(I712C_T1077C)
MFVFLVLLPLVSSQCVNLTTRTQLPPAYTNSFTRGVYYPDKVFRSSVLHSTQDLFLPFFSNVTWFHAIHVSGTNGTKRFDNPVLPFNDGVYFASTEKSNIIRGWIFGTTLDSKTQSLLIVNNATNVVIKVCEFQFCNDPFLGVYYHKNNKSWMESEFRVYSSANNCTFEYVSQPFLMDLEGKQGNFKNLREFVFKNIDGYFKIYSKHTPINLVRDLPQGFSALEPLVDLPIGINITRFQTLLALHRSYLTPGDSSSGWTAGAAAYYVGYLQPRTFLLKYNENGTITDAVDCALDPLSETKCTLKSFTVEKGIYQTSNFRVQPTESIVRFPNITNLCPFGEVFNATRFASVYAWNRKRISNCVADYSVLYNSASFSTFKCYGVSPTKLNDLCFTNVYADSFVIRGDEVRQIAPGQTGKIADYNYKLPDDFTGCVIAWNSNNLDSKVGGNYNYLYRLFRKSNLKPFERDISTEIYQAGSTPCNGVEGFNCYFPLQSYGFQPTNGVGYQPYRVVVLSFELLHAPATVCGPKKSTNLVKNKCVNFNFNGLTGTGVLTESNKKFLPFQQFGRDIADTTDAVRDPQTLEILDITPCSFGGVSVITPGTNTSNQVAVLYQGVNCTEVPVAIHADQLTPTWRVYSTGSNVFQTRAGCLIGAEHVNNSYECDIPIGAGICASYQTQTNSPRRARSVASQSIIAYTMSLGAENSVAYSNNSCAIPTNFTISVTTEILPVSMTKTSVDCTMYICGDSTECSNLLLQYGSFCTQLNRALTGIAVEQDKNTQEVFAQVKQIYKTPPIKDFGGFNFSQILPDPSKPSKRSFIEDLLFNKVTLADAGFIKQYGDCLGDIAARDLICAQKFNGLTVLPPLLTDEMIAQYTSALLAGTITSGWTFGAGAALQIPFAMQMAYRFNGIGVTQNVLYENQKLIANQFNSAIGKIQDSLFSTASALGKLQDVVNQNAQALNTLVKQLSSNFGAISSVLNDILSRLDKVEAEVQIDRLITGRLQSLQTYVTQQLIRAAEIRASANLAATKMSECVLGQSKRVDFCGKGYHLMSFPQSAPHGVVFLHVTYVPAQEKNFTCAPAICHDGKAHFPREGVFVSNGTHWFVTQRNFYEPQIITTDNTFVSGNCDVVIGIVNNTVYDPLQPELDSFKEELDKYFKNHTSPDVDLGDISGINASVVNIQKEIDRLNEVAKNLNESLIDLQELGKYEQYIKWPWYIWLGFIAGLIAIVMVTIMLCCMTSCCSCLKGCCSCGSCCKFDEDDSEPVLKGVKLHYT

SEQ ID NO: 641 - protein, 1273 aa, Artificial Sequence
  SARS-CoV-2/Finland/FIN-313/2020__EPI_ISL_414641 spike protein (1-1273)(I712C_T1077C)
MFVFLVLLPLVSSQCVNLTTRTQLPPAYTNSFTRGVYYPDKVFRSSVLHSTQDLFLPFFSNVTWFHAIHVSGTNGTKRFDNPVLPFNDGVYFASTEKSNIIRGWIFGTTLDSKTQSLLIVNNATNVVIKVCEFQFCNDPFLGVYYHKNNKSWMESEFRVYSSANNCTFEYVSQPFLMDLEGKQGNFKNLREFVFKNIDGYFKIYSKHTPINLVRDLPQGFSALEPLVDLPIGINITRFKTLLALHRSYLTPGDSSSGWTAGAAAYYVGYLQPRTFLLKYNENGTITDAVDCALDPLSETKCTLKSFTVEKGIYQTSNFRVQPTESIVRFPNITNLCPFGEVFNATRFASVYAWNRKRISNCVADYSVLYNSASFSTFKCYGVSPTKLNDLCFTNVYADSFVIRGDEVRQIAPGQTGKIADYNYKLPDDFTGCVIAWNSNNLDSKVGGNYNYLYRLFRKSNLKPFERDISTEIYQAGSTPCNGVEGFNCYFPLQSYGFQPTNGVGYQPYRVVVLSFELLHAPATVCGPKKSTNLVKNKCVNFNFNGLTGTGVLTESNKKFLPFQQFGRDIADTTDAVRDPQTLEILDITPCSFGGVSVITPGTNTSNQVAVLYQGVNCTEVPVAIHADQLTPTWRVYSTGSNVFQTRAGCLIGAEHVNNSYECDIPIGAGICASYQTQTNSPRRARSVASQSIIAYTMSLGAENSVAYSNNSCAIPTNFTISVTTEILPVSMTKTSVDCTMYICGDSTECSNLLLQYGSFCTQLNRALTGIAVEQDKNTQEVFAQVKQIYKTPPIKDFGGFNFSQILPDPSKPSKRSFIEDLLFNKVTLADAGFIKQYGDCLGDIAARDLICAQKFNGLTVLPPLLTDEMIAQYTSALLAGTITSGWTFGAGAALQIPFAMQMAYRFNGIGVTQNVLYENQKLIANQFNSAIGKIQDSLSSTASALGKLQDVVNQNAQALNTLVKQLSSNFGAISSVLNDILSRLDKVEAEVQIDRLITGRLQSLQTYVTQQLIRAAEIRASANLAATKMSECVLGQSKRVDFCGKGYHLMSFPQSAPHGVVFLHVTYVPAQEKNFTCAPAICHDGKAHFPREGVFVSNGTHWFVTQRNFYEPQIITTDNTFVSGNCDVVIGIVNNTVYDPLQPELDSFKEELDKYFKNHTSPDVDLGDISGINASVVNIQKEIDRLNEVAKNLNESLIDLQELGKYEQYIKWPWYIWLGFIAGLIAIVMVTIMLCCMTSCCSCLKGCCSCGSCCKFDEDDSEPVLKGVKLHYT

SEQ ID NO: 642 - protein, 1273 aa, Artificial Sequence
  SARS-CoV-2/Netherlands/ZuidHolland_2/2020__EPI_ISL_414556 spike protein (1-1273)(I712C_T1077C)
MFVFLVLLPLVSSQCVNLTTRTQLPPAYTNSFTRGVYYPDKVFRSSVLHSTQDLFLPFFSNVTWFHAIHVSGTNGTKRFDNPVLPFNDGVYFASTEKSNIIRGWIFGTTLDSKTQSLLIVNNATNVVIKVCEFQFCNDPFLGVYYHKNNKSWMESEFRVYSSANNCTFEYVSQPFLMDLEGKQGNFKNLREFVFKNIDGYFKIYSKHTPINLVRDLPQGFSALEPLVDLPIGINITRFQTLLALHRSYLTPGDSSSGWTAGAAAYYVGYLQPRTFLLKYNENGTITDAVDCALDPLSETKCTLKSFTVEKGIYQTSNFRVQPTESIVRFPNITNLCPFGEVFNATRFASVYAWNRKRISNCVADYSVLYNSASFSTFKCYGVSPTKLNDLCFTNVYADSFVIRGDEVRQIAPGQTGKIADYNYKLPDDFTGCVIAWNSNNLDSKVGGNYNYLYRLFRKSNLKPFERDISTEIYQAGSTPCNGVEGFNCYFPLQSYGFQPTNGVGYQPYRVVVLSFELLHAPATVCGPKKSTNLVKNKCVNFNFNGLTGTGVLTESNKKFLPFQQFGRDIADTTDAVRDPQTLEILDITPCSFGGVSVITPGTNTSNQVAVLYQGVNCTEVPVAIHADQLTPTWRVYSTGSNVFQTRAGCLIGAEHVNNSYECDIPIGAGICASYQTQTNSPRRARSVASQSIIAYTMSLGAENSVAYSNNSCAIPTNFTISVTTEILPVSMTKTSVDCTMYICGDSTECSNLLLQYGSFCTQLNRALTGIALEQDKNTQEVFAQVKQIYKTPPIKDFGGFNFSQILPDPSKPSKRSFIEDLLFNKVTLADAGFIKQYGDCLGDIAARDLICAQKFNGLTVLPPLLTDEMIAQYTSALLAGTITSGWTFGAGAALQIPFAMQMAYRFNGIGVTQNVLYENQKLIANQFNSAIGKIQDSLSSTASALGKLQDVVNQNAQALNTLVKQLSSNFGAISSVLNDILSRLDKVEAEVQIDRLITGRLQSLQTYVTQQLIRAAEIRASANLAATKMSECVLGQSKRVDFCGKGYHLMSFPQSAPHGVVFLHVTYVPAQEKNFTCAPAICHDGKAHFPREGVFVSNGTHWFVTQRNFYEPQIITTDNTFVSGNCDVVIGIVNNTVYDPLQPELDSFKEELDKYFKNHTSPDVDLGDISGINASVVNIQKEIDRLNEVAKNLNESLIDLQELGKYEQYIKWPWYIWLGFIAGLIAIVMVTIMLCCMTSCCSCLKGCCSCGSCCKFDEDDSEPVLKGVKLHYT

SEQ ID NO: 643 - protein, 1273 aa, Artificial Sequence
  SARS-CoV-2/USA/WA-UW31/2020__EPI_ISL_414618 spike protein (1-1273)(I712C_T1077C)
MFVFLVLLPLVSSQCVNLTTRTQLPPAYTNSFTRGVYYPDKVFRSSVLHSTQDLFLPFFSNVTWFHAIHVSGTNGTKRFDNPVLPFNDGVYFASTEKSNIIRGWIFGTTLDSKTQSLLIVNNATNVVIKVCEFQFCNDPFLGVYYHKNNKSWMESEFRVYSSANNCTFEYVSQPFLMDLEGKQGNFKNLREFVFKNIDGYFKIYSKHTPINLVRDLPQGFSALEPLVDLPIGINITRFQTLLALHRSYLTPGDSSSGWTAGAAAYYVGYLQPRTFLLKYNENGTITDAVDCALDPLSETKCTLKSFTVEKGIYQTSNFRVQPTESIVRFPNITNLCPFGEVFNATRFASVYAWNRKRISNCVADYSVLYNSASFSTFKCYGVSPTKLNDLCFTNVYADSFVIRGDEVRQIAPGQTGKIADYNYKLPDDFTGCVIAWNSNNLDSKVGGNYNYLYRLFRKSNLKPFERDISTEIYQAGSTPCNGAEGFNCYFPLQSYGFQPTNGVGYQPYRVVVLSFELLHAPATVCGPKKSTNLVKNKCVNFNFNGLTGTGVLTESNKKFLPFQQFGRDIADTTDAVRDPQTLEILDITPCSFGGVSVITPGTNTSNQVAVLYQDVNCTEVPVAIHADQLTPTWRVYSTGSNVFQTRAGCLIGAEHVNNSYECDIPIGAGICASYQTQTNSPRRARSVASQSIIAYTMSLGAENSVAYSNNSCAIPTNFTISVTTEILPVSMTKTSVDCTMYICGDSTECSNLLLQYGSFCTQLNRALTGIAVEQDKNTQEVFAQVKQIYKTPPIKDFGGFNFSQILPDPSKPSKRSFIEDLLFNKVTLADAGFIKQYGDCLGDIAARDLICAQKFNGLTVLPPLLTDEMIAQYTSALLAGTITSGWTFGAGAALQIPFAMQMAYRFNGIGVTQNVLYENQKLIANQFNSAIGKIQDSLSSTASALGKLQDVVNQNAQALNTLVKQLSSNFGAISSVLNDILSRLDKVEAEVQIDRLITGRLQSLQTYVTQQLIRAAEIRASANLAATKMSECVLGQSKRVDFCGKGYHLMSFPQSAPHGVVFLHVTYVPAQEKNFTCAPAICHDGKAHFPREGVFVSNGTHWFVTQRNFYEPQIITTDNTFVSGNCDVVIGIVNNTVYDPLQPELDSFKEELDKYFKNHTSPDVDLGDISGINASVVNIQKEIDRLNEVAKNLNESLIDLQELGKYEQYIKWPWYIWLGFIAGLIAIVMVTIMLCCMTSCCSCLKGCCSCGSCCKFDEDDSEPVLKGVKLHYT

SEQ ID NO: 644 - protein, 1273 aa, Artificial Sequence
  SARS-CoV-2/South Korea/SNU01/2020__EPI_ISL_411929 spike protein (1-1273)(I712C_T1077C)
MFVFLVLLPLVSSQCVNLTTRTQLPPAYTNSFTRGVYYPDKVFRSSVLHSTQDLFLPFFSNVTWFHAIHVSGTNGTKRFDNPVLPFNDGVYFASTEKSNIIRGWIFGTTLDSKTQSLLIVNNATNVVIKVCEFQFCNDPFLGVYYHKNNKSWMESEFRVYSSANNCTFEYVSQPFLMDLEGKQGNFKNLREFVFKNIDGYFKIYSKHTPINLVRDLPQGFWALEPLVDLPIGINITRFQTLLALHRSYLTPGDSSSGWTAGAAAYYVGYLQPRTFLLKYNENGTITDAVDCALDPLSETKCTLKSFTVEKGIYQTSNFRVQPTESIVRFPNITNLCPFGEVFNATRFASVYAWNRKRISNCVADYSVLYNSASFSTFKCYGVSPTKLNDLCFTNVYADSFVIRGDEVRQIAPGQTGKIADYNYKLPDDFTGCVIAWNSNNLDSKVGGNYNYLYRLFRKSNLKPFERDISTEIYQAGSTPCNGVEGFNCYFPLQSYGFQPTNGVGYQPYRVVVLSFELLHAPATVCGPKKSTNLVKNKCVNFNFNGLTGTGVLTESNKKFLPFQQFGRDIADTTDAVRDPQTLEILDITPCSFGGVSVITPGTNTSNQVAVLYQDVNCTEVPVAIHADQLTPTWRVYSTGSNVFQTRAGCLIGAEHVNNSYECDIPIGAGICASYQTQTNSPRRARSVASQSIIAYTMSLGAENSVAYSNNSCAIPTNFTISVTTEILPVSMTKTSVDCTMYICGDSTECSNLLLQYGSFCTQLNRALTGIAVEQDKNTQEVFAQVKQIYKTPPIKDFGGFNFSQILPDPSKPSKRSFIEDLLFNKVTLADAGFIKQYGDCLGDIAARDLICAQKFNGLTVLPPLLTDEMIAQYTSALLAGTITSGWTFGAGAALQIPFAMQMAYRFNGIGVTQNVLYENQKLIANQFNSAIGKIQDSLSSTASALGKLQDVVNQNAQALNTLVKQLSSNFGAISSVLNDILSRLDKVEAEVQIDRLITGRLQSLQTYVTQQLIRAAEIRASANLAATKMSECVLGQSKRVDFCGKGYHLMSFPQSAPHGVVFLHVTYVPAQEKNFTCAPAICHDGKAHFPREGVFVSNGTHWFVTQRNFYEPQIITTDNTFVSGNCDVVIGIVNNTVYDPLQPELDSFKEELDKYFKNHTSPDVDLGDISGINASVVNIQKEIDRLNEVAKNLNESLIDLQELGKYEQYIKWPWYIWLGFIAGLIAIVMVTIMLCCMTSCCSCLKGCCSCGSCCKFDEDDSEPVLKGVKLHYT

SEQ ID NO: 645 - protein, 1273 aa, Artificial Sequence
  SARS-CoV-2/China/WF0004/2020__EPI_ISL_413694 spike protein (1-1273)(I712C_T1077C)
MFVFLVLLPLVSSQCVNLTTRTQLPPAYTNSFTRGVYYPDKVFRSSVLHSTQDLFLPFFSNVTWFHAIHVSGTNGTKRFDNPVLPFNDGVYFASTEKSNIIRGWIFGTTLDSKTQSLLIVNNATNVVIKVCEFQFCNDPFLGVYYHKNNKSWTESEFRVYSSANNCTFEYVSQPFLMDLEGKQGNFKNLREFVFKNIDGYFKIYSKHTPINLVRDLPQGFSALEPLVDLPIGINITRFQTLLALHRSYLTPGDSSSGWTAGAAAYYVGYLQPRTFLLKYNENGTITDAVDCALDPLSETKCTLKSFTVEKGIYQTSNFRVQPTESIVRFPNITNLCPFGEVFNATRFASVYAWNRKRISNCVADYSVLYNSASFSTFKCYGVSPTKLNDLCFTNVYADSFVIRGDEVRQIAPGQTGKIADYNYKLPDDFTGCVIAWNSNNLDSKVGGNYNYLYRLFRKSNLKPFERDISTEIYQAGSTPCNGVEGFNCYFPLQSYGFQPTNGVGYQPYRVVVLSFELLHAPATVCGPKKSTNLVKNKCVNFNFNGLTGTGVLTESNKKFLPFQQFGRDIADTTDAVRDPQTLEILDITPCSFGGVSVITPGTNTSNQVAVLYQDVNCTEVPVAIHADQLTPTWRVYSTGSNVFQTRAGCLIGAEHVNNSYECDIPIGAGICASYQTQTNSPRRARSVASQSIIAYTMSLGAENSVAYSNNSCAIPTNFTISVTTEILPVSMTKTSVDCTMYICGDSTECSNLLLQYGSFCTQLNRALTGIAVEQDKNTQEVFAQVKQIYKTPPIKDFGGFNFSQILPDPSKPSKRSFIEDLLFNKVTLADAGFIKQYGDCLGDIAARDLICAQKFNGLTVLPPLLTDEMIAQYTSALLAGTITSGWTFGAGAALQIPFAMQMAYRFNGIGVTQNVLYENQKLIANQFNSAIGKIQDSLSSTASALGKLQDVVNQNAQALNTLVKQLSSNFGAISSVLNDILSRLDKVEAEVQIDRLITGRLQSLQTYVTQQLIRAAEIRASANLAATKMSECVLGQSKRFDFCGKGYHLMSFPQSAPHGVVFLHVTYVPAQEKNFTCAPAICHDGKAHFPREGVFVSNGTHWFVTQRNFYEPQIITTDNTFVSGNCDVVIGIVNNTVYDPLQPELDSFKEELDKYFKNHTSPDVDLGDISGINASVVNIQKEIDRLNEVAKNLNESLIDLQELGKYEQYIKWPWYIWLGFIAGLIAIVMVTIMLCCMTSCCSCLKGCCSCGSCCKFDEDDSEPVLKGVKLHYT

SEQ ID NO: 646 - protein, 1273 aa, Artificial Sequence
  SARS-CoV-2/China/WF0028/2020__EPI_ISL_413791 spike protein (1-1273)(I712C_T1077C)
MFVFLVLLPLVSSQCVNLTTRTQLPPAYTNSFTRGVYYPDKVFRSSVLHSTQDLFLPFFSNVTWFHAIHVSGTNGTKRFDNPVLPFNDGVYFASTEKSNIIRGWIFGTTLDSKTQSLLIVNNATNVVIKVCEFQFCNDPFLGVYYHKNNKSWMESEFRVYSSANNCTFEYVSQPFLMDLEGKQGNFKNLREFVFKNIDGYFKIYSKHTPINLVRDLPQGFSALEPLVDLPIGINITRFQTLLALHRSYLTPGDSSSGWTAGAAAYYVGYLQPRTFLLKYNENGTITDAVDCALDPLSETKCTLKSFTVEKGIYQTSNFRVQPTESIVRFPNITNLCPFGEVFNATRFASVYAWNRKRISNCVADYSVLYNSASFSTFKCYGVSPTKLNDLCFTNVYADSFVIRGDEVRQIAPGQTGKIADYNYKLPDDFTGCVIAWNSNNLDSKVGGNYNYLYRLFRKSNLKPFERDISTEIYQAGSTPCNGVEGFNCYFPLQSYGFQPTNGVGYQPYRVVVLSFELLHAPATVCGPKKSTNLVKNKCVNFNFNGLTGTGVLTESNKKFLPFQQFGRDIADTTDAVRDPQTLEILDITPCSFGGVSVITPGTNTSNQVAVLYQDVNCTEVPVAIHADQLTPTWRVYSTGSNVFQTRAGCLIGAEHVNNSYECDIPIGAGICASYQTQTNSPRRARSVASQSIIAYTMSLGAENSVAYSNNSCAIPTNFTISVTTEILPVSMTKTSVDCTMYICGDSTECSNLLLQYGSFCTQLNRALTGIAVEQDKNTQEVFAQVKQIYKTPPIKDFGGFNFSQILPDPSKPSKRSFIEDLLFNKVTLADAGFIKQYGDCLGDIAARDLICAQKFNGLTVLPPLLTDEMIAQYTSALLAGTITSGWTFGAGAALQIPFAMQMAYRFNGIGVTQNVLYENQKLIANQFNSAIGKIQDSLSSTASALGKLQDVVNQNAQALNTLVKQLSSNFGAISSVLNDILSRLDKVEAEVQIDRLITGRLQSLQTYVTQQLIRAAEIRASANLAATKMSECVLGQSKRVDFCGKGYHLMSFPQSAPHGVVFLHVTYVPAQEKNFTCAPAICHDGKAHFPREGVFVSNGTHWFVTQRNFYEPQIITTDNTFVSGNCDVVIGIVNNTVYDPLQPELESFKEELDKYFKNHTSPDVDLGDISGINASVVNIQKEIDRLNEVAKNLNESLIDLQELGKYEQYIKWPWYIWLGFIAGLIAIVMVTIMLCCMTSCCSCLKGCCSCGSCCKFDEDDSEPVLKGVKLHYT

SEQ ID NO: 647 - protein, 1273 aa, Artificial Sequence
  SARS-CoV-2/2019-nCoV/USA-CruiseA-18/2020__MT159716.1 spike protein (1-1273)(I712C_T1077C)
MFVFLVLLPLVSSQCVNLTTRTQLPPAYTNSFTRGVYYPDKVFRSSVLHSTQDLFLPFFSNVTWFHAIHVSGTNGTKRFDNPVLPFNDGVYFASTEKSNIIRGWIFGTTLDSKTQSLLIVNNATNVVIKVCEFQFCNDPFLGVYYHKNNKSWMESELRVYSSANNCTFEYVSQPFLMDLEGKQGNFKNLREFVFKNIDGYFKIYSKHTPINLVRDLPQGFSALEPLVDLPIGINITRFQTLLALHRSYLTPGDSSSGWTAGAAAYYVGYLQPRTFLLKYNENGTITDAVDCALDPLSETKCTLKSFTVEKGIYQTSNFRVQPTESIVRFPNITNLCPFGEVFNATRFASVYAWNRKRISNCVADYSVLYNSASFSTFKCYGVSPTKLNDLCFTNVYADSFVIRGDEVRQIAPGQTGKIADYNYKLPDDFTGCVIAWNSNNLDSKVGGNYNYLYRLFRKSNLKPFERDISTEIYQAGSTPCNGVEGFNCYFPLQSYGFQPTNGVGYQPYRVVVLSFELLHAPATVCGPKKSTNLVKNKCVNFNFNGLTGTGVLTESNKKFLPFQQFGRDIADTTDAVRDPQTLEILDITPCSFGGVSVITPGTNTSNQVAVLYQDVNCTEVPVAIHADQLTPTWRVYSTGSNVFQTRAGCLIGAEHVNNSYECDIPIGAGICASYQTQTNSPRRARSVASQSIIAYTMSLGAENSVAYSNNSCAIPTNFTISVTTEILPVSMTKTSVDCTMYICGDSTECSNLLLQYGSFCTQLNRALTGIAVEQDKNTQEVFAQVKQIYKTPPIKDFGGFNFSQILPDPSKPSKRSFIEDLLFNKVTLADAGFIKQYGDCLGDIAARDLICAQKFNGLTVLPPLLTDEMIAQYTSALLAGTITSGWTFGAGAALQIPFAMQMAYRFNGIGVTQNVLYENQKLIANQFNSAIGKIQDSLSSTASALGKLQDVVNQNAQALNTLVKQLSSNFGAISSVLNDILSRLDKVEAEVQIDRLITGRLQSLQTYVTQQLIRAAEIRASANLAATKMSECVLGQSKRVDFCGKGYHLMSFPQSAPHGVVFLHVTYVPAQEKNFTCAPAICHDGKAHFPREGVFVSNGTHWFVTQRNFYEPQIITTDNTFVSGNCDVVIGIVNNTVYDPLQPELDSFKEELDKYFKNHTSPDVDLGDISGINASVVNIQKEIDRLNEVAKNLNESLIDLQELGKYEQYIKWPWYIWLGFIAGLIAIVMVTIMLCCMTSCCSCLKGCCSCGSCCKFDEDDSEPVLKGVKLHYT

SEQ ID NO: 648 - protein, 1273 aa, Artificial Sequence
  SARS-CoV-2/SARS-CoV-2/Yunnan-01/human/2020/CHN__MT049951.1 spike protein (1-1273)(I712C_T1077C)
MFVFLVLLPLVSSQCVNLTTRTQLPPANTNSFTRGVYYPDKVFRSSVLHSTQDLFLPFFSNVTWFHAIHVSGTNGTKRFDNPVLPFNDGVYFASTEKSNIIRGWIFGTTLDSKTQSLLIVNNATNVVIKVCEFQFCNDPFLGVYYHKNNKSWMESEFRVYSSANNCTFEYVSQPFLMDLEGKQGNFKNLREFVFKNIDGYFKIYSKHTPINLVRDLPQGFSALEPLVDLPIGINITRFQTLLALHRSYLTPGDSSSGWTAGAAAYYVGYLQPRTFLLKYNENGTITDAVDCALDPLSETKCTLKSFTVEKGIYQTSNFRVQPTESIVRFPNITNLCPFGEVFNATRFASVYAWNRKRISNCVADYSVLYNSASFSTFKCYGVSPTKLNDLCFTNVYADSFVIRGDEVRQIAPGQTGKIADYNYKLPDDFTGCVIAWNSNNLDSKVGGNYNYLYRLFRKSNLKPFERDISTEIYQAGSTPCNGVEGFNCYFPLQSYGFQPTNGVGYQPYRVVVLSFELLHAPATVCGPKKSTNLVKNKCVNFNFNGLTGTGVLTESNKKFLPFQQFGRDIADTTDAVRDPQTLEILDITPCSFGGVSVITPGTNTSNQVAVLYQDVNCTEVPVAIHADQLTPTWRVYSTGSNVFQTRAGCLIGAEHVNNSYECDIPIGAGICASYQTQTNSPRRARSVASQSIIAYTMSLGAENSVAYSNNSCAIPTNFTISVTTEILPVSMTKTSVDCTMYICGDSTECSNLLLQYGSFCTQLNRALTGIAVEQDKNTQEVFAQVKQIYKTPPIKDFGGFNFSQILPDPSKPSKRSFIEDLLFNKVTLADAGFIKQYGDCLGDIAARDLICAQKFNGLTVLPPLLTDEMIAQYTSALLAGTITSGWTFGAGAALQIPFAMQMAYRFNGIGVTQNVLYENQKLIANQFNSAIGKIQDSLSSTASALGKLQDVVNQNAQALNTLVKQLSSNFGAISSVLNDILSRLDKVEAEVQIDRLITGRLQSLQTYVTQQLIRAAEIRASANLAATKMSECVLGQSKRVDFCGKGYHLMSFPQSAPHGVVFLHVTYVPAQEKNFTCAPAICHDGKAHFPREGVFVSNGTHWFVTQRNFYEPQIITTDNTFVSGNCDVVIGIVNNTVYDPLQPELDSFKEELDKYFKNHTSPDVDLGDISGINASVVNIQKEIDRLNEVAKNLNESLIDLQELGKYEQYIKWPWYIWLGFIAGLIAIVMVTIMLCCMTSCCSCLKGCCSCGSCCKFDEDDSEPVLKGVKLHYT

SEQ ID NO: 649 - protein, 1273 aa, Artificial Sequence
  SARS-CoV-2/USA/WA-UW292/2020__EPI_ISL_418077 spike protein (1-1273)(I712C_T1077C)
MFVFLVLLPLVSSQCVNLTTRTQLPPAYTNSFTRGVYYPDKVFRSSVLHSTQDLFLPFFSNVTWFHAIHVSGTNGTKRFDNPVLPFNDGVYFASTEKSNIIRGWIFGTTLDSKTQSLLIVNNATNVVIKVCEFQFCNDPFLGVYYHKNNKSWMESEFRVYSSANNCTFEYVSQPFLMDLEGKQGNFKNLREFVFKNIDGYFKIYSKHTPINLVRDLPQGFSALEPLVDLPIGINITRFQTLLALHRSYLTPGDSSSGWTAGAAAYYVGYLQPRTFLLKYNENGTITDAVDCALDPLSETKCTLKSFTVEKGIYQTSNFRVQPTESIVRFPNITNLCPFGEVFNATRFASVYAWNRKRISNCVADYSVLYNSASFSTFKCYGVSPTKLNDLCFTNVYADSFVIRGDEVRQIAPGQTGKIADYNYKLPDDFTGCVIAWNSNNLDSKVGGNYNYLYRLFRKSNLKPFERDISTEIYQASSTPCNGVEGFNCYFPLQSYGFQPTNGVGYQPYRVVVLSFELLHAPATVCGPKKSTNLVKNKCVNFNFNGLTGTGVLTESNKKFLPFQQFGRDIADTTDAVRDPQTLEILDITPCSFGGVSVITPGTNTSNQVAVLYQDVNCTEVPVAIHADQLTPTWRVYSTGSNVFQTRAGCLIGAEHVNNSYECDIPIGAGICASYQTQTNSPRRARSVASQSIIAYTMSLGAENSVAYSNNSCAIPTNFTISVTTEILPVSMTKTSVDCTMYICGDSTECSNLLLQYGSFCTQLNRALTGIAVEQDKNTQEVFAQVKQIYKTPPIKDFGGFNFSQILPDPSKPSKRSFIEDLLFNKVTLADAGFIKQYGDCLGDIAARDLICAQKFNGLTVLPPLLTDEMIAQYTSALLAGTITSGWTFGAGAALQIPFAMQMAYRFNGIGVTQNVLYENQKLIANQFNSAIGKIQDSLSSTASALGKLQDVVNQNAQALNTLVKQLSSNFGAISSVLNDILSRLDKVEAEVQIDRLITGRLQSLQTYVTQQLIRAAEIRASANLAATKMSECVLGQSKRVDFCGKGYHLMSFPQSAPHGVVFLHVTYVPAQEKNFTCAPAICHDGKAHFPREGVFVSNGTHWFVTQRNFYEPQIITTDNTFVSGNCDVVIGIVNNTVYDPLQPELDSFKEELDKYFKNHTSPDVDLGDISGINASVVNIQKEIDRLNEVAKNLNESLIDLQELGKYEQYIKWPWYIWLGFIAGLIAIVMVTIMLCCMTSCCSCLKGCCSCGSCCKFDEDDSEPVLKGVKLHYT

SEQ ID NO: 650 - protein, 1273 aa, Artificial Sequence
  SARS-CoV-2/Iceland/192/2020__EPI_ISL_417819 spike protein (1-1273)(I712C_T1077C)
MFVFFVLLPLVSSQCVNLTTRTQLPPAYTNSFTRGVYYPDKVFRSSVLHSTQDLFLPFFSNVTWFHAIHVSGTNGTKRFDNPVLPFNDGVYFASTEKSNIIRGWIFGTTLDSKTQSLLIVNNATNVVIKVCEFQFCNDPFLGVYYHKNNKSWMESEFRVYSSANNCTFEYVSQPFLMDLEGKQGNFKNLREFVFKNIDGYFKIYSKHTPINLVRDLPQGFSALEPLVDLPIGINITRFQTLLALHRSYLTPGDSSSGWTAGAAAYYVGYLQPRTFLLKYNENGTITDAVDCALDPLSETKCTLKSFTVEKGIYQTSNFRVQPTESIVRFPNITNLCPFGEVFNATRFASVYAWNRKRISNCVADYSVLYNSASFSTFKCYGVSPTKLNDLCFTNVYADSFVIRGDEVRQIAPGQTGKIADYNYKLPDDFTGCVIAWNSNNLDSKVGGNYNYLYRLFRKSNLKPFERDISTEIYQAGSTPCNGVEGFNCYFPLQSYGFQPTNGVGYQPYRVVVLSFELLHAPATVCGPKKSTNLVKNKCVNFNFNGLTGTGVLTESNKKFLPFQQFGRDIADTTDAVRDPQTLEILDITPCSFGGVSVITPGTNTSNQVAVLYQGVNCTEVPVAIHADQLTPTWRVYSTGSNVFQTRAGCLIGAEHVNNSYECDIPIGAGICASYQTQTNSPRRARSVASQSIIAYTMSLGAENSVAYSNNSCAIPTNFTISVTTEILPVSMTKTSVDCTMYICGDSTECSNLLLQYGSFCTQLNRALTGIAVEQDKNTQEVFAQVKQIYKTPPIKDFGGFNFSQILPDPSKPSKRSFIEDLLFNKVTLADAGFIKQYGDCLGDIAARDLICAQKFNGLTVLPPLLTDEMIAQYTSALLAGTITSGWTFGAGAALQIPFAMQMAYRFNGIGVTQNVLYENQKLIANQFNSAIGKIQDSLSSTASALGKLQDVVNQNAQALNTLVKQLSSNFGAISSVLNDILSRLDKVEAEVQIDRLITGRLQSLQTYVTQQLIRAAEIRASANLAATKMSECVLGQSKRVDFCGKGYHLMSFPQSAPHGVVFLHVTYVPAQEKNFTCAPAICHDGKAHFPREGVFVSNGTHWFVTQRNFYEPQIITTDNTFVSGNCDVVIGIVNNTVYDPLQPELDSFKEELDKYFKNHTSPDVDLGDISGINASVVNIQKEIDRLNEVAKNLNESLIDLQELGKYEQYIKWPWYIWLGFIAGLIAIVMVTIMLCCMTSCCSCLKGCCSCGSCCKFDEDDSEPVLKGVKLHYT

SEQ ID NO: 651 - protein, 1273 aa, Artificial Sequence
  SARS-CoV-2/Belgium/ULG-6939/2020__EPI_ISL_417020 spike protein (1-1273)(I712C_T1077C)
MFVFLVLLPLVSSQCVNLTTRTQLPPAYTNSFTRGVYYPDKVFRSSVLHSTQDLFLPFFSNVTWFHAIHVSGTNGTKRFDNPVLPFNDGVYFASTEKSNIIRGWIFGTTLDSKTQSLLIVNNATNVVIKVCEFQFCNDPFLGVYYHKNNKSWMESEFRVYSSANNCTFEYVSQPFLMDLEGKQGNFKNLREFVFKNIDGYFKIYSKHTPINLVRDLPQGFSALEPLVDLPIGINITRFQTLLALHRSYLTPGDSSSGWTAGAAAYYVGYLQPRTFLLKYNENGTITDAVDCALDPLSETKCTLKSFTVEKGIYQTSNFRVQPTESIVRFPNITNLCPFGEVFNATRFASVYAWNRKRISNCVADYSVLYNSASFSTFKCYGVSPTKLNDLCFTNVYADSFVIRGDEVRQIAPGQTGKIADYNYKLPDDFTGCVIAWNSNNLDSKVGGNYNYLYRLFRKSNLKPFERDISTEIYQAGSTPCNGVEGFNCYFPLQSYGFQPTNGVGYQPYRVVVLSFELLHAPATVCGPKKSTNLVKNKCVNFNFNGLTGTGVLTESNKKFLPFQQFGRDIADTTDAVRDPQTLEILDITPCSFGGVSVITPGTNTSNQVAVLYQGVNCTEVPVAIHADQLTPTWRVYSTGSNVFQTRAGCLIGAEHVNNSYECDIPIGAGICASYQTQTNSPRRARSVASQSIIAYTMSLGAENSVVYSNNSCAIPTNFTISVTTEILPVSMTKTSVDCTMYICGDSTECSNLLLQYGSFCTQLNRALTGIAVEQDKNTQEVFAQVKQIYKTPPIKDFGGFNFSQILPDPSKPSKRSFIEDLLFNKVTLADAGFIKQYGDCLGDIAARDLICAQKFNGLTVLPPLLTDEMIAQYTSALLAGTITSGWTFGAGAALQIPFAMQMAYRFNGIGVTQNVLYENQKLIANQFNSAIGKIQDSLSSTASALGKLQDVVNQNAQALNTLVKQLSSNFGAISSVLNDILSRLDKVEAEVQIDRLITGRLQSLQTYVTQQLIRAAEIRASANLAATKMSECVLGQSKRVDFCGKGYHLMSFPQSAPHGVVFLHVTYVPAQEKNFTCAPAICHDGKAHFPREGVFVSNGTHWFVTQRNFYEPQIITTDNTFVSGNCDVVIGIVNNTVYDPLQPELDSFKEELDKYFKNHTSPDVDLGDISGINASVVNIQKEIDRLNEVAKNLNESLIDLQELGKYEQYIKWPWYIWLGFIAGLIAIVMVTIMLCCMTSCCSCLKGCCSCGSCCKFDEDDSEPVLKGVKLHYT

SEQ ID NO: 652 - protein, 1273 aa, Artificial Sequence
  SARS-CoV-2/France/HF2496/2020__EPI_ISL_418231 spike protein (1-1273)(I712C_T1077C)
MFVFLVLLPLVSSQCVNLTTRTQLPPAYTNSFTRGVYYPDKVFRSSVLHSTQDLFLPFFSNVTWFHAIHVSGTNGTKRFDNPVLPFNDGVYFASTEKSNIIRGWIFGTTLDSKTQSLLIVNNATNVVIKVCEFQFCNDPFLGVYYHKNNKSWMESEFRVYSSANNCTFEYVSQPFLMDLEGKQGNFKNLREFVFKNIDGYFKIYSKHTPINLVRDLPQGFSALEPLVDLPIGINITRFQTLLALHRSYLTPGDSSSGWTAGAAAYYVGYLQPRTFLLKYNENGTITDAVDCALDPLSETKCTLKSFTVEKGIYQTSNFRVQPTESIVRFPNITNLCPFGEVFNATRFASVYAWNRKRISNCVADYSVLYNSASFSTFKCYGVSPTKLNDLCFTNVYADSFVIRGDEVRQIAPGQTGKIADYNYKLPDDFTGCVIAWNSNNLDSKVGGNYNYLYRLFRKSNLKPFERDISTEIYQAGSTPCNGVEGFNCYFPLQSYGFQPTNGVGYQPYRVVVLSFELLHAPATVCGPKKSTNLVKNKCVNFNFNGLTGTGVLTESNKKFLPFQQFGRDIADTTDAVRDPQTLEILDITPCSFGGVSVITPGTNTSNQVAVLYQGVNCTEVPVAIHADQLTPTWRVYSTGSNVFQTRAGCLIGAEHVNNSYECDIPIGAGICASYQTQTNSPRRARSVASQSIIAYTMSLGAENSVAYSNNSCAIPTNFTISVTTEILPVSMTKTSVDCTMYICGDSTECSNLLLQYGSFCTQLNRALTGIAVEQDKNTQEVFAQVKQIYKTPPIKDFGGFNFSQILPDPSKPSKRSFIEDLLFNKVTLADAGFIKQYGDCLGDIVARDLICAQKFNGLTVLPPLLTDEMIAQYTSALLAGTITSGWTFGAGAALQIPFAMQMAYRFNGIGVTQNVLYENQKLIANQFNSAIGKIQDSLSSTASALGKLQDVVNQNAQALNTLVKQLSSNFGAISSVLNDILSRLDKVEAEVQIDRLITGRLQSLQTYVTQQLIRAAEIRASANLAATKMSECVLGQSKRVDFCGKGYHLMSFPQSAPHGVVFLHVTYVPAQEKNFTCAPAICHDGKAHFPREGVFVSNGTHWFVTQRNFYEPQIITTDNTFVSGNCDVVIGIVNNTVYDPLQPELDSFKEELDKYFKNHTSPDVDLGDISGINASVVNIQKEIDRLNEVAKNLNESLIDLQELGKYEQYIKWPWYIWLGFIAGLIAIVMVTIMLCCMTSCCSCLKGCCSCGSCCKFDEDDSEPVLKGVKLHYT

SEQ ID NO: 653 - protein, 1273 aa, Artificial Sequence
  SARS-CoV-2/USA/WA-UW291/2020__EPI_ISL_418076 spike protein (1-1273)(I712C_T1077C)
MFVFLVLLPLVSSQCVNLTTRTQLPPAYTNSFTRGVYYPDKVFRSSVLHSTQDLFLPFFSNVTWFHAIHVSGTNGTKRFDNPVLPFNDGVYFASTEKSNIIRGWIFGTTLDSKTQSLLIVNNATNVVIKVCEFQFCNDPFLGVYYHKNNKSWMESEFRVYSSANNCTFEYVSQPFLMDLEGKQGNFKNLREFVFKNIDGYFKIYSKHTPINLVRDLPQGFSALEPLVDLPIGINITRFQTLLALHRSYLTPGDSSSGWTAGAAAYYVGYLQPRTFLLKYNENGTITDAVDCALDPLSETKCTLKSFTVEKGIYQTSNFRVQPTESIVRFPNITNLCPFGEVFNATRFASVYAWNRKRISNCVADYSVLYNSASFSTFKCYGVSPTKLNDLCFTNVYADSFVIRGDEVRQIAPGQTGKIADYNYKLPDDFTGCVIAWNSNNLDSKVGGNYNYLYRLFRKSNLKPFERDISTEIYQAGSTPCNGVEGFNCYFPLQSYGFQPTNGVGYQPYRVVVLSFELLHAPATVCGPKKSTNLVKNKCVNFNFNGLTGTGVLTESNKKFLPFQQFGRDIADTTDAVRDPQTLEILDITPCSFGGVSVITPGTNTSNQVAVLYQGVNCTEVPVAIHADQLTPTWRVYSTGSNVFQTRAGCLIGAEHVNNSYECDIPIGAGICASYQTQTNSPRRARSVASQSIIAYTMSLGAENSVAYSNNSCAIPTNFTISVTTEILPVSMTKTSVDCTMYICGDSTECSNLLLQYGSFCTQLNRALTGIAVEQDKNTQEVFAQVKQIYKTPPIKDFGGFNFSQILPDPSKPSKRSFIEDLLFNKVTLADAGFIKQYGDCLGDIAARDLICAQKFNGLTVLPPLLTDEMIAQYTSALLAGTITSGWTFGAGAALQIPFAMQMAYRFNGIGVTQNVLYENQKLIANQFNSAIGKIQYSLSSTASALGKLQDVVNQNAQALNTLVKQLSSNFGAISSVLNDILSRLDKVEAEVQIDRLITGRLQSLQTYVTQQLIRAAEIRASANLAATKMSECVLGQSKRVDFCGKGYHLMSFPQSAPHGVVFLHVTYVPAQEKNFTCAPAICHDGKAHFPREGVFVSNGTHWFVTQRNFYEPQIITTDNTFVSGNCDVVIGIVNNTVYDPLQPELDSFKEELDKYFKNHTSPDVDLGDISGINASVVNIQKEIDRLNEVAKNLNESLIDLQELGKYEQYIKWPWYIWLGFIAGLIAIVMVTIMLCCMTSCCSCLKGCCSCGSCCKFDEDDSEPVLKGVKLHYT

SEQ ID NO: 654 - protein, 1273 aa, Artificial Sequence
  SARS-CoV-2/Portugal/PT0034/2020__EPI_ISL_418019 spike protein (1-1273)(I712C_T1077C)
MFVFLVLLPLVSSQCVNLTTRTQLPPAYTNSFTRGVYYPDKVFRSSVLHSTQDLFLPFFSNVTWFHAIHVSGTNGTKRFDNPVLPFNDGVYFASTEKSNIIRGWIFGTTLDSKTQSLLIVNNATNVVIKVCEFQFCNDPFLGVYYHKNNKSWMESEFRVYSSANNCTFEYVSQPFLMDLEGKQGNFKNLREFVFKNIDGYFKIYSKHTPINLVRDLPQGFSALEPLVDLPIGINITRFQTLLALHRSYLTPGDSSSGWTAGAAAYYVGYLQPRTFLLKYNENGTITDAVDCALDPLSETKCTLKSFTVEKGIYQTSNFRVQPTESIVRFPNITNLCPFGEVFNATRFASVYAWNRKRISNCVADYSVLYNSASFSTFKCYGVSPTKLNDLCFTNVYADSFVIRGDEVRQIAPGQTGKIADYNYKLPDDFTGCVIAWNSNNLDSKVGGNYNYLYRLFRKSNLKPFERDISTEIYQAGSTPCNGVEGFNCYFPLQSYGFQPTNGVGYQPYRVVVLSFELLHAPATVCGPKKSTNLVKNKCVNFNFNGLTGTGVLTESNKKFLPFQQFGRDIADTTDAVRDPQTLEILDITPCSFGGVSVITPGTNTSNQVAVLYQGVNCTEVPVAIHADQLTPTWRVYSTGSNVFQTRAGCLIGAEHVNNSYECDIPIGAGICASYQTQTNSPRRARSVASQSIIAYTMSLGAENSVAYSNNSCAIPTNFTISVTTEILPVSMTKTSVDCTMYICGDSTECSNLLLQYGSFCTQLNRALTGIAVEQDKNTQEVFAQVKQIYKTPPIKDFGGFNFSQILPDPSKPSKRSFIEDLLFNKVTLADAGFIKQYGDCLGDIAARDLICAQKFNGLTVLPPLLTDEMIAQYTSALLAGTITSGWTFGAGAALQIPFAMQMAYRFNGIGVTQNVLYENQKLIANQFNSAIGKIQDSLSSTASALGKLQDVVNQNAQALNTLVKQLSSNFGAISSVLNDILSRLDKVEAEVQIDRLITGRLQSLQTYVTQQLIRAAEIRASANLAATKMSECVLGQSKRVDFCGKGYHLMSFPQSAPHGVVFLHVTYVPAQEKNFTCAPAICHDGKAHFPREGVFVSNGTHWFVTQRNFYEPQIITTDNTFVSGNCDVVIGIVNNTVYDPLQPELDSFKEELDKYFKNHTSPDVDLGDISGINASVVNIQKEIDRLNEVAKNLNESLIDLQELGKYEQYIKWPWYIWLGFIAGLIAIVMVTIMLCCITSCCSCLKGCCSCGSCCKFDEDDSEPVLKGVKLHYT

SEQ ID NO: 655 - protein, 1273 aa, Artificial Sequence
  SARS-CoV-2/Iceland/202/2020__EPI_ISL_417750 spike protein (1-1273)(I712C_T1077C)
MFVFLVLLPLVSSQCVNLTTRTQLPPAYTNSFTRGVYYPDKVFRSSVLHSTQDLFLPFFSNVTWFHAIHVSGTNGTKRFDNPVLPFNDGVYFASTEKSNIIRGWIFGTTLDSKTQSLLIVNNATNVVIKVCEFQFCNDPFLGVYYHKNNKSWMESEFRVYSSANNCTFEYVSQPFLMDLEGKQGNFKNLREFVFKNIDGYFKIYSKHTPINLVRDLPQGFSALEPLVDLPIGINITRFQTLLALHRSYLTPGDSSSGWTAGAAAYYVGYLQPRTFLLKYNENGTITDAVDCALDPLSETKCTLKSFTVEKGIYQTSNFRVQPTESIVRFPNITNLCPFGEVFNATRFASVYAWNRKRISNCVADYSVLYNSASFSTFKCYGVSPTKLNDLCFTNVYADSFVIRGDEVRQIAPGQTGKIADYNYKLPDDFTGCVIAWNSNNLDSKVGGNYNYLYRLFRKSNLKPFERDISTEIYQAGSTPCNGVEGFNCYFPLQSYGFQPTNGVGYQPYRVVVLSFELLHAPATVCGPKKSTNLVKNKCVNFNFNGLTGTGVLTESNKKFLPFQQFGRDIADTTDAVRDPQTLEILDITPCSFGGVSVITPGTNTSNQVAVLYQDVNCTEVPVAIHADQLTPTWRVYSTGSNVFQTRAGCLIGAEHVNNSYECDIPIGAGICASYQTQTNSPRRARSVASQSIIAYTMSLGAENSVAYSNNSCAIPTNFTISVTTEILPVSMTKTSVDCTMYICGDSTECSNLLLQYGSFCTQLNRALTGIAVEQDKNTQEVFAQVKQIYKTPPIKDFGGFNFSQILPDPSKPSKRSFIEDLLFNKVTLADAGFIKQYGDCLGDIAARDLICAQKFNGLTVLPPLLTDEMIAQYTSALLAGTITSGWTFGAGAALQIPFAMQMAYRFNGIGVTQNVLYENQKLIANQFNSAIGKIQDSLSSTASALGKLQDVVNQNAQALNTLVKQLSSNFGAISSVLNDILSRLDKVEAEVQIDRLITGRLQSLQTYVTQQLIRAAEIRASANLAATKMSECVLGQSKRVDFCGKGYHLMSFPQSAPHGVVFLHVTYVPAQEKNFTCAPAICHDGKAHFPREGVFVSNGTHWFVTQRNFYEPQIITTDNTFVSGNCDVVIGIVNNTVYDPLQPELDSFKEELDKYFKNHTSPDVDLGDIPGINASVVNIQKEIDRLNEVAKNLNESLIDLQELGKYEQYIKWPWYIWLGFIAGLIAIVMVTIMLCCMTSCCSCLKGCCSCGSCCKFDEDDSEPVLKGVKLHYT

SEQ ID NO: 656 - protein, 1273 aa, Artificial Sequence
  SARS-CoV-2/USA/WA-UW261/2020__EPI_ISL_418046 spike protein (1-1273)(I712C_T1077C)
MFVFLVLLPLVSSQCVNLTTRTQLPPAYTNSFTRGVYYPDKVFRSSVLHSTQDLFLPFFSNVTWFHAIHVSGTNGTKRFDNPVLPFNDGVYFASTEKSNIIRGWIFGTTLDSKTQSLLIVNNATNVVIKVCEFQFCNDPFLGVYYHKNNKSWMESEFRVYSSANNCTFEYVSQPFLMDLEGKQGNFKNLREFVFKNIDGYFKIYSKHTPINLVRDLPQGFSALEPLVDLPIGINITRFQTLLALHRSYLTPGDSSSGWTAGAAAYYVGYLQPRTFLLKYNENGTITDAVDCALDPLSETKCTLKSFTVEKGIYQTSNFRVQPTESIVRFPNITNLCPFGEVFNATRFTSVYAWNRKRISNCVADYSVLYNSASFSTFKCYGVSPTKLNDLCFTNVYADSFVIRGDEVRQIAPGQTGKIADYNYKLPDDFTGCVIAWNSNNLDSKVGGNYNYLYRLFRKSNLKPFERDISTEIYQAGSTPCNGVEGFNCYFPLQSYGFQPTNGVGYQPYRVVVLSFELLHAPATVCGPKKSTNLVKNKCVNFNFNGLTGTGVLTESNKKFLPFQQFGRDIADTTDAVRDPQTLEILDITPCSFGGVSVITPGTNTSNQVAVLYQDVNCTEVPVAIHADQLTPTWRVYSTGSNVFQTRAGCLIGAEHVNNSYECDIPIGAGICASYQTQTNSPRRARSVASQSIIAYTMSLGAENSVAYSNNSCAIPTNFTISVTTEILPVSMTKTSVDCTMYICGDSTECSNLLLQYGSFCTQLNRALTGIAVEQDKNTQEVFAQVKQIYKTPPIKDFGGFNFSQILPDPSKPSKRSFIEDLLFNKVTLADAGFIKQYGDCLGDIAARDLICAQKFNGLTVLPPLLTDEMIAQYTSALLAGTITSGWTFGAGAALQIPFAMQMAYRFNGIGVTQNVLYENQKLIANQFNSAIGKIQDSLSSTASALGKLQDVVNQNAQALNTLVKQLSSNFGAISSVLNDILSRLDKVEAEVQIDRLITGRLQSLQTYVTQQLIRAAEIRASANLAATKMSECVLGQSKRVDFCGKGYHLMSFPQSAPHGVVFLHVTYVPAQEKNFTCAPAICHDGKAHFPREGVFVSNGTHWFVTQRNFYEPQIITTDNTFVSGNCDVVIGIVNNTVYDPLQPELDSFKEELDKYFKNHTSPDVDLGDISGINASVVNIQKEIDRLNEVAKNLNESLIDLQELGKYEQYIKWPWYIWLGFIAGLIAIVMVTIMLCCMTSCCSCLKGCCSCGSCCKFDEDDSEPVLKGVKLHYT

SEQ ID NO: 657 - protein, 1273 aa, Artificial Sequence
  SARS-CoV-2/Portugal/PT0035/2020__EPI_ISL_418020 spike protein (1-1273)(I712C_T1077C)
MFVFLVLLPLVSSQCVNLTTRTQLPPAYTNSFTRGVYYPDKVFRSSVLHSTQDLFLPFFSNVTWFHAIHVSGTNGTKRFDNPVLPFNDGVYFASTEKSNIIRGWIFGTTLDSKTQSLLIVNNATNVVIKVCEFQFCNDPFLGVYYHKNNKSWMESEFRVYSSANNCTFEYVSQPFLMDLEGKQGNFKNLREFVFKNIDGYFKIYSKHTPINLVRDLPQGFSALEPLVDLPIGINITRFQTLLALHRSYLTPGDSSSGWTAGAAAYYVGYLQPRTFLLKYNENGTITDAVDCALDPLSETKCTLKSFTVEKGIYQTSNFRVQPTESIVRFPNITNLCPFGEVFNATRFASVYAWNRKRISNCVADYSVLYNSASFSTFKCYGVSPTKLNDLCFTNVYADSFVIRGDEVRQIAPGQTGKIADYNYKLPDDFTGCVIAWNSNNLDSKVGGNYNYLYRLFRKSNLKPFERDISTEIYQAGSTPCNGVEGFNCYFPLQSYGFQPTNGVGYQPYRVVVLSFELLHAPATVCGPKKSTNLVKNKCVNFNFNGLTGTGVLTESNKKFLPFQQFGRDIADTTDAVRDPQTLEILDITPCSFGGVSVITPGTNTSNQVAVLYQDVNCTEVPVAIHADQLTPTWRVYSTGSNVFQTRAGCLIGAEHVNNSYECDIPIGAGICASYQTQTNSPRRARSVASQSIIAYTMSLGAENSVAYSNNSCAIPTNFTISVTTEILPVSMTKTSVDCTMYICGDSTECSNLLLQYGSFCTQLNRALTGIAVEQDKNTQEVFAQVKQIYKTPPIKDFGGFNFSQILPDPSKPSKRSFIEDLLFNKVTLADAGFIKQYGDCLGDISARDLICAQKFNGLTVLPPLLTDEMIAQYTSALLAGTITSGWTFGAGAALQIPFAMQMAYRFNGIGVTQNVLYENQKLIANQFNSAIGKIQDSLSSTASALGKLQDVVNQNAQALNTLVKQLSSNFGAISSVLNDILSRLDKVEAEVQIDRLITGRLQSLQTYVTQQLIRAAEIRASANLAATKMSECVLGQSKRVDFCGKGYHLMSFPQSAPHGVVFLHVTYVPAQEKNFTCAPAICHDGKAHFPREGVFVSNGTHWFVTQRNFYEPQIITTDNTFVSGNCDVVIGIVNNTVYDPLQPELDSFKEELDKYFKNHTSPDVDLGDISGINASVVNIQKEIDRLNEVAKNLNESLIDLQELGKYEQYIKWPWYIWLGFIAGLIAIVMVTIMLCCMTSCCSCLKGCCSCGSCCKFDEDDSEPVLKGVKLHYT

SEQ ID NO: 658 - protein, 1273 aa, Artificial Sequence
  SARS-CoV-2/USA/NY-NYUMC7/2020__EPI_ISL_418192 spike protein (1-1273)(I712C_T1077C)
MFVFLVLLPLVSSQCVNLTTRTQLPPAYTNSFTRGVYYPDKVFRSSVLHSTQDLFLPFFSNVTWFHAIHVSGTNGTKRFDNPVLPFNDGVYFASTEKSNIIRGWIFGTTLDSKTQSLLIVNNATNVVIKVCEFQFCNDPFLGVYHHKNNKSWMESEFRVYSSANNCTFEYVSQPFLMDLEGKQGNFKNLREFVFKNIDGYFKIYSKHTPINLVRDLPQGFSALEPLVDLPIGINITRFQTLLALHRSYLTPGDSSSGWTAGAAAYYVGYLQPRTFLLKYNENGTITDAVDCALDPLSETKCTLKSFTVEKGIYQTSNFRVQPTESIVRFPNITNLCPFGEVFNATRFASVYAWNRKRISNCVADYSVLYNSASFSTFKCYGVSPTKLNDLCFTNVYADSFVIRGDEVRQIAPGQTGKIADYNYKLPDDFTGCVIAWNSNNLDSKVGGNYNYLYRLFRKSNLKPFERDISTEIYQAGSTPCNGVEGFNCYFPLQSYGFQPTNGVGYQPYRVVVLSFELLHAPATVCGPKKSTNLVKNKCVNFNFNGLTGTGVLTESNKKFLPFQQFGRDIADTTDAVRDPQTLEILDITPCSFGGVSVITPGTNTSNQVAVLYQGVNCTEVPVAIHADQLTPTWRVYSTGSNVFQTRAGCLIGAEHVNNSYECDIPIGAGICASYQTQTNSPRRARSVASQSIIAYTMSLGAENSVAYSNNSCAIPTNFTISVTTEILPVSMTKTSVDCTMYICGDSTECSNLLLQYGSFCTQLNRALTGIAVEQDKNTQEVFAQVKQIYKTPPIKDFGGFNFSQILPDPSKPSKRSFIEDLLFNKVTLADAGFIKQYGDCLGDIAARDLICAQKFNGLTVLPPLLTDEMIAQYTSALLAGTITSGWTFGAGAALQIPFAMQMAYRFNGIGVTQNVLYENQKLIANQFNSAIGKIQDSLSSTASALGKLQDVVNQNAQALNTLVKQLSSNFGAISSVLNDILSRLDKVEAEVQIDRLITGRLQSLQTYVTQQLIRAAEIRASANLAATKMSECVLGQSKRVDFCGKGYHLMSFPQSAPHGVVFLHVTYVPAQEKNFTCAPAICHDGKAHFPREGVFVSNGTHWFVTQRNFYEPQIITTDNTFVSGNCDVVIGIVNNTVYDPLQPELDSFKEELDKYFKNHTSPDVDLGDISGINASVVNIQKEIDRLNEVAKNLNESLIDLQELGKYEQYIKWPWYIWLGFIAGLIAIVMVTIMLCCMTSCCSCLKGCCSCGSCCKFDEDDSEPVLKGVKLHYT

SEQ ID NO: 659 - protein, 1273 aa, Artificial Sequence
  SARS-CoV-2/Iceland/189/2020__EPI_ISL_417709 spike protein (1-1273)(I712C_T1077C)
MFVFLVLLPLVSSQCVNLTTRTQLPPAYTNSFTRGVYYPDKVFRSSVLHSTQDLFLPFFSNVTWFHAIHVSGTNGTKRFDNPVLPFNDGVYFASTEKSNIIRGWIFGTTLDSKTQSLLIVNNATNVVIKVCEFQFCNDPFLGVYYHKNNKSWMESEFRVYSSANNCTFEYVSQPFLMDLEGKQGNFKNLREFVFKNIDGYFKIYSKHTPINLVRDLPQGFSALEPLVDLPIGINITRFQTLLALHRSYLTPGDSSSGWTAGAAAYYVGYLQPRTFLLKYNENGTITDAVDCALDPLSETKCTLKSFTVEKGIYQTSNFRVQPTESIVRFPNITNLCPFGEVFNATRFASVYAWNRKRISNCVADYSVLYNSASFSTFKCYGVSPTKLNDLCFTNVYADSFVIRGDEVRQIAPGQTGKIADYNYKLPDDFTGCVIAWNSNNLDSKVGGNYNYLYRLFRKSNLKPFERDISTEIYQAGSTPCNGVEGFNCYFPLQSYGFQPTNGVGYQPYRVVVLSFELLHAPATVCGPKKSTNLVKNKCVNFNFNGLTGTGVLTESNKKFLPFQQFGRDIADTTDAVRDPQTLEILDITPCSFGGVSVITPGTNTSNQVAVLYQGVNCTEVPVAIHADQLTPTWRVYSTGSNVFQTRAGCLIGAEHVNNSYECDIPIGAGICASYQTQTNSPRRARSVASQSIIAYTMSLGAENSVAYSNNSCAIPTNFTISVTTEILPVSMTKTSVDCTMYICGDSTECSNLLLQYGSFCTQLNRALTGIAVEQDKNTQEVFAQVKQIYKTPPIKDFGGFNFSQILPDPSKPSKRSFIEDLLFNKVTLADAGFTKQYGDCLGDIAARDLICAQKFNGLTVLPPLLTDEMIAQYTSALLAGTITSGWTFGAGAALQIPFAMQMAYRFNGIGVTQNVLYENQKLIANQFNSAIGKIQDSLSSTASALGKLQDVVNQNAQALNTLVKQLSSNFGAISSVLNDILSRLDKVEAEVQIDRLITGRLQSLQTYVTQQLIRAAEIRASANLAATKMSECVLGQSKRVDFCGKGYHLMSFPQSAPHGVVFLHVTYVPAQEKNFTCAPAICHDGKAHFPREGVFVSNGTHWFVTQRNFYEPQIITTDNTFVSGNCDVVIGIVNNTVYDPLQPELDSFKEELDKYFKNHTSPDVDLGDISGINASVVNIQKEIDRLNEVAKNLNESLIDLQELGKYEQYIKWPWYIWLGFIAGLIAIVMVTIMLCCMTSCCSCLKGCCSCGSCCKFDEDDSEPVLKGVKLHYT

SEQ ID NO: 660 - protein, 1273 aa, Artificial Sequence
  SARS-CoV-2/Australia/NSW56/2020__EPI_ISL_417408 spike protein (1-1273)(I712C_T1077C)
MFVFLVLLPLVSSQCVNLTTRTQLPPAYTNSFTRGVYYPDKVFRSSVLHSTQDLFLPFFSNVTWFHAIHVSGTNGTKRFDNPVLPFNDGVYFASTEKSNIIRGWIFGTTLDSKTQSLLIVNNATNVVIKVCEFQFCNDPFLGVYYHKNNKSWMESEFRVYSSANNCTFEYVSQPFLMDLEGKQGNFKNLREFVFKNIDGYFKIYSKHTPINLVRDLPQGFSALEPLVDLPIGINITRFQTLLALHRSYLTPGDSSSGWTAGAAAYYVGYLQPRTFLLKYNENGTITDAVDCALDPLSETKCTLKSFTVEKGIYQTSNFRVQPTESIVRFPNITNLCPFGEVFNATRFASVYAWNRKRISNCVADYSVLYNSASFSTFKCYGVSPTKLNDLCFTNVYADSFVIRGDEVRQIAPGQTGKIADYNYKLPDDFTGCVIAWNSNNLDSKVGGNYNYLYRLFRKSNLKPFERDISTEIYQAGSTPCNGVEGFNCYFPLQSYGFQPTNGVGYQPYRVVVLSFELLHAPATVCGPKKSTNLVKNKCVNFNFNGLTGTGVLTESNKKFLPFQQFGRDIADTTDAVRDPQTLEILDITPCSFGGVSVITPGTNTSNQVAVLYQDVNCTEVPVAIHADQLTPTWRVYSTGSNVFQTRAGCLIGAEHVNNSYECDIPIGAGICASYQTQTNSPRRARSVASQSIIAYTMSLGAENSVAYSNNSCAIPTNFTISVTTEILPVSMTKTSVDCTMYICGDSTECSNLLLQYGSFCTQLNRALTGIAVEQDKNTQEVFAQVKQIYKTPPIKDFGGFNFSQILPDSSKPSKRSFIEDLLFNKVTLADAGFIKQYGDCLGDIAARDLICAQKFNGLTVLPPLLTDEMIAQYTSALLAGTITSGWTFGAGAALQIPFAMQMAYRFNGIGVTQNVLYENQKLIANQFNSAIGKIQDSLSSTASALGKLQDVVNQNAQALNTLVKQLSSNFGAISSVLNDILSRLDKVEAEVQIDRLITGRLQSLQTYVTQQLIRAAEIRASANLAATKMSECVLGQSKRVDFCGKGYHLMSFPQSAPHGVVFLHVTYVPAQEKNFTCAPAICHDGKAHFPREGVFVSNGTHWFVTQRNFYEPQIITTDNTFVSGNCDVVIGIVNNTVYDPLQPELDSFKEELDKYFKNHTSPDVDLGDISGINASVVNIQKEIDRLNEVAKNLNESLIDLQELGKYEQYIKWPWYIWLGFIAGLIAIVMVTIMLCCMTSCCSCLKGCCSCGSCCKFDEDDSEPVLKGVKLHYT

SEQ ID NO: 661 - protein, 1273 aa, Artificial Sequence
  SARS-CoV-2/Iceland/280/2020__EPI_ISL_417608 spike protein (1-1273)(I712C_T1077C)
MFVFLVLLPLVSSQCVNLTTRTQLPPAYTNSFTRGVYYPDKVFRSSVLHSTQDLFLPFFSNVTWFHAIHVSGTNGTKRFDNPVLPFNDGVYFASTEKSNIIRGWIFGTTLDSKTQSLLIVNNATNVVIKVCEFQFCNDPFLGVYYHKNNKSWMESEFRVYSSANNCTFEYVSQPFLMDLEGKQGNFKNLREFVFKNIDGYFKIYSKHTPINLVRDLPQGFSALEPLVDLPIGINITRFQTLLALHRSYLTPGDSSSGWTAGAAAYYVGYLQPRTFLLKYNENGTITDAVDCALDPLSETKCTLKSFTVEKGIYQTSNFRVQPTESIVRFPNITNLCPFGEVFNATRFASVYAWNRKRISNCVADYSVLYNSASFSTFKCYGVSPTKLNDLCFTNVYADSFVIRGDEVRQIAPGQTGKIADYNYKLPDDFTGCVIAWNSNNLDSKVGGNYNYLYRLFRKSNLKPFERDISTEIYQAGSTPCNGVEGFNCYFPLQSYGFQPTNGVGYQPYRVVVLSFELLHAPATVCGPKKSTNLVKNKCVNFNFNGLTGTGVLTESNKKFLPFQQFGRDIADTTDAVRDPQTLEILDITPCSFGGVSVITPGTNTSNQVAVLYQGVNCTEVPVAIHADQLTPTWRVYSTGSNVFQTRAGCLIGAEHVNNSYECDIPIGAGICASYHTQTNSPRRARSVASQSIIAYTMSLGAENSVAYSNNSCAIPTNFTISVTTEILPVSMTKTSVDCTMYICGDSTECSNLLLQYGSFCTQLNRALTGIAVEQDKNTQEVFAQVKQIYKTPPIKDFGGFNFSQILPDPSKPSKRSFIEDLLFNKVTLADAGFIKQYGDCLGDIAARDLICAQKFNGLTVLPPLLTDEMIAQYTSALLAGTITSGWTFGAGAALQIPFAMQMAYRFNGIGVTQNVLYENQKLIANQFNSAIGKIQDSLSSTASALGKLQDVVNQNAQALNTLVKQLSSNFGAISSVLNDILSRLDKVEAEVQIDRLITGRLQSLQTYVTQQLIRAAEIRASANLAATKMSECVLGQSKRVDFCGKGYHLMSFPQSAPHGVVFLHVTYVPAQEKNFTCAPAICHDGKAHFPREGVFVSNGTHWFVTQRNFYEPQIITTDNTFVSGNCDVVIGIVNNTVYDPLQPELDSFKEELDKYFKNHTSPDVDLGDISGINASVVNIQKEIDRLNEVAKNLNESLIDLQELGKYEQYIKWPWYIWLGFIAGLIAIVMVTIMLCCMTSCCSCLKGCCSCGSCCKFDEDDSEPVLKGVKLHYT

SEQ ID NO: 662 - protein, 1273 aa, Artificial Sequence
  SARS-CoV-2/Iceland/247/2020__EPI_ISL_417575 spike protein (1-1273)(I712C_T1077C)
MFVFLVLLPLVSSQCVNLTTRTQLPPAYTNSFTRGVYYPDKVFRSSVLHSTQDLFLPFFSNVTWFHAIHVSGTNGTKRFDNPVLPFNDGVYFASTEKSNIIRGWIFGTTLDSKTQSLLIVNNATNVVIKVCEFQFCNDPFLGVYYHKNNKSWMESEFRVYSSANNCTFEYVSQPFLMDLEGKQGNFKNLREFVFKNIDGYFKIYSKHTPINLVRDLPQGFSALEPLVDLPIGINITRFQTLLALHRSYLTPGDSSSGWTAGAAAYYVGYLQPRTFLLKYNENGTITDAVDCALDPLSETKCTLKSFTVEKGIYQTSNFRVQPTESIVRFPNITNLCPFGEVFNATRFASVYAWNRKRISNCVADYSVLYNSASFSTFKCYGVSPTKLNDLCFTNVYADSFVIRGDEVRQIAPGQTGKIADYNYKLPDDFTGCVIAWNSNNLDSKVGGNYNYLYRLFRKSNLKPFERDISTEIYQAGSTPCNGVEGFNCYFPLQSYGFQPTNGVGYQPYRVVVLSFELLHAPATVCGPKKSTNLVKNKCVNFNFNGLTGTGVLTESNKKFLPFQQFGRDIADTTDAVRDPQTLEILDITPCSFGGVSVITPGTNTSNQVAVLYQGVNCTEVPVAIHADQLTPTWRVYSTGSNVFQTRAGCLIGAEHVNNSYECDIPIGAGICASYQTQTNSPRRARSVASQSIIAYTMSLGAENSVAYSNNSCAIPTNFTISVTTEILPVSMTKTSVDCTMYICGDSTECSNLLLQYGSFCTQLNRALTGIAVEQDKNTQEVFAQVKQIYKTPPIKDFGGFNFSQILPDPSKPSKRSFIEDLLFNKVTLADAGFIKQYGDCLGDIAARDLICAQKFNGLTVLPPLLTDEMIAQYTSALLAGTITSGWTFGAGAALQIPFAMQMAYRFNGIGVTQNVLYENQKLIANQFNSAIGKIQDSLSSTASALGKLQDVVNQNAQALNTLVKQLSSNFGAISSVLNDILSRLDKVEAEVQIDRLITGRLQSLQTYVTQQLIRAAEIRASANLAATKMSECVLGQSKRVDFCGKGYHLMSFPQSAPHGVVFLHVTYVPAQEKNFTCAPAICHDGKAHFPREGVFVSNGTHWFVTQRNFYEPQIITTDNTFVSGNCDVVIGIVNNTVYDPLQPELDSFKEELDKYFKNHTSPDVDLGDISGINASVVNIQKEIDRLNEVAKNLNESLIDLQELGKYEQYIKWPWYIWLGFIAGLIAIVIVTIMLCCMTSCCSCLKGCCSCGSCCKFDEDDSEPVLKGVKLHYT

SEQ ID NO: 663 - protein, 1273 aa, Artificial Sequence
  SARS-CoV-2/Iceland/238/2020__EPI_ISL_417566 spike protein (1-1273)(I712C_T1077C)
MFVFLVLLPLVSSQCVNLTTRTQLPPAYTNSFTRGVYYPDKVFRSSVLHSTQDLFLPFFSNVTWFHAIHVSGTNGTKRFDNPVLPFNDGVYFASTEKSNIIRGWIFGTTLDSKTQSLLIVNNATNVVIKVCEFQFCNDPFLGVYYHKNNKSWMESEFRVYSSANNCTFEYVSQPFLMDLEGKQGNFKNLREFVFKNIDGYFKIYSKHTPINLVRDLPQGFSALEPLVDLPIGINITRFQTLLALHRSYLTPGDSSSGWTAGAAAYYVGYLQPRTFLLKYNENGTITDAVDCALDPLSETKCTLKSFTVEKGIYQTSNFRVQPTESIVRFPNITNLCPFGEVFNATRFASVYAWNRKRISNCVADYSVLYNSASFSTFKCYGVSPTKLNDLCFTNVYADSFVIRGDEVRQIAPGQTGKIADYNYKLPDDFTGCVIAWNSNNLDSKVGGNYNYLYRLFRKSNLKPFERDISTEIYQAGSTPCNGVEGFNCYFPLQSYGFQPTNGVGYQPYRVVVLSFELLHAPATVCGPKKSTNLVKNKCVNFNFNGLTGTGVLTESNKKFLPFQQFGRDIADTTDAVRDPQTLEILDITPCSFGGVSVITPGTNTSNQVAVLYQGVNCTEVPVAIHADQLTPTWRVYSTGSNVFQTRAGCLIGAEHVNNSYECDIPIGAGICASYQTQTNSPRRARSVASQSIIAYTMSLGAENSVAYSNNSCAIPTNFTISVTTEILPVSMTKTSVDCTMYICGDSTECSNLLLQYGSFCTQLNRALTGIAVEQDKNTQEVFAQVKQIYKTPPIKDFGGFNFSQILPDPSKPSKRSFIEDLLFNKVTLADVGFIKQYGDCLGDIAARDLICAQKFNGLTVLPPLLTDEMIAQYTSALLAGTITSGWTFGAGAALQIPFAMQMAYRFNGIGVTQNVLYENQKLIANQFNSAIGKIQDSLSSTASALGKLQDVVNQNAQALNTLVKQLSSNFGAISSVLNDILSRLDKVEAEVQIDRLITGRLQSLQTYVTQQLIRAAEIRASANLAATKMSECVLGQSKRVDFCGKGYHLMSFPQSAPHGVVFLHVTYVPAQEKNFTCAPAICHDGKAHFPREGVFVSNGTHWFVTQRNFYEPQIITTDNTFVSGNCDVVIGIVNNTVYDPLQPELDSFKEELDKYFKNHTSPDVDLGDISGINASVVNIQKEIDRLNEVAKNLNESLIDLQELGKYEQYIKWPWYIWLGFIAGLIAIVMVTIMLCCMTSCCSCLKGCCSCGSCCKFDEDDSEPVLKGVKLHYT

SEQ ID NO: 664 - protein, 1273 aa, Artificial Sequence
  SARS-CoV-2/Greece/16/2020__EPI_ISL_418265 spike protein (1-1273)(I712C_T1077C)
MFVFLVLLPLVSSQCVNLTTRTQLPPAYTNSFTRGVYYPDKVFRSSVLHSTQDLFLPFFSNVTWFHAIHVSGTNGTKRFDNPVLPFNDGVYFASTEKSNIIRGWIFGTTLDSKTQSLLIVNNATNVVIKVCEFQFCNDPFLGVYYHKNNKSWMESEFRVYSSANNCTFEYVSQPFLMDLEGKQGNFKNLREFVFKNVDGYFKIYSKHTPINLVRDLPQGFSALEPLVDLPIGINITRFQTLLALHRSYLTPGDSSSGWTAGAAAYYVGYLQPRTFLLKYNENGTITDAVDCALDPLSETKCTLKSFTVEKGIYQTSNFRVQPTESIVRFPNITNLCPFGEVFNATRFASVYAWNRKRISNCVADYSVLYNSASFSTFKCYGVSPTKLNDLCFTNVYADSFVIRGDEVRQIAPGQTGKIADYNYKLPDDFTGCVIAWNSNNLDSKVGGNYNYLYRLFRKSNLKPFERDISTEIYQAGSTPCNGVEGFNCYFPLQSYGFQPTNGVGYQPYRVVVLSFELLHAPATVCGPKKSTNLVKNKCVNFNFNGLTGTGVLTESNKKFLPFQQFGRDIADTTDAVRDPQTLEILDITPCSFGGVSVITPGTNTSNQVAVLYQDVNCTEVPVAIHADQLTPTWRVYSTGSNVFQTRAGCLIGAEHVNNSYECDIPIGAGICASYQTQTNSPRRARSVASQSIIAYTMSLGAENSVAYSNNSCAIPTNFTISVTTEILPVSMTKTSVDCTMYICGDSTECSNLLLQYGSFCTQLNRALTGIAVEQDKNTQEVFAQVKQIYKTPPIKDFGGFNFSQILPDPSKPSKRSFIEDLLFNKVTLADAGFIKQYGDCLGDIAARDLICAQKFNGLTVLPPLLTDEMIAQYTSALLAGTITSGWTFGAGAALQIPFAMQMAYRFNGIGVTQNVLYENQKLIANQFNSAIGKIQDSLSSTASALGKLQDVVNQNAQALNTLVKQLSSNFGAISSVLNDILSRLDKVEAEVQIDRLITGRLQSLQTYVTQQLIRAAEIRASANLAATKMSECVLGQSKRVDFCGKGYHLMSFPQSAPHGVVFLHVTYVPAQEKNFTCAPAICHDGKAHFPREGVFVSNGTHWFVTQRNFYEPQIITTDNTFVSGNCDVVIGIVNNTVYDPLQPELDSFKEELDKYFKNHTSPDVDLGDISGINASVVNIQKEIDRLNEVAKNLNESLIDLQELGKYEQYIKWPWYIWLGFIAGLIAIVMVTIMLCCMTSCCSCLKGCCSCGSCCKFDEDDSEPVLKGVKLHYT

SEQ ID NO: 665 - protein, 1273 aa, Artificial Sequence
  SARS-CoV-2/Iceland/319/2020__EPI_ISL_417648 spike protein (1-1273)(I712C_T1077C)
MFVFLVLLPLVSSQCVNLTTRTQLPPAYTNSFTRGVYYPDKVFRSSVLHSTQDLFLPFFSNVTWFHAIHVSGTNGTKRFDNPVLPFNDGVYFASTEKSNIIRGWIFGTTLDSKTQSLLIVNNATNVVIKVCEFQFCNDPFLGVYYHKNNKSWMESEFRVYSSANNCTFEYVSQPFLIDLEGKQGNFKNLREFVFKNIDGYFKIYSKHTPINLVRDLPQGFSALEPLVDLPIGINITRFQTLLALHRSYLTPGDSSSGWTAGAAAYYVGYLQPRTFLLKYNENGTITDAVDCALDPLSETKCTLKSFTVEKGIYQTSNFRVQPTESIVRFPNITNLCPFGEVFNATRFASVYAWNRKRISNCVADYSVLYNSASFSTFKCYGVSPTKLNDLCFTNVYADSFVIRGDEVRQIAPGQTGKIADYNYKLPDDFTGCVIAWNSNNLDSKVGGNYNYLYRLFRKSNLKPFERDISTEIYQAGSTPCNGVEGFNCYFPLQSYGFQPTNGVGYQPYRVVVLSFELLHAPATVCGPKKSTNLVKNKCVNFNFNGLTGTGVLTESNKKFLPFQQFGRDIADTTDAVRDPQTLEILDITPCSFGGVSVITPGTNTSNQVAVLYQGVNCTEVPVAIHADQLTPTWRVYSTGSNVFQTRAGCLIGAEHVNNSYECDIPIGAGICASYQTQTNSPRRARSVASQSIIAYTMSLGAENSVAYSNNSCAIPTNFTISVTTEILPVSMTKTSVDCTMYICGDSTECSNLLLQYGSFCTQLNRALTGIAVEQDKNTQEVFAQVKQIYKTPPIKDFGGFNFSQILPDPSKPSKRSFIEDLLFNKVTLADAGFIKQYGDCLGDIAARDLICAQKFNGLTVLPPLLTDEMIAQYTSALLAGTITSGWTFGAGAALQIPFAMQMAYRFNGIGVTQNVLYENQKLIANQFNSAIGKIQDSLSSTASALGKLQDVVNQNAQALNTLVKQLSSNFGAISSVLNDILSRLDKVEAEVQIDRLITGRLQSLQTYVTQQLIRAAEIRASANLAATKMSECVLGQSKRVDFCGKGYHLMSFPQSAPHGVVFLHVTYVPAQEKNFTCAPAICHDGKAHFPREGVFVSNGTHWFVTQRNFYEPQIITTDNTFVSGNCDVVIGIVNNTVYDPLQPELDSFKEELDKYFKNHTSPDVDLGDISGINASVVNIQKEIDRLNEVAKNLNESLIDLQELGKYEQYIKWPWYIWLGFIAGLIAIVMVTIMLCCMTSCCSCLKGCCSCGSCCKFDEDDSEPVLKGVKLHYT

SEQ ID NO: 666 - protein, 1273 aa, Artificial Sequence
  SARS-CoV-2/Congo/94/2020__EPI_ISL_417947 spike protein (1-1273)(I712C_T1077C)
MFVFLVLLPLVSSQCVNLTTRTQLPPAYTNSFTRGVYYPDKVFRSSVLHSTQDLFLPFFSNVTWFHAIHVSGTNGTKRFDNPVLPFNDGVYFASTEKSNIIRGWIFGTTLDSKTQSLLIVNNATNVVIKVCEFQFCNDPFLGVYYHKNNKSWMESEFRVYSSANNCTFEYVSQPFLMDLEGKQGNFKNLREFVFKNIDGYFKIYSKHTPINLVRDLPQGFSALEPLVDLPIGINITRFQTLLALHRSYLTPGDSSSGWTAGAAAYYVGYLQPRTFLLKYNENGTITDAVDCALDPLSETKCTLKSFTVEKGIYQTSNFRVQPTESIVRFPNITNLCPFGEVFNATRFASVYAWNRKRISNCVADYSVLYNSASFSTFKCYGVSPTKLNDLCFTNVYADSFVIRGDEVRQIAPGQTGKIADYNYKLPDDFTGCVIAWNSNNLDSKVGGNYNYLYRLFRKSNLKPFERDISTEIYQAGSTPCNGVEGFNCYFPLQSYGFQPTNGVGYQPYRVVVLSFELLHAPATVCGPKKSTNLVKNKCVNFNFNGLTGTGVLTESNKKFLPFQQFGRDIADTTDAVRDPQTLEILDITPCSFGGVSVITPGTNTSNQVAVLYQGVNCTEVPVAIHADQLTPTWRVYSTGSNVFQTRAGCLIGAEHVNNSYECDIPIGAGICASYQTQTNSPRRARSVASQSIIAYTMSLGAENSVAYSNNSCAIPTNFTISVTTEILPVSMTKTSVDCTMYICGDSTECSNLLLQYGSFCTQLNRALTGIAVEQDKNTQEVFAQVKQIYKTPPIKDFGGFNFSQILPDPSKPSKRSFIEDILFNKVTLADAGFIKQYGDCLGDIAARDLICAQKFNGLTVLPPLLTDEMIAQYTSALLAGTITSGWTFGAGAALQIPFAMQMAYRFNGIGVTQNVLYENQKLIANQFNSAIGKIQDSLSSTASALGKLQDVVNQNAQALNTLVKQLSSNFGAISSVLNDILSRLDKVEAEVQIDRLITGRLQSLQTYVTQQLIRAAEIRASANLAATKMSECVLGQSKRVDFCGKGYHLMSFPQSAPHGVVFLHVTYVPAQEKNFTCAPAICHDGKAHFPREGVFVSNGTHWFVTQRNFYEPQIITTDNTFVSGNCDVVIGIVNNTVYDPLQPELDSFKEELDKYFKNHTSPDVDLGDISGINASVVNIQKEIDRLNEVAKNLNESLIDLQELGKYEQYIKWPWYIWLGFIAGLIAIVMVTIMLCCMTSCCSCLKGCCSCGSCCKFDEDDSEPVLKGVKLHYT

SEQ ID NO: 667 - protein, 1273 aa, Artificial Sequence
  SARS-CoV-2/Congo/158/2020__EPI_ISL_417950 spike protein (1-1273)(I712C_T1077C)
MFVFLVLLPLVSSQCVNLTTRTQLPPAYTNSFTRGVYYPDKVFRSSVLHSTQDLFLPFFSNVTWFHAIHVSGTNGTKRFDNPVLPFNDGVYFASTEKSNIIRGWIFGTTLDSKTQSLLIVNNATNVVIKVCEFQFCNDPFLGVYYHKNNKSWMESEFRVYSSANNCTFEYVSQPFLMDLEGKQGNFKNLREFVFKNIDGYFKIYSKHTPINLVRDLPQGFSALEPLVDLPIGINITRFQTLLALHRSYLTPGDSSSGWTAGAAAYYVGYLQPRTFLLKYNENGTITDAVDCALDPLSETKCTLKSFTVEKGIYQTSNFRVQPTESIVRFPNITNLCPFGEVFNATRFASVYAWNRKRISNCVADYSVLYNSASFSTFKCYGVSPTKLNDLCFTNVYADSFVIRGDEVRQIAPGQTGKIADYNYKLPDDFTGCVIAWNSNNLDSKVGGNYNYLYRLFRKSNLKPFERDISTEIYQAGSTPCNGVEGFNCYFPLQSYGFQPTNGVGYQPYRVVVLSFELLHAPATVCGPKKSTNLVKNKCVNFNFNGLTGTGVLTESNKKFLPFQQFGRDIADTTDAVRDPQTLEILDITPCSFGGVSVITPGTNTSNQVAVLYQDVNCTEVPVAIHADQLTPTWRVYSTGSNVFQTRAGCLIGAEHVNNSYECDIPIGAGICASYQTQTNSPRRARSVASQSIIAYTMSLGAENSVAYSNNSCAIPTNFTISVTTEILPVSMTKTSVDCTMYICGDSTECSNLLLQYGSFCTQLNRALTGIAVEQDKNTQEVFAQVKQIYKTPPIKDFGGFNFSQILPDPSKPSKRSFIEDLLFNKVTLADAGFIKQYGDCLGDIAARDLICAQKFNGLTVLPPLLTDEMIAQYTSALLAGTITSGWTFGAGAALQIPFAMQMAYRFNGIGVTQNVLYENQKLIANQFNSAIGKIQDSLSSTASALGKLQDVVNQNAQALNTLVKQLSSNFGAISSVLNDILSRLDKVEAEVQIDRLITGRLQSLQTYVTQQLIRAAEIRASANLAATKMSECVLGQSKRVDFCGKGYHLMSFPQSAPHGVVFLHVTYVPAQEKNFTCAPAICHDGKAHFPREGVFVSNGTHWFVTQRNFYEPQIITTDNTFLSGNCDVVIGIVNNTVYDPLQPELDSFKEELDKYFKNHTSPDVDLGDISGINASVVNIQKEIDRLNEVAKNLNESLIDLQELGKYEQYIKWPWYIWLGFIAGLIAIVMVTIMLCCMTSCCSCLKGCCSCGSCCKFDEDDSEPVLKGVKLHYT

SEQ ID NO: 668 - protein, 1273 aa, Artificial Sequence
  SARS-CoV-2/USA/UT-00034/2020__EPI_ISL_417977 spike protein (1-1273)(I712C_T1077C)
MFVFLVLLPLVSSQCVNLTTRTQLPPAYTNSFTRGVYYPDKVFRSSVLHSTQDLFLPFFSNVTWFHAIHVSGTNGTKRFDNPVLPFNDGVYFASTEKSNIIRGWIFGTTLDSKTQSLLIVNNATNVVIKVCEFQFCNDPFLGVYYYKNNKSWMESEFRVYSSANNCTFEYVSQPFLMDLEGKQGNFKNLREFVFKNIDGYFKIYSKHTPINLVRDLPQGFSALEPLVDLPIGINITRFQTLLALHRSYLTPGDSSSGWTAGAAAYYVGYLQPRTFLLKYNENGTITDAVDCALDPLSETKCTLKSFTVEKGIYQTSNFRVQPTESIVRFPNITNLCPFGEVFNATRFASVYAWNRKRISNCVADYSVLYNSASFSTFKCYGVSPTKLNDLCFTNVYADSFVIRGDEVRQIAPGQTGKIADYNYKLPDDFTGCVIAWNSNNLDSKVGGNYNYLYRLFRKSNLKPFERDISTEIYQAGSTPCNGVEGFNCYFPLQSYGFQPTNGVGYQPYRVVVLSFELLHAPATVCGPKKSTNLVKNKCVNFNFNGLTGTGVLTESNKKFLPFQQFGRDIADTTDAVRDPQTLEILDITPCSFGGVSVITPGTNTSNQVAVLYQGVNCTEVPVAIHADQLTPTWRVYSTGSNVFQTRAGCLIGAEHVNNSYECDIPIGAGICASYQTQTNSPRRARSVASQSIIAYTMSLGAENSVAYSNNSCAIPTNFTISVTTEILPVSMTKTSVDCTMYICGDSTECSNLLLQYGSFCTQLNRALTGIAVEQDKNTQEVFAQVKQIYKTPPIKDFGGFNFSQILPDPSKPSKRSFIEDLLFNKVTLADAGFIKQYGDCLGDIAARDLICAQKFNGLTVLPPLLTDEMIAQYTSALLAGTITSGWTFGAGAALQIPFAMQMAYRFNGIGVTQNVLYENQKLIANQFNSAIGKIQDSLSSTASALGKLQDVVNQNAQALNTLVKQLSSNFGAISSVLNDILSRLDKVEAEVQIDRLITGRLQSLQTYVTQQLIRAAEIRASANLAATKMSECVLGQSKRVDFCGKGYHLMSFPQSAPHGVVFLHVTYVPAQEKNFTCAPAICHDGKAHFPREGVFVSNGTHWFVTQRNFYEPQIITTDNTFVSGNCDVVIGIVNNTVYDPLQPELDSFKEELDKYFKNHTSPDVDLGDISGINASVVNIQKEIDRLNEVAKNLNESLIDLQELGKYEQYIKWPWYIWLGFIAGLIAIVMVTIMLCCMTSCCSCLKGCCSCGSCCKFDEDDSEPVLKGVKLHYT

SEQ ID NO: 669 - protein, 1273 aa, Artificial Sequence
  SARS-CoV-2/USA/UT-00033/2020__EPI_ISL_417976 spike protein (1-1273)(I712C_T1077C)
MFVFLVLLPLVSSQCVNLTTRTQLPPAYTNSFTRGVYYPDKVFRSSVLHSTQDLFLPFFSNVTWFHAIHVSGTNGTKRFDNPVLPFNDGVYFASTEKSNIIRGWIFGTTLDSKTQSLLIVNNATNVVIKVCEFQFCNDPFLGVYYHKNNKSWMESEFRVYSSANNCTFEYVSQPFLMDLEGKQGNFKNLREFVFKNIDGYFKIYSKHTPINLVRDLPQGFSALEPLVDLPIGINITRFQTLLALHRSYLTPGDSSSGLTAGAAAYYVGYLQPRTFLLKYNENGTITDAVDCALDPLSETKCTLKSFTVEKGIYQTSNFRVQPTESIVRFPNITNLCPFGEVFNATRFASVYAWNRKRISNCVADYSVLYNSASFSTFKCYGVSPTKLNDLCFTNVYADSFVIRGDEVRQIAPGQTGKIADYNYKLPDDFTGCVIAWNSNNLDSKVGGNYNYLYRLFRKSNLKPFERDISTEIYQAGSTPCNGVEGFNCYFPLQSYGFQPTNGVGYQPYRVVVLSFELLHAPATVCGPKKSTNLVKNKCVNFNFNGLTGTGVLTESNKKFLPFQQFGRDIADTTDAVRDPQTLEILDITPCSFGGVSVITPGTNTSNQVAVLYQGVNCTEVPVAIHADQLTPTWRVYSTGSNVFQTRAGCLIGAEHVNNSYECDIPIGAGICASYQTQTNSPRRARSVASQSIIAYTMSLGAENSVAYSNNSCAIPTNFTISVTTEILPVSMTKTSVDCTMYICGDSTECSNLLLQYGSFCTQLNRALTGIAVEQDKNTQEVFAQVKQIYKTPPIKDFGGFNFSQILPDPSKPSKRSFIEDLLFNKVTLADAGFIKQYGDCLGDIAARDLICAQKFNGLTVLPPLLTDEMIAQYTSALLAGTITSGWTFGAGAALQIPFAMQMAYRFNGIGVTQNVLYENQKLIANQFNSAIGKIQDSLSSTASALGKLQDVVNQNAQALNTLVKQLSSNFGAISSVLNDILSRLDKVEAEVQIDRLITGRLQSLQTYVTQQLIRAAEIRASANLAATKMSECVLGQSKRVDFCGKGYHLMSFPQSAPHGVVFLHVTYVPAQEKNFTCAPAICHDGKAHFPREGVFVSNGTHWFVTQRNFYEPQIITTDNTFVSGNCDVVIGIVNNTVYDPLQPELDSFKEELDKYFKNHTSPDVDLGDISGINASVVNIQKEIDRLNEVAKNLNESLIDLQELGKYEQYIKWPWYIWLGFIAGLIAIVMVTIMLCCMTSCCSCLKGCCSCGSCCKFDEDDSEPVLKGVKLHYT

SEQ ID NO: 670 - protein, 1273 aa, Artificial Sequence
  SARS-CoV-2/USA/WI-13/2020__EPI_ISL_417516 spike protein (1-1273)(I712C_T1077C)
MFVFLVLLPLVSSQCVNLTTRTQLPPAYTNSFTRGVYYPDKVFRSSVLHSTQDLFLPFFSNVTWFHAIHVSGTNGTKRFDNPVLPFNDGVYFASTEKSNIIRGWIFGTTLDSKTQSLLIVNNATNVVIKVCEFQFCNDPFLGVYYHKNNKSWMESEFRVYSSANNCTFEYVSQPFLMDLEGKQGNFKNLREFVFKNIDGYFKIYSKHTPINLVRDLPQGFSALEPLVDLPIGINITRFQTLLALHRSYLTPGDSSSGWTAGAAAYYVGYLQPRTFLLKYNENGTITDAVDCALDPLSETKCTLKSFTVEKGIYQTSNFRVLPTESIVRFPNITNLCPFGEVFNATRFASVYAWNRKRISNCVADYSVLYNSASFSTFKCYGVSPTKLNDLCFTNVYADSFVIRGDEVRQIAPGQTGKIADYNYKLPDDFTGCVIAWNSNNLDSKVGGNYNYLYRLFRKSNLKPFERDISTEIYQAGSTPCNGVEGFNCYFPLQSYGFQPTNGVGYQPYRVVVLSFELLHAPATVCGPKKSTNLVKNKCVNFNFNGLTGTGVLTESNKKFLPFQQFGRDIADTTDAVRDPQTLEILDITPCSFGGVSVITPGTNTSNQVAVLYQGVNCTEVPVAIHADQLTPTWRVYSTGSNVFQTRAGCLIGAEHVNNSYECDIPIGAGICASYQTQTNSPRRARSVASQSIIAYTMSLGAENSVAYSNNSCAIPTNFTISVTTEILPVSMTKTSVDCTMYICGDSTECSNLLLQYGSFCTQLNRALTGIAVEQDKNTQEVFAQVKQIYKTPPIKDFGGFNFSQILPDPSKPSKRSFIEDLLFNKVTLADAGFIKQYGDCLGDIAARDLICAQKFNGLTVLPPLLTDEMIAQYTSALLAGTITSGWTFGAGAALQIPFAMQMAYRFNGIGVTQNVLYENQKLIANQFNSAIGKIQDSLSSTASALGKLQDVVNQNAQALNTLVKQLSSNFGAISSVLNDILSRLDKVEAEVQIDRLITGRLQSLQTYVTQQLIRAAEIRASANLAATKMSECVLGQSKRVDFCGKGYHLMSFPQSAPHGVVFLHVTYVPAQEKNFTCAPAICHDGKAHFPREGVFVSNGTHWFVTQRNFYEPQIITTDNTFVSGNCDVVIGIVNNTVYDPLQPELDSFKEELDKYFKNHTSPDVDLGDISGINASVVNIQKEIDRLNEVAKNLNESLIDLQELGKYEQYIKWPWYIWLGFIAGLIAIVMVTIMLCCMTSCCSCLKGCCSCGSCCKFDEDDSEPVLKGVKLHYT

SEQ ID NO: 671 - protein, 1272 aa, Artificial Sequence
  SARS-CoV-2/India/1-27/2020__EPI_ISL_413522 spike protein (1-1272)(I711C_T1076C)
MFVFLVLLPLVSSQCVNLTTRTQLPPAYTNSFTRGVYYPDKVFRSSVLHSTQDLFLPFFSNVTWFHAIHVSGTNGTKRFDNPVLPFNDGVYFASTEKSNIIRGWIFGTTLDSKTQSLLIVNNATNVVIKVCEFQFCNDPFLGVYHKNNKSWMESEFRVYSSANNCTFEYVSQPFLMDLEGKQGNFKNLREFVFKNIDGYFKIYSKHTPINLVRDLPQGFSALEPLVDLPIGINITRFQTLLALHRSYLTPGDSSSGWTAGAAAYYVGYLQPRTFLLKYNENGTITDAVDCALDPLSETKCTLKSFTVEKGIYQTSNFRVQPTESIVRFPNITNLCPFGEVFNATRFASVYAWNRKRISNCVADYSVLYNSASFSTFKCYGVSPTKLNDLCFTNVYADSFVIRGDEVIQIAPGQTGKIADYNYKLPDDFTGCVIAWNSNNLDSKVGGNYNYLYRLFRKSNLKPFERDISTEIYQAGSTPCNGVEGFNCYFPLQSYGFQPTNGVGYQPYRVVVLSFELLHAPATVCGPKKSTNLVKNKCVNFNFNGLTGTGVLTESNKKFLPFQQFGRDIADTTDAVRDPQTLEILDITPCSFGGVSVITPGTNTSNQVAVLYQDVNCTEVPVAIHADQLTPTWRVYSTGSNVFQTRAGCLIGAEHVNNSYECDIPIGAGICASYQTQTNSPRRARSVASQSIIAYTMSLGAENSVAYSNNSCAIPTNFTISVTTEILPVSMTKTSVDCTMYICGDSTECSNLLLQYGSFCTQLNRALTGIAVEQDKNTQEVFAQVKQIYKTPPIKDFGGFNFSQILPDPSKPSKRSFIEDLLFNKVTLADAGFIKQYGDCLGDIAARDLICAQKFNGLTVLPPLLTDEMIAQYTSALLAGTITSGWTFGAGAALQIPFAMQMAYRFNGIGVTQNVLYENQKLIANQFNSAIGKIQDSLSSTASALGKLQDVVNQNAQALNTLVKQLSSNFGAISSVLNDILSRLDKVEAEVQIDRLITGRLQSLQTYVTQQLIRAAEIRASANLAATKMSECVLGQSKRVDFCGKGYHLMSFPQSAPHGVVFLHVTYVPAQEKNFTCAPAICHDGKAHFPREGVFVSNGTHWFVTQRNFYEPQIITTDNTFVSGNCDVVIGIVNNTVYDPLQPELDSFKEELDKYFKNHTSPDVDLGDISGINASVVNIQKEIDRLNEVAKNLNESLIDLQELGKYEQYIKWPWYIWLGFIAGLIAIVMVTIMLCCMTSCCSCLKGCCSCGSCCKFDEDDSEPVLKGVKLHYT

SEQ ID NO: 672 - protein, 1267 aa, Artificial Sequence
  SARS-CoV-2/pangolin/Guangxi/P4L/2017__EPI_ISL_410538 spike protein (1-1267)(I706C_T1071C)
MFVFLFVLPLVSSQCVNLTTRTGIPPGYTNSSTRGVYYPDKVFRSSILHLTQDLFLPFFSNVTWFNTINYQGGFKKFDNPVLPFNDGVYFASTEKSNIIRGWIFGTTLDARTQSLLIVNNATNVVIKVCEFQFCTDPFLGVYYHNNNKTWVENEFRVYSSANNCTFEYISQPFLMDLEGKQGNFKNLREFVFKNVDGYFKIYSKHTPIDLVRDLPRGFAALEPLVDLPIGINITRFQTLLALHRSYLTPGNLESGWTTGAAAYYVGYLQQRTFLLSYNQNGTITDAVDCSLDPLSETKCTLKSLTVEKGIYQTSNFRVQPTISIVRFPNITNLCPFGEVFNASKFASVYAWNRKRISNCVADYSVLYNSTSFSTFKCYGVSPTKLNDLCFTNVYADSFVVKGDEVRQIAPGQTGVIADYNYKLPDDFTGCVIAWNSVKQDALTGGNYGYLYRLFRKSKLKPFERDISTEIYQAGSTPCNGQVGLNCYYPLERYGFHPTTGVNYQPFRVVVLSFELLNGPATVCGPKLSTTLVKDKCVNFNFNGLTGTGVLTTSKKQFLPFQQFGRDISDTTDAVRDPQTLEILDITPCSFGGVSVITPGTNTSNQVAVLYQDVNCTEVPMAIHAEQLTPAWRVYSAGANVFQTRAGCLVGAEHVNNSYECDIPVGAGICASYHSMSSLRSVNQRSIIAYTMSLGAENSVAYSNNSCAIPTNFTISVTTEILPVSMTKTSVDCTMYICGDSIECSNLLLQYGSFCTQLNRALTGIAVEQDKNTQEVFAQVKQIYKTPPIKDFGGFNFSQILPDPSKPSKRSFIEDLLFNKVTLADAGFIKQYGDCLGDIAARDLICAQKFNGLTVLPPLLTDEMIAQYTSALLAGTITSGWTFGAGAALQIPFAMQMAYRFNGIGVTQNVLYENQKLIANQFNSAIGKIQDSLSSTASALGKLQDVVNQNAQALNTLVKQLSSNFGAISSVLNDILSRLDKVEAEVQIDRLITGRLQSLQTYVTQQLIRAAEIRASANLAATKMSECVLGQSKRVDFCGKGYHLMSFPQSAPHGVVFLHVTYVPAQEKNFTCAPAICHEGKAHFPREGVFVSNGTHWFITQRNFYEPQIITTDNTFVSGSCDVVIGIVNNTVYDPLQPELDSFKEELDKYFKNHTSPDVDLGDISGINASVVNIQKEIDRLNEVAKNLNESPIDLQELGKYEQYIKWPWYIWLGFIAGLIAIIMVTIMLCCMTSCCSCLKGCCSCGSCCKFDEDDSEPVLKGVKLHYT

SEQ ID NO: 673 - protein, 1267 aa, Artificial Sequence
  SARS-CoV-2/pangolin/Guangxi/P5L/2017__EPI_ISL_410540 spike protein (1-1267)(I706C_T1071C)
MFVFLFVLPLVSSQCVNLTTRTGIPPGYTNSSTRGVYYPDKVFRSSILHLTQDLFLPFFSNVTWFNTINYQGGFKKFDNPVLPFNDGVYFASTEKSNIIRGWIFGTTLDARTQSLLIVNNATNVVIKVCEFQFCTDPFLGVYYHNNNKTWVENEFRVYSSANNCTFEYISQPFLMDLEGKQGNFKNLREFVFKNVDGYFKIYSKHTPIDLVRDLPRGFAALEPLVDLPIGINITRFQTLLALHRSYLTPGKLESGWTTGAAAYYVGYLQQRTFLLSYNQNGTITDAVDCSLDPLSETKCTLKSLTVEKGIYQTSNFRVQPTISIVRFPNITNLCPFGEVFNASKFASVYAWNRKRISNCVADYSVLYNSTSFSTFKCYGVSPTKLNDLCFTNVYADSFVVKGDEVRQIAPGQTGVIADYNYKLPDDFTGCVIAWNSVKQDALTGGNYGYLYRLFRKSKLKPFERDISTEIYQAGSTPCNGQVGLNCYYPLERYGFHPTTGVNYQPFRVVVLSFELLNGPATVCGPKLSTTLVKDKCVNFNFNGLTGTGVLTTSKKQFLPFQQFGRDISDTTDAVRDPQTLEILDITPCSFGGVSVITPGTNTSNQVAVLYQDVNCTEVPMAIHAEQLTPAWRVYSAGANVFQTRAGCLVGAEHVNNSYECDIPVGAGICASYHSMSSFRSVNQRSIIAYTMSLGAENSVAYSNNSCAIPTNFTISVTTEILPVSMTKTSVDCTMYICGDSIECSNLLLQYGSFCTQLNRALTGIAVEQDKNTQEVFAQVKQIYKTPPIKDFGGFNFSQILPDPSKPSKRSFIEDLLFNKVTLADAGFIKQYGDCLGDIAARDLICAQKFNGLTVLPPLLTDEMIAQYTSALLAGTITSGWTFGAGAALQIPFAMQMAYRFNGIGVTQNVLYENQKLIANQFNSAIGKIQDSLSSTASALGKLQDVVNQNAQALNTLVKQLSSNFGAISSVLNDILSRLDKVEAEVQIDRLITGRLQSLQTYVTQQLIRAAEIRASANLAATKMSECVLGQSKRVDFCGKGYHLMSFPQSAPHGVVFLHVTYVPAQEKNFTCAPAICHEGKAHFPREGVFVSNGTHWFITQRNFYEPQIITTDNTFVSGSCDVVIGIVNNTVYDPLQPELDSFKEELDKYFKNHTSPDVDLGDISGINASVVNIQKEIDRLNEVAKNLNESLIDLQELGKYEQYIKWPWYIWLGFIAGLIAIIMVTIMLCCMTSCCSCLKGCCSCGSCCKFDEDDSEPVLKGVKLHYT

SEQ ID NO: 674 - protein, 1267 aa, Artificial Sequence
  SARS-CoV-2/pangolin/Guangxi/P5E/2017__EPI_ISL_410541 spike protein (1-1267)(I706C_T1071C)
MFVFLFVLPLVSSQCVNLTTRTGIPPGYTNSSTRGVYYPDKVFRSSILHLTQDLFLPFFSNVTWFNTITYQGGSKKFDNPVLPFNDGVYFASTEKSNIIRGWIFGTTLDARTQSLLIVNNATNVVIKVCEFQFCTDPFLGVYYHNNNKTWVENEFRVYSSANNCTFEYISQPFLMDLEGKQGNFKNLREFVFKNVDGYFKIYSKHTPIDLVRDLPRGFAALEPLVDLPIGINITRFQTLLALHRSYLTPGKLESGWTTGAAAYYVGYLQQRTFLLSYNQNGTITDAVDCSLDPLSETKCTLKSLTVEKGIYQTSNFRVQPTISIVRFPNITNLCPFGEVFNASKFASVYAWNRKRISNCVADYSVLYNSTSFSTFKCYGVSPTKLNDLCFTNVYADSFVVKGDEVRQIAPGQTGVIADYNYKLPDDFTGCVIAWNSVKQDALTGDNYGYLYRLFRKSKLKPFERDISTEIYQAGSTPCNGQVGLNCYYPLERYGFHPTTGVNYQPFRVVVLSFELLNGPATVCGPKLSTTLVKDKCVNFNFNGLTGTGVLTTSKKQFLPFQQFGRDISDTTDAVRDPQTLEILDITPCSFGGVSVITPGTNTSNQVAVLYQDVNCTEVPMAIHAEQLTPAWRVYSAGANVFQTRAGCLVGAEHVNNSYECDIPVGAGICASYHSMSSFRSVNQRSIIAYTMSLGAENSVAYSNNSCAIPTNFTISVTTEILPVSMTKTSVDCTMYICGDSIECSNLLLQYGSFCTQLNRALTGIAVEQDKNTQEVFAQVKQIYKTPPIKDFGGFNFSQILPDPSKPSKRSFIEDLLFNKVTLADAGFIKQYGDCLGDIAARDLICAQKFNGLTVLPPLLTDEMIAQYTSALLAGTITSGWTFGAGAALQIPFAMQMAYRFNGIGVTQNVLYENQKLIANQFNSAIGKIQDSLSSTASALGKLQDVVNQNAQALNTLVKQLSSNFGAISSVLNDILSRLDKVEAEVQIDRLITGRLQSLQTYVTQQLIRAAEIRASANLAATKMSECVLGQSKRVDFCGKGYHLMSFPQSAPHGVVFLHVTYVPAQEKNFTCAPAICHEGKAHFPREGVFVSNGTHWFITQRNFYEPQIITTDNTFVSGSCDVVIGIVNNTVYDPLQPELDSFKEELDKYFKNHTSPDVDLGDISGINASVVNIQKEIDRLNEVAKNLNESLIDLQELGKYEQYIKWPWYIWLGFIAGLIAIIMVTIMLCCMTSCCSCLKGCCSCGSCCKFDEDDSEPVLKGVKLHYT

SEQ ID NO: 675 - protein, 1265 aa, Artificial Sequence
  SARS-CoV-2/pangolin/Guangxi/P1E/2017__EPI_ISL_410539 spike protein (1-1265)(I704C_T1069C)
MFVFLFVLPLVSSQCVNLTTRTGIQPGYTNSSTRGVYYPDKVFRSSILHLTQDLFLPFFSNVTWFNTINYQGGFKKFDNPVLPFNDGVYFASTEKSNIIRGWIFGTTLDARTQSLLIVNNATNVVIKVCEFQFCTDPFLGVYYHNNNKTWVENEFRVYSSANNCTFEYISQPFLMDLEGKQGNFKNLREFVFKNVDGYFKIYSKHTPIDLVRDLPRGFAALEPLVDLPIGINITRFQTLLALHRSYLTPGKLESGWTTGAAAYYVGYLQQRTFLLSYNQNGTITDAVDCSLDPLSETKCTLKSLTVEKGIYQTSNFRVQPTISIVRFPNITNLCPFGEVFNASKFASVYAWNRKRISNCVADYSVLYNSTSFSTFKCYGVSPTKLNDLCFTNVYADSFVVKGDEVRQIAPGQTGVIADYNYKLPDDFTGCVIAWNSVKQDALTGGNYLYRLFRKSKLKPFERDISTEIYQAGSTPCNGQVGLNCYYPLERYGFHPTTGVNYQPFRVVVLSFELLNGPATVCGPKLSTTLVKDKCVNFNFNGLTGTGVLTTSKKQFLPFQQFGRDISDTTDAVRDPQTLEILDITPCSFGGVSVITPGTNTSNQVAVLYQDVNCTEVPMAIHAEQLTPAWRVYSAGANVFQTRAGCLVGAEHVNNSYECDIPVGAGICASYHSMSSLRSVNQRSIIAYTMSLGAENSVAYSNNSCAIPTNFTISVTTEILPVSMTKTSVDCTMYICGDSIECSNLLLQYGSFCTQLNRALTGIAVEQDKNTQEVFAQVKQIYKTPPIKDFGGFNFSQILPDPSKPSKRSFIEDLLFNKVTLADAGFIKQYGDCLGDIAARDLICAQKFNGLTVLPPLLTDEMIAQYTSALLAGTITSGWTFGAGAALQIPFAMQMAYRFNGIGVTQNVLYENQKLIANQFNSAIGKIQDSLSSTASALGKLQDVVNQNAQALNTLVKQLSSNFGAISSVLNDILSRLDKVEAEVQIDRLITGRLQSLQTYVTQQLIRAAEIRASANLAATKMSECVLGQSKRVDFCGKGYHLMSFPQSAPHGVVFLHVTYVPAQEKNFTCAPAICHEGKAHFPREGVFVSNGTHWFITQRNFYEPQIITTDNTFVSGSCDVVIGIVNNTVYDPLQPELDSFKEELDKYFKNHTSPDVDLGDISGINASVVNIQKEIDRLNEVAKNLNESLIDLQELGKYEQYIKWPWYIWLGFIAGLIAIIMVTIMLCCMTSCCSCLKGCCSCGSCCKFDEDDSEPVLKGVKLHYT

SEQ ID NO: 676 - protein, 1273 aa, Artificial Sequence; identical to SEQ ID NO: 20
  SARS-CoV-2/Wuhan/WIV05/2019__EPI_ISL_402128 spike protein (1-1273)(I714C_Y1110C)

SEQ ID NO: 677 - protein, 1269 aa, Artificial Sequence
  SARS-CoV-2/bat/Yunnan/RaTG13/2013__EPI_ISL_402131 spike protein (1-1269)(I710C_Y1106C)
MFVFLVLLPLVSSQCVNLTTRTQLPPAYTNSSTRGVYYPDKVFRSSVLHLTQDLFLPFFSNVTWFHAIHVSGTNGIKRFDNPVLPFNDGVYFASTEKSNIIRGWIFGTTLDSKTQSLLIVNNATNVVIKVCEFQFCNDPFLGVYYHKNNKSWMESEFRVYSSANNCTFEYVSQPFLMDLEGKQGNFKNLREFVFKNIDGYFKIYSKHTPINLVRDLPPGFSALEPLVDLPIGINITRFQTLLALHRSYLTPGDSSSGWTAGAAAYYVGYLQPRTFLLKYNENGTITDAVDCALDPLSETKCTLKSFTVEKGIYQTSNFRVQPTDSIVRFPNITNLCPFGEVFNATTFASVYAWNRKRISNCVADYSVLYNSTSFSTFKCYGVSPTKLNDLCFTNVYADSFVITGDEVRQIAPGQTGKIADYNYKLPDDFTGCVIAWNSKHIDAKEGGNFNYLYRLFRKANLKPFERDISTEIYQAGSKPCNGQTGLNCYYPLYRYGFYPTDGVGHQPYRVVVLSFELLNAPATVCGPKKSTNLVKNKCVNFNFNGLTGTGVLTESNKKFLPFQQFGRDIADTTDAVRDPQTLEILDITPCSFGGVSVITPGTNASNQVAVLYQDVNCTEVPVAIHADQLTPTWRVYSTGSNVFQTRAGCLIGAEHVNNSYECDIPIGAGICASYQTQTNSRSVASQSIIAYTMSLGAENSVAYSNNSIACPTNFTISVTTEILPVSMTKTSVDCTMYICGDSTECSNLLLQYGSFCTQLNRALTGIAVEQDKNTQEVFAQVKQIYKTPPIKDFGGFNFSQILPDPSKPSKRSFIEDLLFNKVTLADAGFIKQYGDCLGDIAARDLICAQKFNGLTVLPPLLTDEMIAQYTSALLAGTITSGWTFGAGAALQIPFAMQMAYRFNGIGVTQNVLYENQKLIANQFNSAIGKIQDSLSSTASALGKLQDVVNQNAQALNTLVKQLSSNFGAISSVLNDILSRLDKVEAEVQIDRLITGRLQSLQTYVTQQLIRAAEIRASANLAATKMSECVLGQSKRVDFCGKGYHLMSFPQSAPHGVVFLHVTYVPAQEKNFTTAPAICHDGKAHFPREGVFVSNGTHWFVTQRNFCEPQIITTDNTFVSGSCDVVIGIVNNTVYDPLQPELDSFKEELDKYFKNHTSPDVDLGDISGINASVVNIQKEIDRLNEVAKNLNESLIDLQELGKYEQYIKWPWYIWLGFIAGLIAIIMVTIMLCCMTSCCSCLKGCCSCGSCCKFDEDDSEPVLKGVKLHYT

SEQ ID NO: 678 - protein, 1273 aa, Artificial Sequence
  SARS-CoV-2/Wuhan/HBCDC-HB-01/2019__EPI_ISL_402132 spike protein (1-1273)(I714C_Y1110C)
MFVFLVLLPLVSSQCVNLTTRTQLPPAYTNSITRGVYYPDKVFRSSVLHSTQDLFLPFFSNVTWFHAIHVSGTNGTKRFDNPVLPFNDGVYFASTEKSNIIRGWIFGTTLDSKTQSLLIVNNATNVVIKVCEFQFCNDPFLGVYYHKNNKSWMESEFRVYSSANNCTFEYVSQPFLMDLEGKQGNFKNLREFVFKNIDGYFKIYSKHTPINLVRDLPQGFSALEPLVDLPIGINITRFQTLLALHRSYLTPGDSSSGWTAGAAAYYVGYLQPRTFLLKYNENGTITDAVDCALDPLSETKCTLKSFTVEKGIYQTSNFRVQPTESIVRFPNITNLCPFGEVFNATRFASVYAWNRKRISNCVADYSVLYNSASFSTFKCYGVSPTKLNDLCFTNVYADSFVIRGDEVRQIAPGQTGKIADYNYKLPDDFTGCVIAWNSNNLDSKVGGNYNYLYRLFRKSNLKPFERDISTEIYQAGSTPCNGVEGFNCYFPLQSYGFQPTNGVGYQPYRVVVLSFELLHAPATVCGPKKSTNLVKNKCVNFNFNGLTGTGVLTESNKKFLPFQQFGRDIADTTDAVRDPQTLEILDITPCSFGGVSVITPGTNTSNQVAVLYQDVNCTEVPVAIHADQLTPTWRVYSTGSNVFQTRAGCLIGAEHVNNSYECDIPIGAGICASYQTQTNSPRRARSVASQSIIAYTMSLGAENSVAYSNNSIACPTNFTISVTTEILPVSMTKTSVDCTMYICGDSTECSNLLLQYGSFCTQLNRALTGIAVEQDKNTQEVFAQVKQIYKTPPIKDFGGFNFSQILPDPSKPSKRSFIEDLLFNKVTLADAGFIKQYGDCLGDIAARDLICAQKFNGLTVLPPLLTDEMIAQYTSALLAGTITSGWTFGAGAALQIPFAMQMAYRFNGIGVTQNVLYENQKLIANQFNSAIGKIQDSLSSTASALGKLQDVVNQNAQALNTLVKQLSSNFGAISSVLNDILSRLDKVEAEVQIDRLITGRLQSLQTYVTQQLIRAAEIRASANLAATKMSECVLGQSKRVDFCGKGYHLMSFPQSAPHGVVFLHVTYVPAQEKNFTTAPAICHDGKAHFPREGVFVSNGTHWFVTQRNFCEPQIITTDNTFVSGNCDVVIGIVNNTVYDPLQPELDSFKEELDKYFKNHTSPDVDLGDISGINASVVNIQKEIDRLNEVAKNLNESLIDLQELGKYEQYIKWPWYIWLGFIAGLIAIVMVTIMLCCMTSCCSCLKGCCSCGSCCKFDEDDSEPVLKGVKLHYT

SEQ ID NO: 679 - protein, 1273 aa, Artificial Sequence
  SARS-CoV-2/Guangdong/20SF028/2020__EPI_ISL_403936 spike protein (1-1273)(I714C_Y1110C)
MFVFLVLLPLVSSQCVNLTTRTQLPPAYTNSFTRGVYYPDKVFRSSVLYSTQDLFLPFFSNVTWFHAIHVSGTNGTKRFDNPVLPFNDGVYFASTEKSNIIRGWIFGTTLDSKTQSLLIVNNATNVVIKVCEFQFCNDPFLGVYYHKNNKSWMESEFRVYSSANNCTFEYVSQPFLMDLEGKQGNFKNLREFVFKNIDGYFKIYSKHTPINLVRDLPQGFSALEPLVDLPIGINITRFQTLLALHRSYLTPGDSSSGWTAGAAAYYVGYLQPRTFLLKYNENGTITDAVDCALDPLSETKCTLKSFTVEKGIYQTSNFRVQPTESIVRFPNITNLCPFGEVFNATRFASVYAWNRKRISNCVADYSVLYNSASFSTFKCYGVSPTKLNDLCFTNVYADSFVIRGDEVRQIAPGQTGKIADYNYKLPDDFTGCVIAWNSNNLDSKVGGNYNYLYRLFRKSNLKPFERDISTEIYQAGSTPCNGVEGFNCYFPLQSYGFQPTNGVGYQPYRVVVLSFELLHAPATVCGPKKSTNLVKNKCVNFNFNGLTGTGVLTESNKKFLPFQQFGRDIADTTDAVRDPQTLEILDITPCSFGGVSVITPGTNTSNQVAVLYQDVNCTEVPVAIHADQLTPTWRVYSTGSNVFQTRAGCLIGAEHVNNSYECDIPIGAGICASYQTQTNSPRRARSVASQSIIAYTMSLGAENSVAYSNNSIACPTNFTISVTTEILPVSMTKTSVDCTMYICGDSTECSNLLLQYGSFCTQLNRALTGIAVEQDKNTQEVFAQVKQIYKTPPIKDFGGFNFSQILPDPSKPSKRSFIEDLLFNKVTLADAGFIKQYGDCLGDIAARDLICAQKFNGLTVLPPLLTDEMIAQYTSALLAGTITSGWTFGAGAALQIPFAMQMAYRFNGIGVTQNVLYENQKLIANQFNSAIGKIQDSLSSTASALGKLQDVVNQNAQALNTLVKQLSSNFGAISSVLNDILSRLDKVEAEVQIDRLITGRLQSLQTYVTQQLIRAAEIRASANLAATKMSECVLGQSKRVDFCGKGYHLMSFPQSAPHGVVFLHVTYVPAQEKNFTTAPAICHDGKAHFPREGVFVSNGTHWFVTQRNFCEPQIITTDNTFVSGNCDVVIGIVNNTVYDPLQPELDSFKEELDKYFKNHTSPDVDLGDISGINASVVNIQKEIDRLNEVAKNLNESLIDLQELGKYEQYIKWPWYIWLGFIAGLIAIVMVTIMLCCMTSCCSCLKGCCSCGSCCKFDEDDSEPVLKGVKLHYT

SEQ ID NO: 680 - protein, 1273 aa, Artificial Sequence
  SARS-CoV-2/Shenzhen/SZTH-001/2020__EPI_ISL_406592 spike protein (1-1273)(I714C_Y1110C)
MFVFLVLLPLVSSQCVNLTTRTQLPPAYTNSFTRGVYYPDKVFRSSVLHSTQDLFLPFFSNVTWFHAIHVSGTNGTKRFDNPVLPFNDGVYFASTEKSNIIRGWIFGTTLDSKTQSLLIVNNATNVVIKVCEFQFCNDPFLGVYYHKNNKSWMESEFRVYSSANNCTFEYVSQPFLMDLEGKQGNFKNLREFVFKNIDGYFKIYSKHTPINLVRDLPQGFSALEPLVDLPIGINITRFQTLLALHRSYLTPGDSSSGWTAGAAAYYVGYLQPRTFLLKYNENGTITDAVDCALDPLSETKCTLKSFTVEKGIYQTSNFRVQPTESIVRFPNITNLCPFGEVFNATRFASVYAWNRKRISNCVADYSVLYNSASFSTFKCYGVSPTKLNDLCFTNVYADSFVIRGDEVRQIAPGQTGKIADYNYKLPDDFTGCVIAWNSNNLDSKVGGNYNYLYRLFRKSNLKPFERDISTEIYQAGSTPCNGVEGFNCYFPLQSYGFQPTNGVGYQPYRVVVLSFELLHAPATVCGPKKSTNLVKNKCVNFNFNGLTGTGVLTESNKKFLPFQQFGRDIADTTDAVRDPQTLEILDITPCSFGGVSVITPGTNTSNQVAVLYQDVNCTEVPVAIHADQLTPTWRVYSTGSNVFQTRAGCLIGAEHVNNSYECDIPIGAGICASYQTQTNSPRRARSVASQSIIAYTMSLGAENSVAYSNNSIACPTNFTISVTTEILPVSMTKTSVDCTMYICGDSTECSNLLLQYGSFCTQLNRALTGIAVEQDKNTQEVFAQVKQIYKTPPIKDFGGFNFSQILPDPSKPSKRSFIEDLLFNKVTLADAGFIKQYGDCLGDIAARDLICAQKFNGLTVLPPLLTDEMIAQYTSALLAGTITSGWTFGAGAALQIPFAMQMAYRFNGIGVTQNVLYENQKLIANQFNSAIGKIQDSLSSTASALGKLQDVVNQNAQALNTLVKQLSSNFGAISSVLNDILSRLDKVEAEVQIDRLITGRLQSLQTYVTQQLIRAAEIRASANLAATKMSECVLGQSKRVDFCGKGYHLMSFPQSAPHGVVFLHVTYVPAQEKNFTTAPAICHDGKAHFPREGVFVSNGTHWFVTQRNFCEPQIITTDNTFVSGNCDVLIGIVNNTVYDPLQPELDSFKEELDKYFKNHTSPDVDLGDISGINASVVNIQKEIDRLNEVAKNLNESLIDLQELGKYEQYIKWPWYIWLGFIAGLIAIVMVTIMLCCMTSCCSCLKGCCSCGSCCKFDEDDSGPVLKGVKLHYT

SEQ ID NO: 681 - protein, 1273 aa, Artificial Sequence
  SARS-CoV-2/Shenzhen/SZTH-004/2020__EPI_ISL_406595 spike protein (1-1273)(I714C_Y1110C)
MFVFLVLLPLVSSQCVNLTTRTQLPPAYTNSFTRGVYYPDKVFRSSVLHSTQDLFLPFFSNVTWFHAIHVSGTNGTKRFDNPVLPFNDGVYFASTEKSNIIRGWIFGTTLDSKTQSLLIVNNATNVVIKVCEFQFCNDPFLGVYYHKNNKSWMESEFRVYSSANNCTFEYVSQPFLMDLEGKQGNFKNLREFVFKNIDGYFKIYSKHTPINLVRDLPQGFSALEPLVDLPIGINITRFQTLLALHRSYLTPGDSSSGWTAGAAAYYVGYLQPRTFLLKYNENGTITDAVDCALDPLSETKCTLKSFTVEKGIYQTSNFRVQPTESIVRFPNITNLCPFGEVFNATRFASVYAWDRKRISNCVAYYSVLYNSASFSTFKCYGVSPTKLNDLCFTNVYADSFVIRGDEVRQIAPGQTGKIADYNYKLPDDFTGCVIAWNSNNLDSKVGGNYNYLYRLFRKSNLKPFERDISTEIYQAGSTPCNGVEGFNCYFPLQSYGFQPTNGVGYQPYRVVVLSFELLHAPATVCGPKKSTNLVKNKCVNFNFNGLTGTGVLTESNKKFLPFQQFGRDIADTTDAVRDPQTLEILDITPCSFGGVSVITPGTNTSNQVAVLYQDVNCTEVPVAIHADQLTPTWRVYSTGSNVFQTRAGCLIGAEHVNNSYECDIPIGAGICASYQTQTNSPRRARSVASQSIIAYTMSLGAENSVAYSNNSIACPTNFTISVTTEILPVSMTKTSVDCTMYICGDSTECSNLLLQYGSFCTQLNRALTGIAVEQDKNTQEVFAQVKQIYKTPPIKDFGGFNFSQILPDPSKPSKRSFIEDLLFNKVTLADAGFIKQYGDCLGDIAARDLICAQKFNGLTVLPPLLTDEMIAQYTSALLAGTITSGWTFGAGAALQIPFAMQMAYRFNGIGVTQNVLYENQKLIANQFNSAIGKIQDSLSSTASALGKLQDVVNQNAQALNTLVKQLSSNFGAISSVLNDILSRLDKVEAEVQIDRLITGRLQSLQTYVTQQLIRAAEIRASANLAATKMSECVLGQSKRVDFCGKGYHLMSFPQSAPHGVVFLHVTYVPAQEKNFTTAPAICHDGKAHFPREGVFVSNGTHWFVTQRNFCEPQIITTDNTFVSGNCDVVIGIVNNTVYDPLQPELDSFKEELDKYFKNHTSPDVDLGDISGINASVVNIQKEIDRLNEVAKNLNESLIDLQELGKYEQYIKWPWYIWLGFIAGLIAIVMVTIMLCCMTSCCSCLKGCCSCGSCCKFDEDDSEPVLKGVKLHYT

SEQ ID NO: 682 - protein, 1273 aa, Artificial Sequence
  SARS-CoV-2/France/IDF0372/2020__EPI_ISL_406596 spike protein (1-1273)(I714C_Y1110C)
MFVFLVLLPLVSSQCVNLTTRTQLPPAYTNSFTRGVYYPDKVFRSSVLHSTQDLFLPFFSNVTWFHAIHVSGTNGTKRFDNPVLPFNDGVYFASTEKSNIIRGWIFGTTLDSKTQSLLIVNNATNVVIKVCEFQFCNDPFLGVYYHKNNKSWMESEFRVYSSANNCTFEYVSQPFLMDLEGKQGNFKNLREFVFKNIDGYFKIYSKHTPINLVRDLPQGFSALEPLVDLPIGINITRFQTLLALHRSYLTPGDSSSGWTAGAAAYYVGYLQPRTFLLKYNENGTITDAVDCALDPLSETKCTLKSFTVEKGIYQTSNFRVQPTESIVRFPNITNLCPFGEVFNATRFASVYAWNRKRISNCVADYSFLYNSASFSTFKCYGVSPTKLNDLCFTNVYADSFVIRGDEVRQIAPGQTGKIADYNYKLPDDFTGCVIAWNSNNLDSKVGGNYNYLYRLFRKSNLKPFERDISTEIYQAGSTPCNGVEGFNCYFPLQSYGFQPTNGVGYQPYRVVVLSFELLHAPATVCGPKKSTNLVKNKCVNFNFNGLTGTGVLTESNKKFLPFQQFGRDIADTTDAVRDPQTLEILDITPCSFGGVSVITPGTNTSNQVAVLYQDVNCTEVPVAIHADQLTPTWRVYSTGSNVFQTRAGCLIGAEHVNNSYECDIPIGAGICASYQTQTNSPRRARSVASQSIIAYTMSLGAENSVAYSNNSIACPTNFTISVTTEILPVSMTKTSVDCTMYICGDSTECSNLLLQYGSFCTQLNRALTGIAVEQDKNTQEVFAQVKQIYKTPPIKDFGGFNFSQILPDPSKPSKRSFIEDLLFNKVTLADAGFIKQYGDCLGDIAARDLICAQKFNGLTVLPPLLTDEMIAQYTSALLAGTITSGWTFGAGAALQIPFAMQMAYRFNGIGVTQNVLYENQKLIANQFNSAIGKIQDSLSSTASALGKLQDVVNQNAQALNTLVKQLSSNFGAISSVLNDILSRLDKVEAEVQIDRLITGRLQSLQTYVTQQLIRAAEIRASANLAATKMSECVLGQSKRVDFCGKGYHLMSFPQSAPHGVVFLHVTYVPAQEKNFTTAPAICHDGKAHFPREGVFVSNGTHWFVTQRNFCEPQIITTDNTFVSGNCDVVIGIVNNTVYDPLQPELDSFKEELDKYFKNHTSPDVDLGDISGINASVVNIQKEIDRLNEVAKNLNESLIDLQELGKYEQYIKWPWYIWLGFIAGLIAIVMVTIMLCCMTSCCSCLKGCCSCGSCCKFDEDDSEPVLKGVKLHYT

SEQ ID NO: 683 - protein, 1273 aa, Artificial Sequence
  SARS-CoV-2/Australia/VIC01/2020__EPI_ISL_406844 spike protein (1-1273)(I714C_Y1110C)
MFVFLVLLPLVSSQCVNLTTRTQLPPAYTNSFTRGVYYPDKVFRSSVLHSTQDLFLPFFSNVTWFHAIHVSGTNGTKRFDNPVLPFNDGVYFASTEKSNIIRGWIFGTTLDSKTQSLLIVNNATNVVIKVCEFQFCNDPFLGVYYHKNNKSWMESEFRVYSSANNCTFEYVSQPFLMDLEGKQGNFKNLREFVFKNIDGYFKIYSKHTPINLVRDLPQGFSALEPLVDLPIGINITRFQTLLALHRRYLTPGDSSSGWTAGAAAYYVGYLQPRTFLLKYNENGTITDAVDCALDPLSETKCTLKSFTVEKGIYQTSNFRVQPTESIVRFPNITNLCPFGEVFNATRFASVYAWNRKRISNCVADYSVLYNSASFSTFKCYGVSPTKLNDLCFTNVYADSFVIRGDEVRQIAPGQTGKIADYNYKLPDDFTGCVIAWNSNNLDSKVGGNYNYLYRLFRKSNLKPFERDISTEIYQAGSTPCNGVEGFNCYFPLQSYGFQPTNGVGYQPYRVVVLSFELLHAPATVCGPKKSTNLVKNKCVNFNFNGLTGTGVLTESNKKFLPFQQFGRDIADTTDAVRDPQTLEILDITPCSFGGVSVITPGTNTSNQVAVLYQDVNCTEVPVAIHADQLTPTWRVYSTGSNVFQTRAGCLIGAEHVNNSYECDIPIGAGICASYQTQTNSPRRARSVASQSIIAYTMSLGAENSVAYSNNSIACPTNFTISVTTEILPVSMTKTSVDCTMYICGDSTECSNLLLQYGSFCTQLNRALTGIAVEQDKNTQEVFAQVKQIYKTPPIKDFGGFNFSQILPDPSKPSKRSFIEDLLFNKVTLADAGFIKQYGDCLGDIAARDLICAQKFNGLTVLPPLLTDEMIAQYTSALLAGTITSGWTFGAGAALQIPFAMQMAYRFNGIGVTQNVLYENQKLIANQFNSAIGKIQDSLSSTASALGKLQDVVNQNAQALNTLVKQLSSNFGAISSVLNDILSRLDKVEAEVQIDRLITGRLQSLQTYVTQQLIRAAEIRASANLAATKMSECVLGQSKRVDFCGKGYHLMSFPQSAPHGVVFLHVTYVPAQEKNFTTAPAICHDGKAHFPREGVFVSNGTHWFVTQRNFCEPQIITTDNTFVSGNCDVVIGIVNNTVYDPLQPELDSFKEELDKYFKNHTSPDVDLGDISGINASVVNIQKEIDRLNEVAKNLNESLIDLQELGKYEQYIKWPWYIWLGFIAGLIAIVMVTIMLCCMTSCCSCLKGCCSCGSCCKFDEDDSEPVLKGVKLHYT

SEQ ID NO: 684 - protein, 1273 aa, Artificial Sequence
  SARS-CoV-2/Germany/BavPat1/2020__EPI_ISL_406862 spike protein (1-1273)(I714C_Y1110C)
MFVFLVLLPLVSSQCVNLTTRTQLPPAYTNSFTRGVYYPDKVFRSSVLHSTQDLFLPFFSNVTWFHAIHVSGTNGTKRFDNPVLPFNDGVYFASTEKSNIIRGWIFGTTLDSKTQSLLIVNNATNVVIKVCEFQFCNDPFLGVYYHKNNKSWMESEFRVYSSANNCTFEYVSQPFLMDLEGKQGNFKNLREFVFKNIDGYFKIYSKHTPINLVRDLPQGFSALEPLVDLPIGINITRFQTLLALHRSYLTPGDSSSGWTAGAAAYYVGYLQPRTFLLKYNENGTITDAVDCALDPLSETKCTLKSFTVEKGIYQTSNFRVQPTESIVRFPNITNLCPFGEVFNATRFASVYAWNRKRISNCVADYSVLYNSASFSTFKCYGVSPTKLNDLCFTNVYADSFVIRGDEVRQIAPGQTGKIADYNYKLPDDFTGCVIAWNSNNLDSKVGGNYNYLYRLFRKSNLKPFERDISTEIYQAGSTPCNGVEGFNCYFPLQSYGFQPTNGVGYQPYRVVVLSFELLHAPATVCGPKKSTNLVKNKCVNFNFNGLTGTGVLTESNKKFLPFQQFGRDIADTTDAVRDPQTLEILDITPCSFGGVSVITPGTNTSNQVAVLYQGVNCTEVPVAIHADQLTPTWRVYSTGSNVFQTRAGCLIGAEHVNNSYECDIPIGAGICASYQTQTNSPRRARSVASQSIIAYTMSLGAENSVAYSNNSIACPTNFTISVTTEILPVSMTKTSVDCTMYICGDSTECSNLLLQYGSFCTQLNRALTGIAVEQDKNTQEVFAQVKQIYKTPPIKDFGGFNFSQILPDPSKPSKRSFIEDLLFNKVTLADAGFIKQYGDCLGDIAARDLICAQKFNGLTVLPPLLTDEMIAQYTSALLAGTITSGWTFGAGAALQIPFAMQMAYRFNGIGVTQNVLYENQKLIANQFNSAIGKIQDSLSSTASALGKLQDVVNQNAQALNTLVKQLSSNFGAISSVLNDILSRLDKVEAEVQIDRLITGRLQSLQTYVTQQLIRAAEIRASANLAATKMSECVLGQSKRVDFCGKGYHLMSFPQSAPHGVVFLHVTYVPAQEKNFTTAPAICHDGKAHFPREGVFVSNGTHWFVTQRNFCEPQIITTDNTFVSGNCDVVIGIVNNTVYDPLQPELDSFKEELDKYFKNHTSPDVDLGDISGINASVVNIQKEIDRLNEVAKNLNESLIDLQELGKYEQYIKWPWYIWLGFIAGLIAIVMVTIMLCCMTSCCSCLKGCCSCGSCCKFDEDDSEPVLKGVKLHYT

SEQ ID NO: 685 - protein, 1273 aa, Artificial Sequence
  SARS-CoV-2/Wuhan/HBCDC-HB-02/2020__EPI_ISL_412978 spike protein (1-1273)(I714C_Y1110C)
MFVFLVLLPLVSSQCVNLTTRTQLPPAYTNSFTRGVYYPDKVFRSSVLHSTQDLFLPFFSNVTWFHAIHVSGTNGTKRFDNPVLPFNDGVYFASTEKSNIIRGWIFGTTLDSKTQSLLIVNNATNVVIKVCEFQFCNDPFLGVYYHKNNKSWMESEFRVYSSANNCTFEYVSQPFLMDLEGKQGNFKNLREFVFKNIDGYFKIYSKHTPINLVRDLPQGFSALEPLVDLPIGINITRFQTLLALHRSYLTPGDSSSGWTAGAAAYYVGYLQPRTFLLKYNENGTITDAVDCALDPLSETKCTLKSFTVEKGIYQTSNFRVQPTESIVRFPNITNLCPFGEVFNATRFASVYAWNRKRISNCVADYSVLYNSASFSTFKCYGVSPTKLNDLCFTNVYADSFVIRGDEVRQIAPGQTGKIADYNYKLPDDFTGCVIAWNSNNLDSKVGGNYNYLYRLFRKSNLKPFERDISTEIYQAGSTPCNGVEGFNCYFPLQSYGFQPTNGVGYQPYRVVVLSFELLHAPATVCGPKKSTNLVKNKCVNFNFNGLTGTGVLTESNKKFLPFQQFGRDIADTTDAVRDPQTLEILDITPCSFGGVSVITPGTNTSNQVAVLYQDVNCTEVPVAIHADQLTPTWRVYSTGSNVFQTRAGCLIGAEHVNNSYECDIPIGAGICASYQTQTNSPRRARSVASQSIIAYTMSLGAENSVAYSNNSIACPTNFTISVTTEILPVSMTKTSVDCTMYICGDSTECSNFLLQYGSFCTQLNRALTGIAVEQDKNTQEVFAQVKQIYKTPPIKDFGGFNFSQILPDPSKPSKRSFIEDLLFNKVTLADAGFIKQYGDCLGDIAARDLICAQKFNGLTVLPPLLTDEMIAQYTSALLAGTITSGWTFGAGAALQIPFAMQMAYRFNGIGVTQNVLYENQKLIANQFNSAIGKIQDSLSSTASALGKLQDVVNQNAQALNTLVKQLSSNFGAISSVLNDILSRLDKVEAEVQIDRLITGRLQSLQTYVTQQLIRAAEIRASANLAATKMSECVLGQSKRVDFCGKGYHLMSFPQSAPHGVVFLHVTYVPAQEKNFTTAPAICHDGKAHFPREGVFVSNGTHWFVTQRNFCEPQIITTDNTFVSGNCDVVIGIVNNTVYDPLQPELDSFKEELDKYFKNHTSPDVDLGDISGINASVVNIQKEIDRLNEVAKNLNESLIDLQELGKYEQYIKWPWYIWLGFIAGLIAIVMVTIMLCCMTSCCSCLKGCCSCGSCCKFDEDDSEPVLKGVKLHYT

SEQ ID NO: 686 - protein, 1273 aa, Artificial Sequence
  SARS-CoV-2/Australia/QLD02/2020__EPI_ISL_407896 spike protein (1-1273)(I714C_Y1110C)
MFVFLVLLPLVSSQCVNLTTRTQLPPAYTNSFTRGVYYPDKVFRSSVLHSTQDLFLPFFSNVTWFHAIHVSGTNGTKRFDNPVLPFNDGVYFASTEKSNIIRGWIFGTTLDSKTQSLLIVNNATNVVIKVCEFQFCNDPFLGVYYHKNNKSWMESEFRVYSSANNCTFEYVSQPFLMDLEGKQGNFKNLREFVFKNIDGYFKIYSKHTPINLVRDLPQGFSALEPLVDLPIGINITRFQTLLALHRSYLTPGDSSSGWTAGAAAYYVGYLQPRTFLLKYNENGTITDAVDCALDPLSETKCTLKSFTVEKGIYQTSNFRVQPTESIVRFPNITNLCPFGEVFNATRFASVYAWNRKRISNCVADYSVLYNSASFSTFKCYGVSPTKLNDLCFTNVYADSFVIRGDEVRQIAPGQTGKIADYNYKLPDDFTGCVIAWNSNNLDSKVGGNYNYLYRLFRKSNLKPFERDISTEIYQAGSTPCNGVEGFNCYFPLQSYGFQPTNGVGYQPYRVVVLSFELLHAPATVCGPKKSTNLVKNKCVNFNFNGLTGTGVLTESNKKFLPFQQFGRDIADTTDAVRDPQTLEILDITPCSFGGVSVITPGTNTSNQVAVLYQDVNCTEVPVAIHADQLTPTWRVYSTGSNVFQTRAGCLIGAEHVNNSYECDIPIGAGICASYQTQTNSPRRARSVASQSIIAYTMSLGAENSVAYSNNSIACPTNFTISVTTEILPVSMTKTSVDCTMYICGDSTECSNLLLQYGSFCTQLNRALTGIAVEQDKNTQEVFAQVKQIYKTPPIKDFGGFNFSQILPDPSKPSKRSFIEDLLFNKVTLADAGFIKQYGDCLGDIAARDLICAQKFNGLTVLPPLLTDEMIAQYTSALLAGTITSGWTFGAGAALQIPFAMQMAYRFNGIGVTQNVLYENQKLIANQFNSAIGKIQDSLSSTASALGKLQDVVNQNAQALNTLVKQLSSNFGAISSVLNDILSRLDKVEAEVQIDRLITGRLQSLQTYVTQQLIRAAEIRASANLAATKMSECVLGQSKRVDFCGKGYHLMSFPQSAPHGVVFLHVTYVPAQEKNFTTAPAICHDGKAHFPREGVFVSNGTHWFVTQRNFCEPQIITTDNTFVSGNCDVVIGIVNNTVYDPLQLELDSFKEELDKYFKNHTSPDVDLGDISGINASVVNIQKEIDRLNEVAKNLNESLIDLQELGKYEQYIKWPWYIWLGFIAGLIAIVMVTIMLCCMTSCCSCLKGCCSCGSCCKFDEDDSEPVLKGVKLHYT

SEQ ID NO: 687 - protein, 1273 aa, Artificial Sequence
  SARS-CoV-2/India/1-31/2020__EPI_ISL_413523 spike protein (1-1273)(I714C_Y1110C)
MFVFLVLLPLVSSQCVNLTTRTQLPPAYTNSFTRGVYYPDKVFRSSVLHSTQDLFLPFFSNVTWFHAIHVSGTNGTKRFDNPVLPFNDGVYFASTEKSNIIRGWIFGTTLDSKTQSLLIVNNATNVVIKVCEFQFCNDPFLGVYYHKNNKSWMESEFRVYSSANNCTFEYVSQPFLMDLEGKQGNFKNLREFVFKNIDGYFKIYSKHTPINLVRDLPQGFSALEPLVDLPIGINITRFQTLLALHRSYLTPGDSSSGWTAGAAAYYVGYLQPRTFLLKYNENGTITDAVDCALDPLSETKCTLKSFTVEKGIYQTSNFRVQPTESIVRFPNITNLCPFGEVFNATRFASVYAWNRKRISNCVADYSVLYNSASFSTFKCYGVSPTKLNDLCFTNVYADSFVIRGDEVRQIAPGQTGKIADYNYKLPDDFTGCVIAWNSNNLDSKVGGNYNYLYRLFRKSNLKPFERDISTEIYQAGSTPCNGVEGFNCYFPLQSYGFQPTNGVGYQPYRVVVLSFELLHAPATVCGPKKSTNLVKNKCVNFNFNGLTGTGVLTESNKKFLPFQQFGRDIADTTDAVRDPQTLEILDITPCSFGGVSVITPGTNTSNQVAVLYQDVNCTEVPVAIHADQLTPTWRVYSTGSNVFQTRAGCLIGAEHVNNSYECDIPIGAGICASYQTQTNSPRRARSVASQSIIAYTMSLGAENSVAYSNNSIACPTNFTISVTTEILPVSMTKTSVDCTMYICGDSTECSNLLLQYGSFCTQLNRALTGIAVEQDKNTQEVFAQVKQIYKTPPIKDFGGFNFSQILPDPSKPSKRSFIEDLLFNKVTLADAGFIKQYGDCLGDIAARDLICAQKFNGLTVLPPLLTDEMIAQYTSALLAGTITSGWTFGAGAALQIPFAMQMAYRFNGIGVTQNVLYENQKLIANQFNSVIGKIQDSLSSTASALGKLQDVVNQNAQALNTLVKQLSSNFGAISSVLNDILSRLDKVEAEVQIDRLITGRLQSLQTYVTQQLIRAAEIRASANLAATKMSECVLGQSKRVDFCGKGYHLMSFPQSAPHGVVFLHVTYVPAQEKNFTTAPAICHDGKAHFPREGVFVSNGTHWFVTQRNFCEPQIITTDNTFVSGNCDVVIGIVNNTVYDPLQPELDSFKEELDKYFKNHTSPDVDLGDISGINASVVNIQKEIDRLNEVAKNLNESLIDLQELGKYEQYIKWPWYIWLGFIAGLIAIVMVTIMLCCMTSCCSCLKGCCSCGSCCKFDEDDSEPVLKGVKLHYT

SEQ ID NO: 688 - protein, 1273 aa, Artificial Sequence
  SARS-CoV-2/Guangdong/GD2020087-P0008/2020__EPI_ISL_413863 spike protein (1-1273)(I714C_Y1110C)
MFVFLVLLPLVSSQCVNLTTRTQLPPAYTNSFTRGVYYPDKVFRSSVLHSTQDLFLPFFSNVTWFHAIHVSGTNGTKRFDNPVLPFNDGVYFASTEKSNIIRGWIFGTTLDSKTQSLLIVNNATNVVIKVCEFQFCNDPFLGVYYHKNNKSWMESEFRVYSSANNCTFEYVSQPFLMDLEGKQGNFKNLREFVFKNIDGYFKIYSKHTPINLVRDLPQGFSALEPLVDLPIGINITRFQTLLALHRSYLTPGDSSSGWTAGAAAYYVGYLQPRTFLLKYNENGTITDAVDCALDPLSETKCTLKSFTVEKGIYQTSNFRVQPTESIVRFPNITNLCPFGEVFNATRFASVYAWNRKRISNCVADYSVLYNSASFSTFKCYGVSPTKLNDLCFTNVYADSFVIRGDEVREIAPGQTGKIADYNYKLPDDFTGCVIAWNSNNLDSKVGGNYNYLYRLFRKSNLKPFERDISTEIYQAGSTPCNGVEGFNCYFPLQSYGFQPTNGVGYQPYRVVVLSFELLHAPATVCGPKKSTNLVKNKCVNFNFNGLTGTGVLTESNKKFLPFQQFGRDIADTTDAVRDPQTLEILDITPCSFGGVSVITPGTNTSNQVAVLYQDVNCTEVPVAIHADQLTPTWRVYSTGSNVFQTRAGCLIGAEHVNNSYECDIPIGAGICASYQTQTNSPRRARSVASQSIIAYTMSLGAENSVAYSNNSIACPTNFTISVTTEILPVSMTKTSVDCTMYICGDSTECSNLLLQYGSFCTQLNRALTGIAVEQDKNTQEVFAQVKQIYKTPPIKDFGGFNFSQILPDPSKPSKRSFIEDLLFNKVTLADAGFIKQYGDCLGDIAARDLICAQKFNGLTVLPPLLTDEMIAQYTSALLAGTITSGWTFGAGAALQIPFAMQMAYRFNGIGVTQNVLYENQKLIANQFNSAIGKIQDSLSSTASALGKLQDVVNQNAQALNTLVKQLSSNFGAISSVLNDILSRLDKVEAEVQIDRLITGRLQSLQTYVTQQLIRAAEIRASANLAATKMSECVLGQSKRVDFCGKGYHLMSFPQSAPHGVVFLHVTYVPAQEKNFTTAPAICHDGKAHFPREGVFVSNGTHWFVTQRNFCEPQIITTDNTFVSGNCDVVIGIVNNTVYDPLQPELDSFKEELDKYFKNHTSPDVDLGDISGINASVVNIQKEIDRLNEVAKNLNESLIDLQELGKYEQYIKWPWYIWLGFIAGLIAIVMVTIMLCCMTSCCSCLKGCCSCGSCCKFDEDDSEPVLKGVKLHYT

SEQ ID NO: 689 - protein, 1273 aa, Artificial Sequence
  SARS-CoV-2/Sweden/01/2020__EPI_ISL_411951 spike protein (1-1273)(I714C_Y1110C)
MFVFLVLLPLVSSQCVNLTTRTQLPPAYTNSFTRGVYYPDKVFRSSVLHSTQDLFLPFFSNVTWFHAIHVSGTNGTKRFDNPVLPFNDGVYFASTEKSNIIRGWIFGTTLDSKTQSLLIVNNATNVVIKVCEFQFCNDPFLGVYYHKNNKSWMESEFRVYSSANNCTFEYVSQPFLMDLEGKQGNFKNLREFVFKNIDGYFKIYSKHTPINLVRDLPQGFSALEPLVDLPIGINITRFQTLLALHRSYLTPGDSSSGWTAGAAAYYVGYLQPRTFLLKYNENGTITDAVDCALDPLSETKCTLKSFTVEKGIYQTSNFRVQPTESIVRFPNITNLCPFGEVFNATRFASVYAWNRKRISNCVADYSVLYNSASFSTFKCYGVSPTKLNDLCFTNVYADSFVIRGDEVRQIAPGQTGKIADYNYKLPDDFTGCVIAWNSNNLDSKVGGNYNYLYRLFRKSNLKPFERDISTEIYQAGSTPCNGVEGFNCYFPLQSYGFQPTNGVGYQPYRVVVLSFELLHAPATVCGPKKSTNLVKNKCVNFNFNGLTGTGVLTESNKKFLPFQQFGRDIADTTDAVRDPQTLEILDITPCSFGGVSVITPGTNTSNQVAVLYQDVNCTEVPVAIHADQLTPTWRVYSTGSNVFQTRAGCLIGAEHVNNSYECDIPIGAGICASYQTQTNSPRRARSVASQSIIAYTMSLGAENSVAYSNNSIACPTNFTISVTTEILPVSMTKTSVDCTMYICGDSTECSNLLLQYGSFCTQLNRALTGIAVEQDKNTQEVFAQVKQIYKTPPIKDCGGFNFSQILPDPSKPSKRSFIEDLLFNKVTLADAGFIKQYGDCLGDIAARDLICAQKFNGLTVLPPLLTDEMIAQYTSALLAGTITSGWTFGAGAALQIPFAMQMAYRFNGIGVTQNVLYENQKLIANQFNSAIGKIQDSLSSTASALGKLQDVVNQNAQALNTLVKQLSSNFGAISSVLNDILSRLDKVEAEVQIDRLITGRLQSLQTYVTQQLIRAAEIRASANLAATKMSECVLGQSKRVDFCGKGYHLMSFPQSAPHGVVFLHVTYVPAQEKNFTTAPAICHDGKAHFPREGVFVSNGTHWFVTQRNFCEPQIITTDNTFVSGNCDVVIGIVNNTVYDPLQPELDSFKEELDKYFKNHTSPDVDLGDISGINASVVNIQKEIDRLNEVAKNLNESLIDLQELGKYEQYIKWPWYIWLGFIAGLIAIVMVTIMLCCMTSCCSCLKGCCSCGSCCKFDEDDSEPVLKGVKLHYT

SEQ ID NO: 690 - protein, 1273 aa, Artificial Sequence
  SARS-CoV-2/Tianmen/HBCDC-HB-07/2020__EPI_ISL_412983 spike protein (1-1273)(I714C_Y1110C)
MFVFLVLLPLVSSQCVNLTTRTQLPPAYTNSFTRGVYYPDKVFRSSVLHSTQDLFLPFFSNVTWFHAIHVSGTNGTKRFDNPVLPFNDGVYFASTEKSNIIRGWIFGTTLDSKTQSLLIVNNATNVVIKVCEFQFCNDPFLGVYYHKNNKSWMESEFRVYSSANNCTFEYVSQPFLMDLEGKQGNFKNLREFVFKNIDGYFKIYSKHTPINLVRDLPQGFSALEPLVDLPIGINITRFQTLLALHRSYLTPGDSSSGWTAGAAAYYVGYLQPRTFLLKYNENGTITDAVDCALDPLSETKCTLKSFTVEKGIYQTSNFRVQPTESIVRFPNITNLCPFGEVFNATRFASVYAWNRKRISNCVADYSVLYNSASFSTFKCYGVSPTKLNDLCFTNVYADSFVIRGDEVRQIAPGQTGKIADYNYKLPDDFTGCVIAWNSNNLDSKVGGNYNYLYRLFRKSNLKPFERDISTEIYQAGSTPCNGVEGFNCYFPLQSYGFQPTNGVGYQPYRVVVLSFELLHAPATVCGPKKSTNLVKNKCVNFNFNGLTGTGVLTESNKKFLPFQQFGRDIADTTDAVRDPQTLEILDITPCSFGGVSVITPGTNTSNQVAVLYQDLNCTEVPVAIHADQLTPTWRVYSTGSNVFQTRAGCLIGAEHVNNSYECDIPIGAGICASYQTQTNSPRRARSVASQSIIAYTMSLGAENSVAYSNNSIACPTNFTISVTTEILPVSMTKTSVDCTMYICGDSTECSNLLLQYGSFCTQLNRALTGIAVEQDKNTQEVFAQVKQIYKTPPIKDFGGFNFSQILPDPSKPSKRSFIEDLLFNKVTLADAGFIKQYGDCLGDIAARDLICAQKFNGLTVLPPLLTDEMIAQYTSALLAGTITSGWTFGAGAALQIPFAMQMAYRFNGIGVTQNVLYENQKLIANQFNSAIGKIQDSLSSTASALGKLQDVVNQNAQALNTLVKQLSSNFGAISSVLNDILSRLDKVEAEVQIDRLITGRLQSLQTYVTQQLIRAAEIRASANLAATKMSECVLGQSKRVDFCGKGYHLMSFPQSAPHGVVFLHVTYVPAQEKNFTTAPAICHDGKAHFPREGVFVSNGTHWFVTQRNFCEPQIITTDNTFVSGNCDVVIGIVNNTVYDPLQPELDSFKEELDKYFKNHTSPDVDLGDISGINASVVNIQKEIDRLNEVAKNLNESLIDLQELGKYEQYIKWPWYIWLGFIAGLIAIVMVTIMLCCMTSCCSCLKGCCSCGSCCKFDEDDSEPVLKGVKLHYT

SEQ ID NO: 691 - protein, 1273 aa, Artificial Sequence
  SARS-CoV-2/Hong Kong/case42_VM20002493/2020__EPI_ISL_414527 spike protein (1-1273)(I714C_Y1110C)
MFVFLVLLPLVSSQCVNLTTRTQLPPAYTNSFTRGVYYPDKVFRSSVLHSTQDLFLPFFSNVTWFHAIHVSGTNGTKRFDNPVLPFNDGVYFASTEKSNIIRGWIFGTTLDSKTQSLLIVNNATNVVIKVCEFQFCNDPFLGVYYHKNNKSWMESEFRVYSSANNCTFEYVSQPFLMDLEGKQGNFKNLREFVFKNIDGYFKIYSKHTPINLVRDLPQGFSALEPLVDLPIGINITRFQTLLALHRSYLTPGDSSSGWTAGAAAYYVGYLQPRTFLLKYNENGTITDAVDCALDPLSETKCTLKSFTVEKGIYQTSNFRVQPTESIVRFPNITNLCPFGEVFNATRFASVYAWNRKRISNCVADYSVLYNSASFSTFKCYGVSPTKLNDLCFTNVYADSFVIRGDEVRQIAPGQTGKIADYNYKLPDDFTGCVIAWNSNNLDSKVGGNYNYLYRLFRKSNLKPFERDISTEIYQAGSTPCNGVEGFNCYFPLQSYGFQPTNGVGYQPYRVVVLSFELLHAPATVCGPKKSTNLVKNKCVNFNFNGLTGTGVLTESNKKFLPFQQFGRDIADTTDAVRDPQTLEILDITPCSFGGVSVITPGTNTSNQVAVLYQDVNCTEVPVAIHADQLTPTWRVYSTGSNVFQTRAGCLIGAEHVNNSYECDIPIGAGICASYQTQTNSPRRARSVASQSIIAYTMSLGAENSVAYSNNSIACPTNFAISVTTEILPVSMTKTSVDCTMYICGDSTECSNLLLQYGSFCTQLNRALTGIAVEQDKNTQEVFAQVKQIYKTPPIKDFGGFNFSQILPDPSKPSKRSFIEDLLFNKVTLADAGFIKQYGDCLGDIAARDLICAQKFNGLTVLPPLLTDEMIAQYTSALLAGTITSGWTFGAGAALQIPFAMQMAYRFNGIGVTQNVLYENQKLIANQFNSAIGKIQDSLSSTASALGKLQDVVNQNAQALNTLVKQLSSNFGAISSVLNDILSRLDKVEAEVQIDRLITGRLQSLQTYVTQQLIRAAEIRASANLAATKMSECVLGQSKRVDFCGKGYHLMSFPQSAPHGVVFLHVTYVPAQEKNFTTAPAICHDGKAHFPREGVFVSNGTHWFVTQRNFCEPQIITTDNTFVSGNCDVVIGIVNNTVYDPLQPELDSFKEELDKYFKNHTSPDVDLGDISGINASVVNIQKEIDRLNEVAKNLNESLIDLQELGKYEQYIKWPWYIWLGFIAGLIAIVMVTIMLCCMTSCCSCLKGCCSCGSCCKFDEDDSEPVLKGVKLHYT

SEQ ID NO: 692 - protein, 1273 aa, Artificial Sequence
  SARS-CoV-2/USA/CruiseA-23/2020__EPI_ISL_414482 spike protein (1-1273)(I714C_Y1110C)
MFVFLVLLPLVSSQCVNLTTRTQLPPAYTNSFTRGVYYPDKVFRSSVLHSTQDLFLPFFSNVTWFHAIHVSGTNGTKRFDNPVLPFNDGVYFASTEKSNIIRGWIFGTTLDSKTQSLLIVNNATNVVIKVCEFQFCNDPFLGVYYHKNNKSWMESEFRVYSSANNCTFEYVSQPFLMDLEVKQGNFKNLREFVFKNIDGYFKIYSKHTPINLVRDLPQGFSALEPLVDLPIGINITRFQTLLALHRSYLTPGDSSSGWTAGAAAYYVGYLQPRTFLLKYNENGTITDAVDCALDPLSETKCTLKSFTVEKGIYQTSNFRVQPTESIVRFPNITNLCPFGEVFNATRFASVYAWNRKRISNCVADYSVLYNSASFSTFKCYGVSPTKLNDLCFTNVYADSFVIRGDEVRQIAPGQTGKIADYNYKLPDDFTGCVIAWNSNNLDSKVGGNYNYLYRLFRKSNLKPFERDISTEIYQAGSTPCNGVEGFNCYFPLQSYGFQPTNGVGYQPYRVVVLSFELLHAPATVCGPKKSTNLVKNKCVNFNFNGLTGTGVLTESNKKFLPFQQFGRDIADTTDAVRDPQTLEILDITPCSFGGVSVITPGTNTSNQVAVLYQDVNCTEVPVAIHADQLTPTWRVYSTGSNVFQTRAGCLIGAEHVNNSYECDIPIGAGICASYQTQTNSPRRARSVASQSIIAYTMSLGAENSVAYSNNSIACPTNFTISVTTEILPVSMTKTSVDCTMYICGDSTECSNLLLQYGSFCTQLNRALTGIAVEQDKNTQEVFAQVKQIYKTPPIKDFGGFNFSQILPDPSKPSKRSFIEDLLFNKVTLADAGFIKQYGDCLGDIAARDLICAQKFNGLTVLPPLLTDEMIAQYTSALLAGTITSGWTFGAGAALQIPFAMQMAYRFNGIGVTQNVLYENQKLIANQFNSAIGKIQDSLSSTASALGKLQDVVNQNAQALNTLVKQLSSNFGAISSVLNDILSRLDKVEAEVQIDRLITGRLQSLQTYVTQQLIRAAEIRASANLAATKMSECVLGQSKRVDFCGKGYHLMSFPQSAPHGVVFLHVTYVPAQEKNFTTAPAICHDGKAHFPREGVFVSNGTHWFVTQRNFCEPQIITTDNTFVSGNCDVVIGIVNNTVYDPLQPELDSFKEELDKYFKNHTSPDVDLGDISGINASVVNIQKEIDRLNEVAKNLNESLIDLQELGKYEQYIKWPWYIWLGFIAGLIAIVMVTIMLCCMTSCCSCLKGCCSCGSCCKFDEDDSEPVLKGVKLHYT

SEQ ID NO: 693 - protein, 1273 aa, Artificial Sequence
  SARS-CoV-2/Hong Kong/case85_VM20002868/2020__EPI_ISL_414519 spike protein (1-1273)(I714C_Y1110C)
MFVFLVLVPLVSSQCVNLTTRTQLPPAYTNSFTRGVYYPDKVFRSSVLHSTQDLFLPFFSNVTWFHAIHVSGTNGTKRFDNPVLPFNDGVYFASTEKSNIIRGWIFGTTLDSKTQSLLIVNNATNVVIKVCEFQFCNDPFLGVYYHKNNKSWMESEFRVYSSANNCTFEYVSQPFLMDLEGKQGNFKNLREFVFKNIDGYFKIYSKHTPINLVRDLPQGFSALEPLVDLPIGINITRFQTLLALHRSYLTPGDSSSGWTAGAAAYYVGYLQPRTFLLKYNENGTITDAVDCALDPLSETKCTLKSFTVEKGIYQTSNFRVQPTESIVRFPNITNLCPFGEVFNATRFASVYAWNRKRISNCVADYSVLYNSASFSTFKCYGVSPTKLNDLCFTNVYADSFVIRGDEVRQIAPGQTGKIADYNYKLPDDFTGCVIAWNSNNLDSKVGGNYNYLYRLFRKSNLKPFERDISTEIYQAGSTPCNGVEGFNCYFPLQSYGFQPTNGVGYQPYRVVVLSFELLHAPATVCGPKKSTNLVKNKCVNFNFNGLTGTGVLTESNKKFLPFQQFGRDIADTTDAVRDPQTLEILDITPCSFGGVSVITPGTNTSNQVAVLYQDVNCTEVPVAIHADQLTPTWRVYSTGSNVFQTRAGCLIGAEHVNNSYECDIPIGAGICASYQTQTNSPRRARSVASQSIIAYTMSLGAENSVAYSNNSIACPTNFTISVTTEILPVSMTKTSVDCTMYICGDSTECSNLLLQYGSFCTQLNRALTGIAVEQDKNTQEVFAQVKQIYKTPPIKDFGGFNFSQILPDPSKPSKRSFIEDLLFNKVTLADAGFIKQYGDCLGDIAARDLICAQKFNGLTVLPPLLTDEMIAQYTSALLAGTITSGWTFGAGAALQIPFAMQMAYRFNGIGVTQNVLYENQKLIANQFNSAIGKIQDSLSSTASALGKLQDVVNQNAQALNTLVKQLSSNFGAISSVLNDILSRLDKVEAEVQIDRLITGRLQSLQTYVTQQLIRAAEIRASANLAATKMSECVLGQSKRVDFCGKGYHLMSFPQSAPHGVVFLHVTYVPAQEKNFTTAPAICHDGKAHFPREGVFVSNGTHWFVTQRNFCEPQIITTDNTFVSGNCDVVIGIVNNTVYDPLQPELDSFKEELDKYFKNHTSPDVDLGDISGINASVVNIQKEIDRLNEVAKNLNESLIDLQELGKYEQYIKWPWYIWLGFIAGLIAIVMVTIMLCCMTSCCSCLKGCCSCGSCCKFDEDDSEPVLKGVKLHYT

SEQ ID NO: 694 - protein, 1273 aa, Artificial Sequence
  SARS-CoV-2/England/200990660/2020__EPI_ISL_414523 spike protein (1-1273)(I714C_Y1110C)
MFVFLVLLPLVSSQCVNLTTRTQLPPAYTNSFTRGVYYPDKVFRSSVLHSTQDLFLPFFSNVTWFHAIHVSGTNGTKRFDNPVLPFNDGVYFASTEKSNIIRGWIFGTTLDSKTQSLLIVNNATNVVIKVCEFQFCNDPFLGVYYHKNNKSWMESEFRVYSSANNCTFEYVSQPFLMDLEGKQGNFKNLREFVFKNIDGYFKIYSKHTPINLVRDLPQGFSALEPLVDLPIGINITRFQTLLALHRSYLTPGDSSSGWTAGAAAYYVGYLQPRTFLLKYNENGTITDAVDCALDPLSETKCTLKSFTVEKGIYQTSNFRVQPTESIVRFPNITNLCPFGEVFNATRFASVYAWNRKRISNCVADYSVLYNSASFSTFKCYGVSPTKLNDLCFTNVYADSFVIRGDEVRQIAPGQTGKIADYNYKLPDDFTGCVIAWNSNNLDSKVGGNYNYLYRLFRKSNLKPFERDISTEIYQAGSTPCNGVEGFNCYFPLQSYGFQPTNGVGYQPYRVVVLSFELLHAPATVCGPKKSTNLVKNKCVNFNFNGLTGTGVLTESNKKFLPFQQFGRDIADTTDAVRDPQTLEILDITPCSFGGVSVITPGTNTSNQVAVLYQGVNCTEVPVAIHADQLTPTWRVYSTGSNVFQTRAGCLIGAEHVNNSYECDIPIGAGICASYQTQTNSPRRARSVASQSIIAYTMSLGAENSVAYSNNSIACPTNFTISVTTEILPVSMTKTSVDCTMYICGDSTECSNLLLQYGSFCTQLNRALTGIAVEQDKNTQEVFAQVKQIYKTPPIKDFGGFNFSQILPDPSKPSKRSFIEDLLFNKVTLADAGFIKQYGDCLGDIAARDLICAQKFNGLTVLPPLLTDEMIAQYTSALLAGTITSGWTFGAGAALQIPFAMQMAYRFNGIGVTQNVLYENQKLIANQFNSAIGKIQDSLSSTASALGKLQDVVNQNAQALNTLVKQLSSNFGAISSVLNDILSRLDKVEAEVQIDRLITGRLQSLQTYVTQQLIRAAEIRASANLAATKMSECVLGQSKRVDFCGKGYHLMSFPQSAPHGVVFLHVTYVPAQEKNFTTAPAICHDGKAHFPREGVFVSNGTHWFVTQRNFCEPQIITTDNTFVSGNCDVVIGIVNNTVYDPLQPELDSFKEELDKYFKNHTSPDVDLGDISGINASVVNIQKEIDRLNEVAKNLNESLIDLQELGKYEQYIKWPWYIWLGFIAGLIAIVMVTIMLCCMTSCCSCLKGCCSCGSCCKFDEDDSELVLKGVKLHYT

SEQ ID NO: 695 - protein, 1273 aa, Artificial Sequence
  SARS-CoV-2/Australia/NSW09/2020__EPI_ISL_413595 spike protein (1-1273)(I714C_Y1110C)
MFVFLVLLPLVSSQCVNLTTRTQLPPAYTNSFTRGVYYPDKVFRSSVLHSTQDLFLPFFSNVTWFHAIHVSGTNGTKRFDNPVLPFNDGVYFASTEKSNIIRGWIFGTTLDSKTQSLLIVNNATNVVIKVCEFQFCNDPFLGVYYHKNNKSWMESEFRVYSSANNCTFEYVSQPFLMDLEGKQGNFKNLREFVFKNIDGYFKIYSKHTPINLVRDLPQGFSALEPLVDLPIGINITRFQTLLALHRSYLTPGDSSSGWTAGAAAYYVGYLQPRTFLLKYNENGTITDAVDCALDPLSETKCTLKSFTVEKGIYQTSNFRVQPTESIVRFPNITNLCPFGEVFNATRFASVYAWNRKRISNCVADYSVLYNSASFSTFKCYGVSPTKLNDLCFTNVYADSFVIRGDEVRQIAPGQTGKIADYNYKLPDDFTGCVIAWNSNNLDSKVGGNYNYLYRLFRKSNLKPFERDISTEIYQAGSTPCNGVEGFNCYFPLQSYGFQPTNGVGYQPYRVVVLSFELLHAPATVCGPKKSTNLVKNKCVNFNFNGLTGTGVLTESNKKFLPFQQFGRDIADTTDAVRDPQTLEILDITPCSFGGVSVITPGTNTSNQVAVLYQDVNCTEVPVAIHADQLTPTWRVYSTGSNVFQTRAGCLIGAEHVNNSYECDIPIGAGICASYQTQTNSPRRARSVASQSIIAYTMSLGAENSVAYSNNSIACPTNFTISVTTEILPVSMTKTSVDCTMYICGDSTECSNLLLQYGSFCTQLNRALTGIAVEQDKNTQEVFAQVKQIYKTPPIKDFGGFNFSQILPDPSKPSKRSFIEDLLFNKVTLADAGFIKQYGDCLGDIAARDLICAQKFNGLTVLPPLLTDEMIAQYTSALLAGTITSGWTFGAGAALQIPFAMQMAYRFNGIGVTQNVLYENQKLIANQFNSAIGKIQDSLSFTASALGKLQDVVNQNAQALNTLVKQLSSNFGAISSVLNDILSRLDKVEAEVQIDRLITGRLQSLQTYVTQQLIRAAEIRASANLAATKMSECVLGQSKRVDFCGKGYHLMSFPQSAPHGVVFLHVTYVPAQEKNFTTAPAICHDGKAHFPREGVFVSNGTHWFVTQRNFCEPQIITTDNTFVSGNCDVVIGIVNNTVYDPLQPELDSFKEELDKYFKNHTSPDVDLGDISGINASVVNIQKEIDRLNEVAKNLNESLIDLQELGKYEQYIKWPWYIWLGFIAGLIAIVMVTIMLCCMTSCCSCLKGCCSCGSCCKFDEDDSEPVLKGVKLHYT

SEQ ID NO: 696 - protein, 1273 aa, Artificial Sequence
  SARS-CoV-2/Australia/NSW10/2020__EPI_ISL_413596 spike protein (1-1273)(I714C_Y1110C)
MFVFLVLLPLVSSQCVNLTTRTQLPPAYTNSFTRGVYYPDKVFRSSVLHSTQDLFLPFFSNVTWFHAIHVSGTNGTKRFDNPVLPFNDGVYFASTEKSNIIRGWIFGTTLDSKTQSLLIVNNATNVVIKVCEFQFCNDPFLGVYYHKNNKSWMESEFRVYSSANNCTFEYVSQPFLMDLEGKQGNFKNLREFVFKNIDGYFKIYSKHTPINLVRDLPQGFSALEPLVDLPIGINITRFQTLLALHRSYLTPGDSSSGWTAGAAAYYVGYLQPRTFLLKYNENGTITDAVDCALDPLSETKCTLKSFTVEKGIYQTSNFRVQPTESIVRFPNITNLCPFGEVFNATRFASVYAWNRKRISNCVADYSVLYNSASFSTFKCYGVSPTKLNDLCFTNVYADSFVIRGDEVRQIAPGQTGKIADYNYKLPDDFTGCVIAWNSNNLDSKVGGNYNYLYRLFRKSNLKPFERDISTEIYQAGSTPCNGVEGFNCYFPLQSYGFQPTNGVGYQPYRVVVLSFELLHAPATVCGPKKSTNLVKNKCVNFNFNGLTGTGVLTESNKKFLPFQQFGRDIADTTDAVRDPQTLEILDITPCSFGGVSVITPGTNTSNQVAVLYQDVNCTEVPVAIHADQLTPTWRVYSTGSNVFQTRAGCLIGAEHVNNSYECDIPIGAGICASYQTQTNSPRRARSVASQSIIAYTMSLGAENSVAYSNNSIACPTNFTISVTTEILPVSMTKTSVDCTMYICGDSTECSNLLLQYGSFCTQLNRALTGIAVEQDKNTQEVFAQVKQIYKTPPIKDFGGFNFSQILPDPSKPSKRSFIEDLLFNKVTLADAGFIKQYGDCLGDIAARDLICAQKFNGLTVLPPLLTDEMIAQYTSALLAGTITSGWTFGAGAALQIPFAMQMAYRFNGIGVTQNVLYENQKLIANQFNSAIGKIQDSLSSTASALGKLQDVVNQNAQALNTLVKQLSSNFGAISSVLNDILSRLDKVEAEVQIDRLITGRLQSLQTYVTQQLIRAAEIRASANLAATKMSECVLGQSKRVDFCGKGYHLMSFPQSAPHGVVFLHVTYVPAQEKNFTTAPAICHDGKAHFPREGVFVSNGTHWFVTQRNFCEPQIITTDNTFVSGNCDVVIGIVNNTVYDPLQPELDSFKEELDKYFKNHTSPDVDLGDISGINASVVNIQKEIDRLNEVAKNLNESLIDLQELGKYEQYIKWPWYIWLGFIAGLIAIVMVTIMLCCMTSCCSCLKGCCSCGSCFKFDEDDSEPVLKGVKLHYT

SEQ ID NO: 697 - protein, 1273 aa, Artificial Sequence
  SARS-CoV-2/Switzerland/1000477797/2020__EPI_ISL_413023 spike protein (1-1273)(I714C_Y1110C)
MFVFLVLLPLVSSQCVNLTTRTQLPPAYTNSFTRGVYYPDKVFRSSVLHSTQDLFLPFFSNVTWFHAIHVSGTNGTKRFDNPVLPFNDGVYFASTEKSNIIRGWIFGTTLDSKTQSLLIVNNATNVVIKVCEFQFCNDPFLGVYYHKNNKSWMESEFRVYSSANNCTFEYVSQPFLMDLEGKQGNFKNLREFVFKNIDGYFNIYSKHTPINLVRDLPQGFSALEPLVDLPIGINITRFQTLLALHRSYLTPGDSSSGWTAGAAAYYVGYLQPRTFLLKYNENGTITDAVDCALDPLSETKCTLKSFTVEKGIYQTSNFRVQPTESIVRFPNITNLCPFGEVFNATRFASVYAWNRKRISNCVADYSVLYNSASFSTFKCYGVSPTKLNDLCFTNVYADSFVIRGDEVRQIAPGQTGKIADYNYKLPDDFTGCVIAWNSNNLDSKVGGNYNYLYRLFRKSNLKPFERDISTEIYQAGSTPCNGVEGFNCYFPLQSYGFQPTNGVGYQPYRVVVLSFELLHAPATVCGPKKSTNLVKNKCVNFNFNGLTGTGVLTESNKKFLPFQQFGRDIADTTDAVRDPQTLEILDITPCSFGGVSVITPGTNTSNQVAVLYQGVNCTEVPVAIHADQLTPTWRVYSTGSNVFQTRAGCLIGAEHVNNSYECDIPIGAGICASYQTQTNSPRRARSVASQSIIAYTMSLGAENSVAYSNNSIACPTNFTISVTTEILPVSMTKTSVDCTMYICGDSTECSNLLLQYGSFCTQLNRALTGIAVEQDKNTQEVFAQVKQIYKTPPIKDFGGFNFSQILPDPSKPSKRSFIEDLLFNKVTLADAGFIKQYGDCLGDIAARDLICAQKFNGLTVLPPLLTDEMIAQYTSALLAGTITSGWTFGAGAALQIPFAMQMAYRFNGIGVTQNVLYENQKLIANQFNSAIGKIQDSLSSTASALGKLQDVVNQNAQALNTLVKQLSSNFGAISSVLNDILSRLDKVEAEVQIDRLITGRLQSLQTYVTQQLIRAAEIRASANLAATKMSECVLGQSKRVDFCGKGYHLMSFPQSAPHGVVFLHVTYVPAQEKNFTTAPAICHDGKAHFPREGVFVSNGTHWFVTQRNFCEPQIITTDNTFVSGNCDVVIGIVNNTVYDPLQPELDSFKEELDKYFKNHTSPDVDLGDISGINASVVNIQKEIDRLNEVAKNLNESLIDLQELGKYEQYIKWPWYIWLGFIAGLIAIVMVTIMLCCMTSCCSCLKGCCSCGSCCKFDEDDSEPVLKGVKLHYT

SEQ ID NO: 698 - protein, 1273 aa, Artificial Sequence
  SARS-CoV-2/Belgium/BA-02291/2020__EPI_ISL_415159 spike protein (1-1273)(I714C_Y1110C)
MFVFLVLLPLVSSQCVNLTTRTQLPPAYTNSFTRGVYYPDKVFRSSVLHSTQDLFLPFFSNVTWFHAIHVSGTNGTKRFDNPVLPFNDGVYFASTEKSNIIRGWIFGTTLDSKTQSLLIVNNATNVVIKVCEFQFCNDPFLGVYYHKNNKSWMESEFRVYSSANNCTFEYVSQPFLMDLEGKQGNFKNLREFVFKNIDGYFKIYSKHTPINLVRDLPQGFSALEPLVDLPIGINITRFQTLLALHRSYLTPGDSSSGWTAGAAAYYVGYLQPRTFLLKYNENGTITDAVDCALDPLSETKCTLKSFTVEKGIYQTSNFRVQPTESIVRFPNITNLCPFGEVFNATRFASVYAWNRKRISNCVADYSVLYNSASFSTFKCYGVSPTKLNDLCFTNVYADSFVIRGDEVRQIAPGQTGKIADYNYKLPDDFTGCVIAWNSNNLDSKVGGNYNYLYRLFRRSNLKPFERDISTEIYQAGSTPCNGVEGFNCYFPLQSYGFQPTNGVGYQPYRVVVLSFELLPAPATVCGPKKSTNLVKNKCVNFNFNGLTGTGVLTESNKKFLPFQQFGRDIADTTDAVRDPQTLEILDITPCSFGGVSVITPGTNTSNQVAVLYQGVNCTEVPVAIHADQLTPTWRVYSTGSNVFQTRAGCLIGAEHVNNSYECDIPIGAGICASYQTQTNSPRRARSVASQSIIAYTMSLGAENSVAYSNNSIACPTNFTISVTTEILPVSMTKTSVDCTMYICGDSTECSNLLLQYGSFCTQLNRALTGIAVEQDKNTQEVFAQVKQIYKTPPIKDFGGFNFSQILPDPSKPSKRSFIEDLLFNKVTLADAGFIKQYGDCLGDIAARDLICAQKFNGLTVLPPLLTDEMIAQYTSALLAGTITSGWTFGAGAALQIPFAMQMAYRFNGIGVTQNVLYENQKLIANQFNSAIGKIQDSLSSAAPALGKLQDVVNQNAQALNTLVKQLSSNFGAISSVLNDILSRLDKVEAEVQIDRLITGRLQSLQTYVTQQLIRAAEIRASANLAATKMSECVLGQSKRVDFCGKGYHLMSFPQSAPHGVVFLHVTYVPAQEKNFTTAPAICHDGKAHFPREGVFVSNGTHWFVTQRNFCEPQIITTDNTFVSGNCDVVIGIVNNTVYDPLQPELDSFKEELDKYFKNHTSPDVDLGDISGINASVVNIQKEIDRLNEVAKNLNESLIDLQELGKYEQYIKWPWYIWLGFIAGLIAIVMVTIMLCCMTSCCSCLKGCCSCGSCCKFDEDDSEPVLKGVKLHYT

SEQ ID NO: 699 - protein, 1273 aa, Artificial Sequence
  SARS-CoV-2/USA/WA8-UW5/2020__EPI_ISL_413486 spike protein (1-1273)(I714C_Y1110C)
MFVFLVLLPLVSSQCVNLTTRTQLPPAYTNSFTRGVYYPDKVFRSSVLHSTQDLFLPFFSNVTWFHAIHVSGTNGTKRFDNPVLPFNDGVYFASTEKSNIIRGWIFGTTLDSKTQSLLIVNNATNVVIKVCEFQFCNDPFLGVYYHKNNKSWMESEFRVYSSANNCTFEYVSQPFLMDLEGKQGNFKNLREFVFKNIDGYFKIYSKHTPINLVRDLPQGFSALEPLVDLPIGINITRFQTLLALHRSYLTPGDSSSGWTAGAAAYYVGYLQPRTFLLKYNENGTITDAVDCALDPLSETKCTLKSFTVEKGIYQTSNFRVQPTESIVRFPNITNLCPFGEVFNATRFASVYAWNRKRISNCVADYSVLYNSASFSTFKCYGVSPTKLNDLCFTNVYADSFVIRGDEVRQIAPGQTGKIADYNYKLPDDFTGCVIAWNSNNLDSKVGGNYNYLYRLFRKSNLKPFERDISTEIYQAGSTPCNGVEGFNCYFPLQSYGFQPTNGVGYQPYRVVVLSFELLHAPATVCGPKKSTNLVKNKCVNFNFNGLTGTGVLTESNKKFLPFQQFGRDIADTTDAVRDPQTLEILDITPCSFGGVSVITPGTNTSNQVAVLYQDVNCTEVPVAIHADQLTPTWRVYSTGSNVFQTRAGCLIGAEYVNNSYECDIPIGAGICASYQTQTNSPRRARSVASQSIIAYTMSLGAENSVAYSNNSIACPTNFTISVTTEILPVSMTKTSVDCTMYICGDSTECSNLLLQYGSFCTQLNRALTGIAVEQDKNTQEVFAQVKQIYKTPPIKDFGGFNFSQILPDPSKPSKRSFIEDLLFNKVTLADAGFIKQYGDCLGDIAARDLICAQKFNGLTVLPPLLTDEMIAQYTSALLAGTITSGWTFGAGAALQIPFAMQMAYRFNGIGVTQNVLYENQKLIANQFNSAIGKIQDSLSSTASALGKLQDVVNQNAQALNTLVKQLSSNFGAISSVLNDILSRLDKVEAEVQIDRLITGRLQSLQTYVTQQLIRAAEIRASANLAATKMSECVLGQSKRVDFCGKGYHLMSFPQSAPHGVVFLHVTYVPAQEKNFTTAPAICHDGKAHFPREGVFVSNGTHWFVTQRNFCEPQIITTDNTFVSGNCDVVIGIVNNTVYDPLQPELDSFKEELDKYFKNHTSPDVDLGDISGINASVVNIQKEIDRLNEVAKNLNESLIDLQELGKYEQYIKWPWYIWLGFIAGLIAIVMVTIMLCCMTSCCSCLKGCCSCGSCCKFDEDDSEPVLKGVKLHYT

SEQ ID NO: 700 - protein, 1273 aa, Artificial Sequence
  SARS-CoV-2/England/20102000506/2020__EPI_ISL_415147 spike protein (1-1273)(I714C_Y1110C)
MFVFLVLLPLVSSQCVNLTTRTQLPPAYTNSFTRGVYYPDKVFRSSVLHSTQDLFLPFFSNVTWFHAIHVSGTNGTKRFDNPVLPFNDGVYFASTEKSNIIRGWIFGTTLDSKTQSLLIVNNATNVVIKVCEFQFCNDPFLGVYYHKNNKSWMESEFRVYSSANNCTFEYVSQPFLMDLEGKQGNFKNLREFVFKNIDGYFKIYSKHTPINLVRDLPQGFSALEPLVDLPIGINITRFQTLLALHRSYLTPGDSSSGWTAGAAAYYVGYLQPRTFLLKYNENGTITDAVDCALDPLSETKCTLKSFTVEKGIYQTSNFRVQPTESIVRFPNITNLCPFGEVFNATRFASVYAWNRKRISNCVADYSVLYNSASFSTFKCYGVSPTKLNDLCFTNVYADSFVIRGDEVRQIAPGQTGKIADYNYKLPDDFTGCVIAWNSNNLDSKVGGNYNYLYRLFRKSNLKPFERDISTEIYQAGSTPCNGVEGFNCYFPLQSYGFQPTNGVGYQPYRVVVLSFELLHAPATVCGPKKSTNLVKNKCVNFNFNGLTGTGVLTESNKKFLPFQQFGRDIADTTDAVRDPQTLEILDITPCSFGGVSVITPGTNTSNQVAVLYQGVNCTEVPVAIHADQLTPTWRVYSTGSNVFQTRAGCLIGAEHVNNSYECDIPIGAGICASYQTQTNSPRRARSVASQSIIAYTMSLGAENSVAYSNNSIACPTNFTISVTTEILPVSMTKTSVDCTMYICGDSTECSNLLLQYGSFCTQLNRALTGIAVEQDKNTQEVFAQVKQIYKTPPIKDFGGFNFSQILPDPSKPSKRSFIEDLLFNKVTLADAGFIKQYGYCLGDIAARDLICAQKFNGLTVLPPLLTDEMIAQYTSALLAGTITSGWTFGAGAALQIPFAMQMAYRFNGIGVTQNVLYENQKLIANQFNSAIGKIQDSLSSTASALGKLQDVVNQNAQALNTLVKQLSSNFGAISSVLNDILSRLDKVEAEVQIDRLITGRLQSLQTYVTQQLIRAAEIRASANLAATKMSECVLGQSKRVDFCGKGYHLMSFPQSAPHGVVFLHVTYVPAQEKNFTTAPAICHDGKAHFPREGVFVSNGTHWFVTQRNFCEPQIITTDNTFVSGNCDVVIGIVNNTVYDPLQPELDSFKEELDKYFKNHTSPDVDLGDISGINASVVNIQKEIDRLNEVAKNLNESLIDLQELGKYEQYIKWPWYIWLGFIAGLIAIVMVTIMLCCMTSCCSCLKGCCSCGSCCKFDEDDSEPVLKGVKLHYT

SEQ ID NO: 701 - protein, 1273 aa, Artificial Sequence
  SARS-CoV-2/Belgium/VAG-03013/2020__EPI_ISL_415155 spike protein (1-1273)(I714C_Y1110C)
MFVFLVLLPLVSSQCVNLTTRTQLPPAYTNSFTRGVYYPDKVFRSSVLHSTQDLFLPFFSNVTWFHAIHVSGTNGTKRFDNPVLPFNDGVYFASTEKSNIIRGWIFGTTLDSKTQSLLIVNNATNVVIKVCEFQFCNDPFLGVYYHKNNKSWMESEFRVYSSANNCTFEYVSQPFLMDLEGKQGNFKNLREFVFKNIDGYFKIYSKHTPINLVRDLPQGFSALEPLVDLPIGINITRFQTLLALHRSYLTPGDSSSGWTAGAAAYYVGYLQPRTFLLKYNENGTITDAVDCALDPLSETKCTLKSFTVEKGIYQTSNFRVQPTESIVRFPNITNLCPFGEVFNATRFASVYAWNRKRISNCVADYSVLYNSASFSTFKCYGVSPTKLNDLCFTNVYADSFVIRGDEVRQIAPGQTGKIADYNYKLPDDFTGCVIAWNSNNLDSKVGGNYNYLYRLFRKSNLKPFERDISTEIYQAGSTPCNGVEGFNCYFPLQSYGFQPTNGVGYQPYRVVVLSFELLHAPATVCGPKKSTNLVKNKCVNFNFNGLTGTGVLTESNKKFLPFQQFGRDIADTTDAVRDPQTLEILDITPCSFGGVSVITPGTNTSNQVAVLYQGVNCTEVPVAIHADQLTPTWRVYSTGSNVFQTRAGCLIGAEHVNNSYECDIPIGAGICASYQTQTNSPRRARSVASQSIIAYTMSLGAENSVAYSNNSIACPTNFTISVTTEILPVSMTKTSVDCTMYICGDSTECSNLLLQYGSFCTQLNRALTGIAVEQDKNTQEVFAQVKQIYKTPPIKDFGGFNFSQILPDPSKPSKRSFIEDLLFNKVTLADAGFIKQYGDCLGDIAARDLICAQKFNGLTVLPPLLTDEMIAQYTSALLAGTITSGWTFGAGAALQIPFAMQMAYRFNGIGVTQNVLYENQKLIANQFNSAIGKIQDSLSSTATALGKLQDVVNQNAQALNTLVKQLSSNFGAISSVLNDILSRLDKVEAEVQIDRLITGRLQSLQTYVTQQLIRAAEIRASANLAATKMSECVLGQSKRVDFCGKGYHLMSFPQSAPHGVVFLHVTYVPAQEKNFTTAPAICHDGKAHFPREGVFVSNGTHWFVTQRNFCEPQIITTDNTFVSGNCDVVIGIVNNTVYDPLQPELDSFKEELDKYFKNHTSPDVDLGDISGINASVVNIQKEIDRLNEVAKNLNESLIDLQELGKYEQYIKWPWYIWLGFIAGLIAIVMVTIMLCCMTSCCSCLKGCCSCGSCCKFDEDDSEPVLKGVKLHYT

SEQ ID NO: 702 - protein, 1273 aa, Artificial Sequence
  SARS-CoV-2/Belgium/BC-03016/2020__EPI_ISL_415157 spike protein (1-1273)(I714C_Y1110C)
MFVFLVLLPLVSSQCVNLTTRTQLPPAYTNSFTRGVYYPDKVFRSSVLHSTQDLFLPFFSNVTWFHAIHVSGTNGTKRFDNPVLPFNDGVYFASTEKSNIIRGWIFGTTLDSKTQSLLIVNNATNVVIKVCEFQFCNDPFLGVYYHKNNKSWMESEFRVYSSANNCTFEYVSQPFLMDLEGKQGNFKNLREFVFKNIDGYFKIYSKHTPINLVRDLPQGFSALEPLVDLPIGINITRFQTLLALHRSYLTPGDSSSGWTAGAAAYYVGYLQPRTFLLKYNENGTITDAVDCALDPLSETKCTLKSFTVEKGIYQTSNFRVQPTESIVRFPNITNLCPFGEVFNATRFASVYAWNRKRISNCVADYSVLYNSASFSTFKCYGVSPTKLNDLCFTNVYADSFVIRGDEVRQIAPGQTGKIADYNYKLPDDFTGCVIAWNSNNLDSKVGGNYNYLYRLFRKSNLKPFERDISTEIYQAGSTPCNGVEGFNCYFPLQSYGFQPTNGVGYQPYRVVVLSFELLHAPATVCGPKKSTNLVKNKCVNFNFNGLTGTGVLTESNKKFLPFQQFGRDIADTTDAVRDPQTLEILDITPCSFGGVSVITPGTNTSNQVAVLYQGVNCTEVPVAIHADQLTPTWRVYSTGSNVFQTRAGCLIGAEHVNNSYECDIPIGAGICASYQTQTNSPRRARSVASQSIIAYTMSLGAENSVAYSNNSIACPTNFTISVTTEILPVSMTKTSVDCTMYICGDSTECSNLLLQYGSFCTQLNRALTGIAVEQDKNTQEVFAQVKQIYKTPPIKDFGGFNFSQILPDPSKPSKRSFIEDLLFNKVTLADAGFIKQYGDCLGDIAARDLICAQKFNGLTVLPPLLTDEMIAQYTSALLAGTITSGWTFGAGAALQIPFAMQMAYRFNGIGVTQNVLYENQKLIANQFNSAIGKIQDSLSSTAPALGKLQDVVNQNAQALNTLVKQLSSNFGAISSVLNDILSRLDKVEAEVQIDRLITGRLQSLQTYVTQQLIRAAEIRASANLAATKMSECVLGQSKRVDFCGKGYHLMSFPQSAPHGVVFLHVTYVPAQEKNFTTAPAICHDGKAHFPREGVFVSNGTHWFVTQRNFCEPQIITTDNTFVSGNCDVVIGIVNNTVYDPLQPELDSFKEELDKYFKNHTSPDVDLGDISGINASVVNIQKEIDRLNEVAKNLNESLIDLQELGKYEQYIKWPWYIWLGFIAGLIAIVMVTIMLCCMTSCCSCLKGCCSCGSCCKFDEDDSEPVLKGVKLHYT

SEQ ID NO: 703 - protein, 1273 aa, Artificial Sequence
  SARS-CoV-2/Germany/BavPat3/2020__EPI_ISL_414521 spike protein (1-1273)(I714C_Y1110C)
MFVFLVLLPLVSSQCVNLTTRTQLPPAYTNSFTRGVYYPDKVFRSSVLHSTQDLFLPFFSNVTWFHAIHVSGTNGTKRFDNPVLPFNDGVYFASTEKSNIIRGWIFGTTLDSKTQSLLIVNNATNVVIKVCEFQFCNDPFLGVYYHKNNKSWMESEFRVYSSANNCTFEYVSQPFLMDLEGKQGNFKNLREFVFKNIDGYFKIYSKHTPINLVRDLPQGFSALEPLVDLPIGINITRFQTLLALHRSYLTPGDSSSGWTAGAAAYYVGYLQPRTFLLKYNENGTITDAVDCALDPLSETKCTLKSFTVEKGIYQTSNFRVQPTESIVRFPNITNLCPFGEVFNATRFASVYAWNRKRISNCVADYSVLYNSASFSTFKCYGVSPTKLNDLCFTNVYADSFVIRGDEVRQIAPGQTGKIADYNYKLPDDFTGCVIAWNSNNLDSKVGGNYNYLYRLFRKSNLKPFERDISTEIYQAGSTPCNGVEGFNCYFPLQSYGFQPTNGVGYQPYRVVVLSFELLHAPATVCGPKKSTNLVKNKCVNFNFNGLTGTGVLTESNKKFLPFQQFGRDIADTTDAVRDPQTLEILDITPCSFGGVSVITPGTNTSNQVAVLYQDVNCTEVPVAIHADQLTPTWRVYSTGSNVFQTRAGCLIGAEHVNNSYECDIPIGAGICASYQTQTNSPRRARSVASQSIIAYTMSLGAENSVAYSNNSIACPTNFTISVTTEILPVSMTKTSVDCTMYICGDSTECSNLLLQYGSFCTQLNRALTGIAVEQDKNTQQVFAQVKQIYKTPPIKDFGGFNFSQILPDPSKPSKRSFIEDLLFNKVTLADAGFIKQYGDCLGDIAARDLICAQKFNGLTVLPPLLTDEMIAQYTSALLAGTITSGWTFGAGAALQIPFAMQMAYRFNGIGVTQNVLYENQKLIANQFNSAIGKIQDSLSSTASALGKLQDVVNQNAQALNTLVKQLSSNFGAISSVLNDILSRLDKVEAEVQIDRLITGRLQSLQTYVTQQLIRAAEIRASANLAATKMSECVLGQSKRVDFCGKGYHLMSFPQSAPHGVVFLHVTYVPAQEKNFTTAPAICHDGKAHFPREGVFVSNGTHWFVTQRNFCEPQIITTDNTFVSGNCDVVIGIVNNTVYDPLQPELDSFKEELDKYFKNHTSPDVDLGDISGINASVVNIQKEIDRLNEVAKNLNESLIDLQELGKYEQYIKWPWYIWLGFIAGLIAIVMVTIMLCCMTSCCSCLKGCCSCGSCCKFDEDDSEPVLKGVKLHYT

SEQ ID NO: 704 - protein, 1273 aa, Artificial Sequence
  SARS-CoV-2/France/HF1805/2020__EPI_ISL_414628 spike protein (1-1273)(I714C_Y1110C)
MFVFLVLLPLVSSQCVNLTTRTQLPPAYTNSFTRGVYYPDKVFRSSVLHSTQDLFLPFFSNVTWFHAIHVSGTNGTKRFDNPVLPFNDGVYFASTEKSNIIRGWIFGTTLDSKTQSLLIVNNATNVVIKVCEFQFCNDPFLGVYYHKNNKSWMESEFRVYSSANNCTFEYVSQPFLMDLEGKQGNFKNLREFVFKNIDGYFKIYSKHTPINLVRDLPQGFSALEPLVDLPIGINITRFQTLLALHRSYLTPGDSSSGWTAGAAAYYVGYLQPRTFLLKYNENGTITDAVDCALDPLSETKCTLKSFTVEKGIYQTSNFRVQPTESIVRFPNITNLCPFGEVFNATRFASVYAWNRKRISNCVADYSVLYNSASFSTFKCYGVSPTKLNDLCFTNVYADSFVIRGDEVRQIAPGQTGKIADYNYKLPDDFTGCVIAWNSNNLDSKVGGNYNYLYRLFRKSNLKPFERDISTEIYQAGSTPCNGVEGFNCYFPLQSYGFQPTNGVGYQPYRVVVLSFELLHAPATVCGPKKSTNLVKNKCVNFNFNGLTGTGVLTESNKKFLPFQQFGRDIADTTDAVRDPQTLEILDITPCSFGGVSVITPGTNTSNQVAVLYQGVNCTEVPVAIHADQLTPTWRVYSTGSNVFQTRAGCLIGAEHVNNSYECDIPIGAGICASYQTQTNSPRRARSVASQSIIAYTMSLGAENSVAYSNNSIACPTNFTISVTTEILPVSMTKTSVDCTMYICGDSTECSNLLLQYGSFCTQLNRALTGIAVEQDKNTQEVFAQVKQIYKTPPIKDFGGFNFSQILPDPSKPSKRSFIEDLLFNKVTLADAGFIKQYGDCLGDIAARDLICAQKFNGLTVLPPLLTDEMIAQYTSALLAGTITSGWTFGAGAALQIPFAMQMAYRFNGIGVTQNVLYENQKLIANQFNSAIGKIQDSLSSTASALGKLQDVVNQNAQALNTLVKQLSSNFGAISSVLNDILSRLDKVEAEVQIDRLITGRLQSLQTYVTQQLIRAAEIRASANLAATKMSECVLGQSKRVDFCGKGYHLMSFPQSAPHGVVFLHVTYVPAQEKNFTTAPAICHDGKAHFPREGVFVSNGTHWFVTQRNFCEPQIITTDNTFVSGNCDVVIGVVNNTVYDPLQPELDSFKEELDKYFKNHTSPDVDLGDISGINASVVNIQKEIDRLNEVAKNLNESLIDLQELGKYEQYIKWPWYIWLGFIAGLIAIVMVTIMLCCMTSCCSCLKGCCSCGSCCKFDEDDSEPVLKGVKLHYT

SEQ ID NO: 705 - protein, 1273 aa, Artificial Sequence
  SARS-CoV-2/Netherlands/ZuidHolland_9/2020__EPI_ISL_414445 spike protein (1-1273)(I714C_Y1110C)
MFVFLVLLPLVSSQCVNLTTRTQLPPAYTNSFTRGVYYPDKVFRSSVLHSTQDLFLPFFSNVTWFHAIHVSGTNGTKRFDNPVLPFNDGVYFASTEKSNIIRGWIFGTTLDSKTQSLLIVNNATNVVIKVCEFQFCNDPFLGVYYHKNNKSWMESEFRVYSSANNCTFEYVSQPFLMDLEGKQGNFKNLREFVFKNIDGYFKIYSKHTPINLVRDLPQGFSALEPLVDLPIGINITRFQTLLALHRSYLTPGDSSSGWTAGAAAYYVGYLQPRTFLLKYNENGTITDAVDCALDPLSETKCTLKSFTVEKGIYQTSNFRVQPTESIVRFPNITNLCPFGEVFNATRFASVYAWNRKRISNCVADYSVLYNSASFSTFKCYGVSPTKLNDLCFTNVYADSFVIRGDEVRQIAPGQTGKIADYNYKLPDDFTGCVIAWNSNNLDSKVGGNYNYLYRLFRKSNLKPFERDISTEIYQAGSTPCNGVEGFNCYFPLQSYGFQPTNGVGYQPYRVVVLSFELLHAPATVCGPKKSTNLVKNKCVNFNFNGLTGTGVLTESNKKFLPFQQFGRDIADTTDAVRDPQTLEILDITPCSFGGVSVITPGTNTSNQVAVLYQGVNCTEVPVAIHADQLTPTWRVYSTGSNVFQTRAGCLIGAEHVNNSYECDIPIGAGICASYQTQTNSPRRARSVASQSIIAYTMSLGAENSVAYSNNSIACPTNFTISVTTEILPVSMTKTSVDCTMYICGDSTECSNLLLQYGSFCTQLNRALTGIAVEQDKNTQEVFAQVKQIYKTPPIKDFGGFNFSQILPDPSKPSKRSFIEDLLFNKVTLADAGFIKQYGDCLGDIAARDLICVQKFNGLTVLPPLLTDEMIAQYTSALLAGTITSGWTFGAGAALQIPFAMQMAYRFNGIGVTQNVLYENQKLIANQFNSAIGKIQDSLSSTASALGKLQDVVNQNAQALNTLVKQLSSNFGAISSVLNDILSRLDKVEAEVQIDRLITGRLQSLQTYVTQQLIRAAEIRASANLAATKMSECVLGQSKRVDFCGKGYHLMSFPQSAPHGVVFLHVTYVPAQEKNFTTAPAICHDGKAHFPREGVFVSNGTHWFVTQRNFCEPQIITTDNTFVSGNCDVVIGIVNNTVYDPLQPELDSFKEELDKYFKNHTSPDVDLGDISGINASVVNIQKEIDRLNEVAKNLNESLIDLQELGKYEQYIKWPWYIWLGFIAGLIAIVMVTIMLCCMTSCCSCLKGCCSCGSCCKFDEDDSEPVLKGVKLHYT

SEQ ID NO: 706 - protein, 1273 aa, Artificial Sequence
  SARS-CoV-2/Finland/FIN03032020A/2020__EPI_ISL_413602 spike protein (1-1273)(I714C_Y1110C)
MFVFLVLLPLVSSQCVNLTTRTQLPPAYTNSFTRGVYYPDKVFRSSVLHSTQDLFLPFFSNVTWFHAIHVSGTNGTKRFDNPVLPFNDGVYFASTEKSNIIRGWIFGTTLDSKTQSLLIVNNATNVVIKVCEFQFCNDPFLGVYYHKNNKSWMESEFRVYSSANNCTFEYVSQPFLMDLEGKQGNFKNLREFVFKNIDGYFKIYSKHTPINLVRDLPQGFSALEPLVDLPIGINITRFQTLLALHRSYLTPGDSSSGWTAGAAAYYVGYLQPRTFLLKYNENGTITDAVDCALDPLSETKCTLKSFTVEKGIYQTSNFRVQPTESIVRFPNITNLCPFGEVFNATRFASVYAWNRKRISNCVADYSVLYNSASFSTFKCYGVSPTKLNDLCFTNVYADSFVIRGDEVRQIAPGQTGKIADYNYKLPDDFTGCVISWNSNNLDSKVGGNYNYLYRLFRKSNLKPFERDISTEIYQAGSTPCNGVEGFNCYFPLQSYGFQPTNGVGYQPYRVVVLSFELLHAPATVCGPKKSTNLVKNKCVNFNFNGLTGTGVLTESNKKFLPFQQFGRDIADTTDAVRDPQTLEILDITPCSFGGVSVITPGTNTSNQVAVLYQGVNCTEVPVAIHADQLTPTWRVYSTGSNVFQTRAGCLIGAEHVNNSYECDIPIGAGICASYQTQTNSPRRARSVASQSIIAYTMSLGAENSVAYSNNSIACPTNFTISVTTEILPVSMTKTSVDCTMYICGDSTECSNLLLQYGSFCTQLNRALTGIAVEQDKNTQEVFAQVKQIYKTPPIKDFGGFNFSQILPDPSKPSKRSFIEDLLFNKVTLADAGFIKQYGDCLGDIAARDLICAQKFNGLTVLPPLLTDEMIAQYTSALLAGTITSGWTFGAGAALQIPFAMQMAYRFNGIGVTQNVLYENQKLIANQFNSAIGKIQDSLSSTASALGKLQDVVNQNAQALNTLVKQLSSNFGAISSVLNDILSRLDKVEAEVQIDRLITGRLQSLQTYVTQQLIRAAEIRASANLAATKMSECVLGQSKRVDFCGKGYHLMSFPQSAPHGVVFLHVTYVPAQEKNFTTAPAICHDGKAHFPREGVFVSNGTHWFVTQRNFCEPQIITTDNTFVSGNCDVVIGIVNNTVYDPLQPELDSFKEELDKYFKNHTSPDVDLGDISGINASVVNIQKEIDRLNEVAKNLNESLIDLQELGKYEQYIKWPWYIWLGFIAGLIAIVMVTIMLCCMTSCCSCLKGCCSCGSCCKFDEDDSEPVLKGVKLHYT

SEQ ID NO: 707 - protein, 1273 aa, Artificial Sequence
  SARS-CoV-2/France/GE1977/2020__EPI_ISL_414632 spike protein (1-1273)(I714C_Y1110C)
MFVFLVLLPLVSSQCVNLTTRTQLPPAYTNSFTRGVYYPDKVFRSSVLHSTQDLFLPFFSNVTWFHAIHVSGTNGTKRFDNPVLPFNDGVYFASTEKSNIIRGWIFGTTLDSKTQSLLIVNNATNVVIKVCEFQFCNDPFLGVYYHKNNKSWMESEFRVYSSANNCTFEYVSQPFLMDLEGKQGNFKNLREFVFKNIDGYFKIYSKHTPINLVRDLPQGFSALEPLVDLPIGINITRFQTLLALHRSYLTPGDSSSGWTAGAAAYYVGYLQPRTFLLKYNENGTITDAVDCALDPLSETKCTLKSFTVEKGIYQTSNFRVQPTESIVRFPNITNLCPFGEVFNATRFASVYAWNRKRISNCVADYSVLYNSASFSTFKCYGVSPTKLNDLCFTNVYADSFVIRGDEVRQIAPGQTGKIADYNYKLPDDFTGCVIAWNSNNLDSKVGGNYNYLYRLFRKSNLKPFERDISTEIYQAGSTPCNGVEGFNCYFPLQSYGFQPTNGVGYQPYRVVVLSFELLHAPATVCGPKKSTNLVKNKCVNFNFNGLTGTGVLTESNKKFLPFQQFGRDIADTTDAVRDPQTLEILDITPCSFGGVSVITPGTNTSNQVAVLYQGVNCTEVPVAIHADQLTPTWRVYSTGSNVFQTRAGCLIGAEHVNNSYECDIPIGAGICASYQTQTNSPRRARSVASQSIIAYTMSLGAENSVAYSNNSIACPTNFTISVTTEILPVSMTKTSVDCTMYICGDSTECSNLLLQYGSFCTQLNRALTGIAVEQDKNTQEVFAQVKQIYKTPPIKDFGGFNFSQILPDPSKPSKRSFIEDLLFNKVTLADAGFIKQYGDCLGDIAARDLICAQKFNGLTVLPPLLTDEMIAQYTSALLAGTITSGWTFGAGAALQIPFAMQMAYRFNGIGVTQNVLYENQKLIANQFNSAIGKIQDSLFSTASALGKLQDVVNQNAQALNTLVKQLSSNFGAISSVLNDILSRLDKVEAEVQIDRLITGRLQSLQTYVTQQLIRAAEIRASANLAATKMSECVLGQSKRVDFCGKGYHLMSFPQSAPHGVVFLHVTYVPAQEKNFTTAPAICHDGKAHFPREGVFVSNGTHWFVTQRNFCEPQIITTDNTFVSGNCDVVIGIVNNTVYDPLQPELDSFKEELDKYFKNHTSPDVDLGDISGINASVVNIQKEIDRLNEVAKNLNESLIDLQELGKYEQYIKWPWYIWLGFIAGLIAIVMVTIMLCCMTSCCSCLKGCCSCGSCCKFDEDDSEPVLKGVKLHYT

SEQ ID NO: 708 - protein, 1273 aa, Artificial Sequence
  SARS-CoV-2/Finland/FIN-313/2020__EPI_ISL_414641 spike protein (1-1273)(I714C_Y1110C)
MFVFLVLLPLVSSQCVNLTTRTQLPPAYTNSFTRGVYYPDKVFRSSVLHSTQDLFLPFFSNVTWFHAIHVSGTNGTKRFDNPVLPFNDGVYFASTEKSNIIRGWIFGTTLDSKTQSLLIVNNATNVVIKVCEFQFCNDPFLGVYYHKNNKSWMESEFRVYSSANNCTFEYVSQPFLMDLEGKQGNFKNLREFVFKNIDGYFKIYSKHTPINLVRDLPQGFSALEPLVDLPIGINITRFKTLLALHRSYLTPGDSSSGWTAGAAAYYVGYLQPRTFLLKYNENGTITDAVDCALDPLSETKCTLKSFTVEKGIYQTSNFRVQPTESIVRFPNITNLCPFGEVFNATRFASVYAWNRKRISNCVADYSVLYNSASFSTFKCYGVSPTKLNDLCFTNVYADSFVIRGDEVRQIAPGQTGKIADYNYKLPDDFTGCVIAWNSNNLDSKVGGNYNYLYRLFRKSNLKPFERDISTEIYQAGSTPCNGVEGFNCYFPLQSYGFQPTNGVGYQPYRVVVLSFELLHAPATVCGPKKSTNLVKNKCVNFNFNGLTGTGVLTESNKKFLPFQQFGRDIADTTDAVRDPQTLEILDITPCSFGGVSVITPGTNTSNQVAVLYQGVNCTEVPVAIHADQLTPTWRVYSTGSNVFQTRAGCLIGAEHVNNSYECDIPIGAGICASYQTQTNSPRRARSVASQSIIAYTMSLGAENSVAYSNNSIACPTNFTISVTTEILPVSMTKTSVDCTMYICGDSTECSNLLLQYGSFCTQLNRALTGIAVEQDKNTQEVFAQVKQIYKTPPIKDFGGFNFSQILPDPSKPSKRSFIEDLLFNKVTLADAGFIKQYGDCLGDIAARDLICAQKFNGLTVLPPLLTDEMIAQYTSALLAGTITSGWTFGAGAALQIPFAMQMAYRFNGIGVTQNVLYENQKLIANQFNSAIGKIQDSLSSTASALGKLQDVVNQNAQALNTLVKQLSSNFGAISSVLNDILSRLDKVEAEVQIDRLITGRLQSLQTYVTQQLIRAAEIRASANLAATKMSECVLGQSKRVDFCGKGYHLMSFPQSAPHGVVFLHVTYVPAQEKNFTTAPAICHDGKAHFPREGVFVSNGTHWFVTQRNFCEPQIITTDNTFVSGNCDVVIGIVNNTVYDPLQPELDSFKEELDKYFKNHTSPDVDLGDISGINASVVNIQKEIDRLNEVAKNLNESLIDLQELGKYEQYIKWPWYIWLGFIAGLIAIVMVTIMLCCMTSCCSCLKGCCSCGSCCKFDEDDSEPVLKGVKLHYT

SEQ ID NO: 709 - protein, 1273 aa, Artificial Sequence
  SARS-CoV-2/Netherlands/ZuidHolland_2/2020__EPI_ISL_414556 spike protein (1-1273)(I714C_Y1110C)
MFVFLVLLPLVSSQCVNLTTRTQLPPAYTNSFTRGVYYPDKVFRSSVLHSTQDLFLPFFSNVTWFHAIHVSGTNGTKRFDNPVLPFNDGVYFASTEKSNIIRGWIFGTTLDSKTQSLLIVNNATNVVIKVCEFQFCNDPFLGVYYHKNNKSWMESEFRVYSSANNCTFEYVSQPFLMDLEGKQGNFKNLREFVFKNIDGYFKIYSKHTPINLVRDLPQGFSALEPLVDLPIGINITRFQTLLALHRSYLTPGDSSSGWTAGAAAYYVGYLQPRTFLLKYNENGTITDAVDCALDPLSETKCTLKSFTVEKGIYQTSNFRVQPTESIVRFPNITNLCPFGEVFNATRFASVYAWNRKRISNCVADYSVLYNSASFSTFKCYGVSPTKLNDLCFTNVYADSFVIRGDEVRQIAPGQTGKIADYNYKLPDDFTGCVIAWNSNNLDSKVGGNYNYLYRLFRKSNLKPFERDISTEIYQAGSTPCNGVEGFNCYFPLQSYGFQPTNGVGYQPYRVVVLSFELLHAPATVCGPKKSTNLVKNKCVNFNFNGLTGTGVLTESNKKFLPFQQFGRDIADTTDAVRDPQTLEILDITPCSFGGVSVITPGTNTSNQVAVLYQGVNCTEVPVAIHADQLTPTWRVYSTGSNVFQTRAGCLIGAEHVNNSYECDIPIGAGICASYQTQTNSPRRARSVASQSIIAYTMSLGAENSVAYSNNSIACPTNFTISVTTEILPVSMTKTSVDCTMYICGDSTECSNLLLQYGSFCTQLNRALTGIALEQDKNTQEVFAQVKQIYKTPPIKDFGGFNFSQILPDPSKPSKRSFIEDLLFNKVTLADAGFIKQYGDCLGDIAARDLICAQKFNGLTVLPPLLTDEMIAQYTSALLAGTITSGWTFGAGAALQIPFAMQMAYRFNGIGVTQNVLYENQKLIANQFNSAIGKIQDSLSSTASALGKLQDVVNQNAQALNTLVKQLSSNFGAISSVLNDILSRLDKVEAEVQIDRLITGRLQSLQTYVTQQLIRAAEIRASANLAATKMSECVLGQSKRVDFCGKGYHLMSFPQSAPHGVVFLHVTYVPAQEKNFTTAPAICHDGKAHFPREGVFVSNGTHWFVTQRNFCEPQIITTDNTFVSGNCDVVIGIVNNTVYDPLQPELDSFKEELDKYFKNHTSPDVDLGDISGINASVVNIQKEIDRLNEVAKNLNESLIDLQELGKYEQYIKWPWYIWLGFIAGLIAIVMVTIMLCCMTSCCSCLKGCCSCGSCCKFDEDDSEPVLKGVKLHYT

SEQ ID NO: 710 - protein, 1273 aa, Artificial Sequence
  SARS-CoV-2/USA/WA-UW31/2020__EPI_ISL_414618 spike protein (1-1273)(I714C_Y1110C)
MFVFLVLLPLVSSQCVNLTTRTQLPPAYTNSFTRGVYYPDKVFRSSVLHSTQDLFLPFFSNVTWFHAIHVSGTNGTKRFDNPVLPFNDGVYFASTEKSNIIRGWIFGTTLDSKTQSLLIVNNATNVVIKVCEFQFCNDPFLGVYYHKNNKSWMESEFRVYSSANNCTFEYVSQPFLMDLEGKQGNFKNLREFVFKNIDGYFKIYSKHTPINLVRDLPQGFSALEPLVDLPIGINITRFQTLLALHRSYLTPGDSSSGWTAGAAAYYVGYLQPRTFLLKYNENGTITDAVDCALDPLSETKCTLKSFTVEKGIYQTSNFRVQPTESIVRFPNITNLCPFGEVFNATRFASVYAWNRKRISNCVADYSVLYNSASFSTFKCYGVSPTKLNDLCFTNVYADSFVIRGDEVRQIAPGQTGKIADYNYKLPDDFTGCVIAWNSNNLDSKVGGNYNYLYRLFRKSNLKPFERDISTEIYQAGSTPCNGAEGFNCYFPLQSYGFQPTNGVGYQPYRVVVLSFELLHAPATVCGPKKSTNLVKNKCVNFNFNGLTGTGVLTESNKKFLPFQQFGRDIADTTDAVRDPQTLEILDITPCSFGGVSVITPGTNTSNQVAVLYQDVNCTEVPVAIHADQLTPTWRVYSTGSNVFQTRAGCLIGAEHVNNSYECDIPIGAGICASYQTQTNSPRRARSVASQSIIAYTMSLGAENSVAYSNNSIACPTNFTISVTTEILPVSMTKTSVDCTMYICGDSTECSNLLLQYGSFCTQLNRALTGIAVEQDKNTQEVFAQVKQIYKTPPIKDFGGFNFSQILPDPSKPSKRSFIEDLLFNKVTLADAGFIKQYGDCLGDIAARDLICAQKFNGLTVLPPLLTDEMIAQYTSALLAGTITSGWTFGAGAALQIPFAMQMAYRFNGIGVTQNVLYENQKLIANQFNSAIGKIQDSLSSTASALGKLQDVVNQNAQALNTLVKQLSSNFGAISSVLNDILSRLDKVEAEVQIDRLITGRLQSLQTYVTQQLIRAAEIRASANLAATKMSECVLGQSKRVDFCGKGYHLMSFPQSAPHGVVFLHVTYVPAQEKNFTTAPAICHDGKAHFPREGVFVSNGTHWFVTQRNFCEPQIITTDNTFVSGNCDVVIGIVNNTVYDPLQPELDSFKEELDKYFKNHTSPDVDLGDISGINASVVNIQKEIDRLNEVAKNLNESLIDLQELGKYEQYIKWPWYIWLGFIAGLIAIVMVTIMLCCMTSCCSCLKGCCSCGSCCKFDEDDSEPVLKGVKLHYT

SEQ ID NO: 711 - protein, 1273 aa, Artificial Sequence
  SARS-CoV-2/South Korea/SNU01/2020__EPI_ISL_411929 spike protein (1-1273)(I714C_Y1110C)
MFVFLVLLPLVSSQCVNLTTRTQLPPAYTNSFTRGVYYPDKVFRSSVLHSTQDLFLPFFSNVTWFHAIHVSGTNGTKRFDNPVLPFNDGVYFASTEKSNIIRGWIFGTTLDSKTQSLLIVNNATNVVIKVCEFQFCNDPFLGVYYHKNNKSWMESEFRVYSSANNCTFEYVSQPFLMDLEGKQGNFKNLREFVFKNIDGYFKIYSKHTPINLVRDLPQGFWALEPLVDLPIGINITRFQTLLALHRSYLTPGDSSSGWTAGAAAYYVGYLQPRTFLLKYNENGTITDAVDCALDPLSETKCTLKSFTVEKGIYQTSNFRVQPTESIVRFPNITNLCPFGEVFNATRFASVYAWNRKRISNCVADYSVLYNSASFSTFKCYGVSPTKLNDLCFTNVYADSFVIRGDEVRQIAPGQTGKIADYNYKLPDDFTGCVIAWNSNNLDSKVGGNYNYLYRLFRKSNLKPFERDISTEIYQAGSTPCNGVEGFNCYFPLQSYGFQPTNGVGYQPYRVVVLSFELLHAPATVCGPKKSTNLVKNKCVNFNFNGLTGTGVLTESNKKFLPFQQFGRDIADTTDAVRDPQTLEILDITPCSFGGVSVITPGTNTSNQVAVLYQDVNCTEVPVAIHADQLTPTWRVYSTGSNVFQTRAGCLIGAEHVNNSYECDIPIGAGICASYQTQTNSPRRARSVASQSIIAYTMSLGAENSVAYSNNSIACPTNFTISVTTEILPVSMTKTSVDCTMYICGDSTECSNLLLQYGSFCTQLNRALTGIAVEQDKNTQEVFAQVKQIYKTPPIKDFGGFNFSQILPDPSKPSKRSFIEDLLFNKVTLADAGFIKQYGDCLGDIAARDLICAQKFNGLTVLPPLLTDEMIAQYTSALLAGTITSGWTFGAGAALQIPFAMQMAYRFNGIGVTQNVLYENQKLIANQFNSAIGKIQDSLSSTASALGKLQDVVNQNAQALNTLVKQLSSNFGAISSVLNDILSRLDKVEAEVQIDRLITGRLQSLQTYVTQQLIRAAEIRASANLAATKMSECVLGQSKRVDFCGKGYHLMSFPQSAPHGVVFLHVTYVPAQEKNFTTAPAICHDGKAHFPREGVFVSNGTHWFVTQRNFCEPQIITTDNTFVSGNCDVVIGIVNNTVYDPLQPELDSFKEELDKYFKNHTSPDVDLGDISGINASVVNIQKEIDRLNEVAKNLNESLIDLQELGKYEQYIKWPWYIWLGFIAGLIAIVMVTIMLCCMTSCCSCLKGCCSCGSCCKFDEDDSEPVLKGVKLHYT

SEQ ID NO: 712 - protein, 1273 aa, Artificial Sequence
  SARS-CoV-2/China/WF0004/2020__EPI_ISL_413694 spike protein (1-1273)(I714C_Y1110C)
MFVFLVLLPLVSSQCVNLTTRTQLPPAYTNSFTRGVYYPDKVFRSSVLHSTQDLFLPFFSNVTWFHAIHVSGTNGTKRFDNPVLPFNDGVYFASTEKSNIIRGWIFGTTLDSKTQSLLIVNNATNVVIKVCEFQFCNDPFLGVYYHKNNKSWTESEFRVYSSANNCTFEYVSQPFLMDLEGKQGNFKNLREFVFKNIDGYFKIYSKHTPINLVRDLPQGFSALEPLVDLPIGINITRFQTLLALHRSYLTPGDSSSGWTAGAAAYYVGYLQPRTFLLKYNENGTITDAVDCALDPLSETKCTLKSFTVEKGIYQTSNFRVQPTESIVRFPNITNLCPFGEVFNATRFASVYAWNRKRISNCVADYSVLYNSASFSTFKCYGVSPTKLNDLCFTNVYADSFVIRGDEVRQIAPGQTGKIADYNYKLPDDFTGCVIAWNSNNLDSKVGGNYNYLYRLFRKSNLKPFERDISTEIYQAGSTPCNGVEGFNCYFPLQSYGFQPTNGVGYQPYRVVVLSFELLHAPATVCGPKKSTNLVKNKCVNFNFNGLTGTGVLTESNKKFLPFQQFGRDIADTTDAVRDPQTLEILDITPCSFGGVSVITPGTNTSNQVAVLYQDVNCTEVPVAIHADQLTPTWRVYSTGSNVFQTRAGCLIGAEHVNNSYECDIPIGAGICASYQTQTNSPRRARSVASQSIIAYTMSLGAENSVAYSNNSIACPTNFTISVTTEILPVSMTKTSVDCTMYICGDSTECSNLLLQYGSFCTQLNRALTGIAVEQDKNTQEVFAQVKQIYKTPPIKDFGGFNFSQILPDPSKPSKRSFIEDLLFNKVTLADAGFIKQYGDCLGDIAARDLICAQKFNGLTVLPPLLTDEMIAQYTSALLAGTITSGWTFGAGAALQIPFAMQMAYRFNGIGVTQNVLYENQKLIANQFNSAIGKIQDSLSSTASALGKLQDVVNQNAQALNTLVKQLSSNFGAISSVLNDILSRLDKVEAEVQIDRLITGRLQSLQTYVTQQLIRAAEIRASANLAATKMSECVLGQSKRFDFCGKGYHLMSFPQSAPHGVVFLHVTYVPAQEKNFTTAPAICHDGKAHFPREGVFVSNGTHWFVTQRNFCEPQIITTDNTFVSGNCDVVIGIVNNTVYDPLQPELDSFKEELDKYFKNHTSPDVDLGDISGINASVVNIQKEIDRLNEVAKNLNESLIDLQELGKYEQYIKWPWYIWLGFIAGLIAIVMVTIMLCCMTSCCSCLKGCCSCGSCCKFDEDDSEPVLKGVKLHYT

SEQ ID NO: 713 - protein, 1273 aa, Artificial Sequence
  SARS-CoV-2/China/WF0028/2020__EPI_ISL_413791 spike protein (1-1273)(I714C_Y1110C)
MFVFLVLLPLVSSQCVNLTTRTQLPPAYTNSFTRGVYYPDKVFRSSVLHSTQDLFLPFFSNVTWFHAIHVSGTNGTKRFDNPVLPFNDGVYFASTEKSNIIRGWIFGTTLDSKTQSLLIVNNATNVVIKVCEFQFCNDPFLGVYYHKNNKSWMESEFRVYSSANNCTFEYVSQPFLMDLEGKQGNFKNLREFVFKNIDGYFKIYSKHTPINLVRDLPQGFSALEPLVDLPIGINITRFQTLLALHRSYLTPGDSSSGWTAGAAAYYVGYLQPRTFLLKYNENGTITDAVDCALDPLSETKCTLKSFTVEKGIYQTSNFRVQPTESIVRFPNITNLCPFGEVFNATRFASVYAWNRKRISNCVADYSVLYNSASFSTFKCYGVSPTKLNDLCFTNVYADSFVIRGDEVRQIAPGQTGKIADYNYKLPDDFTGCVIAWNSNNLDSKVGGNYNYLYRLFRKSNLKPFERDISTEIYQAGSTPCNGVEGFNCYFPLQSYGFQPTNGVGYQPYRVVVLSFELLHAPATVCGPKKSTNLVKNKCVNFNFNGLTGTGVLTESNKKFLPFQQFGRDIADTTDAVRDPQTLEILDITPCSFGGVSVITPGTNTSNQVAVLYQDVNCTEVPVAIHADQLTPTWRVYSTGSNVFQTRAGCLIGAEHVNNSYECDIPIGAGICASYQTQTNSPRRARSVASQSIIAYTMSLGAENSVAYSNNSIACPTNFTISVTTEILPVSMTKTSVDCTMYICGDSTECSNLLLQYGSFCTQLNRALTGIAVEQDKNTQEVFAQVKQIYKTPPIKDFGGFNFSQILPDPSKPSKRSFIEDLLFNKVTLADAGFIKQYGDCLGDIAARDLICAQKFNGLTVLPPLLTDEMIAQYTSALLAGTITSGWTFGAGAALQIPFAMQMAYRFNGIGVTQNVLYENQKLIANQFNSAIGKIQDSLSSTASALGKLQDVVNQNAQALNTLVKQLSSNFGAISSVLNDILSRLDKVEAEVQIDRLITGRLQSLQTYVTQQLIRAAEIRASANLAATKMSECVLGQSKRVDFCGKGYHLMSFPQSAPHGVVFLHVTYVPAQEKNFTTAPAICHDGKAHFPREGVFVSNGTHWFVTQRNFCEPQIITTDNTFVSGNCDVVIGIVNNTVYDPLQPELESFKEELDKYFKNHTSPDVDLGDISGINASVVNIQKEIDRLNEVAKNLNESLIDLQELGKYEQYIKWPWYIWLGFIAGLIAIVMVTIMLCCMTSCCSCLKGCCSCGSCCKFDEDDSEPVLKGVKLHYT

SEQ ID NO: 714 - protein, 1273 aa, Artificial Sequence
  SARS-CoV-2/2019-nCoV/USA-CruiseA-18/2020__MT159716.1 spike protein (1-1273)(I714C_Y1110C)
MFVFLVLLPLVSSQCVNLTTRTQLPPAYTNSFTRGVYYPDKVFRSSVLHSTQDLFLPFFSNVTWFHAIHVSGTNGTKRFDNPVLPFNDGVYFASTEKSNIIRGWIFGTTLDSKTQSLLIVNNATNVVIKVCEFQFCNDPFLGVYYHKNNKSWMESELRVYSSANNCTFEYVSQPFLMDLEGKQGNFKNLREFVFKNIDGYFKIYSKHTPINLVRDLPQGFSALEPLVDLPIGINITRFQTLLALHRSYLTPGDSSSGWTAGAAAYYVGYLQPRTFLLKYNENGTITDAVDCALDPLSETKCTLKSFTVEKGIYQTSNFRVQPTESIVRFPNITNLCPFGEVFNATRFASVYAWNRKRISNCVADYSVLYNSASFSTFKCYGVSPTKLNDLCFTNVYADSFVIRGDEVRQIAPGQTGKIADYNYKLPDDFTGCVIAWNSNNLDSKVGGNYNYLYRLFRKSNLKPFERDISTEIYQAGSTPCNGVEGFNCYFPLQSYGFQPTNGVGYQPYRVVVLSFELLHAPATVCGPKKSTNLVKNKCVNFNFNGLTGTGVLTESNKKFLPFQQFGRDIADTTDAVRDPQTLEILDITPCSFGGVSVITPGTNTSNQVAVLYQDVNCTEVPVAIHADQLTPTWRVYSTGSNVFQTRAGCLIGAEHVNNSYECDIPIGAGICASYQTQTNSPRRARSVASQSIIAYTMSLGAENSVAYSNNSIACPTNFTISVTTEILPVSMTKTSVDCTMYICGDSTECSNLLLQYGSFCTQLNRALTGIAVEQDKNTQEVFAQVKQIYKTPPIKDFGGFNFSQILPDPSKPSKRSFIEDLLFNKVTLADAGFIKQYGDCLGDIAARDLICAQKFNGLTVLPPLLTDEMIAQYTSALLAGTITSGWTFGAGAALQIPFAMQMAYRFNGIGVTQNVLYENQKLIANQFNSAIGKIQDSLSSTASALGKLQDVVNQNAQALNTLVKQLSSNFGAISSVLNDILSRLDKVEAEVQIDRLITGRLQSLQTYVTQQLIRAAEIRASANLAATKMSECVLGQSKRVDFCGKGYHLMSFPQSAPHGVVFLHVTYVPAQEKNFTTAPAICHDGKAHFPREGVFVSNGTHWFVTQRNFCEPQIITTDNTFVSGNCDVVIGIVNNTVYDPLQPELDSFKEELDKYFKNHTSPDVDLGDISGINASVVNIQKEIDRLNEVAKNLNESLIDLQELGKYEQYIKWPWYIWLGFIAGLIAIVMVTIMLCCMTSCCSCLKGCCSCGSCCKFDEDDSEPVLKGVKLHYT

SEQ ID NO: 715 - protein, 1273 aa, Artificial Sequence
  SARS-CoV-2/SARS-CoV-2/Yunnan-01/human/2020/CHN__MT049951.1 spike protein (1-1273)(I714C_Y1110C)
MFVFLVLLPLVSSQCVNLTTRTQLPPANTNSFTRGVYYPDKVFRSSVLHSTQDLFLPFFSNVTWFHAIHVSGTNGTKRFDNPVLPFNDGVYFASTEKSNIIRGWIFGTTLDSKTQSLLIVNNATNVVIKVCEFQFCNDPFLGVYYHKNNKSWMESEFRVYSSANNCTFEYVSQPFLMDLEGKQGNFKNLREFVFKNIDGYFKIYSKHTPINLVRDLPQGFSALEPLVDLPIGINITRFQTLLALHRSYLTPGDSSSGWTAGAAAYYVGYLQPRTFLLKYNENGTITDAVDCALDPLSETKCTLKSFTVEKGIYQTSNFRVQPTESIVRFPNITNLCPFGEVFNATRFASVYAWNRKRISNCVADYSVLYNSASFSTFKCYGVSPTKLNDLCFTNVYADSFVIRGDEVRQIAPGQTGKIADYNYKLPDDFTGCVIAWNSNNLDSKVGGNYNYLYRLFRKSNLKPFERDISTEIYQAGSTPCNGVEGFNCYFPLQSYGFQPTNGVGYQPYRVVVLSFELLHAPATVCGPKKSTNLVKNKCVNFNFNGLTGTGVLTESNKKFLPFQQFGRDIADTTDAVRDPQTLEILDITPCSFGGVSVITPGTNTSNQVAVLYQDVNCTEVPVAIHADQLTPTWRVYSTGSNVFQTRAGCLIGAEHVNNSYECDIPIGAGICASYQTQTNSPRRARSVASQSIIAYTMSLGAENSVAYSNNSIACPTNFTISVTTEILPVSMTKTSVDCTMYICGDSTECSNLLLQYGSFCTQLNRALTGIAVEQDKNTQEVFAQVKQIYKTPPIKDFGGFNFSQILPDPSKPSKRSFIEDLLFNKVTLADAGFIKQYGDCLGDIAARDLICAQKFNGLTVLPPLLTDEMIAQYTSALLAGTITSGWTFGAGAALQIPFAMQMAYRFNGIGVTQNVLYENQKLIANQFNSAIGKIQDSLSSTASALGKLQDVVNQNAQALNTLVKQLSSNFGAISSVLNDILSRLDKVEAEVQIDRLITGRLQSLQTYVTQQLIRAAEIRASANLAATKMSECVLGQSKRVDFCGKGYHLMSFPQSAPHGVVFLHVTYVPAQEKNFTTAPAICHDGKAHFPREGVFVSNGTHWFVTQRNFCEPQIITTDNTFVSGNCDVVIGIVNNTVYDPLQPELDSFKEELDKYFKNHTSPDVDLGDISGINASVVNIQKEIDRLNEVAKNLNESLIDLQELGKYEQYIKWPWYIWLGFIAGLIAIVMVTIMLCCMTSCCSCLKGCCSCGSCCKFDEDDSEPVLKGVKLHYT

SEQ ID NO: 716 - protein, 1273 aa, Artificial Sequence
  SARS-CoV-2/USA/WA-UW292/2020__EPI_ISL_418077 spike protein (1-1273)(I714C_Y1110C)
MFVFLVLLPLVSSQCVNLTTRTQLPPAYTNSFTRGVYYPDKVFRSSVLHSTQDLFLPFFSNVTWFHAIHVSGTNGTKRFDNPVLPFNDGVYFASTEKSNIIRGWIFGTTLDSKTQSLLIVNNATNVVIKVCEFQFCNDPFLGVYYHKNNKSWMESEFRVYSSANNCTFEYVSQPFLMDLEGKQGNFKNLREFVFKNIDGYFKIYSKHTPINLVRDLPQGFSALEPLVDLPIGINITRFQTLLALHRSYLTPGDSSSGWTAGAAAYYVGYLQPRTFLLKYNENGTITDAVDCALDPLSETKCTLKSFTVEKGIYQTSNFRVQPTESIVRFPNITNLCPFGEVFNATRFASVYAWNRKRISNCVADYSVLYNSASFSTFKCYGVSPTKLNDLCFTNVYADSFVIRGDEVRQIAPGQTGKIADYNYKLPDDFTGCVIAWNSNNLDSKVGGNYNYLYRLFRKSNLKPFERDISTEIYQASSTPCNGVEGFNCYFPLQSYGFQPTNGVGYQPYRVVVLSFELLHAPATVCGPKKSTNLVKNKCVNFNFNGLTGTGVLTESNKKFLPFQQFGRDIADTTDAVRDPQTLEILDITPCSFGGVSVITPGTNTSNQVAVLYQDVNCTEVPVAIHADQLTPTWRVYSTGSNVFQTRAGCLIGAEHVNNSYECDIPIGAGICASYQTQTNSPRRARSVASQSIIAYTMSLGAENSVAYSNNSIACPTNFTISVTTEILPVSMTKTSVDCTMYICGDSTECSNLLLQYGSFCTQLNRALTGIAVEQDKNTQEVFAQVKQIYKTPPIKDFGGFNFSQILPDPSKPSKRSFIEDLLFNKVTLADAGFIKQYGDCLGDIAARDLICAQKFNGLTVLPPLLTDEMIAQYTSALLAGTITSGWTFGAGAALQIPFAMQMAYRFNGIGVTQNVLYENQKLIANQFNSAIGKIQDSLSSTASALGKLQDVVNQNAQALNTLVKQLSSNFGAISSVLNDILSRLDKVEAEVQIDRLITGRLQSLQTYVTQQLIRAAEIRASANLAATKMSECVLGQSKRVDFCGKGYHLMSFPQSAPHGVVFLHVTYVPAQEKNFTTAPAICHDGKAHFPREGVFVSNGTHWFVTQRNFCEPQIITTDNTFVSGNCDVVIGIVNNTVYDPLQPELDSFKEELDKYFKNHTSPDVDLGDISGINASVVNIQKEIDRLNEVAKNLNESLIDLQELGKYEQYIKWPWYIWLGFIAGLIAIVMVTIMLCCMTSCCSCLKGCCSCGSCCKFDEDDSEPVLKGVKLHYT

SEQ ID NO: 717 - protein, 1273 aa, Artificial Sequence
  SARS-CoV-2/Iceland/192/2020__EPI_ISL_417819 spike protein (1-1273)(I714C_Y1110C)
MFVFFVLLPLVSSQCVNLTTRTQLPPAYTNSFTRGVYYPDKVFRSSVLHSTQDLFLPFFSNVTWFHAIHVSGTNGTKRFDNPVLPFNDGVYFASTEKSNIIRGWIFGTTLDSKTQSLLIVNNATNVVIKVCEFQFCNDPFLGVYYHKNNKSWMESEFRVYSSANNCTFEYVSQPFLMDLEGKQGNFKNLREFVFKNIDGYFKIYSKHTPINLVRDLPQGFSALEPLVDLPIGINITRFQTLLALHRSYLTPGDSSSGWTAGAAAYYVGYLQPRTFLLKYNENGTITDAVDCALDPLSETKCTLKSFTVEKGIYQTSNFRVQPTESIVRFPNITNLCPFGEVFNATRFASVYAWNRKRISNCVADYSVLYNSASFSTFKCYGVSPTKLNDLCFTNVYADSFVIRGDEVRQIAPGQTGKIADYNYKLPDDFTGCVIAWNSNNLDSKVGGNYNYLYRLFRKSNLKPFERDISTEIYQAGSTPCNGVEGFNCYFPLQSYGFQPTNGVGYQPYRVVVLSFELLHAPATVCGPKKSTNLVKNKCVNFNFNGLTGTGVLTESNKKFLPFQQFGRDIADTTDAVRDPQTLEILDITPCSFGGVSVITPGTNTSNQVAVLYQGVNCTEVPVAIHADQLTPTWRVYSTGSNVFQTRAGCLIGAEHVNNSYECDIPIGAGICASYQTQTNSPRRARSVASQSIIAYTMSLGAENSVAYSNNSIACPTNFTISVTTEILPVSMTKTSVDCTMYICGDSTECSNLLLQYGSFCTQLNRALTGIAVEQDKNTQEVFAQVKQIYKTPPIKDFGGFNFSQILPDPSKPSKRSFIEDLLFNKVTLADAGFIKQYGDCLGDIAARDLICAQKFNGLTVLPPLLTDEMIAQYTSALLAGTITSGWTFGAGAALQIPFAMQMAYRFNGIGVTQNVLYENQKLIANQFNSAIGKIQDSLSSTASALGKLQDVVNQNAQALNTLVKQLSSNFGAISSVLNDILSRLDKVEAEVQIDRLITGRLQSLQTYVTQQLIRAAEIRASANLAATKMSECVLGQSKRVDFCGKGYHLMSFPQSAPHGVVFLHVTYVPAQEKNFTTAPAICHDGKAHFPREGVFVSNGTHWFVTQRNFCEPQIITTDNTFVSGNCDVVIGIVNNTVYDPLQPELDSFKEELDKYFKNHTSPDVDLGDISGINASVVNIQKEIDRLNEVAKNLNESLIDLQELGKYEQYIKWPWYIWLGFIAGLIAIVMVTIMLCCMTSCCSCLKGCCSCGSCCKFDEDDSEPVLKGVKLHYT

SEQ ID NO: 718 - protein, 1273 aa, Artificial Sequence
  SARS-CoV-2/Belgium/ULG-6939/2020__EPI_ISL_417020 spike protein (1-1273)(I714C_Y1110C)
MFVFLVLLPLVSSQCVNLTTRTQLPPAYTNSFTRGVYYPDKVFRSSVLHSTQDLFLPFFSNVTWFHAIHVSGTNGTKRFDNPVLPFNDGVYFASTEKSNIIRGWIFGTTLDSKTQSLLIVNNATNVVIKVCEFQFCNDPFLGVYYHKNNKSWMESEFRVYSSANNCTFEYVSQPFLMDLEGKQGNFKNLREFVFKNIDGYFKIYSKHTPINLVRDLPQGFSALEPLVDLPIGINITRFQTLLALHRSYLTPGDSSSGWTAGAAAYYVGYLQPRTFLLKYNENGTITDAVDCALDPLSETKCTLKSFTVEKGIYQTSNFRVQPTESIVRFPNITNLCPFGEVFNATRFASVYAWNRKRISNCVADYSVLYNSASFSTFKCYGVSPTKLNDLCFTNVYADSFVIRGDEVRQIAPGQTGKIADYNYKLPDDFTGCVIAWNSNNLDSKVGGNYNYLYRLFRKSNLKPFERDISTEIYQAGSTPCNGVEGFNCYFPLQSYGFQPTNGVGYQPYRVVVLSFELLHAPATVCGPKKSTNLVKNKCVNFNFNGLTGTGVLTESNKKFLPFQQFGRDIADTTDAVRDPQTLEILDITPCSFGGVSVITPGTNTSNQVAVLYQGVNCTEVPVAIHADQLTPTWRVYSTGSNVFQTRAGCLIGAEHVNNSYECDIPIGAGICASYQTQTNSPRRARSVASQSIIAYTMSLGAENSVVYSNNSIACPTNFTISVTTEILPVSMTKTSVDCTMYICGDSTECSNLLLQYGSFCTQLNRALTGIAVEQDKNTQEVFAQVKQIYKTPPIKDFGGFNFSQILPDPSKPSKRSFIEDLLFNKVTLADAGFIKQYGDCLGDIAARDLICAQKFNGLTVLPPLLTDEMIAQYTSALLAGTITSGWTFGAGAALQIPFAMQMAYRFNGIGVTQNVLYENQKLIANQFNSAIGKIQDSLSSTASALGKLQDVVNQNAQALNTLVKQLSSNFGAISSVLNDILSRLDKVEAEVQIDRLITGRLQSLQTYVTQQLIRAAEIRASANLAATKMSECVLGQSKRVDFCGKGYHLMSFPQSAPHGVVFLHVTYVPAQEKNFTTAPAICHDGKAHFPREGVFVSNGTHWFVTQRNFCEPQIITTDNTFVSGNCDVVIGIVNNTVYDPLQPELDSFKEELDKYFKNHTSPDVDLGDISGINASVVNIQKEIDRLNEVAKNLNESLIDLQELGKYEQYIKWPWYIWLGFIAGLIAIVMVTIMLCCMTSCCSCLKGCCSCGSCCKFDEDDSEPVLKGVKLHYT

SEQ ID NO: 719 - protein, 1273 aa, Artificial Sequence
  SARS-CoV-2/France/HF2496/2020__EPI_ISL_418231 spike protein (1-1273)(I714C_Y1110C)
MFVFLVLLPLVSSQCVNLTTRTQLPPAYTNSFTRGVYYPDKVFRSSVLHSTQDLFLPFFSNVTWFHAIHVSGTNGTKRFDNPVLPFNDGVYFASTEKSNIIRGWIFGTTLDSKTQSLLIVNNATNVVIKVCEFQFCNDPFLGVYYHKNNKSWMESEFRVYSSANNCTFEYVSQPFLMDLEGKQGNFKNLREFVFKNIDGYFKIYSKHTPINLVRDLPQGFSALEPLVDLPIGINITRFQTLLALHRSYLTPGDSSSGWTAGAAAYYVGYLQPRTFLLKYNENGTITDAVDCALDPLSETKCTLKSFTVEKGIYQTSNFRVQPTESIVRFPNITNLCPFGEVFNATRFASVYAWNRKRISNCVADYSVLYNSASFSTFKCYGVSPTKLNDLCFTNVYADSFVIRGDEVRQIAPGQTGKIADYNYKLPDDFTGCVIAWNSNNLDSKVGGNYNYLYRLFRKSNLKPFERDISTEIYQAGSTPCNGVEGFNCYFPLQSYGFQPTNGVGYQPYRVVVLSFELLHAPATVCGPKKSTNLVKNKCVNFNFNGLTGTGVLTESNKKFLPFQQFGRDIADTTDAVRDPQTLEILDITPCSFGGVSVITPGTNTSNQVAVLYQGVNCTEVPVAIHADQLTPTWRVYSTGSNVFQTRAGCLIGAEHVNNSYECDIPIGAGICASYQTQTNSPRRARSVASQSIIAYTMSLGAENSVAYSNNSIACPTNFTISVTTEILPVSMTKTSVDCTMYICGDSTECSNLLLQYGSFCTQLNRALTGIAVEQDKNTQEVFAQVKQIYKTPPIKDFGGFNFSQILPDPSKPSKRSFIEDLLFNKVTLADAGFIKQYGDCLGDIVARDLICAQKFNGLTVLPPLLTDEMIAQYTSALLAGTITSGWTFGAGAALQIPFAMQMAYRFNGIGVTQNVLYENQKLIANQFNSAIGKIQDSLSSTASALGKLQDVVNQNAQALNTLVKQLSSNFGAISSVLNDILSRLDKVEAEVQIDRLITGRLQSLQTYVTQQLIRAAEIRASANLAATKMSECVLGQSKRVDFCGKGYHLMSFPQSAPHGVVFLHVTYVPAQEKNFTTAPAICHDGKAHFPREGVFVSNGTHWFVTQRNFCEPQIITTDNTFVSGNCDVVIGIVNNTVYDPLQPELDSFKEELDKYFKNHTSPDVDLGDISGINASVVNIQKEIDRLNEVAKNLNESLIDLQELGKYEQYIKWPWYIWLGFIAGLIAIVMVTIMLCCMTSCCSCLKGCCSCGSCCKFDEDDSEPVLKGVKLHYT

SEQ ID NO: 720 - protein, 1273 aa, Artificial Sequence
  SARS-CoV-2/USA/WA-UW291/2020__EPI_ISL_418076 spike protein (1-1273)(I714C_Y1110C)
MFVFLVLLPLVSSQCVNLTTRTQLPPAYTNSFTRGVYYPDKVFRSSVLHSTQDLFLPFFSNVTWFHAIHVSGTNGTKRFDNPVLPFNDGVYFASTEKSNIIRGWIFGTTLDSKTQSLLIVNNATNVVIKVCEFQFCNDPFLGVYYHKNNKSWMESEFRVYSSANNCTFEYVSQPFLMDLEGKQGNFKNLREFVFKNIDGYFKIYSKHTPINLVRDLPQGFSALEPLVDLPIGINITRFQTLLALHRSYLTPGDSSSGWTAGAAAYYVGYLQPRTFLLKYNENGTITDAVDCALDPLSETKCTLKSFTVEKGIYQTSNFRVQPTESIVRFPNITNLCPFGEVFNATRFASVYAWNRKRISNCVADYSVLYNSASFSTFKCYGVSPTKLNDLCFTNVYADSFVIRGDEVRQIAPGQTGKIADYNYKLPDDFTGCVIAWNSNNLDSKVGGNYNYLYRLFRKSNLKPFERDISTEIYQAGSTPCNGVEGFNCYFPLQSYGFQPTNGVGYQPYRVVVLSFELLHAPATVCGPKKSTNLVKNKCVNFNFNGLTGTGVLTESNKKFLPFQQFGRDIADTTDAVRDPQTLEILDITPCSFGGVSVITPGTNTSNQVAVLYQGVNCTEVPVAIHADQLTPTWRVYSTGSNVFQTRAGCLIGAEHVNNSYECDIPIGAGICASYQTQTNSPRRARSVASQSIIAYTMSLGAENSVAYSNNSIACPTNFTISVTTEILPVSMTKTSVDCTMYICGDSTECSNLLLQYGSFCTQLNRALTGIAVEQDKNTQEVFAQVKQIYKTPPIKDFGGFNFSQILPDPSKPSKRSFIEDLLFNKVTLADAGFIKQYGDCLGDIAARDLICAQKFNGLTVLPPLLTDEMIAQYTSALLAGTITSGWTFGAGAALQIPFAMQMAYRFNGIGVTQNVLYENQKLIANQFNSAIGKIQYSLSSTASALGKLQDVVNQNAQALNTLVKQLSSNFGAISSVLNDILSRLDKVEAEVQIDRLITGRLQSLQTYVTQQLIRAAEIRASANLAATKMSECVLGQSKRVDFCGKGYHLMSFPQSAPHGVVFLHVTYVPAQEKNFTTAPAICHDGKAHFPREGVFVSNGTHWFVTQRNFCEPQIITTDNTFVSGNCDVVIGIVNNTVYDPLQPELDSFKEELDKYFKNHTSPDVDLGDISGINASVVNIQKEIDRLNEVAKNLNESLIDLQELGKYEQYIKWPWYIWLGFIAGLIAIVMVTIMLCCMTSCCSCLKGCCSCGSCCKFDEDDSEPVLKGVKLHYT

SEQ ID NO: 721 - protein, 1273 aa, Artificial Sequence
  SARS-CoV-2/Portugal/PT0034/2020__EPI_ISL_418019 spike protein (1-1273)(I714C_Y1110C)
MFVFLVLLPLVSSQCVNLTTRTQLPPAYTNSFTRGVYYPDKVFRSSVLHSTQDLFLPFFSNVTWFHAIHVSGTNGTKRFDNPVLPFNDGVYFASTEKSNIIRGWIFGTTLDSKTQSLLIVNNATNVVIKVCEFQFCNDPFLGVYYHKNNKSWMESEFRVYSSANNCTFEYVSQPFLMDLEGKQGNFKNLREFVFKNIDGYFKIYSKHTPINLVRDLPQGFSALEPLVDLPIGINITRFQTLLALHRSYLTPGDSSSGWTAGAAAYYVGYLQPRTFLLKYNENGTITDAVDCALDPLSETKCTLKSFTVEKGIYQTSNFRVQPTESIVRFPNITNLCPFGEVFNATRFASVYAWNRKRISNCVADYSVLYNSASFSTFKCYGVSPTKLNDLCFTNVYADSFVIRGDEVRQIAPGQTGKIADYNYKLPDDFTGCVIAWNSNNLDSKVGGNYNYLYRLFRKSNLKPFERDISTEIYQAGSTPCNGVEGFNCYFPLQSYGFQPTNGVGYQPYRVVVLSFELLHAPATVCGPKKSTNLVKNKCVNFNFNGLTGTGVLTESNKKFLPFQQFGRDIADTTDAVRDPQTLEILDITPCSFGGVSVITPGTNTSNQVAVLYQGVNCTEVPVAIHADQLTPTWRVYSTGSNVFQTRAGCLIGAEHVNNSYECDIPIGAGICASYQTQTNSPRRARSVASQSIIAYTMSLGAENSVAYSNNSIACPTNFTISVTTEILPVSMTKTSVDCTMYICGDSTECSNLLLQYGSFCTQLNRALTGIAVEQDKNTQEVFAQVKQIYKTPPIKDFGGFNFSQILPDPSKPSKRSFIEDLLFNKVTLADAGFIKQYGDCLGDIAARDLICAQKFNGLTVLPPLLTDEMIAQYTSALLAGTITSGWTFGAGAALQIPFAMQMAYRFNGIGVTQNVLYENQKLIANQFNSAIGKIQDSLSSTASALGKLQDVVNQNAQALNTLVKQLSSNFGAISSVLNDILSRLDKVEAEVQIDRLITGRLQSLQTYVTQQLIRAAEIRASANLAATKMSECVLGQSKRVDFCGKGYHLMSFPQSAPHGVVFLHVTYVPAQEKNFTTAPAICHDGKAHFPREGVFVSNGTHWFVTQRNFCEPQIITTDNTFVSGNCDVVIGIVNNTVYDPLQPELDSFKEELDKYFKNHTSPDVDLGDISGINASVVNIQKEIDRLNEVAKNLNESLIDLQELGKYEQYIKWPWYIWLGFIAGLIAIVMVTIMLCCITSCCSCLKGCCSCGSCCKFDEDDSEPVLKGVKLHYT

SEQ ID NO: 722 - protein, 1273 aa, Artificial Sequence
  SARS-CoV-2/Iceland/202/2020__EPI_ISL_417750 spike protein (1-1273)(I714C_Y1110C)
MFVFLVLLPLVSSQCVNLTTRTQLPPAYTNSFTRGVYYPDKVFRSSVLHSTQDLFLPFFSNVTWFHAIHVSGTNGTKRFDNPVLPFNDGVYFASTEKSNIIRGWIFGTTLDSKTQSLLIVNNATNVVIKVCEFQFCNDPFLGVYYHKNNKSWMESEFRVYSSANNCTFEYVSQPFLMDLEGKQGNFKNLREFVFKNIDGYFKIYSKHTPINLVRDLPQGFSALEPLVDLPIGINITRFQTLLALHRSYLTPGDSSSGWTAGAAAYYVGYLQPRTFLLKYNENGTITDAVDCALDPLSETKCTLKSFTVEKGIYQTSNFRVQPTESIVRFPNITNLCPFGEVFNATRFASVYAWNRKRISNCVADYSVLYNSASFSTFKCYGVSPTKLNDLCFTNVYADSFVIRGDEVRQIAPGQTGKIADYNYKLPDDFTGCVIAWNSNNLDSKVGGNYNYLYRLFRKSNLKPFERDISTEIYQAGSTPCNGVEGFNCYFPLQSYGFQPTNGVGYQPYRVVVLSFELLHAPATVCGPKKSTNLVKNKCVNFNFNGLTGTGVLTESNKKFLPFQQFGRDIADTTDAVRDPQTLEILDITPCSFGGVSVITPGTNTSNQVAVLYQDVNCTEVPVAIHADQLTPTWRVYSTGSNVFQTRAGCLIGAEHVNNSYECDIPIGAGICASYQTQTNSPRRARSVASQSIIAYTMSLGAENSVAYSNNSIACPTNFTISVTTEILPVSMTKTSVDCTMYICGDSTECSNLLLQYGSFCTQLNRALTGIAVEQDKNTQEVFAQVKQIYKTPPIKDFGGFNFSQILPDPSKPSKRSFIEDLLFNKVTLADAGFIKQYGDCLGDIAARDLICAQKFNGLTVLPPLLTDEMIAQYTSALLAGTITSGWTFGAGAALQIPFAMQMAYRFNGIGVTQNVLYENQKLIANQFNSAIGKIQDSLSSTASALGKLQDVVNQNAQALNTLVKQLSSNFGAISSVLNDILSRLDKVEAEVQIDRLITGRLQSLQTYVTQQLIRAAEIRASANLAATKMSECVLGQSKRVDFCGKGYHLMSFPQSAPHGVVFLHVTYVPAQEKNFTTAPAICHDGKAHFPREGVFVSNGTHWFVTQRNFCEPQIITTDNTFVSGNCDVVIGIVNNTVYDPLQPELDSFKEELDKYFKNHTSPDVDLGDIPGINASVVNIQKEIDRLNEVAKNLNESLIDLQELGKYEQYIKWPWYIWLGFIAGLIAIVMVTIMLCCMTSCCSCLKGCCSCGSCCKFDEDDSEPVLKGVKLHYT

SEQ ID NO: 723 - protein, 1273 aa, Artificial Sequence
  SARS-CoV-2/USA/WA-UW261/2020__EPI_ISL_418046 spike protein (1-1273)(I714C_Y1110C)
MFVFLVLLPLVSSQCVNLTTRTQLPPAYTNSFTRGVYYPDKVFRSSVLHSTQDLFLPFFSNVTWFHAIHVSGTNGTKRFDNPVLPFNDGVYFASTEKSNIIRGWIFGTTLDSKTQSLLIVNNATNVVIKVCEFQFCNDPFLGVYYHKNNKSWMESEFRVYSSANNCTFEYVSQPFLMDLEGKQGNFKNLREFVFKNIDGYFKIYSKHTPINLVRDLPQGFSALEPLVDLPIGINITRFQTLLALHRSYLTPGDSSSGWTAGAAAYYVGYLQPRTFLLKYNENGTITDAVDCALDPLSETKCTLKSFTVEKGIYQTSNFRVQPTESIVRFPNITNLCPFGEVFNATRFTSVYAWNRKRISNCVADYSVLYNSASFSTFKCYGVSPTKLNDLCFTNVYADSFVIRGDEVRQIAPGQTGKIADYNYKLPDDFTGCVIAWNSNNLDSKVGGNYNYLYRLFRKSNLKPFERDISTEIYQAGSTPCNGVEGFNCYFPLQSYGFQPTNGVGYQPYRVVVLSFELLHAPATVCGPKKSTNLVKNKCVNFNFNGLTGTGVLTESNKKFLPFQQFGRDIADTTDAVRDPQTLEILDITPCSFGGVSVITPGTNTSNQVAVLYQDVNCTEVPVAIHADQLTPTWRVYSTGSNVFQTRAGCLIGAEHVNNSYECDIPIGAGICASYQTQTNSPRRARSVASQSIIAYTMSLGAENSVAYSNNSIACPTNFTISVTTEILPVSMTKTSVDCTMYICGDSTECSNLLLQYGSFCTQLNRALTGIAVEQDKNTQEVFAQVKQIYKTPPIKDFGGFNFSQILPDPSKPSKRSFIEDLLFNKVTLADAGFIKQYGDCLGDIAARDLICAQKFNGLTVLPPLLTDEMIAQYTSALLAGTITSGWTFGAGAALQIPFAMQMAYRFNGIGVTQNVLYENQKLIANQFNSAIGKIQDSLSSTASALGKLQDVVNQNAQALNTLVKQLSSNFGAISSVLNDILSRLDKVEAEVQIDRLITGRLQSLQTYVTQQLIRAAEIRASANLAATKMSECVLGQSKRVDFCGKGYHLMSFPQSAPHGVVFLHVTYVPAQEKNFTTAPAICHDGKAHFPREGVFVSNGTHWFVTQRNFCEPQIITTDNTFVSGNCDVVIGIVNNTVYDPLQPELDSFKEELDKYFKNHTSPDVDLGDISGINASVVNIQKEIDRLNEVAKNLNESLIDLQELGKYEQYIKWPWYIWLGFIAGLIAIVMVTIMLCCMTSCCSCLKGCCSCGSCCKFDEDDSEPVLKGVKLHYT

SEQ ID NO: 724 - protein, 1273 aa, Artificial Sequence
  SARS-CoV-2/Portugal/PT0035/2020__EPI_ISL_418020 spike protein (1-1273)(I714C_Y1110C)
MFVFLVLLPLVSSQCVNLTTRTQLPPAYTNSFTRGVYYPDKVFRSSVLHSTQDLFLPFFSNVTWFHAIHVSGTNGTKRFDNPVLPFNDGVYFASTEKSNIIRGWIFGTTLDSKTQSLLIVNNATNVVIKVCEFQFCNDPFLGVYYHKNNKSWMESEFRVYSSANNCTFEYVSQPFLMDLEGKQGNFKNLREFVFKNIDGYFKIYSKHTPINLVRDLPQGFSALEPLVDLPIGINITRFQTLLALHRSYLTPGDSSSGWTAGAAAYYVGYLQPRTFLLKYNENGTITDAVDCALDPLSETKCTLKSFTVEKGIYQTSNFRVQPTESIVRFPNITNLCPFGEVFNATRFASVYAWNRKRISNCVADYSVLYNSASFSTFKCYGVSPTKLNDLCFTNVYADSFVIRGDEVRQIAPGQTGKIADYNYKLPDDFTGCVIAWNSNNLDSKVGGNYNYLYRLFRKSNLKPFERDISTEIYQAGSTPCNGVEGFNCYFPLQSYGFQPTNGVGYQPYRVVVLSFELLHAPATVCGPKKSTNLVKNKCVNFNFNGLTGTGVLTESNKKFLPFQQFGRDIADTTDAVRDPQTLEILDITPCSFGGVSVITPGTNTSNQVAVLYQDVNCTEVPVAIHADQLTPTWRVYSTGSNVFQTRAGCLIGAEHVNNSYECDIPIGAGICASYQTQTNSPRRARSVASQSIIAYTMSLGAENSVAYSNNSIACPTNFTISVTTEILPVSMTKTSVDCTMYICGDSTECSNLLLQYGSFCTQLNRALTGIAVEQDKNTQEVFAQVKQIYKTPPIKDFGGFNFSQILPDPSKPSKRSFIEDLLFNKVTLADAGFIKQYGDCLGDISARDLICAQKFNGLTVLPPLLTDEMIAQYTSALLAGTITSGWTFGAGAALQIPFAMQMAYRFNGIGVTQNVLYENQKLIANQFNSAIGKIQDSLSSTASALGKLQDVVNQNAQALNTLVKQLSSNFGAISSVLNDILSRLDKVEAEVQIDRLITGRLQSLQTYVTQQLIRAAEIRASANLAATKMSECVLGQSKRVDFCGKGYHLMSFPQSAPHGVVFLHVTYVPAQEKNFTTAPAICHDGKAHFPREGVFVSNGTHWFVTQRNFCEPQIITTDNTFVSGNCDVVIGIVNNTVYDPLQPELDSFKEELDKYFKNHTSPDVDLGDISGINASVVNIQKEIDRLNEVAKNLNESLIDLQELGKYEQYIKWPWYIWLGFIAGLIAIVMVTIMLCCMTSCCSCLKGCCSCGSCCKFDEDDSEPVLKGVKLHYT

SEQ ID NO: 725 - protein, 1273 aa, Artificial Sequence
  SARS-CoV-2/USA/NY-NYUMC7/2020__EPI_ISL_418192 spike protein (1-1273)(I714C_Y1110C)
MFVFLVLLPLVSSQCVNLTTRTQLPPAYTNSFTRGVYYPDKVFRSSVLHSTQDLFLPFFSNVTWFHAIHVSGTNGTKRFDNPVLPFNDGVYFASTEKSNIIRGWIFGTTLDSKTQSLLIVNNATNVVIKVCEFQFCNDPFLGVYHHKNNKSWMESEFRVYSSANNCTFEYVSQPFLMDLEGKQGNFKNLREFVFKNIDGYFKIYSKHTPINLVRDLPQGFSALEPLVDLPIGINITRFQTLLALHRSYLTPGDSSSGWTAGAAAYYVGYLQPRTFLLKYNENGTITDAVDCALDPLSETKCTLKSFTVEKGIYQTSNFRVQPTESIVRFPNITNLCPFGEVFNATRFASVYAWNRKRISNCVADYSVLYNSASFSTFKCYGVSPTKLNDLCFTNVYADSFVIRGDEVRQIAPGQTGKIADYNYKLPDDFTGCVIAWNSNNLDSKVGGNYNYLYRLFRKSNLKPFERDISTEIYQAGSTPCNGVEGFNCYFPLQSYGFQPTNGVGYQPYRVVVLSFELLHAPATVCGPKKSTNLVKNKCVNFNFNGLTGTGVLTESNKKFLPFQQFGRDIADTTDAVRDPQTLEILDITPCSFGGVSVITPGTNTSNQVAVLYQGVNCTEVPVAIHADQLTPTWRVYSTGSNVFQTRAGCLIGAEHVNNSYECDIPIGAGICASYQTQTNSPRRARSVASQSIIAYTMSLGAENSVAYSNNSIACPTNFTISVTTEILPVSMTKTSVDCTMYICGDSTECSNLLLQYGSFCTQLNRALTGIAVEQDKNTQEVFAQVKQIYKTPPIKDFGGFNFSQILPDPSKPSKRSFIEDLLFNKVTLADAGFIKQYGDCLGDIAARDLICAQKFNGLTVLPPLLTDEMIAQYTSALLAGTITSGWTFGAGAALQIPFAMQMAYRFNGIGVTQNVLYENQKLIANQFNSAIGKIQDSLSSTASALGKLQDVVNQNAQALNTLVKQLSSNFGAISSVLNDILSRLDKVEAEVQIDRLITGRLQSLQTYVTQQLIRAAEIRASANLAATKMSECVLGQSKRVDFCGKGYHLMSFPQSAPHGVVFLHVTYVPAQEKNFTTAPAICHDGKAHFPREGVFVSNGTHWFVTQRNFCEPQIITTDNTFVSGNCDVVIGIVNNTVYDPLQPELDSFKEELDKYFKNHTSPDVDLGDISGINASVVNIQKEIDRLNEVAKNLNESLIDLQELGKYEQYIKWPWYIWLGFIAGLIAIVMVTIMLCCMTSCCSCLKGCCSCGSCCKFDEDDSEPVLKGVKLHYT

SEQ ID NO: 726 - protein, 1273 aa, Artificial Sequence
  SARS-CoV-2/Iceland/189/2020__EPI_ISL_417709 spike protein (1-1273)(I714C_Y1110C)
MFVFLVLLPLVSSQCVNLTTRTQLPPAYTNSFTRGVYYPDKVFRSSVLHSTQDLFLPFFSNVTWFHAIHVSGTNGTKRFDNPVLPFNDGVYFASTEKSNIIRGWIFGTTLDSKTQSLLIVNNATNVVIKVCEFQFCNDPFLGVYYHKNNKSWMESEFRVYSSANNCTFEYVSQPFLMDLEGKQGNFKNLREFVFKNIDGYFKIYSKHTPINLVRDLPQGFSALEPLVDLPIGINITRFQTLLALHRSYLTPGDSSSGWTAGAAAYYVGYLQPRTFLLKYNENGTITDAVDCALDPLSETKCTLKSFTVEKGIYQTSNFRVQPTESIVRFPNITNLCPFGEVFNATRFASVYAWNRKRISNCVADYSVLYNSASFSTFKCYGVSPTKLNDLCFTNVYADSFVIRGDEVRQIAPGQTGKIADYNYKLPDDFTGCVIAWNSNNLDSKVGGNYNYLYRLFRKSNLKPFERDISTEIYQAGSTPCNGVEGFNCYFPLQSYGFQPTNGVGYQPYRVVVLSFELLHAPATVCGPKKSTNLVKNKCVNFNFNGLTGTGVLTESNKKFLPFQQFGRDIADTTDAVRDPQTLEILDITPCSFGGVSVITPGTNTSNQVAVLYQGVNCTEVPVAIHADQLTPTWRVYSTGSNVFQTRAGCLIGAEHVNNSYECDIPIGAGICASYQTQTNSPRRARSVASQSIIAYTMSLGAENSVAYSNNSIACPTNFTISVTTEILPVSMTKTSVDCTMYICGDSTECSNLLLQYGSFCTQLNRALTGIAVEQDKNTQEVFAQVKQIYKTPPIKDFGGFNFSQILPDPSKPSKRSFIEDLLFNKVTLADAGFTKQYGDCLGDIAARDLICAQKFNGLTVLPPLLTDEMIAQYTSALLAGTITSGWTFGAGAALQIPFAMQMAYRFNGIGVTQNVLYENQKLIANQFNSAIGKIQDSLSSTASALGKLQDVVNQNAQALNTLVKQLSSNFGAISSVLNDILSRLDKVEAEVQIDRLITGRLQSLQTYVTQQLIRAAEIRASANLAATKMSECVLGQSKRVDFCGKGYHLMSFPQSAPHGVVFLHVTYVPAQEKNFTTAPAICHDGKAHFPREGVFVSNGTHWFVTQRNFCEPQIITTDNTFVSGNCDVVIGIVNNTVYDPLQPELDSFKEELDKYFKNHTSPDVDLGDISGINASVVNIQKEIDRLNEVAKNLNESLIDLQELGKYEQYIKWPWYIWLGFIAGLIAIVMVTIMLCCMTSCCSCLKGCCSCGSCCKFDEDDSEPVLKGVKLHYT

SEQ ID NO: 727 - protein, 1273 aa, Artificial Sequence
  SARS-CoV-2/Australia/NSW56/2020__EPI_ISL_417408 spike protein (1-1273)(I714C_Y1110C)
MFVFLVLLPLVSSQCVNLTTRTQLPPAYTNSFTRGVYYPDKVFRSSVLHSTQDLFLPFFSNVTWFHAIHVSGTNGTKRFDNPVLPFNDGVYFASTEKSNIIRGWIFGTTLDSKTQSLLIVNNATNVVIKVCEFQFCNDPFLGVYYHKNNKSWMESEFRVYSSANNCTFEYVSQPFLMDLEGKQGNFKNLREFVFKNIDGYFKIYSKHTPINLVRDLPQGFSALEPLVDLPIGINITRFQTLLALHRSYLTPGDSSSGWTAGAAAYYVGYLQPRTFLLKYNENGTITDAVDCALDPLSETKCTLKSFTVEKGIYQTSNFRVQPTESIVRFPNITNLCPFGEVFNATRFASVYAWNRKRISNCVADYSVLYNSASFSTFKCYGVSPTKLNDLCFTNVYADSFVIRGDEVRQIAPGQTGKIADYNYKLPDDFTGCVIAWNSNNLDSKVGGNYNYLYRLFRKSNLKPFERDISTEIYQAGSTPCNGVEGFNCYFPLQSYGFQPTNGVGYQPYRVVVLSFELLHAPATVCGPKKSTNLVKNKCVNFNFNGLTGTGVLTESNKKFLPFQQFGRDIADTTDAVRDPQTLEILDITPCSFGGVSVITPGTNTSNQVAVLYQDVNCTEVPVAIHADQLTPTWRVYSTGSNVFQTRAGCLIGAEHVNNSYECDIPIGAGICASYQTQTNSPRRARSVASQSIIAYTMSLGAENSVAYSNNSIACPTNFTISVTTEILPVSMTKTSVDCTMYICGDSTECSNLLLQYGSFCTQLNRALTGIAVEQDKNTQEVFAQVKQIYKTPPIKDFGGFNFSQILPDSSKPSKRSFIEDLLFNKVTLADAGFIKQYGDCLGDIAARDLICAQKFNGLTVLPPLLTDEMIAQYTSALLAGTITSGWTFGAGAALQIPFAMQMAYRFNGIGVTQNVLYENQKLIANQFNSAIGKIQDSLSSTASALGKLQDVVNQNAQALNTLVKQLSSNFGAISSVLNDILSRLDKVEAEVQIDRLITGRLQSLQTYVTQQLIRAAEIRASANLAATKMSECVLGQSKRVDFCGKGYHLMSFPQSAPHGVVFLHVTYVPAQEKNFTTAPAICHDGKAHFPREGVFVSNGTHWFVTQRNFCEPQIITTDNTFVSGNCDVVIGIVNNTVYDPLQPELDSFKEELDKYFKNHTSPDVDLGDISGINASVVNIQKEIDRLNEVAKNLNESLIDLQELGKYEQYIKWPWYIWLGFIAGLIAIVMVTIMLCCMTSCCSCLKGCCSCGSCCKFDEDDSEPVLKGVKLHYT

SEQ ID NO: 728 - protein, 1273 aa, Artificial Sequence
  SARS-CoV-2/Iceland/280/2020__EPI_ISL_417608 spike protein (1-1273)(I714C_Y1110C)
MFVFLVLLPLVSSQCVNLTTRTQLPPAYTNSFTRGVYYPDKVFRSSVLHSTQDLFLPFFSNVTWFHAIHVSGTNGTKRFDNPVLPFNDGVYFASTEKSNIIRGWIFGTTLDSKTQSLLIVNNATNVVIKVCEFQFCNDPFLGVYYHKNNKSWMESEFRVYSSANNCTFEYVSQPFLMDLEGKQGNFKNLREFVFKNIDGYFKIYSKHTPINLVRDLPQGFSALEPLVDLPIGINITRFQTLLALHRSYLTPGDSSSGWTAGAAAYYVGYLQPRTFLLKYNENGTITDAVDCALDPLSETKCTLKSFTVEKGIYQTSNFRVQPTESIVRFPNITNLCPFGEVFNATRFASVYAWNRKRISNCVADYSVLYNSASFSTFKCYGVSPTKLNDLCFTNVYADSFVIRGDEVRQIAPGQTGKIADYNYKLPDDFTGCVIAWNSNNLDSKVGGNYNYLYRLFRKSNLKPFERDISTEIYQAGSTPCNGVEGFNCYFPLQSYGFQPTNGVGYQPYRVVVLSFELLHAPATVCGPKKSTNLVKNKCVNFNFNGLTGTGVLTESNKKFLPFQQFGRDIADTTDAVRDPQTLEILDITPCSFGGVSVITPGTNTSNQVAVLYQGVNCTEVPVAIHADQLTPTWRVYSTGSNVFQTRAGCLIGAEHVNNSYECDIPIGAGICASYHTQTNSPRRARSVASQSIIAYTMSLGAENSVAYSNNSIACPTNFTISVTTEILPVSMTKTSVDCTMYICGDSTECSNLLLQYGSFCTQLNRALTGIAVEQDKNTQEVFAQVKQIYKTPPIKDFGGFNFSQILPDPSKPSKRSFIEDLLFNKVTLADAGFIKQYGDCLGDIAARDLICAQKFNGLTVLPPLLTDEMIAQYTSALLAGTITSGWTFGAGAALQIPFAMQMAYRFNGIGVTQNVLYENQKLIANQFNSAIGKIQDSLSSTASALGKLQDVVNQNAQALNTLVKQLSSNFGAISSVLNDILSRLDKVEAEVQIDRLITGRLQSLQTYVTQQLIRAAEIRASANLAATKMSECVLGQSKRVDFCGKGYHLMSFPQSAPHGVVFLHVTYVPAQEKNFTTAPAICHDGKAHFPREGVFVSNGTHWFVTQRNFCEPQIITTDNTFVSGNCDVVIGIVNNTVYDPLQPELDSFKEELDKYFKNHTSPDVDLGDISGINASVVNIQKEIDRLNEVAKNLNESLIDLQELGKYEQYIKWPWYIWLGFIAGLIAIVMVTIMLCCMTSCCSCLKGCCSCGSCCKFDEDDSEPVLKGVKLHYT

SEQ ID NO: 729 - protein, 1273 aa, Artificial Sequence
  SARS-CoV-2/Iceland/247/2020__EPI_ISL_417575 spike protein (1-1273)(I714C_Y1110C)
MFVFLVLLPLVSSQCVNLTTRTQLPPAYTNSFTRGVYYPDKVFRSSVLHSTQDLFLPFFSNVTWFHAIHVSGTNGTKRFDNPVLPFNDGVYFASTEKSNIIRGWIFGTTLDSKTQSLLIVNNATNVVIKVCEFQFCNDPFLGVYYHKNNKSWMESEFRVYSSANNCTFEYVSQPFLMDLEGKQGNFKNLREFVFKNIDGYFKIYSKHTPINLVRDLPQGFSALEPLVDLPIGINITRFQTLLALHRSYLTPGDSSSGWTAGAAAYYVGYLQPRTFLLKYNENGTITDAVDCALDPLSETKCTLKSFTVEKGIYQTSNFRVQPTESIVRFPNITNLCPFGEVFNATRFASVYAWNRKRISNCVADYSVLYNSASFSTFKCYGVSPTKLNDLCFTNVYADSFVIRGDEVRQIAPGQTGKIADYNYKLPDDFTGCVIAWNSNNLDSKVGGNYNYLYRLFRKSNLKPFERDISTEIYQAGSTPCNGVEGFNCYFPLQSYGFQPTNGVGYQPYRVVVLSFELLHAPATVCGPKKSTNLVKNKCVNFNFNGLTGTGVLTESNKKFLPFQQFGRDIADTTDAVRDPQTLEILDITPCSFGGVSVITPGTNTSNQVAVLYQGVNCTEVPVAIHADQLTPTWRVYSTGSNVFQTRAGCLIGAEHVNNSYECDIPIGAGICASYQTQTNSPRRARSVASQSIIAYTMSLGAENSVAYSNNSIACPTNFTISVTTEILPVSMTKTSVDCTMYICGDSTECSNLLLQYGSFCTQLNRALTGIAVEQDKNTQEVFAQVKQIYKTPPIKDFGGFNFSQILPDPSKPSKRSFIEDLLFNKVTLADAGFIKQYGDCLGDIAARDLICAQKFNGLTVLPPLLTDEMIAQYTSALLAGTITSGWTFGAGAALQIPFAMQMAYRFNGIGVTQNVLYENQKLIANQFNSAIGKIQDSLSSTASALGKLQDVVNQNAQALNTLVKQLSSNFGAISSVLNDILSRLDKVEAEVQIDRLITGRLQSLQTYVTQQLIRAAEIRASANLAATKMSECVLGQSKRVDFCGKGYHLMSFPQSAPHGVVFLHVTYVPAQEKNFTTAPAICHDGKAHFPREGVFVSNGTHWFVTQRNFCEPQIITTDNTFVSGNCDVVIGIVNNTVYDPLQPELDSFKEELDKYFKNHTSPDVDLGDISGINASVVNIQKEIDRLNEVAKNLNESLIDLQELGKYEQYIKWPWYIWLGFIAGLIAIVIVTIMLCCMTSCCSCLKGCCSCGSCCKFDEDDSEPVLKGVKLHYT

SEQ ID NO: 730 - protein, 1273 aa, Artificial Sequence
  SARS-CoV-2/Iceland/238/2020__EPI_ISL_417566 spike protein (1-1273)(I714C_Y1110C)
MFVFLVLLPLVSSQCVNLTTRTQLPPAYTNSFTRGVYYPDKVFRSSVLHSTQDLFLPFFSNVTWFHAIHVSGTNGTKRFDNPVLPFNDGVYFASTEKSNIIRGWIFGTTLDSKTQSLLIVNNATNVVIKVCEFQFCNDPFLGVYYHKNNKSWMESEFRVYSSANNCTFEYVSQPFLMDLEGKQGNFKNLREFVFKNIDGYFKIYSKHTPINLVRDLPQGFSALEPLVDLPIGINITRFQTLLALHRSYLTPGDSSSGWTAGAAAYYVGYLQPRTFLLKYNENGTITDAVDCALDPLSETKCTLKSFTVEKGIYQTSNFRVQPTESIVRFPNITNLCPFGEVFNATRFASVYAWNRKRISNCVADYSVLYNSASFSTFKCYGVSPTKLNDLCFTNVYADSFVIRGDEVRQIAPGQTGKIADYNYKLPDDFTGCVIAWNSNNLDSKVGGNYNYLYRLFRKSNLKPFERDISTEIYQAGSTPCNGVEGFNCYFPLQSYGFQPTNGVGYQPYRVVVLSFELLHAPATVCGPKKSTNLVKNKCVNFNFNGLTGTGVLTESNKKFLPFQQFGRDIADTTDAVRDPQTLEILDITPCSFGGVSVITPGTNTSNQVAVLYQGVNCTEVPVAIHADQLTPTWRVYSTGSNVFQTRAGCLIGAEHVNNSYECDIPIGAGICASYQTQTNSPRRARSVASQSIIAYTMSLGAENSVAYSNNSIACPTNFTISVTTEILPVSMTKTSVDCTMYICGDSTECSNLLLQYGSFCTQLNRALTGIAVEQDKNTQEVFAQVKQIYKTPPIKDFGGFNFSQILPDPSKPSKRSFIEDLLFNKVTLADVGFIKQYGDCLGDIAARDLICAQKFNGLTVLPPLLTDEMIAQYTSALLAGTITSGWTFGAGAALQIPFAMQMAYRFNGIGVTQNVLYENQKLIANQFNSAIGKIQDSLSSTASALGKLQDVVNQNAQALNTLVKQLSSNFGAISSVLNDILSRLDKVEAEVQIDRLITGRLQSLQTYVTQQLIRAAEIRASANLAATKMSECVLGQSKRVDFCGKGYHLMSFPQSAPHGVVFLHVTYVPAQEKNFTTAPAICHDGKAHFPREGVFVSNGTHWFVTQRNFCEPQIITTDNTFVSGNCDVVIGIVNNTVYDPLQPELDSFKEELDKYFKNHTSPDVDLGDISGINASVVNIQKEIDRLNEVAKNLNESLIDLQELGKYEQYIKWPWYIWLGFIAGLIAIVMVTIMLCCMTSCCSCLKGCCSCGSCCKFDEDDSEPVLKGVKLHYT

SEQ ID NO: 731 - protein, 1273 aa, Artificial Sequence
  SARS-CoV-2/Greece/16/2020__EPI_ISL_418265 spike protein (1-1273)(I714C_Y1110C)
MFVFLVLLPLVSSQCVNLTTRTQLPPAYTNSFTRGVYYPDKVFRSSVLHSTQDLFLPFFSNVTWFHAIHVSGTNGTKRFDNPVLPFNDGVYFASTEKSNIIRGWIFGTTLDSKTQSLLIVNNATNVVIKVCEFQFCNDPFLGVYYHKNNKSWMESEFRVYSSANNCTFEYVSQPFLMDLEGKQGNFKNLREFVFKNVDGYFKIYSKHTPINLVRDLPQGFSALEPLVDLPIGINITRFQTLLALHRSYLTPGDSSSGWTAGAAAYYVGYLQPRTFLLKYNENGTITDAVDCALDPLSETKCTLKSFTVEKGIYQTSNFRVQPTESIVRFPNITNLCPFGEVFNATRFASVYAWNRKRISNCVADYSVLYNSASFSTFKCYGVSPTKLNDLCFTNVYADSFVIRGDEVRQIAPGQTGKIADYNYKLPDDFTGCVIAWNSNNLDSKVGGNYNYLYRLFRKSNLKPFERDISTEIYQAGSTPCNGVEGFNCYFPLQSYGFQPTNGVGYQPYRVVVLSFELLHAPATVCGPKKSTNLVKNKCVNFNFNGLTGTGVLTESNKKFLPFQQFGRDIADTTDAVRDPQTLEILDITPCSFGGVSVITPGTNTSNQVAVLYQDVNCTEVPVAIHADQLTPTWRVYSTGSNVFQTRAGCLIGAEHVNNSYECDIPIGAGICASYQTQTNSPRRARSVASQSIIAYTMSLGAENSVAYSNNSIACPTNFTISVTTEILPVSMTKTSVDCTMYICGDSTECSNLLLQYGSFCTQLNRALTGIAVEQDKNTQEVFAQVKQIYKTPPIKDFGGFNFSQILPDPSKPSKRSFIEDLLFNKVTLADAGFIKQYGDCLGDIAARDLICAQKFNGLTVLPPLLTDEMIAQYTSALLAGTITSGWTFGAGAALQIPFAMQMAYRFNGIGVTQNVLYENQKLIANQFNSAIGKIQDSLSSTASALGKLQDVVNQNAQALNTLVKQLSSNFGAISSVLNDILSRLDKVEAEVQIDRLITGRLQSLQTYVTQQLIRAAEIRASANLAATKMSECVLGQSKRVDFCGKGYHLMSFPQSAPHGVVFLHVTYVPAQEKNFTTAPAICHDGKAHFPREGVFVSNGTHWFVTQRNFCEPQIITTDNTFVSGNCDVVIGIVNNTVYDPLQPELDSFKEELDKYFKNHTSPDVDLGDISGINASVVNIQKEIDRLNEVAKNLNESLIDLQELGKYEQYIKWPWYIWLGFIAGLIAIVMVTIMLCCMTSCCSCLKGCCSCGSCCKFDEDDSEPVLKGVKLHYT

SEQ ID NO: 732 - protein, 1273 aa, Artificial Sequence
  SARS-CoV-2/Iceland/319/2020__EPI_ISL_417648 spike protein (1-1273)(I714C_Y1110C)
MFVFLVLLPLVSSQCVNLTTRTQLPPAYTNSFTRGVYYPDKVFRSSVLHSTQDLFLPFFSNVTWFHAIHVSGTNGTKRFDNPVLPFNDGVYFASTEKSNIIRGWIFGTTLDSKTQSLLIVNNATNVVIKVCEFQFCNDPFLGVYYHKNNKSWMESEFRVYSSANNCTFEYVSQPFLIDLEGKQGNFKNLREFVFKNIDGYFKIYSKHTPINLVRDLPQGFSALEPLVDLPIGINITRFQTLLALHRSYLTPGDSSSGWTAGAAAYYVGYLQPRTFLLKYNENGTITDAVDCALDPLSETKCTLKSFTVEKGIYQTSNFRVQPTESIVRFPNITNLCPFGEVFNATRFASVYAWNRKRISNCVADYSVLYNSASFSTFKCYGVSPTKLNDLCFTNVYADSFVIRGDEVRQIAPGQTGKIADYNYKLPDDFTGCVIAWNSNNLDSKVGGNYNYLYRLFRKSNLKPFERDISTEIYQAGSTPCNGVEGFNCYFPLQSYGFQPTNGVGYQPYRVVVLSFELLHAPATVCGPKKSTNLVKNKCVNFNFNGLTGTGVLTESNKKFLPFQQFGRDIADTTDAVRDPQTLEILDITPCSFGGVSVITPGTNTSNQVAVLYQGVNCTEVPVAIHADQLTPTWRVYSTGSNVFQTRAGCLIGAEHVNNSYECDIPIGAGICASYQTQTNSPRRARSVASQSIIAYTMSLGAENSVAYSNNSIACPTNFTISVTTEILPVSMTKTSVDCTMYICGDSTECSNLLLQYGSFCTQLNRALTGIAVEQDKNTQEVFAQVKQIYKTPPIKDFGGFNFSQILPDPSKPSKRSFIEDLLFNKVTLADAGFIKQYGDCLGDIAARDLICAQKFNGLTVLPPLLTDEMIAQYTSALLAGTITSGWTFGAGAALQIPFAMQMAYRFNGIGVTQNVLYENQKLIANQFNSAIGKIQDSLSSTASALGKLQDVVNQNAQALNTLVKQLSSNFGAISSVLNDILSRLDKVEAEVQIDRLITGRLQSLQTYVTQQLIRAAEIRASANLAATKMSECVLGQSKRVDFCGKGYHLMSFPQSAPHGVVFLHVTYVPAQEKNFTTAPAICHDGKAHFPREGVFVSNGTHWFVTQRNFCEPQIITTDNTFVSGNCDVVIGIVNNTVYDPLQPELDSFKEELDKYFKNHTSPDVDLGDISGINASVVNIQKEIDRLNEVAKNLNESLIDLQELGKYEQYIKWPWYIWLGFIAGLIAIVMVTIMLCCMTSCCSCLKGCCSCGSCCKFDEDDSEPVLKGVKLHYT

SEQ ID NO: 733 - protein, 1273 aa, Artificial Sequence
  SARS-CoV-2/Congo/94/2020__EPI_ISL_417947 spike protein (1-1273)(I714C_Y1110C)
MFVFLVLLPLVSSQCVNLTTRTQLPPAYTNSFTRGVYYPDKVFRSSVLHSTQDLFLPFFSNVTWFHAIHVSGTNGTKRFDNPVLPFNDGVYFASTEKSNIIRGWIFGTTLDSKTQSLLIVNNATNVVIKVCEFQFCNDPFLGVYYHKNNKSWMESEFRVYSSANNCTFEYVSQPFLMDLEGKQGNFKNLREFVFKNIDGYFKIYSKHTPINLVRDLPQGFSALEPLVDLPIGINITRFQTLLALHRSYLTPGDSSSGWTAGAAAYYVGYLQPRTFLLKYNENGTITDAVDCALDPLSETKCTLKSFTVEKGIYQTSNFRVQPTESIVRFPNITNLCPFGEVFNATRFASVYAWNRKRISNCVADYSVLYNSASFSTFKCYGVSPTKLNDLCFTNVYADSFVIRGDEVRQIAPGQTGKIADYNYKLPDDFTGCVIAWNSNNLDSKVGGNYNYLYRLFRKSNLKPFERDISTEIYQAGSTPCNGVEGFNCYFPLQSYGFQPTNGVGYQPYRVVVLSFELLHAPATVCGPKKSTNLVKNKCVNFNFNGLTGTGVLTESNKKFLPFQQFGRDIADTTDAVRDPQTLEILDITPCSFGGVSVITPGTNTSNQVAVLYQGVNCTEVPVAIHADQLTPTWRVYSTGSNVFQTRAGCLIGAEHVNNSYECDIPIGAGICASYQTQTNSPRRARSVASQSIIAYTMSLGAENSVAYSNNSIACPTNFTISVTTEILPVSMTKTSVDCTMYICGDSTECSNLLLQYGSFCTQLNRALTGIAVEQDKNTQEVFAQVKQIYKTPPIKDFGGFNFSQILPDPSKPSKRSFIEDILFNKVTLADAGFIKQYGDCLGDIAARDLICAQKFNGLTVLPPLLTDEMIAQYTSALLAGTITSGWTFGAGAALQIPFAMQMAYRFNGIGVTQNVLYENQKLIANQFNSAIGKIQDSLSSTASALGKLQDVVNQNAQALNTLVKQLSSNFGAISSVLNDILSRLDKVEAEVQIDRLITGRLQSLQTYVTQQLIRAAEIRASANLAATKMSECVLGQSKRVDFCGKGYHLMSFPQSAPHGVVFLHVTYVPAQEKNFTTAPAICHDGKAHFPREGVFVSNGTHWFVTQRNFCEPQIITTDNTFVSGNCDVVIGIVNNTVYDPLQPELDSFKEELDKYFKNHTSPDVDLGDISGINASVVNIQKEIDRLNEVAKNLNESLIDLQELGKYEQYIKWPWYIWLGFIAGLIAIVMVTIMLCCMTSCCSCLKGCCSCGSCCKFDEDDSEPVLKGVKLHYT

SEQ ID NO: 734 - protein, 1273 aa, Artificial Sequence
  SARS-CoV-2/Congo/158/2020__EPI_ISL_417950 spike protein (1-1273)(I714C_Y1110C)
MFVFLVLLPLVSSQCVNLTTRTQLPPAYTNSFTRGVYYPDKVFRSSVLHSTQDLFLPFFSNVTWFHAIHVSGTNGTKRFDNPVLPFNDGVYFASTEKSNIIRGWIFGTTLDSKTQSLLIVNNATNVVIKVCEFQFCNDPFLGVYYHKNNKSWMESEFRVYSSANNCTFEYVSQPFLMDLEGKQGNFKNLREFVFKNIDGYFKIYSKHTPINLVRDLPQGFSALEPLVDLPIGINITRFQTLLALHRSYLTPGDSSSGWTAGAAAYYVGYLQPRTFLLKYNENGTITDAVDCALDPLSETKCTLKSFTVEKGIYQTSNFRVQPTESIVRFPNITNLCPFGEVFNATRFASVYAWNRKRISNCVADYSVLYNSASFSTFKCYGVSPTKLNDLCFTNVYADSFVIRGDEVRQIAPGQTGKIADYNYKLPDDFTGCVIAWNSNNLDSKVGGNYNYLYRLFRKSNLKPFERDISTEIYQAGSTPCNGVEGFNCYFPLQSYGFQPTNGVGYQPYRVVVLSFELLHAPATVCGPKKSTNLVKNKCVNFNFNGLTGTGVLTESNKKFLPFQQFGRDIADTTDAVRDPQTLEILDITPCSFGGVSVITPGTNTSNQVAVLYQDVNCTEVPVAIHADQLTPTWRVYSTGSNVFQTRAGCLIGAEHVNNSYECDIPIGAGICASYQTQTNSPRRARSVASQSIIAYTMSLGAENSVAYSNNSIACPTNFTISVTTEILPVSMTKTSVDCTMYICGDSTECSNLLLQYGSFCTQLNRALTGIAVEQDKNTQEVFAQVKQIYKTPPIKDFGGFNFSQILPDPSKPSKRSFIEDLLFNKVTLADAGFIKQYGDCLGDIAARDLICAQKFNGLTVLPPLLTDEMIAQYTSALLAGTITSGWTFGAGAALQIPFAMQMAYRFNGIGVTQNVLYENQKLIANQFNSAIGKIQDSLSSTASALGKLQDVVNQNAQALNTLVKQLSSNFGAISSVLNDILSRLDKVEAEVQIDRLITGRLQSLQTYVTQQLIRAAEIRASANLAATKMSECVLGQSKRVDFCGKGYHLMSFPQSAPHGVVFLHVTYVPAQEKNFTTAPAICHDGKAHFPREGVFVSNGTHWFVTQRNFCEPQIITTDNTFLSGNCDVVIGIVNNTVYDPLQPELDSFKEELDKYFKNHTSPDVDLGDISGINASVVNIQKEIDRLNEVAKNLNESLIDLQELGKYEQYIKWPWYIWLGFIAGLIAIVMVTIMLCCMTSCCSCLKGCCSCGSCCKFDEDDSEPVLKGVKLHYT

SEQ ID NO: 735 - protein, 1273 aa, Artificial Sequence
  SARS-CoV-2/USA/UT-00034/2020__EPI_ISL_417977 spike protein (1-1273)(I714C_Y1110C)
MFVFLVLLPLVSSQCVNLTTRTQLPPAYTNSFTRGVYYPDKVFRSSVLHSTQDLFLPFFSNVTWFHAIHVSGTNGTKRFDNPVLPFNDGVYFASTEKSNIIRGWIFGTTLDSKTQSLLIVNNATNVVIKVCEFQFCNDPFLGVYYYKNNKSWMESEFRVYSSANNCTFEYVSQPFLMDLEGKQGNFKNLREFVFKNIDGYFKIYSKHTPINLVRDLPQGFSALEPLVDLPIGINITRFQTLLALHRSYLTPGDSSSGWTAGAAAYYVGYLQPRTFLLKYNENGTITDAVDCALDPLSETKCTLKSFTVEKGIYQTSNFRVQPTESIVRFPNITNLCPFGEVFNATRFASVYAWNRKRISNCVADYSVLYNSASFSTFKCYGVSPTKLNDLCFTNVYADSFVIRGDEVRQIAPGQTGKIADYNYKLPDDFTGCVIAWNSNNLDSKVGGNYNYLYRLFRKSNLKPFERDISTEIYQAGSTPCNGVEGFNCYFPLQSYGFQPTNGVGYQPYRVVVLSFELLHAPATVCGPKKSTNLVKNKCVNFNFNGLTGTGVLTESNKKFLPFQQFGRDIADTTDAVRDPQTLEILDITPCSFGGVSVITPGTNTSNQVAVLYQGVNCTEVPVAIHADQLTPTWRVYSTGSNVFQTRAGCLIGAEHVNNSYECDIPIGAGICASYQTQTNSPRRARSVASQSIIAYTMSLGAENSVAYSNNSIACPTNFTISVTTEILPVSMTKTSVDCTMYICGDSTECSNLLLQYGSFCTQLNRALTGIAVEQDKNTQEVFAQVKQIYKTPPIKDFGGFNFSQILPDPSKPSKRSFIEDLLFNKVTLADAGFIKQYGDCLGDIAARDLICAQKFNGLTVLPPLLTDEMIAQYTSALLAGTITSGWTFGAGAALQIPFAMQMAYRFNGIGVTQNVLYENQKLIANQFNSAIGKIQDSLSSTASALGKLQDVVNQNAQALNTLVKQLSSNFGAISSVLNDILSRLDKVEAEVQIDRLITGRLQSLQTYVTQQLIRAAEIRASANLAATKMSECVLGQSKRVDFCGKGYHLMSFPQSAPHGVVFLHVTYVPAQEKNFTTAPAICHDGKAHFPREGVFVSNGTHWFVTQRNFCEPQIITTDNTFVSGNCDVVIGIVNNTVYDPLQPELDSFKEELDKYFKNHTSPDVDLGDISGINASVVNIQKEIDRLNEVAKNLNESLIDLQELGKYEQYIKWPWYIWLGFIAGLIAIVMVTIMLCCMTSCCSCLKGCCSCGSCCKFDEDDSEPVLKGVKLHYT

SEQ ID NO: 736 - protein, 1273 aa, Artificial Sequence
  SARS-CoV-2/USA/UT-00033/2020__EPI_ISL_417976 spike protein (1-1273)(I714C_Y1110C)
MFVFLVLLPLVSSQCVNLTTRTQLPPAYTNSFTRGVYYPDKVFRSSVLHSTQDLFLPFFSNVTWFHAIHVSGTNGTKRFDNPVLPFNDGVYFASTEKSNIIRGWIFGTTLDSKTQSLLIVNNATNVVIKVCEFQFCNDPFLGVYYHKNNKSWMESEFRVYSSANNCTFEYVSQPFLMDLEGKQGNFKNLREFVFKNIDGYFKIYSKHTPINLVRDLPQGFSALEPLVDLPIGINITRFQTLLALHRSYLTPGDSSSGLTAGAAAYYVGYLQPRTFLLKYNENGTITDAVDCALDPLSETKCTLKSFTVEKGIYQTSNFRVQPTESIVRFPNITNLCPFGEVFNATRFASVYAWNRKRISNCVADYSVLYNSASFSTFKCYGVSPTKLNDLCFTNVYADSFVIRGDEVRQIAPGQTGKIADYNYKLPDDFTGCVIAWNSNNLDSKVGGNYNYLYRLFRKSNLKPFERDISTEIYQAGSTPCNGVEGFNCYFPLQSYGFQPTNGVGYQPYRVVVLSFELLHAPATVCGPKKSTNLVKNKCVNFNFNGLTGTGVLTESNKKFLPFQQFGRDIADTTDAVRDPQTLEILDITPCSFGGVSVITPGTNTSNQVAVLYQGVNCTEVPVAIHADQLTPTWRVYSTGSNVFQTRAGCLIGAEHVNNSYECDIPIGAGICASYQTQTNSPRRARSVASQSIIAYTMSLGAENSVAYSNNSIACPTNFTISVTTEILPVSMTKTSVDCTMYICGDSTECSNLLLQYGSFCTQLNRALTGIAVEQDKNTQEVFAQVKQIYKTPPIKDFGGFNFSQILPDPSKPSKRSFIEDLLFNKVTLADAGFIKQYGDCLGDIAARDLICAQKFNGLTVLPPLLTDEMIAQYTSALLAGTITSGWTFGAGAALQIPFAMQMAYRFNGIGVTQNVLYENQKLIANQFNSAIGKIQDSLSSTASALGKLQDVVNQNAQALNTLVKQLSSNFGAISSVLNDILSRLDKVEAEVQIDRLITGRLQSLQTYVTQQLIRAAEIRASANLAATKMSECVLGQSKRVDFCGKGYHLMSFPQSAPHGVVFLHVTYVPAQEKNFTTAPAICHDGKAHFPREGVFVSNGTHWFVTQRNFCEPQIITTDNTFVSGNCDVVIGIVNNTVYDPLQPELDSFKEELDKYFKNHTSPDVDLGDISGINASVVNIQKEIDRLNEVAKNLNESLIDLQELGKYEQYIKWPWYIWLGFIAGLIAIVMVTIMLCCMTSCCSCLKGCCSCGSCCKFDEDDSEPVLKGVKLHYT

SEQ ID NO: 737 - protein, 1273 aa, Artificial Sequence
  SARS-CoV-2/USA/WI-13/2020__EPI_ISL_417516 spike protein (1-1273)(I714C_Y1110C)
MFVFLVLLPLVSSQCVNLTTRTQLPPAYTNSFTRGVYYPDKVFRSSVLHSTQDLFLPFFSNVTWFHAIHVSGTNGTKRFDNPVLPFNDGVYFASTEKSNIIRGWIFGTTLDSKTQSLLIVNNATNVVIKVCEFQFCNDPFLGVYYHKNNKSWMESEFRVYSSANNCTFEYVSQPFLMDLEGKQGNFKNLREFVFKNIDGYFKIYSKHTPINLVRDLPQGFSALEPLVDLPIGINITRFQTLLALHRSYLTPGDSSSGWTAGAAAYYVGYLQPRTFLLKYNENGTITDAVDCALDPLSETKCTLKSFTVEKGIYQTSNFRVLPTESIVRFPNITNLCPFGEVFNATRFASVYAWNRKRISNCVADYSVLYNSASFSTFKCYGVSPTKLNDLCFTNVYADSFVIRGDEVRQIAPGQTGKIADYNYKLPDDFTGCVIAWNSNNLDSKVGGNYNYLYRLFRKSNLKPFERDISTEIYQAGSTPCNGVEGFNCYFPLQSYGFQPTNGVGYQPYRVVVLSFELLHAPATVCGPKKSTNLVKNKCVNFNFNGLTGTGVLTESNKKFLPFQQFGRDIADTTDAVRDPQTLEILDITPCSFGGVSVITPGTNTSNQVAVLYQGVNCTEVPVAIHADQLTPTWRVYSTGSNVFQTRAGCLIGAEHVNNSYECDIPIGAGICASYQTQTNSPRRARSVASQSIIAYTMSLGAENSVAYSNNSIACPTNFTISVTTEILPVSMTKTSVDCTMYICGDSTECSNLLLQYGSFCTQLNRALTGIAVEQDKNTQEVFAQVKQIYKTPPIKDFGGFNFSQILPDPSKPSKRSFIEDLLFNKVTLADAGFIKQYGDCLGDIAARDLICAQKFNGLTVLPPLLTDEMIAQYTSALLAGTITSGWTFGAGAALQIPFAMQMAYRFNGIGVTQNVLYENQKLIANQFNSAIGKIQDSLSSTASALGKLQDVVNQNAQALNTLVKQLSSNFGAISSVLNDILSRLDKVEAEVQIDRLITGRLQSLQTYVTQQLIRAAEIRASANLAATKMSECVLGQSKRVDFCGKGYHLMSFPQSAPHGVVFLHVTYVPAQEKNFTTAPAICHDGKAHFPREGVFVSNGTHWFVTQRNFCEPQIITTDNTFVSGNCDVVIGIVNNTVYDPLQPELDSFKEELDKYFKNHTSPDVDLGDISGINASVVNIQKEIDRLNEVAKNLNESLIDLQELGKYEQYIKWPWYIWLGFIAGLIAIVMVTIMLCCMTSCCSCLKGCCSCGSCCKFDEDDSEPVLKGVKLHYT

SEQ ID NO: 738 - protein, 1272 aa, Artificial Sequence
  SARS-CoV-2/India/1-27/2020__EPI_ISL_413522 spike protein (1-1272)(I713C_Y1109C)
MFVFLVLLPLVSSQCVNLTTRTQLPPAYTNSFTRGVYYPDKVFRSSVLHSTQDLFLPFFSNVTWFHAIHVSGTNGTKRFDNPVLPFNDGVYFASTEKSNIIRGWIFGTTLDSKTQSLLIVNNATNVVIKVCEFQFCNDPFLGVYHKNNKSWMESEFRVYSSANNCTFEYVSQPFLMDLEGKQGNFKNLREFVFKNIDGYFKIYSKHTPINLVRDLPQGFSALEPLVDLPIGINITRFQTLLALHRSYLTPGDSSSGWTAGAAAYYVGYLQPRTFLLKYNENGTITDAVDCALDPLSETKCTLKSFTVEKGIYQTSNFRVQPTESIVRFPNITNLCPFGEVFNATRFASVYAWNRKRISNCVADYSVLYNSASFSTFKCYGVSPTKLNDLCFTNVYADSFVIRGDEVIQIAPGQTGKIADYNYKLPDDFTGCVIAWNSNNLDSKVGGNYNYLYRLFRKSNLKPFERDISTEIYQAGSTPCNGVEGFNCYFPLQSYGFQPTNGVGYQPYRVVVLSFELLHAPATVCGPKKSTNLVKNKCVNFNFNGLTGTGVLTESNKKFLPFQQFGRDIADTTDAVRDPQTLEILDITPCSFGGVSVITPGTNTSNQVAVLYQDVNCTEVPVAIHADQLTPTWRVYSTGSNVFQTRAGCLIGAEHVNNSYECDIPIGAGICASYQTQTNSPRRARSVASQSIIAYTMSLGAENSVAYSNNSIACPTNFTISVTTEILPVSMTKTSVDCTMYICGDSTECSNLLLQYGSFCTQLNRALTGIAVEQDKNTQEVFAQVKQIYKTPPIKDFGGFNFSQILPDPSKPSKRSFIEDLLFNKVTLADAGFIKQYGDCLGDIAARDLICAQKFNGLTVLPPLLTDEMIAQYTSALLAGTITSGWTFGAGAALQIPFAMQMAYRFNGIGVTQNVLYENQKLIANQFNSAIGKIQDSLSSTASALGKLQDVVNQNAQALNTLVKQLSSNFGAISSVLNDILSRLDKVEAEVQIDRLITGRLQSLQTYVTQQLIRAAEIRASANLAATKMSECVLGQSKRVDFCGKGYHLMSFPQSAPHGVVFLHVTYVPAQEKNFTTAPAICHDGKAHFPREGVFVSNGTHWFVTQRNFCEPQIITTDNTFVSGNCDVVIGIVNNTVYDPLQPELDSFKEELDKYFKNHTSPDVDLGDISGINASVVNIQKEIDRLNEVAKNLNESLIDLQELGKYEQYIKWPWYIWLGFIAGLIAIVMVTIMLCCMTSCCSCLKGCCSCGSCCKFDEDDSEPVLKGVKLHYT

SEQ ID NO: 739 - protein, 1267 aa, Artificial Sequence
  SARS-CoV-2/pangolin/Guangxi/P4L/2017__EPI_ISL_410538 spike protein (1-1267)(I708C_Y1104C)
MFVFLFVLPLVSSQCVNLTTRTGIPPGYTNSSTRGVYYPDKVFRSSILHLTQDLFLPFFSNVTWFNTINYQGGFKKFDNPVLPFNDGVYFASTEKSNIIRGWIFGTTLDARTQSLLIVNNATNVVIKVCEFQFCTDPFLGVYYHNNNKTWVENEFRVYSSANNCTFEYISQPFLMDLEGKQGNFKNLREFVFKNVDGYFKIYSKHTPIDLVRDLPRGFAALEPLVDLPIGINITRFQTLLALHRSYLTPGNLESGWTTGAAAYYVGYLQQRTFLLSYNQNGTITDAVDCSLDPLSETKCTLKSLTVEKGIYQTSNFRVQPTISIVRFPNITNLCPFGEVFNASKFASVYAWNRKRISNCVADYSVLYNSTSFSTFKCYGVSPTKLNDLCFTNVYADSFVVKGDEVRQIAPGQTGVIADYNYKLPDDFTGCVIAWNSVKQDALTGGNYGYLYRLFRKSKLKPFERDISTEIYQAGSTPCNGQVGLNCYYPLERYGFHPTTGVNYQPFRVVVLSFELLNGPATVCGPKLSTTLVKDKCVNFNFNGLTGTGVLTTSKKQFLPFQQFGRDISDTTDAVRDPQTLEILDITPCSFGGVSVITPGTNTSNQVAVLYQDVNCTEVPMAIHAEQLTPAWRVYSAGANVFQTRAGCLVGAEHVNNSYECDIPVGAGICASYHSMSSLRSVNQRSIIAYTMSLGAENSVAYSNNSIACPTNFTISVTTEILPVSMTKTSVDCTMYICGDSIECSNLLLQYGSFCTQLNRALTGIAVEQDKNTQEVFAQVKQIYKTPPIKDFGGFNFSQILPDPSKPSKRSFIEDLLFNKVTLADAGFIKQYGDCLGDIAARDLICAQKFNGLTVLPPLLTDEMIAQYTSALLAGTITSGWTFGAGAALQIPFAMQMAYRFNGIGVTQNVLYENQKLIANQFNSAIGKIQDSLSSTASALGKLQDVVNQNAQALNTLVKQLSSNFGAISSVLNDILSRLDKVEAEVQIDRLITGRLQSLQTYVTQQLIRAAEIRASANLAATKMSECVLGQSKRVDFCGKGYHLMSFPQSAPHGVVFLHVTYVPAQEKNFTTAPAICHEGKAHFPREGVFVSNGTHWFITQRNFCEPQIITTDNTFVSGSCDVVIGIVNNTVYDPLQPELDSFKEELDKYFKNHTSPDVDLGDISGINASVVNIQKEIDRLNEVAKNLNESPIDLQELGKYEQYIKWPWYIWLGFIAGLIAIIMVTIMLCCMTSCCSCLKGCCSCGSCCKFDEDDSEPVLKGVKLHYT

SEQ ID NO: 740 - protein, 1267 aa, Artificial Sequence
  SARS-CoV-2/pangolin/Guangxi/P5L/2017__EPI_ISL_410540 spike protein (1-1267)(I708C_Y1104C)
MFVFLFVLPLVSSQCVNLTTRTGIPPGYTNSSTRGVYYPDKVFRSSILHLTQDLFLPFFSNVTWFNTINYQGGFKKFDNPVLPFNDGVYFASTEKSNIIRGWIFGTTLDARTQSLLIVNNATNVVIKVCEFQFCTDPFLGVYYHNNNKTWVENEFRVYSSANNCTFEYISQPFLMDLEGKQGNFKNLREFVFKNVDGYFKIYSKHTPIDLVRDLPRGFAALEPLVDLPIGINITRFQTLLALHRSYLTPGKLESGWTTGAAAYYVGYLQQRTFLLSYNQNGTITDAVDCSLDPLSETKCTLKSLTVEKGIYQTSNFRVQPTISIVRFPNITNLCPFGEVFNASKFASVYAWNRKRISNCVADYSVLYNSTSFSTFKCYGVSPTKLNDLCFTNVYADSFVVKGDEVRQIAPGQTGVIADYNYKLPDDFTGCVIAWNSVKQDALTGGNYGYLYRLFRKSKLKPFERDISTEIYQAGSTPCNGQVGLNCYYPLERYGFHPTTGVNYQPFRVVVLSFELLNGPATVCGPKLSTTLVKDKCVNFNFNGLTGTGVLTTSKKQFLPFQQFGRDISDTTDAVRDPQTLEILDITPCSFGGVSVITPGTNTSNQVAVLYQDVNCTEVPMAIHAEQLTPAWRVYSAGANVFQTRAGCLVGAEHVNNSYECDIPVGAGICASYHSMSSFRSVNQRSIIAYTMSLGAENSVAYSNNSIACPTNFTISVTTEILPVSMTKTSVDCTMYICGDSIECSNLLLQYGSFCTQLNRALTGIAVEQDKNTQEVFAQVKQIYKTPPIKDFGGFNFSQILPDPSKPSKRSFIEDLLFNKVTLADAGFIKQYGDCLGDIAARDLICAQKFNGLTVLPPLLTDEMIAQYTSALLAGTITSGWTFGAGAALQIPFAMQMAYRFNGIGVTQNVLYENQKLIANQFNSAIGKIQDSLSSTASALGKLQDVVNQNAQALNTLVKQLSSNFGAISSVLNDILSRLDKVEAEVQIDRLITGRLQSLQTYVTQQLIRAAEIRASANLAATKMSECVLGQSKRVDFCGKGYHLMSFPQSAPHGVVFLHVTYVPAQEKNFTTAPAICHEGKAHFPREGVFVSNGTHWFITQRNFCEPQIITTDNTFVSGSCDVVIGIVNNTVYDPLQPELDSFKEELDKYFKNHTSPDVDLGDISGINASVVNIQKEIDRLNEVAKNLNESLIDLQELGKYEQYIKWPWYIWLGFIAGLIAIIMVTIMLCCMTSCCSCLKGCCSCGSCCKFDEDDSEPVLKGVKLHYT

SEQ ID NO: 741 - protein, 1267 aa, Artificial Sequence
  SARS-CoV-2/pangolin/Guangxi/P5E/2017__EPI_ISL_410541 spike protein (1-1267)(I708C_Y1104C)
MFVFLFVLPLVSSQCVNLTTRTGIPPGYTNSSTRGVYYPDKVFRSSILHLTQDLFLPFFSNVTWFNTITYQGGSKKFDNPVLPFNDGVYFASTEKSNIIRGWIFGTTLDARTQSLLIVNNATNVVIKVCEFQFCTDPFLGVYYHNNNKTWVENEFRVYSSANNCTFEYISQPFLMDLEGKQGNFKNLREFVFKNVDGYFKIYSKHTPIDLVRDLPRGFAALEPLVDLPIGINITRFQTLLALHRSYLTPGKLESGWTTGAAAYYVGYLQQRTFLLSYNQNGTITDAVDCSLDPLSETKCTLKSLTVEKGIYQTSNFRVQPTISIVRFPNITNLCPFGEVFNASKFASVYAWNRKRISNCVADYSVLYNSTSFSTFKCYGVSPTKLNDLCFTNVYADSFVVKGDEVRQIAPGQTGVIADYNYKLPDDFTGCVIAWNSVKQDALTGDNYGYLYRLFRKSKLKPFERDISTEIYQAGSTPCNGQVGLNCYYPLERYGFHPTTGVNYQPFRVVVLSFELLNGPATVCGPKLSTTLVKDKCVNFNFNGLTGTGVLTTSKKQFLPFQQFGRDISDTTDAVRDPQTLEILDITPCSFGGVSVITPGTNTSNQVAVLYQDVNCTEVPMAIHAEQLTPAWRVYSAGANVFQTRAGCLVGAEHVNNSYECDIPVGAGICASYHSMSSFRSVNQRSIIAYTMSLGAENSVAYSNNSIACPTNFTISVTTEILPVSMTKTSVDCTMYICGDSIECSNLLLQYGSFCTQLNRALTGIAVEQDKNTQEVFAQVKQIYKTPPIKDFGGFNFSQILPDPSKPSKRSFIEDLLFNKVTLADAGFIKQYGDCLGDIAARDLICAQKFNGLTVLPPLLTDEMIAQYTSALLAGTITSGWTFGAGAALQIPFAMQMAYRFNGIGVTQNVLYENQKLIANQFNSAIGKIQDSLSSTASALGKLQDVVNQNAQALNTLVKQLSSNFGAISSVLNDILSRLDKVEAEVQIDRLITGRLQSLQTYVTQQLIRAAEIRASANLAATKMSECVLGQSKRVDFCGKGYHLMSFPQSAPHGVVFLHVTYVPAQEKNFTTAPAICHEGKAHFPREGVFVSNGTHWFITQRNFCEPQIITTDNTFVSGSCDVVIGIVNNTVYDPLQPELDSFKEELDKYFKNHTSPDVDLGDISGINASVVNIQKEIDRLNEVAKNLNESLIDLQELGKYEQYIKWPWYIWLGFIAGLIAIIMVTIMLCCMTSCCSCLKGCCSCGSCCKFDEDDSEPVLKGVKLHYT

SEQ ID NO: 742 - protein, 1265 aa, Artificial Sequence
  SARS-CoV-2/pangolin/Guangxi/P1E/2017__EPI_ISL_410539 spike protein (1-1265)(I706C_Y1102C)
MFVFLFVLPLVSSQCVNLTTRTGIQPGYTNSSTRGVYYPDKVFRSSILHLTQDLFLPFFSNVTWFNTINYQGGFKKFDNPVLPFNDGVYFASTEKSNIIRGWIFGTTLDARTQSLLIVNNATNVVIKVCEFQFCTDPFLGVYYHNNNKTWVENEFRVYSSANNCTFEYISQPFLMDLEGKQGNFKNLREFVFKNVDGYFKIYSKHTPIDLVRDLPRGFAALEPLVDLPIGINITRFQTLLALHRSYLTPGKLESGWTTGAAAYYVGYLQQRTFLLSYNQNGTITDAVDCSLDPLSETKCTLKSLTVEKGIYQTSNFRVQPTISIVRFPNITNLCPFGEVFNASKFASVYAWNRKRISNCVADYSVLYNSTSFSTFKCYGVSPTKLNDLCFTNVYADSFVVKGDEVRQIAPGQTGVIADYNYKLPDDFTGCVIAWNSVKQDALTGGNYLYRLFRKSKLKPFERDISTEIYQAGSTPCNGQVGLNCYYPLERYGFHPTTGVNYQPFRVVVLSFELLNGPATVCGPKLSTTLVKDKCVNFNFNGLTGTGVLTTSKKQFLPFQQFGRDISDTTDAVRDPQTLEILDITPCSFGGVSVITPGTNTSNQVAVLYQDVNCTEVPMAIHAEQLTPAWRVYSAGANVFQTRAGCLVGAEHVNNSYECDIPVGAGICASYHSMSSLRSVNQRSIIAYTMSLGAENSVAYSNNSIACPTNFTISVTTEILPVSMTKTSVDCTMYICGDSIECSNLLLQYGSFCTQLNRALTGIAVEQDKNTQEVFAQVKQIYKTPPIKDFGGFNFSQILPDPSKPSKRSFIEDLLFNKVTLADAGFIKQYGDCLGDIAARDLICAQKFNGLTVLPPLLTDEMIAQYTSALLAGTITSGWTFGAGAALQIPFAMQMAYRFNGIGVTQNVLYENQKLIANQFNSAIGKIQDSLSSTASALGKLQDVVNQNAQALNTLVKQLSSNFGAISSVLNDILSRLDKVEAEVQIDRLITGRLQSLQTYVTQQLIRAAEIRASANLAATKMSECVLGQSKRVDFCGKGYHLMSFPQSAPHGVVFLHVTYVPAQEKNFTTAPAICHEGKAHFPREGVFVSNGTHWFITQRNFCEPQIITTDNTFVSGSCDVVIGIVNNTVYDPLQPELDSFKEELDKYFKNHTSPDVDLGDISGINASVVNIQKEIDRLNEVAKNLNESLIDLQELGKYEQYIKWPWYIWLGFIAGLIAIIMVTIMLCCMTSCCSCLKGCCSCGSCCKFDEDDSEPVLKGVKLHYT

SEQ ID NO: 743 - protein, 1273 aa, Artificial Sequence; identical to SEQ ID NO: 21
  SARS-CoV-2/Wuhan/WIV05/2019__EPI_ISL_402128 spike protein (1-1273)(P715C_P1069C)

SEQ ID NO: 744 - protein, 1269 aa, Artificial Sequence
  SARS-CoV-2/bat/Yunnan/RaTG13/2013__EPI_ISL_402131 spike protein (1-1269)(P711C_P1065C)
MFVFLVLLPLVSSQCVNLTTRTQLPPAYTNSSTRGVYYPDKVFRSSVLHLTQDLFLPFFSNVTWFHAIHVSGTNGIKRFDNPVLPFNDGVYFASTEKSNIIRGWIFGTTLDSKTQSLLIVNNATNVVIKVCEFQFCNDPFLGVYYHKNNKSWMESEFRVYSSANNCTFEYVSQPFLMDLEGKQGNFKNLREFVFKNIDGYFKIYSKHTPINLVRDLPPGFSALEPLVDLPIGINITRFQTLLALHRSYLTPGDSSSGWTAGAAAYYVGYLQPRTFLLKYNENGTITDAVDCALDPLSETKCTLKSFTVEKGIYQTSNFRVQPTDSIVRFPNITNLCPFGEVFNATTFASVYAWNRKRISNCVADYSVLYNSTSFSTFKCYGVSPTKLNDLCFTNVYADSFVITGDEVRQIAPGQTGKIADYNYKLPDDFTGCVIAWNSKHIDAKEGGNFNYLYRLFRKANLKPFERDISTEIYQAGSKPCNGQTGLNCYYPLYRYGFYPTDGVGHQPYRVVVLSFELLNAPATVCGPKKSTNLVKNKCVNFNFNGLTGTGVLTESNKKFLPFQQFGRDIADTTDAVRDPQTLEILDITPCSFGGVSVITPGTNASNQVAVLYQDVNCTEVPVAIHADQLTPTWRVYSTGSNVFQTRAGCLIGAEHVNNSYECDIPIGAGICASYQTQTNSRSVASQSIIAYTMSLGAENSVAYSNNSIAICTNFTISVTTEILPVSMTKTSVDCTMYICGDSTECSNLLLQYGSFCTQLNRALTGIAVEQDKNTQEVFAQVKQIYKTPPIKDFGGFNFSQILPDPSKPSKRSFIEDLLFNKVTLADAGFIKQYGDCLGDIAARDLICAQKFNGLTVLPPLLTDEMIAQYTSALLAGTITSGWTFGAGAALQIPFAMQMAYRFNGIGVTQNVLYENQKLIANQFNSAIGKIQDSLSSTASALGKLQDVVNQNAQALNTLVKQLSSNFGAISSVLNDILSRLDKVEAEVQIDRLITGRLQSLQTYVTQQLIRAAEIRASANLAATKMSECVLGQSKRVDFCGKGYHLMSFPQSAPHGVVFLHVTYVCAQEKNFTTAPAICHDGKAHFPREGVFVSNGTHWFVTQRNFYEPQIITTDNTFVSGSCDVVIGIVNNTVYDPLQPELDSFKEELDKYFKNHTSPDVDLGDISGINASVVNIQKEIDRLNEVAKNLNESLIDLQELGKYEQYIKWPWYIWLGFIAGLIAIIMVTIMLCCMTSCCSCLKGCCSCGSCCKFDEDDSEPVLKGVKLHYT

SEQ ID NO: 745 - protein, 1273 aa, Artificial Sequence
  SARS-CoV-2/Wuhan/HBCDC-HB-01/2019__EPI_ISL_402132 spike protein (1-1273)(P715C_P1069C)
MFVFLVLLPLVSSQCVNLTTRTQLPPAYTNSITRGVYYPDKVFRSSVLHSTQDLFLPFFSNVTWFHAIHVSGTNGTKRFDNPVLPFNDGVYFASTEKSNIIRGWIFGTTLDSKTQSLLIVNNATNVVIKVCEFQFCNDPFLGVYYHKNNKSWMESEFRVYSSANNCTFEYVSQPFLMDLEGKQGNFKNLREFVFKNIDGYFKIYSKHTPINLVRDLPQGFSALEPLVDLPIGINITRFQTLLALHRSYLTPGDSSSGWTAGAAAYYVGYLQPRTFLLKYNENGTITDAVDCALDPLSETKCTLKSFTVEKGIYQTSNFRVQPTESIVRFPNITNLCPFGEVFNATRFASVYAWNRKRISNCVADYSVLYNSASFSTFKCYGVSPTKLNDLCFTNVYADSFVIRGDEVRQIAPGQTGKIADYNYKLPDDFTGCVIAWNSNNLDSKVGGNYNYLYRLFRKSNLKPFERDISTEIYQAGSTPCNGVEGFNCYFPLQSYGFQPTNGVGYQPYRVVVLSFELLHAPATVCGPKKSTNLVKNKCVNFNFNGLTGTGVLTESNKKFLPFQQFGRDIADTTDAVRDPQTLEILDITPCSFGGVSVITPGTNTSNQVAVLYQDVNCTEVPVAIHADQLTPTWRVYSTGSNVFQTRAGCLIGAEHVNNSYECDIPIGAGICASYQTQTNSPRRARSVASQSIIAYTMSLGAENSVAYSNNSIAICTNFTISVTTEILPVSMTKTSVDCTMYICGDSTECSNLLLQYGSFCTQLNRALTGIAVEQDKNTQEVFAQVKQIYKTPPIKDFGGFNFSQILPDPSKPSKRSFIEDLLFNKVTLADAGFIKQYGDCLGDIAARDLICAQKFNGLTVLPPLLTDEMIAQYTSALLAGTITSGWTFGAGAALQIPFAMQMAYRFNGIGVTQNVLYENQKLIANQFNSAIGKIQDSLSSTASALGKLQDVVNQNAQALNTLVKQLSSNFGAISSVLNDILSRLDKVEAEVQIDRLITGRLQSLQTYVTQQLIRAAEIRASANLAATKMSECVLGQSKRVDFCGKGYHLMSFPQSAPHGVVFLHVTYVCAQEKNFTTAPAICHDGKAHFPREGVFVSNGTHWFVTQRNFYEPQIITTDNTFVSGNCDVVIGIVNNTVYDPLQPELDSFKEELDKYFKNHTSPDVDLGDISGINASVVNIQKEIDRLNEVAKNLNESLIDLQELGKYEQYIKWPWYIWLGFIAGLIAIVMVTIMLCCMTSCCSCLKGCCSCGSCCKFDEDDSEPVLKGVKLHYT

SEQ ID NO: 746 - protein, 1273 aa, Artificial Sequence
  SARS-CoV-2/Guangdong/20SF028/2020__EPI_ISL_403936 spike protein (1-1273)(P715C_P1069C)
MFVFLVLLPLVSSQCVNLTTRTQLPPAYTNSFTRGVYYPDKVFRSSVLYSTQDLFLPFFSNVTWFHAIHVSGTNGTKRFDNPVLPFNDGVYFASTEKSNIIRGWIFGTTLDSKTQSLLIVNNATNVVIKVCEFQFCNDPFLGVYYHKNNKSWMESEFRVYSSANNCTFEYVSQPFLMDLEGKQGNFKNLREFVFKNIDGYFKIYSKHTPINLVRDLPQGFSALEPLVDLPIGINITRFQTLLALHRSYLTPGDSSSGWTAGAAAYYVGYLQPRTFLLKYNENGTITDAVDCALDPLSETKCTLKSFTVEKGIYQTSNFRVQPTESIVRFPNITNLCPFGEVFNATRFASVYAWNRKRISNCVADYSVLYNSASFSTFKCYGVSPTKLNDLCFTNVYADSFVIRGDEVRQIAPGQTGKIADYNYKLPDDFTGCVIAWNSNNLDSKVGGNYNYLYRLFRKSNLKPFERDISTEIYQAGSTPCNGVEGFNCYFPLQSYGFQPTNGVGYQPYRVVVLSFELLHAPATVCGPKKSTNLVKNKCVNFNFNGLTGTGVLTESNKKFLPFQQFGRDIADTTDAVRDPQTLEILDITPCSFGGVSVITPGTNTSNQVAVLYQDVNCTEVPVAIHADQLTPTWRVYSTGSNVFQTRAGCLIGAEHVNNSYECDIPIGAGICASYQTQTNSPRRARSVASQSIIAYTMSLGAENSVAYSNNSIAICTNFTISVTTEILPVSMTKTSVDCTMYICGDSTECSNLLLQYGSFCTQLNRALTGIAVEQDKNTQEVFAQVKQIYKTPPIKDFGGFNFSQILPDPSKPSKRSFIEDLLFNKVTLADAGFIKQYGDCLGDIAARDLICAQKFNGLTVLPPLLTDEMIAQYTSALLAGTITSGWTFGAGAALQIPFAMQMAYRFNGIGVTQNVLYENQKLIANQFNSAIGKIQDSLSSTASALGKLQDVVNQNAQALNTLVKQLSSNFGAISSVLNDILSRLDKVEAEVQIDRLITGRLQSLQTYVTQQLIRAAEIRASANLAATKMSECVLGQSKRVDFCGKGYHLMSFPQSAPHGVVFLHVTYVCAQEKNFTTAPAICHDGKAHFPREGVFVSNGTHWFVTQRNFYEPQIITTDNTFVSGNCDVVIGIVNNTVYDPLQPELDSFKEELDKYFKNHTSPDVDLGDISGINASVVNIQKEIDRLNEVAKNLNESLIDLQELGKYEQYIKWPWYIWLGFIAGLIAIVMVTIMLCCMTSCCSCLKGCCSCGSCCKFDEDDSEPVLKGVKLHYT

SEQ ID NO: 747 - protein, 1273 aa, Artificial Sequence
  SARS-CoV-2/Shenzhen/SZTH-001/2020__EPI_ISL_406592 spike protein (1-1273)(P715C_P1069C)
MFVFLVLLPLVSSQCVNLTTRTQLPPAYTNSFTRGVYYPDKVFRSSVLHSTQDLFLPFFSNVTWFHAIHVSGTNGTKRFDNPVLPFNDGVYFASTEKSNIIRGWIFGTTLDSKTQSLLIVNNATNVVIKVCEFQFCNDPFLGVYYHKNNKSWMESEFRVYSSANNCTFEYVSQPFLMDLEGKQGNFKNLREFVFKNIDGYFKIYSKHTPINLVRDLPQGFSALEPLVDLPIGINITRFQTLLALHRSYLTPGDSSSGWTAGAAAYYVGYLQPRTFLLKYNENGTITDAVDCALDPLSETKCTLKSFTVEKGIYQTSNFRVQPTESIVRFPNITNLCPFGEVFNATRFASVYAWNRKRISNCVADYSVLYNSASFSTFKCYGVSPTKLNDLCFTNVYADSFVIRGDEVRQIAPGQTGKIADYNYKLPDDFTGCVIAWNSNNLDSKVGGNYNYLYRLFRKSNLKPFERDISTEIYQAGSTPCNGVEGFNCYFPLQSYGFQPTNGVGYQPYRVVVLSFELLHAPATVCGPKKSTNLVKNKCVNFNFNGLTGTGVLTESNKKFLPFQQFGRDIADTTDAVRDPQTLEILDITPCSFGGVSVITPGTNTSNQVAVLYQDVNCTEVPVAIHADQLTPTWRVYSTGSNVFQTRAGCLIGAEHVNNSYECDIPIGAGICASYQTQTNSPRRARSVASQSIIAYTMSLGAENSVAYSNNSIAICTNFTISVTTEILPVSMTKTSVDCTMYICGDSTECSNLLLQYGSFCTQLNRALTGIAVEQDKNTQEVFAQVKQIYKTPPIKDFGGFNFSQILPDPSKPSKRSFIEDLLFNKVTLADAGFIKQYGDCLGDIAARDLICAQKFNGLTVLPPLLTDEMIAQYTSALLAGTITSGWTFGAGAALQIPFAMQMAYRFNGIGVTQNVLYENQKLIANQFNSAIGKIQDSLSSTASALGKLQDVVNQNAQALNTLVKQLSSNFGAISSVLNDILSRLDKVEAEVQIDRLITGRLQSLQTYVTQQLIRAAEIRASANLAATKMSECVLGQSKRVDFCGKGYHLMSFPQSAPHGVVFLHVTYVCAQEKNFTTAPAICHDGKAHFPREGVFVSNGTHWFVTQRNFYEPQIITTDNTFVSGNCDVLIGIVNNTVYDPLQPELDSFKEELDKYFKNHTSPDVDLGDISGINASVVNIQKEIDRLNEVAKNLNESLIDLQELGKYEQYIKWPWYIWLGFIAGLIAIVMVTIMLCCMTSCCSCLKGCCSCGSCCKFDEDDSGPVLKGVKLHYT

SEQ ID NO: 748 - protein, 1273 aa, Artificial Sequence
  SARS-CoV-2/Shenzhen/SZTH-004/2020__EPI_ISL_406595 spike protein (1-1273)(P715C_P1069C)
MFVFLVLLPLVSSQCVNLTTRTQLPPAYTNSFTRGVYYPDKVFRSSVLHSTQDLFLPFFSNVTWFHAIHVSGTNGTKRFDNPVLPFNDGVYFASTEKSNIIRGWIFGTTLDSKTQSLLIVNNATNVVIKVCEFQFCNDPFLGVYYHKNNKSWMESEFRVYSSANNCTFEYVSQPFLMDLEGKQGNFKNLREFVFKNIDGYFKIYSKHTPINLVRDLPQGFSALEPLVDLPIGINITRFQTLLALHRSYLTPGDSSSGWTAGAAAYYVGYLQPRTFLLKYNENGTITDAVDCALDPLSETKCTLKSFTVEKGIYQTSNFRVQPTESIVRFPNITNLCPFGEVFNATRFASVYAWDRKRISNCVAYYSVLYNSASFSTFKCYGVSPTKLNDLCFTNVYADSFVIRGDEVRQIAPGQTGKIADYNYKLPDDFTGCVIAWNSNNLDSKVGGNYNYLYRLFRKSNLKPFERDISTEIYQAGSTPCNGVEGFNCYFPLQSYGFQPTNGVGYQPYRVVVLSFELLHAPATVCGPKKSTNLVKNKCVNFNFNGLTGTGVLTESNKKFLPFQQFGRDIADTTDAVRDPQTLEILDITPCSFGGVSVITPGTNTSNQVAVLYQDVNCTEVPVAIHADQLTPTWRVYSTGSNVFQTRAGCLIGAEHVNNSYECDIPIGAGICASYQTQTNSPRRARSVASQSIIAYTMSLGAENSVAYSNNSIAICTNFTISVTTEILPVSMTKTSVDCTMYICGDSTECSNLLLQYGSFCTQLNRALTGIAVEQDKNTQEVFAQVKQIYKTPPIKDFGGFNFSQILPDPSKPSKRSFIEDLLFNKVTLADAGFIKQYGDCLGDIAARDLICAQKFNGLTVLPPLLTDEMIAQYTSALLAGTITSGWTFGAGAALQIPFAMQMAYRFNGIGVTQNVLYENQKLIANQFNSAIGKIQDSLSSTASALGKLQDVVNQNAQALNTLVKQLSSNFGAISSVLNDILSRLDKVEAEVQIDRLITGRLQSLQTYVTQQLIRAAEIRASANLAATKMSECVLGQSKRVDFCGKGYHLMSFPQSAPHGVVFLHVTYVCAQEKNFTTAPAICHDGKAHFPREGVFVSNGTHWFVTQRNFYEPQIITTDNTFVSGNCDVVIGIVNNTVYDPLQPELDSFKEELDKYFKNHTSPDVDLGDISGINASVVNIQKEIDRLNEVAKNLNESLIDLQELGKYEQYIKWPWYIWLGFIAGLIAIVMVTIMLCCMTSCCSCLKGCCSCGSCCKFDEDDSEPVLKGVKLHYT

SEQ ID NO: 749 - protein, 1273 aa, Artificial Sequence
  SARS-CoV-2/France/IDF0372/2020__EPI_ISL_406596 spike protein (1-1273)(P715C_P1069C)
MFVFLVLLPLVSSQCVNLTTRTQLPPAYTNSFTRGVYYPDKVFRSSVLHSTQDLFLPFFSNVTWFHAIHVSGTNGTKRFDNPVLPFNDGVYFASTEKSNIIRGWIFGTTLDSKTQSLLIVNNATNVVIKVCEFQFCNDPFLGVYYHKNNKSWMESEFRVYSSANNCTFEYVSQPFLMDLEGKQGNFKNLREFVFKNIDGYFKIYSKHTPINLVRDLPQGFSALEPLVDLPIGINITRFQTLLALHRSYLTPGDSSSGWTAGAAAYYVGYLQPRTFLLKYNENGTITDAVDCALDPLSETKCTLKSFTVEKGIYQTSNFRVQPTESIVRFPNITNLCPFGEVFNATRFASVYAWNRKRISNCVADYSFLYNSASFSTFKCYGVSPTKLNDLCFTNVYADSFVIRGDEVRQIAPGQTGKIADYNYKLPDDFTGCVIAWNSNNLDSKVGGNYNYLYRLFRKSNLKPFERDISTEIYQAGSTPCNGVEGFNCYFPLQSYGFQPTNGVGYQPYRVVVLSFELLHAPATVCGPKKSTNLVKNKCVNFNFNGLTGTGVLTESNKKFLPFQQFGRDIADTTDAVRDPQTLEILDITPCSFGGVSVITPGTNTSNQVAVLYQDVNCTEVPVAIHADQLTPTWRVYSTGSNVFQTRAGCLIGAEHVNNSYECDIPIGAGICASYQTQTNSPRRARSVASQSIIAYTMSLGAENSVAYSNNSIAICTNFTISVTTEILPVSMTKTSVDCTMYICGDSTECSNLLLQYGSFCTQLNRALTGIAVEQDKNTQEVFAQVKQIYKTPPIKDFGGFNFSQILPDPSKPSKRSFIEDLLFNKVTLADAGFIKQYGDCLGDIAARDLICAQKFNGLTVLPPLLTDEMIAQYTSALLAGTITSGWTFGAGAALQIPFAMQMAYRFNGIGVTQNVLYENQKLIANQFNSAIGKIQDSLSSTASALGKLQDVVNQNAQALNTLVKQLSSNFGAISSVLNDILSRLDKVEAEVQIDRLITGRLQSLQTYVTQQLIRAAEIRASANLAATKMSECVLGQSKRVDFCGKGYHLMSFPQSAPHGVVFLHVTYVCAQEKNFTTAPAICHDGKAHFPREGVFVSNGTHWFVTQRNFYEPQIITTDNTFVSGNCDVVIGIVNNTVYDPLQPELDSFKEELDKYFKNHTSPDVDLGDISGINASVVNIQKEIDRLNEVAKNLNESLIDLQELGKYEQYIKWPWYIWLGFIAGLIAIVMVTIMLCCMTSCCSCLKGCCSCGSCCKFDEDDSEPVLKGVKLHYT

SEQ ID NO: 750 - protein, 1273 aa, Artificial Sequence
  SARS-CoV-2/Australia/VIC01/2020__EPI_ISL_406844 spike protein (1-1273)(P715C_P1069C)
MFVFLVLLPLVSSQCVNLTTRTQLPPAYTNSFTRGVYYPDKVFRSSVLHSTQDLFLPFFSNVTWFHAIHVSGTNGTKRFDNPVLPFNDGVYFASTEKSNIIRGWIFGTTLDSKTQSLLIVNNATNVVIKVCEFQFCNDPFLGVYYHKNNKSWMESEFRVYSSANNCTFEYVSQPFLMDLEGKQGNFKNLREFVFKNIDGYFKIYSKHTPINLVRDLPQGFSALEPLVDLPIGINITRFQTLLALHRRYLTPGDSSSGWTAGAAAYYVGYLQPRTFLLKYNENGTITDAVDCALDPLSETKCTLKSFTVEKGIYQTSNFRVQPTESIVRFPNITNLCPFGEVFNATRFASVYAWNRKRISNCVADYSVLYNSASFSTFKCYGVSPTKLNDLCFTNVYADSFVIRGDEVRQIAPGQTGKIADYNYKLPDDFTGCVIAWNSNNLDSKVGGNYNYLYRLFRKSNLKPFERDISTEIYQAGSTPCNGVEGFNCYFPLQSYGFQPTNGVGYQPYRVVVLSFELLHAPATVCGPKKSTNLVKNKCVNFNFNGLTGTGVLTESNKKFLPFQQFGRDIADTTDAVRDPQTLEILDITPCSFGGVSVITPGTNTSNQVAVLYQDVNCTEVPVAIHADQLTPTWRVYSTGSNVFQTRAGCLIGAEHVNNSYECDIPIGAGICASYQTQTNSPRRARSVASQSIIAYTMSLGAENSVAYSNNSIAICTNFTISVTTEILPVSMTKTSVDCTMYICGDSTECSNLLLQYGSFCTQLNRALTGIAVEQDKNTQEVFAQVKQIYKTPPIKDFGGFNFSQILPDPSKPSKRSFIEDLLFNKVTLADAGFIKQYGDCLGDIAARDLICAQKFNGLTVLPPLLTDEMIAQYTSALLAGTITSGWTFGAGAALQIPFAMQMAYRFNGIGVTQNVLYENQKLIANQFNSAIGKIQDSLSSTASALGKLQDVVNQNAQALNTLVKQLSSNFGAISSVLNDILSRLDKVEAEVQIDRLITGRLQSLQTYVTQQLIRAAEIRASANLAATKMSECVLGQSKRVDFCGKGYHLMSFPQSAPHGVVFLHVTYVCAQEKNFTTAPAICHDGKAHFPREGVFVSNGTHWFVTQRNFYEPQIITTDNTFVSGNCDVVIGIVNNTVYDPLQPELDSFKEELDKYFKNHTSPDVDLGDISGINASVVNIQKEIDRLNEVAKNLNESLIDLQELGKYEQYIKWPWYIWLGFIAGLIAIVMVTIMLCCMTSCCSCLKGCCSCGSCCKFDEDDSEPVLKGVKLHYT

SEQ ID NO: 751 - protein, 1273 aa, Artificial Sequence
  SARS-CoV-2/Germany/BavPat1/2020__EPI_ISL_406862 spike protein (1-1273)(P715C_P1069C)
MFVFLVLLPLVSSQCVNLTTRTQLPPAYTNSFTRGVYYPDKVFRSSVLHSTQDLFLPFFSNVTWFHAIHVSGTNGTKRFDNPVLPFNDGVYFASTEKSNIIRGWIFGTTLDSKTQSLLIVNNATNVVIKVCEFQFCNDPFLGVYYHKNNKSWMESEFRVYSSANNCTFEYVSQPFLMDLEGKQGNFKNLREFVFKNIDGYFKIYSKHTPINLVRDLPQGFSALEPLVDLPIGINITRFQTLLALHRSYLTPGDSSSGWTAGAAAYYVGYLQPRTFLLKYNENGTITDAVDCALDPLSETKCTLKSFTVEKGIYQTSNFRVQPTESIVRFPNITNLCPFGEVFNATRFASVYAWNRKRISNCVADYSVLYNSASFSTFKCYGVSPTKLNDLCFTNVYADSFVIRGDEVRQIAPGQTGKIADYNYKLPDDFTGCVIAWNSNNLDSKVGGNYNYLYRLFRKSNLKPFERDISTEIYQAGSTPCNGVEGFNCYFPLQSYGFQPTNGVGYQPYRVVVLSFELLHAPATVCGPKKSTNLVKNKCVNFNFNGLTGTGVLTESNKKFLPFQQFGRDIADTTDAVRDPQTLEILDITPCSFGGVSVITPGTNTSNQVAVLYQGVNCTEVPVAIHADQLTPTWRVYSTGSNVFQTRAGCLIGAEHVNNSYECDIPIGAGICASYQTQTNSPRRARSVASQSIIAYTMSLGAENSVAYSNNSIAICTNFTISVTTEILPVSMTKTSVDCTMYICGDSTECSNLLLQYGSFCTQLNRALTGIAVEQDKNTQEVFAQVKQIYKTPPIKDFGGFNFSQILPDPSKPSKRSFIEDLLFNKVTLADAGFIKQYGDCLGDIAARDLICAQKFNGLTVLPPLLTDEMIAQYTSALLAGTITSGWTFGAGAALQIPFAMQMAYRFNGIGVTQNVLYENQKLIANQFNSAIGKIQDSLSSTASALGKLQDVVNQNAQALNTLVKQLSSNFGAISSVLNDILSRLDKVEAEVQIDRLITGRLQSLQTYVTQQLIRAAEIRASANLAATKMSECVLGQSKRVDFCGKGYHLMSFPQSAPHGVVFLHVTYVCAQEKNFTTAPAICHDGKAHFPREGVFVSNGTHWFVTQRNFYEPQIITTDNTFVSGNCDVVIGIVNNTVYDPLQPELDSFKEELDKYFKNHTSPDVDLGDISGINASVVNIQKEIDRLNEVAKNLNESLIDLQELGKYEQYIKWPWYIWLGFIAGLIAIVMVTIMLCCMTSCCSCLKGCCSCGSCCKFDEDDSEPVLKGVKLHYT

SEQ ID NO: 752 - protein, 1273 aa, Artificial Sequence
  SARS-CoV-2/Wuhan/HBCDC-HB-02/2020__EPI_ISL_412978 spike protein (1-1273)(P715C_P1069C)
MFVFLVLLPLVSSQCVNLTTRTQLPPAYTNSFTRGVYYPDKVFRSSVLHSTQDLFLPFFSNVTWFHAIHVSGTNGTKRFDNPVLPFNDGVYFASTEKSNIIRGWIFGTTLDSKTQSLLIVNNATNVVIKVCEFQFCNDPFLGVYYHKNNKSWMESEFRVYSSANNCTFEYVSQPFLMDLEGKQGNFKNLREFVFKNIDGYFKIYSKHTPINLVRDLPQGFSALEPLVDLPIGINITRFQTLLALHRSYLTPGDSSSGWTAGAAAYYVGYLQPRTFLLKYNENGTITDAVDCALDPLSETKCTLKSFTVEKGIYQTSNFRVQPTESIVRFPNITNLCPFGEVFNATRFASVYAWNRKRISNCVADYSVLYNSASFSTFKCYGVSPTKLNDLCFTNVYADSFVIRGDEVRQIAPGQTGKIADYNYKLPDDFTGCVIAWNSNNLDSKVGGNYNYLYRLFRKSNLKPFERDISTEIYQAGSTPCNGVEGFNCYFPLQSYGFQPTNGVGYQPYRVVVLSFELLHAPATVCGPKKSTNLVKNKCVNFNFNGLTGTGVLTESNKKFLPFQQFGRDIADTTDAVRDPQTLEILDITPCSFGGVSVITPGTNTSNQVAVLYQDVNCTEVPVAIHADQLTPTWRVYSTGSNVFQTRAGCLIGAEHVNNSYECDIPIGAGICASYQTQTNSPRRARSVASQSIIAYTMSLGAENSVAYSNNSIAICTNFTISVTTEILPVSMTKTSVDCTMYICGDSTECSNFLLQYGSFCTQLNRALTGIAVEQDKNTQEVFAQVKQIYKTPPIKDFGGFNFSQILPDPSKPSKRSFIEDLLFNKVTLADAGFIKQYGDCLGDIAARDLICAQKFNGLTVLPPLLTDEMIAQYTSALLAGTITSGWTFGAGAALQIPFAMQMAYRFNGIGVTQNVLYENQKLIANQFNSAIGKIQDSLSSTASALGKLQDVVNQNAQALNTLVKQLSSNFGAISSVLNDILSRLDKVEAEVQIDRLITGRLQSLQTYVTQQLIRAAEIRASANLAATKMSECVLGQSKRVDFCGKGYHLMSFPQSAPHGVVFLHVTYVCAQEKNFTTAPAICHDGKAHFPREGVFVSNGTHWFVTQRNFYEPQIITTDNTFVSGNCDVVIGIVNNTVYDPLQPELDSFKEELDKYFKNHTSPDVDLGDISGINASVVNIQKEIDRLNEVAKNLNESLIDLQELGKYEQYIKWPWYIWLGFIAGLIAIVMVTIMLCCMTSCCSCLKGCCSCGSCCKFDEDDSEPVLKGVKLHYT

SEQ ID NO: 753 - protein, 1273 aa, Artificial Sequence
  SARS-CoV-2/Australia/QLD02/2020__EPI_ISL_407896 spike protein (1-1273)(P715C_P1069C)
MFVFLVLLPLVSSQCVNLTTRTQLPPAYTNSFTRGVYYPDKVFRSSVLHSTQDLFLPFFSNVTWFHAIHVSGTNGTKRFDNPVLPFNDGVYFASTEKSNIIRGWIFGTTLDSKTQSLLIVNNATNVVIKVCEFQFCNDPFLGVYYHKNNKSWMESEFRVYSSANNCTFEYVSQPFLMDLEGKQGNFKNLREFVFKNIDGYFKIYSKHTPINLVRDLPQGFSALEPLVDLPIGINITRFQTLLALHRSYLTPGDSSSGWTAGAAAYYVGYLQPRTFLLKYNENGTITDAVDCALDPLSETKCTLKSFTVEKGIYQTSNFRVQPTESIVRFPNITNLCPFGEVFNATRFASVYAWNRKRISNCVADYSVLYNSASFSTFKCYGVSPTKLNDLCFTNVYADSFVIRGDEVRQIAPGQTGKIADYNYKLPDDFTGCVIAWNSNNLDSKVGGNYNYLYRLFRKSNLKPFERDISTEIYQAGSTPCNGVEGFNCYFPLQSYGFQPTNGVGYQPYRVVVLSFELLHAPATVCGPKKSTNLVKNKCVNFNFNGLTGTGVLTESNKKFLPFQQFGRDIADTTDAVRDPQTLEILDITPCSFGGVSVITPGTNTSNQVAVLYQDVNCTEVPVAIHADQLTPTWRVYSTGSNVFQTRAGCLIGAEHVNNSYECDIPIGAGICASYQTQTNSPRRARSVASQSIIAYTMSLGAENSVAYSNNSIAICTNFTISVTTEILPVSMTKTSVDCTMYICGDSTECSNLLLQYGSFCTQLNRALTGIAVEQDKNTQEVFAQVKQIYKTPPIKDFGGFNFSQILPDPSKPSKRSFIEDLLFNKVTLADAGFIKQYGDCLGDIAARDLICAQKFNGLTVLPPLLTDEMIAQYTSALLAGTITSGWTFGAGAALQIPFAMQMAYRFNGIGVTQNVLYENQKLIANQFNSAIGKIQDSLSSTASALGKLQDVVNQNAQALNTLVKQLSSNFGAISSVLNDILSRLDKVEAEVQIDRLITGRLQSLQTYVTQQLIRAAEIRASANLAATKMSECVLGQSKRVDFCGKGYHLMSFPQSAPHGVVFLHVTYVCAQEKNFTTAPAICHDGKAHFPREGVFVSNGTHWFVTQRNFYEPQIITTDNTFVSGNCDVVIGIVNNTVYDPLQLELDSFKEELDKYFKNHTSPDVDLGDISGINASVVNIQKEIDRLNEVAKNLNESLIDLQELGKYEQYIKWPWYIWLGFIAGLIAIVMVTIMLCCMTSCCSCLKGCCSCGSCCKFDEDDSEPVLKGVKLHYT

SEQ ID NO: 754 - protein, 1273 aa, Artificial Sequence
  SARS-CoV-2/India/1-31/2020__EPI_ISL_413523 spike protein (1-1273)(P715C_P1069C)
MFVFLVLLPLVSSQCVNLTTRTQLPPAYTNSFTRGVYYPDKVFRSSVLHSTQDLFLPFFSNVTWFHAIHVSGTNGTKRFDNPVLPFNDGVYFASTEKSNIIRGWIFGTTLDSKTQSLLIVNNATNVVIKVCEFQFCNDPFLGVYYHKNNKSWMESEFRVYSSANNCTFEYVSQPFLMDLEGKQGNFKNLREFVFKNIDGYFKIYSKHTPINLVRDLPQGFSALEPLVDLPIGINITRFQTLLALHRSYLTPGDSSSGWTAGAAAYYVGYLQPRTFLLKYNENGTITDAVDCALDPLSETKCTLKSFTVEKGIYQTSNFRVQPTESIVRFPNITNLCPFGEVFNATRFASVYAWNRKRISNCVADYSVLYNSASFSTFKCYGVSPTKLNDLCFTNVYADSFVIRGDEVRQIAPGQTGKIADYNYKLPDDFTGCVIAWNSNNLDSKVGGNYNYLYRLFRKSNLKPFERDISTEIYQAGSTPCNGVEGFNCYFPLQSYGFQPTNGVGYQPYRVVVLSFELLHAPATVCGPKKSTNLVKNKCVNFNFNGLTGTGVLTESNKKFLPFQQFGRDIADTTDAVRDPQTLEILDITPCSFGGVSVITPGTNTSNQVAVLYQDVNCTEVPVAIHADQLTPTWRVYSTGSNVFQTRAGCLIGAEHVNNSYECDIPIGAGICASYQTQTNSPRRARSVASQSIIAYTMSLGAENSVAYSNNSIAICTNFTISVTTEILPVSMTKTSVDCTMYICGDSTECSNLLLQYGSFCTQLNRALTGIAVEQDKNTQEVFAQVKQIYKTPPIKDFGGFNFSQILPDPSKPSKRSFIEDLLFNKVTLADAGFIKQYGDCLGDIAARDLICAQKFNGLTVLPPLLTDEMIAQYTSALLAGTITSGWTFGAGAALQIPFAMQMAYRFNGIGVTQNVLYENQKLIANQFNSVIGKIQDSLSSTASALGKLQDVVNQNAQALNTLVKQLSSNFGAISSVLNDILSRLDKVEAEVQIDRLITGRLQSLQTYVTQQLIRAAEIRASANLAATKMSECVLGQSKRVDFCGKGYHLMSFPQSAPHGVVFLHVTYVCAQEKNFTTAPAICHDGKAHFPREGVFVSNGTHWFVTQRNFYEPQIITTDNTFVSGNCDVVIGIVNNTVYDPLQPELDSFKEELDKYFKNHTSPDVDLGDISGINASVVNIQKEIDRLNEVAKNLNESLIDLQELGKYEQYIKWPWYIWLGFIAGLIAIVMVTIMLCCMTSCCSCLKGCCSCGSCCKFDEDDSEPVLKGVKLHYT

SEQ ID NO: 755 - protein, 1273 aa, Artificial Sequence
  SARS-CoV-2/Guangdong/GD2020087-P0008/2020__EPI_ISL_413863 spike protein (1-1273)(P715C_P1069C)
MFVFLVLLPLVSSQCVNLTTRTQLPPAYTNSFTRGVYYPDKVFRSSVLHSTQDLFLPFFSNVTWFHAIHVSGTNGTKRFDNPVLPFNDGVYFASTEKSNIIRGWIFGTTLDSKTQSLLIVNNATNVVIKVCEFQFCNDPFLGVYYHKNNKSWMESEFRVYSSANNCTFEYVSQPFLMDLEGKQGNFKNLREFVFKNIDGYFKIYSKHTPINLVRDLPQGFSALEPLVDLPIGINITRFQTLLALHRSYLTPGDSSSGWTAGAAAYYVGYLQPRTFLLKYNENGTITDAVDCALDPLSETKCTLKSFTVEKGIYQTSNFRVQPTESIVRFPNITNLCPFGEVFNATRFASVYAWNRKRISNCVADYSVLYNSASFSTFKCYGVSPTKLNDLCFTNVYADSFVIRGDEVREIAPGQTGKIADYNYKLPDDFTGCVIAWNSNNLDSKVGGNYNYLYRLFRKSNLKPFERDISTEIYQAGSTPCNGVEGFNCYFPLQSYGFQPTNGVGYQPYRVVVLSFELLHAPATVCGPKKSTNLVKNKCVNFNFNGLTGTGVLTESNKKFLPFQQFGRDIADTTDAVRDPQTLEILDITPCSFGGVSVITPGTNTSNQVAVLYQDVNCTEVPVAIHADQLTPTWRVYSTGSNVFQTRAGCLIGAEHVNNSYECDIPIGAGICASYQTQTNSPRRARSVASQSIIAYTMSLGAENSVAYSNNSIAICTNFTISVTTEILPVSMTKTSVDCTMYICGDSTECSNLLLQYGSFCTQLNRALTGIAVEQDKNTQEVFAQVKQIYKTPPIKDFGGFNFSQILPDPSKPSKRSFIEDLLFNKVTLADAGFIKQYGDCLGDIAARDLICAQKFNGLTVLPPLLTDEMIAQYTSALLAGTITSGWTFGAGAALQIPFAMQMAYRFNGIGVTQNVLYENQKLIANQFNSAIGKIQDSLSSTASALGKLQDVVNQNAQALNTLVKQLSSNFGAISSVLNDILSRLDKVEAEVQIDRLITGRLQSLQTYVTQQLIRAAEIRASANLAATKMSECVLGQSKRVDFCGKGYHLMSFPQSAPHGVVFLHVTYVCAQEKNFTTAPAICHDGKAHFPREGVFVSNGTHWFVTQRNFYEPQIITTDNTFVSGNCDVVIGIVNNTVYDPLQPELDSFKEELDKYFKNHTSPDVDLGDISGINASVVNIQKEIDRLNEVAKNLNESLIDLQELGKYEQYIKWPWYIWLGFIAGLIAIVMVTIMLCCMTSCCSCLKGCCSCGSCCKFDEDDSEPVLKGVKLHYT

SEQ ID NO: 756 - protein, 1273 aa, Artificial Sequence
  SARS-CoV-2/Sweden/01/2020__EPI_ISL_411951 spike protein (1-1273)(P715C_P1069C)
MFVFLVLLPLVSSQCVNLTTRTQLPPAYTNSFTRGVYYPDKVFRSSVLHSTQDLFLPFFSNVTWFHAIHVSGTNGTKRFDNPVLPFNDGVYFASTEKSNIIRGWIFGTTLDSKTQSLLIVNNATNVVIKVCEFQFCNDPFLGVYYHKNNKSWMESEFRVYSSANNCTFEYVSQPFLMDLEGKQGNFKNLREFVFKNIDGYFKIYSKHTPINLVRDLPQGFSALEPLVDLPIGINITRFQTLLALHRSYLTPGDSSSGWTAGAAAYYVGYLQPRTFLLKYNENGTITDAVDCALDPLSETKCTLKSFTVEKGIYQTSNFRVQPTESIVRFPNITNLCPFGEVFNATRFASVYAWNRKRISNCVADYSVLYNSASFSTFKCYGVSPTKLNDLCFTNVYADSFVIRGDEVRQIAPGQTGKIADYNYKLPDDFTGCVIAWNSNNLDSKVGGNYNYLYRLFRKSNLKPFERDISTEIYQAGSTPCNGVEGFNCYFPLQSYGFQPTNGVGYQPYRVVVLSFELLHAPATVCGPKKSTNLVKNKCVNFNFNGLTGTGVLTESNKKFLPFQQFGRDIADTTDAVRDPQTLEILDITPCSFGGVSVITPGTNTSNQVAVLYQDVNCTEVPVAIHADQLTPTWRVYSTGSNVFQTRAGCLIGAEHVNNSYECDIPIGAGICASYQTQTNSPRRARSVASQSIIAYTMSLGAENSVAYSNNSIAICTNFTISVTTEILPVSMTKTSVDCTMYICGDSTECSNLLLQYGSFCTQLNRALTGIAVEQDKNTQEVFAQVKQIYKTPPIKDCGGFNFSQILPDPSKPSKRSFIEDLLFNKVTLADAGFIKQYGDCLGDIAARDLICAQKFNGLTVLPPLLTDEMIAQYTSALLAGTITSGWTFGAGAALQIPFAMQMAYRFNGIGVTQNVLYENQKLIANQFNSAIGKIQDSLSSTASALGKLQDVVNQNAQALNTLVKQLSSNFGAISSVLNDILSRLDKVEAEVQIDRLITGRLQSLQTYVTQQLIRAAEIRASANLAATKMSECVLGQSKRVDFCGKGYHLMSFPQSAPHGVVFLHVTYVCAQEKNFTTAPAICHDGKAHFPREGVFVSNGTHWFVTQRNFYEPQIITTDNTFVSGNCDVVIGIVNNTVYDPLQPELDSFKEELDKYFKNHTSPDVDLGDISGINASVVNIQKEIDRLNEVAKNLNESLIDLQELGKYEQYIKWPWYIWLGFIAGLIAIVMVTIMLCCMTSCCSCLKGCCSCGSCCKFDEDDSEPVLKGVKLHYT

SEQ ID NO: 757 - protein, 1273 aa, Artificial Sequence
  SARS-CoV-2/Tianmen/HBCDC-HB-07/2020__EPI_ISL_412983 spike protein (1-1273)(P715C_P1069C)
MFVFLVLLPLVSSQCVNLTTRTQLPPAYTNSFTRGVYYPDKVFRSSVLHSTQDLFLPFFSNVTWFHAIHVSGTNGTKRFDNPVLPFNDGVYFASTEKSNIIRGWIFGTTLDSKTQSLLIVNNATNVVIKVCEFQFCNDPFLGVYYHKNNKSWMESEFRVYSSANNCTFEYVSQPFLMDLEGKQGNFKNLREFVFKNIDGYFKIYSKHTPINLVRDLPQGFSALEPLVDLPIGINITRFQTLLALHRSYLTPGDSSSGWTAGAAAYYVGYLQPRTFLLKYNENGTITDAVDCALDPLSETKCTLKSFTVEKGIYQTSNFRVQPTESIVRFPNITNLCPFGEVFNATRFASVYAWNRKRISNCVADYSVLYNSASFSTFKCYGVSPTKLNDLCFTNVYADSFVIRGDEVRQIAPGQTGKIADYNYKLPDDFTGCVIAWNSNNLDSKVGGNYNYLYRLFRKSNLKPFERDISTEIYQAGSTPCNGVEGFNCYFPLQSYGFQPTNGVGYQPYRVVVLSFELLHAPATVCGPKKSTNLVKNKCVNFNFNGLTGTGVLTESNKKFLPFQQFGRDIADTTDAVRDPQTLEILDITPCSFGGVSVITPGTNTSNQVAVLYQDLNCTEVPVAIHADQLTPTWRVYSTGSNVFQTRAGCLIGAEHVNNSYECDIPIGAGICASYQTQTNSPRRARSVASQSIIAYTMSLGAENSVAYSNNSIAICTNFTISVTTEILPVSMTKTSVDCTMYICGDSTECSNLLLQYGSFCTQLNRALTGIAVEQDKNTQEVFAQVKQIYKTPPIKDFGGFNFSQILPDPSKPSKRSFIEDLLFNKVTLADAGFIKQYGDCLGDIAARDLICAQKFNGLTVLPPLLTDEMIAQYTSALLAGTITSGWTFGAGAALQIPFAMQMAYRFNGIGVTQNVLYENQKLIANQFNSAIGKIQDSLSSTASALGKLQDVVNQNAQALNTLVKQLSSNFGAISSVLNDILSRLDKVEAEVQIDRLITGRLQSLQTYVTQQLIRAAEIRASANLAATKMSECVLGQSKRVDFCGKGYHLMSFPQSAPHGVVFLHVTYVCAQEKNFTTAPAICHDGKAHFPREGVFVSNGTHWFVTQRNFYEPQIITTDNTFVSGNCDVVIGIVNNTVYDPLQPELDSFKEELDKYFKNHTSPDVDLGDISGINASVVNIQKEIDRLNEVAKNLNESLIDLQELGKYEQYIKWPWYIWLGFIAGLIAIVMVTIMLCCMTSCCSCLKGCCSCGSCCKFDEDDSEPVLKGVKLHYT

SEQ ID NO: 758 - protein, 1273 aa, Artificial Sequence
  SARS-CoV-2/Hong Kong/case42_VM20002493/2020__EPI_ISL_414527 spike protein (1-1273)(P715C_P1069C)
MFVFLVLLPLVSSQCVNLTTRTQLPPAYTNSFTRGVYYPDKVFRSSVLHSTQDLFLPFFSNVTWFHAIHVSGTNGTKRFDNPVLPFNDGVYFASTEKSNIIRGWIFGTTLDSKTQSLLIVNNATNVVIKVCEFQFCNDPFLGVYYHKNNKSWMESEFRVYSSANNCTFEYVSQPFLMDLEGKQGNFKNLREFVFKNIDGYFKIYSKHTPINLVRDLPQGFSALEPLVDLPIGINITRFQTLLALHRSYLTPGDSSSGWTAGAAAYYVGYLQPRTFLLKYNENGTITDAVDCALDPLSETKCTLKSFTVEKGIYQTSNFRVQPTESIVRFPNITNLCPFGEVFNATRFASVYAWNRKRISNCVADYSVLYNSASFSTFKCYGVSPTKLNDLCFTNVYADSFVIRGDEVRQIAPGQTGKIADYNYKLPDDFTGCVIAWNSNNLDSKVGGNYNYLYRLFRKSNLKPFERDISTEIYQAGSTPCNGVEGFNCYFPLQSYGFQPTNGVGYQPYRVVVLSFELLHAPATVCGPKKSTNLVKNKCVNFNFNGLTGTGVLTESNKKFLPFQQFGRDIADTTDAVRDPQTLEILDITPCSFGGVSVITPGTNTSNQVAVLYQDVNCTEVPVAIHADQLTPTWRVYSTGSNVFQTRAGCLIGAEHVNNSYECDIPIGAGICASYQTQTNSPRRARSVASQSIIAYTMSLGAENSVAYSNNSIAICTNFAISVTTEILPVSMTKTSVDCTMYICGDSTECSNLLLQYGSFCTQLNRALTGIAVEQDKNTQEVFAQVKQIYKTPPIKDFGGFNFSQILPDPSKPSKRSFIEDLLFNKVTLADAGFIKQYGDCLGDIAARDLICAQKFNGLTVLPPLLTDEMIAQYTSALLAGTITSGWTFGAGAALQIPFAMQMAYRFNGIGVTQNVLYENQKLIANQFNSAIGKIQDSLSSTASALGKLQDVVNQNAQALNTLVKQLSSNFGAISSVLNDILSRLDKVEAEVQIDRLITGRLQSLQTYVTQQLIRAAEIRASANLAATKMSECVLGQSKRVDFCGKGYHLMSFPQSAPHGVVFLHVTYVCAQEKNFTTAPAICHDGKAHFPREGVFVSNGTHWFVTQRNFYEPQIITTDNTFVSGNCDVVIGIVNNTVYDPLQPELDSFKEELDKYFKNHTSPDVDLGDISGINASVVNIQKEIDRLNEVAKNLNESLIDLQELGKYEQYIKWPWYIWLGFIAGLIAIVMVTIMLCCMTSCCSCLKGCCSCGSCCKFDEDDSEPVLKGVKLHYT

SEQ ID NO: 759 - protein, 1273 aa, Artificial Sequence
  SARS-CoV-2/USA/CruiseA-23/2020__EPI_ISL_414482 spike protein (1-1273)(P715C_P1069C)
MFVFLVLLPLVSSQCVNLTTRTQLPPAYTNSFTRGVYYPDKVFRSSVLHSTQDLFLPFFSNVTWFHAIHVSGTNGTKRFDNPVLPFNDGVYFASTEKSNIIRGWIFGTTLDSKTQSLLIVNNATNVVIKVCEFQFCNDPFLGVYYHKNNKSWMESEFRVYSSANNCTFEYVSQPFLMDLEVKQGNFKNLREFVFKNIDGYFKIYSKHTPINLVRDLPQGFSALEPLVDLPIGINITRFQTLLALHRSYLTPGDSSSGWTAGAAAYYVGYLQPRTFLLKYNENGTITDAVDCALDPLSETKCTLKSFTVEKGIYQTSNFRVQPTESIVRFPNITNLCPFGEVFNATRFASVYAWNRKRISNCVADYSVLYNSASFSTFKCYGVSPTKLNDLCFTNVYADSFVIRGDEVRQIAPGQTGKIADYNYKLPDDFTGCVIAWNSNNLDSKVGGNYNYLYRLFRKSNLKPFERDISTEIYQAGSTPCNGVEGFNCYFPLQSYGFQPTNGVGYQPYRVVVLSFELLHAPATVCGPKKSTNLVKNKCVNFNFNGLTGTGVLTESNKKFLPFQQFGRDIADTTDAVRDPQTLEILDITPCSFGGVSVITPGTNTSNQVAVLYQDVNCTEVPVAIHADQLTPTWRVYSTGSNVFQTRAGCLIGAEHVNNSYECDIPIGAGICASYQTQTNSPRRARSVASQSIIAYTMSLGAENSVAYSNNSIAICTNFTISVTTEILPVSMTKTSVDCTMYICGDSTECSNLLLQYGSFCTQLNRALTGIAVEQDKNTQEVFAQVKQIYKTPPIKDFGGFNFSQILPDPSKPSKRSFIEDLLFNKVTLADAGFIKQYGDCLGDIAARDLICAQKFNGLTVLPPLLTDEMIAQYTSALLAGTITSGWTFGAGAALQIPFAMQMAYRFNGIGVTQNVLYENQKLIANQFNSAIGKIQDSLSSTASALGKLQDVVNQNAQALNTLVKQLSSNFGAISSVLNDILSRLDKVEAEVQIDRLITGRLQSLQTYVTQQLIRAAEIRASANLAATKMSECVLGQSKRVDFCGKGYHLMSFPQSAPHGVVFLHVTYVCAQEKNFTTAPAICHDGKAHFPREGVFVSNGTHWFVTQRNFYEPQIITTDNTFVSGNCDVVIGIVNNTVYDPLQPELDSFKEELDKYFKNHTSPDVDLGDISGINASVVNIQKEIDRLNEVAKNLNESLIDLQELGKYEQYIKWPWYIWLGFIAGLIAIVMVTIMLCCMTSCCSCLKGCCSCGSCCKFDEDDSEPVLKGVKLHYT

SEQ ID NO: 760 - protein, 1273 aa, Artificial Sequence
  SARS-CoV-2/Hong Kong/case85_VM20002868/2020__EPI_ISL_414519 spike protein (1-1273)(P715C_P1069C)
MFVFLVLVPLVSSQCVNLTTRTQLPPAYTNSFTRGVYYPDKVFRSSVLHSTQDLFLPFFSNVTWFHAIHVSGTNGTKRFDNPVLPFNDGVYFASTEKSNIIRGWIFGTTLDSKTQSLLIVNNATNVVIKVCEFQFCNDPFLGVYYHKNNKSWMESEFRVYSSANNCTFEYVSQPFLMDLEGKQGNFKNLREFVFKNIDGYFKIYSKHTPINLVRDLPQGFSALEPLVDLPIGINITRFQTLLALHRSYLTPGDSSSGWTAGAAAYYVGYLQPRTFLLKYNENGTITDAVDCALDPLSETKCTLKSFTVEKGIYQTSNFRVQPTESIVRFPNITNLCPFGEVFNATRFASVYAWNRKRISNCVADYSVLYNSASFSTFKCYGVSPTKLNDLCFTNVYADSFVIRGDEVRQIAPGQTGKIADYNYKLPDDFTGCVIAWNSNNLDSKVGGNYNYLYRLFRKSNLKPFERDISTEIYQAGSTPCNGVEGFNCYFPLQSYGFQPTNGVGYQPYRVVVLSFELLHAPATVCGPKKSTNLVKNKCVNFNFNGLTGTGVLTESNKKFLPFQQFGRDIADTTDAVRDPQTLEILDITPCSFGGVSVITPGTNTSNQVAVLYQDVNCTEVPVAIHADQLTPTWRVYSTGSNVFQTRAGCLIGAEHVNNSYECDIPIGAGICASYQTQTNSPRRARSVASQSIIAYTMSLGAENSVAYSNNSIAICTNFTISVTTEILPVSMTKTSVDCTMYICGDSTECSNLLLQYGSFCTQLNRALTGIAVEQDKNTQEVFAQVKQIYKTPPIKDFGGFNFSQILPDPSKPSKRSFIEDLLFNKVTLADAGFIKQYGDCLGDIAARDLICAQKFNGLTVLPPLLTDEMIAQYTSALLAGTITSGWTFGAGAALQIPFAMQMAYRFNGIGVTQNVLYENQKLIANQFNSAIGKIQDSLSSTASALGKLQDVVNQNAQALNTLVKQLSSNFGAISSVLNDILSRLDKVEAEVQIDRLITGRLQSLQTYVTQQLIRAAEIRASANLAATKMSECVLGQSKRVDFCGKGYHLMSFPQSAPHGVVFLHVTYVCAQEKNFTTAPAICHDGKAHFPREGVFVSNGTHWFVTQRNFYEPQIITTDNTFVSGNCDVVIGIVNNTVYDPLQPELDSFKEELDKYFKNHTSPDVDLGDISGINASVVNIQKEIDRLNEVAKNLNESLIDLQELGKYEQYIKWPWYIWLGFIAGLIAIVMVTIMLCCMTSCCSCLKGCCSCGSCCKFDEDDSEPVLKGVKLHYT

SEQ ID NO: 761 - protein, 1273 aa, Artificial Sequence
  SARS-CoV-2/England/200990660/2020__EPI_ISL_414523 spike protein (1-1273)(P715C_P1069C)
MFVFLVLLPLVSSQCVNLTTRTQLPPAYTNSFTRGVYYPDKVFRSSVLHSTQDLFLPFFSNVTWFHAIHVSGTNGTKRFDNPVLPFNDGVYFASTEKSNIIRGWIFGTTLDSKTQSLLIVNNATNVVIKVCEFQFCNDPFLGVYYHKNNKSWMESEFRVYSSANNCTFEYVSQPFLMDLEGKQGNFKNLREFVFKNIDGYFKIYSKHTPINLVRDLPQGFSALEPLVDLPIGINITRFQTLLALHRSYLTPGDSSSGWTAGAAAYYVGYLQPRTFLLKYNENGTITDAVDCALDPLSETKCTLKSFTVEKGIYQTSNFRVQPTESIVRFPNITNLCPFGEVFNATRFASVYAWNRKRISNCVADYSVLYNSASFSTFKCYGVSPTKLNDLCFTNVYADSFVIRGDEVRQIAPGQTGKIADYNYKLPDDFTGCVIAWNSNNLDSKVGGNYNYLYRLFRKSNLKPFERDISTEIYQAGSTPCNGVEGFNCYFPLQSYGFQPTNGVGYQPYRVVVLSFELLHAPATVCGPKKSTNLVKNKCVNFNFNGLTGTGVLTESNKKFLPFQQFGRDIADTTDAVRDPQTLEILDITPCSFGGVSVITPGTNTSNQVAVLYQGVNCTEVPVAIHADQLTPTWRVYSTGSNVFQTRAGCLIGAEHVNNSYECDIPIGAGICASYQTQTNSPRRARSVASQSIIAYTMSLGAENSVAYSNNSIAICTNFTISVTTEILPVSMTKTSVDCTMYICGDSTECSNLLLQYGSFCTQLNRALTGIAVEQDKNTQEVFAQVKQIYKTPPIKDFGGFNFSQILPDPSKPSKRSFIEDLLFNKVTLADAGFIKQYGDCLGDIAARDLICAQKFNGLTVLPPLLTDEMIAQYTSALLAGTITSGWTFGAGAALQIPFAMQMAYRFNGIGVTQNVLYENQKLIANQFNSAIGKIQDSLSSTASALGKLQDVVNQNAQALNTLVKQLSSNFGAISSVLNDILSRLDKVEAEVQIDRLITGRLQSLQTYVTQQLIRAAEIRASANLAATKMSECVLGQSKRVDFCGKGYHLMSFPQSAPHGVVFLHVTYVCAQEKNFTTAPAICHDGKAHFPREGVFVSNGTHWFVTQRNFYEPQIITTDNTFVSGNCDVVIGIVNNTVYDPLQPELDSFKEELDKYFKNHTSPDVDLGDISGINASVVNIQKEIDRLNEVAKNLNESLIDLQELGKYEQYIKWPWYIWLGFIAGLIAIVMVTIMLCCMTSCCSCLKGCCSCGSCCKFDEDDSELVLKGVKLHYT

SEQ ID NO: 762 - protein, 1273 aa, Artificial Sequence
  SARS-CoV-2/Australia/NSW09/2020__EPI_ISL_413595 spike protein (1-1273)(P715C_P1069C)
MFVFLVLLPLVSSQCVNLTTRTQLPPAYTNSFTRGVYYPDKVFRSSVLHSTQDLFLPFFSNVTWFHAIHVSGTNGTKRFDNPVLPFNDGVYFASTEKSNIIRGWIFGTTLDSKTQSLLIVNNATNVVIKVCEFQFCNDPFLGVYYHKNNKSWMESEFRVYSSANNCTFEYVSQPFLMDLEGKQGNFKNLREFVFKNIDGYFKIYSKHTPINLVRDLPQGFSALEPLVDLPIGINITRFQTLLALHRSYLTPGDSSSGWTAGAAAYYVGYLQPRTFLLKYNENGTITDAVDCALDPLSETKCTLKSFTVEKGIYQTSNFRVQPTESIVRFPNITNLCPFGEVFNATRFASVYAWNRKRISNCVADYSVLYNSASFSTFKCYGVSPTKLNDLCFTNVYADSFVIRGDEVRQIAPGQTGKIADYNYKLPDDFTGCVIAWNSNNLDSKVGGNYNYLYRLFRKSNLKPFERDISTEIYQAGSTPCNGVEGFNCYFPLQSYGFQPTNGVGYQPYRVVVLSFELLHAPATVCGPKKSTNLVKNKCVNFNFNGLTGTGVLTESNKKFLPFQQFGRDIADTTDAVRDPQTLEILDITPCSFGGVSVITPGTNTSNQVAVLYQDVNCTEVPVAIHADQLTPTWRVYSTGSNVFQTRAGCLIGAEHVNNSYECDIPIGAGICASYQTQTNSPRRARSVASQSIIAYTMSLGAENSVAYSNNSIAICTNFTISVTTEILPVSMTKTSVDCTMYICGDSTECSNLLLQYGSFCTQLNRALTGIAVEQDKNTQEVFAQVKQIYKTPPIKDFGGFNFSQILPDPSKPSKRSFIEDLLFNKVTLADAGFIKQYGDCLGDIAARDLICAQKFNGLTVLPPLLTDEMIAQYTSALLAGTITSGWTFGAGAALQIPFAMQMAYRFNGIGVTQNVLYENQKLIANQFNSAIGKIQDSLSFTASALGKLQDVVNQNAQALNTLVKQLSSNFGAISSVLNDILSRLDKVEAEVQIDRLITGRLQSLQTYVTQQLIRAAEIRASANLAATKMSECVLGQSKRVDFCGKGYHLMSFPQSAPHGVVFLHVTYVCAQEKNFTTAPAICHDGKAHFPREGVFVSNGTHWFVTQRNFYEPQIITTDNTFVSGNCDVVIGIVNNTVYDPLQPELDSFKEELDKYFKNHTSPDVDLGDISGINASVVNIQKEIDRLNEVAKNLNESLIDLQELGKYEQYIKWPWYIWLGFIAGLIAIVMVTIMLCCMTSCCSCLKGCCSCGSCCKFDEDDSEPVLKGVKLHYT

SEQ ID NO: 763 - protein, 1273 aa, Artificial Sequence
  SARS-CoV-2/Australia/NSW10/2020__EPI_ISL_413596 spike protein (1-1273)(P715C_P1069C)
MFVFLVLLPLVSSQCVNLTTRTQLPPAYTNSFTRGVYYPDKVFRSSVLHSTQDLFLPFFSNVTWFHAIHVSGTNGTKRFDNPVLPFNDGVYFASTEKSNIIRGWIFGTTLDSKTQSLLIVNNATNVVIKVCEFQFCNDPFLGVYYHKNNKSWMESEFRVYSSANNCTFEYVSQPFLMDLEGKQGNFKNLREFVFKNIDGYFKIYSKHTPINLVRDLPQGFSALEPLVDLPIGINITRFQTLLALHRSYLTPGDSSSGWTAGAAAYYVGYLQPRTFLLKYNENGTITDAVDCALDPLSETKCTLKSFTVEKGIYQTSNFRVQPTESIVRFPNITNLCPFGEVFNATRFASVYAWNRKRISNCVADYSVLYNSASFSTFKCYGVSPTKLNDLCFTNVYADSFVIRGDEVRQIAPGQTGKIADYNYKLPDDFTGCVIAWNSNNLDSKVGGNYNYLYRLFRKSNLKPFERDISTEIYQAGSTPCNGVEGFNCYFPLQSYGFQPTNGVGYQPYRVVVLSFELLHAPATVCGPKKSTNLVKNKCVNFNFNGLTGTGVLTESNKKFLPFQQFGRDIADTTDAVRDPQTLEILDITPCSFGGVSVITPGTNTSNQVAVLYQDVNCTEVPVAIHADQLTPTWRVYSTGSNVFQTRAGCLIGAEHVNNSYECDIPIGAGICASYQTQTNSPRRARSVASQSIIAYTMSLGAENSVAYSNNSIAICTNFTISVTTEILPVSMTKTSVDCTMYICGDSTECSNLLLQYGSFCTQLNRALTGIAVEQDKNTQEVFAQVKQIYKTPPIKDFGGFNFSQILPDPSKPSKRSFIEDLLFNKVTLADAGFIKQYGDCLGDIAARDLICAQKFNGLTVLPPLLTDEMIAQYTSALLAGTITSGWTFGAGAALQIPFAMQMAYRFNGIGVTQNVLYENQKLIANQFNSAIGKIQDSLSSTASALGKLQDVVNQNAQALNTLVKQLSSNFGAISSVLNDILSRLDKVEAEVQIDRLITGRLQSLQTYVTQQLIRAAEIRASANLAATKMSECVLGQSKRVDFCGKGYHLMSFPQSAPHGVVFLHVTYVCAQEKNFTTAPAICHDGKAHFPREGVFVSNGTHWFVTQRNFYEPQIITTDNTFVSGNCDVVIGIVNNTVYDPLQPELDSFKEELDKYFKNHTSPDVDLGDISGINASVVNIQKEIDRLNEVAKNLNESLIDLQELGKYEQYIKWPWYIWLGFIAGLIAIVMVTIMLCCMTSCCSCLKGCCSCGSCFKFDEDDSEPVLKGVKLHYT

SEQ ID NO: 764 - protein, 1273 aa, Artificial Sequence
  SARS-CoV-2/Switzerland/1000477797/2020__EPI_ISL_413023 spike protein (1-1273)(P715C_P1069C)
MFVFLVLLPLVSSQCVNLTTRTQLPPAYTNSFTRGVYYPDKVFRSSVLHSTQDLFLPFFSNVTWFHAIHVSGTNGTKRFDNPVLPFNDGVYFASTEKSNIIRGWIFGTTLDSKTQSLLIVNNATNVVIKVCEFQFCNDPFLGVYYHKNNKSWMESEFRVYSSANNCTFEYVSQPFLMDLEGKQGNFKNLREFVFKNIDGYFNIYSKHTPINLVRDLPQGFSALEPLVDLPIGINITRFQTLLALHRSYLTPGDSSSGWTAGAAAYYVGYLQPRTFLLKYNENGTITDAVDCALDPLSETKCTLKSFTVEKGIYQTSNFRVQPTESIVRFPNITNLCPFGEVFNATRFASVYAWNRKRISNCVADYSVLYNSASFSTFKCYGVSPTKLNDLCFTNVYADSFVIRGDEVRQIAPGQTGKIADYNYKLPDDFTGCVIAWNSNNLDSKVGGNYNYLYRLFRKSNLKPFERDISTEIYQAGSTPCNGVEGFNCYFPLQSYGFQPTNGVGYQPYRVVVLSFELLHAPATVCGPKKSTNLVKNKCVNFNFNGLTGTGVLTESNKKFLPFQQFGRDIADTTDAVRDPQTLEILDITPCSFGGVSVITPGTNTSNQVAVLYQGVNCTEVPVAIHADQLTPTWRVYSTGSNVFQTRAGCLIGAEHVNNSYECDIPIGAGICASYQTQTNSPRRARSVASQSIIAYTMSLGAENSVAYSNNSIAICTNFTISVTTEILPVSMTKTSVDCTMYICGDSTECSNLLLQYGSFCTQLNRALTGIAVEQDKNTQEVFAQVKQIYKTPPIKDFGGFNFSQILPDPSKPSKRSFIEDLLFNKVTLADAGFIKQYGDCLGDIAARDLICAQKFNGLTVLPPLLTDEMIAQYTSALLAGTITSGWTFGAGAALQIPFAMQMAYRFNGIGVTQNVLYENQKLIANQFNSAIGKIQDSLSSTASALGKLQDVVNQNAQALNTLVKQLSSNFGAISSVLNDILSRLDKVEAEVQIDRLITGRLQSLQTYVTQQLIRAAEIRASANLAATKMSECVLGQSKRVDFCGKGYHLMSFPQSAPHGVVFLHVTYVCAQEKNFTTAPAICHDGKAHFPREGVFVSNGTHWFVTQRNFYEPQIITTDNTFVSGNCDVVIGIVNNTVYDPLQPELDSFKEELDKYFKNHTSPDVDLGDISGINASVVNIQKEIDRLNEVAKNLNESLIDLQELGKYEQYIKWPWYIWLGFIAGLIAIVMVTIMLCCMTSCCSCLKGCCSCGSCCKFDEDDSEPVLKGVKLHYT

SEQ ID NO: 765 - protein, 1273 aa, Artificial Sequence
  SARS-CoV-2/Belgium/BA-02291/2020__EPI_ISL_415159 spike protein (1-1273)(P715C_P1069C)
MFVFLVLLPLVSSQCVNLTTRTQLPPAYTNSFTRGVYYPDKVFRSSVLHSTQDLFLPFFSNVTWFHAIHVSGTNGTKRFDNPVLPFNDGVYFASTEKSNIIRGWIFGTTLDSKTQSLLIVNNATNVVIKVCEFQFCNDPFLGVYYHKNNKSWMESEFRVYSSANNCTFEYVSQPFLMDLEGKQGNFKNLREFVFKNIDGYFKIYSKHTPINLVRDLPQGFSALEPLVDLPIGINITRFQTLLALHRSYLTPGDSSSGWTAGAAAYYVGYLQPRTFLLKYNENGTITDAVDCALDPLSETKCTLKSFTVEKGIYQTSNFRVQPTESIVRFPNITNLCPFGEVFNATRFASVYAWNRKRISNCVADYSVLYNSASFSTFKCYGVSPTKLNDLCFTNVYADSFVIRGDEVRQIAPGQTGKIADYNYKLPDDFTGCVIAWNSNNLDSKVGGNYNYLYRLFRRSNLKPFERDISTEIYQAGSTPCNGVEGFNCYFPLQSYGFQPTNGVGYQPYRVVVLSFELLPAPATVCGPKKSTNLVKNKCVNFNFNGLTGTGVLTESNKKFLPFQQFGRDIADTTDAVRDPQTLEILDITPCSFGGVSVITPGTNTSNQVAVLYQGVNCTEVPVAIHADQLTPTWRVYSTGSNVFQTRAGCLIGAEHVNNSYECDIPIGAGICASYQTQTNSPRRARSVASQSIIAYTMSLGAENSVAYSNNSIAICTNFTISVTTEILPVSMTKTSVDCTMYICGDSTECSNLLLQYGSFCTQLNRALTGIAVEQDKNTQEVFAQVKQIYKTPPIKDFGGFNFSQILPDPSKPSKRSFIEDLLFNKVTLADAGFIKQYGDCLGDIAARDLICAQKFNGLTVLPPLLTDEMIAQYTSALLAGTITSGWTFGAGAALQIPFAMQMAYRFNGIGVTQNVLYENQKLIANQFNSAIGKIQDSLSSAAPALGKLQDVVNQNAQALNTLVKQLSSNFGAISSVLNDILSRLDKVEAEVQIDRLITGRLQSLQTYVTQQLIRAAEIRASANLAATKMSECVLGQSKRVDFCGKGYHLMSFPQSAPHGVVFLHVTYVCAQEKNFTTAPAICHDGKAHFPREGVFVSNGTHWFVTQRNFYEPQIITTDNTFVSGNCDVVIGIVNNTVYDPLQPELDSFKEELDKYFKNHTSPDVDLGDISGINASVVNIQKEIDRLNEVAKNLNESLIDLQELGKYEQYIKWPWYIWLGFIAGLIAIVMVTIMLCCMTSCCSCLKGCCSCGSCCKFDEDDSEPVLKGVKLHYT

SEQ ID NO: 766 - protein, 1273 aa, Artificial Sequence
  SARS-CoV-2/USA/WA8-UW5/2020__EPI_ISL_413486 spike protein (1-1273)(P715C_P1069C)
MFVFLVLLPLVSSQCVNLTTRTQLPPAYTNSFTRGVYYPDKVFRSSVLHSTQDLFLPFFSNVTWFHAIHVSGTNGTKRFDNPVLPFNDGVYFASTEKSNIIRGWIFGTTLDSKTQSLLIVNNATNVVIKVCEFQFCNDPFLGVYYHKNNKSWMESEFRVYSSANNCTFEYVSQPFLMDLEGKQGNFKNLREFVFKNIDGYFKIYSKHTPINLVRDLPQGFSALEPLVDLPIGINITRFQTLLALHRSYLTPGDSSSGWTAGAAAYYVGYLQPRTFLLKYNENGTITDAVDCALDPLSETKCTLKSFTVEKGIYQTSNFRVQPTESIVRFPNITNLCPFGEVFNATRFASVYAWNRKRISNCVADYSVLYNSASFSTFKCYGVSPTKLNDLCFTNVYADSFVIRGDEVRQIAPGQTGKIADYNYKLPDDFTGCVIAWNSNNLDSKVGGNYNYLYRLFRKSNLKPFERDISTEIYQAGSTPCNGVEGFNCYFPLQSYGFQPTNGVGYQPYRVVVLSFELLHAPATVCGPKKSTNLVKNKCVNFNFNGLTGTGVLTESNKKFLPFQQFGRDIADTTDAVRDPQTLEILDITPCSFGGVSVITPGTNTSNQVAVLYQDVNCTEVPVAIHADQLTPTWRVYSTGSNVFQTRAGCLIGAEYVNNSYECDIPIGAGICASYQTQTNSPRRARSVASQSIIAYTMSLGAENSVAYSNNSIAICTNFTISVTTEILPVSMTKTSVDCTMYICGDSTECSNLLLQYGSFCTQLNRALTGIAVEQDKNTQEVFAQVKQIYKTPPIKDFGGFNFSQILPDPSKPSKRSFIEDLLFNKVTLADAGFIKQYGDCLGDIAARDLICAQKFNGLTVLPPLLTDEMIAQYTSALLAGTITSGWTFGAGAALQIPFAMQMAYRFNGIGVTQNVLYENQKLIANQFNSAIGKIQDSLSSTASALGKLQDVVNQNAQALNTLVKQLSSNFGAISSVLNDILSRLDKVEAEVQIDRLITGRLQSLQTYVTQQLIRAAEIRASANLAATKMSECVLGQSKRVDFCGKGYHLMSFPQSAPHGVVFLHVTYVCAQEKNFTTAPAICHDGKAHFPREGVFVSNGTHWFVTQRNFYEPQIITTDNTFVSGNCDVVIGIVNNTVYDPLQPELDSFKEELDKYFKNHTSPDVDLGDISGINASVVNIQKEIDRLNEVAKNLNESLIDLQELGKYEQYIKWPWYIWLGFIAGLIAIVMVTIMLCCMTSCCSCLKGCCSCGSCCKFDEDDSEPVLKGVKLHYT

SEQ ID NO: 767 - protein, 1273 aa, Artificial Sequence
  SARS-CoV-2/England/20102000506/2020__EPI_ISL_415147 spike protein (1-1273)(P715C_P1069C)
MFVFLVLLPLVSSQCVNLTTRTQLPPAYTNSFTRGVYYPDKVFRSSVLHSTQDLFLPFFSNVTWFHAIHVSGTNGTKRFDNPVLPFNDGVYFASTEKSNIIRGWIFGTTLDSKTQSLLIVNNATNVVIKVCEFQFCNDPFLGVYYHKNNKSWMESEFRVYSSANNCTFEYVSQPFLMDLEGKQGNFKNLREFVFKNIDGYFKIYSKHTPINLVRDLPQGFSALEPLVDLPIGINITRFQTLLALHRSYLTPGDSSSGWTAGAAAYYVGYLQPRTFLLKYNENGTITDAVDCALDPLSETKCTLKSFTVEKGIYQTSNFRVQPTESIVRFPNITNLCPFGEVFNATRFASVYAWNRKRISNCVADYSVLYNSASFSTFKCYGVSPTKLNDLCFTNVYADSFVIRGDEVRQIAPGQTGKIADYNYKLPDDFTGCVIAWNSNNLDSKVGGNYNYLYRLFRKSNLKPFERDISTEIYQAGSTPCNGVEGFNCYFPLQSYGFQPTNGVGYQPYRVVVLSFELLHAPATVCGPKKSTNLVKNKCVNFNFNGLTGTGVLTESNKKFLPFQQFGRDIADTTDAVRDPQTLEILDITPCSFGGVSVITPGTNTSNQVAVLYQGVNCTEVPVAIHADQLTPTWRVYSTGSNVFQTRAGCLIGAEHVNNSYECDIPIGAGICASYQTQTNSPRRARSVASQSIIAYTMSLGAENSVAYSNNSIAICTNFTISVTTEILPVSMTKTSVDCTMYICGDSTECSNLLLQYGSFCTQLNRALTGIAVEQDKNTQEVFAQVKQIYKTPPIKDFGGFNFSQILPDPSKPSKRSFIEDLLFNKVTLADAGFIKQYGYCLGDIAARDLICAQKFNGLTVLPPLLTDEMIAQYTSALLAGTITSGWTFGAGAALQIPFAMQMAYRFNGIGVTQNVLYENQKLIANQFNSAIGKIQDSLSSTASALGKLQDVVNQNAQALNTLVKQLSSNFGAISSVLNDILSRLDKVEAEVQIDRLITGRLQSLQTYVTQQLIRAAEIRASANLAATKMSECVLGQSKRVDFCGKGYHLMSFPQSAPHGVVFLHVTYVCAQEKNFTTAPAICHDGKAHFPREGVFVSNGTHWFVTQRNFYEPQIITTDNTFVSGNCDVVIGIVNNTVYDPLQPELDSFKEELDKYFKNHTSPDVDLGDISGINASVVNIQKEIDRLNEVAKNLNESLIDLQELGKYEQYIKWPWYIWLGFIAGLIAIVMVTIMLCCMTSCCSCLKGCCSCGSCCKFDEDDSEPVLKGVKLHYT

SEQ ID NO: 768 - protein, 1273 aa, Artificial Sequence
  SARS-CoV-2/Belgium/VAG-03013/2020__EPI_ISL_415155 spike protein (1-1273)(P715C_P1069C)
MFVFLVLLPLVSSQCVNLTTRTQLPPAYTNSFTRGVYYPDKVFRSSVLHSTQDLFLPFFSNVTWFHAIHVSGTNGTKRFDNPVLPFNDGVYFASTEKSNIIRGWIFGTTLDSKTQSLLIVNNATNVVIKVCEFQFCNDPFLGVYYHKNNKSWMESEFRVYSSANNCTFEYVSQPFLMDLEGKQGNFKNLREFVFKNIDGYFKIYSKHTPINLVRDLPQGFSALEPLVDLPIGINITRFQTLLALHRSYLTPGDSSSGWTAGAAAYYVGYLQPRTFLLKYNENGTITDAVDCALDPLSETKCTLKSFTVEKGIYQTSNFRVQPTESIVRFPNITNLCPFGEVFNATRFASVYAWNRKRISNCVADYSVLYNSASFSTFKCYGVSPTKLNDLCFTNVYADSFVIRGDEVRQIAPGQTGKIADYNYKLPDDFTGCVIAWNSNNLDSKVGGNYNYLYRLFRKSNLKPFERDISTEIYQAGSTPCNGVEGFNCYFPLQSYGFQPTNGVGYQPYRVVVLSFELLHAPATVCGPKKSTNLVKNKCVNFNFNGLTGTGVLTESNKKFLPFQQFGRDIADTTDAVRDPQTLEILDITPCSFGGVSVITPGTNTSNQVAVLYQGVNCTEVPVAIHADQLTPTWRVYSTGSNVFQTRAGCLIGAEHVNNSYECDIPIGAGICASYQTQTNSPRRARSVASQSIIAYTMSLGAENSVAYSNNSIAICTNFTISVTTEILPVSMTKTSVDCTMYICGDSTECSNLLLQYGSFCTQLNRALTGIAVEQDKNTQEVFAQVKQIYKTPPIKDFGGFNFSQILPDPSKPSKRSFIEDLLFNKVTLADAGFIKQYGDCLGDIAARDLICAQKFNGLTVLPPLLTDEMIAQYTSALLAGTITSGWTFGAGAALQIPFAMQMAYRFNGIGVTQNVLYENQKLIANQFNSAIGKIQDSLSSTATALGKLQDVVNQNAQALNTLVKQLSSNFGAISSVLNDILSRLDKVEAEVQIDRLITGRLQSLQTYVTQQLIRAAEIRASANLAATKMSECVLGQSKRVDFCGKGYHLMSFPQSAPHGVVFLHVTYVCAQEKNFTTAPAICHDGKAHFPREGVFVSNGTHWFVTQRNFYEPQIITTDNTFVSGNCDVVIGIVNNTVYDPLQPELDSFKEELDKYFKNHTSPDVDLGDISGINASVVNIQKEIDRLNEVAKNLNESLIDLQELGKYEQYIKWPWYIWLGFIAGLIAIVMVTIMLCCMTSCCSCLKGCCSCGSCCKFDEDDSEPVLKGVKLHYT

SEQ ID NO: 769 - protein, 1273 aa, Artificial Sequence
  SARS-CoV-2/Belgium/BC-03016/2020__EPI_ISL_415157 spike protein (1-1273)(P715C_P1069C)
MFVFLVLLPLVSSQCVNLTTRTQLPPAYTNSFTRGVYYPDKVFRSSVLHSTQDLFLPFFSNVTWFHAIHVSGTNGTKRFDNPVLPFNDGVYFASTEKSNIIRGWIFGTTLDSKTQSLLIVNNATNVVIKVCEFQFCNDPFLGVYYHKNNKSWMESEFRVYSSANNCTFEYVSQPFLMDLEGKQGNFKNLREFVFKNIDGYFKIYSKHTPINLVRDLPQGFSALEPLVDLPIGINITRFQTLLALHRSYLTPGDSSSGWTAGAAAYYVGYLQPRTFLLKYNENGTITDAVDCALDPLSETKCTLKSFTVEKGIYQTSNFRVQPTESIVRFPNITNLCPFGEVFNATRFASVYAWNRKRISNCVADYSVLYNSASFSTFKCYGVSPTKLNDLCFTNVYADSFVIRGDEVRQIAPGQTGKIADYNYKLPDDFTGCVIAWNSNNLDSKVGGNYNYLYRLFRKSNLKPFERDISTEIYQAGSTPCNGVEGFNCYFPLQSYGFQPTNGVGYQPYRVVVLSFELLHAPATVCGPKKSTNLVKNKCVNFNFNGLTGTGVLTESNKKFLPFQQFGRDIADTTDAVRDPQTLEILDITPCSFGGVSVITPGTNTSNQVAVLYQGVNCTEVPVAIHADQLTPTWRVYSTGSNVFQTRAGCLIGAEHVNNSYECDIPIGAGICASYQTQTNSPRRARSVASQSIIAYTMSLGAENSVAYSNNSIAICTNFTISVTTEILPVSMTKTSVDCTMYICGDSTECSNLLLQYGSFCTQLNRALTGIAVEQDKNTQEVFAQVKQIYKTPPIKDFGGFNFSQILPDPSKPSKRSFIEDLLFNKVTLADAGFIKQYGDCLGDIAARDLICAQKFNGLTVLPPLLTDEMIAQYTSALLAGTITSGWTFGAGAALQIPFAMQMAYRFNGIGVTQNVLYENQKLIANQFNSAIGKIQDSLSSTAPALGKLQDVVNQNAQALNTLVKQLSSNFGAISSVLNDILSRLDKVEAEVQIDRLITGRLQSLQTYVTQQLIRAAEIRASANLAATKMSECVLGQSKRVDFCGKGYHLMSFPQSAPHGVVFLHVTYVCAQEKNFTTAPAICHDGKAHFPREGVFVSNGTHWFVTQRNFYEPQIITTDNTFVSGNCDVVIGIVNNTVYDPLQPELDSFKEELDKYFKNHTSPDVDLGDISGINASVVNIQKEIDRLNEVAKNLNESLIDLQELGKYEQYIKWPWYIWLGFIAGLIAIVMVTIMLCCMTSCCSCLKGCCSCGSCCKFDEDDSEPVLKGVKLHYT

SEQ ID NO: 770 - protein, 1273 aa, Artificial Sequence
  SARS-CoV-2/Germany/BavPat3/2020__EPI_ISL_414521 spike protein (1-1273)(P715C_P1069C)
MFVFLVLLPLVSSQCVNLTTRTQLPPAYTNSFTRGVYYPDKVFRSSVLHSTQDLFLPFFSNVTWFHAIHVSGTNGTKRFDNPVLPFNDGVYFASTEKSNIIRGWIFGTTLDSKTQSLLIVNNATNVVIKVCEFQFCNDPFLGVYYHKNNKSWMESEFRVYSSANNCTFEYVSQPFLMDLEGKQGNFKNLREFVFKNIDGYFKIYSKHTPINLVRDLPQGFSALEPLVDLPIGINITRFQTLLALHRSYLTPGDSSSGWTAGAAAYYVGYLQPRTFLLKYNENGTITDAVDCALDPLSETKCTLKSFTVEKGIYQTSNFRVQPTESIVRFPNITNLCPFGEVFNATRFASVYAWNRKRISNCVADYSVLYNSASFSTFKCYGVSPTKLNDLCFTNVYADSFVIRGDEVRQIAPGQTGKIADYNYKLPDDFTGCVIAWNSNNLDSKVGGNYNYLYRLFRKSNLKPFERDISTEIYQAGSTPCNGVEGFNCYFPLQSYGFQPTNGVGYQPYRVVVLSFELLHAPATVCGPKKSTNLVKNKCVNFNFNGLTGTGVLTESNKKFLPFQQFGRDIADTTDAVRDPQTLEILDITPCSFGGVSVITPGTNTSNQVAVLYQDVNCTEVPVAIHADQLTPTWRVYSTGSNVFQTRAGCLIGAEHVNNSYECDIPIGAGICASYQTQTNSPRRARSVASQSIIAYTMSLGAENSVAYSNNSIAICTNFTISVTTEILPVSMTKTSVDCTMYICGDSTECSNLLLQYGSFCTQLNRALTGIAVEQDKNTQQVFAQVKQIYKTPPIKDFGGFNFSQILPDPSKPSKRSFIEDLLFNKVTLADAGFIKQYGDCLGDIAARDLICAQKFNGLTVLPPLLTDEMIAQYTSALLAGTITSGWTFGAGAALQIPFAMQMAYRFNGIGVTQNVLYENQKLIANQFNSAIGKIQDSLSSTASALGKLQDVVNQNAQALNTLVKQLSSNFGAISSVLNDILSRLDKVEAEVQIDRLITGRLQSLQTYVTQQLIRAAEIRASANLAATKMSECVLGQSKRVDFCGKGYHLMSFPQSAPHGVVFLHVTYVCAQEKNFTTAPAICHDGKAHFPREGVFVSNGTHWFVTQRNFYEPQIITTDNTFVSGNCDVVIGIVNNTVYDPLQPELDSFKEELDKYFKNHTSPDVDLGDISGINASVVNIQKEIDRLNEVAKNLNESLIDLQELGKYEQYIKWPWYIWLGFIAGLIAIVMVTIMLCCMTSCCSCLKGCCSCGSCCKFDEDDSEPVLKGVKLHYT

SEQ ID NO: 771 - protein, 1273 aa, Artificial Sequence
  SARS-CoV-2/France/HF1805/2020__EPI_ISL_414628 spike protein (1-1273)(P715C_P1069C)
MFVFLVLLPLVSSQCVNLTTRTQLPPAYTNSFTRGVYYPDKVFRSSVLHSTQDLFLPFFSNVTWFHAIHVSGTNGTKRFDNPVLPFNDGVYFASTEKSNIIRGWIFGTTLDSKTQSLLIVNNATNVVIKVCEFQFCNDPFLGVYYHKNNKSWMESEFRVYSSANNCTFEYVSQPFLMDLEGKQGNFKNLREFVFKNIDGYFKIYSKHTPINLVRDLPQGFSALEPLVDLPIGINITRFQTLLALHRSYLTPGDSSSGWTAGAAAYYVGYLQPRTFLLKYNENGTITDAVDCALDPLSETKCTLKSFTVEKGIYQTSNFRVQPTESIVRFPNITNLCPFGEVFNATRFASVYAWNRKRISNCVADYSVLYNSASFSTFKCYGVSPTKLNDLCFTNVYADSFVIRGDEVRQIAPGQTGKIADYNYKLPDDFTGCVIAWNSNNLDSKVGGNYNYLYRLFRKSNLKPFERDISTEIYQAGSTPCNGVEGFNCYFPLQSYGFQPTNGVGYQPYRVVVLSFELLHAPATVCGPKKSTNLVKNKCVNFNFNGLTGTGVLTESNKKFLPFQQFGRDIADTTDAVRDPQTLEILDITPCSFGGVSVITPGTNTSNQVAVLYQGVNCTEVPVAIHADQLTPTWRVYSTGSNVFQTRAGCLIGAEHVNNSYECDIPIGAGICASYQTQTNSPRRARSVASQSIIAYTMSLGAENSVAYSNNSIAICTNFTISVTTEILPVSMTKTSVDCTMYICGDSTECSNLLLQYGSFCTQLNRALTGIAVEQDKNTQEVFAQVKQIYKTPPIKDFGGFNFSQILPDPSKPSKRSFIEDLLFNKVTLADAGFIKQYGDCLGDIAARDLICAQKFNGLTVLPPLLTDEMIAQYTSALLAGTITSGWTFGAGAALQIPFAMQMAYRFNGIGVTQNVLYENQKLIANQFNSAIGKIQDSLSSTASALGKLQDVVNQNAQALNTLVKQLSSNFGAISSVLNDILSRLDKVEAEVQIDRLITGRLQSLQTYVTQQLIRAAEIRASANLAATKMSECVLGQSKRVDFCGKGYHLMSFPQSAPHGVVFLHVTYVCAQEKNFTTAPAICHDGKAHFPREGVFVSNGTHWFVTQRNFYEPQIITTDNTFVSGNCDVVIGVVNNTVYDPLQPELDSFKEELDKYFKNHTSPDVDLGDISGINASVVNIQKEIDRLNEVAKNLNESLIDLQELGKYEQYIKWPWYIWLGFIAGLIAIVMVTIMLCCMTSCCSCLKGCCSCGSCCKFDEDDSEPVLKGVKLHYT

SEQ ID NO: 772 - protein, 1273 aa, Artificial Sequence
  SARS-CoV-2/Netherlands/ZuidHolland_9/2020__EPI_ISL_414445 spike protein (1-1273)(P715C_P1069C)
MFVFLVLLPLVSSQCVNLTTRTQLPPAYTNSFTRGVYYPDKVFRSSVLHSTQDLFLPFFSNVTWFHAIHVSGTNGTKRFDNPVLPFNDGVYFASTEKSNIIRGWIFGTTLDSKTQSLLIVNNATNVVIKVCEFQFCNDPFLGVYYHKNNKSWMESEFRVYSSANNCTFEYVSQPFLMDLEGKQGNFKNLREFVFKNIDGYFKIYSKHTPINLVRDLPQGFSALEPLVDLPIGINITRFQTLLALHRSYLTPGDSSSGWTAGAAAYYVGYLQPRTFLLKYNENGTITDAVDCALDPLSETKCTLKSFTVEKGIYQTSNFRVQPTESIVRFPNITNLCPFGEVFNATRFASVYAWNRKRISNCVADYSVLYNSASFSTFKCYGVSPTKLNDLCFTNVYADSFVIRGDEVRQIAPGQTGKIADYNYKLPDDFTGCVIAWNSNNLDSKVGGNYNYLYRLFRKSNLKPFERDISTEIYQAGSTPCNGVEGFNCYFPLQSYGFQPTNGVGYQPYRVVVLSFELLHAPATVCGPKKSTNLVKNKCVNFNFNGLTGTGVLTESNKKFLPFQQFGRDIADTTDAVRDPQTLEILDITPCSFGGVSVITPGTNTSNQVAVLYQGVNCTEVPVAIHADQLTPTWRVYSTGSNVFQTRAGCLIGAEHVNNSYECDIPIGAGICASYQTQTNSPRRARSVASQSIIAYTMSLGAENSVAYSNNSIAICTNFTISVTTEILPVSMTKTSVDCTMYICGDSTECSNLLLQYGSFCTQLNRALTGIAVEQDKNTQEVFAQVKQIYKTPPIKDFGGFNFSQILPDPSKPSKRSFIEDLLFNKVTLADAGFIKQYGDCLGDIAARDLICVQKFNGLTVLPPLLTDEMIAQYTSALLAGTITSGWTFGAGAALQIPFAMQMAYRFNGIGVTQNVLYENQKLIANQFNSAIGKIQDSLSSTASALGKLQDVVNQNAQALNTLVKQLSSNFGAISSVLNDILSRLDKVEAEVQIDRLITGRLQSLQTYVTQQLIRAAEIRASANLAATKMSECVLGQSKRVDFCGKGYHLMSFPQSAPHGVVFLHVTYVCAQEKNFTTAPAICHDGKAHFPREGVFVSNGTHWFVTQRNFYEPQIITTDNTFVSGNCDVVIGIVNNTVYDPLQPELDSFKEELDKYFKNHTSPDVDLGDISGINASVVNIQKEIDRLNEVAKNLNESLIDLQELGKYEQYIKWPWYIWLGFIAGLIAIVMVTIMLCCMTSCCSCLKGCCSCGSCCKFDEDDSEPVLKGVKLHYT

SEQ ID NO: 773 - protein, 1273 aa, Artificial Sequence
  SARS-CoV-2/Finland/FIN03032020A/2020__EPI_ISL_413602 spike protein (1-1273)(P715C_P1069C)
MFVFLVLLPLVSSQCVNLTTRTQLPPAYTNSFTRGVYYPDKVFRSSVLHSTQDLFLPFFSNVTWFHAIHVSGTNGTKRFDNPVLPFNDGVYFASTEKSNIIRGWIFGTTLDSKTQSLLIVNNATNVVIKVCEFQFCNDPFLGVYYHKNNKSWMESEFRVYSSANNCTFEYVSQPFLMDLEGKQGNFKNLREFVFKNIDGYFKIYSKHTPINLVRDLPQGFSALEPLVDLPIGINITRFQTLLALHRSYLTPGDSSSGWTAGAAAYYVGYLQPRTFLLKYNENGTITDAVDCALDPLSETKCTLKSFTVEKGIYQTSNFRVQPTESIVRFPNITNLCPFGEVFNATRFASVYAWNRKRISNCVADYSVLYNSASFSTFKCYGVSPTKLNDLCFTNVYADSFVIRGDEVRQIAPGQTGKIADYNYKLPDDFTGCVISWNSNNLDSKVGGNYNYLYRLFRKSNLKPFERDISTEIYQAGSTPCNGVEGFNCYFPLQSYGFQPTNGVGYQPYRVVVLSFELLHAPATVCGPKKSTNLVKNKCVNFNFNGLTGTGVLTESNKKFLPFQQFGRDIADTTDAVRDPQTLEILDITPCSFGGVSVITPGTNTSNQVAVLYQGVNCTEVPVAIHADQLTPTWRVYSTGSNVFQTRAGCLIGAEHVNNSYECDIPIGAGICASYQTQTNSPRRARSVASQSIIAYTMSLGAENSVAYSNNSIAICTNFTISVTTEILPVSMTKTSVDCTMYICGDSTECSNLLLQYGSFCTQLNRALTGIAVEQDKNTQEVFAQVKQIYKTPPIKDFGGFNFSQILPDPSKPSKRSFIEDLLFNKVTLADAGFIKQYGDCLGDIAARDLICAQKFNGLTVLPPLLTDEMIAQYTSALLAGTITSGWTFGAGAALQIPFAMQMAYRFNGIGVTQNVLYENQKLIANQFNSAIGKIQDSLSSTASALGKLQDVVNQNAQALNTLVKQLSSNFGAISSVLNDILSRLDKVEAEVQIDRLITGRLQSLQTYVTQQLIRAAEIRASANLAATKMSECVLGQSKRVDFCGKGYHLMSFPQSAPHGVVFLHVTYVCAQEKNFTTAPAICHDGKAHFPREGVFVSNGTHWFVTQRNFYEPQIITTDNTFVSGNCDVVIGIVNNTVYDPLQPELDSFKEELDKYFKNHTSPDVDLGDISGINASVVNIQKEIDRLNEVAKNLNESLIDLQELGKYEQYIKWPWYIWLGFIAGLIAIVMVTIMLCCMTSCCSCLKGCCSCGSCCKFDEDDSEPVLKGVKLHYT

SEQ ID NO: 774 - protein, 1273 aa, Artificial Sequence
  SARS-CoV-2/France/GE1977/2020__EPI_ISL_414632 spike protein (1-1273)(P715C_P1069C)
MFVFLVLLPLVSSQCVNLTTRTQLPPAYTNSFTRGVYYPDKVFRSSVLHSTQDLFLPFFSNVTWFHAIHVSGTNGTKRFDNPVLPFNDGVYFASTEKSNIIRGWIFGTTLDSKTQSLLIVNNATNVVIKVCEFQFCNDPFLGVYYHKNNKSWMESEFRVYSSANNCTFEYVSQPFLMDLEGKQGNFKNLREFVFKNIDGYFKIYSKHTPINLVRDLPQGFSALEPLVDLPIGINITRFQTLLALHRSYLTPGDSSSGWTAGAAAYYVGYLQPRTFLLKYNENGTITDAVDCALDPLSETKCTLKSFTVEKGIYQTSNFRVQPTESIVRFPNITNLCPFGEVFNATRFASVYAWNRKRISNCVADYSVLYNSASFSTFKCYGVSPTKLNDLCFTNVYADSFVIRGDEVRQIAPGQTGKIADYNYKLPDDFTGCVIAWNSNNLDSKVGGNYNYLYRLFRKSNLKPFERDISTEIYQAGSTPCNGVEGFNCYFPLQSYGFQPTNGVGYQPYRVVVLSFELLHAPATVCGPKKSTNLVKNKCVNFNFNGLTGTGVLTESNKKFLPFQQFGRDIADTTDAVRDPQTLEILDITPCSFGGVSVITPGTNTSNQVAVLYQGVNCTEVPVAIHADQLTPTWRVYSTGSNVFQTRAGCLIGAEHVNNSYECDIPIGAGICASYQTQTNSPRRARSVASQSIIAYTMSLGAENSVAYSNNSIAICTNFTISVTTEILPVSMTKTSVDCTMYICGDSTECSNLLLQYGSFCTQLNRALTGIAVEQDKNTQEVFAQVKQIYKTPPIKDFGGFNFSQILPDPSKPSKRSFIEDLLFNKVTLADAGFIKQYGDCLGDIAARDLICAQKFNGLTVLPPLLTDEMIAQYTSALLAGTITSGWTFGAGAALQIPFAMQMAYRFNGIGVTQNVLYENQKLIANQFNSAIGKIQDSLFSTASALGKLQDVVNQNAQALNTLVKQLSSNFGAISSVLNDILSRLDKVEAEVQIDRLITGRLQSLQTYVTQQLIRAAEIRASANLAATKMSECVLGQSKRVDFCGKGYHLMSFPQSAPHGVVFLHVTYVCAQEKNFTTAPAICHDGKAHFPREGVFVSNGTHWFVTQRNFYEPQIITTDNTFVSGNCDVVIGIVNNTVYDPLQPELDSFKEELDKYFKNHTSPDVDLGDISGINASVVNIQKEIDRLNEVAKNLNESLIDLQELGKYEQYIKWPWYIWLGFIAGLIAIVMVTIMLCCMTSCCSCLKGCCSCGSCCKFDEDDSEPVLKGVKLHYT

SEQ ID NO: 775 - protein, 1273 aa, Artificial Sequence
  SARS-CoV-2/Finland/FIN-313/2020__EPI_ISL_414641 spike protein (1-1273)(P715C_P1069C)
MFVFLVLLPLVSSQCVNLTTRTQLPPAYTNSFTRGVYYPDKVFRSSVLHSTQDLFLPFFSNVTWFHAIHVSGTNGTKRFDNPVLPFNDGVYFASTEKSNIIRGWIFGTTLDSKTQSLLIVNNATNVVIKVCEFQFCNDPFLGVYYHKNNKSWMESEFRVYSSANNCTFEYVSQPFLMDLEGKQGNFKNLREFVFKNIDGYFKIYSKHTPINLVRDLPQGFSALEPLVDLPIGINITRFKTLLALHRSYLTPGDSSSGWTAGAAAYYVGYLQPRTFLLKYNENGTITDAVDCALDPLSETKCTLKSFTVEKGIYQTSNFRVQPTESIVRFPNITNLCPFGEVFNATRFASVYAWNRKRISNCVADYSVLYNSASFSTFKCYGVSPTKLNDLCFTNVYADSFVIRGDEVRQIAPGQTGKIADYNYKLPDDFTGCVIAWNSNNLDSKVGGNYNYLYRLFRKSNLKPFERDISTEIYQAGSTPCNGVEGFNCYFPLQSYGFQPTNGVGYQPYRVVVLSFELLHAPATVCGPKKSTNLVKNKCVNFNFNGLTGTGVLTESNKKFLPFQQFGRDIADTTDAVRDPQTLEILDITPCSFGGVSVITPGTNTSNQVAVLYQGVNCTEVPVAIHADQLTPTWRVYSTGSNVFQTRAGCLIGAEHVNNSYECDIPIGAGICASYQTQTNSPRRARSVASQSIIAYTMSLGAENSVAYSNNSIAICTNFTISVTTEILPVSMTKTSVDCTMYICGDSTECSNLLLQYGSFCTQLNRALTGIAVEQDKNTQEVFAQVKQIYKTPPIKDFGGFNFSQILPDPSKPSKRSFIEDLLFNKVTLADAGFIKQYGDCLGDIAARDLICAQKFNGLTVLPPLLTDEMIAQYTSALLAGTITSGWTFGAGAALQIPFAMQMAYRFNGIGVTQNVLYENQKLIANQFNSAIGKIQDSLSSTASALGKLQDVVNQNAQALNTLVKQLSSNFGAISSVLNDILSRLDKVEAEVQIDRLITGRLQSLQTYVTQQLIRAAEIRASANLAATKMSECVLGQSKRVDFCGKGYHLMSFPQSAPHGVVFLHVTYVCAQEKNFTTAPAICHDGKAHFPREGVFVSNGTHWFVTQRNFYEPQIITTDNTFVSGNCDVVIGIVNNTVYDPLQPELDSFKEELDKYFKNHTSPDVDLGDISGINASVVNIQKEIDRLNEVAKNLNESLIDLQELGKYEQYIKWPWYIWLGFIAGLIAIVMVTIMLCCMTSCCSCLKGCCSCGSCCKFDEDDSEPVLKGVKLHYT

SEQ ID NO: 776 - protein, 1273 aa, Artificial Sequence
  SARS-CoV-2/Netherlands/ZuidHolland_2/2020__EPI_ISL_414556 spike protein (1-1273)(P715C_P1069C)
MFVFLVLLPLVSSQCVNLTTRTQLPPAYTNSFTRGVYYPDKVFRSSVLHSTQDLFLPFFSNVTWFHAIHVSGTNGTKRFDNPVLPFNDGVYFASTEKSNIIRGWIFGTTLDSKTQSLLIVNNATNVVIKVCEFQFCNDPFLGVYYHKNNKSWMESEFRVYSSANNCTFEYVSQPFLMDLEGKQGNFKNLREFVFKNIDGYFKIYSKHTPINLVRDLPQGFSALEPLVDLPIGINITRFQTLLALHRSYLTPGDSSSGWTAGAAAYYVGYLQPRTFLLKYNENGTITDAVDCALDPLSETKCTLKSFTVEKGIYQTSNFRVQPTESIVRFPNITNLCPFGEVFNATRFASVYAWNRKRISNCVADYSVLYNSASFSTFKCYGVSPTKLNDLCFTNVYADSFVIRGDEVRQIAPGQTGKIADYNYKLPDDFTGCVIAWNSNNLDSKVGGNYNYLYRLFRKSNLKPFERDISTEIYQAGSTPCNGVEGFNCYFPLQSYGFQPTNGVGYQPYRVVVLSFELLHAPATVCGPKKSTNLVKNKCVNFNFNGLTGTGVLTESNKKFLPFQQFGRDIADTTDAVRDPQTLEILDITPCSFGGVSVITPGTNTSNQVAVLYQGVNCTEVPVAIHADQLTPTWRVYSTGSNVFQTRAGCLIGAEHVNNSYECDIPIGAGICASYQTQTNSPRRARSVASQSIIAYTMSLGAENSVAYSNNSIAICTNFTISVTTEILPVSMTKTSVDCTMYICGDSTECSNLLLQYGSFCTQLNRALTGIALEQDKNTQEVFAQVKQIYKTPPIKDFGGFNFSQILPDPSKPSKRSFIEDLLFNKVTLADAGFIKQYGDCLGDIAARDLICAQKFNGLTVLPPLLTDEMIAQYTSALLAGTITSGWTFGAGAALQIPFAMQMAYRFNGIGVTQNVLYENQKLIANQFNSAIGKIQDSLSSTASALGKLQDVVNQNAQALNTLVKQLSSNFGAISSVLNDILSRLDKVEAEVQIDRLITGRLQSLQTYVTQQLIRAAEIRASANLAATKMSECVLGQSKRVDFCGKGYHLMSFPQSAPHGVVFLHVTYVCAQEKNFTTAPAICHDGKAHFPREGVFVSNGTHWFVTQRNFYEPQIITTDNTFVSGNCDVVIGIVNNTVYDPLQPELDSFKEELDKYFKNHTSPDVDLGDISGINASVVNIQKEIDRLNEVAKNLNESLIDLQELGKYEQYIKWPWYIWLGFIAGLIAIVMVTIMLCCMTSCCSCLKGCCSCGSCCKFDEDDSEPVLKGVKLHYT

SEQ ID NO: 777 - protein, 1273 aa, Artificial Sequence
  SARS-CoV-2/USA/WA-UW31/2020__EPI_ISL_414618 spike protein (1-1273)(P715C_P1069C)
MFVFLVLLPLVSSQCVNLTTRTQLPPAYTNSFTRGVYYPDKVFRSSVLHSTQDLFLPFFSNVTWFHAIHVSGTNGTKRFDNPVLPFNDGVYFASTEKSNIIRGWIFGTTLDSKTQSLLIVNNATNVVIKVCEFQFCNDPFLGVYYHKNNKSWMESEFRVYSSANNCTFEYVSQPFLMDLEGKQGNFKNLREFVFKNIDGYFKIYSKHTPINLVRDLPQGFSALEPLVDLPIGINITRFQTLLALHRSYLTPGDSSSGWTAGAAAYYVGYLQPRTFLLKYNENGTITDAVDCALDPLSETKCTLKSFTVEKGIYQTSNFRVQPTESIVRFPNITNLCPFGEVFNATRFASVYAWNRKRISNCVADYSVLYNSASFSTFKCYGVSPTKLNDLCFTNVYADSFVIRGDEVRQIAPGQTGKIADYNYKLPDDFTGCVIAWNSNNLDSKVGGNYNYLYRLFRKSNLKPFERDISTEIYQAGSTPCNGAEGFNCYFPLQSYGFQPTNGVGYQPYRVVVLSFELLHAPATVCGPKKSTNLVKNKCVNFNFNGLTGTGVLTESNKKFLPFQQFGRDIADTTDAVRDPQTLEILDITPCSFGGVSVITPGTNTSNQVAVLYQDVNCTEVPVAIHADQLTPTWRVYSTGSNVFQTRAGCLIGAEHVNNSYECDIPIGAGICASYQTQTNSPRRARSVASQSIIAYTMSLGAENSVAYSNNSIAICTNFTISVTTEILPVSMTKTSVDCTMYICGDSTECSNLLLQYGSFCTQLNRALTGIAVEQDKNTQEVFAQVKQIYKTPPIKDFGGFNFSQILPDPSKPSKRSFIEDLLFNKVTLADAGFIKQYGDCLGDIAARDLICAQKFNGLTVLPPLLTDEMIAQYTSALLAGTITSGWTFGAGAALQIPFAMQMAYRFNGIGVTQNVLYENQKLIANQFNSAIGKIQDSLSSTASALGKLQDVVNQNAQALNTLVKQLSSNFGAISSVLNDILSRLDKVEAEVQIDRLITGRLQSLQTYVTQQLIRAAEIRASANLAATKMSECVLGQSKRVDFCGKGYHLMSFPQSAPHGVVFLHVTYVCAQEKNFTTAPAICHDGKAHFPREGVFVSNGTHWFVTQRNFYEPQIITTDNTFVSGNCDVVIGIVNNTVYDPLQPELDSFKEELDKYFKNHTSPDVDLGDISGINASVVNIQKEIDRLNEVAKNLNESLIDLQELGKYEQYIKWPWYIWLGFIAGLIAIVMVTIMLCCMTSCCSCLKGCCSCGSCCKFDEDDSEPVLKGVKLHYT

SEQ ID NO: 778 - protein, 1273 aa, Artificial Sequence
  SARS-CoV-2/South Korea/SNU01/2020__EPI_ISL_411929 spike protein (1-1273)(P715C_P1069C)
MFVFLVLLPLVSSQCVNLTTRTQLPPAYTNSFTRGVYYPDKVFRSSVLHSTQDLFLPFFSNVTWFHAIHVSGTNGTKRFDNPVLPFNDGVYFASTEKSNIIRGWIFGTTLDSKTQSLLIVNNATNVVIKVCEFQFCNDPFLGVYYHKNNKSWMESEFRVYSSANNCTFEYVSQPFLMDLEGKQGNFKNLREFVFKNIDGYFKIYSKHTPINLVRDLPQGFWALEPLVDLPIGINITRFQTLLALHRSYLTPGDSSSGWTAGAAAYYVGYLQPRTFLLKYNENGTITDAVDCALDPLSETKCTLKSFTVEKGIYQTSNFRVQPTESIVRFPNITNLCPFGEVFNATRFASVYAWNRKRISNCVADYSVLYNSASFSTFKCYGVSPTKLNDLCFTNVYADSFVIRGDEVRQIAPGQTGKIADYNYKLPDDFTGCVIAWNSNNLDSKVGGNYNYLYRLFRKSNLKPFERDISTEIYQAGSTPCNGVEGFNCYFPLQSYGFQPTNGVGYQPYRVVVLSFELLHAPATVCGPKKSTNLVKNKCVNFNFNGLTGTGVLTESNKKFLPFQQFGRDIADTTDAVRDPQTLEILDITPCSFGGVSVITPGTNTSNQVAVLYQDVNCTEVPVAIHADQLTPTWRVYSTGSNVFQTRAGCLIGAEHVNNSYECDIPIGAGICASYQTQTNSPRRARSVASQSIIAYTMSLGAENSVAYSNNSIAICTNFTISVTTEILPVSMTKTSVDCTMYICGDSTECSNLLLQYGSFCTQLNRALTGIAVEQDKNTQEVFAQVKQIYKTPPIKDFGGFNFSQILPDPSKPSKRSFIEDLLFNKVTLADAGFIKQYGDCLGDIAARDLICAQKFNGLTVLPPLLTDEMIAQYTSALLAGTITSGWTFGAGAALQIPFAMQMAYRFNGIGVTQNVLYENQKLIANQFNSAIGKIQDSLSSTASALGKLQDVVNQNAQALNTLVKQLSSNFGAISSVLNDILSRLDKVEAEVQIDRLITGRLQSLQTYVTQQLIRAAEIRASANLAATKMSECVLGQSKRVDFCGKGYHLMSFPQSAPHGVVFLHVTYVCAQEKNFTTAPAICHDGKAHFPREGVFVSNGTHWFVTQRNFYEPQIITTDNTFVSGNCDVVIGIVNNTVYDPLQPELDSFKEELDKYFKNHTSPDVDLGDISGINASVVNIQKEIDRLNEVAKNLNESLIDLQELGKYEQYIKWPWYIWLGFIAGLIAIVMVTIMLCCMTSCCSCLKGCCSCGSCCKFDEDDSEPVLKGVKLHYT

SEQ ID NO: 779 - protein, 1273 aa, Artificial Sequence
  SARS-CoV-2/China/WF0004/2020__EPI_ISL_413694 spike protein (1-1273)(P715C_P1069C)
MFVFLVLLPLVSSQCVNLTTRTQLPPAYTNSFTRGVYYPDKVFRSSVLHSTQDLFLPFFSNVTWFHAIHVSGTNGTKRFDNPVLPFNDGVYFASTEKSNIIRGWIFGTTLDSKTQSLLIVNNATNVVIKVCEFQFCNDPFLGVYYHKNNKSWTESEFRVYSSANNCTFEYVSQPFLMDLEGKQGNFKNLREFVFKNIDGYFKIYSKHTPINLVRDLPQGFSALEPLVDLPIGINITRFQTLLALHRSYLTPGDSSSGWTAGAAAYYVGYLQPRTFLLKYNENGTITDAVDCALDPLSETKCTLKSFTVEKGIYQTSNFRVQPTESIVRFPNITNLCPFGEVFNATRFASVYAWNRKRISNCVADYSVLYNSASFSTFKCYGVSPTKLNDLCFTNVYADSFVIRGDEVRQIAPGQTGKIADYNYKLPDDFTGCVIAWNSNNLDSKVGGNYNYLYRLFRKSNLKPFERDISTEIYQAGSTPCNGVEGFNCYFPLQSYGFQPTNGVGYQPYRVVVLSFELLHAPATVCGPKKSTNLVKNKCVNFNFNGLTGTGVLTESNKKFLPFQQFGRDIADTTDAVRDPQTLEILDITPCSFGGVSVITPGTNTSNQVAVLYQDVNCTEVPVAIHADQLTPTWRVYSTGSNVFQTRAGCLIGAEHVNNSYECDIPIGAGICASYQTQTNSPRRARSVASQSIIAYTMSLGAENSVAYSNNSIAICTNFTISVTTEILPVSMTKTSVDCTMYICGDSTECSNLLLQYGSFCTQLNRALTGIAVEQDKNTQEVFAQVKQIYKTPPIKDFGGFNFSQILPDPSKPSKRSFIEDLLFNKVTLADAGFIKQYGDCLGDIAARDLICAQKFNGLTVLPPLLTDEMIAQYTSALLAGTITSGWTFGAGAALQIPFAMQMAYRFNGIGVTQNVLYENQKLIANQFNSAIGKIQDSLSSTASALGKLQDVVNQNAQALNTLVKQLSSNFGAISSVLNDILSRLDKVEAEVQIDRLITGRLQSLQTYVTQQLIRAAEIRASANLAATKMSECVLGQSKRFDFCGKGYHLMSFPQSAPHGVVFLHVTYVCAQEKNFTTAPAICHDGKAHFPREGVFVSNGTHWFVTQRNFYEPQIITTDNTFVSGNCDVVIGIVNNTVYDPLQPELDSFKEELDKYFKNHTSPDVDLGDISGINASVVNIQKEIDRLNEVAKNLNESLIDLQELGKYEQYIKWPWYIWLGFIAGLIAIVMVTIMLCCMTSCCSCLKGCCSCGSCCKFDEDDSEPVLKGVKLHYT

SEQ ID NO: 780 - protein, 1273 aa, Artificial Sequence
  SARS-CoV-2/China/WF0028/2020__EPI_ISL_413791 spike protein (1-1273)(P715C_P1069C)
MFVFLVLLPLVSSQCVNLTTRTQLPPAYTNSFTRGVYYPDKVFRSSVLHSTQDLFLPFFSNVTWFHAIHVSGTNGTKRFDNPVLPFNDGVYFASTEKSNIIRGWIFGTTLDSKTQSLLIVNNATNVVIKVCEFQFCNDPFLGVYYHKNNKSWMESEFRVYSSANNCTFEYVSQPFLMDLEGKQGNFKNLREFVFKNIDGYFKIYSKHTPINLVRDLPQGFSALEPLVDLPIGINITRFQTLLALHRSYLTPGDSSSGWTAGAAAYYVGYLQPRTFLLKYNENGTITDAVDCALDPLSETKCTLKSFTVEKGIYQTSNFRVQPTESIVRFPNITNLCPFGEVFNATRFASVYAWNRKRISNCVADYSVLYNSASFSTFKCYGVSPTKLNDLCFTNVYADSFVIRGDEVRQIAPGQTGKIADYNYKLPDDFTGCVIAWNSNNLDSKVGGNYNYLYRLFRKSNLKPFERDISTEIYQAGSTPCNGVEGFNCYFPLQSYGFQPTNGVGYQPYRVVVLSFELLHAPATVCGPKKSTNLVKNKCVNFNFNGLTGTGVLTESNKKFLPFQQFGRDIADTTDAVRDPQTLEILDITPCSFGGVSVITPGTNTSNQVAVLYQDVNCTEVPVAIHADQLTPTWRVYSTGSNVFQTRAGCLIGAEHVNNSYECDIPIGAGICASYQTQTNSPRRARSVASQSIIAYTMSLGAENSVAYSNNSIAICTNFTISVTTEILPVSMTKTSVDCTMYICGDSTECSNLLLQYGSFCTQLNRALTGIAVEQDKNTQEVFAQVKQIYKTPPIKDFGGFNFSQILPDPSKPSKRSFIEDLLFNKVTLADAGFIKQYGDCLGDIAARDLICAQKFNGLTVLPPLLTDEMIAQYTSALLAGTITSGWTFGAGAALQIPFAMQMAYRFNGIGVTQNVLYENQKLIANQFNSAIGKIQDSLSSTASALGKLQDVVNQNAQALNTLVKQLSSNFGAISSVLNDILSRLDKVEAEVQIDRLITGRLQSLQTYVTQQLIRAAEIRASANLAATKMSECVLGQSKRVDFCGKGYHLMSFPQSAPHGVVFLHVTYVCAQEKNFTTAPAICHDGKAHFPREGVFVSNGTHWFVTQRNFYEPQIITTDNTFVSGNCDVVIGIVNNTVYDPLQPELESFKEELDKYFKNHTSPDVDLGDISGINASVVNIQKEIDRLNEVAKNLNESLIDLQELGKYEQYIKWPWYIWLGFIAGLIAIVMVTIMLCCMTSCCSCLKGCCSCGSCCKFDEDDSEPVLKGVKLHYT

SEQ ID NO: 781 - protein, 1273 aa, Artificial Sequence
  SARS-CoV-2/2019-nCoV/USA-CruiseA-18/2020__MT159716.1 spike protein (1-1273)(P715C_P1069C)
MFVFLVLLPLVSSQCVNLTTRTQLPPAYTNSFTRGVYYPDKVFRSSVLHSTQDLFLPFFSNVTWFHAIHVSGTNGTKRFDNPVLPFNDGVYFASTEKSNIIRGWIFGTTLDSKTQSLLIVNNATNVVIKVCEFQFCNDPFLGVYYHKNNKSWMESELRVYSSANNCTFEYVSQPFLMDLEGKQGNFKNLREFVFKNIDGYFKIYSKHTPINLVRDLPQGFSALEPLVDLPIGINITRFQTLLALHRSYLTPGDSSSGWTAGAAAYYVGYLQPRTFLLKYNENGTITDAVDCALDPLSETKCTLKSFTVEKGIYQTSNFRVQPTESIVRFPNITNLCPFGEVFNATRFASVYAWNRKRISNCVADYSVLYNSASFSTFKCYGVSPTKLNDLCFTNVYADSFVIRGDEVRQIAPGQTGKIADYNYKLPDDFTGCVIAWNSNNLDSKVGGNYNYLYRLFRKSNLKPFERDISTEIYQAGSTPCNGVEGFNCYFPLQSYGFQPTNGVGYQPYRVVVLSFELLHAPATVCGPKKSTNLVKNKCVNFNFNGLTGTGVLTESNKKFLPFQQFGRDIADTTDAVRDPQTLEILDITPCSFGGVSVITPGTNTSNQVAVLYQDVNCTEVPVAIHADQLTPTWRVYSTGSNVFQTRAGCLIGAEHVNNSYECDIPIGAGICASYQTQTNSPRRARSVASQSIIAYTMSLGAENSVAYSNNSIAICTNFTISVTTEILPVSMTKTSVDCTMYICGDSTECSNLLLQYGSFCTQLNRALTGIAVEQDKNTQEVFAQVKQIYKTPPIKDFGGFNFSQILPDPSKPSKRSFIEDLLFNKVTLADAGFIKQYGDCLGDIAARDLICAQKFNGLTVLPPLLTDEMIAQYTSALLAGTITSGWTFGAGAALQIPFAMQMAYRFNGIGVTQNVLYENQKLIANQFNSAIGKIQDSLSSTASALGKLQDVVNQNAQALNTLVKQLSSNFGAISSVLNDILSRLDKVEAEVQIDRLITGRLQSLQTYVTQQLIRAAEIRASANLAATKMSECVLGQSKRVDFCGKGYHLMSFPQSAPHGVVFLHVTYVCAQEKNFTTAPAICHDGKAHFPREGVFVSNGTHWFVTQRNFYEPQIITTDNTFVSGNCDVVIGIVNNTVYDPLQPELDSFKEELDKYFKNHTSPDVDLGDISGINASVVNIQKEIDRLNEVAKNLNESLIDLQELGKYEQYIKWPWYIWLGFIAGLIAIVMVTIMLCCMTSCCSCLKGCCSCGSCCKFDEDDSEPVLKGVKLHYT

SEQ ID NO: 782 - protein, 1273 aa, Artificial Sequence
  SARS-CoV-2/SARS-CoV-2/Yunnan-01/human/2020/CHN__MT049951.1 spike protein (1-1273)(P715C_P1069C)
MFVFLVLLPLVSSQCVNLTTRTQLPPANTNSFTRGVYYPDKVFRSSVLHSTQDLFLPFFSNVTWFHAIHVSGTNGTKRFDNPVLPFNDGVYFASTEKSNIIRGWIFGTTLDSKTQSLLIVNNATNVVIKVCEFQFCNDPFLGVYYHKNNKSWMESEFRVYSSANNCTFEYVSQPFLMDLEGKQGNFKNLREFVFKNIDGYFKIYSKHTPINLVRDLPQGFSALEPLVDLPIGINITRFQTLLALHRSYLTPGDSSSGWTAGAAAYYVGYLQPRTFLLKYNENGTITDAVDCALDPLSETKCTLKSFTVEKGIYQTSNFRVQPTESIVRFPNITNLCPFGEVFNATRFASVYAWNRKRISNCVADYSVLYNSASFSTFKCYGVSPTKLNDLCFTNVYADSFVIRGDEVRQIAPGQTGKIADYNYKLPDDFTGCVIAWNSNNLDSKVGGNYNYLYRLFRKSNLKPFERDISTEIYQAGSTPCNGVEGFNCYFPLQSYGFQPTNGVGYQPYRVVVLSFELLHAPATVCGPKKSTNLVKNKCVNFNFNGLTGTGVLTESNKKFLPFQQFGRDIADTTDAVRDPQTLEILDITPCSFGGVSVITPGTNTSNQVAVLYQDVNCTEVPVAIHADQLTPTWRVYSTGSNVFQTRAGCLIGAEHVNNSYECDIPIGAGICASYQTQTNSPRRARSVASQSIIAYTMSLGAENSVAYSNNSIAICTNFTISVTTEILPVSMTKTSVDCTMYICGDSTECSNLLLQYGSFCTQLNRALTGIAVEQDKNTQEVFAQVKQIYKTPPIKDFGGFNFSQILPDPSKPSKRSFIEDLLFNKVTLADAGFIKQYGDCLGDIAARDLICAQKFNGLTVLPPLLTDEMIAQYTSALLAGTITSGWTFGAGAALQIPFAMQMAYRFNGIGVTQNVLYENQKLIANQFNSAIGKIQDSLSSTASALGKLQDVVNQNAQALNTLVKQLSSNFGAISSVLNDILSRLDKVEAEVQIDRLITGRLQSLQTYVTQQLIRAAEIRASANLAATKMSECVLGQSKRVDFCGKGYHLMSFPQSAPHGVVFLHVTYVCAQEKNFTTAPAICHDGKAHFPREGVFVSNGTHWFVTQRNFYEPQIITTDNTFVSGNCDVVIGIVNNTVYDPLQPELDSFKEELDKYFKNHTSPDVDLGDISGINASVVNIQKEIDRLNEVAKNLNESLIDLQELGKYEQYIKWPWYIWLGFIAGLIAIVMVTIMLCCMTSCCSCLKGCCSCGSCCKFDEDDSEPVLKGVKLHYT

SEQ ID NO: 783 - protein, 1273 aa, Artificial Sequence
  SARS-CoV-2/USA/WA-UW292/2020__EPI_ISL_418077 spike protein (1-1273)(P715C_P1069C)
MFVFLVLLPLVSSQCVNLTTRTQLPPAYTNSFTRGVYYPDKVFRSSVLHSTQDLFLPFFSNVTWFHAIHVSGTNGTKRFDNPVLPFNDGVYFASTEKSNIIRGWIFGTTLDSKTQSLLIVNNATNVVIKVCEFQFCNDPFLGVYYHKNNKSWMESEFRVYSSANNCTFEYVSQPFLMDLEGKQGNFKNLREFVFKNIDGYFKIYSKHTPINLVRDLPQGFSALEPLVDLPIGINITRFQTLLALHRSYLTPGDSSSGWTAGAAAYYVGYLQPRTFLLKYNENGTITDAVDCALDPLSETKCTLKSFTVEKGIYQTSNFRVQPTESIVRFPNITNLCPFGEVFNATRFASVYAWNRKRISNCVADYSVLYNSASFSTFKCYGVSPTKLNDLCFTNVYADSFVIRGDEVRQIAPGQTGKIADYNYKLPDDFTGCVIAWNSNNLDSKVGGNYNYLYRLFRKSNLKPFERDISTEIYQASSTPCNGVEGFNCYFPLQSYGFQPTNGVGYQPYRVVVLSFELLHAPATVCGPKKSTNLVKNKCVNFNFNGLTGTGVLTESNKKFLPFQQFGRDIADTTDAVRDPQTLEILDITPCSFGGVSVITPGTNTSNQVAVLYQDVNCTEVPVAIHADQLTPTWRVYSTGSNVFQTRAGCLIGAEHVNNSYECDIPIGAGICASYQTQTNSPRRARSVASQSIIAYTMSLGAENSVAYSNNSIAICTNFTISVTTEILPVSMTKTSVDCTMYICGDSTECSNLLLQYGSFCTQLNRALTGIAVEQDKNTQEVFAQVKQIYKTPPIKDFGGFNFSQILPDPSKPSKRSFIEDLLFNKVTLADAGFIKQYGDCLGDIAARDLICAQKFNGLTVLPPLLTDEMIAQYTSALLAGTITSGWTFGAGAALQIPFAMQMAYRFNGIGVTQNVLYENQKLIANQFNSAIGKIQDSLSSTASALGKLQDVVNQNAQALNTLVKQLSSNFGAISSVLNDILSRLDKVEAEVQIDRLITGRLQSLQTYVTQQLIRAAEIRASANLAATKMSECVLGQSKRVDFCGKGYHLMSFPQSAPHGVVFLHVTYVCAQEKNFTTAPAICHDGKAHFPREGVFVSNGTHWFVTQRNFYEPQIITTDNTFVSGNCDVVIGIVNNTVYDPLQPELDSFKEELDKYFKNHTSPDVDLGDISGINASVVNIQKEIDRLNEVAKNLNESLIDLQELGKYEQYIKWPWYIWLGFIAGLIAIVMVTIMLCCMTSCCSCLKGCCSCGSCCKFDEDDSEPVLKGVKLHYT

SEQ ID NO: 784 - protein, 1273 aa, Artificial Sequence
  SARS-CoV-2/Iceland/192/2020__EPI_ISL_417819 spike protein (1-1273)(P715C_P1069C)
MFVFFVLLPLVSSQCVNLTTRTQLPPAYTNSFTRGVYYPDKVFRSSVLHSTQDLFLPFFSNVTWFHAIHVSGTNGTKRFDNPVLPFNDGVYFASTEKSNIIRGWIFGTTLDSKTQSLLIVNNATNVVIKVCEFQFCNDPFLGVYYHKNNKSWMESEFRVYSSANNCTFEYVSQPFLMDLEGKQGNFKNLREFVFKNIDGYFKIYSKHTPINLVRDLPQGFSALEPLVDLPIGINITRFQTLLALHRSYLTPGDSSSGWTAGAAAYYVGYLQPRTFLLKYNENGTITDAVDCALDPLSETKCTLKSFTVEKGIYQTSNFRVQPTESIVRFPNITNLCPFGEVFNATRFASVYAWNRKRISNCVADYSVLYNSASFSTFKCYGVSPTKLNDLCFTNVYADSFVIRGDEVRQIAPGQTGKIADYNYKLPDDFTGCVIAWNSNNLDSKVGGNYNYLYRLFRKSNLKPFERDISTEIYQAGSTPCNGVEGFNCYFPLQSYGFQPTNGVGYQPYRVVVLSFELLHAPATVCGPKKSTNLVKNKCVNFNFNGLTGTGVLTESNKKFLPFQQFGRDIADTTDAVRDPQTLEILDITPCSFGGVSVITPGTNTSNQVAVLYQGVNCTEVPVAIHADQLTPTWRVYSTGSNVFQTRAGCLIGAEHVNNSYECDIPIGAGICASYQTQTNSPRRARSVASQSIIAYTMSLGAENSVAYSNNSIAICTNFTISVTTEILPVSMTKTSVDCTMYICGDSTECSNLLLQYGSFCTQLNRALTGIAVEQDKNTQEVFAQVKQIYKTPPIKDFGGFNFSQILPDPSKPSKRSFIEDLLFNKVTLADAGFIKQYGDCLGDIAARDLICAQKFNGLTVLPPLLTDEMIAQYTSALLAGTITSGWTFGAGAALQIPFAMQMAYRFNGIGVTQNVLYENQKLIANQFNSAIGKIQDSLSSTASALGKLQDVVNQNAQALNTLVKQLSSNFGAISSVLNDILSRLDKVEAEVQIDRLITGRLQSLQTYVTQQLIRAAEIRASANLAATKMSECVLGQSKRVDFCGKGYHLMSFPQSAPHGVVFLHVTYVCAQEKNFTTAPAICHDGKAHFPREGVFVSNGTHWFVTQRNFYEPQIITTDNTFVSGNCDVVIGIVNNTVYDPLQPELDSFKEELDKYFKNHTSPDVDLGDISGINASVVNIQKEIDRLNEVAKNLNESLIDLQELGKYEQYIKWPWYIWLGFIAGLIAIVMVTIMLCCMTSCCSCLKGCCSCGSCCKFDEDDSEPVLKGVKLHYT

SEQ ID NO: 785 - protein, 1273 aa, Artificial Sequence
  SARS-CoV-2/Belgium/ULG-6939/2020__EPI_ISL_417020 spike protein (1-1273)(P715C_P1069C)
MFVFLVLLPLVSSQCVNLTTRTQLPPAYTNSFTRGVYYPDKVFRSSVLHSTQDLFLPFFSNVTWFHAIHVSGTNGTKRFDNPVLPFNDGVYFASTEKSNIIRGWIFGTTLDSKTQSLLIVNNATNVVIKVCEFQFCNDPFLGVYYHKNNKSWMESEFRVYSSANNCTFEYVSQPFLMDLEGKQGNFKNLREFVFKNIDGYFKIYSKHTPINLVRDLPQGFSALEPLVDLPIGINITRFQTLLALHRSYLTPGDSSSGWTAGAAAYYVGYLQPRTFLLKYNENGTITDAVDCALDPLSETKCTLKSFTVEKGIYQTSNFRVQPTESIVRFPNITNLCPFGEVFNATRFASVYAWNRKRISNCVADYSVLYNSASFSTFKCYGVSPTKLNDLCFTNVYADSFVIRGDEVRQIAPGQTGKIADYNYKLPDDFTGCVIAWNSNNLDSKVGGNYNYLYRLFRKSNLKPFERDISTEIYQAGSTPCNGVEGFNCYFPLQSYGFQPTNGVGYQPYRVVVLSFELLHAPATVCGPKKSTNLVKNKCVNFNFNGLTGTGVLTESNKKFLPFQQFGRDIADTTDAVRDPQTLEILDITPCSFGGVSVITPGTNTSNQVAVLYQGVNCTEVPVAIHADQLTPTWRVYSTGSNVFQTRAGCLIGAEHVNNSYECDIPIGAGICASYQTQTNSPRRARSVASQSIIAYTMSLGAENSVVYSNNSIAICTNFTISVTTEILPVSMTKTSVDCTMYICGDSTECSNLLLQYGSFCTQLNRALTGIAVEQDKNTQEVFAQVKQIYKTPPIKDFGGFNFSQILPDPSKPSKRSFIEDLLFNKVTLADAGFIKQYGDCLGDIAARDLICAQKFNGLTVLPPLLTDEMIAQYTSALLAGTITSGWTFGAGAALQIPFAMQMAYRFNGIGVTQNVLYENQKLIANQFNSAIGKIQDSLSSTASALGKLQDVVNQNAQALNTLVKQLSSNFGAISSVLNDILSRLDKVEAEVQIDRLITGRLQSLQTYVTQQLIRAAEIRASANLAATKMSECVLGQSKRVDFCGKGYHLMSFPQSAPHGVVFLHVTYVCAQEKNFTTAPAICHDGKAHFPREGVFVSNGTHWFVTQRNFYEPQIITTDNTFVSGNCDVVIGIVNNTVYDPLQPELDSFKEELDKYFKNHTSPDVDLGDISGINASVVNIQKEIDRLNEVAKNLNESLIDLQELGKYEQYIKWPWYIWLGFIAGLIAIVMVTIMLCCMTSCCSCLKGCCSCGSCCKFDEDDSEPVLKGVKLHYT

SEQ ID NO: 786 - protein, 1273 aa, Artificial Sequence
  SARS-CoV-2/France/HF2496/2020__EPI_ISL_418231 spike protein (1-1273)(P715C_P1069C)
MFVFLVLLPLVSSQCVNLTTRTQLPPAYTNSFTRGVYYPDKVFRSSVLHSTQDLFLPFFSNVTWFHAIHVSGTNGTKRFDNPVLPFNDGVYFASTEKSNIIRGWIFGTTLDSKTQSLLIVNNATNVVIKVCEFQFCNDPFLGVYYHKNNKSWMESEFRVYSSANNCTFEYVSQPFLMDLEGKQGNFKNLREFVFKNIDGYFKIYSKHTPINLVRDLPQGFSALEPLVDLPIGINITRFQTLLALHRSYLTPGDSSSGWTAGAAAYYVGYLQPRTFLLKYNENGTITDAVDCALDPLSETKCTLKSFTVEKGIYQTSNFRVQPTESIVRFPNITNLCPFGEVFNATRFASVYAWNRKRISNCVADYSVLYNSASFSTFKCYGVSPTKLNDLCFTNVYADSFVIRGDEVRQIAPGQTGKIADYNYKLPDDFTGCVIAWNSNNLDSKVGGNYNYLYRLFRKSNLKPFERDISTEIYQAGSTPCNGVEGFNCYFPLQSYGFQPTNGVGYQPYRVVVLSFELLHAPATVCGPKKSTNLVKNKCVNFNFNGLTGTGVLTESNKKFLPFQQFGRDIADTTDAVRDPQTLEILDITPCSFGGVSVITPGTNTSNQVAVLYQGVNCTEVPVAIHADQLTPTWRVYSTGSNVFQTRAGCLIGAEHVNNSYECDIPIGAGICASYQTQTNSPRRARSVASQSIIAYTMSLGAENSVAYSNNSIAICTNFTISVTTEILPVSMTKTSVDCTMYICGDSTECSNLLLQYGSFCTQLNRALTGIAVEQDKNTQEVFAQVKQIYKTPPIKDFGGFNFSQILPDPSKPSKRSFIEDLLFNKVTLADAGFIKQYGDCLGDIVARDLICAQKFNGLTVLPPLLTDEMIAQYTSALLAGTITSGWTFGAGAALQIPFAMQMAYRFNGIGVTQNVLYENQKLIANQFNSAIGKIQDSLSSTASALGKLQDVVNQNAQALNTLVKQLSSNFGAISSVLNDILSRLDKVEAEVQIDRLITGRLQSLQTYVTQQLIRAAEIRASANLAATKMSECVLGQSKRVDFCGKGYHLMSFPQSAPHGVVFLHVTYVCAQEKNFTTAPAICHDGKAHFPREGVFVSNGTHWFVTQRNFYEPQIITTDNTFVSGNCDVVIGIVNNTVYDPLQPELDSFKEELDKYFKNHTSPDVDLGDISGINASVVNIQKEIDRLNEVAKNLNESLIDLQELGKYEQYIKWPWYIWLGFIAGLIAIVMVTIMLCCMTSCCSCLKGCCSCGSCCKFDEDDSEPVLKGVKLHYT

SEQ ID NO: 787 - protein, 1273 aa, Artificial Sequence
  SARS-CoV-2/USA/WA-UW291/2020__EPI_ISL_418076 spike protein (1-1273)(P715C_P1069C)
MFVFLVLLPLVSSQCVNLTTRTQLPPAYTNSFTRGVYYPDKVFRSSVLHSTQDLFLPFFSNVTWFHAIHVSGTNGTKRFDNPVLPFNDGVYFASTEKSNIIRGWIFGTTLDSKTQSLLIVNNATNVVIKVCEFQFCNDPFLGVYYHKNNKSWMESEFRVYSSANNCTFEYVSQPFLMDLEGKQGNFKNLREFVFKNIDGYFKIYSKHTPINLVRDLPQGFSALEPLVDLPIGINITRFQTLLALHRSYLTPGDSSSGWTAGAAAYYVGYLQPRTFLLKYNENGTITDAVDCALDPLSETKCTLKSFTVEKGIYQTSNFRVQPTESIVRFPNITNLCPFGEVFNATRFASVYAWNRKRISNCVADYSVLYNSASFSTFKCYGVSPTKLNDLCFTNVYADSFVIRGDEVRQIAPGQTGKIADYNYKLPDDFTGCVIAWNSNNLDSKVGGNYNYLYRLFRKSNLKPFERDISTEIYQAGSTPCNGVEGFNCYFPLQSYGFQPTNGVGYQPYRVVVLSFELLHAPATVCGPKKSTNLVKNKCVNFNFNGLTGTGVLTESNKKFLPFQQFGRDIADTTDAVRDPQTLEILDITPCSFGGVSVITPGTNTSNQVAVLYQGVNCTEVPVAIHADQLTPTWRVYSTGSNVFQTRAGCLIGAEHVNNSYECDIPIGAGICASYQTQTNSPRRARSVASQSIIAYTMSLGAENSVAYSNNSIAICTNFTISVTTEILPVSMTKTSVDCTMYICGDSTECSNLLLQYGSFCTQLNRALTGIAVEQDKNTQEVFAQVKQIYKTPPIKDFGGFNFSQILPDPSKPSKRSFIEDLLFNKVTLADAGFIKQYGDCLGDIAARDLICAQKFNGLTVLPPLLTDEMIAQYTSALLAGTITSGWTFGAGAALQIPFAMQMAYRFNGIGVTQNVLYENQKLIANQFNSAIGKIQYSLSSTASALGKLQDVVNQNAQALNTLVKQLSSNFGAISSVLNDILSRLDKVEAEVQIDRLITGRLQSLQTYVTQQLIRAAEIRASANLAATKMSECVLGQSKRVDFCGKGYHLMSFPQSAPHGVVFLHVTYVCAQEKNFTTAPAICHDGKAHFPREGVFVSNGTHWFVTQRNFYEPQIITTDNTFVSGNCDVVIGIVNNTVYDPLQPELDSFKEELDKYFKNHTSPDVDLGDISGINASVVNIQKEIDRLNEVAKNLNESLIDLQELGKYEQYIKWPWYIWLGFIAGLIAIVMVTIMLCCMTSCCSCLKGCCSCGSCCKFDEDDSEPVLKGVKLHYT

SEQ ID NO: 788 - protein, 1273 aa, Artificial Sequence
  SARS-CoV-2/Portugal/PT0034/2020__EPI_ISL_418019 spike protein (1-1273)(P715C_P1069C)
MFVFLVLLPLVSSQCVNLTTRTQLPPAYTNSFTRGVYYPDKVFRSSVLHSTQDLFLPFFSNVTWFHAIHVSGTNGTKRFDNPVLPFNDGVYFASTEKSNIIRGWIFGTTLDSKTQSLLIVNNATNVVIKVCEFQFCNDPFLGVYYHKNNKSWMESEFRVYSSANNCTFEYVSQPFLMDLEGKQGNFKNLREFVFKNIDGYFKIYSKHTPINLVRDLPQGFSALEPLVDLPIGINITRFQTLLALHRSYLTPGDSSSGWTAGAAAYYVGYLQPRTFLLKYNENGTITDAVDCALDPLSETKCTLKSFTVEKGIYQTSNFRVQPTESIVRFPNITNLCPFGEVFNATRFASVYAWNRKRISNCVADYSVLYNSASFSTFKCYGVSPTKLNDLCFTNVYADSFVIRGDEVRQIAPGQTGKIADYNYKLPDDFTGCVIAWNSNNLDSKVGGNYNYLYRLFRKSNLKPFERDISTEIYQAGSTPCNGVEGFNCYFPLQSYGFQPTNGVGYQPYRVVVLSFELLHAPATVCGPKKSTNLVKNKCVNFNFNGLTGTGVLTESNKKFLPFQQFGRDIADTTDAVRDPQTLEILDITPCSFGGVSVITPGTNTSNQVAVLYQGVNCTEVPVAIHADQLTPTWRVYSTGSNVFQTRAGCLIGAEHVNNSYECDIPIGAGICASYQTQTNSPRRARSVASQSIIAYTMSLGAENSVAYSNNSIAICTNFTISVTTEILPVSMTKTSVDCTMYICGDSTECSNLLLQYGSFCTQLNRALTGIAVEQDKNTQEVFAQVKQIYKTPPIKDFGGFNFSQILPDPSKPSKRSFIEDLLFNKVTLADAGFIKQYGDCLGDIAARDLICAQKFNGLTVLPPLLTDEMIAQYTSALLAGTITSGWTFGAGAALQIPFAMQMAYRFNGIGVTQNVLYENQKLIANQFNSAIGKIQDSLSSTASALGKLQDVVNQNAQALNTLVKQLSSNFGAISSVLNDILSRLDKVEAEVQIDRLITGRLQSLQTYVTQQLIRAAEIRASANLAATKMSECVLGQSKRVDFCGKGYHLMSFPQSAPHGVVFLHVTYVCAQEKNFTTAPAICHDGKAHFPREGVFVSNGTHWFVTQRNFYEPQIITTDNTFVSGNCDVVIGIVNNTVYDPLQPELDSFKEELDKYFKNHTSPDVDLGDISGINASVVNIQKEIDRLNEVAKNLNESLIDLQELGKYEQYIKWPWYIWLGFIAGLIAIVMVTIMLCCITSCCSCLKGCCSCGSCCKFDEDDSEPVLKGVKLHYT

SEQ ID NO: 789 - protein, 1273 aa, Artificial Sequence
  SARS-CoV-2/Iceland/202/2020__EPI_ISL_417750 spike protein (1-1273)(P715C_P1069C)
MFVFLVLLPLVSSQCVNLTTRTQLPPAYTNSFTRGVYYPDKVFRSSVLHSTQDLFLPFFSNVTWFHAIHVSGTNGTKRFDNPVLPFNDGVYFASTEKSNIIRGWIFGTTLDSKTQSLLIVNNATNVVIKVCEFQFCNDPFLGVYYHKNNKSWMESEFRVYSSANNCTFEYVSQPFLMDLEGKQGNFKNLREFVFKNIDGYFKIYSKHTPINLVRDLPQGFSALEPLVDLPIGINITRFQTLLALHRSYLTPGDSSSGWTAGAAAYYVGYLQPRTFLLKYNENGTITDAVDCALDPLSETKCTLKSFTVEKGIYQTSNFRVQPTESIVRFPNITNLCPFGEVFNATRFASVYAWNRKRISNCVADYSVLYNSASFSTFKCYGVSPTKLNDLCFTNVYADSFVIRGDEVRQIAPGQTGKIADYNYKLPDDFTGCVIAWNSNNLDSKVGGNYNYLYRLFRKSNLKPFERDISTEIYQAGSTPCNGVEGFNCYFPLQSYGFQPTNGVGYQPYRVVVLSFELLHAPATVCGPKKSTNLVKNKCVNFNFNGLTGTGVLTESNKKFLPFQQFGRDIADTTDAVRDPQTLEILDITPCSFGGVSVITPGTNTSNQVAVLYQDVNCTEVPVAIHADQLTPTWRVYSTGSNVFQTRAGCLIGAEHVNNSYECDIPIGAGICASYQTQTNSPRRARSVASQSIIAYTMSLGAENSVAYSNNSIAICTNFTISVTTEILPVSMTKTSVDCTMYICGDSTECSNLLLQYGSFCTQLNRALTGIAVEQDKNTQEVFAQVKQIYKTPPIKDFGGFNFSQILPDPSKPSKRSFIEDLLFNKVTLADAGFIKQYGDCLGDIAARDLICAQKFNGLTVLPPLLTDEMIAQYTSALLAGTITSGWTFGAGAALQIPFAMQMAYRFNGIGVTQNVLYENQKLIANQFNSAIGKIQDSLSSTASALGKLQDVVNQNAQALNTLVKQLSSNFGAISSVLNDILSRLDKVEAEVQIDRLITGRLQSLQTYVTQQLIRAAEIRASANLAATKMSECVLGQSKRVDFCGKGYHLMSFPQSAPHGVVFLHVTYVCAQEKNFTTAPAICHDGKAHFPREGVFVSNGTHWFVTQRNFYEPQIITTDNTFVSGNCDVVIGIVNNTVYDPLQPELDSFKEELDKYFKNHTSPDVDLGDIPGINASVVNIQKEIDRLNEVAKNLNESLIDLQELGKYEQYIKWPWYIWLGFIAGLIAIVMVTIMLCCMTSCCSCLKGCCSCGSCCKFDEDDSEPVLKGVKLHYT

SEQ ID NO: 790 - protein, 1273 aa, Artificial Sequence
  SARS-CoV-2/USA/WA-UW261/2020__EPI_ISL_418046 spike protein (1-1273)(P715C_P1069C)
MFVFLVLLPLVSSQCVNLTTRTQLPPAYTNSFTRGVYYPDKVFRSSVLHSTQDLFLPFFSNVTWFHAIHVSGTNGTKRFDNPVLPFNDGVYFASTEKSNIIRGWIFGTTLDSKTQSLLIVNNATNVVIKVCEFQFCNDPFLGVYYHKNNKSWMESEFRVYSSANNCTFEYVSQPFLMDLEGKQGNFKNLREFVFKNIDGYFKIYSKHTPINLVRDLPQGFSALEPLVDLPIGINITRFQTLLALHRSYLTPGDSSSGWTAGAAAYYVGYLQPRTFLLKYNENGTITDAVDCALDPLSETKCTLKSFTVEKGIYQTSNFRVQPTESIVRFPNITNLCPFGEVFNATRFTSVYAWNRKRISNCVADYSVLYNSASFSTFKCYGVSPTKLNDLCFTNVYADSFVIRGDEVRQIAPGQTGKIADYNYKLPDDFTGCVIAWNSNNLDSKVGGNYNYLYRLFRKSNLKPFERDISTEIYQAGSTPCNGVEGFNCYFPLQSYGFQPTNGVGYQPYRVVVLSFELLHAPATVCGPKKSTNLVKNKCVNFNFNGLTGTGVLTESNKKFLPFQQFGRDIADTTDAVRDPQTLEILDITPCSFGGVSVITPGTNTSNQVAVLYQDVNCTEVPVAIHADQLTPTWRVYSTGSNVFQTRAGCLIGAEHVNNSYECDIPIGAGICASYQTQTNSPRRARSVASQSIIAYTMSLGAENSVAYSNNSIAICTNFTISVTTEILPVSMTKTSVDCTMYICGDSTECSNLLLQYGSFCTQLNRALTGIAVEQDKNTQEVFAQVKQIYKTPPIKDFGGFNFSQILPDPSKPSKRSFIEDLLFNKVTLADAGFIKQYGDCLGDIAARDLICAQKFNGLTVLPPLLTDEMIAQYTSALLAGTITSGWTFGAGAALQIPFAMQMAYRFNGIGVTQNVLYENQKLIANQFNSAIGKIQDSLSSTASALGKLQDVVNQNAQALNTLVKQLSSNFGAISSVLNDILSRLDKVEAEVQIDRLITGRLQSLQTYVTQQLIRAAEIRASANLAATKMSECVLGQSKRVDFCGKGYHLMSFPQSAPHGVVFLHVTYVCAQEKNFTTAPAICHDGKAHFPREGVFVSNGTHWFVTQRNFYEPQIITTDNTFVSGNCDVVIGIVNNTVYDPLQPELDSFKEELDKYFKNHTSPDVDLGDISGINASVVNIQKEIDRLNEVAKNLNESLIDLQELGKYEQYIKWPWYIWLGFIAGLIAIVMVTIMLCCMTSCCSCLKGCCSCGSCCKFDEDDSEPVLKGVKLHYT

SEQ ID NO: 791 - protein, 1273 aa, Artificial Sequence
  SARS-CoV-2/Portugal/PT0035/2020__EPI_ISL_418020 spike protein (1-1273)(P715C_P1069C)
MFVFLVLLPLVSSQCVNLTTRTQLPPAYTNSFTRGVYYPDKVFRSSVLHSTQDLFLPFFSNVTWFHAIHVSGTNGTKRFDNPVLPFNDGVYFASTEKSNIIRGWIFGTTLDSKTQSLLIVNNATNVVIKVCEFQFCNDPFLGVYYHKNNKSWMESEFRVYSSANNCTFEYVSQPFLMDLEGKQGNFKNLREFVFKNIDGYFKIYSKHTPINLVRDLPQGFSALEPLVDLPIGINITRFQTLLALHRSYLTPGDSSSGWTAGAAAYYVGYLQPRTFLLKYNENGTITDAVDCALDPLSETKCTLKSFTVEKGIYQTSNFRVQPTESIVRFPNITNLCPFGEVFNATRFASVYAWNRKRISNCVADYSVLYNSASFSTFKCYGVSPTKLNDLCFTNVYADSFVIRGDEVRQIAPGQTGKIADYNYKLPDDFTGCVIAWNSNNLDSKVGGNYNYLYRLFRKSNLKPFERDISTEIYQAGSTPCNGVEGFNCYFPLQSYGFQPTNGVGYQPYRVVVLSFELLHAPATVCGPKKSTNLVKNKCVNFNFNGLTGTGVLTESNKKFLPFQQFGRDIADTTDAVRDPQTLEILDITPCSFGGVSVITPGTNTSNQVAVLYQDVNCTEVPVAIHADQLTPTWRVYSTGSNVFQTRAGCLIGAEHVNNSYECDIPIGAGICASYQTQTNSPRRARSVASQSIIAYTMSLGAENSVAYSNNSIAICTNFTISVTTEILPVSMTKTSVDCTMYICGDSTECSNLLLQYGSFCTQLNRALTGIAVEQDKNTQEVFAQVKQIYKTPPIKDFGGFNFSQILPDPSKPSKRSFIEDLLFNKVTLADAGFIKQYGDCLGDISARDLICAQKFNGLTVLPPLLTDEMIAQYTSALLAGTITSGWTFGAGAALQIPFAMQMAYRFNGIGVTQNVLYENQKLIANQFNSAIGKIQDSLSSTASALGKLQDVVNQNAQALNTLVKQLSSNFGAISSVLNDILSRLDKVEAEVQIDRLITGRLQSLQTYVTQQLIRAAEIRASANLAATKMSECVLGQSKRVDFCGKGYHLMSFPQSAPHGVVFLHVTYVCAQEKNFTTAPAICHDGKAHFPREGVFVSNGTHWFVTQRNFYEPQIITTDNTFVSGNCDVVIGIVNNTVYDPLQPELDSFKEELDKYFKNHTSPDVDLGDISGINASVVNIQKEIDRLNEVAKNLNESLIDLQELGKYEQYIKWPWYIWLGFIAGLIAIVMVTIMLCCMTSCCSCLKGCCSCGSCCKFDEDDSEPVLKGVKLHYT

SEQ ID NO: 792 - protein, 1273 aa, Artificial Sequence
  SARS-CoV-2/USA/NY-NYUMC7/2020__EPI_ISL_418192 spike protein (1-1273)(P715C_P1069C)
MFVFLVLLPLVSSQCVNLTTRTQLPPAYTNSFTRGVYYPDKVFRSSVLHSTQDLFLPFFSNVTWFHAIHVSGTNGTKRFDNPVLPFNDGVYFASTEKSNIIRGWIFGTTLDSKTQSLLIVNNATNVVIKVCEFQFCNDPFLGVYHHKNNKSWMESEFRVYSSANNCTFEYVSQPFLMDLEGKQGNFKNLREFVFKNIDGYFKIYSKHTPINLVRDLPQGFSALEPLVDLPIGINITRFQTLLALHRSYLTPGDSSSGWTAGAAAYYVGYLQPRTFLLKYNENGTITDAVDCALDPLSETKCTLKSFTVEKGIYQTSNFRVQPTESIVRFPNITNLCPFGEVFNATRFASVYAWNRKRISNCVADYSVLYNSASFSTFKCYGVSPTKLNDLCFTNVYADSFVIRGDEVRQIAPGQTGKIADYNYKLPDDFTGCVIAWNSNNLDSKVGGNYNYLYRLFRKSNLKPFERDISTEIYQAGSTPCNGVEGFNCYFPLQSYGFQPTNGVGYQPYRVVVLSFELLHAPATVCGPKKSTNLVKNKCVNFNFNGLTGTGVLTESNKKFLPFQQFGRDIADTTDAVRDPQTLEILDITPCSFGGVSVITPGTNTSNQVAVLYQGVNCTEVPVAIHADQLTPTWRVYSTGSNVFQTRAGCLIGAEHVNNSYECDIPIGAGICASYQTQTNSPRRARSVASQSIIAYTMSLGAENSVAYSNNSIAICTNFTISVTTEILPVSMTKTSVDCTMYICGDSTECSNLLLQYGSFCTQLNRALTGIAVEQDKNTQEVFAQVKQIYKTPPIKDFGGFNFSQILPDPSKPSKRSFIEDLLFNKVTLADAGFIKQYGDCLGDIAARDLICAQKFNGLTVLPPLLTDEMIAQYTSALLAGTITSGWTFGAGAALQIPFAMQMAYRFNGIGVTQNVLYENQKLIANQFNSAIGKIQDSLSSTASALGKLQDVVNQNAQALNTLVKQLSSNFGAISSVLNDILSRLDKVEAEVQIDRLITGRLQSLQTYVTQQLIRAAEIRASANLAATKMSECVLGQSKRVDFCGKGYHLMSFPQSAPHGVVFLHVTYVCAQEKNFTTAPAICHDGKAHFPREGVFVSNGTHWFVTQRNFYEPQIITTDNTFVSGNCDVVIGIVNNTVYDPLQPELDSFKEELDKYFKNHTSPDVDLGDISGINASVVNIQKEIDRLNEVAKNLNESLIDLQELGKYEQYIKWPWYIWLGFIAGLIAIVMVTIMLCCMTSCCSCLKGCCSCGSCCKFDEDDSEPVLKGVKLHYT

SEQ ID NO: 793 - protein, 1273 aa, Artificial Sequence
  SARS-CoV-2/Iceland/189/2020__EPI_ISL_417709 spike protein (1-1273)(P715C_P1069C)
MFVFLVLLPLVSSQCVNLTTRTQLPPAYTNSFTRGVYYPDKVFRSSVLHSTQDLFLPFFSNVTWFHAIHVSGTNGTKRFDNPVLPFNDGVYFASTEKSNIIRGWIFGTTLDSKTQSLLIVNNATNVVIKVCEFQFCNDPFLGVYYHKNNKSWMESEFRVYSSANNCTFEYVSQPFLMDLEGKQGNFKNLREFVFKNIDGYFKIYSKHTPINLVRDLPQGFSALEPLVDLPIGINITRFQTLLALHRSYLTPGDSSSGWTAGAAAYYVGYLQPRTFLLKYNENGTITDAVDCALDPLSETKCTLKSFTVEKGIYQTSNFRVQPTESIVRFPNITNLCPFGEVFNATRFASVYAWNRKRISNCVADYSVLYNSASFSTFKCYGVSPTKLNDLCFTNVYADSFVIRGDEVRQIAPGQTGKIADYNYKLPDDFTGCVIAWNSNNLDSKVGGNYNYLYRLFRKSNLKPFERDISTEIYQAGSTPCNGVEGFNCYFPLQSYGFQPTNGVGYQPYRVVVLSFELLHAPATVCGPKKSTNLVKNKCVNFNFNGLTGTGVLTESNKKFLPFQQFGRDIADTTDAVRDPQTLEILDITPCSFGGVSVITPGTNTSNQVAVLYQGVNCTEVPVAIHADQLTPTWRVYSTGSNVFQTRAGCLIGAEHVNNSYECDIPIGAGICASYQTQTNSPRRARSVASQSIIAYTMSLGAENSVAYSNNSIAICTNFTISVTTEILPVSMTKTSVDCTMYICGDSTECSNLLLQYGSFCTQLNRALTGIAVEQDKNTQEVFAQVKQIYKTPPIKDFGGFNFSQILPDPSKPSKRSFIEDLLFNKVTLADAGFTKQYGDCLGDIAARDLICAQKFNGLTVLPPLLTDEMIAQYTSALLAGTITSGWTFGAGAALQIPFAMQMAYRFNGIGVTQNVLYENQKLIANQFNSAIGKIQDSLSSTASALGKLQDVVNQNAQALNTLVKQLSSNFGAISSVLNDILSRLDKVEAEVQIDRLITGRLQSLQTYVTQQLIRAAEIRASANLAATKMSECVLGQSKRVDFCGKGYHLMSFPQSAPHGVVFLHVTYVCAQEKNFTTAPAICHDGKAHFPREGVFVSNGTHWFVTQRNFYEPQIITTDNTFVSGNCDVVIGIVNNTVYDPLQPELDSFKEELDKYFKNHTSPDVDLGDISGINASVVNIQKEIDRLNEVAKNLNESLIDLQELGKYEQYIKWPWYIWLGFIAGLIAIVMVTIMLCCMTSCCSCLKGCCSCGSCCKFDEDDSEPVLKGVKLHYT

SEQ ID NO: 794 - protein, 1273 aa, Artificial Sequence
  SARS-CoV-2/Australia/NSW56/2020__EPI_ISL_417408 spike protein (1-1273)(P715C_P1069C)
MFVFLVLLPLVSSQCVNLTTRTQLPPAYTNSFTRGVYYPDKVFRSSVLHSTQDLFLPFFSNVTWFHAIHVSGTNGTKRFDNPVLPFNDGVYFASTEKSNIIRGWIFGTTLDSKTQSLLIVNNATNVVIKVCEFQFCNDPFLGVYYHKNNKSWMESEFRVYSSANNCTFEYVSQPFLMDLEGKQGNFKNLREFVFKNIDGYFKIYSKHTPINLVRDLPQGFSALEPLVDLPIGINITRFQTLLALHRSYLTPGDSSSGWTAGAAAYYVGYLQPRTFLLKYNENGTITDAVDCALDPLSETKCTLKSFTVEKGIYQTSNFRVQPTESIVRFPNITNLCPFGEVFNATRFASVYAWNRKRISNCVADYSVLYNSASFSTFKCYGVSPTKLNDLCFTNVYADSFVIRGDEVRQIAPGQTGKIADYNYKLPDDFTGCVIAWNSNNLDSKVGGNYNYLYRLFRKSNLKPFERDISTEIYQAGSTPCNGVEGFNCYFPLQSYGFQPTNGVGYQPYRVVVLSFELLHAPATVCGPKKSTNLVKNKCVNFNFNGLTGTGVLTESNKKFLPFQQFGRDIADTTDAVRDPQTLEILDITPCSFGGVSVITPGTNTSNQVAVLYQDVNCTEVPVAIHADQLTPTWRVYSTGSNVFQTRAGCLIGAEHVNNSYECDIPIGAGICASYQTQTNSPRRARSVASQSIIAYTMSLGAENSVAYSNNSIAICTNFTISVTTEILPVSMTKTSVDCTMYICGDSTECSNLLLQYGSFCTQLNRALTGIAVEQDKNTQEVFAQVKQIYKTPPIKDFGGFNFSQILPDSSKPSKRSFIEDLLFNKVTLADAGFIKQYGDCLGDIAARDLICAQKFNGLTVLPPLLTDEMIAQYTSALLAGTITSGWTFGAGAALQIPFAMQMAYRFNGIGVTQNVLYENQKLIANQFNSAIGKIQDSLSSTASALGKLQDVVNQNAQALNTLVKQLSSNFGAISSVLNDILSRLDKVEAEVQIDRLITGRLQSLQTYVTQQLIRAAEIRASANLAATKMSECVLGQSKRVDFCGKGYHLMSFPQSAPHGVVFLHVTYVCAQEKNFTTAPAICHDGKAHFPREGVFVSNGTHWFVTQRNFYEPQIITTDNTFVSGNCDVVIGIVNNTVYDPLQPELDSFKEELDKYFKNHTSPDVDLGDISGINASVVNIQKEIDRLNEVAKNLNESLIDLQELGKYEQYIKWPWYIWLGFIAGLIAIVMVTIMLCCMTSCCSCLKGCCSCGSCCKFDEDDSEPVLKGVKLHYT

SEQ ID NO: 795 - protein, 1273 aa, Artificial Sequence
  SARS-CoV-2/Iceland/280/2020__EPI_ISL_417608 spike protein (1-1273)(P715C_P1069C)
MFVFLVLLPLVSSQCVNLTTRTQLPPAYTNSFTRGVYYPDKVFRSSVLHSTQDLFLPFFSNVTWFHAIHVSGTNGTKRFDNPVLPFNDGVYFASTEKSNIIRGWIFGTTLDSKTQSLLIVNNATNVVIKVCEFQFCNDPFLGVYYHKNNKSWMESEFRVYSSANNCTFEYVSQPFLMDLEGKQGNFKNLREFVFKNIDGYFKIYSKHTPINLVRDLPQGFSALEPLVDLPIGINITRFQTLLALHRSYLTPGDSSSGWTAGAAAYYVGYLQPRTFLLKYNENGTITDAVDCALDPLSETKCTLKSFTVEKGIYQTSNFRVQPTESIVRFPNITNLCPFGEVFNATRFASVYAWNRKRISNCVADYSVLYNSASFSTFKCYGVSPTKLNDLCFTNVYADSFVIRGDEVRQIAPGQTGKIADYNYKLPDDFTGCVIAWNSNNLDSKVGGNYNYLYRLFRKSNLKPFERDISTEIYQAGSTPCNGVEGFNCYFPLQSYGFQPTNGVGYQPYRVVVLSFELLHAPATVCGPKKSTNLVKNKCVNFNFNGLTGTGVLTESNKKFLPFQQFGRDIADTTDAVRDPQTLEILDITPCSFGGVSVITPGTNTSNQVAVLYQGVNCTEVPVAIHADQLTPTWRVYSTGSNVFQTRAGCLIGAEHVNNSYECDIPIGAGICASYHTQTNSPRRARSVASQSIIAYTMSLGAENSVAYSNNSIAICTNFTISVTTEILPVSMTKTSVDCTMYICGDSTECSNLLLQYGSFCTQLNRALTGIAVEQDKNTQEVFAQVKQIYKTPPIKDFGGFNFSQILPDPSKPSKRSFIEDLLFNKVTLADAGFIKQYGDCLGDIAARDLICAQKFNGLTVLPPLLTDEMIAQYTSALLAGTITSGWTFGAGAALQIPFAMQMAYRFNGIGVTQNVLYENQKLIANQFNSAIGKIQDSLSSTASALGKLQDVVNQNAQALNTLVKQLSSNFGAISSVLNDILSRLDKVEAEVQIDRLITGRLQSLQTYVTQQLIRAAEIRASANLAATKMSECVLGQSKRVDFCGKGYHLMSFPQSAPHGVVFLHVTYVCAQEKNFTTAPAICHDGKAHFPREGVFVSNGTHWFVTQRNFYEPQIITTDNTFVSGNCDVVIGIVNNTVYDPLQPELDSFKEELDKYFKNHTSPDVDLGDISGINASVVNIQKEIDRLNEVAKNLNESLIDLQELGKYEQYIKWPWYIWLGFIAGLIAIVMVTIMLCCMTSCCSCLKGCCSCGSCCKFDEDDSEPVLKGVKLHYT

SEQ ID NO: 796 - protein, 1273 aa, Artificial Sequence
  SARS-CoV-2/Iceland/247/2020__EPI_ISL_417575 spike protein (1-1273)(P715C_P1069C)
MFVFLVLLPLVSSQCVNLTTRTQLPPAYTNSFTRGVYYPDKVFRSSVLHSTQDLFLPFFSNVTWFHAIHVSGTNGTKRFDNPVLPFNDGVYFASTEKSNIIRGWIFGTTLDSKTQSLLIVNNATNVVIKVCEFQFCNDPFLGVYYHKNNKSWMESEFRVYSSANNCTFEYVSQPFLMDLEGKQGNFKNLREFVFKNIDGYFKIYSKHTPINLVRDLPQGFSALEPLVDLPIGINITRFQTLLALHRSYLTPGDSSSGWTAGAAAYYVGYLQPRTFLLKYNENGTITDAVDCALDPLSETKCTLKSFTVEKGIYQTSNFRVQPTESIVRFPNITNLCPFGEVFNATRFASVYAWNRKRISNCVADYSVLYNSASFSTFKCYGVSPTKLNDLCFTNVYADSFVIRGDEVRQIAPGQTGKIADYNYKLPDDFTGCVIAWNSNNLDSKVGGNYNYLYRLFRKSNLKPFERDISTEIYQAGSTPCNGVEGFNCYFPLQSYGFQPTNGVGYQPYRVVVLSFELLHAPATVCGPKKSTNLVKNKCVNFNFNGLTGTGVLTESNKKFLPFQQFGRDIADTTDAVRDPQTLEILDITPCSFGGVSVITPGTNTSNQVAVLYQGVNCTEVPVAIHADQLTPTWRVYSTGSNVFQTRAGCLIGAEHVNNSYECDIPIGAGICASYQTQTNSPRRARSVASQSIIAYTMSLGAENSVAYSNNSIAICTNFTISVTTEILPVSMTKTSVDCTMYICGDSTECSNLLLQYGSFCTQLNRALTGIAVEQDKNTQEVFAQVKQIYKTPPIKDFGGFNFSQILPDPSKPSKRSFIEDLLFNKVTLADAGFIKQYGDCLGDIAARDLICAQKFNGLTVLPPLLTDEMIAQYTSALLAGTITSGWTFGAGAALQIPFAMQMAYRFNGIGVTQNVLYENQKLIANQFNSAIGKIQDSLSSTASALGKLQDVVNQNAQALNTLVKQLSSNFGAISSVLNDILSRLDKVEAEVQIDRLITGRLQSLQTYVTQQLIRAAEIRASANLAATKMSECVLGQSKRVDFCGKGYHLMSFPQSAPHGVVFLHVTYVCAQEKNFTTAPAICHDGKAHFPREGVFVSNGTHWFVTQRNFYEPQIITTDNTFVSGNCDVVIGIVNNTVYDPLQPELDSFKEELDKYFKNHTSPDVDLGDISGINASVVNIQKEIDRLNEVAKNLNESLIDLQELGKYEQYIKWPWYIWLGFIAGLIAIVIVTIMLCCMTSCCSCLKGCCSCGSCCKFDEDDSEPVLKGVKLHYT

SEQ ID NO: 797 - protein, 1273 aa, Artificial Sequence
  SARS-CoV-2/Iceland/238/2020__EPI_ISL_417566 spike protein (1-1273)(P715C_P1069C)
MFVFLVLLPLVSSQCVNLTTRTQLPPAYTNSFTRGVYYPDKVFRSSVLHSTQDLFLPFFSNVTWFHAIHVSGTNGTKRFDNPVLPFNDGVYFASTEKSNIIRGWIFGTTLDSKTQSLLIVNNATNVVIKVCEFQFCNDPFLGVYYHKNNKSWMESEFRVYSSANNCTFEYVSQPFLMDLEGKQGNFKNLREFVFKNIDGYFKIYSKHTPINLVRDLPQGFSALEPLVDLPIGINITRFQTLLALHRSYLTPGDSSSGWTAGAAAYYVGYLQPRTFLLKYNENGTITDAVDCALDPLSETKCTLKSFTVEKGIYQTSNFRVQPTESIVRFPNITNLCPFGEVFNATRFASVYAWNRKRISNCVADYSVLYNSASFSTFKCYGVSPTKLNDLCFTNVYADSFVIRGDEVRQIAPGQTGKIADYNYKLPDDFTGCVIAWNSNNLDSKVGGNYNYLYRLFRKSNLKPFERDISTEIYQAGSTPCNGVEGFNCYFPLQSYGFQPTNGVGYQPYRVVVLSFELLHAPATVCGPKKSTNLVKNKCVNFNFNGLTGTGVLTESNKKFLPFQQFGRDIADTTDAVRDPQTLEILDITPCSFGGVSVITPGTNTSNQVAVLYQGVNCTEVPVAIHADQLTPTWRVYSTGSNVFQTRAGCLIGAEHVNNSYECDIPIGAGICASYQTQTNSPRRARSVASQSIIAYTMSLGAENSVAYSNNSIAICTNFTISVTTEILPVSMTKTSVDCTMYICGDSTECSNLLLQYGSFCTQLNRALTGIAVEQDKNTQEVFAQVKQIYKTPPIKDFGGFNFSQILPDPSKPSKRSFIEDLLFNKVTLADVGFIKQYGDCLGDIAARDLICAQKFNGLTVLPPLLTDEMIAQYTSALLAGTITSGWTFGAGAALQIPFAMQMAYRFNGIGVTQNVLYENQKLIANQFNSAIGKIQDSLSSTASALGKLQDVVNQNAQALNTLVKQLSSNFGAISSVLNDILSRLDKVEAEVQIDRLITGRLQSLQTYVTQQLIRAAEIRASANLAATKMSECVLGQSKRVDFCGKGYHLMSFPQSAPHGVVFLHVTYVCAQEKNFTTAPAICHDGKAHFPREGVFVSNGTHWFVTQRNFYEPQIITTDNTFVSGNCDVVIGIVNNTVYDPLQPELDSFKEELDKYFKNHTSPDVDLGDISGINASVVNIQKEIDRLNEVAKNLNESLIDLQELGKYEQYIKWPWYIWLGFIAGLIAIVMVTIMLCCMTSCCSCLKGCCSCGSCCKFDEDDSEPVLKGVKLHYT

SEQ ID NO: 798 - protein, 1273 aa, Artificial Sequence
  SARS-CoV-2/Greece/16/2020__EPI_ISL_418265 spike protein (1-1273)(P715C_P1069C)
MFVFLVLLPLVSSQCVNLTTRTQLPPAYTNSFTRGVYYPDKVFRSSVLHSTQDLFLPFFSNVTWFHAIHVSGTNGTKRFDNPVLPFNDGVYFASTEKSNIIRGWIFGTTLDSKTQSLLIVNNATNVVIKVCEFQFCNDPFLGVYYHKNNKSWMESEFRVYSSANNCTFEYVSQPFLMDLEGKQGNFKNLREFVFKNVDGYFKIYSKHTPINLVRDLPQGFSALEPLVDLPIGINITRFQTLLALHRSYLTPGDSSSGWTAGAAAYYVGYLQPRTFLLKYNENGTITDAVDCALDPLSETKCTLKSFTVEKGIYQTSNFRVQPTESIVRFPNITNLCPFGEVFNATRFASVYAWNRKRISNCVADYSVLYNSASFSTFKCYGVSPTKLNDLCFTNVYADSFVIRGDEVRQIAPGQTGKIADYNYKLPDDFTGCVIAWNSNNLDSKVGGNYNYLYRLFRKSNLKPFERDISTEIYQAGSTPCNGVEGFNCYFPLQSYGFQPTNGVGYQPYRVVVLSFELLHAPATVCGPKKSTNLVKNKCVNFNFNGLTGTGVLTESNKKFLPFQQFGRDIADTTDAVRDPQTLEILDITPCSFGGVSVITPGTNTSNQVAVLYQDVNCTEVPVAIHADQLTPTWRVYSTGSNVFQTRAGCLIGAEHVNNSYECDIPIGAGICASYQTQTNSPRRARSVASQSIIAYTMSLGAENSVAYSNNSIAICTNFTISVTTEILPVSMTKTSVDCTMYICGDSTECSNLLLQYGSFCTQLNRALTGIAVEQDKNTQEVFAQVKQIYKTPPIKDFGGFNFSQILPDPSKPSKRSFIEDLLFNKVTLADAGFIKQYGDCLGDIAARDLICAQKFNGLTVLPPLLTDEMIAQYTSALLAGTITSGWTFGAGAALQIPFAMQMAYRFNGIGVTQNVLYENQKLIANQFNSAIGKIQDSLSSTASALGKLQDVVNQNAQALNTLVKQLSSNFGAISSVLNDILSRLDKVEAEVQIDRLITGRLQSLQTYVTQQLIRAAEIRASANLAATKMSECVLGQSKRVDFCGKGYHLMSFPQSAPHGVVFLHVTYVCAQEKNFTTAPAICHDGKAHFPREGVFVSNGTHWFVTQRNFYEPQIITTDNTFVSGNCDVVIGIVNNTVYDPLQPELDSFKEELDKYFKNHTSPDVDLGDISGINASVVNIQKEIDRLNEVAKNLNESLIDLQELGKYEQYIKWPWYIWLGFIAGLIAIVMVTIMLCCMTSCCSCLKGCCSCGSCCKFDEDDSEPVLKGVKLHYT

SEQ ID NO: 799 - protein, 1273 aa, Artificial Sequence
  SARS-CoV-2/Iceland/319/2020__EPI_ISL_417648 spike protein (1-1273)(P715C_P1069C)
MFVFLVLLPLVSSQCVNLTTRTQLPPAYTNSFTRGVYYPDKVFRSSVLHSTQDLFLPFFSNVTWFHAIHVSGTNGTKRFDNPVLPFNDGVYFASTEKSNIIRGWIFGTTLDSKTQSLLIVNNATNVVIKVCEFQFCNDPFLGVYYHKNNKSWMESEFRVYSSANNCTFEYVSQPFLIDLEGKQGNFKNLREFVFKNIDGYFKIYSKHTPINLVRDLPQGFSALEPLVDLPIGINITRFQTLLALHRSYLTPGDSSSGWTAGAAAYYVGYLQPRTFLLKYNENGTITDAVDCALDPLSETKCTLKSFTVEKGIYQTSNFRVQPTESIVRFPNITNLCPFGEVFNATRFASVYAWNRKRISNCVADYSVLYNSASFSTFKCYGVSPTKLNDLCFTNVYADSFVIRGDEVRQIAPGQTGKIADYNYKLPDDFTGCVIAWNSNNLDSKVGGNYNYLYRLFRKSNLKPFERDISTEIYQAGSTPCNGVEGFNCYFPLQSYGFQPTNGVGYQPYRVVVLSFELLHAPATVCGPKKSTNLVKNKCVNFNFNGLTGTGVLTESNKKFLPFQQFGRDIADTTDAVRDPQTLEILDITPCSFGGVSVITPGTNTSNQVAVLYQGVNCTEVPVAIHADQLTPTWRVYSTGSNVFQTRAGCLIGAEHVNNSYECDIPIGAGICASYQTQTNSPRRARSVASQSIIAYTMSLGAENSVAYSNNSIAICTNFTISVTTEILPVSMTKTSVDCTMYICGDSTECSNLLLQYGSFCTQLNRALTGIAVEQDKNTQEVFAQVKQIYKTPPIKDFGGFNFSQILPDPSKPSKRSFIEDLLFNKVTLADAGFIKQYGDCLGDIAARDLICAQKFNGLTVLPPLLTDEMIAQYTSALLAGTITSGWTFGAGAALQIPFAMQMAYRFNGIGVTQNVLYENQKLIANQFNSAIGKIQDSLSSTASALGKLQDVVNQNAQALNTLVKQLSSNFGAISSVLNDILSRLDKVEAEVQIDRLITGRLQSLQTYVTQQLIRAAEIRASANLAATKMSECVLGQSKRVDFCGKGYHLMSFPQSAPHGVVFLHVTYVCAQEKNFTTAPAICHDGKAHFPREGVFVSNGTHWFVTQRNFYEPQIITTDNTFVSGNCDVVIGIVNNTVYDPLQPELDSFKEELDKYFKNHTSPDVDLGDISGINASVVNIQKEIDRLNEVAKNLNESLIDLQELGKYEQYIKWPWYIWLGFIAGLIAIVMVTIMLCCMTSCCSCLKGCCSCGSCCKFDEDDSEPVLKGVKLHYT

SEQ ID NO: 800 - protein, 1273 aa, Artificial Sequence
  SARS-CoV-2/Congo/94/2020__EPI_ISL_417947 spike protein (1-1273)(P715C_P1069C)
MFVFLVLLPLVSSQCVNLTTRTQLPPAYTNSFTRGVYYPDKVFRSSVLHSTQDLFLPFFSNVTWFHAIHVSGTNGTKRFDNPVLPFNDGVYFASTEKSNIIRGWIFGTTLDSKTQSLLIVNNATNVVIKVCEFQFCNDPFLGVYYHKNNKSWMESEFRVYSSANNCTFEYVSQPFLMDLEGKQGNFKNLREFVFKNIDGYFKIYSKHTPINLVRDLPQGFSALEPLVDLPIGINITRFQTLLALHRSYLTPGDSSSGWTAGAAAYYVGYLQPRTFLLKYNENGTITDAVDCALDPLSETKCTLKSFTVEKGIYQTSNFRVQPTESIVRFPNITNLCPFGEVFNATRFASVYAWNRKRISNCVADYSVLYNSASFSTFKCYGVSPTKLNDLCFTNVYADSFVIRGDEVRQIAPGQTGKIADYNYKLPDDFTGCVIAWNSNNLDSKVGGNYNYLYRLFRKSNLKPFERDISTEIYQAGSTPCNGVEGFNCYFPLQSYGFQPTNGVGYQPYRVVVLSFELLHAPATVCGPKKSTNLVKNKCVNFNFNGLTGTGVLTESNKKFLPFQQFGRDIADTTDAVRDPQTLEILDITPCSFGGVSVITPGTNTSNQVAVLYQGVNCTEVPVAIHADQLTPTWRVYSTGSNVFQTRAGCLIGAEHVNNSYECDIPIGAGICASYQTQTNSPRRARSVASQSIIAYTMSLGAENSVAYSNNSIAICTNFTISVTTEILPVSMTKTSVDCTMYICGDSTECSNLLLQYGSFCTQLNRALTGIAVEQDKNTQEVFAQVKQIYKTPPIKDFGGFNFSQILPDPSKPSKRSFIEDILFNKVTLADAGFIKQYGDCLGDIAARDLICAQKFNGLTVLPPLLTDEMIAQYTSALLAGTITSGWTFGAGAALQIPFAMQMAYRFNGIGVTQNVLYENQKLIANQFNSAIGKIQDSLSSTASALGKLQDVVNQNAQALNTLVKQLSSNFGAISSVLNDILSRLDKVEAEVQIDRLITGRLQSLQTYVTQQLIRAAEIRASANLAATKMSECVLGQSKRVDFCGKGYHLMSFPQSAPHGVVFLHVTYVCAQEKNFTTAPAICHDGKAHFPREGVFVSNGTHWFVTQRNFYEPQIITTDNTFVSGNCDVVIGIVNNTVYDPLQPELDSFKEELDKYFKNHTSPDVDLGDISGINASVVNIQKEIDRLNEVAKNLNESLIDLQELGKYEQYIKWPWYIWLGFIAGLIAIVMVTIMLCCMTSCCSCLKGCCSCGSCCKFDEDDSEPVLKGVKLHYT

SEQ ID NO: 801 - protein, 1273 aa, Artificial Sequence
  SARS-CoV-2/Congo/158/2020__EPI_ISL_417950 spike protein (1-1273)(P715C_P1069C)
MFVFLVLLPLVSSQCVNLTTRTQLPPAYTNSFTRGVYYPDKVFRSSVLHSTQDLFLPFFSNVTWFHAIHVSGTNGTKRFDNPVLPFNDGVYFASTEKSNIIRGWIFGTTLDSKTQSLLIVNNATNVVIKVCEFQFCNDPFLGVYYHKNNKSWMESEFRVYSSANNCTFEYVSQPFLMDLEGKQGNFKNLREFVFKNIDGYFKIYSKHTPINLVRDLPQGFSALEPLVDLPIGINITRFQTLLALHRSYLTPGDSSSGWTAGAAAYYVGYLQPRTFLLKYNENGTITDAVDCALDPLSETKCTLKSFTVEKGIYQTSNFRVQPTESIVRFPNITNLCPFGEVFNATRFASVYAWNRKRISNCVADYSVLYNSASFSTFKCYGVSPTKLNDLCFTNVYADSFVIRGDEVRQIAPGQTGKIADYNYKLPDDFTGCVIAWNSNNLDSKVGGNYNYLYRLFRKSNLKPFERDISTEIYQAGSTPCNGVEGFNCYFPLQSYGFQPTNGVGYQPYRVVVLSFELLHAPATVCGPKKSTNLVKNKCVNFNFNGLTGTGVLTESNKKFLPFQQFGRDIADTTDAVRDPQTLEILDITPCSFGGVSVITPGTNTSNQVAVLYQDVNCTEVPVAIHADQLTPTWRVYSTGSNVFQTRAGCLIGAEHVNNSYECDIPIGAGICASYQTQTNSPRRARSVASQSIIAYTMSLGAENSVAYSNNSIAICTNFTISVTTEILPVSMTKTSVDCTMYICGDSTECSNLLLQYGSFCTQLNRALTGIAVEQDKNTQEVFAQVKQIYKTPPIKDFGGFNFSQILPDPSKPSKRSFIEDLLFNKVTLADAGFIKQYGDCLGDIAARDLICAQKFNGLTVLPPLLTDEMIAQYTSALLAGTITSGWTFGAGAALQIPFAMQMAYRFNGIGVTQNVLYENQKLIANQFNSAIGKIQDSLSSTASALGKLQDVVNQNAQALNTLVKQLSSNFGAISSVLNDILSRLDKVEAEVQIDRLITGRLQSLQTYVTQQLIRAAEIRASANLAATKMSECVLGQSKRVDFCGKGYHLMSFPQSAPHGVVFLHVTYVCAQEKNFTTAPAICHDGKAHFPREGVFVSNGTHWFVTQRNFYEPQIITTDNTFLSGNCDVVIGIVNNTVYDPLQPELDSFKEELDKYFKNHTSPDVDLGDISGINASVVNIQKEIDRLNEVAKNLNESLIDLQELGKYEQYIKWPWYIWLGFIAGLIAIVMVTIMLCCMTSCCSCLKGCCSCGSCCKFDEDDSEPVLKGVKLHYT

SEQ ID NO: 802 - protein, 1273 aa, Artificial Sequence
  SARS-CoV-2/USA/UT-00034/2020__EPI_ISL_417977 spike protein (1-1273)(P715C_P1069C)
MFVFLVLLPLVSSQCVNLTTRTQLPPAYTNSFTRGVYYPDKVFRSSVLHSTQDLFLPFFSNVTWFHAIHVSGTNGTKRFDNPVLPFNDGVYFASTEKSNIIRGWIFGTTLDSKTQSLLIVNNATNVVIKVCEFQFCNDPFLGVYYYKNNKSWMESEFRVYSSANNCTFEYVSQPFLMDLEGKQGNFKNLREFVFKNIDGYFKIYSKHTPINLVRDLPQGFSALEPLVDLPIGINITRFQTLLALHRSYLTPGDSSSGWTAGAAAYYVGYLQPRTFLLKYNENGTITDAVDCALDPLSETKCTLKSFTVEKGIYQTSNFRVQPTESIVRFPNITNLCPFGEVFNATRFASVYAWNRKRISNCVADYSVLYNSASFSTFKCYGVSPTKLNDLCFTNVYADSFVIRGDEVRQIAPGQTGKIADYNYKLPDDFTGCVIAWNSNNLDSKVGGNYNYLYRLFRKSNLKPFERDISTEIYQAGSTPCNGVEGFNCYFPLQSYGFQPTNGVGYQPYRVVVLSFELLHAPATVCGPKKSTNLVKNKCVNFNFNGLTGTGVLTESNKKFLPFQQFGRDIADTTDAVRDPQTLEILDITPCSFGGVSVITPGTNTSNQVAVLYQGVNCTEVPVAIHADQLTPTWRVYSTGSNVFQTRAGCLIGAEHVNNSYECDIPIGAGICASYQTQTNSPRRARSVASQSIIAYTMSLGAENSVAYSNNSIAICTNFTISVTTEILPVSMTKTSVDCTMYICGDSTECSNLLLQYGSFCTQLNRALTGIAVEQDKNTQEVFAQVKQIYKTPPIKDFGGFNFSQILPDPSKPSKRSFIEDLLFNKVTLADAGFIKQYGDCLGDIAARDLICAQKFNGLTVLPPLLTDEMIAQYTSALLAGTITSGWTFGAGAALQIPFAMQMAYRFNGIGVTQNVLYENQKLIANQFNSAIGKIQDSLSSTASALGKLQDVVNQNAQALNTLVKQLSSNFGAISSVLNDILSRLDKVEAEVQIDRLITGRLQSLQTYVTQQLIRAAEIRASANLAATKMSECVLGQSKRVDFCGKGYHLMSFPQSAPHGVVFLHVTYVCAQEKNFTTAPAICHDGKAHFPREGVFVSNGTHWFVTQRNFYEPQIITTDNTFVSGNCDVVIGIVNNTVYDPLQPELDSFKEELDKYFKNHTSPDVDLGDISGINASVVNIQKEIDRLNEVAKNLNESLIDLQELGKYEQYIKWPWYIWLGFIAGLIAIVMVTIMLCCMTSCCSCLKGCCSCGSCCKFDEDDSEPVLKGVKLHYT

SEQ ID NO: 803 - protein, 1273 aa, Artificial Sequence
  SARS-CoV-2/USA/UT-00033/2020__EPI_ISL_417976 spike protein (1-1273)(P715C_P1069C)
MFVFLVLLPLVSSQCVNLTTRTQLPPAYTNSFTRGVYYPDKVFRSSVLHSTQDLFLPFFSNVTWFHAIHVSGTNGTKRFDNPVLPFNDGVYFASTEKSNIIRGWIFGTTLDSKTQSLLIVNNATNVVIKVCEFQFCNDPFLGVYYHKNNKSWMESEFRVYSSANNCTFEYVSQPFLMDLEGKQGNFKNLREFVFKNIDGYFKIYSKHTPINLVRDLPQGFSALEPLVDLPIGINITRFQTLLALHRSYLTPGDSSSGLTAGAAAYYVGYLQPRTFLLKYNENGTITDAVDCALDPLSETKCTLKSFTVEKGIYQTSNFRVQPTESIVRFPNITNLCPFGEVFNATRFASVYAWNRKRISNCVADYSVLYNSASFSTFKCYGVSPTKLNDLCFTNVYADSFVIRGDEVRQIAPGQTGKIADYNYKLPDDFTGCVIAWNSNNLDSKVGGNYNYLYRLFRKSNLKPFERDISTEIYQAGSTPCNGVEGFNCYFPLQSYGFQPTNGVGYQPYRVVVLSFELLHAPATVCGPKKSTNLVKNKCVNFNFNGLTGTGVLTESNKKFLPFQQFGRDIADTTDAVRDPQTLEILDITPCSFGGVSVITPGTNTSNQVAVLYQGVNCTEVPVAIHADQLTPTWRVYSTGSNVFQTRAGCLIGAEHVNNSYECDIPIGAGICASYQTQTNSPRRARSVASQSIIAYTMSLGAENSVAYSNNSIAICTNFTISVTTEILPVSMTKTSVDCTMYICGDSTECSNLLLQYGSFCTQLNRALTGIAVEQDKNTQEVFAQVKQIYKTPPIKDFGGFNFSQILPDPSKPSKRSFIEDLLFNKVTLADAGFIKQYGDCLGDIAARDLICAQKFNGLTVLPPLLTDEMIAQYTSALLAGTITSGWTFGAGAALQIPFAMQMAYRFNGIGVTQNVLYENQKLIANQFNSAIGKIQDSLSSTASALGKLQDVVNQNAQALNTLVKQLSSNFGAISSVLNDILSRLDKVEAEVQIDRLITGRLQSLQTYVTQQLIRAAEIRASANLAATKMSECVLGQSKRVDFCGKGYHLMSFPQSAPHGVVFLHVTYVCAQEKNFTTAPAICHDGKAHFPREGVFVSNGTHWFVTQRNFYEPQIITTDNTFVSGNCDVVIGIVNNTVYDPLQPELDSFKEELDKYFKNHTSPDVDLGDISGINASVVNIQKEIDRLNEVAKNLNESLIDLQELGKYEQYIKWPWYIWLGFIAGLIAIVMVTIMLCCMTSCCSCLKGCCSCGSCCKFDEDDSEPVLKGVKLHYT

SEQ ID NO: 804 - protein, 1273 aa, Artificial Sequence
  SARS-CoV-2/USA/WI-13/2020__EPI_ISL_417516 spike protein (1-1273)(P715C_P1069C)
MFVFLVLLPLVSSQCVNLTTRTQLPPAYTNSFTRGVYYPDKVFRSSVLHSTQDLFLPFFSNVTWFHAIHVSGTNGTKRFDNPVLPFNDGVYFASTEKSNIIRGWIFGTTLDSKTQSLLIVNNATNVVIKVCEFQFCNDPFLGVYYHKNNKSWMESEFRVYSSANNCTFEYVSQPFLMDLEGKQGNFKNLREFVFKNIDGYFKIYSKHTPINLVRDLPQGFSALEPLVDLPIGINITRFQTLLALHRSYLTPGDSSSGWTAGAAAYYVGYLQPRTFLLKYNENGTITDAVDCALDPLSETKCTLKSFTVEKGIYQTSNFRVLPTESIVRFPNITNLCPFGEVFNATRFASVYAWNRKRISNCVADYSVLYNSASFSTFKCYGVSPTKLNDLCFTNVYADSFVIRGDEVRQIAPGQTGKIADYNYKLPDDFTGCVIAWNSNNLDSKVGGNYNYLYRLFRKSNLKPFERDISTEIYQAGSTPCNGVEGFNCYFPLQSYGFQPTNGVGYQPYRVVVLSFELLHAPATVCGPKKSTNLVKNKCVNFNFNGLTGTGVLTESNKKFLPFQQFGRDIADTTDAVRDPQTLEILDITPCSFGGVSVITPGTNTSNQVAVLYQGVNCTEVPVAIHADQLTPTWRVYSTGSNVFQTRAGCLIGAEHVNNSYECDIPIGAGICASYQTQTNSPRRARSVASQSIIAYTMSLGAENSVAYSNNSIAICTNFTISVTTEILPVSMTKTSVDCTMYICGDSTECSNLLLQYGSFCTQLNRALTGIAVEQDKNTQEVFAQVKQIYKTPPIKDFGGFNFSQILPDPSKPSKRSFIEDLLFNKVTLADAGFIKQYGDCLGDIAARDLICAQKFNGLTVLPPLLTDEMIAQYTSALLAGTITSGWTFGAGAALQIPFAMQMAYRFNGIGVTQNVLYENQKLIANQFNSAIGKIQDSLSSTASALGKLQDVVNQNAQALNTLVKQLSSNFGAISSVLNDILSRLDKVEAEVQIDRLITGRLQSLQTYVTQQLIRAAEIRASANLAATKMSECVLGQSKRVDFCGKGYHLMSFPQSAPHGVVFLHVTYVCAQEKNFTTAPAICHDGKAHFPREGVFVSNGTHWFVTQRNFYEPQIITTDNTFVSGNCDVVIGIVNNTVYDPLQPELDSFKEELDKYFKNHTSPDVDLGDISGINASVVNIQKEIDRLNEVAKNLNESLIDLQELGKYEQYIKWPWYIWLGFIAGLIAIVMVTIMLCCMTSCCSCLKGCCSCGSCCKFDEDDSEPVLKGVKLHYT

SEQ ID NO: 805 - protein, 1272 aa, Artificial Sequence
  SARS-CoV-2/India/1-27/2020__EPI_ISL_413522 spike protein (1-1272)(P714C_P1068C)
MFVFLVLLPLVSSQCVNLTTRTQLPPAYTNSFTRGVYYPDKVFRSSVLHSTQDLFLPFFSNVTWFHAIHVSGTNGTKRFDNPVLPFNDGVYFASTEKSNIIRGWIFGTTLDSKTQSLLIVNNATNVVIKVCEFQFCNDPFLGVYHKNNKSWMESEFRVYSSANNCTFEYVSQPFLMDLEGKQGNFKNLREFVFKNIDGYFKIYSKHTPINLVRDLPQGFSALEPLVDLPIGINITRFQTLLALHRSYLTPGDSSSGWTAGAAAYYVGYLQPRTFLLKYNENGTITDAVDCALDPLSETKCTLKSFTVEKGIYQTSNFRVQPTESIVRFPNITNLCPFGEVFNATRFASVYAWNRKRISNCVADYSVLYNSASFSTFKCYGVSPTKLNDLCFTNVYADSFVIRGDEVIQIAPGQTGKIADYNYKLPDDFTGCVIAWNSNNLDSKVGGNYNYLYRLFRKSNLKPFERDISTEIYQAGSTPCNGVEGFNCYFPLQSYGFQPTNGVGYQPYRVVVLSFELLHAPATVCGPKKSTNLVKNKCVNFNFNGLTGTGVLTESNKKFLPFQQFGRDIADTTDAVRDPQTLEILDITPCSFGGVSVITPGTNTSNQVAVLYQDVNCTEVPVAIHADQLTPTWRVYSTGSNVFQTRAGCLIGAEHVNNSYECDIPIGAGICASYQTQTNSPRRARSVASQSIIAYTMSLGAENSVAYSNNSIAICTNFTISVTTEILPVSMTKTSVDCTMYICGDSTECSNLLLQYGSFCTQLNRALTGIAVEQDKNTQEVFAQVKQIYKTPPIKDFGGFNFSQILPDPSKPSKRSFIEDLLFNKVTLADAGFIKQYGDCLGDIAARDLICAQKFNGLTVLPPLLTDEMIAQYTSALLAGTITSGWTFGAGAALQIPFAMQMAYRFNGIGVTQNVLYENQKLIANQFNSAIGKIQDSLSSTASALGKLQDVVNQNAQALNTLVKQLSSNFGAISSVLNDILSRLDKVEAEVQIDRLITGRLQSLQTYVTQQLIRAAEIRASANLAATKMSECVLGQSKRVDFCGKGYHLMSFPQSAPHGVVFLHVTYVCAQEKNFTTAPAICHDGKAHFPREGVFVSNGTHWFVTQRNFYEPQIITTDNTFVSGNCDVVIGIVNNTVYDPLQPELDSFKEELDKYFKNHTSPDVDLGDISGINASVVNIQKEIDRLNEVAKNLNESLIDLQELGKYEQYIKWPWYIWLGFIAGLIAIVMVTIMLCCMTSCCSCLKGCCSCGSCCKFDEDDSEPVLKGVKLHYT

SEQ ID NO: 806 - protein, 1267 aa, Artificial Sequence
  SARS-CoV-2/pangolin/Guangxi/P4L/2017__EPI_ISL_410538 spike protein (1-1267)(P709C_P1063C)
MFVFLFVLPLVSSQCVNLTTRTGIPPGYTNSSTRGVYYPDKVFRSSILHLTQDLFLPFFSNVTWFNTINYQGGFKKFDNPVLPFNDGVYFASTEKSNIIRGWIFGTTLDARTQSLLIVNNATNVVIKVCEFQFCTDPFLGVYYHNNNKTWVENEFRVYSSANNCTFEYISQPFLMDLEGKQGNFKNLREFVFKNVDGYFKIYSKHTPIDLVRDLPRGFAALEPLVDLPIGINITRFQTLLALHRSYLTPGNLESGWTTGAAAYYVGYLQQRTFLLSYNQNGTITDAVDCSLDPLSETKCTLKSLTVEKGIYQTSNFRVQPTISIVRFPNITNLCPFGEVFNASKFASVYAWNRKRISNCVADYSVLYNSTSFSTFKCYGVSPTKLNDLCFTNVYADSFVVKGDEVRQIAPGQTGVIADYNYKLPDDFTGCVIAWNSVKQDALTGGNYGYLYRLFRKSKLKPFERDISTEIYQAGSTPCNGQVGLNCYYPLERYGFHPTTGVNYQPFRVVVLSFELLNGPATVCGPKLSTTLVKDKCVNFNFNGLTGTGVLTTSKKQFLPFQQFGRDISDTTDAVRDPQTLEILDITPCSFGGVSVITPGTNTSNQVAVLYQDVNCTEVPMAIHAEQLTPAWRVYSAGANVFQTRAGCLVGAEHVNNSYECDIPVGAGICASYHSMSSLRSVNQRSIIAYTMSLGAENSVAYSNNSIAICTNFTISVTTEILPVSMTKTSVDCTMYICGDSIECSNLLLQYGSFCTQLNRALTGIAVEQDKNTQEVFAQVKQIYKTPPIKDFGGFNFSQILPDPSKPSKRSFIEDLLFNKVTLADAGFIKQYGDCLGDIAARDLICAQKFNGLTVLPPLLTDEMIAQYTSALLAGTITSGWTFGAGAALQIPFAMQMAYRFNGIGVTQNVLYENQKLIANQFNSAIGKIQDSLSSTASALGKLQDVVNQNAQALNTLVKQLSSNFGAISSVLNDILSRLDKVEAEVQIDRLITGRLQSLQTYVTQQLIRAAEIRASANLAATKMSECVLGQSKRVDFCGKGYHLMSFPQSAPHGVVFLHVTYVCAQEKNFTTAPAICHEGKAHFPREGVFVSNGTHWFITQRNFYEPQIITTDNTFVSGSCDVVIGIVNNTVYDPLQPELDSFKEELDKYFKNHTSPDVDLGDISGINASVVNIQKEIDRLNEVAKNLNESPIDLQELGKYEQYIKWPWYIWLGFIAGLIAIIMVTIMLCCMTSCCSCLKGCCSCGSCCKFDEDDSEPVLKGVKLHYT

SEQ ID NO: 807 - protein, 1267 aa, Artificial Sequence
  SARS-CoV-2/pangolin/Guangxi/P5L/2017__EPI_ISL_410540 spike protein (1-1267)(P709C_P1063C)
MFVFLFVLPLVSSQCVNLTTRTGIPPGYTNSSTRGVYYPDKVFRSSILHLTQDLFLPFFSNVTWFNTINYQGGFKKFDNPVLPFNDGVYFASTEKSNIIRGWIFGTTLDARTQSLLIVNNATNVVIKVCEFQFCTDPFLGVYYHNNNKTWVENEFRVYSSANNCTFEYISQPFLMDLEGKQGNFKNLREFVFKNVDGYFKIYSKHTPIDLVRDLPRGFAALEPLVDLPIGINITRFQTLLALHRSYLTPGKLESGWTTGAAAYYVGYLQQRTFLLSYNQNGTITDAVDCSLDPLSETKCTLKSLTVEKGIYQTSNFRVQPTISIVRFPNITNLCPFGEVFNASKFASVYAWNRKRISNCVADYSVLYNSTSFSTFKCYGVSPTKLNDLCFTNVYADSFVVKGDEVRQIAPGQTGVIADYNYKLPDDFTGCVIAWNSVKQDALTGGNYGYLYRLFRKSKLKPFERDISTEIYQAGSTPCNGQVGLNCYYPLERYGFHPTTGVNYQPFRVVVLSFELLNGPATVCGPKLSTTLVKDKCVNFNFNGLTGTGVLTTSKKQFLPFQQFGRDISDTTDAVRDPQTLEILDITPCSFGGVSVITPGTNTSNQVAVLYQDVNCTEVPMAIHAEQLTPAWRVYSAGANVFQTRAGCLVGAEHVNNSYECDIPVGAGICASYHSMSSFRSVNQRSIIAYTMSLGAENSVAYSNNSIAICTNFTISVTTEILPVSMTKTSVDCTMYICGDSIECSNLLLQYGSFCTQLNRALTGIAVEQDKNTQEVFAQVKQIYKTPPIKDFGGFNFSQILPDPSKPSKRSFIEDLLFNKVTLADAGFIKQYGDCLGDIAARDLICAQKFNGLTVLPPLLTDEMIAQYTSALLAGTITSGWTFGAGAALQIPFAMQMAYRFNGIGVTQNVLYENQKLIANQFNSAIGKIQDSLSSTASALGKLQDVVNQNAQALNTLVKQLSSNFGAISSVLNDILSRLDKVEAEVQIDRLITGRLQSLQTYVTQQLIRAAEIRASANLAATKMSECVLGQSKRVDFCGKGYHLMSFPQSAPHGVVFLHVTYVCAQEKNFTTAPAICHEGKAHFPREGVFVSNGTHWFITQRNFYEPQIITTDNTFVSGSCDVVIGIVNNTVYDPLQPELDSFKEELDKYFKNHTSPDVDLGDISGINASVVNIQKEIDRLNEVAKNLNESLIDLQELGKYEQYIKWPWYIWLGFIAGLIAIIMVTIMLCCMTSCCSCLKGCCSCGSCCKFDEDDSEPVLKGVKLHYT

SEQ ID NO: 808 - protein, 1267 aa, Artificial Sequence
  SARS-CoV-2/pangolin/Guangxi/P5E/2017__EPI_ISL_410541 spike protein (1-1267)(P709C_P1063C)
MFVFLFVLPLVSSQCVNLTTRTGIPPGYTNSSTRGVYYPDKVFRSSILHLTQDLFLPFFSNVTWFNTITYQGGSKKFDNPVLPFNDGVYFASTEKSNIIRGWIFGTTLDARTQSLLIVNNATNVVIKVCEFQFCTDPFLGVYYHNNNKTWVENEFRVYSSANNCTFEYISQPFLMDLEGKQGNFKNLREFVFKNVDGYFKIYSKHTPIDLVRDLPRGFAALEPLVDLPIGINITRFQTLLALHRSYLTPGKLESGWTTGAAAYYVGYLQQRTFLLSYNQNGTITDAVDCSLDPLSETKCTLKSLTVEKGIYQTSNFRVQPTISIVRFPNITNLCPFGEVFNASKFASVYAWNRKRISNCVADYSVLYNSTSFSTFKCYGVSPTKLNDLCFTNVYADSFVVKGDEVRQIAPGQTGVIADYNYKLPDDFTGCVIAWNSVKQDALTGDNYGYLYRLFRKSKLKPFERDISTEIYQAGSTPCNGQVGLNCYYPLERYGFHPTTGVNYQPFRVVVLSFELLNGPATVCGPKLSTTLVKDKCVNFNFNGLTGTGVLTTSKKQFLPFQQFGRDISDTTDAVRDPQTLEILDITPCSFGGVSVITPGTNTSNQVAVLYQDVNCTEVPMAIHAEQLTPAWRVYSAGANVFQTRAGCLVGAEHVNNSYECDIPVGAGICASYHSMSSFRSVNQRSIIAYTMSLGAENSVAYSNNSIAICTNFTISVTTEILPVSMTKTSVDCTMYICGDSIECSNLLLQYGSFCTQLNRALTGIAVEQDKNTQEVFAQVKQIYKTPPIKDFGGFNFSQILPDPSKPSKRSFIEDLLFNKVTLADAGFIKQYGDCLGDIAARDLICAQKFNGLTVLPPLLTDEMIAQYTSALLAGTITSGWTFGAGAALQIPFAMQMAYRFNGIGVTQNVLYENQKLIANQFNSAIGKIQDSLSSTASALGKLQDVVNQNAQALNTLVKQLSSNFGAISSVLNDILSRLDKVEAEVQIDRLITGRLQSLQTYVTQQLIRAAEIRASANLAATKMSECVLGQSKRVDFCGKGYHLMSFPQSAPHGVVFLHVTYVCAQEKNFTTAPAICHEGKAHFPREGVFVSNGTHWFITQRNFYEPQIITTDNTFVSGSCDVVIGIVNNTVYDPLQPELDSFKEELDKYFKNHTSPDVDLGDISGINASVVNIQKEIDRLNEVAKNLNESLIDLQELGKYEQYIKWPWYIWLGFIAGLIAIIMVTIMLCCMTSCCSCLKGCCSCGSCCKFDEDDSEPVLKGVKLHYT

SEQ ID NO: 809 - protein, 1265 aa, Artificial Sequence
  SARS-CoV-2/pangolin/Guangxi/P1E/2017__EPI_ISL_410539 spike protein (1-1265)(P707C_P1061C)
MFVFLFVLPLVSSQCVNLTTRTGIQPGYTNSSTRGVYYPDKVFRSSILHLTQDLFLPFFSNVTWFNTINYQGGFKKFDNPVLPFNDGVYFASTEKSNIIRGWIFGTTLDARTQSLLIVNNATNVVIKVCEFQFCTDPFLGVYYHNNNKTWVENEFRVYSSANNCTFEYISQPFLMDLEGKQGNFKNLREFVFKNVDGYFKIYSKHTPIDLVRDLPRGFAALEPLVDLPIGINITRFQTLLALHRSYLTPGKLESGWTTGAAAYYVGYLQQRTFLLSYNQNGTITDAVDCSLDPLSETKCTLKSLTVEKGIYQTSNFRVQPTISIVRFPNITNLCPFGEVFNASKFASVYAWNRKRISNCVADYSVLYNSTSFSTFKCYGVSPTKLNDLCFTNVYADSFVVKGDEVRQIAPGQTGVIADYNYKLPDDFTGCVIAWNSVKQDALTGGNYLYRLFRKSKLKPFERDISTEIYQAGSTPCNGQVGLNCYYPLERYGFHPTTGVNYQPFRVVVLSFELLNGPATVCGPKLSTTLVKDKCVNFNFNGLTGTGVLTTSKKQFLPFQQFGRDISDTTDAVRDPQTLEILDITPCSFGGVSVITPGTNTSNQVAVLYQDVNCTEVPMAIHAEQLTPAWRVYSAGANVFQTRAGCLVGAEHVNNSYECDIPVGAGICASYHSMSSLRSVNQRSIIAYTMSLGAENSVAYSNNSIAICTNFTISVTTEILPVSMTKTSVDCTMYICGDSIECSNLLLQYGSFCTQLNRALTGIAVEQDKNTQEVFAQVKQIYKTPPIKDFGGFNFSQILPDPSKPSKRSFIEDLLFNKVTLADAGFIKQYGDCLGDIAARDLICAQKFNGLTVLPPLLTDEMIAQYTSALLAGTITSGWTFGAGAALQIPFAMQMAYRFNGIGVTQNVLYENQKLIANQFNSAIGKIQDSLSSTASALGKLQDVVNQNAQALNTLVKQLSSNFGAISSVLNDILSRLDKVEAEVQIDRLITGRLQSLQTYVTQQLIRAAEIRASANLAATKMSECVLGQSKRVDFCGKGYHLMSFPQSAPHGVVFLHVTYVCAQEKNFTTAPAICHEGKAHFPREGVFVSNGTHWFITQRNFYEPQIITTDNTFVSGSCDVVIGIVNNTVYDPLQPELDSFKEELDKYFKNHTSPDVDLGDISGINASVVNIQKEIDRLNEVAKNLNESLIDLQELGKYEQYIKWPWYIWLGFIAGLIAIIMVTIMLCCMTSCCSCLKGCCSCGSCCKFDEDDSEPVLKGVKLHYT

SEQ ID NO: 810 - protein, 1273 aa, Artificial Sequence; identical to SEQ ID NO: 22
  SARS-CoV-2/Wuhan/WIV05/2019__EPI_ISL_402128 spike protein (1-1273)(G889C_L1034C)

SEQ ID NO: 811 - protein, 1269 aa, Artificial Sequence
  SARS-CoV-2/bat/Yunnan/RaTG13/2013__EPI_ISL_402131 spike protein (1-1269)(G885C_L1030C)
MFVFLVLLPLVSSQCVNLTTRTQLPPAYTNSSTRGVYYPDKVFRSSVLHLTQDLFLPFFSNVTWFHAIHVSGTNGIKRFDNPVLPFNDGVYFASTEKSNIIRGWIFGTTLDSKTQSLLIVNNATNVVIKVCEFQFCNDPFLGVYYHKNNKSWMESEFRVYSSANNCTFEYVSQPFLMDLEGKQGNFKNLREFVFKNIDGYFKIYSKHTPINLVRDLPPGFSALEPLVDLPIGINITRFQTLLALHRSYLTPGDSSSGWTAGAAAYYVGYLQPRTFLLKYNENGTITDAVDCALDPLSETKCTLKSFTVEKGIYQTSNFRVQPTDSIVRFPNITNLCPFGEVFNATTFASVYAWNRKRISNCVADYSVLYNSTSFSTFKCYGVSPTKLNDLCFTNVYADSFVITGDEVRQIAPGQTGKIADYNYKLPDDFTGCVIAWNSKHIDAKEGGNFNYLYRLFRKANLKPFERDISTEIYQAGSKPCNGQTGLNCYYPLYRYGFYPTDGVGHQPYRVVVLSFELLNAPATVCGPKKSTNLVKNKCVNFNFNGLTGTGVLTESNKKFLPFQQFGRDIADTTDAVRDPQTLEILDITPCSFGGVSVITPGTNASNQVAVLYQDVNCTEVPVAIHADQLTPTWRVYSTGSNVFQTRAGCLIGAEHVNNSYECDIPIGAGICASYQTQTNSRSVASQSIIAYTMSLGAENSVAYSNNSIAIPTNFTISVTTEILPVSMTKTSVDCTMYICGDSTECSNLLLQYGSFCTQLNRALTGIAVEQDKNTQEVFAQVKQIYKTPPIKDFGGFNFSQILPDPSKPSKRSFIEDLLFNKVTLADAGFIKQYGDCLGDIAARDLICAQKFNGLTVLPPLLTDEMIAQYTSALLAGTITSGWTFCAGAALQIPFAMQMAYRFNGIGVTQNVLYENQKLIANQFNSAIGKIQDSLSSTASALGKLQDVVNQNAQALNTLVKQLSSNFGAISSVLNDILSRLDKVEAEVQIDRLITGRLQSLQTYVTQQLIRAAEIRASANLAATKMSECVCGQSKRVDFCGKGYHLMSFPQSAPHGVVFLHVTYVPAQEKNFTTAPAICHDGKAHFPREGVFVSNGTHWFVTQRNFYEPQIITTDNTFVSGSCDVVIGIVNNTVYDPLQPELDSFKEELDKYFKNHTSPDVDLGDISGINASVVNIQKEIDRLNEVAKNLNESLIDLQELGKYEQYIKWPWYIWLGFIAGLIAIIMVTIMLCCMTSCCSCLKGCCSCGSCCKFDEDDSEPVLKGVKLHYT

SEQ ID NO: 812 - protein, 1273 aa, Artificial Sequence
  SARS-CoV-2/Wuhan/HBCDC-HB-01/2019__EPI_ISL_402132 spike protein (1-1273)(G889C_L1034C)
MFVFLVLLPLVSSQCVNLTTRTQLPPAYTNSITRGVYYPDKVFRSSVLHSTQDLFLPFFSNVTWFHAIHVSGTNGTKRFDNPVLPFNDGVYFASTEKSNIIRGWIFGTTLDSKTQSLLIVNNATNVVIKVCEFQFCNDPFLGVYYHKNNKSWMESEFRVYSSANNCTFEYVSQPFLMDLEGKQGNFKNLREFVFKNIDGYFKIYSKHTPINLVRDLPQGFSALEPLVDLPIGINITRFQTLLALHRSYLTPGDSSSGWTAGAAAYYVGYLQPRTFLLKYNENGTITDAVDCALDPLSETKCTLKSFTVEKGIYQTSNFRVQPTESIVRFPNITNLCPFGEVFNATRFASVYAWNRKRISNCVADYSVLYNSASFSTFKCYGVSPTKLNDLCFTNVYADSFVIRGDEVRQIAPGQTGKIADYNYKLPDDFTGCVIAWNSNNLDSKVGGNYNYLYRLFRKSNLKPFERDISTEIYQAGSTPCNGVEGFNCYFPLQSYGFQPTNGVGYQPYRVVVLSFELLHAPATVCGPKKSTNLVKNKCVNFNFNGLTGTGVLTESNKKFLPFQQFGRDIADTTDAVRDPQTLEILDITPCSFGGVSVITPGTNTSNQVAVLYQDVNCTEVPVAIHADQLTPTWRVYSTGSNVFQTRAGCLIGAEHVNNSYECDIPIGAGICASYQTQTNSPRRARSVASQSIIAYTMSLGAENSVAYSNNSIAIPTNFTISVTTEILPVSMTKTSVDCTMYICGDSTECSNLLLQYGSFCTQLNRALTGIAVEQDKNTQEVFAQVKQIYKTPPIKDFGGFNFSQILPDPSKPSKRSFIEDLLFNKVTLADAGFIKQYGDCLGDIAARDLICAQKFNGLTVLPPLLTDEMIAQYTSALLAGTITSGWTFCAGAALQIPFAMQMAYRFNGIGVTQNVLYENQKLIANQFNSAIGKIQDSLSSTASALGKLQDVVNQNAQALNTLVKQLSSNFGAISSVLNDILSRLDKVEAEVQIDRLITGRLQSLQTYVTQQLIRAAEIRASANLAATKMSECVCGQSKRVDFCGKGYHLMSFPQSAPHGVVFLHVTYVPAQEKNFTTAPAICHDGKAHFPREGVFVSNGTHWFVTQRNFYEPQIITTDNTFVSGNCDVVIGIVNNTVYDPLQPELDSFKEELDKYFKNHTSPDVDLGDISGINASVVNIQKEIDRLNEVAKNLNESLIDLQELGKYEQYIKWPWYIWLGFIAGLIAIVMVTIMLCCMTSCCSCLKGCCSCGSCCKFDEDDSEPVLKGVKLHYT

SEQ ID NO: 813 - protein, 1273 aa, Artificial Sequence
  SARS-CoV-2/Guangdong/20SF028/2020__EPI_ISL_403936 spike protein (1-1273)(G889C_L1034C)
MFVFLVLLPLVSSQCVNLTTRTQLPPAYTNSFTRGVYYPDKVFRSSVLYSTQDLFLPFFSNVTWFHAIHVSGTNGTKRFDNPVLPFNDGVYFASTEKSNIIRGWIFGTTLDSKTQSLLIVNNATNVVIKVCEFQFCNDPFLGVYYHKNNKSWMESEFRVYSSANNCTFEYVSQPFLMDLEGKQGNFKNLREFVFKNIDGYFKIYSKHTPINLVRDLPQGFSALEPLVDLPIGINITRFQTLLALHRSYLTPGDSSSGWTAGAAAYYVGYLQPRTFLLKYNENGTITDAVDCALDPLSETKCTLKSFTVEKGIYQTSNFRVQPTESIVRFPNITNLCPFGEVFNATRFASVYAWNRKRISNCVADYSVLYNSASFSTFKCYGVSPTKLNDLCFTNVYADSFVIRGDEVRQIAPGQTGKIADYNYKLPDDFTGCVIAWNSNNLDSKVGGNYNYLYRLFRKSNLKPFERDISTEIYQAGSTPCNGVEGFNCYFPLQSYGFQPTNGVGYQPYRVVVLSFELLHAPATVCGPKKSTNLVKNKCVNFNFNGLTGTGVLTESNKKFLPFQQFGRDIADTTDAVRDPQTLEILDITPCSFGGVSVITPGTNTSNQVAVLYQDVNCTEVPVAIHADQLTPTWRVYSTGSNVFQTRAGCLIGAEHVNNSYECDIPIGAGICASYQTQTNSPRRARSVASQSIIAYTMSLGAENSVAYSNNSIAIPTNFTISVTTEILPVSMTKTSVDCTMYICGDSTECSNLLLQYGSFCTQLNRALTGIAVEQDKNTQEVFAQVKQIYKTPPIKDFGGFNFSQILPDPSKPSKRSFIEDLLFNKVTLADAGFIKQYGDCLGDIAARDLICAQKFNGLTVLPPLLTDEMIAQYTSALLAGTITSGWTFCAGAALQIPFAMQMAYRFNGIGVTQNVLYENQKLIANQFNSAIGKIQDSLSSTASALGKLQDVVNQNAQALNTLVKQLSSNFGAISSVLNDILSRLDKVEAEVQIDRLITGRLQSLQTYVTQQLIRAAEIRASANLAATKMSECVCGQSKRVDFCGKGYHLMSFPQSAPHGVVFLHVTYVPAQEKNFTTAPAICHDGKAHFPREGVFVSNGTHWFVTQRNFYEPQIITTDNTFVSGNCDVVIGIVNNTVYDPLQPELDSFKEELDKYFKNHTSPDVDLGDISGINASVVNIQKEIDRLNEVAKNLNESLIDLQELGKYEQYIKWPWYIWLGFIAGLIAIVMVTIMLCCMTSCCSCLKGCCSCGSCCKFDEDDSEPVLKGVKLHYT

SEQ ID NO: 814 - protein, 1273 aa, Artificial Sequence
  SARS-CoV-2/Shenzhen/SZTH-001/2020__EPI_ISL_406592 spike protein (1-1273)(G889C_L1034C)
MFVFLVLLPLVSSQCVNLTTRTQLPPAYTNSFTRGVYYPDKVFRSSVLHSTQDLFLPFFSNVTWFHAIHVSGTNGTKRFDNPVLPFNDGVYFASTEKSNIIRGWIFGTTLDSKTQSLLIVNNATNVVIKVCEFQFCNDPFLGVYYHKNNKSWMESEFRVYSSANNCTFEYVSQPFLMDLEGKQGNFKNLREFVFKNIDGYFKIYSKHTPINLVRDLPQGFSALEPLVDLPIGINITRFQTLLALHRSYLTPGDSSSGWTAGAAAYYVGYLQPRTFLLKYNENGTITDAVDCALDPLSETKCTLKSFTVEKGIYQTSNFRVQPTESIVRFPNITNLCPFGEVFNATRFASVYAWNRKRISNCVADYSVLYNSASFSTFKCYGVSPTKLNDLCFTNVYADSFVIRGDEVRQIAPGQTGKIADYNYKLPDDFTGCVIAWNSNNLDSKVGGNYNYLYRLFRKSNLKPFERDISTEIYQAGSTPCNGVEGFNCYFPLQSYGFQPTNGVGYQPYRVVVLSFELLHAPATVCGPKKSTNLVKNKCVNFNFNGLTGTGVLTESNKKFLPFQQFGRDIADTTDAVRDPQTLEILDITPCSFGGVSVITPGTNTSNQVAVLYQDVNCTEVPVAIHADQLTPTWRVYSTGSNVFQTRAGCLIGAEHVNNSYECDIPIGAGICASYQTQTNSPRRARSVASQSIIAYTMSLGAENSVAYSNNSIAIPTNFTISVTTEILPVSMTKTSVDCTMYICGDSTECSNLLLQYGSFCTQLNRALTGIAVEQDKNTQEVFAQVKQIYKTPPIKDFGGFNFSQILPDPSKPSKRSFIEDLLFNKVTLADAGFIKQYGDCLGDIAARDLICAQKFNGLTVLPPLLTDEMIAQYTSALLAGTITSGWTFCAGAALQIPFAMQMAYRFNGIGVTQNVLYENQKLIANQFNSAIGKIQDSLSSTASALGKLQDVVNQNAQALNTLVKQLSSNFGAISSVLNDILSRLDKVEAEVQIDRLITGRLQSLQTYVTQQLIRAAEIRASANLAATKMSECVCGQSKRVDFCGKGYHLMSFPQSAPHGVVFLHVTYVPAQEKNFTTAPAICHDGKAHFPREGVFVSNGTHWFVTQRNFYEPQIITTDNTFVSGNCDVLIGIVNNTVYDPLQPELDSFKEELDKYFKNHTSPDVDLGDISGINASVVNIQKEIDRLNEVAKNLNESLIDLQELGKYEQYIKWPWYIWLGFIAGLIAIVMVTIMLCCMTSCCSCLKGCCSCGSCCKFDEDDSGPVLKGVKLHYT

SEQ ID NO: 815 - protein, 1273 aa, Artificial Sequence
  SARS-CoV-2/Shenzhen/SZTH-004/2020__EPI_ISL_406595 spike protein (1-1273)(G889C_L1034C)
MFVFLVLLPLVSSQCVNLTTRTQLPPAYTNSFTRGVYYPDKVFRSSVLHSTQDLFLPFFSNVTWFHAIHVSGTNGTKRFDNPVLPFNDGVYFASTEKSNIIRGWIFGTTLDSKTQSLLIVNNATNVVIKVCEFQFCNDPFLGVYYHKNNKSWMESEFRVYSSANNCTFEYVSQPFLMDLEGKQGNFKNLREFVFKNIDGYFKIYSKHTPINLVRDLPQGFSALEPLVDLPIGINITRFQTLLALHRSYLTPGDSSSGWTAGAAAYYVGYLQPRTFLLKYNENGTITDAVDCALDPLSETKCTLKSFTVEKGIYQTSNFRVQPTESIVRFPNITNLCPFGEVFNATRFASVYAWDRKRISNCVAYYSVLYNSASFSTFKCYGVSPTKLNDLCFTNVYADSFVIRGDEVRQIAPGQTGKIADYNYKLPDDFTGCVIAWNSNNLDSKVGGNYNYLYRLFRKSNLKPFERDISTEIYQAGSTPCNGVEGFNCYFPLQSYGFQPTNGVGYQPYRVVVLSFELLHAPATVCGPKKSTNLVKNKCVNFNFNGLTGTGVLTESNKKFLPFQQFGRDIADTTDAVRDPQTLEILDITPCSFGGVSVITPGTNTSNQVAVLYQDVNCTEVPVAIHADQLTPTWRVYSTGSNVFQTRAGCLIGAEHVNNSYECDIPIGAGICASYQTQTNSPRRARSVASQSIIAYTMSLGAENSVAYSNNSIAIPTNFTISVTTEILPVSMTKTSVDCTMYICGDSTECSNLLLQYGSFCTQLNRALTGIAVEQDKNTQEVFAQVKQIYKTPPIKDFGGFNFSQILPDPSKPSKRSFIEDLLFNKVTLADAGFIKQYGDCLGDIAARDLICAQKFNGLTVLPPLLTDEMIAQYTSALLAGTITSGWTFCAGAALQIPFAMQMAYRFNGIGVTQNVLYENQKLIANQFNSAIGKIQDSLSSTASALGKLQDVVNQNAQALNTLVKQLSSNFGAISSVLNDILSRLDKVEAEVQIDRLITGRLQSLQTYVTQQLIRAAEIRASANLAATKMSECVCGQSKRVDFCGKGYHLMSFPQSAPHGVVFLHVTYVPAQEKNFTTAPAICHDGKAHFPREGVFVSNGTHWFVTQRNFYEPQIITTDNTFVSGNCDVVIGIVNNTVYDPLQPELDSFKEELDKYFKNHTSPDVDLGDISGINASVVNIQKEIDRLNEVAKNLNESLIDLQELGKYEQYIKWPWYIWLGFIAGLIAIVMVTIMLCCMTSCCSCLKGCCSCGSCCKFDEDDSEPVLKGVKLHYT

SEQ ID NO: 816 - protein, 1273 aa, Artificial Sequence
  SARS-CoV-2/France/IDF0372/2020__EPI_ISL_406596 spike protein (1-1273)(G889C_L1034C)
MFVFLVLLPLVSSQCVNLTTRTQLPPAYTNSFTRGVYYPDKVFRSSVLHSTQDLFLPFFSNVTWFHAIHVSGTNGTKRFDNPVLPFNDGVYFASTEKSNIIRGWIFGTTLDSKTQSLLIVNNATNVVIKVCEFQFCNDPFLGVYYHKNNKSWMESEFRVYSSANNCTFEYVSQPFLMDLEGKQGNFKNLREFVFKNIDGYFKIYSKHTPINLVRDLPQGFSALEPLVDLPIGINITRFQTLLALHRSYLTPGDSSSGWTAGAAAYYVGYLQPRTFLLKYNENGTITDAVDCALDPLSETKCTLKSFTVEKGIYQTSNFRVQPTESIVRFPNITNLCPFGEVFNATRFASVYAWNRKRISNCVADYSFLYNSASFSTFKCYGVSPTKLNDLCFTNVYADSFVIRGDEVRQIAPGQTGKIADYNYKLPDDFTGCVIAWNSNNLDSKVGGNYNYLYRLFRKSNLKPFERDISTEIYQAGSTPCNGVEGFNCYFPLQSYGFQPTNGVGYQPYRVVVLSFELLHAPATVCGPKKSTNLVKNKCVNFNFNGLTGTGVLTESNKKFLPFQQFGRDIADTTDAVRDPQTLEILDITPCSFGGVSVITPGTNTSNQVAVLYQDVNCTEVPVAIHADQLTPTWRVYSTGSNVFQTRAGCLIGAEHVNNSYECDIPIGAGICASYQTQTNSPRRARSVASQSIIAYTMSLGAENSVAYSNNSIAIPTNFTISVTTEILPVSMTKTSVDCTMYICGDSTECSNLLLQYGSFCTQLNRALTGIAVEQDKNTQEVFAQVKQIYKTPPIKDFGGFNFSQILPDPSKPSKRSFIEDLLFNKVTLADAGFIKQYGDCLGDIAARDLICAQKFNGLTVLPPLLTDEMIAQYTSALLAGTITSGWTFCAGAALQIPFAMQMAYRFNGIGVTQNVLYENQKLIANQFNSAIGKIQDSLSSTASALGKLQDVVNQNAQALNTLVKQLSSNFGAISSVLNDILSRLDKVEAEVQIDRLITGRLQSLQTYVTQQLIRAAEIRASANLAATKMSECVCGQSKRVDFCGKGYHLMSFPQSAPHGVVFLHVTYVPAQEKNFTTAPAICHDGKAHFPREGVFVSNGTHWFVTQRNFYEPQIITTDNTFVSGNCDVVIGIVNNTVYDPLQPELDSFKEELDKYFKNHTSPDVDLGDISGINASVVNIQKEIDRLNEVAKNLNESLIDLQELGKYEQYIKWPWYIWLGFIAGLIAIVMVTIMLCCMTSCCSCLKGCCSCGSCCKFDEDDSEPVLKGVKLHYT

SEQ ID NO: 817 - protein, 1273 aa, Artificial Sequence
  SARS-CoV-2/Australia/VIC01/2020__EPI_ISL_406844 spike protein (1-1273)(G889C_L1034C)
MFVFLVLLPLVSSQCVNLTTRTQLPPAYTNSFTRGVYYPDKVFRSSVLHSTQDLFLPFFSNVTWFHAIHVSGTNGTKRFDNPVLPFNDGVYFASTEKSNIIRGWIFGTTLDSKTQSLLIVNNATNVVIKVCEFQFCNDPFLGVYYHKNNKSWMESEFRVYSSANNCTFEYVSQPFLMDLEGKQGNFKNLREFVFKNIDGYFKIYSKHTPINLVRDLPQGFSALEPLVDLPIGINITRFQTLLALHRRYLTPGDSSSGWTAGAAAYYVGYLQPRTFLLKYNENGTITDAVDCALDPLSETKCTLKSFTVEKGIYQTSNFRVQPTESIVRFPNITNLCPFGEVFNATRFASVYAWNRKRISNCVADYSVLYNSASFSTFKCYGVSPTKLNDLCFTNVYADSFVIRGDEVRQIAPGQTGKIADYNYKLPDDFTGCVIAWNSNNLDSKVGGNYNYLYRLFRKSNLKPFERDISTEIYQAGSTPCNGVEGFNCYFPLQSYGFQPTNGVGYQPYRVVVLSFELLHAPATVCGPKKSTNLVKNKCVNFNFNGLTGTGVLTESNKKFLPFQQFGRDIADTTDAVRDPQTLEILDITPCSFGGVSVITPGTNTSNQVAVLYQDVNCTEVPVAIHADQLTPTWRVYSTGSNVFQTRAGCLIGAEHVNNSYECDIPIGAGICASYQTQTNSPRRARSVASQSIIAYTMSLGAENSVAYSNNSIAIPTNFTISVTTEILPVSMTKTSVDCTMYICGDSTECSNLLLQYGSFCTQLNRALTGIAVEQDKNTQEVFAQVKQIYKTPPIKDFGGFNFSQILPDPSKPSKRSFIEDLLFNKVTLADAGFIKQYGDCLGDIAARDLICAQKFNGLTVLPPLLTDEMIAQYTSALLAGTITSGWTFCAGAALQIPFAMQMAYRFNGIGVTQNVLYENQKLIANQFNSAIGKIQDSLSSTASALGKLQDVVNQNAQALNTLVKQLSSNFGAISSVLNDILSRLDKVEAEVQIDRLITGRLQSLQTYVTQQLIRAAEIRASANLAATKMSECVCGQSKRVDFCGKGYHLMSFPQSAPHGVVFLHVTYVPAQEKNFTTAPAICHDGKAHFPREGVFVSNGTHWFVTQRNFYEPQIITTDNTFVSGNCDVVIGIVNNTVYDPLQPELDSFKEELDKYFKNHTSPDVDLGDISGINASVVNIQKEIDRLNEVAKNLNESLIDLQELGKYEQYIKWPWYIWLGFIAGLIAIVMVTIMLCCMTSCCSCLKGCCSCGSCCKFDEDDSEPVLKGVKLHYT

SEQ ID NO: 818 - protein, 1273 aa, Artificial Sequence
  SARS-CoV-2/Germany/BavPat1/2020__EPI_ISL_406862 spike protein (1-1273)(G889C_L1034C)
MFVFLVLLPLVSSQCVNLTTRTQLPPAYTNSFTRGVYYPDKVFRSSVLHSTQDLFLPFFSNVTWFHAIHVSGTNGTKRFDNPVLPFNDGVYFASTEKSNIIRGWIFGTTLDSKTQSLLIVNNATNVVIKVCEFQFCNDPFLGVYYHKNNKSWMESEFRVYSSANNCTFEYVSQPFLMDLEGKQGNFKNLREFVFKNIDGYFKIYSKHTPINLVRDLPQGFSALEPLVDLPIGINITRFQTLLALHRSYLTPGDSSSGWTAGAAAYYVGYLQPRTFLLKYNENGTITDAVDCALDPLSETKCTLKSFTVEKGIYQTSNFRVQPTESIVRFPNITNLCPFGEVFNATRFASVYAWNRKRISNCVADYSVLYNSASFSTFKCYGVSPTKLNDLCFTNVYADSFVIRGDEVRQIAPGQTGKIADYNYKLPDDFTGCVIAWNSNNLDSKVGGNYNYLYRLFRKSNLKPFERDISTEIYQAGSTPCNGVEGFNCYFPLQSYGFQPTNGVGYQPYRVVVLSFELLHAPATVCGPKKSTNLVKNKCVNFNFNGLTGTGVLTESNKKFLPFQQFGRDIADTTDAVRDPQTLEILDITPCSFGGVSVITPGTNTSNQVAVLYQGVNCTEVPVAIHADQLTPTWRVYSTGSNVFQTRAGCLIGAEHVNNSYECDIPIGAGICASYQTQTNSPRRARSVASQSIIAYTMSLGAENSVAYSNNSIAIPTNFTISVTTEILPVSMTKTSVDCTMYICGDSTECSNLLLQYGSFCTQLNRALTGIAVEQDKNTQEVFAQVKQIYKTPPIKDFGGFNFSQILPDPSKPSKRSFIEDLLFNKVTLADAGFIKQYGDCLGDIAARDLICAQKFNGLTVLPPLLTDEMIAQYTSALLAGTITSGWTFCAGAALQIPFAMQMAYRFNGIGVTQNVLYENQKLIANQFNSAIGKIQDSLSSTASALGKLQDVVNQNAQALNTLVKQLSSNFGAISSVLNDILSRLDKVEAEVQIDRLITGRLQSLQTYVTQQLIRAAEIRASANLAATKMSECVCGQSKRVDFCGKGYHLMSFPQSAPHGVVFLHVTYVPAQEKNFTTAPAICHDGKAHFPREGVFVSNGTHWFVTQRNFYEPQIITTDNTFVSGNCDVVIGIVNNTVYDPLQPELDSFKEELDKYFKNHTSPDVDLGDISGINASVVNIQKEIDRLNEVAKNLNESLIDLQELGKYEQYIKWPWYIWLGFIAGLIAIVMVTIMLCCMTSCCSCLKGCCSCGSCCKFDEDDSEPVLKGVKLHYT

SEQ ID NO: 819 - protein, 1273 aa, Artificial Sequence
  SARS-CoV-2/Wuhan/HBCDC-HB-02/2020__EPI_ISL_412978 spike protein (1-1273)(G889C_L1034C)
MFVFLVLLPLVSSQCVNLTTRTQLPPAYTNSFTRGVYYPDKVFRSSVLHSTQDLFLPFFSNVTWFHAIHVSGTNGTKRFDNPVLPFNDGVYFASTEKSNIIRGWIFGTTLDSKTQSLLIVNNATNVVIKVCEFQFCNDPFLGVYYHKNNKSWMESEFRVYSSANNCTFEYVSQPFLMDLEGKQGNFKNLREFVFKNIDGYFKIYSKHTPINLVRDLPQGFSALEPLVDLPIGINITRFQTLLALHRSYLTPGDSSSGWTAGAAAYYVGYLQPRTFLLKYNENGTITDAVDCALDPLSETKCTLKSFTVEKGIYQTSNFRVQPTESIVRFPNITNLCPFGEVFNATRFASVYAWNRKRISNCVADYSVLYNSASFSTFKCYGVSPTKLNDLCFTNVYADSFVIRGDEVRQIAPGQTGKIADYNYKLPDDFTGCVIAWNSNNLDSKVGGNYNYLYRLFRKSNLKPFERDISTEIYQAGSTPCNGVEGFNCYFPLQSYGFQPTNGVGYQPYRVVVLSFELLHAPATVCGPKKSTNLVKNKCVNFNFNGLTGTGVLTESNKKFLPFQQFGRDIADTTDAVRDPQTLEILDITPCSFGGVSVITPGTNTSNQVAVLYQDVNCTEVPVAIHADQLTPTWRVYSTGSNVFQTRAGCLIGAEHVNNSYECDIPIGAGICASYQTQTNSPRRARSVASQSIIAYTMSLGAENSVAYSNNSIAIPTNFTISVTTEILPVSMTKTSVDCTMYICGDSTECSNFLLQYGSFCTQLNRALTGIAVEQDKNTQEVFAQVKQIYKTPPIKDFGGFNFSQILPDPSKPSKRSFIEDLLFNKVTLADAGFIKQYGDCLGDIAARDLICAQKFNGLTVLPPLLTDEMIAQYTSALLAGTITSGWTFCAGAALQIPFAMQMAYRFNGIGVTQNVLYENQKLIANQFNSAIGKIQDSLSSTASALGKLQDVVNQNAQALNTLVKQLSSNFGAISSVLNDILSRLDKVEAEVQIDRLITGRLQSLQTYVTQQLIRAAEIRASANLAATKMSECVCGQSKRVDFCGKGYHLMSFPQSAPHGVVFLHVTYVPAQEKNFTTAPAICHDGKAHFPREGVFVSNGTHWFVTQRNFYEPQIITTDNTFVSGNCDVVIGIVNNTVYDPLQPELDSFKEELDKYFKNHTSPDVDLGDISGINASVVNIQKEIDRLNEVAKNLNESLIDLQELGKYEQYIKWPWYIWLGFIAGLIAIVMVTIMLCCMTSCCSCLKGCCSCGSCCKFDEDDSEPVLKGVKLHYT

SEQ ID NO: 820 - protein, 1273 aa, Artificial Sequence
  SARS-CoV-2/Australia/QLD02/2020__EPI_ISL_407896 spike protein (1-1273)(G889C_L1034C)
MFVFLVLLPLVSSQCVNLTTRTQLPPAYTNSFTRGVYYPDKVFRSSVLHSTQDLFLPFFSNVTWFHAIHVSGTNGTKRFDNPVLPFNDGVYFASTEKSNIIRGWIFGTTLDSKTQSLLIVNNATNVVIKVCEFQFCNDPFLGVYYHKNNKSWMESEFRVYSSANNCTFEYVSQPFLMDLEGKQGNFKNLREFVFKNIDGYFKIYSKHTPINLVRDLPQGFSALEPLVDLPIGINITRFQTLLALHRSYLTPGDSSSGWTAGAAAYYVGYLQPRTFLLKYNENGTITDAVDCALDPLSETKCTLKSFTVEKGIYQTSNFRVQPTESIVRFPNITNLCPFGEVFNATRFASVYAWNRKRISNCVADYSVLYNSASFSTFKCYGVSPTKLNDLCFTNVYADSFVIRGDEVRQIAPGQTGKIADYNYKLPDDFTGCVIAWNSNNLDSKVGGNYNYLYRLFRKSNLKPFERDISTEIYQAGSTPCNGVEGFNCYFPLQSYGFQPTNGVGYQPYRVVVLSFELLHAPATVCGPKKSTNLVKNKCVNFNFNGLTGTGVLTESNKKFLPFQQFGRDIADTTDAVRDPQTLEILDITPCSFGGVSVITPGTNTSNQVAVLYQDVNCTEVPVAIHADQLTPTWRVYSTGSNVFQTRAGCLIGAEHVNNSYECDIPIGAGICASYQTQTNSPRRARSVASQSIIAYTMSLGAENSVAYSNNSIAIPTNFTISVTTEILPVSMTKTSVDCTMYICGDSTECSNLLLQYGSFCTQLNRALTGIAVEQDKNTQEVFAQVKQIYKTPPIKDFGGFNFSQILPDPSKPSKRSFIEDLLFNKVTLADAGFIKQYGDCLGDIAARDLICAQKFNGLTVLPPLLTDEMIAQYTSALLAGTITSGWTFCAGAALQIPFAMQMAYRFNGIGVTQNVLYENQKLIANQFNSAIGKIQDSLSSTASALGKLQDVVNQNAQALNTLVKQLSSNFGAISSVLNDILSRLDKVEAEVQIDRLITGRLQSLQTYVTQQLIRAAEIRASANLAATKMSECVCGQSKRVDFCGKGYHLMSFPQSAPHGVVFLHVTYVPAQEKNFTTAPAICHDGKAHFPREGVFVSNGTHWFVTQRNFYEPQIITTDNTFVSGNCDVVIGIVNNTVYDPLQLELDSFKEELDKYFKNHTSPDVDLGDISGINASVVNIQKEIDRLNEVAKNLNESLIDLQELGKYEQYIKWPWYIWLGFIAGLIAIVMVTIMLCCMTSCCSCLKGCCSCGSCCKFDEDDSEPVLKGVKLHYT

SEQ ID NO: 821 - protein, 1273 aa, Artificial Sequence
  SARS-CoV-2/India/1-31/2020__EPI_ISL_413523 spike protein (1-1273)(G889C_L1034C)
MFVFLVLLPLVSSQCVNLTTRTQLPPAYTNSFTRGVYYPDKVFRSSVLHSTQDLFLPFFSNVTWFHAIHVSGTNGTKRFDNPVLPFNDGVYFASTEKSNIIRGWIFGTTLDSKTQSLLIVNNATNVVIKVCEFQFCNDPFLGVYYHKNNKSWMESEFRVYSSANNCTFEYVSQPFLMDLEGKQGNFKNLREFVFKNIDGYFKIYSKHTPINLVRDLPQGFSALEPLVDLPIGINITRFQTLLALHRSYLTPGDSSSGWTAGAAAYYVGYLQPRTFLLKYNENGTITDAVDCALDPLSETKCTLKSFTVEKGIYQTSNFRVQPTESIVRFPNITNLCPFGEVFNATRFASVYAWNRKRISNCVADYSVLYNSASFSTFKCYGVSPTKLNDLCFTNVYADSFVIRGDEVRQIAPGQTGKIADYNYKLPDDFTGCVIAWNSNNLDSKVGGNYNYLYRLFRKSNLKPFERDISTEIYQAGSTPCNGVEGFNCYFPLQSYGFQPTNGVGYQPYRVVVLSFELLHAPATVCGPKKSTNLVKNKCVNFNFNGLTGTGVLTESNKKFLPFQQFGRDIADTTDAVRDPQTLEILDITPCSFGGVSVITPGTNTSNQVAVLYQDVNCTEVPVAIHADQLTPTWRVYSTGSNVFQTRAGCLIGAEHVNNSYECDIPIGAGICASYQTQTNSPRRARSVASQSIIAYTMSLGAENSVAYSNNSIAIPTNFTISVTTEILPVSMTKTSVDCTMYICGDSTECSNLLLQYGSFCTQLNRALTGIAVEQDKNTQEVFAQVKQIYKTPPIKDFGGFNFSQILPDPSKPSKRSFIEDLLFNKVTLADAGFIKQYGDCLGDIAARDLICAQKFNGLTVLPPLLTDEMIAQYTSALLAGTITSGWTFCAGAALQIPFAMQMAYRFNGIGVTQNVLYENQKLIANQFNSVIGKIQDSLSSTASALGKLQDVVNQNAQALNTLVKQLSSNFGAISSVLNDILSRLDKVEAEVQIDRLITGRLQSLQTYVTQQLIRAAEIRASANLAATKMSECVCGQSKRVDFCGKGYHLMSFPQSAPHGVVFLHVTYVPAQEKNFTTAPAICHDGKAHFPREGVFVSNGTHWFVTQRNFYEPQIITTDNTFVSGNCDVVIGIVNNTVYDPLQPELDSFKEELDKYFKNHTSPDVDLGDISGINASVVNIQKEIDRLNEVAKNLNESLIDLQELGKYEQYIKWPWYIWLGFIAGLIAIVMVTIMLCCMTSCCSCLKGCCSCGSCCKFDEDDSEPVLKGVKLHYT

SEQ ID NO: 822 - protein, 1273 aa, Artificial Sequence
  SARS-CoV-2/Guangdong/GD2020087-P0008/2020__EPI_ISL_413863 spike protein (1-1273)(G889C_L1034C)
MFVFLVLLPLVSSQCVNLTTRTQLPPAYTNSFTRGVYYPDKVFRSSVLHSTQDLFLPFFSNVTWFHAIHVSGTNGTKRFDNPVLPFNDGVYFASTEKSNIIRGWIFGTTLDSKTQSLLIVNNATNVVIKVCEFQFCNDPFLGVYYHKNNKSWMESEFRVYSSANNCTFEYVSQPFLMDLEGKQGNFKNLREFVFKNIDGYFKIYSKHTPINLVRDLPQGFSALEPLVDLPIGINITRFQTLLALHRSYLTPGDSSSGWTAGAAAYYVGYLQPRTFLLKYNENGTITDAVDCALDPLSETKCTLKSFTVEKGIYQTSNFRVQPTESIVRFPNITNLCPFGEVFNATRFASVYAWNRKRISNCVADYSVLYNSASFSTFKCYGVSPTKLNDLCFTNVYADSFVIRGDEVREIAPGQTGKIADYNYKLPDDFTGCVIAWNSNNLDSKVGGNYNYLYRLFRKSNLKPFERDISTEIYQAGSTPCNGVEGFNCYFPLQSYGFQPTNGVGYQPYRVVVLSFELLHAPATVCGPKKSTNLVKNKCVNFNFNGLTGTGVLTESNKKFLPFQQFGRDIADTTDAVRDPQTLEILDITPCSFGGVSVITPGTNTSNQVAVLYQDVNCTEVPVAIHADQLTPTWRVYSTGSNVFQTRAGCLIGAEHVNNSYECDIPIGAGICASYQTQTNSPRRARSVASQSIIAYTMSLGAENSVAYSNNSIAIPTNFTISVTTEILPVSMTKTSVDCTMYICGDSTECSNLLLQYGSFCTQLNRALTGIAVEQDKNTQEVFAQVKQIYKTPPIKDFGGFNFSQILPDPSKPSKRSFIEDLLFNKVTLADAGFIKQYGDCLGDIAARDLICAQKFNGLTVLPPLLTDEMIAQYTSALLAGTITSGWTFCAGAALQIPFAMQMAYRFNGIGVTQNVLYENQKLIANQFNSAIGKIQDSLSSTASALGKLQDVVNQNAQALNTLVKQLSSNFGAISSVLNDILSRLDKVEAEVQIDRLITGRLQSLQTYVTQQLIRAAEIRASANLAATKMSECVCGQSKRVDFCGKGYHLMSFPQSAPHGVVFLHVTYVPAQEKNFTTAPAICHDGKAHFPREGVFVSNGTHWFVTQRNFYEPQIITTDNTFVSGNCDVVIGIVNNTVYDPLQPELDSFKEELDKYFKNHTSPDVDLGDISGINASVVNIQKEIDRLNEVAKNLNESLIDLQELGKYEQYIKWPWYIWLGFIAGLIAIVMVTIMLCCMTSCCSCLKGCCSCGSCCKFDEDDSEPVLKGVKLHYT

SEQ ID NO: 823 - protein, 1273 aa, Artificial Sequence
  SARS-CoV-2/Sweden/01/2020__EPI_ISL_411951 spike protein (1-1273)(G889C_L1034C)
MFVFLVLLPLVSSQCVNLTTRTQLPPAYTNSFTRGVYYPDKVFRSSVLHSTQDLFLPFFSNVTWFHAIHVSGTNGTKRFDNPVLPFNDGVYFASTEKSNIIRGWIFGTTLDSKTQSLLIVNNATNVVIKVCEFQFCNDPFLGVYYHKNNKSWMESEFRVYSSANNCTFEYVSQPFLMDLEGKQGNFKNLREFVFKNIDGYFKIYSKHTPINLVRDLPQGFSALEPLVDLPIGINITRFQTLLALHRSYLTPGDSSSGWTAGAAAYYVGYLQPRTFLLKYNENGTITDAVDCALDPLSETKCTLKSFTVEKGIYQTSNFRVQPTESIVRFPNITNLCPFGEVFNATRFASVYAWNRKRISNCVADYSVLYNSASFSTFKCYGVSPTKLNDLCFTNVYADSFVIRGDEVRQIAPGQTGKIADYNYKLPDDFTGCVIAWNSNNLDSKVGGNYNYLYRLFRKSNLKPFERDISTEIYQAGSTPCNGVEGFNCYFPLQSYGFQPTNGVGYQPYRVVVLSFELLHAPATVCGPKKSTNLVKNKCVNFNFNGLTGTGVLTESNKKFLPFQQFGRDIADTTDAVRDPQTLEILDITPCSFGGVSVITPGTNTSNQVAVLYQDVNCTEVPVAIHADQLTPTWRVYSTGSNVFQTRAGCLIGAEHVNNSYECDIPIGAGICASYQTQTNSPRRARSVASQSIIAYTMSLGAENSVAYSNNSIAIPTNFTISVTTEILPVSMTKTSVDCTMYICGDSTECSNLLLQYGSFCTQLNRALTGIAVEQDKNTQEVFAQVKQIYKTPPIKDCGGFNFSQILPDPSKPSKRSFIEDLLFNKVTLADAGFIKQYGDCLGDIAARDLICAQKFNGLTVLPPLLTDEMIAQYTSALLAGTITSGWTFCAGAALQIPFAMQMAYRFNGIGVTQNVLYENQKLIANQFNSAIGKIQDSLSSTASALGKLQDVVNQNAQALNTLVKQLSSNFGAISSVLNDILSRLDKVEAEVQIDRLITGRLQSLQTYVTQQLIRAAEIRASANLAATKMSECVCGQSKRVDFCGKGYHLMSFPQSAPHGVVFLHVTYVPAQEKNFTTAPAICHDGKAHFPREGVFVSNGTHWFVTQRNFYEPQIITTDNTFVSGNCDVVIGIVNNTVYDPLQPELDSFKEELDKYFKNHTSPDVDLGDISGINASVVNIQKEIDRLNEVAKNLNESLIDLQELGKYEQYIKWPWYIWLGFIAGLIAIVMVTIMLCCMTSCCSCLKGCCSCGSCCKFDEDDSEPVLKGVKLHYT

SEQ ID NO: 824 - protein, 1273 aa, Artificial Sequence
  SARS-CoV-2/Tianmen/HBCDC-HB-07/2020__EPI_ISL_412983 spike protein (1-1273)(G889C_L1034C)
MFVFLVLLPLVSSQCVNLTTRTQLPPAYTNSFTRGVYYPDKVFRSSVLHSTQDLFLPFFSNVTWFHAIHVSGTNGTKRFDNPVLPFNDGVYFASTEKSNIIRGWIFGTTLDSKTQSLLIVNNATNVVIKVCEFQFCNDPFLGVYYHKNNKSWMESEFRVYSSANNCTFEYVSQPFLMDLEGKQGNFKNLREFVFKNIDGYFKIYSKHTPINLVRDLPQGFSALEPLVDLPIGINITRFQTLLALHRSYLTPGDSSSGWTAGAAAYYVGYLQPRTFLLKYNENGTITDAVDCALDPLSETKCTLKSFTVEKGIYQTSNFRVQPTESIVRFPNITNLCPFGEVFNATRFASVYAWNRKRISNCVADYSVLYNSASFSTFKCYGVSPTKLNDLCFTNVYADSFVIRGDEVRQIAPGQTGKIADYNYKLPDDFTGCVIAWNSNNLDSKVGGNYNYLYRLFRKSNLKPFERDISTEIYQAGSTPCNGVEGFNCYFPLQSYGFQPTNGVGYQPYRVVVLSFELLHAPATVCGPKKSTNLVKNKCVNFNFNGLTGTGVLTESNKKFLPFQQFGRDIADTTDAVRDPQTLEILDITPCSFGGVSVITPGTNTSNQVAVLYQDLNCTEVPVAIHADQLTPTWRVYSTGSNVFQTRAGCLIGAEHVNNSYECDIPIGAGICASYQTQTNSPRRARSVASQSIIAYTMSLGAENSVAYSNNSIAIPTNFTISVTTEILPVSMTKTSVDCTMYICGDSTECSNLLLQYGSFCTQLNRALTGIAVEQDKNTQEVFAQVKQIYKTPPIKDFGGFNFSQILPDPSKPSKRSFIEDLLFNKVTLADAGFIKQYGDCLGDIAARDLICAQKFNGLTVLPPLLTDEMIAQYTSALLAGTITSGWTFCAGAALQIPFAMQMAYRFNGIGVTQNVLYENQKLIANQFNSAIGKIQDSLSSTASALGKLQDVVNQNAQALNTLVKQLSSNFGAISSVLNDILSRLDKVEAEVQIDRLITGRLQSLQTYVTQQLIRAAEIRASANLAATKMSECVCGQSKRVDFCGKGYHLMSFPQSAPHGVVFLHVTYVPAQEKNFTTAPAICHDGKAHFPREGVFVSNGTHWFVTQRNFYEPQIITTDNTFVSGNCDVVIGIVNNTVYDPLQPELDSFKEELDKYFKNHTSPDVDLGDISGINASVVNIQKEIDRLNEVAKNLNESLIDLQELGKYEQYIKWPWYIWLGFIAGLIAIVMVTIMLCCMTSCCSCLKGCCSCGSCCKFDEDDSEPVLKGVKLHYT

SEQ ID NO: 825 - protein, 1273 aa, Artificial Sequence
  SARS-CoV-2/Hong Kong/case42_VM20002493/2020__EPI_ISL_414527 spike protein (1-1273)(G889C_L1034C)
MFVFLVLLPLVSSQCVNLTTRTQLPPAYTNSFTRGVYYPDKVFRSSVLHSTQDLFLPFFSNVTWFHAIHVSGTNGTKRFDNPVLPFNDGVYFASTEKSNIIRGWIFGTTLDSKTQSLLIVNNATNVVIKVCEFQFCNDPFLGVYYHKNNKSWMESEFRVYSSANNCTFEYVSQPFLMDLEGKQGNFKNLREFVFKNIDGYFKIYSKHTPINLVRDLPQGFSALEPLVDLPIGINITRFQTLLALHRSYLTPGDSSSGWTAGAAAYYVGYLQPRTFLLKYNENGTITDAVDCALDPLSETKCTLKSFTVEKGIYQTSNFRVQPTESIVRFPNITNLCPFGEVFNATRFASVYAWNRKRISNCVADYSVLYNSASFSTFKCYGVSPTKLNDLCFTNVYADSFVIRGDEVRQIAPGQTGKIADYNYKLPDDFTGCVIAWNSNNLDSKVGGNYNYLYRLFRKSNLKPFERDISTEIYQAGSTPCNGVEGFNCYFPLQSYGFQPTNGVGYQPYRVVVLSFELLHAPATVCGPKKSTNLVKNKCVNFNFNGLTGTGVLTESNKKFLPFQQFGRDIADTTDAVRDPQTLEILDITPCSFGGVSVITPGTNTSNQVAVLYQDVNCTEVPVAIHADQLTPTWRVYSTGSNVFQTRAGCLIGAEHVNNSYECDIPIGAGICASYQTQTNSPRRARSVASQSIIAYTMSLGAENSVAYSNNSIAIPTNFAISVTTEILPVSMTKTSVDCTMYICGDSTECSNLLLQYGSFCTQLNRALTGIAVEQDKNTQEVFAQVKQIYKTPPIKDFGGFNFSQILPDPSKPSKRSFIEDLLFNKVTLADAGFIKQYGDCLGDIAARDLICAQKFNGLTVLPPLLTDEMIAQYTSALLAGTITSGWTFCAGAALQIPFAMQMAYRFNGIGVTQNVLYENQKLIANQFNSAIGKIQDSLSSTASALGKLQDVVNQNAQALNTLVKQLSSNFGAISSVLNDILSRLDKVEAEVQIDRLITGRLQSLQTYVTQQLIRAAEIRASANLAATKMSECVCGQSKRVDFCGKGYHLMSFPQSAPHGVVFLHVTYVPAQEKNFTTAPAICHDGKAHFPREGVFVSNGTHWFVTQRNFYEPQIITTDNTFVSGNCDVVIGIVNNTVYDPLQPELDSFKEELDKYFKNHTSPDVDLGDISGINASVVNIQKEIDRLNEVAKNLNESLIDLQELGKYEQYIKWPWYIWLGFIAGLIAIVMVTIMLCCMTSCCSCLKGCCSCGSCCKFDEDDSEPVLKGVKLHYT

SEQ ID NO: 826 - protein, 1273 aa, Artificial Sequence
  SARS-CoV-2/USA/CruiseA-23/2020__EPI_ISL_414482 spike protein (1-1273)(G889C_L1034C)
MFVFLVLLPLVSSQCVNLTTRTQLPPAYTNSFTRGVYYPDKVFRSSVLHSTQDLFLPFFSNVTWFHAIHVSGTNGTKRFDNPVLPFNDGVYFASTEKSNIIRGWIFGTTLDSKTQSLLIVNNATNVVIKVCEFQFCNDPFLGVYYHKNNKSWMESEFRVYSSANNCTFEYVSQPFLMDLEVKQGNFKNLREFVFKNIDGYFKIYSKHTPINLVRDLPQGFSALEPLVDLPIGINITRFQTLLALHRSYLTPGDSSSGWTAGAAAYYVGYLQPRTFLLKYNENGTITDAVDCALDPLSETKCTLKSFTVEKGIYQTSNFRVQPTESIVRFPNITNLCPFGEVFNATRFASVYAWNRKRISNCVADYSVLYNSASFSTFKCYGVSPTKLNDLCFTNVYADSFVIRGDEVRQIAPGQTGKIADYNYKLPDDFTGCVIAWNSNNLDSKVGGNYNYLYRLFRKSNLKPFERDISTEIYQAGSTPCNGVEGFNCYFPLQSYGFQPTNGVGYQPYRVVVLSFELLHAPATVCGPKKSTNLVKNKCVNFNFNGLTGTGVLTESNKKFLPFQQFGRDIADTTDAVRDPQTLEILDITPCSFGGVSVITPGTNTSNQVAVLYQDVNCTEVPVAIHADQLTPTWRVYSTGSNVFQTRAGCLIGAEHVNNSYECDIPIGAGICASYQTQTNSPRRARSVASQSIIAYTMSLGAENSVAYSNNSIAIPTNFTISVTTEILPVSMTKTSVDCTMYICGDSTECSNLLLQYGSFCTQLNRALTGIAVEQDKNTQEVFAQVKQIYKTPPIKDFGGFNFSQILPDPSKPSKRSFIEDLLFNKVTLADAGFIKQYGDCLGDIAARDLICAQKFNGLTVLPPLLTDEMIAQYTSALLAGTITSGWTFCAGAALQIPFAMQMAYRFNGIGVTQNVLYENQKLIANQFNSAIGKIQDSLSSTASALGKLQDVVNQNAQALNTLVKQLSSNFGAISSVLNDILSRLDKVEAEVQIDRLITGRLQSLQTYVTQQLIRAAEIRASANLAATKMSECVCGQSKRVDFCGKGYHLMSFPQSAPHGVVFLHVTYVPAQEKNFTTAPAICHDGKAHFPREGVFVSNGTHWFVTQRNFYEPQIITTDNTFVSGNCDVVIGIVNNTVYDPLQPELDSFKEELDKYFKNHTSPDVDLGDISGINASVVNIQKEIDRLNEVAKNLNESLIDLQELGKYEQYIKWPWYIWLGFIAGLIAIVMVTIMLCCMTSCCSCLKGCCSCGSCCKFDEDDSEPVLKGVKLHYT

SEQ ID NO: 827 - protein, 1273 aa, Artificial Sequence
  SARS-CoV-2/Hong Kong/case85_VM20002868/2020__EPI_ISL_414519 spike protein (1-1273)(G889C_L1034C)
MFVFLVLVPLVSSQCVNLTTRTQLPPAYTNSFTRGVYYPDKVFRSSVLHSTQDLFLPFFSNVTWFHAIHVSGTNGTKRFDNPVLPFNDGVYFASTEKSNIIRGWIFGTTLDSKTQSLLIVNNATNVVIKVCEFQFCNDPFLGVYYHKNNKSWMESEFRVYSSANNCTFEYVSQPFLMDLEGKQGNFKNLREFVFKNIDGYFKIYSKHTPINLVRDLPQGFSALEPLVDLPIGINITRFQTLLALHRSYLTPGDSSSGWTAGAAAYYVGYLQPRTFLLKYNENGTITDAVDCALDPLSETKCTLKSFTVEKGIYQTSNFRVQPTESIVRFPNITNLCPFGEVFNATRFASVYAWNRKRISNCVADYSVLYNSASFSTFKCYGVSPTKLNDLCFTNVYADSFVIRGDEVRQIAPGQTGKIADYNYKLPDDFTGCVIAWNSNNLDSKVGGNYNYLYRLFRKSNLKPFERDISTEIYQAGSTPCNGVEGFNCYFPLQSYGFQPTNGVGYQPYRVVVLSFELLHAPATVCGPKKSTNLVKNKCVNFNFNGLTGTGVLTESNKKFLPFQQFGRDIADTTDAVRDPQTLEILDITPCSFGGVSVITPGTNTSNQVAVLYQDVNCTEVPVAIHADQLTPTWRVYSTGSNVFQTRAGCLIGAEHVNNSYECDIPIGAGICASYQTQTNSPRRARSVASQSIIAYTMSLGAENSVAYSNNSIAIPTNFTISVTTEILPVSMTKTSVDCTMYICGDSTECSNLLLQYGSFCTQLNRALTGIAVEQDKNTQEVFAQVKQIYKTPPIKDFGGFNFSQILPDPSKPSKRSFIEDLLFNKVTLADAGFIKQYGDCLGDIAARDLICAQKFNGLTVLPPLLTDEMIAQYTSALLAGTITSGWTFCAGAALQIPFAMQMAYRFNGIGVTQNVLYENQKLIANQFNSAIGKIQDSLSSTASALGKLQDVVNQNAQALNTLVKQLSSNFGAISSVLNDILSRLDKVEAEVQIDRLITGRLQSLQTYVTQQLIRAAEIRASANLAATKMSECVCGQSKRVDFCGKGYHLMSFPQSAPHGVVFLHVTYVPAQEKNFTTAPAICHDGKAHFPREGVFVSNGTHWFVTQRNFYEPQIITTDNTFVSGNCDVVIGIVNNTVYDPLQPELDSFKEELDKYFKNHTSPDVDLGDISGINASVVNIQKEIDRLNEVAKNLNESLIDLQELGKYEQYIKWPWYIWLGFIAGLIAIVMVTIMLCCMTSCCSCLKGCCSCGSCCKFDEDDSEPVLKGVKLHYT

SEQ ID NO: 828 - protein, 1273 aa, Artificial Sequence
  SARS-CoV-2/England/200990660/2020__EPI_ISL_414523 spike protein (1-1273)(G889C_L1034C)
MFVFLVLLPLVSSQCVNLTTRTQLPPAYTNSFTRGVYYPDKVFRSSVLHSTQDLFLPFFSNVTWFHAIHVSGTNGTKRFDNPVLPFNDGVYFASTEKSNIIRGWIFGTTLDSKTQSLLIVNNATNVVIKVCEFQFCNDPFLGVYYHKNNKSWMESEFRVYSSANNCTFEYVSQPFLMDLEGKQGNFKNLREFVFKNIDGYFKIYSKHTPINLVRDLPQGFSALEPLVDLPIGINITRFQTLLALHRSYLTPGDSSSGWTAGAAAYYVGYLQPRTFLLKYNENGTITDAVDCALDPLSETKCTLKSFTVEKGIYQTSNFRVQPTESIVRFPNITNLCPFGEVFNATRFASVYAWNRKRISNCVADYSVLYNSASFSTFKCYGVSPTKLNDLCFTNVYADSFVIRGDEVRQIAPGQTGKIADYNYKLPDDFTGCVIAWNSNNLDSKVGGNYNYLYRLFRKSNLKPFERDISTEIYQAGSTPCNGVEGFNCYFPLQSYGFQPTNGVGYQPYRVVVLSFELLHAPATVCGPKKSTNLVKNKCVNFNFNGLTGTGVLTESNKKFLPFQQFGRDIADTTDAVRDPQTLEILDITPCSFGGVSVITPGTNTSNQVAVLYQGVNCTEVPVAIHADQLTPTWRVYSTGSNVFQTRAGCLIGAEHVNNSYECDIPIGAGICASYQTQTNSPRRARSVASQSIIAYTMSLGAENSVAYSNNSIAIPTNFTISVTTEILPVSMTKTSVDCTMYICGDSTECSNLLLQYGSFCTQLNRALTGIAVEQDKNTQEVFAQVKQIYKTPPIKDFGGFNFSQILPDPSKPSKRSFIEDLLFNKVTLADAGFIKQYGDCLGDIAARDLICAQKFNGLTVLPPLLTDEMIAQYTSALLAGTITSGWTFCAGAALQIPFAMQMAYRFNGIGVTQNVLYENQKLIANQFNSAIGKIQDSLSSTASALGKLQDVVNQNAQALNTLVKQLSSNFGAISSVLNDILSRLDKVEAEVQIDRLITGRLQSLQTYVTQQLIRAAEIRASANLAATKMSECVCGQSKRVDFCGKGYHLMSFPQSAPHGVVFLHVTYVPAQEKNFTTAPAICHDGKAHFPREGVFVSNGTHWFVTQRNFYEPQIITTDNTFVSGNCDVVIGIVNNTVYDPLQPELDSFKEELDKYFKNHTSPDVDLGDISGINASVVNIQKEIDRLNEVAKNLNESLIDLQELGKYEQYIKWPWYIWLGFIAGLIAIVMVTIMLCCMTSCCSCLKGCCSCGSCCKFDEDDSELVLKGVKLHYT

SEQ ID NO: 829 - protein, 1273 aa, Artificial Sequence
  SARS-CoV-2/Australia/NSW09/2020__EPI_ISL_413595 spike protein (1-1273)(G889C_L1034C)
MFVFLVLLPLVSSQCVNLTTRTQLPPAYTNSFTRGVYYPDKVFRSSVLHSTQDLFLPFFSNVTWFHAIHVSGTNGTKRFDNPVLPFNDGVYFASTEKSNIIRGWIFGTTLDSKTQSLLIVNNATNVVIKVCEFQFCNDPFLGVYYHKNNKSWMESEFRVYSSANNCTFEYVSQPFLMDLEGKQGNFKNLREFVFKNIDGYFKIYSKHTPINLVRDLPQGFSALEPLVDLPIGINITRFQTLLALHRSYLTPGDSSSGWTAGAAAYYVGYLQPRTFLLKYNENGTITDAVDCALDPLSETKCTLKSFTVEKGIYQTSNFRVQPTESIVRFPNITNLCPFGEVFNATRFASVYAWNRKRISNCVADYSVLYNSASFSTFKCYGVSPTKLNDLCFTNVYADSFVIRGDEVRQIAPGQTGKIADYNYKLPDDFTGCVIAWNSNNLDSKVGGNYNYLYRLFRKSNLKPFERDISTEIYQAGSTPCNGVEGFNCYFPLQSYGFQPTNGVGYQPYRVVVLSFELLHAPATVCGPKKSTNLVKNKCVNFNFNGLTGTGVLTESNKKFLPFQQFGRDIADTTDAVRDPQTLEILDITPCSFGGVSVITPGTNTSNQVAVLYQDVNCTEVPVAIHADQLTPTWRVYSTGSNVFQTRAGCLIGAEHVNNSYECDIPIGAGICASYQTQTNSPRRARSVASQSIIAYTMSLGAENSVAYSNNSIAIPTNFTISVTTEILPVSMTKTSVDCTMYICGDSTECSNLLLQYGSFCTQLNRALTGIAVEQDKNTQEVFAQVKQIYKTPPIKDFGGFNFSQILPDPSKPSKRSFIEDLLFNKVTLADAGFIKQYGDCLGDIAARDLICAQKFNGLTVLPPLLTDEMIAQYTSALLAGTITSGWTFCAGAALQIPFAMQMAYRFNGIGVTQNVLYENQKLIANQFNSAIGKIQDSLSFTASALGKLQDVVNQNAQALNTLVKQLSSNFGAISSVLNDILSRLDKVEAEVQIDRLITGRLQSLQTYVTQQLIRAAEIRASANLAATKMSECVCGQSKRVDFCGKGYHLMSFPQSAPHGVVFLHVTYVPAQEKNFTTAPAICHDGKAHFPREGVFVSNGTHWFVTQRNFYEPQIITTDNTFVSGNCDVVIGIVNNTVYDPLQPELDSFKEELDKYFKNHTSPDVDLGDISGINASVVNIQKEIDRLNEVAKNLNESLIDLQELGKYEQYIKWPWYIWLGFIAGLIAIVMVTIMLCCMTSCCSCLKGCCSCGSCCKFDEDDSEPVLKGVKLHYT

SEQ ID NO: 830 - protein, 1273 aa, Artificial Sequence
  SARS-CoV-2/Australia/NSW10/2020__EPI_ISL_413596 spike protein (1-1273)(G889C_L1034C)
MFVFLVLLPLVSSQCVNLTTRTQLPPAYTNSFTRGVYYPDKVFRSSVLHSTQDLFLPFFSNVTWFHAIHVSGTNGTKRFDNPVLPFNDGVYFASTEKSNIIRGWIFGTTLDSKTQSLLIVNNATNVVIKVCEFQFCNDPFLGVYYHKNNKSWMESEFRVYSSANNCTFEYVSQPFLMDLEGKQGNFKNLREFVFKNIDGYFKIYSKHTPINLVRDLPQGFSALEPLVDLPIGINITRFQTLLALHRSYLTPGDSSSGWTAGAAAYYVGYLQPRTFLLKYNENGTITDAVDCALDPLSETKCTLKSFTVEKGIYQTSNFRVQPTESIVRFPNITNLCPFGEVFNATRFASVYAWNRKRISNCVADYSVLYNSASFSTFKCYGVSPTKLNDLCFTNVYADSFVIRGDEVRQIAPGQTGKIADYNYKLPDDFTGCVIAWNSNNLDSKVGGNYNYLYRLFRKSNLKPFERDISTEIYQAGSTPCNGVEGFNCYFPLQSYGFQPTNGVGYQPYRVVVLSFELLHAPATVCGPKKSTNLVKNKCVNFNFNGLTGTGVLTESNKKFLPFQQFGRDIADTTDAVRDPQTLEILDITPCSFGGVSVITPGTNTSNQVAVLYQDVNCTEVPVAIHADQLTPTWRVYSTGSNVFQTRAGCLIGAEHVNNSYECDIPIGAGICASYQTQTNSPRRARSVASQSIIAYTMSLGAENSVAYSNNSIAIPTNFTISVTTEILPVSMTKTSVDCTMYICGDSTECSNLLLQYGSFCTQLNRALTGIAVEQDKNTQEVFAQVKQIYKTPPIKDFGGFNFSQILPDPSKPSKRSFIEDLLFNKVTLADAGFIKQYGDCLGDIAARDLICAQKFNGLTVLPPLLTDEMIAQYTSALLAGTITSGWTFCAGAALQIPFAMQMAYRFNGIGVTQNVLYENQKLIANQFNSAIGKIQDSLSSTASALGKLQDVVNQNAQALNTLVKQLSSNFGAISSVLNDILSRLDKVEAEVQIDRLITGRLQSLQTYVTQQLIRAAEIRASANLAATKMSECVCGQSKRVDFCGKGYHLMSFPQSAPHGVVFLHVTYVPAQEKNFTTAPAICHDGKAHFPREGVFVSNGTHWFVTQRNFYEPQIITTDNTFVSGNCDVVIGIVNNTVYDPLQPELDSFKEELDKYFKNHTSPDVDLGDISGINASVVNIQKEIDRLNEVAKNLNESLIDLQELGKYEQYIKWPWYIWLGFIAGLIAIVMVTIMLCCMTSCCSCLKGCCSCGSCFKFDEDDSEPVLKGVKLHYT

SEQ ID NO: 831 - protein, 1273 aa, Artificial Sequence
  SARS-CoV-2/Switzerland/1000477797/2020__EPI_ISL_413023 spike protein (1-1273)(G889C_L1034C)
MFVFLVLLPLVSSQCVNLTTRTQLPPAYTNSFTRGVYYPDKVFRSSVLHSTQDLFLPFFSNVTWFHAIHVSGTNGTKRFDNPVLPFNDGVYFASTEKSNIIRGWIFGTTLDSKTQSLLIVNNATNVVIKVCEFQFCNDPFLGVYYHKNNKSWMESEFRVYSSANNCTFEYVSQPFLMDLEGKQGNFKNLREFVFKNIDGYFNIYSKHTPINLVRDLPQGFSALEPLVDLPIGINITRFQTLLALHRSYLTPGDSSSGWTAGAAAYYVGYLQPRTFLLKYNENGTITDAVDCALDPLSETKCTLKSFTVEKGIYQTSNFRVQPTESIVRFPNITNLCPFGEVFNATRFASVYAWNRKRISNCVADYSVLYNSASFSTFKCYGVSPTKLNDLCFTNVYADSFVIRGDEVRQIAPGQTGKIADYNYKLPDDFTGCVIAWNSNNLDSKVGGNYNYLYRLFRKSNLKPFERDISTEIYQAGSTPCNGVEGFNCYFPLQSYGFQPTNGVGYQPYRVVVLSFELLHAPATVCGPKKSTNLVKNKCVNFNFNGLTGTGVLTESNKKFLPFQQFGRDIADTTDAVRDPQTLEILDITPCSFGGVSVITPGTNTSNQVAVLYQGVNCTEVPVAIHADQLTPTWRVYSTGSNVFQTRAGCLIGAEHVNNSYECDIPIGAGICASYQTQTNSPRRARSVASQSIIAYTMSLGAENSVAYSNNSIAIPTNFTISVTTEILPVSMTKTSVDCTMYICGDSTECSNLLLQYGSFCTQLNRALTGIAVEQDKNTQEVFAQVKQIYKTPPIKDFGGFNFSQILPDPSKPSKRSFIEDLLFNKVTLADAGFIKQYGDCLGDIAARDLICAQKFNGLTVLPPLLTDEMIAQYTSALLAGTITSGWTFCAGAALQIPFAMQMAYRFNGIGVTQNVLYENQKLIANQFNSAIGKIQDSLSSTASALGKLQDVVNQNAQALNTLVKQLSSNFGAISSVLNDILSRLDKVEAEVQIDRLITGRLQSLQTYVTQQLIRAAEIRASANLAATKMSECVCGQSKRVDFCGKGYHLMSFPQSAPHGVVFLHVTYVPAQEKNFTTAPAICHDGKAHFPREGVFVSNGTHWFVTQRNFYEPQIITTDNTFVSGNCDVVIGIVNNTVYDPLQPELDSFKEELDKYFKNHTSPDVDLGDISGINASVVNIQKEIDRLNEVAKNLNESLIDLQELGKYEQYIKWPWYIWLGFIAGLIAIVMVTIMLCCMTSCCSCLKGCCSCGSCCKFDEDDSEPVLKGVKLHYT

SEQ ID NO: 832 - protein, 1273 aa, Artificial Sequence
  SARS-CoV-2/Belgium/BA-02291/2020__EPI_ISL_415159 spike protein (1-1273)(G889C_L1034C)
MFVFLVLLPLVSSQCVNLTTRTQLPPAYTNSFTRGVYYPDKVFRSSVLHSTQDLFLPFFSNVTWFHAIHVSGTNGTKRFDNPVLPFNDGVYFASTEKSNIIRGWIFGTTLDSKTQSLLIVNNATNVVIKVCEFQFCNDPFLGVYYHKNNKSWMESEFRVYSSANNCTFEYVSQPFLMDLEGKQGNFKNLREFVFKNIDGYFKIYSKHTPINLVRDLPQGFSALEPLVDLPIGINITRFQTLLALHRSYLTPGDSSSGWTAGAAAYYVGYLQPRTFLLKYNENGTITDAVDCALDPLSETKCTLKSFTVEKGIYQTSNFRVQPTESIVRFPNITNLCPFGEVFNATRFASVYAWNRKRISNCVADYSVLYNSASFSTFKCYGVSPTKLNDLCFTNVYADSFVIRGDEVRQIAPGQTGKIADYNYKLPDDFTGCVIAWNSNNLDSKVGGNYNYLYRLFRRSNLKPFERDISTEIYQAGSTPCNGVEGFNCYFPLQSYGFQPTNGVGYQPYRVVVLSFELLPAPATVCGPKKSTNLVKNKCVNFNFNGLTGTGVLTESNKKFLPFQQFGRDIADTTDAVRDPQTLEILDITPCSFGGVSVITPGTNTSNQVAVLYQGVNCTEVPVAIHADQLTPTWRVYSTGSNVFQTRAGCLIGAEHVNNSYECDIPIGAGICASYQTQTNSPRRARSVASQSIIAYTMSLGAENSVAYSNNSIAIPTNFTISVTTEILPVSMTKTSVDCTMYICGDSTECSNLLLQYGSFCTQLNRALTGIAVEQDKNTQEVFAQVKQIYKTPPIKDFGGFNFSQILPDPSKPSKRSFIEDLLFNKVTLADAGFIKQYGDCLGDIAARDLICAQKFNGLTVLPPLLTDEMIAQYTSALLAGTITSGWTFCAGAALQIPFAMQMAYRFNGIGVTQNVLYENQKLIANQFNSAIGKIQDSLSSAAPALGKLQDVVNQNAQALNTLVKQLSSNFGAISSVLNDILSRLDKVEAEVQIDRLITGRLQSLQTYVTQQLIRAAEIRASANLAATKMSECVCGQSKRVDFCGKGYHLMSFPQSAPHGVVFLHVTYVPAQEKNFTTAPAICHDGKAHFPREGVFVSNGTHWFVTQRNFYEPQIITTDNTFVSGNCDVVIGIVNNTVYDPLQPELDSFKEELDKYFKNHTSPDVDLGDISGINASVVNIQKEIDRLNEVAKNLNESLIDLQELGKYEQYIKWPWYIWLGFIAGLIAIVMVTIMLCCMTSCCSCLKGCCSCGSCCKFDEDDSEPVLKGVKLHYT

SEQ ID NO: 833 - protein, 1273 aa, Artificial Sequence
  SARS-CoV-2/USA/WA8-UW5/2020__EPI_ISL_413486 spike protein (1-1273)(G889C_L1034C)
MFVFLVLLPLVSSQCVNLTTRTQLPPAYTNSFTRGVYYPDKVFRSSVLHSTQDLFLPFFSNVTWFHAIHVSGTNGTKRFDNPVLPFNDGVYFASTEKSNIIRGWIFGTTLDSKTQSLLIVNNATNVVIKVCEFQFCNDPFLGVYYHKNNKSWMESEFRVYSSANNCTFEYVSQPFLMDLEGKQGNFKNLREFVFKNIDGYFKIYSKHTPINLVRDLPQGFSALEPLVDLPIGINITRFQTLLALHRSYLTPGDSSSGWTAGAAAYYVGYLQPRTFLLKYNENGTITDAVDCALDPLSETKCTLKSFTVEKGIYQTSNFRVQPTESIVRFPNITNLCPFGEVFNATRFASVYAWNRKRISNCVADYSVLYNSASFSTFKCYGVSPTKLNDLCFTNVYADSFVIRGDEVRQIAPGQTGKIADYNYKLPDDFTGCVIAWNSNNLDSKVGGNYNYLYRLFRKSNLKPFERDISTEIYQAGSTPCNGVEGFNCYFPLQSYGFQPTNGVGYQPYRVVVLSFELLHAPATVCGPKKSTNLVKNKCVNFNFNGLTGTGVLTESNKKFLPFQQFGRDIADTTDAVRDPQTLEILDITPCSFGGVSVITPGTNTSNQVAVLYQDVNCTEVPVAIHADQLTPTWRVYSTGSNVFQTRAGCLIGAEYVNNSYECDIPIGAGICASYQTQTNSPRRARSVASQSIIAYTMSLGAENSVAYSNNSIAIPTNFTISVTTEILPVSMTKTSVDCTMYICGDSTECSNLLLQYGSFCTQLNRALTGIAVEQDKNTQEVFAQVKQIYKTPPIKDFGGFNFSQILPDPSKPSKRSFIEDLLFNKVTLADAGFIKQYGDCLGDIAARDLICAQKFNGLTVLPPLLTDEMIAQYTSALLAGTITSGWTFCAGAALQIPFAMQMAYRFNGIGVTQNVLYENQKLIANQFNSAIGKIQDSLSSTASALGKLQDVVNQNAQALNTLVKQLSSNFGAISSVLNDILSRLDKVEAEVQIDRLITGRLQSLQTYVTQQLIRAAEIRASANLAATKMSECVCGQSKRVDFCGKGYHLMSFPQSAPHGVVFLHVTYVPAQEKNFTTAPAICHDGKAHFPREGVFVSNGTHWFVTQRNFYEPQIITTDNTFVSGNCDVVIGIVNNTVYDPLQPELDSFKEELDKYFKNHTSPDVDLGDISGINASVVNIQKEIDRLNEVAKNLNESLIDLQELGKYEQYIKWPWYIWLGFIAGLIAIVMVTIMLCCMTSCCSCLKGCCSCGSCCKFDEDDSEPVLKGVKLHYT

SEQ ID NO: 834 - protein, 1273 aa, Artificial Sequence
  SARS-CoV-2/England/20102000506/2020__EPI_ISL_415147 spike protein (1-1273)(G889C_L1034C)
MFVFLVLLPLVSSQCVNLTTRTQLPPAYTNSFTRGVYYPDKVFRSSVLHSTQDLFLPFFSNVTWFHAIHVSGTNGTKRFDNPVLPFNDGVYFASTEKSNIIRGWIFGTTLDSKTQSLLIVNNATNVVIKVCEFQFCNDPFLGVYYHKNNKSWMESEFRVYSSANNCTFEYVSQPFLMDLEGKQGNFKNLREFVFKNIDGYFKIYSKHTPINLVRDLPQGFSALEPLVDLPIGINITRFQTLLALHRSYLTPGDSSSGWTAGAAAYYVGYLQPRTFLLKYNENGTITDAVDCALDPLSETKCTLKSFTVEKGIYQTSNFRVQPTESIVRFPNITNLCPFGEVFNATRFASVYAWNRKRISNCVADYSVLYNSASFSTFKCYGVSPTKLNDLCFTNVYADSFVIRGDEVRQIAPGQTGKIADYNYKLPDDFTGCVIAWNSNNLDSKVGGNYNYLYRLFRKSNLKPFERDISTEIYQAGSTPCNGVEGFNCYFPLQSYGFQPTNGVGYQPYRVVVLSFELLHAPATVCGPKKSTNLVKNKCVNFNFNGLTGTGVLTESNKKFLPFQQFGRDIADTTDAVRDPQTLEILDITPCSFGGVSVITPGTNTSNQVAVLYQGVNCTEVPVAIHADQLTPTWRVYSTGSNVFQTRAGCLIGAEHVNNSYECDIPIGAGICASYQTQTNSPRRARSVASQSIIAYTMSLGAENSVAYSNNSIAIPTNFTISVTTEILPVSMTKTSVDCTMYICGDSTECSNLLLQYGSFCTQLNRALTGIAVEQDKNTQEVFAQVKQIYKTPPIKDFGGFNFSQILPDPSKPSKRSFIEDLLFNKVTLADAGFIKQYGYCLGDIAARDLICAQKFNGLTVLPPLLTDEMIAQYTSALLAGTITSGWTFCAGAALQIPFAMQMAYRFNGIGVTQNVLYENQKLIANQFNSAIGKIQDSLSSTASALGKLQDVVNQNAQALNTLVKQLSSNFGAISSVLNDILSRLDKVEAEVQIDRLITGRLQSLQTYVTQQLIRAAEIRASANLAATKMSECVCGQSKRVDFCGKGYHLMSFPQSAPHGVVFLHVTYVPAQEKNFTTAPAICHDGKAHFPREGVFVSNGTHWFVTQRNFYEPQIITTDNTFVSGNCDVVIGIVNNTVYDPLQPELDSFKEELDKYFKNHTSPDVDLGDISGINASVVNIQKEIDRLNEVAKNLNESLIDLQELGKYEQYIKWPWYIWLGFIAGLIAIVMVTIMLCCMTSCCSCLKGCCSCGSCCKFDEDDSEPVLKGVKLHYT

SEQ ID NO: 835 - protein, 1273 aa, Artificial Sequence
  SARS-CoV-2/Belgium/VAG-03013/2020__EPI_ISL_415155 spike protein (1-1273)(G889C_L1034C)
MFVFLVLLPLVSSQCVNLTTRTQLPPAYTNSFTRGVYYPDKVFRSSVLHSTQDLFLPFFSNVTWFHAIHVSGTNGTKRFDNPVLPFNDGVYFASTEKSNIIRGWIFGTTLDSKTQSLLIVNNATNVVIKVCEFQFCNDPFLGVYYHKNNKSWMESEFRVYSSANNCTFEYVSQPFLMDLEGKQGNFKNLREFVFKNIDGYFKIYSKHTPINLVRDLPQGFSALEPLVDLPIGINITRFQTLLALHRSYLTPGDSSSGWTAGAAAYYVGYLQPRTFLLKYNENGTITDAVDCALDPLSETKCTLKSFTVEKGIYQTSNFRVQPTESIVRFPNITNLCPFGEVFNATRFASVYAWNRKRISNCVADYSVLYNSASFSTFKCYGVSPTKLNDLCFTNVYADSFVIRGDEVRQIAPGQTGKIADYNYKLPDDFTGCVIAWNSNNLDSKVGGNYNYLYRLFRKSNLKPFERDISTEIYQAGSTPCNGVEGFNCYFPLQSYGFQPTNGVGYQPYRVVVLSFELLHAPATVCGPKKSTNLVKNKCVNFNFNGLTGTGVLTESNKKFLPFQQFGRDIADTTDAVRDPQTLEILDITPCSFGGVSVITPGTNTSNQVAVLYQGVNCTEVPVAIHADQLTPTWRVYSTGSNVFQTRAGCLIGAEHVNNSYECDIPIGAGICASYQTQTNSPRRARSVASQSIIAYTMSLGAENSVAYSNNSIAIPTNFTISVTTEILPVSMTKTSVDCTMYICGDSTECSNLLLQYGSFCTQLNRALTGIAVEQDKNTQEVFAQVKQIYKTPPIKDFGGFNFSQILPDPSKPSKRSFIEDLLFNKVTLADAGFIKQYGDCLGDIAARDLICAQKFNGLTVLPPLLTDEMIAQYTSALLAGTITSGWTFCAGAALQIPFAMQMAYRFNGIGVTQNVLYENQKLIANQFNSAIGKIQDSLSSTATALGKLQDVVNQNAQALNTLVKQLSSNFGAISSVLNDILSRLDKVEAEVQIDRLITGRLQSLQTYVTQQLIRAAEIRASANLAATKMSECVCGQSKRVDFCGKGYHLMSFPQSAPHGVVFLHVTYVPAQEKNFTTAPAICHDGKAHFPREGVFVSNGTHWFVTQRNFYEPQIITTDNTFVSGNCDVVIGIVNNTVYDPLQPELDSFKEELDKYFKNHTSPDVDLGDISGINASVVNIQKEIDRLNEVAKNLNESLIDLQELGKYEQYIKWPWYIWLGFIAGLIAIVMVTIMLCCMTSCCSCLKGCCSCGSCCKFDEDDSEPVLKGVKLHYT

SEQ ID NO: 836 - protein, 1273 aa, Artificial Sequence
  SARS-CoV-2/Belgium/BC-03016/2020__EPI_ISL_415157 spike protein (1-1273)(G889C_L1034C)
MFVFLVLLPLVSSQCVNLTTRTQLPPAYTNSFTRGVYYPDKVFRSSVLHSTQDLFLPFFSNVTWFHAIHVSGTNGTKRFDNPVLPFNDGVYFASTEKSNIIRGWIFGTTLDSKTQSLLIVNNATNVVIKVCEFQFCNDPFLGVYYHKNNKSWMESEFRVYSSANNCTFEYVSQPFLMDLEGKQGNFKNLREFVFKNIDGYFKIYSKHTPINLVRDLPQGFSALEPLVDLPIGINITRFQTLLALHRSYLTPGDSSSGWTAGAAAYYVGYLQPRTFLLKYNENGTITDAVDCALDPLSETKCTLKSFTVEKGIYQTSNFRVQPTESIVRFPNITNLCPFGEVFNATRFASVYAWNRKRISNCVADYSVLYNSASFSTFKCYGVSPTKLNDLCFTNVYADSFVIRGDEVRQIAPGQTGKIADYNYKLPDDFTGCVIAWNSNNLDSKVGGNYNYLYRLFRKSNLKPFERDISTEIYQAGSTPCNGVEGFNCYFPLQSYGFQPTNGVGYQPYRVVVLSFELLHAPATVCGPKKSTNLVKNKCVNFNFNGLTGTGVLTESNKKFLPFQQFGRDIADTTDAVRDPQTLEILDITPCSFGGVSVITPGTNTSNQVAVLYQGVNCTEVPVAIHADQLTPTWRVYSTGSNVFQTRAGCLIGAEHVNNSYECDIPIGAGICASYQTQTNSPRRARSVASQSIIAYTMSLGAENSVAYSNNSIAIPTNFTISVTTEILPVSMTKTSVDCTMYICGDSTECSNLLLQYGSFCTQLNRALTGIAVEQDKNTQEVFAQVKQIYKTPPIKDFGGFNFSQILPDPSKPSKRSFIEDLLFNKVTLADAGFIKQYGDCLGDIAARDLICAQKFNGLTVLPPLLTDEMIAQYTSALLAGTITSGWTFCAGAALQIPFAMQMAYRFNGIGVTQNVLYENQKLIANQFNSAIGKIQDSLSSTAPALGKLQDVVNQNAQALNTLVKQLSSNFGAISSVLNDILSRLDKVEAEVQIDRLITGRLQSLQTYVTQQLIRAAEIRASANLAATKMSECVCGQSKRVDFCGKGYHLMSFPQSAPHGVVFLHVTYVPAQEKNFTTAPAICHDGKAHFPREGVFVSNGTHWFVTQRNFYEPQIITTDNTFVSGNCDVVIGIVNNTVYDPLQPELDSFKEELDKYFKNHTSPDVDLGDISGINASVVNIQKEIDRLNEVAKNLNESLIDLQELGKYEQYIKWPWYIWLGFIAGLIAIVMVTIMLCCMTSCCSCLKGCCSCGSCCKFDEDDSEPVLKGVKLHYT

SEQ ID NO: 837 - protein, 1273 aa, Artificial Sequence
  SARS-CoV-2/Germany/BavPat3/2020__EPI_ISL_414521 spike protein (1-1273)(G889C_L1034C)
MFVFLVLLPLVSSQCVNLTTRTQLPPAYTNSFTRGVYYPDKVFRSSVLHSTQDLFLPFFSNVTWFHAIHVSGTNGTKRFDNPVLPFNDGVYFASTEKSNIIRGWIFGTTLDSKTQSLLIVNNATNVVIKVCEFQFCNDPFLGVYYHKNNKSWMESEFRVYSSANNCTFEYVSQPFLMDLEGKQGNFKNLREFVFKNIDGYFKIYSKHTPINLVRDLPQGFSALEPLVDLPIGINITRFQTLLALHRSYLTPGDSSSGWTAGAAAYYVGYLQPRTFLLKYNENGTITDAVDCALDPLSETKCTLKSFTVEKGIYQTSNFRVQPTESIVRFPNITNLCPFGEVFNATRFASVYAWNRKRISNCVADYSVLYNSASFSTFKCYGVSPTKLNDLCFTNVYADSFVIRGDEVRQIAPGQTGKIADYNYKLPDDFTGCVIAWNSNNLDSKVGGNYNYLYRLFRKSNLKPFERDISTEIYQAGSTPCNGVEGFNCYFPLQSYGFQPTNGVGYQPYRVVVLSFELLHAPATVCGPKKSTNLVKNKCVNFNFNGLTGTGVLTESNKKFLPFQQFGRDIADTTDAVRDPQTLEILDITPCSFGGVSVITPGTNTSNQVAVLYQDVNCTEVPVAIHADQLTPTWRVYSTGSNVFQTRAGCLIGAEHVNNSYECDIPIGAGICASYQTQTNSPRRARSVASQSIIAYTMSLGAENSVAYSNNSIAIPTNFTISVTTEILPVSMTKTSVDCTMYICGDSTECSNLLLQYGSFCTQLNRALTGIAVEQDKNTQQVFAQVKQIYKTPPIKDFGGFNFSQILPDPSKPSKRSFIEDLLFNKVTLADAGFIKQYGDCLGDIAARDLICAQKFNGLTVLPPLLTDEMIAQYTSALLAGTITSGWTFCAGAALQIPFAMQMAYRFNGIGVTQNVLYENQKLIANQFNSAIGKIQDSLSSTASALGKLQDVVNQNAQALNTLVKQLSSNFGAISSVLNDILSRLDKVEAEVQIDRLITGRLQSLQTYVTQQLIRAAEIRASANLAATKMSECVCGQSKRVDFCGKGYHLMSFPQSAPHGVVFLHVTYVPAQEKNFTTAPAICHDGKAHFPREGVFVSNGTHWFVTQRNFYEPQIITTDNTFVSGNCDVVIGIVNNTVYDPLQPELDSFKEELDKYFKNHTSPDVDLGDISGINASVVNIQKEIDRLNEVAKNLNESLIDLQELGKYEQYIKWPWYIWLGFIAGLIAIVMVTIMLCCMTSCCSCLKGCCSCGSCCKFDEDDSEPVLKGVKLHYT

SEQ ID NO: 838 - protein, 1273 aa, Artificial Sequence
  SARS-CoV-2/France/HF1805/2020__EPI_ISL_414628 spike protein (1-1273)(G889C_L1034C)
MFVFLVLLPLVSSQCVNLTTRTQLPPAYTNSFTRGVYYPDKVFRSSVLHSTQDLFLPFFSNVTWFHAIHVSGTNGTKRFDNPVLPFNDGVYFASTEKSNIIRGWIFGTTLDSKTQSLLIVNNATNVVIKVCEFQFCNDPFLGVYYHKNNKSWMESEFRVYSSANNCTFEYVSQPFLMDLEGKQGNFKNLREFVFKNIDGYFKIYSKHTPINLVRDLPQGFSALEPLVDLPIGINITRFQTLLALHRSYLTPGDSSSGWTAGAAAYYVGYLQPRTFLLKYNENGTITDAVDCALDPLSETKCTLKSFTVEKGIYQTSNFRVQPTESIVRFPNITNLCPFGEVFNATRFASVYAWNRKRISNCVADYSVLYNSASFSTFKCYGVSPTKLNDLCFTNVYADSFVIRGDEVRQIAPGQTGKIADYNYKLPDDFTGCVIAWNSNNLDSKVGGNYNYLYRLFRKSNLKPFERDISTEIYQAGSTPCNGVEGFNCYFPLQSYGFQPTNGVGYQPYRVVVLSFELLHAPATVCGPKKSTNLVKNKCVNFNFNGLTGTGVLTESNKKFLPFQQFGRDIADTTDAVRDPQTLEILDITPCSFGGVSVITPGTNTSNQVAVLYQGVNCTEVPVAIHADQLTPTWRVYSTGSNVFQTRAGCLIGAEHVNNSYECDIPIGAGICASYQTQTNSPRRARSVASQSIIAYTMSLGAENSVAYSNNSIAIPTNFTISVTTEILPVSMTKTSVDCTMYICGDSTECSNLLLQYGSFCTQLNRALTGIAVEQDKNTQEVFAQVKQIYKTPPIKDFGGFNFSQILPDPSKPSKRSFIEDLLFNKVTLADAGFIKQYGDCLGDIAARDLICAQKFNGLTVLPPLLTDEMIAQYTSALLAGTITSGWTFCAGAALQIPFAMQMAYRFNGIGVTQNVLYENQKLIANQFNSAIGKIQDSLSSTASALGKLQDVVNQNAQALNTLVKQLSSNFGAISSVLNDILSRLDKVEAEVQIDRLITGRLQSLQTYVTQQLIRAAEIRASANLAATKMSECVCGQSKRVDFCGKGYHLMSFPQSAPHGVVFLHVTYVPAQEKNFTTAPAICHDGKAHFPREGVFVSNGTHWFVTQRNFYEPQIITTDNTFVSGNCDVVIGVVNNTVYDPLQPELDSFKEELDKYFKNHTSPDVDLGDISGINASVVNIQKEIDRLNEVAKNLNESLIDLQELGKYEQYIKWPWYIWLGFIAGLIAIVMVTIMLCCMTSCCSCLKGCCSCGSCCKFDEDDSEPVLKGVKLHYT

SEQ ID NO: 839 - protein, 1273 aa, Artificial Sequence
  SARS-CoV-2/Netherlands/ZuidHolland_9/2020__EPI_ISL_414445 spike protein (1-1273)(G889C_L1034C)
MFVFLVLLPLVSSQCVNLTTRTQLPPAYTNSFTRGVYYPDKVFRSSVLHSTQDLFLPFFSNVTWFHAIHVSGTNGTKRFDNPVLPFNDGVYFASTEKSNIIRGWIFGTTLDSKTQSLLIVNNATNVVIKVCEFQFCNDPFLGVYYHKNNKSWMESEFRVYSSANNCTFEYVSQPFLMDLEGKQGNFKNLREFVFKNIDGYFKIYSKHTPINLVRDLPQGFSALEPLVDLPIGINITRFQTLLALHRSYLTPGDSSSGWTAGAAAYYVGYLQPRTFLLKYNENGTITDAVDCALDPLSETKCTLKSFTVEKGIYQTSNFRVQPTESIVRFPNITNLCPFGEVFNATRFASVYAWNRKRISNCVADYSVLYNSASFSTFKCYGVSPTKLNDLCFTNVYADSFVIRGDEVRQIAPGQTGKIADYNYKLPDDFTGCVIAWNSNNLDSKVGGNYNYLYRLFRKSNLKPFERDISTEIYQAGSTPCNGVEGFNCYFPLQSYGFQPTNGVGYQPYRVVVLSFELLHAPATVCGPKKSTNLVKNKCVNFNFNGLTGTGVLTESNKKFLPFQQFGRDIADTTDAVRDPQTLEILDITPCSFGGVSVITPGTNTSNQVAVLYQGVNCTEVPVAIHADQLTPTWRVYSTGSNVFQTRAGCLIGAEHVNNSYECDIPIGAGICASYQTQTNSPRRARSVASQSIIAYTMSLGAENSVAYSNNSIAIPTNFTISVTTEILPVSMTKTSVDCTMYICGDSTECSNLLLQYGSFCTQLNRALTGIAVEQDKNTQEVFAQVKQIYKTPPIKDFGGFNFSQILPDPSKPSKRSFIEDLLFNKVTLADAGFIKQYGDCLGDIAARDLICVQKFNGLTVLPPLLTDEMIAQYTSALLAGTITSGWTFCAGAALQIPFAMQMAYRFNGIGVTQNVLYENQKLIANQFNSAIGKIQDSLSSTASALGKLQDVVNQNAQALNTLVKQLSSNFGAISSVLNDILSRLDKVEAEVQIDRLITGRLQSLQTYVTQQLIRAAEIRASANLAATKMSECVCGQSKRVDFCGKGYHLMSFPQSAPHGVVFLHVTYVPAQEKNFTTAPAICHDGKAHFPREGVFVSNGTHWFVTQRNFYEPQIITTDNTFVSGNCDVVIGIVNNTVYDPLQPELDSFKEELDKYFKNHTSPDVDLGDISGINASVVNIQKEIDRLNEVAKNLNESLIDLQELGKYEQYIKWPWYIWLGFIAGLIAIVMVTIMLCCMTSCCSCLKGCCSCGSCCKFDEDDSEPVLKGVKLHYT

SEQ ID NO: 840 - protein, 1273 aa, Artificial Sequence
  SARS-CoV-2/Finland/FIN03032020A/2020__EPI_ISL_413602 spike protein (1-1273)(G889C_L1034C)
MFVFLVLLPLVSSQCVNLTTRTQLPPAYTNSFTRGVYYPDKVFRSSVLHSTQDLFLPFFSNVTWFHAIHVSGTNGTKRFDNPVLPFNDGVYFASTEKSNIIRGWIFGTTLDSKTQSLLIVNNATNVVIKVCEFQFCNDPFLGVYYHKNNKSWMESEFRVYSSANNCTFEYVSQPFLMDLEGKQGNFKNLREFVFKNIDGYFKIYSKHTPINLVRDLPQGFSALEPLVDLPIGINITRFQTLLALHRSYLTPGDSSSGWTAGAAAYYVGYLQPRTFLLKYNENGTITDAVDCALDPLSETKCTLKSFTVEKGIYQTSNFRVQPTESIVRFPNITNLCPFGEVFNATRFASVYAWNRKRISNCVADYSVLYNSASFSTFKCYGVSPTKLNDLCFTNVYADSFVIRGDEVRQIAPGQTGKIADYNYKLPDDFTGCVISWNSNNLDSKVGGNYNYLYRLFRKSNLKPFERDISTEIYQAGSTPCNGVEGFNCYFPLQSYGFQPTNGVGYQPYRVVVLSFELLHAPATVCGPKKSTNLVKNKCVNFNFNGLTGTGVLTESNKKFLPFQQFGRDIADTTDAVRDPQTLEILDITPCSFGGVSVITPGTNTSNQVAVLYQGVNCTEVPVAIHADQLTPTWRVYSTGSNVFQTRAGCLIGAEHVNNSYECDIPIGAGICASYQTQTNSPRRARSVASQSIIAYTMSLGAENSVAYSNNSIAIPTNFTISVTTEILPVSMTKTSVDCTMYICGDSTECSNLLLQYGSFCTQLNRALTGIAVEQDKNTQEVFAQVKQIYKTPPIKDFGGFNFSQILPDPSKPSKRSFIEDLLFNKVTLADAGFIKQYGDCLGDIAARDLICAQKFNGLTVLPPLLTDEMIAQYTSALLAGTITSGWTFCAGAALQIPFAMQMAYRFNGIGVTQNVLYENQKLIANQFNSAIGKIQDSLSSTASALGKLQDVVNQNAQALNTLVKQLSSNFGAISSVLNDILSRLDKVEAEVQIDRLITGRLQSLQTYVTQQLIRAAEIRASANLAATKMSECVCGQSKRVDFCGKGYHLMSFPQSAPHGVVFLHVTYVPAQEKNFTTAPAICHDGKAHFPREGVFVSNGTHWFVTQRNFYEPQIITTDNTFVSGNCDVVIGIVNNTVYDPLQPELDSFKEELDKYFKNHTSPDVDLGDISGINASVVNIQKEIDRLNEVAKNLNESLIDLQELGKYEQYIKWPWYIWLGFIAGLIAIVMVTIMLCCMTSCCSCLKGCCSCGSCCKFDEDDSEPVLKGVKLHYT

SEQ ID NO: 841 - protein, 1273 aa, Artificial Sequence
  SARS-CoV-2/France/GE1977/2020__EPI_ISL_414632 spike protein (1-1273)(G889C_L1034C)
MFVFLVLLPLVSSQCVNLTTRTQLPPAYTNSFTRGVYYPDKVFRSSVLHSTQDLFLPFFSNVTWFHAIHVSGTNGTKRFDNPVLPFNDGVYFASTEKSNIIRGWIFGTTLDSKTQSLLIVNNATNVVIKVCEFQFCNDPFLGVYYHKNNKSWMESEFRVYSSANNCTFEYVSQPFLMDLEGKQGNFKNLREFVFKNIDGYFKIYSKHTPINLVRDLPQGFSALEPLVDLPIGINITRFQTLLALHRSYLTPGDSSSGWTAGAAAYYVGYLQPRTFLLKYNENGTITDAVDCALDPLSETKCTLKSFTVEKGIYQTSNFRVQPTESIVRFPNITNLCPFGEVFNATRFASVYAWNRKRISNCVADYSVLYNSASFSTFKCYGVSPTKLNDLCFTNVYADSFVIRGDEVRQIAPGQTGKIADYNYKLPDDFTGCVIAWNSNNLDSKVGGNYNYLYRLFRKSNLKPFERDISTEIYQAGSTPCNGVEGFNCYFPLQSYGFQPTNGVGYQPYRVVVLSFELLHAPATVCGPKKSTNLVKNKCVNFNFNGLTGTGVLTESNKKFLPFQQFGRDIADTTDAVRDPQTLEILDITPCSFGGVSVITPGTNTSNQVAVLYQGVNCTEVPVAIHADQLTPTWRVYSTGSNVFQTRAGCLIGAEHVNNSYECDIPIGAGICASYQTQTNSPRRARSVASQSIIAYTMSLGAENSVAYSNNSIAIPTNFTISVTTEILPVSMTKTSVDCTMYICGDSTECSNLLLQYGSFCTQLNRALTGIAVEQDKNTQEVFAQVKQIYKTPPIKDFGGFNFSQILPDPSKPSKRSFIEDLLFNKVTLADAGFIKQYGDCLGDIAARDLICAQKFNGLTVLPPLLTDEMIAQYTSALLAGTITSGWTFCAGAALQIPFAMQMAYRFNGIGVTQNVLYENQKLIANQFNSAIGKIQDSLFSTASALGKLQDVVNQNAQALNTLVKQLSSNFGAISSVLNDILSRLDKVEAEVQIDRLITGRLQSLQTYVTQQLIRAAEIRASANLAATKMSECVCGQSKRVDFCGKGYHLMSFPQSAPHGVVFLHVTYVPAQEKNFTTAPAICHDGKAHFPREGVFVSNGTHWFVTQRNFYEPQIITTDNTFVSGNCDVVIGIVNNTVYDPLQPELDSFKEELDKYFKNHTSPDVDLGDISGINASVVNIQKEIDRLNEVAKNLNESLIDLQELGKYEQYIKWPWYIWLGFIAGLIAIVMVTIMLCCMTSCCSCLKGCCSCGSCCKFDEDDSEPVLKGVKLHYT

SEQ ID NO: 842 - protein, 1273 aa, Artificial Sequence
  SARS-CoV-2/Finland/FIN-313/2020__EPI_ISL_414641 spike protein (1-1273)(G889C_L1034C)
MFVFLVLLPLVSSQCVNLTTRTQLPPAYTNSFTRGVYYPDKVFRSSVLHSTQDLFLPFFSNVTWFHAIHVSGTNGTKRFDNPVLPFNDGVYFASTEKSNIIRGWIFGTTLDSKTQSLLIVNNATNVVIKVCEFQFCNDPFLGVYYHKNNKSWMESEFRVYSSANNCTFEYVSQPFLMDLEGKQGNFKNLREFVFKNIDGYFKIYSKHTPINLVRDLPQGFSALEPLVDLPIGINITRFKTLLALHRSYLTPGDSSSGWTAGAAAYYVGYLQPRTFLLKYNENGTITDAVDCALDPLSETKCTLKSFTVEKGIYQTSNFRVQPTESIVRFPNITNLCPFGEVFNATRFASVYAWNRKRISNCVADYSVLYNSASFSTFKCYGVSPTKLNDLCFTNVYADSFVIRGDEVRQIAPGQTGKIADYNYKLPDDFTGCVIAWNSNNLDSKVGGNYNYLYRLFRKSNLKPFERDISTEIYQAGSTPCNGVEGFNCYFPLQSYGFQPTNGVGYQPYRVVVLSFELLHAPATVCGPKKSTNLVKNKCVNFNFNGLTGTGVLTESNKKFLPFQQFGRDIADTTDAVRDPQTLEILDITPCSFGGVSVITPGTNTSNQVAVLYQGVNCTEVPVAIHADQLTPTWRVYSTGSNVFQTRAGCLIGAEHVNNSYECDIPIGAGICASYQTQTNSPRRARSVASQSIIAYTMSLGAENSVAYSNNSIAIPTNFTISVTTEILPVSMTKTSVDCTMYICGDSTECSNLLLQYGSFCTQLNRALTGIAVEQDKNTQEVFAQVKQIYKTPPIKDFGGFNFSQILPDPSKPSKRSFIEDLLFNKVTLADAGFIKQYGDCLGDIAARDLICAQKFNGLTVLPPLLTDEMIAQYTSALLAGTITSGWTFCAGAALQIPFAMQMAYRFNGIGVTQNVLYENQKLIANQFNSAIGKIQDSLSSTASALGKLQDVVNQNAQALNTLVKQLSSNFGAISSVLNDILSRLDKVEAEVQIDRLITGRLQSLQTYVTQQLIRAAEIRASANLAATKMSECVCGQSKRVDFCGKGYHLMSFPQSAPHGVVFLHVTYVPAQEKNFTTAPAICHDGKAHFPREGVFVSNGTHWFVTQRNFYEPQIITTDNTFVSGNCDVVIGIVNNTVYDPLQPELDSFKEELDKYFKNHTSPDVDLGDISGINASVVNIQKEIDRLNEVAKNLNESLIDLQELGKYEQYIKWPWYIWLGFIAGLIAIVMVTIMLCCMTSCCSCLKGCCSCGSCCKFDEDDSEPVLKGVKLHYT

SEQ ID NO: 843 - protein, 1273 aa, Artificial Sequence
  SARS-CoV-2/Netherlands/ZuidHolland_2/2020__EPI_ISL_414556 spike protein (1-1273)(G889C_L1034C)
MFVFLVLLPLVSSQCVNLTTRTQLPPAYTNSFTRGVYYPDKVFRSSVLHSTQDLFLPFFSNVTWFHAIHVSGTNGTKRFDNPVLPFNDGVYFASTEKSNIIRGWIFGTTLDSKTQSLLIVNNATNVVIKVCEFQFCNDPFLGVYYHKNNKSWMESEFRVYSSANNCTFEYVSQPFLMDLEGKQGNFKNLREFVFKNIDGYFKIYSKHTPINLVRDLPQGFSALEPLVDLPIGINITRFQTLLALHRSYLTPGDSSSGWTAGAAAYYVGYLQPRTFLLKYNENGTITDAVDCALDPLSETKCTLKSFTVEKGIYQTSNFRVQPTESIVRFPNITNLCPFGEVFNATRFASVYAWNRKRISNCVADYSVLYNSASFSTFKCYGVSPTKLNDLCFTNVYADSFVIRGDEVRQIAPGQTGKIADYNYKLPDDFTGCVIAWNSNNLDSKVGGNYNYLYRLFRKSNLKPFERDISTEIYQAGSTPCNGVEGFNCYFPLQSYGFQPTNGVGYQPYRVVVLSFELLHAPATVCGPKKSTNLVKNKCVNFNFNGLTGTGVLTESNKKFLPFQQFGRDIADTTDAVRDPQTLEILDITPCSFGGVSVITPGTNTSNQVAVLYQGVNCTEVPVAIHADQLTPTWRVYSTGSNVFQTRAGCLIGAEHVNNSYECDIPIGAGICASYQTQTNSPRRARSVASQSIIAYTMSLGAENSVAYSNNSIAIPTNFTISVTTEILPVSMTKTSVDCTMYICGDSTECSNLLLQYGSFCTQLNRALTGIALEQDKNTQEVFAQVKQIYKTPPIKDFGGFNFSQILPDPSKPSKRSFIEDLLFNKVTLADAGFIKQYGDCLGDIAARDLICAQKFNGLTVLPPLLTDEMIAQYTSALLAGTITSGWTFCAGAALQIPFAMQMAYRFNGIGVTQNVLYENQKLIANQFNSAIGKIQDSLSSTASALGKLQDVVNQNAQALNTLVKQLSSNFGAISSVLNDILSRLDKVEAEVQIDRLITGRLQSLQTYVTQQLIRAAEIRASANLAATKMSECVCGQSKRVDFCGKGYHLMSFPQSAPHGVVFLHVTYVPAQEKNFTTAPAICHDGKAHFPREGVFVSNGTHWFVTQRNFYEPQIITTDNTFVSGNCDVVIGIVNNTVYDPLQPELDSFKEELDKYFKNHTSPDVDLGDISGINASVVNIQKEIDRLNEVAKNLNESLIDLQELGKYEQYIKWPWYIWLGFIAGLIAIVMVTIMLCCMTSCCSCLKGCCSCGSCCKFDEDDSEPVLKGVKLHYT

SEQ ID NO: 844 - protein, 1273 aa, Artificial Sequence
  SARS-CoV-2/USA/WA-UW31/2020__EPI_ISL_414618 spike protein (1-1273)(G889C_L1034C)
MFVFLVLLPLVSSQCVNLTTRTQLPPAYTNSFTRGVYYPDKVFRSSVLHSTQDLFLPFFSNVTWFHAIHVSGTNGTKRFDNPVLPFNDGVYFASTEKSNIIRGWIFGTTLDSKTQSLLIVNNATNVVIKVCEFQFCNDPFLGVYYHKNNKSWMESEFRVYSSANNCTFEYVSQPFLMDLEGKQGNFKNLREFVFKNIDGYFKIYSKHTPINLVRDLPQGFSALEPLVDLPIGINITRFQTLLALHRSYLTPGDSSSGWTAGAAAYYVGYLQPRTFLLKYNENGTITDAVDCALDPLSETKCTLKSFTVEKGIYQTSNFRVQPTESIVRFPNITNLCPFGEVFNATRFASVYAWNRKRISNCVADYSVLYNSASFSTFKCYGVSPTKLNDLCFTNVYADSFVIRGDEVRQIAPGQTGKIADYNYKLPDDFTGCVIAWNSNNLDSKVGGNYNYLYRLFRKSNLKPFERDISTEIYQAGSTPCNGAEGFNCYFPLQSYGFQPTNGVGYQPYRVVVLSFELLHAPATVCGPKKSTNLVKNKCVNFNFNGLTGTGVLTESNKKFLPFQQFGRDIADTTDAVRDPQTLEILDITPCSFGGVSVITPGTNTSNQVAVLYQDVNCTEVPVAIHADQLTPTWRVYSTGSNVFQTRAGCLIGAEHVNNSYECDIPIGAGICASYQTQTNSPRRARSVASQSIIAYTMSLGAENSVAYSNNSIAIPTNFTISVTTEILPVSMTKTSVDCTMYICGDSTECSNLLLQYGSFCTQLNRALTGIAVEQDKNTQEVFAQVKQIYKTPPIKDFGGFNFSQILPDPSKPSKRSFIEDLLFNKVTLADAGFIKQYGDCLGDIAARDLICAQKFNGLTVLPPLLTDEMIAQYTSALLAGTITSGWTFCAGAALQIPFAMQMAYRFNGIGVTQNVLYENQKLIANQFNSAIGKIQDSLSSTASALGKLQDVVNQNAQALNTLVKQLSSNFGAISSVLNDILSRLDKVEAEVQIDRLITGRLQSLQTYVTQQLIRAAEIRASANLAATKMSECVCGQSKRVDFCGKGYHLMSFPQSAPHGVVFLHVTYVPAQEKNFTTAPAICHDGKAHFPREGVFVSNGTHWFVTQRNFYEPQIITTDNTFVSGNCDVVIGIVNNTVYDPLQPELDSFKEELDKYFKNHTSPDVDLGDISGINASVVNIQKEIDRLNEVAKNLNESLIDLQELGKYEQYIKWPWYIWLGFIAGLIAIVMVTIMLCCMTSCCSCLKGCCSCGSCCKFDEDDSEPVLKGVKLHYT

SEQ ID NO: 845 - protein, 1273 aa, Artificial Sequence
  SARS-CoV-2/South Korea/SNU01/2020__EPI_ISL_411929 spike protein (1-1273)(G889C_L1034C)
MFVFLVLLPLVSSQCVNLTTRTQLPPAYTNSFTRGVYYPDKVFRSSVLHSTQDLFLPFFSNVTWFHAIHVSGTNGTKRFDNPVLPFNDGVYFASTEKSNIIRGWIFGTTLDSKTQSLLIVNNATNVVIKVCEFQFCNDPFLGVYYHKNNKSWMESEFRVYSSANNCTFEYVSQPFLMDLEGKQGNFKNLREFVFKNIDGYFKIYSKHTPINLVRDLPQGFWALEPLVDLPIGINITRFQTLLALHRSYLTPGDSSSGWTAGAAAYYVGYLQPRTFLLKYNENGTITDAVDCALDPLSETKCTLKSFTVEKGIYQTSNFRVQPTESIVRFPNITNLCPFGEVFNATRFASVYAWNRKRISNCVADYSVLYNSASFSTFKCYGVSPTKLNDLCFTNVYADSFVIRGDEVRQIAPGQTGKIADYNYKLPDDFTGCVIAWNSNNLDSKVGGNYNYLYRLFRKSNLKPFERDISTEIYQAGSTPCNGVEGFNCYFPLQSYGFQPTNGVGYQPYRVVVLSFELLHAPATVCGPKKSTNLVKNKCVNFNFNGLTGTGVLTESNKKFLPFQQFGRDIADTTDAVRDPQTLEILDITPCSFGGVSVITPGTNTSNQVAVLYQDVNCTEVPVAIHADQLTPTWRVYSTGSNVFQTRAGCLIGAEHVNNSYECDIPIGAGICASYQTQTNSPRRARSVASQSIIAYTMSLGAENSVAYSNNSIAIPTNFTISVTTEILPVSMTKTSVDCTMYICGDSTECSNLLLQYGSFCTQLNRALTGIAVEQDKNTQEVFAQVKQIYKTPPIKDFGGFNFSQILPDPSKPSKRSFIEDLLFNKVTLADAGFIKQYGDCLGDIAARDLICAQKFNGLTVLPPLLTDEMIAQYTSALLAGTITSGWTFCAGAALQIPFAMQMAYRFNGIGVTQNVLYENQKLIANQFNSAIGKIQDSLSSTASALGKLQDVVNQNAQALNTLVKQLSSNFGAISSVLNDILSRLDKVEAEVQIDRLITGRLQSLQTYVTQQLIRAAEIRASANLAATKMSECVCGQSKRVDFCGKGYHLMSFPQSAPHGVVFLHVTYVPAQEKNFTTAPAICHDGKAHFPREGVFVSNGTHWFVTQRNFYEPQIITTDNTFVSGNCDVVIGIVNNTVYDPLQPELDSFKEELDKYFKNHTSPDVDLGDISGINASVVNIQKEIDRLNEVAKNLNESLIDLQELGKYEQYIKWPWYIWLGFIAGLIAIVMVTIMLCCMTSCCSCLKGCCSCGSCCKFDEDDSEPVLKGVKLHYT

SEQ ID NO: 846 - protein, 1273 aa, Artificial Sequence
  SARS-CoV-2/China/WF0004/2020__EPI_ISL_413694 spike protein (1-1273)(G889C_L1034C)
MFVFLVLLPLVSSQCVNLTTRTQLPPAYTNSFTRGVYYPDKVFRSSVLHSTQDLFLPFFSNVTWFHAIHVSGTNGTKRFDNPVLPFNDGVYFASTEKSNIIRGWIFGTTLDSKTQSLLIVNNATNVVIKVCEFQFCNDPFLGVYYHKNNKSWTESEFRVYSSANNCTFEYVSQPFLMDLEGKQGNFKNLREFVFKNIDGYFKIYSKHTPINLVRDLPQGFSALEPLVDLPIGINITRFQTLLALHRSYLTPGDSSSGWTAGAAAYYVGYLQPRTFLLKYNENGTITDAVDCALDPLSETKCTLKSFTVEKGIYQTSNFRVQPTESIVRFPNITNLCPFGEVFNATRFASVYAWNRKRISNCVADYSVLYNSASFSTFKCYGVSPTKLNDLCFTNVYADSFVIRGDEVRQIAPGQTGKIADYNYKLPDDFTGCVIAWNSNNLDSKVGGNYNYLYRLFRKSNLKPFERDISTEIYQAGSTPCNGVEGFNCYFPLQSYGFQPTNGVGYQPYRVVVLSFELLHAPATVCGPKKSTNLVKNKCVNFNFNGLTGTGVLTESNKKFLPFQQFGRDIADTTDAVRDPQTLEILDITPCSFGGVSVITPGTNTSNQVAVLYQDVNCTEVPVAIHADQLTPTWRVYSTGSNVFQTRAGCLIGAEHVNNSYECDIPIGAGICASYQTQTNSPRRARSVASQSIIAYTMSLGAENSVAYSNNSIAIPTNFTISVTTEILPVSMTKTSVDCTMYICGDSTECSNLLLQYGSFCTQLNRALTGIAVEQDKNTQEVFAQVKQIYKTPPIKDFGGFNFSQILPDPSKPSKRSFIEDLLFNKVTLADAGFIKQYGDCLGDIAARDLICAQKFNGLTVLPPLLTDEMIAQYTSALLAGTITSGWTFCAGAALQIPFAMQMAYRFNGIGVTQNVLYENQKLIANQFNSAIGKIQDSLSSTASALGKLQDVVNQNAQALNTLVKQLSSNFGAISSVLNDILSRLDKVEAEVQIDRLITGRLQSLQTYVTQQLIRAAEIRASANLAATKMSECVCGQSKRFDFCGKGYHLMSFPQSAPHGVVFLHVTYVPAQEKNFTTAPAICHDGKAHFPREGVFVSNGTHWFVTQRNFYEPQIITTDNTFVSGNCDVVIGIVNNTVYDPLQPELDSFKEELDKYFKNHTSPDVDLGDISGINASVVNIQKEIDRLNEVAKNLNESLIDLQELGKYEQYIKWPWYIWLGFIAGLIAIVMVTIMLCCMTSCCSCLKGCCSCGSCCKFDEDDSEPVLKGVKLHYT

SEQ ID NO: 847 - protein, 1273 aa, Artificial Sequence
  SARS-CoV-2/China/WF0028/2020__EPI_ISL_413791 spike protein (1-1273)(G889C_L1034C)
MFVFLVLLPLVSSQCVNLTTRTQLPPAYTNSFTRGVYYPDKVFRSSVLHSTQDLFLPFFSNVTWFHAIHVSGTNGTKRFDNPVLPFNDGVYFASTEKSNIIRGWIFGTTLDSKTQSLLIVNNATNVVIKVCEFQFCNDPFLGVYYHKNNKSWMESEFRVYSSANNCTFEYVSQPFLMDLEGKQGNFKNLREFVFKNIDGYFKIYSKHTPINLVRDLPQGFSALEPLVDLPIGINITRFQTLLALHRSYLTPGDSSSGWTAGAAAYYVGYLQPRTFLLKYNENGTITDAVDCALDPLSETKCTLKSFTVEKGIYQTSNFRVQPTESIVRFPNITNLCPFGEVFNATRFASVYAWNRKRISNCVADYSVLYNSASFSTFKCYGVSPTKLNDLCFTNVYADSFVIRGDEVRQIAPGQTGKIADYNYKLPDDFTGCVIAWNSNNLDSKVGGNYNYLYRLFRKSNLKPFERDISTEIYQAGSTPCNGVEGFNCYFPLQSYGFQPTNGVGYQPYRVVVLSFELLHAPATVCGPKKSTNLVKNKCVNFNFNGLTGTGVLTESNKKFLPFQQFGRDIADTTDAVRDPQTLEILDITPCSFGGVSVITPGTNTSNQVAVLYQDVNCTEVPVAIHADQLTPTWRVYSTGSNVFQTRAGCLIGAEHVNNSYECDIPIGAGICASYQTQTNSPRRARSVASQSIIAYTMSLGAENSVAYSNNSIAIPTNFTISVTTEILPVSMTKTSVDCTMYICGDSTECSNLLLQYGSFCTQLNRALTGIAVEQDKNTQEVFAQVKQIYKTPPIKDFGGFNFSQILPDPSKPSKRSFIEDLLFNKVTLADAGFIKQYGDCLGDIAARDLICAQKFNGLTVLPPLLTDEMIAQYTSALLAGTITSGWTFCAGAALQIPFAMQMAYRFNGIGVTQNVLYENQKLIANQFNSAIGKIQDSLSSTASALGKLQDVVNQNAQALNTLVKQLSSNFGAISSVLNDILSRLDKVEAEVQIDRLITGRLQSLQTYVTQQLIRAAEIRASANLAATKMSECVCGQSKRVDFCGKGYHLMSFPQSAPHGVVFLHVTYVPAQEKNFTTAPAICHDGKAHFPREGVFVSNGTHWFVTQRNFYEPQIITTDNTFVSGNCDVVIGIVNNTVYDPLQPELESFKEELDKYFKNHTSPDVDLGDISGINASVVNIQKEIDRLNEVAKNLNESLIDLQELGKYEQYIKWPWYIWLGFIAGLIAIVMVTIMLCCMTSCCSCLKGCCSCGSCCKFDEDDSEPVLKGVKLHYT

SEQ ID NO: 848 - protein, 1273 aa, Artificial Sequence
  SARS-CoV-2/2019-nCoV/USA-CruiseA-18/2020__MT159716.1 spike protein (1-1273)(G889C_L1034C)
MFVFLVLLPLVSSQCVNLTTRTQLPPAYTNSFTRGVYYPDKVFRSSVLHSTQDLFLPFFSNVTWFHAIHVSGTNGTKRFDNPVLPFNDGVYFASTEKSNIIRGWIFGTTLDSKTQSLLIVNNATNVVIKVCEFQFCNDPFLGVYYHKNNKSWMESELRVYSSANNCTFEYVSQPFLMDLEGKQGNFKNLREFVFKNIDGYFKIYSKHTPINLVRDLPQGFSALEPLVDLPIGINITRFQTLLALHRSYLTPGDSSSGWTAGAAAYYVGYLQPRTFLLKYNENGTITDAVDCALDPLSETKCTLKSFTVEKGIYQTSNFRVQPTESIVRFPNITNLCPFGEVFNATRFASVYAWNRKRISNCVADYSVLYNSASFSTFKCYGVSPTKLNDLCFTNVYADSFVIRGDEVRQIAPGQTGKIADYNYKLPDDFTGCVIAWNSNNLDSKVGGNYNYLYRLFRKSNLKPFERDISTEIYQAGSTPCNGVEGFNCYFPLQSYGFQPTNGVGYQPYRVVVLSFELLHAPATVCGPKKSTNLVKNKCVNFNFNGLTGTGVLTESNKKFLPFQQFGRDIADTTDAVRDPQTLEILDITPCSFGGVSVITPGTNTSNQVAVLYQDVNCTEVPVAIHADQLTPTWRVYSTGSNVFQTRAGCLIGAEHVNNSYECDIPIGAGICASYQTQTNSPRRARSVASQSIIAYTMSLGAENSVAYSNNSIAIPTNFTISVTTEILPVSMTKTSVDCTMYICGDSTECSNLLLQYGSFCTQLNRALTGIAVEQDKNTQEVFAQVKQIYKTPPIKDFGGFNFSQILPDPSKPSKRSFIEDLLFNKVTLADAGFIKQYGDCLGDIAARDLICAQKFNGLTVLPPLLTDEMIAQYTSALLAGTITSGWTFCAGAALQIPFAMQMAYRFNGIGVTQNVLYENQKLIANQFNSAIGKIQDSLSSTASALGKLQDVVNQNAQALNTLVKQLSSNFGAISSVLNDILSRLDKVEAEVQIDRLITGRLQSLQTYVTQQLIRAAEIRASANLAATKMSECVCGQSKRVDFCGKGYHLMSFPQSAPHGVVFLHVTYVPAQEKNFTTAPAICHDGKAHFPREGVFVSNGTHWFVTQRNFYEPQIITTDNTFVSGNCDVVIGIVNNTVYDPLQPELDSFKEELDKYFKNHTSPDVDLGDISGINASVVNIQKEIDRLNEVAKNLNESLIDLQELGKYEQYIKWPWYIWLGFIAGLIAIVMVTIMLCCMTSCCSCLKGCCSCGSCCKFDEDDSEPVLKGVKLHYT

SEQ ID NO: 849 - protein, 1273 aa, Artificial Sequence
  SARS-CoV-2/SARS-CoV-2/Yunnan-01/human/2020/CHN__MT049951.1 spike protein (1-1273)(G889C_L1034C)
MFVFLVLLPLVSSQCVNLTTRTQLPPANTNSFTRGVYYPDKVFRSSVLHSTQDLFLPFFSNVTWFHAIHVSGTNGTKRFDNPVLPFNDGVYFASTEKSNIIRGWIFGTTLDSKTQSLLIVNNATNVVIKVCEFQFCNDPFLGVYYHKNNKSWMESEFRVYSSANNCTFEYVSQPFLMDLEGKQGNFKNLREFVFKNIDGYFKIYSKHTPINLVRDLPQGFSALEPLVDLPIGINITRFQTLLALHRSYLTPGDSSSGWTAGAAAYYVGYLQPRTFLLKYNENGTITDAVDCALDPLSETKCTLKSFTVEKGIYQTSNFRVQPTESIVRFPNITNLCPFGEVFNATRFASVYAWNRKRISNCVADYSVLYNSASFSTFKCYGVSPTKLNDLCFTNVYADSFVIRGDEVRQIAPGQTGKIADYNYKLPDDFTGCVIAWNSNNLDSKVGGNYNYLYRLFRKSNLKPFERDISTEIYQAGSTPCNGVEGFNCYFPLQSYGFQPTNGVGYQPYRVVVLSFELLHAPATVCGPKKSTNLVKNKCVNFNFNGLTGTGVLTESNKKFLPFQQFGRDIADTTDAVRDPQTLEILDITPCSFGGVSVITPGTNTSNQVAVLYQDVNCTEVPVAIHADQLTPTWRVYSTGSNVFQTRAGCLIGAEHVNNSYECDIPIGAGICASYQTQTNSPRRARSVASQSIIAYTMSLGAENSVAYSNNSIAIPTNFTISVTTEILPVSMTKTSVDCTMYICGDSTECSNLLLQYGSFCTQLNRALTGIAVEQDKNTQEVFAQVKQIYKTPPIKDFGGFNFSQILPDPSKPSKRSFIEDLLFNKVTLADAGFIKQYGDCLGDIAARDLICAQKFNGLTVLPPLLTDEMIAQYTSALLAGTITSGWTFCAGAALQIPFAMQMAYRFNGIGVTQNVLYENQKLIANQFNSAIGKIQDSLSSTASALGKLQDVVNQNAQALNTLVKQLSSNFGAISSVLNDILSRLDKVEAEVQIDRLITGRLQSLQTYVTQQLIRAAEIRASANLAATKMSECVCGQSKRVDFCGKGYHLMSFPQSAPHGVVFLHVTYVPAQEKNFTTAPAICHDGKAHFPREGVFVSNGTHWFVTQRNFYEPQIITTDNTFVSGNCDVVIGIVNNTVYDPLQPELDSFKEELDKYFKNHTSPDVDLGDISGINASVVNIQKEIDRLNEVAKNLNESLIDLQELGKYEQYIKWPWYIWLGFIAGLIAIVMVTIMLCCMTSCCSCLKGCCSCGSCCKFDEDDSEPVLKGVKLHYT

SEQ ID NO: 850 - protein, 1273 aa, Artificial Sequence
  SARS-CoV-2/USA/WA-UW292/2020__EPI_ISL_418077 spike protein (1-1273)(G889C_L1034C)
MFVFLVLLPLVSSQCVNLTTRTQLPPAYTNSFTRGVYYPDKVFRSSVLHSTQDLFLPFFSNVTWFHAIHVSGTNGTKRFDNPVLPFNDGVYFASTEKSNIIRGWIFGTTLDSKTQSLLIVNNATNVVIKVCEFQFCNDPFLGVYYHKNNKSWMESEFRVYSSANNCTFEYVSQPFLMDLEGKQGNFKNLREFVFKNIDGYFKIYSKHTPINLVRDLPQGFSALEPLVDLPIGINITRFQTLLALHRSYLTPGDSSSGWTAGAAAYYVGYLQPRTFLLKYNENGTITDAVDCALDPLSETKCTLKSFTVEKGIYQTSNFRVQPTESIVRFPNITNLCPFGEVFNATRFASVYAWNRKRISNCVADYSVLYNSASFSTFKCYGVSPTKLNDLCFTNVYADSFVIRGDEVRQIAPGQTGKIADYNYKLPDDFTGCVIAWNSNNLDSKVGGNYNYLYRLFRKSNLKPFERDISTEIYQASSTPCNGVEGFNCYFPLQSYGFQPTNGVGYQPYRVVVLSFELLHAPATVCGPKKSTNLVKNKCVNFNFNGLTGTGVLTESNKKFLPFQQFGRDIADTTDAVRDPQTLEILDITPCSFGGVSVITPGTNTSNQVAVLYQDVNCTEVPVAIHADQLTPTWRVYSTGSNVFQTRAGCLIGAEHVNNSYECDIPIGAGICASYQTQTNSPRRARSVASQSIIAYTMSLGAENSVAYSNNSIAIPTNFTISVTTEILPVSMTKTSVDCTMYICGDSTECSNLLLQYGSFCTQLNRALTGIAVEQDKNTQEVFAQVKQIYKTPPIKDFGGFNFSQILPDPSKPSKRSFIEDLLFNKVTLADAGFIKQYGDCLGDIAARDLICAQKFNGLTVLPPLLTDEMIAQYTSALLAGTITSGWTFCAGAALQIPFAMQMAYRFNGIGVTQNVLYENQKLIANQFNSAIGKIQDSLSSTASALGKLQDVVNQNAQALNTLVKQLSSNFGAISSVLNDILSRLDKVEAEVQIDRLITGRLQSLQTYVTQQLIRAAEIRASANLAATKMSECVCGQSKRVDFCGKGYHLMSFPQSAPHGVVFLHVTYVPAQEKNFTTAPAICHDGKAHFPREGVFVSNGTHWFVTQRNFYEPQIITTDNTFVSGNCDVVIGIVNNTVYDPLQPELDSFKEELDKYFKNHTSPDVDLGDISGINASVVNIQKEIDRLNEVAKNLNESLIDLQELGKYEQYIKWPWYIWLGFIAGLIAIVMVTIMLCCMTSCCSCLKGCCSCGSCCKFDEDDSEPVLKGVKLHYT

SEQ ID NO: 851 - protein, 1273 aa, Artificial Sequence
  SARS-CoV-2/Iceland/192/2020__EPI_ISL_417819 spike protein (1-1273)(G889C_L1034C)
MFVFFVLLPLVSSQCVNLTTRTQLPPAYTNSFTRGVYYPDKVFRSSVLHSTQDLFLPFFSNVTWFHAIHVSGTNGTKRFDNPVLPFNDGVYFASTEKSNIIRGWIFGTTLDSKTQSLLIVNNATNVVIKVCEFQFCNDPFLGVYYHKNNKSWMESEFRVYSSANNCTFEYVSQPFLMDLEGKQGNFKNLREFVFKNIDGYFKIYSKHTPINLVRDLPQGFSALEPLVDLPIGINITRFQTLLALHRSYLTPGDSSSGWTAGAAAYYVGYLQPRTFLLKYNENGTITDAVDCALDPLSETKCTLKSFTVEKGIYQTSNFRVQPTESIVRFPNITNLCPFGEVFNATRFASVYAWNRKRISNCVADYSVLYNSASFSTFKCYGVSPTKLNDLCFTNVYADSFVIRGDEVRQIAPGQTGKIADYNYKLPDDFTGCVIAWNSNNLDSKVGGNYNYLYRLFRKSNLKPFERDISTEIYQAGSTPCNGVEGFNCYFPLQSYGFQPTNGVGYQPYRVVVLSFELLHAPATVCGPKKSTNLVKNKCVNFNFNGLTGTGVLTESNKKFLPFQQFGRDIADTTDAVRDPQTLEILDITPCSFGGVSVITPGTNTSNQVAVLYQGVNCTEVPVAIHADQLTPTWRVYSTGSNVFQTRAGCLIGAEHVNNSYECDIPIGAGICASYQTQTNSPRRARSVASQSIIAYTMSLGAENSVAYSNNSIAIPTNFTISVTTEILPVSMTKTSVDCTMYICGDSTECSNLLLQYGSFCTQLNRALTGIAVEQDKNTQEVFAQVKQIYKTPPIKDFGGFNFSQILPDPSKPSKRSFIEDLLFNKVTLADAGFIKQYGDCLGDIAARDLICAQKFNGLTVLPPLLTDEMIAQYTSALLAGTITSGWTFCAGAALQIPFAMQMAYRFNGIGVTQNVLYENQKLIANQFNSAIGKIQDSLSSTASALGKLQDVVNQNAQALNTLVKQLSSNFGAISSVLNDILSRLDKVEAEVQIDRLITGRLQSLQTYVTQQLIRAAEIRASANLAATKMSECVCGQSKRVDFCGKGYHLMSFPQSAPHGVVFLHVTYVPAQEKNFTTAPAICHDGKAHFPREGVFVSNGTHWFVTQRNFYEPQIITTDNTFVSGNCDVVIGIVNNTVYDPLQPELDSFKEELDKYFKNHTSPDVDLGDISGINASVVNIQKEIDRLNEVAKNLNESLIDLQELGKYEQYIKWPWYIWLGFIAGLIAIVMVTIMLCCMTSCCSCLKGCCSCGSCCKFDEDDSEPVLKGVKLHYT

SEQ ID NO: 852 - protein, 1273 aa, Artificial Sequence
  SARS-CoV-2/Belgium/ULG-6939/2020__EPI_ISL_417020 spike protein (1-1273)(G889C_L1034C)
MFVFLVLLPLVSSQCVNLTTRTQLPPAYTNSFTRGVYYPDKVFRSSVLHSTQDLFLPFFSNVTWFHAIHVSGTNGTKRFDNPVLPFNDGVYFASTEKSNIIRGWIFGTTLDSKTQSLLIVNNATNVVIKVCEFQFCNDPFLGVYYHKNNKSWMESEFRVYSSANNCTFEYVSQPFLMDLEGKQGNFKNLREFVFKNIDGYFKIYSKHTPINLVRDLPQGFSALEPLVDLPIGINITRFQTLLALHRSYLTPGDSSSGWTAGAAAYYVGYLQPRTFLLKYNENGTITDAVDCALDPLSETKCTLKSFTVEKGIYQTSNFRVQPTESIVRFPNITNLCPFGEVFNATRFASVYAWNRKRISNCVADYSVLYNSASFSTFKCYGVSPTKLNDLCFTNVYADSFVIRGDEVRQIAPGQTGKIADYNYKLPDDFTGCVIAWNSNNLDSKVGGNYNYLYRLFRKSNLKPFERDISTEIYQAGSTPCNGVEGFNCYFPLQSYGFQPTNGVGYQPYRVVVLSFELLHAPATVCGPKKSTNLVKNKCVNFNFNGLTGTGVLTESNKKFLPFQQFGRDIADTTDAVRDPQTLEILDITPCSFGGVSVITPGTNTSNQVAVLYQGVNCTEVPVAIHADQLTPTWRVYSTGSNVFQTRAGCLIGAEHVNNSYECDIPIGAGICASYQTQTNSPRRARSVASQSIIAYTMSLGAENSVVYSNNSIAIPTNFTISVTTEILPVSMTKTSVDCTMYICGDSTECSNLLLQYGSFCTQLNRALTGIAVEQDKNTQEVFAQVKQIYKTPPIKDFGGFNFSQILPDPSKPSKRSFIEDLLFNKVTLADAGFIKQYGDCLGDIAARDLICAQKFNGLTVLPPLLTDEMIAQYTSALLAGTITSGWTFCAGAALQIPFAMQMAYRFNGIGVTQNVLYENQKLIANQFNSAIGKIQDSLSSTASALGKLQDVVNQNAQALNTLVKQLSSNFGAISSVLNDILSRLDKVEAEVQIDRLITGRLQSLQTYVTQQLIRAAEIRASANLAATKMSECVCGQSKRVDFCGKGYHLMSFPQSAPHGVVFLHVTYVPAQEKNFTTAPAICHDGKAHFPREGVFVSNGTHWFVTQRNFYEPQIITTDNTFVSGNCDVVIGIVNNTVYDPLQPELDSFKEELDKYFKNHTSPDVDLGDISGINASVVNIQKEIDRLNEVAKNLNESLIDLQELGKYEQYIKWPWYIWLGFIAGLIAIVMVTIMLCCMTSCCSCLKGCCSCGSCCKFDEDDSEPVLKGVKLHYT

SEQ ID NO: 853 - protein, 1273 aa, Artificial Sequence
  SARS-CoV-2/France/HF2496/2020__EPI_ISL_418231 spike protein (1-1273)(G889C_L1034C)
MFVFLVLLPLVSSQCVNLTTRTQLPPAYTNSFTRGVYYPDKVFRSSVLHSTQDLFLPFFSNVTWFHAIHVSGTNGTKRFDNPVLPFNDGVYFASTEKSNIIRGWIFGTTLDSKTQSLLIVNNATNVVIKVCEFQFCNDPFLGVYYHKNNKSWMESEFRVYSSANNCTFEYVSQPFLMDLEGKQGNFKNLREFVFKNIDGYFKIYSKHTPINLVRDLPQGFSALEPLVDLPIGINITRFQTLLALHRSYLTPGDSSSGWTAGAAAYYVGYLQPRTFLLKYNENGTITDAVDCALDPLSETKCTLKSFTVEKGIYQTSNFRVQPTESIVRFPNITNLCPFGEVFNATRFASVYAWNRKRISNCVADYSVLYNSASFSTFKCYGVSPTKLNDLCFTNVYADSFVIRGDEVRQIAPGQTGKIADYNYKLPDDFTGCVIAWNSNNLDSKVGGNYNYLYRLFRKSNLKPFERDISTEIYQAGSTPCNGVEGFNCYFPLQSYGFQPTNGVGYQPYRVVVLSFELLHAPATVCGPKKSTNLVKNKCVNFNFNGLTGTGVLTESNKKFLPFQQFGRDIADTTDAVRDPQTLEILDITPCSFGGVSVITPGTNTSNQVAVLYQGVNCTEVPVAIHADQLTPTWRVYSTGSNVFQTRAGCLIGAEHVNNSYECDIPIGAGICASYQTQTNSPRRARSVASQSIIAYTMSLGAENSVAYSNNSIAIPTNFTISVTTEILPVSMTKTSVDCTMYICGDSTECSNLLLQYGSFCTQLNRALTGIAVEQDKNTQEVFAQVKQIYKTPPIKDFGGFNFSQILPDPSKPSKRSFIEDLLFNKVTLADAGFIKQYGDCLGDIVARDLICAQKFNGLTVLPPLLTDEMIAQYTSALLAGTITSGWTFCAGAALQIPFAMQMAYRFNGIGVTQNVLYENQKLIANQFNSAIGKIQDSLSSTASALGKLQDVVNQNAQALNTLVKQLSSNFGAISSVLNDILSRLDKVEAEVQIDRLITGRLQSLQTYVTQQLIRAAEIRASANLAATKMSECVCGQSKRVDFCGKGYHLMSFPQSAPHGVVFLHVTYVPAQEKNFTTAPAICHDGKAHFPREGVFVSNGTHWFVTQRNFYEPQIITTDNTFVSGNCDVVIGIVNNTVYDPLQPELDSFKEELDKYFKNHTSPDVDLGDISGINASVVNIQKEIDRLNEVAKNLNESLIDLQELGKYEQYIKWPWYIWLGFIAGLIAIVMVTIMLCCMTSCCSCLKGCCSCGSCCKFDEDDSEPVLKGVKLHYT

SEQ ID NO: 854 - protein, 1273 aa, Artificial Sequence
  SARS-CoV-2/USA/WA-UW291/2020__EPI_ISL_418076 spike protein (1-1273)(G889C_L1034C)
MFVFLVLLPLVSSQCVNLTTRTQLPPAYTNSFTRGVYYPDKVFRSSVLHSTQDLFLPFFSNVTWFHAIHVSGTNGTKRFDNPVLPFNDGVYFASTEKSNIIRGWIFGTTLDSKTQSLLIVNNATNVVIKVCEFQFCNDPFLGVYYHKNNKSWMESEFRVYSSANNCTFEYVSQPFLMDLEGKQGNFKNLREFVFKNIDGYFKIYSKHTPINLVRDLPQGFSALEPLVDLPIGINITRFQTLLALHRSYLTPGDSSSGWTAGAAAYYVGYLQPRTFLLKYNENGTITDAVDCALDPLSETKCTLKSFTVEKGIYQTSNFRVQPTESIVRFPNITNLCPFGEVFNATRFASVYAWNRKRISNCVADYSVLYNSASFSTFKCYGVSPTKLNDLCFTNVYADSFVIRGDEVRQIAPGQTGKIADYNYKLPDDFTGCVIAWNSNNLDSKVGGNYNYLYRLFRKSNLKPFERDISTEIYQAGSTPCNGVEGFNCYFPLQSYGFQPTNGVGYQPYRVVVLSFELLHAPATVCGPKKSTNLVKNKCVNFNFNGLTGTGVLTESNKKFLPFQQFGRDIADTTDAVRDPQTLEILDITPCSFGGVSVITPGTNTSNQVAVLYQGVNCTEVPVAIHADQLTPTWRVYSTGSNVFQTRAGCLIGAEHVNNSYECDIPIGAGICASYQTQTNSPRRARSVASQSIIAYTMSLGAENSVAYSNNSIAIPTNFTISVTTEILPVSMTKTSVDCTMYICGDSTECSNLLLQYGSFCTQLNRALTGIAVEQDKNTQEVFAQVKQIYKTPPIKDFGGFNFSQILPDPSKPSKRSFIEDLLFNKVTLADAGFIKQYGDCLGDIAARDLICAQKFNGLTVLPPLLTDEMIAQYTSALLAGTITSGWTFCAGAALQIPFAMQMAYRFNGIGVTQNVLYENQKLIANQFNSAIGKIQYSLSSTASALGKLQDVVNQNAQALNTLVKQLSSNFGAISSVLNDILSRLDKVEAEVQIDRLITGRLQSLQTYVTQQLIRAAEIRASANLAATKMSECVCGQSKRVDFCGKGYHLMSFPQSAPHGVVFLHVTYVPAQEKNFTTAPAICHDGKAHFPREGVFVSNGTHWFVTQRNFYEPQIITTDNTFVSGNCDVVIGIVNNTVYDPLQPELDSFKEELDKYFKNHTSPDVDLGDISGINASVVNIQKEIDRLNEVAKNLNESLIDLQELGKYEQYIKWPWYIWLGFIAGLIAIVMVTIMLCCMTSCCSCLKGCCSCGSCCKFDEDDSEPVLKGVKLHYT

SEQ ID NO: 855 - protein, 1273 aa, Artificial Sequence
  SARS-CoV-2/Portugal/PT0034/2020__EPI_ISL_418019 spike protein (1-1273)(G889C_L1034C)
MFVFLVLLPLVSSQCVNLTTRTQLPPAYTNSFTRGVYYPDKVFRSSVLHSTQDLFLPFFSNVTWFHAIHVSGTNGTKRFDNPVLPFNDGVYFASTEKSNIIRGWIFGTTLDSKTQSLLIVNNATNVVIKVCEFQFCNDPFLGVYYHKNNKSWMESEFRVYSSANNCTFEYVSQPFLMDLEGKQGNFKNLREFVFKNIDGYFKIYSKHTPINLVRDLPQGFSALEPLVDLPIGINITRFQTLLALHRSYLTPGDSSSGWTAGAAAYYVGYLQPRTFLLKYNENGTITDAVDCALDPLSETKCTLKSFTVEKGIYQTSNFRVQPTESIVRFPNITNLCPFGEVFNATRFASVYAWNRKRISNCVADYSVLYNSASFSTFKCYGVSPTKLNDLCFTNVYADSFVIRGDEVRQIAPGQTGKIADYNYKLPDDFTGCVIAWNSNNLDSKVGGNYNYLYRLFRKSNLKPFERDISTEIYQAGSTPCNGVEGFNCYFPLQSYGFQPTNGVGYQPYRVVVLSFELLHAPATVCGPKKSTNLVKNKCVNFNFNGLTGTGVLTESNKKFLPFQQFGRDIADTTDAVRDPQTLEILDITPCSFGGVSVITPGTNTSNQVAVLYQGVNCTEVPVAIHADQLTPTWRVYSTGSNVFQTRAGCLIGAEHVNNSYECDIPIGAGICASYQTQTNSPRRARSVASQSIIAYTMSLGAENSVAYSNNSIAIPTNFTISVTTEILPVSMTKTSVDCTMYICGDSTECSNLLLQYGSFCTQLNRALTGIAVEQDKNTQEVFAQVKQIYKTPPIKDFGGFNFSQILPDPSKPSKRSFIEDLLFNKVTLADAGFIKQYGDCLGDIAARDLICAQKFNGLTVLPPLLTDEMIAQYTSALLAGTITSGWTFCAGAALQIPFAMQMAYRFNGIGVTQNVLYENQKLIANQFNSAIGKIQDSLSSTASALGKLQDVVNQNAQALNTLVKQLSSNFGAISSVLNDILSRLDKVEAEVQIDRLITGRLQSLQTYVTQQLIRAAEIRASANLAATKMSECVCGQSKRVDFCGKGYHLMSFPQSAPHGVVFLHVTYVPAQEKNFTTAPAICHDGKAHFPREGVFVSNGTHWFVTQRNFYEPQIITTDNTFVSGNCDVVIGIVNNTVYDPLQPELDSFKEELDKYFKNHTSPDVDLGDISGINASVVNIQKEIDRLNEVAKNLNESLIDLQELGKYEQYIKWPWYIWLGFIAGLIAIVMVTIMLCCITSCCSCLKGCCSCGSCCKFDEDDSEPVLKGVKLHYT

SEQ ID NO: 856 - protein, 1273 aa, Artificial Sequence
  SARS-CoV-2/Iceland/202/2020__EPI_ISL_417750 spike protein (1-1273)(G889C_L1034C)
MFVFLVLLPLVSSQCVNLTTRTQLPPAYTNSFTRGVYYPDKVFRSSVLHSTQDLFLPFFSNVTWFHAIHVSGTNGTKRFDNPVLPFNDGVYFASTEKSNIIRGWIFGTTLDSKTQSLLIVNNATNVVIKVCEFQFCNDPFLGVYYHKNNKSWMESEFRVYSSANNCTFEYVSQPFLMDLEGKQGNFKNLREFVFKNIDGYFKIYSKHTPINLVRDLPQGFSALEPLVDLPIGINITRFQTLLALHRSYLTPGDSSSGWTAGAAAYYVGYLQPRTFLLKYNENGTITDAVDCALDPLSETKCTLKSFTVEKGIYQTSNFRVQPTESIVRFPNITNLCPFGEVFNATRFASVYAWNRKRISNCVADYSVLYNSASFSTFKCYGVSPTKLNDLCFTNVYADSFVIRGDEVRQIAPGQTGKIADYNYKLPDDFTGCVIAWNSNNLDSKVGGNYNYLYRLFRKSNLKPFERDISTEIYQAGSTPCNGVEGFNCYFPLQSYGFQPTNGVGYQPYRVVVLSFELLHAPATVCGPKKSTNLVKNKCVNFNFNGLTGTGVLTESNKKFLPFQQFGRDIADTTDAVRDPQTLEILDITPCSFGGVSVITPGTNTSNQVAVLYQDVNCTEVPVAIHADQLTPTWRVYSTGSNVFQTRAGCLIGAEHVNNSYECDIPIGAGICASYQTQTNSPRRARSVASQSIIAYTMSLGAENSVAYSNNSIAIPTNFTISVTTEILPVSMTKTSVDCTMYICGDSTECSNLLLQYGSFCTQLNRALTGIAVEQDKNTQEVFAQVKQIYKTPPIKDFGGFNFSQILPDPSKPSKRSFIEDLLFNKVTLADAGFIKQYGDCLGDIAARDLICAQKFNGLTVLPPLLTDEMIAQYTSALLAGTITSGWTFCAGAALQIPFAMQMAYRFNGIGVTQNVLYENQKLIANQFNSAIGKIQDSLSSTASALGKLQDVVNQNAQALNTLVKQLSSNFGAISSVLNDILSRLDKVEAEVQIDRLITGRLQSLQTYVTQQLIRAAEIRASANLAATKMSECVCGQSKRVDFCGKGYHLMSFPQSAPHGVVFLHVTYVPAQEKNFTTAPAICHDGKAHFPREGVFVSNGTHWFVTQRNFYEPQIITTDNTFVSGNCDVVIGIVNNTVYDPLQPELDSFKEELDKYFKNHTSPDVDLGDIPGINASVVNIQKEIDRLNEVAKNLNESLIDLQELGKYEQYIKWPWYIWLGFIAGLIAIVMVTIMLCCMTSCCSCLKGCCSCGSCCKFDEDDSEPVLKGVKLHYT

SEQ ID NO: 857 - protein, 1273 aa, Artificial Sequence
  SARS-CoV-2/USA/WA-UW261/2020__EPI_ISL_418046 spike protein (1-1273)(G889C_L1034C)
MFVFLVLLPLVSSQCVNLTTRTQLPPAYTNSFTRGVYYPDKVFRSSVLHSTQDLFLPFFSNVTWFHAIHVSGTNGTKRFDNPVLPFNDGVYFASTEKSNIIRGWIFGTTLDSKTQSLLIVNNATNVVIKVCEFQFCNDPFLGVYYHKNNKSWMESEFRVYSSANNCTFEYVSQPFLMDLEGKQGNFKNLREFVFKNIDGYFKIYSKHTPINLVRDLPQGFSALEPLVDLPIGINITRFQTLLALHRSYLTPGDSSSGWTAGAAAYYVGYLQPRTFLLKYNENGTITDAVDCALDPLSETKCTLKSFTVEKGIYQTSNFRVQPTESIVRFPNITNLCPFGEVFNATRFTSVYAWNRKRISNCVADYSVLYNSASFSTFKCYGVSPTKLNDLCFTNVYADSFVIRGDEVRQIAPGQTGKIADYNYKLPDDFTGCVIAWNSNNLDSKVGGNYNYLYRLFRKSNLKPFERDISTEIYQAGSTPCNGVEGFNCYFPLQSYGFQPTNGVGYQPYRVVVLSFELLHAPATVCGPKKSTNLVKNKCVNFNFNGLTGTGVLTESNKKFLPFQQFGRDIADTTDAVRDPQTLEILDITPCSFGGVSVITPGTNTSNQVAVLYQDVNCTEVPVAIHADQLTPTWRVYSTGSNVFQTRAGCLIGAEHVNNSYECDIPIGAGICASYQTQTNSPRRARSVASQSIIAYTMSLGAENSVAYSNNSIAIPTNFTISVTTEILPVSMTKTSVDCTMYICGDSTECSNLLLQYGSFCTQLNRALTGIAVEQDKNTQEVFAQVKQIYKTPPIKDFGGFNFSQILPDPSKPSKRSFIEDLLFNKVTLADAGFIKQYGDCLGDIAARDLICAQKFNGLTVLPPLLTDEMIAQYTSALLAGTITSGWTFCAGAALQIPFAMQMAYRFNGIGVTQNVLYENQKLIANQFNSAIGKIQDSLSSTASALGKLQDVVNQNAQALNTLVKQLSSNFGAISSVLNDILSRLDKVEAEVQIDRLITGRLQSLQTYVTQQLIRAAEIRASANLAATKMSECVCGQSKRVDFCGKGYHLMSFPQSAPHGVVFLHVTYVPAQEKNFTTAPAICHDGKAHFPREGVFVSNGTHWFVTQRNFYEPQIITTDNTFVSGNCDVVIGIVNNTVYDPLQPELDSFKEELDKYFKNHTSPDVDLGDISGINASVVNIQKEIDRLNEVAKNLNESLIDLQELGKYEQYIKWPWYIWLGFIAGLIAIVMVTIMLCCMTSCCSCLKGCCSCGSCCKFDEDDSEPVLKGVKLHYT

SEQ ID NO: 858 - protein, 1273 aa, Artificial Sequence
  SARS-CoV-2/Portugal/PT0035/2020__EPI_ISL_418020 spike protein (1-1273)(G889C_L1034C)
MFVFLVLLPLVSSQCVNLTTRTQLPPAYTNSFTRGVYYPDKVFRSSVLHSTQDLFLPFFSNVTWFHAIHVSGTNGTKRFDNPVLPFNDGVYFASTEKSNIIRGWIFGTTLDSKTQSLLIVNNATNVVIKVCEFQFCNDPFLGVYYHKNNKSWMESEFRVYSSANNCTFEYVSQPFLMDLEGKQGNFKNLREFVFKNIDGYFKIYSKHTPINLVRDLPQGFSALEPLVDLPIGINITRFQTLLALHRSYLTPGDSSSGWTAGAAAYYVGYLQPRTFLLKYNENGTITDAVDCALDPLSETKCTLKSFTVEKGIYQTSNFRVQPTESIVRFPNITNLCPFGEVFNATRFASVYAWNRKRISNCVADYSVLYNSASFSTFKCYGVSPTKLNDLCFTNVYADSFVIRGDEVRQIAPGQTGKIADYNYKLPDDFTGCVIAWNSNNLDSKVGGNYNYLYRLFRKSNLKPFERDISTEIYQAGSTPCNGVEGFNCYFPLQSYGFQPTNGVGYQPYRVVVLSFELLHAPATVCGPKKSTNLVKNKCVNFNFNGLTGTGVLTESNKKFLPFQQFGRDIADTTDAVRDPQTLEILDITPCSFGGVSVITPGTNTSNQVAVLYQDVNCTEVPVAIHADQLTPTWRVYSTGSNVFQTRAGCLIGAEHVNNSYECDIPIGAGICASYQTQTNSPRRARSVASQSIIAYTMSLGAENSVAYSNNSIAIPTNFTISVTTEILPVSMTKTSVDCTMYICGDSTECSNLLLQYGSFCTQLNRALTGIAVEQDKNTQEVFAQVKQIYKTPPIKDFGGFNFSQILPDPSKPSKRSFIEDLLFNKVTLADAGFIKQYGDCLGDISARDLICAQKFNGLTVLPPLLTDEMIAQYTSALLAGTITSGWTFCAGAALQIPFAMQMAYRFNGIGVTQNVLYENQKLIANQFNSAIGKIQDSLSSTASALGKLQDVVNQNAQALNTLVKQLSSNFGAISSVLNDILSRLDKVEAEVQIDRLITGRLQSLQTYVTQQLIRAAEIRASANLAATKMSECVCGQSKRVDFCGKGYHLMSFPQSAPHGVVFLHVTYVPAQEKNFTTAPAICHDGKAHFPREGVFVSNGTHWFVTQRNFYEPQIITTDNTFVSGNCDVVIGIVNNTVYDPLQPELDSFKEELDKYFKNHTSPDVDLGDISGINASVVNIQKEIDRLNEVAKNLNESLIDLQELGKYEQYIKWPWYIWLGFIAGLIAIVMVTIMLCCMTSCCSCLKGCCSCGSCCKFDEDDSEPVLKGVKLHYT

SEQ ID NO: 859 - protein, 1273 aa, Artificial Sequence
  SARS-CoV-2/USA/NY-NYUMC7/2020__EPI_ISL_418192 spike protein (1-1273)(G889C_L1034C)
MFVFLVLLPLVSSQCVNLTTRTQLPPAYTNSFTRGVYYPDKVFRSSVLHSTQDLFLPFFSNVTWFHAIHVSGTNGTKRFDNPVLPFNDGVYFASTEKSNIIRGWIFGTTLDSKTQSLLIVNNATNVVIKVCEFQFCNDPFLGVYHHKNNKSWMESEFRVYSSANNCTFEYVSQPFLMDLEGKQGNFKNLREFVFKNIDGYFKIYSKHTPINLVRDLPQGFSALEPLVDLPIGINITRFQTLLALHRSYLTPGDSSSGWTAGAAAYYVGYLQPRTFLLKYNENGTITDAVDCALDPLSETKCTLKSFTVEKGIYQTSNFRVQPTESIVRFPNITNLCPFGEVFNATRFASVYAWNRKRISNCVADYSVLYNSASFSTFKCYGVSPTKLNDLCFTNVYADSFVIRGDEVRQIAPGQTGKIADYNYKLPDDFTGCVIAWNSNNLDSKVGGNYNYLYRLFRKSNLKPFERDISTEIYQAGSTPCNGVEGFNCYFPLQSYGFQPTNGVGYQPYRVVVLSFELLHAPATVCGPKKSTNLVKNKCVNFNFNGLTGTGVLTESNKKFLPFQQFGRDIADTTDAVRDPQTLEILDITPCSFGGVSVITPGTNTSNQVAVLYQGVNCTEVPVAIHADQLTPTWRVYSTGSNVFQTRAGCLIGAEHVNNSYECDIPIGAGICASYQTQTNSPRRARSVASQSIIAYTMSLGAENSVAYSNNSIAIPTNFTISVTTEILPVSMTKTSVDCTMYICGDSTECSNLLLQYGSFCTQLNRALTGIAVEQDKNTQEVFAQVKQIYKTPPIKDFGGFNFSQILPDPSKPSKRSFIEDLLFNKVTLADAGFIKQYGDCLGDIAARDLICAQKFNGLTVLPPLLTDEMIAQYTSALLAGTITSGWTFCAGAALQIPFAMQMAYRFNGIGVTQNVLYENQKLIANQFNSAIGKIQDSLSSTASALGKLQDVVNQNAQALNTLVKQLSSNFGAISSVLNDILSRLDKVEAEVQIDRLITGRLQSLQTYVTQQLIRAAEIRASANLAATKMSECVCGQSKRVDFCGKGYHLMSFPQSAPHGVVFLHVTYVPAQEKNFTTAPAICHDGKAHFPREGVFVSNGTHWFVTQRNFYEPQIITTDNTFVSGNCDVVIGIVNNTVYDPLQPELDSFKEELDKYFKNHTSPDVDLGDISGINASVVNIQKEIDRLNEVAKNLNESLIDLQELGKYEQYIKWPWYIWLGFIAGLIAIVMVTIMLCCMTSCCSCLKGCCSCGSCCKFDEDDSEPVLKGVKLHYT

SEQ ID NO: 860 - protein, 1273 aa, Artificial Sequence
  SARS-CoV-2/Iceland/189/2020__EPI_ISL_417709 spike protein (1-1273)(G889C_L1034C)
MFVFLVLLPLVSSQCVNLTTRTQLPPAYTNSFTRGVYYPDKVFRSSVLHSTQDLFLPFFSNVTWFHAIHVSGTNGTKRFDNPVLPFNDGVYFASTEKSNIIRGWIFGTTLDSKTQSLLIVNNATNVVIKVCEFQFCNDPFLGVYYHKNNKSWMESEFRVYSSANNCTFEYVSQPFLMDLEGKQGNFKNLREFVFKNIDGYFKIYSKHTPINLVRDLPQGFSALEPLVDLPIGINITRFQTLLALHRSYLTPGDSSSGWTAGAAAYYVGYLQPRTFLLKYNENGTITDAVDCALDPLSETKCTLKSFTVEKGIYQTSNFRVQPTESIVRFPNITNLCPFGEVFNATRFASVYAWNRKRISNCVADYSVLYNSASFSTFKCYGVSPTKLNDLCFTNVYADSFVIRGDEVRQIAPGQTGKIADYNYKLPDDFTGCVIAWNSNNLDSKVGGNYNYLYRLFRKSNLKPFERDISTEIYQAGSTPCNGVEGFNCYFPLQSYGFQPTNGVGYQPYRVVVLSFELLHAPATVCGPKKSTNLVKNKCVNFNFNGLTGTGVLTESNKKFLPFQQFGRDIADTTDAVRDPQTLEILDITPCSFGGVSVITPGTNTSNQVAVLYQGVNCTEVPVAIHADQLTPTWRVYSTGSNVFQTRAGCLIGAEHVNNSYECDIPIGAGICASYQTQTNSPRRARSVASQSIIAYTMSLGAENSVAYSNNSIAIPTNFTISVTTEILPVSMTKTSVDCTMYICGDSTECSNLLLQYGSFCTQLNRALTGIAVEQDKNTQEVFAQVKQIYKTPPIKDFGGFNFSQILPDPSKPSKRSFIEDLLFNKVTLADAGFTKQYGDCLGDIAARDLICAQKFNGLTVLPPLLTDEMIAQYTSALLAGTITSGWTFCAGAALQIPFAMQMAYRFNGIGVTQNVLYENQKLIANQFNSAIGKIQDSLSSTASALGKLQDVVNQNAQALNTLVKQLSSNFGAISSVLNDILSRLDKVEAEVQIDRLITGRLQSLQTYVTQQLIRAAEIRASANLAATKMSECVCGQSKRVDFCGKGYHLMSFPQSAPHGVVFLHVTYVPAQEKNFTTAPAICHDGKAHFPREGVFVSNGTHWFVTQRNFYEPQIITTDNTFVSGNCDVVIGIVNNTVYDPLQPELDSFKEELDKYFKNHTSPDVDLGDISGINASVVNIQKEIDRLNEVAKNLNESLIDLQELGKYEQYIKWPWYIWLGFIAGLIAIVMVTIMLCCMTSCCSCLKGCCSCGSCCKFDEDDSEPVLKGVKLHYT

SEQ ID NO: 861 - protein, 1273 aa, Artificial Sequence
  SARS-CoV-2/Australia/NSW56/2020__EPI_ISL_417408 spike protein (1-1273)(G889C_L1034C)
MFVFLVLLPLVSSQCVNLTTRTQLPPAYTNSFTRGVYYPDKVFRSSVLHSTQDLFLPFFSNVTWFHAIHVSGTNGTKRFDNPVLPFNDGVYFASTEKSNIIRGWIFGTTLDSKTQSLLIVNNATNVVIKVCEFQFCNDPFLGVYYHKNNKSWMESEFRVYSSANNCTFEYVSQPFLMDLEGKQGNFKNLREFVFKNIDGYFKIYSKHTPINLVRDLPQGFSALEPLVDLPIGINITRFQTLLALHRSYLTPGDSSSGWTAGAAAYYVGYLQPRTFLLKYNENGTITDAVDCALDPLSETKCTLKSFTVEKGIYQTSNFRVQPTESIVRFPNITNLCPFGEVFNATRFASVYAWNRKRISNCVADYSVLYNSASFSTFKCYGVSPTKLNDLCFTNVYADSFVIRGDEVRQIAPGQTGKIADYNYKLPDDFTGCVIAWNSNNLDSKVGGNYNYLYRLFRKSNLKPFERDISTEIYQAGSTPCNGVEGFNCYFPLQSYGFQPTNGVGYQPYRVVVLSFELLHAPATVCGPKKSTNLVKNKCVNFNFNGLTGTGVLTESNKKFLPFQQFGRDIADTTDAVRDPQTLEILDITPCSFGGVSVITPGTNTSNQVAVLYQDVNCTEVPVAIHADQLTPTWRVYSTGSNVFQTRAGCLIGAEHVNNSYECDIPIGAGICASYQTQTNSPRRARSVASQSIIAYTMSLGAENSVAYSNNSIAIPTNFTISVTTEILPVSMTKTSVDCTMYICGDSTECSNLLLQYGSFCTQLNRALTGIAVEQDKNTQEVFAQVKQIYKTPPIKDFGGFNFSQILPDSSKPSKRSFIEDLLFNKVTLADAGFIKQYGDCLGDIAARDLICAQKFNGLTVLPPLLTDEMIAQYTSALLAGTITSGWTFCAGAALQIPFAMQMAYRFNGIGVTQNVLYENQKLIANQFNSAIGKIQDSLSSTASALGKLQDVVNQNAQALNTLVKQLSSNFGAISSVLNDILSRLDKVEAEVQIDRLITGRLQSLQTYVTQQLIRAAEIRASANLAATKMSECVCGQSKRVDFCGKGYHLMSFPQSAPHGVVFLHVTYVPAQEKNFTTAPAICHDGKAHFPREGVFVSNGTHWFVTQRNFYEPQIITTDNTFVSGNCDVVIGIVNNTVYDPLQPELDSFKEELDKYFKNHTSPDVDLGDISGINASVVNIQKEIDRLNEVAKNLNESLIDLQELGKYEQYIKWPWYIWLGFIAGLIAIVMVTIMLCCMTSCCSCLKGCCSCGSCCKFDEDDSEPVLKGVKLHYT

SEQ ID NO: 862 - protein, 1273 aa, Artificial Sequence
  SARS-CoV-2/Iceland/280/2020__EPI_ISL_417608 spike protein (1-1273)(G889C_L1034C)
MFVFLVLLPLVSSQCVNLTTRTQLPPAYTNSFTRGVYYPDKVFRSSVLHSTQDLFLPFFSNVTWFHAIHVSGTNGTKRFDNPVLPFNDGVYFASTEKSNIIRGWIFGTTLDSKTQSLLIVNNATNVVIKVCEFQFCNDPFLGVYYHKNNKSWMESEFRVYSSANNCTFEYVSQPFLMDLEGKQGNFKNLREFVFKNIDGYFKIYSKHTPINLVRDLPQGFSALEPLVDLPIGINITRFQTLLALHRSYLTPGDSSSGWTAGAAAYYVGYLQPRTFLLKYNENGTITDAVDCALDPLSETKCTLKSFTVEKGIYQTSNFRVQPTESIVRFPNITNLCPFGEVFNATRFASVYAWNRKRISNCVADYSVLYNSASFSTFKCYGVSPTKLNDLCFTNVYADSFVIRGDEVRQIAPGQTGKIADYNYKLPDDFTGCVIAWNSNNLDSKVGGNYNYLYRLFRKSNLKPFERDISTEIYQAGSTPCNGVEGFNCYFPLQSYGFQPTNGVGYQPYRVVVLSFELLHAPATVCGPKKSTNLVKNKCVNFNFNGLTGTGVLTESNKKFLPFQQFGRDIADTTDAVRDPQTLEILDITPCSFGGVSVITPGTNTSNQVAVLYQGVNCTEVPVAIHADQLTPTWRVYSTGSNVFQTRAGCLIGAEHVNNSYECDIPIGAGICASYHTQTNSPRRARSVASQSIIAYTMSLGAENSVAYSNNSIAIPTNFTISVTTEILPVSMTKTSVDCTMYICGDSTECSNLLLQYGSFCTQLNRALTGIAVEQDKNTQEVFAQVKQIYKTPPIKDFGGFNFSQILPDPSKPSKRSFIEDLLFNKVTLADAGFIKQYGDCLGDIAARDLICAQKFNGLTVLPPLLTDEMIAQYTSALLAGTITSGWTFCAGAALQIPFAMQMAYRFNGIGVTQNVLYENQKLIANQFNSAIGKIQDSLSSTASALGKLQDVVNQNAQALNTLVKQLSSNFGAISSVLNDILSRLDKVEAEVQIDRLITGRLQSLQTYVTQQLIRAAEIRASANLAATKMSECVCGQSKRVDFCGKGYHLMSFPQSAPHGVVFLHVTYVPAQEKNFTTAPAICHDGKAHFPREGVFVSNGTHWFVTQRNFYEPQIITTDNTFVSGNCDVVIGIVNNTVYDPLQPELDSFKEELDKYFKNHTSPDVDLGDISGINASVVNIQKEIDRLNEVAKNLNESLIDLQELGKYEQYIKWPWYIWLGFIAGLIAIVMVTIMLCCMTSCCSCLKGCCSCGSCCKFDEDDSEPVLKGVKLHYT

SEQ ID NO: 863 - protein, 1273 aa, Artificial Sequence
  SARS-CoV-2/Iceland/247/2020__EPI_ISL_417575 spike protein (1-1273)(G889C_L1034C)
MFVFLVLLPLVSSQCVNLTTRTQLPPAYTNSFTRGVYYPDKVFRSSVLHSTQDLFLPFFSNVTWFHAIHVSGTNGTKRFDNPVLPFNDGVYFASTEKSNIIRGWIFGTTLDSKTQSLLIVNNATNVVIKVCEFQFCNDPFLGVYYHKNNKSWMESEFRVYSSANNCTFEYVSQPFLMDLEGKQGNFKNLREFVFKNIDGYFKIYSKHTPINLVRDLPQGFSALEPLVDLPIGINITRFQTLLALHRSYLTPGDSSSGWTAGAAAYYVGYLQPRTFLLKYNENGTITDAVDCALDPLSETKCTLKSFTVEKGIYQTSNFRVQPTESIVRFPNITNLCPFGEVFNATRFASVYAWNRKRISNCVADYSVLYNSASFSTFKCYGVSPTKLNDLCFTNVYADSFVIRGDEVRQIAPGQTGKIADYNYKLPDDFTGCVIAWNSNNLDSKVGGNYNYLYRLFRKSNLKPFERDISTEIYQAGSTPCNGVEGFNCYFPLQSYGFQPTNGVGYQPYRVVVLSFELLHAPATVCGPKKSTNLVKNKCVNFNFNGLTGTGVLTESNKKFLPFQQFGRDIADTTDAVRDPQTLEILDITPCSFGGVSVITPGTNTSNQVAVLYQGVNCTEVPVAIHADQLTPTWRVYSTGSNVFQTRAGCLIGAEHVNNSYECDIPIGAGICASYQTQTNSPRRARSVASQSIIAYTMSLGAENSVAYSNNSIAIPTNFTISVTTEILPVSMTKTSVDCTMYICGDSTECSNLLLQYGSFCTQLNRALTGIAVEQDKNTQEVFAQVKQIYKTPPIKDFGGFNFSQILPDPSKPSKRSFIEDLLFNKVTLADAGFIKQYGDCLGDIAARDLICAQKFNGLTVLPPLLTDEMIAQYTSALLAGTITSGWTFCAGAALQIPFAMQMAYRFNGIGVTQNVLYENQKLIANQFNSAIGKIQDSLSSTASALGKLQDVVNQNAQALNTLVKQLSSNFGAISSVLNDILSRLDKVEAEVQIDRLITGRLQSLQTYVTQQLIRAAEIRASANLAATKMSECVCGQSKRVDFCGKGYHLMSFPQSAPHGVVFLHVTYVPAQEKNFTTAPAICHDGKAHFPREGVFVSNGTHWFVTQRNFYEPQIITTDNTFVSGNCDVVIGIVNNTVYDPLQPELDSFKEELDKYFKNHTSPDVDLGDISGINASVVNIQKEIDRLNEVAKNLNESLIDLQELGKYEQYIKWPWYIWLGFIAGLIAIVIVTIMLCCMTSCCSCLKGCCSCGSCCKFDEDDSEPVLKGVKLHYT

SEQ ID NO: 864 - protein, 1273 aa, Artificial Sequence
  SARS-CoV-2/Iceland/238/2020__EPI_ISL_417566 spike protein (1-1273)(G889C_L1034C)
MFVFLVLLPLVSSQCVNLTTRTQLPPAYTNSFTRGVYYPDKVFRSSVLHSTQDLFLPFFSNVTWFHAIHVSGTNGTKRFDNPVLPFNDGVYFASTEKSNIIRGWIFGTTLDSKTQSLLIVNNATNVVIKVCEFQFCNDPFLGVYYHKNNKSWMESEFRVYSSANNCTFEYVSQPFLMDLEGKQGNFKNLREFVFKNIDGYFKIYSKHTPINLVRDLPQGFSALEPLVDLPIGINITRFQTLLALHRSYLTPGDSSSGWTAGAAAYYVGYLQPRTFLLKYNENGTITDAVDCALDPLSETKCTLKSFTVEKGIYQTSNFRVQPTESIVRFPNITNLCPFGEVFNATRFASVYAWNRKRISNCVADYSVLYNSASFSTFKCYGVSPTKLNDLCFTNVYADSFVIRGDEVRQIAPGQTGKIADYNYKLPDDFTGCVIAWNSNNLDSKVGGNYNYLYRLFRKSNLKPFERDISTEIYQAGSTPCNGVEGFNCYFPLQSYGFQPTNGVGYQPYRVVVLSFELLHAPATVCGPKKSTNLVKNKCVNFNFNGLTGTGVLTESNKKFLPFQQFGRDIADTTDAVRDPQTLEILDITPCSFGGVSVITPGTNTSNQVAVLYQGVNCTEVPVAIHADQLTPTWRVYSTGSNVFQTRAGCLIGAEHVNNSYECDIPIGAGICASYQTQTNSPRRARSVASQSIIAYTMSLGAENSVAYSNNSIAIPTNFTISVTTEILPVSMTKTSVDCTMYICGDSTECSNLLLQYGSFCTQLNRALTGIAVEQDKNTQEVFAQVKQIYKTPPIKDFGGFNFSQILPDPSKPSKRSFIEDLLFNKVTLADVGFIKQYGDCLGDIAARDLICAQKFNGLTVLPPLLTDEMIAQYTSALLAGTITSGWTFCAGAALQIPFAMQMAYRFNGIGVTQNVLYENQKLIANQFNSAIGKIQDSLSSTASALGKLQDVVNQNAQALNTLVKQLSSNFGAISSVLNDILSRLDKVEAEVQIDRLITGRLQSLQTYVTQQLIRAAEIRASANLAATKMSECVCGQSKRVDFCGKGYHLMSFPQSAPHGVVFLHVTYVPAQEKNFTTAPAICHDGKAHFPREGVFVSNGTHWFVTQRNFYEPQIITTDNTFVSGNCDVVIGIVNNTVYDPLQPELDSFKEELDKYFKNHTSPDVDLGDISGINASVVNIQKEIDRLNEVAKNLNESLIDLQELGKYEQYIKWPWYIWLGFIAGLIAIVMVTIMLCCMTSCCSCLKGCCSCGSCCKFDEDDSEPVLKGVKLHYT

SEQ ID NO: 865 - protein, 1273 aa, Artificial Sequence
  SARS-CoV-2/Greece/16/2020__EPI_ISL_418265 spike protein (1-1273)(G889C_L1034C)
MFVFLVLLPLVSSQCVNLTTRTQLPPAYTNSFTRGVYYPDKVFRSSVLHSTQDLFLPFFSNVTWFHAIHVSGTNGTKRFDNPVLPFNDGVYFASTEKSNIIRGWIFGTTLDSKTQSLLIVNNATNVVIKVCEFQFCNDPFLGVYYHKNNKSWMESEFRVYSSANNCTFEYVSQPFLMDLEGKQGNFKNLREFVFKNVDGYFKIYSKHTPINLVRDLPQGFSALEPLVDLPIGINITRFQTLLALHRSYLTPGDSSSGWTAGAAAYYVGYLQPRTFLLKYNENGTITDAVDCALDPLSETKCTLKSFTVEKGIYQTSNFRVQPTESIVRFPNITNLCPFGEVFNATRFASVYAWNRKRISNCVADYSVLYNSASFSTFKCYGVSPTKLNDLCFTNVYADSFVIRGDEVRQIAPGQTGKIADYNYKLPDDFTGCVIAWNSNNLDSKVGGNYNYLYRLFRKSNLKPFERDISTEIYQAGSTPCNGVEGFNCYFPLQSYGFQPTNGVGYQPYRVVVLSFELLHAPATVCGPKKSTNLVKNKCVNFNFNGLTGTGVLTESNKKFLPFQQFGRDIADTTDAVRDPQTLEILDITPCSFGGVSVITPGTNTSNQVAVLYQDVNCTEVPVAIHADQLTPTWRVYSTGSNVFQTRAGCLIGAEHVNNSYECDIPIGAGICASYQTQTNSPRRARSVASQSIIAYTMSLGAENSVAYSNNSIAIPTNFTISVTTEILPVSMTKTSVDCTMYICGDSTECSNLLLQYGSFCTQLNRALTGIAVEQDKNTQEVFAQVKQIYKTPPIKDFGGFNFSQILPDPSKPSKRSFIEDLLFNKVTLADAGFIKQYGDCLGDIAARDLICAQKFNGLTVLPPLLTDEMIAQYTSALLAGTITSGWTFCAGAALQIPFAMQMAYRFNGIGVTQNVLYENQKLIANQFNSAIGKIQDSLSSTASALGKLQDVVNQNAQALNTLVKQLSSNFGAISSVLNDILSRLDKVEAEVQIDRLITGRLQSLQTYVTQQLIRAAEIRASANLAATKMSECVCGQSKRVDFCGKGYHLMSFPQSAPHGVVFLHVTYVPAQEKNFTTAPAICHDGKAHFPREGVFVSNGTHWFVTQRNFYEPQIITTDNTFVSGNCDVVIGIVNNTVYDPLQPELDSFKEELDKYFKNHTSPDVDLGDISGINASVVNIQKEIDRLNEVAKNLNESLIDLQELGKYEQYIKWPWYIWLGFIAGLIAIVMVTIMLCCMTSCCSCLKGCCSCGSCCKFDEDDSEPVLKGVKLHYT

SEQ ID NO: 866 - protein, 1273 aa, Artificial Sequence
  SARS-CoV-2/Iceland/319/2020__EPI_ISL_417648 spike protein (1-1273)(G889C_L1034C)
MFVFLVLLPLVSSQCVNLTTRTQLPPAYTNSFTRGVYYPDKVFRSSVLHSTQDLFLPFFSNVTWFHAIHVSGTNGTKRFDNPVLPFNDGVYFASTEKSNIIRGWIFGTTLDSKTQSLLIVNNATNVVIKVCEFQFCNDPFLGVYYHKNNKSWMESEFRVYSSANNCTFEYVSQPFLIDLEGKQGNFKNLREFVFKNIDGYFKIYSKHTPINLVRDLPQGFSALEPLVDLPIGINITRFQTLLALHRSYLTPGDSSSGWTAGAAAYYVGYLQPRTFLLKYNENGTITDAVDCALDPLSETKCTLKSFTVEKGIYQTSNFRVQPTESIVRFPNITNLCPFGEVFNATRFASVYAWNRKRISNCVADYSVLYNSASFSTFKCYGVSPTKLNDLCFTNVYADSFVIRGDEVRQIAPGQTGKIADYNYKLPDDFTGCVIAWNSNNLDSKVGGNYNYLYRLFRKSNLKPFERDISTEIYQAGSTPCNGVEGFNCYFPLQSYGFQPTNGVGYQPYRVVVLSFELLHAPATVCGPKKSTNLVKNKCVNFNFNGLTGTGVLTESNKKFLPFQQFGRDIADTTDAVRDPQTLEILDITPCSFGGVSVITPGTNTSNQVAVLYQGVNCTEVPVAIHADQLTPTWRVYSTGSNVFQTRAGCLIGAEHVNNSYECDIPIGAGICASYQTQTNSPRRARSVASQSIIAYTMSLGAENSVAYSNNSIAIPTNFTISVTTEILPVSMTKTSVDCTMYICGDSTECSNLLLQYGSFCTQLNRALTGIAVEQDKNTQEVFAQVKQIYKTPPIKDFGGFNFSQILPDPSKPSKRSFIEDLLFNKVTLADAGFIKQYGDCLGDIAARDLICAQKFNGLTVLPPLLTDEMIAQYTSALLAGTITSGWTFCAGAALQIPFAMQMAYRFNGIGVTQNVLYENQKLIANQFNSAIGKIQDSLSSTASALGKLQDVVNQNAQALNTLVKQLSSNFGAISSVLNDILSRLDKVEAEVQIDRLITGRLQSLQTYVTQQLIRAAEIRASANLAATKMSECVCGQSKRVDFCGKGYHLMSFPQSAPHGVVFLHVTYVPAQEKNFTTAPAICHDGKAHFPREGVFVSNGTHWFVTQRNFYEPQIITTDNTFVSGNCDVVIGIVNNTVYDPLQPELDSFKEELDKYFKNHTSPDVDLGDISGINASVVNIQKEIDRLNEVAKNLNESLIDLQELGKYEQYIKWPWYIWLGFIAGLIAIVMVTIMLCCMTSCCSCLKGCCSCGSCCKFDEDDSEPVLKGVKLHYT

SEQ ID NO: 867 - protein, 1273 aa, Artificial Sequence
  SARS-CoV-2/Congo/94/2020__EPI_ISL_417947 spike protein (1-1273)(G889C_L1034C)
MFVFLVLLPLVSSQCVNLTTRTQLPPAYTNSFTRGVYYPDKVFRSSVLHSTQDLFLPFFSNVTWFHAIHVSGTNGTKRFDNPVLPFNDGVYFASTEKSNIIRGWIFGTTLDSKTQSLLIVNNATNVVIKVCEFQFCNDPFLGVYYHKNNKSWMESEFRVYSSANNCTFEYVSQPFLMDLEGKQGNFKNLREFVFKNIDGYFKIYSKHTPINLVRDLPQGFSALEPLVDLPIGINITRFQTLLALHRSYLTPGDSSSGWTAGAAAYYVGYLQPRTFLLKYNENGTITDAVDCALDPLSETKCTLKSFTVEKGIYQTSNFRVQPTESIVRFPNITNLCPFGEVFNATRFASVYAWNRKRISNCVADYSVLYNSASFSTFKCYGVSPTKLNDLCFTNVYADSFVIRGDEVRQIAPGQTGKIADYNYKLPDDFTGCVIAWNSNNLDSKVGGNYNYLYRLFRKSNLKPFERDISTEIYQAGSTPCNGVEGFNCYFPLQSYGFQPTNGVGYQPYRVVVLSFELLHAPATVCGPKKSTNLVKNKCVNFNFNGLTGTGVLTESNKKFLPFQQFGRDIADTTDAVRDPQTLEILDITPCSFGGVSVITPGTNTSNQVAVLYQGVNCTEVPVAIHADQLTPTWRVYSTGSNVFQTRAGCLIGAEHVNNSYECDIPIGAGICASYQTQTNSPRRARSVASQSIIAYTMSLGAENSVAYSNNSIAIPTNFTISVTTEILPVSMTKTSVDCTMYICGDSTECSNLLLQYGSFCTQLNRALTGIAVEQDKNTQEVFAQVKQIYKTPPIKDFGGFNFSQILPDPSKPSKRSFIEDILFNKVTLADAGFIKQYGDCLGDIAARDLICAQKFNGLTVLPPLLTDEMIAQYTSALLAGTITSGWTFCAGAALQIPFAMQMAYRFNGIGVTQNVLYENQKLIANQFNSAIGKIQDSLSSTASALGKLQDVVNQNAQALNTLVKQLSSNFGAISSVLNDILSRLDKVEAEVQIDRLITGRLQSLQTYVTQQLIRAAEIRASANLAATKMSECVCGQSKRVDFCGKGYHLMSFPQSAPHGVVFLHVTYVPAQEKNFTTAPAICHDGKAHFPREGVFVSNGTHWFVTQRNFYEPQIITTDNTFVSGNCDVVIGIVNNTVYDPLQPELDSFKEELDKYFKNHTSPDVDLGDISGINASVVNIQKEIDRLNEVAKNLNESLIDLQELGKYEQYIKWPWYIWLGFIAGLIAIVMVTIMLCCMTSCCSCLKGCCSCGSCCKFDEDDSEPVLKGVKLHYT

SEQ ID NO: 868 - protein, 1273 aa, Artificial Sequence
  SARS-CoV-2/Congo/158/2020__EPI_ISL_417950 spike protein (1-1273)(G889C_L1034C)
MFVFLVLLPLVSSQCVNLTTRTQLPPAYTNSFTRGVYYPDKVFRSSVLHSTQDLFLPFFSNVTWFHAIHVSGTNGTKRFDNPVLPFNDGVYFASTEKSNIIRGWIFGTTLDSKTQSLLIVNNATNVVIKVCEFQFCNDPFLGVYYHKNNKSWMESEFRVYSSANNCTFEYVSQPFLMDLEGKQGNFKNLREFVFKNIDGYFKIYSKHTPINLVRDLPQGFSALEPLVDLPIGINITRFQTLLALHRSYLTPGDSSSGWTAGAAAYYVGYLQPRTFLLKYNENGTITDAVDCALDPLSETKCTLKSFTVEKGIYQTSNFRVQPTESIVRFPNITNLCPFGEVFNATRFASVYAWNRKRISNCVADYSVLYNSASFSTFKCYGVSPTKLNDLCFTNVYADSFVIRGDEVRQIAPGQTGKIADYNYKLPDDFTGCVIAWNSNNLDSKVGGNYNYLYRLFRKSNLKPFERDISTEIYQAGSTPCNGVEGFNCYFPLQSYGFQPTNGVGYQPYRVVVLSFELLHAPATVCGPKKSTNLVKNKCVNFNFNGLTGTGVLTESNKKFLPFQQFGRDIADTTDAVRDPQTLEILDITPCSFGGVSVITPGTNTSNQVAVLYQDVNCTEVPVAIHADQLTPTWRVYSTGSNVFQTRAGCLIGAEHVNNSYECDIPIGAGICASYQTQTNSPRRARSVASQSIIAYTMSLGAENSVAYSNNSIAIPTNFTISVTTEILPVSMTKTSVDCTMYICGDSTECSNLLLQYGSFCTQLNRALTGIAVEQDKNTQEVFAQVKQIYKTPPIKDFGGFNFSQILPDPSKPSKRSFIEDLLFNKVTLADAGFIKQYGDCLGDIAARDLICAQKFNGLTVLPPLLTDEMIAQYTSALLAGTITSGWTFCAGAALQIPFAMQMAYRFNGIGVTQNVLYENQKLIANQFNSAIGKIQDSLSSTASALGKLQDVVNQNAQALNTLVKQLSSNFGAISSVLNDILSRLDKVEAEVQIDRLITGRLQSLQTYVTQQLIRAAEIRASANLAATKMSECVCGQSKRVDFCGKGYHLMSFPQSAPHGVVFLHVTYVPAQEKNFTTAPAICHDGKAHFPREGVFVSNGTHWFVTQRNFYEPQIITTDNTFLSGNCDVVIGIVNNTVYDPLQPELDSFKEELDKYFKNHTSPDVDLGDISGINASVVNIQKEIDRLNEVAKNLNESLIDLQELGKYEQYIKWPWYIWLGFIAGLIAIVMVTIMLCCMTSCCSCLKGCCSCGSCCKFDEDDSEPVLKGVKLHYT

SEQ ID NO: 869 - protein, 1273 aa, Artificial Sequence
  SARS-CoV-2/USA/UT-00034/2020__EPI_ISL_417977 spike protein (1-1273)(G889C_L1034C)
MFVFLVLLPLVSSQCVNLTTRTQLPPAYTNSFTRGVYYPDKVFRSSVLHSTQDLFLPFFSNVTWFHAIHVSGTNGTKRFDNPVLPFNDGVYFASTEKSNIIRGWIFGTTLDSKTQSLLIVNNATNVVIKVCEFQFCNDPFLGVYYYKNNKSWMESEFRVYSSANNCTFEYVSQPFLMDLEGKQGNFKNLREFVFKNIDGYFKIYSKHTPINLVRDLPQGFSALEPLVDLPIGINITRFQTLLALHRSYLTPGDSSSGWTAGAAAYYVGYLQPRTFLLKYNENGTITDAVDCALDPLSETKCTLKSFTVEKGIYQTSNFRVQPTESIVRFPNITNLCPFGEVFNATRFASVYAWNRKRISNCVADYSVLYNSASFSTFKCYGVSPTKLNDLCFTNVYADSFVIRGDEVRQIAPGQTGKIADYNYKLPDDFTGCVIAWNSNNLDSKVGGNYNYLYRLFRKSNLKPFERDISTEIYQAGSTPCNGVEGFNCYFPLQSYGFQPTNGVGYQPYRVVVLSFELLHAPATVCGPKKSTNLVKNKCVNFNFNGLTGTGVLTESNKKFLPFQQFGRDIADTTDAVRDPQTLEILDITPCSFGGVSVITPGTNTSNQVAVLYQGVNCTEVPVAIHADQLTPTWRVYSTGSNVFQTRAGCLIGAEHVNNSYECDIPIGAGICASYQTQTNSPRRARSVASQSIIAYTMSLGAENSVAYSNNSIAIPTNFTISVTTEILPVSMTKTSVDCTMYICGDSTECSNLLLQYGSFCTQLNRALTGIAVEQDKNTQEVFAQVKQIYKTPPIKDFGGFNFSQILPDPSKPSKRSFIEDLLFNKVTLADAGFIKQYGDCLGDIAARDLICAQKFNGLTVLPPLLTDEMIAQYTSALLAGTITSGWTFCAGAALQIPFAMQMAYRFNGIGVTQNVLYENQKLIANQFNSAIGKIQDSLSSTASALGKLQDVVNQNAQALNTLVKQLSSNFGAISSVLNDILSRLDKVEAEVQIDRLITGRLQSLQTYVTQQLIRAAEIRASANLAATKMSECVCGQSKRVDFCGKGYHLMSFPQSAPHGVVFLHVTYVPAQEKNFTTAPAICHDGKAHFPREGVFVSNGTHWFVTQRNFYEPQIITTDNTFVSGNCDVVIGIVNNTVYDPLQPELDSFKEELDKYFKNHTSPDVDLGDISGINASVVNIQKEIDRLNEVAKNLNESLIDLQELGKYEQYIKWPWYIWLGFIAGLIAIVMVTIMLCCMTSCCSCLKGCCSCGSCCKFDEDDSEPVLKGVKLHYT

SEQ ID NO: 870 - protein, 1273 aa, Artificial Sequence
  SARS-CoV-2/USA/UT-00033/2020__EPI_ISL_417976 spike protein (1-1273)(G889C_L1034C)
MFVFLVLLPLVSSQCVNLTTRTQLPPAYTNSFTRGVYYPDKVFRSSVLHSTQDLFLPFFSNVTWFHAIHVSGTNGTKRFDNPVLPFNDGVYFASTEKSNIIRGWIFGTTLDSKTQSLLIVNNATNVVIKVCEFQFCNDPFLGVYYHKNNKSWMESEFRVYSSANNCTFEYVSQPFLMDLEGKQGNFKNLREFVFKNIDGYFKIYSKHTPINLVRDLPQGFSALEPLVDLPIGINITRFQTLLALHRSYLTPGDSSSGLTAGAAAYYVGYLQPRTFLLKYNENGTITDAVDCALDPLSETKCTLKSFTVEKGIYQTSNFRVQPTESIVRFPNITNLCPFGEVFNATRFASVYAWNRKRISNCVADYSVLYNSASFSTFKCYGVSPTKLNDLCFTNVYADSFVIRGDEVRQIAPGQTGKIADYNYKLPDDFTGCVIAWNSNNLDSKVGGNYNYLYRLFRKSNLKPFERDISTEIYQAGSTPCNGVEGFNCYFPLQSYGFQPTNGVGYQPYRVVVLSFELLHAPATVCGPKKSTNLVKNKCVNFNFNGLTGTGVLTESNKKFLPFQQFGRDIADTTDAVRDPQTLEILDITPCSFGGVSVITPGTNTSNQVAVLYQGVNCTEVPVAIHADQLTPTWRVYSTGSNVFQTRAGCLIGAEHVNNSYECDIPIGAGICASYQTQTNSPRRARSVASQSIIAYTMSLGAENSVAYSNNSIAIPTNFTISVTTEILPVSMTKTSVDCTMYICGDSTECSNLLLQYGSFCTQLNRALTGIAVEQDKNTQEVFAQVKQIYKTPPIKDFGGFNFSQILPDPSKPSKRSFIEDLLFNKVTLADAGFIKQYGDCLGDIAARDLICAQKFNGLTVLPPLLTDEMIAQYTSALLAGTITSGWTFCAGAALQIPFAMQMAYRFNGIGVTQNVLYENQKLIANQFNSAIGKIQDSLSSTASALGKLQDVVNQNAQALNTLVKQLSSNFGAISSVLNDILSRLDKVEAEVQIDRLITGRLQSLQTYVTQQLIRAAEIRASANLAATKMSECVCGQSKRVDFCGKGYHLMSFPQSAPHGVVFLHVTYVPAQEKNFTTAPAICHDGKAHFPREGVFVSNGTHWFVTQRNFYEPQIITTDNTFVSGNCDVVIGIVNNTVYDPLQPELDSFKEELDKYFKNHTSPDVDLGDISGINASVVNIQKEIDRLNEVAKNLNESLIDLQELGKYEQYIKWPWYIWLGFIAGLIAIVMVTIMLCCMTSCCSCLKGCCSCGSCCKFDEDDSEPVLKGVKLHYT

SEQ ID NO: 871 - protein, 1273 aa, Artificial Sequence
  SARS-CoV-2/USA/WI-13/2020__EPI_ISL_417516 spike protein (1-1273)(G889C_L1034C)
MFVFLVLLPLVSSQCVNLTTRTQLPPAYTNSFTRGVYYPDKVFRSSVLHSTQDLFLPFFSNVTWFHAIHVSGTNGTKRFDNPVLPFNDGVYFASTEKSNIIRGWIFGTTLDSKTQSLLIVNNATNVVIKVCEFQFCNDPFLGVYYHKNNKSWMESEFRVYSSANNCTFEYVSQPFLMDLEGKQGNFKNLREFVFKNIDGYFKIYSKHTPINLVRDLPQGFSALEPLVDLPIGINITRFQTLLALHRSYLTPGDSSSGWTAGAAAYYVGYLQPRTFLLKYNENGTITDAVDCALDPLSETKCTLKSFTVEKGIYQTSNFRVLPTESIVRFPNITNLCPFGEVFNATRFASVYAWNRKRISNCVADYSVLYNSASFSTFKCYGVSPTKLNDLCFTNVYADSFVIRGDEVRQIAPGQTGKIADYNYKLPDDFTGCVIAWNSNNLDSKVGGNYNYLYRLFRKSNLKPFERDISTEIYQAGSTPCNGVEGFNCYFPLQSYGFQPTNGVGYQPYRVVVLSFELLHAPATVCGPKKSTNLVKNKCVNFNFNGLTGTGVLTESNKKFLPFQQFGRDIADTTDAVRDPQTLEILDITPCSFGGVSVITPGTNTSNQVAVLYQGVNCTEVPVAIHADQLTPTWRVYSTGSNVFQTRAGCLIGAEHVNNSYECDIPIGAGICASYQTQTNSPRRARSVASQSIIAYTMSLGAENSVAYSNNSIAIPTNFTISVTTEILPVSMTKTSVDCTMYICGDSTECSNLLLQYGSFCTQLNRALTGIAVEQDKNTQEVFAQVKQIYKTPPIKDFGGFNFSQILPDPSKPSKRSFIEDLLFNKVTLADAGFIKQYGDCLGDIAARDLICAQKFNGLTVLPPLLTDEMIAQYTSALLAGTITSGWTFCAGAALQIPFAMQMAYRFNGIGVTQNVLYENQKLIANQFNSAIGKIQDSLSSTASALGKLQDVVNQNAQALNTLVKQLSSNFGAISSVLNDILSRLDKVEAEVQIDRLITGRLQSLQTYVTQQLIRAAEIRASANLAATKMSECVCGQSKRVDFCGKGYHLMSFPQSAPHGVVFLHVTYVPAQEKNFTTAPAICHDGKAHFPREGVFVSNGTHWFVTQRNFYEPQIITTDNTFVSGNCDVVIGIVNNTVYDPLQPELDSFKEELDKYFKNHTSPDVDLGDISGINASVVNIQKEIDRLNEVAKNLNESLIDLQELGKYEQYIKWPWYIWLGFIAGLIAIVMVTIMLCCMTSCCSCLKGCCSCGSCCKFDEDDSEPVLKGVKLHYT

SEQ ID NO: 872 - protein, 1272 aa, Artificial Sequence
  SARS-CoV-2/India/1-27/2020__EPI_ISL_413522 spike protein (1-1272)(G888C_L1033C)
MFVFLVLLPLVSSQCVNLTTRTQLPPAYTNSFTRGVYYPDKVFRSSVLHSTQDLFLPFFSNVTWFHAIHVSGTNGTKRFDNPVLPFNDGVYFASTEKSNIIRGWIFGTTLDSKTQSLLIVNNATNVVIKVCEFQFCNDPFLGVYHKNNKSWMESEFRVYSSANNCTFEYVSQPFLMDLEGKQGNFKNLREFVFKNIDGYFKIYSKHTPINLVRDLPQGFSALEPLVDLPIGINITRFQTLLALHRSYLTPGDSSSGWTAGAAAYYVGYLQPRTFLLKYNENGTITDAVDCALDPLSETKCTLKSFTVEKGIYQTSNFRVQPTESIVRFPNITNLCPFGEVFNATRFASVYAWNRKRISNCVADYSVLYNSASFSTFKCYGVSPTKLNDLCFTNVYADSFVIRGDEVIQIAPGQTGKIADYNYKLPDDFTGCVIAWNSNNLDSKVGGNYNYLYRLFRKSNLKPFERDISTEIYQAGSTPCNGVEGFNCYFPLQSYGFQPTNGVGYQPYRVVVLSFELLHAPATVCGPKKSTNLVKNKCVNFNFNGLTGTGVLTESNKKFLPFQQFGRDIADTTDAVRDPQTLEILDITPCSFGGVSVITPGTNTSNQVAVLYQDVNCTEVPVAIHADQLTPTWRVYSTGSNVFQTRAGCLIGAEHVNNSYECDIPIGAGICASYQTQTNSPRRARSVASQSIIAYTMSLGAENSVAYSNNSIAIPTNFTISVTTEILPVSMTKTSVDCTMYICGDSTECSNLLLQYGSFCTQLNRALTGIAVEQDKNTQEVFAQVKQIYKTPPIKDFGGFNFSQILPDPSKPSKRSFIEDLLFNKVTLADAGFIKQYGDCLGDIAARDLICAQKFNGLTVLPPLLTDEMIAQYTSALLAGTITSGWTFCAGAALQIPFAMQMAYRFNGIGVTQNVLYENQKLIANQFNSAIGKIQDSLSSTASALGKLQDVVNQNAQALNTLVKQLSSNFGAISSVLNDILSRLDKVEAEVQIDRLITGRLQSLQTYVTQQLIRAAEIRASANLAATKMSECVCGQSKRVDFCGKGYHLMSFPQSAPHGVVFLHVTYVPAQEKNFTTAPAICHDGKAHFPREGVFVSNGTHWFVTQRNFYEPQIITTDNTFVSGNCDVVIGIVNNTVYDPLQPELDSFKEELDKYFKNHTSPDVDLGDISGINASVVNIQKEIDRLNEVAKNLNESLIDLQELGKYEQYIKWPWYIWLGFIAGLIAIVMVTIMLCCMTSCCSCLKGCCSCGSCCKFDEDDSEPVLKGVKLHYT

SEQ ID NO: 873 - protein, 1267 aa, Artificial Sequence
  SARS-CoV-2/pangolin/Guangxi/P4L/2017__EPI_ISL_410538 spike protein (1-1267)(G883C_L1028C)
MFVFLFVLPLVSSQCVNLTTRTGIPPGYTNSSTRGVYYPDKVFRSSILHLTQDLFLPFFSNVTWFNTINYQGGFKKFDNPVLPFNDGVYFASTEKSNIIRGWIFGTTLDARTQSLLIVNNATNVVIKVCEFQFCTDPFLGVYYHNNNKTWVENEFRVYSSANNCTFEYISQPFLMDLEGKQGNFKNLREFVFKNVDGYFKIYSKHTPIDLVRDLPRGFAALEPLVDLPIGINITRFQTLLALHRSYLTPGNLESGWTTGAAAYYVGYLQQRTFLLSYNQNGTITDAVDCSLDPLSETKCTLKSLTVEKGIYQTSNFRVQPTISIVRFPNITNLCPFGEVFNASKFASVYAWNRKRISNCVADYSVLYNSTSFSTFKCYGVSPTKLNDLCFTNVYADSFVVKGDEVRQIAPGQTGVIADYNYKLPDDFTGCVIAWNSVKQDALTGGNYGYLYRLFRKSKLKPFERDISTEIYQAGSTPCNGQVGLNCYYPLERYGFHPTTGVNYQPFRVVVLSFELLNGPATVCGPKLSTTLVKDKCVNFNFNGLTGTGVLTTSKKQFLPFQQFGRDISDTTDAVRDPQTLEILDITPCSFGGVSVITPGTNTSNQVAVLYQDVNCTEVPMAIHAEQLTPAWRVYSAGANVFQTRAGCLVGAEHVNNSYECDIPVGAGICASYHSMSSLRSVNQRSIIAYTMSLGAENSVAYSNNSIAIPTNFTISVTTEILPVSMTKTSVDCTMYICGDSIECSNLLLQYGSFCTQLNRALTGIAVEQDKNTQEVFAQVKQIYKTPPIKDFGGFNFSQILPDPSKPSKRSFIEDLLFNKVTLADAGFIKQYGDCLGDIAARDLICAQKFNGLTVLPPLLTDEMIAQYTSALLAGTITSGWTFCAGAALQIPFAMQMAYRFNGIGVTQNVLYENQKLIANQFNSAIGKIQDSLSSTASALGKLQDVVNQNAQALNTLVKQLSSNFGAISSVLNDILSRLDKVEAEVQIDRLITGRLQSLQTYVTQQLIRAAEIRASANLAATKMSECVCGQSKRVDFCGKGYHLMSFPQSAPHGVVFLHVTYVPAQEKNFTTAPAICHEGKAHFPREGVFVSNGTHWFITQRNFYEPQIITTDNTFVSGSCDVVIGIVNNTVYDPLQPELDSFKEELDKYFKNHTSPDVDLGDISGINASVVNIQKEIDRLNEVAKNLNESPIDLQELGKYEQYIKWPWYIWLGFIAGLIAIIMVTIMLCCMTSCCSCLKGCCSCGSCCKFDEDDSEPVLKGVKLHYT

SEQ ID NO: 874 - protein, 1267 aa, Artificial Sequence
  SARS-CoV-2/pangolin/Guangxi/P5L/2017__EPI_ISL_410540 spike protein (1-1267)(G883C_L1028C)
MFVFLFVLPLVSSQCVNLTTRTGIPPGYTNSSTRGVYYPDKVFRSSILHLTQDLFLPFFSNVTWFNTINYQGGFKKFDNPVLPFNDGVYFASTEKSNIIRGWIFGTTLDARTQSLLIVNNATNVVIKVCEFQFCTDPFLGVYYHNNNKTWVENEFRVYSSANNCTFEYISQPFLMDLEGKQGNFKNLREFVFKNVDGYFKIYSKHTPIDLVRDLPRGFAALEPLVDLPIGINITRFQTLLALHRSYLTPGKLESGWTTGAAAYYVGYLQQRTFLLSYNQNGTITDAVDCSLDPLSETKCTLKSLTVEKGIYQTSNFRVQPTISIVRFPNITNLCPFGEVFNASKFASVYAWNRKRISNCVADYSVLYNSTSFSTFKCYGVSPTKLNDLCFTNVYADSFVVKGDEVRQIAPGQTGVIADYNYKLPDDFTGCVIAWNSVKQDALTGGNYGYLYRLFRKSKLKPFERDISTEIYQAGSTPCNGQVGLNCYYPLERYGFHPTTGVNYQPFRVVVLSFELLNGPATVCGPKLSTTLVKDKCVNFNFNGLTGTGVLTTSKKQFLPFQQFGRDISDTTDAVRDPQTLEILDITPCSFGGVSVITPGTNTSNQVAVLYQDVNCTEVPMAIHAEQLTPAWRVYSAGANVFQTRAGCLVGAEHVNNSYECDIPVGAGICASYHSMSSFRSVNQRSIIAYTMSLGAENSVAYSNNSIAIPTNFTISVTTEILPVSMTKTSVDCTMYICGDSIECSNLLLQYGSFCTQLNRALTGIAVEQDKNTQEVFAQVKQIYKTPPIKDFGGFNFSQILPDPSKPSKRSFIEDLLFNKVTLADAGFIKQYGDCLGDIAARDLICAQKFNGLTVLPPLLTDEMIAQYTSALLAGTITSGWTFCAGAALQIPFAMQMAYRFNGIGVTQNVLYENQKLIANQFNSAIGKIQDSLSSTASALGKLQDVVNQNAQALNTLVKQLSSNFGAISSVLNDILSRLDKVEAEVQIDRLITGRLQSLQTYVTQQLIRAAEIRASANLAATKMSECVCGQSKRVDFCGKGYHLMSFPQSAPHGVVFLHVTYVPAQEKNFTTAPAICHEGKAHFPREGVFVSNGTHWFITQRNFYEPQIITTDNTFVSGSCDVVIGIVNNTVYDPLQPELDSFKEELDKYFKNHTSPDVDLGDISGINASVVNIQKEIDRLNEVAKNLNESLIDLQELGKYEQYIKWPWYIWLGFIAGLIAIIMVTIMLCCMTSCCSCLKGCCSCGSCCKFDEDDSEPVLKGVKLHYT

SEQ ID NO: 875 - protein, 1267 aa, Artificial Sequence
  SARS-CoV-2/pangolin/Guangxi/P5E/2017__EPI_ISL_410541 spike protein (1-1267)(G883C_L1028C)
MFVFLFVLPLVSSQCVNLTTRTGIPPGYTNSSTRGVYYPDKVFRSSILHLTQDLFLPFFSNVTWFNTITYQGGSKKFDNPVLPFNDGVYFASTEKSNIIRGWIFGTTLDARTQSLLIVNNATNVVIKVCEFQFCTDPFLGVYYHNNNKTWVENEFRVYSSANNCTFEYISQPFLMDLEGKQGNFKNLREFVFKNVDGYFKIYSKHTPIDLVRDLPRGFAALEPLVDLPIGINITRFQTLLALHRSYLTPGKLESGWTTGAAAYYVGYLQQRTFLLSYNQNGTITDAVDCSLDPLSETKCTLKSLTVEKGIYQTSNFRVQPTISIVRFPNITNLCPFGEVFNASKFASVYAWNRKRISNCVADYSVLYNSTSFSTFKCYGVSPTKLNDLCFTNVYADSFVVKGDEVRQIAPGQTGVIADYNYKLPDDFTGCVIAWNSVKQDALTGDNYGYLYRLFRKSKLKPFERDISTEIYQAGSTPCNGQVGLNCYYPLERYGFHPTTGVNYQPFRVVVLSFELLNGPATVCGPKLSTTLVKDKCVNFNFNGLTGTGVLTTSKKQFLPFQQFGRDISDTTDAVRDPQTLEILDITPCSFGGVSVITPGTNTSNQVAVLYQDVNCTEVPMAIHAEQLTPAWRVYSAGANVFQTRAGCLVGAEHVNNSYECDIPVGAGICASYHSMSSFRSVNQRSIIAYTMSLGAENSVAYSNNSIAIPTNFTISVTTEILPVSMTKTSVDCTMYICGDSIECSNLLLQYGSFCTQLNRALTGIAVEQDKNTQEVFAQVKQIYKTPPIKDFGGFNFSQILPDPSKPSKRSFIEDLLFNKVTLADAGFIKQYGDCLGDIAARDLICAQKFNGLTVLPPLLTDEMIAQYTSALLAGTITSGWTFCAGAALQIPFAMQMAYRFNGIGVTQNVLYENQKLIANQFNSAIGKIQDSLSSTASALGKLQDVVNQNAQALNTLVKQLSSNFGAISSVLNDILSRLDKVEAEVQIDRLITGRLQSLQTYVTQQLIRAAEIRASANLAATKMSECVCGQSKRVDFCGKGYHLMSFPQSAPHGVVFLHVTYVPAQEKNFTTAPAICHEGKAHFPREGVFVSNGTHWFITQRNFYEPQIITTDNTFVSGSCDVVIGIVNNTVYDPLQPELDSFKEELDKYFKNHTSPDVDLGDISGINASVVNIQKEIDRLNEVAKNLNESLIDLQELGKYEQYIKWPWYIWLGFIAGLIAIIMVTIMLCCMTSCCSCLKGCCSCGSCCKFDEDDSEPVLKGVKLHYT

SEQ ID NO: 876 - protein, 1265 aa, Artificial Sequence
  SARS-CoV-2/pangolin/Guangxi/P1E/2017__EPI_ISL_410539 spike protein (1-1265)(G881C_L1026C)
MFVFLFVLPLVSSQCVNLTTRTGIQPGYTNSSTRGVYYPDKVFRSSILHLTQDLFLPFFSNVTWFNTINYQGGFKKFDNPVLPFNDGVYFASTEKSNIIRGWIFGTTLDARTQSLLIVNNATNVVIKVCEFQFCTDPFLGVYYHNNNKTWVENEFRVYSSANNCTFEYISQPFLMDLEGKQGNFKNLREFVFKNVDGYFKIYSKHTPIDLVRDLPRGFAALEPLVDLPIGINITRFQTLLALHRSYLTPGKLESGWTTGAAAYYVGYLQQRTFLLSYNQNGTITDAVDCSLDPLSETKCTLKSLTVEKGIYQTSNFRVQPTISIVRFPNITNLCPFGEVFNASKFASVYAWNRKRISNCVADYSVLYNSTSFSTFKCYGVSPTKLNDLCFTNVYADSFVVKGDEVRQIAPGQTGVIADYNYKLPDDFTGCVIAWNSVKQDALTGGNYLYRLFRKSKLKPFERDISTEIYQAGSTPCNGQVGLNCYYPLERYGFHPTTGVNYQPFRVVVLSFELLNGPATVCGPKLSTTLVKDKCVNFNFNGLTGTGVLTTSKKQFLPFQQFGRDISDTTDAVRDPQTLEILDITPCSFGGVSVITPGTNTSNQVAVLYQDVNCTEVPMAIHAEQLTPAWRVYSAGANVFQTRAGCLVGAEHVNNSYECDIPVGAGICASYHSMSSLRSVNQRSIIAYTMSLGAENSVAYSNNSIAIPTNFTISVTTEILPVSMTKTSVDCTMYICGDSIECSNLLLQYGSFCTQLNRALTGIAVEQDKNTQEVFAQVKQIYKTPPIKDFGGFNFSQILPDPSKPSKRSFIEDLLFNKVTLADAGFIKQYGDCLGDIAARDLICAQKFNGLTVLPPLLTDEMIAQYTSALLAGTITSGWTFCAGAALQIPFAMQMAYRFNGIGVTQNVLYENQKLIANQFNSAIGKIQDSLSSTASALGKLQDVVNQNAQALNTLVKQLSSNFGAISSVLNDILSRLDKVEAEVQIDRLITGRLQSLQTYVTQQLIRAAEIRASANLAATKMSECVCGQSKRVDFCGKGYHLMSFPQSAPHGVVFLHVTYVPAQEKNFTTAPAICHEGKAHFPREGVFVSNGTHWFITQRNFYEPQIITTDNTFVSGSCDVVIGIVNNTVYDPLQPELDSFKEELDKYFKNHTSPDVDLGDISGINASVVNIQKEIDRLNEVAKNLNESLIDLQELGKYEQYIKWPWYIWLGFIAGLIAIIMVTIMLCCMTSCCSCLKGCCSCGSCCKFDEDDSEPVLKGVKLHYT

SEQ ID NO: 877 - protein, 1273 aa, Artificial Sequence; identical to SEQ ID NO: 23
  SARS-CoV-2/Wuhan/WIV05/2019__EPI_ISL_402128 spike protein (1-1273)(I909C_Y1047C)

SEQ ID NO: 878 - protein, 1269 aa, Artificial Sequence
  SARS-CoV-2/bat/Yunnan/RaTG13/2013__EPI_ISL_402131 spike protein (1-1269)(I905C_Y1043C)
MFVFLVLLPLVSSQCVNLTTRTQLPPAYTNSSTRGVYYPDKVFRSSVLHLTQDLFLPFFSNVTWFHAIHVSGTNGIKRFDNPVLPFNDGVYFASTEKSNIIRGWIFGTTLDSKTQSLLIVNNATNVVIKVCEFQFCNDPFLGVYYHKNNKSWMESEFRVYSSANNCTFEYVSQPFLMDLEGKQGNFKNLREFVFKNIDGYFKIYSKHTPINLVRDLPPGFSALEPLVDLPIGINITRFQTLLALHRSYLTPGDSSSGWTAGAAAYYVGYLQPRTFLLKYNENGTITDAVDCALDPLSETKCTLKSFTVEKGIYQTSNFRVQPTDSIVRFPNITNLCPFGEVFNATTFASVYAWNRKRISNCVADYSVLYNSTSFSTFKCYGVSPTKLNDLCFTNVYADSFVITGDEVRQIAPGQTGKIADYNYKLPDDFTGCVIAWNSKHIDAKEGGNFNYLYRLFRKANLKPFERDISTEIYQAGSKPCNGQTGLNCYYPLYRYGFYPTDGVGHQPYRVVVLSFELLNAPATVCGPKKSTNLVKNKCVNFNFNGLTGTGVLTESNKKFLPFQQFGRDIADTTDAVRDPQTLEILDITPCSFGGVSVITPGTNASNQVAVLYQDVNCTEVPVAIHADQLTPTWRVYSTGSNVFQTRAGCLIGAEHVNNSYECDIPIGAGICASYQTQTNSRSVASQSIIAYTMSLGAENSVAYSNNSIAIPTNFTISVTTEILPVSMTKTSVDCTMYICGDSTECSNLLLQYGSFCTQLNRALTGIAVEQDKNTQEVFAQVKQIYKTPPIKDFGGFNFSQILPDPSKPSKRSFIEDLLFNKVTLADAGFIKQYGDCLGDIAARDLICAQKFNGLTVLPPLLTDEMIAQYTSALLAGTITSGWTFGAGAALQIPFAMQMAYRFNGCGVTQNVLYENQKLIANQFNSAIGKIQDSLSSTASALGKLQDVVNQNAQALNTLVKQLSSNFGAISSVLNDILSRLDKVEAEVQIDRLITGRLQSLQTYVTQQLIRAAEIRASANLAATKMSECVLGQSKRVDFCGKGCHLMSFPQSAPHGVVFLHVTYVPAQEKNFTTAPAICHDGKAHFPREGVFVSNGTHWFVTQRNFYEPQIITTDNTFVSGSCDVVIGIVNNTVYDPLQPELDSFKEELDKYFKNHTSPDVDLGDISGINASVVNIQKEIDRLNEVAKNLNESLIDLQELGKYEQYIKWPWYIWLGFIAGLIAIIMVTIMLCCMTSCCSCLKGCCSCGSCCKFDEDDSEPVLKGVKLHYT

SEQ ID NO: 879 - protein, 1273 aa, Artificial Sequence
  SARS-CoV-2/Wuhan/HBCDC-HB-01/2019__EPI_ISL_402132 spike protein (1-1273)(I909C_Y1047C)
MFVFLVLLPLVSSQCVNLTTRTQLPPAYTNSITRGVYYPDKVFRSSVLHSTQDLFLPFFSNVTWFHAIHVSGTNGTKRFDNPVLPFNDGVYFASTEKSNIIRGWIFGTTLDSKTQSLLIVNNATNVVIKVCEFQFCNDPFLGVYYHKNNKSWMESEFRVYSSANNCTFEYVSQPFLMDLEGKQGNFKNLREFVFKNIDGYFKIYSKHTPINLVRDLPQGFSALEPLVDLPIGINITRFQTLLALHRSYLTPGDSSSGWTAGAAAYYVGYLQPRTFLLKYNENGTITDAVDCALDPLSETKCTLKSFTVEKGIYQTSNFRVQPTESIVRFPNITNLCPFGEVFNATRFASVYAWNRKRISNCVADYSVLYNSASFSTFKCYGVSPTKLNDLCFTNVYADSFVIRGDEVRQIAPGQTGKIADYNYKLPDDFTGCVIAWNSNNLDSKVGGNYNYLYRLFRKSNLKPFERDISTEIYQAGSTPCNGVEGFNCYFPLQSYGFQPTNGVGYQPYRVVVLSFELLHAPATVCGPKKSTNLVKNKCVNFNFNGLTGTGVLTESNKKFLPFQQFGRDIADTTDAVRDPQTLEILDITPCSFGGVSVITPGTNTSNQVAVLYQDVNCTEVPVAIHADQLTPTWRVYSTGSNVFQTRAGCLIGAEHVNNSYECDIPIGAGICASYQTQTNSPRRARSVASQSIIAYTMSLGAENSVAYSNNSIAIPTNFTISVTTEILPVSMTKTSVDCTMYICGDSTECSNLLLQYGSFCTQLNRALTGIAVEQDKNTQEVFAQVKQIYKTPPIKDFGGFNFSQILPDPSKPSKRSFIEDLLFNKVTLADAGFIKQYGDCLGDIAARDLICAQKFNGLTVLPPLLTDEMIAQYTSALLAGTITSGWTFGAGAALQIPFAMQMAYRFNGCGVTQNVLYENQKLIANQFNSAIGKIQDSLSSTASALGKLQDVVNQNAQALNTLVKQLSSNFGAISSVLNDILSRLDKVEAEVQIDRLITGRLQSLQTYVTQQLIRAAEIRASANLAATKMSECVLGQSKRVDFCGKGCHLMSFPQSAPHGVVFLHVTYVPAQEKNFTTAPAICHDGKAHFPREGVFVSNGTHWFVTQRNFYEPQIITTDNTFVSGNCDVVIGIVNNTVYDPLQPELDSFKEELDKYFKNHTSPDVDLGDISGINASVVNIQKEIDRLNEVAKNLNESLIDLQELGKYEQYIKWPWYIWLGFIAGLIAIVMVTIMLCCMTSCCSCLKGCCSCGSCCKFDEDDSEPVLKGVKLHYT

SEQ ID NO: 880 - protein, 1273 aa, Artificial Sequence
  SARS-CoV-2/Guangdong/20SF028/2020__EPI_ISL_403936 spike protein (1-1273)(I909C_Y1047C)
MFVFLVLLPLVSSQCVNLTTRTQLPPAYTNSFTRGVYYPDKVFRSSVLYSTQDLFLPFFSNVTWFHAIHVSGTNGTKRFDNPVLPFNDGVYFASTEKSNIIRGWIFGTTLDSKTQSLLIVNNATNVVIKVCEFQFCNDPFLGVYYHKNNKSWMESEFRVYSSANNCTFEYVSQPFLMDLEGKQGNFKNLREFVFKNIDGYFKIYSKHTPINLVRDLPQGFSALEPLVDLPIGINITRFQTLLALHRSYLTPGDSSSGWTAGAAAYYVGYLQPRTFLLKYNENGTITDAVDCALDPLSETKCTLKSFTVEKGIYQTSNFRVQPTESIVRFPNITNLCPFGEVFNATRFASVYAWNRKRISNCVADYSVLYNSASFSTFKCYGVSPTKLNDLCFTNVYADSFVIRGDEVRQIAPGQTGKIADYNYKLPDDFTGCVIAWNSNNLDSKVGGNYNYLYRLFRKSNLKPFERDISTEIYQAGSTPCNGVEGFNCYFPLQSYGFQPTNGVGYQPYRVVVLSFELLHAPATVCGPKKSTNLVKNKCVNFNFNGLTGTGVLTESNKKFLPFQQFGRDIADTTDAVRDPQTLEILDITPCSFGGVSVITPGTNTSNQVAVLYQDVNCTEVPVAIHADQLTPTWRVYSTGSNVFQTRAGCLIGAEHVNNSYECDIPIGAGICASYQTQTNSPRRARSVASQSIIAYTMSLGAENSVAYSNNSIAIPTNFTISVTTEILPVSMTKTSVDCTMYICGDSTECSNLLLQYGSFCTQLNRALTGIAVEQDKNTQEVFAQVKQIYKTPPIKDFGGFNFSQILPDPSKPSKRSFIEDLLFNKVTLADAGFIKQYGDCLGDIAARDLICAQKFNGLTVLPPLLTDEMIAQYTSALLAGTITSGWTFGAGAALQIPFAMQMAYRFNGCGVTQNVLYENQKLIANQFNSAIGKIQDSLSSTASALGKLQDVVNQNAQALNTLVKQLSSNFGAISSVLNDILSRLDKVEAEVQIDRLITGRLQSLQTYVTQQLIRAAEIRASANLAATKMSECVLGQSKRVDFCGKGCHLMSFPQSAPHGVVFLHVTYVPAQEKNFTTAPAICHDGKAHFPREGVFVSNGTHWFVTQRNFYEPQIITTDNTFVSGNCDVVIGIVNNTVYDPLQPELDSFKEELDKYFKNHTSPDVDLGDISGINASVVNIQKEIDRLNEVAKNLNESLIDLQELGKYEQYIKWPWYIWLGFIAGLIAIVMVTIMLCCMTSCCSCLKGCCSCGSCCKFDEDDSEPVLKGVKLHYT

SEQ ID NO: 881 - protein, 1273 aa, Artificial Sequence
  SARS-CoV-2/Shenzhen/SZTH-001/2020__EPI_ISL_406592 spike protein (1-1273)(I909C_Y1047C)
MFVFLVLLPLVSSQCVNLTTRTQLPPAYTNSFTRGVYYPDKVFRSSVLHSTQDLFLPFFSNVTWFHAIHVSGTNGTKRFDNPVLPFNDGVYFASTEKSNIIRGWIFGTTLDSKTQSLLIVNNATNVVIKVCEFQFCNDPFLGVYYHKNNKSWMESEFRVYSSANNCTFEYVSQPFLMDLEGKQGNFKNLREFVFKNIDGYFKIYSKHTPINLVRDLPQGFSALEPLVDLPIGINITRFQTLLALHRSYLTPGDSSSGWTAGAAAYYVGYLQPRTFLLKYNENGTITDAVDCALDPLSETKCTLKSFTVEKGIYQTSNFRVQPTESIVRFPNITNLCPFGEVFNATRFASVYAWNRKRISNCVADYSVLYNSASFSTFKCYGVSPTKLNDLCFTNVYADSFVIRGDEVRQIAPGQTGKIADYNYKLPDDFTGCVIAWNSNNLDSKVGGNYNYLYRLFRKSNLKPFERDISTEIYQAGSTPCNGVEGFNCYFPLQSYGFQPTNGVGYQPYRVVVLSFELLHAPATVCGPKKSTNLVKNKCVNFNFNGLTGTGVLTESNKKFLPFQQFGRDIADTTDAVRDPQTLEILDITPCSFGGVSVITPGTNTSNQVAVLYQDVNCTEVPVAIHADQLTPTWRVYSTGSNVFQTRAGCLIGAEHVNNSYECDIPIGAGICASYQTQTNSPRRARSVASQSIIAYTMSLGAENSVAYSNNSIAIPTNFTISVTTEILPVSMTKTSVDCTMYICGDSTECSNLLLQYGSFCTQLNRALTGIAVEQDKNTQEVFAQVKQIYKTPPIKDFGGFNFSQILPDPSKPSKRSFIEDLLFNKVTLADAGFIKQYGDCLGDIAARDLICAQKFNGLTVLPPLLTDEMIAQYTSALLAGTITSGWTFGAGAALQIPFAMQMAYRFNGCGVTQNVLYENQKLIANQFNSAIGKIQDSLSSTASALGKLQDVVNQNAQALNTLVKQLSSNFGAISSVLNDILSRLDKVEAEVQIDRLITGRLQSLQTYVTQQLIRAAEIRASANLAATKMSECVLGQSKRVDFCGKGCHLMSFPQSAPHGVVFLHVTYVPAQEKNFTTAPAICHDGKAHFPREGVFVSNGTHWFVTQRNFYEPQIITTDNTFVSGNCDVLIGIVNNTVYDPLQPELDSFKEELDKYFKNHTSPDVDLGDISGINASVVNIQKEIDRLNEVAKNLNESLIDLQELGKYEQYIKWPWYIWLGFIAGLIAIVMVTIMLCCMTSCCSCLKGCCSCGSCCKFDEDDSGPVLKGVKLHYT

SEQ ID NO: 882 - protein, 1273 aa, Artificial Sequence
  SARS-CoV-2/Shenzhen/SZTH-004/2020__EPI_ISL_406595 spike protein (1-1273)(I909C_Y1047C)
MFVFLVLLPLVSSQCVNLTTRTQLPPAYTNSFTRGVYYPDKVFRSSVLHSTQDLFLPFFSNVTWFHAIHVSGTNGTKRFDNPVLPFNDGVYFASTEKSNIIRGWIFGTTLDSKTQSLLIVNNATNVVIKVCEFQFCNDPFLGVYYHKNNKSWMESEFRVYSSANNCTFEYVSQPFLMDLEGKQGNFKNLREFVFKNIDGYFKIYSKHTPINLVRDLPQGFSALEPLVDLPIGINITRFQTLLALHRSYLTPGDSSSGWTAGAAAYYVGYLQPRTFLLKYNENGTITDAVDCALDPLSETKCTLKSFTVEKGIYQTSNFRVQPTESIVRFPNITNLCPFGEVFNATRFASVYAWDRKRISNCVAYYSVLYNSASFSTFKCYGVSPTKLNDLCFTNVYADSFVIRGDEVRQIAPGQTGKIADYNYKLPDDFTGCVIAWNSNNLDSKVGGNYNYLYRLFRKSNLKPFERDISTEIYQAGSTPCNGVEGFNCYFPLQSYGFQPTNGVGYQPYRVVVLSFELLHAPATVCGPKKSTNLVKNKCVNFNFNGLTGTGVLTESNKKFLPFQQFGRDIADTTDAVRDPQTLEILDITPCSFGGVSVITPGTNTSNQVAVLYQDVNCTEVPVAIHADQLTPTWRVYSTGSNVFQTRAGCLIGAEHVNNSYECDIPIGAGICASYQTQTNSPRRARSVASQSIIAYTMSLGAENSVAYSNNSIAIPTNFTISVTTEILPVSMTKTSVDCTMYICGDSTECSNLLLQYGSFCTQLNRALTGIAVEQDKNTQEVFAQVKQIYKTPPIKDFGGFNFSQILPDPSKPSKRSFIEDLLFNKVTLADAGFIKQYGDCLGDIAARDLICAQKFNGLTVLPPLLTDEMIAQYTSALLAGTITSGWTFGAGAALQIPFAMQMAYRFNGCGVTQNVLYENQKLIANQFNSAIGKIQDSLSSTASALGKLQDVVNQNAQALNTLVKQLSSNFGAISSVLNDILSRLDKVEAEVQIDRLITGRLQSLQTYVTQQLIRAAEIRASANLAATKMSECVLGQSKRVDFCGKGCHLMSFPQSAPHGVVFLHVTYVPAQEKNFTTAPAICHDGKAHFPREGVFVSNGTHWFVTQRNFYEPQIITTDNTFVSGNCDVVIGIVNNTVYDPLQPELDSFKEELDKYFKNHTSPDVDLGDISGINASVVNIQKEIDRLNEVAKNLNESLIDLQELGKYEQYIKWPWYIWLGFIAGLIAIVMVTIMLCCMTSCCSCLKGCCSCGSCCKFDEDDSEPVLKGVKLHYT

SEQ ID NO: 883 - protein, 1273 aa, Artificial Sequence
  SARS-CoV-2/France/IDF0372/2020__EPI_ISL_406596 spike protein (1-1273)(I909C_Y1047C)
MFVFLVLLPLVSSQCVNLTTRTQLPPAYTNSFTRGVYYPDKVFRSSVLHSTQDLFLPFFSNVTWFHAIHVSGTNGTKRFDNPVLPFNDGVYFASTEKSNIIRGWIFGTTLDSKTQSLLIVNNATNVVIKVCEFQFCNDPFLGVYYHKNNKSWMESEFRVYSSANNCTFEYVSQPFLMDLEGKQGNFKNLREFVFKNIDGYFKIYSKHTPINLVRDLPQGFSALEPLVDLPIGINITRFQTLLALHRSYLTPGDSSSGWTAGAAAYYVGYLQPRTFLLKYNENGTITDAVDCALDPLSETKCTLKSFTVEKGIYQTSNFRVQPTESIVRFPNITNLCPFGEVFNATRFASVYAWNRKRISNCVADYSFLYNSASFSTFKCYGVSPTKLNDLCFTNVYADSFVIRGDEVRQIAPGQTGKIADYNYKLPDDFTGCVIAWNSNNLDSKVGGNYNYLYRLFRKSNLKPFERDISTEIYQAGSTPCNGVEGFNCYFPLQSYGFQPTNGVGYQPYRVVVLSFELLHAPATVCGPKKSTNLVKNKCVNFNFNGLTGTGVLTESNKKFLPFQQFGRDIADTTDAVRDPQTLEILDITPCSFGGVSVITPGTNTSNQVAVLYQDVNCTEVPVAIHADQLTPTWRVYSTGSNVFQTRAGCLIGAEHVNNSYECDIPIGAGICASYQTQTNSPRRARSVASQSIIAYTMSLGAENSVAYSNNSIAIPTNFTISVTTEILPVSMTKTSVDCTMYICGDSTECSNLLLQYGSFCTQLNRALTGIAVEQDKNTQEVFAQVKQIYKTPPIKDFGGFNFSQILPDPSKPSKRSFIEDLLFNKVTLADAGFIKQYGDCLGDIAARDLICAQKFNGLTVLPPLLTDEMIAQYTSALLAGTITSGWTFGAGAALQIPFAMQMAYRFNGCGVTQNVLYENQKLIANQFNSAIGKIQDSLSSTASALGKLQDVVNQNAQALNTLVKQLSSNFGAISSVLNDILSRLDKVEAEVQIDRLITGRLQSLQTYVTQQLIRAAEIRASANLAATKMSECVLGQSKRVDFCGKGCHLMSFPQSAPHGVVFLHVTYVPAQEKNFTTAPAICHDGKAHFPREGVFVSNGTHWFVTQRNFYEPQIITTDNTFVSGNCDVVIGIVNNTVYDPLQPELDSFKEELDKYFKNHTSPDVDLGDISGINASVVNIQKEIDRLNEVAKNLNESLIDLQELGKYEQYIKWPWYIWLGFIAGLIAIVMVTIMLCCMTSCCSCLKGCCSCGSCCKFDEDDSEPVLKGVKLHYT

SEQ ID NO: 884 - protein, 1273 aa, Artificial Sequence
  SARS-CoV-2/Australia/VIC01/2020__EPI_ISL_406844 spike protein (1-1273)(I909C_Y1047C)
MFVFLVLLPLVSSQCVNLTTRTQLPPAYTNSFTRGVYYPDKVFRSSVLHSTQDLFLPFFSNVTWFHAIHVSGTNGTKRFDNPVLPFNDGVYFASTEKSNIIRGWIFGTTLDSKTQSLLIVNNATNVVIKVCEFQFCNDPFLGVYYHKNNKSWMESEFRVYSSANNCTFEYVSQPFLMDLEGKQGNFKNLREFVFKNIDGYFKIYSKHTPINLVRDLPQGFSALEPLVDLPIGINITRFQTLLALHRRYLTPGDSSSGWTAGAAAYYVGYLQPRTFLLKYNENGTITDAVDCALDPLSETKCTLKSFTVEKGIYQTSNFRVQPTESIVRFPNITNLCPFGEVFNATRFASVYAWNRKRISNCVADYSVLYNSASFSTFKCYGVSPTKLNDLCFTNVYADSFVIRGDEVRQIAPGQTGKIADYNYKLPDDFTGCVIAWNSNNLDSKVGGNYNYLYRLFRKSNLKPFERDISTEIYQAGSTPCNGVEGFNCYFPLQSYGFQPTNGVGYQPYRVVVLSFELLHAPATVCGPKKSTNLVKNKCVNFNFNGLTGTGVLTESNKKFLPFQQFGRDIADTTDAVRDPQTLEILDITPCSFGGVSVITPGTNTSNQVAVLYQDVNCTEVPVAIHADQLTPTWRVYSTGSNVFQTRAGCLIGAEHVNNSYECDIPIGAGICASYQTQTNSPRRARSVASQSIIAYTMSLGAENSVAYSNNSIAIPTNFTISVTTEILPVSMTKTSVDCTMYICGDSTECSNLLLQYGSFCTQLNRALTGIAVEQDKNTQEVFAQVKQIYKTPPIKDFGGFNFSQILPDPSKPSKRSFIEDLLFNKVTLADAGFIKQYGDCLGDIAARDLICAQKFNGLTVLPPLLTDEMIAQYTSALLAGTITSGWTFGAGAALQIPFAMQMAYRFNGCGVTQNVLYENQKLIANQFNSAIGKIQDSLSSTASALGKLQDVVNQNAQALNTLVKQLSSNFGAISSVLNDILSRLDKVEAEVQIDRLITGRLQSLQTYVTQQLIRAAEIRASANLAATKMSECVLGQSKRVDFCGKGCHLMSFPQSAPHGVVFLHVTYVPAQEKNFTTAPAICHDGKAHFPREGVFVSNGTHWFVTQRNFYEPQIITTDNTFVSGNCDVVIGIVNNTVYDPLQPELDSFKEELDKYFKNHTSPDVDLGDISGINASVVNIQKEIDRLNEVAKNLNESLIDLQELGKYEQYIKWPWYIWLGFIAGLIAIVMVTIMLCCMTSCCSCLKGCCSCGSCCKFDEDDSEPVLKGVKLHYT

SEQ ID NO: 885 - protein, 1273 aa, Artificial Sequence
  SARS-CoV-2/Germany/BavPat1/2020__EPI_ISL_406862 spike protein (1-1273)(I909C_Y1047C)
MFVFLVLLPLVSSQCVNLTTRTQLPPAYTNSFTRGVYYPDKVFRSSVLHSTQDLFLPFFSNVTWFHAIHVSGTNGTKRFDNPVLPFNDGVYFASTEKSNIIRGWIFGTTLDSKTQSLLIVNNATNVVIKVCEFQFCNDPFLGVYYHKNNKSWMESEFRVYSSANNCTFEYVSQPFLMDLEGKQGNFKNLREFVFKNIDGYFKIYSKHTPINLVRDLPQGFSALEPLVDLPIGINITRFQTLLALHRSYLTPGDSSSGWTAGAAAYYVGYLQPRTFLLKYNENGTITDAVDCALDPLSETKCTLKSFTVEKGIYQTSNFRVQPTESIVRFPNITNLCPFGEVFNATRFASVYAWNRKRISNCVADYSVLYNSASFSTFKCYGVSPTKLNDLCFTNVYADSFVIRGDEVRQIAPGQTGKIADYNYKLPDDFTGCVIAWNSNNLDSKVGGNYNYLYRLFRKSNLKPFERDISTEIYQAGSTPCNGVEGFNCYFPLQSYGFQPTNGVGYQPYRVVVLSFELLHAPATVCGPKKSTNLVKNKCVNFNFNGLTGTGVLTESNKKFLPFQQFGRDIADTTDAVRDPQTLEILDITPCSFGGVSVITPGTNTSNQVAVLYQGVNCTEVPVAIHADQLTPTWRVYSTGSNVFQTRAGCLIGAEHVNNSYECDIPIGAGICASYQTQTNSPRRARSVASQSIIAYTMSLGAENSVAYSNNSIAIPTNFTISVTTEILPVSMTKTSVDCTMYICGDSTECSNLLLQYGSFCTQLNRALTGIAVEQDKNTQEVFAQVKQIYKTPPIKDFGGFNFSQILPDPSKPSKRSFIEDLLFNKVTLADAGFIKQYGDCLGDIAARDLICAQKFNGLTVLPPLLTDEMIAQYTSALLAGTITSGWTFGAGAALQIPFAMQMAYRFNGCGVTQNVLYENQKLIANQFNSAIGKIQDSLSSTASALGKLQDVVNQNAQALNTLVKQLSSNFGAISSVLNDILSRLDKVEAEVQIDRLITGRLQSLQTYVTQQLIRAAEIRASANLAATKMSECVLGQSKRVDFCGKGCHLMSFPQSAPHGVVFLHVTYVPAQEKNFTTAPAICHDGKAHFPREGVFVSNGTHWFVTQRNFYEPQIITTDNTFVSGNCDVVIGIVNNTVYDPLQPELDSFKEELDKYFKNHTSPDVDLGDISGINASVVNIQKEIDRLNEVAKNLNESLIDLQELGKYEQYIKWPWYIWLGFIAGLIAIVMVTIMLCCMTSCCSCLKGCCSCGSCCKFDEDDSEPVLKGVKLHYT

SEQ ID NO: 886 - protein, 1273 aa, Artificial Sequence
  SARS-CoV-2/Wuhan/HBCDC-HB-02/2020__EPI_ISL_412978 spike protein (1-1273)(I909C_Y1047C)
MFVFLVLLPLVSSQCVNLTTRTQLPPAYTNSFTRGVYYPDKVFRSSVLHSTQDLFLPFFSNVTWFHAIHVSGTNGTKRFDNPVLPFNDGVYFASTEKSNIIRGWIFGTTLDSKTQSLLIVNNATNVVIKVCEFQFCNDPFLGVYYHKNNKSWMESEFRVYSSANNCTFEYVSQPFLMDLEGKQGNFKNLREFVFKNIDGYFKIYSKHTPINLVRDLPQGFSALEPLVDLPIGINITRFQTLLALHRSYLTPGDSSSGWTAGAAAYYVGYLQPRTFLLKYNENGTITDAVDCALDPLSETKCTLKSFTVEKGIYQTSNFRVQPTESIVRFPNITNLCPFGEVFNATRFASVYAWNRKRISNCVADYSVLYNSASFSTFKCYGVSPTKLNDLCFTNVYADSFVIRGDEVRQIAPGQTGKIADYNYKLPDDFTGCVIAWNSNNLDSKVGGNYNYLYRLFRKSNLKPFERDISTEIYQAGSTPCNGVEGFNCYFPLQSYGFQPTNGVGYQPYRVVVLSFELLHAPATVCGPKKSTNLVKNKCVNFNFNGLTGTGVLTESNKKFLPFQQFGRDIADTTDAVRDPQTLEILDITPCSFGGVSVITPGTNTSNQVAVLYQDVNCTEVPVAIHADQLTPTWRVYSTGSNVFQTRAGCLIGAEHVNNSYECDIPIGAGICASYQTQTNSPRRARSVASQSIIAYTMSLGAENSVAYSNNSIAIPTNFTISVTTEILPVSMTKTSVDCTMYICGDSTECSNFLLQYGSFCTQLNRALTGIAVEQDKNTQEVFAQVKQIYKTPPIKDFGGFNFSQILPDPSKPSKRSFIEDLLFNKVTLADAGFIKQYGDCLGDIAARDLICAQKFNGLTVLPPLLTDEMIAQYTSALLAGTITSGWTFGAGAALQIPFAMQMAYRFNGCGVTQNVLYENQKLIANQFNSAIGKIQDSLSSTASALGKLQDVVNQNAQALNTLVKQLSSNFGAISSVLNDILSRLDKVEAEVQIDRLITGRLQSLQTYVTQQLIRAAEIRASANLAATKMSECVLGQSKRVDFCGKGCHLMSFPQSAPHGVVFLHVTYVPAQEKNFTTAPAICHDGKAHFPREGVFVSNGTHWFVTQRNFYEPQIITTDNTFVSGNCDVVIGIVNNTVYDPLQPELDSFKEELDKYFKNHTSPDVDLGDISGINASVVNIQKEIDRLNEVAKNLNESLIDLQELGKYEQYIKWPWYIWLGFIAGLIAIVMVTIMLCCMTSCCSCLKGCCSCGSCCKFDEDDSEPVLKGVKLHYT

SEQ ID NO: 887 - protein, 1273 aa, Artificial Sequence
  SARS-CoV-2/Australia/QLD02/2020__EPI_ISL_407896 spike protein (1-1273)(I909C_Y1047C)
MFVFLVLLPLVSSQCVNLTTRTQLPPAYTNSFTRGVYYPDKVFRSSVLHSTQDLFLPFFSNVTWFHAIHVSGTNGTKRFDNPVLPFNDGVYFASTEKSNIIRGWIFGTTLDSKTQSLLIVNNATNVVIKVCEFQFCNDPFLGVYYHKNNKSWMESEFRVYSSANNCTFEYVSQPFLMDLEGKQGNFKNLREFVFKNIDGYFKIYSKHTPINLVRDLPQGFSALEPLVDLPIGINITRFQTLLALHRSYLTPGDSSSGWTAGAAAYYVGYLQPRTFLLKYNENGTITDAVDCALDPLSETKCTLKSFTVEKGIYQTSNFRVQPTESIVRFPNITNLCPFGEVFNATRFASVYAWNRKRISNCVADYSVLYNSASFSTFKCYGVSPTKLNDLCFTNVYADSFVIRGDEVRQIAPGQTGKIADYNYKLPDDFTGCVIAWNSNNLDSKVGGNYNYLYRLFRKSNLKPFERDISTEIYQAGSTPCNGVEGFNCYFPLQSYGFQPTNGVGYQPYRVVVLSFELLHAPATVCGPKKSTNLVKNKCVNFNFNGLTGTGVLTESNKKFLPFQQFGRDIADTTDAVRDPQTLEILDITPCSFGGVSVITPGTNTSNQVAVLYQDVNCTEVPVAIHADQLTPTWRVYSTGSNVFQTRAGCLIGAEHVNNSYECDIPIGAGICASYQTQTNSPRRARSVASQSIIAYTMSLGAENSVAYSNNSIAIPTNFTISVTTEILPVSMTKTSVDCTMYICGDSTECSNLLLQYGSFCTQLNRALTGIAVEQDKNTQEVFAQVKQIYKTPPIKDFGGFNFSQILPDPSKPSKRSFIEDLLFNKVTLADAGFIKQYGDCLGDIAARDLICAQKFNGLTVLPPLLTDEMIAQYTSALLAGTITSGWTFGAGAALQIPFAMQMAYRFNGCGVTQNVLYENQKLIANQFNSAIGKIQDSLSSTASALGKLQDVVNQNAQALNTLVKQLSSNFGAISSVLNDILSRLDKVEAEVQIDRLITGRLQSLQTYVTQQLIRAAEIRASANLAATKMSECVLGQSKRVDFCGKGCHLMSFPQSAPHGVVFLHVTYVPAQEKNFTTAPAICHDGKAHFPREGVFVSNGTHWFVTQRNFYEPQIITTDNTFVSGNCDVVIGIVNNTVYDPLQLELDSFKEELDKYFKNHTSPDVDLGDISGINASVVNIQKEIDRLNEVAKNLNESLIDLQELGKYEQYIKWPWYIWLGFIAGLIAIVMVTIMLCCMTSCCSCLKGCCSCGSCCKFDEDDSEPVLKGVKLHYT

SEQ ID NO: 888 - protein, 1273 aa, Artificial Sequence
  SARS-CoV-2/India/1-31/2020__EPI_ISL_413523 spike protein (1-1273)(I909C_Y1047C)
MFVFLVLLPLVSSQCVNLTTRTQLPPAYTNSFTRGVYYPDKVFRSSVLHSTQDLFLPFFSNVTWFHAIHVSGTNGTKRFDNPVLPFNDGVYFASTEKSNIIRGWIFGTTLDSKTQSLLIVNNATNVVIKVCEFQFCNDPFLGVYYHKNNKSWMESEFRVYSSANNCTFEYVSQPFLMDLEGKQGNFKNLREFVFKNIDGYFKIYSKHTPINLVRDLPQGFSALEPLVDLPIGINITRFQTLLALHRSYLTPGDSSSGWTAGAAAYYVGYLQPRTFLLKYNENGTITDAVDCALDPLSETKCTLKSFTVEKGIYQTSNFRVQPTESIVRFPNITNLCPFGEVFNATRFASVYAWNRKRISNCVADYSVLYNSASFSTFKCYGVSPTKLNDLCFTNVYADSFVIRGDEVRQIAPGQTGKIADYNYKLPDDFTGCVIAWNSNNLDSKVGGNYNYLYRLFRKSNLKPFERDISTEIYQAGSTPCNGVEGFNCYFPLQSYGFQPTNGVGYQPYRVVVLSFELLHAPATVCGPKKSTNLVKNKCVNFNFNGLTGTGVLTESNKKFLPFQQFGRDIADTTDAVRDPQTLEILDITPCSFGGVSVITPGTNTSNQVAVLYQDVNCTEVPVAIHADQLTPTWRVYSTGSNVFQTRAGCLIGAEHVNNSYECDIPIGAGICASYQTQTNSPRRARSVASQSIIAYTMSLGAENSVAYSNNSIAIPTNFTISVTTEILPVSMTKTSVDCTMYICGDSTECSNLLLQYGSFCTQLNRALTGIAVEQDKNTQEVFAQVKQIYKTPPIKDFGGFNFSQILPDPSKPSKRSFIEDLLFNKVTLADAGFIKQYGDCLGDIAARDLICAQKFNGLTVLPPLLTDEMIAQYTSALLAGTITSGWTFGAGAALQIPFAMQMAYRFNGCGVTQNVLYENQKLIANQFNSVIGKIQDSLSSTASALGKLQDVVNQNAQALNTLVKQLSSNFGAISSVLNDILSRLDKVEAEVQIDRLITGRLQSLQTYVTQQLIRAAEIRASANLAATKMSECVLGQSKRVDFCGKGCHLMSFPQSAPHGVVFLHVTYVPAQEKNFTTAPAICHDGKAHFPREGVFVSNGTHWFVTQRNFYEPQIITTDNTFVSGNCDVVIGIVNNTVYDPLQPELDSFKEELDKYFKNHTSPDVDLGDISGINASVVNIQKEIDRLNEVAKNLNESLIDLQELGKYEQYIKWPWYIWLGFIAGLIAIVMVTIMLCCMTSCCSCLKGCCSCGSCCKFDEDDSEPVLKGVKLHYT

SEQ ID NO: 889 - protein, 1273 aa, Artificial Sequence
  SARS-CoV-2/Guangdong/GD2020087-P0008/2020__EPI_ISL_413863 spike protein (1-1273)(I909C_Y1047C)
MFVFLVLLPLVSSQCVNLTTRTQLPPAYTNSFTRGVYYPDKVFRSSVLHSTQDLFLPFFSNVTWFHAIHVSGTNGTKRFDNPVLPFNDGVYFASTEKSNIIRGWIFGTTLDSKTQSLLIVNNATNVVIKVCEFQFCNDPFLGVYYHKNNKSWMESEFRVYSSANNCTFEYVSQPFLMDLEGKQGNFKNLREFVFKNIDGYFKIYSKHTPINLVRDLPQGFSALEPLVDLPIGINITRFQTLLALHRSYLTPGDSSSGWTAGAAAYYVGYLQPRTFLLKYNENGTITDAVDCALDPLSETKCTLKSFTVEKGIYQTSNFRVQPTESIVRFPNITNLCPFGEVFNATRFASVYAWNRKRISNCVADYSVLYNSASFSTFKCYGVSPTKLNDLCFTNVYADSFVIRGDEVREIAPGQTGKIADYNYKLPDDFTGCVIAWNSNNLDSKVGGNYNYLYRLFRKSNLKPFERDISTEIYQAGSTPCNGVEGFNCYFPLQSYGFQPTNGVGYQPYRVVVLSFELLHAPATVCGPKKSTNLVKNKCVNFNFNGLTGTGVLTESNKKFLPFQQFGRDIADTTDAVRDPQTLEILDITPCSFGGVSVITPGTNTSNQVAVLYQDVNCTEVPVAIHADQLTPTWRVYSTGSNVFQTRAGCLIGAEHVNNSYECDIPIGAGICASYQTQTNSPRRARSVASQSIIAYTMSLGAENSVAYSNNSIAIPTNFTISVTTEILPVSMTKTSVDCTMYICGDSTECSNLLLQYGSFCTQLNRALTGIAVEQDKNTQEVFAQVKQIYKTPPIKDFGGFNFSQILPDPSKPSKRSFIEDLLFNKVTLADAGFIKQYGDCLGDIAARDLICAQKFNGLTVLPPLLTDEMIAQYTSALLAGTITSGWTFGAGAALQIPFAMQMAYRFNGCGVTQNVLYENQKLIANQFNSAIGKIQDSLSSTASALGKLQDVVNQNAQALNTLVKQLSSNFGAISSVLNDILSRLDKVEAEVQIDRLITGRLQSLQTYVTQQLIRAAEIRASANLAATKMSECVLGQSKRVDFCGKGCHLMSFPQSAPHGVVFLHVTYVPAQEKNFTTAPAICHDGKAHFPREGVFVSNGTHWFVTQRNFYEPQIITTDNTFVSGNCDVVIGIVNNTVYDPLQPELDSFKEELDKYFKNHTSPDVDLGDISGINASVVNIQKEIDRLNEVAKNLNESLIDLQELGKYEQYIKWPWYIWLGFIAGLIAIVMVTIMLCCMTSCCSCLKGCCSCGSCCKFDEDDSEPVLKGVKLHYT

SEQ ID NO: 890 - protein, 1273 aa, Artificial Sequence
  SARS-CoV-2/Sweden/01/2020__EPI_ISL_411951 spike protein (1-1273)(I909C_Y1047C)
MFVFLVLLPLVSSQCVNLTTRTQLPPAYTNSFTRGVYYPDKVFRSSVLHSTQDLFLPFFSNVTWFHAIHVSGTNGTKRFDNPVLPFNDGVYFASTEKSNIIRGWIFGTTLDSKTQSLLIVNNATNVVIKVCEFQFCNDPFLGVYYHKNNKSWMESEFRVYSSANNCTFEYVSQPFLMDLEGKQGNFKNLREFVFKNIDGYFKIYSKHTPINLVRDLPQGFSALEPLVDLPIGINITRFQTLLALHRSYLTPGDSSSGWTAGAAAYYVGYLQPRTFLLKYNENGTITDAVDCALDPLSETKCTLKSFTVEKGIYQTSNFRVQPTESIVRFPNITNLCPFGEVFNATRFASVYAWNRKRISNCVADYSVLYNSASFSTFKCYGVSPTKLNDLCFTNVYADSFVIRGDEVRQIAPGQTGKIADYNYKLPDDFTGCVIAWNSNNLDSKVGGNYNYLYRLFRKSNLKPFERDISTEIYQAGSTPCNGVEGFNCYFPLQSYGFQPTNGVGYQPYRVVVLSFELLHAPATVCGPKKSTNLVKNKCVNFNFNGLTGTGVLTESNKKFLPFQQFGRDIADTTDAVRDPQTLEILDITPCSFGGVSVITPGTNTSNQVAVLYQDVNCTEVPVAIHADQLTPTWRVYSTGSNVFQTRAGCLIGAEHVNNSYECDIPIGAGICASYQTQTNSPRRARSVASQSIIAYTMSLGAENSVAYSNNSIAIPTNFTISVTTEILPVSMTKTSVDCTMYICGDSTECSNLLLQYGSFCTQLNRALTGIAVEQDKNTQEVFAQVKQIYKTPPIKDCGGFNFSQILPDPSKPSKRSFIEDLLFNKVTLADAGFIKQYGDCLGDIAARDLICAQKFNGLTVLPPLLTDEMIAQYTSALLAGTITSGWTFGAGAALQIPFAMQMAYRFNGCGVTQNVLYENQKLIANQFNSAIGKIQDSLSSTASALGKLQDVVNQNAQALNTLVKQLSSNFGAISSVLNDILSRLDKVEAEVQIDRLITGRLQSLQTYVTQQLIRAAEIRASANLAATKMSECVLGQSKRVDFCGKGCHLMSFPQSAPHGVVFLHVTYVPAQEKNFTTAPAICHDGKAHFPREGVFVSNGTHWFVTQRNFYEPQIITTDNTFVSGNCDVVIGIVNNTVYDPLQPELDSFKEELDKYFKNHTSPDVDLGDISGINASVVNIQKEIDRLNEVAKNLNESLIDLQELGKYEQYIKWPWYIWLGFIAGLIAIVMVTIMLCCMTSCCSCLKGCCSCGSCCKFDEDDSEPVLKGVKLHYT

SEQ ID NO: 891 - protein, 1273 aa, Artificial Sequence
  SARS-CoV-2/Tianmen/HBCDC-HB-07/2020__EPI_ISL_412983 spike protein (1-1273)(I909C_Y1047C)
MFVFLVLLPLVSSQCVNLTTRTQLPPAYTNSFTRGVYYPDKVFRSSVLHSTQDLFLPFFSNVTWFHAIHVSGTNGTKRFDNPVLPFNDGVYFASTEKSNIIRGWIFGTTLDSKTQSLLIVNNATNVVIKVCEFQFCNDPFLGVYYHKNNKSWMESEFRVYSSANNCTFEYVSQPFLMDLEGKQGNFKNLREFVFKNIDGYFKIYSKHTPINLVRDLPQGFSALEPLVDLPIGINITRFQTLLALHRSYLTPGDSSSGWTAGAAAYYVGYLQPRTFLLKYNENGTITDAVDCALDPLSETKCTLKSFTVEKGIYQTSNFRVQPTESIVRFPNITNLCPFGEVFNATRFASVYAWNRKRISNCVADYSVLYNSASFSTFKCYGVSPTKLNDLCFTNVYADSFVIRGDEVRQIAPGQTGKIADYNYKLPDDFTGCVIAWNSNNLDSKVGGNYNYLYRLFRKSNLKPFERDISTEIYQAGSTPCNGVEGFNCYFPLQSYGFQPTNGVGYQPYRVVVLSFELLHAPATVCGPKKSTNLVKNKCVNFNFNGLTGTGVLTESNKKFLPFQQFGRDIADTTDAVRDPQTLEILDITPCSFGGVSVITPGTNTSNQVAVLYQDLNCTEVPVAIHADQLTPTWRVYSTGSNVFQTRAGCLIGAEHVNNSYECDIPIGAGICASYQTQTNSPRRARSVASQSIIAYTMSLGAENSVAYSNNSIAIPTNFTISVTTEILPVSMTKTSVDCTMYICGDSTECSNLLLQYGSFCTQLNRALTGIAVEQDKNTQEVFAQVKQIYKTPPIKDFGGFNFSQILPDPSKPSKRSFIEDLLFNKVTLADAGFIKQYGDCLGDIAARDLICAQKFNGLTVLPPLLTDEMIAQYTSALLAGTITSGWTFGAGAALQIPFAMQMAYRFNGCGVTQNVLYENQKLIANQFNSAIGKIQDSLSSTASALGKLQDVVNQNAQALNTLVKQLSSNFGAISSVLNDILSRLDKVEAEVQIDRLITGRLQSLQTYVTQQLIRAAEIRASANLAATKMSECVLGQSKRVDFCGKGCHLMSFPQSAPHGVVFLHVTYVPAQEKNFTTAPAICHDGKAHFPREGVFVSNGTHWFVTQRNFYEPQIITTDNTFVSGNCDVVIGIVNNTVYDPLQPELDSFKEELDKYFKNHTSPDVDLGDISGINASVVNIQKEIDRLNEVAKNLNESLIDLQELGKYEQYIKWPWYIWLGFIAGLIAIVMVTIMLCCMTSCCSCLKGCCSCGSCCKFDEDDSEPVLKGVKLHYT

SEQ ID NO: 892 - protein, 1273 aa, Artificial Sequence
  SARS-CoV-2/Hong Kong/case42_VM20002493/2020__EPI_ISL_414527 spike protein (1-1273)(I909C_Y1047C)
MFVFLVLLPLVSSQCVNLTTRTQLPPAYTNSFTRGVYYPDKVFRSSVLHSTQDLFLPFFSNVTWFHAIHVSGTNGTKRFDNPVLPFNDGVYFASTEKSNIIRGWIFGTTLDSKTQSLLIVNNATNVVIKVCEFQFCNDPFLGVYYHKNNKSWMESEFRVYSSANNCTFEYVSQPFLMDLEGKQGNFKNLREFVFKNIDGYFKIYSKHTPINLVRDLPQGFSALEPLVDLPIGINITRFQTLLALHRSYLTPGDSSSGWTAGAAAYYVGYLQPRTFLLKYNENGTITDAVDCALDPLSETKCTLKSFTVEKGIYQTSNFRVQPTESIVRFPNITNLCPFGEVFNATRFASVYAWNRKRISNCVADYSVLYNSASFSTFKCYGVSPTKLNDLCFTNVYADSFVIRGDEVRQIAPGQTGKIADYNYKLPDDFTGCVIAWNSNNLDSKVGGNYNYLYRLFRKSNLKPFERDISTEIYQAGSTPCNGVEGFNCYFPLQSYGFQPTNGVGYQPYRVVVLSFELLHAPATVCGPKKSTNLVKNKCVNFNFNGLTGTGVLTESNKKFLPFQQFGRDIADTTDAVRDPQTLEILDITPCSFGGVSVITPGTNTSNQVAVLYQDVNCTEVPVAIHADQLTPTWRVYSTGSNVFQTRAGCLIGAEHVNNSYECDIPIGAGICASYQTQTNSPRRARSVASQSIIAYTMSLGAENSVAYSNNSIAIPTNFAISVTTEILPVSMTKTSVDCTMYICGDSTECSNLLLQYGSFCTQLNRALTGIAVEQDKNTQEVFAQVKQIYKTPPIKDFGGFNFSQILPDPSKPSKRSFIEDLLFNKVTLADAGFIKQYGDCLGDIAARDLICAQKFNGLTVLPPLLTDEMIAQYTSALLAGTITSGWTFGAGAALQIPFAMQMAYRFNGCGVTQNVLYENQKLIANQFNSAIGKIQDSLSSTASALGKLQDVVNQNAQALNTLVKQLSSNFGAISSVLNDILSRLDKVEAEVQIDRLITGRLQSLQTYVTQQLIRAAEIRASANLAATKMSECVLGQSKRVDFCGKGCHLMSFPQSAPHGVVFLHVTYVPAQEKNFTTAPAICHDGKAHFPREGVFVSNGTHWFVTQRNFYEPQIITTDNTFVSGNCDVVIGIVNNTVYDPLQPELDSFKEELDKYFKNHTSPDVDLGDISGINASVVNIQKEIDRLNEVAKNLNESLIDLQELGKYEQYIKWPWYIWLGFIAGLIAIVMVTIMLCCMTSCCSCLKGCCSCGSCCKFDEDDSEPVLKGVKLHYT

SEQ ID NO: 893 - protein, 1273 aa, Artificial Sequence
  SARS-CoV-2/USA/CruiseA-23/2020__EPI_ISL_414482 spike protein (1-1273)(I909C_Y1047C)
MFVFLVLLPLVSSQCVNLTTRTQLPPAYTNSFTRGVYYPDKVFRSSVLHSTQDLFLPFFSNVTWFHAIHVSGTNGTKRFDNPVLPFNDGVYFASTEKSNIIRGWIFGTTLDSKTQSLLIVNNATNVVIKVCEFQFCNDPFLGVYYHKNNKSWMESEFRVYSSANNCTFEYVSQPFLMDLEVKQGNFKNLREFVFKNIDGYFKIYSKHTPINLVRDLPQGFSALEPLVDLPIGINITRFQTLLALHRSYLTPGDSSSGWTAGAAAYYVGYLQPRTFLLKYNENGTITDAVDCALDPLSETKCTLKSFTVEKGIYQTSNFRVQPTESIVRFPNITNLCPFGEVFNATRFASVYAWNRKRISNCVADYSVLYNSASFSTFKCYGVSPTKLNDLCFTNVYADSFVIRGDEVRQIAPGQTGKIADYNYKLPDDFTGCVIAWNSNNLDSKVGGNYNYLYRLFRKSNLKPFERDISTEIYQAGSTPCNGVEGFNCYFPLQSYGFQPTNGVGYQPYRVVVLSFELLHAPATVCGPKKSTNLVKNKCVNFNFNGLTGTGVLTESNKKFLPFQQFGRDIADTTDAVRDPQTLEILDITPCSFGGVSVITPGTNTSNQVAVLYQDVNCTEVPVAIHADQLTPTWRVYSTGSNVFQTRAGCLIGAEHVNNSYECDIPIGAGICASYQTQTNSPRRARSVASQSIIAYTMSLGAENSVAYSNNSIAIPTNFTISVTTEILPVSMTKTSVDCTMYICGDSTECSNLLLQYGSFCTQLNRALTGIAVEQDKNTQEVFAQVKQIYKTPPIKDFGGFNFSQILPDPSKPSKRSFIEDLLFNKVTLADAGFIKQYGDCLGDIAARDLICAQKFNGLTVLPPLLTDEMIAQYTSALLAGTITSGWTFGAGAALQIPFAMQMAYRFNGCGVTQNVLYENQKLIANQFNSAIGKIQDSLSSTASALGKLQDVVNQNAQALNTLVKQLSSNFGAISSVLNDILSRLDKVEAEVQIDRLITGRLQSLQTYVTQQLIRAAEIRASANLAATKMSECVLGQSKRVDFCGKGCHLMSFPQSAPHGVVFLHVTYVPAQEKNFTTAPAICHDGKAHFPREGVFVSNGTHWFVTQRNFYEPQIITTDNTFVSGNCDVVIGIVNNTVYDPLQPELDSFKEELDKYFKNHTSPDVDLGDISGINASVVNIQKEIDRLNEVAKNLNESLIDLQELGKYEQYIKWPWYIWLGFIAGLIAIVMVTIMLCCMTSCCSCLKGCCSCGSCCKFDEDDSEPVLKGVKLHYT

SEQ ID NO: 894 - protein, 1273 aa, Artificial Sequence
  SARS-CoV-2/Hong Kong/case85_VM20002868/2020__EPI_ISL_414519 spike protein (1-1273)(I909C_Y1047C)
MFVFLVLVPLVSSQCVNLTTRTQLPPAYTNSFTRGVYYPDKVFRSSVLHSTQDLFLPFFSNVTWFHAIHVSGTNGTKRFDNPVLPFNDGVYFASTEKSNIIRGWIFGTTLDSKTQSLLIVNNATNVVIKVCEFQFCNDPFLGVYYHKNNKSWMESEFRVYSSANNCTFEYVSQPFLMDLEGKQGNFKNLREFVFKNIDGYFKIYSKHTPINLVRDLPQGFSALEPLVDLPIGINITRFQTLLALHRSYLTPGDSSSGWTAGAAAYYVGYLQPRTFLLKYNENGTITDAVDCALDPLSETKCTLKSFTVEKGIYQTSNFRVQPTESIVRFPNITNLCPFGEVFNATRFASVYAWNRKRISNCVADYSVLYNSASFSTFKCYGVSPTKLNDLCFTNVYADSFVIRGDEVRQIAPGQTGKIADYNYKLPDDFTGCVIAWNSNNLDSKVGGNYNYLYRLFRKSNLKPFERDISTEIYQAGSTPCNGVEGFNCYFPLQSYGFQPTNGVGYQPYRVVVLSFELLHAPATVCGPKKSTNLVKNKCVNFNFNGLTGTGVLTESNKKFLPFQQFGRDIADTTDAVRDPQTLEILDITPCSFGGVSVITPGTNTSNQVAVLYQDVNCTEVPVAIHADQLTPTWRVYSTGSNVFQTRAGCLIGAEHVNNSYECDIPIGAGICASYQTQTNSPRRARSVASQSIIAYTMSLGAENSVAYSNNSIAIPTNFTISVTTEILPVSMTKTSVDCTMYICGDSTECSNLLLQYGSFCTQLNRALTGIAVEQDKNTQEVFAQVKQIYKTPPIKDFGGFNFSQILPDPSKPSKRSFIEDLLFNKVTLADAGFIKQYGDCLGDIAARDLICAQKFNGLTVLPPLLTDEMIAQYTSALLAGTITSGWTFGAGAALQIPFAMQMAYRFNGCGVTQNVLYENQKLIANQFNSAIGKIQDSLSSTASALGKLQDVVNQNAQALNTLVKQLSSNFGAISSVLNDILSRLDKVEAEVQIDRLITGRLQSLQTYVTQQLIRAAEIRASANLAATKMSECVLGQSKRVDFCGKGCHLMSFPQSAPHGVVFLHVTYVPAQEKNFTTAPAICHDGKAHFPREGVFVSNGTHWFVTQRNFYEPQIITTDNTFVSGNCDVVIGIVNNTVYDPLQPELDSFKEELDKYFKNHTSPDVDLGDISGINASVVNIQKEIDRLNEVAKNLNESLIDLQELGKYEQYIKWPWYIWLGFIAGLIAIVMVTIMLCCMTSCCSCLKGCCSCGSCCKFDEDDSEPVLKGVKLHYT

SEQ ID NO: 895 - protein, 1273 aa, Artificial Sequence
  SARS-CoV-2/England/200990660/2020__EPI_ISL_414523 spike protein (1-1273)(I909C_Y1047C)
MFVFLVLLPLVSSQCVNLTTRTQLPPAYTNSFTRGVYYPDKVFRSSVLHSTQDLFLPFFSNVTWFHAIHVSGTNGTKRFDNPVLPFNDGVYFASTEKSNIIRGWIFGTTLDSKTQSLLIVNNATNVVIKVCEFQFCNDPFLGVYYHKNNKSWMESEFRVYSSANNCTFEYVSQPFLMDLEGKQGNFKNLREFVFKNIDGYFKIYSKHTPINLVRDLPQGFSALEPLVDLPIGINITRFQTLLALHRSYLTPGDSSSGWTAGAAAYYVGYLQPRTFLLKYNENGTITDAVDCALDPLSETKCTLKSFTVEKGIYQTSNFRVQPTESIVRFPNITNLCPFGEVFNATRFASVYAWNRKRISNCVADYSVLYNSASFSTFKCYGVSPTKLNDLCFTNVYADSFVIRGDEVRQIAPGQTGKIADYNYKLPDDFTGCVIAWNSNNLDSKVGGNYNYLYRLFRKSNLKPFERDISTEIYQAGSTPCNGVEGFNCYFPLQSYGFQPTNGVGYQPYRVVVLSFELLHAPATVCGPKKSTNLVKNKCVNFNFNGLTGTGVLTESNKKFLPFQQFGRDIADTTDAVRDPQTLEILDITPCSFGGVSVITPGTNTSNQVAVLYQGVNCTEVPVAIHADQLTPTWRVYSTGSNVFQTRAGCLIGAEHVNNSYECDIPIGAGICASYQTQTNSPRRARSVASQSIIAYTMSLGAENSVAYSNNSIAIPTNFTISVTTEILPVSMTKTSVDCTMYICGDSTECSNLLLQYGSFCTQLNRALTGIAVEQDKNTQEVFAQVKQIYKTPPIKDFGGFNFSQILPDPSKPSKRSFIEDLLFNKVTLADAGFIKQYGDCLGDIAARDLICAQKFNGLTVLPPLLTDEMIAQYTSALLAGTITSGWTFGAGAALQIPFAMQMAYRFNGCGVTQNVLYENQKLIANQFNSAIGKIQDSLSSTASALGKLQDVVNQNAQALNTLVKQLSSNFGAISSVLNDILSRLDKVEAEVQIDRLITGRLQSLQTYVTQQLIRAAEIRASANLAATKMSECVLGQSKRVDFCGKGCHLMSFPQSAPHGVVFLHVTYVPAQEKNFTTAPAICHDGKAHFPREGVFVSNGTHWFVTQRNFYEPQIITTDNTFVSGNCDVVIGIVNNTVYDPLQPELDSFKEELDKYFKNHTSPDVDLGDISGINASVVNIQKEIDRLNEVAKNLNESLIDLQELGKYEQYIKWPWYIWLGFIAGLIAIVMVTIMLCCMTSCCSCLKGCCSCGSCCKFDEDDSELVLKGVKLHYT

SEQ ID NO: 896 - protein, 1273 aa, Artificial Sequence
  SARS-CoV-2/Australia/NSW09/2020__EPI_ISL_413595 spike protein (1-1273)(I909C_Y1047C)
MFVFLVLLPLVSSQCVNLTTRTQLPPAYTNSFTRGVYYPDKVFRSSVLHSTQDLFLPFFSNVTWFHAIHVSGTNGTKRFDNPVLPFNDGVYFASTEKSNIIRGWIFGTTLDSKTQSLLIVNNATNVVIKVCEFQFCNDPFLGVYYHKNNKSWMESEFRVYSSANNCTFEYVSQPFLMDLEGKQGNFKNLREFVFKNIDGYFKIYSKHTPINLVRDLPQGFSALEPLVDLPIGINITRFQTLLALHRSYLTPGDSSSGWTAGAAAYYVGYLQPRTFLLKYNENGTITDAVDCALDPLSETKCTLKSFTVEKGIYQTSNFRVQPTESIVRFPNITNLCPFGEVFNATRFASVYAWNRKRISNCVADYSVLYNSASFSTFKCYGVSPTKLNDLCFTNVYADSFVIRGDEVRQIAPGQTGKIADYNYKLPDDFTGCVIAWNSNNLDSKVGGNYNYLYRLFRKSNLKPFERDISTEIYQAGSTPCNGVEGFNCYFPLQSYGFQPTNGVGYQPYRVVVLSFELLHAPATVCGPKKSTNLVKNKCVNFNFNGLTGTGVLTESNKKFLPFQQFGRDIADTTDAVRDPQTLEILDITPCSFGGVSVITPGTNTSNQVAVLYQDVNCTEVPVAIHADQLTPTWRVYSTGSNVFQTRAGCLIGAEHVNNSYECDIPIGAGICASYQTQTNSPRRARSVASQSIIAYTMSLGAENSVAYSNNSIAIPTNFTISVTTEILPVSMTKTSVDCTMYICGDSTECSNLLLQYGSFCTQLNRALTGIAVEQDKNTQEVFAQVKQIYKTPPIKDFGGFNFSQILPDPSKPSKRSFIEDLLFNKVTLADAGFIKQYGDCLGDIAARDLICAQKFNGLTVLPPLLTDEMIAQYTSALLAGTITSGWTFGAGAALQIPFAMQMAYRFNGCGVTQNVLYENQKLIANQFNSAIGKIQDSLSFTASALGKLQDVVNQNAQALNTLVKQLSSNFGAISSVLNDILSRLDKVEAEVQIDRLITGRLQSLQTYVTQQLIRAAEIRASANLAATKMSECVLGQSKRVDFCGKGCHLMSFPQSAPHGVVFLHVTYVPAQEKNFTTAPAICHDGKAHFPREGVFVSNGTHWFVTQRNFYEPQIITTDNTFVSGNCDVVIGIVNNTVYDPLQPELDSFKEELDKYFKNHTSPDVDLGDISGINASVVNIQKEIDRLNEVAKNLNESLIDLQELGKYEQYIKWPWYIWLGFIAGLIAIVMVTIMLCCMTSCCSCLKGCCSCGSCCKFDEDDSEPVLKGVKLHYT

SEQ ID NO: 897 - protein, 1273 aa, Artificial Sequence
  SARS-CoV-2/Australia/NSW10/2020__EPI_ISL_413596 spike protein (1-1273)(I909C_Y1047C)
MFVFLVLLPLVSSQCVNLTTRTQLPPAYTNSFTRGVYYPDKVFRSSVLHSTQDLFLPFFSNVTWFHAIHVSGTNGTKRFDNPVLPFNDGVYFASTEKSNIIRGWIFGTTLDSKTQSLLIVNNATNVVIKVCEFQFCNDPFLGVYYHKNNKSWMESEFRVYSSANNCTFEYVSQPFLMDLEGKQGNFKNLREFVFKNIDGYFKIYSKHTPINLVRDLPQGFSALEPLVDLPIGINITRFQTLLALHRSYLTPGDSSSGWTAGAAAYYVGYLQPRTFLLKYNENGTITDAVDCALDPLSETKCTLKSFTVEKGIYQTSNFRVQPTESIVRFPNITNLCPFGEVFNATRFASVYAWNRKRISNCVADYSVLYNSASFSTFKCYGVSPTKLNDLCFTNVYADSFVIRGDEVRQIAPGQTGKIADYNYKLPDDFTGCVIAWNSNNLDSKVGGNYNYLYRLFRKSNLKPFERDISTEIYQAGSTPCNGVEGFNCYFPLQSYGFQPTNGVGYQPYRVVVLSFELLHAPATVCGPKKSTNLVKNKCVNFNFNGLTGTGVLTESNKKFLPFQQFGRDIADTTDAVRDPQTLEILDITPCSFGGVSVITPGTNTSNQVAVLYQDVNCTEVPVAIHADQLTPTWRVYSTGSNVFQTRAGCLIGAEHVNNSYECDIPIGAGICASYQTQTNSPRRARSVASQSIIAYTMSLGAENSVAYSNNSIAIPTNFTISVTTEILPVSMTKTSVDCTMYICGDSTECSNLLLQYGSFCTQLNRALTGIAVEQDKNTQEVFAQVKQIYKTPPIKDFGGFNFSQILPDPSKPSKRSFIEDLLFNKVTLADAGFIKQYGDCLGDIAARDLICAQKFNGLTVLPPLLTDEMIAQYTSALLAGTITSGWTFGAGAALQIPFAMQMAYRFNGCGVTQNVLYENQKLIANQFNSAIGKIQDSLSSTASALGKLQDVVNQNAQALNTLVKQLSSNFGAISSVLNDILSRLDKVEAEVQIDRLITGRLQSLQTYVTQQLIRAAEIRASANLAATKMSECVLGQSKRVDFCGKGCHLMSFPQSAPHGVVFLHVTYVPAQEKNFTTAPAICHDGKAHFPREGVFVSNGTHWFVTQRNFYEPQIITTDNTFVSGNCDVVIGIVNNTVYDPLQPELDSFKEELDKYFKNHTSPDVDLGDISGINASVVNIQKEIDRLNEVAKNLNESLIDLQELGKYEQYIKWPWYIWLGFIAGLIAIVMVTIMLCCMTSCCSCLKGCCSCGSCFKFDEDDSEPVLKGVKLHYT

SEQ ID NO: 898 - protein, 1273 aa, Artificial Sequence
  SARS-CoV-2/Switzerland/1000477797/2020__EPI_ISL_413023 spike protein (1-1273)(I909C_Y1047C)
MFVFLVLLPLVSSQCVNLTTRTQLPPAYTNSFTRGVYYPDKVFRSSVLHSTQDLFLPFFSNVTWFHAIHVSGTNGTKRFDNPVLPFNDGVYFASTEKSNIIRGWIFGTTLDSKTQSLLIVNNATNVVIKVCEFQFCNDPFLGVYYHKNNKSWMESEFRVYSSANNCTFEYVSQPFLMDLEGKQGNFKNLREFVFKNIDGYFNIYSKHTPINLVRDLPQGFSALEPLVDLPIGINITRFQTLLALHRSYLTPGDSSSGWTAGAAAYYVGYLQPRTFLLKYNENGTITDAVDCALDPLSETKCTLKSFTVEKGIYQTSNFRVQPTESIVRFPNITNLCPFGEVFNATRFASVYAWNRKRISNCVADYSVLYNSASFSTFKCYGVSPTKLNDLCFTNVYADSFVIRGDEVRQIAPGQTGKIADYNYKLPDDFTGCVIAWNSNNLDSKVGGNYNYLYRLFRKSNLKPFERDISTEIYQAGSTPCNGVEGFNCYFPLQSYGFQPTNGVGYQPYRVVVLSFELLHAPATVCGPKKSTNLVKNKCVNFNFNGLTGTGVLTESNKKFLPFQQFGRDIADTTDAVRDPQTLEILDITPCSFGGVSVITPGTNTSNQVAVLYQGVNCTEVPVAIHADQLTPTWRVYSTGSNVFQTRAGCLIGAEHVNNSYECDIPIGAGICASYQTQTNSPRRARSVASQSIIAYTMSLGAENSVAYSNNSIAIPTNFTISVTTEILPVSMTKTSVDCTMYICGDSTECSNLLLQYGSFCTQLNRALTGIAVEQDKNTQEVFAQVKQIYKTPPIKDFGGFNFSQILPDPSKPSKRSFIEDLLFNKVTLADAGFIKQYGDCLGDIAARDLICAQKFNGLTVLPPLLTDEMIAQYTSALLAGTITSGWTFGAGAALQIPFAMQMAYRFNGCGVTQNVLYENQKLIANQFNSAIGKIQDSLSSTASALGKLQDVVNQNAQALNTLVKQLSSNFGAISSVLNDILSRLDKVEAEVQIDRLITGRLQSLQTYVTQQLIRAAEIRASANLAATKMSECVLGQSKRVDFCGKGCHLMSFPQSAPHGVVFLHVTYVPAQEKNFTTAPAICHDGKAHFPREGVFVSNGTHWFVTQRNFYEPQIITTDNTFVSGNCDVVIGIVNNTVYDPLQPELDSFKEELDKYFKNHTSPDVDLGDISGINASVVNIQKEIDRLNEVAKNLNESLIDLQELGKYEQYIKWPWYIWLGFIAGLIAIVMVTIMLCCMTSCCSCLKGCCSCGSCCKFDEDDSEPVLKGVKLHYT

SEQ ID NO: 899 - protein, 1273 aa, Artificial Sequence
  SARS-CoV-2/Belgium/BA-02291/2020__EPI_ISL_415159 spike protein (1-1273)(I909C_Y1047C)
MFVFLVLLPLVSSQCVNLTTRTQLPPAYTNSFTRGVYYPDKVFRSSVLHSTQDLFLPFFSNVTWFHAIHVSGTNGTKRFDNPVLPFNDGVYFASTEKSNIIRGWIFGTTLDSKTQSLLIVNNATNVVIKVCEFQFCNDPFLGVYYHKNNKSWMESEFRVYSSANNCTFEYVSQPFLMDLEGKQGNFKNLREFVFKNIDGYFKIYSKHTPINLVRDLPQGFSALEPLVDLPIGINITRFQTLLALHRSYLTPGDSSSGWTAGAAAYYVGYLQPRTFLLKYNENGTITDAVDCALDPLSETKCTLKSFTVEKGIYQTSNFRVQPTESIVRFPNITNLCPFGEVFNATRFASVYAWNRKRISNCVADYSVLYNSASFSTFKCYGVSPTKLNDLCFTNVYADSFVIRGDEVRQIAPGQTGKIADYNYKLPDDFTGCVIAWNSNNLDSKVGGNYNYLYRLFRRSNLKPFERDISTEIYQAGSTPCNGVEGFNCYFPLQSYGFQPTNGVGYQPYRVVVLSFELLPAPATVCGPKKSTNLVKNKCVNFNFNGLTGTGVLTESNKKFLPFQQFGRDIADTTDAVRDPQTLEILDITPCSFGGVSVITPGTNTSNQVAVLYQGVNCTEVPVAIHADQLTPTWRVYSTGSNVFQTRAGCLIGAEHVNNSYECDIPIGAGICASYQTQTNSPRRARSVASQSIIAYTMSLGAENSVAYSNNSIAIPTNFTISVTTEILPVSMTKTSVDCTMYICGDSTECSNLLLQYGSFCTQLNRALTGIAVEQDKNTQEVFAQVKQIYKTPPIKDFGGFNFSQILPDPSKPSKRSFIEDLLFNKVTLADAGFIKQYGDCLGDIAARDLICAQKFNGLTVLPPLLTDEMIAQYTSALLAGTITSGWTFGAGAALQIPFAMQMAYRFNGCGVTQNVLYENQKLIANQFNSAIGKIQDSLSSAAPALGKLQDVVNQNAQALNTLVKQLSSNFGAISSVLNDILSRLDKVEAEVQIDRLITGRLQSLQTYVTQQLIRAAEIRASANLAATKMSECVLGQSKRVDFCGKGCHLMSFPQSAPHGVVFLHVTYVPAQEKNFTTAPAICHDGKAHFPREGVFVSNGTHWFVTQRNFYEPQIITTDNTFVSGNCDVVIGIVNNTVYDPLQPELDSFKEELDKYFKNHTSPDVDLGDISGINASVVNIQKEIDRLNEVAKNLNESLIDLQELGKYEQYIKWPWYIWLGFIAGLIAIVMVTIMLCCMTSCCSCLKGCCSCGSCCKFDEDDSEPVLKGVKLHYT

SEQ ID NO: 900 - protein, 1273 aa, Artificial Sequence
  SARS-CoV-2/USA/WA8-UW5/2020__EPI_ISL_413486 spike protein (1-1273)(I909C_Y1047C)
MFVFLVLLPLVSSQCVNLTTRTQLPPAYTNSFTRGVYYPDKVFRSSVLHSTQDLFLPFFSNVTWFHAIHVSGTNGTKRFDNPVLPFNDGVYFASTEKSNIIRGWIFGTTLDSKTQSLLIVNNATNVVIKVCEFQFCNDPFLGVYYHKNNKSWMESEFRVYSSANNCTFEYVSQPFLMDLEGKQGNFKNLREFVFKNIDGYFKIYSKHTPINLVRDLPQGFSALEPLVDLPIGINITRFQTLLALHRSYLTPGDSSSGWTAGAAAYYVGYLQPRTFLLKYNENGTITDAVDCALDPLSETKCTLKSFTVEKGIYQTSNFRVQPTESIVRFPNITNLCPFGEVFNATRFASVYAWNRKRISNCVADYSVLYNSASFSTFKCYGVSPTKLNDLCFTNVYADSFVIRGDEVRQIAPGQTGKIADYNYKLPDDFTGCVIAWNSNNLDSKVGGNYNYLYRLFRKSNLKPFERDISTEIYQAGSTPCNGVEGFNCYFPLQSYGFQPTNGVGYQPYRVVVLSFELLHAPATVCGPKKSTNLVKNKCVNFNFNGLTGTGVLTESNKKFLPFQQFGRDIADTTDAVRDPQTLEILDITPCSFGGVSVITPGTNTSNQVAVLYQDVNCTEVPVAIHADQLTPTWRVYSTGSNVFQTRAGCLIGAEYVNNSYECDIPIGAGICASYQTQTNSPRRARSVASQSIIAYTMSLGAENSVAYSNNSIAIPTNFTISVTTEILPVSMTKTSVDCTMYICGDSTECSNLLLQYGSFCTQLNRALTGIAVEQDKNTQEVFAQVKQIYKTPPIKDFGGFNFSQILPDPSKPSKRSFIEDLLFNKVTLADAGFIKQYGDCLGDIAARDLICAQKFNGLTVLPPLLTDEMIAQYTSALLAGTITSGWTFGAGAALQIPFAMQMAYRFNGCGVTQNVLYENQKLIANQFNSAIGKIQDSLSSTASALGKLQDVVNQNAQALNTLVKQLSSNFGAISSVLNDILSRLDKVEAEVQIDRLITGRLQSLQTYVTQQLIRAAEIRASANLAATKMSECVLGQSKRVDFCGKGCHLMSFPQSAPHGVVFLHVTYVPAQEKNFTTAPAICHDGKAHFPREGVFVSNGTHWFVTQRNFYEPQIITTDNTFVSGNCDVVIGIVNNTVYDPLQPELDSFKEELDKYFKNHTSPDVDLGDISGINASVVNIQKEIDRLNEVAKNLNESLIDLQELGKYEQYIKWPWYIWLGFIAGLIAIVMVTIMLCCMTSCCSCLKGCCSCGSCCKFDEDDSEPVLKGVKLHYT

SEQ ID NO: 901 - protein, 1273 aa, Artificial Sequence
  SARS-CoV-2/England/20102000506/2020__EPI_ISL_415147 spike protein (1-1273)(I909C_Y1047C)
MFVFLVLLPLVSSQCVNLTTRTQLPPAYTNSFTRGVYYPDKVFRSSVLHSTQDLFLPFFSNVTWFHAIHVSGTNGTKRFDNPVLPFNDGVYFASTEKSNIIRGWIFGTTLDSKTQSLLIVNNATNVVIKVCEFQFCNDPFLGVYYHKNNKSWMESEFRVYSSANNCTFEYVSQPFLMDLEGKQGNFKNLREFVFKNIDGYFKIYSKHTPINLVRDLPQGFSALEPLVDLPIGINITRFQTLLALHRSYLTPGDSSSGWTAGAAAYYVGYLQPRTFLLKYNENGTITDAVDCALDPLSETKCTLKSFTVEKGIYQTSNFRVQPTESIVRFPNITNLCPFGEVFNATRFASVYAWNRKRISNCVADYSVLYNSASFSTFKCYGVSPTKLNDLCFTNVYADSFVIRGDEVRQIAPGQTGKIADYNYKLPDDFTGCVIAWNSNNLDSKVGGNYNYLYRLFRKSNLKPFERDISTEIYQAGSTPCNGVEGFNCYFPLQSYGFQPTNGVGYQPYRVVVLSFELLHAPATVCGPKKSTNLVKNKCVNFNFNGLTGTGVLTESNKKFLPFQQFGRDIADTTDAVRDPQTLEILDITPCSFGGVSVITPGTNTSNQVAVLYQGVNCTEVPVAIHADQLTPTWRVYSTGSNVFQTRAGCLIGAEHVNNSYECDIPIGAGICASYQTQTNSPRRARSVASQSIIAYTMSLGAENSVAYSNNSIAIPTNFTISVTTEILPVSMTKTSVDCTMYICGDSTECSNLLLQYGSFCTQLNRALTGIAVEQDKNTQEVFAQVKQIYKTPPIKDFGGFNFSQILPDPSKPSKRSFIEDLLFNKVTLADAGFIKQYGYCLGDIAARDLICAQKFNGLTVLPPLLTDEMIAQYTSALLAGTITSGWTFGAGAALQIPFAMQMAYRFNGCGVTQNVLYENQKLIANQFNSAIGKIQDSLSSTASALGKLQDVVNQNAQALNTLVKQLSSNFGAISSVLNDILSRLDKVEAEVQIDRLITGRLQSLQTYVTQQLIRAAEIRASANLAATKMSECVLGQSKRVDFCGKGCHLMSFPQSAPHGVVFLHVTYVPAQEKNFTTAPAICHDGKAHFPREGVFVSNGTHWFVTQRNFYEPQIITTDNTFVSGNCDVVIGIVNNTVYDPLQPELDSFKEELDKYFKNHTSPDVDLGDISGINASVVNIQKEIDRLNEVAKNLNESLIDLQELGKYEQYIKWPWYIWLGFIAGLIAIVMVTIMLCCMTSCCSCLKGCCSCGSCCKFDEDDSEPVLKGVKLHYT

SEQ ID NO: 902 - protein, 1273 aa, Artificial Sequence
  SARS-CoV-2/Belgium/VAG-03013/2020__EPI_ISL_415155 spike protein (1-1273)(I909C_Y1047C)
MFVFLVLLPLVSSQCVNLTTRTQLPPAYTNSFTRGVYYPDKVFRSSVLHSTQDLFLPFFSNVTWFHAIHVSGTNGTKRFDNPVLPFNDGVYFASTEKSNIIRGWIFGTTLDSKTQSLLIVNNATNVVIKVCEFQFCNDPFLGVYYHKNNKSWMESEFRVYSSANNCTFEYVSQPFLMDLEGKQGNFKNLREFVFKNIDGYFKIYSKHTPINLVRDLPQGFSALEPLVDLPIGINITRFQTLLALHRSYLTPGDSSSGWTAGAAAYYVGYLQPRTFLLKYNENGTITDAVDCALDPLSETKCTLKSFTVEKGIYQTSNFRVQPTESIVRFPNITNLCPFGEVFNATRFASVYAWNRKRISNCVADYSVLYNSASFSTFKCYGVSPTKLNDLCFTNVYADSFVIRGDEVRQIAPGQTGKIADYNYKLPDDFTGCVIAWNSNNLDSKVGGNYNYLYRLFRKSNLKPFERDISTEIYQAGSTPCNGVEGFNCYFPLQSYGFQPTNGVGYQPYRVVVLSFELLHAPATVCGPKKSTNLVKNKCVNFNFNGLTGTGVLTESNKKFLPFQQFGRDIADTTDAVRDPQTLEILDITPCSFGGVSVITPGTNTSNQVAVLYQGVNCTEVPVAIHADQLTPTWRVYSTGSNVFQTRAGCLIGAEHVNNSYECDIPIGAGICASYQTQTNSPRRARSVASQSIIAYTMSLGAENSVAYSNNSIAIPTNFTISVTTEILPVSMTKTSVDCTMYICGDSTECSNLLLQYGSFCTQLNRALTGIAVEQDKNTQEVFAQVKQIYKTPPIKDFGGFNFSQILPDPSKPSKRSFIEDLLFNKVTLADAGFIKQYGDCLGDIAARDLICAQKFNGLTVLPPLLTDEMIAQYTSALLAGTITSGWTFGAGAALQIPFAMQMAYRFNGCGVTQNVLYENQKLIANQFNSAIGKIQDSLSSTATALGKLQDVVNQNAQALNTLVKQLSSNFGAISSVLNDILSRLDKVEAEVQIDRLITGRLQSLQTYVTQQLIRAAEIRASANLAATKMSECVLGQSKRVDFCGKGCHLMSFPQSAPHGVVFLHVTYVPAQEKNFTTAPAICHDGKAHFPREGVFVSNGTHWFVTQRNFYEPQIITTDNTFVSGNCDVVIGIVNNTVYDPLQPELDSFKEELDKYFKNHTSPDVDLGDISGINASVVNIQKEIDRLNEVAKNLNESLIDLQELGKYEQYIKWPWYIWLGFIAGLIAIVMVTIMLCCMTSCCSCLKGCCSCGSCCKFDEDDSEPVLKGVKLHYT

SEQ ID NO: 903 - protein, 1273 aa, Artificial Sequence
  SARS-CoV-2/Belgium/BC-03016/2020__EPI_ISL_415157 spike protein (1-1273)(I909C_Y1047C)
MFVFLVLLPLVSSQCVNLTTRTQLPPAYTNSFTRGVYYPDKVFRSSVLHSTQDLFLPFFSNVTWFHAIHVSGTNGTKRFDNPVLPFNDGVYFASTEKSNIIRGWIFGTTLDSKTQSLLIVNNATNVVIKVCEFQFCNDPFLGVYYHKNNKSWMESEFRVYSSANNCTFEYVSQPFLMDLEGKQGNFKNLREFVFKNIDGYFKIYSKHTPINLVRDLPQGFSALEPLVDLPIGINITRFQTLLALHRSYLTPGDSSSGWTAGAAAYYVGYLQPRTFLLKYNENGTITDAVDCALDPLSETKCTLKSFTVEKGIYQTSNFRVQPTESIVRFPNITNLCPFGEVFNATRFASVYAWNRKRISNCVADYSVLYNSASFSTFKCYGVSPTKLNDLCFTNVYADSFVIRGDEVRQIAPGQTGKIADYNYKLPDDFTGCVIAWNSNNLDSKVGGNYNYLYRLFRKSNLKPFERDISTEIYQAGSTPCNGVEGFNCYFPLQSYGFQPTNGVGYQPYRVVVLSFELLHAPATVCGPKKSTNLVKNKCVNFNFNGLTGTGVLTESNKKFLPFQQFGRDIADTTDAVRDPQTLEILDITPCSFGGVSVITPGTNTSNQVAVLYQGVNCTEVPVAIHADQLTPTWRVYSTGSNVFQTRAGCLIGAEHVNNSYECDIPIGAGICASYQTQTNSPRRARSVASQSIIAYTMSLGAENSVAYSNNSIAIPTNFTISVTTEILPVSMTKTSVDCTMYICGDSTECSNLLLQYGSFCTQLNRALTGIAVEQDKNTQEVFAQVKQIYKTPPIKDFGGFNFSQILPDPSKPSKRSFIEDLLFNKVTLADAGFIKQYGDCLGDIAARDLICAQKFNGLTVLPPLLTDEMIAQYTSALLAGTITSGWTFGAGAALQIPFAMQMAYRFNGCGVTQNVLYENQKLIANQFNSAIGKIQDSLSSTAPALGKLQDVVNQNAQALNTLVKQLSSNFGAISSVLNDILSRLDKVEAEVQIDRLITGRLQSLQTYVTQQLIRAAEIRASANLAATKMSECVLGQSKRVDFCGKGCHLMSFPQSAPHGVVFLHVTYVPAQEKNFTTAPAICHDGKAHFPREGVFVSNGTHWFVTQRNFYEPQIITTDNTFVSGNCDVVIGIVNNTVYDPLQPELDSFKEELDKYFKNHTSPDVDLGDISGINASVVNIQKEIDRLNEVAKNLNESLIDLQELGKYEQYIKWPWYIWLGFIAGLIAIVMVTIMLCCMTSCCSCLKGCCSCGSCCKFDEDDSEPVLKGVKLHYT

SEQ ID NO: 904 - protein, 1273 aa, Artificial Sequence
  SARS-CoV-2/Germany/BavPat3/2020__EPI_ISL_414521 spike protein (1-1273)(I909C_Y1047C)
MFVFLVLLPLVSSQCVNLTTRTQLPPAYTNSFTRGVYYPDKVFRSSVLHSTQDLFLPFFSNVTWFHAIHVSGTNGTKRFDNPVLPFNDGVYFASTEKSNIIRGWIFGTTLDSKTQSLLIVNNATNVVIKVCEFQFCNDPFLGVYYHKNNKSWMESEFRVYSSANNCTFEYVSQPFLMDLEGKQGNFKNLREFVFKNIDGYFKIYSKHTPINLVRDLPQGFSALEPLVDLPIGINITRFQTLLALHRSYLTPGDSSSGWTAGAAAYYVGYLQPRTFLLKYNENGTITDAVDCALDPLSETKCTLKSFTVEKGIYQTSNFRVQPTESIVRFPNITNLCPFGEVFNATRFASVYAWNRKRISNCVADYSVLYNSASFSTFKCYGVSPTKLNDLCFTNVYADSFVIRGDEVRQIAPGQTGKIADYNYKLPDDFTGCVIAWNSNNLDSKVGGNYNYLYRLFRKSNLKPFERDISTEIYQAGSTPCNGVEGFNCYFPLQSYGFQPTNGVGYQPYRVVVLSFELLHAPATVCGPKKSTNLVKNKCVNFNFNGLTGTGVLTESNKKFLPFQQFGRDIADTTDAVRDPQTLEILDITPCSFGGVSVITPGTNTSNQVAVLYQDVNCTEVPVAIHADQLTPTWRVYSTGSNVFQTRAGCLIGAEHVNNSYECDIPIGAGICASYQTQTNSPRRARSVASQSIIAYTMSLGAENSVAYSNNSIAIPTNFTISVTTEILPVSMTKTSVDCTMYICGDSTECSNLLLQYGSFCTQLNRALTGIAVEQDKNTQQVFAQVKQIYKTPPIKDFGGFNFSQILPDPSKPSKRSFIEDLLFNKVTLADAGFIKQYGDCLGDIAARDLICAQKFNGLTVLPPLLTDEMIAQYTSALLAGTITSGWTFGAGAALQIPFAMQMAYRFNGCGVTQNVLYENQKLIANQFNSAIGKIQDSLSSTASALGKLQDVVNQNAQALNTLVKQLSSNFGAISSVLNDILSRLDKVEAEVQIDRLITGRLQSLQTYVTQQLIRAAEIRASANLAATKMSECVLGQSKRVDFCGKGCHLMSFPQSAPHGVVFLHVTYVPAQEKNFTTAPAICHDGKAHFPREGVFVSNGTHWFVTQRNFYEPQIITTDNTFVSGNCDVVIGIVNNTVYDPLQPELDSFKEELDKYFKNHTSPDVDLGDISGINASVVNIQKEIDRLNEVAKNLNESLIDLQELGKYEQYIKWPWYIWLGFIAGLIAIVMVTIMLCCMTSCCSCLKGCCSCGSCCKFDEDDSEPVLKGVKLHYT

SEQ ID NO: 905 - protein, 1273 aa, Artificial Sequence
  SARS-CoV-2/France/HF1805/2020__EPI_ISL_414628 spike protein (1-1273)(I909C_Y1047C)
MFVFLVLLPLVSSQCVNLTTRTQLPPAYTNSFTRGVYYPDKVFRSSVLHSTQDLFLPFFSNVTWFHAIHVSGTNGTKRFDNPVLPFNDGVYFASTEKSNIIRGWIFGTTLDSKTQSLLIVNNATNVVIKVCEFQFCNDPFLGVYYHKNNKSWMESEFRVYSSANNCTFEYVSQPFLMDLEGKQGNFKNLREFVFKNIDGYFKIYSKHTPINLVRDLPQGFSALEPLVDLPIGINITRFQTLLALHRSYLTPGDSSSGWTAGAAAYYVGYLQPRTFLLKYNENGTITDAVDCALDPLSETKCTLKSFTVEKGIYQTSNFRVQPTESIVRFPNITNLCPFGEVFNATRFASVYAWNRKRISNCVADYSVLYNSASFSTFKCYGVSPTKLNDLCFTNVYADSFVIRGDEVRQIAPGQTGKIADYNYKLPDDFTGCVIAWNSNNLDSKVGGNYNYLYRLFRKSNLKPFERDISTEIYQAGSTPCNGVEGFNCYFPLQSYGFQPTNGVGYQPYRVVVLSFELLHAPATVCGPKKSTNLVKNKCVNFNFNGLTGTGVLTESNKKFLPFQQFGRDIADTTDAVRDPQTLEILDITPCSFGGVSVITPGTNTSNQVAVLYQGVNCTEVPVAIHADQLTPTWRVYSTGSNVFQTRAGCLIGAEHVNNSYECDIPIGAGICASYQTQTNSPRRARSVASQSIIAYTMSLGAENSVAYSNNSIAIPTNFTISVTTEILPVSMTKTSVDCTMYICGDSTECSNLLLQYGSFCTQLNRALTGIAVEQDKNTQEVFAQVKQIYKTPPIKDFGGFNFSQILPDPSKPSKRSFIEDLLFNKVTLADAGFIKQYGDCLGDIAARDLICAQKFNGLTVLPPLLTDEMIAQYTSALLAGTITSGWTFGAGAALQIPFAMQMAYRFNGCGVTQNVLYENQKLIANQFNSAIGKIQDSLSSTASALGKLQDVVNQNAQALNTLVKQLSSNFGAISSVLNDILSRLDKVEAEVQIDRLITGRLQSLQTYVTQQLIRAAEIRASANLAATKMSECVLGQSKRVDFCGKGCHLMSFPQSAPHGVVFLHVTYVPAQEKNFTTAPAICHDGKAHFPREGVFVSNGTHWFVTQRNFYEPQIITTDNTFVSGNCDVVIGVVNNTVYDPLQPELDSFKEELDKYFKNHTSPDVDLGDISGINASVVNIQKEIDRLNEVAKNLNESLIDLQELGKYEQYIKWPWYIWLGFIAGLIAIVMVTIMLCCMTSCCSCLKGCCSCGSCCKFDEDDSEPVLKGVKLHYT

SEQ ID NO: 906 - protein, 1273 aa, Artificial Sequence
  SARS-CoV-2/Netherlands/ZuidHolland_9/2020__EPI_ISL_414445 spike protein (1-1273)(I909C_Y1047C)
MFVFLVLLPLVSSQCVNLTTRTQLPPAYTNSFTRGVYYPDKVFRSSVLHSTQDLFLPFFSNVTWFHAIHVSGTNGTKRFDNPVLPFNDGVYFASTEKSNIIRGWIFGTTLDSKTQSLLIVNNATNVVIKVCEFQFCNDPFLGVYYHKNNKSWMESEFRVYSSANNCTFEYVSQPFLMDLEGKQGNFKNLREFVFKNIDGYFKIYSKHTPINLVRDLPQGFSALEPLVDLPIGINITRFQTLLALHRSYLTPGDSSSGWTAGAAAYYVGYLQPRTFLLKYNENGTITDAVDCALDPLSETKCTLKSFTVEKGIYQTSNFRVQPTESIVRFPNITNLCPFGEVFNATRFASVYAWNRKRISNCVADYSVLYNSASFSTFKCYGVSPTKLNDLCFTNVYADSFVIRGDEVRQIAPGQTGKIADYNYKLPDDFTGCVIAWNSNNLDSKVGGNYNYLYRLFRKSNLKPFERDISTEIYQAGSTPCNGVEGFNCYFPLQSYGFQPTNGVGYQPYRVVVLSFELLHAPATVCGPKKSTNLVKNKCVNFNFNGLTGTGVLTESNKKFLPFQQFGRDIADTTDAVRDPQTLEILDITPCSFGGVSVITPGTNTSNQVAVLYQGVNCTEVPVAIHADQLTPTWRVYSTGSNVFQTRAGCLIGAEHVNNSYECDIPIGAGICASYQTQTNSPRRARSVASQSIIAYTMSLGAENSVAYSNNSIAIPTNFTISVTTEILPVSMTKTSVDCTMYICGDSTECSNLLLQYGSFCTQLNRALTGIAVEQDKNTQEVFAQVKQIYKTPPIKDFGGFNFSQILPDPSKPSKRSFIEDLLFNKVTLADAGFIKQYGDCLGDIAARDLICVQKFNGLTVLPPLLTDEMIAQYTSALLAGTITSGWTFGAGAALQIPFAMQMAYRFNGCGVTQNVLYENQKLIANQFNSAIGKIQDSLSSTASALGKLQDVVNQNAQALNTLVKQLSSNFGAISSVLNDILSRLDKVEAEVQIDRLITGRLQSLQTYVTQQLIRAAEIRASANLAATKMSECVLGQSKRVDFCGKGCHLMSFPQSAPHGVVFLHVTYVPAQEKNFTTAPAICHDGKAHFPREGVFVSNGTHWFVTQRNFYEPQIITTDNTFVSGNCDVVIGIVNNTVYDPLQPELDSFKEELDKYFKNHTSPDVDLGDISGINASVVNIQKEIDRLNEVAKNLNESLIDLQELGKYEQYIKWPWYIWLGFIAGLIAIVMVTIMLCCMTSCCSCLKGCCSCGSCCKFDEDDSEPVLKGVKLHYT

SEQ ID NO: 907 - protein, 1273 aa, Artificial Sequence
  SARS-CoV-2/Finland/FIN03032020A/2020__EPI_ISL_413602 spike protein (1-1273)(I909C_Y1047C)
MFVFLVLLPLVSSQCVNLTTRTQLPPAYTNSFTRGVYYPDKVFRSSVLHSTQDLFLPFFSNVTWFHAIHVSGTNGTKRFDNPVLPFNDGVYFASTEKSNIIRGWIFGTTLDSKTQSLLIVNNATNVVIKVCEFQFCNDPFLGVYYHKNNKSWMESEFRVYSSANNCTFEYVSQPFLMDLEGKQGNFKNLREFVFKNIDGYFKIYSKHTPINLVRDLPQGFSALEPLVDLPIGINITRFQTLLALHRSYLTPGDSSSGWTAGAAAYYVGYLQPRTFLLKYNENGTITDAVDCALDPLSETKCTLKSFTVEKGIYQTSNFRVQPTESIVRFPNITNLCPFGEVFNATRFASVYAWNRKRISNCVADYSVLYNSASFSTFKCYGVSPTKLNDLCFTNVYADSFVIRGDEVRQIAPGQTGKIADYNYKLPDDFTGCVISWNSNNLDSKVGGNYNYLYRLFRKSNLKPFERDISTEIYQAGSTPCNGVEGFNCYFPLQSYGFQPTNGVGYQPYRVVVLSFELLHAPATVCGPKKSTNLVKNKCVNFNFNGLTGTGVLTESNKKFLPFQQFGRDIADTTDAVRDPQTLEILDITPCSFGGVSVITPGTNTSNQVAVLYQGVNCTEVPVAIHADQLTPTWRVYSTGSNVFQTRAGCLIGAEHVNNSYECDIPIGAGICASYQTQTNSPRRARSVASQSIIAYTMSLGAENSVAYSNNSIAIPTNFTISVTTEILPVSMTKTSVDCTMYICGDSTECSNLLLQYGSFCTQLNRALTGIAVEQDKNTQEVFAQVKQIYKTPPIKDFGGFNFSQILPDPSKPSKRSFIEDLLFNKVTLADAGFIKQYGDCLGDIAARDLICAQKFNGLTVLPPLLTDEMIAQYTSALLAGTITSGWTFGAGAALQIPFAMQMAYRFNGCGVTQNVLYENQKLIANQFNSAIGKIQDSLSSTASALGKLQDVVNQNAQALNTLVKQLSSNFGAISSVLNDILSRLDKVEAEVQIDRLITGRLQSLQTYVTQQLIRAAEIRASANLAATKMSECVLGQSKRVDFCGKGCHLMSFPQSAPHGVVFLHVTYVPAQEKNFTTAPAICHDGKAHFPREGVFVSNGTHWFVTQRNFYEPQIITTDNTFVSGNCDVVIGIVNNTVYDPLQPELDSFKEELDKYFKNHTSPDVDLGDISGINASVVNIQKEIDRLNEVAKNLNESLIDLQELGKYEQYIKWPWYIWLGFIAGLIAIVMVTIMLCCMTSCCSCLKGCCSCGSCCKFDEDDSEPVLKGVKLHYT

SEQ ID NO: 908 - protein, 1273 aa, Artificial Sequence
  SARS-CoV-2/France/GE1977/2020__EPI_ISL_414632 spike protein (1-1273)(I909C_Y1047C)
MFVFLVLLPLVSSQCVNLTTRTQLPPAYTNSFTRGVYYPDKVFRSSVLHSTQDLFLPFFSNVTWFHAIHVSGTNGTKRFDNPVLPFNDGVYFASTEKSNIIRGWIFGTTLDSKTQSLLIVNNATNVVIKVCEFQFCNDPFLGVYYHKNNKSWMESEFRVYSSANNCTFEYVSQPFLMDLEGKQGNFKNLREFVFKNIDGYFKIYSKHTPINLVRDLPQGFSALEPLVDLPIGINITRFQTLLALHRSYLTPGDSSSGWTAGAAAYYVGYLQPRTFLLKYNENGTITDAVDCALDPLSETKCTLKSFTVEKGIYQTSNFRVQPTESIVRFPNITNLCPFGEVFNATRFASVYAWNRKRISNCVADYSVLYNSASFSTFKCYGVSPTKLNDLCFTNVYADSFVIRGDEVRQIAPGQTGKIADYNYKLPDDFTGCVIAWNSNNLDSKVGGNYNYLYRLFRKSNLKPFERDISTEIYQAGSTPCNGVEGFNCYFPLQSYGFQPTNGVGYQPYRVVVLSFELLHAPATVCGPKKSTNLVKNKCVNFNFNGLTGTGVLTESNKKFLPFQQFGRDIADTTDAVRDPQTLEILDITPCSFGGVSVITPGTNTSNQVAVLYQGVNCTEVPVAIHADQLTPTWRVYSTGSNVFQTRAGCLIGAEHVNNSYECDIPIGAGICASYQTQTNSPRRARSVASQSIIAYTMSLGAENSVAYSNNSIAIPTNFTISVTTEILPVSMTKTSVDCTMYICGDSTECSNLLLQYGSFCTQLNRALTGIAVEQDKNTQEVFAQVKQIYKTPPIKDFGGFNFSQILPDPSKPSKRSFIEDLLFNKVTLADAGFIKQYGDCLGDIAARDLICAQKFNGLTVLPPLLTDEMIAQYTSALLAGTITSGWTFGAGAALQIPFAMQMAYRFNGCGVTQNVLYENQKLIANQFNSAIGKIQDSLFSTASALGKLQDVVNQNAQALNTLVKQLSSNFGAISSVLNDILSRLDKVEAEVQIDRLITGRLQSLQTYVTQQLIRAAEIRASANLAATKMSECVLGQSKRVDFCGKGCHLMSFPQSAPHGVVFLHVTYVPAQEKNFTTAPAICHDGKAHFPREGVFVSNGTHWFVTQRNFYEPQIITTDNTFVSGNCDVVIGIVNNTVYDPLQPELDSFKEELDKYFKNHTSPDVDLGDISGINASVVNIQKEIDRLNEVAKNLNESLIDLQELGKYEQYIKWPWYIWLGFIAGLIAIVMVTIMLCCMTSCCSCLKGCCSCGSCCKFDEDDSEPVLKGVKLHYT

SEQ ID NO: 909 - protein, 1273 aa, Artificial Sequence
  SARS-CoV-2/Finland/FIN-313/2020__EPI_ISL_414641 spike protein (1-1273)(I909C_Y1047C)
MFVFLVLLPLVSSQCVNLTTRTQLPPAYTNSFTRGVYYPDKVFRSSVLHSTQDLFLPFFSNVTWFHAIHVSGTNGTKRFDNPVLPFNDGVYFASTEKSNIIRGWIFGTTLDSKTQSLLIVNNATNVVIKVCEFQFCNDPFLGVYYHKNNKSWMESEFRVYSSANNCTFEYVSQPFLMDLEGKQGNFKNLREFVFKNIDGYFKIYSKHTPINLVRDLPQGFSALEPLVDLPIGINITRFKTLLALHRSYLTPGDSSSGWTAGAAAYYVGYLQPRTFLLKYNENGTITDAVDCALDPLSETKCTLKSFTVEKGIYQTSNFRVQPTESIVRFPNITNLCPFGEVFNATRFASVYAWNRKRISNCVADYSVLYNSASFSTFKCYGVSPTKLNDLCFTNVYADSFVIRGDEVRQIAPGQTGKIADYNYKLPDDFTGCVIAWNSNNLDSKVGGNYNYLYRLFRKSNLKPFERDISTEIYQAGSTPCNGVEGFNCYFPLQSYGFQPTNGVGYQPYRVVVLSFELLHAPATVCGPKKSTNLVKNKCVNFNFNGLTGTGVLTESNKKFLPFQQFGRDIADTTDAVRDPQTLEILDITPCSFGGVSVITPGTNTSNQVAVLYQGVNCTEVPVAIHADQLTPTWRVYSTGSNVFQTRAGCLIGAEHVNNSYECDIPIGAGICASYQTQTNSPRRARSVASQSIIAYTMSLGAENSVAYSNNSIAIPTNFTISVTTEILPVSMTKTSVDCTMYICGDSTECSNLLLQYGSFCTQLNRALTGIAVEQDKNTQEVFAQVKQIYKTPPIKDFGGFNFSQILPDPSKPSKRSFIEDLLFNKVTLADAGFIKQYGDCLGDIAARDLICAQKFNGLTVLPPLLTDEMIAQYTSALLAGTITSGWTFGAGAALQIPFAMQMAYRFNGCGVTQNVLYENQKLIANQFNSAIGKIQDSLSSTASALGKLQDVVNQNAQALNTLVKQLSSNFGAISSVLNDILSRLDKVEAEVQIDRLITGRLQSLQTYVTQQLIRAAEIRASANLAATKMSECVLGQSKRVDFCGKGCHLMSFPQSAPHGVVFLHVTYVPAQEKNFTTAPAICHDGKAHFPREGVFVSNGTHWFVTQRNFYEPQIITTDNTFVSGNCDVVIGIVNNTVYDPLQPELDSFKEELDKYFKNHTSPDVDLGDISGINASVVNIQKEIDRLNEVAKNLNESLIDLQELGKYEQYIKWPWYIWLGFIAGLIAIVMVTIMLCCMTSCCSCLKGCCSCGSCCKFDEDDSEPVLKGVKLHYT

SEQ ID NO: 910 - protein, 1273 aa, Artificial Sequence
  SARS-CoV-2/Netherlands/ZuidHolland_2/2020__EPI_ISL_414556 spike protein (1-1273)(I909C_Y1047C)
MFVFLVLLPLVSSQCVNLTTRTQLPPAYTNSFTRGVYYPDKVFRSSVLHSTQDLFLPFFSNVTWFHAIHVSGTNGTKRFDNPVLPFNDGVYFASTEKSNIIRGWIFGTTLDSKTQSLLIVNNATNVVIKVCEFQFCNDPFLGVYYHKNNKSWMESEFRVYSSANNCTFEYVSQPFLMDLEGKQGNFKNLREFVFKNIDGYFKIYSKHTPINLVRDLPQGFSALEPLVDLPIGINITRFQTLLALHRSYLTPGDSSSGWTAGAAAYYVGYLQPRTFLLKYNENGTITDAVDCALDPLSETKCTLKSFTVEKGIYQTSNFRVQPTESIVRFPNITNLCPFGEVFNATRFASVYAWNRKRISNCVADYSVLYNSASFSTFKCYGVSPTKLNDLCFTNVYADSFVIRGDEVRQIAPGQTGKIADYNYKLPDDFTGCVIAWNSNNLDSKVGGNYNYLYRLFRKSNLKPFERDISTEIYQAGSTPCNGVEGFNCYFPLQSYGFQPTNGVGYQPYRVVVLSFELLHAPATVCGPKKSTNLVKNKCVNFNFNGLTGTGVLTESNKKFLPFQQFGRDIADTTDAVRDPQTLEILDITPCSFGGVSVITPGTNTSNQVAVLYQGVNCTEVPVAIHADQLTPTWRVYSTGSNVFQTRAGCLIGAEHVNNSYECDIPIGAGICASYQTQTNSPRRARSVASQSIIAYTMSLGAENSVAYSNNSIAIPTNFTISVTTEILPVSMTKTSVDCTMYICGDSTECSNLLLQYGSFCTQLNRALTGIALEQDKNTQEVFAQVKQIYKTPPIKDFGGFNFSQILPDPSKPSKRSFIEDLLFNKVTLADAGFIKQYGDCLGDIAARDLICAQKFNGLTVLPPLLTDEMIAQYTSALLAGTITSGWTFGAGAALQIPFAMQMAYRFNGCGVTQNVLYENQKLIANQFNSAIGKIQDSLSSTASALGKLQDVVNQNAQALNTLVKQLSSNFGAISSVLNDILSRLDKVEAEVQIDRLITGRLQSLQTYVTQQLIRAAEIRASANLAATKMSECVLGQSKRVDFCGKGCHLMSFPQSAPHGVVFLHVTYVPAQEKNFTTAPAICHDGKAHFPREGVFVSNGTHWFVTQRNFYEPQIITTDNTFVSGNCDVVIGIVNNTVYDPLQPELDSFKEELDKYFKNHTSPDVDLGDISGINASVVNIQKEIDRLNEVAKNLNESLIDLQELGKYEQYIKWPWYIWLGFIAGLIAIVMVTIMLCCMTSCCSCLKGCCSCGSCCKFDEDDSEPVLKGVKLHYT

SEQ ID NO: 911 - protein, 1273 aa, Artificial Sequence
  SARS-CoV-2/USA/WA-UW31/2020__EPI_ISL_414618 spike protein (1-1273)(I909C_Y1047C)
MFVFLVLLPLVSSQCVNLTTRTQLPPAYTNSFTRGVYYPDKVFRSSVLHSTQDLFLPFFSNVTWFHAIHVSGTNGTKRFDNPVLPFNDGVYFASTEKSNIIRGWIFGTTLDSKTQSLLIVNNATNVVIKVCEFQFCNDPFLGVYYHKNNKSWMESEFRVYSSANNCTFEYVSQPFLMDLEGKQGNFKNLREFVFKNIDGYFKIYSKHTPINLVRDLPQGFSALEPLVDLPIGINITRFQTLLALHRSYLTPGDSSSGWTAGAAAYYVGYLQPRTFLLKYNENGTITDAVDCALDPLSETKCTLKSFTVEKGIYQTSNFRVQPTESIVRFPNITNLCPFGEVFNATRFASVYAWNRKRISNCVADYSVLYNSASFSTFKCYGVSPTKLNDLCFTNVYADSFVIRGDEVRQIAPGQTGKIADYNYKLPDDFTGCVIAWNSNNLDSKVGGNYNYLYRLFRKSNLKPFERDISTEIYQAGSTPCNGAEGFNCYFPLQSYGFQPTNGVGYQPYRVVVLSFELLHAPATVCGPKKSTNLVKNKCVNFNFNGLTGTGVLTESNKKFLPFQQFGRDIADTTDAVRDPQTLEILDITPCSFGGVSVITPGTNTSNQVAVLYQDVNCTEVPVAIHADQLTPTWRVYSTGSNVFQTRAGCLIGAEHVNNSYECDIPIGAGICASYQTQTNSPRRARSVASQSIIAYTMSLGAENSVAYSNNSIAIPTNFTISVTTEILPVSMTKTSVDCTMYICGDSTECSNLLLQYGSFCTQLNRALTGIAVEQDKNTQEVFAQVKQIYKTPPIKDFGGFNFSQILPDPSKPSKRSFIEDLLFNKVTLADAGFIKQYGDCLGDIAARDLICAQKFNGLTVLPPLLTDEMIAQYTSALLAGTITSGWTFGAGAALQIPFAMQMAYRFNGCGVTQNVLYENQKLIANQFNSAIGKIQDSLSSTASALGKLQDVVNQNAQALNTLVKQLSSNFGAISSVLNDILSRLDKVEAEVQIDRLITGRLQSLQTYVTQQLIRAAEIRASANLAATKMSECVLGQSKRVDFCGKGCHLMSFPQSAPHGVVFLHVTYVPAQEKNFTTAPAICHDGKAHFPREGVFVSNGTHWFVTQRNFYEPQIITTDNTFVSGNCDVVIGIVNNTVYDPLQPELDSFKEELDKYFKNHTSPDVDLGDISGINASVVNIQKEIDRLNEVAKNLNESLIDLQELGKYEQYIKWPWYIWLGFIAGLIAIVMVTIMLCCMTSCCSCLKGCCSCGSCCKFDEDDSEPVLKGVKLHYT

SEQ ID NO: 912 - protein, 1273 aa, Artificial Sequence
  SARS-CoV-2/South Korea/SNU01/2020__EPI_ISL_411929 spike protein (1-1273)(I909C_Y1047C)
MFVFLVLLPLVSSQCVNLTTRTQLPPAYTNSFTRGVYYPDKVFRSSVLHSTQDLFLPFFSNVTWFHAIHVSGTNGTKRFDNPVLPFNDGVYFASTEKSNIIRGWIFGTTLDSKTQSLLIVNNATNVVIKVCEFQFCNDPFLGVYYHKNNKSWMESEFRVYSSANNCTFEYVSQPFLMDLEGKQGNFKNLREFVFKNIDGYFKIYSKHTPINLVRDLPQGFWALEPLVDLPIGINITRFQTLLALHRSYLTPGDSSSGWTAGAAAYYVGYLQPRTFLLKYNENGTITDAVDCALDPLSETKCTLKSFTVEKGIYQTSNFRVQPTESIVRFPNITNLCPFGEVFNATRFASVYAWNRKRISNCVADYSVLYNSASFSTFKCYGVSPTKLNDLCFTNVYADSFVIRGDEVRQIAPGQTGKIADYNYKLPDDFTGCVIAWNSNNLDSKVGGNYNYLYRLFRKSNLKPFERDISTEIYQAGSTPCNGVEGFNCYFPLQSYGFQPTNGVGYQPYRVVVLSFELLHAPATVCGPKKSTNLVKNKCVNFNFNGLTGTGVLTESNKKFLPFQQFGRDIADTTDAVRDPQTLEILDITPCSFGGVSVITPGTNTSNQVAVLYQDVNCTEVPVAIHADQLTPTWRVYSTGSNVFQTRAGCLIGAEHVNNSYECDIPIGAGICASYQTQTNSPRRARSVASQSIIAYTMSLGAENSVAYSNNSIAIPTNFTISVTTEILPVSMTKTSVDCTMYICGDSTECSNLLLQYGSFCTQLNRALTGIAVEQDKNTQEVFAQVKQIYKTPPIKDFGGFNFSQILPDPSKPSKRSFIEDLLFNKVTLADAGFIKQYGDCLGDIAARDLICAQKFNGLTVLPPLLTDEMIAQYTSALLAGTITSGWTFGAGAALQIPFAMQMAYRFNGCGVTQNVLYENQKLIANQFNSAIGKIQDSLSSTASALGKLQDVVNQNAQALNTLVKQLSSNFGAISSVLNDILSRLDKVEAEVQIDRLITGRLQSLQTYVTQQLIRAAEIRASANLAATKMSECVLGQSKRVDFCGKGCHLMSFPQSAPHGVVFLHVTYVPAQEKNFTTAPAICHDGKAHFPREGVFVSNGTHWFVTQRNFYEPQIITTDNTFVSGNCDVVIGIVNNTVYDPLQPELDSFKEELDKYFKNHTSPDVDLGDISGINASVVNIQKEIDRLNEVAKNLNESLIDLQELGKYEQYIKWPWYIWLGFIAGLIAIVMVTIMLCCMTSCCSCLKGCCSCGSCCKFDEDDSEPVLKGVKLHYT

SEQ ID NO: 913 - protein, 1273 aa, Artificial Sequence
  SARS-CoV-2/China/WF0004/2020__EPI_ISL_413694 spike protein (1-1273)(I909C_Y1047C)
MFVFLVLLPLVSSQCVNLTTRTQLPPAYTNSFTRGVYYPDKVFRSSVLHSTQDLFLPFFSNVTWFHAIHVSGTNGTKRFDNPVLPFNDGVYFASTEKSNIIRGWIFGTTLDSKTQSLLIVNNATNVVIKVCEFQFCNDPFLGVYYHKNNKSWTESEFRVYSSANNCTFEYVSQPFLMDLEGKQGNFKNLREFVFKNIDGYFKIYSKHTPINLVRDLPQGFSALEPLVDLPIGINITRFQTLLALHRSYLTPGDSSSGWTAGAAAYYVGYLQPRTFLLKYNENGTITDAVDCALDPLSETKCTLKSFTVEKGIYQTSNFRVQPTESIVRFPNITNLCPFGEVFNATRFASVYAWNRKRISNCVADYSVLYNSASFSTFKCYGVSPTKLNDLCFTNVYADSFVIRGDEVRQIAPGQTGKIADYNYKLPDDFTGCVIAWNSNNLDSKVGGNYNYLYRLFRKSNLKPFERDISTEIYQAGSTPCNGVEGFNCYFPLQSYGFQPTNGVGYQPYRVVVLSFELLHAPATVCGPKKSTNLVKNKCVNFNFNGLTGTGVLTESNKKFLPFQQFGRDIADTTDAVRDPQTLEILDITPCSFGGVSVITPGTNTSNQVAVLYQDVNCTEVPVAIHADQLTPTWRVYSTGSNVFQTRAGCLIGAEHVNNSYECDIPIGAGICASYQTQTNSPRRARSVASQSIIAYTMSLGAENSVAYSNNSIAIPTNFTISVTTEILPVSMTKTSVDCTMYICGDSTECSNLLLQYGSFCTQLNRALTGIAVEQDKNTQEVFAQVKQIYKTPPIKDFGGFNFSQILPDPSKPSKRSFIEDLLFNKVTLADAGFIKQYGDCLGDIAARDLICAQKFNGLTVLPPLLTDEMIAQYTSALLAGTITSGWTFGAGAALQIPFAMQMAYRFNGCGVTQNVLYENQKLIANQFNSAIGKIQDSLSSTASALGKLQDVVNQNAQALNTLVKQLSSNFGAISSVLNDILSRLDKVEAEVQIDRLITGRLQSLQTYVTQQLIRAAEIRASANLAATKMSECVLGQSKRFDFCGKGCHLMSFPQSAPHGVVFLHVTYVPAQEKNFTTAPAICHDGKAHFPREGVFVSNGTHWFVTQRNFYEPQIITTDNTFVSGNCDVVIGIVNNTVYDPLQPELDSFKEELDKYFKNHTSPDVDLGDISGINASVVNIQKEIDRLNEVAKNLNESLIDLQELGKYEQYIKWPWYIWLGFIAGLIAIVMVTIMLCCMTSCCSCLKGCCSCGSCCKFDEDDSEPVLKGVKLHYT

SEQ ID NO: 914 - protein, 1273 aa, Artificial Sequence
  SARS-CoV-2/China/WF0028/2020__EPI_ISL_413791 spike protein (1-1273)(I909C_Y1047C)
MFVFLVLLPLVSSQCVNLTTRTQLPPAYTNSFTRGVYYPDKVFRSSVLHSTQDLFLPFFSNVTWFHAIHVSGTNGTKRFDNPVLPFNDGVYFASTEKSNIIRGWIFGTTLDSKTQSLLIVNNATNVVIKVCEFQFCNDPFLGVYYHKNNKSWMESEFRVYSSANNCTFEYVSQPFLMDLEGKQGNFKNLREFVFKNIDGYFKIYSKHTPINLVRDLPQGFSALEPLVDLPIGINITRFQTLLALHRSYLTPGDSSSGWTAGAAAYYVGYLQPRTFLLKYNENGTITDAVDCALDPLSETKCTLKSFTVEKGIYQTSNFRVQPTESIVRFPNITNLCPFGEVFNATRFASVYAWNRKRISNCVADYSVLYNSASFSTFKCYGVSPTKLNDLCFTNVYADSFVIRGDEVRQIAPGQTGKIADYNYKLPDDFTGCVIAWNSNNLDSKVGGNYNYLYRLFRKSNLKPFERDISTEIYQAGSTPCNGVEGFNCYFPLQSYGFQPTNGVGYQPYRVVVLSFELLHAPATVCGPKKSTNLVKNKCVNFNFNGLTGTGVLTESNKKFLPFQQFGRDIADTTDAVRDPQTLEILDITPCSFGGVSVITPGTNTSNQVAVLYQDVNCTEVPVAIHADQLTPTWRVYSTGSNVFQTRAGCLIGAEHVNNSYECDIPIGAGICASYQTQTNSPRRARSVASQSIIAYTMSLGAENSVAYSNNSIAIPTNFTISVTTEILPVSMTKTSVDCTMYICGDSTECSNLLLQYGSFCTQLNRALTGIAVEQDKNTQEVFAQVKQIYKTPPIKDFGGFNFSQILPDPSKPSKRSFIEDLLFNKVTLADAGFIKQYGDCLGDIAARDLICAQKFNGLTVLPPLLTDEMIAQYTSALLAGTITSGWTFGAGAALQIPFAMQMAYRFNGCGVTQNVLYENQKLIANQFNSAIGKIQDSLSSTASALGKLQDVVNQNAQALNTLVKQLSSNFGAISSVLNDILSRLDKVEAEVQIDRLITGRLQSLQTYVTQQLIRAAEIRASANLAATKMSECVLGQSKRVDFCGKGCHLMSFPQSAPHGVVFLHVTYVPAQEKNFTTAPAICHDGKAHFPREGVFVSNGTHWFVTQRNFYEPQIITTDNTFVSGNCDVVIGIVNNTVYDPLQPELESFKEELDKYFKNHTSPDVDLGDISGINASVVNIQKEIDRLNEVAKNLNESLIDLQELGKYEQYIKWPWYIWLGFIAGLIAIVMVTIMLCCMTSCCSCLKGCCSCGSCCKFDEDDSEPVLKGVKLHYT

SEQ ID NO: 915 - protein, 1273 aa, Artificial Sequence
  SARS-CoV-2/2019-nCoV/USA-CruiseA-18/2020__MT159716.1 spike protein (1-1273)(I909C_Y1047C)
MFVFLVLLPLVSSQCVNLTTRTQLPPAYTNSFTRGVYYPDKVFRSSVLHSTQDLFLPFFSNVTWFHAIHVSGTNGTKRFDNPVLPFNDGVYFASTEKSNIIRGWIFGTTLDSKTQSLLIVNNATNVVIKVCEFQFCNDPFLGVYYHKNNKSWMESELRVYSSANNCTFEYVSQPFLMDLEGKQGNFKNLREFVFKNIDGYFKIYSKHTPINLVRDLPQGFSALEPLVDLPIGINITRFQTLLALHRSYLTPGDSSSGWTAGAAAYYVGYLQPRTFLLKYNENGTITDAVDCALDPLSETKCTLKSFTVEKGIYQTSNFRVQPTESIVRFPNITNLCPFGEVFNATRFASVYAWNRKRISNCVADYSVLYNSASFSTFKCYGVSPTKLNDLCFTNVYADSFVIRGDEVRQIAPGQTGKIADYNYKLPDDFTGCVIAWNSNNLDSKVGGNYNYLYRLFRKSNLKPFERDISTEIYQAGSTPCNGVEGFNCYFPLQSYGFQPTNGVGYQPYRVVVLSFELLHAPATVCGPKKSTNLVKNKCVNFNFNGLTGTGVLTESNKKFLPFQQFGRDIADTTDAVRDPQTLEILDITPCSFGGVSVITPGTNTSNQVAVLYQDVNCTEVPVAIHADQLTPTWRVYSTGSNVFQTRAGCLIGAEHVNNSYECDIPIGAGICASYQTQTNSPRRARSVASQSIIAYTMSLGAENSVAYSNNSIAIPTNFTISVTTEILPVSMTKTSVDCTMYICGDSTECSNLLLQYGSFCTQLNRALTGIAVEQDKNTQEVFAQVKQIYKTPPIKDFGGFNFSQILPDPSKPSKRSFIEDLLFNKVTLADAGFIKQYGDCLGDIAARDLICAQKFNGLTVLPPLLTDEMIAQYTSALLAGTITSGWTFGAGAALQIPFAMQMAYRFNGCGVTQNVLYENQKLIANQFNSAIGKIQDSLSSTASALGKLQDVVNQNAQALNTLVKQLSSNFGAISSVLNDILSRLDKVEAEVQIDRLITGRLQSLQTYVTQQLIRAAEIRASANLAATKMSECVLGQSKRVDFCGKGCHLMSFPQSAPHGVVFLHVTYVPAQEKNFTTAPAICHDGKAHFPREGVFVSNGTHWFVTQRNFYEPQIITTDNTFVSGNCDVVIGIVNNTVYDPLQPELDSFKEELDKYFKNHTSPDVDLGDISGINASVVNIQKEIDRLNEVAKNLNESLIDLQELGKYEQYIKWPWYIWLGFIAGLIAIVMVTIMLCCMTSCCSCLKGCCSCGSCCKFDEDDSEPVLKGVKLHYT

SEQ ID NO: 916 - protein, 1273 aa, Artificial Sequence
  SARS-CoV-2/SARS-CoV-2/Yunnan-01/human/2020/CHN__MT049951.1 spike protein (1-1273)(I909C_Y1047C)
MFVFLVLLPLVSSQCVNLTTRTQLPPANTNSFTRGVYYPDKVFRSSVLHSTQDLFLPFFSNVTWFHAIHVSGTNGTKRFDNPVLPFNDGVYFASTEKSNIIRGWIFGTTLDSKTQSLLIVNNATNVVIKVCEFQFCNDPFLGVYYHKNNKSWMESEFRVYSSANNCTFEYVSQPFLMDLEGKQGNFKNLREFVFKNIDGYFKIYSKHTPINLVRDLPQGFSALEPLVDLPIGINITRFQTLLALHRSYLTPGDSSSGWTAGAAAYYVGYLQPRTFLLKYNENGTITDAVDCALDPLSETKCTLKSFTVEKGIYQTSNFRVQPTESIVRFPNITNLCPFGEVFNATRFASVYAWNRKRISNCVADYSVLYNSASFSTFKCYGVSPTKLNDLCFTNVYADSFVIRGDEVRQIAPGQTGKIADYNYKLPDDFTGCVIAWNSNNLDSKVGGNYNYLYRLFRKSNLKPFERDISTEIYQAGSTPCNGVEGFNCYFPLQSYGFQPTNGVGYQPYRVVVLSFELLHAPATVCGPKKSTNLVKNKCVNFNFNGLTGTGVLTESNKKFLPFQQFGRDIADTTDAVRDPQTLEILDITPCSFGGVSVITPGTNTSNQVAVLYQDVNCTEVPVAIHADQLTPTWRVYSTGSNVFQTRAGCLIGAEHVNNSYECDIPIGAGICASYQTQTNSPRRARSVASQSIIAYTMSLGAENSVAYSNNSIAIPTNFTISVTTEILPVSMTKTSVDCTMYICGDSTECSNLLLQYGSFCTQLNRALTGIAVEQDKNTQEVFAQVKQIYKTPPIKDFGGFNFSQILPDPSKPSKRSFIEDLLFNKVTLADAGFIKQYGDCLGDIAARDLICAQKFNGLTVLPPLLTDEMIAQYTSALLAGTITSGWTFGAGAALQIPFAMQMAYRFNGCGVTQNVLYENQKLIANQFNSAIGKIQDSLSSTASALGKLQDVVNQNAQALNTLVKQLSSNFGAISSVLNDILSRLDKVEAEVQIDRLITGRLQSLQTYVTQQLIRAAEIRASANLAATKMSECVLGQSKRVDFCGKGCHLMSFPQSAPHGVVFLHVTYVPAQEKNFTTAPAICHDGKAHFPREGVFVSNGTHWFVTQRNFYEPQIITTDNTFVSGNCDVVIGIVNNTVYDPLQPELDSFKEELDKYFKNHTSPDVDLGDISGINASVVNIQKEIDRLNEVAKNLNESLIDLQELGKYEQYIKWPWYIWLGFIAGLIAIVMVTIMLCCMTSCCSCLKGCCSCGSCCKFDEDDSEPVLKGVKLHYT

SEQ ID NO: 917 - protein, 1273 aa, Artificial Sequence
  SARS-CoV-2/USA/WA-UW292/2020__EPI_ISL_418077 spike protein (1-1273)(I909C_Y1047C)
MFVFLVLLPLVSSQCVNLTTRTQLPPAYTNSFTRGVYYPDKVFRSSVLHSTQDLFLPFFSNVTWFHAIHVSGTNGTKRFDNPVLPFNDGVYFASTEKSNIIRGWIFGTTLDSKTQSLLIVNNATNVVIKVCEFQFCNDPFLGVYYHKNNKSWMESEFRVYSSANNCTFEYVSQPFLMDLEGKQGNFKNLREFVFKNIDGYFKIYSKHTPINLVRDLPQGFSALEPLVDLPIGINITRFQTLLALHRSYLTPGDSSSGWTAGAAAYYVGYLQPRTFLLKYNENGTITDAVDCALDPLSETKCTLKSFTVEKGIYQTSNFRVQPTESIVRFPNITNLCPFGEVFNATRFASVYAWNRKRISNCVADYSVLYNSASFSTFKCYGVSPTKLNDLCFTNVYADSFVIRGDEVRQIAPGQTGKIADYNYKLPDDFTGCVIAWNSNNLDSKVGGNYNYLYRLFRKSNLKPFERDISTEIYQASSTPCNGVEGFNCYFPLQSYGFQPTNGVGYQPYRVVVLSFELLHAPATVCGPKKSTNLVKNKCVNFNFNGLTGTGVLTESNKKFLPFQQFGRDIADTTDAVRDPQTLEILDITPCSFGGVSVITPGTNTSNQVAVLYQDVNCTEVPVAIHADQLTPTWRVYSTGSNVFQTRAGCLIGAEHVNNSYECDIPIGAGICASYQTQTNSPRRARSVASQSIIAYTMSLGAENSVAYSNNSIAIPTNFTISVTTEILPVSMTKTSVDCTMYICGDSTECSNLLLQYGSFCTQLNRALTGIAVEQDKNTQEVFAQVKQIYKTPPIKDFGGFNFSQILPDPSKPSKRSFIEDLLFNKVTLADAGFIKQYGDCLGDIAARDLICAQKFNGLTVLPPLLTDEMIAQYTSALLAGTITSGWTFGAGAALQIPFAMQMAYRFNGCGVTQNVLYENQKLIANQFNSAIGKIQDSLSSTASALGKLQDVVNQNAQALNTLVKQLSSNFGAISSVLNDILSRLDKVEAEVQIDRLITGRLQSLQTYVTQQLIRAAEIRASANLAATKMSECVLGQSKRVDFCGKGCHLMSFPQSAPHGVVFLHVTYVPAQEKNFTTAPAICHDGKAHFPREGVFVSNGTHWFVTQRNFYEPQIITTDNTFVSGNCDVVIGIVNNTVYDPLQPELDSFKEELDKYFKNHTSPDVDLGDISGINASVVNIQKEIDRLNEVAKNLNESLIDLQELGKYEQYIKWPWYIWLGFIAGLIAIVMVTIMLCCMTSCCSCLKGCCSCGSCCKFDEDDSEPVLKGVKLHYT

SEQ ID NO: 918 - protein, 1273 aa, Artificial Sequence
  SARS-CoV-2/Iceland/192/2020__EPI_ISL_417819 spike protein (1-1273)(I909C_Y1047C)
MFVFFVLLPLVSSQCVNLTTRTQLPPAYTNSFTRGVYYPDKVFRSSVLHSTQDLFLPFFSNVTWFHAIHVSGTNGTKRFDNPVLPFNDGVYFASTEKSNIIRGWIFGTTLDSKTQSLLIVNNATNVVIKVCEFQFCNDPFLGVYYHKNNKSWMESEFRVYSSANNCTFEYVSQPFLMDLEGKQGNFKNLREFVFKNIDGYFKIYSKHTPINLVRDLPQGFSALEPLVDLPIGINITRFQTLLALHRSYLTPGDSSSGWTAGAAAYYVGYLQPRTFLLKYNENGTITDAVDCALDPLSETKCTLKSFTVEKGIYQTSNFRVQPTESIVRFPNITNLCPFGEVFNATRFASVYAWNRKRISNCVADYSVLYNSASFSTFKCYGVSPTKLNDLCFTNVYADSFVIRGDEVRQIAPGQTGKIADYNYKLPDDFTGCVIAWNSNNLDSKVGGNYNYLYRLFRKSNLKPFERDISTEIYQAGSTPCNGVEGFNCYFPLQSYGFQPTNGVGYQPYRVVVLSFELLHAPATVCGPKKSTNLVKNKCVNFNFNGLTGTGVLTESNKKFLPFQQFGRDIADTTDAVRDPQTLEILDITPCSFGGVSVITPGTNTSNQVAVLYQGVNCTEVPVAIHADQLTPTWRVYSTGSNVFQTRAGCLIGAEHVNNSYECDIPIGAGICASYQTQTNSPRRARSVASQSIIAYTMSLGAENSVAYSNNSIAIPTNFTISVTTEILPVSMTKTSVDCTMYICGDSTECSNLLLQYGSFCTQLNRALTGIAVEQDKNTQEVFAQVKQIYKTPPIKDFGGFNFSQILPDPSKPSKRSFIEDLLFNKVTLADAGFIKQYGDCLGDIAARDLICAQKFNGLTVLPPLLTDEMIAQYTSALLAGTITSGWTFGAGAALQIPFAMQMAYRFNGCGVTQNVLYENQKLIANQFNSAIGKIQDSLSSTASALGKLQDVVNQNAQALNTLVKQLSSNFGAISSVLNDILSRLDKVEAEVQIDRLITGRLQSLQTYVTQQLIRAAEIRASANLAATKMSECVLGQSKRVDFCGKGCHLMSFPQSAPHGVVFLHVTYVPAQEKNFTTAPAICHDGKAHFPREGVFVSNGTHWFVTQRNFYEPQIITTDNTFVSGNCDVVIGIVNNTVYDPLQPELDSFKEELDKYFKNHTSPDVDLGDISGINASVVNIQKEIDRLNEVAKNLNESLIDLQELGKYEQYIKWPWYIWLGFIAGLIAIVMVTIMLCCMTSCCSCLKGCCSCGSCCKFDEDDSEPVLKGVKLHYT

SEQ ID NO: 919 - protein, 1273 aa, Artificial Sequence
  SARS-CoV-2/Belgium/ULG-6939/2020__EPI_ISL_417020 spike protein (1-1273)(I909C_Y1047C)
MFVFLVLLPLVSSQCVNLTTRTQLPPAYTNSFTRGVYYPDKVFRSSVLHSTQDLFLPFFSNVTWFHAIHVSGTNGTKRFDNPVLPFNDGVYFASTEKSNIIRGWIFGTTLDSKTQSLLIVNNATNVVIKVCEFQFCNDPFLGVYYHKNNKSWMESEFRVYSSANNCTFEYVSQPFLMDLEGKQGNFKNLREFVFKNIDGYFKIYSKHTPINLVRDLPQGFSALEPLVDLPIGINITRFQTLLALHRSYLTPGDSSSGWTAGAAAYYVGYLQPRTFLLKYNENGTITDAVDCALDPLSETKCTLKSFTVEKGIYQTSNFRVQPTESIVRFPNITNLCPFGEVFNATRFASVYAWNRKRISNCVADYSVLYNSASFSTFKCYGVSPTKLNDLCFTNVYADSFVIRGDEVRQIAPGQTGKIADYNYKLPDDFTGCVIAWNSNNLDSKVGGNYNYLYRLFRKSNLKPFERDISTEIYQAGSTPCNGVEGFNCYFPLQSYGFQPTNGVGYQPYRVVVLSFELLHAPATVCGPKKSTNLVKNKCVNFNFNGLTGTGVLTESNKKFLPFQQFGRDIADTTDAVRDPQTLEILDITPCSFGGVSVITPGTNTSNQVAVLYQGVNCTEVPVAIHADQLTPTWRVYSTGSNVFQTRAGCLIGAEHVNNSYECDIPIGAGICASYQTQTNSPRRARSVASQSIIAYTMSLGAENSVVYSNNSIAIPTNFTISVTTEILPVSMTKTSVDCTMYICGDSTECSNLLLQYGSFCTQLNRALTGIAVEQDKNTQEVFAQVKQIYKTPPIKDFGGFNFSQILPDPSKPSKRSFIEDLLFNKVTLADAGFIKQYGDCLGDIAARDLICAQKFNGLTVLPPLLTDEMIAQYTSALLAGTITSGWTFGAGAALQIPFAMQMAYRFNGCGVTQNVLYENQKLIANQFNSAIGKIQDSLSSTASALGKLQDVVNQNAQALNTLVKQLSSNFGAISSVLNDILSRLDKVEAEVQIDRLITGRLQSLQTYVTQQLIRAAEIRASANLAATKMSECVLGQSKRVDFCGKGCHLMSFPQSAPHGVVFLHVTYVPAQEKNFTTAPAICHDGKAHFPREGVFVSNGTHWFVTQRNFYEPQIITTDNTFVSGNCDVVIGIVNNTVYDPLQPELDSFKEELDKYFKNHTSPDVDLGDISGINASVVNIQKEIDRLNEVAKNLNESLIDLQELGKYEQYIKWPWYIWLGFIAGLIAIVMVTIMLCCMTSCCSCLKGCCSCGSCCKFDEDDSEPVLKGVKLHYT

SEQ ID NO: 920 - protein, 1273 aa, Artificial Sequence
  SARS-CoV-2/France/HF2496/2020__EPI_ISL_418231 spike protein (1-1273)(I909C_Y1047C)
MFVFLVLLPLVSSQCVNLTTRTQLPPAYTNSFTRGVYYPDKVFRSSVLHSTQDLFLPFFSNVTWFHAIHVSGTNGTKRFDNPVLPFNDGVYFASTEKSNIIRGWIFGTTLDSKTQSLLIVNNATNVVIKVCEFQFCNDPFLGVYYHKNNKSWMESEFRVYSSANNCTFEYVSQPFLMDLEGKQGNFKNLREFVFKNIDGYFKIYSKHTPINLVRDLPQGFSALEPLVDLPIGINITRFQTLLALHRSYLTPGDSSSGWTAGAAAYYVGYLQPRTFLLKYNENGTITDAVDCALDPLSETKCTLKSFTVEKGIYQTSNFRVQPTESIVRFPNITNLCPFGEVFNATRFASVYAWNRKRISNCVADYSVLYNSASFSTFKCYGVSPTKLNDLCFTNVYADSFVIRGDEVRQIAPGQTGKIADYNYKLPDDFTGCVIAWNSNNLDSKVGGNYNYLYRLFRKSNLKPFERDISTEIYQAGSTPCNGVEGFNCYFPLQSYGFQPTNGVGYQPYRVVVLSFELLHAPATVCGPKKSTNLVKNKCVNFNFNGLTGTGVLTESNKKFLPFQQFGRDIADTTDAVRDPQTLEILDITPCSFGGVSVITPGTNTSNQVAVLYQGVNCTEVPVAIHADQLTPTWRVYSTGSNVFQTRAGCLIGAEHVNNSYECDIPIGAGICASYQTQTNSPRRARSVASQSIIAYTMSLGAENSVAYSNNSIAIPTNFTISVTTEILPVSMTKTSVDCTMYICGDSTECSNLLLQYGSFCTQLNRALTGIAVEQDKNTQEVFAQVKQIYKTPPIKDFGGFNFSQILPDPSKPSKRSFIEDLLFNKVTLADAGFIKQYGDCLGDIVARDLICAQKFNGLTVLPPLLTDEMIAQYTSALLAGTITSGWTFGAGAALQIPFAMQMAYRFNGCGVTQNVLYENQKLIANQFNSAIGKIQDSLSSTASALGKLQDVVNQNAQALNTLVKQLSSNFGAISSVLNDILSRLDKVEAEVQIDRLITGRLQSLQTYVTQQLIRAAEIRASANLAATKMSECVLGQSKRVDFCGKGCHLMSFPQSAPHGVVFLHVTYVPAQEKNFTTAPAICHDGKAHFPREGVFVSNGTHWFVTQRNFYEPQIITTDNTFVSGNCDVVIGIVNNTVYDPLQPELDSFKEELDKYFKNHTSPDVDLGDISGINASVVNIQKEIDRLNEVAKNLNESLIDLQELGKYEQYIKWPWYIWLGFIAGLIAIVMVTIMLCCMTSCCSCLKGCCSCGSCCKFDEDDSEPVLKGVKLHYT

SEQ ID NO: 921 - protein, 1273 aa, Artificial Sequence
  SARS-CoV-2/USA/WA-UW291/2020__EPI_ISL_418076 spike protein (1-1273)(I909C_Y1047C)
MFVFLVLLPLVSSQCVNLTTRTQLPPAYTNSFTRGVYYPDKVFRSSVLHSTQDLFLPFFSNVTWFHAIHVSGTNGTKRFDNPVLPFNDGVYFASTEKSNIIRGWIFGTTLDSKTQSLLIVNNATNVVIKVCEFQFCNDPFLGVYYHKNNKSWMESEFRVYSSANNCTFEYVSQPFLMDLEGKQGNFKNLREFVFKNIDGYFKIYSKHTPINLVRDLPQGFSALEPLVDLPIGINITRFQTLLALHRSYLTPGDSSSGWTAGAAAYYVGYLQPRTFLLKYNENGTITDAVDCALDPLSETKCTLKSFTVEKGIYQTSNFRVQPTESIVRFPNITNLCPFGEVFNATRFASVYAWNRKRISNCVADYSVLYNSASFSTFKCYGVSPTKLNDLCFTNVYADSFVIRGDEVRQIAPGQTGKIADYNYKLPDDFTGCVIAWNSNNLDSKVGGNYNYLYRLFRKSNLKPFERDISTEIYQAGSTPCNGVEGFNCYFPLQSYGFQPTNGVGYQPYRVVVLSFELLHAPATVCGPKKSTNLVKNKCVNFNFNGLTGTGVLTESNKKFLPFQQFGRDIADTTDAVRDPQTLEILDITPCSFGGVSVITPGTNTSNQVAVLYQGVNCTEVPVAIHADQLTPTWRVYSTGSNVFQTRAGCLIGAEHVNNSYECDIPIGAGICASYQTQTNSPRRARSVASQSIIAYTMSLGAENSVAYSNNSIAIPTNFTISVTTEILPVSMTKTSVDCTMYICGDSTECSNLLLQYGSFCTQLNRALTGIAVEQDKNTQEVFAQVKQIYKTPPIKDFGGFNFSQILPDPSKPSKRSFIEDLLFNKVTLADAGFIKQYGDCLGDIAARDLICAQKFNGLTVLPPLLTDEMIAQYTSALLAGTITSGWTFGAGAALQIPFAMQMAYRFNGCGVTQNVLYENQKLIANQFNSAIGKIQYSLSSTASALGKLQDVVNQNAQALNTLVKQLSSNFGAISSVLNDILSRLDKVEAEVQIDRLITGRLQSLQTYVTQQLIRAAEIRASANLAATKMSECVLGQSKRVDFCGKGCHLMSFPQSAPHGVVFLHVTYVPAQEKNFTTAPAICHDGKAHFPREGVFVSNGTHWFVTQRNFYEPQIITTDNTFVSGNCDVVIGIVNNTVYDPLQPELDSFKEELDKYFKNHTSPDVDLGDISGINASVVNIQKEIDRLNEVAKNLNESLIDLQELGKYEQYIKWPWYIWLGFIAGLIAIVMVTIMLCCMTSCCSCLKGCCSCGSCCKFDEDDSEPVLKGVKLHYT

SEQ ID NO: 922 - protein, 1273 aa, Artificial Sequence
  SARS-CoV-2/Portugal/PT0034/2020__EPI_ISL_418019 spike protein (1-1273)(I909C_Y1047C)
MFVFLVLLPLVSSQCVNLTTRTQLPPAYTNSFTRGVYYPDKVFRSSVLHSTQDLFLPFFSNVTWFHAIHVSGTNGTKRFDNPVLPFNDGVYFASTEKSNIIRGWIFGTTLDSKTQSLLIVNNATNVVIKVCEFQFCNDPFLGVYYHKNNKSWMESEFRVYSSANNCTFEYVSQPFLMDLEGKQGNFKNLREFVFKNIDGYFKIYSKHTPINLVRDLPQGFSALEPLVDLPIGINITRFQTLLALHRSYLTPGDSSSGWTAGAAAYYVGYLQPRTFLLKYNENGTITDAVDCALDPLSETKCTLKSFTVEKGIYQTSNFRVQPTESIVRFPNITNLCPFGEVFNATRFASVYAWNRKRISNCVADYSVLYNSASFSTFKCYGVSPTKLNDLCFTNVYADSFVIRGDEVRQIAPGQTGKIADYNYKLPDDFTGCVIAWNSNNLDSKVGGNYNYLYRLFRKSNLKPFERDISTEIYQAGSTPCNGVEGFNCYFPLQSYGFQPTNGVGYQPYRVVVLSFELLHAPATVCGPKKSTNLVKNKCVNFNFNGLTGTGVLTESNKKFLPFQQFGRDIADTTDAVRDPQTLEILDITPCSFGGVSVITPGTNTSNQVAVLYQGVNCTEVPVAIHADQLTPTWRVYSTGSNVFQTRAGCLIGAEHVNNSYECDIPIGAGICASYQTQTNSPRRARSVASQSIIAYTMSLGAENSVAYSNNSIAIPTNFTISVTTEILPVSMTKTSVDCTMYICGDSTECSNLLLQYGSFCTQLNRALTGIAVEQDKNTQEVFAQVKQIYKTPPIKDFGGFNFSQILPDPSKPSKRSFIEDLLFNKVTLADAGFIKQYGDCLGDIAARDLICAQKFNGLTVLPPLLTDEMIAQYTSALLAGTITSGWTFGAGAALQIPFAMQMAYRFNGCGVTQNVLYENQKLIANQFNSAIGKIQDSLSSTASALGKLQDVVNQNAQALNTLVKQLSSNFGAISSVLNDILSRLDKVEAEVQIDRLITGRLQSLQTYVTQQLIRAAEIRASANLAATKMSECVLGQSKRVDFCGKGCHLMSFPQSAPHGVVFLHVTYVPAQEKNFTTAPAICHDGKAHFPREGVFVSNGTHWFVTQRNFYEPQIITTDNTFVSGNCDVVIGIVNNTVYDPLQPELDSFKEELDKYFKNHTSPDVDLGDISGINASVVNIQKEIDRLNEVAKNLNESLIDLQELGKYEQYIKWPWYIWLGFIAGLIAIVMVTIMLCCITSCCSCLKGCCSCGSCCKFDEDDSEPVLKGVKLHYT

SEQ ID NO: 923 - protein, 1273 aa, Artificial Sequence
  SARS-CoV-2/Iceland/202/2020__EPI_ISL_417750 spike protein (1-1273)(I909C_Y1047C)
MFVFLVLLPLVSSQCVNLTTRTQLPPAYTNSFTRGVYYPDKVFRSSVLHSTQDLFLPFFSNVTWFHAIHVSGTNGTKRFDNPVLPFNDGVYFASTEKSNIIRGWIFGTTLDSKTQSLLIVNNATNVVIKVCEFQFCNDPFLGVYYHKNNKSWMESEFRVYSSANNCTFEYVSQPFLMDLEGKQGNFKNLREFVFKNIDGYFKIYSKHTPINLVRDLPQGFSALEPLVDLPIGINITRFQTLLALHRSYLTPGDSSSGWTAGAAAYYVGYLQPRTFLLKYNENGTITDAVDCALDPLSETKCTLKSFTVEKGIYQTSNFRVQPTESIVRFPNITNLCPFGEVFNATRFASVYAWNRKRISNCVADYSVLYNSASFSTFKCYGVSPTKLNDLCFTNVYADSFVIRGDEVRQIAPGQTGKIADYNYKLPDDFTGCVIAWNSNNLDSKVGGNYNYLYRLFRKSNLKPFERDISTEIYQAGSTPCNGVEGFNCYFPLQSYGFQPTNGVGYQPYRVVVLSFELLHAPATVCGPKKSTNLVKNKCVNFNFNGLTGTGVLTESNKKFLPFQQFGRDIADTTDAVRDPQTLEILDITPCSFGGVSVITPGTNTSNQVAVLYQDVNCTEVPVAIHADQLTPTWRVYSTGSNVFQTRAGCLIGAEHVNNSYECDIPIGAGICASYQTQTNSPRRARSVASQSIIAYTMSLGAENSVAYSNNSIAIPTNFTISVTTEILPVSMTKTSVDCTMYICGDSTECSNLLLQYGSFCTQLNRALTGIAVEQDKNTQEVFAQVKQIYKTPPIKDFGGFNFSQILPDPSKPSKRSFIEDLLFNKVTLADAGFIKQYGDCLGDIAARDLICAQKFNGLTVLPPLLTDEMIAQYTSALLAGTITSGWTFGAGAALQIPFAMQMAYRFNGCGVTQNVLYENQKLIANQFNSAIGKIQDSLSSTASALGKLQDVVNQNAQALNTLVKQLSSNFGAISSVLNDILSRLDKVEAEVQIDRLITGRLQSLQTYVTQQLIRAAEIRASANLAATKMSECVLGQSKRVDFCGKGCHLMSFPQSAPHGVVFLHVTYVPAQEKNFTTAPAICHDGKAHFPREGVFVSNGTHWFVTQRNFYEPQIITTDNTFVSGNCDVVIGIVNNTVYDPLQPELDSFKEELDKYFKNHTSPDVDLGDIPGINASVVNIQKEIDRLNEVAKNLNESLIDLQELGKYEQYIKWPWYIWLGFIAGLIAIVMVTIMLCCMTSCCSCLKGCCSCGSCCKFDEDDSEPVLKGVKLHYT

SEQ ID NO: 924 - protein, 1273 aa, Artificial Sequence
  SARS-CoV-2/USA/WA-UW261/2020__EPI_ISL_418046 spike protein (1-1273)(I909C_Y1047C)
MFVFLVLLPLVSSQCVNLTTRTQLPPAYTNSFTRGVYYPDKVFRSSVLHSTQDLFLPFFSNVTWFHAIHVSGTNGTKRFDNPVLPFNDGVYFASTEKSNIIRGWIFGTTLDSKTQSLLIVNNATNVVIKVCEFQFCNDPFLGVYYHKNNKSWMESEFRVYSSANNCTFEYVSQPFLMDLEGKQGNFKNLREFVFKNIDGYFKIYSKHTPINLVRDLPQGFSALEPLVDLPIGINITRFQTLLALHRSYLTPGDSSSGWTAGAAAYYVGYLQPRTFLLKYNENGTITDAVDCALDPLSETKCTLKSFTVEKGIYQTSNFRVQPTESIVRFPNITNLCPFGEVFNATRFTSVYAWNRKRISNCVADYSVLYNSASFSTFKCYGVSPTKLNDLCFTNVYADSFVIRGDEVRQIAPGQTGKIADYNYKLPDDFTGCVIAWNSNNLDSKVGGNYNYLYRLFRKSNLKPFERDISTEIYQAGSTPCNGVEGFNCYFPLQSYGFQPTNGVGYQPYRVVVLSFELLHAPATVCGPKKSTNLVKNKCVNFNFNGLTGTGVLTESNKKFLPFQQFGRDIADTTDAVRDPQTLEILDITPCSFGGVSVITPGTNTSNQVAVLYQDVNCTEVPVAIHADQLTPTWRVYSTGSNVFQTRAGCLIGAEHVNNSYECDIPIGAGICASYQTQTNSPRRARSVASQSIIAYTMSLGAENSVAYSNNSIAIPTNFTISVTTEILPVSMTKTSVDCTMYICGDSTECSNLLLQYGSFCTQLNRALTGIAVEQDKNTQEVFAQVKQIYKTPPIKDFGGFNFSQILPDPSKPSKRSFIEDLLFNKVTLADAGFIKQYGDCLGDIAARDLICAQKFNGLTVLPPLLTDEMIAQYTSALLAGTITSGWTFGAGAALQIPFAMQMAYRFNGCGVTQNVLYENQKLIANQFNSAIGKIQDSLSSTASALGKLQDVVNQNAQALNTLVKQLSSNFGAISSVLNDILSRLDKVEAEVQIDRLITGRLQSLQTYVTQQLIRAAEIRASANLAATKMSECVLGQSKRVDFCGKGCHLMSFPQSAPHGVVFLHVTYVPAQEKNFTTAPAICHDGKAHFPREGVFVSNGTHWFVTQRNFYEPQIITTDNTFVSGNCDVVIGIVNNTVYDPLQPELDSFKEELDKYFKNHTSPDVDLGDISGINASVVNIQKEIDRLNEVAKNLNESLIDLQELGKYEQYIKWPWYIWLGFIAGLIAIVMVTIMLCCMTSCCSCLKGCCSCGSCCKFDEDDSEPVLKGVKLHYT

SEQ ID NO: 925 - protein, 1273 aa, Artificial Sequence
  SARS-CoV-2/Portugal/PT0035/2020__EPI_ISL_418020 spike protein (1-1273)(I909C_Y1047C)
MFVFLVLLPLVSSQCVNLTTRTQLPPAYTNSFTRGVYYPDKVFRSSVLHSTQDLFLPFFSNVTWFHAIHVSGTNGTKRFDNPVLPFNDGVYFASTEKSNIIRGWIFGTTLDSKTQSLLIVNNATNVVIKVCEFQFCNDPFLGVYYHKNNKSWMESEFRVYSSANNCTFEYVSQPFLMDLEGKQGNFKNLREFVFKNIDGYFKIYSKHTPINLVRDLPQGFSALEPLVDLPIGINITRFQTLLALHRSYLTPGDSSSGWTAGAAAYYVGYLQPRTFLLKYNENGTITDAVDCALDPLSETKCTLKSFTVEKGIYQTSNFRVQPTESIVRFPNITNLCPFGEVFNATRFASVYAWNRKRISNCVADYSVLYNSASFSTFKCYGVSPTKLNDLCFTNVYADSFVIRGDEVRQIAPGQTGKIADYNYKLPDDFTGCVIAWNSNNLDSKVGGNYNYLYRLFRKSNLKPFERDISTEIYQAGSTPCNGVEGFNCYFPLQSYGFQPTNGVGYQPYRVVVLSFELLHAPATVCGPKKSTNLVKNKCVNFNFNGLTGTGVLTESNKKFLPFQQFGRDIADTTDAVRDPQTLEILDITPCSFGGVSVITPGTNTSNQVAVLYQDVNCTEVPVAIHADQLTPTWRVYSTGSNVFQTRAGCLIGAEHVNNSYECDIPIGAGICASYQTQTNSPRRARSVASQSIIAYTMSLGAENSVAYSNNSIAIPTNFTISVTTEILPVSMTKTSVDCTMYICGDSTECSNLLLQYGSFCTQLNRALTGIAVEQDKNTQEVFAQVKQIYKTPPIKDFGGFNFSQILPDPSKPSKRSFIEDLLFNKVTLADAGFIKQYGDCLGDISARDLICAQKFNGLTVLPPLLTDEMIAQYTSALLAGTITSGWTFGAGAALQIPFAMQMAYRFNGCGVTQNVLYENQKLIANQFNSAIGKIQDSLSSTASALGKLQDVVNQNAQALNTLVKQLSSNFGAISSVLNDILSRLDKVEAEVQIDRLITGRLQSLQTYVTQQLIRAAEIRASANLAATKMSECVLGQSKRVDFCGKGCHLMSFPQSAPHGVVFLHVTYVPAQEKNFTTAPAICHDGKAHFPREGVFVSNGTHWFVTQRNFYEPQIITTDNTFVSGNCDVVIGIVNNTVYDPLQPELDSFKEELDKYFKNHTSPDVDLGDISGINASVVNIQKEIDRLNEVAKNLNESLIDLQELGKYEQYIKWPWYIWLGFIAGLIAIVMVTIMLCCMTSCCSCLKGCCSCGSCCKFDEDDSEPVLKGVKLHYT

SEQ ID NO: 926 - protein, 1273 aa, Artificial Sequence
  SARS-CoV-2/USA/NY-NYUMC7/2020__EPI_ISL_418192 spike protein (1-1273)(I909C_Y1047C)
MFVFLVLLPLVSSQCVNLTTRTQLPPAYTNSFTRGVYYPDKVFRSSVLHSTQDLFLPFFSNVTWFHAIHVSGTNGTKRFDNPVLPFNDGVYFASTEKSNIIRGWIFGTTLDSKTQSLLIVNNATNVVIKVCEFQFCNDPFLGVYHHKNNKSWMESEFRVYSSANNCTFEYVSQPFLMDLEGKQGNFKNLREFVFKNIDGYFKIYSKHTPINLVRDLPQGFSALEPLVDLPIGINITRFQTLLALHRSYLTPGDSSSGWTAGAAAYYVGYLQPRTFLLKYNENGTITDAVDCALDPLSETKCTLKSFTVEKGIYQTSNFRVQPTESIVRFPNITNLCPFGEVFNATRFASVYAWNRKRISNCVADYSVLYNSASFSTFKCYGVSPTKLNDLCFTNVYADSFVIRGDEVRQIAPGQTGKIADYNYKLPDDFTGCVIAWNSNNLDSKVGGNYNYLYRLFRKSNLKPFERDISTEIYQAGSTPCNGVEGFNCYFPLQSYGFQPTNGVGYQPYRVVVLSFELLHAPATVCGPKKSTNLVKNKCVNFNFNGLTGTGVLTESNKKFLPFQQFGRDIADTTDAVRDPQTLEILDITPCSFGGVSVITPGTNTSNQVAVLYQGVNCTEVPVAIHADQLTPTWRVYSTGSNVFQTRAGCLIGAEHVNNSYECDIPIGAGICASYQTQTNSPRRARSVASQSIIAYTMSLGAENSVAYSNNSIAIPTNFTISVTTEILPVSMTKTSVDCTMYICGDSTECSNLLLQYGSFCTQLNRALTGIAVEQDKNTQEVFAQVKQIYKTPPIKDFGGFNFSQILPDPSKPSKRSFIEDLLFNKVTLADAGFIKQYGDCLGDIAARDLICAQKFNGLTVLPPLLTDEMIAQYTSALLAGTITSGWTFGAGAALQIPFAMQMAYRFNGCGVTQNVLYENQKLIANQFNSAIGKIQDSLSSTASALGKLQDVVNQNAQALNTLVKQLSSNFGAISSVLNDILSRLDKVEAEVQIDRLITGRLQSLQTYVTQQLIRAAEIRASANLAATKMSECVLGQSKRVDFCGKGCHLMSFPQSAPHGVVFLHVTYVPAQEKNFTTAPAICHDGKAHFPREGVFVSNGTHWFVTQRNFYEPQIITTDNTFVSGNCDVVIGIVNNTVYDPLQPELDSFKEELDKYFKNHTSPDVDLGDISGINASVVNIQKEIDRLNEVAKNLNESLIDLQELGKYEQYIKWPWYIWLGFIAGLIAIVMVTIMLCCMTSCCSCLKGCCSCGSCCKFDEDDSEPVLKGVKLHYT

SEQ ID NO: 927 - protein, 1273 aa, Artificial Sequence
  SARS-CoV-2/Iceland/189/2020__EPI_ISL_417709 spike protein (1-1273)(I909C_Y1047C)
MFVFLVLLPLVSSQCVNLTTRTQLPPAYTNSFTRGVYYPDKVFRSSVLHSTQDLFLPFFSNVTWFHAIHVSGTNGTKRFDNPVLPFNDGVYFASTEKSNIIRGWIFGTTLDSKTQSLLIVNNATNVVIKVCEFQFCNDPFLGVYYHKNNKSWMESEFRVYSSANNCTFEYVSQPFLMDLEGKQGNFKNLREFVFKNIDGYFKIYSKHTPINLVRDLPQGFSALEPLVDLPIGINITRFQTLLALHRSYLTPGDSSSGWTAGAAAYYVGYLQPRTFLLKYNENGTITDAVDCALDPLSETKCTLKSFTVEKGIYQTSNFRVQPTESIVRFPNITNLCPFGEVFNATRFASVYAWNRKRISNCVADYSVLYNSASFSTFKCYGVSPTKLNDLCFTNVYADSFVIRGDEVRQIAPGQTGKIADYNYKLPDDFTGCVIAWNSNNLDSKVGGNYNYLYRLFRKSNLKPFERDISTEIYQAGSTPCNGVEGFNCYFPLQSYGFQPTNGVGYQPYRVVVLSFELLHAPATVCGPKKSTNLVKNKCVNFNFNGLTGTGVLTESNKKFLPFQQFGRDIADTTDAVRDPQTLEILDITPCSFGGVSVITPGTNTSNQVAVLYQGVNCTEVPVAIHADQLTPTWRVYSTGSNVFQTRAGCLIGAEHVNNSYECDIPIGAGICASYQTQTNSPRRARSVASQSIIAYTMSLGAENSVAYSNNSIAIPTNFTISVTTEILPVSMTKTSVDCTMYICGDSTECSNLLLQYGSFCTQLNRALTGIAVEQDKNTQEVFAQVKQIYKTPPIKDFGGFNFSQILPDPSKPSKRSFIEDLLFNKVTLADAGFTKQYGDCLGDIAARDLICAQKFNGLTVLPPLLTDEMIAQYTSALLAGTITSGWTFGAGAALQIPFAMQMAYRFNGCGVTQNVLYENQKLIANQFNSAIGKIQDSLSSTASALGKLQDVVNQNAQALNTLVKQLSSNFGAISSVLNDILSRLDKVEAEVQIDRLITGRLQSLQTYVTQQLIRAAEIRASANLAATKMSECVLGQSKRVDFCGKGCHLMSFPQSAPHGVVFLHVTYVPAQEKNFTTAPAICHDGKAHFPREGVFVSNGTHWFVTQRNFYEPQIITTDNTFVSGNCDVVIGIVNNTVYDPLQPELDSFKEELDKYFKNHTSPDVDLGDISGINASVVNIQKEIDRLNEVAKNLNESLIDLQELGKYEQYIKWPWYIWLGFIAGLIAIVMVTIMLCCMTSCCSCLKGCCSCGSCCKFDEDDSEPVLKGVKLHYT

SEQ ID NO: 928 - protein, 1273 aa, Artificial Sequence
  SARS-CoV-2/Australia/NSW56/2020__EPI_ISL_417408 spike protein (1-1273)(I909C_Y1047C)
MFVFLVLLPLVSSQCVNLTTRTQLPPAYTNSFTRGVYYPDKVFRSSVLHSTQDLFLPFFSNVTWFHAIHVSGTNGTKRFDNPVLPFNDGVYFASTEKSNIIRGWIFGTTLDSKTQSLLIVNNATNVVIKVCEFQFCNDPFLGVYYHKNNKSWMESEFRVYSSANNCTFEYVSQPFLMDLEGKQGNFKNLREFVFKNIDGYFKIYSKHTPINLVRDLPQGFSALEPLVDLPIGINITRFQTLLALHRSYLTPGDSSSGWTAGAAAYYVGYLQPRTFLLKYNENGTITDAVDCALDPLSETKCTLKSFTVEKGIYQTSNFRVQPTESIVRFPNITNLCPFGEVFNATRFASVYAWNRKRISNCVADYSVLYNSASFSTFKCYGVSPTKLNDLCFTNVYADSFVIRGDEVRQIAPGQTGKIADYNYKLPDDFTGCVIAWNSNNLDSKVGGNYNYLYRLFRKSNLKPFERDISTEIYQAGSTPCNGVEGFNCYFPLQSYGFQPTNGVGYQPYRVVVLSFELLHAPATVCGPKKSTNLVKNKCVNFNFNGLTGTGVLTESNKKFLPFQQFGRDIADTTDAVRDPQTLEILDITPCSFGGVSVITPGTNTSNQVAVLYQDVNCTEVPVAIHADQLTPTWRVYSTGSNVFQTRAGCLIGAEHVNNSYECDIPIGAGICASYQTQTNSPRRARSVASQSIIAYTMSLGAENSVAYSNNSIAIPTNFTISVTTEILPVSMTKTSVDCTMYICGDSTECSNLLLQYGSFCTQLNRALTGIAVEQDKNTQEVFAQVKQIYKTPPIKDFGGFNFSQILPDSSKPSKRSFIEDLLFNKVTLADAGFIKQYGDCLGDIAARDLICAQKFNGLTVLPPLLTDEMIAQYTSALLAGTITSGWTFGAGAALQIPFAMQMAYRFNGCGVTQNVLYENQKLIANQFNSAIGKIQDSLSSTASALGKLQDVVNQNAQALNTLVKQLSSNFGAISSVLNDILSRLDKVEAEVQIDRLITGRLQSLQTYVTQQLIRAAEIRASANLAATKMSECVLGQSKRVDFCGKGCHLMSFPQSAPHGVVFLHVTYVPAQEKNFTTAPAICHDGKAHFPREGVFVSNGTHWFVTQRNFYEPQIITTDNTFVSGNCDVVIGIVNNTVYDPLQPELDSFKEELDKYFKNHTSPDVDLGDISGINASVVNIQKEIDRLNEVAKNLNESLIDLQELGKYEQYIKWPWYIWLGFIAGLIAIVMVTIMLCCMTSCCSCLKGCCSCGSCCKFDEDDSEPVLKGVKLHYT

SEQ ID NO: 929 - protein, 1273 aa, Artificial Sequence
  SARS-CoV-2/Iceland/280/2020__EPI_ISL_417608 spike protein (1-1273)(I909C_Y1047C)
MFVFLVLLPLVSSQCVNLTTRTQLPPAYTNSFTRGVYYPDKVFRSSVLHSTQDLFLPFFSNVTWFHAIHVSGTNGTKRFDNPVLPFNDGVYFASTEKSNIIRGWIFGTTLDSKTQSLLIVNNATNVVIKVCEFQFCNDPFLGVYYHKNNKSWMESEFRVYSSANNCTFEYVSQPFLMDLEGKQGNFKNLREFVFKNIDGYFKIYSKHTPINLVRDLPQGFSALEPLVDLPIGINITRFQTLLALHRSYLTPGDSSSGWTAGAAAYYVGYLQPRTFLLKYNENGTITDAVDCALDPLSETKCTLKSFTVEKGIYQTSNFRVQPTESIVRFPNITNLCPFGEVFNATRFASVYAWNRKRISNCVADYSVLYNSASFSTFKCYGVSPTKLNDLCFTNVYADSFVIRGDEVRQIAPGQTGKIADYNYKLPDDFTGCVIAWNSNNLDSKVGGNYNYLYRLFRKSNLKPFERDISTEIYQAGSTPCNGVEGFNCYFPLQSYGFQPTNGVGYQPYRVVVLSFELLHAPATVCGPKKSTNLVKNKCVNFNFNGLTGTGVLTESNKKFLPFQQFGRDIADTTDAVRDPQTLEILDITPCSFGGVSVITPGTNTSNQVAVLYQGVNCTEVPVAIHADQLTPTWRVYSTGSNVFQTRAGCLIGAEHVNNSYECDIPIGAGICASYHTQTNSPRRARSVASQSIIAYTMSLGAENSVAYSNNSIAIPTNFTISVTTEILPVSMTKTSVDCTMYICGDSTECSNLLLQYGSFCTQLNRALTGIAVEQDKNTQEVFAQVKQIYKTPPIKDFGGFNFSQILPDPSKPSKRSFIEDLLFNKVTLADAGFIKQYGDCLGDIAARDLICAQKFNGLTVLPPLLTDEMIAQYTSALLAGTITSGWTFGAGAALQIPFAMQMAYRFNGCGVTQNVLYENQKLIANQFNSAIGKIQDSLSSTASALGKLQDVVNQNAQALNTLVKQLSSNFGAISSVLNDILSRLDKVEAEVQIDRLITGRLQSLQTYVTQQLIRAAEIRASANLAATKMSECVLGQSKRVDFCGKGCHLMSFPQSAPHGVVFLHVTYVPAQEKNFTTAPAICHDGKAHFPREGVFVSNGTHWFVTQRNFYEPQIITTDNTFVSGNCDVVIGIVNNTVYDPLQPELDSFKEELDKYFKNHTSPDVDLGDISGINASVVNIQKEIDRLNEVAKNLNESLIDLQELGKYEQYIKWPWYIWLGFIAGLIAIVMVTIMLCCMTSCCSCLKGCCSCGSCCKFDEDDSEPVLKGVKLHYT

SEQ ID NO: 930 - protein, 1273 aa, Artificial Sequence
  SARS-CoV-2/Iceland/247/2020__EPI_ISL_417575 spike protein (1-1273)(I909C_Y1047C)
MFVFLVLLPLVSSQCVNLTTRTQLPPAYTNSFTRGVYYPDKVFRSSVLHSTQDLFLPFFSNVTWFHAIHVSGTNGTKRFDNPVLPFNDGVYFASTEKSNIIRGWIFGTTLDSKTQSLLIVNNATNVVIKVCEFQFCNDPFLGVYYHKNNKSWMESEFRVYSSANNCTFEYVSQPFLMDLEGKQGNFKNLREFVFKNIDGYFKIYSKHTPINLVRDLPQGFSALEPLVDLPIGINITRFQTLLALHRSYLTPGDSSSGWTAGAAAYYVGYLQPRTFLLKYNENGTITDAVDCALDPLSETKCTLKSFTVEKGIYQTSNFRVQPTESIVRFPNITNLCPFGEVFNATRFASVYAWNRKRISNCVADYSVLYNSASFSTFKCYGVSPTKLNDLCFTNVYADSFVIRGDEVRQIAPGQTGKIADYNYKLPDDFTGCVIAWNSNNLDSKVGGNYNYLYRLFRKSNLKPFERDISTEIYQAGSTPCNGVEGFNCYFPLQSYGFQPTNGVGYQPYRVVVLSFELLHAPATVCGPKKSTNLVKNKCVNFNFNGLTGTGVLTESNKKFLPFQQFGRDIADTTDAVRDPQTLEILDITPCSFGGVSVITPGTNTSNQVAVLYQGVNCTEVPVAIHADQLTPTWRVYSTGSNVFQTRAGCLIGAEHVNNSYECDIPIGAGICASYQTQTNSPRRARSVASQSIIAYTMSLGAENSVAYSNNSIAIPTNFTISVTTEILPVSMTKTSVDCTMYICGDSTECSNLLLQYGSFCTQLNRALTGIAVEQDKNTQEVFAQVKQIYKTPPIKDFGGFNFSQILPDPSKPSKRSFIEDLLFNKVTLADAGFIKQYGDCLGDIAARDLICAQKFNGLTVLPPLLTDEMIAQYTSALLAGTITSGWTFGAGAALQIPFAMQMAYRFNGCGVTQNVLYENQKLIANQFNSAIGKIQDSLSSTASALGKLQDVVNQNAQALNTLVKQLSSNFGAISSVLNDILSRLDKVEAEVQIDRLITGRLQSLQTYVTQQLIRAAEIRASANLAATKMSECVLGQSKRVDFCGKGCHLMSFPQSAPHGVVFLHVTYVPAQEKNFTTAPAICHDGKAHFPREGVFVSNGTHWFVTQRNFYEPQIITTDNTFVSGNCDVVIGIVNNTVYDPLQPELDSFKEELDKYFKNHTSPDVDLGDISGINASVVNIQKEIDRLNEVAKNLNESLIDLQELGKYEQYIKWPWYIWLGFIAGLIAIVIVTIMLCCMTSCCSCLKGCCSCGSCCKFDEDDSEPVLKGVKLHYT

SEQ ID NO: 931 - protein, 1273 aa, Artificial Sequence
  SARS-CoV-2/Iceland/238/2020__EPI_ISL_417566 spike protein (1-1273)(I909C_Y1047C)
MFVFLVLLPLVSSQCVNLTTRTQLPPAYTNSFTRGVYYPDKVFRSSVLHSTQDLFLPFFSNVTWFHAIHVSGTNGTKRFDNPVLPFNDGVYFASTEKSNIIRGWIFGTTLDSKTQSLLIVNNATNVVIKVCEFQFCNDPFLGVYYHKNNKSWMESEFRVYSSANNCTFEYVSQPFLMDLEGKQGNFKNLREFVFKNIDGYFKIYSKHTPINLVRDLPQGFSALEPLVDLPIGINITRFQTLLALHRSYLTPGDSSSGWTAGAAAYYVGYLQPRTFLLKYNENGTITDAVDCALDPLSETKCTLKSFTVEKGIYQTSNFRVQPTESIVRFPNITNLCPFGEVFNATRFASVYAWNRKRISNCVADYSVLYNSASFSTFKCYGVSPTKLNDLCFTNVYADSFVIRGDEVRQIAPGQTGKIADYNYKLPDDFTGCVIAWNSNNLDSKVGGNYNYLYRLFRKSNLKPFERDISTEIYQAGSTPCNGVEGFNCYFPLQSYGFQPTNGVGYQPYRVVVLSFELLHAPATVCGPKKSTNLVKNKCVNFNFNGLTGTGVLTESNKKFLPFQQFGRDIADTTDAVRDPQTLEILDITPCSFGGVSVITPGTNTSNQVAVLYQGVNCTEVPVAIHADQLTPTWRVYSTGSNVFQTRAGCLIGAEHVNNSYECDIPIGAGICASYQTQTNSPRRARSVASQSIIAYTMSLGAENSVAYSNNSIAIPTNFTISVTTEILPVSMTKTSVDCTMYICGDSTECSNLLLQYGSFCTQLNRALTGIAVEQDKNTQEVFAQVKQIYKTPPIKDFGGFNFSQILPDPSKPSKRSFIEDLLFNKVTLADVGFIKQYGDCLGDIAARDLICAQKFNGLTVLPPLLTDEMIAQYTSALLAGTITSGWTFGAGAALQIPFAMQMAYRFNGCGVTQNVLYENQKLIANQFNSAIGKIQDSLSSTASALGKLQDVVNQNAQALNTLVKQLSSNFGAISSVLNDILSRLDKVEAEVQIDRLITGRLQSLQTYVTQQLIRAAEIRASANLAATKMSECVLGQSKRVDFCGKGCHLMSFPQSAPHGVVFLHVTYVPAQEKNFTTAPAICHDGKAHFPREGVFVSNGTHWFVTQRNFYEPQIITTDNTFVSGNCDVVIGIVNNTVYDPLQPELDSFKEELDKYFKNHTSPDVDLGDISGINASVVNIQKEIDRLNEVAKNLNESLIDLQELGKYEQYIKWPWYIWLGFIAGLIAIVMVTIMLCCMTSCCSCLKGCCSCGSCCKFDEDDSEPVLKGVKLHYT

SEQ ID NO: 932 - protein, 1273 aa, Artificial Sequence
  SARS-CoV-2/Greece/16/2020__EPI_ISL_418265 spike protein (1-1273)(I909C_Y1047C)
MFVFLVLLPLVSSQCVNLTTRTQLPPAYTNSFTRGVYYPDKVFRSSVLHSTQDLFLPFFSNVTWFHAIHVSGTNGTKRFDNPVLPFNDGVYFASTEKSNIIRGWIFGTTLDSKTQSLLIVNNATNVVIKVCEFQFCNDPFLGVYYHKNNKSWMESEFRVYSSANNCTFEYVSQPFLMDLEGKQGNFKNLREFVFKNVDGYFKIYSKHTPINLVRDLPQGFSALEPLVDLPIGINITRFQTLLALHRSYLTPGDSSSGWTAGAAAYYVGYLQPRTFLLKYNENGTITDAVDCALDPLSETKCTLKSFTVEKGIYQTSNFRVQPTESIVRFPNITNLCPFGEVFNATRFASVYAWNRKRISNCVADYSVLYNSASFSTFKCYGVSPTKLNDLCFTNVYADSFVIRGDEVRQIAPGQTGKIADYNYKLPDDFTGCVIAWNSNNLDSKVGGNYNYLYRLFRKSNLKPFERDISTEIYQAGSTPCNGVEGFNCYFPLQSYGFQPTNGVGYQPYRVVVLSFELLHAPATVCGPKKSTNLVKNKCVNFNFNGLTGTGVLTESNKKFLPFQQFGRDIADTTDAVRDPQTLEILDITPCSFGGVSVITPGTNTSNQVAVLYQDVNCTEVPVAIHADQLTPTWRVYSTGSNVFQTRAGCLIGAEHVNNSYECDIPIGAGICASYQTQTNSPRRARSVASQSIIAYTMSLGAENSVAYSNNSIAIPTNFTISVTTEILPVSMTKTSVDCTMYICGDSTECSNLLLQYGSFCTQLNRALTGIAVEQDKNTQEVFAQVKQIYKTPPIKDFGGFNFSQILPDPSKPSKRSFIEDLLFNKVTLADAGFIKQYGDCLGDIAARDLICAQKFNGLTVLPPLLTDEMIAQYTSALLAGTITSGWTFGAGAALQIPFAMQMAYRFNGCGVTQNVLYENQKLIANQFNSAIGKIQDSLSSTASALGKLQDVVNQNAQALNTLVKQLSSNFGAISSVLNDILSRLDKVEAEVQIDRLITGRLQSLQTYVTQQLIRAAEIRASANLAATKMSECVLGQSKRVDFCGKGCHLMSFPQSAPHGVVFLHVTYVPAQEKNFTTAPAICHDGKAHFPREGVFVSNGTHWFVTQRNFYEPQIITTDNTFVSGNCDVVIGIVNNTVYDPLQPELDSFKEELDKYFKNHTSPDVDLGDISGINASVVNIQKEIDRLNEVAKNLNESLIDLQELGKYEQYIKWPWYIWLGFIAGLIAIVMVTIMLCCMTSCCSCLKGCCSCGSCCKFDEDDSEPVLKGVKLHYT

SEQ ID NO: 933 - protein, 1273 aa, Artificial Sequence
  SARS-CoV-2/Iceland/319/2020__EPI_ISL_417648 spike protein (1-1273)(I909C_Y1047C)
MFVFLVLLPLVSSQCVNLTTRTQLPPAYTNSFTRGVYYPDKVFRSSVLHSTQDLFLPFFSNVTWFHAIHVSGTNGTKRFDNPVLPFNDGVYFASTEKSNIIRGWIFGTTLDSKTQSLLIVNNATNVVIKVCEFQFCNDPFLGVYYHKNNKSWMESEFRVYSSANNCTFEYVSQPFLIDLEGKQGNFKNLREFVFKNIDGYFKIYSKHTPINLVRDLPQGFSALEPLVDLPIGINITRFQTLLALHRSYLTPGDSSSGWTAGAAAYYVGYLQPRTFLLKYNENGTITDAVDCALDPLSETKCTLKSFTVEKGIYQTSNFRVQPTESIVRFPNITNLCPFGEVFNATRFASVYAWNRKRISNCVADYSVLYNSASFSTFKCYGVSPTKLNDLCFTNVYADSFVIRGDEVRQIAPGQTGKIADYNYKLPDDFTGCVIAWNSNNLDSKVGGNYNYLYRLFRKSNLKPFERDISTEIYQAGSTPCNGVEGFNCYFPLQSYGFQPTNGVGYQPYRVVVLSFELLHAPATVCGPKKSTNLVKNKCVNFNFNGLTGTGVLTESNKKFLPFQQFGRDIADTTDAVRDPQTLEILDITPCSFGGVSVITPGTNTSNQVAVLYQGVNCTEVPVAIHADQLTPTWRVYSTGSNVFQTRAGCLIGAEHVNNSYECDIPIGAGICASYQTQTNSPRRARSVASQSIIAYTMSLGAENSVAYSNNSIAIPTNFTISVTTEILPVSMTKTSVDCTMYICGDSTECSNLLLQYGSFCTQLNRALTGIAVEQDKNTQEVFAQVKQIYKTPPIKDFGGFNFSQILPDPSKPSKRSFIEDLLFNKVTLADAGFIKQYGDCLGDIAARDLICAQKFNGLTVLPPLLTDEMIAQYTSALLAGTITSGWTFGAGAALQIPFAMQMAYRFNGCGVTQNVLYENQKLIANQFNSAIGKIQDSLSSTASALGKLQDVVNQNAQALNTLVKQLSSNFGAISSVLNDILSRLDKVEAEVQIDRLITGRLQSLQTYVTQQLIRAAEIRASANLAATKMSECVLGQSKRVDFCGKGCHLMSFPQSAPHGVVFLHVTYVPAQEKNFTTAPAICHDGKAHFPREGVFVSNGTHWFVTQRNFYEPQIITTDNTFVSGNCDVVIGIVNNTVYDPLQPELDSFKEELDKYFKNHTSPDVDLGDISGINASVVNIQKEIDRLNEVAKNLNESLIDLQELGKYEQYIKWPWYIWLGFIAGLIAIVMVTIMLCCMTSCCSCLKGCCSCGSCCKFDEDDSEPVLKGVKLHYT

SEQ ID NO: 934 - protein, 1273 aa, Artificial Sequence
  SARS-CoV-2/Congo/94/2020__EPI_ISL_417947 spike protein (1-1273)(I909C_Y1047C)
MFVFLVLLPLVSSQCVNLTTRTQLPPAYTNSFTRGVYYPDKVFRSSVLHSTQDLFLPFFSNVTWFHAIHVSGTNGTKRFDNPVLPFNDGVYFASTEKSNIIRGWIFGTTLDSKTQSLLIVNNATNVVIKVCEFQFCNDPFLGVYYHKNNKSWMESEFRVYSSANNCTFEYVSQPFLMDLEGKQGNFKNLREFVFKNIDGYFKIYSKHTPINLVRDLPQGFSALEPLVDLPIGINITRFQTLLALHRSYLTPGDSSSGWTAGAAAYYVGYLQPRTFLLKYNENGTITDAVDCALDPLSETKCTLKSFTVEKGIYQTSNFRVQPTESIVRFPNITNLCPFGEVFNATRFASVYAWNRKRISNCVADYSVLYNSASFSTFKCYGVSPTKLNDLCFTNVYADSFVIRGDEVRQIAPGQTGKIADYNYKLPDDFTGCVIAWNSNNLDSKVGGNYNYLYRLFRKSNLKPFERDISTEIYQAGSTPCNGVEGFNCYFPLQSYGFQPTNGVGYQPYRVVVLSFELLHAPATVCGPKKSTNLVKNKCVNFNFNGLTGTGVLTESNKKFLPFQQFGRDIADTTDAVRDPQTLEILDITPCSFGGVSVITPGTNTSNQVAVLYQGVNCTEVPVAIHADQLTPTWRVYSTGSNVFQTRAGCLIGAEHVNNSYECDIPIGAGICASYQTQTNSPRRARSVASQSIIAYTMSLGAENSVAYSNNSIAIPTNFTISVTTEILPVSMTKTSVDCTMYICGDSTECSNLLLQYGSFCTQLNRALTGIAVEQDKNTQEVFAQVKQIYKTPPIKDFGGFNFSQILPDPSKPSKRSFIEDILFNKVTLADAGFIKQYGDCLGDIAARDLICAQKFNGLTVLPPLLTDEMIAQYTSALLAGTITSGWTFGAGAALQIPFAMQMAYRFNGCGVTQNVLYENQKLIANQFNSAIGKIQDSLSSTASALGKLQDVVNQNAQALNTLVKQLSSNFGAISSVLNDILSRLDKVEAEVQIDRLITGRLQSLQTYVTQQLIRAAEIRASANLAATKMSECVLGQSKRVDFCGKGCHLMSFPQSAPHGVVFLHVTYVPAQEKNFTTAPAICHDGKAHFPREGVFVSNGTHWFVTQRNFYEPQIITTDNTFVSGNCDVVIGIVNNTVYDPLQPELDSFKEELDKYFKNHTSPDVDLGDISGINASVVNIQKEIDRLNEVAKNLNESLIDLQELGKYEQYIKWPWYIWLGFIAGLIAIVMVTIMLCCMTSCCSCLKGCCSCGSCCKFDEDDSEPVLKGVKLHYT

SEQ ID NO: 935 - protein, 1273 aa, Artificial Sequence
  SARS-CoV-2/Congo/158/2020__EPI_ISL_417950 spike protein (1-1273)(I909C_Y1047C)
MFVFLVLLPLVSSQCVNLTTRTQLPPAYTNSFTRGVYYPDKVFRSSVLHSTQDLFLPFFSNVTWFHAIHVSGTNGTKRFDNPVLPFNDGVYFASTEKSNIIRGWIFGTTLDSKTQSLLIVNNATNVVIKVCEFQFCNDPFLGVYYHKNNKSWMESEFRVYSSANNCTFEYVSQPFLMDLEGKQGNFKNLREFVFKNIDGYFKIYSKHTPINLVRDLPQGFSALEPLVDLPIGINITRFQTLLALHRSYLTPGDSSSGWTAGAAAYYVGYLQPRTFLLKYNENGTITDAVDCALDPLSETKCTLKSFTVEKGIYQTSNFRVQPTESIVRFPNITNLCPFGEVFNATRFASVYAWNRKRISNCVADYSVLYNSASFSTFKCYGVSPTKLNDLCFTNVYADSFVIRGDEVRQIAPGQTGKIADYNYKLPDDFTGCVIAWNSNNLDSKVGGNYNYLYRLFRKSNLKPFERDISTEIYQAGSTPCNGVEGFNCYFPLQSYGFQPTNGVGYQPYRVVVLSFELLHAPATVCGPKKSTNLVKNKCVNFNFNGLTGTGVLTESNKKFLPFQQFGRDIADTTDAVRDPQTLEILDITPCSFGGVSVITPGTNTSNQVAVLYQDVNCTEVPVAIHADQLTPTWRVYSTGSNVFQTRAGCLIGAEHVNNSYECDIPIGAGICASYQTQTNSPRRARSVASQSIIAYTMSLGAENSVAYSNNSIAIPTNFTISVTTEILPVSMTKTSVDCTMYICGDSTECSNLLLQYGSFCTQLNRALTGIAVEQDKNTQEVFAQVKQIYKTPPIKDFGGFNFSQILPDPSKPSKRSFIEDLLFNKVTLADAGFIKQYGDCLGDIAARDLICAQKFNGLTVLPPLLTDEMIAQYTSALLAGTITSGWTFGAGAALQIPFAMQMAYRFNGCGVTQNVLYENQKLIANQFNSAIGKIQDSLSSTASALGKLQDVVNQNAQALNTLVKQLSSNFGAISSVLNDILSRLDKVEAEVQIDRLITGRLQSLQTYVTQQLIRAAEIRASANLAATKMSECVLGQSKRVDFCGKGCHLMSFPQSAPHGVVFLHVTYVPAQEKNFTTAPAICHDGKAHFPREGVFVSNGTHWFVTQRNFYEPQIITTDNTFLSGNCDVVIGIVNNTVYDPLQPELDSFKEELDKYFKNHTSPDVDLGDISGINASVVNIQKEIDRLNEVAKNLNESLIDLQELGKYEQYIKWPWYIWLGFIAGLIAIVMVTIMLCCMTSCCSCLKGCCSCGSCCKFDEDDSEPVLKGVKLHYT

SEQ ID NO: 936 - protein, 1273 aa, Artificial Sequence
  SARS-CoV-2/USA/UT-00034/2020__EPI_ISL_417977 spike protein (1-1273)(I909C_Y1047C)
MFVFLVLLPLVSSQCVNLTTRTQLPPAYTNSFTRGVYYPDKVFRSSVLHSTQDLFLPFFSNVTWFHAIHVSGTNGTKRFDNPVLPFNDGVYFASTEKSNIIRGWIFGTTLDSKTQSLLIVNNATNVVIKVCEFQFCNDPFLGVYYYKNNKSWMESEFRVYSSANNCTFEYVSQPFLMDLEGKQGNFKNLREFVFKNIDGYFKIYSKHTPINLVRDLPQGFSALEPLVDLPIGINITRFQTLLALHRSYLTPGDSSSGWTAGAAAYYVGYLQPRTFLLKYNENGTITDAVDCALDPLSETKCTLKSFTVEKGIYQTSNFRVQPTESIVRFPNITNLCPFGEVFNATRFASVYAWNRKRISNCVADYSVLYNSASFSTFKCYGVSPTKLNDLCFTNVYADSFVIRGDEVRQIAPGQTGKIADYNYKLPDDFTGCVIAWNSNNLDSKVGGNYNYLYRLFRKSNLKPFERDISTEIYQAGSTPCNGVEGFNCYFPLQSYGFQPTNGVGYQPYRVVVLSFELLHAPATVCGPKKSTNLVKNKCVNFNFNGLTGTGVLTESNKKFLPFQQFGRDIADTTDAVRDPQTLEILDITPCSFGGVSVITPGTNTSNQVAVLYQGVNCTEVPVAIHADQLTPTWRVYSTGSNVFQTRAGCLIGAEHVNNSYECDIPIGAGICASYQTQTNSPRRARSVASQSIIAYTMSLGAENSVAYSNNSIAIPTNFTISVTTEILPVSMTKTSVDCTMYICGDSTECSNLLLQYGSFCTQLNRALTGIAVEQDKNTQEVFAQVKQIYKTPPIKDFGGFNFSQILPDPSKPSKRSFIEDLLFNKVTLADAGFIKQYGDCLGDIAARDLICAQKFNGLTVLPPLLTDEMIAQYTSALLAGTITSGWTFGAGAALQIPFAMQMAYRFNGCGVTQNVLYENQKLIANQFNSAIGKIQDSLSSTASALGKLQDVVNQNAQALNTLVKQLSSNFGAISSVLNDILSRLDKVEAEVQIDRLITGRLQSLQTYVTQQLIRAAEIRASANLAATKMSECVLGQSKRVDFCGKGCHLMSFPQSAPHGVVFLHVTYVPAQEKNFTTAPAICHDGKAHFPREGVFVSNGTHWFVTQRNFYEPQIITTDNTFVSGNCDVVIGIVNNTVYDPLQPELDSFKEELDKYFKNHTSPDVDLGDISGINASVVNIQKEIDRLNEVAKNLNESLIDLQELGKYEQYIKWPWYIWLGFIAGLIAIVMVTIMLCCMTSCCSCLKGCCSCGSCCKFDEDDSEPVLKGVKLHYT

SEQ ID NO: 937 - protein, 1273 aa, Artificial Sequence
  SARS-CoV-2/USA/UT-00033/2020__EPI_ISL_417976 spike protein (1-1273)(I909C_Y1047C)
MFVFLVLLPLVSSQCVNLTTRTQLPPAYTNSFTRGVYYPDKVFRSSVLHSTQDLFLPFFSNVTWFHAIHVSGTNGTKRFDNPVLPFNDGVYFASTEKSNIIRGWIFGTTLDSKTQSLLIVNNATNVVIKVCEFQFCNDPFLGVYYHKNNKSWMESEFRVYSSANNCTFEYVSQPFLMDLEGKQGNFKNLREFVFKNIDGYFKIYSKHTPINLVRDLPQGFSALEPLVDLPIGINITRFQTLLALHRSYLTPGDSSSGLTAGAAAYYVGYLQPRTFLLKYNENGTITDAVDCALDPLSETKCTLKSFTVEKGIYQTSNFRVQPTESIVRFPNITNLCPFGEVFNATRFASVYAWNRKRISNCVADYSVLYNSASFSTFKCYGVSPTKLNDLCFTNVYADSFVIRGDEVRQIAPGQTGKIADYNYKLPDDFTGCVIAWNSNNLDSKVGGNYNYLYRLFRKSNLKPFERDISTEIYQAGSTPCNGVEGFNCYFPLQSYGFQPTNGVGYQPYRVVVLSFELLHAPATVCGPKKSTNLVKNKCVNFNFNGLTGTGVLTESNKKFLPFQQFGRDIADTTDAVRDPQTLEILDITPCSFGGVSVITPGTNTSNQVAVLYQGVNCTEVPVAIHADQLTPTWRVYSTGSNVFQTRAGCLIGAEHVNNSYECDIPIGAGICASYQTQTNSPRRARSVASQSIIAYTMSLGAENSVAYSNNSIAIPTNFTISVTTEILPVSMTKTSVDCTMYICGDSTECSNLLLQYGSFCTQLNRALTGIAVEQDKNTQEVFAQVKQIYKTPPIKDFGGFNFSQILPDPSKPSKRSFIEDLLFNKVTLADAGFIKQYGDCLGDIAARDLICAQKFNGLTVLPPLLTDEMIAQYTSALLAGTITSGWTFGAGAALQIPFAMQMAYRFNGCGVTQNVLYENQKLIANQFNSAIGKIQDSLSSTASALGKLQDVVNQNAQALNTLVKQLSSNFGAISSVLNDILSRLDKVEAEVQIDRLITGRLQSLQTYVTQQLIRAAEIRASANLAATKMSECVLGQSKRVDFCGKGCHLMSFPQSAPHGVVFLHVTYVPAQEKNFTTAPAICHDGKAHFPREGVFVSNGTHWFVTQRNFYEPQIITTDNTFVSGNCDVVIGIVNNTVYDPLQPELDSFKEELDKYFKNHTSPDVDLGDISGINASVVNIQKEIDRLNEVAKNLNESLIDLQELGKYEQYIKWPWYIWLGFIAGLIAIVMVTIMLCCMTSCCSCLKGCCSCGSCCKFDEDDSEPVLKGVKLHYT

SEQ ID NO: 938 - protein, 1273 aa, Artificial Sequence
  SARS-CoV-2/USA/WI-13/2020__EPI_ISL_417516 spike protein (1-1273)(I909C_Y1047C)
MFVFLVLLPLVSSQCVNLTTRTQLPPAYTNSFTRGVYYPDKVFRSSVLHSTQDLFLPFFSNVTWFHAIHVSGTNGTKRFDNPVLPFNDGVYFASTEKSNIIRGWIFGTTLDSKTQSLLIVNNATNVVIKVCEFQFCNDPFLGVYYHKNNKSWMESEFRVYSSANNCTFEYVSQPFLMDLEGKQGNFKNLREFVFKNIDGYFKIYSKHTPINLVRDLPQGFSALEPLVDLPIGINITRFQTLLALHRSYLTPGDSSSGWTAGAAAYYVGYLQPRTFLLKYNENGTITDAVDCALDPLSETKCTLKSFTVEKGIYQTSNFRVLPTESIVRFPNITNLCPFGEVFNATRFASVYAWNRKRISNCVADYSVLYNSASFSTFKCYGVSPTKLNDLCFTNVYADSFVIRGDEVRQIAPGQTGKIADYNYKLPDDFTGCVIAWNSNNLDSKVGGNYNYLYRLFRKSNLKPFERDISTEIYQAGSTPCNGVEGFNCYFPLQSYGFQPTNGVGYQPYRVVVLSFELLHAPATVCGPKKSTNLVKNKCVNFNFNGLTGTGVLTESNKKFLPFQQFGRDIADTTDAVRDPQTLEILDITPCSFGGVSVITPGTNTSNQVAVLYQGVNCTEVPVAIHADQLTPTWRVYSTGSNVFQTRAGCLIGAEHVNNSYECDIPIGAGICASYQTQTNSPRRARSVASQSIIAYTMSLGAENSVAYSNNSIAIPTNFTISVTTEILPVSMTKTSVDCTMYICGDSTECSNLLLQYGSFCTQLNRALTGIAVEQDKNTQEVFAQVKQIYKTPPIKDFGGFNFSQILPDPSKPSKRSFIEDLLFNKVTLADAGFIKQYGDCLGDIAARDLICAQKFNGLTVLPPLLTDEMIAQYTSALLAGTITSGWTFGAGAALQIPFAMQMAYRFNGCGVTQNVLYENQKLIANQFNSAIGKIQDSLSSTASALGKLQDVVNQNAQALNTLVKQLSSNFGAISSVLNDILSRLDKVEAEVQIDRLITGRLQSLQTYVTQQLIRAAEIRASANLAATKMSECVLGQSKRVDFCGKGCHLMSFPQSAPHGVVFLHVTYVPAQEKNFTTAPAICHDGKAHFPREGVFVSNGTHWFVTQRNFYEPQIITTDNTFVSGNCDVVIGIVNNTVYDPLQPELDSFKEELDKYFKNHTSPDVDLGDISGINASVVNIQKEIDRLNEVAKNLNESLIDLQELGKYEQYIKWPWYIWLGFIAGLIAIVMVTIMLCCMTSCCSCLKGCCSCGSCCKFDEDDSEPVLKGVKLHYT

SEQ ID NO: 939 - protein, 1272 aa, Artificial Sequence
  SARS-CoV-2/India/1-27/2020__EPI_ISL_413522 spike protein (1-1272)(I908C_Y1046C)
MFVFLVLLPLVSSQCVNLTTRTQLPPAYTNSFTRGVYYPDKVFRSSVLHSTQDLFLPFFSNVTWFHAIHVSGTNGTKRFDNPVLPFNDGVYFASTEKSNIIRGWIFGTTLDSKTQSLLIVNNATNVVIKVCEFQFCNDPFLGVYHKNNKSWMESEFRVYSSANNCTFEYVSQPFLMDLEGKQGNFKNLREFVFKNIDGYFKIYSKHTPINLVRDLPQGFSALEPLVDLPIGINITRFQTLLALHRSYLTPGDSSSGWTAGAAAYYVGYLQPRTFLLKYNENGTITDAVDCALDPLSETKCTLKSFTVEKGIYQTSNFRVQPTESIVRFPNITNLCPFGEVFNATRFASVYAWNRKRISNCVADYSVLYNSASFSTFKCYGVSPTKLNDLCFTNVYADSFVIRGDEVIQIAPGQTGKIADYNYKLPDDFTGCVIAWNSNNLDSKVGGNYNYLYRLFRKSNLKPFERDISTEIYQAGSTPCNGVEGFNCYFPLQSYGFQPTNGVGYQPYRVVVLSFELLHAPATVCGPKKSTNLVKNKCVNFNFNGLTGTGVLTESNKKFLPFQQFGRDIADTTDAVRDPQTLEILDITPCSFGGVSVITPGTNTSNQVAVLYQDVNCTEVPVAIHADQLTPTWRVYSTGSNVFQTRAGCLIGAEHVNNSYECDIPIGAGICASYQTQTNSPRRARSVASQSIIAYTMSLGAENSVAYSNNSIAIPTNFTISVTTEILPVSMTKTSVDCTMYICGDSTECSNLLLQYGSFCTQLNRALTGIAVEQDKNTQEVFAQVKQIYKTPPIKDFGGFNFSQILPDPSKPSKRSFIEDLLFNKVTLADAGFIKQYGDCLGDIAARDLICAQKFNGLTVLPPLLTDEMIAQYTSALLAGTITSGWTFGAGAALQIPFAMQMAYRFNGCGVTQNVLYENQKLIANQFNSAIGKIQDSLSSTASALGKLQDVVNQNAQALNTLVKQLSSNFGAISSVLNDILSRLDKVEAEVQIDRLITGRLQSLQTYVTQQLIRAAEIRASANLAATKMSECVLGQSKRVDFCGKGCHLMSFPQSAPHGVVFLHVTYVPAQEKNFTTAPAICHDGKAHFPREGVFVSNGTHWFVTQRNFYEPQIITTDNTFVSGNCDVVIGIVNNTVYDPLQPELDSFKEELDKYFKNHTSPDVDLGDISGINASVVNIQKEIDRLNEVAKNLNESLIDLQELGKYEQYIKWPWYIWLGFIAGLIAIVMVTIMLCCMTSCCSCLKGCCSCGSCCKFDEDDSEPVLKGVKLHYT

SEQ ID NO: 940 - protein, 1267 aa, Artificial Sequence
  SARS-CoV-2/pangolin/Guangxi/P4L/2017__EPI_ISL_410538 spike protein (1-1267)(I903C_Y1041C)
MFVFLFVLPLVSSQCVNLTTRTGIPPGYTNSSTRGVYYPDKVFRSSILHLTQDLFLPFFSNVTWFNTINYQGGFKKFDNPVLPFNDGVYFASTEKSNIIRGWIFGTTLDARTQSLLIVNNATNVVIKVCEFQFCTDPFLGVYYHNNNKTWVENEFRVYSSANNCTFEYISQPFLMDLEGKQGNFKNLREFVFKNVDGYFKIYSKHTPIDLVRDLPRGFAALEPLVDLPIGINITRFQTLLALHRSYLTPGNLESGWTTGAAAYYVGYLQQRTFLLSYNQNGTITDAVDCSLDPLSETKCTLKSLTVEKGIYQTSNFRVQPTISIVRFPNITNLCPFGEVFNASKFASVYAWNRKRISNCVADYSVLYNSTSFSTFKCYGVSPTKLNDLCFTNVYADSFVVKGDEVRQIAPGQTGVIADYNYKLPDDFTGCVIAWNSVKQDALTGGNYGYLYRLFRKSKLKPFERDISTEIYQAGSTPCNGQVGLNCYYPLERYGFHPTTGVNYQPFRVVVLSFELLNGPATVCGPKLSTTLVKDKCVNFNFNGLTGTGVLTTSKKQFLPFQQFGRDISDTTDAVRDPQTLEILDITPCSFGGVSVITPGTNTSNQVAVLYQDVNCTEVPMAIHAEQLTPAWRVYSAGANVFQTRAGCLVGAEHVNNSYECDIPVGAGICASYHSMSSLRSVNQRSIIAYTMSLGAENSVAYSNNSIAIPTNFTISVTTEILPVSMTKTSVDCTMYICGDSIECSNLLLQYGSFCTQLNRALTGIAVEQDKNTQEVFAQVKQIYKTPPIKDFGGFNFSQILPDPSKPSKRSFIEDLLFNKVTLADAGFIKQYGDCLGDIAARDLICAQKFNGLTVLPPLLTDEMIAQYTSALLAGTITSGWTFGAGAALQIPFAMQMAYRFNGCGVTQNVLYENQKLIANQFNSAIGKIQDSLSSTASALGKLQDVVNQNAQALNTLVKQLSSNFGAISSVLNDILSRLDKVEAEVQIDRLITGRLQSLQTYVTQQLIRAAEIRASANLAATKMSECVLGQSKRVDFCGKGCHLMSFPQSAPHGVVFLHVTYVPAQEKNFTTAPAICHEGKAHFPREGVFVSNGTHWFITQRNFYEPQIITTDNTFVSGSCDVVIGIVNNTVYDPLQPELDSFKEELDKYFKNHTSPDVDLGDISGINASVVNIQKEIDRLNEVAKNLNESPIDLQELGKYEQYIKWPWYIWLGFIAGLIAIIMVTIMLCCMTSCCSCLKGCCSCGSCCKFDEDDSEPVLKGVKLHYT

SEQ ID NO: 941 - protein, 1267 aa, Artificial Sequence
  SARS-CoV-2/pangolin/Guangxi/P5L/2017__EPI_ISL_410540 spike protein (1-1267)(I903C_Y1041C)
MFVFLFVLPLVSSQCVNLTTRTGIPPGYTNSSTRGVYYPDKVFRSSILHLTQDLFLPFFSNVTWFNTINYQGGFKKFDNPVLPFNDGVYFASTEKSNIIRGWIFGTTLDARTQSLLIVNNATNVVIKVCEFQFCTDPFLGVYYHNNNKTWVENEFRVYSSANNCTFEYISQPFLMDLEGKQGNFKNLREFVFKNVDGYFKIYSKHTPIDLVRDLPRGFAALEPLVDLPIGINITRFQTLLALHRSYLTPGKLESGWTTGAAAYYVGYLQQRTFLLSYNQNGTITDAVDCSLDPLSETKCTLKSLTVEKGIYQTSNFRVQPTISIVRFPNITNLCPFGEVFNASKFASVYAWNRKRISNCVADYSVLYNSTSFSTFKCYGVSPTKLNDLCFTNVYADSFVVKGDEVRQIAPGQTGVIADYNYKLPDDFTGCVIAWNSVKQDALTGGNYGYLYRLFRKSKLKPFERDISTEIYQAGSTPCNGQVGLNCYYPLERYGFHPTTGVNYQPFRVVVLSFELLNGPATVCGPKLSTTLVKDKCVNFNFNGLTGTGVLTTSKKQFLPFQQFGRDISDTTDAVRDPQTLEILDITPCSFGGVSVITPGTNTSNQVAVLYQDVNCTEVPMAIHAEQLTPAWRVYSAGANVFQTRAGCLVGAEHVNNSYECDIPVGAGICASYHSMSSFRSVNQRSIIAYTMSLGAENSVAYSNNSIAIPTNFTISVTTEILPVSMTKTSVDCTMYICGDSIECSNLLLQYGSFCTQLNRALTGIAVEQDKNTQEVFAQVKQIYKTPPIKDFGGFNFSQILPDPSKPSKRSFIEDLLFNKVTLADAGFIKQYGDCLGDIAARDLICAQKFNGLTVLPPLLTDEMIAQYTSALLAGTITSGWTFGAGAALQIPFAMQMAYRFNGCGVTQNVLYENQKLIANQFNSAIGKIQDSLSSTASALGKLQDVVNQNAQALNTLVKQLSSNFGAISSVLNDILSRLDKVEAEVQIDRLITGRLQSLQTYVTQQLIRAAEIRASANLAATKMSECVLGQSKRVDFCGKGCHLMSFPQSAPHGVVFLHVTYVPAQEKNFTTAPAICHEGKAHFPREGVFVSNGTHWFITQRNFYEPQIITTDNTFVSGSCDVVIGIVNNTVYDPLQPELDSFKEELDKYFKNHTSPDVDLGDISGINASVVNIQKEIDRLNEVAKNLNESLIDLQELGKYEQYIKWPWYIWLGFIAGLIAIIMVTIMLCCMTSCCSCLKGCCSCGSCCKFDEDDSEPVLKGVKLHYT

SEQ ID NO: 942 - protein, 1267 aa, Artificial Sequence
  SARS-CoV-2/pangolin/Guangxi/P5E/2017__EPI_ISL_410541 spike protein (1-1267)(I903C_Y1041C)
MFVFLFVLPLVSSQCVNLTTRTGIPPGYTNSSTRGVYYPDKVFRSSILHLTQDLFLPFFSNVTWFNTITYQGGSKKFDNPVLPFNDGVYFASTEKSNIIRGWIFGTTLDARTQSLLIVNNATNVVIKVCEFQFCTDPFLGVYYHNNNKTWVENEFRVYSSANNCTFEYISQPFLMDLEGKQGNFKNLREFVFKNVDGYFKIYSKHTPIDLVRDLPRGFAALEPLVDLPIGINITRFQTLLALHRSYLTPGKLESGWTTGAAAYYVGYLQQRTFLLSYNQNGTITDAVDCSLDPLSETKCTLKSLTVEKGIYQTSNFRVQPTISIVRFPNITNLCPFGEVFNASKFASVYAWNRKRISNCVADYSVLYNSTSFSTFKCYGVSPTKLNDLCFTNVYADSFVVKGDEVRQIAPGQTGVIADYNYKLPDDFTGCVIAWNSVKQDALTGDNYGYLYRLFRKSKLKPFERDISTEIYQAGSTPCNGQVGLNCYYPLERYGFHPTTGVNYQPFRVVVLSFELLNGPATVCGPKLSTTLVKDKCVNFNFNGLTGTGVLTTSKKQFLPFQQFGRDISDTTDAVRDPQTLEILDITPCSFGGVSVITPGTNTSNQVAVLYQDVNCTEVPMAIHAEQLTPAWRVYSAGANVFQTRAGCLVGAEHVNNSYECDIPVGAGICASYHSMSSFRSVNQRSIIAYTMSLGAENSVAYSNNSIAIPTNFTISVTTEILPVSMTKTSVDCTMYICGDSIECSNLLLQYGSFCTQLNRALTGIAVEQDKNTQEVFAQVKQIYKTPPIKDFGGFNFSQILPDPSKPSKRSFIEDLLFNKVTLADAGFIKQYGDCLGDIAARDLICAQKFNGLTVLPPLLTDEMIAQYTSALLAGTITSGWTFGAGAALQIPFAMQMAYRFNGCGVTQNVLYENQKLIANQFNSAIGKIQDSLSSTASALGKLQDVVNQNAQALNTLVKQLSSNFGAISSVLNDILSRLDKVEAEVQIDRLITGRLQSLQTYVTQQLIRAAEIRASANLAATKMSECVLGQSKRVDFCGKGCHLMSFPQSAPHGVVFLHVTYVPAQEKNFTTAPAICHEGKAHFPREGVFVSNGTHWFITQRNFYEPQIITTDNTFVSGSCDVVIGIVNNTVYDPLQPELDSFKEELDKYFKNHTSPDVDLGDISGINASVVNIQKEIDRLNEVAKNLNESLIDLQELGKYEQYIKWPWYIWLGFIAGLIAIIMVTIMLCCMTSCCSCLKGCCSCGSCCKFDEDDSEPVLKGVKLHYT

SEQ ID NO: 943 - protein, 1265 aa, Artificial Sequence
  SARS-CoV-2/pangolin/Guangxi/P1E/2017__EPI_ISL_410539 spike protein (1-1265)(I901C_Y1039C)
MFVFLFVLPLVSSQCVNLTTRTGIQPGYTNSSTRGVYYPDKVFRSSILHLTQDLFLPFFSNVTWFNTINYQGGFKKFDNPVLPFNDGVYFASTEKSNIIRGWIFGTTLDARTQSLLIVNNATNVVIKVCEFQFCTDPFLGVYYHNNNKTWVENEFRVYSSANNCTFEYISQPFLMDLEGKQGNFKNLREFVFKNVDGYFKIYSKHTPIDLVRDLPRGFAALEPLVDLPIGINITRFQTLLALHRSYLTPGKLESGWTTGAAAYYVGYLQQRTFLLSYNQNGTITDAVDCSLDPLSETKCTLKSLTVEKGIYQTSNFRVQPTISIVRFPNITNLCPFGEVFNASKFASVYAWNRKRISNCVADYSVLYNSTSFSTFKCYGVSPTKLNDLCFTNVYADSFVVKGDEVRQIAPGQTGVIADYNYKLPDDFTGCVIAWNSVKQDALTGGNYLYRLFRKSKLKPFERDISTEIYQAGSTPCNGQVGLNCYYPLERYGFHPTTGVNYQPFRVVVLSFELLNGPATVCGPKLSTTLVKDKCVNFNFNGLTGTGVLTTSKKQFLPFQQFGRDISDTTDAVRDPQTLEILDITPCSFGGVSVITPGTNTSNQVAVLYQDVNCTEVPMAIHAEQLTPAWRVYSAGANVFQTRAGCLVGAEHVNNSYECDIPVGAGICASYHSMSSLRSVNQRSIIAYTMSLGAENSVAYSNNSIAIPTNFTISVTTEILPVSMTKTSVDCTMYICGDSIECSNLLLQYGSFCTQLNRALTGIAVEQDKNTQEVFAQVKQIYKTPPIKDFGGFNFSQILPDPSKPSKRSFIEDLLFNKVTLADAGFIKQYGDCLGDIAARDLICAQKFNGLTVLPPLLTDEMIAQYTSALLAGTITSGWTFGAGAALQIPFAMQMAYRFNGCGVTQNVLYENQKLIANQFNSAIGKIQDSLSSTASALGKLQDVVNQNAQALNTLVKQLSSNFGAISSVLNDILSRLDKVEAEVQIDRLITGRLQSLQTYVTQQLIRAAEIRASANLAATKMSECVLGQSKRVDFCGKGCHLMSFPQSAPHGVVFLHVTYVPAQEKNFTTAPAICHEGKAHFPREGVFVSNGTHWFITQRNFYEPQIITTDNTFVSGSCDVVIGIVNNTVYDPLQPELDSFKEELDKYFKNHTSPDVDLGDISGINASVVNIQKEIDRLNEVAKNLNESLIDLQELGKYEQYIKWPWYIWLGFIAGLIAIIMVTIMLCCMTSCCSCLKGCCSCGSCCKFDEDDSEPVLKGVKLHYT

SEQ ID NO: 944 - protein, 1273 aa, Artificial Sequence; identical to SEQ ID NO: 24
  SARS-CoV-2/Wuhan/WIV05/2019__EPI_ISL_402128 spike protein (1-1273)(Q965C_S1003C)

SEQ ID NO: 945 - protein, 1269 aa, Artificial Sequence
  SARS-CoV-2/bat/Yunnan/RaTG13/2013__EPI_ISL_402131 spike protein (1-1269)(Q961C_S999C)
MFVFLVLLPLVSSQCVNLTTRTQLPPAYTNSSTRGVYYPDKVFRSSVLHLTQDLFLPFFSNVTWFHAIHVSGTNGIKRFDNPVLPFNDGVYFASTEKSNIIRGWIFGTTLDSKTQSLLIVNNATNVVIKVCEFQFCNDPFLGVYYHKNNKSWMESEFRVYSSANNCTFEYVSQPFLMDLEGKQGNFKNLREFVFKNIDGYFKIYSKHTPINLVRDLPPGFSALEPLVDLPIGINITRFQTLLALHRSYLTPGDSSSGWTAGAAAYYVGYLQPRTFLLKYNENGTITDAVDCALDPLSETKCTLKSFTVEKGIYQTSNFRVQPTDSIVRFPNITNLCPFGEVFNATTFASVYAWNRKRISNCVADYSVLYNSTSFSTFKCYGVSPTKLNDLCFTNVYADSFVITGDEVRQIAPGQTGKIADYNYKLPDDFTGCVIAWNSKHIDAKEGGNFNYLYRLFRKANLKPFERDISTEIYQAGSKPCNGQTGLNCYYPLYRYGFYPTDGVGHQPYRVVVLSFELLNAPATVCGPKKSTNLVKNKCVNFNFNGLTGTGVLTESNKKFLPFQQFGRDIADTTDAVRDPQTLEILDITPCSFGGVSVITPGTNASNQVAVLYQDVNCTEVPVAIHADQLTPTWRVYSTGSNVFQTRAGCLIGAEHVNNSYECDIPIGAGICASYQTQTNSRSVASQSIIAYTMSLGAENSVAYSNNSIAIPTNFTISVTTEILPVSMTKTSVDCTMYICGDSTECSNLLLQYGSFCTQLNRALTGIAVEQDKNTQEVFAQVKQIYKTPPIKDFGGFNFSQILPDPSKPSKRSFIEDLLFNKVTLADAGFIKQYGDCLGDIAARDLICAQKFNGLTVLPPLLTDEMIAQYTSALLAGTITSGWTFGAGAALQIPFAMQMAYRFNGIGVTQNVLYENQKLIANQFNSAIGKIQDSLSSTASALGKLQDVVNQNAQALNTLVKCLSSNFGAISSVLNDILSRLDKVEAEVQIDRLITGRLQCLQTYVTQQLIRAAEIRASANLAATKMSECVLGQSKRVDFCGKGYHLMSFPQSAPHGVVFLHVTYVPAQEKNFTTAPAICHDGKAHFPREGVFVSNGTHWFVTQRNFYEPQIITTDNTFVSGSCDVVIGIVNNTVYDPLQPELDSFKEELDKYFKNHTSPDVDLGDISGINASVVNIQKEIDRLNEVAKNLNESLIDLQELGKYEQYIKWPWYIWLGFIAGLIAIIMVTIMLCCMTSCCSCLKGCCSCGSCCKFDEDDSEPVLKGVKLHYT

SEQ ID NO: 946 - protein, 1273 aa, Artificial Sequence
  SARS-CoV-2/Wuhan/HBCDC-HB-01/2019__EPI_ISL_402132 spike protein (1-1273)(Q965C_S1003C)
MFVFLVLLPLVSSQCVNLTTRTQLPPAYTNSITRGVYYPDKVFRSSVLHSTQDLFLPFFSNVTWFHAIHVSGTNGTKRFDNPVLPFNDGVYFASTEKSNIIRGWIFGTTLDSKTQSLLIVNNATNVVIKVCEFQFCNDPFLGVYYHKNNKSWMESEFRVYSSANNCTFEYVSQPFLMDLEGKQGNFKNLREFVFKNIDGYFKIYSKHTPINLVRDLPQGFSALEPLVDLPIGINITRFQTLLALHRSYLTPGDSSSGWTAGAAAYYVGYLQPRTFLLKYNENGTITDAVDCALDPLSETKCTLKSFTVEKGIYQTSNFRVQPTESIVRFPNITNLCPFGEVFNATRFASVYAWNRKRISNCVADYSVLYNSASFSTFKCYGVSPTKLNDLCFTNVYADSFVIRGDEVRQIAPGQTGKIADYNYKLPDDFTGCVIAWNSNNLDSKVGGNYNYLYRLFRKSNLKPFERDISTEIYQAGSTPCNGVEGFNCYFPLQSYGFQPTNGVGYQPYRVVVLSFELLHAPATVCGPKKSTNLVKNKCVNFNFNGLTGTGVLTESNKKFLPFQQFGRDIADTTDAVRDPQTLEILDITPCSFGGVSVITPGTNTSNQVAVLYQDVNCTEVPVAIHADQLTPTWRVYSTGSNVFQTRAGCLIGAEHVNNSYECDIPIGAGICASYQTQTNSPRRARSVASQSIIAYTMSLGAENSVAYSNNSIAIPTNFTISVTTEILPVSMTKTSVDCTMYICGDSTECSNLLLQYGSFCTQLNRALTGIAVEQDKNTQEVFAQVKQIYKTPPIKDFGGFNFSQILPDPSKPSKRSFIEDLLFNKVTLADAGFIKQYGDCLGDIAARDLICAQKFNGLTVLPPLLTDEMIAQYTSALLAGTITSGWTFGAGAALQIPFAMQMAYRFNGIGVTQNVLYENQKLIANQFNSAIGKIQDSLSSTASALGKLQDVVNQNAQALNTLVKCLSSNFGAISSVLNDILSRLDKVEAEVQIDRLITGRLQCLQTYVTQQLIRAAEIRASANLAATKMSECVLGQSKRVDFCGKGYHLMSFPQSAPHGVVFLHVTYVPAQEKNFTTAPAICHDGKAHFPREGVFVSNGTHWFVTQRNFYEPQIITTDNTFVSGNCDVVIGIVNNTVYDPLQPELDSFKEELDKYFKNHTSPDVDLGDISGINASVVNIQKEIDRLNEVAKNLNESLIDLQELGKYEQYIKWPWYIWLGFIAGLIAIVMVTIMLCCMTSCCSCLKGCCSCGSCCKFDEDDSEPVLKGVKLHYT

SEQ ID NO: 947 - protein, 1273 aa, Artificial Sequence
  SARS-CoV-2/Guangdong/20SF028/2020__EPI_ISL_403936 spike protein (1-1273)(Q965C_S1003C)
MFVFLVLLPLVSSQCVNLTTRTQLPPAYTNSFTRGVYYPDKVFRSSVLYSTQDLFLPFFSNVTWFHAIHVSGTNGTKRFDNPVLPFNDGVYFASTEKSNIIRGWIFGTTLDSKTQSLLIVNNATNVVIKVCEFQFCNDPFLGVYYHKNNKSWMESEFRVYSSANNCTFEYVSQPFLMDLEGKQGNFKNLREFVFKNIDGYFKIYSKHTPINLVRDLPQGFSALEPLVDLPIGINITRFQTLLALHRSYLTPGDSSSGWTAGAAAYYVGYLQPRTFLLKYNENGTITDAVDCALDPLSETKCTLKSFTVEKGIYQTSNFRVQPTESIVRFPNITNLCPFGEVFNATRFASVYAWNRKRISNCVADYSVLYNSASFSTFKCYGVSPTKLNDLCFTNVYADSFVIRGDEVRQIAPGQTGKIADYNYKLPDDFTGCVIAWNSNNLDSKVGGNYNYLYRLFRKSNLKPFERDISTEIYQAGSTPCNGVEGFNCYFPLQSYGFQPTNGVGYQPYRVVVLSFELLHAPATVCGPKKSTNLVKNKCVNFNFNGLTGTGVLTESNKKFLPFQQFGRDIADTTDAVRDPQTLEILDITPCSFGGVSVITPGTNTSNQVAVLYQDVNCTEVPVAIHADQLTPTWRVYSTGSNVFQTRAGCLIGAEHVNNSYECDIPIGAGICASYQTQTNSPRRARSVASQSIIAYTMSLGAENSVAYSNNSIAIPTNFTISVTTEILPVSMTKTSVDCTMYICGDSTECSNLLLQYGSFCTQLNRALTGIAVEQDKNTQEVFAQVKQIYKTPPIKDFGGFNFSQILPDPSKPSKRSFIEDLLFNKVTLADAGFIKQYGDCLGDIAARDLICAQKFNGLTVLPPLLTDEMIAQYTSALLAGTITSGWTFGAGAALQIPFAMQMAYRFNGIGVTQNVLYENQKLIANQFNSAIGKIQDSLSSTASALGKLQDVVNQNAQALNTLVKCLSSNFGAISSVLNDILSRLDKVEAEVQIDRLITGRLQCLQTYVTQQLIRAAEIRASANLAATKMSECVLGQSKRVDFCGKGYHLMSFPQSAPHGVVFLHVTYVPAQEKNFTTAPAICHDGKAHFPREGVFVSNGTHWFVTQRNFYEPQIITTDNTFVSGNCDVVIGIVNNTVYDPLQPELDSFKEELDKYFKNHTSPDVDLGDISGINASVVNIQKEIDRLNEVAKNLNESLIDLQELGKYEQYIKWPWYIWLGFIAGLIAIVMVTIMLCCMTSCCSCLKGCCSCGSCCKFDEDDSEPVLKGVKLHYT

SEQ ID NO: 948 - protein, 1273 aa, Artificial Sequence
  SARS-CoV-2/Shenzhen/SZTH-001/2020__EPI_ISL_406592 spike protein (1-1273)(Q965C_S1003C)
MFVFLVLLPLVSSQCVNLTTRTQLPPAYTNSFTRGVYYPDKVFRSSVLHSTQDLFLPFFSNVTWFHAIHVSGTNGTKRFDNPVLPFNDGVYFASTEKSNIIRGWIFGTTLDSKTQSLLIVNNATNVVIKVCEFQFCNDPFLGVYYHKNNKSWMESEFRVYSSANNCTFEYVSQPFLMDLEGKQGNFKNLREFVFKNIDGYFKIYSKHTPINLVRDLPQGFSALEPLVDLPIGINITRFQTLLALHRSYLTPGDSSSGWTAGAAAYYVGYLQPRTFLLKYNENGTITDAVDCALDPLSETKCTLKSFTVEKGIYQTSNFRVQPTESIVRFPNITNLCPFGEVFNATRFASVYAWNRKRISNCVADYSVLYNSASFSTFKCYGVSPTKLNDLCFTNVYADSFVIRGDEVRQIAPGQTGKIADYNYKLPDDFTGCVIAWNSNNLDSKVGGNYNYLYRLFRKSNLKPFERDISTEIYQAGSTPCNGVEGFNCYFPLQSYGFQPTNGVGYQPYRVVVLSFELLHAPATVCGPKKSTNLVKNKCVNFNFNGLTGTGVLTESNKKFLPFQQFGRDIADTTDAVRDPQTLEILDITPCSFGGVSVITPGTNTSNQVAVLYQDVNCTEVPVAIHADQLTPTWRVYSTGSNVFQTRAGCLIGAEHVNNSYECDIPIGAGICASYQTQTNSPRRARSVASQSIIAYTMSLGAENSVAYSNNSIAIPTNFTISVTTEILPVSMTKTSVDCTMYICGDSTECSNLLLQYGSFCTQLNRALTGIAVEQDKNTQEVFAQVKQIYKTPPIKDFGGFNFSQILPDPSKPSKRSFIEDLLFNKVTLADAGFIKQYGDCLGDIAARDLICAQKFNGLTVLPPLLTDEMIAQYTSALLAGTITSGWTFGAGAALQIPFAMQMAYRFNGIGVTQNVLYENQKLIANQFNSAIGKIQDSLSSTASALGKLQDVVNQNAQALNTLVKCLSSNFGAISSVLNDILSRLDKVEAEVQIDRLITGRLQCLQTYVTQQLIRAAEIRASANLAATKMSECVLGQSKRVDFCGKGYHLMSFPQSAPHGVVFLHVTYVPAQEKNFTTAPAICHDGKAHFPREGVFVSNGTHWFVTQRNFYEPQIITTDNTFVSGNCDVLIGIVNNTVYDPLQPELDSFKEELDKYFKNHTSPDVDLGDISGINASVVNIQKEIDRLNEVAKNLNESLIDLQELGKYEQYIKWPWYIWLGFIAGLIAIVMVTIMLCCMTSCCSCLKGCCSCGSCCKFDEDDSGPVLKGVKLHYT

SEQ ID NO: 949 - protein, 1273 aa, Artificial Sequence
  SARS-CoV-2/Shenzhen/SZTH-004/2020__EPI_ISL_406595 spike protein (1-1273)(Q965C_S1003C)
MFVFLVLLPLVSSQCVNLTTRTQLPPAYTNSFTRGVYYPDKVFRSSVLHSTQDLFLPFFSNVTWFHAIHVSGTNGTKRFDNPVLPFNDGVYFASTEKSNIIRGWIFGTTLDSKTQSLLIVNNATNVVIKVCEFQFCNDPFLGVYYHKNNKSWMESEFRVYSSANNCTFEYVSQPFLMDLEGKQGNFKNLREFVFKNIDGYFKIYSKHTPINLVRDLPQGFSALEPLVDLPIGINITRFQTLLALHRSYLTPGDSSSGWTAGAAAYYVGYLQPRTFLLKYNENGTITDAVDCALDPLSETKCTLKSFTVEKGIYQTSNFRVQPTESIVRFPNITNLCPFGEVFNATRFASVYAWDRKRISNCVAYYSVLYNSASFSTFKCYGVSPTKLNDLCFTNVYADSFVIRGDEVRQIAPGQTGKIADYNYKLPDDFTGCVIAWNSNNLDSKVGGNYNYLYRLFRKSNLKPFERDISTEIYQAGSTPCNGVEGFNCYFPLQSYGFQPTNGVGYQPYRVVVLSFELLHAPATVCGPKKSTNLVKNKCVNFNFNGLTGTGVLTESNKKFLPFQQFGRDIADTTDAVRDPQTLEILDITPCSFGGVSVITPGTNTSNQVAVLYQDVNCTEVPVAIHADQLTPTWRVYSTGSNVFQTRAGCLIGAEHVNNSYECDIPIGAGICASYQTQTNSPRRARSVASQSIIAYTMSLGAENSVAYSNNSIAIPTNFTISVTTEILPVSMTKTSVDCTMYICGDSTECSNLLLQYGSFCTQLNRALTGIAVEQDKNTQEVFAQVKQIYKTPPIKDFGGFNFSQILPDPSKPSKRSFIEDLLFNKVTLADAGFIKQYGDCLGDIAARDLICAQKFNGLTVLPPLLTDEMIAQYTSALLAGTITSGWTFGAGAALQIPFAMQMAYRFNGIGVTQNVLYENQKLIANQFNSAIGKIQDSLSSTASALGKLQDVVNQNAQALNTLVKCLSSNFGAISSVLNDILSRLDKVEAEVQIDRLITGRLQCLQTYVTQQLIRAAEIRASANLAATKMSECVLGQSKRVDFCGKGYHLMSFPQSAPHGVVFLHVTYVPAQEKNFTTAPAICHDGKAHFPREGVFVSNGTHWFVTQRNFYEPQIITTDNTFVSGNCDVVIGIVNNTVYDPLQPELDSFKEELDKYFKNHTSPDVDLGDISGINASVVNIQKEIDRLNEVAKNLNESLIDLQELGKYEQYIKWPWYIWLGFIAGLIAIVMVTIMLCCMTSCCSCLKGCCSCGSCCKFDEDDSEPVLKGVKLHYT

SEQ ID NO: 950 - protein, 1273 aa, Artificial Sequence
  SARS-CoV-2/France/IDF0372/2020__EPI_ISL_406596 spike protein (1-1273)(Q965C_S1003C)
MFVFLVLLPLVSSQCVNLTTRTQLPPAYTNSFTRGVYYPDKVFRSSVLHSTQDLFLPFFSNVTWFHAIHVSGTNGTKRFDNPVLPFNDGVYFASTEKSNIIRGWIFGTTLDSKTQSLLIVNNATNVVIKVCEFQFCNDPFLGVYYHKNNKSWMESEFRVYSSANNCTFEYVSQPFLMDLEGKQGNFKNLREFVFKNIDGYFKIYSKHTPINLVRDLPQGFSALEPLVDLPIGINITRFQTLLALHRSYLTPGDSSSGWTAGAAAYYVGYLQPRTFLLKYNENGTITDAVDCALDPLSETKCTLKSFTVEKGIYQTSNFRVQPTESIVRFPNITNLCPFGEVFNATRFASVYAWNRKRISNCVADYSFLYNSASFSTFKCYGVSPTKLNDLCFTNVYADSFVIRGDEVRQIAPGQTGKIADYNYKLPDDFTGCVIAWNSNNLDSKVGGNYNYLYRLFRKSNLKPFERDISTEIYQAGSTPCNGVEGFNCYFPLQSYGFQPTNGVGYQPYRVVVLSFELLHAPATVCGPKKSTNLVKNKCVNFNFNGLTGTGVLTESNKKFLPFQQFGRDIADTTDAVRDPQTLEILDITPCSFGGVSVITPGTNTSNQVAVLYQDVNCTEVPVAIHADQLTPTWRVYSTGSNVFQTRAGCLIGAEHVNNSYECDIPIGAGICASYQTQTNSPRRARSVASQSIIAYTMSLGAENSVAYSNNSIAIPTNFTISVTTEILPVSMTKTSVDCTMYICGDSTECSNLLLQYGSFCTQLNRALTGIAVEQDKNTQEVFAQVKQIYKTPPIKDFGGFNFSQILPDPSKPSKRSFIEDLLFNKVTLADAGFIKQYGDCLGDIAARDLICAQKFNGLTVLPPLLTDEMIAQYTSALLAGTITSGWTFGAGAALQIPFAMQMAYRFNGIGVTQNVLYENQKLIANQFNSAIGKIQDSLSSTASALGKLQDVVNQNAQALNTLVKCLSSNFGAISSVLNDILSRLDKVEAEVQIDRLITGRLQCLQTYVTQQLIRAAEIRASANLAATKMSECVLGQSKRVDFCGKGYHLMSFPQSAPHGVVFLHVTYVPAQEKNFTTAPAICHDGKAHFPREGVFVSNGTHWFVTQRNFYEPQIITTDNTFVSGNCDVVIGIVNNTVYDPLQPELDSFKEELDKYFKNHTSPDVDLGDISGINASVVNIQKEIDRLNEVAKNLNESLIDLQELGKYEQYIKWPWYIWLGFIAGLIAIVMVTIMLCCMTSCCSCLKGCCSCGSCCKFDEDDSEPVLKGVKLHYT

SEQ ID NO: 951 - protein, 1273 aa, Artificial Sequence
  SARS-CoV-2/Australia/VIC01/2020__EPI_ISL_406844 spike protein (1-1273)(Q965C_S1003C)
MFVFLVLLPLVSSQCVNLTTRTQLPPAYTNSFTRGVYYPDKVFRSSVLHSTQDLFLPFFSNVTWFHAIHVSGTNGTKRFDNPVLPFNDGVYFASTEKSNIIRGWIFGTTLDSKTQSLLIVNNATNVVIKVCEFQFCNDPFLGVYYHKNNKSWMESEFRVYSSANNCTFEYVSQPFLMDLEGKQGNFKNLREFVFKNIDGYFKIYSKHTPINLVRDLPQGFSALEPLVDLPIGINITRFQTLLALHRRYLTPGDSSSGWTAGAAAYYVGYLQPRTFLLKYNENGTITDAVDCALDPLSETKCTLKSFTVEKGIYQTSNFRVQPTESIVRFPNITNLCPFGEVFNATRFASVYAWNRKRISNCVADYSVLYNSASFSTFKCYGVSPTKLNDLCFTNVYADSFVIRGDEVRQIAPGQTGKIADYNYKLPDDFTGCVIAWNSNNLDSKVGGNYNYLYRLFRKSNLKPFERDISTEIYQAGSTPCNGVEGFNCYFPLQSYGFQPTNGVGYQPYRVVVLSFELLHAPATVCGPKKSTNLVKNKCVNFNFNGLTGTGVLTESNKKFLPFQQFGRDIADTTDAVRDPQTLEILDITPCSFGGVSVITPGTNTSNQVAVLYQDVNCTEVPVAIHADQLTPTWRVYSTGSNVFQTRAGCLIGAEHVNNSYECDIPIGAGICASYQTQTNSPRRARSVASQSIIAYTMSLGAENSVAYSNNSIAIPTNFTISVTTEILPVSMTKTSVDCTMYICGDSTECSNLLLQYGSFCTQLNRALTGIAVEQDKNTQEVFAQVKQIYKTPPIKDFGGFNFSQILPDPSKPSKRSFIEDLLFNKVTLADAGFIKQYGDCLGDIAARDLICAQKFNGLTVLPPLLTDEMIAQYTSALLAGTITSGWTFGAGAALQIPFAMQMAYRFNGIGVTQNVLYENQKLIANQFNSAIGKIQDSLSSTASALGKLQDVVNQNAQALNTLVKCLSSNFGAISSVLNDILSRLDKVEAEVQIDRLITGRLQCLQTYVTQQLIRAAEIRASANLAATKMSECVLGQSKRVDFCGKGYHLMSFPQSAPHGVVFLHVTYVPAQEKNFTTAPAICHDGKAHFPREGVFVSNGTHWFVTQRNFYEPQIITTDNTFVSGNCDVVIGIVNNTVYDPLQPELDSFKEELDKYFKNHTSPDVDLGDISGINASVVNIQKEIDRLNEVAKNLNESLIDLQELGKYEQYIKWPWYIWLGFIAGLIAIVMVTIMLCCMTSCCSCLKGCCSCGSCCKFDEDDSEPVLKGVKLHYT

SEQ ID NO: 952 - protein, 1273 aa, Artificial Sequence
  SARS-CoV-2/Germany/BavPat1/2020__EPI_ISL_406862 spike protein (1-1273)(Q965C_S1003C)
MFVFLVLLPLVSSQCVNLTTRTQLPPAYTNSFTRGVYYPDKVFRSSVLHSTQDLFLPFFSNVTWFHAIHVSGTNGTKRFDNPVLPFNDGVYFASTEKSNIIRGWIFGTTLDSKTQSLLIVNNATNVVIKVCEFQFCNDPFLGVYYHKNNKSWMESEFRVYSSANNCTFEYVSQPFLMDLEGKQGNFKNLREFVFKNIDGYFKIYSKHTPINLVRDLPQGFSALEPLVDLPIGINITRFQTLLALHRSYLTPGDSSSGWTAGAAAYYVGYLQPRTFLLKYNENGTITDAVDCALDPLSETKCTLKSFTVEKGIYQTSNFRVQPTESIVRFPNITNLCPFGEVFNATRFASVYAWNRKRISNCVADYSVLYNSASFSTFKCYGVSPTKLNDLCFTNVYADSFVIRGDEVRQIAPGQTGKIADYNYKLPDDFTGCVIAWNSNNLDSKVGGNYNYLYRLFRKSNLKPFERDISTEIYQAGSTPCNGVEGFNCYFPLQSYGFQPTNGVGYQPYRVVVLSFELLHAPATVCGPKKSTNLVKNKCVNFNFNGLTGTGVLTESNKKFLPFQQFGRDIADTTDAVRDPQTLEILDITPCSFGGVSVITPGTNTSNQVAVLYQGVNCTEVPVAIHADQLTPTWRVYSTGSNVFQTRAGCLIGAEHVNNSYECDIPIGAGICASYQTQTNSPRRARSVASQSIIAYTMSLGAENSVAYSNNSIAIPTNFTISVTTEILPVSMTKTSVDCTMYICGDSTECSNLLLQYGSFCTQLNRALTGIAVEQDKNTQEVFAQVKQIYKTPPIKDFGGFNFSQILPDPSKPSKRSFIEDLLFNKVTLADAGFIKQYGDCLGDIAARDLICAQKFNGLTVLPPLLTDEMIAQYTSALLAGTITSGWTFGAGAALQIPFAMQMAYRFNGIGVTQNVLYENQKLIANQFNSAIGKIQDSLSSTASALGKLQDVVNQNAQALNTLVKCLSSNFGAISSVLNDILSRLDKVEAEVQIDRLITGRLQCLQTYVTQQLIRAAEIRASANLAATKMSECVLGQSKRVDFCGKGYHLMSFPQSAPHGVVFLHVTYVPAQEKNFTTAPAICHDGKAHFPREGVFVSNGTHWFVTQRNFYEPQIITTDNTFVSGNCDVVIGIVNNTVYDPLQPELDSFKEELDKYFKNHTSPDVDLGDISGINASVVNIQKEIDRLNEVAKNLNESLIDLQELGKYEQYIKWPWYIWLGFIAGLIAIVMVTIMLCCMTSCCSCLKGCCSCGSCCKFDEDDSEPVLKGVKLHYT

SEQ ID NO: 953 - protein, 1273 aa, Artificial Sequence
  SARS-CoV-2/Wuhan/HBCDC-HB-02/2020__EPI_ISL_412978 spike protein (1-1273)(Q965C_S1003C)
MFVFLVLLPLVSSQCVNLTTRTQLPPAYTNSFTRGVYYPDKVFRSSVLHSTQDLFLPFFSNVTWFHAIHVSGTNGTKRFDNPVLPFNDGVYFASTEKSNIIRGWIFGTTLDSKTQSLLIVNNATNVVIKVCEFQFCNDPFLGVYYHKNNKSWMESEFRVYSSANNCTFEYVSQPFLMDLEGKQGNFKNLREFVFKNIDGYFKIYSKHTPINLVRDLPQGFSALEPLVDLPIGINITRFQTLLALHRSYLTPGDSSSGWTAGAAAYYVGYLQPRTFLLKYNENGTITDAVDCALDPLSETKCTLKSFTVEKGIYQTSNFRVQPTESIVRFPNITNLCPFGEVFNATRFASVYAWNRKRISNCVADYSVLYNSASFSTFKCYGVSPTKLNDLCFTNVYADSFVIRGDEVRQIAPGQTGKIADYNYKLPDDFTGCVIAWNSNNLDSKVGGNYNYLYRLFRKSNLKPFERDISTEIYQAGSTPCNGVEGFNCYFPLQSYGFQPTNGVGYQPYRVVVLSFELLHAPATVCGPKKSTNLVKNKCVNFNFNGLTGTGVLTESNKKFLPFQQFGRDIADTTDAVRDPQTLEILDITPCSFGGVSVITPGTNTSNQVAVLYQDVNCTEVPVAIHADQLTPTWRVYSTGSNVFQTRAGCLIGAEHVNNSYECDIPIGAGICASYQTQTNSPRRARSVASQSIIAYTMSLGAENSVAYSNNSIAIPTNFTISVTTEILPVSMTKTSVDCTMYICGDSTECSNFLLQYGSFCTQLNRALTGIAVEQDKNTQEVFAQVKQIYKTPPIKDFGGFNFSQILPDPSKPSKRSFIEDLLFNKVTLADAGFIKQYGDCLGDIAARDLICAQKFNGLTVLPPLLTDEMIAQYTSALLAGTITSGWTFGAGAALQIPFAMQMAYRFNGIGVTQNVLYENQKLIANQFNSAIGKIQDSLSSTASALGKLQDVVNQNAQALNTLVKCLSSNFGAISSVLNDILSRLDKVEAEVQIDRLITGRLQCLQTYVTQQLIRAAEIRASANLAATKMSECVLGQSKRVDFCGKGYHLMSFPQSAPHGVVFLHVTYVPAQEKNFTTAPAICHDGKAHFPREGVFVSNGTHWFVTQRNFYEPQIITTDNTFVSGNCDVVIGIVNNTVYDPLQPELDSFKEELDKYFKNHTSPDVDLGDISGINASVVNIQKEIDRLNEVAKNLNESLIDLQELGKYEQYIKWPWYIWLGFIAGLIAIVMVTIMLCCMTSCCSCLKGCCSCGSCCKFDEDDSEPVLKGVKLHYT

SEQ ID NO: 954 - protein, 1273 aa, Artificial Sequence
  SARS-CoV-2/Australia/QLD02/2020__EPI_ISL_407896 spike protein (1-1273)(Q965C_S1003C)
MFVFLVLLPLVSSQCVNLTTRTQLPPAYTNSFTRGVYYPDKVFRSSVLHSTQDLFLPFFSNVTWFHAIHVSGTNGTKRFDNPVLPFNDGVYFASTEKSNIIRGWIFGTTLDSKTQSLLIVNNATNVVIKVCEFQFCNDPFLGVYYHKNNKSWMESEFRVYSSANNCTFEYVSQPFLMDLEGKQGNFKNLREFVFKNIDGYFKIYSKHTPINLVRDLPQGFSALEPLVDLPIGINITRFQTLLALHRSYLTPGDSSSGWTAGAAAYYVGYLQPRTFLLKYNENGTITDAVDCALDPLSETKCTLKSFTVEKGIYQTSNFRVQPTESIVRFPNITNLCPFGEVFNATRFASVYAWNRKRISNCVADYSVLYNSASFSTFKCYGVSPTKLNDLCFTNVYADSFVIRGDEVRQIAPGQTGKIADYNYKLPDDFTGCVIAWNSNNLDSKVGGNYNYLYRLFRKSNLKPFERDISTEIYQAGSTPCNGVEGFNCYFPLQSYGFQPTNGVGYQPYRVVVLSFELLHAPATVCGPKKSTNLVKNKCVNFNFNGLTGTGVLTESNKKFLPFQQFGRDIADTTDAVRDPQTLEILDITPCSFGGVSVITPGTNTSNQVAVLYQDVNCTEVPVAIHADQLTPTWRVYSTGSNVFQTRAGCLIGAEHVNNSYECDIPIGAGICASYQTQTNSPRRARSVASQSIIAYTMSLGAENSVAYSNNSIAIPTNFTISVTTEILPVSMTKTSVDCTMYICGDSTECSNLLLQYGSFCTQLNRALTGIAVEQDKNTQEVFAQVKQIYKTPPIKDFGGFNFSQILPDPSKPSKRSFIEDLLFNKVTLADAGFIKQYGDCLGDIAARDLICAQKFNGLTVLPPLLTDEMIAQYTSALLAGTITSGWTFGAGAALQIPFAMQMAYRFNGIGVTQNVLYENQKLIANQFNSAIGKIQDSLSSTASALGKLQDVVNQNAQALNTLVKCLSSNFGAISSVLNDILSRLDKVEAEVQIDRLITGRLQCLQTYVTQQLIRAAEIRASANLAATKMSECVLGQSKRVDFCGKGYHLMSFPQSAPHGVVFLHVTYVPAQEKNFTTAPAICHDGKAHFPREGVFVSNGTHWFVTQRNFYEPQIITTDNTFVSGNCDVVIGIVNNTVYDPLQLELDSFKEELDKYFKNHTSPDVDLGDISGINASVVNIQKEIDRLNEVAKNLNESLIDLQELGKYEQYIKWPWYIWLGFIAGLIAIVMVTIMLCCMTSCCSCLKGCCSCGSCCKFDEDDSEPVLKGVKLHYT

SEQ ID NO: 955 - protein, 1273 aa, Artificial Sequence
  SARS-CoV-2/India/1-31/2020__EPI_ISL_413523 spike protein (1-1273)(Q965C_S1003C)
MFVFLVLLPLVSSQCVNLTTRTQLPPAYTNSFTRGVYYPDKVFRSSVLHSTQDLFLPFFSNVTWFHAIHVSGTNGTKRFDNPVLPFNDGVYFASTEKSNIIRGWIFGTTLDSKTQSLLIVNNATNVVIKVCEFQFCNDPFLGVYYHKNNKSWMESEFRVYSSANNCTFEYVSQPFLMDLEGKQGNFKNLREFVFKNIDGYFKIYSKHTPINLVRDLPQGFSALEPLVDLPIGINITRFQTLLALHRSYLTPGDSSSGWTAGAAAYYVGYLQPRTFLLKYNENGTITDAVDCALDPLSETKCTLKSFTVEKGIYQTSNFRVQPTESIVRFPNITNLCPFGEVFNATRFASVYAWNRKRISNCVADYSVLYNSASFSTFKCYGVSPTKLNDLCFTNVYADSFVIRGDEVRQIAPGQTGKIADYNYKLPDDFTGCVIAWNSNNLDSKVGGNYNYLYRLFRKSNLKPFERDISTEIYQAGSTPCNGVEGFNCYFPLQSYGFQPTNGVGYQPYRVVVLSFELLHAPATVCGPKKSTNLVKNKCVNFNFNGLTGTGVLTESNKKFLPFQQFGRDIADTTDAVRDPQTLEILDITPCSFGGVSVITPGTNTSNQVAVLYQDVNCTEVPVAIHADQLTPTWRVYSTGSNVFQTRAGCLIGAEHVNNSYECDIPIGAGICASYQTQTNSPRRARSVASQSIIAYTMSLGAENSVAYSNNSIAIPTNFTISVTTEILPVSMTKTSVDCTMYICGDSTECSNLLLQYGSFCTQLNRALTGIAVEQDKNTQEVFAQVKQIYKTPPIKDFGGFNFSQILPDPSKPSKRSFIEDLLFNKVTLADAGFIKQYGDCLGDIAARDLICAQKFNGLTVLPPLLTDEMIAQYTSALLAGTITSGWTFGAGAALQIPFAMQMAYRFNGIGVTQNVLYENQKLIANQFNSVIGKIQDSLSSTASALGKLQDVVNQNAQALNTLVKCLSSNFGAISSVLNDILSRLDKVEAEVQIDRLITGRLQCLQTYVTQQLIRAAEIRASANLAATKMSECVLGQSKRVDFCGKGYHLMSFPQSAPHGVVFLHVTYVPAQEKNFTTAPAICHDGKAHFPREGVFVSNGTHWFVTQRNFYEPQIITTDNTFVSGNCDVVIGIVNNTVYDPLQPELDSFKEELDKYFKNHTSPDVDLGDISGINASVVNIQKEIDRLNEVAKNLNESLIDLQELGKYEQYIKWPWYIWLGFIAGLIAIVMVTIMLCCMTSCCSCLKGCCSCGSCCKFDEDDSEPVLKGVKLHYT

SEQ ID NO: 956 - protein, 1273 aa, Artificial Sequence
  SARS-CoV-2/Guangdong/GD2020087-P0008/2020__EPI_ISL_413863 spike protein (1-1273)(Q965C_S1003C)
MFVFLVLLPLVSSQCVNLTTRTQLPPAYTNSFTRGVYYPDKVFRSSVLHSTQDLFLPFFSNVTWFHAIHVSGTNGTKRFDNPVLPFNDGVYFASTEKSNIIRGWIFGTTLDSKTQSLLIVNNATNVVIKVCEFQFCNDPFLGVYYHKNNKSWMESEFRVYSSANNCTFEYVSQPFLMDLEGKQGNFKNLREFVFKNIDGYFKIYSKHTPINLVRDLPQGFSALEPLVDLPIGINITRFQTLLALHRSYLTPGDSSSGWTAGAAAYYVGYLQPRTFLLKYNENGTITDAVDCALDPLSETKCTLKSFTVEKGIYQTSNFRVQPTESIVRFPNITNLCPFGEVFNATRFASVYAWNRKRISNCVADYSVLYNSASFSTFKCYGVSPTKLNDLCFTNVYADSFVIRGDEVREIAPGQTGKIADYNYKLPDDFTGCVIAWNSNNLDSKVGGNYNYLYRLFRKSNLKPFERDISTEIYQAGSTPCNGVEGFNCYFPLQSYGFQPTNGVGYQPYRVVVLSFELLHAPATVCGPKKSTNLVKNKCVNFNFNGLTGTGVLTESNKKFLPFQQFGRDIADTTDAVRDPQTLEILDITPCSFGGVSVITPGTNTSNQVAVLYQDVNCTEVPVAIHADQLTPTWRVYSTGSNVFQTRAGCLIGAEHVNNSYECDIPIGAGICASYQTQTNSPRRARSVASQSIIAYTMSLGAENSVAYSNNSIAIPTNFTISVTTEILPVSMTKTSVDCTMYICGDSTECSNLLLQYGSFCTQLNRALTGIAVEQDKNTQEVFAQVKQIYKTPPIKDFGGFNFSQILPDPSKPSKRSFIEDLLFNKVTLADAGFIKQYGDCLGDIAARDLICAQKFNGLTVLPPLLTDEMIAQYTSALLAGTITSGWTFGAGAALQIPFAMQMAYRFNGIGVTQNVLYENQKLIANQFNSAIGKIQDSLSSTASALGKLQDVVNQNAQALNTLVKCLSSNFGAISSVLNDILSRLDKVEAEVQIDRLITGRLQCLQTYVTQQLIRAAEIRASANLAATKMSECVLGQSKRVDFCGKGYHLMSFPQSAPHGVVFLHVTYVPAQEKNFTTAPAICHDGKAHFPREGVFVSNGTHWFVTQRNFYEPQIITTDNTFVSGNCDVVIGIVNNTVYDPLQPELDSFKEELDKYFKNHTSPDVDLGDISGINASVVNIQKEIDRLNEVAKNLNESLIDLQELGKYEQYIKWPWYIWLGFIAGLIAIVMVTIMLCCMTSCCSCLKGCCSCGSCCKFDEDDSEPVLKGVKLHYT

SEQ ID NO: 957 - protein, 1273 aa, Artificial Sequence
  SARS-CoV-2/Sweden/01/2020__EPI_ISL_411951 spike protein (1-1273)(Q965C_S1003C)
MFVFLVLLPLVSSQCVNLTTRTQLPPAYTNSFTRGVYYPDKVFRSSVLHSTQDLFLPFFSNVTWFHAIHVSGTNGTKRFDNPVLPFNDGVYFASTEKSNIIRGWIFGTTLDSKTQSLLIVNNATNVVIKVCEFQFCNDPFLGVYYHKNNKSWMESEFRVYSSANNCTFEYVSQPFLMDLEGKQGNFKNLREFVFKNIDGYFKIYSKHTPINLVRDLPQGFSALEPLVDLPIGINITRFQTLLALHRSYLTPGDSSSGWTAGAAAYYVGYLQPRTFLLKYNENGTITDAVDCALDPLSETKCTLKSFTVEKGIYQTSNFRVQPTESIVRFPNITNLCPFGEVFNATRFASVYAWNRKRISNCVADYSVLYNSASFSTFKCYGVSPTKLNDLCFTNVYADSFVIRGDEVRQIAPGQTGKIADYNYKLPDDFTGCVIAWNSNNLDSKVGGNYNYLYRLFRKSNLKPFERDISTEIYQAGSTPCNGVEGFNCYFPLQSYGFQPTNGVGYQPYRVVVLSFELLHAPATVCGPKKSTNLVKNKCVNFNFNGLTGTGVLTESNKKFLPFQQFGRDIADTTDAVRDPQTLEILDITPCSFGGVSVITPGTNTSNQVAVLYQDVNCTEVPVAIHADQLTPTWRVYSTGSNVFQTRAGCLIGAEHVNNSYECDIPIGAGICASYQTQTNSPRRARSVASQSIIAYTMSLGAENSVAYSNNSIAIPTNFTISVTTEILPVSMTKTSVDCTMYICGDSTECSNLLLQYGSFCTQLNRALTGIAVEQDKNTQEVFAQVKQIYKTPPIKDCGGFNFSQILPDPSKPSKRSFIEDLLFNKVTLADAGFIKQYGDCLGDIAARDLICAQKFNGLTVLPPLLTDEMIAQYTSALLAGTITSGWTFGAGAALQIPFAMQMAYRFNGIGVTQNVLYENQKLIANQFNSAIGKIQDSLSSTASALGKLQDVVNQNAQALNTLVKCLSSNFGAISSVLNDILSRLDKVEAEVQIDRLITGRLQCLQTYVTQQLIRAAEIRASANLAATKMSECVLGQSKRVDFCGKGYHLMSFPQSAPHGVVFLHVTYVPAQEKNFTTAPAICHDGKAHFPREGVFVSNGTHWFVTQRNFYEPQIITTDNTFVSGNCDVVIGIVNNTVYDPLQPELDSFKEELDKYFKNHTSPDVDLGDISGINASVVNIQKEIDRLNEVAKNLNESLIDLQELGKYEQYIKWPWYIWLGFIAGLIAIVMVTIMLCCMTSCCSCLKGCCSCGSCCKFDEDDSEPVLKGVKLHYT

SEQ ID NO: 958 - protein, 1273 aa, Artificial Sequence
  SARS-CoV-2/Tianmen/HBCDC-HB-07/2020__EPI_ISL_412983 spike protein (1-1273)(Q965C_S1003C)
MFVFLVLLPLVSSQCVNLTTRTQLPPAYTNSFTRGVYYPDKVFRSSVLHSTQDLFLPFFSNVTWFHAIHVSGTNGTKRFDNPVLPFNDGVYFASTEKSNIIRGWIFGTTLDSKTQSLLIVNNATNVVIKVCEFQFCNDPFLGVYYHKNNKSWMESEFRVYSSANNCTFEYVSQPFLMDLEGKQGNFKNLREFVFKNIDGYFKIYSKHTPINLVRDLPQGFSALEPLVDLPIGINITRFQTLLALHRSYLTPGDSSSGWTAGAAAYYVGYLQPRTFLLKYNENGTITDAVDCALDPLSETKCTLKSFTVEKGIYQTSNFRVQPTESIVRFPNITNLCPFGEVFNATRFASVYAWNRKRISNCVADYSVLYNSASFSTFKCYGVSPTKLNDLCFTNVYADSFVIRGDEVRQIAPGQTGKIADYNYKLPDDFTGCVIAWNSNNLDSKVGGNYNYLYRLFRKSNLKPFERDISTEIYQAGSTPCNGVEGFNCYFPLQSYGFQPTNGVGYQPYRVVVLSFELLHAPATVCGPKKSTNLVKNKCVNFNFNGLTGTGVLTESNKKFLPFQQFGRDIADTTDAVRDPQTLEILDITPCSFGGVSVITPGTNTSNQVAVLYQDLNCTEVPVAIHADQLTPTWRVYSTGSNVFQTRAGCLIGAEHVNNSYECDIPIGAGICASYQTQTNSPRRARSVASQSIIAYTMSLGAENSVAYSNNSIAIPTNFTISVTTEILPVSMTKTSVDCTMYICGDSTECSNLLLQYGSFCTQLNRALTGIAVEQDKNTQEVFAQVKQIYKTPPIKDFGGFNFSQILPDPSKPSKRSFIEDLLFNKVTLADAGFIKQYGDCLGDIAARDLICAQKFNGLTVLPPLLTDEMIAQYTSALLAGTITSGWTFGAGAALQIPFAMQMAYRFNGIGVTQNVLYENQKLIANQFNSAIGKIQDSLSSTASALGKLQDVVNQNAQALNTLVKCLSSNFGAISSVLNDILSRLDKVEAEVQIDRLITGRLQCLQTYVTQQLIRAAEIRASANLAATKMSECVLGQSKRVDFCGKGYHLMSFPQSAPHGVVFLHVTYVPAQEKNFTTAPAICHDGKAHFPREGVFVSNGTHWFVTQRNFYEPQIITTDNTFVSGNCDVVIGIVNNTVYDPLQPELDSFKEELDKYFKNHTSPDVDLGDISGINASVVNIQKEIDRLNEVAKNLNESLIDLQELGKYEQYIKWPWYIWLGFIAGLIAIVMVTIMLCCMTSCCSCLKGCCSCGSCCKFDEDDSEPVLKGVKLHYT

SEQ ID NO: 959 - protein, 1273 aa, Artificial Sequence
  SARS-CoV-2/Hong Kong/case42_VM20002493/2020__EPI_ISL_414527 spike protein (1-1273)(Q965C_S1003C)
MFVFLVLLPLVSSQCVNLTTRTQLPPAYTNSFTRGVYYPDKVFRSSVLHSTQDLFLPFFSNVTWFHAIHVSGTNGTKRFDNPVLPFNDGVYFASTEKSNIIRGWIFGTTLDSKTQSLLIVNNATNVVIKVCEFQFCNDPFLGVYYHKNNKSWMESEFRVYSSANNCTFEYVSQPFLMDLEGKQGNFKNLREFVFKNIDGYFKIYSKHTPINLVRDLPQGFSALEPLVDLPIGINITRFQTLLALHRSYLTPGDSSSGWTAGAAAYYVGYLQPRTFLLKYNENGTITDAVDCALDPLSETKCTLKSFTVEKGIYQTSNFRVQPTESIVRFPNITNLCPFGEVFNATRFASVYAWNRKRISNCVADYSVLYNSASFSTFKCYGVSPTKLNDLCFTNVYADSFVIRGDEVRQIAPGQTGKIADYNYKLPDDFTGCVIAWNSNNLDSKVGGNYNYLYRLFRKSNLKPFERDISTEIYQAGSTPCNGVEGFNCYFPLQSYGFQPTNGVGYQPYRVVVLSFELLHAPATVCGPKKSTNLVKNKCVNFNFNGLTGTGVLTESNKKFLPFQQFGRDIADTTDAVRDPQTLEILDITPCSFGGVSVITPGTNTSNQVAVLYQDVNCTEVPVAIHADQLTPTWRVYSTGSNVFQTRAGCLIGAEHVNNSYECDIPIGAGICASYQTQTNSPRRARSVASQSIIAYTMSLGAENSVAYSNNSIAIPTNFAISVTTEILPVSMTKTSVDCTMYICGDSTECSNLLLQYGSFCTQLNRALTGIAVEQDKNTQEVFAQVKQIYKTPPIKDFGGFNFSQILPDPSKPSKRSFIEDLLFNKVTLADAGFIKQYGDCLGDIAARDLICAQKFNGLTVLPPLLTDEMIAQYTSALLAGTITSGWTFGAGAALQIPFAMQMAYRFNGIGVTQNVLYENQKLIANQFNSAIGKIQDSLSSTASALGKLQDVVNQNAQALNTLVKCLSSNFGAISSVLNDILSRLDKVEAEVQIDRLITGRLQCLQTYVTQQLIRAAEIRASANLAATKMSECVLGQSKRVDFCGKGYHLMSFPQSAPHGVVFLHVTYVPAQEKNFTTAPAICHDGKAHFPREGVFVSNGTHWFVTQRNFYEPQIITTDNTFVSGNCDVVIGIVNNTVYDPLQPELDSFKEELDKYFKNHTSPDVDLGDISGINASVVNIQKEIDRLNEVAKNLNESLIDLQELGKYEQYIKWPWYIWLGFIAGLIAIVMVTIMLCCMTSCCSCLKGCCSCGSCCKFDEDDSEPVLKGVKLHYT

SEQ ID NO: 960 - protein, 1273 aa, Artificial Sequence
  SARS-CoV-2/USA/CruiseA-23/2020__EPI_ISL_414482 spike protein (1-1273)(Q965C_S1003C)
MFVFLVLLPLVSSQCVNLTTRTQLPPAYTNSFTRGVYYPDKVFRSSVLHSTQDLFLPFFSNVTWFHAIHVSGTNGTKRFDNPVLPFNDGVYFASTEKSNIIRGWIFGTTLDSKTQSLLIVNNATNVVIKVCEFQFCNDPFLGVYYHKNNKSWMESEFRVYSSANNCTFEYVSQPFLMDLEVKQGNFKNLREFVFKNIDGYFKIYSKHTPINLVRDLPQGFSALEPLVDLPIGINITRFQTLLALHRSYLTPGDSSSGWTAGAAAYYVGYLQPRTFLLKYNENGTITDAVDCALDPLSETKCTLKSFTVEKGIYQTSNFRVQPTESIVRFPNITNLCPFGEVFNATRFASVYAWNRKRISNCVADYSVLYNSASFSTFKCYGVSPTKLNDLCFTNVYADSFVIRGDEVRQIAPGQTGKIADYNYKLPDDFTGCVIAWNSNNLDSKVGGNYNYLYRLFRKSNLKPFERDISTEIYQAGSTPCNGVEGFNCYFPLQSYGFQPTNGVGYQPYRVVVLSFELLHAPATVCGPKKSTNLVKNKCVNFNFNGLTGTGVLTESNKKFLPFQQFGRDIADTTDAVRDPQTLEILDITPCSFGGVSVITPGTNTSNQVAVLYQDVNCTEVPVAIHADQLTPTWRVYSTGSNVFQTRAGCLIGAEHVNNSYECDIPIGAGICASYQTQTNSPRRARSVASQSIIAYTMSLGAENSVAYSNNSIAIPTNFTISVTTEILPVSMTKTSVDCTMYICGDSTECSNLLLQYGSFCTQLNRALTGIAVEQDKNTQEVFAQVKQIYKTPPIKDFGGFNFSQILPDPSKPSKRSFIEDLLFNKVTLADAGFIKQYGDCLGDIAARDLICAQKFNGLTVLPPLLTDEMIAQYTSALLAGTITSGWTFGAGAALQIPFAMQMAYRFNGIGVTQNVLYENQKLIANQFNSAIGKIQDSLSSTASALGKLQDVVNQNAQALNTLVKCLSSNFGAISSVLNDILSRLDKVEAEVQIDRLITGRLQCLQTYVTQQLIRAAEIRASANLAATKMSECVLGQSKRVDFCGKGYHLMSFPQSAPHGVVFLHVTYVPAQEKNFTTAPAICHDGKAHFPREGVFVSNGTHWFVTQRNFYEPQIITTDNTFVSGNCDVVIGIVNNTVYDPLQPELDSFKEELDKYFKNHTSPDVDLGDISGINASVVNIQKEIDRLNEVAKNLNESLIDLQELGKYEQYIKWPWYIWLGFIAGLIAIVMVTIMLCCMTSCCSCLKGCCSCGSCCKFDEDDSEPVLKGVKLHYT

SEQ ID NO: 961 - protein, 1273 aa, Artificial Sequence
  SARS-CoV-2/Hong Kong/case85_VM20002868/2020__EPI_ISL_414519 spike protein (1-1273)(Q965C_S1003C)
MFVFLVLVPLVSSQCVNLTTRTQLPPAYTNSFTRGVYYPDKVFRSSVLHSTQDLFLPFFSNVTWFHAIHVSGTNGTKRFDNPVLPFNDGVYFASTEKSNIIRGWIFGTTLDSKTQSLLIVNNATNVVIKVCEFQFCNDPFLGVYYHKNNKSWMESEFRVYSSANNCTFEYVSQPFLMDLEGKQGNFKNLREFVFKNIDGYFKIYSKHTPINLVRDLPQGFSALEPLVDLPIGINITRFQTLLALHRSYLTPGDSSSGWTAGAAAYYVGYLQPRTFLLKYNENGTITDAVDCALDPLSETKCTLKSFTVEKGIYQTSNFRVQPTESIVRFPNITNLCPFGEVFNATRFASVYAWNRKRISNCVADYSVLYNSASFSTFKCYGVSPTKLNDLCFTNVYADSFVIRGDEVRQIAPGQTGKIADYNYKLPDDFTGCVIAWNSNNLDSKVGGNYNYLYRLFRKSNLKPFERDISTEIYQAGSTPCNGVEGFNCYFPLQSYGFQPTNGVGYQPYRVVVLSFELLHAPATVCGPKKSTNLVKNKCVNFNFNGLTGTGVLTESNKKFLPFQQFGRDIADTTDAVRDPQTLEILDITPCSFGGVSVITPGTNTSNQVAVLYQDVNCTEVPVAIHADQLTPTWRVYSTGSNVFQTRAGCLIGAEHVNNSYECDIPIGAGICASYQTQTNSPRRARSVASQSIIAYTMSLGAENSVAYSNNSIAIPTNFTISVTTEILPVSMTKTSVDCTMYICGDSTECSNLLLQYGSFCTQLNRALTGIAVEQDKNTQEVFAQVKQIYKTPPIKDFGGFNFSQILPDPSKPSKRSFIEDLLFNKVTLADAGFIKQYGDCLGDIAARDLICAQKFNGLTVLPPLLTDEMIAQYTSALLAGTITSGWTFGAGAALQIPFAMQMAYRFNGIGVTQNVLYENQKLIANQFNSAIGKIQDSLSSTASALGKLQDVVNQNAQALNTLVKCLSSNFGAISSVLNDILSRLDKVEAEVQIDRLITGRLQCLQTYVTQQLIRAAEIRASANLAATKMSECVLGQSKRVDFCGKGYHLMSFPQSAPHGVVFLHVTYVPAQEKNFTTAPAICHDGKAHFPREGVFVSNGTHWFVTQRNFYEPQIITTDNTFVSGNCDVVIGIVNNTVYDPLQPELDSFKEELDKYFKNHTSPDVDLGDISGINASVVNIQKEIDRLNEVAKNLNESLIDLQELGKYEQYIKWPWYIWLGFIAGLIAIVMVTIMLCCMTSCCSCLKGCCSCGSCCKFDEDDSEPVLKGVKLHYT

SEQ ID NO: 962 - protein, 1273 aa, Artificial Sequence
  SARS-CoV-2/England/200990660/2020__EPI_ISL_414523 spike protein (1-1273)(Q965C_S1003C)
MFVFLVLLPLVSSQCVNLTTRTQLPPAYTNSFTRGVYYPDKVFRSSVLHSTQDLFLPFFSNVTWFHAIHVSGTNGTKRFDNPVLPFNDGVYFASTEKSNIIRGWIFGTTLDSKTQSLLIVNNATNVVIKVCEFQFCNDPFLGVYYHKNNKSWMESEFRVYSSANNCTFEYVSQPFLMDLEGKQGNFKNLREFVFKNIDGYFKIYSKHTPINLVRDLPQGFSALEPLVDLPIGINITRFQTLLALHRSYLTPGDSSSGWTAGAAAYYVGYLQPRTFLLKYNENGTITDAVDCALDPLSETKCTLKSFTVEKGIYQTSNFRVQPTESIVRFPNITNLCPFGEVFNATRFASVYAWNRKRISNCVADYSVLYNSASFSTFKCYGVSPTKLNDLCFTNVYADSFVIRGDEVRQIAPGQTGKIADYNYKLPDDFTGCVIAWNSNNLDSKVGGNYNYLYRLFRKSNLKPFERDISTEIYQAGSTPCNGVEGFNCYFPLQSYGFQPTNGVGYQPYRVVVLSFELLHAPATVCGPKKSTNLVKNKCVNFNFNGLTGTGVLTESNKKFLPFQQFGRDIADTTDAVRDPQTLEILDITPCSFGGVSVITPGTNTSNQVAVLYQGVNCTEVPVAIHADQLTPTWRVYSTGSNVFQTRAGCLIGAEHVNNSYECDIPIGAGICASYQTQTNSPRRARSVASQSIIAYTMSLGAENSVAYSNNSIAIPTNFTISVTTEILPVSMTKTSVDCTMYICGDSTECSNLLLQYGSFCTQLNRALTGIAVEQDKNTQEVFAQVKQIYKTPPIKDFGGFNFSQILPDPSKPSKRSFIEDLLFNKVTLADAGFIKQYGDCLGDIAARDLICAQKFNGLTVLPPLLTDEMIAQYTSALLAGTITSGWTFGAGAALQIPFAMQMAYRFNGIGVTQNVLYENQKLIANQFNSAIGKIQDSLSSTASALGKLQDVVNQNAQALNTLVKCLSSNFGAISSVLNDILSRLDKVEAEVQIDRLITGRLQCLQTYVTQQLIRAAEIRASANLAATKMSECVLGQSKRVDFCGKGYHLMSFPQSAPHGVVFLHVTYVPAQEKNFTTAPAICHDGKAHFPREGVFVSNGTHWFVTQRNFYEPQIITTDNTFVSGNCDVVIGIVNNTVYDPLQPELDSFKEELDKYFKNHTSPDVDLGDISGINASVVNIQKEIDRLNEVAKNLNESLIDLQELGKYEQYIKWPWYIWLGFIAGLIAIVMVTIMLCCMTSCCSCLKGCCSCGSCCKFDEDDSELVLKGVKLHYT

SEQ ID NO: 963 - protein, 1273 aa, Artificial Sequence
  SARS-CoV-2/Australia/NSW09/2020__EPI_ISL_413595 spike protein (1-1273)(Q965C_S1003C)
MFVFLVLLPLVSSQCVNLTTRTQLPPAYTNSFTRGVYYPDKVFRSSVLHSTQDLFLPFFSNVTWFHAIHVSGTNGTKRFDNPVLPFNDGVYFASTEKSNIIRGWIFGTTLDSKTQSLLIVNNATNVVIKVCEFQFCNDPFLGVYYHKNNKSWMESEFRVYSSANNCTFEYVSQPFLMDLEGKQGNFKNLREFVFKNIDGYFKIYSKHTPINLVRDLPQGFSALEPLVDLPIGINITRFQTLLALHRSYLTPGDSSSGWTAGAAAYYVGYLQPRTFLLKYNENGTITDAVDCALDPLSETKCTLKSFTVEKGIYQTSNFRVQPTESIVRFPNITNLCPFGEVFNATRFASVYAWNRKRISNCVADYSVLYNSASFSTFKCYGVSPTKLNDLCFTNVYADSFVIRGDEVRQIAPGQTGKIADYNYKLPDDFTGCVIAWNSNNLDSKVGGNYNYLYRLFRKSNLKPFERDISTEIYQAGSTPCNGVEGFNCYFPLQSYGFQPTNGVGYQPYRVVVLSFELLHAPATVCGPKKSTNLVKNKCVNFNFNGLTGTGVLTESNKKFLPFQQFGRDIADTTDAVRDPQTLEILDITPCSFGGVSVITPGTNTSNQVAVLYQDVNCTEVPVAIHADQLTPTWRVYSTGSNVFQTRAGCLIGAEHVNNSYECDIPIGAGICASYQTQTNSPRRARSVASQSIIAYTMSLGAENSVAYSNNSIAIPTNFTISVTTEILPVSMTKTSVDCTMYICGDSTECSNLLLQYGSFCTQLNRALTGIAVEQDKNTQEVFAQVKQIYKTPPIKDFGGFNFSQILPDPSKPSKRSFIEDLLFNKVTLADAGFIKQYGDCLGDIAARDLICAQKFNGLTVLPPLLTDEMIAQYTSALLAGTITSGWTFGAGAALQIPFAMQMAYRFNGIGVTQNVLYENQKLIANQFNSAIGKIQDSLSFTASALGKLQDVVNQNAQALNTLVKCLSSNFGAISSVLNDILSRLDKVEAEVQIDRLITGRLQCLQTYVTQQLIRAAEIRASANLAATKMSECVLGQSKRVDFCGKGYHLMSFPQSAPHGVVFLHVTYVPAQEKNFTTAPAICHDGKAHFPREGVFVSNGTHWFVTQRNFYEPQIITTDNTFVSGNCDVVIGIVNNTVYDPLQPELDSFKEELDKYFKNHTSPDVDLGDISGINASVVNIQKEIDRLNEVAKNLNESLIDLQELGKYEQYIKWPWYIWLGFIAGLIAIVMVTIMLCCMTSCCSCLKGCCSCGSCCKFDEDDSEPVLKGVKLHYT

SEQ ID NO: 964 - protein, 1273 aa, Artificial Sequence
  SARS-CoV-2/Australia/NSW10/2020__EPI_ISL_413596 spike protein (1-1273)(Q965C_S1003C)
MFVFLVLLPLVSSQCVNLTTRTQLPPAYTNSFTRGVYYPDKVFRSSVLHSTQDLFLPFFSNVTWFHAIHVSGTNGTKRFDNPVLPFNDGVYFASTEKSNIIRGWIFGTTLDSKTQSLLIVNNATNVVIKVCEFQFCNDPFLGVYYHKNNKSWMESEFRVYSSANNCTFEYVSQPFLMDLEGKQGNFKNLREFVFKNIDGYFKIYSKHTPINLVRDLPQGFSALEPLVDLPIGINITRFQTLLALHRSYLTPGDSSSGWTAGAAAYYVGYLQPRTFLLKYNENGTITDAVDCALDPLSETKCTLKSFTVEKGIYQTSNFRVQPTESIVRFPNITNLCPFGEVFNATRFASVYAWNRKRISNCVADYSVLYNSASFSTFKCYGVSPTKLNDLCFTNVYADSFVIRGDEVRQIAPGQTGKIADYNYKLPDDFTGCVIAWNSNNLDSKVGGNYNYLYRLFRKSNLKPFERDISTEIYQAGSTPCNGVEGFNCYFPLQSYGFQPTNGVGYQPYRVVVLSFELLHAPATVCGPKKSTNLVKNKCVNFNFNGLTGTGVLTESNKKFLPFQQFGRDIADTTDAVRDPQTLEILDITPCSFGGVSVITPGTNTSNQVAVLYQDVNCTEVPVAIHADQLTPTWRVYSTGSNVFQTRAGCLIGAEHVNNSYECDIPIGAGICASYQTQTNSPRRARSVASQSIIAYTMSLGAENSVAYSNNSIAIPTNFTISVTTEILPVSMTKTSVDCTMYICGDSTECSNLLLQYGSFCTQLNRALTGIAVEQDKNTQEVFAQVKQIYKTPPIKDFGGFNFSQILPDPSKPSKRSFIEDLLFNKVTLADAGFIKQYGDCLGDIAARDLICAQKFNGLTVLPPLLTDEMIAQYTSALLAGTITSGWTFGAGAALQIPFAMQMAYRFNGIGVTQNVLYENQKLIANQFNSAIGKIQDSLSSTASALGKLQDVVNQNAQALNTLVKCLSSNFGAISSVLNDILSRLDKVEAEVQIDRLITGRLQCLQTYVTQQLIRAAEIRASANLAATKMSECVLGQSKRVDFCGKGYHLMSFPQSAPHGVVFLHVTYVPAQEKNFTTAPAICHDGKAHFPREGVFVSNGTHWFVTQRNFYEPQIITTDNTFVSGNCDVVIGIVNNTVYDPLQPELDSFKEELDKYFKNHTSPDVDLGDISGINASVVNIQKEIDRLNEVAKNLNESLIDLQELGKYEQYIKWPWYIWLGFIAGLIAIVMVTIMLCCMTSCCSCLKGCCSCGSCFKFDEDDSEPVLKGVKLHYT

SEQ ID NO: 965 - protein, 1273 aa, Artificial Sequence
  SARS-CoV-2/Switzerland/1000477797/2020__EPI_ISL_413023 spike protein (1-1273)(Q965C_S1003C)
MFVFLVLLPLVSSQCVNLTTRTQLPPAYTNSFTRGVYYPDKVFRSSVLHSTQDLFLPFFSNVTWFHAIHVSGTNGTKRFDNPVLPFNDGVYFASTEKSNIIRGWIFGTTLDSKTQSLLIVNNATNVVIKVCEFQFCNDPFLGVYYHKNNKSWMESEFRVYSSANNCTFEYVSQPFLMDLEGKQGNFKNLREFVFKNIDGYFNIYSKHTPINLVRDLPQGFSALEPLVDLPIGINITRFQTLLALHRSYLTPGDSSSGWTAGAAAYYVGYLQPRTFLLKYNENGTITDAVDCALDPLSETKCTLKSFTVEKGIYQTSNFRVQPTESIVRFPNITNLCPFGEVFNATRFASVYAWNRKRISNCVADYSVLYNSASFSTFKCYGVSPTKLNDLCFTNVYADSFVIRGDEVRQIAPGQTGKIADYNYKLPDDFTGCVIAWNSNNLDSKVGGNYNYLYRLFRKSNLKPFERDISTEIYQAGSTPCNGVEGFNCYFPLQSYGFQPTNGVGYQPYRVVVLSFELLHAPATVCGPKKSTNLVKNKCVNFNFNGLTGTGVLTESNKKFLPFQQFGRDIADTTDAVRDPQTLEILDITPCSFGGVSVITPGTNTSNQVAVLYQGVNCTEVPVAIHADQLTPTWRVYSTGSNVFQTRAGCLIGAEHVNNSYECDIPIGAGICASYQTQTNSPRRARSVASQSIIAYTMSLGAENSVAYSNNSIAIPTNFTISVTTEILPVSMTKTSVDCTMYICGDSTECSNLLLQYGSFCTQLNRALTGIAVEQDKNTQEVFAQVKQIYKTPPIKDFGGFNFSQILPDPSKPSKRSFIEDLLFNKVTLADAGFIKQYGDCLGDIAARDLICAQKFNGLTVLPPLLTDEMIAQYTSALLAGTITSGWTFGAGAALQIPFAMQMAYRFNGIGVTQNVLYENQKLIANQFNSAIGKIQDSLSSTASALGKLQDVVNQNAQALNTLVKCLSSNFGAISSVLNDILSRLDKVEAEVQIDRLITGRLQCLQTYVTQQLIRAAEIRASANLAATKMSECVLGQSKRVDFCGKGYHLMSFPQSAPHGVVFLHVTYVPAQEKNFTTAPAICHDGKAHFPREGVFVSNGTHWFVTQRNFYEPQIITTDNTFVSGNCDVVIGIVNNTVYDPLQPELDSFKEELDKYFKNHTSPDVDLGDISGINASVVNIQKEIDRLNEVAKNLNESLIDLQELGKYEQYIKWPWYIWLGFIAGLIAIVMVTIMLCCMTSCCSCLKGCCSCGSCCKFDEDDSEPVLKGVKLHYT

SEQ ID NO: 966 - protein, 1273 aa, Artificial Sequence
  SARS-CoV-2/Belgium/BA-02291/2020__EPI_ISL_415159 spike protein (1-1273)(Q965C_S1003C)
MFVFLVLLPLVSSQCVNLTTRTQLPPAYTNSFTRGVYYPDKVFRSSVLHSTQDLFLPFFSNVTWFHAIHVSGTNGTKRFDNPVLPFNDGVYFASTEKSNIIRGWIFGTTLDSKTQSLLIVNNATNVVIKVCEFQFCNDPFLGVYYHKNNKSWMESEFRVYSSANNCTFEYVSQPFLMDLEGKQGNFKNLREFVFKNIDGYFKIYSKHTPINLVRDLPQGFSALEPLVDLPIGINITRFQTLLALHRSYLTPGDSSSGWTAGAAAYYVGYLQPRTFLLKYNENGTITDAVDCALDPLSETKCTLKSFTVEKGIYQTSNFRVQPTESIVRFPNITNLCPFGEVFNATRFASVYAWNRKRISNCVADYSVLYNSASFSTFKCYGVSPTKLNDLCFTNVYADSFVIRGDEVRQIAPGQTGKIADYNYKLPDDFTGCVIAWNSNNLDSKVGGNYNYLYRLFRRSNLKPFERDISTEIYQAGSTPCNGVEGFNCYFPLQSYGFQPTNGVGYQPYRVVVLSFELLPAPATVCGPKKSTNLVKNKCVNFNFNGLTGTGVLTESNKKFLPFQQFGRDIADTTDAVRDPQTLEILDITPCSFGGVSVITPGTNTSNQVAVLYQGVNCTEVPVAIHADQLTPTWRVYSTGSNVFQTRAGCLIGAEHVNNSYECDIPIGAGICASYQTQTNSPRRARSVASQSIIAYTMSLGAENSVAYSNNSIAIPTNFTISVTTEILPVSMTKTSVDCTMYICGDSTECSNLLLQYGSFCTQLNRALTGIAVEQDKNTQEVFAQVKQIYKTPPIKDFGGFNFSQILPDPSKPSKRSFIEDLLFNKVTLADAGFIKQYGDCLGDIAARDLICAQKFNGLTVLPPLLTDEMIAQYTSALLAGTITSGWTFGAGAALQIPFAMQMAYRFNGIGVTQNVLYENQKLIANQFNSAIGKIQDSLSSAAPALGKLQDVVNQNAQALNTLVKCLSSNFGAISSVLNDILSRLDKVEAEVQIDRLITGRLQCLQTYVTQQLIRAAEIRASANLAATKMSECVLGQSKRVDFCGKGYHLMSFPQSAPHGVVFLHVTYVPAQEKNFTTAPAICHDGKAHFPREGVFVSNGTHWFVTQRNFYEPQIITTDNTFVSGNCDVVIGIVNNTVYDPLQPELDSFKEELDKYFKNHTSPDVDLGDISGINASVVNIQKEIDRLNEVAKNLNESLIDLQELGKYEQYIKWPWYIWLGFIAGLIAIVMVTIMLCCMTSCCSCLKGCCSCGSCCKFDEDDSEPVLKGVKLHYT

SEQ ID NO: 967 - protein, 1273 aa, Artificial Sequence
  SARS-CoV-2/USA/WA8-UW5/2020__EPI_ISL_413486 spike protein (1-1273)(Q965C_S1003C)
MFVFLVLLPLVSSQCVNLTTRTQLPPAYTNSFTRGVYYPDKVFRSSVLHSTQDLFLPFFSNVTWFHAIHVSGTNGTKRFDNPVLPFNDGVYFASTEKSNIIRGWIFGTTLDSKTQSLLIVNNATNVVIKVCEFQFCNDPFLGVYYHKNNKSWMESEFRVYSSANNCTFEYVSQPFLMDLEGKQGNFKNLREFVFKNIDGYFKIYSKHTPINLVRDLPQGFSALEPLVDLPIGINITRFQTLLALHRSYLTPGDSSSGWTAGAAAYYVGYLQPRTFLLKYNENGTITDAVDCALDPLSETKCTLKSFTVEKGIYQTSNFRVQPTESIVRFPNITNLCPFGEVFNATRFASVYAWNRKRISNCVADYSVLYNSASFSTFKCYGVSPTKLNDLCFTNVYADSFVIRGDEVRQIAPGQTGKIADYNYKLPDDFTGCVIAWNSNNLDSKVGGNYNYLYRLFRKSNLKPFERDISTEIYQAGSTPCNGVEGFNCYFPLQSYGFQPTNGVGYQPYRVVVLSFELLHAPATVCGPKKSTNLVKNKCVNFNFNGLTGTGVLTESNKKFLPFQQFGRDIADTTDAVRDPQTLEILDITPCSFGGVSVITPGTNTSNQVAVLYQDVNCTEVPVAIHADQLTPTWRVYSTGSNVFQTRAGCLIGAEYVNNSYECDIPIGAGICASYQTQTNSPRRARSVASQSIIAYTMSLGAENSVAYSNNSIAIPTNFTISVTTEILPVSMTKTSVDCTMYICGDSTECSNLLLQYGSFCTQLNRALTGIAVEQDKNTQEVFAQVKQIYKTPPIKDFGGFNFSQILPDPSKPSKRSFIEDLLFNKVTLADAGFIKQYGDCLGDIAARDLICAQKFNGLTVLPPLLTDEMIAQYTSALLAGTITSGWTFGAGAALQIPFAMQMAYRFNGIGVTQNVLYENQKLIANQFNSAIGKIQDSLSSTASALGKLQDVVNQNAQALNTLVKCLSSNFGAISSVLNDILSRLDKVEAEVQIDRLITGRLQCLQTYVTQQLIRAAEIRASANLAATKMSECVLGQSKRVDFCGKGYHLMSFPQSAPHGVVFLHVTYVPAQEKNFTTAPAICHDGKAHFPREGVFVSNGTHWFVTQRNFYEPQIITTDNTFVSGNCDVVIGIVNNTVYDPLQPELDSFKEELDKYFKNHTSPDVDLGDISGINASVVNIQKEIDRLNEVAKNLNESLIDLQELGKYEQYIKWPWYIWLGFIAGLIAIVMVTIMLCCMTSCCSCLKGCCSCGSCCKFDEDDSEPVLKGVKLHYT

SEQ ID NO: 968 - protein, 1273 aa, Artificial Sequence
  SARS-CoV-2/England/20102000506/2020__EPI_ISL_415147 spike protein (1-1273)(Q965C_S1003C)
MFVFLVLLPLVSSQCVNLTTRTQLPPAYTNSFTRGVYYPDKVFRSSVLHSTQDLFLPFFSNVTWFHAIHVSGTNGTKRFDNPVLPFNDGVYFASTEKSNIIRGWIFGTTLDSKTQSLLIVNNATNVVIKVCEFQFCNDPFLGVYYHKNNKSWMESEFRVYSSANNCTFEYVSQPFLMDLEGKQGNFKNLREFVFKNIDGYFKIYSKHTPINLVRDLPQGFSALEPLVDLPIGINITRFQTLLALHRSYLTPGDSSSGWTAGAAAYYVGYLQPRTFLLKYNENGTITDAVDCALDPLSETKCTLKSFTVEKGIYQTSNFRVQPTESIVRFPNITNLCPFGEVFNATRFASVYAWNRKRISNCVADYSVLYNSASFSTFKCYGVSPTKLNDLCFTNVYADSFVIRGDEVRQIAPGQTGKIADYNYKLPDDFTGCVIAWNSNNLDSKVGGNYNYLYRLFRKSNLKPFERDISTEIYQAGSTPCNGVEGFNCYFPLQSYGFQPTNGVGYQPYRVVVLSFELLHAPATVCGPKKSTNLVKNKCVNFNFNGLTGTGVLTESNKKFLPFQQFGRDIADTTDAVRDPQTLEILDITPCSFGGVSVITPGTNTSNQVAVLYQGVNCTEVPVAIHADQLTPTWRVYSTGSNVFQTRAGCLIGAEHVNNSYECDIPIGAGICASYQTQTNSPRRARSVASQSIIAYTMSLGAENSVAYSNNSIAIPTNFTISVTTEILPVSMTKTSVDCTMYICGDSTECSNLLLQYGSFCTQLNRALTGIAVEQDKNTQEVFAQVKQIYKTPPIKDFGGFNFSQILPDPSKPSKRSFIEDLLFNKVTLADAGFIKQYGYCLGDIAARDLICAQKFNGLTVLPPLLTDEMIAQYTSALLAGTITSGWTFGAGAALQIPFAMQMAYRFNGIGVTQNVLYENQKLIANQFNSAIGKIQDSLSSTASALGKLQDVVNQNAQALNTLVKCLSSNFGAISSVLNDILSRLDKVEAEVQIDRLITGRLQCLQTYVTQQLIRAAEIRASANLAATKMSECVLGQSKRVDFCGKGYHLMSFPQSAPHGVVFLHVTYVPAQEKNFTTAPAICHDGKAHFPREGVFVSNGTHWFVTQRNFYEPQIITTDNTFVSGNCDVVIGIVNNTVYDPLQPELDSFKEELDKYFKNHTSPDVDLGDISGINASVVNIQKEIDRLNEVAKNLNESLIDLQELGKYEQYIKWPWYIWLGFIAGLIAIVMVTIMLCCMTSCCSCLKGCCSCGSCCKFDEDDSEPVLKGVKLHYT

SEQ ID NO: 969 - protein, 1273 aa, Artificial Sequence
  SARS-CoV-2/Belgium/VAG-03013/2020__EPI_ISL_415155 spike protein (1-1273)(Q965C_S1003C)
MFVFLVLLPLVSSQCVNLTTRTQLPPAYTNSFTRGVYYPDKVFRSSVLHSTQDLFLPFFSNVTWFHAIHVSGTNGTKRFDNPVLPFNDGVYFASTEKSNIIRGWIFGTTLDSKTQSLLIVNNATNVVIKVCEFQFCNDPFLGVYYHKNNKSWMESEFRVYSSANNCTFEYVSQPFLMDLEGKQGNFKNLREFVFKNIDGYFKIYSKHTPINLVRDLPQGFSALEPLVDLPIGINITRFQTLLALHRSYLTPGDSSSGWTAGAAAYYVGYLQPRTFLLKYNENGTITDAVDCALDPLSETKCTLKSFTVEKGIYQTSNFRVQPTESIVRFPNITNLCPFGEVFNATRFASVYAWNRKRISNCVADYSVLYNSASFSTFKCYGVSPTKLNDLCFTNVYADSFVIRGDEVRQIAPGQTGKIADYNYKLPDDFTGCVIAWNSNNLDSKVGGNYNYLYRLFRKSNLKPFERDISTEIYQAGSTPCNGVEGFNCYFPLQSYGFQPTNGVGYQPYRVVVLSFELLHAPATVCGPKKSTNLVKNKCVNFNFNGLTGTGVLTESNKKFLPFQQFGRDIADTTDAVRDPQTLEILDITPCSFGGVSVITPGTNTSNQVAVLYQGVNCTEVPVAIHADQLTPTWRVYSTGSNVFQTRAGCLIGAEHVNNSYECDIPIGAGICASYQTQTNSPRRARSVASQSIIAYTMSLGAENSVAYSNNSIAIPTNFTISVTTEILPVSMTKTSVDCTMYICGDSTECSNLLLQYGSFCTQLNRALTGIAVEQDKNTQEVFAQVKQIYKTPPIKDFGGFNFSQILPDPSKPSKRSFIEDLLFNKVTLADAGFIKQYGDCLGDIAARDLICAQKFNGLTVLPPLLTDEMIAQYTSALLAGTITSGWTFGAGAALQIPFAMQMAYRFNGIGVTQNVLYENQKLIANQFNSAIGKIQDSLSSTATALGKLQDVVNQNAQALNTLVKCLSSNFGAISSVLNDILSRLDKVEAEVQIDRLITGRLQCLQTYVTQQLIRAAEIRASANLAATKMSECVLGQSKRVDFCGKGYHLMSFPQSAPHGVVFLHVTYVPAQEKNFTTAPAICHDGKAHFPREGVFVSNGTHWFVTQRNFYEPQIITTDNTFVSGNCDVVIGIVNNTVYDPLQPELDSFKEELDKYFKNHTSPDVDLGDISGINASVVNIQKEIDRLNEVAKNLNESLIDLQELGKYEQYIKWPWYIWLGFIAGLIAIVMVTIMLCCMTSCCSCLKGCCSCGSCCKFDEDDSEPVLKGVKLHYT

SEQ ID NO: 970 - protein, 1273 aa, Artificial Sequence
  SARS-CoV-2/Belgium/BC-03016/2020__EPI_ISL_415157 spike protein (1-1273)(Q965C_S1003C)
MFVFLVLLPLVSSQCVNLTTRTQLPPAYTNSFTRGVYYPDKVFRSSVLHSTQDLFLPFFSNVTWFHAIHVSGTNGTKRFDNPVLPFNDGVYFASTEKSNIIRGWIFGTTLDSKTQSLLIVNNATNVVIKVCEFQFCNDPFLGVYYHKNNKSWMESEFRVYSSANNCTFEYVSQPFLMDLEGKQGNFKNLREFVFKNIDGYFKIYSKHTPINLVRDLPQGFSALEPLVDLPIGINITRFQTLLALHRSYLTPGDSSSGWTAGAAAYYVGYLQPRTFLLKYNENGTITDAVDCALDPLSETKCTLKSFTVEKGIYQTSNFRVQPTESIVRFPNITNLCPFGEVFNATRFASVYAWNRKRISNCVADYSVLYNSASFSTFKCYGVSPTKLNDLCFTNVYADSFVIRGDEVRQIAPGQTGKIADYNYKLPDDFTGCVIAWNSNNLDSKVGGNYNYLYRLFRKSNLKPFERDISTEIYQAGSTPCNGVEGFNCYFPLQSYGFQPTNGVGYQPYRVVVLSFELLHAPATVCGPKKSTNLVKNKCVNFNFNGLTGTGVLTESNKKFLPFQQFGRDIADTTDAVRDPQTLEILDITPCSFGGVSVITPGTNTSNQVAVLYQGVNCTEVPVAIHADQLTPTWRVYSTGSNVFQTRAGCLIGAEHVNNSYECDIPIGAGICASYQTQTNSPRRARSVASQSIIAYTMSLGAENSVAYSNNSIAIPTNFTISVTTEILPVSMTKTSVDCTMYICGDSTECSNLLLQYGSFCTQLNRALTGIAVEQDKNTQEVFAQVKQIYKTPPIKDFGGFNFSQILPDPSKPSKRSFIEDLLFNKVTLADAGFIKQYGDCLGDIAARDLICAQKFNGLTVLPPLLTDEMIAQYTSALLAGTITSGWTFGAGAALQIPFAMQMAYRFNGIGVTQNVLYENQKLIANQFNSAIGKIQDSLSSTAPALGKLQDVVNQNAQALNTLVKCLSSNFGAISSVLNDILSRLDKVEAEVQIDRLITGRLQCLQTYVTQQLIRAAEIRASANLAATKMSECVLGQSKRVDFCGKGYHLMSFPQSAPHGVVFLHVTYVPAQEKNFTTAPAICHDGKAHFPREGVFVSNGTHWFVTQRNFYEPQIITTDNTFVSGNCDVVIGIVNNTVYDPLQPELDSFKEELDKYFKNHTSPDVDLGDISGINASVVNIQKEIDRLNEVAKNLNESLIDLQELGKYEQYIKWPWYIWLGFIAGLIAIVMVTIMLCCMTSCCSCLKGCCSCGSCCKFDEDDSEPVLKGVKLHYT

SEQ ID NO: 971 - protein, 1273 aa, Artificial Sequence
  SARS-CoV-2/Germany/BavPat3/2020__EPI_ISL_414521 spike protein (1-1273)(Q965C_S1003C)
MFVFLVLLPLVSSQCVNLTTRTQLPPAYTNSFTRGVYYPDKVFRSSVLHSTQDLFLPFFSNVTWFHAIHVSGTNGTKRFDNPVLPFNDGVYFASTEKSNIIRGWIFGTTLDSKTQSLLIVNNATNVVIKVCEFQFCNDPFLGVYYHKNNKSWMESEFRVYSSANNCTFEYVSQPFLMDLEGKQGNFKNLREFVFKNIDGYFKIYSKHTPINLVRDLPQGFSALEPLVDLPIGINITRFQTLLALHRSYLTPGDSSSGWTAGAAAYYVGYLQPRTFLLKYNENGTITDAVDCALDPLSETKCTLKSFTVEKGIYQTSNFRVQPTESIVRFPNITNLCPFGEVFNATRFASVYAWNRKRISNCVADYSVLYNSASFSTFKCYGVSPTKLNDLCFTNVYADSFVIRGDEVRQIAPGQTGKIADYNYKLPDDFTGCVIAWNSNNLDSKVGGNYNYLYRLFRKSNLKPFERDISTEIYQAGSTPCNGVEGFNCYFPLQSYGFQPTNGVGYQPYRVVVLSFELLHAPATVCGPKKSTNLVKNKCVNFNFNGLTGTGVLTESNKKFLPFQQFGRDIADTTDAVRDPQTLEILDITPCSFGGVSVITPGTNTSNQVAVLYQDVNCTEVPVAIHADQLTPTWRVYSTGSNVFQTRAGCLIGAEHVNNSYECDIPIGAGICASYQTQTNSPRRARSVASQSIIAYTMSLGAENSVAYSNNSIAIPTNFTISVTTEILPVSMTKTSVDCTMYICGDSTECSNLLLQYGSFCTQLNRALTGIAVEQDKNTQQVFAQVKQIYKTPPIKDFGGFNFSQILPDPSKPSKRSFIEDLLFNKVTLADAGFIKQYGDCLGDIAARDLICAQKFNGLTVLPPLLTDEMIAQYTSALLAGTITSGWTFGAGAALQIPFAMQMAYRFNGIGVTQNVLYENQKLIANQFNSAIGKIQDSLSSTASALGKLQDVVNQNAQALNTLVKCLSSNFGAISSVLNDILSRLDKVEAEVQIDRLITGRLQCLQTYVTQQLIRAAEIRASANLAATKMSECVLGQSKRVDFCGKGYHLMSFPQSAPHGVVFLHVTYVPAQEKNFTTAPAICHDGKAHFPREGVFVSNGTHWFVTQRNFYEPQIITTDNTFVSGNCDVVIGIVNNTVYDPLQPELDSFKEELDKYFKNHTSPDVDLGDISGINASVVNIQKEIDRLNEVAKNLNESLIDLQELGKYEQYIKWPWYIWLGFIAGLIAIVMVTIMLCCMTSCCSCLKGCCSCGSCCKFDEDDSEPVLKGVKLHYT

SEQ ID NO: 972 - protein, 1273 aa, Artificial Sequence
  SARS-CoV-2/France/HF1805/2020__EPI_ISL_414628 spike protein (1-1273)(Q965C_S1003C)
MFVFLVLLPLVSSQCVNLTTRTQLPPAYTNSFTRGVYYPDKVFRSSVLHSTQDLFLPFFSNVTWFHAIHVSGTNGTKRFDNPVLPFNDGVYFASTEKSNIIRGWIFGTTLDSKTQSLLIVNNATNVVIKVCEFQFCNDPFLGVYYHKNNKSWMESEFRVYSSANNCTFEYVSQPFLMDLEGKQGNFKNLREFVFKNIDGYFKIYSKHTPINLVRDLPQGFSALEPLVDLPIGINITRFQTLLALHRSYLTPGDSSSGWTAGAAAYYVGYLQPRTFLLKYNENGTITDAVDCALDPLSETKCTLKSFTVEKGIYQTSNFRVQPTESIVRFPNITNLCPFGEVFNATRFASVYAWNRKRISNCVADYSVLYNSASFSTFKCYGVSPTKLNDLCFTNVYADSFVIRGDEVRQIAPGQTGKIADYNYKLPDDFTGCVIAWNSNNLDSKVGGNYNYLYRLFRKSNLKPFERDISTEIYQAGSTPCNGVEGFNCYFPLQSYGFQPTNGVGYQPYRVVVLSFELLHAPATVCGPKKSTNLVKNKCVNFNFNGLTGTGVLTESNKKFLPFQQFGRDIADTTDAVRDPQTLEILDITPCSFGGVSVITPGTNTSNQVAVLYQGVNCTEVPVAIHADQLTPTWRVYSTGSNVFQTRAGCLIGAEHVNNSYECDIPIGAGICASYQTQTNSPRRARSVASQSIIAYTMSLGAENSVAYSNNSIAIPTNFTISVTTEILPVSMTKTSVDCTMYICGDSTECSNLLLQYGSFCTQLNRALTGIAVEQDKNTQEVFAQVKQIYKTPPIKDFGGFNFSQILPDPSKPSKRSFIEDLLFNKVTLADAGFIKQYGDCLGDIAARDLICAQKFNGLTVLPPLLTDEMIAQYTSALLAGTITSGWTFGAGAALQIPFAMQMAYRFNGIGVTQNVLYENQKLIANQFNSAIGKIQDSLSSTASALGKLQDVVNQNAQALNTLVKCLSSNFGAISSVLNDILSRLDKVEAEVQIDRLITGRLQCLQTYVTQQLIRAAEIRASANLAATKMSECVLGQSKRVDFCGKGYHLMSFPQSAPHGVVFLHVTYVPAQEKNFTTAPAICHDGKAHFPREGVFVSNGTHWFVTQRNFYEPQIITTDNTFVSGNCDVVIGVVNNTVYDPLQPELDSFKEELDKYFKNHTSPDVDLGDISGINASVVNIQKEIDRLNEVAKNLNESLIDLQELGKYEQYIKWPWYIWLGFIAGLIAIVMVTIMLCCMTSCCSCLKGCCSCGSCCKFDEDDSEPVLKGVKLHYT

SEQ ID NO: 973 - protein, 1273 aa, Artificial Sequence
  SARS-CoV-2/Netherlands/ZuidHolland_9/2020__EPI_ISL_414445 spike protein (1-1273)(Q965C_S1003C)
MFVFLVLLPLVSSQCVNLTTRTQLPPAYTNSFTRGVYYPDKVFRSSVLHSTQDLFLPFFSNVTWFHAIHVSGTNGTKRFDNPVLPFNDGVYFASTEKSNIIRGWIFGTTLDSKTQSLLIVNNATNVVIKVCEFQFCNDPFLGVYYHKNNKSWMESEFRVYSSANNCTFEYVSQPFLMDLEGKQGNFKNLREFVFKNIDGYFKIYSKHTPINLVRDLPQGFSALEPLVDLPIGINITRFQTLLALHRSYLTPGDSSSGWTAGAAAYYVGYLQPRTFLLKYNENGTITDAVDCALDPLSETKCTLKSFTVEKGIYQTSNFRVQPTESIVRFPNITNLCPFGEVFNATRFASVYAWNRKRISNCVADYSVLYNSASFSTFKCYGVSPTKLNDLCFTNVYADSFVIRGDEVRQIAPGQTGKIADYNYKLPDDFTGCVIAWNSNNLDSKVGGNYNYLYRLFRKSNLKPFERDISTEIYQAGSTPCNGVEGFNCYFPLQSYGFQPTNGVGYQPYRVVVLSFELLHAPATVCGPKKSTNLVKNKCVNFNFNGLTGTGVLTESNKKFLPFQQFGRDIADTTDAVRDPQTLEILDITPCSFGGVSVITPGTNTSNQVAVLYQGVNCTEVPVAIHADQLTPTWRVYSTGSNVFQTRAGCLIGAEHVNNSYECDIPIGAGICASYQTQTNSPRRARSVASQSIIAYTMSLGAENSVAYSNNSIAIPTNFTISVTTEILPVSMTKTSVDCTMYICGDSTECSNLLLQYGSFCTQLNRALTGIAVEQDKNTQEVFAQVKQIYKTPPIKDFGGFNFSQILPDPSKPSKRSFIEDLLFNKVTLADAGFIKQYGDCLGDIAARDLICVQKFNGLTVLPPLLTDEMIAQYTSALLAGTITSGWTFGAGAALQIPFAMQMAYRFNGIGVTQNVLYENQKLIANQFNSAIGKIQDSLSSTASALGKLQDVVNQNAQALNTLVKCLSSNFGAISSVLNDILSRLDKVEAEVQIDRLITGRLQCLQTYVTQQLIRAAEIRASANLAATKMSECVLGQSKRVDFCGKGYHLMSFPQSAPHGVVFLHVTYVPAQEKNFTTAPAICHDGKAHFPREGVFVSNGTHWFVTQRNFYEPQIITTDNTFVSGNCDVVIGIVNNTVYDPLQPELDSFKEELDKYFKNHTSPDVDLGDISGINASVVNIQKEIDRLNEVAKNLNESLIDLQELGKYEQYIKWPWYIWLGFIAGLIAIVMVTIMLCCMTSCCSCLKGCCSCGSCCKFDEDDSEPVLKGVKLHYT

SEQ ID NO: 974 - protein, 1273 aa, Artificial Sequence
  SARS-CoV-2/Finland/FIN03032020A/2020__EPI_ISL_413602 spike protein (1-1273)(Q965C_S1003C)
MFVFLVLLPLVSSQCVNLTTRTQLPPAYTNSFTRGVYYPDKVFRSSVLHSTQDLFLPFFSNVTWFHAIHVSGTNGTKRFDNPVLPFNDGVYFASTEKSNIIRGWIFGTTLDSKTQSLLIVNNATNVVIKVCEFQFCNDPFLGVYYHKNNKSWMESEFRVYSSANNCTFEYVSQPFLMDLEGKQGNFKNLREFVFKNIDGYFKIYSKHTPINLVRDLPQGFSALEPLVDLPIGINITRFQTLLALHRSYLTPGDSSSGWTAGAAAYYVGYLQPRTFLLKYNENGTITDAVDCALDPLSETKCTLKSFTVEKGIYQTSNFRVQPTESIVRFPNITNLCPFGEVFNATRFASVYAWNRKRISNCVADYSVLYNSASFSTFKCYGVSPTKLNDLCFTNVYADSFVIRGDEVRQIAPGQTGKIADYNYKLPDDFTGCVISWNSNNLDSKVGGNYNYLYRLFRKSNLKPFERDISTEIYQAGSTPCNGVEGFNCYFPLQSYGFQPTNGVGYQPYRVVVLSFELLHAPATVCGPKKSTNLVKNKCVNFNFNGLTGTGVLTESNKKFLPFQQFGRDIADTTDAVRDPQTLEILDITPCSFGGVSVITPGTNTSNQVAVLYQGVNCTEVPVAIHADQLTPTWRVYSTGSNVFQTRAGCLIGAEHVNNSYECDIPIGAGICASYQTQTNSPRRARSVASQSIIAYTMSLGAENSVAYSNNSIAIPTNFTISVTTEILPVSMTKTSVDCTMYICGDSTECSNLLLQYGSFCTQLNRALTGIAVEQDKNTQEVFAQVKQIYKTPPIKDFGGFNFSQILPDPSKPSKRSFIEDLLFNKVTLADAGFIKQYGDCLGDIAARDLICAQKFNGLTVLPPLLTDEMIAQYTSALLAGTITSGWTFGAGAALQIPFAMQMAYRFNGIGVTQNVLYENQKLIANQFNSAIGKIQDSLSSTASALGKLQDVVNQNAQALNTLVKCLSSNFGAISSVLNDILSRLDKVEAEVQIDRLITGRLQCLQTYVTQQLIRAAEIRASANLAATKMSECVLGQSKRVDFCGKGYHLMSFPQSAPHGVVFLHVTYVPAQEKNFTTAPAICHDGKAHFPREGVFVSNGTHWFVTQRNFYEPQIITTDNTFVSGNCDVVIGIVNNTVYDPLQPELDSFKEELDKYFKNHTSPDVDLGDISGINASVVNIQKEIDRLNEVAKNLNESLIDLQELGKYEQYIKWPWYIWLGFIAGLIAIVMVTIMLCCMTSCCSCLKGCCSCGSCCKFDEDDSEPVLKGVKLHYT

SEQ ID NO: 975 - protein, 1273 aa, Artificial Sequence
  SARS-CoV-2/France/GE1977/2020__EPI_ISL_414632 spike protein (1-1273)(Q965C_S1003C)
MFVFLVLLPLVSSQCVNLTTRTQLPPAYTNSFTRGVYYPDKVFRSSVLHSTQDLFLPFFSNVTWFHAIHVSGTNGTKRFDNPVLPFNDGVYFASTEKSNIIRGWIFGTTLDSKTQSLLIVNNATNVVIKVCEFQFCNDPFLGVYYHKNNKSWMESEFRVYSSANNCTFEYVSQPFLMDLEGKQGNFKNLREFVFKNIDGYFKIYSKHTPINLVRDLPQGFSALEPLVDLPIGINITRFQTLLALHRSYLTPGDSSSGWTAGAAAYYVGYLQPRTFLLKYNENGTITDAVDCALDPLSETKCTLKSFTVEKGIYQTSNFRVQPTESIVRFPNITNLCPFGEVFNATRFASVYAWNRKRISNCVADYSVLYNSASFSTFKCYGVSPTKLNDLCFTNVYADSFVIRGDEVRQIAPGQTGKIADYNYKLPDDFTGCVIAWNSNNLDSKVGGNYNYLYRLFRKSNLKPFERDISTEIYQAGSTPCNGVEGFNCYFPLQSYGFQPTNGVGYQPYRVVVLSFELLHAPATVCGPKKSTNLVKNKCVNFNFNGLTGTGVLTESNKKFLPFQQFGRDIADTTDAVRDPQTLEILDITPCSFGGVSVITPGTNTSNQVAVLYQGVNCTEVPVAIHADQLTPTWRVYSTGSNVFQTRAGCLIGAEHVNNSYECDIPIGAGICASYQTQTNSPRRARSVASQSIIAYTMSLGAENSVAYSNNSIAIPTNFTISVTTEILPVSMTKTSVDCTMYICGDSTECSNLLLQYGSFCTQLNRALTGIAVEQDKNTQEVFAQVKQIYKTPPIKDFGGFNFSQILPDPSKPSKRSFIEDLLFNKVTLADAGFIKQYGDCLGDIAARDLICAQKFNGLTVLPPLLTDEMIAQYTSALLAGTITSGWTFGAGAALQIPFAMQMAYRFNGIGVTQNVLYENQKLIANQFNSAIGKIQDSLFSTASALGKLQDVVNQNAQALNTLVKCLSSNFGAISSVLNDILSRLDKVEAEVQIDRLITGRLQCLQTYVTQQLIRAAEIRASANLAATKMSECVLGQSKRVDFCGKGYHLMSFPQSAPHGVVFLHVTYVPAQEKNFTTAPAICHDGKAHFPREGVFVSNGTHWFVTQRNFYEPQIITTDNTFVSGNCDVVIGIVNNTVYDPLQPELDSFKEELDKYFKNHTSPDVDLGDISGINASVVNIQKEIDRLNEVAKNLNESLIDLQELGKYEQYIKWPWYIWLGFIAGLIAIVMVTIMLCCMTSCCSCLKGCCSCGSCCKFDEDDSEPVLKGVKLHYT

SEQ ID NO: 976 - protein, 1273 aa, Artificial Sequence
  SARS-CoV-2/Finland/FIN-313/2020__EPI_ISL_414641 spike protein (1-1273)(Q965C_S1003C)
MFVFLVLLPLVSSQCVNLTTRTQLPPAYTNSFTRGVYYPDKVFRSSVLHSTQDLFLPFFSNVTWFHAIHVSGTNGTKRFDNPVLPFNDGVYFASTEKSNIIRGWIFGTTLDSKTQSLLIVNNATNVVIKVCEFQFCNDPFLGVYYHKNNKSWMESEFRVYSSANNCTFEYVSQPFLMDLEGKQGNFKNLREFVFKNIDGYFKIYSKHTPINLVRDLPQGFSALEPLVDLPIGINITRFKTLLALHRSYLTPGDSSSGWTAGAAAYYVGYLQPRTFLLKYNENGTITDAVDCALDPLSETKCTLKSFTVEKGIYQTSNFRVQPTESIVRFPNITNLCPFGEVFNATRFASVYAWNRKRISNCVADYSVLYNSASFSTFKCYGVSPTKLNDLCFTNVYADSFVIRGDEVRQIAPGQTGKIADYNYKLPDDFTGCVIAWNSNNLDSKVGGNYNYLYRLFRKSNLKPFERDISTEIYQAGSTPCNGVEGFNCYFPLQSYGFQPTNGVGYQPYRVVVLSFELLHAPATVCGPKKSTNLVKNKCVNFNFNGLTGTGVLTESNKKFLPFQQFGRDIADTTDAVRDPQTLEILDITPCSFGGVSVITPGTNTSNQVAVLYQGVNCTEVPVAIHADQLTPTWRVYSTGSNVFQTRAGCLIGAEHVNNSYECDIPIGAGICASYQTQTNSPRRARSVASQSIIAYTMSLGAENSVAYSNNSIAIPTNFTISVTTEILPVSMTKTSVDCTMYICGDSTECSNLLLQYGSFCTQLNRALTGIAVEQDKNTQEVFAQVKQIYKTPPIKDFGGFNFSQILPDPSKPSKRSFIEDLLFNKVTLADAGFIKQYGDCLGDIAARDLICAQKFNGLTVLPPLLTDEMIAQYTSALLAGTITSGWTFGAGAALQIPFAMQMAYRFNGIGVTQNVLYENQKLIANQFNSAIGKIQDSLSSTASALGKLQDVVNQNAQALNTLVKCLSSNFGAISSVLNDILSRLDKVEAEVQIDRLITGRLQCLQTYVTQQLIRAAEIRASANLAATKMSECVLGQSKRVDFCGKGYHLMSFPQSAPHGVVFLHVTYVPAQEKNFTTAPAICHDGKAHFPREGVFVSNGTHWFVTQRNFYEPQIITTDNTFVSGNCDVVIGIVNNTVYDPLQPELDSFKEELDKYFKNHTSPDVDLGDISGINASVVNIQKEIDRLNEVAKNLNESLIDLQELGKYEQYIKWPWYIWLGFIAGLIAIVMVTIMLCCMTSCCSCLKGCCSCGSCCKFDEDDSEPVLKGVKLHYT

SEQ ID NO: 977 - protein, 1273 aa, Artificial Sequence
  SARS-CoV-2/Netherlands/ZuidHolland_2/2020__EPI_ISL_414556 spike protein (1-1273)(Q965C_S1003C)
MFVFLVLLPLVSSQCVNLTTRTQLPPAYTNSFTRGVYYPDKVFRSSVLHSTQDLFLPFFSNVTWFHAIHVSGTNGTKRFDNPVLPFNDGVYFASTEKSNIIRGWIFGTTLDSKTQSLLIVNNATNVVIKVCEFQFCNDPFLGVYYHKNNKSWMESEFRVYSSANNCTFEYVSQPFLMDLEGKQGNFKNLREFVFKNIDGYFKIYSKHTPINLVRDLPQGFSALEPLVDLPIGINITRFQTLLALHRSYLTPGDSSSGWTAGAAAYYVGYLQPRTFLLKYNENGTITDAVDCALDPLSETKCTLKSFTVEKGIYQTSNFRVQPTESIVRFPNITNLCPFGEVFNATRFASVYAWNRKRISNCVADYSVLYNSASFSTFKCYGVSPTKLNDLCFTNVYADSFVIRGDEVRQIAPGQTGKIADYNYKLPDDFTGCVIAWNSNNLDSKVGGNYNYLYRLFRKSNLKPFERDISTEIYQAGSTPCNGVEGFNCYFPLQSYGFQPTNGVGYQPYRVVVLSFELLHAPATVCGPKKSTNLVKNKCVNFNFNGLTGTGVLTESNKKFLPFQQFGRDIADTTDAVRDPQTLEILDITPCSFGGVSVITPGTNTSNQVAVLYQGVNCTEVPVAIHADQLTPTWRVYSTGSNVFQTRAGCLIGAEHVNNSYECDIPIGAGICASYQTQTNSPRRARSVASQSIIAYTMSLGAENSVAYSNNSIAIPTNFTISVTTEILPVSMTKTSVDCTMYICGDSTECSNLLLQYGSFCTQLNRALTGIALEQDKNTQEVFAQVKQIYKTPPIKDFGGFNFSQILPDPSKPSKRSFIEDLLFNKVTLADAGFIKQYGDCLGDIAARDLICAQKFNGLTVLPPLLTDEMIAQYTSALLAGTITSGWTFGAGAALQIPFAMQMAYRFNGIGVTQNVLYENQKLIANQFNSAIGKIQDSLSSTASALGKLQDVVNQNAQALNTLVKCLSSNFGAISSVLNDILSRLDKVEAEVQIDRLITGRLQCLQTYVTQQLIRAAEIRASANLAATKMSECVLGQSKRVDFCGKGYHLMSFPQSAPHGVVFLHVTYVPAQEKNFTTAPAICHDGKAHFPREGVFVSNGTHWFVTQRNFYEPQIITTDNTFVSGNCDVVIGIVNNTVYDPLQPELDSFKEELDKYFKNHTSPDVDLGDISGINASVVNIQKEIDRLNEVAKNLNESLIDLQELGKYEQYIKWPWYIWLGFIAGLIAIVMVTIMLCCMTSCCSCLKGCCSCGSCCKFDEDDSEPVLKGVKLHYT

SEQ ID NO: 978 - protein, 1273 aa, Artificial Sequence
  SARS-CoV-2/USA/WA-UW31/2020__EPI_ISL_414618 spike protein (1-1273)(Q965C_S1003C)
MFVFLVLLPLVSSQCVNLTTRTQLPPAYTNSFTRGVYYPDKVFRSSVLHSTQDLFLPFFSNVTWFHAIHVSGTNGTKRFDNPVLPFNDGVYFASTEKSNIIRGWIFGTTLDSKTQSLLIVNNATNVVIKVCEFQFCNDPFLGVYYHKNNKSWMESEFRVYSSANNCTFEYVSQPFLMDLEGKQGNFKNLREFVFKNIDGYFKIYSKHTPINLVRDLPQGFSALEPLVDLPIGINITRFQTLLALHRSYLTPGDSSSGWTAGAAAYYVGYLQPRTFLLKYNENGTITDAVDCALDPLSETKCTLKSFTVEKGIYQTSNFRVQPTESIVRFPNITNLCPFGEVFNATRFASVYAWNRKRISNCVADYSVLYNSASFSTFKCYGVSPTKLNDLCFTNVYADSFVIRGDEVRQIAPGQTGKIADYNYKLPDDFTGCVIAWNSNNLDSKVGGNYNYLYRLFRKSNLKPFERDISTEIYQAGSTPCNGAEGFNCYFPLQSYGFQPTNGVGYQPYRVVVLSFELLHAPATVCGPKKSTNLVKNKCVNFNFNGLTGTGVLTESNKKFLPFQQFGRDIADTTDAVRDPQTLEILDITPCSFGGVSVITPGTNTSNQVAVLYQDVNCTEVPVAIHADQLTPTWRVYSTGSNVFQTRAGCLIGAEHVNNSYECDIPIGAGICASYQTQTNSPRRARSVASQSIIAYTMSLGAENSVAYSNNSIAIPTNFTISVTTEILPVSMTKTSVDCTMYICGDSTECSNLLLQYGSFCTQLNRALTGIAVEQDKNTQEVFAQVKQIYKTPPIKDFGGFNFSQILPDPSKPSKRSFIEDLLFNKVTLADAGFIKQYGDCLGDIAARDLICAQKFNGLTVLPPLLTDEMIAQYTSALLAGTITSGWTFGAGAALQIPFAMQMAYRFNGIGVTQNVLYENQKLIANQFNSAIGKIQDSLSSTASALGKLQDVVNQNAQALNTLVKCLSSNFGAISSVLNDILSRLDKVEAEVQIDRLITGRLQCLQTYVTQQLIRAAEIRASANLAATKMSECVLGQSKRVDFCGKGYHLMSFPQSAPHGVVFLHVTYVPAQEKNFTTAPAICHDGKAHFPREGVFVSNGTHWFVTQRNFYEPQIITTDNTFVSGNCDVVIGIVNNTVYDPLQPELDSFKEELDKYFKNHTSPDVDLGDISGINASVVNIQKEIDRLNEVAKNLNESLIDLQELGKYEQYIKWPWYIWLGFIAGLIAIVMVTIMLCCMTSCCSCLKGCCSCGSCCKFDEDDSEPVLKGVKLHYT

SEQ ID NO: 979 - protein, 1273 aa, Artificial Sequence
  SARS-CoV-2/South Korea/SNU01/2020__EPI_ISL_411929 spike protein (1-1273)(Q965C_S1003C)
MFVFLVLLPLVSSQCVNLTTRTQLPPAYTNSFTRGVYYPDKVFRSSVLHSTQDLFLPFFSNVTWFHAIHVSGTNGTKRFDNPVLPFNDGVYFASTEKSNIIRGWIFGTTLDSKTQSLLIVNNATNVVIKVCEFQFCNDPFLGVYYHKNNKSWMESEFRVYSSANNCTFEYVSQPFLMDLEGKQGNFKNLREFVFKNIDGYFKIYSKHTPINLVRDLPQGFWALEPLVDLPIGINITRFQTLLALHRSYLTPGDSSSGWTAGAAAYYVGYLQPRTFLLKYNENGTITDAVDCALDPLSETKCTLKSFTVEKGIYQTSNFRVQPTESIVRFPNITNLCPFGEVFNATRFASVYAWNRKRISNCVADYSVLYNSASFSTFKCYGVSPTKLNDLCFTNVYADSFVIRGDEVRQIAPGQTGKIADYNYKLPDDFTGCVIAWNSNNLDSKVGGNYNYLYRLFRKSNLKPFERDISTEIYQAGSTPCNGVEGFNCYFPLQSYGFQPTNGVGYQPYRVVVLSFELLHAPATVCGPKKSTNLVKNKCVNFNFNGLTGTGVLTESNKKFLPFQQFGRDIADTTDAVRDPQTLEILDITPCSFGGVSVITPGTNTSNQVAVLYQDVNCTEVPVAIHADQLTPTWRVYSTGSNVFQTRAGCLIGAEHVNNSYECDIPIGAGICASYQTQTNSPRRARSVASQSIIAYTMSLGAENSVAYSNNSIAIPTNFTISVTTEILPVSMTKTSVDCTMYICGDSTECSNLLLQYGSFCTQLNRALTGIAVEQDKNTQEVFAQVKQIYKTPPIKDFGGFNFSQILPDPSKPSKRSFIEDLLFNKVTLADAGFIKQYGDCLGDIAARDLICAQKFNGLTVLPPLLTDEMIAQYTSALLAGTITSGWTFGAGAALQIPFAMQMAYRFNGIGVTQNVLYENQKLIANQFNSAIGKIQDSLSSTASALGKLQDVVNQNAQALNTLVKCLSSNFGAISSVLNDILSRLDKVEAEVQIDRLITGRLQCLQTYVTQQLIRAAEIRASANLAATKMSECVLGQSKRVDFCGKGYHLMSFPQSAPHGVVFLHVTYVPAQEKNFTTAPAICHDGKAHFPREGVFVSNGTHWFVTQRNFYEPQIITTDNTFVSGNCDVVIGIVNNTVYDPLQPELDSFKEELDKYFKNHTSPDVDLGDISGINASVVNIQKEIDRLNEVAKNLNESLIDLQELGKYEQYIKWPWYIWLGFIAGLIAIVMVTIMLCCMTSCCSCLKGCCSCGSCCKFDEDDSEPVLKGVKLHYT

SEQ ID NO: 980 - protein, 1273 aa, Artificial Sequence
  SARS-CoV-2/China/WF0004/2020__EPI_ISL_413694 spike protein (1-1273)(Q965C_S1003C)
MFVFLVLLPLVSSQCVNLTTRTQLPPAYTNSFTRGVYYPDKVFRSSVLHSTQDLFLPFFSNVTWFHAIHVSGTNGTKRFDNPVLPFNDGVYFASTEKSNIIRGWIFGTTLDSKTQSLLIVNNATNVVIKVCEFQFCNDPFLGVYYHKNNKSWTESEFRVYSSANNCTFEYVSQPFLMDLEGKQGNFKNLREFVFKNIDGYFKIYSKHTPINLVRDLPQGFSALEPLVDLPIGINITRFQTLLALHRSYLTPGDSSSGWTAGAAAYYVGYLQPRTFLLKYNENGTITDAVDCALDPLSETKCTLKSFTVEKGIYQTSNFRVQPTESIVRFPNITNLCPFGEVFNATRFASVYAWNRKRISNCVADYSVLYNSASFSTFKCYGVSPTKLNDLCFTNVYADSFVIRGDEVRQIAPGQTGKIADYNYKLPDDFTGCVIAWNSNNLDSKVGGNYNYLYRLFRKSNLKPFERDISTEIYQAGSTPCNGVEGFNCYFPLQSYGFQPTNGVGYQPYRVVVLSFELLHAPATVCGPKKSTNLVKNKCVNFNFNGLTGTGVLTESNKKFLPFQQFGRDIADTTDAVRDPQTLEILDITPCSFGGVSVITPGTNTSNQVAVLYQDVNCTEVPVAIHADQLTPTWRVYSTGSNVFQTRAGCLIGAEHVNNSYECDIPIGAGICASYQTQTNSPRRARSVASQSIIAYTMSLGAENSVAYSNNSIAIPTNFTISVTTEILPVSMTKTSVDCTMYICGDSTECSNLLLQYGSFCTQLNRALTGIAVEQDKNTQEVFAQVKQIYKTPPIKDFGGFNFSQILPDPSKPSKRSFIEDLLFNKVTLADAGFIKQYGDCLGDIAARDLICAQKFNGLTVLPPLLTDEMIAQYTSALLAGTITSGWTFGAGAALQIPFAMQMAYRFNGIGVTQNVLYENQKLIANQFNSAIGKIQDSLSSTASALGKLQDVVNQNAQALNTLVKCLSSNFGAISSVLNDILSRLDKVEAEVQIDRLITGRLQCLQTYVTQQLIRAAEIRASANLAATKMSECVLGQSKRFDFCGKGYHLMSFPQSAPHGVVFLHVTYVPAQEKNFTTAPAICHDGKAHFPREGVFVSNGTHWFVTQRNFYEPQIITTDNTFVSGNCDVVIGIVNNTVYDPLQPELDSFKEELDKYFKNHTSPDVDLGDISGINASVVNIQKEIDRLNEVAKNLNESLIDLQELGKYEQYIKWPWYIWLGFIAGLIAIVMVTIMLCCMTSCCSCLKGCCSCGSCCKFDEDDSEPVLKGVKLHYT

SEQ ID NO: 981 - protein, 1273 aa, Artificial Sequence
  SARS-CoV-2/China/WF0028/2020__EPI_ISL_413791 spike protein (1-1273)(Q965C_S1003C)
MFVFLVLLPLVSSQCVNLTTRTQLPPAYTNSFTRGVYYPDKVFRSSVLHSTQDLFLPFFSNVTWFHAIHVSGTNGTKRFDNPVLPFNDGVYFASTEKSNIIRGWIFGTTLDSKTQSLLIVNNATNVVIKVCEFQFCNDPFLGVYYHKNNKSWMESEFRVYSSANNCTFEYVSQPFLMDLEGKQGNFKNLREFVFKNIDGYFKIYSKHTPINLVRDLPQGFSALEPLVDLPIGINITRFQTLLALHRSYLTPGDSSSGWTAGAAAYYVGYLQPRTFLLKYNENGTITDAVDCALDPLSETKCTLKSFTVEKGIYQTSNFRVQPTESIVRFPNITNLCPFGEVFNATRFASVYAWNRKRISNCVADYSVLYNSASFSTFKCYGVSPTKLNDLCFTNVYADSFVIRGDEVRQIAPGQTGKIADYNYKLPDDFTGCVIAWNSNNLDSKVGGNYNYLYRLFRKSNLKPFERDISTEIYQAGSTPCNGVEGFNCYFPLQSYGFQPTNGVGYQPYRVVVLSFELLHAPATVCGPKKSTNLVKNKCVNFNFNGLTGTGVLTESNKKFLPFQQFGRDIADTTDAVRDPQTLEILDITPCSFGGVSVITPGTNTSNQVAVLYQDVNCTEVPVAIHADQLTPTWRVYSTGSNVFQTRAGCLIGAEHVNNSYECDIPIGAGICASYQTQTNSPRRARSVASQSIIAYTMSLGAENSVAYSNNSIAIPTNFTISVTTEILPVSMTKTSVDCTMYICGDSTECSNLLLQYGSFCTQLNRALTGIAVEQDKNTQEVFAQVKQIYKTPPIKDFGGFNFSQILPDPSKPSKRSFIEDLLFNKVTLADAGFIKQYGDCLGDIAARDLICAQKFNGLTVLPPLLTDEMIAQYTSALLAGTITSGWTFGAGAALQIPFAMQMAYRFNGIGVTQNVLYENQKLIANQFNSAIGKIQDSLSSTASALGKLQDVVNQNAQALNTLVKCLSSNFGAISSVLNDILSRLDKVEAEVQIDRLITGRLQCLQTYVTQQLIRAAEIRASANLAATKMSECVLGQSKRVDFCGKGYHLMSFPQSAPHGVVFLHVTYVPAQEKNFTTAPAICHDGKAHFPREGVFVSNGTHWFVTQRNFYEPQIITTDNTFVSGNCDVVIGIVNNTVYDPLQPELESFKEELDKYFKNHTSPDVDLGDISGINASVVNIQKEIDRLNEVAKNLNESLIDLQELGKYEQYIKWPWYIWLGFIAGLIAIVMVTIMLCCMTSCCSCLKGCCSCGSCCKFDEDDSEPVLKGVKLHYT

SEQ ID NO: 982 - protein, 1273 aa, Artificial Sequence
  SARS-CoV-2/2019-nCoV/USA-CruiseA-18/2020__MT159716.1 spike protein (1-1273)(Q965C_S1003C)
MFVFLVLLPLVSSQCVNLTTRTQLPPAYTNSFTRGVYYPDKVFRSSVLHSTQDLFLPFFSNVTWFHAIHVSGTNGTKRFDNPVLPFNDGVYFASTEKSNIIRGWIFGTTLDSKTQSLLIVNNATNVVIKVCEFQFCNDPFLGVYYHKNNKSWMESELRVYSSANNCTFEYVSQPFLMDLEGKQGNFKNLREFVFKNIDGYFKIYSKHTPINLVRDLPQGFSALEPLVDLPIGINITRFQTLLALHRSYLTPGDSSSGWTAGAAAYYVGYLQPRTFLLKYNENGTITDAVDCALDPLSETKCTLKSFTVEKGIYQTSNFRVQPTESIVRFPNITNLCPFGEVFNATRFASVYAWNRKRISNCVADYSVLYNSASFSTFKCYGVSPTKLNDLCFTNVYADSFVIRGDEVRQIAPGQTGKIADYNYKLPDDFTGCVIAWNSNNLDSKVGGNYNYLYRLFRKSNLKPFERDISTEIYQAGSTPCNGVEGFNCYFPLQSYGFQPTNGVGYQPYRVVVLSFELLHAPATVCGPKKSTNLVKNKCVNFNFNGLTGTGVLTESNKKFLPFQQFGRDIADTTDAVRDPQTLEILDITPCSFGGVSVITPGTNTSNQVAVLYQDVNCTEVPVAIHADQLTPTWRVYSTGSNVFQTRAGCLIGAEHVNNSYECDIPIGAGICASYQTQTNSPRRARSVASQSIIAYTMSLGAENSVAYSNNSIAIPTNFTISVTTEILPVSMTKTSVDCTMYICGDSTECSNLLLQYGSFCTQLNRALTGIAVEQDKNTQEVFAQVKQIYKTPPIKDFGGFNFSQILPDPSKPSKRSFIEDLLFNKVTLADAGFIKQYGDCLGDIAARDLICAQKFNGLTVLPPLLTDEMIAQYTSALLAGTITSGWTFGAGAALQIPFAMQMAYRFNGIGVTQNVLYENQKLIANQFNSAIGKIQDSLSSTASALGKLQDVVNQNAQALNTLVKCLSSNFGAISSVLNDILSRLDKVEAEVQIDRLITGRLQCLQTYVTQQLIRAAEIRASANLAATKMSECVLGQSKRVDFCGKGYHLMSFPQSAPHGVVFLHVTYVPAQEKNFTTAPAICHDGKAHFPREGVFVSNGTHWFVTQRNFYEPQIITTDNTFVSGNCDVVIGIVNNTVYDPLQPELDSFKEELDKYFKNHTSPDVDLGDISGINASVVNIQKEIDRLNEVAKNLNESLIDLQELGKYEQYIKWPWYIWLGFIAGLIAIVMVTIMLCCMTSCCSCLKGCCSCGSCCKFDEDDSEPVLKGVKLHYT

SEQ ID NO: 983 - protein, 1273 aa, Artificial Sequence
  SARS-CoV-2/SARS-CoV-2/Yunnan-01/human/2020/CHN__MT049951.1 spike protein (1-1273)(Q965C_S1003C)
MFVFLVLLPLVSSQCVNLTTRTQLPPANTNSFTRGVYYPDKVFRSSVLHSTQDLFLPFFSNVTWFHAIHVSGTNGTKRFDNPVLPFNDGVYFASTEKSNIIRGWIFGTTLDSKTQSLLIVNNATNVVIKVCEFQFCNDPFLGVYYHKNNKSWMESEFRVYSSANNCTFEYVSQPFLMDLEGKQGNFKNLREFVFKNIDGYFKIYSKHTPINLVRDLPQGFSALEPLVDLPIGINITRFQTLLALHRSYLTPGDSSSGWTAGAAAYYVGYLQPRTFLLKYNENGTITDAVDCALDPLSETKCTLKSFTVEKGIYQTSNFRVQPTESIVRFPNITNLCPFGEVFNATRFASVYAWNRKRISNCVADYSVLYNSASFSTFKCYGVSPTKLNDLCFTNVYADSFVIRGDEVRQIAPGQTGKIADYNYKLPDDFTGCVIAWNSNNLDSKVGGNYNYLYRLFRKSNLKPFERDISTEIYQAGSTPCNGVEGFNCYFPLQSYGFQPTNGVGYQPYRVVVLSFELLHAPATVCGPKKSTNLVKNKCVNFNFNGLTGTGVLTESNKKFLPFQQFGRDIADTTDAVRDPQTLEILDITPCSFGGVSVITPGTNTSNQVAVLYQDVNCTEVPVAIHADQLTPTWRVYSTGSNVFQTRAGCLIGAEHVNNSYECDIPIGAGICASYQTQTNSPRRARSVASQSIIAYTMSLGAENSVAYSNNSIAIPTNFTISVTTEILPVSMTKTSVDCTMYICGDSTECSNLLLQYGSFCTQLNRALTGIAVEQDKNTQEVFAQVKQIYKTPPIKDFGGFNFSQILPDPSKPSKRSFIEDLLFNKVTLADAGFIKQYGDCLGDIAARDLICAQKFNGLTVLPPLLTDEMIAQYTSALLAGTITSGWTFGAGAALQIPFAMQMAYRFNGIGVTQNVLYENQKLIANQFNSAIGKIQDSLSSTASALGKLQDVVNQNAQALNTLVKCLSSNFGAISSVLNDILSRLDKVEAEVQIDRLITGRLQCLQTYVTQQLIRAAEIRASANLAATKMSECVLGQSKRVDFCGKGYHLMSFPQSAPHGVVFLHVTYVPAQEKNFTTAPAICHDGKAHFPREGVFVSNGTHWFVTQRNFYEPQIITTDNTFVSGNCDVVIGIVNNTVYDPLQPELDSFKEELDKYFKNHTSPDVDLGDISGINASVVNIQKEIDRLNEVAKNLNESLIDLQELGKYEQYIKWPWYIWLGFIAGLIAIVMVTIMLCCMTSCCSCLKGCCSCGSCCKFDEDDSEPVLKGVKLHYT

SEQ ID NO: 984 - protein, 1273 aa, Artificial Sequence
  SARS-CoV-2/USA/WA-UW292/2020__EPI_ISL_418077 spike protein (1-1273)(Q965C_S1003C)
MFVFLVLLPLVSSQCVNLTTRTQLPPAYTNSFTRGVYYPDKVFRSSVLHSTQDLFLPFFSNVTWFHAIHVSGTNGTKRFDNPVLPFNDGVYFASTEKSNIIRGWIFGTTLDSKTQSLLIVNNATNVVIKVCEFQFCNDPFLGVYYHKNNKSWMESEFRVYSSANNCTFEYVSQPFLMDLEGKQGNFKNLREFVFKNIDGYFKIYSKHTPINLVRDLPQGFSALEPLVDLPIGINITRFQTLLALHRSYLTPGDSSSGWTAGAAAYYVGYLQPRTFLLKYNENGTITDAVDCALDPLSETKCTLKSFTVEKGIYQTSNFRVQPTESIVRFPNITNLCPFGEVFNATRFASVYAWNRKRISNCVADYSVLYNSASFSTFKCYGVSPTKLNDLCFTNVYADSFVIRGDEVRQIAPGQTGKIADYNYKLPDDFTGCVIAWNSNNLDSKVGGNYNYLYRLFRKSNLKPFERDISTEIYQASSTPCNGVEGFNCYFPLQSYGFQPTNGVGYQPYRVVVLSFELLHAPATVCGPKKSTNLVKNKCVNFNFNGLTGTGVLTESNKKFLPFQQFGRDIADTTDAVRDPQTLEILDITPCSFGGVSVITPGTNTSNQVAVLYQDVNCTEVPVAIHADQLTPTWRVYSTGSNVFQTRAGCLIGAEHVNNSYECDIPIGAGICASYQTQTNSPRRARSVASQSIIAYTMSLGAENSVAYSNNSIAIPTNFTISVTTEILPVSMTKTSVDCTMYICGDSTECSNLLLQYGSFCTQLNRALTGIAVEQDKNTQEVFAQVKQIYKTPPIKDFGGFNFSQILPDPSKPSKRSFIEDLLFNKVTLADAGFIKQYGDCLGDIAARDLICAQKFNGLTVLPPLLTDEMIAQYTSALLAGTITSGWTFGAGAALQIPFAMQMAYRFNGIGVTQNVLYENQKLIANQFNSAIGKIQDSLSSTASALGKLQDVVNQNAQALNTLVKCLSSNFGAISSVLNDILSRLDKVEAEVQIDRLITGRLQCLQTYVTQQLIRAAEIRASANLAATKMSECVLGQSKRVDFCGKGYHLMSFPQSAPHGVVFLHVTYVPAQEKNFTTAPAICHDGKAHFPREGVFVSNGTHWFVTQRNFYEPQIITTDNTFVSGNCDVVIGIVNNTVYDPLQPELDSFKEELDKYFKNHTSPDVDLGDISGINASVVNIQKEIDRLNEVAKNLNESLIDLQELGKYEQYIKWPWYIWLGFIAGLIAIVMVTIMLCCMTSCCSCLKGCCSCGSCCKFDEDDSEPVLKGVKLHYT

SEQ ID NO: 985 - protein, 1273 aa, Artificial Sequence
  SARS-CoV-2/Iceland/192/2020__EPI_ISL_417819 spike protein (1-1273)(Q965C_S1003C)
MFVFFVLLPLVSSQCVNLTTRTQLPPAYTNSFTRGVYYPDKVFRSSVLHSTQDLFLPFFSNVTWFHAIHVSGTNGTKRFDNPVLPFNDGVYFASTEKSNIIRGWIFGTTLDSKTQSLLIVNNATNVVIKVCEFQFCNDPFLGVYYHKNNKSWMESEFRVYSSANNCTFEYVSQPFLMDLEGKQGNFKNLREFVFKNIDGYFKIYSKHTPINLVRDLPQGFSALEPLVDLPIGINITRFQTLLALHRSYLTPGDSSSGWTAGAAAYYVGYLQPRTFLLKYNENGTITDAVDCALDPLSETKCTLKSFTVEKGIYQTSNFRVQPTESIVRFPNITNLCPFGEVFNATRFASVYAWNRKRISNCVADYSVLYNSASFSTFKCYGVSPTKLNDLCFTNVYADSFVIRGDEVRQIAPGQTGKIADYNYKLPDDFTGCVIAWNSNNLDSKVGGNYNYLYRLFRKSNLKPFERDISTEIYQAGSTPCNGVEGFNCYFPLQSYGFQPTNGVGYQPYRVVVLSFELLHAPATVCGPKKSTNLVKNKCVNFNFNGLTGTGVLTESNKKFLPFQQFGRDIADTTDAVRDPQTLEILDITPCSFGGVSVITPGTNTSNQVAVLYQGVNCTEVPVAIHADQLTPTWRVYSTGSNVFQTRAGCLIGAEHVNNSYECDIPIGAGICASYQTQTNSPRRARSVASQSIIAYTMSLGAENSVAYSNNSIAIPTNFTISVTTEILPVSMTKTSVDCTMYICGDSTECSNLLLQYGSFCTQLNRALTGIAVEQDKNTQEVFAQVKQIYKTPPIKDFGGFNFSQILPDPSKPSKRSFIEDLLFNKVTLADAGFIKQYGDCLGDIAARDLICAQKFNGLTVLPPLLTDEMIAQYTSALLAGTITSGWTFGAGAALQIPFAMQMAYRFNGIGVTQNVLYENQKLIANQFNSAIGKIQDSLSSTASALGKLQDVVNQNAQALNTLVKCLSSNFGAISSVLNDILSRLDKVEAEVQIDRLITGRLQCLQTYVTQQLIRAAEIRASANLAATKMSECVLGQSKRVDFCGKGYHLMSFPQSAPHGVVFLHVTYVPAQEKNFTTAPAICHDGKAHFPREGVFVSNGTHWFVTQRNFYEPQIITTDNTFVSGNCDVVIGIVNNTVYDPLQPELDSFKEELDKYFKNHTSPDVDLGDISGINASVVNIQKEIDRLNEVAKNLNESLIDLQELGKYEQYIKWPWYIWLGFIAGLIAIVMVTIMLCCMTSCCSCLKGCCSCGSCCKFDEDDSEPVLKGVKLHYT

SEQ ID NO: 986 - protein, 1273 aa, Artificial Sequence
  SARS-CoV-2/Belgium/ULG-6939/2020__EPI_ISL_417020 spike protein (1-1273)(Q965C_S1003C)
MFVFLVLLPLVSSQCVNLTTRTQLPPAYTNSFTRGVYYPDKVFRSSVLHSTQDLFLPFFSNVTWFHAIHVSGTNGTKRFDNPVLPFNDGVYFASTEKSNIIRGWIFGTTLDSKTQSLLIVNNATNVVIKVCEFQFCNDPFLGVYYHKNNKSWMESEFRVYSSANNCTFEYVSQPFLMDLEGKQGNFKNLREFVFKNIDGYFKIYSKHTPINLVRDLPQGFSALEPLVDLPIGINITRFQTLLALHRSYLTPGDSSSGWTAGAAAYYVGYLQPRTFLLKYNENGTITDAVDCALDPLSETKCTLKSFTVEKGIYQTSNFRVQPTESIVRFPNITNLCPFGEVFNATRFASVYAWNRKRISNCVADYSVLYNSASFSTFKCYGVSPTKLNDLCFTNVYADSFVIRGDEVRQIAPGQTGKIADYNYKLPDDFTGCVIAWNSNNLDSKVGGNYNYLYRLFRKSNLKPFERDISTEIYQAGSTPCNGVEGFNCYFPLQSYGFQPTNGVGYQPYRVVVLSFELLHAPATVCGPKKSTNLVKNKCVNFNFNGLTGTGVLTESNKKFLPFQQFGRDIADTTDAVRDPQTLEILDITPCSFGGVSVITPGTNTSNQVAVLYQGVNCTEVPVAIHADQLTPTWRVYSTGSNVFQTRAGCLIGAEHVNNSYECDIPIGAGICASYQTQTNSPRRARSVASQSIIAYTMSLGAENSVVYSNNSIAIPTNFTISVTTEILPVSMTKTSVDCTMYICGDSTECSNLLLQYGSFCTQLNRALTGIAVEQDKNTQEVFAQVKQIYKTPPIKDFGGFNFSQILPDPSKPSKRSFIEDLLFNKVTLADAGFIKQYGDCLGDIAARDLICAQKFNGLTVLPPLLTDEMIAQYTSALLAGTITSGWTFGAGAALQIPFAMQMAYRFNGIGVTQNVLYENQKLIANQFNSAIGKIQDSLSSTASALGKLQDVVNQNAQALNTLVKCLSSNFGAISSVLNDILSRLDKVEAEVQIDRLITGRLQCLQTYVTQQLIRAAEIRASANLAATKMSECVLGQSKRVDFCGKGYHLMSFPQSAPHGVVFLHVTYVPAQEKNFTTAPAICHDGKAHFPREGVFVSNGTHWFVTQRNFYEPQIITTDNTFVSGNCDVVIGIVNNTVYDPLQPELDSFKEELDKYFKNHTSPDVDLGDISGINASVVNIQKEIDRLNEVAKNLNESLIDLQELGKYEQYIKWPWYIWLGFIAGLIAIVMVTIMLCCMTSCCSCLKGCCSCGSCCKFDEDDSEPVLKGVKLHYT

SEQ ID NO: 987 - protein, 1273 aa, Artificial Sequence
  SARS-CoV-2/France/HF2496/2020__EPI_ISL_418231 spike protein (1-1273)(Q965C_S1003C)
MFVFLVLLPLVSSQCVNLTTRTQLPPAYTNSFTRGVYYPDKVFRSSVLHSTQDLFLPFFSNVTWFHAIHVSGTNGTKRFDNPVLPFNDGVYFASTEKSNIIRGWIFGTTLDSKTQSLLIVNNATNVVIKVCEFQFCNDPFLGVYYHKNNKSWMESEFRVYSSANNCTFEYVSQPFLMDLEGKQGNFKNLREFVFKNIDGYFKIYSKHTPINLVRDLPQGFSALEPLVDLPIGINITRFQTLLALHRSYLTPGDSSSGWTAGAAAYYVGYLQPRTFLLKYNENGTITDAVDCALDPLSETKCTLKSFTVEKGIYQTSNFRVQPTESIVRFPNITNLCPFGEVFNATRFASVYAWNRKRISNCVADYSVLYNSASFSTFKCYGVSPTKLNDLCFTNVYADSFVIRGDEVRQIAPGQTGKIADYNYKLPDDFTGCVIAWNSNNLDSKVGGNYNYLYRLFRKSNLKPFERDISTEIYQAGSTPCNGVEGFNCYFPLQSYGFQPTNGVGYQPYRVVVLSFELLHAPATVCGPKKSTNLVKNKCVNFNFNGLTGTGVLTESNKKFLPFQQFGRDIADTTDAVRDPQTLEILDITPCSFGGVSVITPGTNTSNQVAVLYQGVNCTEVPVAIHADQLTPTWRVYSTGSNVFQTRAGCLIGAEHVNNSYECDIPIGAGICASYQTQTNSPRRARSVASQSIIAYTMSLGAENSVAYSNNSIAIPTNFTISVTTEILPVSMTKTSVDCTMYICGDSTECSNLLLQYGSFCTQLNRALTGIAVEQDKNTQEVFAQVKQIYKTPPIKDFGGFNFSQILPDPSKPSKRSFIEDLLFNKVTLADAGFIKQYGDCLGDIVARDLICAQKFNGLTVLPPLLTDEMIAQYTSALLAGTITSGWTFGAGAALQIPFAMQMAYRFNGIGVTQNVLYENQKLIANQFNSAIGKIQDSLSSTASALGKLQDVVNQNAQALNTLVKCLSSNFGAISSVLNDILSRLDKVEAEVQIDRLITGRLQCLQTYVTQQLIRAAEIRASANLAATKMSECVLGQSKRVDFCGKGYHLMSFPQSAPHGVVFLHVTYVPAQEKNFTTAPAICHDGKAHFPREGVFVSNGTHWFVTQRNFYEPQIITTDNTFVSGNCDVVIGIVNNTVYDPLQPELDSFKEELDKYFKNHTSPDVDLGDISGINASVVNIQKEIDRLNEVAKNLNESLIDLQELGKYEQYIKWPWYIWLGFIAGLIAIVMVTIMLCCMTSCCSCLKGCCSCGSCCKFDEDDSEPVLKGVKLHYT

SEQ ID NO: 988 - protein, 1273 aa, Artificial Sequence
  SARS-CoV-2/USA/WA-UW291/2020__EPI_ISL_418076 spike protein (1-1273)(Q965C_S1003C)
MFVFLVLLPLVSSQCVNLTTRTQLPPAYTNSFTRGVYYPDKVFRSSVLHSTQDLFLPFFSNVTWFHAIHVSGTNGTKRFDNPVLPFNDGVYFASTEKSNIIRGWIFGTTLDSKTQSLLIVNNATNVVIKVCEFQFCNDPFLGVYYHKNNKSWMESEFRVYSSANNCTFEYVSQPFLMDLEGKQGNFKNLREFVFKNIDGYFKIYSKHTPINLVRDLPQGFSALEPLVDLPIGINITRFQTLLALHRSYLTPGDSSSGWTAGAAAYYVGYLQPRTFLLKYNENGTITDAVDCALDPLSETKCTLKSFTVEKGIYQTSNFRVQPTESIVRFPNITNLCPFGEVFNATRFASVYAWNRKRISNCVADYSVLYNSASFSTFKCYGVSPTKLNDLCFTNVYADSFVIRGDEVRQIAPGQTGKIADYNYKLPDDFTGCVIAWNSNNLDSKVGGNYNYLYRLFRKSNLKPFERDISTEIYQAGSTPCNGVEGFNCYFPLQSYGFQPTNGVGYQPYRVVVLSFELLHAPATVCGPKKSTNLVKNKCVNFNFNGLTGTGVLTESNKKFLPFQQFGRDIADTTDAVRDPQTLEILDITPCSFGGVSVITPGTNTSNQVAVLYQGVNCTEVPVAIHADQLTPTWRVYSTGSNVFQTRAGCLIGAEHVNNSYECDIPIGAGICASYQTQTNSPRRARSVASQSIIAYTMSLGAENSVAYSNNSIAIPTNFTISVTTEILPVSMTKTSVDCTMYICGDSTECSNLLLQYGSFCTQLNRALTGIAVEQDKNTQEVFAQVKQIYKTPPIKDFGGFNFSQILPDPSKPSKRSFIEDLLFNKVTLADAGFIKQYGDCLGDIAARDLICAQKFNGLTVLPPLLTDEMIAQYTSALLAGTITSGWTFGAGAALQIPFAMQMAYRFNGIGVTQNVLYENQKLIANQFNSAIGKIQYSLSSTASALGKLQDVVNQNAQALNTLVKCLSSNFGAISSVLNDILSRLDKVEAEVQIDRLITGRLQCLQTYVTQQLIRAAEIRASANLAATKMSECVLGQSKRVDFCGKGYHLMSFPQSAPHGVVFLHVTYVPAQEKNFTTAPAICHDGKAHFPREGVFVSNGTHWFVTQRNFYEPQIITTDNTFVSGNCDVVIGIVNNTVYDPLQPELDSFKEELDKYFKNHTSPDVDLGDISGINASVVNIQKEIDRLNEVAKNLNESLIDLQELGKYEQYIKWPWYIWLGFIAGLIAIVMVTIMLCCMTSCCSCLKGCCSCGSCCKFDEDDSEPVLKGVKLHYT

SEQ ID NO: 989 - protein, 1273 aa, Artificial Sequence
  SARS-CoV-2/Portugal/PT0034/2020__EPI_ISL_418019 spike protein (1-1273)(Q965C_S1003C)
MFVFLVLLPLVSSQCVNLTTRTQLPPAYTNSFTRGVYYPDKVFRSSVLHSTQDLFLPFFSNVTWFHAIHVSGTNGTKRFDNPVLPFNDGVYFASTEKSNIIRGWIFGTTLDSKTQSLLIVNNATNVVIKVCEFQFCNDPFLGVYYHKNNKSWMESEFRVYSSANNCTFEYVSQPFLMDLEGKQGNFKNLREFVFKNIDGYFKIYSKHTPINLVRDLPQGFSALEPLVDLPIGINITRFQTLLALHRSYLTPGDSSSGWTAGAAAYYVGYLQPRTFLLKYNENGTITDAVDCALDPLSETKCTLKSFTVEKGIYQTSNFRVQPTESIVRFPNITNLCPFGEVFNATRFASVYAWNRKRISNCVADYSVLYNSASFSTFKCYGVSPTKLNDLCFTNVYADSFVIRGDEVRQIAPGQTGKIADYNYKLPDDFTGCVIAWNSNNLDSKVGGNYNYLYRLFRKSNLKPFERDISTEIYQAGSTPCNGVEGFNCYFPLQSYGFQPTNGVGYQPYRVVVLSFELLHAPATVCGPKKSTNLVKNKCVNFNFNGLTGTGVLTESNKKFLPFQQFGRDIADTTDAVRDPQTLEILDITPCSFGGVSVITPGTNTSNQVAVLYQGVNCTEVPVAIHADQLTPTWRVYSTGSNVFQTRAGCLIGAEHVNNSYECDIPIGAGICASYQTQTNSPRRARSVASQSIIAYTMSLGAENSVAYSNNSIAIPTNFTISVTTEILPVSMTKTSVDCTMYICGDSTECSNLLLQYGSFCTQLNRALTGIAVEQDKNTQEVFAQVKQIYKTPPIKDFGGFNFSQILPDPSKPSKRSFIEDLLFNKVTLADAGFIKQYGDCLGDIAARDLICAQKFNGLTVLPPLLTDEMIAQYTSALLAGTITSGWTFGAGAALQIPFAMQMAYRFNGIGVTQNVLYENQKLIANQFNSAIGKIQDSLSSTASALGKLQDVVNQNAQALNTLVKCLSSNFGAISSVLNDILSRLDKVEAEVQIDRLITGRLQCLQTYVTQQLIRAAEIRASANLAATKMSECVLGQSKRVDFCGKGYHLMSFPQSAPHGVVFLHVTYVPAQEKNFTTAPAICHDGKAHFPREGVFVSNGTHWFVTQRNFYEPQIITTDNTFVSGNCDVVIGIVNNTVYDPLQPELDSFKEELDKYFKNHTSPDVDLGDISGINASVVNIQKEIDRLNEVAKNLNESLIDLQELGKYEQYIKWPWYIWLGFIAGLIAIVMVTIMLCCITSCCSCLKGCCSCGSCCKFDEDDSEPVLKGVKLHYT

SEQ ID NO: 990 - protein, 1273 aa, Artificial Sequence
  SARS-CoV-2/Iceland/202/2020__EPI_ISL_417750 spike protein (1-1273)(Q965C_S1003C)
MFVFLVLLPLVSSQCVNLTTRTQLPPAYTNSFTRGVYYPDKVFRSSVLHSTQDLFLPFFSNVTWFHAIHVSGTNGTKRFDNPVLPFNDGVYFASTEKSNIIRGWIFGTTLDSKTQSLLIVNNATNVVIKVCEFQFCNDPFLGVYYHKNNKSWMESEFRVYSSANNCTFEYVSQPFLMDLEGKQGNFKNLREFVFKNIDGYFKIYSKHTPINLVRDLPQGFSALEPLVDLPIGINITRFQTLLALHRSYLTPGDSSSGWTAGAAAYYVGYLQPRTFLLKYNENGTITDAVDCALDPLSETKCTLKSFTVEKGIYQTSNFRVQPTESIVRFPNITNLCPFGEVFNATRFASVYAWNRKRISNCVADYSVLYNSASFSTFKCYGVSPTKLNDLCFTNVYADSFVIRGDEVRQIAPGQTGKIADYNYKLPDDFTGCVIAWNSNNLDSKVGGNYNYLYRLFRKSNLKPFERDISTEIYQAGSTPCNGVEGFNCYFPLQSYGFQPTNGVGYQPYRVVVLSFELLHAPATVCGPKKSTNLVKNKCVNFNFNGLTGTGVLTESNKKFLPFQQFGRDIADTTDAVRDPQTLEILDITPCSFGGVSVITPGTNTSNQVAVLYQDVNCTEVPVAIHADQLTPTWRVYSTGSNVFQTRAGCLIGAEHVNNSYECDIPIGAGICASYQTQTNSPRRARSVASQSIIAYTMSLGAENSVAYSNNSIAIPTNFTISVTTEILPVSMTKTSVDCTMYICGDSTECSNLLLQYGSFCTQLNRALTGIAVEQDKNTQEVFAQVKQIYKTPPIKDFGGFNFSQILPDPSKPSKRSFIEDLLFNKVTLADAGFIKQYGDCLGDIAARDLICAQKFNGLTVLPPLLTDEMIAQYTSALLAGTITSGWTFGAGAALQIPFAMQMAYRFNGIGVTQNVLYENQKLIANQFNSAIGKIQDSLSSTASALGKLQDVVNQNAQALNTLVKCLSSNFGAISSVLNDILSRLDKVEAEVQIDRLITGRLQCLQTYVTQQLIRAAEIRASANLAATKMSECVLGQSKRVDFCGKGYHLMSFPQSAPHGVVFLHVTYVPAQEKNFTTAPAICHDGKAHFPREGVFVSNGTHWFVTQRNFYEPQIITTDNTFVSGNCDVVIGIVNNTVYDPLQPELDSFKEELDKYFKNHTSPDVDLGDIPGINASVVNIQKEIDRLNEVAKNLNESLIDLQELGKYEQYIKWPWYIWLGFIAGLIAIVMVTIMLCCMTSCCSCLKGCCSCGSCCKFDEDDSEPVLKGVKLHYT

SEQ ID NO: 991 - protein, 1273 aa, Artificial Sequence
  SARS-CoV-2/USA/WA-UW261/2020__EPI_ISL_418046 spike protein (1-1273)(Q965C_S1003C)
MFVFLVLLPLVSSQCVNLTTRTQLPPAYTNSFTRGVYYPDKVFRSSVLHSTQDLFLPFFSNVTWFHAIHVSGTNGTKRFDNPVLPFNDGVYFASTEKSNIIRGWIFGTTLDSKTQSLLIVNNATNVVIKVCEFQFCNDPFLGVYYHKNNKSWMESEFRVYSSANNCTFEYVSQPFLMDLEGKQGNFKNLREFVFKNIDGYFKIYSKHTPINLVRDLPQGFSALEPLVDLPIGINITRFQTLLALHRSYLTPGDSSSGWTAGAAAYYVGYLQPRTFLLKYNENGTITDAVDCALDPLSETKCTLKSFTVEKGIYQTSNFRVQPTESIVRFPNITNLCPFGEVFNATRFTSVYAWNRKRISNCVADYSVLYNSASFSTFKCYGVSPTKLNDLCFTNVYADSFVIRGDEVRQIAPGQTGKIADYNYKLPDDFTGCVIAWNSNNLDSKVGGNYNYLYRLFRKSNLKPFERDISTEIYQAGSTPCNGVEGFNCYFPLQSYGFQPTNGVGYQPYRVVVLSFELLHAPATVCGPKKSTNLVKNKCVNFNFNGLTGTGVLTESNKKFLPFQQFGRDIADTTDAVRDPQTLEILDITPCSFGGVSVITPGTNTSNQVAVLYQDVNCTEVPVAIHADQLTPTWRVYSTGSNVFQTRAGCLIGAEHVNNSYECDIPIGAGICASYQTQTNSPRRARSVASQSIIAYTMSLGAENSVAYSNNSIAIPTNFTISVTTEILPVSMTKTSVDCTMYICGDSTECSNLLLQYGSFCTQLNRALTGIAVEQDKNTQEVFAQVKQIYKTPPIKDFGGFNFSQILPDPSKPSKRSFIEDLLFNKVTLADAGFIKQYGDCLGDIAARDLICAQKFNGLTVLPPLLTDEMIAQYTSALLAGTITSGWTFGAGAALQIPFAMQMAYRFNGIGVTQNVLYENQKLIANQFNSAIGKIQDSLSSTASALGKLQDVVNQNAQALNTLVKCLSSNFGAISSVLNDILSRLDKVEAEVQIDRLITGRLQCLQTYVTQQLIRAAEIRASANLAATKMSECVLGQSKRVDFCGKGYHLMSFPQSAPHGVVFLHVTYVPAQEKNFTTAPAICHDGKAHFPREGVFVSNGTHWFVTQRNFYEPQIITTDNTFVSGNCDVVIGIVNNTVYDPLQPELDSFKEELDKYFKNHTSPDVDLGDISGINASVVNIQKEIDRLNEVAKNLNESLIDLQELGKYEQYIKWPWYIWLGFIAGLIAIVMVTIMLCCMTSCCSCLKGCCSCGSCCKFDEDDSEPVLKGVKLHYT

SEQ ID NO: 992 - protein, 1273 aa, Artificial Sequence
  SARS-CoV-2/Portugal/PT0035/2020__EPI_ISL_418020 spike protein (1-1273)(Q965C_S1003C)
MFVFLVLLPLVSSQCVNLTTRTQLPPAYTNSFTRGVYYPDKVFRSSVLHSTQDLFLPFFSNVTWFHAIHVSGTNGTKRFDNPVLPFNDGVYFASTEKSNIIRGWIFGTTLDSKTQSLLIVNNATNVVIKVCEFQFCNDPFLGVYYHKNNKSWMESEFRVYSSANNCTFEYVSQPFLMDLEGKQGNFKNLREFVFKNIDGYFKIYSKHTPINLVRDLPQGFSALEPLVDLPIGINITRFQTLLALHRSYLTPGDSSSGWTAGAAAYYVGYLQPRTFLLKYNENGTITDAVDCALDPLSETKCTLKSFTVEKGIYQTSNFRVQPTESIVRFPNITNLCPFGEVFNATRFASVYAWNRKRISNCVADYSVLYNSASFSTFKCYGVSPTKLNDLCFTNVYADSFVIRGDEVRQIAPGQTGKIADYNYKLPDDFTGCVIAWNSNNLDSKVGGNYNYLYRLFRKSNLKPFERDISTEIYQAGSTPCNGVEGFNCYFPLQSYGFQPTNGVGYQPYRVVVLSFELLHAPATVCGPKKSTNLVKNKCVNFNFNGLTGTGVLTESNKKFLPFQQFGRDIADTTDAVRDPQTLEILDITPCSFGGVSVITPGTNTSNQVAVLYQDVNCTEVPVAIHADQLTPTWRVYSTGSNVFQTRAGCLIGAEHVNNSYECDIPIGAGICASYQTQTNSPRRARSVASQSIIAYTMSLGAENSVAYSNNSIAIPTNFTISVTTEILPVSMTKTSVDCTMYICGDSTECSNLLLQYGSFCTQLNRALTGIAVEQDKNTQEVFAQVKQIYKTPPIKDFGGFNFSQILPDPSKPSKRSFIEDLLFNKVTLADAGFIKQYGDCLGDISARDLICAQKFNGLTVLPPLLTDEMIAQYTSALLAGTITSGWTFGAGAALQIPFAMQMAYRFNGIGVTQNVLYENQKLIANQFNSAIGKIQDSLSSTASALGKLQDVVNQNAQALNTLVKCLSSNFGAISSVLNDILSRLDKVEAEVQIDRLITGRLQCLQTYVTQQLIRAAEIRASANLAATKMSECVLGQSKRVDFCGKGYHLMSFPQSAPHGVVFLHVTYVPAQEKNFTTAPAICHDGKAHFPREGVFVSNGTHWFVTQRNFYEPQIITTDNTFVSGNCDVVIGIVNNTVYDPLQPELDSFKEELDKYFKNHTSPDVDLGDISGINASVVNIQKEIDRLNEVAKNLNESLIDLQELGKYEQYIKWPWYIWLGFIAGLIAIVMVTIMLCCMTSCCSCLKGCCSCGSCCKFDEDDSEPVLKGVKLHYT

SEQ ID NO: 993 - protein, 1273 aa, Artificial Sequence
  SARS-CoV-2/USA/NY-NYUMC7/2020__EPI_ISL_418192 spike protein (1-1273)(Q965C_S1003C)
MFVFLVLLPLVSSQCVNLTTRTQLPPAYTNSFTRGVYYPDKVFRSSVLHSTQDLFLPFFSNVTWFHAIHVSGTNGTKRFDNPVLPFNDGVYFASTEKSNIIRGWIFGTTLDSKTQSLLIVNNATNVVIKVCEFQFCNDPFLGVYHHKNNKSWMESEFRVYSSANNCTFEYVSQPFLMDLEGKQGNFKNLREFVFKNIDGYFKIYSKHTPINLVRDLPQGFSALEPLVDLPIGINITRFQTLLALHRSYLTPGDSSSGWTAGAAAYYVGYLQPRTFLLKYNENGTITDAVDCALDPLSETKCTLKSFTVEKGIYQTSNFRVQPTESIVRFPNITNLCPFGEVFNATRFASVYAWNRKRISNCVADYSVLYNSASFSTFKCYGVSPTKLNDLCFTNVYADSFVIRGDEVRQIAPGQTGKIADYNYKLPDDFTGCVIAWNSNNLDSKVGGNYNYLYRLFRKSNLKPFERDISTEIYQAGSTPCNGVEGFNCYFPLQSYGFQPTNGVGYQPYRVVVLSFELLHAPATVCGPKKSTNLVKNKCVNFNFNGLTGTGVLTESNKKFLPFQQFGRDIADTTDAVRDPQTLEILDITPCSFGGVSVITPGTNTSNQVAVLYQGVNCTEVPVAIHADQLTPTWRVYSTGSNVFQTRAGCLIGAEHVNNSYECDIPIGAGICASYQTQTNSPRRARSVASQSIIAYTMSLGAENSVAYSNNSIAIPTNFTISVTTEILPVSMTKTSVDCTMYICGDSTECSNLLLQYGSFCTQLNRALTGIAVEQDKNTQEVFAQVKQIYKTPPIKDFGGFNFSQILPDPSKPSKRSFIEDLLFNKVTLADAGFIKQYGDCLGDIAARDLICAQKFNGLTVLPPLLTDEMIAQYTSALLAGTITSGWTFGAGAALQIPFAMQMAYRFNGIGVTQNVLYENQKLIANQFNSAIGKIQDSLSSTASALGKLQDVVNQNAQALNTLVKCLSSNFGAISSVLNDILSRLDKVEAEVQIDRLITGRLQCLQTYVTQQLIRAAEIRASANLAATKMSECVLGQSKRVDFCGKGYHLMSFPQSAPHGVVFLHVTYVPAQEKNFTTAPAICHDGKAHFPREGVFVSNGTHWFVTQRNFYEPQIITTDNTFVSGNCDVVIGIVNNTVYDPLQPELDSFKEELDKYFKNHTSPDVDLGDISGINASVVNIQKEIDRLNEVAKNLNESLIDLQELGKYEQYIKWPWYIWLGFIAGLIAIVMVTIMLCCMTSCCSCLKGCCSCGSCCKFDEDDSEPVLKGVKLHYT

SEQ ID NO: 994 - protein, 1273 aa, Artificial Sequence
  SARS-CoV-2/Iceland/189/2020__EPI_ISL_417709 spike protein (1-1273)(Q965C_S1003C)
MFVFLVLLPLVSSQCVNLTTRTQLPPAYTNSFTRGVYYPDKVFRSSVLHSTQDLFLPFFSNVTWFHAIHVSGTNGTKRFDNPVLPFNDGVYFASTEKSNIIRGWIFGTTLDSKTQSLLIVNNATNVVIKVCEFQFCNDPFLGVYYHKNNKSWMESEFRVYSSANNCTFEYVSQPFLMDLEGKQGNFKNLREFVFKNIDGYFKIYSKHTPINLVRDLPQGFSALEPLVDLPIGINITRFQTLLALHRSYLTPGDSSSGWTAGAAAYYVGYLQPRTFLLKYNENGTITDAVDCALDPLSETKCTLKSFTVEKGIYQTSNFRVQPTESIVRFPNITNLCPFGEVFNATRFASVYAWNRKRISNCVADYSVLYNSASFSTFKCYGVSPTKLNDLCFTNVYADSFVIRGDEVRQIAPGQTGKIADYNYKLPDDFTGCVIAWNSNNLDSKVGGNYNYLYRLFRKSNLKPFERDISTEIYQAGSTPCNGVEGFNCYFPLQSYGFQPTNGVGYQPYRVVVLSFELLHAPATVCGPKKSTNLVKNKCVNFNFNGLTGTGVLTESNKKFLPFQQFGRDIADTTDAVRDPQTLEILDITPCSFGGVSVITPGTNTSNQVAVLYQGVNCTEVPVAIHADQLTPTWRVYSTGSNVFQTRAGCLIGAEHVNNSYECDIPIGAGICASYQTQTNSPRRARSVASQSIIAYTMSLGAENSVAYSNNSIAIPTNFTISVTTEILPVSMTKTSVDCTMYICGDSTECSNLLLQYGSFCTQLNRALTGIAVEQDKNTQEVFAQVKQIYKTPPIKDFGGFNFSQILPDPSKPSKRSFIEDLLFNKVTLADAGFTKQYGDCLGDIAARDLICAQKFNGLTVLPPLLTDEMIAQYTSALLAGTITSGWTFGAGAALQIPFAMQMAYRFNGIGVTQNVLYENQKLIANQFNSAIGKIQDSLSSTASALGKLQDVVNQNAQALNTLVKCLSSNFGAISSVLNDILSRLDKVEAEVQIDRLITGRLQCLQTYVTQQLIRAAEIRASANLAATKMSECVLGQSKRVDFCGKGYHLMSFPQSAPHGVVFLHVTYVPAQEKNFTTAPAICHDGKAHFPREGVFVSNGTHWFVTQRNFYEPQIITTDNTFVSGNCDVVIGIVNNTVYDPLQPELDSFKEELDKYFKNHTSPDVDLGDISGINASVVNIQKEIDRLNEVAKNLNESLIDLQELGKYEQYIKWPWYIWLGFIAGLIAIVMVTIMLCCMTSCCSCLKGCCSCGSCCKFDEDDSEPVLKGVKLHYT

SEQ ID NO: 995 - protein, 1273 aa, Artificial Sequence
  SARS-CoV-2/Australia/NSW56/2020__EPI_ISL_417408 spike protein (1-1273)(Q965C_S1003C)
MFVFLVLLPLVSSQCVNLTTRTQLPPAYTNSFTRGVYYPDKVFRSSVLHSTQDLFLPFFSNVTWFHAIHVSGTNGTKRFDNPVLPFNDGVYFASTEKSNIIRGWIFGTTLDSKTQSLLIVNNATNVVIKVCEFQFCNDPFLGVYYHKNNKSWMESEFRVYSSANNCTFEYVSQPFLMDLEGKQGNFKNLREFVFKNIDGYFKIYSKHTPINLVRDLPQGFSALEPLVDLPIGINITRFQTLLALHRSYLTPGDSSSGWTAGAAAYYVGYLQPRTFLLKYNENGTITDAVDCALDPLSETKCTLKSFTVEKGIYQTSNFRVQPTESIVRFPNITNLCPFGEVFNATRFASVYAWNRKRISNCVADYSVLYNSASFSTFKCYGVSPTKLNDLCFTNVYADSFVIRGDEVRQIAPGQTGKIADYNYKLPDDFTGCVIAWNSNNLDSKVGGNYNYLYRLFRKSNLKPFERDISTEIYQAGSTPCNGVEGFNCYFPLQSYGFQPTNGVGYQPYRVVVLSFELLHAPATVCGPKKSTNLVKNKCVNFNFNGLTGTGVLTESNKKFLPFQQFGRDIADTTDAVRDPQTLEILDITPCSFGGVSVITPGTNTSNQVAVLYQDVNCTEVPVAIHADQLTPTWRVYSTGSNVFQTRAGCLIGAEHVNNSYECDIPIGAGICASYQTQTNSPRRARSVASQSIIAYTMSLGAENSVAYSNNSIAIPTNFTISVTTEILPVSMTKTSVDCTMYICGDSTECSNLLLQYGSFCTQLNRALTGIAVEQDKNTQEVFAQVKQIYKTPPIKDFGGFNFSQILPDSSKPSKRSFIEDLLFNKVTLADAGFIKQYGDCLGDIAARDLICAQKFNGLTVLPPLLTDEMIAQYTSALLAGTITSGWTFGAGAALQIPFAMQMAYRFNGIGVTQNVLYENQKLIANQFNSAIGKIQDSLSSTASALGKLQDVVNQNAQALNTLVKCLSSNFGAISSVLNDILSRLDKVEAEVQIDRLITGRLQCLQTYVTQQLIRAAEIRASANLAATKMSECVLGQSKRVDFCGKGYHLMSFPQSAPHGVVFLHVTYVPAQEKNFTTAPAICHDGKAHFPREGVFVSNGTHWFVTQRNFYEPQIITTDNTFVSGNCDVVIGIVNNTVYDPLQPELDSFKEELDKYFKNHTSPDVDLGDISGINASVVNIQKEIDRLNEVAKNLNESLIDLQELGKYEQYIKWPWYIWLGFIAGLIAIVMVTIMLCCMTSCCSCLKGCCSCGSCCKFDEDDSEPVLKGVKLHYT

SEQ ID NO: 996 - protein, 1273 aa, Artificial Sequence
  SARS-CoV-2/Iceland/280/2020__EPI_ISL_417608 spike protein (1-1273)(Q965C_S1003C)
MFVFLVLLPLVSSQCVNLTTRTQLPPAYTNSFTRGVYYPDKVFRSSVLHSTQDLFLPFFSNVTWFHAIHVSGTNGTKRFDNPVLPFNDGVYFASTEKSNIIRGWIFGTTLDSKTQSLLIVNNATNVVIKVCEFQFCNDPFLGVYYHKNNKSWMESEFRVYSSANNCTFEYVSQPFLMDLEGKQGNFKNLREFVFKNIDGYFKIYSKHTPINLVRDLPQGFSALEPLVDLPIGINITRFQTLLALHRSYLTPGDSSSGWTAGAAAYYVGYLQPRTFLLKYNENGTITDAVDCALDPLSETKCTLKSFTVEKGIYQTSNFRVQPTESIVRFPNITNLCPFGEVFNATRFASVYAWNRKRISNCVADYSVLYNSASFSTFKCYGVSPTKLNDLCFTNVYADSFVIRGDEVRQIAPGQTGKIADYNYKLPDDFTGCVIAWNSNNLDSKVGGNYNYLYRLFRKSNLKPFERDISTEIYQAGSTPCNGVEGFNCYFPLQSYGFQPTNGVGYQPYRVVVLSFELLHAPATVCGPKKSTNLVKNKCVNFNFNGLTGTGVLTESNKKFLPFQQFGRDIADTTDAVRDPQTLEILDITPCSFGGVSVITPGTNTSNQVAVLYQGVNCTEVPVAIHADQLTPTWRVYSTGSNVFQTRAGCLIGAEHVNNSYECDIPIGAGICASYHTQTNSPRRARSVASQSIIAYTMSLGAENSVAYSNNSIAIPTNFTISVTTEILPVSMTKTSVDCTMYICGDSTECSNLLLQYGSFCTQLNRALTGIAVEQDKNTQEVFAQVKQIYKTPPIKDFGGFNFSQILPDPSKPSKRSFIEDLLFNKVTLADAGFIKQYGDCLGDIAARDLICAQKFNGLTVLPPLLTDEMIAQYTSALLAGTITSGWTFGAGAALQIPFAMQMAYRFNGIGVTQNVLYENQKLIANQFNSAIGKIQDSLSSTASALGKLQDVVNQNAQALNTLVKCLSSNFGAISSVLNDILSRLDKVEAEVQIDRLITGRLQCLQTYVTQQLIRAAEIRASANLAATKMSECVLGQSKRVDFCGKGYHLMSFPQSAPHGVVFLHVTYVPAQEKNFTTAPAICHDGKAHFPREGVFVSNGTHWFVTQRNFYEPQIITTDNTFVSGNCDVVIGIVNNTVYDPLQPELDSFKEELDKYFKNHTSPDVDLGDISGINASVVNIQKEIDRLNEVAKNLNESLIDLQELGKYEQYIKWPWYIWLGFIAGLIAIVMVTIMLCCMTSCCSCLKGCCSCGSCCKFDEDDSEPVLKGVKLHYT

SEQ ID NO: 997 - protein, 1273 aa, Artificial Sequence
  SARS-CoV-2/Iceland/247/2020__EPI_ISL_417575 spike protein (1-1273)(Q965C_S1003C)
MFVFLVLLPLVSSQCVNLTTRTQLPPAYTNSFTRGVYYPDKVFRSSVLHSTQDLFLPFFSNVTWFHAIHVSGTNGTKRFDNPVLPFNDGVYFASTEKSNIIRGWIFGTTLDSKTQSLLIVNNATNVVIKVCEFQFCNDPFLGVYYHKNNKSWMESEFRVYSSANNCTFEYVSQPFLMDLEGKQGNFKNLREFVFKNIDGYFKIYSKHTPINLVRDLPQGFSALEPLVDLPIGINITRFQTLLALHRSYLTPGDSSSGWTAGAAAYYVGYLQPRTFLLKYNENGTITDAVDCALDPLSETKCTLKSFTVEKGIYQTSNFRVQPTESIVRFPNITNLCPFGEVFNATRFASVYAWNRKRISNCVADYSVLYNSASFSTFKCYGVSPTKLNDLCFTNVYADSFVIRGDEVRQIAPGQTGKIADYNYKLPDDFTGCVIAWNSNNLDSKVGGNYNYLYRLFRKSNLKPFERDISTEIYQAGSTPCNGVEGFNCYFPLQSYGFQPTNGVGYQPYRVVVLSFELLHAPATVCGPKKSTNLVKNKCVNFNFNGLTGTGVLTESNKKFLPFQQFGRDIADTTDAVRDPQTLEILDITPCSFGGVSVITPGTNTSNQVAVLYQGVNCTEVPVAIHADQLTPTWRVYSTGSNVFQTRAGCLIGAEHVNNSYECDIPIGAGICASYQTQTNSPRRARSVASQSIIAYTMSLGAENSVAYSNNSIAIPTNFTISVTTEILPVSMTKTSVDCTMYICGDSTECSNLLLQYGSFCTQLNRALTGIAVEQDKNTQEVFAQVKQIYKTPPIKDFGGFNFSQILPDPSKPSKRSFIEDLLFNKVTLADAGFIKQYGDCLGDIAARDLICAQKFNGLTVLPPLLTDEMIAQYTSALLAGTITSGWTFGAGAALQIPFAMQMAYRFNGIGVTQNVLYENQKLIANQFNSAIGKIQDSLSSTASALGKLQDVVNQNAQALNTLVKCLSSNFGAISSVLNDILSRLDKVEAEVQIDRLITGRLQCLQTYVTQQLIRAAEIRASANLAATKMSECVLGQSKRVDFCGKGYHLMSFPQSAPHGVVFLHVTYVPAQEKNFTTAPAICHDGKAHFPREGVFVSNGTHWFVTQRNFYEPQIITTDNTFVSGNCDVVIGIVNNTVYDPLQPELDSFKEELDKYFKNHTSPDVDLGDISGINASVVNIQKEIDRLNEVAKNLNESLIDLQELGKYEQYIKWPWYIWLGFIAGLIAIVIVTIMLCCMTSCCSCLKGCCSCGSCCKFDEDDSEPVLKGVKLHYT

SEQ ID NO: 998 - protein, 1273 aa, Artificial Sequence
  SARS-CoV-2/Iceland/238/2020__EPI_ISL_417566 spike protein (1-1273)(Q965C_S1003C)
MFVFLVLLPLVSSQCVNLTTRTQLPPAYTNSFTRGVYYPDKVFRSSVLHSTQDLFLPFFSNVTWFHAIHVSGTNGTKRFDNPVLPFNDGVYFASTEKSNIIRGWIFGTTLDSKTQSLLIVNNATNVVIKVCEFQFCNDPFLGVYYHKNNKSWMESEFRVYSSANNCTFEYVSQPFLMDLEGKQGNFKNLREFVFKNIDGYFKIYSKHTPINLVRDLPQGFSALEPLVDLPIGINITRFQTLLALHRSYLTPGDSSSGWTAGAAAYYVGYLQPRTFLLKYNENGTITDAVDCALDPLSETKCTLKSFTVEKGIYQTSNFRVQPTESIVRFPNITNLCPFGEVFNATRFASVYAWNRKRISNCVADYSVLYNSASFSTFKCYGVSPTKLNDLCFTNVYADSFVIRGDEVRQIAPGQTGKIADYNYKLPDDFTGCVIAWNSNNLDSKVGGNYNYLYRLFRKSNLKPFERDISTEIYQAGSTPCNGVEGFNCYFPLQSYGFQPTNGVGYQPYRVVVLSFELLHAPATVCGPKKSTNLVKNKCVNFNFNGLTGTGVLTESNKKFLPFQQFGRDIADTTDAVRDPQTLEILDITPCSFGGVSVITPGTNTSNQVAVLYQGVNCTEVPVAIHADQLTPTWRVYSTGSNVFQTRAGCLIGAEHVNNSYECDIPIGAGICASYQTQTNSPRRARSVASQSIIAYTMSLGAENSVAYSNNSIAIPTNFTISVTTEILPVSMTKTSVDCTMYICGDSTECSNLLLQYGSFCTQLNRALTGIAVEQDKNTQEVFAQVKQIYKTPPIKDFGGFNFSQILPDPSKPSKRSFIEDLLFNKVTLADVGFIKQYGDCLGDIAARDLICAQKFNGLTVLPPLLTDEMIAQYTSALLAGTITSGWTFGAGAALQIPFAMQMAYRFNGIGVTQNVLYENQKLIANQFNSAIGKIQDSLSSTASALGKLQDVVNQNAQALNTLVKCLSSNFGAISSVLNDILSRLDKVEAEVQIDRLITGRLQCLQTYVTQQLIRAAEIRASANLAATKMSECVLGQSKRVDFCGKGYHLMSFPQSAPHGVVFLHVTYVPAQEKNFTTAPAICHDGKAHFPREGVFVSNGTHWFVTQRNFYEPQIITTDNTFVSGNCDVVIGIVNNTVYDPLQPELDSFKEELDKYFKNHTSPDVDLGDISGINASVVNIQKEIDRLNEVAKNLNESLIDLQELGKYEQYIKWPWYIWLGFIAGLIAIVMVTIMLCCMTSCCSCLKGCCSCGSCCKFDEDDSEPVLKGVKLHYT

SEQ ID NO: 999 - protein, 1273 aa, Artificial Sequence
  SARS-CoV-2/Greece/16/2020__EPI_ISL_418265 spike protein (1-1273)(Q965C_S1003C)
MFVFLVLLPLVSSQCVNLTTRTQLPPAYTNSFTRGVYYPDKVFRSSVLHSTQDLFLPFFSNVTWFHAIHVSGTNGTKRFDNPVLPFNDGVYFASTEKSNIIRGWIFGTTLDSKTQSLLIVNNATNVVIKVCEFQFCNDPFLGVYYHKNNKSWMESEFRVYSSANNCTFEYVSQPFLMDLEGKQGNFKNLREFVFKNVDGYFKIYSKHTPINLVRDLPQGFSALEPLVDLPIGINITRFQTLLALHRSYLTPGDSSSGWTAGAAAYYVGYLQPRTFLLKYNENGTITDAVDCALDPLSETKCTLKSFTVEKGIYQTSNFRVQPTESIVRFPNITNLCPFGEVFNATRFASVYAWNRKRISNCVADYSVLYNSASFSTFKCYGVSPTKLNDLCFTNVYADSFVIRGDEVRQIAPGQTGKIADYNYKLPDDFTGCVIAWNSNNLDSKVGGNYNYLYRLFRKSNLKPFERDISTEIYQAGSTPCNGVEGFNCYFPLQSYGFQPTNGVGYQPYRVVVLSFELLHAPATVCGPKKSTNLVKNKCVNFNFNGLTGTGVLTESNKKFLPFQQFGRDIADTTDAVRDPQTLEILDITPCSFGGVSVITPGTNTSNQVAVLYQDVNCTEVPVAIHADQLTPTWRVYSTGSNVFQTRAGCLIGAEHVNNSYECDIPIGAGICASYQTQTNSPRRARSVASQSIIAYTMSLGAENSVAYSNNSIAIPTNFTISVTTEILPVSMTKTSVDCTMYICGDSTECSNLLLQYGSFCTQLNRALTGIAVEQDKNTQEVFAQVKQIYKTPPIKDFGGFNFSQILPDPSKPSKRSFIEDLLFNKVTLADAGFIKQYGDCLGDIAARDLICAQKFNGLTVLPPLLTDEMIAQYTSALLAGTITSGWTFGAGAALQIPFAMQMAYRFNGIGVTQNVLYENQKLIANQFNSAIGKIQDSLSSTASALGKLQDVVNQNAQALNTLVKCLSSNFGAISSVLNDILSRLDKVEAEVQIDRLITGRLQCLQTYVTQQLIRAAEIRASANLAATKMSECVLGQSKRVDFCGKGYHLMSFPQSAPHGVVFLHVTYVPAQEKNFTTAPAICHDGKAHFPREGVFVSNGTHWFVTQRNFYEPQIITTDNTFVSGNCDVVIGIVNNTVYDPLQPELDSFKEELDKYFKNHTSPDVDLGDISGINASVVNIQKEIDRLNEVAKNLNESLIDLQELGKYEQYIKWPWYIWLGFIAGLIAIVMVTIMLCCMTSCCSCLKGCCSCGSCCKFDEDDSEPVLKGVKLHYT

SEQ ID NO: 1000 - protein, 1273 aa, Artificial Sequence
  SARS-CoV-2/Iceland/319/2020__EPI_ISL_417648 spike protein (1-1273)(Q965C_S1003C)
MFVFLVLLPLVSSQCVNLTTRTQLPPAYTNSFTRGVYYPDKVFRSSVLHSTQDLFLPFFSNVTWFHAIHVSGTNGTKRFDNPVLPFNDGVYFASTEKSNIIRGWIFGTTLDSKTQSLLIVNNATNVVIKVCEFQFCNDPFLGVYYHKNNKSWMESEFRVYSSANNCTFEYVSQPFLIDLEGKQGNFKNLREFVFKNIDGYFKIYSKHTPINLVRDLPQGFSALEPLVDLPIGINITRFQTLLALHRSYLTPGDSSSGWTAGAAAYYVGYLQPRTFLLKYNENGTITDAVDCALDPLSETKCTLKSFTVEKGIYQTSNFRVQPTESIVRFPNITNLCPFGEVFNATRFASVYAWNRKRISNCVADYSVLYNSASFSTFKCYGVSPTKLNDLCFTNVYADSFVIRGDEVRQIAPGQTGKIADYNYKLPDDFTGCVIAWNSNNLDSKVGGNYNYLYRLFRKSNLKPFERDISTEIYQAGSTPCNGVEGFNCYFPLQSYGFQPTNGVGYQPYRVVVLSFELLHAPATVCGPKKSTNLVKNKCVNFNFNGLTGTGVLTESNKKFLPFQQFGRDIADTTDAVRDPQTLEILDITPCSFGGVSVITPGTNTSNQVAVLYQGVNCTEVPVAIHADQLTPTWRVYSTGSNVFQTRAGCLIGAEHVNNSYECDIPIGAGICASYQTQTNSPRRARSVASQSIIAYTMSLGAENSVAYSNNSIAIPTNFTISVTTEILPVSMTKTSVDCTMYICGDSTECSNLLLQYGSFCTQLNRALTGIAVEQDKNTQEVFAQVKQIYKTPPIKDFGGFNFSQILPDPSKPSKRSFIEDLLFNKVTLADAGFIKQYGDCLGDIAARDLICAQKFNGLTVLPPLLTDEMIAQYTSALLAGTITSGWTFGAGAALQIPFAMQMAYRFNGIGVTQNVLYENQKLIANQFNSAIGKIQDSLSSTASALGKLQDVVNQNAQALNTLVKCLSSNFGAISSVLNDILSRLDKVEAEVQIDRLITGRLQCLQTYVTQQLIRAAEIRASANLAATKMSECVLGQSKRVDFCGKGYHLMSFPQSAPHGVVFLHVTYVPAQEKNFTTAPAICHDGKAHFPREGVFVSNGTHWFVTQRNFYEPQIITTDNTFVSGNCDVVIGIVNNTVYDPLQPELDSFKEELDKYFKNHTSPDVDLGDISGINASVVNIQKEIDRLNEVAKNLNESLIDLQELGKYEQYIKWPWYIWLGFIAGLIAIVMVTIMLCCMTSCCSCLKGCCSCGSCCKFDEDDSEPVLKGVKLHYT

SEQ ID NO: 1001 - protein, 1273 aa, Artificial Sequence
  SARS-CoV-2/Congo/94/2020__EPI_ISL_417947 spike protein (1-1273)(Q965C_S1003C)
MFVFLVLLPLVSSQCVNLTTRTQLPPAYTNSFTRGVYYPDKVFRSSVLHSTQDLFLPFFSNVTWFHAIHVSGTNGTKRFDNPVLPFNDGVYFASTEKSNIIRGWIFGTTLDSKTQSLLIVNNATNVVIKVCEFQFCNDPFLGVYYHKNNKSWMESEFRVYSSANNCTFEYVSQPFLMDLEGKQGNFKNLREFVFKNIDGYFKIYSKHTPINLVRDLPQGFSALEPLVDLPIGINITRFQTLLALHRSYLTPGDSSSGWTAGAAAYYVGYLQPRTFLLKYNENGTITDAVDCALDPLSETKCTLKSFTVEKGIYQTSNFRVQPTESIVRFPNITNLCPFGEVFNATRFASVYAWNRKRISNCVADYSVLYNSASFSTFKCYGVSPTKLNDLCFTNVYADSFVIRGDEVRQIAPGQTGKIADYNYKLPDDFTGCVIAWNSNNLDSKVGGNYNYLYRLFRKSNLKPFERDISTEIYQAGSTPCNGVEGFNCYFPLQSYGFQPTNGVGYQPYRVVVLSFELLHAPATVCGPKKSTNLVKNKCVNFNFNGLTGTGVLTESNKKFLPFQQFGRDIADTTDAVRDPQTLEILDITPCSFGGVSVITPGTNTSNQVAVLYQGVNCTEVPVAIHADQLTPTWRVYSTGSNVFQTRAGCLIGAEHVNNSYECDIPIGAGICASYQTQTNSPRRARSVASQSIIAYTMSLGAENSVAYSNNSIAIPTNFTISVTTEILPVSMTKTSVDCTMYICGDSTECSNLLLQYGSFCTQLNRALTGIAVEQDKNTQEVFAQVKQIYKTPPIKDFGGFNFSQILPDPSKPSKRSFIEDILFNKVTLADAGFIKQYGDCLGDIAARDLICAQKFNGLTVLPPLLTDEMIAQYTSALLAGTITSGWTFGAGAALQIPFAMQMAYRFNGIGVTQNVLYENQKLIANQFNSAIGKIQDSLSSTASALGKLQDVVNQNAQALNTLVKCLSSNFGAISSVLNDILSRLDKVEAEVQIDRLITGRLQCLQTYVTQQLIRAAEIRASANLAATKMSECVLGQSKRVDFCGKGYHLMSFPQSAPHGVVFLHVTYVPAQEKNFTTAPAICHDGKAHFPREGVFVSNGTHWFVTQRNFYEPQIITTDNTFVSGNCDVVIGIVNNTVYDPLQPELDSFKEELDKYFKNHTSPDVDLGDISGINASVVNIQKEIDRLNEVAKNLNESLIDLQELGKYEQYIKWPWYIWLGFIAGLIAIVMVTIMLCCMTSCCSCLKGCCSCGSCCKFDEDDSEPVLKGVKLHYT

SEQ ID NO: 1002 - protein, 1273 aa, Artificial Sequence
  SARS-CoV-2/Congo/158/2020__EPI_ISL_417950 spike protein (1-1273)(Q965C_S1003C)
MFVFLVLLPLVSSQCVNLTTRTQLPPAYTNSFTRGVYYPDKVFRSSVLHSTQDLFLPFFSNVTWFHAIHVSGTNGTKRFDNPVLPFNDGVYFASTEKSNIIRGWIFGTTLDSKTQSLLIVNNATNVVIKVCEFQFCNDPFLGVYYHKNNKSWMESEFRVYSSANNCTFEYVSQPFLMDLEGKQGNFKNLREFVFKNIDGYFKIYSKHTPINLVRDLPQGFSALEPLVDLPIGINITRFQTLLALHRSYLTPGDSSSGWTAGAAAYYVGYLQPRTFLLKYNENGTITDAVDCALDPLSETKCTLKSFTVEKGIYQTSNFRVQPTESIVRFPNITNLCPFGEVFNATRFASVYAWNRKRISNCVADYSVLYNSASFSTFKCYGVSPTKLNDLCFTNVYADSFVIRGDEVRQIAPGQTGKIADYNYKLPDDFTGCVIAWNSNNLDSKVGGNYNYLYRLFRKSNLKPFERDISTEIYQAGSTPCNGVEGFNCYFPLQSYGFQPTNGVGYQPYRVVVLSFELLHAPATVCGPKKSTNLVKNKCVNFNFNGLTGTGVLTESNKKFLPFQQFGRDIADTTDAVRDPQTLEILDITPCSFGGVSVITPGTNTSNQVAVLYQDVNCTEVPVAIHADQLTPTWRVYSTGSNVFQTRAGCLIGAEHVNNSYECDIPIGAGICASYQTQTNSPRRARSVASQSIIAYTMSLGAENSVAYSNNSIAIPTNFTISVTTEILPVSMTKTSVDCTMYICGDSTECSNLLLQYGSFCTQLNRALTGIAVEQDKNTQEVFAQVKQIYKTPPIKDFGGFNFSQILPDPSKPSKRSFIEDLLFNKVTLADAGFIKQYGDCLGDIAARDLICAQKFNGLTVLPPLLTDEMIAQYTSALLAGTITSGWTFGAGAALQIPFAMQMAYRFNGIGVTQNVLYENQKLIANQFNSAIGKIQDSLSSTASALGKLQDVVNQNAQALNTLVKCLSSNFGAISSVLNDILSRLDKVEAEVQIDRLITGRLQCLQTYVTQQLIRAAEIRASANLAATKMSECVLGQSKRVDFCGKGYHLMSFPQSAPHGVVFLHVTYVPAQEKNFTTAPAICHDGKAHFPREGVFVSNGTHWFVTQRNFYEPQIITTDNTFLSGNCDVVIGIVNNTVYDPLQPELDSFKEELDKYFKNHTSPDVDLGDISGINASVVNIQKEIDRLNEVAKNLNESLIDLQELGKYEQYIKWPWYIWLGFIAGLIAIVMVTIMLCCMTSCCSCLKGCCSCGSCCKFDEDDSEPVLKGVKLHYT

SEQ ID NO: 1003 - protein, 1273 aa, Artificial Sequence
  SARS-CoV-2/USA/UT-00034/2020__EPI_ISL_417977 spike protein (1-1273)(Q965C_S1003C)
MFVFLVLLPLVSSQCVNLTTRTQLPPAYTNSFTRGVYYPDKVFRSSVLHSTQDLFLPFFSNVTWFHAIHVSGTNGTKRFDNPVLPFNDGVYFASTEKSNIIRGWIFGTTLDSKTQSLLIVNNATNVVIKVCEFQFCNDPFLGVYYYKNNKSWMESEFRVYSSANNCTFEYVSQPFLMDLEGKQGNFKNLREFVFKNIDGYFKIYSKHTPINLVRDLPQGFSALEPLVDLPIGINITRFQTLLALHRSYLTPGDSSSGWTAGAAAYYVGYLQPRTFLLKYNENGTITDAVDCALDPLSETKCTLKSFTVEKGIYQTSNFRVQPTESIVRFPNITNLCPFGEVFNATRFASVYAWNRKRISNCVADYSVLYNSASFSTFKCYGVSPTKLNDLCFTNVYADSFVIRGDEVRQIAPGQTGKIADYNYKLPDDFTGCVIAWNSNNLDSKVGGNYNYLYRLFRKSNLKPFERDISTEIYQAGSTPCNGVEGFNCYFPLQSYGFQPTNGVGYQPYRVVVLSFELLHAPATVCGPKKSTNLVKNKCVNFNFNGLTGTGVLTESNKKFLPFQQFGRDIADTTDAVRDPQTLEILDITPCSFGGVSVITPGTNTSNQVAVLYQGVNCTEVPVAIHADQLTPTWRVYSTGSNVFQTRAGCLIGAEHVNNSYECDIPIGAGICASYQTQTNSPRRARSVASQSIIAYTMSLGAENSVAYSNNSIAIPTNFTISVTTEILPVSMTKTSVDCTMYICGDSTECSNLLLQYGSFCTQLNRALTGIAVEQDKNTQEVFAQVKQIYKTPPIKDFGGFNFSQILPDPSKPSKRSFIEDLLFNKVTLADAGFIKQYGDCLGDIAARDLICAQKFNGLTVLPPLLTDEMIAQYTSALLAGTITSGWTFGAGAALQIPFAMQMAYRFNGIGVTQNVLYENQKLIANQFNSAIGKIQDSLSSTASALGKLQDVVNQNAQALNTLVKCLSSNFGAISSVLNDILSRLDKVEAEVQIDRLITGRLQCLQTYVTQQLIRAAEIRASANLAATKMSECVLGQSKRVDFCGKGYHLMSFPQSAPHGVVFLHVTYVPAQEKNFTTAPAICHDGKAHFPREGVFVSNGTHWFVTQRNFYEPQIITTDNTFVSGNCDVVIGIVNNTVYDPLQPELDSFKEELDKYFKNHTSPDVDLGDISGINASVVNIQKEIDRLNEVAKNLNESLIDLQELGKYEQYIKWPWYIWLGFIAGLIAIVMVTIMLCCMTSCCSCLKGCCSCGSCCKFDEDDSEPVLKGVKLHYT

SEQ ID NO: 1004 - protein, 1273 aa, Artificial Sequence
  SARS-CoV-2/USA/UT-00033/2020__EPI_ISL_417976 spike protein (1-1273)(Q965C_S1003C)
MFVFLVLLPLVSSQCVNLTTRTQLPPAYTNSFTRGVYYPDKVFRSSVLHSTQDLFLPFFSNVTWFHAIHVSGTNGTKRFDNPVLPFNDGVYFASTEKSNIIRGWIFGTTLDSKTQSLLIVNNATNVVIKVCEFQFCNDPFLGVYYHKNNKSWMESEFRVYSSANNCTFEYVSQPFLMDLEGKQGNFKNLREFVFKNIDGYFKIYSKHTPINLVRDLPQGFSALEPLVDLPIGINITRFQTLLALHRSYLTPGDSSSGLTAGAAAYYVGYLQPRTFLLKYNENGTITDAVDCALDPLSETKCTLKSFTVEKGIYQTSNFRVQPTESIVRFPNITNLCPFGEVFNATRFASVYAWNRKRISNCVADYSVLYNSASFSTFKCYGVSPTKLNDLCFTNVYADSFVIRGDEVRQIAPGQTGKIADYNYKLPDDFTGCVIAWNSNNLDSKVGGNYNYLYRLFRKSNLKPFERDISTEIYQAGSTPCNGVEGFNCYFPLQSYGFQPTNGVGYQPYRVVVLSFELLHAPATVCGPKKSTNLVKNKCVNFNFNGLTGTGVLTESNKKFLPFQQFGRDIADTTDAVRDPQTLEILDITPCSFGGVSVITPGTNTSNQVAVLYQGVNCTEVPVAIHADQLTPTWRVYSTGSNVFQTRAGCLIGAEHVNNSYECDIPIGAGICASYQTQTNSPRRARSVASQSIIAYTMSLGAENSVAYSNNSIAIPTNFTISVTTEILPVSMTKTSVDCTMYICGDSTECSNLLLQYGSFCTQLNRALTGIAVEQDKNTQEVFAQVKQIYKTPPIKDFGGFNFSQILPDPSKPSKRSFIEDLLFNKVTLADAGFIKQYGDCLGDIAARDLICAQKFNGLTVLPPLLTDEMIAQYTSALLAGTITSGWTFGAGAALQIPFAMQMAYRFNGIGVTQNVLYENQKLIANQFNSAIGKIQDSLSSTASALGKLQDVVNQNAQALNTLVKCLSSNFGAISSVLNDILSRLDKVEAEVQIDRLITGRLQCLQTYVTQQLIRAAEIRASANLAATKMSECVLGQSKRVDFCGKGYHLMSFPQSAPHGVVFLHVTYVPAQEKNFTTAPAICHDGKAHFPREGVFVSNGTHWFVTQRNFYEPQIITTDNTFVSGNCDVVIGIVNNTVYDPLQPELDSFKEELDKYFKNHTSPDVDLGDISGINASVVNIQKEIDRLNEVAKNLNESLIDLQELGKYEQYIKWPWYIWLGFIAGLIAIVMVTIMLCCMTSCCSCLKGCCSCGSCCKFDEDDSEPVLKGVKLHYT

SEQ ID NO: 1005 - protein, 1273 aa, Artificial Sequence
  SARS-CoV-2/USA/WI-13/2020__EPI_ISL_417516 spike protein (1-1273)(Q965C_S1003C)
MFVFLVLLPLVSSQCVNLTTRTQLPPAYTNSFTRGVYYPDKVFRSSVLHSTQDLFLPFFSNVTWFHAIHVSGTNGTKRFDNPVLPFNDGVYFASTEKSNIIRGWIFGTTLDSKTQSLLIVNNATNVVIKVCEFQFCNDPFLGVYYHKNNKSWMESEFRVYSSANNCTFEYVSQPFLMDLEGKQGNFKNLREFVFKNIDGYFKIYSKHTPINLVRDLPQGFSALEPLVDLPIGINITRFQTLLALHRSYLTPGDSSSGWTAGAAAYYVGYLQPRTFLLKYNENGTITDAVDCALDPLSETKCTLKSFTVEKGIYQTSNFRVLPTESIVRFPNITNLCPFGEVFNATRFASVYAWNRKRISNCVADYSVLYNSASFSTFKCYGVSPTKLNDLCFTNVYADSFVIRGDEVRQIAPGQTGKIADYNYKLPDDFTGCVIAWNSNNLDSKVGGNYNYLYRLFRKSNLKPFERDISTEIYQAGSTPCNGVEGFNCYFPLQSYGFQPTNGVGYQPYRVVVLSFELLHAPATVCGPKKSTNLVKNKCVNFNFNGLTGTGVLTESNKKFLPFQQFGRDIADTTDAVRDPQTLEILDITPCSFGGVSVITPGTNTSNQVAVLYQGVNCTEVPVAIHADQLTPTWRVYSTGSNVFQTRAGCLIGAEHVNNSYECDIPIGAGICASYQTQTNSPRRARSVASQSIIAYTMSLGAENSVAYSNNSIAIPTNFTISVTTEILPVSMTKTSVDCTMYICGDSTECSNLLLQYGSFCTQLNRALTGIAVEQDKNTQEVFAQVKQIYKTPPIKDFGGFNFSQILPDPSKPSKRSFIEDLLFNKVTLADAGFIKQYGDCLGDIAARDLICAQKFNGLTVLPPLLTDEMIAQYTSALLAGTITSGWTFGAGAALQIPFAMQMAYRFNGIGVTQNVLYENQKLIANQFNSAIGKIQDSLSSTASALGKLQDVVNQNAQALNTLVKCLSSNFGAISSVLNDILSRLDKVEAEVQIDRLITGRLQCLQTYVTQQLIRAAEIRASANLAATKMSECVLGQSKRVDFCGKGYHLMSFPQSAPHGVVFLHVTYVPAQEKNFTTAPAICHDGKAHFPREGVFVSNGTHWFVTQRNFYEPQIITTDNTFVSGNCDVVIGIVNNTVYDPLQPELDSFKEELDKYFKNHTSPDVDLGDISGINASVVNIQKEIDRLNEVAKNLNESLIDLQELGKYEQYIKWPWYIWLGFIAGLIAIVMVTIMLCCMTSCCSCLKGCCSCGSCCKFDEDDSEPVLKGVKLHYT

SEQ ID NO: 1006 - protein, 1272 aa, Artificial Sequence
  SARS-CoV-2/India/1-27/2020__EPI_ISL_413522 spike protein (1-1272)(Q964C_S1002C)
MFVFLVLLPLVSSQCVNLTTRTQLPPAYTNSFTRGVYYPDKVFRSSVLHSTQDLFLPFFSNVTWFHAIHVSGTNGTKRFDNPVLPFNDGVYFASTEKSNIIRGWIFGTTLDSKTQSLLIVNNATNVVIKVCEFQFCNDPFLGVYHKNNKSWMESEFRVYSSANNCTFEYVSQPFLMDLEGKQGNFKNLREFVFKNIDGYFKIYSKHTPINLVRDLPQGFSALEPLVDLPIGINITRFQTLLALHRSYLTPGDSSSGWTAGAAAYYVGYLQPRTFLLKYNENGTITDAVDCALDPLSETKCTLKSFTVEKGIYQTSNFRVQPTESIVRFPNITNLCPFGEVFNATRFASVYAWNRKRISNCVADYSVLYNSASFSTFKCYGVSPTKLNDLCFTNVYADSFVIRGDEVIQIAPGQTGKIADYNYKLPDDFTGCVIAWNSNNLDSKVGGNYNYLYRLFRKSNLKPFERDISTEIYQAGSTPCNGVEGFNCYFPLQSYGFQPTNGVGYQPYRVVVLSFELLHAPATVCGPKKSTNLVKNKCVNFNFNGLTGTGVLTESNKKFLPFQQFGRDIADTTDAVRDPQTLEILDITPCSFGGVSVITPGTNTSNQVAVLYQDVNCTEVPVAIHADQLTPTWRVYSTGSNVFQTRAGCLIGAEHVNNSYECDIPIGAGICASYQTQTNSPRRARSVASQSIIAYTMSLGAENSVAYSNNSIAIPTNFTISVTTEILPVSMTKTSVDCTMYICGDSTECSNLLLQYGSFCTQLNRALTGIAVEQDKNTQEVFAQVKQIYKTPPIKDFGGFNFSQILPDPSKPSKRSFIEDLLFNKVTLADAGFIKQYGDCLGDIAARDLICAQKFNGLTVLPPLLTDEMIAQYTSALLAGTITSGWTFGAGAALQIPFAMQMAYRFNGIGVTQNVLYENQKLIANQFNSAIGKIQDSLSSTASALGKLQDVVNQNAQALNTLVKCLSSNFGAISSVLNDILSRLDKVEAEVQIDRLITGRLQCLQTYVTQQLIRAAEIRASANLAATKMSECVLGQSKRVDFCGKGYHLMSFPQSAPHGVVFLHVTYVPAQEKNFTTAPAICHDGKAHFPREGVFVSNGTHWFVTQRNFYEPQIITTDNTFVSGNCDVVIGIVNNTVYDPLQPELDSFKEELDKYFKNHTSPDVDLGDISGINASVVNIQKEIDRLNEVAKNLNESLIDLQELGKYEQYIKWPWYIWLGFIAGLIAIVMVTIMLCCMTSCCSCLKGCCSCGSCCKFDEDDSEPVLKGVKLHYT

SEQ ID NO: 1007 - protein, 1267 aa, Artificial Sequence
  SARS-CoV-2/pangolin/Guangxi/P4L/2017__EPI_ISL_410538 spike protein (1-1267)(Q959C_S997C)
MFVFLFVLPLVSSQCVNLTTRTGIPPGYTNSSTRGVYYPDKVFRSSILHLTQDLFLPFFSNVTWFNTINYQGGFKKFDNPVLPFNDGVYFASTEKSNIIRGWIFGTTLDARTQSLLIVNNATNVVIKVCEFQFCTDPFLGVYYHNNNKTWVENEFRVYSSANNCTFEYISQPFLMDLEGKQGNFKNLREFVFKNVDGYFKIYSKHTPIDLVRDLPRGFAALEPLVDLPIGINITRFQTLLALHRSYLTPGNLESGWTTGAAAYYVGYLQQRTFLLSYNQNGTITDAVDCSLDPLSETKCTLKSLTVEKGIYQTSNFRVQPTISIVRFPNITNLCPFGEVFNASKFASVYAWNRKRISNCVADYSVLYNSTSFSTFKCYGVSPTKLNDLCFTNVYADSFVVKGDEVRQIAPGQTGVIADYNYKLPDDFTGCVIAWNSVKQDALTGGNYGYLYRLFRKSKLKPFERDISTEIYQAGSTPCNGQVGLNCYYPLERYGFHPTTGVNYQPFRVVVLSFELLNGPATVCGPKLSTTLVKDKCVNFNFNGLTGTGVLTTSKKQFLPFQQFGRDISDTTDAVRDPQTLEILDITPCSFGGVSVITPGTNTSNQVAVLYQDVNCTEVPMAIHAEQLTPAWRVYSAGANVFQTRAGCLVGAEHVNNSYECDIPVGAGICASYHSMSSLRSVNQRSIIAYTMSLGAENSVAYSNNSIAIPTNFTISVTTEILPVSMTKTSVDCTMYICGDSIECSNLLLQYGSFCTQLNRALTGIAVEQDKNTQEVFAQVKQIYKTPPIKDFGGFNFSQILPDPSKPSKRSFIEDLLFNKVTLADAGFIKQYGDCLGDIAARDLICAQKFNGLTVLPPLLTDEMIAQYTSALLAGTITSGWTFGAGAALQIPFAMQMAYRFNGIGVTQNVLYENQKLIANQFNSAIGKIQDSLSSTASALGKLQDVVNQNAQALNTLVKCLSSNFGAISSVLNDILSRLDKVEAEVQIDRLITGRLQCLQTYVTQQLIRAAEIRASANLAATKMSECVLGQSKRVDFCGKGYHLMSFPQSAPHGVVFLHVTYVPAQEKNFTTAPAICHEGKAHFPREGVFVSNGTHWFITQRNFYEPQIITTDNTFVSGSCDVVIGIVNNTVYDPLQPELDSFKEELDKYFKNHTSPDVDLGDISGINASVVNIQKEIDRLNEVAKNLNESPIDLQELGKYEQYIKWPWYIWLGFIAGLIAIIMVTIMLCCMTSCCSCLKGCCSCGSCCKFDEDDSEPVLKGVKLHYT

SEQ ID NO: 1008 - protein, 1267 aa, Artificial Sequence
  SARS-CoV-2/pangolin/Guangxi/P5L/2017__EPI_ISL_410540 spike protein (1-1267)(Q959C_S997C)
MFVFLFVLPLVSSQCVNLTTRTGIPPGYTNSSTRGVYYPDKVFRSSILHLTQDLFLPFFSNVTWFNTINYQGGFKKFDNPVLPFNDGVYFASTEKSNIIRGWIFGTTLDARTQSLLIVNNATNVVIKVCEFQFCTDPFLGVYYHNNNKTWVENEFRVYSSANNCTFEYISQPFLMDLEGKQGNFKNLREFVFKNVDGYFKIYSKHTPIDLVRDLPRGFAALEPLVDLPIGINITRFQTLLALHRSYLTPGKLESGWTTGAAAYYVGYLQQRTFLLSYNQNGTITDAVDCSLDPLSETKCTLKSLTVEKGIYQTSNFRVQPTISIVRFPNITNLCPFGEVFNASKFASVYAWNRKRISNCVADYSVLYNSTSFSTFKCYGVSPTKLNDLCFTNVYADSFVVKGDEVRQIAPGQTGVIADYNYKLPDDFTGCVIAWNSVKQDALTGGNYGYLYRLFRKSKLKPFERDISTEIYQAGSTPCNGQVGLNCYYPLERYGFHPTTGVNYQPFRVVVLSFELLNGPATVCGPKLSTTLVKDKCVNFNFNGLTGTGVLTTSKKQFLPFQQFGRDISDTTDAVRDPQTLEILDITPCSFGGVSVITPGTNTSNQVAVLYQDVNCTEVPMAIHAEQLTPAWRVYSAGANVFQTRAGCLVGAEHVNNSYECDIPVGAGICASYHSMSSFRSVNQRSIIAYTMSLGAENSVAYSNNSIAIPTNFTISVTTEILPVSMTKTSVDCTMYICGDSIECSNLLLQYGSFCTQLNRALTGIAVEQDKNTQEVFAQVKQIYKTPPIKDFGGFNFSQILPDPSKPSKRSFIEDLLFNKVTLADAGFIKQYGDCLGDIAARDLICAQKFNGLTVLPPLLTDEMIAQYTSALLAGTITSGWTFGAGAALQIPFAMQMAYRFNGIGVTQNVLYENQKLIANQFNSAIGKIQDSLSSTASALGKLQDVVNQNAQALNTLVKCLSSNFGAISSVLNDILSRLDKVEAEVQIDRLITGRLQCLQTYVTQQLIRAAEIRASANLAATKMSECVLGQSKRVDFCGKGYHLMSFPQSAPHGVVFLHVTYVPAQEKNFTTAPAICHEGKAHFPREGVFVSNGTHWFITQRNFYEPQIITTDNTFVSGSCDVVIGIVNNTVYDPLQPELDSFKEELDKYFKNHTSPDVDLGDISGINASVVNIQKEIDRLNEVAKNLNESLIDLQELGKYEQYIKWPWYIWLGFIAGLIAIIMVTIMLCCMTSCCSCLKGCCSCGSCCKFDEDDSEPVLKGVKLHYT

SEQ ID NO: 1009 - protein, 1267 aa, Artificial Sequence
  SARS-CoV-2/pangolin/Guangxi/P5E/2017__EPI_ISL_410541 spike protein (1-1267)(Q959C_S997C)
MFVFLFVLPLVSSQCVNLTTRTGIPPGYTNSSTRGVYYPDKVFRSSILHLTQDLFLPFFSNVTWFNTITYQGGSKKFDNPVLPFNDGVYFASTEKSNIIRGWIFGTTLDARTQSLLIVNNATNVVIKVCEFQFCTDPFLGVYYHNNNKTWVENEFRVYSSANNCTFEYISQPFLMDLEGKQGNFKNLREFVFKNVDGYFKIYSKHTPIDLVRDLPRGFAALEPLVDLPIGINITRFQTLLALHRSYLTPGKLESGWTTGAAAYYVGYLQQRTFLLSYNQNGTITDAVDCSLDPLSETKCTLKSLTVEKGIYQTSNFRVQPTISIVRFPNITNLCPFGEVFNASKFASVYAWNRKRISNCVADYSVLYNSTSFSTFKCYGVSPTKLNDLCFTNVYADSFVVKGDEVRQIAPGQTGVIADYNYKLPDDFTGCVIAWNSVKQDALTGDNYGYLYRLFRKSKLKPFERDISTEIYQAGSTPCNGQVGLNCYYPLERYGFHPTTGVNYQPFRVVVLSFELLNGPATVCGPKLSTTLVKDKCVNFNFNGLTGTGVLTTSKKQFLPFQQFGRDISDTTDAVRDPQTLEILDITPCSFGGVSVITPGTNTSNQVAVLYQDVNCTEVPMAIHAEQLTPAWRVYSAGANVFQTRAGCLVGAEHVNNSYECDIPVGAGICASYHSMSSFRSVNQRSIIAYTMSLGAENSVAYSNNSIAIPTNFTISVTTEILPVSMTKTSVDCTMYICGDSIECSNLLLQYGSFCTQLNRALTGIAVEQDKNTQEVFAQVKQIYKTPPIKDFGGFNFSQILPDPSKPSKRSFIEDLLFNKVTLADAGFIKQYGDCLGDIAARDLICAQKFNGLTVLPPLLTDEMIAQYTSALLAGTITSGWTFGAGAALQIPFAMQMAYRFNGIGVTQNVLYENQKLIANQFNSAIGKIQDSLSSTASALGKLQDVVNQNAQALNTLVKCLSSNFGAISSVLNDILSRLDKVEAEVQIDRLITGRLQCLQTYVTQQLIRAAEIRASANLAATKMSECVLGQSKRVDFCGKGYHLMSFPQSAPHGVVFLHVTYVPAQEKNFTTAPAICHEGKAHFPREGVFVSNGTHWFITQRNFYEPQIITTDNTFVSGSCDVVIGIVNNTVYDPLQPELDSFKEELDKYFKNHTSPDVDLGDISGINASVVNIQKEIDRLNEVAKNLNESLIDLQELGKYEQYIKWPWYIWLGFIAGLIAIIMVTIMLCCMTSCCSCLKGCCSCGSCCKFDEDDSEPVLKGVKLHYT

SEQ ID NO: 1010 - protein, 1265 aa, Artificial Sequence
  SARS-CoV-2/pangolin/Guangxi/P1E/2017__EPI_ISL_410539 spike protein (1-1265)(Q957C_S995C)
MFVFLFVLPLVSSQCVNLTTRTGIQPGYTNSSTRGVYYPDKVFRSSILHLTQDLFLPFFSNVTWFNTINYQGGFKKFDNPVLPFNDGVYFASTEKSNIIRGWIFGTTLDARTQSLLIVNNATNVVIKVCEFQFCTDPFLGVYYHNNNKTWVENEFRVYSSANNCTFEYISQPFLMDLEGKQGNFKNLREFVFKNVDGYFKIYSKHTPIDLVRDLPRGFAALEPLVDLPIGINITRFQTLLALHRSYLTPGKLESGWTTGAAAYYVGYLQQRTFLLSYNQNGTITDAVDCSLDPLSETKCTLKSLTVEKGIYQTSNFRVQPTISIVRFPNITNLCPFGEVFNASKFASVYAWNRKRISNCVADYSVLYNSTSFSTFKCYGVSPTKLNDLCFTNVYADSFVVKGDEVRQIAPGQTGVIADYNYKLPDDFTGCVIAWNSVKQDALTGGNYLYRLFRKSKLKPFERDISTEIYQAGSTPCNGQVGLNCYYPLERYGFHPTTGVNYQPFRVVVLSFELLNGPATVCGPKLSTTLVKDKCVNFNFNGLTGTGVLTTSKKQFLPFQQFGRDISDTTDAVRDPQTLEILDITPCSFGGVSVITPGTNTSNQVAVLYQDVNCTEVPMAIHAEQLTPAWRVYSAGANVFQTRAGCLVGAEHVNNSYECDIPVGAGICASYHSMSSLRSVNQRSIIAYTMSLGAENSVAYSNNSIAIPTNFTISVTTEILPVSMTKTSVDCTMYICGDSIECSNLLLQYGSFCTQLNRALTGIAVEQDKNTQEVFAQVKQIYKTPPIKDFGGFNFSQILPDPSKPSKRSFIEDLLFNKVTLADAGFIKQYGDCLGDIAARDLICAQKFNGLTVLPPLLTDEMIAQYTSALLAGTITSGWTFGAGAALQIPFAMQMAYRFNGIGVTQNVLYENQKLIANQFNSAIGKIQDSLSSTASALGKLQDVVNQNAQALNTLVKCLSSNFGAISSVLNDILSRLDKVEAEVQIDRLITGRLQCLQTYVTQQLIRAAEIRASANLAATKMSECVLGQSKRVDFCGKGYHLMSFPQSAPHGVVFLHVTYVPAQEKNFTTAPAICHEGKAHFPREGVFVSNGTHWFITQRNFYEPQIITTDNTFVSGSCDVVIGIVNNTVYDPLQPELDSFKEELDKYFKNHTSPDVDLGDISGINASVVNIQKEIDRLNEVAKNLNESLIDLQELGKYEQYIKWPWYIWLGFIAGLIAIIMVTIMLCCMTSCCSCLKGCCSCGSCCKFDEDDSEPVLKGVKLHYT

SEQ ID NO: 1011 - protein, 1273 aa, Artificial Sequence; identical to SEQ ID NO: 25
  SARS-CoV-2/Wuhan/WIV05/2019__EPI_ISL_402128 spike protein (1-1273)(F970C_G999C)

SEQ ID NO: 1012 - protein, 1269 aa, Artificial Sequence
  SARS-CoV-2/bat/Yunnan/RaTG13/2013__EPI_ISL_402131 spike protein (1-1269)(F966C_G995C)
MFVFLVLLPLVSSQCVNLTTRTQLPPAYTNSSTRGVYYPDKVFRSSVLHLTQDLFLPFFSNVTWFHAIHVSGTNGIKRFDNPVLPFNDGVYFASTEKSNIIRGWIFGTTLDSKTQSLLIVNNATNVVIKVCEFQFCNDPFLGVYYHKNNKSWMESEFRVYSSANNCTFEYVSQPFLMDLEGKQGNFKNLREFVFKNIDGYFKIYSKHTPINLVRDLPPGFSALEPLVDLPIGINITRFQTLLALHRSYLTPGDSSSGWTAGAAAYYVGYLQPRTFLLKYNENGTITDAVDCALDPLSETKCTLKSFTVEKGIYQTSNFRVQPTDSIVRFPNITNLCPFGEVFNATTFASVYAWNRKRISNCVADYSVLYNSTSFSTFKCYGVSPTKLNDLCFTNVYADSFVITGDEVRQIAPGQTGKIADYNYKLPDDFTGCVIAWNSKHIDAKEGGNFNYLYRLFRKANLKPFERDISTEIYQAGSKPCNGQTGLNCYYPLYRYGFYPTDGVGHQPYRVVVLSFELLNAPATVCGPKKSTNLVKNKCVNFNFNGLTGTGVLTESNKKFLPFQQFGRDIADTTDAVRDPQTLEILDITPCSFGGVSVITPGTNASNQVAVLYQDVNCTEVPVAIHADQLTPTWRVYSTGSNVFQTRAGCLIGAEHVNNSYECDIPIGAGICASYQTQTNSRSVASQSIIAYTMSLGAENSVAYSNNSIAIPTNFTISVTTEILPVSMTKTSVDCTMYICGDSTECSNLLLQYGSFCTQLNRALTGIAVEQDKNTQEVFAQVKQIYKTPPIKDFGGFNFSQILPDPSKPSKRSFIEDLLFNKVTLADAGFIKQYGDCLGDIAARDLICAQKFNGLTVLPPLLTDEMIAQYTSALLAGTITSGWTFGAGAALQIPFAMQMAYRFNGIGVTQNVLYENQKLIANQFNSAIGKIQDSLSSTASALGKLQDVVNQNAQALNTLVKQLSSNCGAISSVLNDILSRLDKVEAEVQIDRLITCRLQSLQTYVTQQLIRAAEIRASANLAATKMSECVLGQSKRVDFCGKGYHLMSFPQSAPHGVVFLHVTYVPAQEKNFTTAPAICHDGKAHFPREGVFVSNGTHWFVTQRNFYEPQIITTDNTFVSGSCDVVIGIVNNTVYDPLQPELDSFKEELDKYFKNHTSPDVDLGDISGINASVVNIQKEIDRLNEVAKNLNESLIDLQELGKYEQYIKWPWYIWLGFIAGLIAIIMVTIMLCCMTSCCSCLKGCCSCGSCCKFDEDDSEPVLKGVKLHYT

SEQ ID NO: 1013 - protein, 1273 aa, Artificial Sequence
  SARS-CoV-2/Wuhan/HBCDC-HB-01/2019__EPI_ISL_402132 spike protein (1-1273)(F970C_G999C)
MFVFLVLLPLVSSQCVNLTTRTQLPPAYTNSITRGVYYPDKVFRSSVLHSTQDLFLPFFSNVTWFHAIHVSGTNGTKRFDNPVLPFNDGVYFASTEKSNIIRGWIFGTTLDSKTQSLLIVNNATNVVIKVCEFQFCNDPFLGVYYHKNNKSWMESEFRVYSSANNCTFEYVSQPFLMDLEGKQGNFKNLREFVFKNIDGYFKIYSKHTPINLVRDLPQGFSALEPLVDLPIGINITRFQTLLALHRSYLTPGDSSSGWTAGAAAYYVGYLQPRTFLLKYNENGTITDAVDCALDPLSETKCTLKSFTVEKGIYQTSNFRVQPTESIVRFPNITNLCPFGEVFNATRFASVYAWNRKRISNCVADYSVLYNSASFSTFKCYGVSPTKLNDLCFTNVYADSFVIRGDEVRQIAPGQTGKIADYNYKLPDDFTGCVIAWNSNNLDSKVGGNYNYLYRLFRKSNLKPFERDISTEIYQAGSTPCNGVEGFNCYFPLQSYGFQPTNGVGYQPYRVVVLSFELLHAPATVCGPKKSTNLVKNKCVNFNFNGLTGTGVLTESNKKFLPFQQFGRDIADTTDAVRDPQTLEILDITPCSFGGVSVITPGTNTSNQVAVLYQDVNCTEVPVAIHADQLTPTWRVYSTGSNVFQTRAGCLIGAEHVNNSYECDIPIGAGICASYQTQTNSPRRARSVASQSIIAYTMSLGAENSVAYSNNSIAIPTNFTISVTTEILPVSMTKTSVDCTMYICGDSTECSNLLLQYGSFCTQLNRALTGIAVEQDKNTQEVFAQVKQIYKTPPIKDFGGFNFSQILPDPSKPSKRSFIEDLLFNKVTLADAGFIKQYGDCLGDIAARDLICAQKFNGLTVLPPLLTDEMIAQYTSALLAGTITSGWTFGAGAALQIPFAMQMAYRFNGIGVTQNVLYENQKLIANQFNSAIGKIQDSLSSTASALGKLQDVVNQNAQALNTLVKQLSSNCGAISSVLNDILSRLDKVEAEVQIDRLITCRLQSLQTYVTQQLIRAAEIRASANLAATKMSECVLGQSKRVDFCGKGYHLMSFPQSAPHGVVFLHVTYVPAQEKNFTTAPAICHDGKAHFPREGVFVSNGTHWFVTQRNFYEPQIITTDNTFVSGNCDVVIGIVNNTVYDPLQPELDSFKEELDKYFKNHTSPDVDLGDISGINASVVNIQKEIDRLNEVAKNLNESLIDLQELGKYEQYIKWPWYIWLGFIAGLIAIVMVTIMLCCMTSCCSCLKGCCSCGSCCKFDEDDSEPVLKGVKLHYT

SEQ ID NO: 1014 - protein, 1273 aa, Artificial Sequence
  SARS-CoV-2/Guangdong/20SF028/2020__EPI_ISL_403936 spike protein (1-1273)(F970C_G999C)
MFVFLVLLPLVSSQCVNLTTRTQLPPAYTNSFTRGVYYPDKVFRSSVLYSTQDLFLPFFSNVTWFHAIHVSGTNGTKRFDNPVLPFNDGVYFASTEKSNIIRGWIFGTTLDSKTQSLLIVNNATNVVIKVCEFQFCNDPFLGVYYHKNNKSWMESEFRVYSSANNCTFEYVSQPFLMDLEGKQGNFKNLREFVFKNIDGYFKIYSKHTPINLVRDLPQGFSALEPLVDLPIGINITRFQTLLALHRSYLTPGDSSSGWTAGAAAYYVGYLQPRTFLLKYNENGTITDAVDCALDPLSETKCTLKSFTVEKGIYQTSNFRVQPTESIVRFPNITNLCPFGEVFNATRFASVYAWNRKRISNCVADYSVLYNSASFSTFKCYGVSPTKLNDLCFTNVYADSFVIRGDEVRQIAPGQTGKIADYNYKLPDDFTGCVIAWNSNNLDSKVGGNYNYLYRLFRKSNLKPFERDISTEIYQAGSTPCNGVEGFNCYFPLQSYGFQPTNGVGYQPYRVVVLSFELLHAPATVCGPKKSTNLVKNKCVNFNFNGLTGTGVLTESNKKFLPFQQFGRDIADTTDAVRDPQTLEILDITPCSFGGVSVITPGTNTSNQVAVLYQDVNCTEVPVAIHADQLTPTWRVYSTGSNVFQTRAGCLIGAEHVNNSYECDIPIGAGICASYQTQTNSPRRARSVASQSIIAYTMSLGAENSVAYSNNSIAIPTNFTISVTTEILPVSMTKTSVDCTMYICGDSTECSNLLLQYGSFCTQLNRALTGIAVEQDKNTQEVFAQVKQIYKTPPIKDFGGFNFSQILPDPSKPSKRSFIEDLLFNKVTLADAGFIKQYGDCLGDIAARDLICAQKFNGLTVLPPLLTDEMIAQYTSALLAGTITSGWTFGAGAALQIPFAMQMAYRFNGIGVTQNVLYENQKLIANQFNSAIGKIQDSLSSTASALGKLQDVVNQNAQALNTLVKQLSSNCGAISSVLNDILSRLDKVEAEVQIDRLITCRLQSLQTYVTQQLIRAAEIRASANLAATKMSECVLGQSKRVDFCGKGYHLMSFPQSAPHGVVFLHVTYVPAQEKNFTTAPAICHDGKAHFPREGVFVSNGTHWFVTQRNFYEPQIITTDNTFVSGNCDVVIGIVNNTVYDPLQPELDSFKEELDKYFKNHTSPDVDLGDISGINASVVNIQKEIDRLNEVAKNLNESLIDLQELGKYEQYIKWPWYIWLGFIAGLIAIVMVTIMLCCMTSCCSCLKGCCSCGSCCKFDEDDSEPVLKGVKLHYT

SEQ ID NO: 1015 - protein, 1273 aa, Artificial Sequence
  SARS-CoV-2/Shenzhen/SZTH-001/2020__EPI_ISL_406592 spike protein (1-1273)(F970C_G999C)
MFVFLVLLPLVSSQCVNLTTRTQLPPAYTNSFTRGVYYPDKVFRSSVLHSTQDLFLPFFSNVTWFHAIHVSGTNGTKRFDNPVLPFNDGVYFASTEKSNIIRGWIFGTTLDSKTQSLLIVNNATNVVIKVCEFQFCNDPFLGVYYHKNNKSWMESEFRVYSSANNCTFEYVSQPFLMDLEGKQGNFKNLREFVFKNIDGYFKIYSKHTPINLVRDLPQGFSALEPLVDLPIGINITRFQTLLALHRSYLTPGDSSSGWTAGAAAYYVGYLQPRTFLLKYNENGTITDAVDCALDPLSETKCTLKSFTVEKGIYQTSNFRVQPTESIVRFPNITNLCPFGEVFNATRFASVYAWNRKRISNCVADYSVLYNSASFSTFKCYGVSPTKLNDLCFTNVYADSFVIRGDEVRQIAPGQTGKIADYNYKLPDDFTGCVIAWNSNNLDSKVGGNYNYLYRLFRKSNLKPFERDISTEIYQAGSTPCNGVEGFNCYFPLQSYGFQPTNGVGYQPYRVVVLSFELLHAPATVCGPKKSTNLVKNKCVNFNFNGLTGTGVLTESNKKFLPFQQFGRDIADTTDAVRDPQTLEILDITPCSFGGVSVITPGTNTSNQVAVLYQDVNCTEVPVAIHADQLTPTWRVYSTGSNVFQTRAGCLIGAEHVNNSYECDIPIGAGICASYQTQTNSPRRARSVASQSIIAYTMSLGAENSVAYSNNSIAIPTNFTISVTTEILPVSMTKTSVDCTMYICGDSTECSNLLLQYGSFCTQLNRALTGIAVEQDKNTQEVFAQVKQIYKTPPIKDFGGFNFSQILPDPSKPSKRSFIEDLLFNKVTLADAGFIKQYGDCLGDIAARDLICAQKFNGLTVLPPLLTDEMIAQYTSALLAGTITSGWTFGAGAALQIPFAMQMAYRFNGIGVTQNVLYENQKLIANQFNSAIGKIQDSLSSTASALGKLQDVVNQNAQALNTLVKQLSSNCGAISSVLNDILSRLDKVEAEVQIDRLITCRLQSLQTYVTQQLIRAAEIRASANLAATKMSECVLGQSKRVDFCGKGYHLMSFPQSAPHGVVFLHVTYVPAQEKNFTTAPAICHDGKAHFPREGVFVSNGTHWFVTQRNFYEPQIITTDNTFVSGNCDVLIGIVNNTVYDPLQPELDSFKEELDKYFKNHTSPDVDLGDISGINASVVNIQKEIDRLNEVAKNLNESLIDLQELGKYEQYIKWPWYIWLGFIAGLIAIVMVTIMLCCMTSCCSCLKGCCSCGSCCKFDEDDSGPVLKGVKLHYT

SEQ ID NO: 1016 - protein, 1273 aa, Artificial Sequence
  SARS-CoV-2/Shenzhen/SZTH-004/2020__EPI_ISL_406595 spike protein (1-1273)(F970C_G999C)
MFVFLVLLPLVSSQCVNLTTRTQLPPAYTNSFTRGVYYPDKVFRSSVLHSTQDLFLPFFSNVTWFHAIHVSGTNGTKRFDNPVLPFNDGVYFASTEKSNIIRGWIFGTTLDSKTQSLLIVNNATNVVIKVCEFQFCNDPFLGVYYHKNNKSWMESEFRVYSSANNCTFEYVSQPFLMDLEGKQGNFKNLREFVFKNIDGYFKIYSKHTPINLVRDLPQGFSALEPLVDLPIGINITRFQTLLALHRSYLTPGDSSSGWTAGAAAYYVGYLQPRTFLLKYNENGTITDAVDCALDPLSETKCTLKSFTVEKGIYQTSNFRVQPTESIVRFPNITNLCPFGEVFNATRFASVYAWDRKRISNCVAYYSVLYNSASFSTFKCYGVSPTKLNDLCFTNVYADSFVIRGDEVRQIAPGQTGKIADYNYKLPDDFTGCVIAWNSNNLDSKVGGNYNYLYRLFRKSNLKPFERDISTEIYQAGSTPCNGVEGFNCYFPLQSYGFQPTNGVGYQPYRVVVLSFELLHAPATVCGPKKSTNLVKNKCVNFNFNGLTGTGVLTESNKKFLPFQQFGRDIADTTDAVRDPQTLEILDITPCSFGGVSVITPGTNTSNQVAVLYQDVNCTEVPVAIHADQLTPTWRVYSTGSNVFQTRAGCLIGAEHVNNSYECDIPIGAGICASYQTQTNSPRRARSVASQSIIAYTMSLGAENSVAYSNNSIAIPTNFTISVTTEILPVSMTKTSVDCTMYICGDSTECSNLLLQYGSFCTQLNRALTGIAVEQDKNTQEVFAQVKQIYKTPPIKDFGGFNFSQILPDPSKPSKRSFIEDLLFNKVTLADAGFIKQYGDCLGDIAARDLICAQKFNGLTVLPPLLTDEMIAQYTSALLAGTITSGWTFGAGAALQIPFAMQMAYRFNGIGVTQNVLYENQKLIANQFNSAIGKIQDSLSSTASALGKLQDVVNQNAQALNTLVKQLSSNCGAISSVLNDILSRLDKVEAEVQIDRLITCRLQSLQTYVTQQLIRAAEIRASANLAATKMSECVLGQSKRVDFCGKGYHLMSFPQSAPHGVVFLHVTYVPAQEKNFTTAPAICHDGKAHFPREGVFVSNGTHWFVTQRNFYEPQIITTDNTFVSGNCDVVIGIVNNTVYDPLQPELDSFKEELDKYFKNHTSPDVDLGDISGINASVVNIQKEIDRLNEVAKNLNESLIDLQELGKYEQYIKWPWYIWLGFIAGLIAIVMVTIMLCCMTSCCSCLKGCCSCGSCCKFDEDDSEPVLKGVKLHYT

SEQ ID NO: 1017 - protein, 1273 aa, Artificial Sequence
  SARS-CoV-2/France/IDF0372/2020__EPI_ISL_406596 spike protein (1-1273)(F970C_G999C)
MFVFLVLLPLVSSQCVNLTTRTQLPPAYTNSFTRGVYYPDKVFRSSVLHSTQDLFLPFFSNVTWFHAIHVSGTNGTKRFDNPVLPFNDGVYFASTEKSNIIRGWIFGTTLDSKTQSLLIVNNATNVVIKVCEFQFCNDPFLGVYYHKNNKSWMESEFRVYSSANNCTFEYVSQPFLMDLEGKQGNFKNLREFVFKNIDGYFKIYSKHTPINLVRDLPQGFSALEPLVDLPIGINITRFQTLLALHRSYLTPGDSSSGWTAGAAAYYVGYLQPRTFLLKYNENGTITDAVDCALDPLSETKCTLKSFTVEKGIYQTSNFRVQPTESIVRFPNITNLCPFGEVFNATRFASVYAWNRKRISNCVADYSFLYNSASFSTFKCYGVSPTKLNDLCFTNVYADSFVIRGDEVRQIAPGQTGKIADYNYKLPDDFTGCVIAWNSNNLDSKVGGNYNYLYRLFRKSNLKPFERDISTEIYQAGSTPCNGVEGFNCYFPLQSYGFQPTNGVGYQPYRVVVLSFELLHAPATVCGPKKSTNLVKNKCVNFNFNGLTGTGVLTESNKKFLPFQQFGRDIADTTDAVRDPQTLEILDITPCSFGGVSVITPGTNTSNQVAVLYQDVNCTEVPVAIHADQLTPTWRVYSTGSNVFQTRAGCLIGAEHVNNSYECDIPIGAGICASYQTQTNSPRRARSVASQSIIAYTMSLGAENSVAYSNNSIAIPTNFTISVTTEILPVSMTKTSVDCTMYICGDSTECSNLLLQYGSFCTQLNRALTGIAVEQDKNTQEVFAQVKQIYKTPPIKDFGGFNFSQILPDPSKPSKRSFIEDLLFNKVTLADAGFIKQYGDCLGDIAARDLICAQKFNGLTVLPPLLTDEMIAQYTSALLAGTITSGWTFGAGAALQIPFAMQMAYRFNGIGVTQNVLYENQKLIANQFNSAIGKIQDSLSSTASALGKLQDVVNQNAQALNTLVKQLSSNCGAISSVLNDILSRLDKVEAEVQIDRLITCRLQSLQTYVTQQLIRAAEIRASANLAATKMSECVLGQSKRVDFCGKGYHLMSFPQSAPHGVVFLHVTYVPAQEKNFTTAPAICHDGKAHFPREGVFVSNGTHWFVTQRNFYEPQIITTDNTFVSGNCDVVIGIVNNTVYDPLQPELDSFKEELDKYFKNHTSPDVDLGDISGINASVVNIQKEIDRLNEVAKNLNESLIDLQELGKYEQYIKWPWYIWLGFIAGLIAIVMVTIMLCCMTSCCSCLKGCCSCGSCCKFDEDDSEPVLKGVKLHYT

SEQ ID NO: 1018 - protein, 1273 aa, Artificial Sequence
  SARS-CoV-2/Australia/VIC01/2020__EPI_ISL_406844 spike protein (1-1273)(F970C_G999C)
MFVFLVLLPLVSSQCVNLTTRTQLPPAYTNSFTRGVYYPDKVFRSSVLHSTQDLFLPFFSNVTWFHAIHVSGTNGTKRFDNPVLPFNDGVYFASTEKSNIIRGWIFGTTLDSKTQSLLIVNNATNVVIKVCEFQFCNDPFLGVYYHKNNKSWMESEFRVYSSANNCTFEYVSQPFLMDLEGKQGNFKNLREFVFKNIDGYFKIYSKHTPINLVRDLPQGFSALEPLVDLPIGINITRFQTLLALHRRYLTPGDSSSGWTAGAAAYYVGYLQPRTFLLKYNENGTITDAVDCALDPLSETKCTLKSFTVEKGIYQTSNFRVQPTESIVRFPNITNLCPFGEVFNATRFASVYAWNRKRISNCVADYSVLYNSASFSTFKCYGVSPTKLNDLCFTNVYADSFVIRGDEVRQIAPGQTGKIADYNYKLPDDFTGCVIAWNSNNLDSKVGGNYNYLYRLFRKSNLKPFERDISTEIYQAGSTPCNGVEGFNCYFPLQSYGFQPTNGVGYQPYRVVVLSFELLHAPATVCGPKKSTNLVKNKCVNFNFNGLTGTGVLTESNKKFLPFQQFGRDIADTTDAVRDPQTLEILDITPCSFGGVSVITPGTNTSNQVAVLYQDVNCTEVPVAIHADQLTPTWRVYSTGSNVFQTRAGCLIGAEHVNNSYECDIPIGAGICASYQTQTNSPRRARSVASQSIIAYTMSLGAENSVAYSNNSIAIPTNFTISVTTEILPVSMTKTSVDCTMYICGDSTECSNLLLQYGSFCTQLNRALTGIAVEQDKNTQEVFAQVKQIYKTPPIKDFGGFNFSQILPDPSKPSKRSFIEDLLFNKVTLADAGFIKQYGDCLGDIAARDLICAQKFNGLTVLPPLLTDEMIAQYTSALLAGTITSGWTFGAGAALQIPFAMQMAYRFNGIGVTQNVLYENQKLIANQFNSAIGKIQDSLSSTASALGKLQDVVNQNAQALNTLVKQLSSNCGAISSVLNDILSRLDKVEAEVQIDRLITCRLQSLQTYVTQQLIRAAEIRASANLAATKMSECVLGQSKRVDFCGKGYHLMSFPQSAPHGVVFLHVTYVPAQEKNFTTAPAICHDGKAHFPREGVFVSNGTHWFVTQRNFYEPQIITTDNTFVSGNCDVVIGIVNNTVYDPLQPELDSFKEELDKYFKNHTSPDVDLGDISGINASVVNIQKEIDRLNEVAKNLNESLIDLQELGKYEQYIKWPWYIWLGFIAGLIAIVMVTIMLCCMTSCCSCLKGCCSCGSCCKFDEDDSEPVLKGVKLHYT

SEQ ID NO: 1019 - protein, 1273 aa, Artificial Sequence
  SARS-CoV-2/Germany/BavPat1/2020__EPI_ISL_406862 spike protein (1-1273)(F970C_G999C)
MFVFLVLLPLVSSQCVNLTTRTQLPPAYTNSFTRGVYYPDKVFRSSVLHSTQDLFLPFFSNVTWFHAIHVSGTNGTKRFDNPVLPFNDGVYFASTEKSNIIRGWIFGTTLDSKTQSLLIVNNATNVVIKVCEFQFCNDPFLGVYYHKNNKSWMESEFRVYSSANNCTFEYVSQPFLMDLEGKQGNFKNLREFVFKNIDGYFKIYSKHTPINLVRDLPQGFSALEPLVDLPIGINITRFQTLLALHRSYLTPGDSSSGWTAGAAAYYVGYLQPRTFLLKYNENGTITDAVDCALDPLSETKCTLKSFTVEKGIYQTSNFRVQPTESIVRFPNITNLCPFGEVFNATRFASVYAWNRKRISNCVADYSVLYNSASFSTFKCYGVSPTKLNDLCFTNVYADSFVIRGDEVRQIAPGQTGKIADYNYKLPDDFTGCVIAWNSNNLDSKVGGNYNYLYRLFRKSNLKPFERDISTEIYQAGSTPCNGVEGFNCYFPLQSYGFQPTNGVGYQPYRVVVLSFELLHAPATVCGPKKSTNLVKNKCVNFNFNGLTGTGVLTESNKKFLPFQQFGRDIADTTDAVRDPQTLEILDITPCSFGGVSVITPGTNTSNQVAVLYQGVNCTEVPVAIHADQLTPTWRVYSTGSNVFQTRAGCLIGAEHVNNSYECDIPIGAGICASYQTQTNSPRRARSVASQSIIAYTMSLGAENSVAYSNNSIAIPTNFTISVTTEILPVSMTKTSVDCTMYICGDSTECSNLLLQYGSFCTQLNRALTGIAVEQDKNTQEVFAQVKQIYKTPPIKDFGGFNFSQILPDPSKPSKRSFIEDLLFNKVTLADAGFIKQYGDCLGDIAARDLICAQKFNGLTVLPPLLTDEMIAQYTSALLAGTITSGWTFGAGAALQIPFAMQMAYRFNGIGVTQNVLYENQKLIANQFNSAIGKIQDSLSSTASALGKLQDVVNQNAQALNTLVKQLSSNCGAISSVLNDILSRLDKVEAEVQIDRLITCRLQSLQTYVTQQLIRAAEIRASANLAATKMSECVLGQSKRVDFCGKGYHLMSFPQSAPHGVVFLHVTYVPAQEKNFTTAPAICHDGKAHFPREGVFVSNGTHWFVTQRNFYEPQIITTDNTFVSGNCDVVIGIVNNTVYDPLQPELDSFKEELDKYFKNHTSPDVDLGDISGINASVVNIQKEIDRLNEVAKNLNESLIDLQELGKYEQYIKWPWYIWLGFIAGLIAIVMVTIMLCCMTSCCSCLKGCCSCGSCCKFDEDDSEPVLKGVKLHYT

SEQ ID NO: 1020 - protein, 1273 aa, Artificial Sequence
  SARS-CoV-2/Wuhan/HBCDC-HB-02/2020__EPI_ISL_412978 spike protein (1-1273)(F970C_G999C)
MFVFLVLLPLVSSQCVNLTTRTQLPPAYTNSFTRGVYYPDKVFRSSVLHSTQDLFLPFFSNVTWFHAIHVSGTNGTKRFDNPVLPFNDGVYFASTEKSNIIRGWIFGTTLDSKTQSLLIVNNATNVVIKVCEFQFCNDPFLGVYYHKNNKSWMESEFRVYSSANNCTFEYVSQPFLMDLEGKQGNFKNLREFVFKNIDGYFKIYSKHTPINLVRDLPQGFSALEPLVDLPIGINITRFQTLLALHRSYLTPGDSSSGWTAGAAAYYVGYLQPRTFLLKYNENGTITDAVDCALDPLSETKCTLKSFTVEKGIYQTSNFRVQPTESIVRFPNITNLCPFGEVFNATRFASVYAWNRKRISNCVADYSVLYNSASFSTFKCYGVSPTKLNDLCFTNVYADSFVIRGDEVRQIAPGQTGKIADYNYKLPDDFTGCVIAWNSNNLDSKVGGNYNYLYRLFRKSNLKPFERDISTEIYQAGSTPCNGVEGFNCYFPLQSYGFQPTNGVGYQPYRVVVLSFELLHAPATVCGPKKSTNLVKNKCVNFNFNGLTGTGVLTESNKKFLPFQQFGRDIADTTDAVRDPQTLEILDITPCSFGGVSVITPGTNTSNQVAVLYQDVNCTEVPVAIHADQLTPTWRVYSTGSNVFQTRAGCLIGAEHVNNSYECDIPIGAGICASYQTQTNSPRRARSVASQSIIAYTMSLGAENSVAYSNNSIAIPTNFTISVTTEILPVSMTKTSVDCTMYICGDSTECSNFLLQYGSFCTQLNRALTGIAVEQDKNTQEVFAQVKQIYKTPPIKDFGGFNFSQILPDPSKPSKRSFIEDLLFNKVTLADAGFIKQYGDCLGDIAARDLICAQKFNGLTVLPPLLTDEMIAQYTSALLAGTITSGWTFGAGAALQIPFAMQMAYRFNGIGVTQNVLYENQKLIANQFNSAIGKIQDSLSSTASALGKLQDVVNQNAQALNTLVKQLSSNCGAISSVLNDILSRLDKVEAEVQIDRLITCRLQSLQTYVTQQLIRAAEIRASANLAATKMSECVLGQSKRVDFCGKGYHLMSFPQSAPHGVVFLHVTYVPAQEKNFTTAPAICHDGKAHFPREGVFVSNGTHWFVTQRNFYEPQIITTDNTFVSGNCDVVIGIVNNTVYDPLQPELDSFKEELDKYFKNHTSPDVDLGDISGINASVVNIQKEIDRLNEVAKNLNESLIDLQELGKYEQYIKWPWYIWLGFIAGLIAIVMVTIMLCCMTSCCSCLKGCCSCGSCCKFDEDDSEPVLKGVKLHYT

SEQ ID NO: 1021 - protein, 1273 aa, Artificial Sequence
  SARS-CoV-2/Australia/QLD02/2020__EPI_ISL_407896 spike protein (1-1273)(F970C_G999C)
MFVFLVLLPLVSSQCVNLTTRTQLPPAYTNSFTRGVYYPDKVFRSSVLHSTQDLFLPFFSNVTWFHAIHVSGTNGTKRFDNPVLPFNDGVYFASTEKSNIIRGWIFGTTLDSKTQSLLIVNNATNVVIKVCEFQFCNDPFLGVYYHKNNKSWMESEFRVYSSANNCTFEYVSQPFLMDLEGKQGNFKNLREFVFKNIDGYFKIYSKHTPINLVRDLPQGFSALEPLVDLPIGINITRFQTLLALHRSYLTPGDSSSGWTAGAAAYYVGYLQPRTFLLKYNENGTITDAVDCALDPLSETKCTLKSFTVEKGIYQTSNFRVQPTESIVRFPNITNLCPFGEVFNATRFASVYAWNRKRISNCVADYSVLYNSASFSTFKCYGVSPTKLNDLCFTNVYADSFVIRGDEVRQIAPGQTGKIADYNYKLPDDFTGCVIAWNSNNLDSKVGGNYNYLYRLFRKSNLKPFERDISTEIYQAGSTPCNGVEGFNCYFPLQSYGFQPTNGVGYQPYRVVVLSFELLHAPATVCGPKKSTNLVKNKCVNFNFNGLTGTGVLTESNKKFLPFQQFGRDIADTTDAVRDPQTLEILDITPCSFGGVSVITPGTNTSNQVAVLYQDVNCTEVPVAIHADQLTPTWRVYSTGSNVFQTRAGCLIGAEHVNNSYECDIPIGAGICASYQTQTNSPRRARSVASQSIIAYTMSLGAENSVAYSNNSIAIPTNFTISVTTEILPVSMTKTSVDCTMYICGDSTECSNLLLQYGSFCTQLNRALTGIAVEQDKNTQEVFAQVKQIYKTPPIKDFGGFNFSQILPDPSKPSKRSFIEDLLFNKVTLADAGFIKQYGDCLGDIAARDLICAQKFNGLTVLPPLLTDEMIAQYTSALLAGTITSGWTFGAGAALQIPFAMQMAYRFNGIGVTQNVLYENQKLIANQFNSAIGKIQDSLSSTASALGKLQDVVNQNAQALNTLVKQLSSNCGAISSVLNDILSRLDKVEAEVQIDRLITCRLQSLQTYVTQQLIRAAEIRASANLAATKMSECVLGQSKRVDFCGKGYHLMSFPQSAPHGVVFLHVTYVPAQEKNFTTAPAICHDGKAHFPREGVFVSNGTHWFVTQRNFYEPQIITTDNTFVSGNCDVVIGIVNNTVYDPLQLELDSFKEELDKYFKNHTSPDVDLGDISGINASVVNIQKEIDRLNEVAKNLNESLIDLQELGKYEQYIKWPWYIWLGFIAGLIAIVMVTIMLCCMTSCCSCLKGCCSCGSCCKFDEDDSEPVLKGVKLHYT

SEQ ID NO: 1022 - protein, 1273 aa, Artificial Sequence
  SARS-CoV-2/India/1-31/2020__EPI_ISL_413523 spike protein (1-1273)(F970C_G999C)
MFVFLVLLPLVSSQCVNLTTRTQLPPAYTNSFTRGVYYPDKVFRSSVLHSTQDLFLPFFSNVTWFHAIHVSGTNGTKRFDNPVLPFNDGVYFASTEKSNIIRGWIFGTTLDSKTQSLLIVNNATNVVIKVCEFQFCNDPFLGVYYHKNNKSWMESEFRVYSSANNCTFEYVSQPFLMDLEGKQGNFKNLREFVFKNIDGYFKIYSKHTPINLVRDLPQGFSALEPLVDLPIGINITRFQTLLALHRSYLTPGDSSSGWTAGAAAYYVGYLQPRTFLLKYNENGTITDAVDCALDPLSETKCTLKSFTVEKGIYQTSNFRVQPTESIVRFPNITNLCPFGEVFNATRFASVYAWNRKRISNCVADYSVLYNSASFSTFKCYGVSPTKLNDLCFTNVYADSFVIRGDEVRQIAPGQTGKIADYNYKLPDDFTGCVIAWNSNNLDSKVGGNYNYLYRLFRKSNLKPFERDISTEIYQAGSTPCNGVEGFNCYFPLQSYGFQPTNGVGYQPYRVVVLSFELLHAPATVCGPKKSTNLVKNKCVNFNFNGLTGTGVLTESNKKFLPFQQFGRDIADTTDAVRDPQTLEILDITPCSFGGVSVITPGTNTSNQVAVLYQDVNCTEVPVAIHADQLTPTWRVYSTGSNVFQTRAGCLIGAEHVNNSYECDIPIGAGICASYQTQTNSPRRARSVASQSIIAYTMSLGAENSVAYSNNSIAIPTNFTISVTTEILPVSMTKTSVDCTMYICGDSTECSNLLLQYGSFCTQLNRALTGIAVEQDKNTQEVFAQVKQIYKTPPIKDFGGFNFSQILPDPSKPSKRSFIEDLLFNKVTLADAGFIKQYGDCLGDIAARDLICAQKFNGLTVLPPLLTDEMIAQYTSALLAGTITSGWTFGAGAALQIPFAMQMAYRFNGIGVTQNVLYENQKLIANQFNSVIGKIQDSLSSTASALGKLQDVVNQNAQALNTLVKQLSSNCGAISSVLNDILSRLDKVEAEVQIDRLITCRLQSLQTYVTQQLIRAAEIRASANLAATKMSECVLGQSKRVDFCGKGYHLMSFPQSAPHGVVFLHVTYVPAQEKNFTTAPAICHDGKAHFPREGVFVSNGTHWFVTQRNFYEPQIITTDNTFVSGNCDVVIGIVNNTVYDPLQPELDSFKEELDKYFKNHTSPDVDLGDISGINASVVNIQKEIDRLNEVAKNLNESLIDLQELGKYEQYIKWPWYIWLGFIAGLIAIVMVTIMLCCMTSCCSCLKGCCSCGSCCKFDEDDSEPVLKGVKLHYT

SEQ ID NO: 1023 - protein, 1273 aa, Artificial Sequence
  SARS-CoV-2/Guangdong/GD2020087-P0008/2020__EPI_ISL_413863 spike protein (1-1273)(F970C_G999C)
MFVFLVLLPLVSSQCVNLTTRTQLPPAYTNSFTRGVYYPDKVFRSSVLHSTQDLFLPFFSNVTWFHAIHVSGTNGTKRFDNPVLPFNDGVYFASTEKSNIIRGWIFGTTLDSKTQSLLIVNNATNVVIKVCEFQFCNDPFLGVYYHKNNKSWMESEFRVYSSANNCTFEYVSQPFLMDLEGKQGNFKNLREFVFKNIDGYFKIYSKHTPINLVRDLPQGFSALEPLVDLPIGINITRFQTLLALHRSYLTPGDSSSGWTAGAAAYYVGYLQPRTFLLKYNENGTITDAVDCALDPLSETKCTLKSFTVEKGIYQTSNFRVQPTESIVRFPNITNLCPFGEVFNATRFASVYAWNRKRISNCVADYSVLYNSASFSTFKCYGVSPTKLNDLCFTNVYADSFVIRGDEVREIAPGQTGKIADYNYKLPDDFTGCVIAWNSNNLDSKVGGNYNYLYRLFRKSNLKPFERDISTEIYQAGSTPCNGVEGFNCYFPLQSYGFQPTNGVGYQPYRVVVLSFELLHAPATVCGPKKSTNLVKNKCVNFNFNGLTGTGVLTESNKKFLPFQQFGRDIADTTDAVRDPQTLEILDITPCSFGGVSVITPGTNTSNQVAVLYQDVNCTEVPVAIHADQLTPTWRVYSTGSNVFQTRAGCLIGAEHVNNSYECDIPIGAGICASYQTQTNSPRRARSVASQSIIAYTMSLGAENSVAYSNNSIAIPTNFTISVTTEILPVSMTKTSVDCTMYICGDSTECSNLLLQYGSFCTQLNRALTGIAVEQDKNTQEVFAQVKQIYKTPPIKDFGGFNFSQILPDPSKPSKRSFIEDLLFNKVTLADAGFIKQYGDCLGDIAARDLICAQKFNGLTVLPPLLTDEMIAQYTSALLAGTITSGWTFGAGAALQIPFAMQMAYRFNGIGVTQNVLYENQKLIANQFNSAIGKIQDSLSSTASALGKLQDVVNQNAQALNTLVKQLSSNCGAISSVLNDILSRLDKVEAEVQIDRLITCRLQSLQTYVTQQLIRAAEIRASANLAATKMSECVLGQSKRVDFCGKGYHLMSFPQSAPHGVVFLHVTYVPAQEKNFTTAPAICHDGKAHFPREGVFVSNGTHWFVTQRNFYEPQIITTDNTFVSGNCDVVIGIVNNTVYDPLQPELDSFKEELDKYFKNHTSPDVDLGDISGINASVVNIQKEIDRLNEVAKNLNESLIDLQELGKYEQYIKWPWYIWLGFIAGLIAIVMVTIMLCCMTSCCSCLKGCCSCGSCCKFDEDDSEPVLKGVKLHYT

SEQ ID NO: 1024 - protein, 1273 aa, Artificial Sequence
  SARS-CoV-2/Sweden/01/2020__EPI_ISL_411951 spike protein (1-1273)(F970C_G999C)
MFVFLVLLPLVSSQCVNLTTRTQLPPAYTNSFTRGVYYPDKVFRSSVLHSTQDLFLPFFSNVTWFHAIHVSGTNGTKRFDNPVLPFNDGVYFASTEKSNIIRGWIFGTTLDSKTQSLLIVNNATNVVIKVCEFQFCNDPFLGVYYHKNNKSWMESEFRVYSSANNCTFEYVSQPFLMDLEGKQGNFKNLREFVFKNIDGYFKIYSKHTPINLVRDLPQGFSALEPLVDLPIGINITRFQTLLALHRSYLTPGDSSSGWTAGAAAYYVGYLQPRTFLLKYNENGTITDAVDCALDPLSETKCTLKSFTVEKGIYQTSNFRVQPTESIVRFPNITNLCPFGEVFNATRFASVYAWNRKRISNCVADYSVLYNSASFSTFKCYGVSPTKLNDLCFTNVYADSFVIRGDEVRQIAPGQTGKIADYNYKLPDDFTGCVIAWNSNNLDSKVGGNYNYLYRLFRKSNLKPFERDISTEIYQAGSTPCNGVEGFNCYFPLQSYGFQPTNGVGYQPYRVVVLSFELLHAPATVCGPKKSTNLVKNKCVNFNFNGLTGTGVLTESNKKFLPFQQFGRDIADTTDAVRDPQTLEILDITPCSFGGVSVITPGTNTSNQVAVLYQDVNCTEVPVAIHADQLTPTWRVYSTGSNVFQTRAGCLIGAEHVNNSYECDIPIGAGICASYQTQTNSPRRARSVASQSIIAYTMSLGAENSVAYSNNSIAIPTNFTISVTTEILPVSMTKTSVDCTMYICGDSTECSNLLLQYGSFCTQLNRALTGIAVEQDKNTQEVFAQVKQIYKTPPIKDCGGFNFSQILPDPSKPSKRSFIEDLLFNKVTLADAGFIKQYGDCLGDIAARDLICAQKFNGLTVLPPLLTDEMIAQYTSALLAGTITSGWTFGAGAALQIPFAMQMAYRFNGIGVTQNVLYENQKLIANQFNSAIGKIQDSLSSTASALGKLQDVVNQNAQALNTLVKQLSSNCGAISSVLNDILSRLDKVEAEVQIDRLITCRLQSLQTYVTQQLIRAAEIRASANLAATKMSECVLGQSKRVDFCGKGYHLMSFPQSAPHGVVFLHVTYVPAQEKNFTTAPAICHDGKAHFPREGVFVSNGTHWFVTQRNFYEPQIITTDNTFVSGNCDVVIGIVNNTVYDPLQPELDSFKEELDKYFKNHTSPDVDLGDISGINASVVNIQKEIDRLNEVAKNLNESLIDLQELGKYEQYIKWPWYIWLGFIAGLIAIVMVTIMLCCMTSCCSCLKGCCSCGSCCKFDEDDSEPVLKGVKLHYT

SEQ ID NO: 1025 - protein, 1273 aa, Artificial Sequence
  SARS-CoV-2/Tianmen/HBCDC-HB-07/2020__EPI_ISL_412983 spike protein (1-1273)(F970C_G999C)
MFVFLVLLPLVSSQCVNLTTRTQLPPAYTNSFTRGVYYPDKVFRSSVLHSTQDLFLPFFSNVTWFHAIHVSGTNGTKRFDNPVLPFNDGVYFASTEKSNIIRGWIFGTTLDSKTQSLLIVNNATNVVIKVCEFQFCNDPFLGVYYHKNNKSWMESEFRVYSSANNCTFEYVSQPFLMDLEGKQGNFKNLREFVFKNIDGYFKIYSKHTPINLVRDLPQGFSALEPLVDLPIGINITRFQTLLALHRSYLTPGDSSSGWTAGAAAYYVGYLQPRTFLLKYNENGTITDAVDCALDPLSETKCTLKSFTVEKGIYQTSNFRVQPTESIVRFPNITNLCPFGEVFNATRFASVYAWNRKRISNCVADYSVLYNSASFSTFKCYGVSPTKLNDLCFTNVYADSFVIRGDEVRQIAPGQTGKIADYNYKLPDDFTGCVIAWNSNNLDSKVGGNYNYLYRLFRKSNLKPFERDISTEIYQAGSTPCNGVEGFNCYFPLQSYGFQPTNGVGYQPYRVVVLSFELLHAPATVCGPKKSTNLVKNKCVNFNFNGLTGTGVLTESNKKFLPFQQFGRDIADTTDAVRDPQTLEILDITPCSFGGVSVITPGTNTSNQVAVLYQDLNCTEVPVAIHADQLTPTWRVYSTGSNVFQTRAGCLIGAEHVNNSYECDIPIGAGICASYQTQTNSPRRARSVASQSIIAYTMSLGAENSVAYSNNSIAIPTNFTISVTTEILPVSMTKTSVDCTMYICGDSTECSNLLLQYGSFCTQLNRALTGIAVEQDKNTQEVFAQVKQIYKTPPIKDFGGFNFSQILPDPSKPSKRSFIEDLLFNKVTLADAGFIKQYGDCLGDIAARDLICAQKFNGLTVLPPLLTDEMIAQYTSALLAGTITSGWTFGAGAALQIPFAMQMAYRFNGIGVTQNVLYENQKLIANQFNSAIGKIQDSLSSTASALGKLQDVVNQNAQALNTLVKQLSSNCGAISSVLNDILSRLDKVEAEVQIDRLITCRLQSLQTYVTQQLIRAAEIRASANLAATKMSECVLGQSKRVDFCGKGYHLMSFPQSAPHGVVFLHVTYVPAQEKNFTTAPAICHDGKAHFPREGVFVSNGTHWFVTQRNFYEPQIITTDNTFVSGNCDVVIGIVNNTVYDPLQPELDSFKEELDKYFKNHTSPDVDLGDISGINASVVNIQKEIDRLNEVAKNLNESLIDLQELGKYEQYIKWPWYIWLGFIAGLIAIVMVTIMLCCMTSCCSCLKGCCSCGSCCKFDEDDSEPVLKGVKLHYT

SEQ ID NO: 1026 - protein, 1273 aa, Artificial Sequence
  SARS-CoV-2/Hong Kong/case42_VM20002493/2020__EPI_ISL_414527 spike protein (1-1273)(F970C_G999C)
MFVFLVLLPLVSSQCVNLTTRTQLPPAYTNSFTRGVYYPDKVFRSSVLHSTQDLFLPFFSNVTWFHAIHVSGTNGTKRFDNPVLPFNDGVYFASTEKSNIIRGWIFGTTLDSKTQSLLIVNNATNVVIKVCEFQFCNDPFLGVYYHKNNKSWMESEFRVYSSANNCTFEYVSQPFLMDLEGKQGNFKNLREFVFKNIDGYFKIYSKHTPINLVRDLPQGFSALEPLVDLPIGINITRFQTLLALHRSYLTPGDSSSGWTAGAAAYYVGYLQPRTFLLKYNENGTITDAVDCALDPLSETKCTLKSFTVEKGIYQTSNFRVQPTESIVRFPNITNLCPFGEVFNATRFASVYAWNRKRISNCVADYSVLYNSASFSTFKCYGVSPTKLNDLCFTNVYADSFVIRGDEVRQIAPGQTGKIADYNYKLPDDFTGCVIAWNSNNLDSKVGGNYNYLYRLFRKSNLKPFERDISTEIYQAGSTPCNGVEGFNCYFPLQSYGFQPTNGVGYQPYRVVVLSFELLHAPATVCGPKKSTNLVKNKCVNFNFNGLTGTGVLTESNKKFLPFQQFGRDIADTTDAVRDPQTLEILDITPCSFGGVSVITPGTNTSNQVAVLYQDVNCTEVPVAIHADQLTPTWRVYSTGSNVFQTRAGCLIGAEHVNNSYECDIPIGAGICASYQTQTNSPRRARSVASQSIIAYTMSLGAENSVAYSNNSIAIPTNFAISVTTEILPVSMTKTSVDCTMYICGDSTECSNLLLQYGSFCTQLNRALTGIAVEQDKNTQEVFAQVKQIYKTPPIKDFGGFNFSQILPDPSKPSKRSFIEDLLFNKVTLADAGFIKQYGDCLGDIAARDLICAQKFNGLTVLPPLLTDEMIAQYTSALLAGTITSGWTFGAGAALQIPFAMQMAYRFNGIGVTQNVLYENQKLIANQFNSAIGKIQDSLSSTASALGKLQDVVNQNAQALNTLVKQLSSNCGAISSVLNDILSRLDKVEAEVQIDRLITCRLQSLQTYVTQQLIRAAEIRASANLAATKMSECVLGQSKRVDFCGKGYHLMSFPQSAPHGVVFLHVTYVPAQEKNFTTAPAICHDGKAHFPREGVFVSNGTHWFVTQRNFYEPQIITTDNTFVSGNCDVVIGIVNNTVYDPLQPELDSFKEELDKYFKNHTSPDVDLGDISGINASVVNIQKEIDRLNEVAKNLNESLIDLQELGKYEQYIKWPWYIWLGFIAGLIAIVMVTIMLCCMTSCCSCLKGCCSCGSCCKFDEDDSEPVLKGVKLHYT

SEQ ID NO: 1027 - protein, 1273 aa, Artificial Sequence
  SARS-CoV-2/USA/CruiseA-23/2020__EPI_ISL_414482 spike protein (1-1273)(F970C_G999C)
MFVFLVLLPLVSSQCVNLTTRTQLPPAYTNSFTRGVYYPDKVFRSSVLHSTQDLFLPFFSNVTWFHAIHVSGTNGTKRFDNPVLPFNDGVYFASTEKSNIIRGWIFGTTLDSKTQSLLIVNNATNVVIKVCEFQFCNDPFLGVYYHKNNKSWMESEFRVYSSANNCTFEYVSQPFLMDLEVKQGNFKNLREFVFKNIDGYFKIYSKHTPINLVRDLPQGFSALEPLVDLPIGINITRFQTLLALHRSYLTPGDSSSGWTAGAAAYYVGYLQPRTFLLKYNENGTITDAVDCALDPLSETKCTLKSFTVEKGIYQTSNFRVQPTESIVRFPNITNLCPFGEVFNATRFASVYAWNRKRISNCVADYSVLYNSASFSTFKCYGVSPTKLNDLCFTNVYADSFVIRGDEVRQIAPGQTGKIADYNYKLPDDFTGCVIAWNSNNLDSKVGGNYNYLYRLFRKSNLKPFERDISTEIYQAGSTPCNGVEGFNCYFPLQSYGFQPTNGVGYQPYRVVVLSFELLHAPATVCGPKKSTNLVKNKCVNFNFNGLTGTGVLTESNKKFLPFQQFGRDIADTTDAVRDPQTLEILDITPCSFGGVSVITPGTNTSNQVAVLYQDVNCTEVPVAIHADQLTPTWRVYSTGSNVFQTRAGCLIGAEHVNNSYECDIPIGAGICASYQTQTNSPRRARSVASQSIIAYTMSLGAENSVAYSNNSIAIPTNFTISVTTEILPVSMTKTSVDCTMYICGDSTECSNLLLQYGSFCTQLNRALTGIAVEQDKNTQEVFAQVKQIYKTPPIKDFGGFNFSQILPDPSKPSKRSFIEDLLFNKVTLADAGFIKQYGDCLGDIAARDLICAQKFNGLTVLPPLLTDEMIAQYTSALLAGTITSGWTFGAGAALQIPFAMQMAYRFNGIGVTQNVLYENQKLIANQFNSAIGKIQDSLSSTASALGKLQDVVNQNAQALNTLVKQLSSNCGAISSVLNDILSRLDKVEAEVQIDRLITCRLQSLQTYVTQQLIRAAEIRASANLAATKMSECVLGQSKRVDFCGKGYHLMSFPQSAPHGVVFLHVTYVPAQEKNFTTAPAICHDGKAHFPREGVFVSNGTHWFVTQRNFYEPQIITTDNTFVSGNCDVVIGIVNNTVYDPLQPELDSFKEELDKYFKNHTSPDVDLGDISGINASVVNIQKEIDRLNEVAKNLNESLIDLQELGKYEQYIKWPWYIWLGFIAGLIAIVMVTIMLCCMTSCCSCLKGCCSCGSCCKFDEDDSEPVLKGVKLHYT

SEQ ID NO: 1028 - protein, 1273 aa, Artificial Sequence
  SARS-CoV-2/Hong Kong/case85_VM20002868/2020__EPI_ISL_414519 spike protein (1-1273)(F970C_G999C)
MFVFLVLVPLVSSQCVNLTTRTQLPPAYTNSFTRGVYYPDKVFRSSVLHSTQDLFLPFFSNVTWFHAIHVSGTNGTKRFDNPVLPFNDGVYFASTEKSNIIRGWIFGTTLDSKTQSLLIVNNATNVVIKVCEFQFCNDPFLGVYYHKNNKSWMESEFRVYSSANNCTFEYVSQPFLMDLEGKQGNFKNLREFVFKNIDGYFKIYSKHTPINLVRDLPQGFSALEPLVDLPIGINITRFQTLLALHRSYLTPGDSSSGWTAGAAAYYVGYLQPRTFLLKYNENGTITDAVDCALDPLSETKCTLKSFTVEKGIYQTSNFRVQPTESIVRFPNITNLCPFGEVFNATRFASVYAWNRKRISNCVADYSVLYNSASFSTFKCYGVSPTKLNDLCFTNVYADSFVIRGDEVRQIAPGQTGKIADYNYKLPDDFTGCVIAWNSNNLDSKVGGNYNYLYRLFRKSNLKPFERDISTEIYQAGSTPCNGVEGFNCYFPLQSYGFQPTNGVGYQPYRVVVLSFELLHAPATVCGPKKSTNLVKNKCVNFNFNGLTGTGVLTESNKKFLPFQQFGRDIADTTDAVRDPQTLEILDITPCSFGGVSVITPGTNTSNQVAVLYQDVNCTEVPVAIHADQLTPTWRVYSTGSNVFQTRAGCLIGAEHVNNSYECDIPIGAGICASYQTQTNSPRRARSVASQSIIAYTMSLGAENSVAYSNNSIAIPTNFTISVTTEILPVSMTKTSVDCTMYICGDSTECSNLLLQYGSFCTQLNRALTGIAVEQDKNTQEVFAQVKQIYKTPPIKDFGGFNFSQILPDPSKPSKRSFIEDLLFNKVTLADAGFIKQYGDCLGDIAARDLICAQKFNGLTVLPPLLTDEMIAQYTSALLAGTITSGWTFGAGAALQIPFAMQMAYRFNGIGVTQNVLYENQKLIANQFNSAIGKIQDSLSSTASALGKLQDVVNQNAQALNTLVKQLSSNCGAISSVLNDILSRLDKVEAEVQIDRLITCRLQSLQTYVTQQLIRAAEIRASANLAATKMSECVLGQSKRVDFCGKGYHLMSFPQSAPHGVVFLHVTYVPAQEKNFTTAPAICHDGKAHFPREGVFVSNGTHWFVTQRNFYEPQIITTDNTFVSGNCDVVIGIVNNTVYDPLQPELDSFKEELDKYFKNHTSPDVDLGDISGINASVVNIQKEIDRLNEVAKNLNESLIDLQELGKYEQYIKWPWYIWLGFIAGLIAIVMVTIMLCCMTSCCSCLKGCCSCGSCCKFDEDDSEPVLKGVKLHYT

SEQ ID NO: 1029 - protein, 1273 aa, Artificial Sequence
  SARS-CoV-2/England/200990660/2020__EPI_ISL_414523 spike protein (1-1273)(F970C_G999C)
MFVFLVLLPLVSSQCVNLTTRTQLPPAYTNSFTRGVYYPDKVFRSSVLHSTQDLFLPFFSNVTWFHAIHVSGTNGTKRFDNPVLPFNDGVYFASTEKSNIIRGWIFGTTLDSKTQSLLIVNNATNVVIKVCEFQFCNDPFLGVYYHKNNKSWMESEFRVYSSANNCTFEYVSQPFLMDLEGKQGNFKNLREFVFKNIDGYFKIYSKHTPINLVRDLPQGFSALEPLVDLPIGINITRFQTLLALHRSYLTPGDSSSGWTAGAAAYYVGYLQPRTFLLKYNENGTITDAVDCALDPLSETKCTLKSFTVEKGIYQTSNFRVQPTESIVRFPNITNLCPFGEVFNATRFASVYAWNRKRISNCVADYSVLYNSASFSTFKCYGVSPTKLNDLCFTNVYADSFVIRGDEVRQIAPGQTGKIADYNYKLPDDFTGCVIAWNSNNLDSKVGGNYNYLYRLFRKSNLKPFERDISTEIYQAGSTPCNGVEGFNCYFPLQSYGFQPTNGVGYQPYRVVVLSFELLHAPATVCGPKKSTNLVKNKCVNFNFNGLTGTGVLTESNKKFLPFQQFGRDIADTTDAVRDPQTLEILDITPCSFGGVSVITPGTNTSNQVAVLYQGVNCTEVPVAIHADQLTPTWRVYSTGSNVFQTRAGCLIGAEHVNNSYECDIPIGAGICASYQTQTNSPRRARSVASQSIIAYTMSLGAENSVAYSNNSIAIPTNFTISVTTEILPVSMTKTSVDCTMYICGDSTECSNLLLQYGSFCTQLNRALTGIAVEQDKNTQEVFAQVKQIYKTPPIKDFGGFNFSQILPDPSKPSKRSFIEDLLFNKVTLADAGFIKQYGDCLGDIAARDLICAQKFNGLTVLPPLLTDEMIAQYTSALLAGTITSGWTFGAGAALQIPFAMQMAYRFNGIGVTQNVLYENQKLIANQFNSAIGKIQDSLSSTASALGKLQDVVNQNAQALNTLVKQLSSNCGAISSVLNDILSRLDKVEAEVQIDRLITCRLQSLQTYVTQQLIRAAEIRASANLAATKMSECVLGQSKRVDFCGKGYHLMSFPQSAPHGVVFLHVTYVPAQEKNFTTAPAICHDGKAHFPREGVFVSNGTHWFVTQRNFYEPQIITTDNTFVSGNCDVVIGIVNNTVYDPLQPELDSFKEELDKYFKNHTSPDVDLGDISGINASVVNIQKEIDRLNEVAKNLNESLIDLQELGKYEQYIKWPWYIWLGFIAGLIAIVMVTIMLCCMTSCCSCLKGCCSCGSCCKFDEDDSELVLKGVKLHYT

SEQ ID NO: 1030 - protein, 1273 aa, Artificial Sequence
  SARS-CoV-2/Australia/NSW09/2020__EPI_ISL_413595 spike protein (1-1273)(F970C_G999C)
MFVFLVLLPLVSSQCVNLTTRTQLPPAYTNSFTRGVYYPDKVFRSSVLHSTQDLFLPFFSNVTWFHAIHVSGTNGTKRFDNPVLPFNDGVYFASTEKSNIIRGWIFGTTLDSKTQSLLIVNNATNVVIKVCEFQFCNDPFLGVYYHKNNKSWMESEFRVYSSANNCTFEYVSQPFLMDLEGKQGNFKNLREFVFKNIDGYFKIYSKHTPINLVRDLPQGFSALEPLVDLPIGINITRFQTLLALHRSYLTPGDSSSGWTAGAAAYYVGYLQPRTFLLKYNENGTITDAVDCALDPLSETKCTLKSFTVEKGIYQTSNFRVQPTESIVRFPNITNLCPFGEVFNATRFASVYAWNRKRISNCVADYSVLYNSASFSTFKCYGVSPTKLNDLCFTNVYADSFVIRGDEVRQIAPGQTGKIADYNYKLPDDFTGCVIAWNSNNLDSKVGGNYNYLYRLFRKSNLKPFERDISTEIYQAGSTPCNGVEGFNCYFPLQSYGFQPTNGVGYQPYRVVVLSFELLHAPATVCGPKKSTNLVKNKCVNFNFNGLTGTGVLTESNKKFLPFQQFGRDIADTTDAVRDPQTLEILDITPCSFGGVSVITPGTNTSNQVAVLYQDVNCTEVPVAIHADQLTPTWRVYSTGSNVFQTRAGCLIGAEHVNNSYECDIPIGAGICASYQTQTNSPRRARSVASQSIIAYTMSLGAENSVAYSNNSIAIPTNFTISVTTEILPVSMTKTSVDCTMYICGDSTECSNLLLQYGSFCTQLNRALTGIAVEQDKNTQEVFAQVKQIYKTPPIKDFGGFNFSQILPDPSKPSKRSFIEDLLFNKVTLADAGFIKQYGDCLGDIAARDLICAQKFNGLTVLPPLLTDEMIAQYTSALLAGTITSGWTFGAGAALQIPFAMQMAYRFNGIGVTQNVLYENQKLIANQFNSAIGKIQDSLSFTASALGKLQDVVNQNAQALNTLVKQLSSNCGAISSVLNDILSRLDKVEAEVQIDRLITCRLQSLQTYVTQQLIRAAEIRASANLAATKMSECVLGQSKRVDFCGKGYHLMSFPQSAPHGVVFLHVTYVPAQEKNFTTAPAICHDGKAHFPREGVFVSNGTHWFVTQRNFYEPQIITTDNTFVSGNCDVVIGIVNNTVYDPLQPELDSFKEELDKYFKNHTSPDVDLGDISGINASVVNIQKEIDRLNEVAKNLNESLIDLQELGKYEQYIKWPWYIWLGFIAGLIAIVMVTIMLCCMTSCCSCLKGCCSCGSCCKFDEDDSEPVLKGVKLHYT

SEQ ID NO: 1031 - protein, 1273 aa, Artificial Sequence
  SARS-CoV-2/Australia/NSW10/2020__EPI_ISL_413596 spike protein (1-1273)(F970C_G999C)
MFVFLVLLPLVSSQCVNLTTRTQLPPAYTNSFTRGVYYPDKVFRSSVLHSTQDLFLPFFSNVTWFHAIHVSGTNGTKRFDNPVLPFNDGVYFASTEKSNIIRGWIFGTTLDSKTQSLLIVNNATNVVIKVCEFQFCNDPFLGVYYHKNNKSWMESEFRVYSSANNCTFEYVSQPFLMDLEGKQGNFKNLREFVFKNIDGYFKIYSKHTPINLVRDLPQGFSALEPLVDLPIGINITRFQTLLALHRSYLTPGDSSSGWTAGAAAYYVGYLQPRTFLLKYNENGTITDAVDCALDPLSETKCTLKSFTVEKGIYQTSNFRVQPTESIVRFPNITNLCPFGEVFNATRFASVYAWNRKRISNCVADYSVLYNSASFSTFKCYGVSPTKLNDLCFTNVYADSFVIRGDEVRQIAPGQTGKIADYNYKLPDDFTGCVIAWNSNNLDSKVGGNYNYLYRLFRKSNLKPFERDISTEIYQAGSTPCNGVEGFNCYFPLQSYGFQPTNGVGYQPYRVVVLSFELLHAPATVCGPKKSTNLVKNKCVNFNFNGLTGTGVLTESNKKFLPFQQFGRDIADTTDAVRDPQTLEILDITPCSFGGVSVITPGTNTSNQVAVLYQDVNCTEVPVAIHADQLTPTWRVYSTGSNVFQTRAGCLIGAEHVNNSYECDIPIGAGICASYQTQTNSPRRARSVASQSIIAYTMSLGAENSVAYSNNSIAIPTNFTISVTTEILPVSMTKTSVDCTMYICGDSTECSNLLLQYGSFCTQLNRALTGIAVEQDKNTQEVFAQVKQIYKTPPIKDFGGFNFSQILPDPSKPSKRSFIEDLLFNKVTLADAGFIKQYGDCLGDIAARDLICAQKFNGLTVLPPLLTDEMIAQYTSALLAGTITSGWTFGAGAALQIPFAMQMAYRFNGIGVTQNVLYENQKLIANQFNSAIGKIQDSLSSTASALGKLQDVVNQNAQALNTLVKQLSSNCGAISSVLNDILSRLDKVEAEVQIDRLITCRLQSLQTYVTQQLIRAAEIRASANLAATKMSECVLGQSKRVDFCGKGYHLMSFPQSAPHGVVFLHVTYVPAQEKNFTTAPAICHDGKAHFPREGVFVSNGTHWFVTQRNFYEPQIITTDNTFVSGNCDVVIGIVNNTVYDPLQPELDSFKEELDKYFKNHTSPDVDLGDISGINASVVNIQKEIDRLNEVAKNLNESLIDLQELGKYEQYIKWPWYIWLGFIAGLIAIVMVTIMLCCMTSCCSCLKGCCSCGSCFKFDEDDSEPVLKGVKLHYT

SEQ ID NO: 1032 - protein, 1273 aa, Artificial Sequence
  SARS-CoV-2/Switzerland/1000477797/2020__EPI_ISL_413023 spike protein (1-1273)(F970C_G999C)
MFVFLVLLPLVSSQCVNLTTRTQLPPAYTNSFTRGVYYPDKVFRSSVLHSTQDLFLPFFSNVTWFHAIHVSGTNGTKRFDNPVLPFNDGVYFASTEKSNIIRGWIFGTTLDSKTQSLLIVNNATNVVIKVCEFQFCNDPFLGVYYHKNNKSWMESEFRVYSSANNCTFEYVSQPFLMDLEGKQGNFKNLREFVFKNIDGYFNIYSKHTPINLVRDLPQGFSALEPLVDLPIGINITRFQTLLALHRSYLTPGDSSSGWTAGAAAYYVGYLQPRTFLLKYNENGTITDAVDCALDPLSETKCTLKSFTVEKGIYQTSNFRVQPTESIVRFPNITNLCPFGEVFNATRFASVYAWNRKRISNCVADYSVLYNSASFSTFKCYGVSPTKLNDLCFTNVYADSFVIRGDEVRQIAPGQTGKIADYNYKLPDDFTGCVIAWNSNNLDSKVGGNYNYLYRLFRKSNLKPFERDISTEIYQAGSTPCNGVEGFNCYFPLQSYGFQPTNGVGYQPYRVVVLSFELLHAPATVCGPKKSTNLVKNKCVNFNFNGLTGTGVLTESNKKFLPFQQFGRDIADTTDAVRDPQTLEILDITPCSFGGVSVITPGTNTSNQVAVLYQGVNCTEVPVAIHADQLTPTWRVYSTGSNVFQTRAGCLIGAEHVNNSYECDIPIGAGICASYQTQTNSPRRARSVASQSIIAYTMSLGAENSVAYSNNSIAIPTNFTISVTTEILPVSMTKTSVDCTMYICGDSTECSNLLLQYGSFCTQLNRALTGIAVEQDKNTQEVFAQVKQIYKTPPIKDFGGFNFSQILPDPSKPSKRSFIEDLLFNKVTLADAGFIKQYGDCLGDIAARDLICAQKFNGLTVLPPLLTDEMIAQYTSALLAGTITSGWTFGAGAALQIPFAMQMAYRFNGIGVTQNVLYENQKLIANQFNSAIGKIQDSLSSTASALGKLQDVVNQNAQALNTLVKQLSSNCGAISSVLNDILSRLDKVEAEVQIDRLITCRLQSLQTYVTQQLIRAAEIRASANLAATKMSECVLGQSKRVDFCGKGYHLMSFPQSAPHGVVFLHVTYVPAQEKNFTTAPAICHDGKAHFPREGVFVSNGTHWFVTQRNFYEPQIITTDNTFVSGNCDVVIGIVNNTVYDPLQPELDSFKEELDKYFKNHTSPDVDLGDISGINASVVNIQKEIDRLNEVAKNLNESLIDLQELGKYEQYIKWPWYIWLGFIAGLIAIVMVTIMLCCMTSCCSCLKGCCSCGSCCKFDEDDSEPVLKGVKLHYT

SEQ ID NO: 1033 - protein, 1273 aa, Artificial Sequence
  SARS-CoV-2/Belgium/BA-02291/2020__EPI_ISL_415159 spike protein (1-1273)(F970C_G999C)
MFVFLVLLPLVSSQCVNLTTRTQLPPAYTNSFTRGVYYPDKVFRSSVLHSTQDLFLPFFSNVTWFHAIHVSGTNGTKRFDNPVLPFNDGVYFASTEKSNIIRGWIFGTTLDSKTQSLLIVNNATNVVIKVCEFQFCNDPFLGVYYHKNNKSWMESEFRVYSSANNCTFEYVSQPFLMDLEGKQGNFKNLREFVFKNIDGYFKIYSKHTPINLVRDLPQGFSALEPLVDLPIGINITRFQTLLALHRSYLTPGDSSSGWTAGAAAYYVGYLQPRTFLLKYNENGTITDAVDCALDPLSETKCTLKSFTVEKGIYQTSNFRVQPTESIVRFPNITNLCPFGEVFNATRFASVYAWNRKRISNCVADYSVLYNSASFSTFKCYGVSPTKLNDLCFTNVYADSFVIRGDEVRQIAPGQTGKIADYNYKLPDDFTGCVIAWNSNNLDSKVGGNYNYLYRLFRRSNLKPFERDISTEIYQAGSTPCNGVEGFNCYFPLQSYGFQPTNGVGYQPYRVVVLSFELLPAPATVCGPKKSTNLVKNKCVNFNFNGLTGTGVLTESNKKFLPFQQFGRDIADTTDAVRDPQTLEILDITPCSFGGVSVITPGTNTSNQVAVLYQGVNCTEVPVAIHADQLTPTWRVYSTGSNVFQTRAGCLIGAEHVNNSYECDIPIGAGICASYQTQTNSPRRARSVASQSIIAYTMSLGAENSVAYSNNSIAIPTNFTISVTTEILPVSMTKTSVDCTMYICGDSTECSNLLLQYGSFCTQLNRALTGIAVEQDKNTQEVFAQVKQIYKTPPIKDFGGFNFSQILPDPSKPSKRSFIEDLLFNKVTLADAGFIKQYGDCLGDIAARDLICAQKFNGLTVLPPLLTDEMIAQYTSALLAGTITSGWTFGAGAALQIPFAMQMAYRFNGIGVTQNVLYENQKLIANQFNSAIGKIQDSLSSAAPALGKLQDVVNQNAQALNTLVKQLSSNCGAISSVLNDILSRLDKVEAEVQIDRLITCRLQSLQTYVTQQLIRAAEIRASANLAATKMSECVLGQSKRVDFCGKGYHLMSFPQSAPHGVVFLHVTYVPAQEKNFTTAPAICHDGKAHFPREGVFVSNGTHWFVTQRNFYEPQIITTDNTFVSGNCDVVIGIVNNTVYDPLQPELDSFKEELDKYFKNHTSPDVDLGDISGINASVVNIQKEIDRLNEVAKNLNESLIDLQELGKYEQYIKWPWYIWLGFIAGLIAIVMVTIMLCCMTSCCSCLKGCCSCGSCCKFDEDDSEPVLKGVKLHYT

SEQ ID NO: 1034 - protein, 1273 aa, Artificial Sequence
  SARS-CoV-2/USA/WA8-UW5/2020__EPI_ISL_413486 spike protein (1-1273)(F970C_G999C)
MFVFLVLLPLVSSQCVNLTTRTQLPPAYTNSFTRGVYYPDKVFRSSVLHSTQDLFLPFFSNVTWFHAIHVSGTNGTKRFDNPVLPFNDGVYFASTEKSNIIRGWIFGTTLDSKTQSLLIVNNATNVVIKVCEFQFCNDPFLGVYYHKNNKSWMESEFRVYSSANNCTFEYVSQPFLMDLEGKQGNFKNLREFVFKNIDGYFKIYSKHTPINLVRDLPQGFSALEPLVDLPIGINITRFQTLLALHRSYLTPGDSSSGWTAGAAAYYVGYLQPRTFLLKYNENGTITDAVDCALDPLSETKCTLKSFTVEKGIYQTSNFRVQPTESIVRFPNITNLCPFGEVFNATRFASVYAWNRKRISNCVADYSVLYNSASFSTFKCYGVSPTKLNDLCFTNVYADSFVIRGDEVRQIAPGQTGKIADYNYKLPDDFTGCVIAWNSNNLDSKVGGNYNYLYRLFRKSNLKPFERDISTEIYQAGSTPCNGVEGFNCYFPLQSYGFQPTNGVGYQPYRVVVLSFELLHAPATVCGPKKSTNLVKNKCVNFNFNGLTGTGVLTESNKKFLPFQQFGRDIADTTDAVRDPQTLEILDITPCSFGGVSVITPGTNTSNQVAVLYQDVNCTEVPVAIHADQLTPTWRVYSTGSNVFQTRAGCLIGAEYVNNSYECDIPIGAGICASYQTQTNSPRRARSVASQSIIAYTMSLGAENSVAYSNNSIAIPTNFTISVTTEILPVSMTKTSVDCTMYICGDSTECSNLLLQYGSFCTQLNRALTGIAVEQDKNTQEVFAQVKQIYKTPPIKDFGGFNFSQILPDPSKPSKRSFIEDLLFNKVTLADAGFIKQYGDCLGDIAARDLICAQKFNGLTVLPPLLTDEMIAQYTSALLAGTITSGWTFGAGAALQIPFAMQMAYRFNGIGVTQNVLYENQKLIANQFNSAIGKIQDSLSSTASALGKLQDVVNQNAQALNTLVKQLSSNCGAISSVLNDILSRLDKVEAEVQIDRLITCRLQSLQTYVTQQLIRAAEIRASANLAATKMSECVLGQSKRVDFCGKGYHLMSFPQSAPHGVVFLHVTYVPAQEKNFTTAPAICHDGKAHFPREGVFVSNGTHWFVTQRNFYEPQIITTDNTFVSGNCDVVIGIVNNTVYDPLQPELDSFKEELDKYFKNHTSPDVDLGDISGINASVVNIQKEIDRLNEVAKNLNESLIDLQELGKYEQYIKWPWYIWLGFIAGLIAIVMVTIMLCCMTSCCSCLKGCCSCGSCCKFDEDDSEPVLKGVKLHYT

SEQ ID NO: 1035 - protein, 1273 aa, Artificial Sequence
  SARS-CoV-2/England/20102000506/2020__EPI_ISL_415147 spike protein (1-1273)(F970C_G999C)
MFVFLVLLPLVSSQCVNLTTRTQLPPAYTNSFTRGVYYPDKVFRSSVLHSTQDLFLPFFSNVTWFHAIHVSGTNGTKRFDNPVLPFNDGVYFASTEKSNIIRGWIFGTTLDSKTQSLLIVNNATNVVIKVCEFQFCNDPFLGVYYHKNNKSWMESEFRVYSSANNCTFEYVSQPFLMDLEGKQGNFKNLREFVFKNIDGYFKIYSKHTPINLVRDLPQGFSALEPLVDLPIGINITRFQTLLALHRSYLTPGDSSSGWTAGAAAYYVGYLQPRTFLLKYNENGTITDAVDCALDPLSETKCTLKSFTVEKGIYQTSNFRVQPTESIVRFPNITNLCPFGEVFNATRFASVYAWNRKRISNCVADYSVLYNSASFSTFKCYGVSPTKLNDLCFTNVYADSFVIRGDEVRQIAPGQTGKIADYNYKLPDDFTGCVIAWNSNNLDSKVGGNYNYLYRLFRKSNLKPFERDISTEIYQAGSTPCNGVEGFNCYFPLQSYGFQPTNGVGYQPYRVVVLSFELLHAPATVCGPKKSTNLVKNKCVNFNFNGLTGTGVLTESNKKFLPFQQFGRDIADTTDAVRDPQTLEILDITPCSFGGVSVITPGTNTSNQVAVLYQGVNCTEVPVAIHADQLTPTWRVYSTGSNVFQTRAGCLIGAEHVNNSYECDIPIGAGICASYQTQTNSPRRARSVASQSIIAYTMSLGAENSVAYSNNSIAIPTNFTISVTTEILPVSMTKTSVDCTMYICGDSTECSNLLLQYGSFCTQLNRALTGIAVEQDKNTQEVFAQVKQIYKTPPIKDFGGFNFSQILPDPSKPSKRSFIEDLLFNKVTLADAGFIKQYGYCLGDIAARDLICAQKFNGLTVLPPLLTDEMIAQYTSALLAGTITSGWTFGAGAALQIPFAMQMAYRFNGIGVTQNVLYENQKLIANQFNSAIGKIQDSLSSTASALGKLQDVVNQNAQALNTLVKQLSSNCGAISSVLNDILSRLDKVEAEVQIDRLITCRLQSLQTYVTQQLIRAAEIRASANLAATKMSECVLGQSKRVDFCGKGYHLMSFPQSAPHGVVFLHVTYVPAQEKNFTTAPAICHDGKAHFPREGVFVSNGTHWFVTQRNFYEPQIITTDNTFVSGNCDVVIGIVNNTVYDPLQPELDSFKEELDKYFKNHTSPDVDLGDISGINASVVNIQKEIDRLNEVAKNLNESLIDLQELGKYEQYIKWPWYIWLGFIAGLIAIVMVTIMLCCMTSCCSCLKGCCSCGSCCKFDEDDSEPVLKGVKLHYT

SEQ ID NO: 1036 - protein, 1273 aa, Artificial Sequence
  SARS-CoV-2/Belgium/VAG-03013/2020__EPI_ISL_415155 spike protein (1-1273)(F970C_G999C)
MFVFLVLLPLVSSQCVNLTTRTQLPPAYTNSFTRGVYYPDKVFRSSVLHSTQDLFLPFFSNVTWFHAIHVSGTNGTKRFDNPVLPFNDGVYFASTEKSNIIRGWIFGTTLDSKTQSLLIVNNATNVVIKVCEFQFCNDPFLGVYYHKNNKSWMESEFRVYSSANNCTFEYVSQPFLMDLEGKQGNFKNLREFVFKNIDGYFKIYSKHTPINLVRDLPQGFSALEPLVDLPIGINITRFQTLLALHRSYLTPGDSSSGWTAGAAAYYVGYLQPRTFLLKYNENGTITDAVDCALDPLSETKCTLKSFTVEKGIYQTSNFRVQPTESIVRFPNITNLCPFGEVFNATRFASVYAWNRKRISNCVADYSVLYNSASFSTFKCYGVSPTKLNDLCFTNVYADSFVIRGDEVRQIAPGQTGKIADYNYKLPDDFTGCVIAWNSNNLDSKVGGNYNYLYRLFRKSNLKPFERDISTEIYQAGSTPCNGVEGFNCYFPLQSYGFQPTNGVGYQPYRVVVLSFELLHAPATVCGPKKSTNLVKNKCVNFNFNGLTGTGVLTESNKKFLPFQQFGRDIADTTDAVRDPQTLEILDITPCSFGGVSVITPGTNTSNQVAVLYQGVNCTEVPVAIHADQLTPTWRVYSTGSNVFQTRAGCLIGAEHVNNSYECDIPIGAGICASYQTQTNSPRRARSVASQSIIAYTMSLGAENSVAYSNNSIAIPTNFTISVTTEILPVSMTKTSVDCTMYICGDSTECSNLLLQYGSFCTQLNRALTGIAVEQDKNTQEVFAQVKQIYKTPPIKDFGGFNFSQILPDPSKPSKRSFIEDLLFNKVTLADAGFIKQYGDCLGDIAARDLICAQKFNGLTVLPPLLTDEMIAQYTSALLAGTITSGWTFGAGAALQIPFAMQMAYRFNGIGVTQNVLYENQKLIANQFNSAIGKIQDSLSSTATALGKLQDVVNQNAQALNTLVKQLSSNCGAISSVLNDILSRLDKVEAEVQIDRLITCRLQSLQTYVTQQLIRAAEIRASANLAATKMSECVLGQSKRVDFCGKGYHLMSFPQSAPHGVVFLHVTYVPAQEKNFTTAPAICHDGKAHFPREGVFVSNGTHWFVTQRNFYEPQIITTDNTFVSGNCDVVIGIVNNTVYDPLQPELDSFKEELDKYFKNHTSPDVDLGDISGINASVVNIQKEIDRLNEVAKNLNESLIDLQELGKYEQYIKWPWYIWLGFIAGLIAIVMVTIMLCCMTSCCSCLKGCCSCGSCCKFDEDDSEPVLKGVKLHYT

SEQ ID NO: 1037 - protein, 1273 aa, Artificial Sequence
  SARS-CoV-2/Belgium/BC-03016/2020__EPI_ISL_415157 spike protein (1-1273)(F970C_G999C)
MFVFLVLLPLVSSQCVNLTTRTQLPPAYTNSFTRGVYYPDKVFRSSVLHSTQDLFLPFFSNVTWFHAIHVSGTNGTKRFDNPVLPFNDGVYFASTEKSNIIRGWIFGTTLDSKTQSLLIVNNATNVVIKVCEFQFCNDPFLGVYYHKNNKSWMESEFRVYSSANNCTFEYVSQPFLMDLEGKQGNFKNLREFVFKNIDGYFKIYSKHTPINLVRDLPQGFSALEPLVDLPIGINITRFQTLLALHRSYLTPGDSSSGWTAGAAAYYVGYLQPRTFLLKYNENGTITDAVDCALDPLSETKCTLKSFTVEKGIYQTSNFRVQPTESIVRFPNITNLCPFGEVFNATRFASVYAWNRKRISNCVADYSVLYNSASFSTFKCYGVSPTKLNDLCFTNVYADSFVIRGDEVRQIAPGQTGKIADYNYKLPDDFTGCVIAWNSNNLDSKVGGNYNYLYRLFRKSNLKPFERDISTEIYQAGSTPCNGVEGFNCYFPLQSYGFQPTNGVGYQPYRVVVLSFELLHAPATVCGPKKSTNLVKNKCVNFNFNGLTGTGVLTESNKKFLPFQQFGRDIADTTDAVRDPQTLEILDITPCSFGGVSVITPGTNTSNQVAVLYQGVNCTEVPVAIHADQLTPTWRVYSTGSNVFQTRAGCLIGAEHVNNSYECDIPIGAGICASYQTQTNSPRRARSVASQSIIAYTMSLGAENSVAYSNNSIAIPTNFTISVTTEILPVSMTKTSVDCTMYICGDSTECSNLLLQYGSFCTQLNRALTGIAVEQDKNTQEVFAQVKQIYKTPPIKDFGGFNFSQILPDPSKPSKRSFIEDLLFNKVTLADAGFIKQYGDCLGDIAARDLICAQKFNGLTVLPPLLTDEMIAQYTSALLAGTITSGWTFGAGAALQIPFAMQMAYRFNGIGVTQNVLYENQKLIANQFNSAIGKIQDSLSSTAPALGKLQDVVNQNAQALNTLVKQLSSNCGAISSVLNDILSRLDKVEAEVQIDRLITCRLQSLQTYVTQQLIRAAEIRASANLAATKMSECVLGQSKRVDFCGKGYHLMSFPQSAPHGVVFLHVTYVPAQEKNFTTAPAICHDGKAHFPREGVFVSNGTHWFVTQRNFYEPQIITTDNTFVSGNCDVVIGIVNNTVYDPLQPELDSFKEELDKYFKNHTSPDVDLGDISGINASVVNIQKEIDRLNEVAKNLNESLIDLQELGKYEQYIKWPWYIWLGFIAGLIAIVMVTIMLCCMTSCCSCLKGCCSCGSCCKFDEDDSEPVLKGVKLHYT

SEQ ID NO: 1038 - protein, 1273 aa, Artificial Sequence
  SARS-CoV-2/Germany/BavPat3/2020__EPI_ISL_414521 spike protein (1-1273)(F970C_G999C)
MFVFLVLLPLVSSQCVNLTTRTQLPPAYTNSFTRGVYYPDKVFRSSVLHSTQDLFLPFFSNVTWFHAIHVSGTNGTKRFDNPVLPFNDGVYFASTEKSNIIRGWIFGTTLDSKTQSLLIVNNATNVVIKVCEFQFCNDPFLGVYYHKNNKSWMESEFRVYSSANNCTFEYVSQPFLMDLEGKQGNFKNLREFVFKNIDGYFKIYSKHTPINLVRDLPQGFSALEPLVDLPIGINITRFQTLLALHRSYLTPGDSSSGWTAGAAAYYVGYLQPRTFLLKYNENGTITDAVDCALDPLSETKCTLKSFTVEKGIYQTSNFRVQPTESIVRFPNITNLCPFGEVFNATRFASVYAWNRKRISNCVADYSVLYNSASFSTFKCYGVSPTKLNDLCFTNVYADSFVIRGDEVRQIAPGQTGKIADYNYKLPDDFTGCVIAWNSNNLDSKVGGNYNYLYRLFRKSNLKPFERDISTEIYQAGSTPCNGVEGFNCYFPLQSYGFQPTNGVGYQPYRVVVLSFELLHAPATVCGPKKSTNLVKNKCVNFNFNGLTGTGVLTESNKKFLPFQQFGRDIADTTDAVRDPQTLEILDITPCSFGGVSVITPGTNTSNQVAVLYQDVNCTEVPVAIHADQLTPTWRVYSTGSNVFQTRAGCLIGAEHVNNSYECDIPIGAGICASYQTQTNSPRRARSVASQSIIAYTMSLGAENSVAYSNNSIAIPTNFTISVTTEILPVSMTKTSVDCTMYICGDSTECSNLLLQYGSFCTQLNRALTGIAVEQDKNTQQVFAQVKQIYKTPPIKDFGGFNFSQILPDPSKPSKRSFIEDLLFNKVTLADAGFIKQYGDCLGDIAARDLICAQKFNGLTVLPPLLTDEMIAQYTSALLAGTITSGWTFGAGAALQIPFAMQMAYRFNGIGVTQNVLYENQKLIANQFNSAIGKIQDSLSSTASALGKLQDVVNQNAQALNTLVKQLSSNCGAISSVLNDILSRLDKVEAEVQIDRLITCRLQSLQTYVTQQLIRAAEIRASANLAATKMSECVLGQSKRVDFCGKGYHLMSFPQSAPHGVVFLHVTYVPAQEKNFTTAPAICHDGKAHFPREGVFVSNGTHWFVTQRNFYEPQIITTDNTFVSGNCDVVIGIVNNTVYDPLQPELDSFKEELDKYFKNHTSPDVDLGDISGINASVVNIQKEIDRLNEVAKNLNESLIDLQELGKYEQYIKWPWYIWLGFIAGLIAIVMVTIMLCCMTSCCSCLKGCCSCGSCCKFDEDDSEPVLKGVKLHYT

SEQ ID NO: 1039 - protein, 1273 aa, Artificial Sequence
  SARS-CoV-2/France/HF1805/2020__EPI_ISL_414628 spike protein (1-1273)(F970C_G999C)
MFVFLVLLPLVSSQCVNLTTRTQLPPAYTNSFTRGVYYPDKVFRSSVLHSTQDLFLPFFSNVTWFHAIHVSGTNGTKRFDNPVLPFNDGVYFASTEKSNIIRGWIFGTTLDSKTQSLLIVNNATNVVIKVCEFQFCNDPFLGVYYHKNNKSWMESEFRVYSSANNCTFEYVSQPFLMDLEGKQGNFKNLREFVFKNIDGYFKIYSKHTPINLVRDLPQGFSALEPLVDLPIGINITRFQTLLALHRSYLTPGDSSSGWTAGAAAYYVGYLQPRTFLLKYNENGTITDAVDCALDPLSETKCTLKSFTVEKGIYQTSNFRVQPTESIVRFPNITNLCPFGEVFNATRFASVYAWNRKRISNCVADYSVLYNSASFSTFKCYGVSPTKLNDLCFTNVYADSFVIRGDEVRQIAPGQTGKIADYNYKLPDDFTGCVIAWNSNNLDSKVGGNYNYLYRLFRKSNLKPFERDISTEIYQAGSTPCNGVEGFNCYFPLQSYGFQPTNGVGYQPYRVVVLSFELLHAPATVCGPKKSTNLVKNKCVNFNFNGLTGTGVLTESNKKFLPFQQFGRDIADTTDAVRDPQTLEILDITPCSFGGVSVITPGTNTSNQVAVLYQGVNCTEVPVAIHADQLTPTWRVYSTGSNVFQTRAGCLIGAEHVNNSYECDIPIGAGICASYQTQTNSPRRARSVASQSIIAYTMSLGAENSVAYSNNSIAIPTNFTISVTTEILPVSMTKTSVDCTMYICGDSTECSNLLLQYGSFCTQLNRALTGIAVEQDKNTQEVFAQVKQIYKTPPIKDFGGFNFSQILPDPSKPSKRSFIEDLLFNKVTLADAGFIKQYGDCLGDIAARDLICAQKFNGLTVLPPLLTDEMIAQYTSALLAGTITSGWTFGAGAALQIPFAMQMAYRFNGIGVTQNVLYENQKLIANQFNSAIGKIQDSLSSTASALGKLQDVVNQNAQALNTLVKQLSSNCGAISSVLNDILSRLDKVEAEVQIDRLITCRLQSLQTYVTQQLIRAAEIRASANLAATKMSECVLGQSKRVDFCGKGYHLMSFPQSAPHGVVFLHVTYVPAQEKNFTTAPAICHDGKAHFPREGVFVSNGTHWFVTQRNFYEPQIITTDNTFVSGNCDVVIGVVNNTVYDPLQPELDSFKEELDKYFKNHTSPDVDLGDISGINASVVNIQKEIDRLNEVAKNLNESLIDLQELGKYEQYIKWPWYIWLGFIAGLIAIVMVTIMLCCMTSCCSCLKGCCSCGSCCKFDEDDSEPVLKGVKLHYT

SEQ ID NO: 1040 - protein, 1273 aa, Artificial Sequence
  SARS-CoV-2/Netherlands/ZuidHolland_9/2020__EPI_ISL_414445 spike protein (1-1273)(F970C_G999C)
MFVFLVLLPLVSSQCVNLTTRTQLPPAYTNSFTRGVYYPDKVFRSSVLHSTQDLFLPFFSNVTWFHAIHVSGTNGTKRFDNPVLPFNDGVYFASTEKSNIIRGWIFGTTLDSKTQSLLIVNNATNVVIKVCEFQFCNDPFLGVYYHKNNKSWMESEFRVYSSANNCTFEYVSQPFLMDLEGKQGNFKNLREFVFKNIDGYFKIYSKHTPINLVRDLPQGFSALEPLVDLPIGINITRFQTLLALHRSYLTPGDSSSGWTAGAAAYYVGYLQPRTFLLKYNENGTITDAVDCALDPLSETKCTLKSFTVEKGIYQTSNFRVQPTESIVRFPNITNLCPFGEVFNATRFASVYAWNRKRISNCVADYSVLYNSASFSTFKCYGVSPTKLNDLCFTNVYADSFVIRGDEVRQIAPGQTGKIADYNYKLPDDFTGCVIAWNSNNLDSKVGGNYNYLYRLFRKSNLKPFERDISTEIYQAGSTPCNGVEGFNCYFPLQSYGFQPTNGVGYQPYRVVVLSFELLHAPATVCGPKKSTNLVKNKCVNFNFNGLTGTGVLTESNKKFLPFQQFGRDIADTTDAVRDPQTLEILDITPCSFGGVSVITPGTNTSNQVAVLYQGVNCTEVPVAIHADQLTPTWRVYSTGSNVFQTRAGCLIGAEHVNNSYECDIPIGAGICASYQTQTNSPRRARSVASQSIIAYTMSLGAENSVAYSNNSIAIPTNFTISVTTEILPVSMTKTSVDCTMYICGDSTECSNLLLQYGSFCTQLNRALTGIAVEQDKNTQEVFAQVKQIYKTPPIKDFGGFNFSQILPDPSKPSKRSFIEDLLFNKVTLADAGFIKQYGDCLGDIAARDLICVQKFNGLTVLPPLLTDEMIAQYTSALLAGTITSGWTFGAGAALQIPFAMQMAYRFNGIGVTQNVLYENQKLIANQFNSAIGKIQDSLSSTASALGKLQDVVNQNAQALNTLVKQLSSNCGAISSVLNDILSRLDKVEAEVQIDRLITCRLQSLQTYVTQQLIRAAEIRASANLAATKMSECVLGQSKRVDFCGKGYHLMSFPQSAPHGVVFLHVTYVPAQEKNFTTAPAICHDGKAHFPREGVFVSNGTHWFVTQRNFYEPQIITTDNTFVSGNCDVVIGIVNNTVYDPLQPELDSFKEELDKYFKNHTSPDVDLGDISGINASVVNIQKEIDRLNEVAKNLNESLIDLQELGKYEQYIKWPWYIWLGFIAGLIAIVMVTIMLCCMTSCCSCLKGCCSCGSCCKFDEDDSEPVLKGVKLHYT

SEQ ID NO: 1041 - protein, 1273 aa, Artificial Sequence
  SARS-CoV-2/Finland/FIN03032020A/2020__EPI_ISL_413602 spike protein (1-1273)(F970C_G999C)
MFVFLVLLPLVSSQCVNLTTRTQLPPAYTNSFTRGVYYPDKVFRSSVLHSTQDLFLPFFSNVTWFHAIHVSGTNGTKRFDNPVLPFNDGVYFASTEKSNIIRGWIFGTTLDSKTQSLLIVNNATNVVIKVCEFQFCNDPFLGVYYHKNNKSWMESEFRVYSSANNCTFEYVSQPFLMDLEGKQGNFKNLREFVFKNIDGYFKIYSKHTPINLVRDLPQGFSALEPLVDLPIGINITRFQTLLALHRSYLTPGDSSSGWTAGAAAYYVGYLQPRTFLLKYNENGTITDAVDCALDPLSETKCTLKSFTVEKGIYQTSNFRVQPTESIVRFPNITNLCPFGEVFNATRFASVYAWNRKRISNCVADYSVLYNSASFSTFKCYGVSPTKLNDLCFTNVYADSFVIRGDEVRQIAPGQTGKIADYNYKLPDDFTGCVISWNSNNLDSKVGGNYNYLYRLFRKSNLKPFERDISTEIYQAGSTPCNGVEGFNCYFPLQSYGFQPTNGVGYQPYRVVVLSFELLHAPATVCGPKKSTNLVKNKCVNFNFNGLTGTGVLTESNKKFLPFQQFGRDIADTTDAVRDPQTLEILDITPCSFGGVSVITPGTNTSNQVAVLYQGVNCTEVPVAIHADQLTPTWRVYSTGSNVFQTRAGCLIGAEHVNNSYECDIPIGAGICASYQTQTNSPRRARSVASQSIIAYTMSLGAENSVAYSNNSIAIPTNFTISVTTEILPVSMTKTSVDCTMYICGDSTECSNLLLQYGSFCTQLNRALTGIAVEQDKNTQEVFAQVKQIYKTPPIKDFGGFNFSQILPDPSKPSKRSFIEDLLFNKVTLADAGFIKQYGDCLGDIAARDLICAQKFNGLTVLPPLLTDEMIAQYTSALLAGTITSGWTFGAGAALQIPFAMQMAYRFNGIGVTQNVLYENQKLIANQFNSAIGKIQDSLSSTASALGKLQDVVNQNAQALNTLVKQLSSNCGAISSVLNDILSRLDKVEAEVQIDRLITCRLQSLQTYVTQQLIRAAEIRASANLAATKMSECVLGQSKRVDFCGKGYHLMSFPQSAPHGVVFLHVTYVPAQEKNFTTAPAICHDGKAHFPREGVFVSNGTHWFVTQRNFYEPQIITTDNTFVSGNCDVVIGIVNNTVYDPLQPELDSFKEELDKYFKNHTSPDVDLGDISGINASVVNIQKEIDRLNEVAKNLNESLIDLQELGKYEQYIKWPWYIWLGFIAGLIAIVMVTIMLCCMTSCCSCLKGCCSCGSCCKFDEDDSEPVLKGVKLHYT

SEQ ID NO: 1042 - protein, 1273 aa, Artificial Sequence
  SARS-CoV-2/France/GE1977/2020__EPI_ISL_414632 spike protein (1-1273)(F970C_G999C)
MFVFLVLLPLVSSQCVNLTTRTQLPPAYTNSFTRGVYYPDKVFRSSVLHSTQDLFLPFFSNVTWFHAIHVSGTNGTKRFDNPVLPFNDGVYFASTEKSNIIRGWIFGTTLDSKTQSLLIVNNATNVVIKVCEFQFCNDPFLGVYYHKNNKSWMESEFRVYSSANNCTFEYVSQPFLMDLEGKQGNFKNLREFVFKNIDGYFKIYSKHTPINLVRDLPQGFSALEPLVDLPIGINITRFQTLLALHRSYLTPGDSSSGWTAGAAAYYVGYLQPRTFLLKYNENGTITDAVDCALDPLSETKCTLKSFTVEKGIYQTSNFRVQPTESIVRFPNITNLCPFGEVFNATRFASVYAWNRKRISNCVADYSVLYNSASFSTFKCYGVSPTKLNDLCFTNVYADSFVIRGDEVRQIAPGQTGKIADYNYKLPDDFTGCVIAWNSNNLDSKVGGNYNYLYRLFRKSNLKPFERDISTEIYQAGSTPCNGVEGFNCYFPLQSYGFQPTNGVGYQPYRVVVLSFELLHAPATVCGPKKSTNLVKNKCVNFNFNGLTGTGVLTESNKKFLPFQQFGRDIADTTDAVRDPQTLEILDITPCSFGGVSVITPGTNTSNQVAVLYQGVNCTEVPVAIHADQLTPTWRVYSTGSNVFQTRAGCLIGAEHVNNSYECDIPIGAGICASYQTQTNSPRRARSVASQSIIAYTMSLGAENSVAYSNNSIAIPTNFTISVTTEILPVSMTKTSVDCTMYICGDSTECSNLLLQYGSFCTQLNRALTGIAVEQDKNTQEVFAQVKQIYKTPPIKDFGGFNFSQILPDPSKPSKRSFIEDLLFNKVTLADAGFIKQYGDCLGDIAARDLICAQKFNGLTVLPPLLTDEMIAQYTSALLAGTITSGWTFGAGAALQIPFAMQMAYRFNGIGVTQNVLYENQKLIANQFNSAIGKIQDSLFSTASALGKLQDVVNQNAQALNTLVKQLSSNCGAISSVLNDILSRLDKVEAEVQIDRLITCRLQSLQTYVTQQLIRAAEIRASANLAATKMSECVLGQSKRVDFCGKGYHLMSFPQSAPHGVVFLHVTYVPAQEKNFTTAPAICHDGKAHFPREGVFVSNGTHWFVTQRNFYEPQIITTDNTFVSGNCDVVIGIVNNTVYDPLQPELDSFKEELDKYFKNHTSPDVDLGDISGINASVVNIQKEIDRLNEVAKNLNESLIDLQELGKYEQYIKWPWYIWLGFIAGLIAIVMVTIMLCCMTSCCSCLKGCCSCGSCCKFDEDDSEPVLKGVKLHYT

SEQ ID NO: 1043 - protein, 1273 aa, Artificial Sequence
  SARS-CoV-2/Finland/FIN-313/2020__EPI_ISL_414641 spike protein (1-1273)(F970C_G999C)
MFVFLVLLPLVSSQCVNLTTRTQLPPAYTNSFTRGVYYPDKVFRSSVLHSTQDLFLPFFSNVTWFHAIHVSGTNGTKRFDNPVLPFNDGVYFASTEKSNIIRGWIFGTTLDSKTQSLLIVNNATNVVIKVCEFQFCNDPFLGVYYHKNNKSWMESEFRVYSSANNCTFEYVSQPFLMDLEGKQGNFKNLREFVFKNIDGYFKIYSKHTPINLVRDLPQGFSALEPLVDLPIGINITRFKTLLALHRSYLTPGDSSSGWTAGAAAYYVGYLQPRTFLLKYNENGTITDAVDCALDPLSETKCTLKSFTVEKGIYQTSNFRVQPTESIVRFPNITNLCPFGEVFNATRFASVYAWNRKRISNCVADYSVLYNSASFSTFKCYGVSPTKLNDLCFTNVYADSFVIRGDEVRQIAPGQTGKIADYNYKLPDDFTGCVIAWNSNNLDSKVGGNYNYLYRLFRKSNLKPFERDISTEIYQAGSTPCNGVEGFNCYFPLQSYGFQPTNGVGYQPYRVVVLSFELLHAPATVCGPKKSTNLVKNKCVNFNFNGLTGTGVLTESNKKFLPFQQFGRDIADTTDAVRDPQTLEILDITPCSFGGVSVITPGTNTSNQVAVLYQGVNCTEVPVAIHADQLTPTWRVYSTGSNVFQTRAGCLIGAEHVNNSYECDIPIGAGICASYQTQTNSPRRARSVASQSIIAYTMSLGAENSVAYSNNSIAIPTNFTISVTTEILPVSMTKTSVDCTMYICGDSTECSNLLLQYGSFCTQLNRALTGIAVEQDKNTQEVFAQVKQIYKTPPIKDFGGFNFSQILPDPSKPSKRSFIEDLLFNKVTLADAGFIKQYGDCLGDIAARDLICAQKFNGLTVLPPLLTDEMIAQYTSALLAGTITSGWTFGAGAALQIPFAMQMAYRFNGIGVTQNVLYENQKLIANQFNSAIGKIQDSLSSTASALGKLQDVVNQNAQALNTLVKQLSSNCGAISSVLNDILSRLDKVEAEVQIDRLITCRLQSLQTYVTQQLIRAAEIRASANLAATKMSECVLGQSKRVDFCGKGYHLMSFPQSAPHGVVFLHVTYVPAQEKNFTTAPAICHDGKAHFPREGVFVSNGTHWFVTQRNFYEPQIITTDNTFVSGNCDVVIGIVNNTVYDPLQPELDSFKEELDKYFKNHTSPDVDLGDISGINASVVNIQKEIDRLNEVAKNLNESLIDLQELGKYEQYIKWPWYIWLGFIAGLIAIVMVTIMLCCMTSCCSCLKGCCSCGSCCKFDEDDSEPVLKGVKLHYT

SEQ ID NO: 1044 - protein, 1273 aa, Artificial Sequence
  SARS-CoV-2/Netherlands/ZuidHolland_2/2020__EPI_ISL_414556 spike protein (1-1273)(F970C_G999C)
MFVFLVLLPLVSSQCVNLTTRTQLPPAYTNSFTRGVYYPDKVFRSSVLHSTQDLFLPFFSNVTWFHAIHVSGTNGTKRFDNPVLPFNDGVYFASTEKSNIIRGWIFGTTLDSKTQSLLIVNNATNVVIKVCEFQFCNDPFLGVYYHKNNKSWMESEFRVYSSANNCTFEYVSQPFLMDLEGKQGNFKNLREFVFKNIDGYFKIYSKHTPINLVRDLPQGFSALEPLVDLPIGINITRFQTLLALHRSYLTPGDSSSGWTAGAAAYYVGYLQPRTFLLKYNENGTITDAVDCALDPLSETKCTLKSFTVEKGIYQTSNFRVQPTESIVRFPNITNLCPFGEVFNATRFASVYAWNRKRISNCVADYSVLYNSASFSTFKCYGVSPTKLNDLCFTNVYADSFVIRGDEVRQIAPGQTGKIADYNYKLPDDFTGCVIAWNSNNLDSKVGGNYNYLYRLFRKSNLKPFERDISTEIYQAGSTPCNGVEGFNCYFPLQSYGFQPTNGVGYQPYRVVVLSFELLHAPATVCGPKKSTNLVKNKCVNFNFNGLTGTGVLTESNKKFLPFQQFGRDIADTTDAVRDPQTLEILDITPCSFGGVSVITPGTNTSNQVAVLYQGVNCTEVPVAIHADQLTPTWRVYSTGSNVFQTRAGCLIGAEHVNNSYECDIPIGAGICASYQTQTNSPRRARSVASQSIIAYTMSLGAENSVAYSNNSIAIPTNFTISVTTEILPVSMTKTSVDCTMYICGDSTECSNLLLQYGSFCTQLNRALTGIALEQDKNTQEVFAQVKQIYKTPPIKDFGGFNFSQILPDPSKPSKRSFIEDLLFNKVTLADAGFIKQYGDCLGDIAARDLICAQKFNGLTVLPPLLTDEMIAQYTSALLAGTITSGWTFGAGAALQIPFAMQMAYRFNGIGVTQNVLYENQKLIANQFNSAIGKIQDSLSSTASALGKLQDVVNQNAQALNTLVKQLSSNCGAISSVLNDILSRLDKVEAEVQIDRLITCRLQSLQTYVTQQLIRAAEIRASANLAATKMSECVLGQSKRVDFCGKGYHLMSFPQSAPHGVVFLHVTYVPAQEKNFTTAPAICHDGKAHFPREGVFVSNGTHWFVTQRNFYEPQIITTDNTFVSGNCDVVIGIVNNTVYDPLQPELDSFKEELDKYFKNHTSPDVDLGDISGINASVVNIQKEIDRLNEVAKNLNESLIDLQELGKYEQYIKWPWYIWLGFIAGLIAIVMVTIMLCCMTSCCSCLKGCCSCGSCCKFDEDDSEPVLKGVKLHYT

SEQ ID NO: 1045 - protein, 1273 aa, Artificial Sequence
  SARS-CoV-2/USA/WA-UW31/2020__EPI_ISL_414618 spike protein (1-1273)(F970C_G999C)
MFVFLVLLPLVSSQCVNLTTRTQLPPAYTNSFTRGVYYPDKVFRSSVLHSTQDLFLPFFSNVTWFHAIHVSGTNGTKRFDNPVLPFNDGVYFASTEKSNIIRGWIFGTTLDSKTQSLLIVNNATNVVIKVCEFQFCNDPFLGVYYHKNNKSWMESEFRVYSSANNCTFEYVSQPFLMDLEGKQGNFKNLREFVFKNIDGYFKIYSKHTPINLVRDLPQGFSALEPLVDLPIGINITRFQTLLALHRSYLTPGDSSSGWTAGAAAYYVGYLQPRTFLLKYNENGTITDAVDCALDPLSETKCTLKSFTVEKGIYQTSNFRVQPTESIVRFPNITNLCPFGEVFNATRFASVYAWNRKRISNCVADYSVLYNSASFSTFKCYGVSPTKLNDLCFTNVYADSFVIRGDEVRQIAPGQTGKIADYNYKLPDDFTGCVIAWNSNNLDSKVGGNYNYLYRLFRKSNLKPFERDISTEIYQAGSTPCNGAEGFNCYFPLQSYGFQPTNGVGYQPYRVVVLSFELLHAPATVCGPKKSTNLVKNKCVNFNFNGLTGTGVLTESNKKFLPFQQFGRDIADTTDAVRDPQTLEILDITPCSFGGVSVITPGTNTSNQVAVLYQDVNCTEVPVAIHADQLTPTWRVYSTGSNVFQTRAGCLIGAEHVNNSYECDIPIGAGICASYQTQTNSPRRARSVASQSIIAYTMSLGAENSVAYSNNSIAIPTNFTISVTTEILPVSMTKTSVDCTMYICGDSTECSNLLLQYGSFCTQLNRALTGIAVEQDKNTQEVFAQVKQIYKTPPIKDFGGFNFSQILPDPSKPSKRSFIEDLLFNKVTLADAGFIKQYGDCLGDIAARDLICAQKFNGLTVLPPLLTDEMIAQYTSALLAGTITSGWTFGAGAALQIPFAMQMAYRFNGIGVTQNVLYENQKLIANQFNSAIGKIQDSLSSTASALGKLQDVVNQNAQALNTLVKQLSSNCGAISSVLNDILSRLDKVEAEVQIDRLITCRLQSLQTYVTQQLIRAAEIRASANLAATKMSECVLGQSKRVDFCGKGYHLMSFPQSAPHGVVFLHVTYVPAQEKNFTTAPAICHDGKAHFPREGVFVSNGTHWFVTQRNFYEPQIITTDNTFVSGNCDVVIGIVNNTVYDPLQPELDSFKEELDKYFKNHTSPDVDLGDISGINASVVNIQKEIDRLNEVAKNLNESLIDLQELGKYEQYIKWPWYIWLGFIAGLIAIVMVTIMLCCMTSCCSCLKGCCSCGSCCKFDEDDSEPVLKGVKLHYT

SEQ ID NO: 1046 - protein, 1273 aa, Artificial Sequence
  SARS-CoV-2/South Korea/SNU01/2020__EPI_ISL_411929 spike protein (1-1273)(F970C_G999C)
MFVFLVLLPLVSSQCVNLTTRTQLPPAYTNSFTRGVYYPDKVFRSSVLHSTQDLFLPFFSNVTWFHAIHVSGTNGTKRFDNPVLPFNDGVYFASTEKSNIIRGWIFGTTLDSKTQSLLIVNNATNVVIKVCEFQFCNDPFLGVYYHKNNKSWMESEFRVYSSANNCTFEYVSQPFLMDLEGKQGNFKNLREFVFKNIDGYFKIYSKHTPINLVRDLPQGFWALEPLVDLPIGINITRFQTLLALHRSYLTPGDSSSGWTAGAAAYYVGYLQPRTFLLKYNENGTITDAVDCALDPLSETKCTLKSFTVEKGIYQTSNFRVQPTESIVRFPNITNLCPFGEVFNATRFASVYAWNRKRISNCVADYSVLYNSASFSTFKCYGVSPTKLNDLCFTNVYADSFVIRGDEVRQIAPGQTGKIADYNYKLPDDFTGCVIAWNSNNLDSKVGGNYNYLYRLFRKSNLKPFERDISTEIYQAGSTPCNGVEGFNCYFPLQSYGFQPTNGVGYQPYRVVVLSFELLHAPATVCGPKKSTNLVKNKCVNFNFNGLTGTGVLTESNKKFLPFQQFGRDIADTTDAVRDPQTLEILDITPCSFGGVSVITPGTNTSNQVAVLYQDVNCTEVPVAIHADQLTPTWRVYSTGSNVFQTRAGCLIGAEHVNNSYECDIPIGAGICASYQTQTNSPRRARSVASQSIIAYTMSLGAENSVAYSNNSIAIPTNFTISVTTEILPVSMTKTSVDCTMYICGDSTECSNLLLQYGSFCTQLNRALTGIAVEQDKNTQEVFAQVKQIYKTPPIKDFGGFNFSQILPDPSKPSKRSFIEDLLFNKVTLADAGFIKQYGDCLGDIAARDLICAQKFNGLTVLPPLLTDEMIAQYTSALLAGTITSGWTFGAGAALQIPFAMQMAYRFNGIGVTQNVLYENQKLIANQFNSAIGKIQDSLSSTASALGKLQDVVNQNAQALNTLVKQLSSNCGAISSVLNDILSRLDKVEAEVQIDRLITCRLQSLQTYVTQQLIRAAEIRASANLAATKMSECVLGQSKRVDFCGKGYHLMSFPQSAPHGVVFLHVTYVPAQEKNFTTAPAICHDGKAHFPREGVFVSNGTHWFVTQRNFYEPQIITTDNTFVSGNCDVVIGIVNNTVYDPLQPELDSFKEELDKYFKNHTSPDVDLGDISGINASVVNIQKEIDRLNEVAKNLNESLIDLQELGKYEQYIKWPWYIWLGFIAGLIAIVMVTIMLCCMTSCCSCLKGCCSCGSCCKFDEDDSEPVLKGVKLHYT

SEQ ID NO: 1047 - protein, 1273 aa, Artificial Sequence
  SARS-CoV-2/China/WF0004/2020__EPI_ISL_413694 spike protein (1-1273)(F970C_G999C)
MFVFLVLLPLVSSQCVNLTTRTQLPPAYTNSFTRGVYYPDKVFRSSVLHSTQDLFLPFFSNVTWFHAIHVSGTNGTKRFDNPVLPFNDGVYFASTEKSNIIRGWIFGTTLDSKTQSLLIVNNATNVVIKVCEFQFCNDPFLGVYYHKNNKSWTESEFRVYSSANNCTFEYVSQPFLMDLEGKQGNFKNLREFVFKNIDGYFKIYSKHTPINLVRDLPQGFSALEPLVDLPIGINITRFQTLLALHRSYLTPGDSSSGWTAGAAAYYVGYLQPRTFLLKYNENGTITDAVDCALDPLSETKCTLKSFTVEKGIYQTSNFRVQPTESIVRFPNITNLCPFGEVFNATRFASVYAWNRKRISNCVADYSVLYNSASFSTFKCYGVSPTKLNDLCFTNVYADSFVIRGDEVRQIAPGQTGKIADYNYKLPDDFTGCVIAWNSNNLDSKVGGNYNYLYRLFRKSNLKPFERDISTEIYQAGSTPCNGVEGFNCYFPLQSYGFQPTNGVGYQPYRVVVLSFELLHAPATVCGPKKSTNLVKNKCVNFNFNGLTGTGVLTESNKKFLPFQQFGRDIADTTDAVRDPQTLEILDITPCSFGGVSVITPGTNTSNQVAVLYQDVNCTEVPVAIHADQLTPTWRVYSTGSNVFQTRAGCLIGAEHVNNSYECDIPIGAGICASYQTQTNSPRRARSVASQSIIAYTMSLGAENSVAYSNNSIAIPTNFTISVTTEILPVSMTKTSVDCTMYICGDSTECSNLLLQYGSFCTQLNRALTGIAVEQDKNTQEVFAQVKQIYKTPPIKDFGGFNFSQILPDPSKPSKRSFIEDLLFNKVTLADAGFIKQYGDCLGDIAARDLICAQKFNGLTVLPPLLTDEMIAQYTSALLAGTITSGWTFGAGAALQIPFAMQMAYRFNGIGVTQNVLYENQKLIANQFNSAIGKIQDSLSSTASALGKLQDVVNQNAQALNTLVKQLSSNCGAISSVLNDILSRLDKVEAEVQIDRLITCRLQSLQTYVTQQLIRAAEIRASANLAATKMSECVLGQSKRFDFCGKGYHLMSFPQSAPHGVVFLHVTYVPAQEKNFTTAPAICHDGKAHFPREGVFVSNGTHWFVTQRNFYEPQIITTDNTFVSGNCDVVIGIVNNTVYDPLQPELDSFKEELDKYFKNHTSPDVDLGDISGINASVVNIQKEIDRLNEVAKNLNESLIDLQELGKYEQYIKWPWYIWLGFIAGLIAIVMVTIMLCCMTSCCSCLKGCCSCGSCCKFDEDDSEPVLKGVKLHYT

SEQ ID NO: 1048 - protein, 1273 aa, Artificial Sequence
  SARS-CoV-2/China/WF0028/2020__EPI_ISL_413791 spike protein (1-1273)(F970C_G999C)
MFVFLVLLPLVSSQCVNLTTRTQLPPAYTNSFTRGVYYPDKVFRSSVLHSTQDLFLPFFSNVTWFHAIHVSGTNGTKRFDNPVLPFNDGVYFASTEKSNIIRGWIFGTTLDSKTQSLLIVNNATNVVIKVCEFQFCNDPFLGVYYHKNNKSWMESEFRVYSSANNCTFEYVSQPFLMDLEGKQGNFKNLREFVFKNIDGYFKIYSKHTPINLVRDLPQGFSALEPLVDLPIGINITRFQTLLALHRSYLTPGDSSSGWTAGAAAYYVGYLQPRTFLLKYNENGTITDAVDCALDPLSETKCTLKSFTVEKGIYQTSNFRVQPTESIVRFPNITNLCPFGEVFNATRFASVYAWNRKRISNCVADYSVLYNSASFSTFKCYGVSPTKLNDLCFTNVYADSFVIRGDEVRQIAPGQTGKIADYNYKLPDDFTGCVIAWNSNNLDSKVGGNYNYLYRLFRKSNLKPFERDISTEIYQAGSTPCNGVEGFNCYFPLQSYGFQPTNGVGYQPYRVVVLSFELLHAPATVCGPKKSTNLVKNKCVNFNFNGLTGTGVLTESNKKFLPFQQFGRDIADTTDAVRDPQTLEILDITPCSFGGVSVITPGTNTSNQVAVLYQDVNCTEVPVAIHADQLTPTWRVYSTGSNVFQTRAGCLIGAEHVNNSYECDIPIGAGICASYQTQTNSPRRARSVASQSIIAYTMSLGAENSVAYSNNSIAIPTNFTISVTTEILPVSMTKTSVDCTMYICGDSTECSNLLLQYGSFCTQLNRALTGIAVEQDKNTQEVFAQVKQIYKTPPIKDFGGFNFSQILPDPSKPSKRSFIEDLLFNKVTLADAGFIKQYGDCLGDIAARDLICAQKFNGLTVLPPLLTDEMIAQYTSALLAGTITSGWTFGAGAALQIPFAMQMAYRFNGIGVTQNVLYENQKLIANQFNSAIGKIQDSLSSTASALGKLQDVVNQNAQALNTLVKQLSSNCGAISSVLNDILSRLDKVEAEVQIDRLITCRLQSLQTYVTQQLIRAAEIRASANLAATKMSECVLGQSKRVDFCGKGYHLMSFPQSAPHGVVFLHVTYVPAQEKNFTTAPAICHDGKAHFPREGVFVSNGTHWFVTQRNFYEPQIITTDNTFVSGNCDVVIGIVNNTVYDPLQPELESFKEELDKYFKNHTSPDVDLGDISGINASVVNIQKEIDRLNEVAKNLNESLIDLQELGKYEQYIKWPWYIWLGFIAGLIAIVMVTIMLCCMTSCCSCLKGCCSCGSCCKFDEDDSEPVLKGVKLHYT

SEQ ID NO: 1049 - protein, 1273 aa, Artificial Sequence
  SARS-CoV-2/2019-nCoV/USA-CruiseA-18/2020__MT159716.1 spike protein (1-1273)(F970C_G999C)
MFVFLVLLPLVSSQCVNLTTRTQLPPAYTNSFTRGVYYPDKVFRSSVLHSTQDLFLPFFSNVTWFHAIHVSGTNGTKRFDNPVLPFNDGVYFASTEKSNIIRGWIFGTTLDSKTQSLLIVNNATNVVIKVCEFQFCNDPFLGVYYHKNNKSWMESELRVYSSANNCTFEYVSQPFLMDLEGKQGNFKNLREFVFKNIDGYFKIYSKHTPINLVRDLPQGFSALEPLVDLPIGINITRFQTLLALHRSYLTPGDSSSGWTAGAAAYYVGYLQPRTFLLKYNENGTITDAVDCALDPLSETKCTLKSFTVEKGIYQTSNFRVQPTESIVRFPNITNLCPFGEVFNATRFASVYAWNRKRISNCVADYSVLYNSASFSTFKCYGVSPTKLNDLCFTNVYADSFVIRGDEVRQIAPGQTGKIADYNYKLPDDFTGCVIAWNSNNLDSKVGGNYNYLYRLFRKSNLKPFERDISTEIYQAGSTPCNGVEGFNCYFPLQSYGFQPTNGVGYQPYRVVVLSFELLHAPATVCGPKKSTNLVKNKCVNFNFNGLTGTGVLTESNKKFLPFQQFGRDIADTTDAVRDPQTLEILDITPCSFGGVSVITPGTNTSNQVAVLYQDVNCTEVPVAIHADQLTPTWRVYSTGSNVFQTRAGCLIGAEHVNNSYECDIPIGAGICASYQTQTNSPRRARSVASQSIIAYTMSLGAENSVAYSNNSIAIPTNFTISVTTEILPVSMTKTSVDCTMYICGDSTECSNLLLQYGSFCTQLNRALTGIAVEQDKNTQEVFAQVKQIYKTPPIKDFGGFNFSQILPDPSKPSKRSFIEDLLFNKVTLADAGFIKQYGDCLGDIAARDLICAQKFNGLTVLPPLLTDEMIAQYTSALLAGTITSGWTFGAGAALQIPFAMQMAYRFNGIGVTQNVLYENQKLIANQFNSAIGKIQDSLSSTASALGKLQDVVNQNAQALNTLVKQLSSNCGAISSVLNDILSRLDKVEAEVQIDRLITCRLQSLQTYVTQQLIRAAEIRASANLAATKMSECVLGQSKRVDFCGKGYHLMSFPQSAPHGVVFLHVTYVPAQEKNFTTAPAICHDGKAHFPREGVFVSNGTHWFVTQRNFYEPQIITTDNTFVSGNCDVVIGIVNNTVYDPLQPELDSFKEELDKYFKNHTSPDVDLGDISGINASVVNIQKEIDRLNEVAKNLNESLIDLQELGKYEQYIKWPWYIWLGFIAGLIAIVMVTIMLCCMTSCCSCLKGCCSCGSCCKFDEDDSEPVLKGVKLHYT

SEQ ID NO: 1050 - protein, 1273 aa, Artificial Sequence
  SARS-CoV-2/SARS-CoV-2/Yunnan-01/human/2020/CHN__MT049951.1 spike protein (1-1273)(F970C_G999C)
MFVFLVLLPLVSSQCVNLTTRTQLPPANTNSFTRGVYYPDKVFRSSVLHSTQDLFLPFFSNVTWFHAIHVSGTNGTKRFDNPVLPFNDGVYFASTEKSNIIRGWIFGTTLDSKTQSLLIVNNATNVVIKVCEFQFCNDPFLGVYYHKNNKSWMESEFRVYSSANNCTFEYVSQPFLMDLEGKQGNFKNLREFVFKNIDGYFKIYSKHTPINLVRDLPQGFSALEPLVDLPIGINITRFQTLLALHRSYLTPGDSSSGWTAGAAAYYVGYLQPRTFLLKYNENGTITDAVDCALDPLSETKCTLKSFTVEKGIYQTSNFRVQPTESIVRFPNITNLCPFGEVFNATRFASVYAWNRKRISNCVADYSVLYNSASFSTFKCYGVSPTKLNDLCFTNVYADSFVIRGDEVRQIAPGQTGKIADYNYKLPDDFTGCVIAWNSNNLDSKVGGNYNYLYRLFRKSNLKPFERDISTEIYQAGSTPCNGVEGFNCYFPLQSYGFQPTNGVGYQPYRVVVLSFELLHAPATVCGPKKSTNLVKNKCVNFNFNGLTGTGVLTESNKKFLPFQQFGRDIADTTDAVRDPQTLEILDITPCSFGGVSVITPGTNTSNQVAVLYQDVNCTEVPVAIHADQLTPTWRVYSTGSNVFQTRAGCLIGAEHVNNSYECDIPIGAGICASYQTQTNSPRRARSVASQSIIAYTMSLGAENSVAYSNNSIAIPTNFTISVTTEILPVSMTKTSVDCTMYICGDSTECSNLLLQYGSFCTQLNRALTGIAVEQDKNTQEVFAQVKQIYKTPPIKDFGGFNFSQILPDPSKPSKRSFIEDLLFNKVTLADAGFIKQYGDCLGDIAARDLICAQKFNGLTVLPPLLTDEMIAQYTSALLAGTITSGWTFGAGAALQIPFAMQMAYRFNGIGVTQNVLYENQKLIANQFNSAIGKIQDSLSSTASALGKLQDVVNQNAQALNTLVKQLSSNCGAISSVLNDILSRLDKVEAEVQIDRLITCRLQSLQTYVTQQLIRAAEIRASANLAATKMSECVLGQSKRVDFCGKGYHLMSFPQSAPHGVVFLHVTYVPAQEKNFTTAPAICHDGKAHFPREGVFVSNGTHWFVTQRNFYEPQIITTDNTFVSGNCDVVIGIVNNTVYDPLQPELDSFKEELDKYFKNHTSPDVDLGDISGINASVVNIQKEIDRLNEVAKNLNESLIDLQELGKYEQYIKWPWYIWLGFIAGLIAIVMVTIMLCCMTSCCSCLKGCCSCGSCCKFDEDDSEPVLKGVKLHYT

SEQ ID NO: 1051 - protein, 1273 aa, Artificial Sequence
  SARS-CoV-2/USA/WA-UW292/2020__EPI_ISL_418077 spike protein (1-1273)(F970C_G999C)
MFVFLVLLPLVSSQCVNLTTRTQLPPAYTNSFTRGVYYPDKVFRSSVLHSTQDLFLPFFSNVTWFHAIHVSGTNGTKRFDNPVLPFNDGVYFASTEKSNIIRGWIFGTTLDSKTQSLLIVNNATNVVIKVCEFQFCNDPFLGVYYHKNNKSWMESEFRVYSSANNCTFEYVSQPFLMDLEGKQGNFKNLREFVFKNIDGYFKIYSKHTPINLVRDLPQGFSALEPLVDLPIGINITRFQTLLALHRSYLTPGDSSSGWTAGAAAYYVGYLQPRTFLLKYNENGTITDAVDCALDPLSETKCTLKSFTVEKGIYQTSNFRVQPTESIVRFPNITNLCPFGEVFNATRFASVYAWNRKRISNCVADYSVLYNSASFSTFKCYGVSPTKLNDLCFTNVYADSFVIRGDEVRQIAPGQTGKIADYNYKLPDDFTGCVIAWNSNNLDSKVGGNYNYLYRLFRKSNLKPFERDISTEIYQASSTPCNGVEGFNCYFPLQSYGFQPTNGVGYQPYRVVVLSFELLHAPATVCGPKKSTNLVKNKCVNFNFNGLTGTGVLTESNKKFLPFQQFGRDIADTTDAVRDPQTLEILDITPCSFGGVSVITPGTNTSNQVAVLYQDVNCTEVPVAIHADQLTPTWRVYSTGSNVFQTRAGCLIGAEHVNNSYECDIPIGAGICASYQTQTNSPRRARSVASQSIIAYTMSLGAENSVAYSNNSIAIPTNFTISVTTEILPVSMTKTSVDCTMYICGDSTECSNLLLQYGSFCTQLNRALTGIAVEQDKNTQEVFAQVKQIYKTPPIKDFGGFNFSQILPDPSKPSKRSFIEDLLFNKVTLADAGFIKQYGDCLGDIAARDLICAQKFNGLTVLPPLLTDEMIAQYTSALLAGTITSGWTFGAGAALQIPFAMQMAYRFNGIGVTQNVLYENQKLIANQFNSAIGKIQDSLSSTASALGKLQDVVNQNAQALNTLVKQLSSNCGAISSVLNDILSRLDKVEAEVQIDRLITCRLQSLQTYVTQQLIRAAEIRASANLAATKMSECVLGQSKRVDFCGKGYHLMSFPQSAPHGVVFLHVTYVPAQEKNFTTAPAICHDGKAHFPREGVFVSNGTHWFVTQRNFYEPQIITTDNTFVSGNCDVVIGIVNNTVYDPLQPELDSFKEELDKYFKNHTSPDVDLGDISGINASVVNIQKEIDRLNEVAKNLNESLIDLQELGKYEQYIKWPWYIWLGFIAGLIAIVMVTIMLCCMTSCCSCLKGCCSCGSCCKFDEDDSEPVLKGVKLHYT

SEQ ID NO: 1052 - protein, 1273 aa, Artificial Sequence
  SARS-CoV-2/Iceland/192/2020__EPI_ISL_417819 spike protein (1-1273)(F970C_G999C)
MFVFFVLLPLVSSQCVNLTTRTQLPPAYTNSFTRGVYYPDKVFRSSVLHSTQDLFLPFFSNVTWFHAIHVSGTNGTKRFDNPVLPFNDGVYFASTEKSNIIRGWIFGTTLDSKTQSLLIVNNATNVVIKVCEFQFCNDPFLGVYYHKNNKSWMESEFRVYSSANNCTFEYVSQPFLMDLEGKQGNFKNLREFVFKNIDGYFKIYSKHTPINLVRDLPQGFSALEPLVDLPIGINITRFQTLLALHRSYLTPGDSSSGWTAGAAAYYVGYLQPRTFLLKYNENGTITDAVDCALDPLSETKCTLKSFTVEKGIYQTSNFRVQPTESIVRFPNITNLCPFGEVFNATRFASVYAWNRKRISNCVADYSVLYNSASFSTFKCYGVSPTKLNDLCFTNVYADSFVIRGDEVRQIAPGQTGKIADYNYKLPDDFTGCVIAWNSNNLDSKVGGNYNYLYRLFRKSNLKPFERDISTEIYQAGSTPCNGVEGFNCYFPLQSYGFQPTNGVGYQPYRVVVLSFELLHAPATVCGPKKSTNLVKNKCVNFNFNGLTGTGVLTESNKKFLPFQQFGRDIADTTDAVRDPQTLEILDITPCSFGGVSVITPGTNTSNQVAVLYQGVNCTEVPVAIHADQLTPTWRVYSTGSNVFQTRAGCLIGAEHVNNSYECDIPIGAGICASYQTQTNSPRRARSVASQSIIAYTMSLGAENSVAYSNNSIAIPTNFTISVTTEILPVSMTKTSVDCTMYICGDSTECSNLLLQYGSFCTQLNRALTGIAVEQDKNTQEVFAQVKQIYKTPPIKDFGGFNFSQILPDPSKPSKRSFIEDLLFNKVTLADAGFIKQYGDCLGDIAARDLICAQKFNGLTVLPPLLTDEMIAQYTSALLAGTITSGWTFGAGAALQIPFAMQMAYRFNGIGVTQNVLYENQKLIANQFNSAIGKIQDSLSSTASALGKLQDVVNQNAQALNTLVKQLSSNCGAISSVLNDILSRLDKVEAEVQIDRLITCRLQSLQTYVTQQLIRAAEIRASANLAATKMSECVLGQSKRVDFCGKGYHLMSFPQSAPHGVVFLHVTYVPAQEKNFTTAPAICHDGKAHFPREGVFVSNGTHWFVTQRNFYEPQIITTDNTFVSGNCDVVIGIVNNTVYDPLQPELDSFKEELDKYFKNHTSPDVDLGDISGINASVVNIQKEIDRLNEVAKNLNESLIDLQELGKYEQYIKWPWYIWLGFIAGLIAIVMVTIMLCCMTSCCSCLKGCCSCGSCCKFDEDDSEPVLKGVKLHYT

SEQ ID NO: 1053 - protein, 1273 aa, Artificial Sequence
  SARS-CoV-2/Belgium/ULG-6939/2020__EPI_ISL_417020 spike protein (1-1273)(F970C_G999C)
MFVFLVLLPLVSSQCVNLTTRTQLPPAYTNSFTRGVYYPDKVFRSSVLHSTQDLFLPFFSNVTWFHAIHVSGTNGTKRFDNPVLPFNDGVYFASTEKSNIIRGWIFGTTLDSKTQSLLIVNNATNVVIKVCEFQFCNDPFLGVYYHKNNKSWMESEFRVYSSANNCTFEYVSQPFLMDLEGKQGNFKNLREFVFKNIDGYFKIYSKHTPINLVRDLPQGFSALEPLVDLPIGINITRFQTLLALHRSYLTPGDSSSGWTAGAAAYYVGYLQPRTFLLKYNENGTITDAVDCALDPLSETKCTLKSFTVEKGIYQTSNFRVQPTESIVRFPNITNLCPFGEVFNATRFASVYAWNRKRISNCVADYSVLYNSASFSTFKCYGVSPTKLNDLCFTNVYADSFVIRGDEVRQIAPGQTGKIADYNYKLPDDFTGCVIAWNSNNLDSKVGGNYNYLYRLFRKSNLKPFERDISTEIYQAGSTPCNGVEGFNCYFPLQSYGFQPTNGVGYQPYRVVVLSFELLHAPATVCGPKKSTNLVKNKCVNFNFNGLTGTGVLTESNKKFLPFQQFGRDIADTTDAVRDPQTLEILDITPCSFGGVSVITPGTNTSNQVAVLYQGVNCTEVPVAIHADQLTPTWRVYSTGSNVFQTRAGCLIGAEHVNNSYECDIPIGAGICASYQTQTNSPRRARSVASQSIIAYTMSLGAENSVVYSNNSIAIPTNFTISVTTEILPVSMTKTSVDCTMYICGDSTECSNLLLQYGSFCTQLNRALTGIAVEQDKNTQEVFAQVKQIYKTPPIKDFGGFNFSQILPDPSKPSKRSFIEDLLFNKVTLADAGFIKQYGDCLGDIAARDLICAQKFNGLTVLPPLLTDEMIAQYTSALLAGTITSGWTFGAGAALQIPFAMQMAYRFNGIGVTQNVLYENQKLIANQFNSAIGKIQDSLSSTASALGKLQDVVNQNAQALNTLVKQLSSNCGAISSVLNDILSRLDKVEAEVQIDRLITCRLQSLQTYVTQQLIRAAEIRASANLAATKMSECVLGQSKRVDFCGKGYHLMSFPQSAPHGVVFLHVTYVPAQEKNFTTAPAICHDGKAHFPREGVFVSNGTHWFVTQRNFYEPQIITTDNTFVSGNCDVVIGIVNNTVYDPLQPELDSFKEELDKYFKNHTSPDVDLGDISGINASVVNIQKEIDRLNEVAKNLNESLIDLQELGKYEQYIKWPWYIWLGFIAGLIAIVMVTIMLCCMTSCCSCLKGCCSCGSCCKFDEDDSEPVLKGVKLHYT

SEQ ID NO: 1054 - protein, 1273 aa, Artificial Sequence
  SARS-CoV-2/France/HF2496/2020__EPI_ISL_418231 spike protein (1-1273)(F970C_G999C)
MFVFLVLLPLVSSQCVNLTTRTQLPPAYTNSFTRGVYYPDKVFRSSVLHSTQDLFLPFFSNVTWFHAIHVSGTNGTKRFDNPVLPFNDGVYFASTEKSNIIRGWIFGTTLDSKTQSLLIVNNATNVVIKVCEFQFCNDPFLGVYYHKNNKSWMESEFRVYSSANNCTFEYVSQPFLMDLEGKQGNFKNLREFVFKNIDGYFKIYSKHTPINLVRDLPQGFSALEPLVDLPIGINITRFQTLLALHRSYLTPGDSSSGWTAGAAAYYVGYLQPRTFLLKYNENGTITDAVDCALDPLSETKCTLKSFTVEKGIYQTSNFRVQPTESIVRFPNITNLCPFGEVFNATRFASVYAWNRKRISNCVADYSVLYNSASFSTFKCYGVSPTKLNDLCFTNVYADSFVIRGDEVRQIAPGQTGKIADYNYKLPDDFTGCVIAWNSNNLDSKVGGNYNYLYRLFRKSNLKPFERDISTEIYQAGSTPCNGVEGFNCYFPLQSYGFQPTNGVGYQPYRVVVLSFELLHAPATVCGPKKSTNLVKNKCVNFNFNGLTGTGVLTESNKKFLPFQQFGRDIADTTDAVRDPQTLEILDITPCSFGGVSVITPGTNTSNQVAVLYQGVNCTEVPVAIHADQLTPTWRVYSTGSNVFQTRAGCLIGAEHVNNSYECDIPIGAGICASYQTQTNSPRRARSVASQSIIAYTMSLGAENSVAYSNNSIAIPTNFTISVTTEILPVSMTKTSVDCTMYICGDSTECSNLLLQYGSFCTQLNRALTGIAVEQDKNTQEVFAQVKQIYKTPPIKDFGGFNFSQILPDPSKPSKRSFIEDLLFNKVTLADAGFIKQYGDCLGDIVARDLICAQKFNGLTVLPPLLTDEMIAQYTSALLAGTITSGWTFGAGAALQIPFAMQMAYRFNGIGVTQNVLYENQKLIANQFNSAIGKIQDSLSSTASALGKLQDVVNQNAQALNTLVKQLSSNCGAISSVLNDILSRLDKVEAEVQIDRLITCRLQSLQTYVTQQLIRAAEIRASANLAATKMSECVLGQSKRVDFCGKGYHLMSFPQSAPHGVVFLHVTYVPAQEKNFTTAPAICHDGKAHFPREGVFVSNGTHWFVTQRNFYEPQIITTDNTFVSGNCDVVIGIVNNTVYDPLQPELDSFKEELDKYFKNHTSPDVDLGDISGINASVVNIQKEIDRLNEVAKNLNESLIDLQELGKYEQYIKWPWYIWLGFIAGLIAIVMVTIMLCCMTSCCSCLKGCCSCGSCCKFDEDDSEPVLKGVKLHYT

SEQ ID NO: 1055 - protein, 1273 aa, Artificial Sequence
  SARS-CoV-2/USA/WA-UW291/2020__EPI_ISL_418076 spike protein (1-1273)(F970C_G999C)
MFVFLVLLPLVSSQCVNLTTRTQLPPAYTNSFTRGVYYPDKVFRSSVLHSTQDLFLPFFSNVTWFHAIHVSGTNGTKRFDNPVLPFNDGVYFASTEKSNIIRGWIFGTTLDSKTQSLLIVNNATNVVIKVCEFQFCNDPFLGVYYHKNNKSWMESEFRVYSSANNCTFEYVSQPFLMDLEGKQGNFKNLREFVFKNIDGYFKIYSKHTPINLVRDLPQGFSALEPLVDLPIGINITRFQTLLALHRSYLTPGDSSSGWTAGAAAYYVGYLQPRTFLLKYNENGTITDAVDCALDPLSETKCTLKSFTVEKGIYQTSNFRVQPTESIVRFPNITNLCPFGEVFNATRFASVYAWNRKRISNCVADYSVLYNSASFSTFKCYGVSPTKLNDLCFTNVYADSFVIRGDEVRQIAPGQTGKIADYNYKLPDDFTGCVIAWNSNNLDSKVGGNYNYLYRLFRKSNLKPFERDISTEIYQAGSTPCNGVEGFNCYFPLQSYGFQPTNGVGYQPYRVVVLSFELLHAPATVCGPKKSTNLVKNKCVNFNFNGLTGTGVLTESNKKFLPFQQFGRDIADTTDAVRDPQTLEILDITPCSFGGVSVITPGTNTSNQVAVLYQGVNCTEVPVAIHADQLTPTWRVYSTGSNVFQTRAGCLIGAEHVNNSYECDIPIGAGICASYQTQTNSPRRARSVASQSIIAYTMSLGAENSVAYSNNSIAIPTNFTISVTTEILPVSMTKTSVDCTMYICGDSTECSNLLLQYGSFCTQLNRALTGIAVEQDKNTQEVFAQVKQIYKTPPIKDFGGFNFSQILPDPSKPSKRSFIEDLLFNKVTLADAGFIKQYGDCLGDIAARDLICAQKFNGLTVLPPLLTDEMIAQYTSALLAGTITSGWTFGAGAALQIPFAMQMAYRFNGIGVTQNVLYENQKLIANQFNSAIGKIQYSLSSTASALGKLQDVVNQNAQALNTLVKQLSSNCGAISSVLNDILSRLDKVEAEVQIDRLITCRLQSLQTYVTQQLIRAAEIRASANLAATKMSECVLGQSKRVDFCGKGYHLMSFPQSAPHGVVFLHVTYVPAQEKNFTTAPAICHDGKAHFPREGVFVSNGTHWFVTQRNFYEPQIITTDNTFVSGNCDVVIGIVNNTVYDPLQPELDSFKEELDKYFKNHTSPDVDLGDISGINASVVNIQKEIDRLNEVAKNLNESLIDLQELGKYEQYIKWPWYIWLGFIAGLIAIVMVTIMLCCMTSCCSCLKGCCSCGSCCKFDEDDSEPVLKGVKLHYT

SEQ ID NO: 1056 - protein, 1273 aa, Artificial Sequence
  SARS-CoV-2/Portugal/PT0034/2020__EPI_ISL_418019 spike protein (1-1273)(F970C_G999C)
MFVFLVLLPLVSSQCVNLTTRTQLPPAYTNSFTRGVYYPDKVFRSSVLHSTQDLFLPFFSNVTWFHAIHVSGTNGTKRFDNPVLPFNDGVYFASTEKSNIIRGWIFGTTLDSKTQSLLIVNNATNVVIKVCEFQFCNDPFLGVYYHKNNKSWMESEFRVYSSANNCTFEYVSQPFLMDLEGKQGNFKNLREFVFKNIDGYFKIYSKHTPINLVRDLPQGFSALEPLVDLPIGINITRFQTLLALHRSYLTPGDSSSGWTAGAAAYYVGYLQPRTFLLKYNENGTITDAVDCALDPLSETKCTLKSFTVEKGIYQTSNFRVQPTESIVRFPNITNLCPFGEVFNATRFASVYAWNRKRISNCVADYSVLYNSASFSTFKCYGVSPTKLNDLCFTNVYADSFVIRGDEVRQIAPGQTGKIADYNYKLPDDFTGCVIAWNSNNLDSKVGGNYNYLYRLFRKSNLKPFERDISTEIYQAGSTPCNGVEGFNCYFPLQSYGFQPTNGVGYQPYRVVVLSFELLHAPATVCGPKKSTNLVKNKCVNFNFNGLTGTGVLTESNKKFLPFQQFGRDIADTTDAVRDPQTLEILDITPCSFGGVSVITPGTNTSNQVAVLYQGVNCTEVPVAIHADQLTPTWRVYSTGSNVFQTRAGCLIGAEHVNNSYECDIPIGAGICASYQTQTNSPRRARSVASQSIIAYTMSLGAENSVAYSNNSIAIPTNFTISVTTEILPVSMTKTSVDCTMYICGDSTECSNLLLQYGSFCTQLNRALTGIAVEQDKNTQEVFAQVKQIYKTPPIKDFGGFNFSQILPDPSKPSKRSFIEDLLFNKVTLADAGFIKQYGDCLGDIAARDLICAQKFNGLTVLPPLLTDEMIAQYTSALLAGTITSGWTFGAGAALQIPFAMQMAYRFNGIGVTQNVLYENQKLIANQFNSAIGKIQDSLSSTASALGKLQDVVNQNAQALNTLVKQLSSNCGAISSVLNDILSRLDKVEAEVQIDRLITCRLQSLQTYVTQQLIRAAEIRASANLAATKMSECVLGQSKRVDFCGKGYHLMSFPQSAPHGVVFLHVTYVPAQEKNFTTAPAICHDGKAHFPREGVFVSNGTHWFVTQRNFYEPQIITTDNTFVSGNCDVVIGIVNNTVYDPLQPELDSFKEELDKYFKNHTSPDVDLGDISGINASVVNIQKEIDRLNEVAKNLNESLIDLQELGKYEQYIKWPWYIWLGFIAGLIAIVMVTIMLCCITSCCSCLKGCCSCGSCCKFDEDDSEPVLKGVKLHYT

SEQ ID NO: 1057 - protein, 1273 aa, Artificial Sequence
  SARS-CoV-2/Iceland/202/2020__EPI_ISL_417750 spike protein (1-1273)(F970C_G999C)
MFVFLVLLPLVSSQCVNLTTRTQLPPAYTNSFTRGVYYPDKVFRSSVLHSTQDLFLPFFSNVTWFHAIHVSGTNGTKRFDNPVLPFNDGVYFASTEKSNIIRGWIFGTTLDSKTQSLLIVNNATNVVIKVCEFQFCNDPFLGVYYHKNNKSWMESEFRVYSSANNCTFEYVSQPFLMDLEGKQGNFKNLREFVFKNIDGYFKIYSKHTPINLVRDLPQGFSALEPLVDLPIGINITRFQTLLALHRSYLTPGDSSSGWTAGAAAYYVGYLQPRTFLLKYNENGTITDAVDCALDPLSETKCTLKSFTVEKGIYQTSNFRVQPTESIVRFPNITNLCPFGEVFNATRFASVYAWNRKRISNCVADYSVLYNSASFSTFKCYGVSPTKLNDLCFTNVYADSFVIRGDEVRQIAPGQTGKIADYNYKLPDDFTGCVIAWNSNNLDSKVGGNYNYLYRLFRKSNLKPFERDISTEIYQAGSTPCNGVEGFNCYFPLQSYGFQPTNGVGYQPYRVVVLSFELLHAPATVCGPKKSTNLVKNKCVNFNFNGLTGTGVLTESNKKFLPFQQFGRDIADTTDAVRDPQTLEILDITPCSFGGVSVITPGTNTSNQVAVLYQDVNCTEVPVAIHADQLTPTWRVYSTGSNVFQTRAGCLIGAEHVNNSYECDIPIGAGICASYQTQTNSPRRARSVASQSIIAYTMSLGAENSVAYSNNSIAIPTNFTISVTTEILPVSMTKTSVDCTMYICGDSTECSNLLLQYGSFCTQLNRALTGIAVEQDKNTQEVFAQVKQIYKTPPIKDFGGFNFSQILPDPSKPSKRSFIEDLLFNKVTLADAGFIKQYGDCLGDIAARDLICAQKFNGLTVLPPLLTDEMIAQYTSALLAGTITSGWTFGAGAALQIPFAMQMAYRFNGIGVTQNVLYENQKLIANQFNSAIGKIQDSLSSTASALGKLQDVVNQNAQALNTLVKQLSSNCGAISSVLNDILSRLDKVEAEVQIDRLITCRLQSLQTYVTQQLIRAAEIRASANLAATKMSECVLGQSKRVDFCGKGYHLMSFPQSAPHGVVFLHVTYVPAQEKNFTTAPAICHDGKAHFPREGVFVSNGTHWFVTQRNFYEPQIITTDNTFVSGNCDVVIGIVNNTVYDPLQPELDSFKEELDKYFKNHTSPDVDLGDIPGINASVVNIQKEIDRLNEVAKNLNESLIDLQELGKYEQYIKWPWYIWLGFIAGLIAIVMVTIMLCCMTSCCSCLKGCCSCGSCCKFDEDDSEPVLKGVKLHYT

SEQ ID NO: 1058 - protein, 1273 aa, Artificial Sequence
  SARS-CoV-2/USA/WA-UW261/2020__EPI_ISL_418046 spike protein (1-1273)(F970C_G999C)
MFVFLVLLPLVSSQCVNLTTRTQLPPAYTNSFTRGVYYPDKVFRSSVLHSTQDLFLPFFSNVTWFHAIHVSGTNGTKRFDNPVLPFNDGVYFASTEKSNIIRGWIFGTTLDSKTQSLLIVNNATNVVIKVCEFQFCNDPFLGVYYHKNNKSWMESEFRVYSSANNCTFEYVSQPFLMDLEGKQGNFKNLREFVFKNIDGYFKIYSKHTPINLVRDLPQGFSALEPLVDLPIGINITRFQTLLALHRSYLTPGDSSSGWTAGAAAYYVGYLQPRTFLLKYNENGTITDAVDCALDPLSETKCTLKSFTVEKGIYQTSNFRVQPTESIVRFPNITNLCPFGEVFNATRFTSVYAWNRKRISNCVADYSVLYNSASFSTFKCYGVSPTKLNDLCFTNVYADSFVIRGDEVRQIAPGQTGKIADYNYKLPDDFTGCVIAWNSNNLDSKVGGNYNYLYRLFRKSNLKPFERDISTEIYQAGSTPCNGVEGFNCYFPLQSYGFQPTNGVGYQPYRVVVLSFELLHAPATVCGPKKSTNLVKNKCVNFNFNGLTGTGVLTESNKKFLPFQQFGRDIADTTDAVRDPQTLEILDITPCSFGGVSVITPGTNTSNQVAVLYQDVNCTEVPVAIHADQLTPTWRVYSTGSNVFQTRAGCLIGAEHVNNSYECDIPIGAGICASYQTQTNSPRRARSVASQSIIAYTMSLGAENSVAYSNNSIAIPTNFTISVTTEILPVSMTKTSVDCTMYICGDSTECSNLLLQYGSFCTQLNRALTGIAVEQDKNTQEVFAQVKQIYKTPPIKDFGGFNFSQILPDPSKPSKRSFIEDLLFNKVTLADAGFIKQYGDCLGDIAARDLICAQKFNGLTVLPPLLTDEMIAQYTSALLAGTITSGWTFGAGAALQIPFAMQMAYRFNGIGVTQNVLYENQKLIANQFNSAIGKIQDSLSSTASALGKLQDVVNQNAQALNTLVKQLSSNCGAISSVLNDILSRLDKVEAEVQIDRLITCRLQSLQTYVTQQLIRAAEIRASANLAATKMSECVLGQSKRVDFCGKGYHLMSFPQSAPHGVVFLHVTYVPAQEKNFTTAPAICHDGKAHFPREGVFVSNGTHWFVTQRNFYEPQIITTDNTFVSGNCDVVIGIVNNTVYDPLQPELDSFKEELDKYFKNHTSPDVDLGDISGINASVVNIQKEIDRLNEVAKNLNESLIDLQELGKYEQYIKWPWYIWLGFIAGLIAIVMVTIMLCCMTSCCSCLKGCCSCGSCCKFDEDDSEPVLKGVKLHYT

SEQ ID NO: 1059 - protein, 1273 aa, Artificial Sequence
  SARS-CoV-2/Portugal/PT0035/2020__EPI_ISL_418020 spike protein (1-1273)(F970C_G999C)
MFVFLVLLPLVSSQCVNLTTRTQLPPAYTNSFTRGVYYPDKVFRSSVLHSTQDLFLPFFSNVTWFHAIHVSGTNGTKRFDNPVLPFNDGVYFASTEKSNIIRGWIFGTTLDSKTQSLLIVNNATNVVIKVCEFQFCNDPFLGVYYHKNNKSWMESEFRVYSSANNCTFEYVSQPFLMDLEGKQGNFKNLREFVFKNIDGYFKIYSKHTPINLVRDLPQGFSALEPLVDLPIGINITRFQTLLALHRSYLTPGDSSSGWTAGAAAYYVGYLQPRTFLLKYNENGTITDAVDCALDPLSETKCTLKSFTVEKGIYQTSNFRVQPTESIVRFPNITNLCPFGEVFNATRFASVYAWNRKRISNCVADYSVLYNSASFSTFKCYGVSPTKLNDLCFTNVYADSFVIRGDEVRQIAPGQTGKIADYNYKLPDDFTGCVIAWNSNNLDSKVGGNYNYLYRLFRKSNLKPFERDISTEIYQAGSTPCNGVEGFNCYFPLQSYGFQPTNGVGYQPYRVVVLSFELLHAPATVCGPKKSTNLVKNKCVNFNFNGLTGTGVLTESNKKFLPFQQFGRDIADTTDAVRDPQTLEILDITPCSFGGVSVITPGTNTSNQVAVLYQDVNCTEVPVAIHADQLTPTWRVYSTGSNVFQTRAGCLIGAEHVNNSYECDIPIGAGICASYQTQTNSPRRARSVASQSIIAYTMSLGAENSVAYSNNSIAIPTNFTISVTTEILPVSMTKTSVDCTMYICGDSTECSNLLLQYGSFCTQLNRALTGIAVEQDKNTQEVFAQVKQIYKTPPIKDFGGFNFSQILPDPSKPSKRSFIEDLLFNKVTLADAGFIKQYGDCLGDISARDLICAQKFNGLTVLPPLLTDEMIAQYTSALLAGTITSGWTFGAGAALQIPFAMQMAYRFNGIGVTQNVLYENQKLIANQFNSAIGKIQDSLSSTASALGKLQDVVNQNAQALNTLVKQLSSNCGAISSVLNDILSRLDKVEAEVQIDRLITCRLQSLQTYVTQQLIRAAEIRASANLAATKMSECVLGQSKRVDFCGKGYHLMSFPQSAPHGVVFLHVTYVPAQEKNFTTAPAICHDGKAHFPREGVFVSNGTHWFVTQRNFYEPQIITTDNTFVSGNCDVVIGIVNNTVYDPLQPELDSFKEELDKYFKNHTSPDVDLGDISGINASVVNIQKEIDRLNEVAKNLNESLIDLQELGKYEQYIKWPWYIWLGFIAGLIAIVMVTIMLCCMTSCCSCLKGCCSCGSCCKFDEDDSEPVLKGVKLHYT

SEQ ID NO: 1060 - protein, 1273 aa, Artificial Sequence
  SARS-CoV-2/USA/NY-NYUMC7/2020__EPI_ISL_418192 spike protein (1-1273)(F970C_G999C)
MFVFLVLLPLVSSQCVNLTTRTQLPPAYTNSFTRGVYYPDKVFRSSVLHSTQDLFLPFFSNVTWFHAIHVSGTNGTKRFDNPVLPFNDGVYFASTEKSNIIRGWIFGTTLDSKTQSLLIVNNATNVVIKVCEFQFCNDPFLGVYHHKNNKSWMESEFRVYSSANNCTFEYVSQPFLMDLEGKQGNFKNLREFVFKNIDGYFKIYSKHTPINLVRDLPQGFSALEPLVDLPIGINITRFQTLLALHRSYLTPGDSSSGWTAGAAAYYVGYLQPRTFLLKYNENGTITDAVDCALDPLSETKCTLKSFTVEKGIYQTSNFRVQPTESIVRFPNITNLCPFGEVFNATRFASVYAWNRKRISNCVADYSVLYNSASFSTFKCYGVSPTKLNDLCFTNVYADSFVIRGDEVRQIAPGQTGKIADYNYKLPDDFTGCVIAWNSNNLDSKVGGNYNYLYRLFRKSNLKPFERDISTEIYQAGSTPCNGVEGFNCYFPLQSYGFQPTNGVGYQPYRVVVLSFELLHAPATVCGPKKSTNLVKNKCVNFNFNGLTGTGVLTESNKKFLPFQQFGRDIADTTDAVRDPQTLEILDITPCSFGGVSVITPGTNTSNQVAVLYQGVNCTEVPVAIHADQLTPTWRVYSTGSNVFQTRAGCLIGAEHVNNSYECDIPIGAGICASYQTQTNSPRRARSVASQSIIAYTMSLGAENSVAYSNNSIAIPTNFTISVTTEILPVSMTKTSVDCTMYICGDSTECSNLLLQYGSFCTQLNRALTGIAVEQDKNTQEVFAQVKQIYKTPPIKDFGGFNFSQILPDPSKPSKRSFIEDLLFNKVTLADAGFIKQYGDCLGDIAARDLICAQKFNGLTVLPPLLTDEMIAQYTSALLAGTITSGWTFGAGAALQIPFAMQMAYRFNGIGVTQNVLYENQKLIANQFNSAIGKIQDSLSSTASALGKLQDVVNQNAQALNTLVKQLSSNCGAISSVLNDILSRLDKVEAEVQIDRLITCRLQSLQTYVTQQLIRAAEIRASANLAATKMSECVLGQSKRVDFCGKGYHLMSFPQSAPHGVVFLHVTYVPAQEKNFTTAPAICHDGKAHFPREGVFVSNGTHWFVTQRNFYEPQIITTDNTFVSGNCDVVIGIVNNTVYDPLQPELDSFKEELDKYFKNHTSPDVDLGDISGINASVVNIQKEIDRLNEVAKNLNESLIDLQELGKYEQYIKWPWYIWLGFIAGLIAIVMVTIMLCCMTSCCSCLKGCCSCGSCCKFDEDDSEPVLKGVKLHYT

SEQ ID NO: 1061 - protein, 1273 aa, Artificial Sequence
  SARS-CoV-2/Iceland/189/2020__EPI_ISL_417709 spike protein (1-1273)(F970C_G999C)
MFVFLVLLPLVSSQCVNLTTRTQLPPAYTNSFTRGVYYPDKVFRSSVLHSTQDLFLPFFSNVTWFHAIHVSGTNGTKRFDNPVLPFNDGVYFASTEKSNIIRGWIFGTTLDSKTQSLLIVNNATNVVIKVCEFQFCNDPFLGVYYHKNNKSWMESEFRVYSSANNCTFEYVSQPFLMDLEGKQGNFKNLREFVFKNIDGYFKIYSKHTPINLVRDLPQGFSALEPLVDLPIGINITRFQTLLALHRSYLTPGDSSSGWTAGAAAYYVGYLQPRTFLLKYNENGTITDAVDCALDPLSETKCTLKSFTVEKGIYQTSNFRVQPTESIVRFPNITNLCPFGEVFNATRFASVYAWNRKRISNCVADYSVLYNSASFSTFKCYGVSPTKLNDLCFTNVYADSFVIRGDEVRQIAPGQTGKIADYNYKLPDDFTGCVIAWNSNNLDSKVGGNYNYLYRLFRKSNLKPFERDISTEIYQAGSTPCNGVEGFNCYFPLQSYGFQPTNGVGYQPYRVVVLSFELLHAPATVCGPKKSTNLVKNKCVNFNFNGLTGTGVLTESNKKFLPFQQFGRDIADTTDAVRDPQTLEILDITPCSFGGVSVITPGTNTSNQVAVLYQGVNCTEVPVAIHADQLTPTWRVYSTGSNVFQTRAGCLIGAEHVNNSYECDIPIGAGICASYQTQTNSPRRARSVASQSIIAYTMSLGAENSVAYSNNSIAIPTNFTISVTTEILPVSMTKTSVDCTMYICGDSTECSNLLLQYGSFCTQLNRALTGIAVEQDKNTQEVFAQVKQIYKTPPIKDFGGFNFSQILPDPSKPSKRSFIEDLLFNKVTLADAGFTKQYGDCLGDIAARDLICAQKFNGLTVLPPLLTDEMIAQYTSALLAGTITSGWTFGAGAALQIPFAMQMAYRFNGIGVTQNVLYENQKLIANQFNSAIGKIQDSLSSTASALGKLQDVVNQNAQALNTLVKQLSSNCGAISSVLNDILSRLDKVEAEVQIDRLITCRLQSLQTYVTQQLIRAAEIRASANLAATKMSECVLGQSKRVDFCGKGYHLMSFPQSAPHGVVFLHVTYVPAQEKNFTTAPAICHDGKAHFPREGVFVSNGTHWFVTQRNFYEPQIITTDNTFVSGNCDVVIGIVNNTVYDPLQPELDSFKEELDKYFKNHTSPDVDLGDISGINASVVNIQKEIDRLNEVAKNLNESLIDLQELGKYEQYIKWPWYIWLGFIAGLIAIVMVTIMLCCMTSCCSCLKGCCSCGSCCKFDEDDSEPVLKGVKLHYT

SEQ ID NO: 1062 - protein, 1273 aa, Artificial Sequence
  SARS-CoV-2/Australia/NSW56/2020__EPI_ISL_417408 spike protein (1-1273)(F970C_G999C)
MFVFLVLLPLVSSQCVNLTTRTQLPPAYTNSFTRGVYYPDKVFRSSVLHSTQDLFLPFFSNVTWFHAIHVSGTNGTKRFDNPVLPFNDGVYFASTEKSNIIRGWIFGTTLDSKTQSLLIVNNATNVVIKVCEFQFCNDPFLGVYYHKNNKSWMESEFRVYSSANNCTFEYVSQPFLMDLEGKQGNFKNLREFVFKNIDGYFKIYSKHTPINLVRDLPQGFSALEPLVDLPIGINITRFQTLLALHRSYLTPGDSSSGWTAGAAAYYVGYLQPRTFLLKYNENGTITDAVDCALDPLSETKCTLKSFTVEKGIYQTSNFRVQPTESIVRFPNITNLCPFGEVFNATRFASVYAWNRKRISNCVADYSVLYNSASFSTFKCYGVSPTKLNDLCFTNVYADSFVIRGDEVRQIAPGQTGKIADYNYKLPDDFTGCVIAWNSNNLDSKVGGNYNYLYRLFRKSNLKPFERDISTEIYQAGSTPCNGVEGFNCYFPLQSYGFQPTNGVGYQPYRVVVLSFELLHAPATVCGPKKSTNLVKNKCVNFNFNGLTGTGVLTESNKKFLPFQQFGRDIADTTDAVRDPQTLEILDITPCSFGGVSVITPGTNTSNQVAVLYQDVNCTEVPVAIHADQLTPTWRVYSTGSNVFQTRAGCLIGAEHVNNSYECDIPIGAGICASYQTQTNSPRRARSVASQSIIAYTMSLGAENSVAYSNNSIAIPTNFTISVTTEILPVSMTKTSVDCTMYICGDSTECSNLLLQYGSFCTQLNRALTGIAVEQDKNTQEVFAQVKQIYKTPPIKDFGGFNFSQILPDSSKPSKRSFIEDLLFNKVTLADAGFIKQYGDCLGDIAARDLICAQKFNGLTVLPPLLTDEMIAQYTSALLAGTITSGWTFGAGAALQIPFAMQMAYRFNGIGVTQNVLYENQKLIANQFNSAIGKIQDSLSSTASALGKLQDVVNQNAQALNTLVKQLSSNCGAISSVLNDILSRLDKVEAEVQIDRLITCRLQSLQTYVTQQLIRAAEIRASANLAATKMSECVLGQSKRVDFCGKGYHLMSFPQSAPHGVVFLHVTYVPAQEKNFTTAPAICHDGKAHFPREGVFVSNGTHWFVTQRNFYEPQIITTDNTFVSGNCDVVIGIVNNTVYDPLQPELDSFKEELDKYFKNHTSPDVDLGDISGINASVVNIQKEIDRLNEVAKNLNESLIDLQELGKYEQYIKWPWYIWLGFIAGLIAIVMVTIMLCCMTSCCSCLKGCCSCGSCCKFDEDDSEPVLKGVKLHYT

SEQ ID NO: 1063 - protein, 1273 aa, Artificial Sequence
  SARS-CoV-2/Iceland/280/2020__EPI_ISL_417608 spike protein (1-1273)(F970C_G999C)
MFVFLVLLPLVSSQCVNLTTRTQLPPAYTNSFTRGVYYPDKVFRSSVLHSTQDLFLPFFSNVTWFHAIHVSGTNGTKRFDNPVLPFNDGVYFASTEKSNIIRGWIFGTTLDSKTQSLLIVNNATNVVIKVCEFQFCNDPFLGVYYHKNNKSWMESEFRVYSSANNCTFEYVSQPFLMDLEGKQGNFKNLREFVFKNIDGYFKIYSKHTPINLVRDLPQGFSALEPLVDLPIGINITRFQTLLALHRSYLTPGDSSSGWTAGAAAYYVGYLQPRTFLLKYNENGTITDAVDCALDPLSETKCTLKSFTVEKGIYQTSNFRVQPTESIVRFPNITNLCPFGEVFNATRFASVYAWNRKRISNCVADYSVLYNSASFSTFKCYGVSPTKLNDLCFTNVYADSFVIRGDEVRQIAPGQTGKIADYNYKLPDDFTGCVIAWNSNNLDSKVGGNYNYLYRLFRKSNLKPFERDISTEIYQAGSTPCNGVEGFNCYFPLQSYGFQPTNGVGYQPYRVVVLSFELLHAPATVCGPKKSTNLVKNKCVNFNFNGLTGTGVLTESNKKFLPFQQFGRDIADTTDAVRDPQTLEILDITPCSFGGVSVITPGTNTSNQVAVLYQGVNCTEVPVAIHADQLTPTWRVYSTGSNVFQTRAGCLIGAEHVNNSYECDIPIGAGICASYHTQTNSPRRARSVASQSIIAYTMSLGAENSVAYSNNSIAIPTNFTISVTTEILPVSMTKTSVDCTMYICGDSTECSNLLLQYGSFCTQLNRALTGIAVEQDKNTQEVFAQVKQIYKTPPIKDFGGFNFSQILPDPSKPSKRSFIEDLLFNKVTLADAGFIKQYGDCLGDIAARDLICAQKFNGLTVLPPLLTDEMIAQYTSALLAGTITSGWTFGAGAALQIPFAMQMAYRFNGIGVTQNVLYENQKLIANQFNSAIGKIQDSLSSTASALGKLQDVVNQNAQALNTLVKQLSSNCGAISSVLNDILSRLDKVEAEVQIDRLITCRLQSLQTYVTQQLIRAAEIRASANLAATKMSECVLGQSKRVDFCGKGYHLMSFPQSAPHGVVFLHVTYVPAQEKNFTTAPAICHDGKAHFPREGVFVSNGTHWFVTQRNFYEPQIITTDNTFVSGNCDVVIGIVNNTVYDPLQPELDSFKEELDKYFKNHTSPDVDLGDISGINASVVNIQKEIDRLNEVAKNLNESLIDLQELGKYEQYIKWPWYIWLGFIAGLIAIVMVTIMLCCMTSCCSCLKGCCSCGSCCKFDEDDSEPVLKGVKLHYT

SEQ ID NO: 1064 - protein, 1273 aa, Artificial Sequence
  SARS-CoV-2/Iceland/247/2020__EPI_ISL_417575 spike protein (1-1273)(F970C_G999C)
MFVFLVLLPLVSSQCVNLTTRTQLPPAYTNSFTRGVYYPDKVFRSSVLHSTQDLFLPFFSNVTWFHAIHVSGTNGTKRFDNPVLPFNDGVYFASTEKSNIIRGWIFGTTLDSKTQSLLIVNNATNVVIKVCEFQFCNDPFLGVYYHKNNKSWMESEFRVYSSANNCTFEYVSQPFLMDLEGKQGNFKNLREFVFKNIDGYFKIYSKHTPINLVRDLPQGFSALEPLVDLPIGINITRFQTLLALHRSYLTPGDSSSGWTAGAAAYYVGYLQPRTFLLKYNENGTITDAVDCALDPLSETKCTLKSFTVEKGIYQTSNFRVQPTESIVRFPNITNLCPFGEVFNATRFASVYAWNRKRISNCVADYSVLYNSASFSTFKCYGVSPTKLNDLCFTNVYADSFVIRGDEVRQIAPGQTGKIADYNYKLPDDFTGCVIAWNSNNLDSKVGGNYNYLYRLFRKSNLKPFERDISTEIYQAGSTPCNGVEGFNCYFPLQSYGFQPTNGVGYQPYRVVVLSFELLHAPATVCGPKKSTNLVKNKCVNFNFNGLTGTGVLTESNKKFLPFQQFGRDIADTTDAVRDPQTLEILDITPCSFGGVSVITPGTNTSNQVAVLYQGVNCTEVPVAIHADQLTPTWRVYSTGSNVFQTRAGCLIGAEHVNNSYECDIPIGAGICASYQTQTNSPRRARSVASQSIIAYTMSLGAENSVAYSNNSIAIPTNFTISVTTEILPVSMTKTSVDCTMYICGDSTECSNLLLQYGSFCTQLNRALTGIAVEQDKNTQEVFAQVKQIYKTPPIKDFGGFNFSQILPDPSKPSKRSFIEDLLFNKVTLADAGFIKQYGDCLGDIAARDLICAQKFNGLTVLPPLLTDEMIAQYTSALLAGTITSGWTFGAGAALQIPFAMQMAYRFNGIGVTQNVLYENQKLIANQFNSAIGKIQDSLSSTASALGKLQDVVNQNAQALNTLVKQLSSNCGAISSVLNDILSRLDKVEAEVQIDRLITCRLQSLQTYVTQQLIRAAEIRASANLAATKMSECVLGQSKRVDFCGKGYHLMSFPQSAPHGVVFLHVTYVPAQEKNFTTAPAICHDGKAHFPREGVFVSNGTHWFVTQRNFYEPQIITTDNTFVSGNCDVVIGIVNNTVYDPLQPELDSFKEELDKYFKNHTSPDVDLGDISGINASVVNIQKEIDRLNEVAKNLNESLIDLQELGKYEQYIKWPWYIWLGFIAGLIAIVIVTIMLCCMTSCCSCLKGCCSCGSCCKFDEDDSEPVLKGVKLHYT

SEQ ID NO: 1065 - protein, 1273 aa, Artificial Sequence
  SARS-CoV-2/Iceland/238/2020__EPI_ISL_417566 spike protein (1-1273)(F970C_G999C)
MFVFLVLLPLVSSQCVNLTTRTQLPPAYTNSFTRGVYYPDKVFRSSVLHSTQDLFLPFFSNVTWFHAIHVSGTNGTKRFDNPVLPFNDGVYFASTEKSNIIRGWIFGTTLDSKTQSLLIVNNATNVVIKVCEFQFCNDPFLGVYYHKNNKSWMESEFRVYSSANNCTFEYVSQPFLMDLEGKQGNFKNLREFVFKNIDGYFKIYSKHTPINLVRDLPQGFSALEPLVDLPIGINITRFQTLLALHRSYLTPGDSSSGWTAGAAAYYVGYLQPRTFLLKYNENGTITDAVDCALDPLSETKCTLKSFTVEKGIYQTSNFRVQPTESIVRFPNITNLCPFGEVFNATRFASVYAWNRKRISNCVADYSVLYNSASFSTFKCYGVSPTKLNDLCFTNVYADSFVIRGDEVRQIAPGQTGKIADYNYKLPDDFTGCVIAWNSNNLDSKVGGNYNYLYRLFRKSNLKPFERDISTEIYQAGSTPCNGVEGFNCYFPLQSYGFQPTNGVGYQPYRVVVLSFELLHAPATVCGPKKSTNLVKNKCVNFNFNGLTGTGVLTESNKKFLPFQQFGRDIADTTDAVRDPQTLEILDITPCSFGGVSVITPGTNTSNQVAVLYQGVNCTEVPVAIHADQLTPTWRVYSTGSNVFQTRAGCLIGAEHVNNSYECDIPIGAGICASYQTQTNSPRRARSVASQSIIAYTMSLGAENSVAYSNNSIAIPTNFTISVTTEILPVSMTKTSVDCTMYICGDSTECSNLLLQYGSFCTQLNRALTGIAVEQDKNTQEVFAQVKQIYKTPPIKDFGGFNFSQILPDPSKPSKRSFIEDLLFNKVTLADVGFIKQYGDCLGDIAARDLICAQKFNGLTVLPPLLTDEMIAQYTSALLAGTITSGWTFGAGAALQIPFAMQMAYRFNGIGVTQNVLYENQKLIANQFNSAIGKIQDSLSSTASALGKLQDVVNQNAQALNTLVKQLSSNCGAISSVLNDILSRLDKVEAEVQIDRLITCRLQSLQTYVTQQLIRAAEIRASANLAATKMSECVLGQSKRVDFCGKGYHLMSFPQSAPHGVVFLHVTYVPAQEKNFTTAPAICHDGKAHFPREGVFVSNGTHWFVTQRNFYEPQIITTDNTFVSGNCDVVIGIVNNTVYDPLQPELDSFKEELDKYFKNHTSPDVDLGDISGINASVVNIQKEIDRLNEVAKNLNESLIDLQELGKYEQYIKWPWYIWLGFIAGLIAIVMVTIMLCCMTSCCSCLKGCCSCGSCCKFDEDDSEPVLKGVKLHYT

SEQ ID NO: 1066 - protein, 1273 aa, Artificial Sequence
  SARS-CoV-2/Greece/16/2020__EPI_ISL_418265 spike protein (1-1273)(F970C_G999C)
MFVFLVLLPLVSSQCVNLTTRTQLPPAYTNSFTRGVYYPDKVFRSSVLHSTQDLFLPFFSNVTWFHAIHVSGTNGTKRFDNPVLPFNDGVYFASTEKSNIIRGWIFGTTLDSKTQSLLIVNNATNVVIKVCEFQFCNDPFLGVYYHKNNKSWMESEFRVYSSANNCTFEYVSQPFLMDLEGKQGNFKNLREFVFKNVDGYFKIYSKHTPINLVRDLPQGFSALEPLVDLPIGINITRFQTLLALHRSYLTPGDSSSGWTAGAAAYYVGYLQPRTFLLKYNENGTITDAVDCALDPLSETKCTLKSFTVEKGIYQTSNFRVQPTESIVRFPNITNLCPFGEVFNATRFASVYAWNRKRISNCVADYSVLYNSASFSTFKCYGVSPTKLNDLCFTNVYADSFVIRGDEVRQIAPGQTGKIADYNYKLPDDFTGCVIAWNSNNLDSKVGGNYNYLYRLFRKSNLKPFERDISTEIYQAGSTPCNGVEGFNCYFPLQSYGFQPTNGVGYQPYRVVVLSFELLHAPATVCGPKKSTNLVKNKCVNFNFNGLTGTGVLTESNKKFLPFQQFGRDIADTTDAVRDPQTLEILDITPCSFGGVSVITPGTNTSNQVAVLYQDVNCTEVPVAIHADQLTPTWRVYSTGSNVFQTRAGCLIGAEHVNNSYECDIPIGAGICASYQTQTNSPRRARSVASQSIIAYTMSLGAENSVAYSNNSIAIPTNFTISVTTEILPVSMTKTSVDCTMYICGDSTECSNLLLQYGSFCTQLNRALTGIAVEQDKNTQEVFAQVKQIYKTPPIKDFGGFNFSQILPDPSKPSKRSFIEDLLFNKVTLADAGFIKQYGDCLGDIAARDLICAQKFNGLTVLPPLLTDEMIAQYTSALLAGTITSGWTFGAGAALQIPFAMQMAYRFNGIGVTQNVLYENQKLIANQFNSAIGKIQDSLSSTASALGKLQDVVNQNAQALNTLVKQLSSNCGAISSVLNDILSRLDKVEAEVQIDRLITCRLQSLQTYVTQQLIRAAEIRASANLAATKMSECVLGQSKRVDFCGKGYHLMSFPQSAPHGVVFLHVTYVPAQEKNFTTAPAICHDGKAHFPREGVFVSNGTHWFVTQRNFYEPQIITTDNTFVSGNCDVVIGIVNNTVYDPLQPELDSFKEELDKYFKNHTSPDVDLGDISGINASVVNIQKEIDRLNEVAKNLNESLIDLQELGKYEQYIKWPWYIWLGFIAGLIAIVMVTIMLCCMTSCCSCLKGCCSCGSCCKFDEDDSEPVLKGVKLHYT

SEQ ID NO: 1067 - protein, 1273 aa, Artificial Sequence
  SARS-CoV-2/Iceland/319/2020__EPI_ISL_417648 spike protein (1-1273)(F970C_G999C)
MFVFLVLLPLVSSQCVNLTTRTQLPPAYTNSFTRGVYYPDKVFRSSVLHSTQDLFLPFFSNVTWFHAIHVSGTNGTKRFDNPVLPFNDGVYFASTEKSNIIRGWIFGTTLDSKTQSLLIVNNATNVVIKVCEFQFCNDPFLGVYYHKNNKSWMESEFRVYSSANNCTFEYVSQPFLIDLEGKQGNFKNLREFVFKNIDGYFKIYSKHTPINLVRDLPQGFSALEPLVDLPIGINITRFQTLLALHRSYLTPGDSSSGWTAGAAAYYVGYLQPRTFLLKYNENGTITDAVDCALDPLSETKCTLKSFTVEKGIYQTSNFRVQPTESIVRFPNITNLCPFGEVFNATRFASVYAWNRKRISNCVADYSVLYNSASFSTFKCYGVSPTKLNDLCFTNVYADSFVIRGDEVRQIAPGQTGKIADYNYKLPDDFTGCVIAWNSNNLDSKVGGNYNYLYRLFRKSNLKPFERDISTEIYQAGSTPCNGVEGFNCYFPLQSYGFQPTNGVGYQPYRVVVLSFELLHAPATVCGPKKSTNLVKNKCVNFNFNGLTGTGVLTESNKKFLPFQQFGRDIADTTDAVRDPQTLEILDITPCSFGGVSVITPGTNTSNQVAVLYQGVNCTEVPVAIHADQLTPTWRVYSTGSNVFQTRAGCLIGAEHVNNSYECDIPIGAGICASYQTQTNSPRRARSVASQSIIAYTMSLGAENSVAYSNNSIAIPTNFTISVTTEILPVSMTKTSVDCTMYICGDSTECSNLLLQYGSFCTQLNRALTGIAVEQDKNTQEVFAQVKQIYKTPPIKDFGGFNFSQILPDPSKPSKRSFIEDLLFNKVTLADAGFIKQYGDCLGDIAARDLICAQKFNGLTVLPPLLTDEMIAQYTSALLAGTITSGWTFGAGAALQIPFAMQMAYRFNGIGVTQNVLYENQKLIANQFNSAIGKIQDSLSSTASALGKLQDVVNQNAQALNTLVKQLSSNCGAISSVLNDILSRLDKVEAEVQIDRLITCRLQSLQTYVTQQLIRAAEIRASANLAATKMSECVLGQSKRVDFCGKGYHLMSFPQSAPHGVVFLHVTYVPAQEKNFTTAPAICHDGKAHFPREGVFVSNGTHWFVTQRNFYEPQIITTDNTFVSGNCDVVIGIVNNTVYDPLQPELDSFKEELDKYFKNHTSPDVDLGDISGINASVVNIQKEIDRLNEVAKNLNESLIDLQELGKYEQYIKWPWYIWLGFIAGLIAIVMVTIMLCCMTSCCSCLKGCCSCGSCCKFDEDDSEPVLKGVKLHYT

SEQ ID NO: 1068 - protein, 1273 aa, Artificial Sequence
  SARS-CoV-2/Congo/94/2020__EPI_ISL_417947 spike protein (1-1273)(F970C_G999C)
MFVFLVLLPLVSSQCVNLTTRTQLPPAYTNSFTRGVYYPDKVFRSSVLHSTQDLFLPFFSNVTWFHAIHVSGTNGTKRFDNPVLPFNDGVYFASTEKSNIIRGWIFGTTLDSKTQSLLIVNNATNVVIKVCEFQFCNDPFLGVYYHKNNKSWMESEFRVYSSANNCTFEYVSQPFLMDLEGKQGNFKNLREFVFKNIDGYFKIYSKHTPINLVRDLPQGFSALEPLVDLPIGINITRFQTLLALHRSYLTPGDSSSGWTAGAAAYYVGYLQPRTFLLKYNENGTITDAVDCALDPLSETKCTLKSFTVEKGIYQTSNFRVQPTESIVRFPNITNLCPFGEVFNATRFASVYAWNRKRISNCVADYSVLYNSASFSTFKCYGVSPTKLNDLCFTNVYADSFVIRGDEVRQIAPGQTGKIADYNYKLPDDFTGCVIAWNSNNLDSKVGGNYNYLYRLFRKSNLKPFERDISTEIYQAGSTPCNGVEGFNCYFPLQSYGFQPTNGVGYQPYRVVVLSFELLHAPATVCGPKKSTNLVKNKCVNFNFNGLTGTGVLTESNKKFLPFQQFGRDIADTTDAVRDPQTLEILDITPCSFGGVSVITPGTNTSNQVAVLYQGVNCTEVPVAIHADQLTPTWRVYSTGSNVFQTRAGCLIGAEHVNNSYECDIPIGAGICASYQTQTNSPRRARSVASQSIIAYTMSLGAENSVAYSNNSIAIPTNFTISVTTEILPVSMTKTSVDCTMYICGDSTECSNLLLQYGSFCTQLNRALTGIAVEQDKNTQEVFAQVKQIYKTPPIKDFGGFNFSQILPDPSKPSKRSFIEDILFNKVTLADAGFIKQYGDCLGDIAARDLICAQKFNGLTVLPPLLTDEMIAQYTSALLAGTITSGWTFGAGAALQIPFAMQMAYRFNGIGVTQNVLYENQKLIANQFNSAIGKIQDSLSSTASALGKLQDVVNQNAQALNTLVKQLSSNCGAISSVLNDILSRLDKVEAEVQIDRLITCRLQSLQTYVTQQLIRAAEIRASANLAATKMSECVLGQSKRVDFCGKGYHLMSFPQSAPHGVVFLHVTYVPAQEKNFTTAPAICHDGKAHFPREGVFVSNGTHWFVTQRNFYEPQIITTDNTFVSGNCDVVIGIVNNTVYDPLQPELDSFKEELDKYFKNHTSPDVDLGDISGINASVVNIQKEIDRLNEVAKNLNESLIDLQELGKYEQYIKWPWYIWLGFIAGLIAIVMVTIMLCCMTSCCSCLKGCCSCGSCCKFDEDDSEPVLKGVKLHYT

SEQ ID NO: 1069 - protein, 1273 aa, Artificial Sequence
  SARS-CoV-2/Congo/158/2020__EPI_ISL_417950 spike protein (1-1273)(F970C_G999C)
MFVFLVLLPLVSSQCVNLTTRTQLPPAYTNSFTRGVYYPDKVFRSSVLHSTQDLFLPFFSNVTWFHAIHVSGTNGTKRFDNPVLPFNDGVYFASTEKSNIIRGWIFGTTLDSKTQSLLIVNNATNVVIKVCEFQFCNDPFLGVYYHKNNKSWMESEFRVYSSANNCTFEYVSQPFLMDLEGKQGNFKNLREFVFKNIDGYFKIYSKHTPINLVRDLPQGFSALEPLVDLPIGINITRFQTLLALHRSYLTPGDSSSGWTAGAAAYYVGYLQPRTFLLKYNENGTITDAVDCALDPLSETKCTLKSFTVEKGIYQTSNFRVQPTESIVRFPNITNLCPFGEVFNATRFASVYAWNRKRISNCVADYSVLYNSASFSTFKCYGVSPTKLNDLCFTNVYADSFVIRGDEVRQIAPGQTGKIADYNYKLPDDFTGCVIAWNSNNLDSKVGGNYNYLYRLFRKSNLKPFERDISTEIYQAGSTPCNGVEGFNCYFPLQSYGFQPTNGVGYQPYRVVVLSFELLHAPATVCGPKKSTNLVKNKCVNFNFNGLTGTGVLTESNKKFLPFQQFGRDIADTTDAVRDPQTLEILDITPCSFGGVSVITPGTNTSNQVAVLYQDVNCTEVPVAIHADQLTPTWRVYSTGSNVFQTRAGCLIGAEHVNNSYECDIPIGAGICASYQTQTNSPRRARSVASQSIIAYTMSLGAENSVAYSNNSIAIPTNFTISVTTEILPVSMTKTSVDCTMYICGDSTECSNLLLQYGSFCTQLNRALTGIAVEQDKNTQEVFAQVKQIYKTPPIKDFGGFNFSQILPDPSKPSKRSFIEDLLFNKVTLADAGFIKQYGDCLGDIAARDLICAQKFNGLTVLPPLLTDEMIAQYTSALLAGTITSGWTFGAGAALQIPFAMQMAYRFNGIGVTQNVLYENQKLIANQFNSAIGKIQDSLSSTASALGKLQDVVNQNAQALNTLVKQLSSNCGAISSVLNDILSRLDKVEAEVQIDRLITCRLQSLQTYVTQQLIRAAEIRASANLAATKMSECVLGQSKRVDFCGKGYHLMSFPQSAPHGVVFLHVTYVPAQEKNFTTAPAICHDGKAHFPREGVFVSNGTHWFVTQRNFYEPQIITTDNTFLSGNCDVVIGIVNNTVYDPLQPELDSFKEELDKYFKNHTSPDVDLGDISGINASVVNIQKEIDRLNEVAKNLNESLIDLQELGKYEQYIKWPWYIWLGFIAGLIAIVMVTIMLCCMTSCCSCLKGCCSCGSCCKFDEDDSEPVLKGVKLHYT

SEQ ID NO: 1070 - protein, 1273 aa, Artificial Sequence
  SARS-CoV-2/USA/UT-00034/2020__EPI_ISL_417977 spike protein (1-1273)(F970C_G999C)
MFVFLVLLPLVSSQCVNLTTRTQLPPAYTNSFTRGVYYPDKVFRSSVLHSTQDLFLPFFSNVTWFHAIHVSGTNGTKRFDNPVLPFNDGVYFASTEKSNIIRGWIFGTTLDSKTQSLLIVNNATNVVIKVCEFQFCNDPFLGVYYYKNNKSWMESEFRVYSSANNCTFEYVSQPFLMDLEGKQGNFKNLREFVFKNIDGYFKIYSKHTPINLVRDLPQGFSALEPLVDLPIGINITRFQTLLALHRSYLTPGDSSSGWTAGAAAYYVGYLQPRTFLLKYNENGTITDAVDCALDPLSETKCTLKSFTVEKGIYQTSNFRVQPTESIVRFPNITNLCPFGEVFNATRFASVYAWNRKRISNCVADYSVLYNSASFSTFKCYGVSPTKLNDLCFTNVYADSFVIRGDEVRQIAPGQTGKIADYNYKLPDDFTGCVIAWNSNNLDSKVGGNYNYLYRLFRKSNLKPFERDISTEIYQAGSTPCNGVEGFNCYFPLQSYGFQPTNGVGYQPYRVVVLSFELLHAPATVCGPKKSTNLVKNKCVNFNFNGLTGTGVLTESNKKFLPFQQFGRDIADTTDAVRDPQTLEILDITPCSFGGVSVITPGTNTSNQVAVLYQGVNCTEVPVAIHADQLTPTWRVYSTGSNVFQTRAGCLIGAEHVNNSYECDIPIGAGICASYQTQTNSPRRARSVASQSIIAYTMSLGAENSVAYSNNSIAIPTNFTISVTTEILPVSMTKTSVDCTMYICGDSTECSNLLLQYGSFCTQLNRALTGIAVEQDKNTQEVFAQVKQIYKTPPIKDFGGFNFSQILPDPSKPSKRSFIEDLLFNKVTLADAGFIKQYGDCLGDIAARDLICAQKFNGLTVLPPLLTDEMIAQYTSALLAGTITSGWTFGAGAALQIPFAMQMAYRFNGIGVTQNVLYENQKLIANQFNSAIGKIQDSLSSTASALGKLQDVVNQNAQALNTLVKQLSSNCGAISSVLNDILSRLDKVEAEVQIDRLITCRLQSLQTYVTQQLIRAAEIRASANLAATKMSECVLGQSKRVDFCGKGYHLMSFPQSAPHGVVFLHVTYVPAQEKNFTTAPAICHDGKAHFPREGVFVSNGTHWFVTQRNFYEPQIITTDNTFVSGNCDVVIGIVNNTVYDPLQPELDSFKEELDKYFKNHTSPDVDLGDISGINASVVNIQKEIDRLNEVAKNLNESLIDLQELGKYEQYIKWPWYIWLGFIAGLIAIVMVTIMLCCMTSCCSCLKGCCSCGSCCKFDEDDSEPVLKGVKLHYT

SEQ ID NO: 1071 - protein, 1273 aa, Artificial Sequence
  SARS-CoV-2/USA/UT-00033/2020__EPI_ISL_417976 spike protein (1-1273)(F970C_G999C)
MFVFLVLLPLVSSQCVNLTTRTQLPPAYTNSFTRGVYYPDKVFRSSVLHSTQDLFLPFFSNVTWFHAIHVSGTNGTKRFDNPVLPFNDGVYFASTEKSNIIRGWIFGTTLDSKTQSLLIVNNATNVVIKVCEFQFCNDPFLGVYYHKNNKSWMESEFRVYSSANNCTFEYVSQPFLMDLEGKQGNFKNLREFVFKNIDGYFKIYSKHTPINLVRDLPQGFSALEPLVDLPIGINITRFQTLLALHRSYLTPGDSSSGLTAGAAAYYVGYLQPRTFLLKYNENGTITDAVDCALDPLSETKCTLKSFTVEKGIYQTSNFRVQPTESIVRFPNITNLCPFGEVFNATRFASVYAWNRKRISNCVADYSVLYNSASFSTFKCYGVSPTKLNDLCFTNVYADSFVIRGDEVRQIAPGQTGKIADYNYKLPDDFTGCVIAWNSNNLDSKVGGNYNYLYRLFRKSNLKPFERDISTEIYQAGSTPCNGVEGFNCYFPLQSYGFQPTNGVGYQPYRVVVLSFELLHAPATVCGPKKSTNLVKNKCVNFNFNGLTGTGVLTESNKKFLPFQQFGRDIADTTDAVRDPQTLEILDITPCSFGGVSVITPGTNTSNQVAVLYQGVNCTEVPVAIHADQLTPTWRVYSTGSNVFQTRAGCLIGAEHVNNSYECDIPIGAGICASYQTQTNSPRRARSVASQSIIAYTMSLGAENSVAYSNNSIAIPTNFTISVTTEILPVSMTKTSVDCTMYICGDSTECSNLLLQYGSFCTQLNRALTGIAVEQDKNTQEVFAQVKQIYKTPPIKDFGGFNFSQILPDPSKPSKRSFIEDLLFNKVTLADAGFIKQYGDCLGDIAARDLICAQKFNGLTVLPPLLTDEMIAQYTSALLAGTITSGWTFGAGAALQIPFAMQMAYRFNGIGVTQNVLYENQKLIANQFNSAIGKIQDSLSSTASALGKLQDVVNQNAQALNTLVKQLSSNCGAISSVLNDILSRLDKVEAEVQIDRLITCRLQSLQTYVTQQLIRAAEIRASANLAATKMSECVLGQSKRVDFCGKGYHLMSFPQSAPHGVVFLHVTYVPAQEKNFTTAPAICHDGKAHFPREGVFVSNGTHWFVTQRNFYEPQIITTDNTFVSGNCDVVIGIVNNTVYDPLQPELDSFKEELDKYFKNHTSPDVDLGDISGINASVVNIQKEIDRLNEVAKNLNESLIDLQELGKYEQYIKWPWYIWLGFIAGLIAIVMVTIMLCCMTSCCSCLKGCCSCGSCCKFDEDDSEPVLKGVKLHYT

SEQ ID NO: 1072 - protein, 1273 aa, Artificial Sequence
  SARS-CoV-2/USA/WI-13/2020__EPI_ISL_417516 spike protein (1-1273)(F970C_G999C)
MFVFLVLLPLVSSQCVNLTTRTQLPPAYTNSFTRGVYYPDKVFRSSVLHSTQDLFLPFFSNVTWFHAIHVSGTNGTKRFDNPVLPFNDGVYFASTEKSNIIRGWIFGTTLDSKTQSLLIVNNATNVVIKVCEFQFCNDPFLGVYYHKNNKSWMESEFRVYSSANNCTFEYVSQPFLMDLEGKQGNFKNLREFVFKNIDGYFKIYSKHTPINLVRDLPQGFSALEPLVDLPIGINITRFQTLLALHRSYLTPGDSSSGWTAGAAAYYVGYLQPRTFLLKYNENGTITDAVDCALDPLSETKCTLKSFTVEKGIYQTSNFRVLPTESIVRFPNITNLCPFGEVFNATRFASVYAWNRKRISNCVADYSVLYNSASFSTFKCYGVSPTKLNDLCFTNVYADSFVIRGDEVRQIAPGQTGKIADYNYKLPDDFTGCVIAWNSNNLDSKVGGNYNYLYRLFRKSNLKPFERDISTEIYQAGSTPCNGVEGFNCYFPLQSYGFQPTNGVGYQPYRVVVLSFELLHAPATVCGPKKSTNLVKNKCVNFNFNGLTGTGVLTESNKKFLPFQQFGRDIADTTDAVRDPQTLEILDITPCSFGGVSVITPGTNTSNQVAVLYQGVNCTEVPVAIHADQLTPTWRVYSTGSNVFQTRAGCLIGAEHVNNSYECDIPIGAGICASYQTQTNSPRRARSVASQSIIAYTMSLGAENSVAYSNNSIAIPTNFTISVTTEILPVSMTKTSVDCTMYICGDSTECSNLLLQYGSFCTQLNRALTGIAVEQDKNTQEVFAQVKQIYKTPPIKDFGGFNFSQILPDPSKPSKRSFIEDLLFNKVTLADAGFIKQYGDCLGDIAARDLICAQKFNGLTVLPPLLTDEMIAQYTSALLAGTITSGWTFGAGAALQIPFAMQMAYRFNGIGVTQNVLYENQKLIANQFNSAIGKIQDSLSSTASALGKLQDVVNQNAQALNTLVKQLSSNCGAISSVLNDILSRLDKVEAEVQIDRLITCRLQSLQTYVTQQLIRAAEIRASANLAATKMSECVLGQSKRVDFCGKGYHLMSFPQSAPHGVVFLHVTYVPAQEKNFTTAPAICHDGKAHFPREGVFVSNGTHWFVTQRNFYEPQIITTDNTFVSGNCDVVIGIVNNTVYDPLQPELDSFKEELDKYFKNHTSPDVDLGDISGINASVVNIQKEIDRLNEVAKNLNESLIDLQELGKYEQYIKWPWYIWLGFIAGLIAIVMVTIMLCCMTSCCSCLKGCCSCGSCCKFDEDDSEPVLKGVKLHYT

SEQ ID NO: 1073 - protein, 1272 aa, Artificial Sequence
  SARS-CoV-2/India/1-27/2020__EPI_ISL_413522 spike protein (1-1272)(F969C_G998C)
MFVFLVLLPLVSSQCVNLTTRTQLPPAYTNSFTRGVYYPDKVFRSSVLHSTQDLFLPFFSNVTWFHAIHVSGTNGTKRFDNPVLPFNDGVYFASTEKSNIIRGWIFGTTLDSKTQSLLIVNNATNVVIKVCEFQFCNDPFLGVYHKNNKSWMESEFRVYSSANNCTFEYVSQPFLMDLEGKQGNFKNLREFVFKNIDGYFKIYSKHTPINLVRDLPQGFSALEPLVDLPIGINITRFQTLLALHRSYLTPGDSSSGWTAGAAAYYVGYLQPRTFLLKYNENGTITDAVDCALDPLSETKCTLKSFTVEKGIYQTSNFRVQPTESIVRFPNITNLCPFGEVFNATRFASVYAWNRKRISNCVADYSVLYNSASFSTFKCYGVSPTKLNDLCFTNVYADSFVIRGDEVIQIAPGQTGKIADYNYKLPDDFTGCVIAWNSNNLDSKVGGNYNYLYRLFRKSNLKPFERDISTEIYQAGSTPCNGVEGFNCYFPLQSYGFQPTNGVGYQPYRVVVLSFELLHAPATVCGPKKSTNLVKNKCVNFNFNGLTGTGVLTESNKKFLPFQQFGRDIADTTDAVRDPQTLEILDITPCSFGGVSVITPGTNTSNQVAVLYQDVNCTEVPVAIHADQLTPTWRVYSTGSNVFQTRAGCLIGAEHVNNSYECDIPIGAGICASYQTQTNSPRRARSVASQSIIAYTMSLGAENSVAYSNNSIAIPTNFTISVTTEILPVSMTKTSVDCTMYICGDSTECSNLLLQYGSFCTQLNRALTGIAVEQDKNTQEVFAQVKQIYKTPPIKDFGGFNFSQILPDPSKPSKRSFIEDLLFNKVTLADAGFIKQYGDCLGDIAARDLICAQKFNGLTVLPPLLTDEMIAQYTSALLAGTITSGWTFGAGAALQIPFAMQMAYRFNGIGVTQNVLYENQKLIANQFNSAIGKIQDSLSSTASALGKLQDVVNQNAQALNTLVKQLSSNCGAISSVLNDILSRLDKVEAEVQIDRLITCRLQSLQTYVTQQLIRAAEIRASANLAATKMSECVLGQSKRVDFCGKGYHLMSFPQSAPHGVVFLHVTYVPAQEKNFTTAPAICHDGKAHFPREGVFVSNGTHWFVTQRNFYEPQIITTDNTFVSGNCDVVIGIVNNTVYDPLQPELDSFKEELDKYFKNHTSPDVDLGDISGINASVVNIQKEIDRLNEVAKNLNESLIDLQELGKYEQYIKWPWYIWLGFIAGLIAIVMVTIMLCCMTSCCSCLKGCCSCGSCCKFDEDDSEPVLKGVKLHYT

SEQ ID NO: 1074 - protein, 1267 aa, Artificial Sequence
  SARS-CoV-2/pangolin/Guangxi/P4L/2017__EPI_ISL_410538 spike protein (1-1267)(F964C_G993C)
MFVFLFVLPLVSSQCVNLTTRTGIPPGYTNSSTRGVYYPDKVFRSSILHLTQDLFLPFFSNVTWFNTINYQGGFKKFDNPVLPFNDGVYFASTEKSNIIRGWIFGTTLDARTQSLLIVNNATNVVIKVCEFQFCTDPFLGVYYHNNNKTWVENEFRVYSSANNCTFEYISQPFLMDLEGKQGNFKNLREFVFKNVDGYFKIYSKHTPIDLVRDLPRGFAALEPLVDLPIGINITRFQTLLALHRSYLTPGNLESGWTTGAAAYYVGYLQQRTFLLSYNQNGTITDAVDCSLDPLSETKCTLKSLTVEKGIYQTSNFRVQPTISIVRFPNITNLCPFGEVFNASKFASVYAWNRKRISNCVADYSVLYNSTSFSTFKCYGVSPTKLNDLCFTNVYADSFVVKGDEVRQIAPGQTGVIADYNYKLPDDFTGCVIAWNSVKQDALTGGNYGYLYRLFRKSKLKPFERDISTEIYQAGSTPCNGQVGLNCYYPLERYGFHPTTGVNYQPFRVVVLSFELLNGPATVCGPKLSTTLVKDKCVNFNFNGLTGTGVLTTSKKQFLPFQQFGRDISDTTDAVRDPQTLEILDITPCSFGGVSVITPGTNTSNQVAVLYQDVNCTEVPMAIHAEQLTPAWRVYSAGANVFQTRAGCLVGAEHVNNSYECDIPVGAGICASYHSMSSLRSVNQRSIIAYTMSLGAENSVAYSNNSIAIPTNFTISVTTEILPVSMTKTSVDCTMYICGDSIECSNLLLQYGSFCTQLNRALTGIAVEQDKNTQEVFAQVKQIYKTPPIKDFGGFNFSQILPDPSKPSKRSFIEDLLFNKVTLADAGFIKQYGDCLGDIAARDLICAQKFNGLTVLPPLLTDEMIAQYTSALLAGTITSGWTFGAGAALQIPFAMQMAYRFNGIGVTQNVLYENQKLIANQFNSAIGKIQDSLSSTASALGKLQDVVNQNAQALNTLVKQLSSNCGAISSVLNDILSRLDKVEAEVQIDRLITCRLQSLQTYVTQQLIRAAEIRASANLAATKMSECVLGQSKRVDFCGKGYHLMSFPQSAPHGVVFLHVTYVPAQEKNFTTAPAICHEGKAHFPREGVFVSNGTHWFITQRNFYEPQIITTDNTFVSGSCDVVIGIVNNTVYDPLQPELDSFKEELDKYFKNHTSPDVDLGDISGINASVVNIQKEIDRLNEVAKNLNESPIDLQELGKYEQYIKWPWYIWLGFIAGLIAIIMVTIMLCCMTSCCSCLKGCCSCGSCCKFDEDDSEPVLKGVKLHYT

SEQ ID NO: 1075 - protein, 1267 aa, Artificial Sequence
  SARS-CoV-2/pangolin/Guangxi/P5L/2017__EPI_ISL_410540 spike protein (1-1267)(F964C_G993C)
MFVFLFVLPLVSSQCVNLTTRTGIPPGYTNSSTRGVYYPDKVFRSSILHLTQDLFLPFFSNVTWFNTINYQGGFKKFDNPVLPFNDGVYFASTEKSNIIRGWIFGTTLDARTQSLLIVNNATNVVIKVCEFQFCTDPFLGVYYHNNNKTWVENEFRVYSSANNCTFEYISQPFLMDLEGKQGNFKNLREFVFKNVDGYFKIYSKHTPIDLVRDLPRGFAALEPLVDLPIGINITRFQTLLALHRSYLTPGKLESGWTTGAAAYYVGYLQQRTFLLSYNQNGTITDAVDCSLDPLSETKCTLKSLTVEKGIYQTSNFRVQPTISIVRFPNITNLCPFGEVFNASKFASVYAWNRKRISNCVADYSVLYNSTSFSTFKCYGVSPTKLNDLCFTNVYADSFVVKGDEVRQIAPGQTGVIADYNYKLPDDFTGCVIAWNSVKQDALTGGNYGYLYRLFRKSKLKPFERDISTEIYQAGSTPCNGQVGLNCYYPLERYGFHPTTGVNYQPFRVVVLSFELLNGPATVCGPKLSTTLVKDKCVNFNFNGLTGTGVLTTSKKQFLPFQQFGRDISDTTDAVRDPQTLEILDITPCSFGGVSVITPGTNTSNQVAVLYQDVNCTEVPMAIHAEQLTPAWRVYSAGANVFQTRAGCLVGAEHVNNSYECDIPVGAGICASYHSMSSFRSVNQRSIIAYTMSLGAENSVAYSNNSIAIPTNFTISVTTEILPVSMTKTSVDCTMYICGDSIECSNLLLQYGSFCTQLNRALTGIAVEQDKNTQEVFAQVKQIYKTPPIKDFGGFNFSQILPDPSKPSKRSFIEDLLFNKVTLADAGFIKQYGDCLGDIAARDLICAQKFNGLTVLPPLLTDEMIAQYTSALLAGTITSGWTFGAGAALQIPFAMQMAYRFNGIGVTQNVLYENQKLIANQFNSAIGKIQDSLSSTASALGKLQDVVNQNAQALNTLVKQLSSNCGAISSVLNDILSRLDKVEAEVQIDRLITCRLQSLQTYVTQQLIRAAEIRASANLAATKMSECVLGQSKRVDFCGKGYHLMSFPQSAPHGVVFLHVTYVPAQEKNFTTAPAICHEGKAHFPREGVFVSNGTHWFITQRNFYEPQIITTDNTFVSGSCDVVIGIVNNTVYDPLQPELDSFKEELDKYFKNHTSPDVDLGDISGINASVVNIQKEIDRLNEVAKNLNESLIDLQELGKYEQYIKWPWYIWLGFIAGLIAIIMVTIMLCCMTSCCSCLKGCCSCGSCCKFDEDDSEPVLKGVKLHYT

SEQ ID NO: 1076 - protein, 1267 aa, Artificial Sequence
  SARS-CoV-2/pangolin/Guangxi/P5E/2017__EPI_ISL_410541 spike protein (1-1267)(F964C_G993C)
MFVFLFVLPLVSSQCVNLTTRTGIPPGYTNSSTRGVYYPDKVFRSSILHLTQDLFLPFFSNVTWFNTITYQGGSKKFDNPVLPFNDGVYFASTEKSNIIRGWIFGTTLDARTQSLLIVNNATNVVIKVCEFQFCTDPFLGVYYHNNNKTWVENEFRVYSSANNCTFEYISQPFLMDLEGKQGNFKNLREFVFKNVDGYFKIYSKHTPIDLVRDLPRGFAALEPLVDLPIGINITRFQTLLALHRSYLTPGKLESGWTTGAAAYYVGYLQQRTFLLSYNQNGTITDAVDCSLDPLSETKCTLKSLTVEKGIYQTSNFRVQPTISIVRFPNITNLCPFGEVFNASKFASVYAWNRKRISNCVADYSVLYNSTSFSTFKCYGVSPTKLNDLCFTNVYADSFVVKGDEVRQIAPGQTGVIADYNYKLPDDFTGCVIAWNSVKQDALTGDNYGYLYRLFRKSKLKPFERDISTEIYQAGSTPCNGQVGLNCYYPLERYGFHPTTGVNYQPFRVVVLSFELLNGPATVCGPKLSTTLVKDKCVNFNFNGLTGTGVLTTSKKQFLPFQQFGRDISDTTDAVRDPQTLEILDITPCSFGGVSVITPGTNTSNQVAVLYQDVNCTEVPMAIHAEQLTPAWRVYSAGANVFQTRAGCLVGAEHVNNSYECDIPVGAGICASYHSMSSFRSVNQRSIIAYTMSLGAENSVAYSNNSIAIPTNFTISVTTEILPVSMTKTSVDCTMYICGDSIECSNLLLQYGSFCTQLNRALTGIAVEQDKNTQEVFAQVKQIYKTPPIKDFGGFNFSQILPDPSKPSKRSFIEDLLFNKVTLADAGFIKQYGDCLGDIAARDLICAQKFNGLTVLPPLLTDEMIAQYTSALLAGTITSGWTFGAGAALQIPFAMQMAYRFNGIGVTQNVLYENQKLIANQFNSAIGKIQDSLSSTASALGKLQDVVNQNAQALNTLVKQLSSNCGAISSVLNDILSRLDKVEAEVQIDRLITCRLQSLQTYVTQQLIRAAEIRASANLAATKMSECVLGQSKRVDFCGKGYHLMSFPQSAPHGVVFLHVTYVPAQEKNFTTAPAICHEGKAHFPREGVFVSNGTHWFITQRNFYEPQIITTDNTFVSGSCDVVIGIVNNTVYDPLQPELDSFKEELDKYFKNHTSPDVDLGDISGINASVVNIQKEIDRLNEVAKNLNESLIDLQELGKYEQYIKWPWYIWLGFIAGLIAIIMVTIMLCCMTSCCSCLKGCCSCGSCCKFDEDDSEPVLKGVKLHYT

SEQ ID NO: 1077 - protein, 1265 aa, Artificial Sequence
  SARS-CoV-2/pangolin/Guangxi/P1E/2017__EPI_ISL_410539 spike protein (1-1265)(F962C_G991C)
MFVFLFVLPLVSSQCVNLTTRTGIQPGYTNSSTRGVYYPDKVFRSSILHLTQDLFLPFFSNVTWFNTINYQGGFKKFDNPVLPFNDGVYFASTEKSNIIRGWIFGTTLDARTQSLLIVNNATNVVIKVCEFQFCTDPFLGVYYHNNNKTWVENEFRVYSSANNCTFEYISQPFLMDLEGKQGNFKNLREFVFKNVDGYFKIYSKHTPIDLVRDLPRGFAALEPLVDLPIGINITRFQTLLALHRSYLTPGKLESGWTTGAAAYYVGYLQQRTFLLSYNQNGTITDAVDCSLDPLSETKCTLKSLTVEKGIYQTSNFRVQPTISIVRFPNITNLCPFGEVFNASKFASVYAWNRKRISNCVADYSVLYNSTSFSTFKCYGVSPTKLNDLCFTNVYADSFVVKGDEVRQIAPGQTGVIADYNYKLPDDFTGCVIAWNSVKQDALTGGNYLYRLFRKSKLKPFERDISTEIYQAGSTPCNGQVGLNCYYPLERYGFHPTTGVNYQPFRVVVLSFELLNGPATVCGPKLSTTLVKDKCVNFNFNGLTGTGVLTTSKKQFLPFQQFGRDISDTTDAVRDPQTLEILDITPCSFGGVSVITPGTNTSNQVAVLYQDVNCTEVPMAIHAEQLTPAWRVYSAGANVFQTRAGCLVGAEHVNNSYECDIPVGAGICASYHSMSSLRSVNQRSIIAYTMSLGAENSVAYSNNSIAIPTNFTISVTTEILPVSMTKTSVDCTMYICGDSIECSNLLLQYGSFCTQLNRALTGIAVEQDKNTQEVFAQVKQIYKTPPIKDFGGFNFSQILPDPSKPSKRSFIEDLLFNKVTLADAGFIKQYGDCLGDIAARDLICAQKFNGLTVLPPLLTDEMIAQYTSALLAGTITSGWTFGAGAALQIPFAMQMAYRFNGIGVTQNVLYENQKLIANQFNSAIGKIQDSLSSTASALGKLQDVVNQNAQALNTLVKQLSSNCGAISSVLNDILSRLDKVEAEVQIDRLITCRLQSLQTYVTQQLIRAAEIRASANLAATKMSECVLGQSKRVDFCGKGYHLMSFPQSAPHGVVFLHVTYVPAQEKNFTTAPAICHEGKAHFPREGVFVSNGTHWFITQRNFYEPQIITTDNTFVSGSCDVVIGIVNNTVYDPLQPELDSFKEELDKYFKNHTSPDVDLGDISGINASVVNIQKEIDRLNEVAKNLNESLIDLQELGKYEQYIKWPWYIWLGFIAGLIAIIMVTIMLCCMTSCCSCLKGCCSCGSCCKFDEDDSEPVLKGVKLHYT

SEQ ID NO: 1078 - protein, 1273 aa, Artificial Sequence; identical to SEQ ID NO: 26
  SARS-CoV-2/Wuhan/WIV05/2019__EPI_ISL_402128 spike protein (1-1273)(A972C_R995C)

SEQ ID NO: 1079 - protein, 1269 aa, Artificial Sequence
  SARS-CoV-2/bat/Yunnan/RaTG13/2013__EPI_ISL_402131 spike protein (1-1269)(A968C_R991C)
MFVFLVLLPLVSSQCVNLTTRTQLPPAYTNSSTRGVYYPDKVFRSSVLHLTQDLFLPFFSNVTWFHAIHVSGTNGIKRFDNPVLPFNDGVYFASTEKSNIIRGWIFGTTLDSKTQSLLIVNNATNVVIKVCEFQFCNDPFLGVYYHKNNKSWMESEFRVYSSANNCTFEYVSQPFLMDLEGKQGNFKNLREFVFKNIDGYFKIYSKHTPINLVRDLPPGFSALEPLVDLPIGINITRFQTLLALHRSYLTPGDSSSGWTAGAAAYYVGYLQPRTFLLKYNENGTITDAVDCALDPLSETKCTLKSFTVEKGIYQTSNFRVQPTDSIVRFPNITNLCPFGEVFNATTFASVYAWNRKRISNCVADYSVLYNSTSFSTFKCYGVSPTKLNDLCFTNVYADSFVITGDEVRQIAPGQTGKIADYNYKLPDDFTGCVIAWNSKHIDAKEGGNFNYLYRLFRKANLKPFERDISTEIYQAGSKPCNGQTGLNCYYPLYRYGFYPTDGVGHQPYRVVVLSFELLNAPATVCGPKKSTNLVKNKCVNFNFNGLTGTGVLTESNKKFLPFQQFGRDIADTTDAVRDPQTLEILDITPCSFGGVSVITPGTNASNQVAVLYQDVNCTEVPVAIHADQLTPTWRVYSTGSNVFQTRAGCLIGAEHVNNSYECDIPIGAGICASYQTQTNSRSVASQSIIAYTMSLGAENSVAYSNNSIAIPTNFTISVTTEILPVSMTKTSVDCTMYICGDSTECSNLLLQYGSFCTQLNRALTGIAVEQDKNTQEVFAQVKQIYKTPPIKDFGGFNFSQILPDPSKPSKRSFIEDLLFNKVTLADAGFIKQYGDCLGDIAARDLICAQKFNGLTVLPPLLTDEMIAQYTSALLAGTITSGWTFGAGAALQIPFAMQMAYRFNGIGVTQNVLYENQKLIANQFNSAIGKIQDSLSSTASALGKLQDVVNQNAQALNTLVKQLSSNFGCISSVLNDILSRLDKVEAEVQIDCLITGRLQSLQTYVTQQLIRAAEIRASANLAATKMSECVLGQSKRVDFCGKGYHLMSFPQSAPHGVVFLHVTYVPAQEKNFTTAPAICHDGKAHFPREGVFVSNGTHWFVTQRNFYEPQIITTDNTFVSGSCDVVIGIVNNTVYDPLQPELDSFKEELDKYFKNHTSPDVDLGDISGINASVVNIQKEIDRLNEVAKNLNESLIDLQELGKYEQYIKWPWYIWLGFIAGLIAIIMVTIMLCCMTSCCSCLKGCCSCGSCCKFDEDDSEPVLKGVKLHYT

SEQ ID NO: 1080 - protein, 1273 aa, Artificial Sequence
  SARS-CoV-2/Wuhan/HBCDC-HB-01/2019__EPI_ISL_402132 spike protein (1-1273)(A972C_R995C)
MFVFLVLLPLVSSQCVNLTTRTQLPPAYTNSITRGVYYPDKVFRSSVLHSTQDLFLPFFSNVTWFHAIHVSGTNGTKRFDNPVLPFNDGVYFASTEKSNIIRGWIFGTTLDSKTQSLLIVNNATNVVIKVCEFQFCNDPFLGVYYHKNNKSWMESEFRVYSSANNCTFEYVSQPFLMDLEGKQGNFKNLREFVFKNIDGYFKIYSKHTPINLVRDLPQGFSALEPLVDLPIGINITRFQTLLALHRSYLTPGDSSSGWTAGAAAYYVGYLQPRTFLLKYNENGTITDAVDCALDPLSETKCTLKSFTVEKGIYQTSNFRVQPTESIVRFPNITNLCPFGEVFNATRFASVYAWNRKRISNCVADYSVLYNSASFSTFKCYGVSPTKLNDLCFTNVYADSFVIRGDEVRQIAPGQTGKIADYNYKLPDDFTGCVIAWNSNNLDSKVGGNYNYLYRLFRKSNLKPFERDISTEIYQAGSTPCNGVEGFNCYFPLQSYGFQPTNGVGYQPYRVVVLSFELLHAPATVCGPKKSTNLVKNKCVNFNFNGLTGTGVLTESNKKFLPFQQFGRDIADTTDAVRDPQTLEILDITPCSFGGVSVITPGTNTSNQVAVLYQDVNCTEVPVAIHADQLTPTWRVYSTGSNVFQTRAGCLIGAEHVNNSYECDIPIGAGICASYQTQTNSPRRARSVASQSIIAYTMSLGAENSVAYSNNSIAIPTNFTISVTTEILPVSMTKTSVDCTMYICGDSTECSNLLLQYGSFCTQLNRALTGIAVEQDKNTQEVFAQVKQIYKTPPIKDFGGFNFSQILPDPSKPSKRSFIEDLLFNKVTLADAGFIKQYGDCLGDIAARDLICAQKFNGLTVLPPLLTDEMIAQYTSALLAGTITSGWTFGAGAALQIPFAMQMAYRFNGIGVTQNVLYENQKLIANQFNSAIGKIQDSLSSTASALGKLQDVVNQNAQALNTLVKQLSSNFGCISSVLNDILSRLDKVEAEVQIDCLITGRLQSLQTYVTQQLIRAAEIRASANLAATKMSECVLGQSKRVDFCGKGYHLMSFPQSAPHGVVFLHVTYVPAQEKNFTTAPAICHDGKAHFPREGVFVSNGTHWFVTQRNFYEPQIITTDNTFVSGNCDVVIGIVNNTVYDPLQPELDSFKEELDKYFKNHTSPDVDLGDISGINASVVNIQKEIDRLNEVAKNLNESLIDLQELGKYEQYIKWPWYIWLGFIAGLIAIVMVTIMLCCMTSCCSCLKGCCSCGSCCKFDEDDSEPVLKGVKLHYT

SEQ ID NO: 1081 - protein, 1273 aa, Artificial Sequence
  SARS-CoV-2/Guangdong/20SF028/2020__EPI_ISL_403936 spike protein (1-1273)(A972C_R995C)
MFVFLVLLPLVSSQCVNLTTRTQLPPAYTNSFTRGVYYPDKVFRSSVLYSTQDLFLPFFSNVTWFHAIHVSGTNGTKRFDNPVLPFNDGVYFASTEKSNIIRGWIFGTTLDSKTQSLLIVNNATNVVIKVCEFQFCNDPFLGVYYHKNNKSWMESEFRVYSSANNCTFEYVSQPFLMDLEGKQGNFKNLREFVFKNIDGYFKIYSKHTPINLVRDLPQGFSALEPLVDLPIGINITRFQTLLALHRSYLTPGDSSSGWTAGAAAYYVGYLQPRTFLLKYNENGTITDAVDCALDPLSETKCTLKSFTVEKGIYQTSNFRVQPTESIVRFPNITNLCPFGEVFNATRFASVYAWNRKRISNCVADYSVLYNSASFSTFKCYGVSPTKLNDLCFTNVYADSFVIRGDEVRQIAPGQTGKIADYNYKLPDDFTGCVIAWNSNNLDSKVGGNYNYLYRLFRKSNLKPFERDISTEIYQAGSTPCNGVEGFNCYFPLQSYGFQPTNGVGYQPYRVVVLSFELLHAPATVCGPKKSTNLVKNKCVNFNFNGLTGTGVLTESNKKFLPFQQFGRDIADTTDAVRDPQTLEILDITPCSFGGVSVITPGTNTSNQVAVLYQDVNCTEVPVAIHADQLTPTWRVYSTGSNVFQTRAGCLIGAEHVNNSYECDIPIGAGICASYQTQTNSPRRARSVASQSIIAYTMSLGAENSVAYSNNSIAIPTNFTISVTTEILPVSMTKTSVDCTMYICGDSTECSNLLLQYGSFCTQLNRALTGIAVEQDKNTQEVFAQVKQIYKTPPIKDFGGFNFSQILPDPSKPSKRSFIEDLLFNKVTLADAGFIKQYGDCLGDIAARDLICAQKFNGLTVLPPLLTDEMIAQYTSALLAGTITSGWTFGAGAALQIPFAMQMAYRFNGIGVTQNVLYENQKLIANQFNSAIGKIQDSLSSTASALGKLQDVVNQNAQALNTLVKQLSSNFGCISSVLNDILSRLDKVEAEVQIDCLITGRLQSLQTYVTQQLIRAAEIRASANLAATKMSECVLGQSKRVDFCGKGYHLMSFPQSAPHGVVFLHVTYVPAQEKNFTTAPAICHDGKAHFPREGVFVSNGTHWFVTQRNFYEPQIITTDNTFVSGNCDVVIGIVNNTVYDPLQPELDSFKEELDKYFKNHTSPDVDLGDISGINASVVNIQKEIDRLNEVAKNLNESLIDLQELGKYEQYIKWPWYIWLGFIAGLIAIVMVTIMLCCMTSCCSCLKGCCSCGSCCKFDEDDSEPVLKGVKLHYT

SEQ ID NO: 1082 - protein, 1273 aa, Artificial Sequence
  SARS-CoV-2/Shenzhen/SZTH-001/2020__EPI_ISL_406592 spike protein (1-1273)(A972C_R995C)
MFVFLVLLPLVSSQCVNLTTRTQLPPAYTNSFTRGVYYPDKVFRSSVLHSTQDLFLPFFSNVTWFHAIHVSGTNGTKRFDNPVLPFNDGVYFASTEKSNIIRGWIFGTTLDSKTQSLLIVNNATNVVIKVCEFQFCNDPFLGVYYHKNNKSWMESEFRVYSSANNCTFEYVSQPFLMDLEGKQGNFKNLREFVFKNIDGYFKIYSKHTPINLVRDLPQGFSALEPLVDLPIGINITRFQTLLALHRSYLTPGDSSSGWTAGAAAYYVGYLQPRTFLLKYNENGTITDAVDCALDPLSETKCTLKSFTVEKGIYQTSNFRVQPTESIVRFPNITNLCPFGEVFNATRFASVYAWNRKRISNCVADYSVLYNSASFSTFKCYGVSPTKLNDLCFTNVYADSFVIRGDEVRQIAPGQTGKIADYNYKLPDDFTGCVIAWNSNNLDSKVGGNYNYLYRLFRKSNLKPFERDISTEIYQAGSTPCNGVEGFNCYFPLQSYGFQPTNGVGYQPYRVVVLSFELLHAPATVCGPKKSTNLVKNKCVNFNFNGLTGTGVLTESNKKFLPFQQFGRDIADTTDAVRDPQTLEILDITPCSFGGVSVITPGTNTSNQVAVLYQDVNCTEVPVAIHADQLTPTWRVYSTGSNVFQTRAGCLIGAEHVNNSYECDIPIGAGICASYQTQTNSPRRARSVASQSIIAYTMSLGAENSVAYSNNSIAIPTNFTISVTTEILPVSMTKTSVDCTMYICGDSTECSNLLLQYGSFCTQLNRALTGIAVEQDKNTQEVFAQVKQIYKTPPIKDFGGFNFSQILPDPSKPSKRSFIEDLLFNKVTLADAGFIKQYGDCLGDIAARDLICAQKFNGLTVLPPLLTDEMIAQYTSALLAGTITSGWTFGAGAALQIPFAMQMAYRFNGIGVTQNVLYENQKLIANQFNSAIGKIQDSLSSTASALGKLQDVVNQNAQALNTLVKQLSSNFGCISSVLNDILSRLDKVEAEVQIDCLITGRLQSLQTYVTQQLIRAAEIRASANLAATKMSECVLGQSKRVDFCGKGYHLMSFPQSAPHGVVFLHVTYVPAQEKNFTTAPAICHDGKAHFPREGVFVSNGTHWFVTQRNFYEPQIITTDNTFVSGNCDVLIGIVNNTVYDPLQPELDSFKEELDKYFKNHTSPDVDLGDISGINASVVNIQKEIDRLNEVAKNLNESLIDLQELGKYEQYIKWPWYIWLGFIAGLIAIVMVTIMLCCMTSCCSCLKGCCSCGSCCKFDEDDSGPVLKGVKLHYT

SEQ ID NO: 1083 - protein, 1273 aa, Artificial Sequence
  SARS-CoV-2/Shenzhen/SZTH-004/2020__EPI_ISL_406595 spike protein (1-1273)(A972C_R995C)
MFVFLVLLPLVSSQCVNLTTRTQLPPAYTNSFTRGVYYPDKVFRSSVLHSTQDLFLPFFSNVTWFHAIHVSGTNGTKRFDNPVLPFNDGVYFASTEKSNIIRGWIFGTTLDSKTQSLLIVNNATNVVIKVCEFQFCNDPFLGVYYHKNNKSWMESEFRVYSSANNCTFEYVSQPFLMDLEGKQGNFKNLREFVFKNIDGYFKIYSKHTPINLVRDLPQGFSALEPLVDLPIGINITRFQTLLALHRSYLTPGDSSSGWTAGAAAYYVGYLQPRTFLLKYNENGTITDAVDCALDPLSETKCTLKSFTVEKGIYQTSNFRVQPTESIVRFPNITNLCPFGEVFNATRFASVYAWDRKRISNCVAYYSVLYNSASFSTFKCYGVSPTKLNDLCFTNVYADSFVIRGDEVRQIAPGQTGKIADYNYKLPDDFTGCVIAWNSNNLDSKVGGNYNYLYRLFRKSNLKPFERDISTEIYQAGSTPCNGVEGFNCYFPLQSYGFQPTNGVGYQPYRVVVLSFELLHAPATVCGPKKSTNLVKNKCVNFNFNGLTGTGVLTESNKKFLPFQQFGRDIADTTDAVRDPQTLEILDITPCSFGGVSVITPGTNTSNQVAVLYQDVNCTEVPVAIHADQLTPTWRVYSTGSNVFQTRAGCLIGAEHVNNSYECDIPIGAGICASYQTQTNSPRRARSVASQSIIAYTMSLGAENSVAYSNNSIAIPTNFTISVTTEILPVSMTKTSVDCTMYICGDSTECSNLLLQYGSFCTQLNRALTGIAVEQDKNTQEVFAQVKQIYKTPPIKDFGGFNFSQILPDPSKPSKRSFIEDLLFNKVTLADAGFIKQYGDCLGDIAARDLICAQKFNGLTVLPPLLTDEMIAQYTSALLAGTITSGWTFGAGAALQIPFAMQMAYRFNGIGVTQNVLYENQKLIANQFNSAIGKIQDSLSSTASALGKLQDVVNQNAQALNTLVKQLSSNFGCISSVLNDILSRLDKVEAEVQIDCLITGRLQSLQTYVTQQLIRAAEIRASANLAATKMSECVLGQSKRVDFCGKGYHLMSFPQSAPHGVVFLHVTYVPAQEKNFTTAPAICHDGKAHFPREGVFVSNGTHWFVTQRNFYEPQIITTDNTFVSGNCDVVIGIVNNTVYDPLQPELDSFKEELDKYFKNHTSPDVDLGDISGINASVVNIQKEIDRLNEVAKNLNESLIDLQELGKYEQYIKWPWYIWLGFIAGLIAIVMVTIMLCCMTSCCSCLKGCCSCGSCCKFDEDDSEPVLKGVKLHYT

SEQ ID NO: 1084 - protein, 1273 aa, Artificial Sequence
  SARS-CoV-2/France/IDF0372/2020__EPI_ISL_406596 spike protein (1-1273)(A972C_R995C)
MFVFLVLLPLVSSQCVNLTTRTQLPPAYTNSFTRGVYYPDKVFRSSVLHSTQDLFLPFFSNVTWFHAIHVSGTNGTKRFDNPVLPFNDGVYFASTEKSNIIRGWIFGTTLDSKTQSLLIVNNATNVVIKVCEFQFCNDPFLGVYYHKNNKSWMESEFRVYSSANNCTFEYVSQPFLMDLEGKQGNFKNLREFVFKNIDGYFKIYSKHTPINLVRDLPQGFSALEPLVDLPIGINITRFQTLLALHRSYLTPGDSSSGWTAGAAAYYVGYLQPRTFLLKYNENGTITDAVDCALDPLSETKCTLKSFTVEKGIYQTSNFRVQPTESIVRFPNITNLCPFGEVFNATRFASVYAWNRKRISNCVADYSFLYNSASFSTFKCYGVSPTKLNDLCFTNVYADSFVIRGDEVRQIAPGQTGKIADYNYKLPDDFTGCVIAWNSNNLDSKVGGNYNYLYRLFRKSNLKPFERDISTEIYQAGSTPCNGVEGFNCYFPLQSYGFQPTNGVGYQPYRVVVLSFELLHAPATVCGPKKSTNLVKNKCVNFNFNGLTGTGVLTESNKKFLPFQQFGRDIADTTDAVRDPQTLEILDITPCSFGGVSVITPGTNTSNQVAVLYQDVNCTEVPVAIHADQLTPTWRVYSTGSNVFQTRAGCLIGAEHVNNSYECDIPIGAGICASYQTQTNSPRRARSVASQSIIAYTMSLGAENSVAYSNNSIAIPTNFTISVTTEILPVSMTKTSVDCTMYICGDSTECSNLLLQYGSFCTQLNRALTGIAVEQDKNTQEVFAQVKQIYKTPPIKDFGGFNFSQILPDPSKPSKRSFIEDLLFNKVTLADAGFIKQYGDCLGDIAARDLICAQKFNGLTVLPPLLTDEMIAQYTSALLAGTITSGWTFGAGAALQIPFAMQMAYRFNGIGVTQNVLYENQKLIANQFNSAIGKIQDSLSSTASALGKLQDVVNQNAQALNTLVKQLSSNFGCISSVLNDILSRLDKVEAEVQIDCLITGRLQSLQTYVTQQLIRAAEIRASANLAATKMSECVLGQSKRVDFCGKGYHLMSFPQSAPHGVVFLHVTYVPAQEKNFTTAPAICHDGKAHFPREGVFVSNGTHWFVTQRNFYEPQIITTDNTFVSGNCDVVIGIVNNTVYDPLQPELDSFKEELDKYFKNHTSPDVDLGDISGINASVVNIQKEIDRLNEVAKNLNESLIDLQELGKYEQYIKWPWYIWLGFIAGLIAIVMVTIMLCCMTSCCSCLKGCCSCGSCCKFDEDDSEPVLKGVKLHYT

SEQ ID NO: 1085 - protein, 1273 aa, Artificial Sequence
  SARS-CoV-2/Australia/VIC01/2020__EPI_ISL_406844 spike protein (1-1273)(A972C_R995C)
MFVFLVLLPLVSSQCVNLTTRTQLPPAYTNSFTRGVYYPDKVFRSSVLHSTQDLFLPFFSNVTWFHAIHVSGTNGTKRFDNPVLPFNDGVYFASTEKSNIIRGWIFGTTLDSKTQSLLIVNNATNVVIKVCEFQFCNDPFLGVYYHKNNKSWMESEFRVYSSANNCTFEYVSQPFLMDLEGKQGNFKNLREFVFKNIDGYFKIYSKHTPINLVRDLPQGFSALEPLVDLPIGINITRFQTLLALHRRYLTPGDSSSGWTAGAAAYYVGYLQPRTFLLKYNENGTITDAVDCALDPLSETKCTLKSFTVEKGIYQTSNFRVQPTESIVRFPNITNLCPFGEVFNATRFASVYAWNRKRISNCVADYSVLYNSASFSTFKCYGVSPTKLNDLCFTNVYADSFVIRGDEVRQIAPGQTGKIADYNYKLPDDFTGCVIAWNSNNLDSKVGGNYNYLYRLFRKSNLKPFERDISTEIYQAGSTPCNGVEGFNCYFPLQSYGFQPTNGVGYQPYRVVVLSFELLHAPATVCGPKKSTNLVKNKCVNFNFNGLTGTGVLTESNKKFLPFQQFGRDIADTTDAVRDPQTLEILDITPCSFGGVSVITPGTNTSNQVAVLYQDVNCTEVPVAIHADQLTPTWRVYSTGSNVFQTRAGCLIGAEHVNNSYECDIPIGAGICASYQTQTNSPRRARSVASQSIIAYTMSLGAENSVAYSNNSIAIPTNFTISVTTEILPVSMTKTSVDCTMYICGDSTECSNLLLQYGSFCTQLNRALTGIAVEQDKNTQEVFAQVKQIYKTPPIKDFGGFNFSQILPDPSKPSKRSFIEDLLFNKVTLADAGFIKQYGDCLGDIAARDLICAQKFNGLTVLPPLLTDEMIAQYTSALLAGTITSGWTFGAGAALQIPFAMQMAYRFNGIGVTQNVLYENQKLIANQFNSAIGKIQDSLSSTASALGKLQDVVNQNAQALNTLVKQLSSNFGCISSVLNDILSRLDKVEAEVQIDCLITGRLQSLQTYVTQQLIRAAEIRASANLAATKMSECVLGQSKRVDFCGKGYHLMSFPQSAPHGVVFLHVTYVPAQEKNFTTAPAICHDGKAHFPREGVFVSNGTHWFVTQRNFYEPQIITTDNTFVSGNCDVVIGIVNNTVYDPLQPELDSFKEELDKYFKNHTSPDVDLGDISGINASVVNIQKEIDRLNEVAKNLNESLIDLQELGKYEQYIKWPWYIWLGFIAGLIAIVMVTIMLCCMTSCCSCLKGCCSCGSCCKFDEDDSEPVLKGVKLHYT

SEQ ID NO: 1086 - protein, 1273 aa, Artificial Sequence
  SARS-CoV-2/Germany/BavPat1/2020__EPI_ISL_406862 spike protein (1-1273)(A972C_R995C)
MFVFLVLLPLVSSQCVNLTTRTQLPPAYTNSFTRGVYYPDKVFRSSVLHSTQDLFLPFFSNVTWFHAIHVSGTNGTKRFDNPVLPFNDGVYFASTEKSNIIRGWIFGTTLDSKTQSLLIVNNATNVVIKVCEFQFCNDPFLGVYYHKNNKSWMESEFRVYSSANNCTFEYVSQPFLMDLEGKQGNFKNLREFVFKNIDGYFKIYSKHTPINLVRDLPQGFSALEPLVDLPIGINITRFQTLLALHRSYLTPGDSSSGWTAGAAAYYVGYLQPRTFLLKYNENGTITDAVDCALDPLSETKCTLKSFTVEKGIYQTSNFRVQPTESIVRFPNITNLCPFGEVFNATRFASVYAWNRKRISNCVADYSVLYNSASFSTFKCYGVSPTKLNDLCFTNVYADSFVIRGDEVRQIAPGQTGKIADYNYKLPDDFTGCVIAWNSNNLDSKVGGNYNYLYRLFRKSNLKPFERDISTEIYQAGSTPCNGVEGFNCYFPLQSYGFQPTNGVGYQPYRVVVLSFELLHAPATVCGPKKSTNLVKNKCVNFNFNGLTGTGVLTESNKKFLPFQQFGRDIADTTDAVRDPQTLEILDITPCSFGGVSVITPGTNTSNQVAVLYQGVNCTEVPVAIHADQLTPTWRVYSTGSNVFQTRAGCLIGAEHVNNSYECDIPIGAGICASYQTQTNSPRRARSVASQSIIAYTMSLGAENSVAYSNNSIAIPTNFTISVTTEILPVSMTKTSVDCTMYICGDSTECSNLLLQYGSFCTQLNRALTGIAVEQDKNTQEVFAQVKQIYKTPPIKDFGGFNFSQILPDPSKPSKRSFIEDLLFNKVTLADAGFIKQYGDCLGDIAARDLICAQKFNGLTVLPPLLTDEMIAQYTSALLAGTITSGWTFGAGAALQIPFAMQMAYRFNGIGVTQNVLYENQKLIANQFNSAIGKIQDSLSSTASALGKLQDVVNQNAQALNTLVKQLSSNFGCISSVLNDILSRLDKVEAEVQIDCLITGRLQSLQTYVTQQLIRAAEIRASANLAATKMSECVLGQSKRVDFCGKGYHLMSFPQSAPHGVVFLHVTYVPAQEKNFTTAPAICHDGKAHFPREGVFVSNGTHWFVTQRNFYEPQIITTDNTFVSGNCDVVIGIVNNTVYDPLQPELDSFKEELDKYFKNHTSPDVDLGDISGINASVVNIQKEIDRLNEVAKNLNESLIDLQELGKYEQYIKWPWYIWLGFIAGLIAIVMVTIMLCCMTSCCSCLKGCCSCGSCCKFDEDDSEPVLKGVKLHYT

SEQ ID NO: 1087 - protein, 1273 aa, Artificial Sequence
  SARS-CoV-2/Wuhan/HBCDC-HB-02/2020__EPI_ISL_412978 spike protein (1-1273)(A972C_R995C)
MFVFLVLLPLVSSQCVNLTTRTQLPPAYTNSFTRGVYYPDKVFRSSVLHSTQDLFLPFFSNVTWFHAIHVSGTNGTKRFDNPVLPFNDGVYFASTEKSNIIRGWIFGTTLDSKTQSLLIVNNATNVVIKVCEFQFCNDPFLGVYYHKNNKSWMESEFRVYSSANNCTFEYVSQPFLMDLEGKQGNFKNLREFVFKNIDGYFKIYSKHTPINLVRDLPQGFSALEPLVDLPIGINITRFQTLLALHRSYLTPGDSSSGWTAGAAAYYVGYLQPRTFLLKYNENGTITDAVDCALDPLSETKCTLKSFTVEKGIYQTSNFRVQPTESIVRFPNITNLCPFGEVFNATRFASVYAWNRKRISNCVADYSVLYNSASFSTFKCYGVSPTKLNDLCFTNVYADSFVIRGDEVRQIAPGQTGKIADYNYKLPDDFTGCVIAWNSNNLDSKVGGNYNYLYRLFRKSNLKPFERDISTEIYQAGSTPCNGVEGFNCYFPLQSYGFQPTNGVGYQPYRVVVLSFELLHAPATVCGPKKSTNLVKNKCVNFNFNGLTGTGVLTESNKKFLPFQQFGRDIADTTDAVRDPQTLEILDITPCSFGGVSVITPGTNTSNQVAVLYQDVNCTEVPVAIHADQLTPTWRVYSTGSNVFQTRAGCLIGAEHVNNSYECDIPIGAGICASYQTQTNSPRRARSVASQSIIAYTMSLGAENSVAYSNNSIAIPTNFTISVTTEILPVSMTKTSVDCTMYICGDSTECSNFLLQYGSFCTQLNRALTGIAVEQDKNTQEVFAQVKQIYKTPPIKDFGGFNFSQILPDPSKPSKRSFIEDLLFNKVTLADAGFIKQYGDCLGDIAARDLICAQKFNGLTVLPPLLTDEMIAQYTSALLAGTITSGWTFGAGAALQIPFAMQMAYRFNGIGVTQNVLYENQKLIANQFNSAIGKIQDSLSSTASALGKLQDVVNQNAQALNTLVKQLSSNFGCISSVLNDILSRLDKVEAEVQIDCLITGRLQSLQTYVTQQLIRAAEIRASANLAATKMSECVLGQSKRVDFCGKGYHLMSFPQSAPHGVVFLHVTYVPAQEKNFTTAPAICHDGKAHFPREGVFVSNGTHWFVTQRNFYEPQIITTDNTFVSGNCDVVIGIVNNTVYDPLQPELDSFKEELDKYFKNHTSPDVDLGDISGINASVVNIQKEIDRLNEVAKNLNESLIDLQELGKYEQYIKWPWYIWLGFIAGLIAIVMVTIMLCCMTSCCSCLKGCCSCGSCCKFDEDDSEPVLKGVKLHYT

SEQ ID NO: 1088 - protein, 1273 aa, Artificial Sequence
  SARS-CoV-2/Australia/QLD02/2020__EPI_ISL_407896 spike protein (1-1273)(A972C_R995C)
MFVFLVLLPLVSSQCVNLTTRTQLPPAYTNSFTRGVYYPDKVFRSSVLHSTQDLFLPFFSNVTWFHAIHVSGTNGTKRFDNPVLPFNDGVYFASTEKSNIIRGWIFGTTLDSKTQSLLIVNNATNVVIKVCEFQFCNDPFLGVYYHKNNKSWMESEFRVYSSANNCTFEYVSQPFLMDLEGKQGNFKNLREFVFKNIDGYFKIYSKHTPINLVRDLPQGFSALEPLVDLPIGINITRFQTLLALHRSYLTPGDSSSGWTAGAAAYYVGYLQPRTFLLKYNENGTITDAVDCALDPLSETKCTLKSFTVEKGIYQTSNFRVQPTESIVRFPNITNLCPFGEVFNATRFASVYAWNRKRISNCVADYSVLYNSASFSTFKCYGVSPTKLNDLCFTNVYADSFVIRGDEVRQIAPGQTGKIADYNYKLPDDFTGCVIAWNSNNLDSKVGGNYNYLYRLFRKSNLKPFERDISTEIYQAGSTPCNGVEGFNCYFPLQSYGFQPTNGVGYQPYRVVVLSFELLHAPATVCGPKKSTNLVKNKCVNFNFNGLTGTGVLTESNKKFLPFQQFGRDIADTTDAVRDPQTLEILDITPCSFGGVSVITPGTNTSNQVAVLYQDVNCTEVPVAIHADQLTPTWRVYSTGSNVFQTRAGCLIGAEHVNNSYECDIPIGAGICASYQTQTNSPRRARSVASQSIIAYTMSLGAENSVAYSNNSIAIPTNFTISVTTEILPVSMTKTSVDCTMYICGDSTECSNLLLQYGSFCTQLNRALTGIAVEQDKNTQEVFAQVKQIYKTPPIKDFGGFNFSQILPDPSKPSKRSFIEDLLFNKVTLADAGFIKQYGDCLGDIAARDLICAQKFNGLTVLPPLLTDEMIAQYTSALLAGTITSGWTFGAGAALQIPFAMQMAYRFNGIGVTQNVLYENQKLIANQFNSAIGKIQDSLSSTASALGKLQDVVNQNAQALNTLVKQLSSNFGCISSVLNDILSRLDKVEAEVQIDCLITGRLQSLQTYVTQQLIRAAEIRASANLAATKMSECVLGQSKRVDFCGKGYHLMSFPQSAPHGVVFLHVTYVPAQEKNFTTAPAICHDGKAHFPREGVFVSNGTHWFVTQRNFYEPQIITTDNTFVSGNCDVVIGIVNNTVYDPLQLELDSFKEELDKYFKNHTSPDVDLGDISGINASVVNIQKEIDRLNEVAKNLNESLIDLQELGKYEQYIKWPWYIWLGFIAGLIAIVMVTIMLCCMTSCCSCLKGCCSCGSCCKFDEDDSEPVLKGVKLHYT

SEQ ID NO: 1089 - protein, 1273 aa, Artificial Sequence
  SARS-CoV-2/India/1-31/2020__EPI_ISL_413523 spike protein (1-1273)(A972C_R995C)
MFVFLVLLPLVSSQCVNLTTRTQLPPAYTNSFTRGVYYPDKVFRSSVLHSTQDLFLPFFSNVTWFHAIHVSGTNGTKRFDNPVLPFNDGVYFASTEKSNIIRGWIFGTTLDSKTQSLLIVNNATNVVIKVCEFQFCNDPFLGVYYHKNNKSWMESEFRVYSSANNCTFEYVSQPFLMDLEGKQGNFKNLREFVFKNIDGYFKIYSKHTPINLVRDLPQGFSALEPLVDLPIGINITRFQTLLALHRSYLTPGDSSSGWTAGAAAYYVGYLQPRTFLLKYNENGTITDAVDCALDPLSETKCTLKSFTVEKGIYQTSNFRVQPTESIVRFPNITNLCPFGEVFNATRFASVYAWNRKRISNCVADYSVLYNSASFSTFKCYGVSPTKLNDLCFTNVYADSFVIRGDEVRQIAPGQTGKIADYNYKLPDDFTGCVIAWNSNNLDSKVGGNYNYLYRLFRKSNLKPFERDISTEIYQAGSTPCNGVEGFNCYFPLQSYGFQPTNGVGYQPYRVVVLSFELLHAPATVCGPKKSTNLVKNKCVNFNFNGLTGTGVLTESNKKFLPFQQFGRDIADTTDAVRDPQTLEILDITPCSFGGVSVITPGTNTSNQVAVLYQDVNCTEVPVAIHADQLTPTWRVYSTGSNVFQTRAGCLIGAEHVNNSYECDIPIGAGICASYQTQTNSPRRARSVASQSIIAYTMSLGAENSVAYSNNSIAIPTNFTISVTTEILPVSMTKTSVDCTMYICGDSTECSNLLLQYGSFCTQLNRALTGIAVEQDKNTQEVFAQVKQIYKTPPIKDFGGFNFSQILPDPSKPSKRSFIEDLLFNKVTLADAGFIKQYGDCLGDIAARDLICAQKFNGLTVLPPLLTDEMIAQYTSALLAGTITSGWTFGAGAALQIPFAMQMAYRFNGIGVTQNVLYENQKLIANQFNSVIGKIQDSLSSTASALGKLQDVVNQNAQALNTLVKQLSSNFGCISSVLNDILSRLDKVEAEVQIDCLITGRLQSLQTYVTQQLIRAAEIRASANLAATKMSECVLGQSKRVDFCGKGYHLMSFPQSAPHGVVFLHVTYVPAQEKNFTTAPAICHDGKAHFPREGVFVSNGTHWFVTQRNFYEPQIITTDNTFVSGNCDVVIGIVNNTVYDPLQPELDSFKEELDKYFKNHTSPDVDLGDISGINASVVNIQKEIDRLNEVAKNLNESLIDLQELGKYEQYIKWPWYIWLGFIAGLIAIVMVTIMLCCMTSCCSCLKGCCSCGSCCKFDEDDSEPVLKGVKLHYT

SEQ ID NO: 1090 - protein, 1273 aa, Artificial Sequence
  SARS-CoV-2/Guangdong/GD2020087-P0008/2020__EPI_ISL_413863 spike protein (1-1273)(A972C_R995C)
MFVFLVLLPLVSSQCVNLTTRTQLPPAYTNSFTRGVYYPDKVFRSSVLHSTQDLFLPFFSNVTWFHAIHVSGTNGTKRFDNPVLPFNDGVYFASTEKSNIIRGWIFGTTLDSKTQSLLIVNNATNVVIKVCEFQFCNDPFLGVYYHKNNKSWMESEFRVYSSANNCTFEYVSQPFLMDLEGKQGNFKNLREFVFKNIDGYFKIYSKHTPINLVRDLPQGFSALEPLVDLPIGINITRFQTLLALHRSYLTPGDSSSGWTAGAAAYYVGYLQPRTFLLKYNENGTITDAVDCALDPLSETKCTLKSFTVEKGIYQTSNFRVQPTESIVRFPNITNLCPFGEVFNATRFASVYAWNRKRISNCVADYSVLYNSASFSTFKCYGVSPTKLNDLCFTNVYADSFVIRGDEVREIAPGQTGKIADYNYKLPDDFTGCVIAWNSNNLDSKVGGNYNYLYRLFRKSNLKPFERDISTEIYQAGSTPCNGVEGFNCYFPLQSYGFQPTNGVGYQPYRVVVLSFELLHAPATVCGPKKSTNLVKNKCVNFNFNGLTGTGVLTESNKKFLPFQQFGRDIADTTDAVRDPQTLEILDITPCSFGGVSVITPGTNTSNQVAVLYQDVNCTEVPVAIHADQLTPTWRVYSTGSNVFQTRAGCLIGAEHVNNSYECDIPIGAGICASYQTQTNSPRRARSVASQSIIAYTMSLGAENSVAYSNNSIAIPTNFTISVTTEILPVSMTKTSVDCTMYICGDSTECSNLLLQYGSFCTQLNRALTGIAVEQDKNTQEVFAQVKQIYKTPPIKDFGGFNFSQILPDPSKPSKRSFIEDLLFNKVTLADAGFIKQYGDCLGDIAARDLICAQKFNGLTVLPPLLTDEMIAQYTSALLAGTITSGWTFGAGAALQIPFAMQMAYRFNGIGVTQNVLYENQKLIANQFNSAIGKIQDSLSSTASALGKLQDVVNQNAQALNTLVKQLSSNFGCISSVLNDILSRLDKVEAEVQIDCLITGRLQSLQTYVTQQLIRAAEIRASANLAATKMSECVLGQSKRVDFCGKGYHLMSFPQSAPHGVVFLHVTYVPAQEKNFTTAPAICHDGKAHFPREGVFVSNGTHWFVTQRNFYEPQIITTDNTFVSGNCDVVIGIVNNTVYDPLQPELDSFKEELDKYFKNHTSPDVDLGDISGINASVVNIQKEIDRLNEVAKNLNESLIDLQELGKYEQYIKWPWYIWLGFIAGLIAIVMVTIMLCCMTSCCSCLKGCCSCGSCCKFDEDDSEPVLKGVKLHYT

SEQ ID NO: 1091 - protein, 1273 aa, Artificial Sequence
  SARS-CoV-2/Sweden/01/2020__EPI_ISL_411951 spike protein (1-1273)(A972C_R995C)
MFVFLVLLPLVSSQCVNLTTRTQLPPAYTNSFTRGVYYPDKVFRSSVLHSTQDLFLPFFSNVTWFHAIHVSGTNGTKRFDNPVLPFNDGVYFASTEKSNIIRGWIFGTTLDSKTQSLLIVNNATNVVIKVCEFQFCNDPFLGVYYHKNNKSWMESEFRVYSSANNCTFEYVSQPFLMDLEGKQGNFKNLREFVFKNIDGYFKIYSKHTPINLVRDLPQGFSALEPLVDLPIGINITRFQTLLALHRSYLTPGDSSSGWTAGAAAYYVGYLQPRTFLLKYNENGTITDAVDCALDPLSETKCTLKSFTVEKGIYQTSNFRVQPTESIVRFPNITNLCPFGEVFNATRFASVYAWNRKRISNCVADYSVLYNSASFSTFKCYGVSPTKLNDLCFTNVYADSFVIRGDEVRQIAPGQTGKIADYNYKLPDDFTGCVIAWNSNNLDSKVGGNYNYLYRLFRKSNLKPFERDISTEIYQAGSTPCNGVEGFNCYFPLQSYGFQPTNGVGYQPYRVVVLSFELLHAPATVCGPKKSTNLVKNKCVNFNFNGLTGTGVLTESNKKFLPFQQFGRDIADTTDAVRDPQTLEILDITPCSFGGVSVITPGTNTSNQVAVLYQDVNCTEVPVAIHADQLTPTWRVYSTGSNVFQTRAGCLIGAEHVNNSYECDIPIGAGICASYQTQTNSPRRARSVASQSIIAYTMSLGAENSVAYSNNSIAIPTNFTISVTTEILPVSMTKTSVDCTMYICGDSTECSNLLLQYGSFCTQLNRALTGIAVEQDKNTQEVFAQVKQIYKTPPIKDCGGFNFSQILPDPSKPSKRSFIEDLLFNKVTLADAGFIKQYGDCLGDIAARDLICAQKFNGLTVLPPLLTDEMIAQYTSALLAGTITSGWTFGAGAALQIPFAMQMAYRFNGIGVTQNVLYENQKLIANQFNSAIGKIQDSLSSTASALGKLQDVVNQNAQALNTLVKQLSSNFGCISSVLNDILSRLDKVEAEVQIDCLITGRLQSLQTYVTQQLIRAAEIRASANLAATKMSECVLGQSKRVDFCGKGYHLMSFPQSAPHGVVFLHVTYVPAQEKNFTTAPAICHDGKAHFPREGVFVSNGTHWFVTQRNFYEPQIITTDNTFVSGNCDVVIGIVNNTVYDPLQPELDSFKEELDKYFKNHTSPDVDLGDISGINASVVNIQKEIDRLNEVAKNLNESLIDLQELGKYEQYIKWPWYIWLGFIAGLIAIVMVTIMLCCMTSCCSCLKGCCSCGSCCKFDEDDSEPVLKGVKLHYT

SEQ ID NO: 1092 - protein, 1273 aa, Artificial Sequence
  SARS-CoV-2/Tianmen/HBCDC-HB-07/2020__EPI_ISL_412983 spike protein (1-1273)(A972C_R995C)
MFVFLVLLPLVSSQCVNLTTRTQLPPAYTNSFTRGVYYPDKVFRSSVLHSTQDLFLPFFSNVTWFHAIHVSGTNGTKRFDNPVLPFNDGVYFASTEKSNIIRGWIFGTTLDSKTQSLLIVNNATNVVIKVCEFQFCNDPFLGVYYHKNNKSWMESEFRVYSSANNCTFEYVSQPFLMDLEGKQGNFKNLREFVFKNIDGYFKIYSKHTPINLVRDLPQGFSALEPLVDLPIGINITRFQTLLALHRSYLTPGDSSSGWTAGAAAYYVGYLQPRTFLLKYNENGTITDAVDCALDPLSETKCTLKSFTVEKGIYQTSNFRVQPTESIVRFPNITNLCPFGEVFNATRFASVYAWNRKRISNCVADYSVLYNSASFSTFKCYGVSPTKLNDLCFTNVYADSFVIRGDEVRQIAPGQTGKIADYNYKLPDDFTGCVIAWNSNNLDSKVGGNYNYLYRLFRKSNLKPFERDISTEIYQAGSTPCNGVEGFNCYFPLQSYGFQPTNGVGYQPYRVVVLSFELLHAPATVCGPKKSTNLVKNKCVNFNFNGLTGTGVLTESNKKFLPFQQFGRDIADTTDAVRDPQTLEILDITPCSFGGVSVITPGTNTSNQVAVLYQDLNCTEVPVAIHADQLTPTWRVYSTGSNVFQTRAGCLIGAEHVNNSYECDIPIGAGICASYQTQTNSPRRARSVASQSIIAYTMSLGAENSVAYSNNSIAIPTNFTISVTTEILPVSMTKTSVDCTMYICGDSTECSNLLLQYGSFCTQLNRALTGIAVEQDKNTQEVFAQVKQIYKTPPIKDFGGFNFSQILPDPSKPSKRSFIEDLLFNKVTLADAGFIKQYGDCLGDIAARDLICAQKFNGLTVLPPLLTDEMIAQYTSALLAGTITSGWTFGAGAALQIPFAMQMAYRFNGIGVTQNVLYENQKLIANQFNSAIGKIQDSLSSTASALGKLQDVVNQNAQALNTLVKQLSSNFGCISSVLNDILSRLDKVEAEVQIDCLITGRLQSLQTYVTQQLIRAAEIRASANLAATKMSECVLGQSKRVDFCGKGYHLMSFPQSAPHGVVFLHVTYVPAQEKNFTTAPAICHDGKAHFPREGVFVSNGTHWFVTQRNFYEPQIITTDNTFVSGNCDVVIGIVNNTVYDPLQPELDSFKEELDKYFKNHTSPDVDLGDISGINASVVNIQKEIDRLNEVAKNLNESLIDLQELGKYEQYIKWPWYIWLGFIAGLIAIVMVTIMLCCMTSCCSCLKGCCSCGSCCKFDEDDSEPVLKGVKLHYT

SEQ ID NO: 1093 - protein, 1273 aa, Artificial Sequence
  SARS-CoV-2/Hong Kong/case42_VM20002493/2020__EPI_ISL_414527 spike protein (1-1273)(A972C_R995C)
MFVFLVLLPLVSSQCVNLTTRTQLPPAYTNSFTRGVYYPDKVFRSSVLHSTQDLFLPFFSNVTWFHAIHVSGTNGTKRFDNPVLPFNDGVYFASTEKSNIIRGWIFGTTLDSKTQSLLIVNNATNVVIKVCEFQFCNDPFLGVYYHKNNKSWMESEFRVYSSANNCTFEYVSQPFLMDLEGKQGNFKNLREFVFKNIDGYFKIYSKHTPINLVRDLPQGFSALEPLVDLPIGINITRFQTLLALHRSYLTPGDSSSGWTAGAAAYYVGYLQPRTFLLKYNENGTITDAVDCALDPLSETKCTLKSFTVEKGIYQTSNFRVQPTESIVRFPNITNLCPFGEVFNATRFASVYAWNRKRISNCVADYSVLYNSASFSTFKCYGVSPTKLNDLCFTNVYADSFVIRGDEVRQIAPGQTGKIADYNYKLPDDFTGCVIAWNSNNLDSKVGGNYNYLYRLFRKSNLKPFERDISTEIYQAGSTPCNGVEGFNCYFPLQSYGFQPTNGVGYQPYRVVVLSFELLHAPATVCGPKKSTNLVKNKCVNFNFNGLTGTGVLTESNKKFLPFQQFGRDIADTTDAVRDPQTLEILDITPCSFGGVSVITPGTNTSNQVAVLYQDVNCTEVPVAIHADQLTPTWRVYSTGSNVFQTRAGCLIGAEHVNNSYECDIPIGAGICASYQTQTNSPRRARSVASQSIIAYTMSLGAENSVAYSNNSIAIPTNFAISVTTEILPVSMTKTSVDCTMYICGDSTECSNLLLQYGSFCTQLNRALTGIAVEQDKNTQEVFAQVKQIYKTPPIKDFGGFNFSQILPDPSKPSKRSFIEDLLFNKVTLADAGFIKQYGDCLGDIAARDLICAQKFNGLTVLPPLLTDEMIAQYTSALLAGTITSGWTFGAGAALQIPFAMQMAYRFNGIGVTQNVLYENQKLIANQFNSAIGKIQDSLSSTASALGKLQDVVNQNAQALNTLVKQLSSNFGCISSVLNDILSRLDKVEAEVQIDCLITGRLQSLQTYVTQQLIRAAEIRASANLAATKMSECVLGQSKRVDFCGKGYHLMSFPQSAPHGVVFLHVTYVPAQEKNFTTAPAICHDGKAHFPREGVFVSNGTHWFVTQRNFYEPQIITTDNTFVSGNCDVVIGIVNNTVYDPLQPELDSFKEELDKYFKNHTSPDVDLGDISGINASVVNIQKEIDRLNEVAKNLNESLIDLQELGKYEQYIKWPWYIWLGFIAGLIAIVMVTIMLCCMTSCCSCLKGCCSCGSCCKFDEDDSEPVLKGVKLHYT

SEQ ID NO: 1094 - protein, 1273 aa, Artificial Sequence
  SARS-CoV-2/USA/CruiseA-23/2020__EPI_ISL_414482 spike protein (1-1273)(A972C_R995C)
MFVFLVLLPLVSSQCVNLTTRTQLPPAYTNSFTRGVYYPDKVFRSSVLHSTQDLFLPFFSNVTWFHAIHVSGTNGTKRFDNPVLPFNDGVYFASTEKSNIIRGWIFGTTLDSKTQSLLIVNNATNVVIKVCEFQFCNDPFLGVYYHKNNKSWMESEFRVYSSANNCTFEYVSQPFLMDLEVKQGNFKNLREFVFKNIDGYFKIYSKHTPINLVRDLPQGFSALEPLVDLPIGINITRFQTLLALHRSYLTPGDSSSGWTAGAAAYYVGYLQPRTFLLKYNENGTITDAVDCALDPLSETKCTLKSFTVEKGIYQTSNFRVQPTESIVRFPNITNLCPFGEVFNATRFASVYAWNRKRISNCVADYSVLYNSASFSTFKCYGVSPTKLNDLCFTNVYADSFVIRGDEVRQIAPGQTGKIADYNYKLPDDFTGCVIAWNSNNLDSKVGGNYNYLYRLFRKSNLKPFERDISTEIYQAGSTPCNGVEGFNCYFPLQSYGFQPTNGVGYQPYRVVVLSFELLHAPATVCGPKKSTNLVKNKCVNFNFNGLTGTGVLTESNKKFLPFQQFGRDIADTTDAVRDPQTLEILDITPCSFGGVSVITPGTNTSNQVAVLYQDVNCTEVPVAIHADQLTPTWRVYSTGSNVFQTRAGCLIGAEHVNNSYECDIPIGAGICASYQTQTNSPRRARSVASQSIIAYTMSLGAENSVAYSNNSIAIPTNFTISVTTEILPVSMTKTSVDCTMYICGDSTECSNLLLQYGSFCTQLNRALTGIAVEQDKNTQEVFAQVKQIYKTPPIKDFGGFNFSQILPDPSKPSKRSFIEDLLFNKVTLADAGFIKQYGDCLGDIAARDLICAQKFNGLTVLPPLLTDEMIAQYTSALLAGTITSGWTFGAGAALQIPFAMQMAYRFNGIGVTQNVLYENQKLIANQFNSAIGKIQDSLSSTASALGKLQDVVNQNAQALNTLVKQLSSNFGCISSVLNDILSRLDKVEAEVQIDCLITGRLQSLQTYVTQQLIRAAEIRASANLAATKMSECVLGQSKRVDFCGKGYHLMSFPQSAPHGVVFLHVTYVPAQEKNFTTAPAICHDGKAHFPREGVFVSNGTHWFVTQRNFYEPQIITTDNTFVSGNCDVVIGIVNNTVYDPLQPELDSFKEELDKYFKNHTSPDVDLGDISGINASVVNIQKEIDRLNEVAKNLNESLIDLQELGKYEQYIKWPWYIWLGFIAGLIAIVMVTIMLCCMTSCCSCLKGCCSCGSCCKFDEDDSEPVLKGVKLHYT

SEQ ID NO: 1095 - protein, 1273 aa, Artificial Sequence
  SARS-CoV-2/Hong Kong/case85_VM20002868/2020__EPI_ISL_414519 spike protein (1-1273)(A972C_R995C)
MFVFLVLVPLVSSQCVNLTTRTQLPPAYTNSFTRGVYYPDKVFRSSVLHSTQDLFLPFFSNVTWFHAIHVSGTNGTKRFDNPVLPFNDGVYFASTEKSNIIRGWIFGTTLDSKTQSLLIVNNATNVVIKVCEFQFCNDPFLGVYYHKNNKSWMESEFRVYSSANNCTFEYVSQPFLMDLEGKQGNFKNLREFVFKNIDGYFKIYSKHTPINLVRDLPQGFSALEPLVDLPIGINITRFQTLLALHRSYLTPGDSSSGWTAGAAAYYVGYLQPRTFLLKYNENGTITDAVDCALDPLSETKCTLKSFTVEKGIYQTSNFRVQPTESIVRFPNITNLCPFGEVFNATRFASVYAWNRKRISNCVADYSVLYNSASFSTFKCYGVSPTKLNDLCFTNVYADSFVIRGDEVRQIAPGQTGKIADYNYKLPDDFTGCVIAWNSNNLDSKVGGNYNYLYRLFRKSNLKPFERDISTEIYQAGSTPCNGVEGFNCYFPLQSYGFQPTNGVGYQPYRVVVLSFELLHAPATVCGPKKSTNLVKNKCVNFNFNGLTGTGVLTESNKKFLPFQQFGRDIADTTDAVRDPQTLEILDITPCSFGGVSVITPGTNTSNQVAVLYQDVNCTEVPVAIHADQLTPTWRVYSTGSNVFQTRAGCLIGAEHVNNSYECDIPIGAGICASYQTQTNSPRRARSVASQSIIAYTMSLGAENSVAYSNNSIAIPTNFTISVTTEILPVSMTKTSVDCTMYICGDSTECSNLLLQYGSFCTQLNRALTGIAVEQDKNTQEVFAQVKQIYKTPPIKDFGGFNFSQILPDPSKPSKRSFIEDLLFNKVTLADAGFIKQYGDCLGDIAARDLICAQKFNGLTVLPPLLTDEMIAQYTSALLAGTITSGWTFGAGAALQIPFAMQMAYRFNGIGVTQNVLYENQKLIANQFNSAIGKIQDSLSSTASALGKLQDVVNQNAQALNTLVKQLSSNFGCISSVLNDILSRLDKVEAEVQIDCLITGRLQSLQTYVTQQLIRAAEIRASANLAATKMSECVLGQSKRVDFCGKGYHLMSFPQSAPHGVVFLHVTYVPAQEKNFTTAPAICHDGKAHFPREGVFVSNGTHWFVTQRNFYEPQIITTDNTFVSGNCDVVIGIVNNTVYDPLQPELDSFKEELDKYFKNHTSPDVDLGDISGINASVVNIQKEIDRLNEVAKNLNESLIDLQELGKYEQYIKWPWYIWLGFIAGLIAIVMVTIMLCCMTSCCSCLKGCCSCGSCCKFDEDDSEPVLKGVKLHYT

SEQ ID NO: 1096 - protein, 1273 aa, Artificial Sequence
  SARS-CoV-2/England/200990660/2020__EPI_ISL_414523 spike protein (1-1273)(A972C_R995C)
MFVFLVLLPLVSSQCVNLTTRTQLPPAYTNSFTRGVYYPDKVFRSSVLHSTQDLFLPFFSNVTWFHAIHVSGTNGTKRFDNPVLPFNDGVYFASTEKSNIIRGWIFGTTLDSKTQSLLIVNNATNVVIKVCEFQFCNDPFLGVYYHKNNKSWMESEFRVYSSANNCTFEYVSQPFLMDLEGKQGNFKNLREFVFKNIDGYFKIYSKHTPINLVRDLPQGFSALEPLVDLPIGINITRFQTLLALHRSYLTPGDSSSGWTAGAAAYYVGYLQPRTFLLKYNENGTITDAVDCALDPLSETKCTLKSFTVEKGIYQTSNFRVQPTESIVRFPNITNLCPFGEVFNATRFASVYAWNRKRISNCVADYSVLYNSASFSTFKCYGVSPTKLNDLCFTNVYADSFVIRGDEVRQIAPGQTGKIADYNYKLPDDFTGCVIAWNSNNLDSKVGGNYNYLYRLFRKSNLKPFERDISTEIYQAGSTPCNGVEGFNCYFPLQSYGFQPTNGVGYQPYRVVVLSFELLHAPATVCGPKKSTNLVKNKCVNFNFNGLTGTGVLTESNKKFLPFQQFGRDIADTTDAVRDPQTLEILDITPCSFGGVSVITPGTNTSNQVAVLYQGVNCTEVPVAIHADQLTPTWRVYSTGSNVFQTRAGCLIGAEHVNNSYECDIPIGAGICASYQTQTNSPRRARSVASQSIIAYTMSLGAENSVAYSNNSIAIPTNFTISVTTEILPVSMTKTSVDCTMYICGDSTECSNLLLQYGSFCTQLNRALTGIAVEQDKNTQEVFAQVKQIYKTPPIKDFGGFNFSQILPDPSKPSKRSFIEDLLFNKVTLADAGFIKQYGDCLGDIAARDLICAQKFNGLTVLPPLLTDEMIAQYTSALLAGTITSGWTFGAGAALQIPFAMQMAYRFNGIGVTQNVLYENQKLIANQFNSAIGKIQDSLSSTASALGKLQDVVNQNAQALNTLVKQLSSNFGCISSVLNDILSRLDKVEAEVQIDCLITGRLQSLQTYVTQQLIRAAEIRASANLAATKMSECVLGQSKRVDFCGKGYHLMSFPQSAPHGVVFLHVTYVPAQEKNFTTAPAICHDGKAHFPREGVFVSNGTHWFVTQRNFYEPQIITTDNTFVSGNCDVVIGIVNNTVYDPLQPELDSFKEELDKYFKNHTSPDVDLGDISGINASVVNIQKEIDRLNEVAKNLNESLIDLQELGKYEQYIKWPWYIWLGFIAGLIAIVMVTIMLCCMTSCCSCLKGCCSCGSCCKFDEDDSELVLKGVKLHYT

SEQ ID NO: 1097 - protein, 1273 aa, Artificial Sequence
  SARS-CoV-2/Australia/NSW09/2020__EPI_ISL_413595 spike protein (1-1273)(A972C_R995C)
MFVFLVLLPLVSSQCVNLTTRTQLPPAYTNSFTRGVYYPDKVFRSSVLHSTQDLFLPFFSNVTWFHAIHVSGTNGTKRFDNPVLPFNDGVYFASTEKSNIIRGWIFGTTLDSKTQSLLIVNNATNVVIKVCEFQFCNDPFLGVYYHKNNKSWMESEFRVYSSANNCTFEYVSQPFLMDLEGKQGNFKNLREFVFKNIDGYFKIYSKHTPINLVRDLPQGFSALEPLVDLPIGINITRFQTLLALHRSYLTPGDSSSGWTAGAAAYYVGYLQPRTFLLKYNENGTITDAVDCALDPLSETKCTLKSFTVEKGIYQTSNFRVQPTESIVRFPNITNLCPFGEVFNATRFASVYAWNRKRISNCVADYSVLYNSASFSTFKCYGVSPTKLNDLCFTNVYADSFVIRGDEVRQIAPGQTGKIADYNYKLPDDFTGCVIAWNSNNLDSKVGGNYNYLYRLFRKSNLKPFERDISTEIYQAGSTPCNGVEGFNCYFPLQSYGFQPTNGVGYQPYRVVVLSFELLHAPATVCGPKKSTNLVKNKCVNFNFNGLTGTGVLTESNKKFLPFQQFGRDIADTTDAVRDPQTLEILDITPCSFGGVSVITPGTNTSNQVAVLYQDVNCTEVPVAIHADQLTPTWRVYSTGSNVFQTRAGCLIGAEHVNNSYECDIPIGAGICASYQTQTNSPRRARSVASQSIIAYTMSLGAENSVAYSNNSIAIPTNFTISVTTEILPVSMTKTSVDCTMYICGDSTECSNLLLQYGSFCTQLNRALTGIAVEQDKNTQEVFAQVKQIYKTPPIKDFGGFNFSQILPDPSKPSKRSFIEDLLFNKVTLADAGFIKQYGDCLGDIAARDLICAQKFNGLTVLPPLLTDEMIAQYTSALLAGTITSGWTFGAGAALQIPFAMQMAYRFNGIGVTQNVLYENQKLIANQFNSAIGKIQDSLSFTASALGKLQDVVNQNAQALNTLVKQLSSNFGCISSVLNDILSRLDKVEAEVQIDCLITGRLQSLQTYVTQQLIRAAEIRASANLAATKMSECVLGQSKRVDFCGKGYHLMSFPQSAPHGVVFLHVTYVPAQEKNFTTAPAICHDGKAHFPREGVFVSNGTHWFVTQRNFYEPQIITTDNTFVSGNCDVVIGIVNNTVYDPLQPELDSFKEELDKYFKNHTSPDVDLGDISGINASVVNIQKEIDRLNEVAKNLNESLIDLQELGKYEQYIKWPWYIWLGFIAGLIAIVMVTIMLCCMTSCCSCLKGCCSCGSCCKFDEDDSEPVLKGVKLHYT

SEQ ID NO: 1098 - protein, 1273 aa, Artificial Sequence
  SARS-CoV-2/Australia/NSW10/2020__EPI_ISL_413596 spike protein (1-1273)(A972C_R995C)
MFVFLVLLPLVSSQCVNLTTRTQLPPAYTNSFTRGVYYPDKVFRSSVLHSTQDLFLPFFSNVTWFHAIHVSGTNGTKRFDNPVLPFNDGVYFASTEKSNIIRGWIFGTTLDSKTQSLLIVNNATNVVIKVCEFQFCNDPFLGVYYHKNNKSWMESEFRVYSSANNCTFEYVSQPFLMDLEGKQGNFKNLREFVFKNIDGYFKIYSKHTPINLVRDLPQGFSALEPLVDLPIGINITRFQTLLALHRSYLTPGDSSSGWTAGAAAYYVGYLQPRTFLLKYNENGTITDAVDCALDPLSETKCTLKSFTVEKGIYQTSNFRVQPTESIVRFPNITNLCPFGEVFNATRFASVYAWNRKRISNCVADYSVLYNSASFSTFKCYGVSPTKLNDLCFTNVYADSFVIRGDEVRQIAPGQTGKIADYNYKLPDDFTGCVIAWNSNNLDSKVGGNYNYLYRLFRKSNLKPFERDISTEIYQAGSTPCNGVEGFNCYFPLQSYGFQPTNGVGYQPYRVVVLSFELLHAPATVCGPKKSTNLVKNKCVNFNFNGLTGTGVLTESNKKFLPFQQFGRDIADTTDAVRDPQTLEILDITPCSFGGVSVITPGTNTSNQVAVLYQDVNCTEVPVAIHADQLTPTWRVYSTGSNVFQTRAGCLIGAEHVNNSYECDIPIGAGICASYQTQTNSPRRARSVASQSIIAYTMSLGAENSVAYSNNSIAIPTNFTISVTTEILPVSMTKTSVDCTMYICGDSTECSNLLLQYGSFCTQLNRALTGIAVEQDKNTQEVFAQVKQIYKTPPIKDFGGFNFSQILPDPSKPSKRSFIEDLLFNKVTLADAGFIKQYGDCLGDIAARDLICAQKFNGLTVLPPLLTDEMIAQYTSALLAGTITSGWTFGAGAALQIPFAMQMAYRFNGIGVTQNVLYENQKLIANQFNSAIGKIQDSLSSTASALGKLQDVVNQNAQALNTLVKQLSSNFGCISSVLNDILSRLDKVEAEVQIDCLITGRLQSLQTYVTQQLIRAAEIRASANLAATKMSECVLGQSKRVDFCGKGYHLMSFPQSAPHGVVFLHVTYVPAQEKNFTTAPAICHDGKAHFPREGVFVSNGTHWFVTQRNFYEPQIITTDNTFVSGNCDVVIGIVNNTVYDPLQPELDSFKEELDKYFKNHTSPDVDLGDISGINASVVNIQKEIDRLNEVAKNLNESLIDLQELGKYEQYIKWPWYIWLGFIAGLIAIVMVTIMLCCMTSCCSCLKGCCSCGSCFKFDEDDSEPVLKGVKLHYT

SEQ ID NO: 1099 - protein, 1273 aa, Artificial Sequence
  SARS-CoV-2/Switzerland/1000477797/2020__EPI_ISL_413023 spike protein (1-1273)(A972C_R995C)
MFVFLVLLPLVSSQCVNLTTRTQLPPAYTNSFTRGVYYPDKVFRSSVLHSTQDLFLPFFSNVTWFHAIHVSGTNGTKRFDNPVLPFNDGVYFASTEKSNIIRGWIFGTTLDSKTQSLLIVNNATNVVIKVCEFQFCNDPFLGVYYHKNNKSWMESEFRVYSSANNCTFEYVSQPFLMDLEGKQGNFKNLREFVFKNIDGYFNIYSKHTPINLVRDLPQGFSALEPLVDLPIGINITRFQTLLALHRSYLTPGDSSSGWTAGAAAYYVGYLQPRTFLLKYNENGTITDAVDCALDPLSETKCTLKSFTVEKGIYQTSNFRVQPTESIVRFPNITNLCPFGEVFNATRFASVYAWNRKRISNCVADYSVLYNSASFSTFKCYGVSPTKLNDLCFTNVYADSFVIRGDEVRQIAPGQTGKIADYNYKLPDDFTGCVIAWNSNNLDSKVGGNYNYLYRLFRKSNLKPFERDISTEIYQAGSTPCNGVEGFNCYFPLQSYGFQPTNGVGYQPYRVVVLSFELLHAPATVCGPKKSTNLVKNKCVNFNFNGLTGTGVLTESNKKFLPFQQFGRDIADTTDAVRDPQTLEILDITPCSFGGVSVITPGTNTSNQVAVLYQGVNCTEVPVAIHADQLTPTWRVYSTGSNVFQTRAGCLIGAEHVNNSYECDIPIGAGICASYQTQTNSPRRARSVASQSIIAYTMSLGAENSVAYSNNSIAIPTNFTISVTTEILPVSMTKTSVDCTMYICGDSTECSNLLLQYGSFCTQLNRALTGIAVEQDKNTQEVFAQVKQIYKTPPIKDFGGFNFSQILPDPSKPSKRSFIEDLLFNKVTLADAGFIKQYGDCLGDIAARDLICAQKFNGLTVLPPLLTDEMIAQYTSALLAGTITSGWTFGAGAALQIPFAMQMAYRFNGIGVTQNVLYENQKLIANQFNSAIGKIQDSLSSTASALGKLQDVVNQNAQALNTLVKQLSSNFGCISSVLNDILSRLDKVEAEVQIDCLITGRLQSLQTYVTQQLIRAAEIRASANLAATKMSECVLGQSKRVDFCGKGYHLMSFPQSAPHGVVFLHVTYVPAQEKNFTTAPAICHDGKAHFPREGVFVSNGTHWFVTQRNFYEPQIITTDNTFVSGNCDVVIGIVNNTVYDPLQPELDSFKEELDKYFKNHTSPDVDLGDISGINASVVNIQKEIDRLNEVAKNLNESLIDLQELGKYEQYIKWPWYIWLGFIAGLIAIVMVTIMLCCMTSCCSCLKGCCSCGSCCKFDEDDSEPVLKGVKLHYT

SEQ ID NO: 1100 - protein, 1273 aa, Artificial Sequence
  SARS-CoV-2/Belgium/BA-02291/2020__EPI_ISL_415159 spike protein (1-1273)(A972C_R995C)
MFVFLVLLPLVSSQCVNLTTRTQLPPAYTNSFTRGVYYPDKVFRSSVLHSTQDLFLPFFSNVTWFHAIHVSGTNGTKRFDNPVLPFNDGVYFASTEKSNIIRGWIFGTTLDSKTQSLLIVNNATNVVIKVCEFQFCNDPFLGVYYHKNNKSWMESEFRVYSSANNCTFEYVSQPFLMDLEGKQGNFKNLREFVFKNIDGYFKIYSKHTPINLVRDLPQGFSALEPLVDLPIGINITRFQTLLALHRSYLTPGDSSSGWTAGAAAYYVGYLQPRTFLLKYNENGTITDAVDCALDPLSETKCTLKSFTVEKGIYQTSNFRVQPTESIVRFPNITNLCPFGEVFNATRFASVYAWNRKRISNCVADYSVLYNSASFSTFKCYGVSPTKLNDLCFTNVYADSFVIRGDEVRQIAPGQTGKIADYNYKLPDDFTGCVIAWNSNNLDSKVGGNYNYLYRLFRRSNLKPFERDISTEIYQAGSTPCNGVEGFNCYFPLQSYGFQPTNGVGYQPYRVVVLSFELLPAPATVCGPKKSTNLVKNKCVNFNFNGLTGTGVLTESNKKFLPFQQFGRDIADTTDAVRDPQTLEILDITPCSFGGVSVITPGTNTSNQVAVLYQGVNCTEVPVAIHADQLTPTWRVYSTGSNVFQTRAGCLIGAEHVNNSYECDIPIGAGICASYQTQTNSPRRARSVASQSIIAYTMSLGAENSVAYSNNSIAIPTNFTISVTTEILPVSMTKTSVDCTMYICGDSTECSNLLLQYGSFCTQLNRALTGIAVEQDKNTQEVFAQVKQIYKTPPIKDFGGFNFSQILPDPSKPSKRSFIEDLLFNKVTLADAGFIKQYGDCLGDIAARDLICAQKFNGLTVLPPLLTDEMIAQYTSALLAGTITSGWTFGAGAALQIPFAMQMAYRFNGIGVTQNVLYENQKLIANQFNSAIGKIQDSLSSAAPALGKLQDVVNQNAQALNTLVKQLSSNFGCISSVLNDILSRLDKVEAEVQIDCLITGRLQSLQTYVTQQLIRAAEIRASANLAATKMSECVLGQSKRVDFCGKGYHLMSFPQSAPHGVVFLHVTYVPAQEKNFTTAPAICHDGKAHFPREGVFVSNGTHWFVTQRNFYEPQIITTDNTFVSGNCDVVIGIVNNTVYDPLQPELDSFKEELDKYFKNHTSPDVDLGDISGINASVVNIQKEIDRLNEVAKNLNESLIDLQELGKYEQYIKWPWYIWLGFIAGLIAIVMVTIMLCCMTSCCSCLKGCCSCGSCCKFDEDDSEPVLKGVKLHYT

SEQ ID NO: 1101 - protein, 1273 aa, Artificial Sequence
  SARS-CoV-2/USA/WA8-UW5/2020__EPI_ISL_413486 spike protein (1-1273)(A972C_R995C)
MFVFLVLLPLVSSQCVNLTTRTQLPPAYTNSFTRGVYYPDKVFRSSVLHSTQDLFLPFFSNVTWFHAIHVSGTNGTKRFDNPVLPFNDGVYFASTEKSNIIRGWIFGTTLDSKTQSLLIVNNATNVVIKVCEFQFCNDPFLGVYYHKNNKSWMESEFRVYSSANNCTFEYVSQPFLMDLEGKQGNFKNLREFVFKNIDGYFKIYSKHTPINLVRDLPQGFSALEPLVDLPIGINITRFQTLLALHRSYLTPGDSSSGWTAGAAAYYVGYLQPRTFLLKYNENGTITDAVDCALDPLSETKCTLKSFTVEKGIYQTSNFRVQPTESIVRFPNITNLCPFGEVFNATRFASVYAWNRKRISNCVADYSVLYNSASFSTFKCYGVSPTKLNDLCFTNVYADSFVIRGDEVRQIAPGQTGKIADYNYKLPDDFTGCVIAWNSNNLDSKVGGNYNYLYRLFRKSNLKPFERDISTEIYQAGSTPCNGVEGFNCYFPLQSYGFQPTNGVGYQPYRVVVLSFELLHAPATVCGPKKSTNLVKNKCVNFNFNGLTGTGVLTESNKKFLPFQQFGRDIADTTDAVRDPQTLEILDITPCSFGGVSVITPGTNTSNQVAVLYQDVNCTEVPVAIHADQLTPTWRVYSTGSNVFQTRAGCLIGAEYVNNSYECDIPIGAGICASYQTQTNSPRRARSVASQSIIAYTMSLGAENSVAYSNNSIAIPTNFTISVTTEILPVSMTKTSVDCTMYICGDSTECSNLLLQYGSFCTQLNRALTGIAVEQDKNTQEVFAQVKQIYKTPPIKDFGGFNFSQILPDPSKPSKRSFIEDLLFNKVTLADAGFIKQYGDCLGDIAARDLICAQKFNGLTVLPPLLTDEMIAQYTSALLAGTITSGWTFGAGAALQIPFAMQMAYRFNGIGVTQNVLYENQKLIANQFNSAIGKIQDSLSSTASALGKLQDVVNQNAQALNTLVKQLSSNFGCISSVLNDILSRLDKVEAEVQIDCLITGRLQSLQTYVTQQLIRAAEIRASANLAATKMSECVLGQSKRVDFCGKGYHLMSFPQSAPHGVVFLHVTYVPAQEKNFTTAPAICHDGKAHFPREGVFVSNGTHWFVTQRNFYEPQIITTDNTFVSGNCDVVIGIVNNTVYDPLQPELDSFKEELDKYFKNHTSPDVDLGDISGINASVVNIQKEIDRLNEVAKNLNESLIDLQELGKYEQYIKWPWYIWLGFIAGLIAIVMVTIMLCCMTSCCSCLKGCCSCGSCCKFDEDDSEPVLKGVKLHYT

SEQ ID NO: 1102 - protein, 1273 aa, Artificial Sequence
  SARS-CoV-2/England/20102000506/2020__EPI_ISL_415147 spike protein (1-1273)(A972C_R995C)
MFVFLVLLPLVSSQCVNLTTRTQLPPAYTNSFTRGVYYPDKVFRSSVLHSTQDLFLPFFSNVTWFHAIHVSGTNGTKRFDNPVLPFNDGVYFASTEKSNIIRGWIFGTTLDSKTQSLLIVNNATNVVIKVCEFQFCNDPFLGVYYHKNNKSWMESEFRVYSSANNCTFEYVSQPFLMDLEGKQGNFKNLREFVFKNIDGYFKIYSKHTPINLVRDLPQGFSALEPLVDLPIGINITRFQTLLALHRSYLTPGDSSSGWTAGAAAYYVGYLQPRTFLLKYNENGTITDAVDCALDPLSETKCTLKSFTVEKGIYQTSNFRVQPTESIVRFPNITNLCPFGEVFNATRFASVYAWNRKRISNCVADYSVLYNSASFSTFKCYGVSPTKLNDLCFTNVYADSFVIRGDEVRQIAPGQTGKIADYNYKLPDDFTGCVIAWNSNNLDSKVGGNYNYLYRLFRKSNLKPFERDISTEIYQAGSTPCNGVEGFNCYFPLQSYGFQPTNGVGYQPYRVVVLSFELLHAPATVCGPKKSTNLVKNKCVNFNFNGLTGTGVLTESNKKFLPFQQFGRDIADTTDAVRDPQTLEILDITPCSFGGVSVITPGTNTSNQVAVLYQGVNCTEVPVAIHADQLTPTWRVYSTGSNVFQTRAGCLIGAEHVNNSYECDIPIGAGICASYQTQTNSPRRARSVASQSIIAYTMSLGAENSVAYSNNSIAIPTNFTISVTTEILPVSMTKTSVDCTMYICGDSTECSNLLLQYGSFCTQLNRALTGIAVEQDKNTQEVFAQVKQIYKTPPIKDFGGFNFSQILPDPSKPSKRSFIEDLLFNKVTLADAGFIKQYGYCLGDIAARDLICAQKFNGLTVLPPLLTDEMIAQYTSALLAGTITSGWTFGAGAALQIPFAMQMAYRFNGIGVTQNVLYENQKLIANQFNSAIGKIQDSLSSTASALGKLQDVVNQNAQALNTLVKQLSSNFGCISSVLNDILSRLDKVEAEVQIDCLITGRLQSLQTYVTQQLIRAAEIRASANLAATKMSECVLGQSKRVDFCGKGYHLMSFPQSAPHGVVFLHVTYVPAQEKNFTTAPAICHDGKAHFPREGVFVSNGTHWFVTQRNFYEPQIITTDNTFVSGNCDVVIGIVNNTVYDPLQPELDSFKEELDKYFKNHTSPDVDLGDISGINASVVNIQKEIDRLNEVAKNLNESLIDLQELGKYEQYIKWPWYIWLGFIAGLIAIVMVTIMLCCMTSCCSCLKGCCSCGSCCKFDEDDSEPVLKGVKLHYT

SEQ ID NO: 1103 - protein, 1273 aa, Artificial Sequence
  SARS-CoV-2/Belgium/VAG-03013/2020__EPI_ISL_415155 spike protein (1-1273)(A972C_R995C)
MFVFLVLLPLVSSQCVNLTTRTQLPPAYTNSFTRGVYYPDKVFRSSVLHSTQDLFLPFFSNVTWFHAIHVSGTNGTKRFDNPVLPFNDGVYFASTEKSNIIRGWIFGTTLDSKTQSLLIVNNATNVVIKVCEFQFCNDPFLGVYYHKNNKSWMESEFRVYSSANNCTFEYVSQPFLMDLEGKQGNFKNLREFVFKNIDGYFKIYSKHTPINLVRDLPQGFSALEPLVDLPIGINITRFQTLLALHRSYLTPGDSSSGWTAGAAAYYVGYLQPRTFLLKYNENGTITDAVDCALDPLSETKCTLKSFTVEKGIYQTSNFRVQPTESIVRFPNITNLCPFGEVFNATRFASVYAWNRKRISNCVADYSVLYNSASFSTFKCYGVSPTKLNDLCFTNVYADSFVIRGDEVRQIAPGQTGKIADYNYKLPDDFTGCVIAWNSNNLDSKVGGNYNYLYRLFRKSNLKPFERDISTEIYQAGSTPCNGVEGFNCYFPLQSYGFQPTNGVGYQPYRVVVLSFELLHAPATVCGPKKSTNLVKNKCVNFNFNGLTGTGVLTESNKKFLPFQQFGRDIADTTDAVRDPQTLEILDITPCSFGGVSVITPGTNTSNQVAVLYQGVNCTEVPVAIHADQLTPTWRVYSTGSNVFQTRAGCLIGAEHVNNSYECDIPIGAGICASYQTQTNSPRRARSVASQSIIAYTMSLGAENSVAYSNNSIAIPTNFTISVTTEILPVSMTKTSVDCTMYICGDSTECSNLLLQYGSFCTQLNRALTGIAVEQDKNTQEVFAQVKQIYKTPPIKDFGGFNFSQILPDPSKPSKRSFIEDLLFNKVTLADAGFIKQYGDCLGDIAARDLICAQKFNGLTVLPPLLTDEMIAQYTSALLAGTITSGWTFGAGAALQIPFAMQMAYRFNGIGVTQNVLYENQKLIANQFNSAIGKIQDSLSSTATALGKLQDVVNQNAQALNTLVKQLSSNFGCISSVLNDILSRLDKVEAEVQIDCLITGRLQSLQTYVTQQLIRAAEIRASANLAATKMSECVLGQSKRVDFCGKGYHLMSFPQSAPHGVVFLHVTYVPAQEKNFTTAPAICHDGKAHFPREGVFVSNGTHWFVTQRNFYEPQIITTDNTFVSGNCDVVIGIVNNTVYDPLQPELDSFKEELDKYFKNHTSPDVDLGDISGINASVVNIQKEIDRLNEVAKNLNESLIDLQELGKYEQYIKWPWYIWLGFIAGLIAIVMVTIMLCCMTSCCSCLKGCCSCGSCCKFDEDDSEPVLKGVKLHYT

SEQ ID NO: 1104 - protein, 1273 aa, Artificial Sequence
  SARS-CoV-2/Belgium/BC-03016/2020__EPI_ISL_415157 spike protein (1-1273)(A972C_R995C)
MFVFLVLLPLVSSQCVNLTTRTQLPPAYTNSFTRGVYYPDKVFRSSVLHSTQDLFLPFFSNVTWFHAIHVSGTNGTKRFDNPVLPFNDGVYFASTEKSNIIRGWIFGTTLDSKTQSLLIVNNATNVVIKVCEFQFCNDPFLGVYYHKNNKSWMESEFRVYSSANNCTFEYVSQPFLMDLEGKQGNFKNLREFVFKNIDGYFKIYSKHTPINLVRDLPQGFSALEPLVDLPIGINITRFQTLLALHRSYLTPGDSSSGWTAGAAAYYVGYLQPRTFLLKYNENGTITDAVDCALDPLSETKCTLKSFTVEKGIYQTSNFRVQPTESIVRFPNITNLCPFGEVFNATRFASVYAWNRKRISNCVADYSVLYNSASFSTFKCYGVSPTKLNDLCFTNVYADSFVIRGDEVRQIAPGQTGKIADYNYKLPDDFTGCVIAWNSNNLDSKVGGNYNYLYRLFRKSNLKPFERDISTEIYQAGSTPCNGVEGFNCYFPLQSYGFQPTNGVGYQPYRVVVLSFELLHAPATVCGPKKSTNLVKNKCVNFNFNGLTGTGVLTESNKKFLPFQQFGRDIADTTDAVRDPQTLEILDITPCSFGGVSVITPGTNTSNQVAVLYQGVNCTEVPVAIHADQLTPTWRVYSTGSNVFQTRAGCLIGAEHVNNSYECDIPIGAGICASYQTQTNSPRRARSVASQSIIAYTMSLGAENSVAYSNNSIAIPTNFTISVTTEILPVSMTKTSVDCTMYICGDSTECSNLLLQYGSFCTQLNRALTGIAVEQDKNTQEVFAQVKQIYKTPPIKDFGGFNFSQILPDPSKPSKRSFIEDLLFNKVTLADAGFIKQYGDCLGDIAARDLICAQKFNGLTVLPPLLTDEMIAQYTSALLAGTITSGWTFGAGAALQIPFAMQMAYRFNGIGVTQNVLYENQKLIANQFNSAIGKIQDSLSSTAPALGKLQDVVNQNAQALNTLVKQLSSNFGCISSVLNDILSRLDKVEAEVQIDCLITGRLQSLQTYVTQQLIRAAEIRASANLAATKMSECVLGQSKRVDFCGKGYHLMSFPQSAPHGVVFLHVTYVPAQEKNFTTAPAICHDGKAHFPREGVFVSNGTHWFVTQRNFYEPQIITTDNTFVSGNCDVVIGIVNNTVYDPLQPELDSFKEELDKYFKNHTSPDVDLGDISGINASVVNIQKEIDRLNEVAKNLNESLIDLQELGKYEQYIKWPWYIWLGFIAGLIAIVMVTIMLCCMTSCCSCLKGCCSCGSCCKFDEDDSEPVLKGVKLHYT

SEQ ID NO: 1105 - protein, 1273 aa, Artificial Sequence
  SARS-CoV-2/Germany/BavPat3/2020__EPI_ISL_414521 spike protein (1-1273)(A972C_R995C)
MFVFLVLLPLVSSQCVNLTTRTQLPPAYTNSFTRGVYYPDKVFRSSVLHSTQDLFLPFFSNVTWFHAIHVSGTNGTKRFDNPVLPFNDGVYFASTEKSNIIRGWIFGTTLDSKTQSLLIVNNATNVVIKVCEFQFCNDPFLGVYYHKNNKSWMESEFRVYSSANNCTFEYVSQPFLMDLEGKQGNFKNLREFVFKNIDGYFKIYSKHTPINLVRDLPQGFSALEPLVDLPIGINITRFQTLLALHRSYLTPGDSSSGWTAGAAAYYVGYLQPRTFLLKYNENGTITDAVDCALDPLSETKCTLKSFTVEKGIYQTSNFRVQPTESIVRFPNITNLCPFGEVFNATRFASVYAWNRKRISNCVADYSVLYNSASFSTFKCYGVSPTKLNDLCFTNVYADSFVIRGDEVRQIAPGQTGKIADYNYKLPDDFTGCVIAWNSNNLDSKVGGNYNYLYRLFRKSNLKPFERDISTEIYQAGSTPCNGVEGFNCYFPLQSYGFQPTNGVGYQPYRVVVLSFELLHAPATVCGPKKSTNLVKNKCVNFNFNGLTGTGVLTESNKKFLPFQQFGRDIADTTDAVRDPQTLEILDITPCSFGGVSVITPGTNTSNQVAVLYQDVNCTEVPVAIHADQLTPTWRVYSTGSNVFQTRAGCLIGAEHVNNSYECDIPIGAGICASYQTQTNSPRRARSVASQSIIAYTMSLGAENSVAYSNNSIAIPTNFTISVTTEILPVSMTKTSVDCTMYICGDSTECSNLLLQYGSFCTQLNRALTGIAVEQDKNTQQVFAQVKQIYKTPPIKDFGGFNFSQILPDPSKPSKRSFIEDLLFNKVTLADAGFIKQYGDCLGDIAARDLICAQKFNGLTVLPPLLTDEMIAQYTSALLAGTITSGWTFGAGAALQIPFAMQMAYRFNGIGVTQNVLYENQKLIANQFNSAIGKIQDSLSSTASALGKLQDVVNQNAQALNTLVKQLSSNFGCISSVLNDILSRLDKVEAEVQIDCLITGRLQSLQTYVTQQLIRAAEIRASANLAATKMSECVLGQSKRVDFCGKGYHLMSFPQSAPHGVVFLHVTYVPAQEKNFTTAPAICHDGKAHFPREGVFVSNGTHWFVTQRNFYEPQIITTDNTFVSGNCDVVIGIVNNTVYDPLQPELDSFKEELDKYFKNHTSPDVDLGDISGINASVVNIQKEIDRLNEVAKNLNESLIDLQELGKYEQYIKWPWYIWLGFIAGLIAIVMVTIMLCCMTSCCSCLKGCCSCGSCCKFDEDDSEPVLKGVKLHYT

SEQ ID NO: 1106 - protein, 1273 aa, Artificial Sequence
  SARS-CoV-2/France/HF1805/2020__EPI_ISL_414628 spike protein (1-1273)(A972C_R995C)
MFVFLVLLPLVSSQCVNLTTRTQLPPAYTNSFTRGVYYPDKVFRSSVLHSTQDLFLPFFSNVTWFHAIHVSGTNGTKRFDNPVLPFNDGVYFASTEKSNIIRGWIFGTTLDSKTQSLLIVNNATNVVIKVCEFQFCNDPFLGVYYHKNNKSWMESEFRVYSSANNCTFEYVSQPFLMDLEGKQGNFKNLREFVFKNIDGYFKIYSKHTPINLVRDLPQGFSALEPLVDLPIGINITRFQTLLALHRSYLTPGDSSSGWTAGAAAYYVGYLQPRTFLLKYNENGTITDAVDCALDPLSETKCTLKSFTVEKGIYQTSNFRVQPTESIVRFPNITNLCPFGEVFNATRFASVYAWNRKRISNCVADYSVLYNSASFSTFKCYGVSPTKLNDLCFTNVYADSFVIRGDEVRQIAPGQTGKIADYNYKLPDDFTGCVIAWNSNNLDSKVGGNYNYLYRLFRKSNLKPFERDISTEIYQAGSTPCNGVEGFNCYFPLQSYGFQPTNGVGYQPYRVVVLSFELLHAPATVCGPKKSTNLVKNKCVNFNFNGLTGTGVLTESNKKFLPFQQFGRDIADTTDAVRDPQTLEILDITPCSFGGVSVITPGTNTSNQVAVLYQGVNCTEVPVAIHADQLTPTWRVYSTGSNVFQTRAGCLIGAEHVNNSYECDIPIGAGICASYQTQTNSPRRARSVASQSIIAYTMSLGAENSVAYSNNSIAIPTNFTISVTTEILPVSMTKTSVDCTMYICGDSTECSNLLLQYGSFCTQLNRALTGIAVEQDKNTQEVFAQVKQIYKTPPIKDFGGFNFSQILPDPSKPSKRSFIEDLLFNKVTLADAGFIKQYGDCLGDIAARDLICAQKFNGLTVLPPLLTDEMIAQYTSALLAGTITSGWTFGAGAALQIPFAMQMAYRFNGIGVTQNVLYENQKLIANQFNSAIGKIQDSLSSTASALGKLQDVVNQNAQALNTLVKQLSSNFGCISSVLNDILSRLDKVEAEVQIDCLITGRLQSLQTYVTQQLIRAAEIRASANLAATKMSECVLGQSKRVDFCGKGYHLMSFPQSAPHGVVFLHVTYVPAQEKNFTTAPAICHDGKAHFPREGVFVSNGTHWFVTQRNFYEPQIITTDNTFVSGNCDVVIGVVNNTVYDPLQPELDSFKEELDKYFKNHTSPDVDLGDISGINASVVNIQKEIDRLNEVAKNLNESLIDLQELGKYEQYIKWPWYIWLGFIAGLIAIVMVTIMLCCMTSCCSCLKGCCSCGSCCKFDEDDSEPVLKGVKLHYT

SEQ ID NO: 1107 - protein, 1273 aa, Artificial Sequence
  SARS-CoV-2/Netherlands/ZuidHolland_9/2020__EPI_ISL_414445 spike protein (1-1273)(A972C_R995C)
MFVFLVLLPLVSSQCVNLTTRTQLPPAYTNSFTRGVYYPDKVFRSSVLHSTQDLFLPFFSNVTWFHAIHVSGTNGTKRFDNPVLPFNDGVYFASTEKSNIIRGWIFGTTLDSKTQSLLIVNNATNVVIKVCEFQFCNDPFLGVYYHKNNKSWMESEFRVYSSANNCTFEYVSQPFLMDLEGKQGNFKNLREFVFKNIDGYFKIYSKHTPINLVRDLPQGFSALEPLVDLPIGINITRFQTLLALHRSYLTPGDSSSGWTAGAAAYYVGYLQPRTFLLKYNENGTITDAVDCALDPLSETKCTLKSFTVEKGIYQTSNFRVQPTESIVRFPNITNLCPFGEVFNATRFASVYAWNRKRISNCVADYSVLYNSASFSTFKCYGVSPTKLNDLCFTNVYADSFVIRGDEVRQIAPGQTGKIADYNYKLPDDFTGCVIAWNSNNLDSKVGGNYNYLYRLFRKSNLKPFERDISTEIYQAGSTPCNGVEGFNCYFPLQSYGFQPTNGVGYQPYRVVVLSFELLHAPATVCGPKKSTNLVKNKCVNFNFNGLTGTGVLTESNKKFLPFQQFGRDIADTTDAVRDPQTLEILDITPCSFGGVSVITPGTNTSNQVAVLYQGVNCTEVPVAIHADQLTPTWRVYSTGSNVFQTRAGCLIGAEHVNNSYECDIPIGAGICASYQTQTNSPRRARSVASQSIIAYTMSLGAENSVAYSNNSIAIPTNFTISVTTEILPVSMTKTSVDCTMYICGDSTECSNLLLQYGSFCTQLNRALTGIAVEQDKNTQEVFAQVKQIYKTPPIKDFGGFNFSQILPDPSKPSKRSFIEDLLFNKVTLADAGFIKQYGDCLGDIAARDLICVQKFNGLTVLPPLLTDEMIAQYTSALLAGTITSGWTFGAGAALQIPFAMQMAYRFNGIGVTQNVLYENQKLIANQFNSAIGKIQDSLSSTASALGKLQDVVNQNAQALNTLVKQLSSNFGCISSVLNDILSRLDKVEAEVQIDCLITGRLQSLQTYVTQQLIRAAEIRASANLAATKMSECVLGQSKRVDFCGKGYHLMSFPQSAPHGVVFLHVTYVPAQEKNFTTAPAICHDGKAHFPREGVFVSNGTHWFVTQRNFYEPQIITTDNTFVSGNCDVVIGIVNNTVYDPLQPELDSFKEELDKYFKNHTSPDVDLGDISGINASVVNIQKEIDRLNEVAKNLNESLIDLQELGKYEQYIKWPWYIWLGFIAGLIAIVMVTIMLCCMTSCCSCLKGCCSCGSCCKFDEDDSEPVLKGVKLHYT

SEQ ID NO: 1108 - protein, 1273 aa, Artificial Sequence
  SARS-CoV-2/Finland/FIN03032020A/2020__EPI_ISL_413602 spike protein (1-1273)(A972C_R995C)
MFVFLVLLPLVSSQCVNLTTRTQLPPAYTNSFTRGVYYPDKVFRSSVLHSTQDLFLPFFSNVTWFHAIHVSGTNGTKRFDNPVLPFNDGVYFASTEKSNIIRGWIFGTTLDSKTQSLLIVNNATNVVIKVCEFQFCNDPFLGVYYHKNNKSWMESEFRVYSSANNCTFEYVSQPFLMDLEGKQGNFKNLREFVFKNIDGYFKIYSKHTPINLVRDLPQGFSALEPLVDLPIGINITRFQTLLALHRSYLTPGDSSSGWTAGAAAYYVGYLQPRTFLLKYNENGTITDAVDCALDPLSETKCTLKSFTVEKGIYQTSNFRVQPTESIVRFPNITNLCPFGEVFNATRFASVYAWNRKRISNCVADYSVLYNSASFSTFKCYGVSPTKLNDLCFTNVYADSFVIRGDEVRQIAPGQTGKIADYNYKLPDDFTGCVISWNSNNLDSKVGGNYNYLYRLFRKSNLKPFERDISTEIYQAGSTPCNGVEGFNCYFPLQSYGFQPTNGVGYQPYRVVVLSFELLHAPATVCGPKKSTNLVKNKCVNFNFNGLTGTGVLTESNKKFLPFQQFGRDIADTTDAVRDPQTLEILDITPCSFGGVSVITPGTNTSNQVAVLYQGVNCTEVPVAIHADQLTPTWRVYSTGSNVFQTRAGCLIGAEHVNNSYECDIPIGAGICASYQTQTNSPRRARSVASQSIIAYTMSLGAENSVAYSNNSIAIPTNFTISVTTEILPVSMTKTSVDCTMYICGDSTECSNLLLQYGSFCTQLNRALTGIAVEQDKNTQEVFAQVKQIYKTPPIKDFGGFNFSQILPDPSKPSKRSFIEDLLFNKVTLADAGFIKQYGDCLGDIAARDLICAQKFNGLTVLPPLLTDEMIAQYTSALLAGTITSGWTFGAGAALQIPFAMQMAYRFNGIGVTQNVLYENQKLIANQFNSAIGKIQDSLSSTASALGKLQDVVNQNAQALNTLVKQLSSNFGCISSVLNDILSRLDKVEAEVQIDCLITGRLQSLQTYVTQQLIRAAEIRASANLAATKMSECVLGQSKRVDFCGKGYHLMSFPQSAPHGVVFLHVTYVPAQEKNFTTAPAICHDGKAHFPREGVFVSNGTHWFVTQRNFYEPQIITTDNTFVSGNCDVVIGIVNNTVYDPLQPELDSFKEELDKYFKNHTSPDVDLGDISGINASVVNIQKEIDRLNEVAKNLNESLIDLQELGKYEQYIKWPWYIWLGFIAGLIAIVMVTIMLCCMTSCCSCLKGCCSCGSCCKFDEDDSEPVLKGVKLHYT

SEQ ID NO: 1109 - protein, 1273 aa, Artificial Sequence
  SARS-CoV-2/France/GE1977/2020__EPI_ISL_414632 spike protein (1-1273)(A972C_R995C)
MFVFLVLLPLVSSQCVNLTTRTQLPPAYTNSFTRGVYYPDKVFRSSVLHSTQDLFLPFFSNVTWFHAIHVSGTNGTKRFDNPVLPFNDGVYFASTEKSNIIRGWIFGTTLDSKTQSLLIVNNATNVVIKVCEFQFCNDPFLGVYYHKNNKSWMESEFRVYSSANNCTFEYVSQPFLMDLEGKQGNFKNLREFVFKNIDGYFKIYSKHTPINLVRDLPQGFSALEPLVDLPIGINITRFQTLLALHRSYLTPGDSSSGWTAGAAAYYVGYLQPRTFLLKYNENGTITDAVDCALDPLSETKCTLKSFTVEKGIYQTSNFRVQPTESIVRFPNITNLCPFGEVFNATRFASVYAWNRKRISNCVADYSVLYNSASFSTFKCYGVSPTKLNDLCFTNVYADSFVIRGDEVRQIAPGQTGKIADYNYKLPDDFTGCVIAWNSNNLDSKVGGNYNYLYRLFRKSNLKPFERDISTEIYQAGSTPCNGVEGFNCYFPLQSYGFQPTNGVGYQPYRVVVLSFELLHAPATVCGPKKSTNLVKNKCVNFNFNGLTGTGVLTESNKKFLPFQQFGRDIADTTDAVRDPQTLEILDITPCSFGGVSVITPGTNTSNQVAVLYQGVNCTEVPVAIHADQLTPTWRVYSTGSNVFQTRAGCLIGAEHVNNSYECDIPIGAGICASYQTQTNSPRRARSVASQSIIAYTMSLGAENSVAYSNNSIAIPTNFTISVTTEILPVSMTKTSVDCTMYICGDSTECSNLLLQYGSFCTQLNRALTGIAVEQDKNTQEVFAQVKQIYKTPPIKDFGGFNFSQILPDPSKPSKRSFIEDLLFNKVTLADAGFIKQYGDCLGDIAARDLICAQKFNGLTVLPPLLTDEMIAQYTSALLAGTITSGWTFGAGAALQIPFAMQMAYRFNGIGVTQNVLYENQKLIANQFNSAIGKIQDSLFSTASALGKLQDVVNQNAQALNTLVKQLSSNFGCISSVLNDILSRLDKVEAEVQIDCLITGRLQSLQTYVTQQLIRAAEIRASANLAATKMSECVLGQSKRVDFCGKGYHLMSFPQSAPHGVVFLHVTYVPAQEKNFTTAPAICHDGKAHFPREGVFVSNGTHWFVTQRNFYEPQIITTDNTFVSGNCDVVIGIVNNTVYDPLQPELDSFKEELDKYFKNHTSPDVDLGDISGINASVVNIQKEIDRLNEVAKNLNESLIDLQELGKYEQYIKWPWYIWLGFIAGLIAIVMVTIMLCCMTSCCSCLKGCCSCGSCCKFDEDDSEPVLKGVKLHYT

SEQ ID NO: 1110 - protein, 1273 aa, Artificial Sequence
  SARS-CoV-2/Finland/FIN-313/2020__EPI_ISL_414641 spike protein (1-1273)(A972C_R995C)
MFVFLVLLPLVSSQCVNLTTRTQLPPAYTNSFTRGVYYPDKVFRSSVLHSTQDLFLPFFSNVTWFHAIHVSGTNGTKRFDNPVLPFNDGVYFASTEKSNIIRGWIFGTTLDSKTQSLLIVNNATNVVIKVCEFQFCNDPFLGVYYHKNNKSWMESEFRVYSSANNCTFEYVSQPFLMDLEGKQGNFKNLREFVFKNIDGYFKIYSKHTPINLVRDLPQGFSALEPLVDLPIGINITRFKTLLALHRSYLTPGDSSSGWTAGAAAYYVGYLQPRTFLLKYNENGTITDAVDCALDPLSETKCTLKSFTVEKGIYQTSNFRVQPTESIVRFPNITNLCPFGEVFNATRFASVYAWNRKRISNCVADYSVLYNSASFSTFKCYGVSPTKLNDLCFTNVYADSFVIRGDEVRQIAPGQTGKIADYNYKLPDDFTGCVIAWNSNNLDSKVGGNYNYLYRLFRKSNLKPFERDISTEIYQAGSTPCNGVEGFNCYFPLQSYGFQPTNGVGYQPYRVVVLSFELLHAPATVCGPKKSTNLVKNKCVNFNFNGLTGTGVLTESNKKFLPFQQFGRDIADTTDAVRDPQTLEILDITPCSFGGVSVITPGTNTSNQVAVLYQGVNCTEVPVAIHADQLTPTWRVYSTGSNVFQTRAGCLIGAEHVNNSYECDIPIGAGICASYQTQTNSPRRARSVASQSIIAYTMSLGAENSVAYSNNSIAIPTNFTISVTTEILPVSMTKTSVDCTMYICGDSTECSNLLLQYGSFCTQLNRALTGIAVEQDKNTQEVFAQVKQIYKTPPIKDFGGFNFSQILPDPSKPSKRSFIEDLLFNKVTLADAGFIKQYGDCLGDIAARDLICAQKFNGLTVLPPLLTDEMIAQYTSALLAGTITSGWTFGAGAALQIPFAMQMAYRFNGIGVTQNVLYENQKLIANQFNSAIGKIQDSLSSTASALGKLQDVVNQNAQALNTLVKQLSSNFGCISSVLNDILSRLDKVEAEVQIDCLITGRLQSLQTYVTQQLIRAAEIRASANLAATKMSECVLGQSKRVDFCGKGYHLMSFPQSAPHGVVFLHVTYVPAQEKNFTTAPAICHDGKAHFPREGVFVSNGTHWFVTQRNFYEPQIITTDNTFVSGNCDVVIGIVNNTVYDPLQPELDSFKEELDKYFKNHTSPDVDLGDISGINASVVNIQKEIDRLNEVAKNLNESLIDLQELGKYEQYIKWPWYIWLGFIAGLIAIVMVTIMLCCMTSCCSCLKGCCSCGSCCKFDEDDSEPVLKGVKLHYT

SEQ ID NO: 1111 - protein, 1273 aa, Artificial Sequence
  SARS-CoV-2/Netherlands/ZuidHolland_2/2020__EPI_ISL_414556 spike protein (1-1273)(A972C_R995C)
MFVFLVLLPLVSSQCVNLTTRTQLPPAYTNSFTRGVYYPDKVFRSSVLHSTQDLFLPFFSNVTWFHAIHVSGTNGTKRFDNPVLPFNDGVYFASTEKSNIIRGWIFGTTLDSKTQSLLIVNNATNVVIKVCEFQFCNDPFLGVYYHKNNKSWMESEFRVYSSANNCTFEYVSQPFLMDLEGKQGNFKNLREFVFKNIDGYFKIYSKHTPINLVRDLPQGFSALEPLVDLPIGINITRFQTLLALHRSYLTPGDSSSGWTAGAAAYYVGYLQPRTFLLKYNENGTITDAVDCALDPLSETKCTLKSFTVEKGIYQTSNFRVQPTESIVRFPNITNLCPFGEVFNATRFASVYAWNRKRISNCVADYSVLYNSASFSTFKCYGVSPTKLNDLCFTNVYADSFVIRGDEVRQIAPGQTGKIADYNYKLPDDFTGCVIAWNSNNLDSKVGGNYNYLYRLFRKSNLKPFERDISTEIYQAGSTPCNGVEGFNCYFPLQSYGFQPTNGVGYQPYRVVVLSFELLHAPATVCGPKKSTNLVKNKCVNFNFNGLTGTGVLTESNKKFLPFQQFGRDIADTTDAVRDPQTLEILDITPCSFGGVSVITPGTNTSNQVAVLYQGVNCTEVPVAIHADQLTPTWRVYSTGSNVFQTRAGCLIGAEHVNNSYECDIPIGAGICASYQTQTNSPRRARSVASQSIIAYTMSLGAENSVAYSNNSIAIPTNFTISVTTEILPVSMTKTSVDCTMYICGDSTECSNLLLQYGSFCTQLNRALTGIALEQDKNTQEVFAQVKQIYKTPPIKDFGGFNFSQILPDPSKPSKRSFIEDLLFNKVTLADAGFIKQYGDCLGDIAARDLICAQKFNGLTVLPPLLTDEMIAQYTSALLAGTITSGWTFGAGAALQIPFAMQMAYRFNGIGVTQNVLYENQKLIANQFNSAIGKIQDSLSSTASALGKLQDVVNQNAQALNTLVKQLSSNFGCISSVLNDILSRLDKVEAEVQIDCLITGRLQSLQTYVTQQLIRAAEIRASANLAATKMSECVLGQSKRVDFCGKGYHLMSFPQSAPHGVVFLHVTYVPAQEKNFTTAPAICHDGKAHFPREGVFVSNGTHWFVTQRNFYEPQIITTDNTFVSGNCDVVIGIVNNTVYDPLQPELDSFKEELDKYFKNHTSPDVDLGDISGINASVVNIQKEIDRLNEVAKNLNESLIDLQELGKYEQYIKWPWYIWLGFIAGLIAIVMVTIMLCCMTSCCSCLKGCCSCGSCCKFDEDDSEPVLKGVKLHYT

SEQ ID NO: 1112 - protein, 1273 aa, Artificial Sequence
  SARS-CoV-2/USA/WA-UW31/2020__EPI_ISL_414618 spike protein (1-1273)(A972C_R995C)
MFVFLVLLPLVSSQCVNLTTRTQLPPAYTNSFTRGVYYPDKVFRSSVLHSTQDLFLPFFSNVTWFHAIHVSGTNGTKRFDNPVLPFNDGVYFASTEKSNIIRGWIFGTTLDSKTQSLLIVNNATNVVIKVCEFQFCNDPFLGVYYHKNNKSWMESEFRVYSSANNCTFEYVSQPFLMDLEGKQGNFKNLREFVFKNIDGYFKIYSKHTPINLVRDLPQGFSALEPLVDLPIGINITRFQTLLALHRSYLTPGDSSSGWTAGAAAYYVGYLQPRTFLLKYNENGTITDAVDCALDPLSETKCTLKSFTVEKGIYQTSNFRVQPTESIVRFPNITNLCPFGEVFNATRFASVYAWNRKRISNCVADYSVLYNSASFSTFKCYGVSPTKLNDLCFTNVYADSFVIRGDEVRQIAPGQTGKIADYNYKLPDDFTGCVIAWNSNNLDSKVGGNYNYLYRLFRKSNLKPFERDISTEIYQAGSTPCNGAEGFNCYFPLQSYGFQPTNGVGYQPYRVVVLSFELLHAPATVCGPKKSTNLVKNKCVNFNFNGLTGTGVLTESNKKFLPFQQFGRDIADTTDAVRDPQTLEILDITPCSFGGVSVITPGTNTSNQVAVLYQDVNCTEVPVAIHADQLTPTWRVYSTGSNVFQTRAGCLIGAEHVNNSYECDIPIGAGICASYQTQTNSPRRARSVASQSIIAYTMSLGAENSVAYSNNSIAIPTNFTISVTTEILPVSMTKTSVDCTMYICGDSTECSNLLLQYGSFCTQLNRALTGIAVEQDKNTQEVFAQVKQIYKTPPIKDFGGFNFSQILPDPSKPSKRSFIEDLLFNKVTLADAGFIKQYGDCLGDIAARDLICAQKFNGLTVLPPLLTDEMIAQYTSALLAGTITSGWTFGAGAALQIPFAMQMAYRFNGIGVTQNVLYENQKLIANQFNSAIGKIQDSLSSTASALGKLQDVVNQNAQALNTLVKQLSSNFGCISSVLNDILSRLDKVEAEVQIDCLITGRLQSLQTYVTQQLIRAAEIRASANLAATKMSECVLGQSKRVDFCGKGYHLMSFPQSAPHGVVFLHVTYVPAQEKNFTTAPAICHDGKAHFPREGVFVSNGTHWFVTQRNFYEPQIITTDNTFVSGNCDVVIGIVNNTVYDPLQPELDSFKEELDKYFKNHTSPDVDLGDISGINASVVNIQKEIDRLNEVAKNLNESLIDLQELGKYEQYIKWPWYIWLGFIAGLIAIVMVTIMLCCMTSCCSCLKGCCSCGSCCKFDEDDSEPVLKGVKLHYT

SEQ ID NO: 1113 - protein, 1273 aa, Artificial Sequence
  SARS-CoV-2/South Korea/SNU01/2020__EPI_ISL_411929 spike protein (1-1273)(A972C_R995C)
MFVFLVLLPLVSSQCVNLTTRTQLPPAYTNSFTRGVYYPDKVFRSSVLHSTQDLFLPFFSNVTWFHAIHVSGTNGTKRFDNPVLPFNDGVYFASTEKSNIIRGWIFGTTLDSKTQSLLIVNNATNVVIKVCEFQFCNDPFLGVYYHKNNKSWMESEFRVYSSANNCTFEYVSQPFLMDLEGKQGNFKNLREFVFKNIDGYFKIYSKHTPINLVRDLPQGFWALEPLVDLPIGINITRFQTLLALHRSYLTPGDSSSGWTAGAAAYYVGYLQPRTFLLKYNENGTITDAVDCALDPLSETKCTLKSFTVEKGIYQTSNFRVQPTESIVRFPNITNLCPFGEVFNATRFASVYAWNRKRISNCVADYSVLYNSASFSTFKCYGVSPTKLNDLCFTNVYADSFVIRGDEVRQIAPGQTGKIADYNYKLPDDFTGCVIAWNSNNLDSKVGGNYNYLYRLFRKSNLKPFERDISTEIYQAGSTPCNGVEGFNCYFPLQSYGFQPTNGVGYQPYRVVVLSFELLHAPATVCGPKKSTNLVKNKCVNFNFNGLTGTGVLTESNKKFLPFQQFGRDIADTTDAVRDPQTLEILDITPCSFGGVSVITPGTNTSNQVAVLYQDVNCTEVPVAIHADQLTPTWRVYSTGSNVFQTRAGCLIGAEHVNNSYECDIPIGAGICASYQTQTNSPRRARSVASQSIIAYTMSLGAENSVAYSNNSIAIPTNFTISVTTEILPVSMTKTSVDCTMYICGDSTECSNLLLQYGSFCTQLNRALTGIAVEQDKNTQEVFAQVKQIYKTPPIKDFGGFNFSQILPDPSKPSKRSFIEDLLFNKVTLADAGFIKQYGDCLGDIAARDLICAQKFNGLTVLPPLLTDEMIAQYTSALLAGTITSGWTFGAGAALQIPFAMQMAYRFNGIGVTQNVLYENQKLIANQFNSAIGKIQDSLSSTASALGKLQDVVNQNAQALNTLVKQLSSNFGCISSVLNDILSRLDKVEAEVQIDCLITGRLQSLQTYVTQQLIRAAEIRASANLAATKMSECVLGQSKRVDFCGKGYHLMSFPQSAPHGVVFLHVTYVPAQEKNFTTAPAICHDGKAHFPREGVFVSNGTHWFVTQRNFYEPQIITTDNTFVSGNCDVVIGIVNNTVYDPLQPELDSFKEELDKYFKNHTSPDVDLGDISGINASVVNIQKEIDRLNEVAKNLNESLIDLQELGKYEQYIKWPWYIWLGFIAGLIAIVMVTIMLCCMTSCCSCLKGCCSCGSCCKFDEDDSEPVLKGVKLHYT

SEQ ID NO: 1114 - protein, 1273 aa, Artificial Sequence
  SARS-CoV-2/China/WF0004/2020__EPI_ISL_413694 spike protein (1-1273)(A972C_R995C)
MFVFLVLLPLVSSQCVNLTTRTQLPPAYTNSFTRGVYYPDKVFRSSVLHSTQDLFLPFFSNVTWFHAIHVSGTNGTKRFDNPVLPFNDGVYFASTEKSNIIRGWIFGTTLDSKTQSLLIVNNATNVVIKVCEFQFCNDPFLGVYYHKNNKSWTESEFRVYSSANNCTFEYVSQPFLMDLEGKQGNFKNLREFVFKNIDGYFKIYSKHTPINLVRDLPQGFSALEPLVDLPIGINITRFQTLLALHRSYLTPGDSSSGWTAGAAAYYVGYLQPRTFLLKYNENGTITDAVDCALDPLSETKCTLKSFTVEKGIYQTSNFRVQPTESIVRFPNITNLCPFGEVFNATRFASVYAWNRKRISNCVADYSVLYNSASFSTFKCYGVSPTKLNDLCFTNVYADSFVIRGDEVRQIAPGQTGKIADYNYKLPDDFTGCVIAWNSNNLDSKVGGNYNYLYRLFRKSNLKPFERDISTEIYQAGSTPCNGVEGFNCYFPLQSYGFQPTNGVGYQPYRVVVLSFELLHAPATVCGPKKSTNLVKNKCVNFNFNGLTGTGVLTESNKKFLPFQQFGRDIADTTDAVRDPQTLEILDITPCSFGGVSVITPGTNTSNQVAVLYQDVNCTEVPVAIHADQLTPTWRVYSTGSNVFQTRAGCLIGAEHVNNSYECDIPIGAGICASYQTQTNSPRRARSVASQSIIAYTMSLGAENSVAYSNNSIAIPTNFTISVTTEILPVSMTKTSVDCTMYICGDSTECSNLLLQYGSFCTQLNRALTGIAVEQDKNTQEVFAQVKQIYKTPPIKDFGGFNFSQILPDPSKPSKRSFIEDLLFNKVTLADAGFIKQYGDCLGDIAARDLICAQKFNGLTVLPPLLTDEMIAQYTSALLAGTITSGWTFGAGAALQIPFAMQMAYRFNGIGVTQNVLYENQKLIANQFNSAIGKIQDSLSSTASALGKLQDVVNQNAQALNTLVKQLSSNFGCISSVLNDILSRLDKVEAEVQIDCLITGRLQSLQTYVTQQLIRAAEIRASANLAATKMSECVLGQSKRFDFCGKGYHLMSFPQSAPHGVVFLHVTYVPAQEKNFTTAPAICHDGKAHFPREGVFVSNGTHWFVTQRNFYEPQIITTDNTFVSGNCDVVIGIVNNTVYDPLQPELDSFKEELDKYFKNHTSPDVDLGDISGINASVVNIQKEIDRLNEVAKNLNESLIDLQELGKYEQYIKWPWYIWLGFIAGLIAIVMVTIMLCCMTSCCSCLKGCCSCGSCCKFDEDDSEPVLKGVKLHYT

SEQ ID NO: 1115 - protein, 1273 aa, Artificial Sequence
  SARS-CoV-2/China/WF0028/2020__EPI_ISL_413791 spike protein (1-1273)(A972C_R995C)
MFVFLVLLPLVSSQCVNLTTRTQLPPAYTNSFTRGVYYPDKVFRSSVLHSTQDLFLPFFSNVTWFHAIHVSGTNGTKRFDNPVLPFNDGVYFASTEKSNIIRGWIFGTTLDSKTQSLLIVNNATNVVIKVCEFQFCNDPFLGVYYHKNNKSWMESEFRVYSSANNCTFEYVSQPFLMDLEGKQGNFKNLREFVFKNIDGYFKIYSKHTPINLVRDLPQGFSALEPLVDLPIGINITRFQTLLALHRSYLTPGDSSSGWTAGAAAYYVGYLQPRTFLLKYNENGTITDAVDCALDPLSETKCTLKSFTVEKGIYQTSNFRVQPTESIVRFPNITNLCPFGEVFNATRFASVYAWNRKRISNCVADYSVLYNSASFSTFKCYGVSPTKLNDLCFTNVYADSFVIRGDEVRQIAPGQTGKIADYNYKLPDDFTGCVIAWNSNNLDSKVGGNYNYLYRLFRKSNLKPFERDISTEIYQAGSTPCNGVEGFNCYFPLQSYGFQPTNGVGYQPYRVVVLSFELLHAPATVCGPKKSTNLVKNKCVNFNFNGLTGTGVLTESNKKFLPFQQFGRDIADTTDAVRDPQTLEILDITPCSFGGVSVITPGTNTSNQVAVLYQDVNCTEVPVAIHADQLTPTWRVYSTGSNVFQTRAGCLIGAEHVNNSYECDIPIGAGICASYQTQTNSPRRARSVASQSIIAYTMSLGAENSVAYSNNSIAIPTNFTISVTTEILPVSMTKTSVDCTMYICGDSTECSNLLLQYGSFCTQLNRALTGIAVEQDKNTQEVFAQVKQIYKTPPIKDFGGFNFSQILPDPSKPSKRSFIEDLLFNKVTLADAGFIKQYGDCLGDIAARDLICAQKFNGLTVLPPLLTDEMIAQYTSALLAGTITSGWTFGAGAALQIPFAMQMAYRFNGIGVTQNVLYENQKLIANQFNSAIGKIQDSLSSTASALGKLQDVVNQNAQALNTLVKQLSSNFGCISSVLNDILSRLDKVEAEVQIDCLITGRLQSLQTYVTQQLIRAAEIRASANLAATKMSECVLGQSKRVDFCGKGYHLMSFPQSAPHGVVFLHVTYVPAQEKNFTTAPAICHDGKAHFPREGVFVSNGTHWFVTQRNFYEPQIITTDNTFVSGNCDVVIGIVNNTVYDPLQPELESFKEELDKYFKNHTSPDVDLGDISGINASVVNIQKEIDRLNEVAKNLNESLIDLQELGKYEQYIKWPWYIWLGFIAGLIAIVMVTIMLCCMTSCCSCLKGCCSCGSCCKFDEDDSEPVLKGVKLHYT

SEQ ID NO: 1116 - protein, 1273 aa, Artificial Sequence
  SARS-CoV-2/2019-nCoV/USA-CruiseA-18/2020__MT159716.1 spike protein (1-1273)(A972C_R995C)
MFVFLVLLPLVSSQCVNLTTRTQLPPAYTNSFTRGVYYPDKVFRSSVLHSTQDLFLPFFSNVTWFHAIHVSGTNGTKRFDNPVLPFNDGVYFASTEKSNIIRGWIFGTTLDSKTQSLLIVNNATNVVIKVCEFQFCNDPFLGVYYHKNNKSWMESELRVYSSANNCTFEYVSQPFLMDLEGKQGNFKNLREFVFKNIDGYFKIYSKHTPINLVRDLPQGFSALEPLVDLPIGINITRFQTLLALHRSYLTPGDSSSGWTAGAAAYYVGYLQPRTFLLKYNENGTITDAVDCALDPLSETKCTLKSFTVEKGIYQTSNFRVQPTESIVRFPNITNLCPFGEVFNATRFASVYAWNRKRISNCVADYSVLYNSASFSTFKCYGVSPTKLNDLCFTNVYADSFVIRGDEVRQIAPGQTGKIADYNYKLPDDFTGCVIAWNSNNLDSKVGGNYNYLYRLFRKSNLKPFERDISTEIYQAGSTPCNGVEGFNCYFPLQSYGFQPTNGVGYQPYRVVVLSFELLHAPATVCGPKKSTNLVKNKCVNFNFNGLTGTGVLTESNKKFLPFQQFGRDIADTTDAVRDPQTLEILDITPCSFGGVSVITPGTNTSNQVAVLYQDVNCTEVPVAIHADQLTPTWRVYSTGSNVFQTRAGCLIGAEHVNNSYECDIPIGAGICASYQTQTNSPRRARSVASQSIIAYTMSLGAENSVAYSNNSIAIPTNFTISVTTEILPVSMTKTSVDCTMYICGDSTECSNLLLQYGSFCTQLNRALTGIAVEQDKNTQEVFAQVKQIYKTPPIKDFGGFNFSQILPDPSKPSKRSFIEDLLFNKVTLADAGFIKQYGDCLGDIAARDLICAQKFNGLTVLPPLLTDEMIAQYTSALLAGTITSGWTFGAGAALQIPFAMQMAYRFNGIGVTQNVLYENQKLIANQFNSAIGKIQDSLSSTASALGKLQDVVNQNAQALNTLVKQLSSNFGCISSVLNDILSRLDKVEAEVQIDCLITGRLQSLQTYVTQQLIRAAEIRASANLAATKMSECVLGQSKRVDFCGKGYHLMSFPQSAPHGVVFLHVTYVPAQEKNFTTAPAICHDGKAHFPREGVFVSNGTHWFVTQRNFYEPQIITTDNTFVSGNCDVVIGIVNNTVYDPLQPELDSFKEELDKYFKNHTSPDVDLGDISGINASVVNIQKEIDRLNEVAKNLNESLIDLQELGKYEQYIKWPWYIWLGFIAGLIAIVMVTIMLCCMTSCCSCLKGCCSCGSCCKFDEDDSEPVLKGVKLHYT

SEQ ID NO: 1117 - protein, 1273 aa, Artificial Sequence
  SARS-CoV-2/SARS-CoV-2/Yunnan-01/human/2020/CHN__MT049951.1 spike protein (1-1273)(A972C_R995C)
MFVFLVLLPLVSSQCVNLTTRTQLPPANTNSFTRGVYYPDKVFRSSVLHSTQDLFLPFFSNVTWFHAIHVSGTNGTKRFDNPVLPFNDGVYFASTEKSNIIRGWIFGTTLDSKTQSLLIVNNATNVVIKVCEFQFCNDPFLGVYYHKNNKSWMESEFRVYSSANNCTFEYVSQPFLMDLEGKQGNFKNLREFVFKNIDGYFKIYSKHTPINLVRDLPQGFSALEPLVDLPIGINITRFQTLLALHRSYLTPGDSSSGWTAGAAAYYVGYLQPRTFLLKYNENGTITDAVDCALDPLSETKCTLKSFTVEKGIYQTSNFRVQPTESIVRFPNITNLCPFGEVFNATRFASVYAWNRKRISNCVADYSVLYNSASFSTFKCYGVSPTKLNDLCFTNVYADSFVIRGDEVRQIAPGQTGKIADYNYKLPDDFTGCVIAWNSNNLDSKVGGNYNYLYRLFRKSNLKPFERDISTEIYQAGSTPCNGVEGFNCYFPLQSYGFQPTNGVGYQPYRVVVLSFELLHAPATVCGPKKSTNLVKNKCVNFNFNGLTGTGVLTESNKKFLPFQQFGRDIADTTDAVRDPQTLEILDITPCSFGGVSVITPGTNTSNQVAVLYQDVNCTEVPVAIHADQLTPTWRVYSTGSNVFQTRAGCLIGAEHVNNSYECDIPIGAGICASYQTQTNSPRRARSVASQSIIAYTMSLGAENSVAYSNNSIAIPTNFTISVTTEILPVSMTKTSVDCTMYICGDSTECSNLLLQYGSFCTQLNRALTGIAVEQDKNTQEVFAQVKQIYKTPPIKDFGGFNFSQILPDPSKPSKRSFIEDLLFNKVTLADAGFIKQYGDCLGDIAARDLICAQKFNGLTVLPPLLTDEMIAQYTSALLAGTITSGWTFGAGAALQIPFAMQMAYRFNGIGVTQNVLYENQKLIANQFNSAIGKIQDSLSSTASALGKLQDVVNQNAQALNTLVKQLSSNFGCISSVLNDILSRLDKVEAEVQIDCLITGRLQSLQTYVTQQLIRAAEIRASANLAATKMSECVLGQSKRVDFCGKGYHLMSFPQSAPHGVVFLHVTYVPAQEKNFTTAPAICHDGKAHFPREGVFVSNGTHWFVTQRNFYEPQIITTDNTFVSGNCDVVIGIVNNTVYDPLQPELDSFKEELDKYFKNHTSPDVDLGDISGINASVVNIQKEIDRLNEVAKNLNESLIDLQELGKYEQYIKWPWYIWLGFIAGLIAIVMVTIMLCCMTSCCSCLKGCCSCGSCCKFDEDDSEPVLKGVKLHYT

SEQ ID NO: 1118 - protein, 1273 aa, Artificial Sequence
  SARS-CoV-2/USA/WA-UW292/2020__EPI_ISL_418077 spike protein (1-1273)(A972C_R995C)
MFVFLVLLPLVSSQCVNLTTRTQLPPAYTNSFTRGVYYPDKVFRSSVLHSTQDLFLPFFSNVTWFHAIHVSGTNGTKRFDNPVLPFNDGVYFASTEKSNIIRGWIFGTTLDSKTQSLLIVNNATNVVIKVCEFQFCNDPFLGVYYHKNNKSWMESEFRVYSSANNCTFEYVSQPFLMDLEGKQGNFKNLREFVFKNIDGYFKIYSKHTPINLVRDLPQGFSALEPLVDLPIGINITRFQTLLALHRSYLTPGDSSSGWTAGAAAYYVGYLQPRTFLLKYNENGTITDAVDCALDPLSETKCTLKSFTVEKGIYQTSNFRVQPTESIVRFPNITNLCPFGEVFNATRFASVYAWNRKRISNCVADYSVLYNSASFSTFKCYGVSPTKLNDLCFTNVYADSFVIRGDEVRQIAPGQTGKIADYNYKLPDDFTGCVIAWNSNNLDSKVGGNYNYLYRLFRKSNLKPFERDISTEIYQASSTPCNGVEGFNCYFPLQSYGFQPTNGVGYQPYRVVVLSFELLHAPATVCGPKKSTNLVKNKCVNFNFNGLTGTGVLTESNKKFLPFQQFGRDIADTTDAVRDPQTLEILDITPCSFGGVSVITPGTNTSNQVAVLYQDVNCTEVPVAIHADQLTPTWRVYSTGSNVFQTRAGCLIGAEHVNNSYECDIPIGAGICASYQTQTNSPRRARSVASQSIIAYTMSLGAENSVAYSNNSIAIPTNFTISVTTEILPVSMTKTSVDCTMYICGDSTECSNLLLQYGSFCTQLNRALTGIAVEQDKNTQEVFAQVKQIYKTPPIKDFGGFNFSQILPDPSKPSKRSFIEDLLFNKVTLADAGFIKQYGDCLGDIAARDLICAQKFNGLTVLPPLLTDEMIAQYTSALLAGTITSGWTFGAGAALQIPFAMQMAYRFNGIGVTQNVLYENQKLIANQFNSAIGKIQDSLSSTASALGKLQDVVNQNAQALNTLVKQLSSNFGCISSVLNDILSRLDKVEAEVQIDCLITGRLQSLQTYVTQQLIRAAEIRASANLAATKMSECVLGQSKRVDFCGKGYHLMSFPQSAPHGVVFLHVTYVPAQEKNFTTAPAICHDGKAHFPREGVFVSNGTHWFVTQRNFYEPQIITTDNTFVSGNCDVVIGIVNNTVYDPLQPELDSFKEELDKYFKNHTSPDVDLGDISGINASVVNIQKEIDRLNEVAKNLNESLIDLQELGKYEQYIKWPWYIWLGFIAGLIAIVMVTIMLCCMTSCCSCLKGCCSCGSCCKFDEDDSEPVLKGVKLHYT

SEQ ID NO: 1119 - protein, 1273 aa, Artificial Sequence
  SARS-CoV-2/Iceland/192/2020__EPI_ISL_417819 spike protein (1-1273)(A972C_R995C)
MFVFFVLLPLVSSQCVNLTTRTQLPPAYTNSFTRGVYYPDKVFRSSVLHSTQDLFLPFFSNVTWFHAIHVSGTNGTKRFDNPVLPFNDGVYFASTEKSNIIRGWIFGTTLDSKTQSLLIVNNATNVVIKVCEFQFCNDPFLGVYYHKNNKSWMESEFRVYSSANNCTFEYVSQPFLMDLEGKQGNFKNLREFVFKNIDGYFKIYSKHTPINLVRDLPQGFSALEPLVDLPIGINITRFQTLLALHRSYLTPGDSSSGWTAGAAAYYVGYLQPRTFLLKYNENGTITDAVDCALDPLSETKCTLKSFTVEKGIYQTSNFRVQPTESIVRFPNITNLCPFGEVFNATRFASVYAWNRKRISNCVADYSVLYNSASFSTFKCYGVSPTKLNDLCFTNVYADSFVIRGDEVRQIAPGQTGKIADYNYKLPDDFTGCVIAWNSNNLDSKVGGNYNYLYRLFRKSNLKPFERDISTEIYQAGSTPCNGVEGFNCYFPLQSYGFQPTNGVGYQPYRVVVLSFELLHAPATVCGPKKSTNLVKNKCVNFNFNGLTGTGVLTESNKKFLPFQQFGRDIADTTDAVRDPQTLEILDITPCSFGGVSVITPGTNTSNQVAVLYQGVNCTEVPVAIHADQLTPTWRVYSTGSNVFQTRAGCLIGAEHVNNSYECDIPIGAGICASYQTQTNSPRRARSVASQSIIAYTMSLGAENSVAYSNNSIAIPTNFTISVTTEILPVSMTKTSVDCTMYICGDSTECSNLLLQYGSFCTQLNRALTGIAVEQDKNTQEVFAQVKQIYKTPPIKDFGGFNFSQILPDPSKPSKRSFIEDLLFNKVTLADAGFIKQYGDCLGDIAARDLICAQKFNGLTVLPPLLTDEMIAQYTSALLAGTITSGWTFGAGAALQIPFAMQMAYRFNGIGVTQNVLYENQKLIANQFNSAIGKIQDSLSSTASALGKLQDVVNQNAQALNTLVKQLSSNFGCISSVLNDILSRLDKVEAEVQIDCLITGRLQSLQTYVTQQLIRAAEIRASANLAATKMSECVLGQSKRVDFCGKGYHLMSFPQSAPHGVVFLHVTYVPAQEKNFTTAPAICHDGKAHFPREGVFVSNGTHWFVTQRNFYEPQIITTDNTFVSGNCDVVIGIVNNTVYDPLQPELDSFKEELDKYFKNHTSPDVDLGDISGINASVVNIQKEIDRLNEVAKNLNESLIDLQELGKYEQYIKWPWYIWLGFIAGLIAIVMVTIMLCCMTSCCSCLKGCCSCGSCCKFDEDDSEPVLKGVKLHYT

SEQ ID NO: 1120 - protein, 1273 aa, Artificial Sequence
  SARS-CoV-2/Belgium/ULG-6939/2020__EPI_ISL_417020 spike protein (1-1273)(A972C_R995C)
MFVFLVLLPLVSSQCVNLTTRTQLPPAYTNSFTRGVYYPDKVFRSSVLHSTQDLFLPFFSNVTWFHAIHVSGTNGTKRFDNPVLPFNDGVYFASTEKSNIIRGWIFGTTLDSKTQSLLIVNNATNVVIKVCEFQFCNDPFLGVYYHKNNKSWMESEFRVYSSANNCTFEYVSQPFLMDLEGKQGNFKNLREFVFKNIDGYFKIYSKHTPINLVRDLPQGFSALEPLVDLPIGINITRFQTLLALHRSYLTPGDSSSGWTAGAAAYYVGYLQPRTFLLKYNENGTITDAVDCALDPLSETKCTLKSFTVEKGIYQTSNFRVQPTESIVRFPNITNLCPFGEVFNATRFASVYAWNRKRISNCVADYSVLYNSASFSTFKCYGVSPTKLNDLCFTNVYADSFVIRGDEVRQIAPGQTGKIADYNYKLPDDFTGCVIAWNSNNLDSKVGGNYNYLYRLFRKSNLKPFERDISTEIYQAGSTPCNGVEGFNCYFPLQSYGFQPTNGVGYQPYRVVVLSFELLHAPATVCGPKKSTNLVKNKCVNFNFNGLTGTGVLTESNKKFLPFQQFGRDIADTTDAVRDPQTLEILDITPCSFGGVSVITPGTNTSNQVAVLYQGVNCTEVPVAIHADQLTPTWRVYSTGSNVFQTRAGCLIGAEHVNNSYECDIPIGAGICASYQTQTNSPRRARSVASQSIIAYTMSLGAENSVVYSNNSIAIPTNFTISVTTEILPVSMTKTSVDCTMYICGDSTECSNLLLQYGSFCTQLNRALTGIAVEQDKNTQEVFAQVKQIYKTPPIKDFGGFNFSQILPDPSKPSKRSFIEDLLFNKVTLADAGFIKQYGDCLGDIAARDLICAQKFNGLTVLPPLLTDEMIAQYTSALLAGTITSGWTFGAGAALQIPFAMQMAYRFNGIGVTQNVLYENQKLIANQFNSAIGKIQDSLSSTASALGKLQDVVNQNAQALNTLVKQLSSNFGCISSVLNDILSRLDKVEAEVQIDCLITGRLQSLQTYVTQQLIRAAEIRASANLAATKMSECVLGQSKRVDFCGKGYHLMSFPQSAPHGVVFLHVTYVPAQEKNFTTAPAICHDGKAHFPREGVFVSNGTHWFVTQRNFYEPQIITTDNTFVSGNCDVVIGIVNNTVYDPLQPELDSFKEELDKYFKNHTSPDVDLGDISGINASVVNIQKEIDRLNEVAKNLNESLIDLQELGKYEQYIKWPWYIWLGFIAGLIAIVMVTIMLCCMTSCCSCLKGCCSCGSCCKFDEDDSEPVLKGVKLHYT

SEQ ID NO: 1121 - protein, 1273 aa, Artificial Sequence
  SARS-CoV-2/France/HF2496/2020__EPI_ISL_418231 spike protein (1-1273)(A972C_R995C)
MFVFLVLLPLVSSQCVNLTTRTQLPPAYTNSFTRGVYYPDKVFRSSVLHSTQDLFLPFFSNVTWFHAIHVSGTNGTKRFDNPVLPFNDGVYFASTEKSNIIRGWIFGTTLDSKTQSLLIVNNATNVVIKVCEFQFCNDPFLGVYYHKNNKSWMESEFRVYSSANNCTFEYVSQPFLMDLEGKQGNFKNLREFVFKNIDGYFKIYSKHTPINLVRDLPQGFSALEPLVDLPIGINITRFQTLLALHRSYLTPGDSSSGWTAGAAAYYVGYLQPRTFLLKYNENGTITDAVDCALDPLSETKCTLKSFTVEKGIYQTSNFRVQPTESIVRFPNITNLCPFGEVFNATRFASVYAWNRKRISNCVADYSVLYNSASFSTFKCYGVSPTKLNDLCFTNVYADSFVIRGDEVRQIAPGQTGKIADYNYKLPDDFTGCVIAWNSNNLDSKVGGNYNYLYRLFRKSNLKPFERDISTEIYQAGSTPCNGVEGFNCYFPLQSYGFQPTNGVGYQPYRVVVLSFELLHAPATVCGPKKSTNLVKNKCVNFNFNGLTGTGVLTESNKKFLPFQQFGRDIADTTDAVRDPQTLEILDITPCSFGGVSVITPGTNTSNQVAVLYQGVNCTEVPVAIHADQLTPTWRVYSTGSNVFQTRAGCLIGAEHVNNSYECDIPIGAGICASYQTQTNSPRRARSVASQSIIAYTMSLGAENSVAYSNNSIAIPTNFTISVTTEILPVSMTKTSVDCTMYICGDSTECSNLLLQYGSFCTQLNRALTGIAVEQDKNTQEVFAQVKQIYKTPPIKDFGGFNFSQILPDPSKPSKRSFIEDLLFNKVTLADAGFIKQYGDCLGDIVARDLICAQKFNGLTVLPPLLTDEMIAQYTSALLAGTITSGWTFGAGAALQIPFAMQMAYRFNGIGVTQNVLYENQKLIANQFNSAIGKIQDSLSSTASALGKLQDVVNQNAQALNTLVKQLSSNFGCISSVLNDILSRLDKVEAEVQIDCLITGRLQSLQTYVTQQLIRAAEIRASANLAATKMSECVLGQSKRVDFCGKGYHLMSFPQSAPHGVVFLHVTYVPAQEKNFTTAPAICHDGKAHFPREGVFVSNGTHWFVTQRNFYEPQIITTDNTFVSGNCDVVIGIVNNTVYDPLQPELDSFKEELDKYFKNHTSPDVDLGDISGINASVVNIQKEIDRLNEVAKNLNESLIDLQELGKYEQYIKWPWYIWLGFIAGLIAIVMVTIMLCCMTSCCSCLKGCCSCGSCCKFDEDDSEPVLKGVKLHYT

SEQ ID NO: 1122 - protein, 1273 aa, Artificial Sequence
  SARS-CoV-2/USA/WA-UW291/2020__EPI_ISL_418076 spike protein (1-1273)(A972C_R995C)
MFVFLVLLPLVSSQCVNLTTRTQLPPAYTNSFTRGVYYPDKVFRSSVLHSTQDLFLPFFSNVTWFHAIHVSGTNGTKRFDNPVLPFNDGVYFASTEKSNIIRGWIFGTTLDSKTQSLLIVNNATNVVIKVCEFQFCNDPFLGVYYHKNNKSWMESEFRVYSSANNCTFEYVSQPFLMDLEGKQGNFKNLREFVFKNIDGYFKIYSKHTPINLVRDLPQGFSALEPLVDLPIGINITRFQTLLALHRSYLTPGDSSSGWTAGAAAYYVGYLQPRTFLLKYNENGTITDAVDCALDPLSETKCTLKSFTVEKGIYQTSNFRVQPTESIVRFPNITNLCPFGEVFNATRFASVYAWNRKRISNCVADYSVLYNSASFSTFKCYGVSPTKLNDLCFTNVYADSFVIRGDEVRQIAPGQTGKIADYNYKLPDDFTGCVIAWNSNNLDSKVGGNYNYLYRLFRKSNLKPFERDISTEIYQAGSTPCNGVEGFNCYFPLQSYGFQPTNGVGYQPYRVVVLSFELLHAPATVCGPKKSTNLVKNKCVNFNFNGLTGTGVLTESNKKFLPFQQFGRDIADTTDAVRDPQTLEILDITPCSFGGVSVITPGTNTSNQVAVLYQGVNCTEVPVAIHADQLTPTWRVYSTGSNVFQTRAGCLIGAEHVNNSYECDIPIGAGICASYQTQTNSPRRARSVASQSIIAYTMSLGAENSVAYSNNSIAIPTNFTISVTTEILPVSMTKTSVDCTMYICGDSTECSNLLLQYGSFCTQLNRALTGIAVEQDKNTQEVFAQVKQIYKTPPIKDFGGFNFSQILPDPSKPSKRSFIEDLLFNKVTLADAGFIKQYGDCLGDIAARDLICAQKFNGLTVLPPLLTDEMIAQYTSALLAGTITSGWTFGAGAALQIPFAMQMAYRFNGIGVTQNVLYENQKLIANQFNSAIGKIQYSLSSTASALGKLQDVVNQNAQALNTLVKQLSSNFGCISSVLNDILSRLDKVEAEVQIDCLITGRLQSLQTYVTQQLIRAAEIRASANLAATKMSECVLGQSKRVDFCGKGYHLMSFPQSAPHGVVFLHVTYVPAQEKNFTTAPAICHDGKAHFPREGVFVSNGTHWFVTQRNFYEPQIITTDNTFVSGNCDVVIGIVNNTVYDPLQPELDSFKEELDKYFKNHTSPDVDLGDISGINASVVNIQKEIDRLNEVAKNLNESLIDLQELGKYEQYIKWPWYIWLGFIAGLIAIVMVTIMLCCMTSCCSCLKGCCSCGSCCKFDEDDSEPVLKGVKLHYT

SEQ ID NO: 1123 - protein, 1273 aa, Artificial Sequence
  SARS-CoV-2/Portugal/PT0034/2020__EPI_ISL_418019 spike protein (1-1273)(A972C_R995C)
MFVFLVLLPLVSSQCVNLTTRTQLPPAYTNSFTRGVYYPDKVFRSSVLHSTQDLFLPFFSNVTWFHAIHVSGTNGTKRFDNPVLPFNDGVYFASTEKSNIIRGWIFGTTLDSKTQSLLIVNNATNVVIKVCEFQFCNDPFLGVYYHKNNKSWMESEFRVYSSANNCTFEYVSQPFLMDLEGKQGNFKNLREFVFKNIDGYFKIYSKHTPINLVRDLPQGFSALEPLVDLPIGINITRFQTLLALHRSYLTPGDSSSGWTAGAAAYYVGYLQPRTFLLKYNENGTITDAVDCALDPLSETKCTLKSFTVEKGIYQTSNFRVQPTESIVRFPNITNLCPFGEVFNATRFASVYAWNRKRISNCVADYSVLYNSASFSTFKCYGVSPTKLNDLCFTNVYADSFVIRGDEVRQIAPGQTGKIADYNYKLPDDFTGCVIAWNSNNLDSKVGGNYNYLYRLFRKSNLKPFERDISTEIYQAGSTPCNGVEGFNCYFPLQSYGFQPTNGVGYQPYRVVVLSFELLHAPATVCGPKKSTNLVKNKCVNFNFNGLTGTGVLTESNKKFLPFQQFGRDIADTTDAVRDPQTLEILDITPCSFGGVSVITPGTNTSNQVAVLYQGVNCTEVPVAIHADQLTPTWRVYSTGSNVFQTRAGCLIGAEHVNNSYECDIPIGAGICASYQTQTNSPRRARSVASQSIIAYTMSLGAENSVAYSNNSIAIPTNFTISVTTEILPVSMTKTSVDCTMYICGDSTECSNLLLQYGSFCTQLNRALTGIAVEQDKNTQEVFAQVKQIYKTPPIKDFGGFNFSQILPDPSKPSKRSFIEDLLFNKVTLADAGFIKQYGDCLGDIAARDLICAQKFNGLTVLPPLLTDEMIAQYTSALLAGTITSGWTFGAGAALQIPFAMQMAYRFNGIGVTQNVLYENQKLIANQFNSAIGKIQDSLSSTASALGKLQDVVNQNAQALNTLVKQLSSNFGCISSVLNDILSRLDKVEAEVQIDCLITGRLQSLQTYVTQQLIRAAEIRASANLAATKMSECVLGQSKRVDFCGKGYHLMSFPQSAPHGVVFLHVTYVPAQEKNFTTAPAICHDGKAHFPREGVFVSNGTHWFVTQRNFYEPQIITTDNTFVSGNCDVVIGIVNNTVYDPLQPELDSFKEELDKYFKNHTSPDVDLGDISGINASVVNIQKEIDRLNEVAKNLNESLIDLQELGKYEQYIKWPWYIWLGFIAGLIAIVMVTIMLCCITSCCSCLKGCCSCGSCCKFDEDDSEPVLKGVKLHYT

SEQ ID NO: 1124 - protein, 1273 aa, Artificial Sequence
  SARS-CoV-2/Iceland/202/2020__EPI_ISL_417750 spike protein (1-1273)(A972C_R995C)
MFVFLVLLPLVSSQCVNLTTRTQLPPAYTNSFTRGVYYPDKVFRSSVLHSTQDLFLPFFSNVTWFHAIHVSGTNGTKRFDNPVLPFNDGVYFASTEKSNIIRGWIFGTTLDSKTQSLLIVNNATNVVIKVCEFQFCNDPFLGVYYHKNNKSWMESEFRVYSSANNCTFEYVSQPFLMDLEGKQGNFKNLREFVFKNIDGYFKIYSKHTPINLVRDLPQGFSALEPLVDLPIGINITRFQTLLALHRSYLTPGDSSSGWTAGAAAYYVGYLQPRTFLLKYNENGTITDAVDCALDPLSETKCTLKSFTVEKGIYQTSNFRVQPTESIVRFPNITNLCPFGEVFNATRFASVYAWNRKRISNCVADYSVLYNSASFSTFKCYGVSPTKLNDLCFTNVYADSFVIRGDEVRQIAPGQTGKIADYNYKLPDDFTGCVIAWNSNNLDSKVGGNYNYLYRLFRKSNLKPFERDISTEIYQAGSTPCNGVEGFNCYFPLQSYGFQPTNGVGYQPYRVVVLSFELLHAPATVCGPKKSTNLVKNKCVNFNFNGLTGTGVLTESNKKFLPFQQFGRDIADTTDAVRDPQTLEILDITPCSFGGVSVITPGTNTSNQVAVLYQDVNCTEVPVAIHADQLTPTWRVYSTGSNVFQTRAGCLIGAEHVNNSYECDIPIGAGICASYQTQTNSPRRARSVASQSIIAYTMSLGAENSVAYSNNSIAIPTNFTISVTTEILPVSMTKTSVDCTMYICGDSTECSNLLLQYGSFCTQLNRALTGIAVEQDKNTQEVFAQVKQIYKTPPIKDFGGFNFSQILPDPSKPSKRSFIEDLLFNKVTLADAGFIKQYGDCLGDIAARDLICAQKFNGLTVLPPLLTDEMIAQYTSALLAGTITSGWTFGAGAALQIPFAMQMAYRFNGIGVTQNVLYENQKLIANQFNSAIGKIQDSLSSTASALGKLQDVVNQNAQALNTLVKQLSSNFGCISSVLNDILSRLDKVEAEVQIDCLITGRLQSLQTYVTQQLIRAAEIRASANLAATKMSECVLGQSKRVDFCGKGYHLMSFPQSAPHGVVFLHVTYVPAQEKNFTTAPAICHDGKAHFPREGVFVSNGTHWFVTQRNFYEPQIITTDNTFVSGNCDVVIGIVNNTVYDPLQPELDSFKEELDKYFKNHTSPDVDLGDIPGINASVVNIQKEIDRLNEVAKNLNESLIDLQELGKYEQYIKWPWYIWLGFIAGLIAIVMVTIMLCCMTSCCSCLKGCCSCGSCCKFDEDDSEPVLKGVKLHYT

SEQ ID NO: 1125 - protein, 1273 aa, Artificial Sequence
  SARS-CoV-2/USA/WA-UW261/2020__EPI_ISL_418046 spike protein (1-1273)(A972C_R995C)
MFVFLVLLPLVSSQCVNLTTRTQLPPAYTNSFTRGVYYPDKVFRSSVLHSTQDLFLPFFSNVTWFHAIHVSGTNGTKRFDNPVLPFNDGVYFASTEKSNIIRGWIFGTTLDSKTQSLLIVNNATNVVIKVCEFQFCNDPFLGVYYHKNNKSWMESEFRVYSSANNCTFEYVSQPFLMDLEGKQGNFKNLREFVFKNIDGYFKIYSKHTPINLVRDLPQGFSALEPLVDLPIGINITRFQTLLALHRSYLTPGDSSSGWTAGAAAYYVGYLQPRTFLLKYNENGTITDAVDCALDPLSETKCTLKSFTVEKGIYQTSNFRVQPTESIVRFPNITNLCPFGEVFNATRFTSVYAWNRKRISNCVADYSVLYNSASFSTFKCYGVSPTKLNDLCFTNVYADSFVIRGDEVRQIAPGQTGKIADYNYKLPDDFTGCVIAWNSNNLDSKVGGNYNYLYRLFRKSNLKPFERDISTEIYQAGSTPCNGVEGFNCYFPLQSYGFQPTNGVGYQPYRVVVLSFELLHAPATVCGPKKSTNLVKNKCVNFNFNGLTGTGVLTESNKKFLPFQQFGRDIADTTDAVRDPQTLEILDITPCSFGGVSVITPGTNTSNQVAVLYQDVNCTEVPVAIHADQLTPTWRVYSTGSNVFQTRAGCLIGAEHVNNSYECDIPIGAGICASYQTQTNSPRRARSVASQSIIAYTMSLGAENSVAYSNNSIAIPTNFTISVTTEILPVSMTKTSVDCTMYICGDSTECSNLLLQYGSFCTQLNRALTGIAVEQDKNTQEVFAQVKQIYKTPPIKDFGGFNFSQILPDPSKPSKRSFIEDLLFNKVTLADAGFIKQYGDCLGDIAARDLICAQKFNGLTVLPPLLTDEMIAQYTSALLAGTITSGWTFGAGAALQIPFAMQMAYRFNGIGVTQNVLYENQKLIANQFNSAIGKIQDSLSSTASALGKLQDVVNQNAQALNTLVKQLSSNFGCISSVLNDILSRLDKVEAEVQIDCLITGRLQSLQTYVTQQLIRAAEIRASANLAATKMSECVLGQSKRVDFCGKGYHLMSFPQSAPHGVVFLHVTYVPAQEKNFTTAPAICHDGKAHFPREGVFVSNGTHWFVTQRNFYEPQIITTDNTFVSGNCDVVIGIVNNTVYDPLQPELDSFKEELDKYFKNHTSPDVDLGDISGINASVVNIQKEIDRLNEVAKNLNESLIDLQELGKYEQYIKWPWYIWLGFIAGLIAIVMVTIMLCCMTSCCSCLKGCCSCGSCCKFDEDDSEPVLKGVKLHYT

SEQ ID NO: 1126 - protein, 1273 aa, Artificial Sequence
  SARS-CoV-2/Portugal/PT0035/2020__EPI_ISL_418020 spike protein (1-1273)(A972C_R995C)
MFVFLVLLPLVSSQCVNLTTRTQLPPAYTNSFTRGVYYPDKVFRSSVLHSTQDLFLPFFSNVTWFHAIHVSGTNGTKRFDNPVLPFNDGVYFASTEKSNIIRGWIFGTTLDSKTQSLLIVNNATNVVIKVCEFQFCNDPFLGVYYHKNNKSWMESEFRVYSSANNCTFEYVSQPFLMDLEGKQGNFKNLREFVFKNIDGYFKIYSKHTPINLVRDLPQGFSALEPLVDLPIGINITRFQTLLALHRSYLTPGDSSSGWTAGAAAYYVGYLQPRTFLLKYNENGTITDAVDCALDPLSETKCTLKSFTVEKGIYQTSNFRVQPTESIVRFPNITNLCPFGEVFNATRFASVYAWNRKRISNCVADYSVLYNSASFSTFKCYGVSPTKLNDLCFTNVYADSFVIRGDEVRQIAPGQTGKIADYNYKLPDDFTGCVIAWNSNNLDSKVGGNYNYLYRLFRKSNLKPFERDISTEIYQAGSTPCNGVEGFNCYFPLQSYGFQPTNGVGYQPYRVVVLSFELLHAPATVCGPKKSTNLVKNKCVNFNFNGLTGTGVLTESNKKFLPFQQFGRDIADTTDAVRDPQTLEILDITPCSFGGVSVITPGTNTSNQVAVLYQDVNCTEVPVAIHADQLTPTWRVYSTGSNVFQTRAGCLIGAEHVNNSYECDIPIGAGICASYQTQTNSPRRARSVASQSIIAYTMSLGAENSVAYSNNSIAIPTNFTISVTTEILPVSMTKTSVDCTMYICGDSTECSNLLLQYGSFCTQLNRALTGIAVEQDKNTQEVFAQVKQIYKTPPIKDFGGFNFSQILPDPSKPSKRSFIEDLLFNKVTLADAGFIKQYGDCLGDISARDLICAQKFNGLTVLPPLLTDEMIAQYTSALLAGTITSGWTFGAGAALQIPFAMQMAYRFNGIGVTQNVLYENQKLIANQFNSAIGKIQDSLSSTASALGKLQDVVNQNAQALNTLVKQLSSNFGCISSVLNDILSRLDKVEAEVQIDCLITGRLQSLQTYVTQQLIRAAEIRASANLAATKMSECVLGQSKRVDFCGKGYHLMSFPQSAPHGVVFLHVTYVPAQEKNFTTAPAICHDGKAHFPREGVFVSNGTHWFVTQRNFYEPQIITTDNTFVSGNCDVVIGIVNNTVYDPLQPELDSFKEELDKYFKNHTSPDVDLGDISGINASVVNIQKEIDRLNEVAKNLNESLIDLQELGKYEQYIKWPWYIWLGFIAGLIAIVMVTIMLCCMTSCCSCLKGCCSCGSCCKFDEDDSEPVLKGVKLHYT

SEQ ID NO: 1127 - protein, 1273 aa, Artificial Sequence
  SARS-CoV-2/USA/NY-NYUMC7/2020__EPI_ISL_418192 spike protein (1-1273)(A972C_R995C)
MFVFLVLLPLVSSQCVNLTTRTQLPPAYTNSFTRGVYYPDKVFRSSVLHSTQDLFLPFFSNVTWFHAIHVSGTNGTKRFDNPVLPFNDGVYFASTEKSNIIRGWIFGTTLDSKTQSLLIVNNATNVVIKVCEFQFCNDPFLGVYHHKNNKSWMESEFRVYSSANNCTFEYVSQPFLMDLEGKQGNFKNLREFVFKNIDGYFKIYSKHTPINLVRDLPQGFSALEPLVDLPIGINITRFQTLLALHRSYLTPGDSSSGWTAGAAAYYVGYLQPRTFLLKYNENGTITDAVDCALDPLSETKCTLKSFTVEKGIYQTSNFRVQPTESIVRFPNITNLCPFGEVFNATRFASVYAWNRKRISNCVADYSVLYNSASFSTFKCYGVSPTKLNDLCFTNVYADSFVIRGDEVRQIAPGQTGKIADYNYKLPDDFTGCVIAWNSNNLDSKVGGNYNYLYRLFRKSNLKPFERDISTEIYQAGSTPCNGVEGFNCYFPLQSYGFQPTNGVGYQPYRVVVLSFELLHAPATVCGPKKSTNLVKNKCVNFNFNGLTGTGVLTESNKKFLPFQQFGRDIADTTDAVRDPQTLEILDITPCSFGGVSVITPGTNTSNQVAVLYQGVNCTEVPVAIHADQLTPTWRVYSTGSNVFQTRAGCLIGAEHVNNSYECDIPIGAGICASYQTQTNSPRRARSVASQSIIAYTMSLGAENSVAYSNNSIAIPTNFTISVTTEILPVSMTKTSVDCTMYICGDSTECSNLLLQYGSFCTQLNRALTGIAVEQDKNTQEVFAQVKQIYKTPPIKDFGGFNFSQILPDPSKPSKRSFIEDLLFNKVTLADAGFIKQYGDCLGDIAARDLICAQKFNGLTVLPPLLTDEMIAQYTSALLAGTITSGWTFGAGAALQIPFAMQMAYRFNGIGVTQNVLYENQKLIANQFNSAIGKIQDSLSSTASALGKLQDVVNQNAQALNTLVKQLSSNFGCISSVLNDILSRLDKVEAEVQIDCLITGRLQSLQTYVTQQLIRAAEIRASANLAATKMSECVLGQSKRVDFCGKGYHLMSFPQSAPHGVVFLHVTYVPAQEKNFTTAPAICHDGKAHFPREGVFVSNGTHWFVTQRNFYEPQIITTDNTFVSGNCDVVIGIVNNTVYDPLQPELDSFKEELDKYFKNHTSPDVDLGDISGINASVVNIQKEIDRLNEVAKNLNESLIDLQELGKYEQYIKWPWYIWLGFIAGLIAIVMVTIMLCCMTSCCSCLKGCCSCGSCCKFDEDDSEPVLKGVKLHYT

SEQ ID NO: 1128 - protein, 1273 aa, Artificial Sequence
  SARS-CoV-2/Iceland/189/2020__EPI_ISL_417709 spike protein (1-1273)(A972C_R995C)
MFVFLVLLPLVSSQCVNLTTRTQLPPAYTNSFTRGVYYPDKVFRSSVLHSTQDLFLPFFSNVTWFHAIHVSGTNGTKRFDNPVLPFNDGVYFASTEKSNIIRGWIFGTTLDSKTQSLLIVNNATNVVIKVCEFQFCNDPFLGVYYHKNNKSWMESEFRVYSSANNCTFEYVSQPFLMDLEGKQGNFKNLREFVFKNIDGYFKIYSKHTPINLVRDLPQGFSALEPLVDLPIGINITRFQTLLALHRSYLTPGDSSSGWTAGAAAYYVGYLQPRTFLLKYNENGTITDAVDCALDPLSETKCTLKSFTVEKGIYQTSNFRVQPTESIVRFPNITNLCPFGEVFNATRFASVYAWNRKRISNCVADYSVLYNSASFSTFKCYGVSPTKLNDLCFTNVYADSFVIRGDEVRQIAPGQTGKIADYNYKLPDDFTGCVIAWNSNNLDSKVGGNYNYLYRLFRKSNLKPFERDISTEIYQAGSTPCNGVEGFNCYFPLQSYGFQPTNGVGYQPYRVVVLSFELLHAPATVCGPKKSTNLVKNKCVNFNFNGLTGTGVLTESNKKFLPFQQFGRDIADTTDAVRDPQTLEILDITPCSFGGVSVITPGTNTSNQVAVLYQGVNCTEVPVAIHADQLTPTWRVYSTGSNVFQTRAGCLIGAEHVNNSYECDIPIGAGICASYQTQTNSPRRARSVASQSIIAYTMSLGAENSVAYSNNSIAIPTNFTISVTTEILPVSMTKTSVDCTMYICGDSTECSNLLLQYGSFCTQLNRALTGIAVEQDKNTQEVFAQVKQIYKTPPIKDFGGFNFSQILPDPSKPSKRSFIEDLLFNKVTLADAGFTKQYGDCLGDIAARDLICAQKFNGLTVLPPLLTDEMIAQYTSALLAGTITSGWTFGAGAALQIPFAMQMAYRFNGIGVTQNVLYENQKLIANQFNSAIGKIQDSLSSTASALGKLQDVVNQNAQALNTLVKQLSSNFGCISSVLNDILSRLDKVEAEVQIDCLITGRLQSLQTYVTQQLIRAAEIRASANLAATKMSECVLGQSKRVDFCGKGYHLMSFPQSAPHGVVFLHVTYVPAQEKNFTTAPAICHDGKAHFPREGVFVSNGTHWFVTQRNFYEPQIITTDNTFVSGNCDVVIGIVNNTVYDPLQPELDSFKEELDKYFKNHTSPDVDLGDISGINASVVNIQKEIDRLNEVAKNLNESLIDLQELGKYEQYIKWPWYIWLGFIAGLIAIVMVTIMLCCMTSCCSCLKGCCSCGSCCKFDEDDSEPVLKGVKLHYT

SEQ ID NO: 1129 - protein, 1273 aa, Artificial Sequence
  SARS-CoV-2/Australia/NSW56/2020__EPI_ISL_417408 spike protein (1-1273)(A972C_R995C)
MFVFLVLLPLVSSQCVNLTTRTQLPPAYTNSFTRGVYYPDKVFRSSVLHSTQDLFLPFFSNVTWFHAIHVSGTNGTKRFDNPVLPFNDGVYFASTEKSNIIRGWIFGTTLDSKTQSLLIVNNATNVVIKVCEFQFCNDPFLGVYYHKNNKSWMESEFRVYSSANNCTFEYVSQPFLMDLEGKQGNFKNLREFVFKNIDGYFKIYSKHTPINLVRDLPQGFSALEPLVDLPIGINITRFQTLLALHRSYLTPGDSSSGWTAGAAAYYVGYLQPRTFLLKYNENGTITDAVDCALDPLSETKCTLKSFTVEKGIYQTSNFRVQPTESIVRFPNITNLCPFGEVFNATRFASVYAWNRKRISNCVADYSVLYNSASFSTFKCYGVSPTKLNDLCFTNVYADSFVIRGDEVRQIAPGQTGKIADYNYKLPDDFTGCVIAWNSNNLDSKVGGNYNYLYRLFRKSNLKPFERDISTEIYQAGSTPCNGVEGFNCYFPLQSYGFQPTNGVGYQPYRVVVLSFELLHAPATVCGPKKSTNLVKNKCVNFNFNGLTGTGVLTESNKKFLPFQQFGRDIADTTDAVRDPQTLEILDITPCSFGGVSVITPGTNTSNQVAVLYQDVNCTEVPVAIHADQLTPTWRVYSTGSNVFQTRAGCLIGAEHVNNSYECDIPIGAGICASYQTQTNSPRRARSVASQSIIAYTMSLGAENSVAYSNNSIAIPTNFTISVTTEILPVSMTKTSVDCTMYICGDSTECSNLLLQYGSFCTQLNRALTGIAVEQDKNTQEVFAQVKQIYKTPPIKDFGGFNFSQILPDSSKPSKRSFIEDLLFNKVTLADAGFIKQYGDCLGDIAARDLICAQKFNGLTVLPPLLTDEMIAQYTSALLAGTITSGWTFGAGAALQIPFAMQMAYRFNGIGVTQNVLYENQKLIANQFNSAIGKIQDSLSSTASALGKLQDVVNQNAQALNTLVKQLSSNFGCISSVLNDILSRLDKVEAEVQIDCLITGRLQSLQTYVTQQLIRAAEIRASANLAATKMSECVLGQSKRVDFCGKGYHLMSFPQSAPHGVVFLHVTYVPAQEKNFTTAPAICHDGKAHFPREGVFVSNGTHWFVTQRNFYEPQIITTDNTFVSGNCDVVIGIVNNTVYDPLQPELDSFKEELDKYFKNHTSPDVDLGDISGINASVVNIQKEIDRLNEVAKNLNESLIDLQELGKYEQYIKWPWYIWLGFIAGLIAIVMVTIMLCCMTSCCSCLKGCCSCGSCCKFDEDDSEPVLKGVKLHYT

SEQ ID NO: 1130 - protein, 1273 aa, Artificial Sequence
  SARS-CoV-2/Iceland/280/2020__EPI_ISL_417608 spike protein (1-1273)(A972C_R995C)
MFVFLVLLPLVSSQCVNLTTRTQLPPAYTNSFTRGVYYPDKVFRSSVLHSTQDLFLPFFSNVTWFHAIHVSGTNGTKRFDNPVLPFNDGVYFASTEKSNIIRGWIFGTTLDSKTQSLLIVNNATNVVIKVCEFQFCNDPFLGVYYHKNNKSWMESEFRVYSSANNCTFEYVSQPFLMDLEGKQGNFKNLREFVFKNIDGYFKIYSKHTPINLVRDLPQGFSALEPLVDLPIGINITRFQTLLALHRSYLTPGDSSSGWTAGAAAYYVGYLQPRTFLLKYNENGTITDAVDCALDPLSETKCTLKSFTVEKGIYQTSNFRVQPTESIVRFPNITNLCPFGEVFNATRFASVYAWNRKRISNCVADYSVLYNSASFSTFKCYGVSPTKLNDLCFTNVYADSFVIRGDEVRQIAPGQTGKIADYNYKLPDDFTGCVIAWNSNNLDSKVGGNYNYLYRLFRKSNLKPFERDISTEIYQAGSTPCNGVEGFNCYFPLQSYGFQPTNGVGYQPYRVVVLSFELLHAPATVCGPKKSTNLVKNKCVNFNFNGLTGTGVLTESNKKFLPFQQFGRDIADTTDAVRDPQTLEILDITPCSFGGVSVITPGTNTSNQVAVLYQGVNCTEVPVAIHADQLTPTWRVYSTGSNVFQTRAGCLIGAEHVNNSYECDIPIGAGICASYHTQTNSPRRARSVASQSIIAYTMSLGAENSVAYSNNSIAIPTNFTISVTTEILPVSMTKTSVDCTMYICGDSTECSNLLLQYGSFCTQLNRALTGIAVEQDKNTQEVFAQVKQIYKTPPIKDFGGFNFSQILPDPSKPSKRSFIEDLLFNKVTLADAGFIKQYGDCLGDIAARDLICAQKFNGLTVLPPLLTDEMIAQYTSALLAGTITSGWTFGAGAALQIPFAMQMAYRFNGIGVTQNVLYENQKLIANQFNSAIGKIQDSLSSTASALGKLQDVVNQNAQALNTLVKQLSSNFGCISSVLNDILSRLDKVEAEVQIDCLITGRLQSLQTYVTQQLIRAAEIRASANLAATKMSECVLGQSKRVDFCGKGYHLMSFPQSAPHGVVFLHVTYVPAQEKNFTTAPAICHDGKAHFPREGVFVSNGTHWFVTQRNFYEPQIITTDNTFVSGNCDVVIGIVNNTVYDPLQPELDSFKEELDKYFKNHTSPDVDLGDISGINASVVNIQKEIDRLNEVAKNLNESLIDLQELGKYEQYIKWPWYIWLGFIAGLIAIVMVTIMLCCMTSCCSCLKGCCSCGSCCKFDEDDSEPVLKGVKLHYT

SEQ ID NO: 1131 - protein, 1273 aa, Artificial Sequence
  SARS-CoV-2/Iceland/247/2020__EPI_ISL_417575 spike protein (1-1273)(A972C_R995C)
MFVFLVLLPLVSSQCVNLTTRTQLPPAYTNSFTRGVYYPDKVFRSSVLHSTQDLFLPFFSNVTWFHAIHVSGTNGTKRFDNPVLPFNDGVYFASTEKSNIIRGWIFGTTLDSKTQSLLIVNNATNVVIKVCEFQFCNDPFLGVYYHKNNKSWMESEFRVYSSANNCTFEYVSQPFLMDLEGKQGNFKNLREFVFKNIDGYFKIYSKHTPINLVRDLPQGFSALEPLVDLPIGINITRFQTLLALHRSYLTPGDSSSGWTAGAAAYYVGYLQPRTFLLKYNENGTITDAVDCALDPLSETKCTLKSFTVEKGIYQTSNFRVQPTESIVRFPNITNLCPFGEVFNATRFASVYAWNRKRISNCVADYSVLYNSASFSTFKCYGVSPTKLNDLCFTNVYADSFVIRGDEVRQIAPGQTGKIADYNYKLPDDFTGCVIAWNSNNLDSKVGGNYNYLYRLFRKSNLKPFERDISTEIYQAGSTPCNGVEGFNCYFPLQSYGFQPTNGVGYQPYRVVVLSFELLHAPATVCGPKKSTNLVKNKCVNFNFNGLTGTGVLTESNKKFLPFQQFGRDIADTTDAVRDPQTLEILDITPCSFGGVSVITPGTNTSNQVAVLYQGVNCTEVPVAIHADQLTPTWRVYSTGSNVFQTRAGCLIGAEHVNNSYECDIPIGAGICASYQTQTNSPRRARSVASQSIIAYTMSLGAENSVAYSNNSIAIPTNFTISVTTEILPVSMTKTSVDCTMYICGDSTECSNLLLQYGSFCTQLNRALTGIAVEQDKNTQEVFAQVKQIYKTPPIKDFGGFNFSQILPDPSKPSKRSFIEDLLFNKVTLADAGFIKQYGDCLGDIAARDLICAQKFNGLTVLPPLLTDEMIAQYTSALLAGTITSGWTFGAGAALQIPFAMQMAYRFNGIGVTQNVLYENQKLIANQFNSAIGKIQDSLSSTASALGKLQDVVNQNAQALNTLVKQLSSNFGCISSVLNDILSRLDKVEAEVQIDCLITGRLQSLQTYVTQQLIRAAEIRASANLAATKMSECVLGQSKRVDFCGKGYHLMSFPQSAPHGVVFLHVTYVPAQEKNFTTAPAICHDGKAHFPREGVFVSNGTHWFVTQRNFYEPQIITTDNTFVSGNCDVVIGIVNNTVYDPLQPELDSFKEELDKYFKNHTSPDVDLGDISGINASVVNIQKEIDRLNEVAKNLNESLIDLQELGKYEQYIKWPWYIWLGFIAGLIAIVIVTIMLCCMTSCCSCLKGCCSCGSCCKFDEDDSEPVLKGVKLHYT

SEQ ID NO: 1132 - protein, 1273 aa, Artificial Sequence
  SARS-CoV-2/Iceland/238/2020__EPI_ISL_417566 spike protein (1-1273)(A972C_R995C)
MFVFLVLLPLVSSQCVNLTTRTQLPPAYTNSFTRGVYYPDKVFRSSVLHSTQDLFLPFFSNVTWFHAIHVSGTNGTKRFDNPVLPFNDGVYFASTEKSNIIRGWIFGTTLDSKTQSLLIVNNATNVVIKVCEFQFCNDPFLGVYYHKNNKSWMESEFRVYSSANNCTFEYVSQPFLMDLEGKQGNFKNLREFVFKNIDGYFKIYSKHTPINLVRDLPQGFSALEPLVDLPIGINITRFQTLLALHRSYLTPGDSSSGWTAGAAAYYVGYLQPRTFLLKYNENGTITDAVDCALDPLSETKCTLKSFTVEKGIYQTSNFRVQPTESIVRFPNITNLCPFGEVFNATRFASVYAWNRKRISNCVADYSVLYNSASFSTFKCYGVSPTKLNDLCFTNVYADSFVIRGDEVRQIAPGQTGKIADYNYKLPDDFTGCVIAWNSNNLDSKVGGNYNYLYRLFRKSNLKPFERDISTEIYQAGSTPCNGVEGFNCYFPLQSYGFQPTNGVGYQPYRVVVLSFELLHAPATVCGPKKSTNLVKNKCVNFNFNGLTGTGVLTESNKKFLPFQQFGRDIADTTDAVRDPQTLEILDITPCSFGGVSVITPGTNTSNQVAVLYQGVNCTEVPVAIHADQLTPTWRVYSTGSNVFQTRAGCLIGAEHVNNSYECDIPIGAGICASYQTQTNSPRRARSVASQSIIAYTMSLGAENSVAYSNNSIAIPTNFTISVTTEILPVSMTKTSVDCTMYICGDSTECSNLLLQYGSFCTQLNRALTGIAVEQDKNTQEVFAQVKQIYKTPPIKDFGGFNFSQILPDPSKPSKRSFIEDLLFNKVTLADVGFIKQYGDCLGDIAARDLICAQKFNGLTVLPPLLTDEMIAQYTSALLAGTITSGWTFGAGAALQIPFAMQMAYRFNGIGVTQNVLYENQKLIANQFNSAIGKIQDSLSSTASALGKLQDVVNQNAQALNTLVKQLSSNFGCISSVLNDILSRLDKVEAEVQIDCLITGRLQSLQTYVTQQLIRAAEIRASANLAATKMSECVLGQSKRVDFCGKGYHLMSFPQSAPHGVVFLHVTYVPAQEKNFTTAPAICHDGKAHFPREGVFVSNGTHWFVTQRNFYEPQIITTDNTFVSGNCDVVIGIVNNTVYDPLQPELDSFKEELDKYFKNHTSPDVDLGDISGINASVVNIQKEIDRLNEVAKNLNESLIDLQELGKYEQYIKWPWYIWLGFIAGLIAIVMVTIMLCCMTSCCSCLKGCCSCGSCCKFDEDDSEPVLKGVKLHYT

SEQ ID NO: 1133 - protein, 1273 aa, Artificial Sequence
  SARS-CoV-2/Greece/16/2020__EPI_ISL_418265 spike protein (1-1273)(A972C_R995C)
MFVFLVLLPLVSSQCVNLTTRTQLPPAYTNSFTRGVYYPDKVFRSSVLHSTQDLFLPFFSNVTWFHAIHVSGTNGTKRFDNPVLPFNDGVYFASTEKSNIIRGWIFGTTLDSKTQSLLIVNNATNVVIKVCEFQFCNDPFLGVYYHKNNKSWMESEFRVYSSANNCTFEYVSQPFLMDLEGKQGNFKNLREFVFKNVDGYFKIYSKHTPINLVRDLPQGFSALEPLVDLPIGINITRFQTLLALHRSYLTPGDSSSGWTAGAAAYYVGYLQPRTFLLKYNENGTITDAVDCALDPLSETKCTLKSFTVEKGIYQTSNFRVQPTESIVRFPNITNLCPFGEVFNATRFASVYAWNRKRISNCVADYSVLYNSASFSTFKCYGVSPTKLNDLCFTNVYADSFVIRGDEVRQIAPGQTGKIADYNYKLPDDFTGCVIAWNSNNLDSKVGGNYNYLYRLFRKSNLKPFERDISTEIYQAGSTPCNGVEGFNCYFPLQSYGFQPTNGVGYQPYRVVVLSFELLHAPATVCGPKKSTNLVKNKCVNFNFNGLTGTGVLTESNKKFLPFQQFGRDIADTTDAVRDPQTLEILDITPCSFGGVSVITPGTNTSNQVAVLYQDVNCTEVPVAIHADQLTPTWRVYSTGSNVFQTRAGCLIGAEHVNNSYECDIPIGAGICASYQTQTNSPRRARSVASQSIIAYTMSLGAENSVAYSNNSIAIPTNFTISVTTEILPVSMTKTSVDCTMYICGDSTECSNLLLQYGSFCTQLNRALTGIAVEQDKNTQEVFAQVKQIYKTPPIKDFGGFNFSQILPDPSKPSKRSFIEDLLFNKVTLADAGFIKQYGDCLGDIAARDLICAQKFNGLTVLPPLLTDEMIAQYTSALLAGTITSGWTFGAGAALQIPFAMQMAYRFNGIGVTQNVLYENQKLIANQFNSAIGKIQDSLSSTASALGKLQDVVNQNAQALNTLVKQLSSNFGCISSVLNDILSRLDKVEAEVQIDCLITGRLQSLQTYVTQQLIRAAEIRASANLAATKMSECVLGQSKRVDFCGKGYHLMSFPQSAPHGVVFLHVTYVPAQEKNFTTAPAICHDGKAHFPREGVFVSNGTHWFVTQRNFYEPQIITTDNTFVSGNCDVVIGIVNNTVYDPLQPELDSFKEELDKYFKNHTSPDVDLGDISGINASVVNIQKEIDRLNEVAKNLNESLIDLQELGKYEQYIKWPWYIWLGFIAGLIAIVMVTIMLCCMTSCCSCLKGCCSCGSCCKFDEDDSEPVLKGVKLHYT

SEQ ID NO: 1134 - protein, 1273 aa, Artificial Sequence
  SARS-CoV-2/Iceland/319/2020__EPI_ISL_417648 spike protein (1-1273)(A972C_R995C)
MFVFLVLLPLVSSQCVNLTTRTQLPPAYTNSFTRGVYYPDKVFRSSVLHSTQDLFLPFFSNVTWFHAIHVSGTNGTKRFDNPVLPFNDGVYFASTEKSNIIRGWIFGTTLDSKTQSLLIVNNATNVVIKVCEFQFCNDPFLGVYYHKNNKSWMESEFRVYSSANNCTFEYVSQPFLIDLEGKQGNFKNLREFVFKNIDGYFKIYSKHTPINLVRDLPQGFSALEPLVDLPIGINITRFQTLLALHRSYLTPGDSSSGWTAGAAAYYVGYLQPRTFLLKYNENGTITDAVDCALDPLSETKCTLKSFTVEKGIYQTSNFRVQPTESIVRFPNITNLCPFGEVFNATRFASVYAWNRKRISNCVADYSVLYNSASFSTFKCYGVSPTKLNDLCFTNVYADSFVIRGDEVRQIAPGQTGKIADYNYKLPDDFTGCVIAWNSNNLDSKVGGNYNYLYRLFRKSNLKPFERDISTEIYQAGSTPCNGVEGFNCYFPLQSYGFQPTNGVGYQPYRVVVLSFELLHAPATVCGPKKSTNLVKNKCVNFNFNGLTGTGVLTESNKKFLPFQQFGRDIADTTDAVRDPQTLEILDITPCSFGGVSVITPGTNTSNQVAVLYQGVNCTEVPVAIHADQLTPTWRVYSTGSNVFQTRAGCLIGAEHVNNSYECDIPIGAGICASYQTQTNSPRRARSVASQSIIAYTMSLGAENSVAYSNNSIAIPTNFTISVTTEILPVSMTKTSVDCTMYICGDSTECSNLLLQYGSFCTQLNRALTGIAVEQDKNTQEVFAQVKQIYKTPPIKDFGGFNFSQILPDPSKPSKRSFIEDLLFNKVTLADAGFIKQYGDCLGDIAARDLICAQKFNGLTVLPPLLTDEMIAQYTSALLAGTITSGWTFGAGAALQIPFAMQMAYRFNGIGVTQNVLYENQKLIANQFNSAIGKIQDSLSSTASALGKLQDVVNQNAQALNTLVKQLSSNFGCISSVLNDILSRLDKVEAEVQIDCLITGRLQSLQTYVTQQLIRAAEIRASANLAATKMSECVLGQSKRVDFCGKGYHLMSFPQSAPHGVVFLHVTYVPAQEKNFTTAPAICHDGKAHFPREGVFVSNGTHWFVTQRNFYEPQIITTDNTFVSGNCDVVIGIVNNTVYDPLQPELDSFKEELDKYFKNHTSPDVDLGDISGINASVVNIQKEIDRLNEVAKNLNESLIDLQELGKYEQYIKWPWYIWLGFIAGLIAIVMVTIMLCCMTSCCSCLKGCCSCGSCCKFDEDDSEPVLKGVKLHYT

SEQ ID NO: 1135 - protein, 1273 aa, Artificial Sequence
  SARS-CoV-2/Congo/94/2020__EPI_ISL_417947 spike protein (1-1273)(A972C_R995C)
MFVFLVLLPLVSSQCVNLTTRTQLPPAYTNSFTRGVYYPDKVFRSSVLHSTQDLFLPFFSNVTWFHAIHVSGTNGTKRFDNPVLPFNDGVYFASTEKSNIIRGWIFGTTLDSKTQSLLIVNNATNVVIKVCEFQFCNDPFLGVYYHKNNKSWMESEFRVYSSANNCTFEYVSQPFLMDLEGKQGNFKNLREFVFKNIDGYFKIYSKHTPINLVRDLPQGFSALEPLVDLPIGINITRFQTLLALHRSYLTPGDSSSGWTAGAAAYYVGYLQPRTFLLKYNENGTITDAVDCALDPLSETKCTLKSFTVEKGIYQTSNFRVQPTESIVRFPNITNLCPFGEVFNATRFASVYAWNRKRISNCVADYSVLYNSASFSTFKCYGVSPTKLNDLCFTNVYADSFVIRGDEVRQIAPGQTGKIADYNYKLPDDFTGCVIAWNSNNLDSKVGGNYNYLYRLFRKSNLKPFERDISTEIYQAGSTPCNGVEGFNCYFPLQSYGFQPTNGVGYQPYRVVVLSFELLHAPATVCGPKKSTNLVKNKCVNFNFNGLTGTGVLTESNKKFLPFQQFGRDIADTTDAVRDPQTLEILDITPCSFGGVSVITPGTNTSNQVAVLYQGVNCTEVPVAIHADQLTPTWRVYSTGSNVFQTRAGCLIGAEHVNNSYECDIPIGAGICASYQTQTNSPRRARSVASQSIIAYTMSLGAENSVAYSNNSIAIPTNFTISVTTEILPVSMTKTSVDCTMYICGDSTECSNLLLQYGSFCTQLNRALTGIAVEQDKNTQEVFAQVKQIYKTPPIKDFGGFNFSQILPDPSKPSKRSFIEDILFNKVTLADAGFIKQYGDCLGDIAARDLICAQKFNGLTVLPPLLTDEMIAQYTSALLAGTITSGWTFGAGAALQIPFAMQMAYRFNGIGVTQNVLYENQKLIANQFNSAIGKIQDSLSSTASALGKLQDVVNQNAQALNTLVKQLSSNFGCISSVLNDILSRLDKVEAEVQIDCLITGRLQSLQTYVTQQLIRAAEIRASANLAATKMSECVLGQSKRVDFCGKGYHLMSFPQSAPHGVVFLHVTYVPAQEKNFTTAPAICHDGKAHFPREGVFVSNGTHWFVTQRNFYEPQIITTDNTFVSGNCDVVIGIVNNTVYDPLQPELDSFKEELDKYFKNHTSPDVDLGDISGINASVVNIQKEIDRLNEVAKNLNESLIDLQELGKYEQYIKWPWYIWLGFIAGLIAIVMVTIMLCCMTSCCSCLKGCCSCGSCCKFDEDDSEPVLKGVKLHYT

SEQ ID NO: 1136 - protein, 1273 aa, Artificial Sequence
  SARS-CoV-2/Congo/158/2020__EPI_ISL_417950 spike protein (1-1273)(A972C_R995C)
MFVFLVLLPLVSSQCVNLTTRTQLPPAYTNSFTRGVYYPDKVFRSSVLHSTQDLFLPFFSNVTWFHAIHVSGTNGTKRFDNPVLPFNDGVYFASTEKSNIIRGWIFGTTLDSKTQSLLIVNNATNVVIKVCEFQFCNDPFLGVYYHKNNKSWMESEFRVYSSANNCTFEYVSQPFLMDLEGKQGNFKNLREFVFKNIDGYFKIYSKHTPINLVRDLPQGFSALEPLVDLPIGINITRFQTLLALHRSYLTPGDSSSGWTAGAAAYYVGYLQPRTFLLKYNENGTITDAVDCALDPLSETKCTLKSFTVEKGIYQTSNFRVQPTESIVRFPNITNLCPFGEVFNATRFASVYAWNRKRISNCVADYSVLYNSASFSTFKCYGVSPTKLNDLCFTNVYADSFVIRGDEVRQIAPGQTGKIADYNYKLPDDFTGCVIAWNSNNLDSKVGGNYNYLYRLFRKSNLKPFERDISTEIYQAGSTPCNGVEGFNCYFPLQSYGFQPTNGVGYQPYRVVVLSFELLHAPATVCGPKKSTNLVKNKCVNFNFNGLTGTGVLTESNKKFLPFQQFGRDIADTTDAVRDPQTLEILDITPCSFGGVSVITPGTNTSNQVAVLYQDVNCTEVPVAIHADQLTPTWRVYSTGSNVFQTRAGCLIGAEHVNNSYECDIPIGAGICASYQTQTNSPRRARSVASQSIIAYTMSLGAENSVAYSNNSIAIPTNFTISVTTEILPVSMTKTSVDCTMYICGDSTECSNLLLQYGSFCTQLNRALTGIAVEQDKNTQEVFAQVKQIYKTPPIKDFGGFNFSQILPDPSKPSKRSFIEDLLFNKVTLADAGFIKQYGDCLGDIAARDLICAQKFNGLTVLPPLLTDEMIAQYTSALLAGTITSGWTFGAGAALQIPFAMQMAYRFNGIGVTQNVLYENQKLIANQFNSAIGKIQDSLSSTASALGKLQDVVNQNAQALNTLVKQLSSNFGCISSVLNDILSRLDKVEAEVQIDCLITGRLQSLQTYVTQQLIRAAEIRASANLAATKMSECVLGQSKRVDFCGKGYHLMSFPQSAPHGVVFLHVTYVPAQEKNFTTAPAICHDGKAHFPREGVFVSNGTHWFVTQRNFYEPQIITTDNTFLSGNCDVVIGIVNNTVYDPLQPELDSFKEELDKYFKNHTSPDVDLGDISGINASVVNIQKEIDRLNEVAKNLNESLIDLQELGKYEQYIKWPWYIWLGFIAGLIAIVMVTIMLCCMTSCCSCLKGCCSCGSCCKFDEDDSEPVLKGVKLHYT

SEQ ID NO: 1137 - protein, 1273 aa, Artificial Sequence
  SARS-CoV-2/USA/UT-00034/2020__EPI_ISL_417977 spike protein (1-1273)(A972C_R995C)
MFVFLVLLPLVSSQCVNLTTRTQLPPAYTNSFTRGVYYPDKVFRSSVLHSTQDLFLPFFSNVTWFHAIHVSGTNGTKRFDNPVLPFNDGVYFASTEKSNIIRGWIFGTTLDSKTQSLLIVNNATNVVIKVCEFQFCNDPFLGVYYYKNNKSWMESEFRVYSSANNCTFEYVSQPFLMDLEGKQGNFKNLREFVFKNIDGYFKIYSKHTPINLVRDLPQGFSALEPLVDLPIGINITRFQTLLALHRSYLTPGDSSSGWTAGAAAYYVGYLQPRTFLLKYNENGTITDAVDCALDPLSETKCTLKSFTVEKGIYQTSNFRVQPTESIVRFPNITNLCPFGEVFNATRFASVYAWNRKRISNCVADYSVLYNSASFSTFKCYGVSPTKLNDLCFTNVYADSFVIRGDEVRQIAPGQTGKIADYNYKLPDDFTGCVIAWNSNNLDSKVGGNYNYLYRLFRKSNLKPFERDISTEIYQAGSTPCNGVEGFNCYFPLQSYGFQPTNGVGYQPYRVVVLSFELLHAPATVCGPKKSTNLVKNKCVNFNFNGLTGTGVLTESNKKFLPFQQFGRDIADTTDAVRDPQTLEILDITPCSFGGVSVITPGTNTSNQVAVLYQGVNCTEVPVAIHADQLTPTWRVYSTGSNVFQTRAGCLIGAEHVNNSYECDIPIGAGICASYQTQTNSPRRARSVASQSIIAYTMSLGAENSVAYSNNSIAIPTNFTISVTTEILPVSMTKTSVDCTMYICGDSTECSNLLLQYGSFCTQLNRALTGIAVEQDKNTQEVFAQVKQIYKTPPIKDFGGFNFSQILPDPSKPSKRSFIEDLLFNKVTLADAGFIKQYGDCLGDIAARDLICAQKFNGLTVLPPLLTDEMIAQYTSALLAGTITSGWTFGAGAALQIPFAMQMAYRFNGIGVTQNVLYENQKLIANQFNSAIGKIQDSLSSTASALGKLQDVVNQNAQALNTLVKQLSSNFGCISSVLNDILSRLDKVEAEVQIDCLITGRLQSLQTYVTQQLIRAAEIRASANLAATKMSECVLGQSKRVDFCGKGYHLMSFPQSAPHGVVFLHVTYVPAQEKNFTTAPAICHDGKAHFPREGVFVSNGTHWFVTQRNFYEPQIITTDNTFVSGNCDVVIGIVNNTVYDPLQPELDSFKEELDKYFKNHTSPDVDLGDISGINASVVNIQKEIDRLNEVAKNLNESLIDLQELGKYEQYIKWPWYIWLGFIAGLIAIVMVTIMLCCMTSCCSCLKGCCSCGSCCKFDEDDSEPVLKGVKLHYT

SEQ ID NO: 1138 - protein, 1273 aa, Artificial Sequence
  SARS-CoV-2/USA/UT-00033/2020__EPI_ISL_417976 spike protein (1-1273)(A972C_R995C)
MFVFLVLLPLVSSQCVNLTTRTQLPPAYTNSFTRGVYYPDKVFRSSVLHSTQDLFLPFFSNVTWFHAIHVSGTNGTKRFDNPVLPFNDGVYFASTEKSNIIRGWIFGTTLDSKTQSLLIVNNATNVVIKVCEFQFCNDPFLGVYYHKNNKSWMESEFRVYSSANNCTFEYVSQPFLMDLEGKQGNFKNLREFVFKNIDGYFKIYSKHTPINLVRDLPQGFSALEPLVDLPIGINITRFQTLLALHRSYLTPGDSSSGLTAGAAAYYVGYLQPRTFLLKYNENGTITDAVDCALDPLSETKCTLKSFTVEKGIYQTSNFRVQPTESIVRFPNITNLCPFGEVFNATRFASVYAWNRKRISNCVADYSVLYNSASFSTFKCYGVSPTKLNDLCFTNVYADSFVIRGDEVRQIAPGQTGKIADYNYKLPDDFTGCVIAWNSNNLDSKVGGNYNYLYRLFRKSNLKPFERDISTEIYQAGSTPCNGVEGFNCYFPLQSYGFQPTNGVGYQPYRVVVLSFELLHAPATVCGPKKSTNLVKNKCVNFNFNGLTGTGVLTESNKKFLPFQQFGRDIADTTDAVRDPQTLEILDITPCSFGGVSVITPGTNTSNQVAVLYQGVNCTEVPVAIHADQLTPTWRVYSTGSNVFQTRAGCLIGAEHVNNSYECDIPIGAGICASYQTQTNSPRRARSVASQSIIAYTMSLGAENSVAYSNNSIAIPTNFTISVTTEILPVSMTKTSVDCTMYICGDSTECSNLLLQYGSFCTQLNRALTGIAVEQDKNTQEVFAQVKQIYKTPPIKDFGGFNFSQILPDPSKPSKRSFIEDLLFNKVTLADAGFIKQYGDCLGDIAARDLICAQKFNGLTVLPPLLTDEMIAQYTSALLAGTITSGWTFGAGAALQIPFAMQMAYRFNGIGVTQNVLYENQKLIANQFNSAIGKIQDSLSSTASALGKLQDVVNQNAQALNTLVKQLSSNFGCISSVLNDILSRLDKVEAEVQIDCLITGRLQSLQTYVTQQLIRAAEIRASANLAATKMSECVLGQSKRVDFCGKGYHLMSFPQSAPHGVVFLHVTYVPAQEKNFTTAPAICHDGKAHFPREGVFVSNGTHWFVTQRNFYEPQIITTDNTFVSGNCDVVIGIVNNTVYDPLQPELDSFKEELDKYFKNHTSPDVDLGDISGINASVVNIQKEIDRLNEVAKNLNESLIDLQELGKYEQYIKWPWYIWLGFIAGLIAIVMVTIMLCCMTSCCSCLKGCCSCGSCCKFDEDDSEPVLKGVKLHYT

SEQ ID NO: 1139 - protein, 1273 aa, Artificial Sequence
  SARS-CoV-2/USA/WI-13/2020__EPI_ISL_417516 spike protein (1-1273)(A972C_R995C)
MFVFLVLLPLVSSQCVNLTTRTQLPPAYTNSFTRGVYYPDKVFRSSVLHSTQDLFLPFFSNVTWFHAIHVSGTNGTKRFDNPVLPFNDGVYFASTEKSNIIRGWIFGTTLDSKTQSLLIVNNATNVVIKVCEFQFCNDPFLGVYYHKNNKSWMESEFRVYSSANNCTFEYVSQPFLMDLEGKQGNFKNLREFVFKNIDGYFKIYSKHTPINLVRDLPQGFSALEPLVDLPIGINITRFQTLLALHRSYLTPGDSSSGWTAGAAAYYVGYLQPRTFLLKYNENGTITDAVDCALDPLSETKCTLKSFTVEKGIYQTSNFRVLPTESIVRFPNITNLCPFGEVFNATRFASVYAWNRKRISNCVADYSVLYNSASFSTFKCYGVSPTKLNDLCFTNVYADSFVIRGDEVRQIAPGQTGKIADYNYKLPDDFTGCVIAWNSNNLDSKVGGNYNYLYRLFRKSNLKPFERDISTEIYQAGSTPCNGVEGFNCYFPLQSYGFQPTNGVGYQPYRVVVLSFELLHAPATVCGPKKSTNLVKNKCVNFNFNGLTGTGVLTESNKKFLPFQQFGRDIADTTDAVRDPQTLEILDITPCSFGGVSVITPGTNTSNQVAVLYQGVNCTEVPVAIHADQLTPTWRVYSTGSNVFQTRAGCLIGAEHVNNSYECDIPIGAGICASYQTQTNSPRRARSVASQSIIAYTMSLGAENSVAYSNNSIAIPTNFTISVTTEILPVSMTKTSVDCTMYICGDSTECSNLLLQYGSFCTQLNRALTGIAVEQDKNTQEVFAQVKQIYKTPPIKDFGGFNFSQILPDPSKPSKRSFIEDLLFNKVTLADAGFIKQYGDCLGDIAARDLICAQKFNGLTVLPPLLTDEMIAQYTSALLAGTITSGWTFGAGAALQIPFAMQMAYRFNGIGVTQNVLYENQKLIANQFNSAIGKIQDSLSSTASALGKLQDVVNQNAQALNTLVKQLSSNFGCISSVLNDILSRLDKVEAEVQIDCLITGRLQSLQTYVTQQLIRAAEIRASANLAATKMSECVLGQSKRVDFCGKGYHLMSFPQSAPHGVVFLHVTYVPAQEKNFTTAPAICHDGKAHFPREGVFVSNGTHWFVTQRNFYEPQIITTDNTFVSGNCDVVIGIVNNTVYDPLQPELDSFKEELDKYFKNHTSPDVDLGDISGINASVVNIQKEIDRLNEVAKNLNESLIDLQELGKYEQYIKWPWYIWLGFIAGLIAIVMVTIMLCCMTSCCSCLKGCCSCGSCCKFDEDDSEPVLKGVKLHYT

SEQ ID NO: 1140 - protein, 1272 aa, Artificial Sequence
  SARS-CoV-2/India/1-27/2020__EPI_ISL_413522 spike protein (1-1272)(A971C_R994C)
MFVFLVLLPLVSSQCVNLTTRTQLPPAYTNSFTRGVYYPDKVFRSSVLHSTQDLFLPFFSNVTWFHAIHVSGTNGTKRFDNPVLPFNDGVYFASTEKSNIIRGWIFGTTLDSKTQSLLIVNNATNVVIKVCEFQFCNDPFLGVYHKNNKSWMESEFRVYSSANNCTFEYVSQPFLMDLEGKQGNFKNLREFVFKNIDGYFKIYSKHTPINLVRDLPQGFSALEPLVDLPIGINITRFQTLLALHRSYLTPGDSSSGWTAGAAAYYVGYLQPRTFLLKYNENGTITDAVDCALDPLSETKCTLKSFTVEKGIYQTSNFRVQPTESIVRFPNITNLCPFGEVFNATRFASVYAWNRKRISNCVADYSVLYNSASFSTFKCYGVSPTKLNDLCFTNVYADSFVIRGDEVIQIAPGQTGKIADYNYKLPDDFTGCVIAWNSNNLDSKVGGNYNYLYRLFRKSNLKPFERDISTEIYQAGSTPCNGVEGFNCYFPLQSYGFQPTNGVGYQPYRVVVLSFELLHAPATVCGPKKSTNLVKNKCVNFNFNGLTGTGVLTESNKKFLPFQQFGRDIADTTDAVRDPQTLEILDITPCSFGGVSVITPGTNTSNQVAVLYQDVNCTEVPVAIHADQLTPTWRVYSTGSNVFQTRAGCLIGAEHVNNSYECDIPIGAGICASYQTQTNSPRRARSVASQSIIAYTMSLGAENSVAYSNNSIAIPTNFTISVTTEILPVSMTKTSVDCTMYICGDSTECSNLLLQYGSFCTQLNRALTGIAVEQDKNTQEVFAQVKQIYKTPPIKDFGGFNFSQILPDPSKPSKRSFIEDLLFNKVTLADAGFIKQYGDCLGDIAARDLICAQKFNGLTVLPPLLTDEMIAQYTSALLAGTITSGWTFGAGAALQIPFAMQMAYRFNGIGVTQNVLYENQKLIANQFNSAIGKIQDSLSSTASALGKLQDVVNQNAQALNTLVKQLSSNFGCISSVLNDILSRLDKVEAEVQIDCLITGRLQSLQTYVTQQLIRAAEIRASANLAATKMSECVLGQSKRVDFCGKGYHLMSFPQSAPHGVVFLHVTYVPAQEKNFTTAPAICHDGKAHFPREGVFVSNGTHWFVTQRNFYEPQIITTDNTFVSGNCDVVIGIVNNTVYDPLQPELDSFKEELDKYFKNHTSPDVDLGDISGINASVVNIQKEIDRLNEVAKNLNESLIDLQELGKYEQYIKWPWYIWLGFIAGLIAIVMVTIMLCCMTSCCSCLKGCCSCGSCCKFDEDDSEPVLKGVKLHYT

SEQ ID NO: 1141 - protein, 1267 aa, Artificial Sequence
  SARS-CoV-2/pangolin/Guangxi/P4L/2017__EPI_ISL_410538 spike protein (1-1267)(A966C_R989C)
MFVFLFVLPLVSSQCVNLTTRTGIPPGYTNSSTRGVYYPDKVFRSSILHLTQDLFLPFFSNVTWFNTINYQGGFKKFDNPVLPFNDGVYFASTEKSNIIRGWIFGTTLDARTQSLLIVNNATNVVIKVCEFQFCTDPFLGVYYHNNNKTWVENEFRVYSSANNCTFEYISQPFLMDLEGKQGNFKNLREFVFKNVDGYFKIYSKHTPIDLVRDLPRGFAALEPLVDLPIGINITRFQTLLALHRSYLTPGNLESGWTTGAAAYYVGYLQQRTFLLSYNQNGTITDAVDCSLDPLSETKCTLKSLTVEKGIYQTSNFRVQPTISIVRFPNITNLCPFGEVFNASKFASVYAWNRKRISNCVADYSVLYNSTSFSTFKCYGVSPTKLNDLCFTNVYADSFVVKGDEVRQIAPGQTGVIADYNYKLPDDFTGCVIAWNSVKQDALTGGNYGYLYRLFRKSKLKPFERDISTEIYQAGSTPCNGQVGLNCYYPLERYGFHPTTGVNYQPFRVVVLSFELLNGPATVCGPKLSTTLVKDKCVNFNFNGLTGTGVLTTSKKQFLPFQQFGRDISDTTDAVRDPQTLEILDITPCSFGGVSVITPGTNTSNQVAVLYQDVNCTEVPMAIHAEQLTPAWRVYSAGANVFQTRAGCLVGAEHVNNSYECDIPVGAGICASYHSMSSLRSVNQRSIIAYTMSLGAENSVAYSNNSIAIPTNFTISVTTEILPVSMTKTSVDCTMYICGDSIECSNLLLQYGSFCTQLNRALTGIAVEQDKNTQEVFAQVKQIYKTPPIKDFGGFNFSQILPDPSKPSKRSFIEDLLFNKVTLADAGFIKQYGDCLGDIAARDLICAQKFNGLTVLPPLLTDEMIAQYTSALLAGTITSGWTFGAGAALQIPFAMQMAYRFNGIGVTQNVLYENQKLIANQFNSAIGKIQDSLSSTASALGKLQDVVNQNAQALNTLVKQLSSNFGCISSVLNDILSRLDKVEAEVQIDCLITGRLQSLQTYVTQQLIRAAEIRASANLAATKMSECVLGQSKRVDFCGKGYHLMSFPQSAPHGVVFLHVTYVPAQEKNFTTAPAICHEGKAHFPREGVFVSNGTHWFITQRNFYEPQIITTDNTFVSGSCDVVIGIVNNTVYDPLQPELDSFKEELDKYFKNHTSPDVDLGDISGINASVVNIQKEIDRLNEVAKNLNESPIDLQELGKYEQYIKWPWYIWLGFIAGLIAIIMVTIMLCCMTSCCSCLKGCCSCGSCCKFDEDDSEPVLKGVKLHYT

SEQ ID NO: 1142 - protein, 1267 aa, Artificial Sequence
  SARS-CoV-2/pangolin/Guangxi/P5L/2017__EPI_ISL_410540 spike protein (1-1267)(A966C_R989C)
MFVFLFVLPLVSSQCVNLTTRTGIPPGYTNSSTRGVYYPDKVFRSSILHLTQDLFLPFFSNVTWFNTINYQGGFKKFDNPVLPFNDGVYFASTEKSNIIRGWIFGTTLDARTQSLLIVNNATNVVIKVCEFQFCTDPFLGVYYHNNNKTWVENEFRVYSSANNCTFEYISQPFLMDLEGKQGNFKNLREFVFKNVDGYFKIYSKHTPIDLVRDLPRGFAALEPLVDLPIGINITRFQTLLALHRSYLTPGKLESGWTTGAAAYYVGYLQQRTFLLSYNQNGTITDAVDCSLDPLSETKCTLKSLTVEKGIYQTSNFRVQPTISIVRFPNITNLCPFGEVFNASKFASVYAWNRKRISNCVADYSVLYNSTSFSTFKCYGVSPTKLNDLCFTNVYADSFVVKGDEVRQIAPGQTGVIADYNYKLPDDFTGCVIAWNSVKQDALTGGNYGYLYRLFRKSKLKPFERDISTEIYQAGSTPCNGQVGLNCYYPLERYGFHPTTGVNYQPFRVVVLSFELLNGPATVCGPKLSTTLVKDKCVNFNFNGLTGTGVLTTSKKQFLPFQQFGRDISDTTDAVRDPQTLEILDITPCSFGGVSVITPGTNTSNQVAVLYQDVNCTEVPMAIHAEQLTPAWRVYSAGANVFQTRAGCLVGAEHVNNSYECDIPVGAGICASYHSMSSFRSVNQRSIIAYTMSLGAENSVAYSNNSIAIPTNFTISVTTEILPVSMTKTSVDCTMYICGDSIECSNLLLQYGSFCTQLNRALTGIAVEQDKNTQEVFAQVKQIYKTPPIKDFGGFNFSQILPDPSKPSKRSFIEDLLFNKVTLADAGFIKQYGDCLGDIAARDLICAQKFNGLTVLPPLLTDEMIAQYTSALLAGTITSGWTFGAGAALQIPFAMQMAYRFNGIGVTQNVLYENQKLIANQFNSAIGKIQDSLSSTASALGKLQDVVNQNAQALNTLVKQLSSNFGCISSVLNDILSRLDKVEAEVQIDCLITGRLQSLQTYVTQQLIRAAEIRASANLAATKMSECVLGQSKRVDFCGKGYHLMSFPQSAPHGVVFLHVTYVPAQEKNFTTAPAICHEGKAHFPREGVFVSNGTHWFITQRNFYEPQIITTDNTFVSGSCDVVIGIVNNTVYDPLQPELDSFKEELDKYFKNHTSPDVDLGDISGINASVVNIQKEIDRLNEVAKNLNESLIDLQELGKYEQYIKWPWYIWLGFIAGLIAIIMVTIMLCCMTSCCSCLKGCCSCGSCCKFDEDDSEPVLKGVKLHYT

SEQ ID NO: 1143 - protein, 1267 aa, Artificial Sequence
  SARS-CoV-2/pangolin/Guangxi/P5E/2017__EPI_ISL_410541 spike protein (1-1267)(A966C_R989C)
MFVFLFVLPLVSSQCVNLTTRTGIPPGYTNSSTRGVYYPDKVFRSSILHLTQDLFLPFFSNVTWFNTITYQGGSKKFDNPVLPFNDGVYFASTEKSNIIRGWIFGTTLDARTQSLLIVNNATNVVIKVCEFQFCTDPFLGVYYHNNNKTWVENEFRVYSSANNCTFEYISQPFLMDLEGKQGNFKNLREFVFKNVDGYFKIYSKHTPIDLVRDLPRGFAALEPLVDLPIGINITRFQTLLALHRSYLTPGKLESGWTTGAAAYYVGYLQQRTFLLSYNQNGTITDAVDCSLDPLSETKCTLKSLTVEKGIYQTSNFRVQPTISIVRFPNITNLCPFGEVFNASKFASVYAWNRKRISNCVADYSVLYNSTSFSTFKCYGVSPTKLNDLCFTNVYADSFVVKGDEVRQIAPGQTGVIADYNYKLPDDFTGCVIAWNSVKQDALTGDNYGYLYRLFRKSKLKPFERDISTEIYQAGSTPCNGQVGLNCYYPLERYGFHPTTGVNYQPFRVVVLSFELLNGPATVCGPKLSTTLVKDKCVNFNFNGLTGTGVLTTSKKQFLPFQQFGRDISDTTDAVRDPQTLEILDITPCSFGGVSVITPGTNTSNQVAVLYQDVNCTEVPMAIHAEQLTPAWRVYSAGANVFQTRAGCLVGAEHVNNSYECDIPVGAGICASYHSMSSFRSVNQRSIIAYTMSLGAENSVAYSNNSIAIPTNFTISVTTEILPVSMTKTSVDCTMYICGDSIECSNLLLQYGSFCTQLNRALTGIAVEQDKNTQEVFAQVKQIYKTPPIKDFGGFNFSQILPDPSKPSKRSFIEDLLFNKVTLADAGFIKQYGDCLGDIAARDLICAQKFNGLTVLPPLLTDEMIAQYTSALLAGTITSGWTFGAGAALQIPFAMQMAYRFNGIGVTQNVLYENQKLIANQFNSAIGKIQDSLSSTASALGKLQDVVNQNAQALNTLVKQLSSNFGCISSVLNDILSRLDKVEAEVQIDCLITGRLQSLQTYVTQQLIRAAEIRASANLAATKMSECVLGQSKRVDFCGKGYHLMSFPQSAPHGVVFLHVTYVPAQEKNFTTAPAICHEGKAHFPREGVFVSNGTHWFITQRNFYEPQIITTDNTFVSGSCDVVIGIVNNTVYDPLQPELDSFKEELDKYFKNHTSPDVDLGDISGINASVVNIQKEIDRLNEVAKNLNESLIDLQELGKYEQYIKWPWYIWLGFIAGLIAIIMVTIMLCCMTSCCSCLKGCCSCGSCCKFDEDDSEPVLKGVKLHYT

SEQ ID NO: 1144 - protein, 1265 aa, Artificial Sequence
  SARS-CoV-2/pangolin/Guangxi/P1E/2017__EPI_ISL_410539 spike protein (1-1265)(A964C_R987C)
MFVFLFVLPLVSSQCVNLTTRTGIQPGYTNSSTRGVYYPDKVFRSSILHLTQDLFLPFFSNVTWFNTINYQGGFKKFDNPVLPFNDGVYFASTEKSNIIRGWIFGTTLDARTQSLLIVNNATNVVIKVCEFQFCTDPFLGVYYHNNNKTWVENEFRVYSSANNCTFEYISQPFLMDLEGKQGNFKNLREFVFKNVDGYFKIYSKHTPIDLVRDLPRGFAALEPLVDLPIGINITRFQTLLALHRSYLTPGKLESGWTTGAAAYYVGYLQQRTFLLSYNQNGTITDAVDCSLDPLSETKCTLKSLTVEKGIYQTSNFRVQPTISIVRFPNITNLCPFGEVFNASKFASVYAWNRKRISNCVADYSVLYNSTSFSTFKCYGVSPTKLNDLCFTNVYADSFVVKGDEVRQIAPGQTGVIADYNYKLPDDFTGCVIAWNSVKQDALTGGNYLYRLFRKSKLKPFERDISTEIYQAGSTPCNGQVGLNCYYPLERYGFHPTTGVNYQPFRVVVLSFELLNGPATVCGPKLSTTLVKDKCVNFNFNGLTGTGVLTTSKKQFLPFQQFGRDISDTTDAVRDPQTLEILDITPCSFGGVSVITPGTNTSNQVAVLYQDVNCTEVPMAIHAEQLTPAWRVYSAGANVFQTRAGCLVGAEHVNNSYECDIPVGAGICASYHSMSSLRSVNQRSIIAYTMSLGAENSVAYSNNSIAIPTNFTISVTTEILPVSMTKTSVDCTMYICGDSIECSNLLLQYGSFCTQLNRALTGIAVEQDKNTQEVFAQVKQIYKTPPIKDFGGFNFSQILPDPSKPSKRSFIEDLLFNKVTLADAGFIKQYGDCLGDIAARDLICAQKFNGLTVLPPLLTDEMIAQYTSALLAGTITSGWTFGAGAALQIPFAMQMAYRFNGIGVTQNVLYENQKLIANQFNSAIGKIQDSLSSTASALGKLQDVVNQNAQALNTLVKQLSSNFGCISSVLNDILSRLDKVEAEVQIDCLITGRLQSLQTYVTQQLIRAAEIRASANLAATKMSECVLGQSKRVDFCGKGYHLMSFPQSAPHGVVFLHVTYVPAQEKNFTTAPAICHEGKAHFPREGVFVSNGTHWFITQRNFYEPQIITTDNTFVSGSCDVVIGIVNNTVYDPLQPELDSFKEELDKYFKNHTSPDVDLGDISGINASVVNIQKEIDRLNEVAKNLNESLIDLQELGKYEQYIKWPWYIWLGFIAGLIAIIMVTIMLCCMTSCCSCLKGCCSCGSCCKFDEDDSEPVLKGVKLHYT

SEQ ID NO: 1145 - protein, 1273 aa, Artificial Sequence
  SARS-CoV-2/Wuhan/WIV05/2019__EPI_ISL_402128 spike protein (1-1273)(A890C_V1040C)
MFVFLVLLPLVSSQCVNLTTRTQLPPAYTNSFTRGVYYPDKVFRSSVLHSTQDLFLPFFSNVTWFHAIHVSGTNGTKRFDNPVLPFNDGVYFASTEKSNIIRGWIFGTTLDSKTQSLLIVNNATNVVIKVCEFQFCNDPFLGVYYHKNNKSWMESEFRVYSSANNCTFEYVSQPFLMDLEGKQGNFKNLREFVFKNIDGYFKIYSKHTPINLVRDLPQGFSALEPLVDLPIGINITRFQTLLALHRSYLTPGDSSSGWTAGAAAYYVGYLQPRTFLLKYNENGTITDAVDCALDPLSETKCTLKSFTVEKGIYQTSNFRVQPTESIVRFPNITNLCPFGEVFNATRFASVYAWNRKRISNCVADYSVLYNSASFSTFKCYGVSPTKLNDLCFTNVYADSFVIRGDEVRQIAPGQTGKIADYNYKLPDDFTGCVIAWNSNNLDSKVGGNYNYLYRLFRKSNLKPFERDISTEIYQAGSTPCNGVEGFNCYFPLQSYGFQPTNGVGYQPYRVVVLSFELLHAPATVCGPKKSTNLVKNKCVNFNFNGLTGTGVLTESNKKFLPFQQFGRDIADTTDAVRDPQTLEILDITPCSFGGVSVITPGTNTSNQVAVLYQDVNCTEVPVAIHADQLTPTWRVYSTGSNVFQTRAGCLIGAEHVNNSYECDIPIGAGICASYQTQTNSPRRARSVASQSIIAYTMSLGAENSVAYSNNSIAIPTNFTISVTTEILPVSMTKTSVDCTMYICGDSTECSNLLLQYGSFCTQLNRALTGIAVEQDKNTQEVFAQVKQIYKTPPIKDFGGFNFSQILPDPSKPSKRSFIEDLLFNKVTLADAGFIKQYGDCLGDIAARDLICAQKFNGLTVLPPLLTDEMIAQYTSALLAGTITSGWTFGCGAALQIPFAMQMAYRFNGIGVTQNVLYENQKLIANQFNSAIGKIQDSLSSTASALGKLQDVVNQNAQALNTLVKQLSSNFGAISSVLNDILSRLDKVEAEVQIDRLITGRLQSLQTYVTQQLIRAAEIRASANLAATKMSECVLGQSKRCDFCGKGYHLMSFPQSAPHGVVFLHVTYVPAQEKNFTTAPAICHDGKAHFPREGVFVSNGTHWFVTQRNFYEPQIITTDNTFVSGNCDVVIGIVNNTVYDPLQPELDSFKEELDKYFKNHTSPDVDLGDISGINASVVNIQKEIDRLNEVAKNLNESLIDLQELGKYEQYIKWPWYIWLGFIAGLIAIVMVTIMLCCMTSCCSCLKGCCSCGSCCKFDEDDSEPVLKGVKLHYT

SEQ ID NO: 1146 - protein, 1269 aa, Artificial Sequence
  SARS-CoV-2/bat/Yunnan/RaTG13/2013__EPI_ISL_402131 spike protein (1-1269)(A886C_V1036C)
MFVFLVLLPLVSSQCVNLTTRTQLPPAYTNSSTRGVYYPDKVFRSSVLHLTQDLFLPFFSNVTWFHAIHVSGTNGIKRFDNPVLPFNDGVYFASTEKSNIIRGWIFGTTLDSKTQSLLIVNNATNVVIKVCEFQFCNDPFLGVYYHKNNKSWMESEFRVYSSANNCTFEYVSQPFLMDLEGKQGNFKNLREFVFKNIDGYFKIYSKHTPINLVRDLPPGFSALEPLVDLPIGINITRFQTLLALHRSYLTPGDSSSGWTAGAAAYYVGYLQPRTFLLKYNENGTITDAVDCALDPLSETKCTLKSFTVEKGIYQTSNFRVQPTDSIVRFPNITNLCPFGEVFNATTFASVYAWNRKRISNCVADYSVLYNSTSFSTFKCYGVSPTKLNDLCFTNVYADSFVITGDEVRQIAPGQTGKIADYNYKLPDDFTGCVIAWNSKHIDAKEGGNFNYLYRLFRKANLKPFERDISTEIYQAGSKPCNGQTGLNCYYPLYRYGFYPTDGVGHQPYRVVVLSFELLNAPATVCGPKKSTNLVKNKCVNFNFNGLTGTGVLTESNKKFLPFQQFGRDIADTTDAVRDPQTLEILDITPCSFGGVSVITPGTNASNQVAVLYQDVNCTEVPVAIHADQLTPTWRVYSTGSNVFQTRAGCLIGAEHVNNSYECDIPIGAGICASYQTQTNSRSVASQSIIAYTMSLGAENSVAYSNNSIAIPTNFTISVTTEILPVSMTKTSVDCTMYICGDSTECSNLLLQYGSFCTQLNRALTGIAVEQDKNTQEVFAQVKQIYKTPPIKDFGGFNFSQILPDPSKPSKRSFIEDLLFNKVTLADAGFIKQYGDCLGDIAARDLICAQKFNGLTVLPPLLTDEMIAQYTSALLAGTITSGWTFGCGAALQIPFAMQMAYRFNGIGVTQNVLYENQKLIANQFNSAIGKIQDSLSSTASALGKLQDVVNQNAQALNTLVKQLSSNFGAISSVLNDILSRLDKVEAEVQIDRLITGRLQSLQTYVTQQLIRAAEIRASANLAATKMSECVLGQSKRCDFCGKGYHLMSFPQSAPHGVVFLHVTYVPAQEKNFTTAPAICHDGKAHFPREGVFVSNGTHWFVTQRNFYEPQIITTDNTFVSGSCDVVIGIVNNTVYDPLQPELDSFKEELDKYFKNHTSPDVDLGDISGINASVVNIQKEIDRLNEVAKNLNESLIDLQELGKYEQYIKWPWYIWLGFIAGLIAIIMVTIMLCCMTSCCSCLKGCCSCGSCCKFDEDDSEPVLKGVKLHYT

SEQ ID NO: 1147 - protein, 1273 aa, Artificial Sequence
  SARS-CoV-2/Wuhan/HBCDC-HB-01/2019__EPI_ISL_402132 spike protein (1-1273)(A890C_V1040C)
MFVFLVLLPLVSSQCVNLTTRTQLPPAYTNSITRGVYYPDKVFRSSVLHSTQDLFLPFFSNVTWFHAIHVSGTNGTKRFDNPVLPFNDGVYFASTEKSNIIRGWIFGTTLDSKTQSLLIVNNATNVVIKVCEFQFCNDPFLGVYYHKNNKSWMESEFRVYSSANNCTFEYVSQPFLMDLEGKQGNFKNLREFVFKNIDGYFKIYSKHTPINLVRDLPQGFSALEPLVDLPIGINITRFQTLLALHRSYLTPGDSSSGWTAGAAAYYVGYLQPRTFLLKYNENGTITDAVDCALDPLSETKCTLKSFTVEKGIYQTSNFRVQPTESIVRFPNITNLCPFGEVFNATRFASVYAWNRKRISNCVADYSVLYNSASFSTFKCYGVSPTKLNDLCFTNVYADSFVIRGDEVRQIAPGQTGKIADYNYKLPDDFTGCVIAWNSNNLDSKVGGNYNYLYRLFRKSNLKPFERDISTEIYQAGSTPCNGVEGFNCYFPLQSYGFQPTNGVGYQPYRVVVLSFELLHAPATVCGPKKSTNLVKNKCVNFNFNGLTGTGVLTESNKKFLPFQQFGRDIADTTDAVRDPQTLEILDITPCSFGGVSVITPGTNTSNQVAVLYQDVNCTEVPVAIHADQLTPTWRVYSTGSNVFQTRAGCLIGAEHVNNSYECDIPIGAGICASYQTQTNSPRRARSVASQSIIAYTMSLGAENSVAYSNNSIAIPTNFTISVTTEILPVSMTKTSVDCTMYICGDSTECSNLLLQYGSFCTQLNRALTGIAVEQDKNTQEVFAQVKQIYKTPPIKDFGGFNFSQILPDPSKPSKRSFIEDLLFNKVTLADAGFIKQYGDCLGDIAARDLICAQKFNGLTVLPPLLTDEMIAQYTSALLAGTITSGWTFGCGAALQIPFAMQMAYRFNGIGVTQNVLYENQKLIANQFNSAIGKIQDSLSSTASALGKLQDVVNQNAQALNTLVKQLSSNFGAISSVLNDILSRLDKVEAEVQIDRLITGRLQSLQTYVTQQLIRAAEIRASANLAATKMSECVLGQSKRCDFCGKGYHLMSFPQSAPHGVVFLHVTYVPAQEKNFTTAPAICHDGKAHFPREGVFVSNGTHWFVTQRNFYEPQIITTDNTFVSGNCDVVIGIVNNTVYDPLQPELDSFKEELDKYFKNHTSPDVDLGDISGINASVVNIQKEIDRLNEVAKNLNESLIDLQELGKYEQYIKWPWYIWLGFIAGLIAIVMVTIMLCCMTSCCSCLKGCCSCGSCCKFDEDDSEPVLKGVKLHYT

SEQ ID NO: 1148 - protein, 1273 aa, Artificial Sequence
  SARS-CoV-2/Guangdong/20SF028/2020__EPI_ISL_403936 spike protein (1-1273)(A890C_V1040C)
MFVFLVLLPLVSSQCVNLTTRTQLPPAYTNSFTRGVYYPDKVFRSSVLYSTQDLFLPFFSNVTWFHAIHVSGTNGTKRFDNPVLPFNDGVYFASTEKSNIIRGWIFGTTLDSKTQSLLIVNNATNVVIKVCEFQFCNDPFLGVYYHKNNKSWMESEFRVYSSANNCTFEYVSQPFLMDLEGKQGNFKNLREFVFKNIDGYFKIYSKHTPINLVRDLPQGFSALEPLVDLPIGINITRFQTLLALHRSYLTPGDSSSGWTAGAAAYYVGYLQPRTFLLKYNENGTITDAVDCALDPLSETKCTLKSFTVEKGIYQTSNFRVQPTESIVRFPNITNLCPFGEVFNATRFASVYAWNRKRISNCVADYSVLYNSASFSTFKCYGVSPTKLNDLCFTNVYADSFVIRGDEVRQIAPGQTGKIADYNYKLPDDFTGCVIAWNSNNLDSKVGGNYNYLYRLFRKSNLKPFERDISTEIYQAGSTPCNGVEGFNCYFPLQSYGFQPTNGVGYQPYRVVVLSFELLHAPATVCGPKKSTNLVKNKCVNFNFNGLTGTGVLTESNKKFLPFQQFGRDIADTTDAVRDPQTLEILDITPCSFGGVSVITPGTNTSNQVAVLYQDVNCTEVPVAIHADQLTPTWRVYSTGSNVFQTRAGCLIGAEHVNNSYECDIPIGAGICASYQTQTNSPRRARSVASQSIIAYTMSLGAENSVAYSNNSIAIPTNFTISVTTEILPVSMTKTSVDCTMYICGDSTECSNLLLQYGSFCTQLNRALTGIAVEQDKNTQEVFAQVKQIYKTPPIKDFGGFNFSQILPDPSKPSKRSFIEDLLFNKVTLADAGFIKQYGDCLGDIAARDLICAQKFNGLTVLPPLLTDEMIAQYTSALLAGTITSGWTFGCGAALQIPFAMQMAYRFNGIGVTQNVLYENQKLIANQFNSAIGKIQDSLSSTASALGKLQDVVNQNAQALNTLVKQLSSNFGAISSVLNDILSRLDKVEAEVQIDRLITGRLQSLQTYVTQQLIRAAEIRASANLAATKMSECVLGQSKRCDFCGKGYHLMSFPQSAPHGVVFLHVTYVPAQEKNFTTAPAICHDGKAHFPREGVFVSNGTHWFVTQRNFYEPQIITTDNTFVSGNCDVVIGIVNNTVYDPLQPELDSFKEELDKYFKNHTSPDVDLGDISGINASVVNIQKEIDRLNEVAKNLNESLIDLQELGKYEQYIKWPWYIWLGFIAGLIAIVMVTIMLCCMTSCCSCLKGCCSCGSCCKFDEDDSEPVLKGVKLHYT

SEQ ID NO: 1149 - protein, 1273 aa, Artificial Sequence
  SARS-CoV-2/Shenzhen/SZTH-001/2020__EPI_ISL_406592 spike protein (1-1273)(A890C_V1040C)
MFVFLVLLPLVSSQCVNLTTRTQLPPAYTNSFTRGVYYPDKVFRSSVLHSTQDLFLPFFSNVTWFHAIHVSGTNGTKRFDNPVLPFNDGVYFASTEKSNIIRGWIFGTTLDSKTQSLLIVNNATNVVIKVCEFQFCNDPFLGVYYHKNNKSWMESEFRVYSSANNCTFEYVSQPFLMDLEGKQGNFKNLREFVFKNIDGYFKIYSKHTPINLVRDLPQGFSALEPLVDLPIGINITRFQTLLALHRSYLTPGDSSSGWTAGAAAYYVGYLQPRTFLLKYNENGTITDAVDCALDPLSETKCTLKSFTVEKGIYQTSNFRVQPTESIVRFPNITNLCPFGEVFNATRFASVYAWNRKRISNCVADYSVLYNSASFSTFKCYGVSPTKLNDLCFTNVYADSFVIRGDEVRQIAPGQTGKIADYNYKLPDDFTGCVIAWNSNNLDSKVGGNYNYLYRLFRKSNLKPFERDISTEIYQAGSTPCNGVEGFNCYFPLQSYGFQPTNGVGYQPYRVVVLSFELLHAPATVCGPKKSTNLVKNKCVNFNFNGLTGTGVLTESNKKFLPFQQFGRDIADTTDAVRDPQTLEILDITPCSFGGVSVITPGTNTSNQVAVLYQDVNCTEVPVAIHADQLTPTWRVYSTGSNVFQTRAGCLIGAEHVNNSYECDIPIGAGICASYQTQTNSPRRARSVASQSIIAYTMSLGAENSVAYSNNSIAIPTNFTISVTTEILPVSMTKTSVDCTMYICGDSTECSNLLLQYGSFCTQLNRALTGIAVEQDKNTQEVFAQVKQIYKTPPIKDFGGFNFSQILPDPSKPSKRSFIEDLLFNKVTLADAGFIKQYGDCLGDIAARDLICAQKFNGLTVLPPLLTDEMIAQYTSALLAGTITSGWTFGCGAALQIPFAMQMAYRFNGIGVTQNVLYENQKLIANQFNSAIGKIQDSLSSTASALGKLQDVVNQNAQALNTLVKQLSSNFGAISSVLNDILSRLDKVEAEVQIDRLITGRLQSLQTYVTQQLIRAAEIRASANLAATKMSECVLGQSKRCDFCGKGYHLMSFPQSAPHGVVFLHVTYVPAQEKNFTTAPAICHDGKAHFPREGVFVSNGTHWFVTQRNFYEPQIITTDNTFVSGNCDVLIGIVNNTVYDPLQPELDSFKEELDKYFKNHTSPDVDLGDISGINASVVNIQKEIDRLNEVAKNLNESLIDLQELGKYEQYIKWPWYIWLGFIAGLIAIVMVTIMLCCMTSCCSCLKGCCSCGSCCKFDEDDSGPVLKGVKLHYT

SEQ ID NO: 1150 - protein, 1273 aa, Artificial Sequence
  SARS-CoV-2/Shenzhen/SZTH-004/2020__EPI_ISL_406595 spike protein (1-1273)(A890C_V1040C)
MFVFLVLLPLVSSQCVNLTTRTQLPPAYTNSFTRGVYYPDKVFRSSVLHSTQDLFLPFFSNVTWFHAIHVSGTNGTKRFDNPVLPFNDGVYFASTEKSNIIRGWIFGTTLDSKTQSLLIVNNATNVVIKVCEFQFCNDPFLGVYYHKNNKSWMESEFRVYSSANNCTFEYVSQPFLMDLEGKQGNFKNLREFVFKNIDGYFKIYSKHTPINLVRDLPQGFSALEPLVDLPIGINITRFQTLLALHRSYLTPGDSSSGWTAGAAAYYVGYLQPRTFLLKYNENGTITDAVDCALDPLSETKCTLKSFTVEKGIYQTSNFRVQPTESIVRFPNITNLCPFGEVFNATRFASVYAWDRKRISNCVAYYSVLYNSASFSTFKCYGVSPTKLNDLCFTNVYADSFVIRGDEVRQIAPGQTGKIADYNYKLPDDFTGCVIAWNSNNLDSKVGGNYNYLYRLFRKSNLKPFERDISTEIYQAGSTPCNGVEGFNCYFPLQSYGFQPTNGVGYQPYRVVVLSFELLHAPATVCGPKKSTNLVKNKCVNFNFNGLTGTGVLTESNKKFLPFQQFGRDIADTTDAVRDPQTLEILDITPCSFGGVSVITPGTNTSNQVAVLYQDVNCTEVPVAIHADQLTPTWRVYSTGSNVFQTRAGCLIGAEHVNNSYECDIPIGAGICASYQTQTNSPRRARSVASQSIIAYTMSLGAENSVAYSNNSIAIPTNFTISVTTEILPVSMTKTSVDCTMYICGDSTECSNLLLQYGSFCTQLNRALTGIAVEQDKNTQEVFAQVKQIYKTPPIKDFGGFNFSQILPDPSKPSKRSFIEDLLFNKVTLADAGFIKQYGDCLGDIAARDLICAQKFNGLTVLPPLLTDEMIAQYTSALLAGTITSGWTFGCGAALQIPFAMQMAYRFNGIGVTQNVLYENQKLIANQFNSAIGKIQDSLSSTASALGKLQDVVNQNAQALNTLVKQLSSNFGAISSVLNDILSRLDKVEAEVQIDRLITGRLQSLQTYVTQQLIRAAEIRASANLAATKMSECVLGQSKRCDFCGKGYHLMSFPQSAPHGVVFLHVTYVPAQEKNFTTAPAICHDGKAHFPREGVFVSNGTHWFVTQRNFYEPQIITTDNTFVSGNCDVVIGIVNNTVYDPLQPELDSFKEELDKYFKNHTSPDVDLGDISGINASVVNIQKEIDRLNEVAKNLNESLIDLQELGKYEQYIKWPWYIWLGFIAGLIAIVMVTIMLCCMTSCCSCLKGCCSCGSCCKFDEDDSEPVLKGVKLHYT

SEQ ID NO: 1151 - protein, 1273 aa, Artificial Sequence
  SARS-CoV-2/France/IDF0372/2020__EPI_ISL_406596 spike protein (1-1273)(A890C_V1040C)
MFVFLVLLPLVSSQCVNLTTRTQLPPAYTNSFTRGVYYPDKVFRSSVLHSTQDLFLPFFSNVTWFHAIHVSGTNGTKRFDNPVLPFNDGVYFASTEKSNIIRGWIFGTTLDSKTQSLLIVNNATNVVIKVCEFQFCNDPFLGVYYHKNNKSWMESEFRVYSSANNCTFEYVSQPFLMDLEGKQGNFKNLREFVFKNIDGYFKIYSKHTPINLVRDLPQGFSALEPLVDLPIGINITRFQTLLALHRSYLTPGDSSSGWTAGAAAYYVGYLQPRTFLLKYNENGTITDAVDCALDPLSETKCTLKSFTVEKGIYQTSNFRVQPTESIVRFPNITNLCPFGEVFNATRFASVYAWNRKRISNCVADYSFLYNSASFSTFKCYGVSPTKLNDLCFTNVYADSFVIRGDEVRQIAPGQTGKIADYNYKLPDDFTGCVIAWNSNNLDSKVGGNYNYLYRLFRKSNLKPFERDISTEIYQAGSTPCNGVEGFNCYFPLQSYGFQPTNGVGYQPYRVVVLSFELLHAPATVCGPKKSTNLVKNKCVNFNFNGLTGTGVLTESNKKFLPFQQFGRDIADTTDAVRDPQTLEILDITPCSFGGVSVITPGTNTSNQVAVLYQDVNCTEVPVAIHADQLTPTWRVYSTGSNVFQTRAGCLIGAEHVNNSYECDIPIGAGICASYQTQTNSPRRARSVASQSIIAYTMSLGAENSVAYSNNSIAIPTNFTISVTTEILPVSMTKTSVDCTMYICGDSTECSNLLLQYGSFCTQLNRALTGIAVEQDKNTQEVFAQVKQIYKTPPIKDFGGFNFSQILPDPSKPSKRSFIEDLLFNKVTLADAGFIKQYGDCLGDIAARDLICAQKFNGLTVLPPLLTDEMIAQYTSALLAGTITSGWTFGCGAALQIPFAMQMAYRFNGIGVTQNVLYENQKLIANQFNSAIGKIQDSLSSTASALGKLQDVVNQNAQALNTLVKQLSSNFGAISSVLNDILSRLDKVEAEVQIDRLITGRLQSLQTYVTQQLIRAAEIRASANLAATKMSECVLGQSKRCDFCGKGYHLMSFPQSAPHGVVFLHVTYVPAQEKNFTTAPAICHDGKAHFPREGVFVSNGTHWFVTQRNFYEPQIITTDNTFVSGNCDVVIGIVNNTVYDPLQPELDSFKEELDKYFKNHTSPDVDLGDISGINASVVNIQKEIDRLNEVAKNLNESLIDLQELGKYEQYIKWPWYIWLGFIAGLIAIVMVTIMLCCMTSCCSCLKGCCSCGSCCKFDEDDSEPVLKGVKLHYT

SEQ ID NO: 1152 - protein, 1273 aa, Artificial Sequence
  SARS-CoV-2/Australia/VIC01/2020__EPI_ISL_406844 spike protein (1-1273)(A890C_V1040C)
MFVFLVLLPLVSSQCVNLTTRTQLPPAYTNSFTRGVYYPDKVFRSSVLHSTQDLFLPFFSNVTWFHAIHVSGTNGTKRFDNPVLPFNDGVYFASTEKSNIIRGWIFGTTLDSKTQSLLIVNNATNVVIKVCEFQFCNDPFLGVYYHKNNKSWMESEFRVYSSANNCTFEYVSQPFLMDLEGKQGNFKNLREFVFKNIDGYFKIYSKHTPINLVRDLPQGFSALEPLVDLPIGINITRFQTLLALHRRYLTPGDSSSGWTAGAAAYYVGYLQPRTFLLKYNENGTITDAVDCALDPLSETKCTLKSFTVEKGIYQTSNFRVQPTESIVRFPNITNLCPFGEVFNATRFASVYAWNRKRISNCVADYSVLYNSASFSTFKCYGVSPTKLNDLCFTNVYADSFVIRGDEVRQIAPGQTGKIADYNYKLPDDFTGCVIAWNSNNLDSKVGGNYNYLYRLFRKSNLKPFERDISTEIYQAGSTPCNGVEGFNCYFPLQSYGFQPTNGVGYQPYRVVVLSFELLHAPATVCGPKKSTNLVKNKCVNFNFNGLTGTGVLTESNKKFLPFQQFGRDIADTTDAVRDPQTLEILDITPCSFGGVSVITPGTNTSNQVAVLYQDVNCTEVPVAIHADQLTPTWRVYSTGSNVFQTRAGCLIGAEHVNNSYECDIPIGAGICASYQTQTNSPRRARSVASQSIIAYTMSLGAENSVAYSNNSIAIPTNFTISVTTEILPVSMTKTSVDCTMYICGDSTECSNLLLQYGSFCTQLNRALTGIAVEQDKNTQEVFAQVKQIYKTPPIKDFGGFNFSQILPDPSKPSKRSFIEDLLFNKVTLADAGFIKQYGDCLGDIAARDLICAQKFNGLTVLPPLLTDEMIAQYTSALLAGTITSGWTFGCGAALQIPFAMQMAYRFNGIGVTQNVLYENQKLIANQFNSAIGKIQDSLSSTASALGKLQDVVNQNAQALNTLVKQLSSNFGAISSVLNDILSRLDKVEAEVQIDRLITGRLQSLQTYVTQQLIRAAEIRASANLAATKMSECVLGQSKRCDFCGKGYHLMSFPQSAPHGVVFLHVTYVPAQEKNFTTAPAICHDGKAHFPREGVFVSNGTHWFVTQRNFYEPQIITTDNTFVSGNCDVVIGIVNNTVYDPLQPELDSFKEELDKYFKNHTSPDVDLGDISGINASVVNIQKEIDRLNEVAKNLNESLIDLQELGKYEQYIKWPWYIWLGFIAGLIAIVMVTIMLCCMTSCCSCLKGCCSCGSCCKFDEDDSEPVLKGVKLHYT

SEQ ID NO: 1153 - protein, 1273 aa, Artificial Sequence
  SARS-CoV-2/Germany/BavPat1/2020__EPI_ISL_406862 spike protein (1-1273)(A890C_V1040C)
MFVFLVLLPLVSSQCVNLTTRTQLPPAYTNSFTRGVYYPDKVFRSSVLHSTQDLFLPFFSNVTWFHAIHVSGTNGTKRFDNPVLPFNDGVYFASTEKSNIIRGWIFGTTLDSKTQSLLIVNNATNVVIKVCEFQFCNDPFLGVYYHKNNKSWMESEFRVYSSANNCTFEYVSQPFLMDLEGKQGNFKNLREFVFKNIDGYFKIYSKHTPINLVRDLPQGFSALEPLVDLPIGINITRFQTLLALHRSYLTPGDSSSGWTAGAAAYYVGYLQPRTFLLKYNENGTITDAVDCALDPLSETKCTLKSFTVEKGIYQTSNFRVQPTESIVRFPNITNLCPFGEVFNATRFASVYAWNRKRISNCVADYSVLYNSASFSTFKCYGVSPTKLNDLCFTNVYADSFVIRGDEVRQIAPGQTGKIADYNYKLPDDFTGCVIAWNSNNLDSKVGGNYNYLYRLFRKSNLKPFERDISTEIYQAGSTPCNGVEGFNCYFPLQSYGFQPTNGVGYQPYRVVVLSFELLHAPATVCGPKKSTNLVKNKCVNFNFNGLTGTGVLTESNKKFLPFQQFGRDIADTTDAVRDPQTLEILDITPCSFGGVSVITPGTNTSNQVAVLYQGVNCTEVPVAIHADQLTPTWRVYSTGSNVFQTRAGCLIGAEHVNNSYECDIPIGAGICASYQTQTNSPRRARSVASQSIIAYTMSLGAENSVAYSNNSIAIPTNFTISVTTEILPVSMTKTSVDCTMYICGDSTECSNLLLQYGSFCTQLNRALTGIAVEQDKNTQEVFAQVKQIYKTPPIKDFGGFNFSQILPDPSKPSKRSFIEDLLFNKVTLADAGFIKQYGDCLGDIAARDLICAQKFNGLTVLPPLLTDEMIAQYTSALLAGTITSGWTFGCGAALQIPFAMQMAYRFNGIGVTQNVLYENQKLIANQFNSAIGKIQDSLSSTASALGKLQDVVNQNAQALNTLVKQLSSNFGAISSVLNDILSRLDKVEAEVQIDRLITGRLQSLQTYVTQQLIRAAEIRASANLAATKMSECVLGQSKRCDFCGKGYHLMSFPQSAPHGVVFLHVTYVPAQEKNFTTAPAICHDGKAHFPREGVFVSNGTHWFVTQRNFYEPQIITTDNTFVSGNCDVVIGIVNNTVYDPLQPELDSFKEELDKYFKNHTSPDVDLGDISGINASVVNIQKEIDRLNEVAKNLNESLIDLQELGKYEQYIKWPWYIWLGFIAGLIAIVMVTIMLCCMTSCCSCLKGCCSCGSCCKFDEDDSEPVLKGVKLHYT

SEQ ID NO: 1154 - protein, 1273 aa, Artificial Sequence
  SARS-CoV-2/Wuhan/HBCDC-HB-02/2020__EPI_ISL_412978 spike protein (1-1273)(A890C_V1040C)
MFVFLVLLPLVSSQCVNLTTRTQLPPAYTNSFTRGVYYPDKVFRSSVLHSTQDLFLPFFSNVTWFHAIHVSGTNGTKRFDNPVLPFNDGVYFASTEKSNIIRGWIFGTTLDSKTQSLLIVNNATNVVIKVCEFQFCNDPFLGVYYHKNNKSWMESEFRVYSSANNCTFEYVSQPFLMDLEGKQGNFKNLREFVFKNIDGYFKIYSKHTPINLVRDLPQGFSALEPLVDLPIGINITRFQTLLALHRSYLTPGDSSSGWTAGAAAYYVGYLQPRTFLLKYNENGTITDAVDCALDPLSETKCTLKSFTVEKGIYQTSNFRVQPTESIVRFPNITNLCPFGEVFNATRFASVYAWNRKRISNCVADYSVLYNSASFSTFKCYGVSPTKLNDLCFTNVYADSFVIRGDEVRQIAPGQTGKIADYNYKLPDDFTGCVIAWNSNNLDSKVGGNYNYLYRLFRKSNLKPFERDISTEIYQAGSTPCNGVEGFNCYFPLQSYGFQPTNGVGYQPYRVVVLSFELLHAPATVCGPKKSTNLVKNKCVNFNFNGLTGTGVLTESNKKFLPFQQFGRDIADTTDAVRDPQTLEILDITPCSFGGVSVITPGTNTSNQVAVLYQDVNCTEVPVAIHADQLTPTWRVYSTGSNVFQTRAGCLIGAEHVNNSYECDIPIGAGICASYQTQTNSPRRARSVASQSIIAYTMSLGAENSVAYSNNSIAIPTNFTISVTTEILPVSMTKTSVDCTMYICGDSTECSNFLLQYGSFCTQLNRALTGIAVEQDKNTQEVFAQVKQIYKTPPIKDFGGFNFSQILPDPSKPSKRSFIEDLLFNKVTLADAGFIKQYGDCLGDIAARDLICAQKFNGLTVLPPLLTDEMIAQYTSALLAGTITSGWTFGCGAALQIPFAMQMAYRFNGIGVTQNVLYENQKLIANQFNSAIGKIQDSLSSTASALGKLQDVVNQNAQALNTLVKQLSSNFGAISSVLNDILSRLDKVEAEVQIDRLITGRLQSLQTYVTQQLIRAAEIRASANLAATKMSECVLGQSKRCDFCGKGYHLMSFPQSAPHGVVFLHVTYVPAQEKNFTTAPAICHDGKAHFPREGVFVSNGTHWFVTQRNFYEPQIITTDNTFVSGNCDVVIGIVNNTVYDPLQPELDSFKEELDKYFKNHTSPDVDLGDISGINASVVNIQKEIDRLNEVAKNLNESLIDLQELGKYEQYIKWPWYIWLGFIAGLIAIVMVTIMLCCMTSCCSCLKGCCSCGSCCKFDEDDSEPVLKGVKLHYT

SEQ ID NO: 1155 - protein, 1273 aa, Artificial Sequence
  SARS-CoV-2/Australia/QLD02/2020__EPI_ISL_407896 spike protein (1-1273)(A890C_V1040C)
MFVFLVLLPLVSSQCVNLTTRTQLPPAYTNSFTRGVYYPDKVFRSSVLHSTQDLFLPFFSNVTWFHAIHVSGTNGTKRFDNPVLPFNDGVYFASTEKSNIIRGWIFGTTLDSKTQSLLIVNNATNVVIKVCEFQFCNDPFLGVYYHKNNKSWMESEFRVYSSANNCTFEYVSQPFLMDLEGKQGNFKNLREFVFKNIDGYFKIYSKHTPINLVRDLPQGFSALEPLVDLPIGINITRFQTLLALHRSYLTPGDSSSGWTAGAAAYYVGYLQPRTFLLKYNENGTITDAVDCALDPLSETKCTLKSFTVEKGIYQTSNFRVQPTESIVRFPNITNLCPFGEVFNATRFASVYAWNRKRISNCVADYSVLYNSASFSTFKCYGVSPTKLNDLCFTNVYADSFVIRGDEVRQIAPGQTGKIADYNYKLPDDFTGCVIAWNSNNLDSKVGGNYNYLYRLFRKSNLKPFERDISTEIYQAGSTPCNGVEGFNCYFPLQSYGFQPTNGVGYQPYRVVVLSFELLHAPATVCGPKKSTNLVKNKCVNFNFNGLTGTGVLTESNKKFLPFQQFGRDIADTTDAVRDPQTLEILDITPCSFGGVSVITPGTNTSNQVAVLYQDVNCTEVPVAIHADQLTPTWRVYSTGSNVFQTRAGCLIGAEHVNNSYECDIPIGAGICASYQTQTNSPRRARSVASQSIIAYTMSLGAENSVAYSNNSIAIPTNFTISVTTEILPVSMTKTSVDCTMYICGDSTECSNLLLQYGSFCTQLNRALTGIAVEQDKNTQEVFAQVKQIYKTPPIKDFGGFNFSQILPDPSKPSKRSFIEDLLFNKVTLADAGFIKQYGDCLGDIAARDLICAQKFNGLTVLPPLLTDEMIAQYTSALLAGTITSGWTFGCGAALQIPFAMQMAYRFNGIGVTQNVLYENQKLIANQFNSAIGKIQDSLSSTASALGKLQDVVNQNAQALNTLVKQLSSNFGAISSVLNDILSRLDKVEAEVQIDRLITGRLQSLQTYVTQQLIRAAEIRASANLAATKMSECVLGQSKRCDFCGKGYHLMSFPQSAPHGVVFLHVTYVPAQEKNFTTAPAICHDGKAHFPREGVFVSNGTHWFVTQRNFYEPQIITTDNTFVSGNCDVVIGIVNNTVYDPLQLELDSFKEELDKYFKNHTSPDVDLGDISGINASVVNIQKEIDRLNEVAKNLNESLIDLQELGKYEQYIKWPWYIWLGFIAGLIAIVMVTIMLCCMTSCCSCLKGCCSCGSCCKFDEDDSEPVLKGVKLHYT

SEQ ID NO: 1156 - protein, 1273 aa, Artificial Sequence
  SARS-CoV-2/India/1-31/2020__EPI_ISL_413523 spike protein (1-1273)(A890C_V1040C)
MFVFLVLLPLVSSQCVNLTTRTQLPPAYTNSFTRGVYYPDKVFRSSVLHSTQDLFLPFFSNVTWFHAIHVSGTNGTKRFDNPVLPFNDGVYFASTEKSNIIRGWIFGTTLDSKTQSLLIVNNATNVVIKVCEFQFCNDPFLGVYYHKNNKSWMESEFRVYSSANNCTFEYVSQPFLMDLEGKQGNFKNLREFVFKNIDGYFKIYSKHTPINLVRDLPQGFSALEPLVDLPIGINITRFQTLLALHRSYLTPGDSSSGWTAGAAAYYVGYLQPRTFLLKYNENGTITDAVDCALDPLSETKCTLKSFTVEKGIYQTSNFRVQPTESIVRFPNITNLCPFGEVFNATRFASVYAWNRKRISNCVADYSVLYNSASFSTFKCYGVSPTKLNDLCFTNVYADSFVIRGDEVRQIAPGQTGKIADYNYKLPDDFTGCVIAWNSNNLDSKVGGNYNYLYRLFRKSNLKPFERDISTEIYQAGSTPCNGVEGFNCYFPLQSYGFQPTNGVGYQPYRVVVLSFELLHAPATVCGPKKSTNLVKNKCVNFNFNGLTGTGVLTESNKKFLPFQQFGRDIADTTDAVRDPQTLEILDITPCSFGGVSVITPGTNTSNQVAVLYQDVNCTEVPVAIHADQLTPTWRVYSTGSNVFQTRAGCLIGAEHVNNSYECDIPIGAGICASYQTQTNSPRRARSVASQSIIAYTMSLGAENSVAYSNNSIAIPTNFTISVTTEILPVSMTKTSVDCTMYICGDSTECSNLLLQYGSFCTQLNRALTGIAVEQDKNTQEVFAQVKQIYKTPPIKDFGGFNFSQILPDPSKPSKRSFIEDLLFNKVTLADAGFIKQYGDCLGDIAARDLICAQKFNGLTVLPPLLTDEMIAQYTSALLAGTITSGWTFGCGAALQIPFAMQMAYRFNGIGVTQNVLYENQKLIANQFNSVIGKIQDSLSSTASALGKLQDVVNQNAQALNTLVKQLSSNFGAISSVLNDILSRLDKVEAEVQIDRLITGRLQSLQTYVTQQLIRAAEIRASANLAATKMSECVLGQSKRCDFCGKGYHLMSFPQSAPHGVVFLHVTYVPAQEKNFTTAPAICHDGKAHFPREGVFVSNGTHWFVTQRNFYEPQIITTDNTFVSGNCDVVIGIVNNTVYDPLQPELDSFKEELDKYFKNHTSPDVDLGDISGINASVVNIQKEIDRLNEVAKNLNESLIDLQELGKYEQYIKWPWYIWLGFIAGLIAIVMVTIMLCCMTSCCSCLKGCCSCGSCCKFDEDDSEPVLKGVKLHYT

SEQ ID NO: 1157 - protein, 1273 aa, Artificial Sequence
  SARS-CoV-2/Guangdong/GD2020087-P0008/2020__EPI_ISL_413863 spike protein (1-1273)(A890C_V1040C)
MFVFLVLLPLVSSQCVNLTTRTQLPPAYTNSFTRGVYYPDKVFRSSVLHSTQDLFLPFFSNVTWFHAIHVSGTNGTKRFDNPVLPFNDGVYFASTEKSNIIRGWIFGTTLDSKTQSLLIVNNATNVVIKVCEFQFCNDPFLGVYYHKNNKSWMESEFRVYSSANNCTFEYVSQPFLMDLEGKQGNFKNLREFVFKNIDGYFKIYSKHTPINLVRDLPQGFSALEPLVDLPIGINITRFQTLLALHRSYLTPGDSSSGWTAGAAAYYVGYLQPRTFLLKYNENGTITDAVDCALDPLSETKCTLKSFTVEKGIYQTSNFRVQPTESIVRFPNITNLCPFGEVFNATRFASVYAWNRKRISNCVADYSVLYNSASFSTFKCYGVSPTKLNDLCFTNVYADSFVIRGDEVREIAPGQTGKIADYNYKLPDDFTGCVIAWNSNNLDSKVGGNYNYLYRLFRKSNLKPFERDISTEIYQAGSTPCNGVEGFNCYFPLQSYGFQPTNGVGYQPYRVVVLSFELLHAPATVCGPKKSTNLVKNKCVNFNFNGLTGTGVLTESNKKFLPFQQFGRDIADTTDAVRDPQTLEILDITPCSFGGVSVITPGTNTSNQVAVLYQDVNCTEVPVAIHADQLTPTWRVYSTGSNVFQTRAGCLIGAEHVNNSYECDIPIGAGICASYQTQTNSPRRARSVASQSIIAYTMSLGAENSVAYSNNSIAIPTNFTISVTTEILPVSMTKTSVDCTMYICGDSTECSNLLLQYGSFCTQLNRALTGIAVEQDKNTQEVFAQVKQIYKTPPIKDFGGFNFSQILPDPSKPSKRSFIEDLLFNKVTLADAGFIKQYGDCLGDIAARDLICAQKFNGLTVLPPLLTDEMIAQYTSALLAGTITSGWTFGCGAALQIPFAMQMAYRFNGIGVTQNVLYENQKLIANQFNSAIGKIQDSLSSTASALGKLQDVVNQNAQALNTLVKQLSSNFGAISSVLNDILSRLDKVEAEVQIDRLITGRLQSLQTYVTQQLIRAAEIRASANLAATKMSECVLGQSKRCDFCGKGYHLMSFPQSAPHGVVFLHVTYVPAQEKNFTTAPAICHDGKAHFPREGVFVSNGTHWFVTQRNFYEPQIITTDNTFVSGNCDVVIGIVNNTVYDPLQPELDSFKEELDKYFKNHTSPDVDLGDISGINASVVNIQKEIDRLNEVAKNLNESLIDLQELGKYEQYIKWPWYIWLGFIAGLIAIVMVTIMLCCMTSCCSCLKGCCSCGSCCKFDEDDSEPVLKGVKLHYT

SEQ ID NO: 1158 - protein, 1273 aa, Artificial Sequence
  SARS-CoV-2/Sweden/01/2020__EPI_ISL_411951 spike protein (1-1273)(A890C_V1040C)
MFVFLVLLPLVSSQCVNLTTRTQLPPAYTNSFTRGVYYPDKVFRSSVLHSTQDLFLPFFSNVTWFHAIHVSGTNGTKRFDNPVLPFNDGVYFASTEKSNIIRGWIFGTTLDSKTQSLLIVNNATNVVIKVCEFQFCNDPFLGVYYHKNNKSWMESEFRVYSSANNCTFEYVSQPFLMDLEGKQGNFKNLREFVFKNIDGYFKIYSKHTPINLVRDLPQGFSALEPLVDLPIGINITRFQTLLALHRSYLTPGDSSSGWTAGAAAYYVGYLQPRTFLLKYNENGTITDAVDCALDPLSETKCTLKSFTVEKGIYQTSNFRVQPTESIVRFPNITNLCPFGEVFNATRFASVYAWNRKRISNCVADYSVLYNSASFSTFKCYGVSPTKLNDLCFTNVYADSFVIRGDEVRQIAPGQTGKIADYNYKLPDDFTGCVIAWNSNNLDSKVGGNYNYLYRLFRKSNLKPFERDISTEIYQAGSTPCNGVEGFNCYFPLQSYGFQPTNGVGYQPYRVVVLSFELLHAPATVCGPKKSTNLVKNKCVNFNFNGLTGTGVLTESNKKFLPFQQFGRDIADTTDAVRDPQTLEILDITPCSFGGVSVITPGTNTSNQVAVLYQDVNCTEVPVAIHADQLTPTWRVYSTGSNVFQTRAGCLIGAEHVNNSYECDIPIGAGICASYQTQTNSPRRARSVASQSIIAYTMSLGAENSVAYSNNSIAIPTNFTISVTTEILPVSMTKTSVDCTMYICGDSTECSNLLLQYGSFCTQLNRALTGIAVEQDKNTQEVFAQVKQIYKTPPIKDCGGFNFSQILPDPSKPSKRSFIEDLLFNKVTLADAGFIKQYGDCLGDIAARDLICAQKFNGLTVLPPLLTDEMIAQYTSALLAGTITSGWTFGCGAALQIPFAMQMAYRFNGIGVTQNVLYENQKLIANQFNSAIGKIQDSLSSTASALGKLQDVVNQNAQALNTLVKQLSSNFGAISSVLNDILSRLDKVEAEVQIDRLITGRLQSLQTYVTQQLIRAAEIRASANLAATKMSECVLGQSKRCDFCGKGYHLMSFPQSAPHGVVFLHVTYVPAQEKNFTTAPAICHDGKAHFPREGVFVSNGTHWFVTQRNFYEPQIITTDNTFVSGNCDVVIGIVNNTVYDPLQPELDSFKEELDKYFKNHTSPDVDLGDISGINASVVNIQKEIDRLNEVAKNLNESLIDLQELGKYEQYIKWPWYIWLGFIAGLIAIVMVTIMLCCMTSCCSCLKGCCSCGSCCKFDEDDSEPVLKGVKLHYT

SEQ ID NO: 1159 - protein, 1273 aa, Artificial Sequence
  SARS-CoV-2/Tianmen/HBCDC-HB-07/2020__EPI_ISL_412983 spike protein (1-1273)(A890C_V1040C)
MFVFLVLLPLVSSQCVNLTTRTQLPPAYTNSFTRGVYYPDKVFRSSVLHSTQDLFLPFFSNVTWFHAIHVSGTNGTKRFDNPVLPFNDGVYFASTEKSNIIRGWIFGTTLDSKTQSLLIVNNATNVVIKVCEFQFCNDPFLGVYYHKNNKSWMESEFRVYSSANNCTFEYVSQPFLMDLEGKQGNFKNLREFVFKNIDGYFKIYSKHTPINLVRDLPQGFSALEPLVDLPIGINITRFQTLLALHRSYLTPGDSSSGWTAGAAAYYVGYLQPRTFLLKYNENGTITDAVDCALDPLSETKCTLKSFTVEKGIYQTSNFRVQPTESIVRFPNITNLCPFGEVFNATRFASVYAWNRKRISNCVADYSVLYNSASFSTFKCYGVSPTKLNDLCFTNVYADSFVIRGDEVRQIAPGQTGKIADYNYKLPDDFTGCVIAWNSNNLDSKVGGNYNYLYRLFRKSNLKPFERDISTEIYQAGSTPCNGVEGFNCYFPLQSYGFQPTNGVGYQPYRVVVLSFELLHAPATVCGPKKSTNLVKNKCVNFNFNGLTGTGVLTESNKKFLPFQQFGRDIADTTDAVRDPQTLEILDITPCSFGGVSVITPGTNTSNQVAVLYQDLNCTEVPVAIHADQLTPTWRVYSTGSNVFQTRAGCLIGAEHVNNSYECDIPIGAGICASYQTQTNSPRRARSVASQSIIAYTMSLGAENSVAYSNNSIAIPTNFTISVTTEILPVSMTKTSVDCTMYICGDSTECSNLLLQYGSFCTQLNRALTGIAVEQDKNTQEVFAQVKQIYKTPPIKDFGGFNFSQILPDPSKPSKRSFIEDLLFNKVTLADAGFIKQYGDCLGDIAARDLICAQKFNGLTVLPPLLTDEMIAQYTSALLAGTITSGWTFGCGAALQIPFAMQMAYRFNGIGVTQNVLYENQKLIANQFNSAIGKIQDSLSSTASALGKLQDVVNQNAQALNTLVKQLSSNFGAISSVLNDILSRLDKVEAEVQIDRLITGRLQSLQTYVTQQLIRAAEIRASANLAATKMSECVLGQSKRCDFCGKGYHLMSFPQSAPHGVVFLHVTYVPAQEKNFTTAPAICHDGKAHFPREGVFVSNGTHWFVTQRNFYEPQIITTDNTFVSGNCDVVIGIVNNTVYDPLQPELDSFKEELDKYFKNHTSPDVDLGDISGINASVVNIQKEIDRLNEVAKNLNESLIDLQELGKYEQYIKWPWYIWLGFIAGLIAIVMVTIMLCCMTSCCSCLKGCCSCGSCCKFDEDDSEPVLKGVKLHYT

SEQ ID NO: 1160 - protein, 1273 aa, Artificial Sequence
  SARS-CoV-2/Hong Kong/case42_VM20002493/2020__EPI_ISL_414527 spike protein (1-1273)(A890C_V1040C)
MFVFLVLLPLVSSQCVNLTTRTQLPPAYTNSFTRGVYYPDKVFRSSVLHSTQDLFLPFFSNVTWFHAIHVSGTNGTKRFDNPVLPFNDGVYFASTEKSNIIRGWIFGTTLDSKTQSLLIVNNATNVVIKVCEFQFCNDPFLGVYYHKNNKSWMESEFRVYSSANNCTFEYVSQPFLMDLEGKQGNFKNLREFVFKNIDGYFKIYSKHTPINLVRDLPQGFSALEPLVDLPIGINITRFQTLLALHRSYLTPGDSSSGWTAGAAAYYVGYLQPRTFLLKYNENGTITDAVDCALDPLSETKCTLKSFTVEKGIYQTSNFRVQPTESIVRFPNITNLCPFGEVFNATRFASVYAWNRKRISNCVADYSVLYNSASFSTFKCYGVSPTKLNDLCFTNVYADSFVIRGDEVRQIAPGQTGKIADYNYKLPDDFTGCVIAWNSNNLDSKVGGNYNYLYRLFRKSNLKPFERDISTEIYQAGSTPCNGVEGFNCYFPLQSYGFQPTNGVGYQPYRVVVLSFELLHAPATVCGPKKSTNLVKNKCVNFNFNGLTGTGVLTESNKKFLPFQQFGRDIADTTDAVRDPQTLEILDITPCSFGGVSVITPGTNTSNQVAVLYQDVNCTEVPVAIHADQLTPTWRVYSTGSNVFQTRAGCLIGAEHVNNSYECDIPIGAGICASYQTQTNSPRRARSVASQSIIAYTMSLGAENSVAYSNNSIAIPTNFAISVTTEILPVSMTKTSVDCTMYICGDSTECSNLLLQYGSFCTQLNRALTGIAVEQDKNTQEVFAQVKQIYKTPPIKDFGGFNFSQILPDPSKPSKRSFIEDLLFNKVTLADAGFIKQYGDCLGDIAARDLICAQKFNGLTVLPPLLTDEMIAQYTSALLAGTITSGWTFGCGAALQIPFAMQMAYRFNGIGVTQNVLYENQKLIANQFNSAIGKIQDSLSSTASALGKLQDVVNQNAQALNTLVKQLSSNFGAISSVLNDILSRLDKVEAEVQIDRLITGRLQSLQTYVTQQLIRAAEIRASANLAATKMSECVLGQSKRCDFCGKGYHLMSFPQSAPHGVVFLHVTYVPAQEKNFTTAPAICHDGKAHFPREGVFVSNGTHWFVTQRNFYEPQIITTDNTFVSGNCDVVIGIVNNTVYDPLQPELDSFKEELDKYFKNHTSPDVDLGDISGINASVVNIQKEIDRLNEVAKNLNESLIDLQELGKYEQYIKWPWYIWLGFIAGLIAIVMVTIMLCCMTSCCSCLKGCCSCGSCCKFDEDDSEPVLKGVKLHYT

SEQ ID NO: 1161 - protein, 1273 aa, Artificial Sequence
  SARS-CoV-2/USA/CruiseA-23/2020__EPI_ISL_414482 spike protein (1-1273)(A890C_V1040C)
MFVFLVLLPLVSSQCVNLTTRTQLPPAYTNSFTRGVYYPDKVFRSSVLHSTQDLFLPFFSNVTWFHAIHVSGTNGTKRFDNPVLPFNDGVYFASTEKSNIIRGWIFGTTLDSKTQSLLIVNNATNVVIKVCEFQFCNDPFLGVYYHKNNKSWMESEFRVYSSANNCTFEYVSQPFLMDLEVKQGNFKNLREFVFKNIDGYFKIYSKHTPINLVRDLPQGFSALEPLVDLPIGINITRFQTLLALHRSYLTPGDSSSGWTAGAAAYYVGYLQPRTFLLKYNENGTITDAVDCALDPLSETKCTLKSFTVEKGIYQTSNFRVQPTESIVRFPNITNLCPFGEVFNATRFASVYAWNRKRISNCVADYSVLYNSASFSTFKCYGVSPTKLNDLCFTNVYADSFVIRGDEVRQIAPGQTGKIADYNYKLPDDFTGCVIAWNSNNLDSKVGGNYNYLYRLFRKSNLKPFERDISTEIYQAGSTPCNGVEGFNCYFPLQSYGFQPTNGVGYQPYRVVVLSFELLHAPATVCGPKKSTNLVKNKCVNFNFNGLTGTGVLTESNKKFLPFQQFGRDIADTTDAVRDPQTLEILDITPCSFGGVSVITPGTNTSNQVAVLYQDVNCTEVPVAIHADQLTPTWRVYSTGSNVFQTRAGCLIGAEHVNNSYECDIPIGAGICASYQTQTNSPRRARSVASQSIIAYTMSLGAENSVAYSNNSIAIPTNFTISVTTEILPVSMTKTSVDCTMYICGDSTECSNLLLQYGSFCTQLNRALTGIAVEQDKNTQEVFAQVKQIYKTPPIKDFGGFNFSQILPDPSKPSKRSFIEDLLFNKVTLADAGFIKQYGDCLGDIAARDLICAQKFNGLTVLPPLLTDEMIAQYTSALLAGTITSGWTFGCGAALQIPFAMQMAYRFNGIGVTQNVLYENQKLIANQFNSAIGKIQDSLSSTASALGKLQDVVNQNAQALNTLVKQLSSNFGAISSVLNDILSRLDKVEAEVQIDRLITGRLQSLQTYVTQQLIRAAEIRASANLAATKMSECVLGQSKRCDFCGKGYHLMSFPQSAPHGVVFLHVTYVPAQEKNFTTAPAICHDGKAHFPREGVFVSNGTHWFVTQRNFYEPQIITTDNTFVSGNCDVVIGIVNNTVYDPLQPELDSFKEELDKYFKNHTSPDVDLGDISGINASVVNIQKEIDRLNEVAKNLNESLIDLQELGKYEQYIKWPWYIWLGFIAGLIAIVMVTIMLCCMTSCCSCLKGCCSCGSCCKFDEDDSEPVLKGVKLHYT

SEQ ID NO: 1162 - protein, 1273 aa, Artificial Sequence
  SARS-CoV-2/Hong Kong/case85_VM20002868/2020__EPI_ISL_414519 spike protein (1-1273)(A890C_V1040C)
MFVFLVLVPLVSSQCVNLTTRTQLPPAYTNSFTRGVYYPDKVFRSSVLHSTQDLFLPFFSNVTWFHAIHVSGTNGTKRFDNPVLPFNDGVYFASTEKSNIIRGWIFGTTLDSKTQSLLIVNNATNVVIKVCEFQFCNDPFLGVYYHKNNKSWMESEFRVYSSANNCTFEYVSQPFLMDLEGKQGNFKNLREFVFKNIDGYFKIYSKHTPINLVRDLPQGFSALEPLVDLPIGINITRFQTLLALHRSYLTPGDSSSGWTAGAAAYYVGYLQPRTFLLKYNENGTITDAVDCALDPLSETKCTLKSFTVEKGIYQTSNFRVQPTESIVRFPNITNLCPFGEVFNATRFASVYAWNRKRISNCVADYSVLYNSASFSTFKCYGVSPTKLNDLCFTNVYADSFVIRGDEVRQIAPGQTGKIADYNYKLPDDFTGCVIAWNSNNLDSKVGGNYNYLYRLFRKSNLKPFERDISTEIYQAGSTPCNGVEGFNCYFPLQSYGFQPTNGVGYQPYRVVVLSFELLHAPATVCGPKKSTNLVKNKCVNFNFNGLTGTGVLTESNKKFLPFQQFGRDIADTTDAVRDPQTLEILDITPCSFGGVSVITPGTNTSNQVAVLYQDVNCTEVPVAIHADQLTPTWRVYSTGSNVFQTRAGCLIGAEHVNNSYECDIPIGAGICASYQTQTNSPRRARSVASQSIIAYTMSLGAENSVAYSNNSIAIPTNFTISVTTEILPVSMTKTSVDCTMYICGDSTECSNLLLQYGSFCTQLNRALTGIAVEQDKNTQEVFAQVKQIYKTPPIKDFGGFNFSQILPDPSKPSKRSFIEDLLFNKVTLADAGFIKQYGDCLGDIAARDLICAQKFNGLTVLPPLLTDEMIAQYTSALLAGTITSGWTFGCGAALQIPFAMQMAYRFNGIGVTQNVLYENQKLIANQFNSAIGKIQDSLSSTASALGKLQDVVNQNAQALNTLVKQLSSNFGAISSVLNDILSRLDKVEAEVQIDRLITGRLQSLQTYVTQQLIRAAEIRASANLAATKMSECVLGQSKRCDFCGKGYHLMSFPQSAPHGVVFLHVTYVPAQEKNFTTAPAICHDGKAHFPREGVFVSNGTHWFVTQRNFYEPQIITTDNTFVSGNCDVVIGIVNNTVYDPLQPELDSFKEELDKYFKNHTSPDVDLGDISGINASVVNIQKEIDRLNEVAKNLNESLIDLQELGKYEQYIKWPWYIWLGFIAGLIAIVMVTIMLCCMTSCCSCLKGCCSCGSCCKFDEDDSEPVLKGVKLHYT

SEQ ID NO: 1163 - protein, 1273 aa, Artificial Sequence
  SARS-CoV-2/England/200990660/2020__EPI_ISL_414523 spike protein (1-1273)(A890C_V1040C)
MFVFLVLLPLVSSQCVNLTTRTQLPPAYTNSFTRGVYYPDKVFRSSVLHSTQDLFLPFFSNVTWFHAIHVSGTNGTKRFDNPVLPFNDGVYFASTEKSNIIRGWIFGTTLDSKTQSLLIVNNATNVVIKVCEFQFCNDPFLGVYYHKNNKSWMESEFRVYSSANNCTFEYVSQPFLMDLEGKQGNFKNLREFVFKNIDGYFKIYSKHTPINLVRDLPQGFSALEPLVDLPIGINITRFQTLLALHRSYLTPGDSSSGWTAGAAAYYVGYLQPRTFLLKYNENGTITDAVDCALDPLSETKCTLKSFTVEKGIYQTSNFRVQPTESIVRFPNITNLCPFGEVFNATRFASVYAWNRKRISNCVADYSVLYNSASFSTFKCYGVSPTKLNDLCFTNVYADSFVIRGDEVRQIAPGQTGKIADYNYKLPDDFTGCVIAWNSNNLDSKVGGNYNYLYRLFRKSNLKPFERDISTEIYQAGSTPCNGVEGFNCYFPLQSYGFQPTNGVGYQPYRVVVLSFELLHAPATVCGPKKSTNLVKNKCVNFNFNGLTGTGVLTESNKKFLPFQQFGRDIADTTDAVRDPQTLEILDITPCSFGGVSVITPGTNTSNQVAVLYQGVNCTEVPVAIHADQLTPTWRVYSTGSNVFQTRAGCLIGAEHVNNSYECDIPIGAGICASYQTQTNSPRRARSVASQSIIAYTMSLGAENSVAYSNNSIAIPTNFTISVTTEILPVSMTKTSVDCTMYICGDSTECSNLLLQYGSFCTQLNRALTGIAVEQDKNTQEVFAQVKQIYKTPPIKDFGGFNFSQILPDPSKPSKRSFIEDLLFNKVTLADAGFIKQYGDCLGDIAARDLICAQKFNGLTVLPPLLTDEMIAQYTSALLAGTITSGWTFGCGAALQIPFAMQMAYRFNGIGVTQNVLYENQKLIANQFNSAIGKIQDSLSSTASALGKLQDVVNQNAQALNTLVKQLSSNFGAISSVLNDILSRLDKVEAEVQIDRLITGRLQSLQTYVTQQLIRAAEIRASANLAATKMSECVLGQSKRCDFCGKGYHLMSFPQSAPHGVVFLHVTYVPAQEKNFTTAPAICHDGKAHFPREGVFVSNGTHWFVTQRNFYEPQIITTDNTFVSGNCDVVIGIVNNTVYDPLQPELDSFKEELDKYFKNHTSPDVDLGDISGINASVVNIQKEIDRLNEVAKNLNESLIDLQELGKYEQYIKWPWYIWLGFIAGLIAIVMVTIMLCCMTSCCSCLKGCCSCGSCCKFDEDDSELVLKGVKLHYT

SEQ ID NO: 1164 - protein, 1273 aa, Artificial Sequence
  SARS-CoV-2/Australia/NSW09/2020__EPI_ISL_413595 spike protein (1-1273)(A890C_V1040C)
MFVFLVLLPLVSSQCVNLTTRTQLPPAYTNSFTRGVYYPDKVFRSSVLHSTQDLFLPFFSNVTWFHAIHVSGTNGTKRFDNPVLPFNDGVYFASTEKSNIIRGWIFGTTLDSKTQSLLIVNNATNVVIKVCEFQFCNDPFLGVYYHKNNKSWMESEFRVYSSANNCTFEYVSQPFLMDLEGKQGNFKNLREFVFKNIDGYFKIYSKHTPINLVRDLPQGFSALEPLVDLPIGINITRFQTLLALHRSYLTPGDSSSGWTAGAAAYYVGYLQPRTFLLKYNENGTITDAVDCALDPLSETKCTLKSFTVEKGIYQTSNFRVQPTESIVRFPNITNLCPFGEVFNATRFASVYAWNRKRISNCVADYSVLYNSASFSTFKCYGVSPTKLNDLCFTNVYADSFVIRGDEVRQIAPGQTGKIADYNYKLPDDFTGCVIAWNSNNLDSKVGGNYNYLYRLFRKSNLKPFERDISTEIYQAGSTPCNGVEGFNCYFPLQSYGFQPTNGVGYQPYRVVVLSFELLHAPATVCGPKKSTNLVKNKCVNFNFNGLTGTGVLTESNKKFLPFQQFGRDIADTTDAVRDPQTLEILDITPCSFGGVSVITPGTNTSNQVAVLYQDVNCTEVPVAIHADQLTPTWRVYSTGSNVFQTRAGCLIGAEHVNNSYECDIPIGAGICASYQTQTNSPRRARSVASQSIIAYTMSLGAENSVAYSNNSIAIPTNFTISVTTEILPVSMTKTSVDCTMYICGDSTECSNLLLQYGSFCTQLNRALTGIAVEQDKNTQEVFAQVKQIYKTPPIKDFGGFNFSQILPDPSKPSKRSFIEDLLFNKVTLADAGFIKQYGDCLGDIAARDLICAQKFNGLTVLPPLLTDEMIAQYTSALLAGTITSGWTFGCGAALQIPFAMQMAYRFNGIGVTQNVLYENQKLIANQFNSAIGKIQDSLSFTASALGKLQDVVNQNAQALNTLVKQLSSNFGAISSVLNDILSRLDKVEAEVQIDRLITGRLQSLQTYVTQQLIRAAEIRASANLAATKMSECVLGQSKRCDFCGKGYHLMSFPQSAPHGVVFLHVTYVPAQEKNFTTAPAICHDGKAHFPREGVFVSNGTHWFVTQRNFYEPQIITTDNTFVSGNCDVVIGIVNNTVYDPLQPELDSFKEELDKYFKNHTSPDVDLGDISGINASVVNIQKEIDRLNEVAKNLNESLIDLQELGKYEQYIKWPWYIWLGFIAGLIAIVMVTIMLCCMTSCCSCLKGCCSCGSCCKFDEDDSEPVLKGVKLHYT

SEQ ID NO: 1165 - protein, 1273 aa, Artificial Sequence
  SARS-CoV-2/Australia/NSW10/2020__EPI_ISL_413596 spike protein (1-1273)(A890C_V1040C)
MFVFLVLLPLVSSQCVNLTTRTQLPPAYTNSFTRGVYYPDKVFRSSVLHSTQDLFLPFFSNVTWFHAIHVSGTNGTKRFDNPVLPFNDGVYFASTEKSNIIRGWIFGTTLDSKTQSLLIVNNATNVVIKVCEFQFCNDPFLGVYYHKNNKSWMESEFRVYSSANNCTFEYVSQPFLMDLEGKQGNFKNLREFVFKNIDGYFKIYSKHTPINLVRDLPQGFSALEPLVDLPIGINITRFQTLLALHRSYLTPGDSSSGWTAGAAAYYVGYLQPRTFLLKYNENGTITDAVDCALDPLSETKCTLKSFTVEKGIYQTSNFRVQPTESIVRFPNITNLCPFGEVFNATRFASVYAWNRKRISNCVADYSVLYNSASFSTFKCYGVSPTKLNDLCFTNVYADSFVIRGDEVRQIAPGQTGKIADYNYKLPDDFTGCVIAWNSNNLDSKVGGNYNYLYRLFRKSNLKPFERDISTEIYQAGSTPCNGVEGFNCYFPLQSYGFQPTNGVGYQPYRVVVLSFELLHAPATVCGPKKSTNLVKNKCVNFNFNGLTGTGVLTESNKKFLPFQQFGRDIADTTDAVRDPQTLEILDITPCSFGGVSVITPGTNTSNQVAVLYQDVNCTEVPVAIHADQLTPTWRVYSTGSNVFQTRAGCLIGAEHVNNSYECDIPIGAGICASYQTQTNSPRRARSVASQSIIAYTMSLGAENSVAYSNNSIAIPTNFTISVTTEILPVSMTKTSVDCTMYICGDSTECSNLLLQYGSFCTQLNRALTGIAVEQDKNTQEVFAQVKQIYKTPPIKDFGGFNFSQILPDPSKPSKRSFIEDLLFNKVTLADAGFIKQYGDCLGDIAARDLICAQKFNGLTVLPPLLTDEMIAQYTSALLAGTITSGWTFGCGAALQIPFAMQMAYRFNGIGVTQNVLYENQKLIANQFNSAIGKIQDSLSSTASALGKLQDVVNQNAQALNTLVKQLSSNFGAISSVLNDILSRLDKVEAEVQIDRLITGRLQSLQTYVTQQLIRAAEIRASANLAATKMSECVLGQSKRCDFCGKGYHLMSFPQSAPHGVVFLHVTYVPAQEKNFTTAPAICHDGKAHFPREGVFVSNGTHWFVTQRNFYEPQIITTDNTFVSGNCDVVIGIVNNTVYDPLQPELDSFKEELDKYFKNHTSPDVDLGDISGINASVVNIQKEIDRLNEVAKNLNESLIDLQELGKYEQYIKWPWYIWLGFIAGLIAIVMVTIMLCCMTSCCSCLKGCCSCGSCFKFDEDDSEPVLKGVKLHYT

SEQ ID NO: 1166 - protein, 1273 aa, Artificial Sequence
  SARS-CoV-2/Switzerland/1000477797/2020__EPI_ISL_413023 spike protein (1-1273)(A890C_V1040C)
MFVFLVLLPLVSSQCVNLTTRTQLPPAYTNSFTRGVYYPDKVFRSSVLHSTQDLFLPFFSNVTWFHAIHVSGTNGTKRFDNPVLPFNDGVYFASTEKSNIIRGWIFGTTLDSKTQSLLIVNNATNVVIKVCEFQFCNDPFLGVYYHKNNKSWMESEFRVYSSANNCTFEYVSQPFLMDLEGKQGNFKNLREFVFKNIDGYFNIYSKHTPINLVRDLPQGFSALEPLVDLPIGINITRFQTLLALHRSYLTPGDSSSGWTAGAAAYYVGYLQPRTFLLKYNENGTITDAVDCALDPLSETKCTLKSFTVEKGIYQTSNFRVQPTESIVRFPNITNLCPFGEVFNATRFASVYAWNRKRISNCVADYSVLYNSASFSTFKCYGVSPTKLNDLCFTNVYADSFVIRGDEVRQIAPGQTGKIADYNYKLPDDFTGCVIAWNSNNLDSKVGGNYNYLYRLFRKSNLKPFERDISTEIYQAGSTPCNGVEGFNCYFPLQSYGFQPTNGVGYQPYRVVVLSFELLHAPATVCGPKKSTNLVKNKCVNFNFNGLTGTGVLTESNKKFLPFQQFGRDIADTTDAVRDPQTLEILDITPCSFGGVSVITPGTNTSNQVAVLYQGVNCTEVPVAIHADQLTPTWRVYSTGSNVFQTRAGCLIGAEHVNNSYECDIPIGAGICASYQTQTNSPRRARSVASQSIIAYTMSLGAENSVAYSNNSIAIPTNFTISVTTEILPVSMTKTSVDCTMYICGDSTECSNLLLQYGSFCTQLNRALTGIAVEQDKNTQEVFAQVKQIYKTPPIKDFGGFNFSQILPDPSKPSKRSFIEDLLFNKVTLADAGFIKQYGDCLGDIAARDLICAQKFNGLTVLPPLLTDEMIAQYTSALLAGTITSGWTFGCGAALQIPFAMQMAYRFNGIGVTQNVLYENQKLIANQFNSAIGKIQDSLSSTASALGKLQDVVNQNAQALNTLVKQLSSNFGAISSVLNDILSRLDKVEAEVQIDRLITGRLQSLQTYVTQQLIRAAEIRASANLAATKMSECVLGQSKRCDFCGKGYHLMSFPQSAPHGVVFLHVTYVPAQEKNFTTAPAICHDGKAHFPREGVFVSNGTHWFVTQRNFYEPQIITTDNTFVSGNCDVVIGIVNNTVYDPLQPELDSFKEELDKYFKNHTSPDVDLGDISGINASVVNIQKEIDRLNEVAKNLNESLIDLQELGKYEQYIKWPWYIWLGFIAGLIAIVMVTIMLCCMTSCCSCLKGCCSCGSCCKFDEDDSEPVLKGVKLHYT

SEQ ID NO: 1167 - protein, 1273 aa, Artificial Sequence
  SARS-CoV-2/Belgium/BA-02291/2020__EPI_ISL_415159 spike protein (1-1273)(A890C_V1040C)
MFVFLVLLPLVSSQCVNLTTRTQLPPAYTNSFTRGVYYPDKVFRSSVLHSTQDLFLPFFSNVTWFHAIHVSGTNGTKRFDNPVLPFNDGVYFASTEKSNIIRGWIFGTTLDSKTQSLLIVNNATNVVIKVCEFQFCNDPFLGVYYHKNNKSWMESEFRVYSSANNCTFEYVSQPFLMDLEGKQGNFKNLREFVFKNIDGYFKIYSKHTPINLVRDLPQGFSALEPLVDLPIGINITRFQTLLALHRSYLTPGDSSSGWTAGAAAYYVGYLQPRTFLLKYNENGTITDAVDCALDPLSETKCTLKSFTVEKGIYQTSNFRVQPTESIVRFPNITNLCPFGEVFNATRFASVYAWNRKRISNCVADYSVLYNSASFSTFKCYGVSPTKLNDLCFTNVYADSFVIRGDEVRQIAPGQTGKIADYNYKLPDDFTGCVIAWNSNNLDSKVGGNYNYLYRLFRRSNLKPFERDISTEIYQAGSTPCNGVEGFNCYFPLQSYGFQPTNGVGYQPYRVVVLSFELLPAPATVCGPKKSTNLVKNKCVNFNFNGLTGTGVLTESNKKFLPFQQFGRDIADTTDAVRDPQTLEILDITPCSFGGVSVITPGTNTSNQVAVLYQGVNCTEVPVAIHADQLTPTWRVYSTGSNVFQTRAGCLIGAEHVNNSYECDIPIGAGICASYQTQTNSPRRARSVASQSIIAYTMSLGAENSVAYSNNSIAIPTNFTISVTTEILPVSMTKTSVDCTMYICGDSTECSNLLLQYGSFCTQLNRALTGIAVEQDKNTQEVFAQVKQIYKTPPIKDFGGFNFSQILPDPSKPSKRSFIEDLLFNKVTLADAGFIKQYGDCLGDIAARDLICAQKFNGLTVLPPLLTDEMIAQYTSALLAGTITSGWTFGCGAALQIPFAMQMAYRFNGIGVTQNVLYENQKLIANQFNSAIGKIQDSLSSAAPALGKLQDVVNQNAQALNTLVKQLSSNFGAISSVLNDILSRLDKVEAEVQIDRLITGRLQSLQTYVTQQLIRAAEIRASANLAATKMSECVLGQSKRCDFCGKGYHLMSFPQSAPHGVVFLHVTYVPAQEKNFTTAPAICHDGKAHFPREGVFVSNGTHWFVTQRNFYEPQIITTDNTFVSGNCDVVIGIVNNTVYDPLQPELDSFKEELDKYFKNHTSPDVDLGDISGINASVVNIQKEIDRLNEVAKNLNESLIDLQELGKYEQYIKWPWYIWLGFIAGLIAIVMVTIMLCCMTSCCSCLKGCCSCGSCCKFDEDDSEPVLKGVKLHYT

SEQ ID NO: 1168 - protein, 1273 aa, Artificial Sequence
  SARS-CoV-2/USA/WA8-UW5/2020__EPI_ISL_413486 spike protein (1-1273)(A890C_V1040C)
MFVFLVLLPLVSSQCVNLTTRTQLPPAYTNSFTRGVYYPDKVFRSSVLHSTQDLFLPFFSNVTWFHAIHVSGTNGTKRFDNPVLPFNDGVYFASTEKSNIIRGWIFGTTLDSKTQSLLIVNNATNVVIKVCEFQFCNDPFLGVYYHKNNKSWMESEFRVYSSANNCTFEYVSQPFLMDLEGKQGNFKNLREFVFKNIDGYFKIYSKHTPINLVRDLPQGFSALEPLVDLPIGINITRFQTLLALHRSYLTPGDSSSGWTAGAAAYYVGYLQPRTFLLKYNENGTITDAVDCALDPLSETKCTLKSFTVEKGIYQTSNFRVQPTESIVRFPNITNLCPFGEVFNATRFASVYAWNRKRISNCVADYSVLYNSASFSTFKCYGVSPTKLNDLCFTNVYADSFVIRGDEVRQIAPGQTGKIADYNYKLPDDFTGCVIAWNSNNLDSKVGGNYNYLYRLFRKSNLKPFERDISTEIYQAGSTPCNGVEGFNCYFPLQSYGFQPTNGVGYQPYRVVVLSFELLHAPATVCGPKKSTNLVKNKCVNFNFNGLTGTGVLTESNKKFLPFQQFGRDIADTTDAVRDPQTLEILDITPCSFGGVSVITPGTNTSNQVAVLYQDVNCTEVPVAIHADQLTPTWRVYSTGSNVFQTRAGCLIGAEYVNNSYECDIPIGAGICASYQTQTNSPRRARSVASQSIIAYTMSLGAENSVAYSNNSIAIPTNFTISVTTEILPVSMTKTSVDCTMYICGDSTECSNLLLQYGSFCTQLNRALTGIAVEQDKNTQEVFAQVKQIYKTPPIKDFGGFNFSQILPDPSKPSKRSFIEDLLFNKVTLADAGFIKQYGDCLGDIAARDLICAQKFNGLTVLPPLLTDEMIAQYTSALLAGTITSGWTFGCGAALQIPFAMQMAYRFNGIGVTQNVLYENQKLIANQFNSAIGKIQDSLSSTASALGKLQDVVNQNAQALNTLVKQLSSNFGAISSVLNDILSRLDKVEAEVQIDRLITGRLQSLQTYVTQQLIRAAEIRASANLAATKMSECVLGQSKRCDFCGKGYHLMSFPQSAPHGVVFLHVTYVPAQEKNFTTAPAICHDGKAHFPREGVFVSNGTHWFVTQRNFYEPQIITTDNTFVSGNCDVVIGIVNNTVYDPLQPELDSFKEELDKYFKNHTSPDVDLGDISGINASVVNIQKEIDRLNEVAKNLNESLIDLQELGKYEQYIKWPWYIWLGFIAGLIAIVMVTIMLCCMTSCCSCLKGCCSCGSCCKFDEDDSEPVLKGVKLHYT

SEQ ID NO: 1169 - protein, 1273 aa, Artificial Sequence
  SARS-CoV-2/England/20102000506/2020__EPI_ISL_415147 spike protein (1-1273)(A890C_V1040C)
MFVFLVLLPLVSSQCVNLTTRTQLPPAYTNSFTRGVYYPDKVFRSSVLHSTQDLFLPFFSNVTWFHAIHVSGTNGTKRFDNPVLPFNDGVYFASTEKSNIIRGWIFGTTLDSKTQSLLIVNNATNVVIKVCEFQFCNDPFLGVYYHKNNKSWMESEFRVYSSANNCTFEYVSQPFLMDLEGKQGNFKNLREFVFKNIDGYFKIYSKHTPINLVRDLPQGFSALEPLVDLPIGINITRFQTLLALHRSYLTPGDSSSGWTAGAAAYYVGYLQPRTFLLKYNENGTITDAVDCALDPLSETKCTLKSFTVEKGIYQTSNFRVQPTESIVRFPNITNLCPFGEVFNATRFASVYAWNRKRISNCVADYSVLYNSASFSTFKCYGVSPTKLNDLCFTNVYADSFVIRGDEVRQIAPGQTGKIADYNYKLPDDFTGCVIAWNSNNLDSKVGGNYNYLYRLFRKSNLKPFERDISTEIYQAGSTPCNGVEGFNCYFPLQSYGFQPTNGVGYQPYRVVVLSFELLHAPATVCGPKKSTNLVKNKCVNFNFNGLTGTGVLTESNKKFLPFQQFGRDIADTTDAVRDPQTLEILDITPCSFGGVSVITPGTNTSNQVAVLYQGVNCTEVPVAIHADQLTPTWRVYSTGSNVFQTRAGCLIGAEHVNNSYECDIPIGAGICASYQTQTNSPRRARSVASQSIIAYTMSLGAENSVAYSNNSIAIPTNFTISVTTEILPVSMTKTSVDCTMYICGDSTECSNLLLQYGSFCTQLNRALTGIAVEQDKNTQEVFAQVKQIYKTPPIKDFGGFNFSQILPDPSKPSKRSFIEDLLFNKVTLADAGFIKQYGYCLGDIAARDLICAQKFNGLTVLPPLLTDEMIAQYTSALLAGTITSGWTFGCGAALQIPFAMQMAYRFNGIGVTQNVLYENQKLIANQFNSAIGKIQDSLSSTASALGKLQDVVNQNAQALNTLVKQLSSNFGAISSVLNDILSRLDKVEAEVQIDRLITGRLQSLQTYVTQQLIRAAEIRASANLAATKMSECVLGQSKRCDFCGKGYHLMSFPQSAPHGVVFLHVTYVPAQEKNFTTAPAICHDGKAHFPREGVFVSNGTHWFVTQRNFYEPQIITTDNTFVSGNCDVVIGIVNNTVYDPLQPELDSFKEELDKYFKNHTSPDVDLGDISGINASVVNIQKEIDRLNEVAKNLNESLIDLQELGKYEQYIKWPWYIWLGFIAGLIAIVMVTIMLCCMTSCCSCLKGCCSCGSCCKFDEDDSEPVLKGVKLHYT

SEQ ID NO: 1170 - protein, 1273 aa, Artificial Sequence
  SARS-CoV-2/Belgium/VAG-03013/2020__EPI_ISL_415155 spike protein (1-1273)(A890C_V1040C)
MFVFLVLLPLVSSQCVNLTTRTQLPPAYTNSFTRGVYYPDKVFRSSVLHSTQDLFLPFFSNVTWFHAIHVSGTNGTKRFDNPVLPFNDGVYFASTEKSNIIRGWIFGTTLDSKTQSLLIVNNATNVVIKVCEFQFCNDPFLGVYYHKNNKSWMESEFRVYSSANNCTFEYVSQPFLMDLEGKQGNFKNLREFVFKNIDGYFKIYSKHTPINLVRDLPQGFSALEPLVDLPIGINITRFQTLLALHRSYLTPGDSSSGWTAGAAAYYVGYLQPRTFLLKYNENGTITDAVDCALDPLSETKCTLKSFTVEKGIYQTSNFRVQPTESIVRFPNITNLCPFGEVFNATRFASVYAWNRKRISNCVADYSVLYNSASFSTFKCYGVSPTKLNDLCFTNVYADSFVIRGDEVRQIAPGQTGKIADYNYKLPDDFTGCVIAWNSNNLDSKVGGNYNYLYRLFRKSNLKPFERDISTEIYQAGSTPCNGVEGFNCYFPLQSYGFQPTNGVGYQPYRVVVLSFELLHAPATVCGPKKSTNLVKNKCVNFNFNGLTGTGVLTESNKKFLPFQQFGRDIADTTDAVRDPQTLEILDITPCSFGGVSVITPGTNTSNQVAVLYQGVNCTEVPVAIHADQLTPTWRVYSTGSNVFQTRAGCLIGAEHVNNSYECDIPIGAGICASYQTQTNSPRRARSVASQSIIAYTMSLGAENSVAYSNNSIAIPTNFTISVTTEILPVSMTKTSVDCTMYICGDSTECSNLLLQYGSFCTQLNRALTGIAVEQDKNTQEVFAQVKQIYKTPPIKDFGGFNFSQILPDPSKPSKRSFIEDLLFNKVTLADAGFIKQYGDCLGDIAARDLICAQKFNGLTVLPPLLTDEMIAQYTSALLAGTITSGWTFGCGAALQIPFAMQMAYRFNGIGVTQNVLYENQKLIANQFNSAIGKIQDSLSSTATALGKLQDVVNQNAQALNTLVKQLSSNFGAISSVLNDILSRLDKVEAEVQIDRLITGRLQSLQTYVTQQLIRAAEIRASANLAATKMSECVLGQSKRCDFCGKGYHLMSFPQSAPHGVVFLHVTYVPAQEKNFTTAPAICHDGKAHFPREGVFVSNGTHWFVTQRNFYEPQIITTDNTFVSGNCDVVIGIVNNTVYDPLQPELDSFKEELDKYFKNHTSPDVDLGDISGINASVVNIQKEIDRLNEVAKNLNESLIDLQELGKYEQYIKWPWYIWLGFIAGLIAIVMVTIMLCCMTSCCSCLKGCCSCGSCCKFDEDDSEPVLKGVKLHYT

SEQ ID NO: 1171 - protein, 1273 aa, Artificial Sequence
  SARS-CoV-2/Belgium/BC-03016/2020__EPI_ISL_415157 spike protein (1-1273)(A890C_V1040C)
MFVFLVLLPLVSSQCVNLTTRTQLPPAYTNSFTRGVYYPDKVFRSSVLHSTQDLFLPFFSNVTWFHAIHVSGTNGTKRFDNPVLPFNDGVYFASTEKSNIIRGWIFGTTLDSKTQSLLIVNNATNVVIKVCEFQFCNDPFLGVYYHKNNKSWMESEFRVYSSANNCTFEYVSQPFLMDLEGKQGNFKNLREFVFKNIDGYFKIYSKHTPINLVRDLPQGFSALEPLVDLPIGINITRFQTLLALHRSYLTPGDSSSGWTAGAAAYYVGYLQPRTFLLKYNENGTITDAVDCALDPLSETKCTLKSFTVEKGIYQTSNFRVQPTESIVRFPNITNLCPFGEVFNATRFASVYAWNRKRISNCVADYSVLYNSASFSTFKCYGVSPTKLNDLCFTNVYADSFVIRGDEVRQIAPGQTGKIADYNYKLPDDFTGCVIAWNSNNLDSKVGGNYNYLYRLFRKSNLKPFERDISTEIYQAGSTPCNGVEGFNCYFPLQSYGFQPTNGVGYQPYRVVVLSFELLHAPATVCGPKKSTNLVKNKCVNFNFNGLTGTGVLTESNKKFLPFQQFGRDIADTTDAVRDPQTLEILDITPCSFGGVSVITPGTNTSNQVAVLYQGVNCTEVPVAIHADQLTPTWRVYSTGSNVFQTRAGCLIGAEHVNNSYECDIPIGAGICASYQTQTNSPRRARSVASQSIIAYTMSLGAENSVAYSNNSIAIPTNFTISVTTEILPVSMTKTSVDCTMYICGDSTECSNLLLQYGSFCTQLNRALTGIAVEQDKNTQEVFAQVKQIYKTPPIKDFGGFNFSQILPDPSKPSKRSFIEDLLFNKVTLADAGFIKQYGDCLGDIAARDLICAQKFNGLTVLPPLLTDEMIAQYTSALLAGTITSGWTFGCGAALQIPFAMQMAYRFNGIGVTQNVLYENQKLIANQFNSAIGKIQDSLSSTAPALGKLQDVVNQNAQALNTLVKQLSSNFGAISSVLNDILSRLDKVEAEVQIDRLITGRLQSLQTYVTQQLIRAAEIRASANLAATKMSECVLGQSKRCDFCGKGYHLMSFPQSAPHGVVFLHVTYVPAQEKNFTTAPAICHDGKAHFPREGVFVSNGTHWFVTQRNFYEPQIITTDNTFVSGNCDVVIGIVNNTVYDPLQPELDSFKEELDKYFKNHTSPDVDLGDISGINASVVNIQKEIDRLNEVAKNLNESLIDLQELGKYEQYIKWPWYIWLGFIAGLIAIVMVTIMLCCMTSCCSCLKGCCSCGSCCKFDEDDSEPVLKGVKLHYT

SEQ ID NO: 1172 - protein, 1273 aa, Artificial Sequence
  SARS-CoV-2/Germany/BavPat3/2020__EPI_ISL_414521 spike protein (1-1273)(A890C_V1040C)
MFVFLVLLPLVSSQCVNLTTRTQLPPAYTNSFTRGVYYPDKVFRSSVLHSTQDLFLPFFSNVTWFHAIHVSGTNGTKRFDNPVLPFNDGVYFASTEKSNIIRGWIFGTTLDSKTQSLLIVNNATNVVIKVCEFQFCNDPFLGVYYHKNNKSWMESEFRVYSSANNCTFEYVSQPFLMDLEGKQGNFKNLREFVFKNIDGYFKIYSKHTPINLVRDLPQGFSALEPLVDLPIGINITRFQTLLALHRSYLTPGDSSSGWTAGAAAYYVGYLQPRTFLLKYNENGTITDAVDCALDPLSETKCTLKSFTVEKGIYQTSNFRVQPTESIVRFPNITNLCPFGEVFNATRFASVYAWNRKRISNCVADYSVLYNSASFSTFKCYGVSPTKLNDLCFTNVYADSFVIRGDEVRQIAPGQTGKIADYNYKLPDDFTGCVIAWNSNNLDSKVGGNYNYLYRLFRKSNLKPFERDISTEIYQAGSTPCNGVEGFNCYFPLQSYGFQPTNGVGYQPYRVVVLSFELLHAPATVCGPKKSTNLVKNKCVNFNFNGLTGTGVLTESNKKFLPFQQFGRDIADTTDAVRDPQTLEILDITPCSFGGVSVITPGTNTSNQVAVLYQDVNCTEVPVAIHADQLTPTWRVYSTGSNVFQTRAGCLIGAEHVNNSYECDIPIGAGICASYQTQTNSPRRARSVASQSIIAYTMSLGAENSVAYSNNSIAIPTNFTISVTTEILPVSMTKTSVDCTMYICGDSTECSNLLLQYGSFCTQLNRALTGIAVEQDKNTQQVFAQVKQIYKTPPIKDFGGFNFSQILPDPSKPSKRSFIEDLLFNKVTLADAGFIKQYGDCLGDIAARDLICAQKFNGLTVLPPLLTDEMIAQYTSALLAGTITSGWTFGCGAALQIPFAMQMAYRFNGIGVTQNVLYENQKLIANQFNSAIGKIQDSLSSTASALGKLQDVVNQNAQALNTLVKQLSSNFGAISSVLNDILSRLDKVEAEVQIDRLITGRLQSLQTYVTQQLIRAAEIRASANLAATKMSECVLGQSKRCDFCGKGYHLMSFPQSAPHGVVFLHVTYVPAQEKNFTTAPAICHDGKAHFPREGVFVSNGTHWFVTQRNFYEPQIITTDNTFVSGNCDVVIGIVNNTVYDPLQPELDSFKEELDKYFKNHTSPDVDLGDISGINASVVNIQKEIDRLNEVAKNLNESLIDLQELGKYEQYIKWPWYIWLGFIAGLIAIVMVTIMLCCMTSCCSCLKGCCSCGSCCKFDEDDSEPVLKGVKLHYT

SEQ ID NO: 1173 - protein, 1273 aa, Artificial Sequence
  SARS-CoV-2/France/HF1805/2020__EPI_ISL_414628 spike protein (1-1273)(A890C_V1040C)
MFVFLVLLPLVSSQCVNLTTRTQLPPAYTNSFTRGVYYPDKVFRSSVLHSTQDLFLPFFSNVTWFHAIHVSGTNGTKRFDNPVLPFNDGVYFASTEKSNIIRGWIFGTTLDSKTQSLLIVNNATNVVIKVCEFQFCNDPFLGVYYHKNNKSWMESEFRVYSSANNCTFEYVSQPFLMDLEGKQGNFKNLREFVFKNIDGYFKIYSKHTPINLVRDLPQGFSALEPLVDLPIGINITRFQTLLALHRSYLTPGDSSSGWTAGAAAYYVGYLQPRTFLLKYNENGTITDAVDCALDPLSETKCTLKSFTVEKGIYQTSNFRVQPTESIVRFPNITNLCPFGEVFNATRFASVYAWNRKRISNCVADYSVLYNSASFSTFKCYGVSPTKLNDLCFTNVYADSFVIRGDEVRQIAPGQTGKIADYNYKLPDDFTGCVIAWNSNNLDSKVGGNYNYLYRLFRKSNLKPFERDISTEIYQAGSTPCNGVEGFNCYFPLQSYGFQPTNGVGYQPYRVVVLSFELLHAPATVCGPKKSTNLVKNKCVNFNFNGLTGTGVLTESNKKFLPFQQFGRDIADTTDAVRDPQTLEILDITPCSFGGVSVITPGTNTSNQVAVLYQGVNCTEVPVAIHADQLTPTWRVYSTGSNVFQTRAGCLIGAEHVNNSYECDIPIGAGICASYQTQTNSPRRARSVASQSIIAYTMSLGAENSVAYSNNSIAIPTNFTISVTTEILPVSMTKTSVDCTMYICGDSTECSNLLLQYGSFCTQLNRALTGIAVEQDKNTQEVFAQVKQIYKTPPIKDFGGFNFSQILPDPSKPSKRSFIEDLLFNKVTLADAGFIKQYGDCLGDIAARDLICAQKFNGLTVLPPLLTDEMIAQYTSALLAGTITSGWTFGCGAALQIPFAMQMAYRFNGIGVTQNVLYENQKLIANQFNSAIGKIQDSLSSTASALGKLQDVVNQNAQALNTLVKQLSSNFGAISSVLNDILSRLDKVEAEVQIDRLITGRLQSLQTYVTQQLIRAAEIRASANLAATKMSECVLGQSKRCDFCGKGYHLMSFPQSAPHGVVFLHVTYVPAQEKNFTTAPAICHDGKAHFPREGVFVSNGTHWFVTQRNFYEPQIITTDNTFVSGNCDVVIGVVNNTVYDPLQPELDSFKEELDKYFKNHTSPDVDLGDISGINASVVNIQKEIDRLNEVAKNLNESLIDLQELGKYEQYIKWPWYIWLGFIAGLIAIVMVTIMLCCMTSCCSCLKGCCSCGSCCKFDEDDSEPVLKGVKLHYT

SEQ ID NO: 1174 - protein, 1273 aa, Artificial Sequence
  SARS-CoV-2/Netherlands/ZuidHolland_9/2020__EPI_ISL_414445 spike protein (1-1273)(A890C_V1040C)
MFVFLVLLPLVSSQCVNLTTRTQLPPAYTNSFTRGVYYPDKVFRSSVLHSTQDLFLPFFSNVTWFHAIHVSGTNGTKRFDNPVLPFNDGVYFASTEKSNIIRGWIFGTTLDSKTQSLLIVNNATNVVIKVCEFQFCNDPFLGVYYHKNNKSWMESEFRVYSSANNCTFEYVSQPFLMDLEGKQGNFKNLREFVFKNIDGYFKIYSKHTPINLVRDLPQGFSALEPLVDLPIGINITRFQTLLALHRSYLTPGDSSSGWTAGAAAYYVGYLQPRTFLLKYNENGTITDAVDCALDPLSETKCTLKSFTVEKGIYQTSNFRVQPTESIVRFPNITNLCPFGEVFNATRFASVYAWNRKRISNCVADYSVLYNSASFSTFKCYGVSPTKLNDLCFTNVYADSFVIRGDEVRQIAPGQTGKIADYNYKLPDDFTGCVIAWNSNNLDSKVGGNYNYLYRLFRKSNLKPFERDISTEIYQAGSTPCNGVEGFNCYFPLQSYGFQPTNGVGYQPYRVVVLSFELLHAPATVCGPKKSTNLVKNKCVNFNFNGLTGTGVLTESNKKFLPFQQFGRDIADTTDAVRDPQTLEILDITPCSFGGVSVITPGTNTSNQVAVLYQGVNCTEVPVAIHADQLTPTWRVYSTGSNVFQTRAGCLIGAEHVNNSYECDIPIGAGICASYQTQTNSPRRARSVASQSIIAYTMSLGAENSVAYSNNSIAIPTNFTISVTTEILPVSMTKTSVDCTMYICGDSTECSNLLLQYGSFCTQLNRALTGIAVEQDKNTQEVFAQVKQIYKTPPIKDFGGFNFSQILPDPSKPSKRSFIEDLLFNKVTLADAGFIKQYGDCLGDIAARDLICVQKFNGLTVLPPLLTDEMIAQYTSALLAGTITSGWTFGCGAALQIPFAMQMAYRFNGIGVTQNVLYENQKLIANQFNSAIGKIQDSLSSTASALGKLQDVVNQNAQALNTLVKQLSSNFGAISSVLNDILSRLDKVEAEVQIDRLITGRLQSLQTYVTQQLIRAAEIRASANLAATKMSECVLGQSKRCDFCGKGYHLMSFPQSAPHGVVFLHVTYVPAQEKNFTTAPAICHDGKAHFPREGVFVSNGTHWFVTQRNFYEPQIITTDNTFVSGNCDVVIGIVNNTVYDPLQPELDSFKEELDKYFKNHTSPDVDLGDISGINASVVNIQKEIDRLNEVAKNLNESLIDLQELGKYEQYIKWPWYIWLGFIAGLIAIVMVTIMLCCMTSCCSCLKGCCSCGSCCKFDEDDSEPVLKGVKLHYT

SEQ ID NO: 1175 - protein, 1273 aa, Artificial Sequence
  SARS-CoV-2/Finland/FIN03032020A/2020__EPI_ISL_413602 spike protein (1-1273)(A890C_V1040C)
MFVFLVLLPLVSSQCVNLTTRTQLPPAYTNSFTRGVYYPDKVFRSSVLHSTQDLFLPFFSNVTWFHAIHVSGTNGTKRFDNPVLPFNDGVYFASTEKSNIIRGWIFGTTLDSKTQSLLIVNNATNVVIKVCEFQFCNDPFLGVYYHKNNKSWMESEFRVYSSANNCTFEYVSQPFLMDLEGKQGNFKNLREFVFKNIDGYFKIYSKHTPINLVRDLPQGFSALEPLVDLPIGINITRFQTLLALHRSYLTPGDSSSGWTAGAAAYYVGYLQPRTFLLKYNENGTITDAVDCALDPLSETKCTLKSFTVEKGIYQTSNFRVQPTESIVRFPNITNLCPFGEVFNATRFASVYAWNRKRISNCVADYSVLYNSASFSTFKCYGVSPTKLNDLCFTNVYADSFVIRGDEVRQIAPGQTGKIADYNYKLPDDFTGCVISWNSNNLDSKVGGNYNYLYRLFRKSNLKPFERDISTEIYQAGSTPCNGVEGFNCYFPLQSYGFQPTNGVGYQPYRVVVLSFELLHAPATVCGPKKSTNLVKNKCVNFNFNGLTGTGVLTESNKKFLPFQQFGRDIADTTDAVRDPQTLEILDITPCSFGGVSVITPGTNTSNQVAVLYQGVNCTEVPVAIHADQLTPTWRVYSTGSNVFQTRAGCLIGAEHVNNSYECDIPIGAGICASYQTQTNSPRRARSVASQSIIAYTMSLGAENSVAYSNNSIAIPTNFTISVTTEILPVSMTKTSVDCTMYICGDSTECSNLLLQYGSFCTQLNRALTGIAVEQDKNTQEVFAQVKQIYKTPPIKDFGGFNFSQILPDPSKPSKRSFIEDLLFNKVTLADAGFIKQYGDCLGDIAARDLICAQKFNGLTVLPPLLTDEMIAQYTSALLAGTITSGWTFGCGAALQIPFAMQMAYRFNGIGVTQNVLYENQKLIANQFNSAIGKIQDSLSSTASALGKLQDVVNQNAQALNTLVKQLSSNFGAISSVLNDILSRLDKVEAEVQIDRLITGRLQSLQTYVTQQLIRAAEIRASANLAATKMSECVLGQSKRCDFCGKGYHLMSFPQSAPHGVVFLHVTYVPAQEKNFTTAPAICHDGKAHFPREGVFVSNGTHWFVTQRNFYEPQIITTDNTFVSGNCDVVIGIVNNTVYDPLQPELDSFKEELDKYFKNHTSPDVDLGDISGINASVVNIQKEIDRLNEVAKNLNESLIDLQELGKYEQYIKWPWYIWLGFIAGLIAIVMVTIMLCCMTSCCSCLKGCCSCGSCCKFDEDDSEPVLKGVKLHYT

SEQ ID NO: 1176 - protein, 1273 aa, Artificial Sequence
  SARS-CoV-2/France/GE1977/2020__EPI_ISL_414632 spike protein (1-1273)(A890C_V1040C)
MFVFLVLLPLVSSQCVNLTTRTQLPPAYTNSFTRGVYYPDKVFRSSVLHSTQDLFLPFFSNVTWFHAIHVSGTNGTKRFDNPVLPFNDGVYFASTEKSNIIRGWIFGTTLDSKTQSLLIVNNATNVVIKVCEFQFCNDPFLGVYYHKNNKSWMESEFRVYSSANNCTFEYVSQPFLMDLEGKQGNFKNLREFVFKNIDGYFKIYSKHTPINLVRDLPQGFSALEPLVDLPIGINITRFQTLLALHRSYLTPGDSSSGWTAGAAAYYVGYLQPRTFLLKYNENGTITDAVDCALDPLSETKCTLKSFTVEKGIYQTSNFRVQPTESIVRFPNITNLCPFGEVFNATRFASVYAWNRKRISNCVADYSVLYNSASFSTFKCYGVSPTKLNDLCFTNVYADSFVIRGDEVRQIAPGQTGKIADYNYKLPDDFTGCVIAWNSNNLDSKVGGNYNYLYRLFRKSNLKPFERDISTEIYQAGSTPCNGVEGFNCYFPLQSYGFQPTNGVGYQPYRVVVLSFELLHAPATVCGPKKSTNLVKNKCVNFNFNGLTGTGVLTESNKKFLPFQQFGRDIADTTDAVRDPQTLEILDITPCSFGGVSVITPGTNTSNQVAVLYQGVNCTEVPVAIHADQLTPTWRVYSTGSNVFQTRAGCLIGAEHVNNSYECDIPIGAGICASYQTQTNSPRRARSVASQSIIAYTMSLGAENSVAYSNNSIAIPTNFTISVTTEILPVSMTKTSVDCTMYICGDSTECSNLLLQYGSFCTQLNRALTGIAVEQDKNTQEVFAQVKQIYKTPPIKDFGGFNFSQILPDPSKPSKRSFIEDLLFNKVTLADAGFIKQYGDCLGDIAARDLICAQKFNGLTVLPPLLTDEMIAQYTSALLAGTITSGWTFGCGAALQIPFAMQMAYRFNGIGVTQNVLYENQKLIANQFNSAIGKIQDSLFSTASALGKLQDVVNQNAQALNTLVKQLSSNFGAISSVLNDILSRLDKVEAEVQIDRLITGRLQSLQTYVTQQLIRAAEIRASANLAATKMSECVLGQSKRCDFCGKGYHLMSFPQSAPHGVVFLHVTYVPAQEKNFTTAPAICHDGKAHFPREGVFVSNGTHWFVTQRNFYEPQIITTDNTFVSGNCDVVIGIVNNTVYDPLQPELDSFKEELDKYFKNHTSPDVDLGDISGINASVVNIQKEIDRLNEVAKNLNESLIDLQELGKYEQYIKWPWYIWLGFIAGLIAIVMVTIMLCCMTSCCSCLKGCCSCGSCCKFDEDDSEPVLKGVKLHYT

SEQ ID NO: 1177 - protein, 1273 aa, Artificial Sequence
  SARS-CoV-2/Finland/FIN-313/2020__EPI_ISL_414641 spike protein (1-1273)(A890C_V1040C)
MFVFLVLLPLVSSQCVNLTTRTQLPPAYTNSFTRGVYYPDKVFRSSVLHSTQDLFLPFFSNVTWFHAIHVSGTNGTKRFDNPVLPFNDGVYFASTEKSNIIRGWIFGTTLDSKTQSLLIVNNATNVVIKVCEFQFCNDPFLGVYYHKNNKSWMESEFRVYSSANNCTFEYVSQPFLMDLEGKQGNFKNLREFVFKNIDGYFKIYSKHTPINLVRDLPQGFSALEPLVDLPIGINITRFKTLLALHRSYLTPGDSSSGWTAGAAAYYVGYLQPRTFLLKYNENGTITDAVDCALDPLSETKCTLKSFTVEKGIYQTSNFRVQPTESIVRFPNITNLCPFGEVFNATRFASVYAWNRKRISNCVADYSVLYNSASFSTFKCYGVSPTKLNDLCFTNVYADSFVIRGDEVRQIAPGQTGKIADYNYKLPDDFTGCVIAWNSNNLDSKVGGNYNYLYRLFRKSNLKPFERDISTEIYQAGSTPCNGVEGFNCYFPLQSYGFQPTNGVGYQPYRVVVLSFELLHAPATVCGPKKSTNLVKNKCVNFNFNGLTGTGVLTESNKKFLPFQQFGRDIADTTDAVRDPQTLEILDITPCSFGGVSVITPGTNTSNQVAVLYQGVNCTEVPVAIHADQLTPTWRVYSTGSNVFQTRAGCLIGAEHVNNSYECDIPIGAGICASYQTQTNSPRRARSVASQSIIAYTMSLGAENSVAYSNNSIAIPTNFTISVTTEILPVSMTKTSVDCTMYICGDSTECSNLLLQYGSFCTQLNRALTGIAVEQDKNTQEVFAQVKQIYKTPPIKDFGGFNFSQILPDPSKPSKRSFIEDLLFNKVTLADAGFIKQYGDCLGDIAARDLICAQKFNGLTVLPPLLTDEMIAQYTSALLAGTITSGWTFGCGAALQIPFAMQMAYRFNGIGVTQNVLYENQKLIANQFNSAIGKIQDSLSSTASALGKLQDVVNQNAQALNTLVKQLSSNFGAISSVLNDILSRLDKVEAEVQIDRLITGRLQSLQTYVTQQLIRAAEIRASANLAATKMSECVLGQSKRCDFCGKGYHLMSFPQSAPHGVVFLHVTYVPAQEKNFTTAPAICHDGKAHFPREGVFVSNGTHWFVTQRNFYEPQIITTDNTFVSGNCDVVIGIVNNTVYDPLQPELDSFKEELDKYFKNHTSPDVDLGDISGINASVVNIQKEIDRLNEVAKNLNESLIDLQELGKYEQYIKWPWYIWLGFIAGLIAIVMVTIMLCCMTSCCSCLKGCCSCGSCCKFDEDDSEPVLKGVKLHYT

SEQ ID NO: 1178 - protein, 1273 aa, Artificial Sequence
  SARS-CoV-2/Netherlands/ZuidHolland_2/2020__EPI_ISL_414556 spike protein (1-1273)(A890C_V1040C)
MFVFLVLLPLVSSQCVNLTTRTQLPPAYTNSFTRGVYYPDKVFRSSVLHSTQDLFLPFFSNVTWFHAIHVSGTNGTKRFDNPVLPFNDGVYFASTEKSNIIRGWIFGTTLDSKTQSLLIVNNATNVVIKVCEFQFCNDPFLGVYYHKNNKSWMESEFRVYSSANNCTFEYVSQPFLMDLEGKQGNFKNLREFVFKNIDGYFKIYSKHTPINLVRDLPQGFSALEPLVDLPIGINITRFQTLLALHRSYLTPGDSSSGWTAGAAAYYVGYLQPRTFLLKYNENGTITDAVDCALDPLSETKCTLKSFTVEKGIYQTSNFRVQPTESIVRFPNITNLCPFGEVFNATRFASVYAWNRKRISNCVADYSVLYNSASFSTFKCYGVSPTKLNDLCFTNVYADSFVIRGDEVRQIAPGQTGKIADYNYKLPDDFTGCVIAWNSNNLDSKVGGNYNYLYRLFRKSNLKPFERDISTEIYQAGSTPCNGVEGFNCYFPLQSYGFQPTNGVGYQPYRVVVLSFELLHAPATVCGPKKSTNLVKNKCVNFNFNGLTGTGVLTESNKKFLPFQQFGRDIADTTDAVRDPQTLEILDITPCSFGGVSVITPGTNTSNQVAVLYQGVNCTEVPVAIHADQLTPTWRVYSTGSNVFQTRAGCLIGAEHVNNSYECDIPIGAGICASYQTQTNSPRRARSVASQSIIAYTMSLGAENSVAYSNNSIAIPTNFTISVTTEILPVSMTKTSVDCTMYICGDSTECSNLLLQYGSFCTQLNRALTGIALEQDKNTQEVFAQVKQIYKTPPIKDFGGFNFSQILPDPSKPSKRSFIEDLLFNKVTLADAGFIKQYGDCLGDIAARDLICAQKFNGLTVLPPLLTDEMIAQYTSALLAGTITSGWTFGCGAALQIPFAMQMAYRFNGIGVTQNVLYENQKLIANQFNSAIGKIQDSLSSTASALGKLQDVVNQNAQALNTLVKQLSSNFGAISSVLNDILSRLDKVEAEVQIDRLITGRLQSLQTYVTQQLIRAAEIRASANLAATKMSECVLGQSKRCDFCGKGYHLMSFPQSAPHGVVFLHVTYVPAQEKNFTTAPAICHDGKAHFPREGVFVSNGTHWFVTQRNFYEPQIITTDNTFVSGNCDVVIGIVNNTVYDPLQPELDSFKEELDKYFKNHTSPDVDLGDISGINASVVNIQKEIDRLNEVAKNLNESLIDLQELGKYEQYIKWPWYIWLGFIAGLIAIVMVTIMLCCMTSCCSCLKGCCSCGSCCKFDEDDSEPVLKGVKLHYT

SEQ ID NO: 1179 - protein, 1273 aa, Artificial Sequence
  SARS-CoV-2/USA/WA-UW31/2020__EPI_ISL_414618 spike protein (1-1273)(A890C_V1040C)
MFVFLVLLPLVSSQCVNLTTRTQLPPAYTNSFTRGVYYPDKVFRSSVLHSTQDLFLPFFSNVTWFHAIHVSGTNGTKRFDNPVLPFNDGVYFASTEKSNIIRGWIFGTTLDSKTQSLLIVNNATNVVIKVCEFQFCNDPFLGVYYHKNNKSWMESEFRVYSSANNCTFEYVSQPFLMDLEGKQGNFKNLREFVFKNIDGYFKIYSKHTPINLVRDLPQGFSALEPLVDLPIGINITRFQTLLALHRSYLTPGDSSSGWTAGAAAYYVGYLQPRTFLLKYNENGTITDAVDCALDPLSETKCTLKSFTVEKGIYQTSNFRVQPTESIVRFPNITNLCPFGEVFNATRFASVYAWNRKRISNCVADYSVLYNSASFSTFKCYGVSPTKLNDLCFTNVYADSFVIRGDEVRQIAPGQTGKIADYNYKLPDDFTGCVIAWNSNNLDSKVGGNYNYLYRLFRKSNLKPFERDISTEIYQAGSTPCNGAEGFNCYFPLQSYGFQPTNGVGYQPYRVVVLSFELLHAPATVCGPKKSTNLVKNKCVNFNFNGLTGTGVLTESNKKFLPFQQFGRDIADTTDAVRDPQTLEILDITPCSFGGVSVITPGTNTSNQVAVLYQDVNCTEVPVAIHADQLTPTWRVYSTGSNVFQTRAGCLIGAEHVNNSYECDIPIGAGICASYQTQTNSPRRARSVASQSIIAYTMSLGAENSVAYSNNSIAIPTNFTISVTTEILPVSMTKTSVDCTMYICGDSTECSNLLLQYGSFCTQLNRALTGIAVEQDKNTQEVFAQVKQIYKTPPIKDFGGFNFSQILPDPSKPSKRSFIEDLLFNKVTLADAGFIKQYGDCLGDIAARDLICAQKFNGLTVLPPLLTDEMIAQYTSALLAGTITSGWTFGCGAALQIPFAMQMAYRFNGIGVTQNVLYENQKLIANQFNSAIGKIQDSLSSTASALGKLQDVVNQNAQALNTLVKQLSSNFGAISSVLNDILSRLDKVEAEVQIDRLITGRLQSLQTYVTQQLIRAAEIRASANLAATKMSECVLGQSKRCDFCGKGYHLMSFPQSAPHGVVFLHVTYVPAQEKNFTTAPAICHDGKAHFPREGVFVSNGTHWFVTQRNFYEPQIITTDNTFVSGNCDVVIGIVNNTVYDPLQPELDSFKEELDKYFKNHTSPDVDLGDISGINASVVNIQKEIDRLNEVAKNLNESLIDLQELGKYEQYIKWPWYIWLGFIAGLIAIVMVTIMLCCMTSCCSCLKGCCSCGSCCKFDEDDSEPVLKGVKLHYT

SEQ ID NO: 1180 - protein, 1273 aa, Artificial Sequence
  SARS-CoV-2/South Korea/SNU01/2020__EPI_ISL_411929 spike protein (1-1273)(A890C_V1040C)
MFVFLVLLPLVSSQCVNLTTRTQLPPAYTNSFTRGVYYPDKVFRSSVLHSTQDLFLPFFSNVTWFHAIHVSGTNGTKRFDNPVLPFNDGVYFASTEKSNIIRGWIFGTTLDSKTQSLLIVNNATNVVIKVCEFQFCNDPFLGVYYHKNNKSWMESEFRVYSSANNCTFEYVSQPFLMDLEGKQGNFKNLREFVFKNIDGYFKIYSKHTPINLVRDLPQGFWALEPLVDLPIGINITRFQTLLALHRSYLTPGDSSSGWTAGAAAYYVGYLQPRTFLLKYNENGTITDAVDCALDPLSETKCTLKSFTVEKGIYQTSNFRVQPTESIVRFPNITNLCPFGEVFNATRFASVYAWNRKRISNCVADYSVLYNSASFSTFKCYGVSPTKLNDLCFTNVYADSFVIRGDEVRQIAPGQTGKIADYNYKLPDDFTGCVIAWNSNNLDSKVGGNYNYLYRLFRKSNLKPFERDISTEIYQAGSTPCNGVEGFNCYFPLQSYGFQPTNGVGYQPYRVVVLSFELLHAPATVCGPKKSTNLVKNKCVNFNFNGLTGTGVLTESNKKFLPFQQFGRDIADTTDAVRDPQTLEILDITPCSFGGVSVITPGTNTSNQVAVLYQDVNCTEVPVAIHADQLTPTWRVYSTGSNVFQTRAGCLIGAEHVNNSYECDIPIGAGICASYQTQTNSPRRARSVASQSIIAYTMSLGAENSVAYSNNSIAIPTNFTISVTTEILPVSMTKTSVDCTMYICGDSTECSNLLLQYGSFCTQLNRALTGIAVEQDKNTQEVFAQVKQIYKTPPIKDFGGFNFSQILPDPSKPSKRSFIEDLLFNKVTLADAGFIKQYGDCLGDIAARDLICAQKFNGLTVLPPLLTDEMIAQYTSALLAGTITSGWTFGCGAALQIPFAMQMAYRFNGIGVTQNVLYENQKLIANQFNSAIGKIQDSLSSTASALGKLQDVVNQNAQALNTLVKQLSSNFGAISSVLNDILSRLDKVEAEVQIDRLITGRLQSLQTYVTQQLIRAAEIRASANLAATKMSECVLGQSKRCDFCGKGYHLMSFPQSAPHGVVFLHVTYVPAQEKNFTTAPAICHDGKAHFPREGVFVSNGTHWFVTQRNFYEPQIITTDNTFVSGNCDVVIGIVNNTVYDPLQPELDSFKEELDKYFKNHTSPDVDLGDISGINASVVNIQKEIDRLNEVAKNLNESLIDLQELGKYEQYIKWPWYIWLGFIAGLIAIVMVTIMLCCMTSCCSCLKGCCSCGSCCKFDEDDSEPVLKGVKLHYT

SEQ ID NO: 1181 - protein, 1273 aa, Artificial Sequence
  SARS-CoV-2/China/WF0004/2020__EPI_ISL_413694 spike protein (1-1273)(A890C_V1040C)
MFVFLVLLPLVSSQCVNLTTRTQLPPAYTNSFTRGVYYPDKVFRSSVLHSTQDLFLPFFSNVTWFHAIHVSGTNGTKRFDNPVLPFNDGVYFASTEKSNIIRGWIFGTTLDSKTQSLLIVNNATNVVIKVCEFQFCNDPFLGVYYHKNNKSWTESEFRVYSSANNCTFEYVSQPFLMDLEGKQGNFKNLREFVFKNIDGYFKIYSKHTPINLVRDLPQGFSALEPLVDLPIGINITRFQTLLALHRSYLTPGDSSSGWTAGAAAYYVGYLQPRTFLLKYNENGTITDAVDCALDPLSETKCTLKSFTVEKGIYQTSNFRVQPTESIVRFPNITNLCPFGEVFNATRFASVYAWNRKRISNCVADYSVLYNSASFSTFKCYGVSPTKLNDLCFTNVYADSFVIRGDEVRQIAPGQTGKIADYNYKLPDDFTGCVIAWNSNNLDSKVGGNYNYLYRLFRKSNLKPFERDISTEIYQAGSTPCNGVEGFNCYFPLQSYGFQPTNGVGYQPYRVVVLSFELLHAPATVCGPKKSTNLVKNKCVNFNFNGLTGTGVLTESNKKFLPFQQFGRDIADTTDAVRDPQTLEILDITPCSFGGVSVITPGTNTSNQVAVLYQDVNCTEVPVAIHADQLTPTWRVYSTGSNVFQTRAGCLIGAEHVNNSYECDIPIGAGICASYQTQTNSPRRARSVASQSIIAYTMSLGAENSVAYSNNSIAIPTNFTISVTTEILPVSMTKTSVDCTMYICGDSTECSNLLLQYGSFCTQLNRALTGIAVEQDKNTQEVFAQVKQIYKTPPIKDFGGFNFSQILPDPSKPSKRSFIEDLLFNKVTLADAGFIKQYGDCLGDIAARDLICAQKFNGLTVLPPLLTDEMIAQYTSALLAGTITSGWTFGCGAALQIPFAMQMAYRFNGIGVTQNVLYENQKLIANQFNSAIGKIQDSLSSTASALGKLQDVVNQNAQALNTLVKQLSSNFGAISSVLNDILSRLDKVEAEVQIDRLITGRLQSLQTYVTQQLIRAAEIRASANLAATKMSECVLGQSKRCDFCGKGYHLMSFPQSAPHGVVFLHVTYVPAQEKNFTTAPAICHDGKAHFPREGVFVSNGTHWFVTQRNFYEPQIITTDNTFVSGNCDVVIGIVNNTVYDPLQPELDSFKEELDKYFKNHTSPDVDLGDISGINASVVNIQKEIDRLNEVAKNLNESLIDLQELGKYEQYIKWPWYIWLGFIAGLIAIVMVTIMLCCMTSCCSCLKGCCSCGSCCKFDEDDSEPVLKGVKLHYT

SEQ ID NO: 1182 - protein, 1273 aa, Artificial Sequence
  SARS-CoV-2/China/WF0028/2020__EPI_ISL_413791 spike protein (1-1273)(A890C_V1040C)
MFVFLVLLPLVSSQCVNLTTRTQLPPAYTNSFTRGVYYPDKVFRSSVLHSTQDLFLPFFSNVTWFHAIHVSGTNGTKRFDNPVLPFNDGVYFASTEKSNIIRGWIFGTTLDSKTQSLLIVNNATNVVIKVCEFQFCNDPFLGVYYHKNNKSWMESEFRVYSSANNCTFEYVSQPFLMDLEGKQGNFKNLREFVFKNIDGYFKIYSKHTPINLVRDLPQGFSALEPLVDLPIGINITRFQTLLALHRSYLTPGDSSSGWTAGAAAYYVGYLQPRTFLLKYNENGTITDAVDCALDPLSETKCTLKSFTVEKGIYQTSNFRVQPTESIVRFPNITNLCPFGEVFNATRFASVYAWNRKRISNCVADYSVLYNSASFSTFKCYGVSPTKLNDLCFTNVYADSFVIRGDEVRQIAPGQTGKIADYNYKLPDDFTGCVIAWNSNNLDSKVGGNYNYLYRLFRKSNLKPFERDISTEIYQAGSTPCNGVEGFNCYFPLQSYGFQPTNGVGYQPYRVVVLSFELLHAPATVCGPKKSTNLVKNKCVNFNFNGLTGTGVLTESNKKFLPFQQFGRDIADTTDAVRDPQTLEILDITPCSFGGVSVITPGTNTSNQVAVLYQDVNCTEVPVAIHADQLTPTWRVYSTGSNVFQTRAGCLIGAEHVNNSYECDIPIGAGICASYQTQTNSPRRARSVASQSIIAYTMSLGAENSVAYSNNSIAIPTNFTISVTTEILPVSMTKTSVDCTMYICGDSTECSNLLLQYGSFCTQLNRALTGIAVEQDKNTQEVFAQVKQIYKTPPIKDFGGFNFSQILPDPSKPSKRSFIEDLLFNKVTLADAGFIKQYGDCLGDIAARDLICAQKFNGLTVLPPLLTDEMIAQYTSALLAGTITSGWTFGCGAALQIPFAMQMAYRFNGIGVTQNVLYENQKLIANQFNSAIGKIQDSLSSTASALGKLQDVVNQNAQALNTLVKQLSSNFGAISSVLNDILSRLDKVEAEVQIDRLITGRLQSLQTYVTQQLIRAAEIRASANLAATKMSECVLGQSKRCDFCGKGYHLMSFPQSAPHGVVFLHVTYVPAQEKNFTTAPAICHDGKAHFPREGVFVSNGTHWFVTQRNFYEPQIITTDNTFVSGNCDVVIGIVNNTVYDPLQPELESFKEELDKYFKNHTSPDVDLGDISGINASVVNIQKEIDRLNEVAKNLNESLIDLQELGKYEQYIKWPWYIWLGFIAGLIAIVMVTIMLCCMTSCCSCLKGCCSCGSCCKFDEDDSEPVLKGVKLHYT

SEQ ID NO: 1183 - protein, 1273 aa, Artificial Sequence
  SARS-CoV-2/2019-nCoV/USA-CruiseA-18/2020__MT159716.1 spike protein (1-1273)(A890C_V1040C)
MFVFLVLLPLVSSQCVNLTTRTQLPPAYTNSFTRGVYYPDKVFRSSVLHSTQDLFLPFFSNVTWFHAIHVSGTNGTKRFDNPVLPFNDGVYFASTEKSNIIRGWIFGTTLDSKTQSLLIVNNATNVVIKVCEFQFCNDPFLGVYYHKNNKSWMESELRVYSSANNCTFEYVSQPFLMDLEGKQGNFKNLREFVFKNIDGYFKIYSKHTPINLVRDLPQGFSALEPLVDLPIGINITRFQTLLALHRSYLTPGDSSSGWTAGAAAYYVGYLQPRTFLLKYNENGTITDAVDCALDPLSETKCTLKSFTVEKGIYQTSNFRVQPTESIVRFPNITNLCPFGEVFNATRFASVYAWNRKRISNCVADYSVLYNSASFSTFKCYGVSPTKLNDLCFTNVYADSFVIRGDEVRQIAPGQTGKIADYNYKLPDDFTGCVIAWNSNNLDSKVGGNYNYLYRLFRKSNLKPFERDISTEIYQAGSTPCNGVEGFNCYFPLQSYGFQPTNGVGYQPYRVVVLSFELLHAPATVCGPKKSTNLVKNKCVNFNFNGLTGTGVLTESNKKFLPFQQFGRDIADTTDAVRDPQTLEILDITPCSFGGVSVITPGTNTSNQVAVLYQDVNCTEVPVAIHADQLTPTWRVYSTGSNVFQTRAGCLIGAEHVNNSYECDIPIGAGICASYQTQTNSPRRARSVASQSIIAYTMSLGAENSVAYSNNSIAIPTNFTISVTTEILPVSMTKTSVDCTMYICGDSTECSNLLLQYGSFCTQLNRALTGIAVEQDKNTQEVFAQVKQIYKTPPIKDFGGFNFSQILPDPSKPSKRSFIEDLLFNKVTLADAGFIKQYGDCLGDIAARDLICAQKFNGLTVLPPLLTDEMIAQYTSALLAGTITSGWTFGCGAALQIPFAMQMAYRFNGIGVTQNVLYENQKLIANQFNSAIGKIQDSLSSTASALGKLQDVVNQNAQALNTLVKQLSSNFGAISSVLNDILSRLDKVEAEVQIDRLITGRLQSLQTYVTQQLIRAAEIRASANLAATKMSECVLGQSKRCDFCGKGYHLMSFPQSAPHGVVFLHVTYVPAQEKNFTTAPAICHDGKAHFPREGVFVSNGTHWFVTQRNFYEPQIITTDNTFVSGNCDVVIGIVNNTVYDPLQPELDSFKEELDKYFKNHTSPDVDLGDISGINASVVNIQKEIDRLNEVAKNLNESLIDLQELGKYEQYIKWPWYIWLGFIAGLIAIVMVTIMLCCMTSCCSCLKGCCSCGSCCKFDEDDSEPVLKGVKLHYT

SEQ ID NO: 1184 - protein, 1273 aa, Artificial Sequence
  SARS-CoV-2/SARS-CoV-2/Yunnan-01/human/2020/CHN__MT049951.1 spike protein (1-1273)(A890C_V1040C)
MFVFLVLLPLVSSQCVNLTTRTQLPPANTNSFTRGVYYPDKVFRSSVLHSTQDLFLPFFSNVTWFHAIHVSGTNGTKRFDNPVLPFNDGVYFASTEKSNIIRGWIFGTTLDSKTQSLLIVNNATNVVIKVCEFQFCNDPFLGVYYHKNNKSWMESEFRVYSSANNCTFEYVSQPFLMDLEGKQGNFKNLREFVFKNIDGYFKIYSKHTPINLVRDLPQGFSALEPLVDLPIGINITRFQTLLALHRSYLTPGDSSSGWTAGAAAYYVGYLQPRTFLLKYNENGTITDAVDCALDPLSETKCTLKSFTVEKGIYQTSNFRVQPTESIVRFPNITNLCPFGEVFNATRFASVYAWNRKRISNCVADYSVLYNSASFSTFKCYGVSPTKLNDLCFTNVYADSFVIRGDEVRQIAPGQTGKIADYNYKLPDDFTGCVIAWNSNNLDSKVGGNYNYLYRLFRKSNLKPFERDISTEIYQAGSTPCNGVEGFNCYFPLQSYGFQPTNGVGYQPYRVVVLSFELLHAPATVCGPKKSTNLVKNKCVNFNFNGLTGTGVLTESNKKFLPFQQFGRDIADTTDAVRDPQTLEILDITPCSFGGVSVITPGTNTSNQVAVLYQDVNCTEVPVAIHADQLTPTWRVYSTGSNVFQTRAGCLIGAEHVNNSYECDIPIGAGICASYQTQTNSPRRARSVASQSIIAYTMSLGAENSVAYSNNSIAIPTNFTISVTTEILPVSMTKTSVDCTMYICGDSTECSNLLLQYGSFCTQLNRALTGIAVEQDKNTQEVFAQVKQIYKTPPIKDFGGFNFSQILPDPSKPSKRSFIEDLLFNKVTLADAGFIKQYGDCLGDIAARDLICAQKFNGLTVLPPLLTDEMIAQYTSALLAGTITSGWTFGCGAALQIPFAMQMAYRFNGIGVTQNVLYENQKLIANQFNSAIGKIQDSLSSTASALGKLQDVVNQNAQALNTLVKQLSSNFGAISSVLNDILSRLDKVEAEVQIDRLITGRLQSLQTYVTQQLIRAAEIRASANLAATKMSECVLGQSKRCDFCGKGYHLMSFPQSAPHGVVFLHVTYVPAQEKNFTTAPAICHDGKAHFPREGVFVSNGTHWFVTQRNFYEPQIITTDNTFVSGNCDVVIGIVNNTVYDPLQPELDSFKEELDKYFKNHTSPDVDLGDISGINASVVNIQKEIDRLNEVAKNLNESLIDLQELGKYEQYIKWPWYIWLGFIAGLIAIVMVTIMLCCMTSCCSCLKGCCSCGSCCKFDEDDSEPVLKGVKLHYT

SEQ ID NO: 1185 - protein, 1273 aa, Artificial Sequence
  SARS-CoV-2/USA/WA-UW292/2020__EPI_ISL_418077 spike protein (1-1273)(A890C_V1040C)
MFVFLVLLPLVSSQCVNLTTRTQLPPAYTNSFTRGVYYPDKVFRSSVLHSTQDLFLPFFSNVTWFHAIHVSGTNGTKRFDNPVLPFNDGVYFASTEKSNIIRGWIFGTTLDSKTQSLLIVNNATNVVIKVCEFQFCNDPFLGVYYHKNNKSWMESEFRVYSSANNCTFEYVSQPFLMDLEGKQGNFKNLREFVFKNIDGYFKIYSKHTPINLVRDLPQGFSALEPLVDLPIGINITRFQTLLALHRSYLTPGDSSSGWTAGAAAYYVGYLQPRTFLLKYNENGTITDAVDCALDPLSETKCTLKSFTVEKGIYQTSNFRVQPTESIVRFPNITNLCPFGEVFNATRFASVYAWNRKRISNCVADYSVLYNSASFSTFKCYGVSPTKLNDLCFTNVYADSFVIRGDEVRQIAPGQTGKIADYNYKLPDDFTGCVIAWNSNNLDSKVGGNYNYLYRLFRKSNLKPFERDISTEIYQASSTPCNGVEGFNCYFPLQSYGFQPTNGVGYQPYRVVVLSFELLHAPATVCGPKKSTNLVKNKCVNFNFNGLTGTGVLTESNKKFLPFQQFGRDIADTTDAVRDPQTLEILDITPCSFGGVSVITPGTNTSNQVAVLYQDVNCTEVPVAIHADQLTPTWRVYSTGSNVFQTRAGCLIGAEHVNNSYECDIPIGAGICASYQTQTNSPRRARSVASQSIIAYTMSLGAENSVAYSNNSIAIPTNFTISVTTEILPVSMTKTSVDCTMYICGDSTECSNLLLQYGSFCTQLNRALTGIAVEQDKNTQEVFAQVKQIYKTPPIKDFGGFNFSQILPDPSKPSKRSFIEDLLFNKVTLADAGFIKQYGDCLGDIAARDLICAQKFNGLTVLPPLLTDEMIAQYTSALLAGTITSGWTFGCGAALQIPFAMQMAYRFNGIGVTQNVLYENQKLIANQFNSAIGKIQDSLSSTASALGKLQDVVNQNAQALNTLVKQLSSNFGAISSVLNDILSRLDKVEAEVQIDRLITGRLQSLQTYVTQQLIRAAEIRASANLAATKMSECVLGQSKRCDFCGKGYHLMSFPQSAPHGVVFLHVTYVPAQEKNFTTAPAICHDGKAHFPREGVFVSNGTHWFVTQRNFYEPQIITTDNTFVSGNCDVVIGIVNNTVYDPLQPELDSFKEELDKYFKNHTSPDVDLGDISGINASVVNIQKEIDRLNEVAKNLNESLIDLQELGKYEQYIKWPWYIWLGFIAGLIAIVMVTIMLCCMTSCCSCLKGCCSCGSCCKFDEDDSEPVLKGVKLHYT

SEQ ID NO: 1186 - protein, 1273 aa, Artificial Sequence
  SARS-CoV-2/Iceland/192/2020__EPI_ISL_417819 spike protein (1-1273)(A890C_V1040C)
MFVFFVLLPLVSSQCVNLTTRTQLPPAYTNSFTRGVYYPDKVFRSSVLHSTQDLFLPFFSNVTWFHAIHVSGTNGTKRFDNPVLPFNDGVYFASTEKSNIIRGWIFGTTLDSKTQSLLIVNNATNVVIKVCEFQFCNDPFLGVYYHKNNKSWMESEFRVYSSANNCTFEYVSQPFLMDLEGKQGNFKNLREFVFKNIDGYFKIYSKHTPINLVRDLPQGFSALEPLVDLPIGINITRFQTLLALHRSYLTPGDSSSGWTAGAAAYYVGYLQPRTFLLKYNENGTITDAVDCALDPLSETKCTLKSFTVEKGIYQTSNFRVQPTESIVRFPNITNLCPFGEVFNATRFASVYAWNRKRISNCVADYSVLYNSASFSTFKCYGVSPTKLNDLCFTNVYADSFVIRGDEVRQIAPGQTGKIADYNYKLPDDFTGCVIAWNSNNLDSKVGGNYNYLYRLFRKSNLKPFERDISTEIYQAGSTPCNGVEGFNCYFPLQSYGFQPTNGVGYQPYRVVVLSFELLHAPATVCGPKKSTNLVKNKCVNFNFNGLTGTGVLTESNKKFLPFQQFGRDIADTTDAVRDPQTLEILDITPCSFGGVSVITPGTNTSNQVAVLYQGVNCTEVPVAIHADQLTPTWRVYSTGSNVFQTRAGCLIGAEHVNNSYECDIPIGAGICASYQTQTNSPRRARSVASQSIIAYTMSLGAENSVAYSNNSIAIPTNFTISVTTEILPVSMTKTSVDCTMYICGDSTECSNLLLQYGSFCTQLNRALTGIAVEQDKNTQEVFAQVKQIYKTPPIKDFGGFNFSQILPDPSKPSKRSFIEDLLFNKVTLADAGFIKQYGDCLGDIAARDLICAQKFNGLTVLPPLLTDEMIAQYTSALLAGTITSGWTFGCGAALQIPFAMQMAYRFNGIGVTQNVLYENQKLIANQFNSAIGKIQDSLSSTASALGKLQDVVNQNAQALNTLVKQLSSNFGAISSVLNDILSRLDKVEAEVQIDRLITGRLQSLQTYVTQQLIRAAEIRASANLAATKMSECVLGQSKRCDFCGKGYHLMSFPQSAPHGVVFLHVTYVPAQEKNFTTAPAICHDGKAHFPREGVFVSNGTHWFVTQRNFYEPQIITTDNTFVSGNCDVVIGIVNNTVYDPLQPELDSFKEELDKYFKNHTSPDVDLGDISGINASVVNIQKEIDRLNEVAKNLNESLIDLQELGKYEQYIKWPWYIWLGFIAGLIAIVMVTIMLCCMTSCCSCLKGCCSCGSCCKFDEDDSEPVLKGVKLHYT

SEQ ID NO: 1187 - protein, 1273 aa, Artificial Sequence
  SARS-CoV-2/Belgium/ULG-6939/2020__EPI_ISL_417020 spike protein (1-1273)(A890C_V1040C)
MFVFLVLLPLVSSQCVNLTTRTQLPPAYTNSFTRGVYYPDKVFRSSVLHSTQDLFLPFFSNVTWFHAIHVSGTNGTKRFDNPVLPFNDGVYFASTEKSNIIRGWIFGTTLDSKTQSLLIVNNATNVVIKVCEFQFCNDPFLGVYYHKNNKSWMESEFRVYSSANNCTFEYVSQPFLMDLEGKQGNFKNLREFVFKNIDGYFKIYSKHTPINLVRDLPQGFSALEPLVDLPIGINITRFQTLLALHRSYLTPGDSSSGWTAGAAAYYVGYLQPRTFLLKYNENGTITDAVDCALDPLSETKCTLKSFTVEKGIYQTSNFRVQPTESIVRFPNITNLCPFGEVFNATRFASVYAWNRKRISNCVADYSVLYNSASFSTFKCYGVSPTKLNDLCFTNVYADSFVIRGDEVRQIAPGQTGKIADYNYKLPDDFTGCVIAWNSNNLDSKVGGNYNYLYRLFRKSNLKPFERDISTEIYQAGSTPCNGVEGFNCYFPLQSYGFQPTNGVGYQPYRVVVLSFELLHAPATVCGPKKSTNLVKNKCVNFNFNGLTGTGVLTESNKKFLPFQQFGRDIADTTDAVRDPQTLEILDITPCSFGGVSVITPGTNTSNQVAVLYQGVNCTEVPVAIHADQLTPTWRVYSTGSNVFQTRAGCLIGAEHVNNSYECDIPIGAGICASYQTQTNSPRRARSVASQSIIAYTMSLGAENSVVYSNNSIAIPTNFTISVTTEILPVSMTKTSVDCTMYICGDSTECSNLLLQYGSFCTQLNRALTGIAVEQDKNTQEVFAQVKQIYKTPPIKDFGGFNFSQILPDPSKPSKRSFIEDLLFNKVTLADAGFIKQYGDCLGDIAARDLICAQKFNGLTVLPPLLTDEMIAQYTSALLAGTITSGWTFGCGAALQIPFAMQMAYRFNGIGVTQNVLYENQKLIANQFNSAIGKIQDSLSSTASALGKLQDVVNQNAQALNTLVKQLSSNFGAISSVLNDILSRLDKVEAEVQIDRLITGRLQSLQTYVTQQLIRAAEIRASANLAATKMSECVLGQSKRCDFCGKGYHLMSFPQSAPHGVVFLHVTYVPAQEKNFTTAPAICHDGKAHFPREGVFVSNGTHWFVTQRNFYEPQIITTDNTFVSGNCDVVIGIVNNTVYDPLQPELDSFKEELDKYFKNHTSPDVDLGDISGINASVVNIQKEIDRLNEVAKNLNESLIDLQELGKYEQYIKWPWYIWLGFIAGLIAIVMVTIMLCCMTSCCSCLKGCCSCGSCCKFDEDDSEPVLKGVKLHYT

SEQ ID NO: 1188 - protein, 1273 aa, Artificial Sequence
  SARS-CoV-2/France/HF2496/2020__EPI_ISL_418231 spike protein (1-1273)(A890C_V1040C)
MFVFLVLLPLVSSQCVNLTTRTQLPPAYTNSFTRGVYYPDKVFRSSVLHSTQDLFLPFFSNVTWFHAIHVSGTNGTKRFDNPVLPFNDGVYFASTEKSNIIRGWIFGTTLDSKTQSLLIVNNATNVVIKVCEFQFCNDPFLGVYYHKNNKSWMESEFRVYSSANNCTFEYVSQPFLMDLEGKQGNFKNLREFVFKNIDGYFKIYSKHTPINLVRDLPQGFSALEPLVDLPIGINITRFQTLLALHRSYLTPGDSSSGWTAGAAAYYVGYLQPRTFLLKYNENGTITDAVDCALDPLSETKCTLKSFTVEKGIYQTSNFRVQPTESIVRFPNITNLCPFGEVFNATRFASVYAWNRKRISNCVADYSVLYNSASFSTFKCYGVSPTKLNDLCFTNVYADSFVIRGDEVRQIAPGQTGKIADYNYKLPDDFTGCVIAWNSNNLDSKVGGNYNYLYRLFRKSNLKPFERDISTEIYQAGSTPCNGVEGFNCYFPLQSYGFQPTNGVGYQPYRVVVLSFELLHAPATVCGPKKSTNLVKNKCVNFNFNGLTGTGVLTESNKKFLPFQQFGRDIADTTDAVRDPQTLEILDITPCSFGGVSVITPGTNTSNQVAVLYQGVNCTEVPVAIHADQLTPTWRVYSTGSNVFQTRAGCLIGAEHVNNSYECDIPIGAGICASYQTQTNSPRRARSVASQSIIAYTMSLGAENSVAYSNNSIAIPTNFTISVTTEILPVSMTKTSVDCTMYICGDSTECSNLLLQYGSFCTQLNRALTGIAVEQDKNTQEVFAQVKQIYKTPPIKDFGGFNFSQILPDPSKPSKRSFIEDLLFNKVTLADAGFIKQYGDCLGDIVARDLICAQKFNGLTVLPPLLTDEMIAQYTSALLAGTITSGWTFGCGAALQIPFAMQMAYRFNGIGVTQNVLYENQKLIANQFNSAIGKIQDSLSSTASALGKLQDVVNQNAQALNTLVKQLSSNFGAISSVLNDILSRLDKVEAEVQIDRLITGRLQSLQTYVTQQLIRAAEIRASANLAATKMSECVLGQSKRCDFCGKGYHLMSFPQSAPHGVVFLHVTYVPAQEKNFTTAPAICHDGKAHFPREGVFVSNGTHWFVTQRNFYEPQIITTDNTFVSGNCDVVIGIVNNTVYDPLQPELDSFKEELDKYFKNHTSPDVDLGDISGINASVVNIQKEIDRLNEVAKNLNESLIDLQELGKYEQYIKWPWYIWLGFIAGLIAIVMVTIMLCCMTSCCSCLKGCCSCGSCCKFDEDDSEPVLKGVKLHYT

SEQ ID NO: 1189 - protein, 1273 aa, Artificial Sequence
  SARS-CoV-2/USA/WA-UW291/2020__EPI_ISL_418076 spike protein (1-1273)(A890C_V1040C)
MFVFLVLLPLVSSQCVNLTTRTQLPPAYTNSFTRGVYYPDKVFRSSVLHSTQDLFLPFFSNVTWFHAIHVSGTNGTKRFDNPVLPFNDGVYFASTEKSNIIRGWIFGTTLDSKTQSLLIVNNATNVVIKVCEFQFCNDPFLGVYYHKNNKSWMESEFRVYSSANNCTFEYVSQPFLMDLEGKQGNFKNLREFVFKNIDGYFKIYSKHTPINLVRDLPQGFSALEPLVDLPIGINITRFQTLLALHRSYLTPGDSSSGWTAGAAAYYVGYLQPRTFLLKYNENGTITDAVDCALDPLSETKCTLKSFTVEKGIYQTSNFRVQPTESIVRFPNITNLCPFGEVFNATRFASVYAWNRKRISNCVADYSVLYNSASFSTFKCYGVSPTKLNDLCFTNVYADSFVIRGDEVRQIAPGQTGKIADYNYKLPDDFTGCVIAWNSNNLDSKVGGNYNYLYRLFRKSNLKPFERDISTEIYQAGSTPCNGVEGFNCYFPLQSYGFQPTNGVGYQPYRVVVLSFELLHAPATVCGPKKSTNLVKNKCVNFNFNGLTGTGVLTESNKKFLPFQQFGRDIADTTDAVRDPQTLEILDITPCSFGGVSVITPGTNTSNQVAVLYQGVNCTEVPVAIHADQLTPTWRVYSTGSNVFQTRAGCLIGAEHVNNSYECDIPIGAGICASYQTQTNSPRRARSVASQSIIAYTMSLGAENSVAYSNNSIAIPTNFTISVTTEILPVSMTKTSVDCTMYICGDSTECSNLLLQYGSFCTQLNRALTGIAVEQDKNTQEVFAQVKQIYKTPPIKDFGGFNFSQILPDPSKPSKRSFIEDLLFNKVTLADAGFIKQYGDCLGDIAARDLICAQKFNGLTVLPPLLTDEMIAQYTSALLAGTITSGWTFGCGAALQIPFAMQMAYRFNGIGVTQNVLYENQKLIANQFNSAIGKIQYSLSSTASALGKLQDVVNQNAQALNTLVKQLSSNFGAISSVLNDILSRLDKVEAEVQIDRLITGRLQSLQTYVTQQLIRAAEIRASANLAATKMSECVLGQSKRCDFCGKGYHLMSFPQSAPHGVVFLHVTYVPAQEKNFTTAPAICHDGKAHFPREGVFVSNGTHWFVTQRNFYEPQIITTDNTFVSGNCDVVIGIVNNTVYDPLQPELDSFKEELDKYFKNHTSPDVDLGDISGINASVVNIQKEIDRLNEVAKNLNESLIDLQELGKYEQYIKWPWYIWLGFIAGLIAIVMVTIMLCCMTSCCSCLKGCCSCGSCCKFDEDDSEPVLKGVKLHYT

SEQ ID NO: 1190 - protein, 1273 aa, Artificial Sequence
  SARS-CoV-2/Portugal/PT0034/2020__EPI_ISL_418019 spike protein (1-1273)(A890C_V1040C)
MFVFLVLLPLVSSQCVNLTTRTQLPPAYTNSFTRGVYYPDKVFRSSVLHSTQDLFLPFFSNVTWFHAIHVSGTNGTKRFDNPVLPFNDGVYFASTEKSNIIRGWIFGTTLDSKTQSLLIVNNATNVVIKVCEFQFCNDPFLGVYYHKNNKSWMESEFRVYSSANNCTFEYVSQPFLMDLEGKQGNFKNLREFVFKNIDGYFKIYSKHTPINLVRDLPQGFSALEPLVDLPIGINITRFQTLLALHRSYLTPGDSSSGWTAGAAAYYVGYLQPRTFLLKYNENGTITDAVDCALDPLSETKCTLKSFTVEKGIYQTSNFRVQPTESIVRFPNITNLCPFGEVFNATRFASVYAWNRKRISNCVADYSVLYNSASFSTFKCYGVSPTKLNDLCFTNVYADSFVIRGDEVRQIAPGQTGKIADYNYKLPDDFTGCVIAWNSNNLDSKVGGNYNYLYRLFRKSNLKPFERDISTEIYQAGSTPCNGVEGFNCYFPLQSYGFQPTNGVGYQPYRVVVLSFELLHAPATVCGPKKSTNLVKNKCVNFNFNGLTGTGVLTESNKKFLPFQQFGRDIADTTDAVRDPQTLEILDITPCSFGGVSVITPGTNTSNQVAVLYQGVNCTEVPVAIHADQLTPTWRVYSTGSNVFQTRAGCLIGAEHVNNSYECDIPIGAGICASYQTQTNSPRRARSVASQSIIAYTMSLGAENSVAYSNNSIAIPTNFTISVTTEILPVSMTKTSVDCTMYICGDSTECSNLLLQYGSFCTQLNRALTGIAVEQDKNTQEVFAQVKQIYKTPPIKDFGGFNFSQILPDPSKPSKRSFIEDLLFNKVTLADAGFIKQYGDCLGDIAARDLICAQKFNGLTVLPPLLTDEMIAQYTSALLAGTITSGWTFGCGAALQIPFAMQMAYRFNGIGVTQNVLYENQKLIANQFNSAIGKIQDSLSSTASALGKLQDVVNQNAQALNTLVKQLSSNFGAISSVLNDILSRLDKVEAEVQIDRLITGRLQSLQTYVTQQLIRAAEIRASANLAATKMSECVLGQSKRCDFCGKGYHLMSFPQSAPHGVVFLHVTYVPAQEKNFTTAPAICHDGKAHFPREGVFVSNGTHWFVTQRNFYEPQIITTDNTFVSGNCDVVIGIVNNTVYDPLQPELDSFKEELDKYFKNHTSPDVDLGDISGINASVVNIQKEIDRLNEVAKNLNESLIDLQELGKYEQYIKWPWYIWLGFIAGLIAIVMVTIMLCCITSCCSCLKGCCSCGSCCKFDEDDSEPVLKGVKLHYT

SEQ ID NO: 1191 - protein, 1273 aa, Artificial Sequence
  SARS-CoV-2/Iceland/202/2020__EPI_ISL_417750 spike protein (1-1273)(A890C_V1040C)
MFVFLVLLPLVSSQCVNLTTRTQLPPAYTNSFTRGVYYPDKVFRSSVLHSTQDLFLPFFSNVTWFHAIHVSGTNGTKRFDNPVLPFNDGVYFASTEKSNIIRGWIFGTTLDSKTQSLLIVNNATNVVIKVCEFQFCNDPFLGVYYHKNNKSWMESEFRVYSSANNCTFEYVSQPFLMDLEGKQGNFKNLREFVFKNIDGYFKIYSKHTPINLVRDLPQGFSALEPLVDLPIGINITRFQTLLALHRSYLTPGDSSSGWTAGAAAYYVGYLQPRTFLLKYNENGTITDAVDCALDPLSETKCTLKSFTVEKGIYQTSNFRVQPTESIVRFPNITNLCPFGEVFNATRFASVYAWNRKRISNCVADYSVLYNSASFSTFKCYGVSPTKLNDLCFTNVYADSFVIRGDEVRQIAPGQTGKIADYNYKLPDDFTGCVIAWNSNNLDSKVGGNYNYLYRLFRKSNLKPFERDISTEIYQAGSTPCNGVEGFNCYFPLQSYGFQPTNGVGYQPYRVVVLSFELLHAPATVCGPKKSTNLVKNKCVNFNFNGLTGTGVLTESNKKFLPFQQFGRDIADTTDAVRDPQTLEILDITPCSFGGVSVITPGTNTSNQVAVLYQDVNCTEVPVAIHADQLTPTWRVYSTGSNVFQTRAGCLIGAEHVNNSYECDIPIGAGICASYQTQTNSPRRARSVASQSIIAYTMSLGAENSVAYSNNSIAIPTNFTISVTTEILPVSMTKTSVDCTMYICGDSTECSNLLLQYGSFCTQLNRALTGIAVEQDKNTQEVFAQVKQIYKTPPIKDFGGFNFSQILPDPSKPSKRSFIEDLLFNKVTLADAGFIKQYGDCLGDIAARDLICAQKFNGLTVLPPLLTDEMIAQYTSALLAGTITSGWTFGCGAALQIPFAMQMAYRFNGIGVTQNVLYENQKLIANQFNSAIGKIQDSLSSTASALGKLQDVVNQNAQALNTLVKQLSSNFGAISSVLNDILSRLDKVEAEVQIDRLITGRLQSLQTYVTQQLIRAAEIRASANLAATKMSECVLGQSKRCDFCGKGYHLMSFPQSAPHGVVFLHVTYVPAQEKNFTTAPAICHDGKAHFPREGVFVSNGTHWFVTQRNFYEPQIITTDNTFVSGNCDVVIGIVNNTVYDPLQPELDSFKEELDKYFKNHTSPDVDLGDIPGINASVVNIQKEIDRLNEVAKNLNESLIDLQELGKYEQYIKWPWYIWLGFIAGLIAIVMVTIMLCCMTSCCSCLKGCCSCGSCCKFDEDDSEPVLKGVKLHYT

SEQ ID NO: 1192 - protein, 1273 aa, Artificial Sequence
  SARS-CoV-2/USA/WA-UW261/2020__EPI_ISL_418046 spike protein (1-1273)(A890C_V1040C)
MFVFLVLLPLVSSQCVNLTTRTQLPPAYTNSFTRGVYYPDKVFRSSVLHSTQDLFLPFFSNVTWFHAIHVSGTNGTKRFDNPVLPFNDGVYFASTEKSNIIRGWIFGTTLDSKTQSLLIVNNATNVVIKVCEFQFCNDPFLGVYYHKNNKSWMESEFRVYSSANNCTFEYVSQPFLMDLEGKQGNFKNLREFVFKNIDGYFKIYSKHTPINLVRDLPQGFSALEPLVDLPIGINITRFQTLLALHRSYLTPGDSSSGWTAGAAAYYVGYLQPRTFLLKYNENGTITDAVDCALDPLSETKCTLKSFTVEKGIYQTSNFRVQPTESIVRFPNITNLCPFGEVFNATRFTSVYAWNRKRISNCVADYSVLYNSASFSTFKCYGVSPTKLNDLCFTNVYADSFVIRGDEVRQIAPGQTGKIADYNYKLPDDFTGCVIAWNSNNLDSKVGGNYNYLYRLFRKSNLKPFERDISTEIYQAGSTPCNGVEGFNCYFPLQSYGFQPTNGVGYQPYRVVVLSFELLHAPATVCGPKKSTNLVKNKCVNFNFNGLTGTGVLTESNKKFLPFQQFGRDIADTTDAVRDPQTLEILDITPCSFGGVSVITPGTNTSNQVAVLYQDVNCTEVPVAIHADQLTPTWRVYSTGSNVFQTRAGCLIGAEHVNNSYECDIPIGAGICASYQTQTNSPRRARSVASQSIIAYTMSLGAENSVAYSNNSIAIPTNFTISVTTEILPVSMTKTSVDCTMYICGDSTECSNLLLQYGSFCTQLNRALTGIAVEQDKNTQEVFAQVKQIYKTPPIKDFGGFNFSQILPDPSKPSKRSFIEDLLFNKVTLADAGFIKQYGDCLGDIAARDLICAQKFNGLTVLPPLLTDEMIAQYTSALLAGTITSGWTFGCGAALQIPFAMQMAYRFNGIGVTQNVLYENQKLIANQFNSAIGKIQDSLSSTASALGKLQDVVNQNAQALNTLVKQLSSNFGAISSVLNDILSRLDKVEAEVQIDRLITGRLQSLQTYVTQQLIRAAEIRASANLAATKMSECVLGQSKRCDFCGKGYHLMSFPQSAPHGVVFLHVTYVPAQEKNFTTAPAICHDGKAHFPREGVFVSNGTHWFVTQRNFYEPQIITTDNTFVSGNCDVVIGIVNNTVYDPLQPELDSFKEELDKYFKNHTSPDVDLGDISGINASVVNIQKEIDRLNEVAKNLNESLIDLQELGKYEQYIKWPWYIWLGFIAGLIAIVMVTIMLCCMTSCCSCLKGCCSCGSCCKFDEDDSEPVLKGVKLHYT

SEQ ID NO: 1193 - protein, 1273 aa, Artificial Sequence
  SARS-CoV-2/Portugal/PT0035/2020__EPI_ISL_418020 spike protein (1-1273)(A890C_V1040C)
MFVFLVLLPLVSSQCVNLTTRTQLPPAYTNSFTRGVYYPDKVFRSSVLHSTQDLFLPFFSNVTWFHAIHVSGTNGTKRFDNPVLPFNDGVYFASTEKSNIIRGWIFGTTLDSKTQSLLIVNNATNVVIKVCEFQFCNDPFLGVYYHKNNKSWMESEFRVYSSANNCTFEYVSQPFLMDLEGKQGNFKNLREFVFKNIDGYFKIYSKHTPINLVRDLPQGFSALEPLVDLPIGINITRFQTLLALHRSYLTPGDSSSGWTAGAAAYYVGYLQPRTFLLKYNENGTITDAVDCALDPLSETKCTLKSFTVEKGIYQTSNFRVQPTESIVRFPNITNLCPFGEVFNATRFASVYAWNRKRISNCVADYSVLYNSASFSTFKCYGVSPTKLNDLCFTNVYADSFVIRGDEVRQIAPGQTGKIADYNYKLPDDFTGCVIAWNSNNLDSKVGGNYNYLYRLFRKSNLKPFERDISTEIYQAGSTPCNGVEGFNCYFPLQSYGFQPTNGVGYQPYRVVVLSFELLHAPATVCGPKKSTNLVKNKCVNFNFNGLTGTGVLTESNKKFLPFQQFGRDIADTTDAVRDPQTLEILDITPCSFGGVSVITPGTNTSNQVAVLYQDVNCTEVPVAIHADQLTPTWRVYSTGSNVFQTRAGCLIGAEHVNNSYECDIPIGAGICASYQTQTNSPRRARSVASQSIIAYTMSLGAENSVAYSNNSIAIPTNFTISVTTEILPVSMTKTSVDCTMYICGDSTECSNLLLQYGSFCTQLNRALTGIAVEQDKNTQEVFAQVKQIYKTPPIKDFGGFNFSQILPDPSKPSKRSFIEDLLFNKVTLADAGFIKQYGDCLGDISARDLICAQKFNGLTVLPPLLTDEMIAQYTSALLAGTITSGWTFGCGAALQIPFAMQMAYRFNGIGVTQNVLYENQKLIANQFNSAIGKIQDSLSSTASALGKLQDVVNQNAQALNTLVKQLSSNFGAISSVLNDILSRLDKVEAEVQIDRLITGRLQSLQTYVTQQLIRAAEIRASANLAATKMSECVLGQSKRCDFCGKGYHLMSFPQSAPHGVVFLHVTYVPAQEKNFTTAPAICHDGKAHFPREGVFVSNGTHWFVTQRNFYEPQIITTDNTFVSGNCDVVIGIVNNTVYDPLQPELDSFKEELDKYFKNHTSPDVDLGDISGINASVVNIQKEIDRLNEVAKNLNESLIDLQELGKYEQYIKWPWYIWLGFIAGLIAIVMVTIMLCCMTSCCSCLKGCCSCGSCCKFDEDDSEPVLKGVKLHYT

SEQ ID NO: 1194 - protein, 1273 aa, Artificial Sequence
  SARS-CoV-2/USA/NY-NYUMC7/2020__EPI_ISL_418192 spike protein (1-1273)(A890C_V1040C)
MFVFLVLLPLVSSQCVNLTTRTQLPPAYTNSFTRGVYYPDKVFRSSVLHSTQDLFLPFFSNVTWFHAIHVSGTNGTKRFDNPVLPFNDGVYFASTEKSNIIRGWIFGTTLDSKTQSLLIVNNATNVVIKVCEFQFCNDPFLGVYHHKNNKSWMESEFRVYSSANNCTFEYVSQPFLMDLEGKQGNFKNLREFVFKNIDGYFKIYSKHTPINLVRDLPQGFSALEPLVDLPIGINITRFQTLLALHRSYLTPGDSSSGWTAGAAAYYVGYLQPRTFLLKYNENGTITDAVDCALDPLSETKCTLKSFTVEKGIYQTSNFRVQPTESIVRFPNITNLCPFGEVFNATRFASVYAWNRKRISNCVADYSVLYNSASFSTFKCYGVSPTKLNDLCFTNVYADSFVIRGDEVRQIAPGQTGKIADYNYKLPDDFTGCVIAWNSNNLDSKVGGNYNYLYRLFRKSNLKPFERDISTEIYQAGSTPCNGVEGFNCYFPLQSYGFQPTNGVGYQPYRVVVLSFELLHAPATVCGPKKSTNLVKNKCVNFNFNGLTGTGVLTESNKKFLPFQQFGRDIADTTDAVRDPQTLEILDITPCSFGGVSVITPGTNTSNQVAVLYQGVNCTEVPVAIHADQLTPTWRVYSTGSNVFQTRAGCLIGAEHVNNSYECDIPIGAGICASYQTQTNSPRRARSVASQSIIAYTMSLGAENSVAYSNNSIAIPTNFTISVTTEILPVSMTKTSVDCTMYICGDSTECSNLLLQYGSFCTQLNRALTGIAVEQDKNTQEVFAQVKQIYKTPPIKDFGGFNFSQILPDPSKPSKRSFIEDLLFNKVTLADAGFIKQYGDCLGDIAARDLICAQKFNGLTVLPPLLTDEMIAQYTSALLAGTITSGWTFGCGAALQIPFAMQMAYRFNGIGVTQNVLYENQKLIANQFNSAIGKIQDSLSSTASALGKLQDVVNQNAQALNTLVKQLSSNFGAISSVLNDILSRLDKVEAEVQIDRLITGRLQSLQTYVTQQLIRAAEIRASANLAATKMSECVLGQSKRCDFCGKGYHLMSFPQSAPHGVVFLHVTYVPAQEKNFTTAPAICHDGKAHFPREGVFVSNGTHWFVTQRNFYEPQIITTDNTFVSGNCDVVIGIVNNTVYDPLQPELDSFKEELDKYFKNHTSPDVDLGDISGINASVVNIQKEIDRLNEVAKNLNESLIDLQELGKYEQYIKWPWYIWLGFIAGLIAIVMVTIMLCCMTSCCSCLKGCCSCGSCCKFDEDDSEPVLKGVKLHYT

SEQ ID NO: 1195 - protein, 1273 aa, Artificial Sequence
  SARS-CoV-2/Iceland/189/2020__EPI_ISL_417709 spike protein (1-1273)(A890C_V1040C)
MFVFLVLLPLVSSQCVNLTTRTQLPPAYTNSFTRGVYYPDKVFRSSVLHSTQDLFLPFFSNVTWFHAIHVSGTNGTKRFDNPVLPFNDGVYFASTEKSNIIRGWIFGTTLDSKTQSLLIVNNATNVVIKVCEFQFCNDPFLGVYYHKNNKSWMESEFRVYSSANNCTFEYVSQPFLMDLEGKQGNFKNLREFVFKNIDGYFKIYSKHTPINLVRDLPQGFSALEPLVDLPIGINITRFQTLLALHRSYLTPGDSSSGWTAGAAAYYVGYLQPRTFLLKYNENGTITDAVDCALDPLSETKCTLKSFTVEKGIYQTSNFRVQPTESIVRFPNITNLCPFGEVFNATRFASVYAWNRKRISNCVADYSVLYNSASFSTFKCYGVSPTKLNDLCFTNVYADSFVIRGDEVRQIAPGQTGKIADYNYKLPDDFTGCVIAWNSNNLDSKVGGNYNYLYRLFRKSNLKPFERDISTEIYQAGSTPCNGVEGFNCYFPLQSYGFQPTNGVGYQPYRVVVLSFELLHAPATVCGPKKSTNLVKNKCVNFNFNGLTGTGVLTESNKKFLPFQQFGRDIADTTDAVRDPQTLEILDITPCSFGGVSVITPGTNTSNQVAVLYQGVNCTEVPVAIHADQLTPTWRVYSTGSNVFQTRAGCLIGAEHVNNSYECDIPIGAGICASYQTQTNSPRRARSVASQSIIAYTMSLGAENSVAYSNNSIAIPTNFTISVTTEILPVSMTKTSVDCTMYICGDSTECSNLLLQYGSFCTQLNRALTGIAVEQDKNTQEVFAQVKQIYKTPPIKDFGGFNFSQILPDPSKPSKRSFIEDLLFNKVTLADAGFTKQYGDCLGDIAARDLICAQKFNGLTVLPPLLTDEMIAQYTSALLAGTITSGWTFGCGAALQIPFAMQMAYRFNGIGVTQNVLYENQKLIANQFNSAIGKIQDSLSSTASALGKLQDVVNQNAQALNTLVKQLSSNFGAISSVLNDILSRLDKVEAEVQIDRLITGRLQSLQTYVTQQLIRAAEIRASANLAATKMSECVLGQSKRCDFCGKGYHLMSFPQSAPHGVVFLHVTYVPAQEKNFTTAPAICHDGKAHFPREGVFVSNGTHWFVTQRNFYEPQIITTDNTFVSGNCDVVIGIVNNTVYDPLQPELDSFKEELDKYFKNHTSPDVDLGDISGINASVVNIQKEIDRLNEVAKNLNESLIDLQELGKYEQYIKWPWYIWLGFIAGLIAIVMVTIMLCCMTSCCSCLKGCCSCGSCCKFDEDDSEPVLKGVKLHYT

SEQ ID NO: 1196 - protein, 1273 aa, Artificial Sequence
  SARS-CoV-2/Australia/NSW56/2020__EPI_ISL_417408 spike protein (1-1273)(A890C_V1040C)
MFVFLVLLPLVSSQCVNLTTRTQLPPAYTNSFTRGVYYPDKVFRSSVLHSTQDLFLPFFSNVTWFHAIHVSGTNGTKRFDNPVLPFNDGVYFASTEKSNIIRGWIFGTTLDSKTQSLLIVNNATNVVIKVCEFQFCNDPFLGVYYHKNNKSWMESEFRVYSSANNCTFEYVSQPFLMDLEGKQGNFKNLREFVFKNIDGYFKIYSKHTPINLVRDLPQGFSALEPLVDLPIGINITRFQTLLALHRSYLTPGDSSSGWTAGAAAYYVGYLQPRTFLLKYNENGTITDAVDCALDPLSETKCTLKSFTVEKGIYQTSNFRVQPTESIVRFPNITNLCPFGEVFNATRFASVYAWNRKRISNCVADYSVLYNSASFSTFKCYGVSPTKLNDLCFTNVYADSFVIRGDEVRQIAPGQTGKIADYNYKLPDDFTGCVIAWNSNNLDSKVGGNYNYLYRLFRKSNLKPFERDISTEIYQAGSTPCNGVEGFNCYFPLQSYGFQPTNGVGYQPYRVVVLSFELLHAPATVCGPKKSTNLVKNKCVNFNFNGLTGTGVLTESNKKFLPFQQFGRDIADTTDAVRDPQTLEILDITPCSFGGVSVITPGTNTSNQVAVLYQDVNCTEVPVAIHADQLTPTWRVYSTGSNVFQTRAGCLIGAEHVNNSYECDIPIGAGICASYQTQTNSPRRARSVASQSIIAYTMSLGAENSVAYSNNSIAIPTNFTISVTTEILPVSMTKTSVDCTMYICGDSTECSNLLLQYGSFCTQLNRALTGIAVEQDKNTQEVFAQVKQIYKTPPIKDFGGFNFSQILPDSSKPSKRSFIEDLLFNKVTLADAGFIKQYGDCLGDIAARDLICAQKFNGLTVLPPLLTDEMIAQYTSALLAGTITSGWTFGCGAALQIPFAMQMAYRFNGIGVTQNVLYENQKLIANQFNSAIGKIQDSLSSTASALGKLQDVVNQNAQALNTLVKQLSSNFGAISSVLNDILSRLDKVEAEVQIDRLITGRLQSLQTYVTQQLIRAAEIRASANLAATKMSECVLGQSKRCDFCGKGYHLMSFPQSAPHGVVFLHVTYVPAQEKNFTTAPAICHDGKAHFPREGVFVSNGTHWFVTQRNFYEPQIITTDNTFVSGNCDVVIGIVNNTVYDPLQPELDSFKEELDKYFKNHTSPDVDLGDISGINASVVNIQKEIDRLNEVAKNLNESLIDLQELGKYEQYIKWPWYIWLGFIAGLIAIVMVTIMLCCMTSCCSCLKGCCSCGSCCKFDEDDSEPVLKGVKLHYT

SEQ ID NO: 1197 - protein, 1273 aa, Artificial Sequence
  SARS-CoV-2/Iceland/280/2020__EPI_ISL_417608 spike protein (1-1273)(A890C_V1040C)
MFVFLVLLPLVSSQCVNLTTRTQLPPAYTNSFTRGVYYPDKVFRSSVLHSTQDLFLPFFSNVTWFHAIHVSGTNGTKRFDNPVLPFNDGVYFASTEKSNIIRGWIFGTTLDSKTQSLLIVNNATNVVIKVCEFQFCNDPFLGVYYHKNNKSWMESEFRVYSSANNCTFEYVSQPFLMDLEGKQGNFKNLREFVFKNIDGYFKIYSKHTPINLVRDLPQGFSALEPLVDLPIGINITRFQTLLALHRSYLTPGDSSSGWTAGAAAYYVGYLQPRTFLLKYNENGTITDAVDCALDPLSETKCTLKSFTVEKGIYQTSNFRVQPTESIVRFPNITNLCPFGEVFNATRFASVYAWNRKRISNCVADYSVLYNSASFSTFKCYGVSPTKLNDLCFTNVYADSFVIRGDEVRQIAPGQTGKIADYNYKLPDDFTGCVIAWNSNNLDSKVGGNYNYLYRLFRKSNLKPFERDISTEIYQAGSTPCNGVEGFNCYFPLQSYGFQPTNGVGYQPYRVVVLSFELLHAPATVCGPKKSTNLVKNKCVNFNFNGLTGTGVLTESNKKFLPFQQFGRDIADTTDAVRDPQTLEILDITPCSFGGVSVITPGTNTSNQVAVLYQGVNCTEVPVAIHADQLTPTWRVYSTGSNVFQTRAGCLIGAEHVNNSYECDIPIGAGICASYHTQTNSPRRARSVASQSIIAYTMSLGAENSVAYSNNSIAIPTNFTISVTTEILPVSMTKTSVDCTMYICGDSTECSNLLLQYGSFCTQLNRALTGIAVEQDKNTQEVFAQVKQIYKTPPIKDFGGFNFSQILPDPSKPSKRSFIEDLLFNKVTLADAGFIKQYGDCLGDIAARDLICAQKFNGLTVLPPLLTDEMIAQYTSALLAGTITSGWTFGCGAALQIPFAMQMAYRFNGIGVTQNVLYENQKLIANQFNSAIGKIQDSLSSTASALGKLQDVVNQNAQALNTLVKQLSSNFGAISSVLNDILSRLDKVEAEVQIDRLITGRLQSLQTYVTQQLIRAAEIRASANLAATKMSECVLGQSKRCDFCGKGYHLMSFPQSAPHGVVFLHVTYVPAQEKNFTTAPAICHDGKAHFPREGVFVSNGTHWFVTQRNFYEPQIITTDNTFVSGNCDVVIGIVNNTVYDPLQPELDSFKEELDKYFKNHTSPDVDLGDISGINASVVNIQKEIDRLNEVAKNLNESLIDLQELGKYEQYIKWPWYIWLGFIAGLIAIVMVTIMLCCMTSCCSCLKGCCSCGSCCKFDEDDSEPVLKGVKLHYT

SEQ ID NO: 1198 - protein, 1273 aa, Artificial Sequence
  SARS-CoV-2/Iceland/247/2020__EPI_ISL_417575 spike protein (1-1273)(A890C_V1040C)
MFVFLVLLPLVSSQCVNLTTRTQLPPAYTNSFTRGVYYPDKVFRSSVLHSTQDLFLPFFSNVTWFHAIHVSGTNGTKRFDNPVLPFNDGVYFASTEKSNIIRGWIFGTTLDSKTQSLLIVNNATNVVIKVCEFQFCNDPFLGVYYHKNNKSWMESEFRVYSSANNCTFEYVSQPFLMDLEGKQGNFKNLREFVFKNIDGYFKIYSKHTPINLVRDLPQGFSALEPLVDLPIGINITRFQTLLALHRSYLTPGDSSSGWTAGAAAYYVGYLQPRTFLLKYNENGTITDAVDCALDPLSETKCTLKSFTVEKGIYQTSNFRVQPTESIVRFPNITNLCPFGEVFNATRFASVYAWNRKRISNCVADYSVLYNSASFSTFKCYGVSPTKLNDLCFTNVYADSFVIRGDEVRQIAPGQTGKIADYNYKLPDDFTGCVIAWNSNNLDSKVGGNYNYLYRLFRKSNLKPFERDISTEIYQAGSTPCNGVEGFNCYFPLQSYGFQPTNGVGYQPYRVVVLSFELLHAPATVCGPKKSTNLVKNKCVNFNFNGLTGTGVLTESNKKFLPFQQFGRDIADTTDAVRDPQTLEILDITPCSFGGVSVITPGTNTSNQVAVLYQGVNCTEVPVAIHADQLTPTWRVYSTGSNVFQTRAGCLIGAEHVNNSYECDIPIGAGICASYQTQTNSPRRARSVASQSIIAYTMSLGAENSVAYSNNSIAIPTNFTISVTTEILPVSMTKTSVDCTMYICGDSTECSNLLLQYGSFCTQLNRALTGIAVEQDKNTQEVFAQVKQIYKTPPIKDFGGFNFSQILPDPSKPSKRSFIEDLLFNKVTLADAGFIKQYGDCLGDIAARDLICAQKFNGLTVLPPLLTDEMIAQYTSALLAGTITSGWTFGCGAALQIPFAMQMAYRFNGIGVTQNVLYENQKLIANQFNSAIGKIQDSLSSTASALGKLQDVVNQNAQALNTLVKQLSSNFGAISSVLNDILSRLDKVEAEVQIDRLITGRLQSLQTYVTQQLIRAAEIRASANLAATKMSECVLGQSKRCDFCGKGYHLMSFPQSAPHGVVFLHVTYVPAQEKNFTTAPAICHDGKAHFPREGVFVSNGTHWFVTQRNFYEPQIITTDNTFVSGNCDVVIGIVNNTVYDPLQPELDSFKEELDKYFKNHTSPDVDLGDISGINASVVNIQKEIDRLNEVAKNLNESLIDLQELGKYEQYIKWPWYIWLGFIAGLIAIVIVTIMLCCMTSCCSCLKGCCSCGSCCKFDEDDSEPVLKGVKLHYT

SEQ ID NO: 1199 - protein, 1273 aa, Artificial Sequence
  SARS-CoV-2/Iceland/238/2020__EPI_ISL_417566 spike protein (1-1273)(A890C_V1040C)
MFVFLVLLPLVSSQCVNLTTRTQLPPAYTNSFTRGVYYPDKVFRSSVLHSTQDLFLPFFSNVTWFHAIHVSGTNGTKRFDNPVLPFNDGVYFASTEKSNIIRGWIFGTTLDSKTQSLLIVNNATNVVIKVCEFQFCNDPFLGVYYHKNNKSWMESEFRVYSSANNCTFEYVSQPFLMDLEGKQGNFKNLREFVFKNIDGYFKIYSKHTPINLVRDLPQGFSALEPLVDLPIGINITRFQTLLALHRSYLTPGDSSSGWTAGAAAYYVGYLQPRTFLLKYNENGTITDAVDCALDPLSETKCTLKSFTVEKGIYQTSNFRVQPTESIVRFPNITNLCPFGEVFNATRFASVYAWNRKRISNCVADYSVLYNSASFSTFKCYGVSPTKLNDLCFTNVYADSFVIRGDEVRQIAPGQTGKIADYNYKLPDDFTGCVIAWNSNNLDSKVGGNYNYLYRLFRKSNLKPFERDISTEIYQAGSTPCNGVEGFNCYFPLQSYGFQPTNGVGYQPYRVVVLSFELLHAPATVCGPKKSTNLVKNKCVNFNFNGLTGTGVLTESNKKFLPFQQFGRDIADTTDAVRDPQTLEILDITPCSFGGVSVITPGTNTSNQVAVLYQGVNCTEVPVAIHADQLTPTWRVYSTGSNVFQTRAGCLIGAEHVNNSYECDIPIGAGICASYQTQTNSPRRARSVASQSIIAYTMSLGAENSVAYSNNSIAIPTNFTISVTTEILPVSMTKTSVDCTMYICGDSTECSNLLLQYGSFCTQLNRALTGIAVEQDKNTQEVFAQVKQIYKTPPIKDFGGFNFSQILPDPSKPSKRSFIEDLLFNKVTLADVGFIKQYGDCLGDIAARDLICAQKFNGLTVLPPLLTDEMIAQYTSALLAGTITSGWTFGCGAALQIPFAMQMAYRFNGIGVTQNVLYENQKLIANQFNSAIGKIQDSLSSTASALGKLQDVVNQNAQALNTLVKQLSSNFGAISSVLNDILSRLDKVEAEVQIDRLITGRLQSLQTYVTQQLIRAAEIRASANLAATKMSECVLGQSKRCDFCGKGYHLMSFPQSAPHGVVFLHVTYVPAQEKNFTTAPAICHDGKAHFPREGVFVSNGTHWFVTQRNFYEPQIITTDNTFVSGNCDVVIGIVNNTVYDPLQPELDSFKEELDKYFKNHTSPDVDLGDISGINASVVNIQKEIDRLNEVAKNLNESLIDLQELGKYEQYIKWPWYIWLGFIAGLIAIVMVTIMLCCMTSCCSCLKGCCSCGSCCKFDEDDSEPVLKGVKLHYT

SEQ ID NO: 1200 - protein, 1273 aa, Artificial Sequence
  SARS-CoV-2/Greece/16/2020__EPI_ISL_418265 spike protein (1-1273)(A890C_V1040C)
MFVFLVLLPLVSSQCVNLTTRTQLPPAYTNSFTRGVYYPDKVFRSSVLHSTQDLFLPFFSNVTWFHAIHVSGTNGTKRFDNPVLPFNDGVYFASTEKSNIIRGWIFGTTLDSKTQSLLIVNNATNVVIKVCEFQFCNDPFLGVYYHKNNKSWMESEFRVYSSANNCTFEYVSQPFLMDLEGKQGNFKNLREFVFKNVDGYFKIYSKHTPINLVRDLPQGFSALEPLVDLPIGINITRFQTLLALHRSYLTPGDSSSGWTAGAAAYYVGYLQPRTFLLKYNENGTITDAVDCALDPLSETKCTLKSFTVEKGIYQTSNFRVQPTESIVRFPNITNLCPFGEVFNATRFASVYAWNRKRISNCVADYSVLYNSASFSTFKCYGVSPTKLNDLCFTNVYADSFVIRGDEVRQIAPGQTGKIADYNYKLPDDFTGCVIAWNSNNLDSKVGGNYNYLYRLFRKSNLKPFERDISTEIYQAGSTPCNGVEGFNCYFPLQSYGFQPTNGVGYQPYRVVVLSFELLHAPATVCGPKKSTNLVKNKCVNFNFNGLTGTGVLTESNKKFLPFQQFGRDIADTTDAVRDPQTLEILDITPCSFGGVSVITPGTNTSNQVAVLYQDVNCTEVPVAIHADQLTPTWRVYSTGSNVFQTRAGCLIGAEHVNNSYECDIPIGAGICASYQTQTNSPRRARSVASQSIIAYTMSLGAENSVAYSNNSIAIPTNFTISVTTEILPVSMTKTSVDCTMYICGDSTECSNLLLQYGSFCTQLNRALTGIAVEQDKNTQEVFAQVKQIYKTPPIKDFGGFNFSQILPDPSKPSKRSFIEDLLFNKVTLADAGFIKQYGDCLGDIAARDLICAQKFNGLTVLPPLLTDEMIAQYTSALLAGTITSGWTFGCGAALQIPFAMQMAYRFNGIGVTQNVLYENQKLIANQFNSAIGKIQDSLSSTASALGKLQDVVNQNAQALNTLVKQLSSNFGAISSVLNDILSRLDKVEAEVQIDRLITGRLQSLQTYVTQQLIRAAEIRASANLAATKMSECVLGQSKRCDFCGKGYHLMSFPQSAPHGVVFLHVTYVPAQEKNFTTAPAICHDGKAHFPREGVFVSNGTHWFVTQRNFYEPQIITTDNTFVSGNCDVVIGIVNNTVYDPLQPELDSFKEELDKYFKNHTSPDVDLGDISGINASVVNIQKEIDRLNEVAKNLNESLIDLQELGKYEQYIKWPWYIWLGFIAGLIAIVMVTIMLCCMTSCCSCLKGCCSCGSCCKFDEDDSEPVLKGVKLHYT

SEQ ID NO: 1201 - protein, 1273 aa, Artificial Sequence
  SARS-CoV-2/Iceland/319/2020__EPI_ISL_417648 spike protein (1-1273)(A890C_V1040C)
MFVFLVLLPLVSSQCVNLTTRTQLPPAYTNSFTRGVYYPDKVFRSSVLHSTQDLFLPFFSNVTWFHAIHVSGTNGTKRFDNPVLPFNDGVYFASTEKSNIIRGWIFGTTLDSKTQSLLIVNNATNVVIKVCEFQFCNDPFLGVYYHKNNKSWMESEFRVYSSANNCTFEYVSQPFLIDLEGKQGNFKNLREFVFKNIDGYFKIYSKHTPINLVRDLPQGFSALEPLVDLPIGINITRFQTLLALHRSYLTPGDSSSGWTAGAAAYYVGYLQPRTFLLKYNENGTITDAVDCALDPLSETKCTLKSFTVEKGIYQTSNFRVQPTESIVRFPNITNLCPFGEVFNATRFASVYAWNRKRISNCVADYSVLYNSASFSTFKCYGVSPTKLNDLCFTNVYADSFVIRGDEVRQIAPGQTGKIADYNYKLPDDFTGCVIAWNSNNLDSKVGGNYNYLYRLFRKSNLKPFERDISTEIYQAGSTPCNGVEGFNCYFPLQSYGFQPTNGVGYQPYRVVVLSFELLHAPATVCGPKKSTNLVKNKCVNFNFNGLTGTGVLTESNKKFLPFQQFGRDIADTTDAVRDPQTLEILDITPCSFGGVSVITPGTNTSNQVAVLYQGVNCTEVPVAIHADQLTPTWRVYSTGSNVFQTRAGCLIGAEHVNNSYECDIPIGAGICASYQTQTNSPRRARSVASQSIIAYTMSLGAENSVAYSNNSIAIPTNFTISVTTEILPVSMTKTSVDCTMYICGDSTECSNLLLQYGSFCTQLNRALTGIAVEQDKNTQEVFAQVKQIYKTPPIKDFGGFNFSQILPDPSKPSKRSFIEDLLFNKVTLADAGFIKQYGDCLGDIAARDLICAQKFNGLTVLPPLLTDEMIAQYTSALLAGTITSGWTFGCGAALQIPFAMQMAYRFNGIGVTQNVLYENQKLIANQFNSAIGKIQDSLSSTASALGKLQDVVNQNAQALNTLVKQLSSNFGAISSVLNDILSRLDKVEAEVQIDRLITGRLQSLQTYVTQQLIRAAEIRASANLAATKMSECVLGQSKRCDFCGKGYHLMSFPQSAPHGVVFLHVTYVPAQEKNFTTAPAICHDGKAHFPREGVFVSNGTHWFVTQRNFYEPQIITTDNTFVSGNCDVVIGIVNNTVYDPLQPELDSFKEELDKYFKNHTSPDVDLGDISGINASVVNIQKEIDRLNEVAKNLNESLIDLQELGKYEQYIKWPWYIWLGFIAGLIAIVMVTIMLCCMTSCCSCLKGCCSCGSCCKFDEDDSEPVLKGVKLHYT

SEQ ID NO: 1202 - protein, 1273 aa, Artificial Sequence
  SARS-CoV-2/Congo/94/2020__EPI_ISL_417947 spike protein (1-1273)(A890C_V1040C)
MFVFLVLLPLVSSQCVNLTTRTQLPPAYTNSFTRGVYYPDKVFRSSVLHSTQDLFLPFFSNVTWFHAIHVSGTNGTKRFDNPVLPFNDGVYFASTEKSNIIRGWIFGTTLDSKTQSLLIVNNATNVVIKVCEFQFCNDPFLGVYYHKNNKSWMESEFRVYSSANNCTFEYVSQPFLMDLEGKQGNFKNLREFVFKNIDGYFKIYSKHTPINLVRDLPQGFSALEPLVDLPIGINITRFQTLLALHRSYLTPGDSSSGWTAGAAAYYVGYLQPRTFLLKYNENGTITDAVDCALDPLSETKCTLKSFTVEKGIYQTSNFRVQPTESIVRFPNITNLCPFGEVFNATRFASVYAWNRKRISNCVADYSVLYNSASFSTFKCYGVSPTKLNDLCFTNVYADSFVIRGDEVRQIAPGQTGKIADYNYKLPDDFTGCVIAWNSNNLDSKVGGNYNYLYRLFRKSNLKPFERDISTEIYQAGSTPCNGVEGFNCYFPLQSYGFQPTNGVGYQPYRVVVLSFELLHAPATVCGPKKSTNLVKNKCVNFNFNGLTGTGVLTESNKKFLPFQQFGRDIADTTDAVRDPQTLEILDITPCSFGGVSVITPGTNTSNQVAVLYQGVNCTEVPVAIHADQLTPTWRVYSTGSNVFQTRAGCLIGAEHVNNSYECDIPIGAGICASYQTQTNSPRRARSVASQSIIAYTMSLGAENSVAYSNNSIAIPTNFTISVTTEILPVSMTKTSVDCTMYICGDSTECSNLLLQYGSFCTQLNRALTGIAVEQDKNTQEVFAQVKQIYKTPPIKDFGGFNFSQILPDPSKPSKRSFIEDILFNKVTLADAGFIKQYGDCLGDIAARDLICAQKFNGLTVLPPLLTDEMIAQYTSALLAGTITSGWTFGCGAALQIPFAMQMAYRFNGIGVTQNVLYENQKLIANQFNSAIGKIQDSLSSTASALGKLQDVVNQNAQALNTLVKQLSSNFGAISSVLNDILSRLDKVEAEVQIDRLITGRLQSLQTYVTQQLIRAAEIRASANLAATKMSECVLGQSKRCDFCGKGYHLMSFPQSAPHGVVFLHVTYVPAQEKNFTTAPAICHDGKAHFPREGVFVSNGTHWFVTQRNFYEPQIITTDNTFVSGNCDVVIGIVNNTVYDPLQPELDSFKEELDKYFKNHTSPDVDLGDISGINASVVNIQKEIDRLNEVAKNLNESLIDLQELGKYEQYIKWPWYIWLGFIAGLIAIVMVTIMLCCMTSCCSCLKGCCSCGSCCKFDEDDSEPVLKGVKLHYT

SEQ ID NO: 1203 - protein, 1273 aa, Artificial Sequence
  SARS-CoV-2/Congo/158/2020__EPI_ISL_417950 spike protein (1-1273)(A890C_V1040C)
MFVFLVLLPLVSSQCVNLTTRTQLPPAYTNSFTRGVYYPDKVFRSSVLHSTQDLFLPFFSNVTWFHAIHVSGTNGTKRFDNPVLPFNDGVYFASTEKSNIIRGWIFGTTLDSKTQSLLIVNNATNVVIKVCEFQFCNDPFLGVYYHKNNKSWMESEFRVYSSANNCTFEYVSQPFLMDLEGKQGNFKNLREFVFKNIDGYFKIYSKHTPINLVRDLPQGFSALEPLVDLPIGINITRFQTLLALHRSYLTPGDSSSGWTAGAAAYYVGYLQPRTFLLKYNENGTITDAVDCALDPLSETKCTLKSFTVEKGIYQTSNFRVQPTESIVRFPNITNLCPFGEVFNATRFASVYAWNRKRISNCVADYSVLYNSASFSTFKCYGVSPTKLNDLCFTNVYADSFVIRGDEVRQIAPGQTGKIADYNYKLPDDFTGCVIAWNSNNLDSKVGGNYNYLYRLFRKSNLKPFERDISTEIYQAGSTPCNGVEGFNCYFPLQSYGFQPTNGVGYQPYRVVVLSFELLHAPATVCGPKKSTNLVKNKCVNFNFNGLTGTGVLTESNKKFLPFQQFGRDIADTTDAVRDPQTLEILDITPCSFGGVSVITPGTNTSNQVAVLYQDVNCTEVPVAIHADQLTPTWRVYSTGSNVFQTRAGCLIGAEHVNNSYECDIPIGAGICASYQTQTNSPRRARSVASQSIIAYTMSLGAENSVAYSNNSIAIPTNFTISVTTEILPVSMTKTSVDCTMYICGDSTECSNLLLQYGSFCTQLNRALTGIAVEQDKNTQEVFAQVKQIYKTPPIKDFGGFNFSQILPDPSKPSKRSFIEDLLFNKVTLADAGFIKQYGDCLGDIAARDLICAQKFNGLTVLPPLLTDEMIAQYTSALLAGTITSGWTFGCGAALQIPFAMQMAYRFNGIGVTQNVLYENQKLIANQFNSAIGKIQDSLSSTASALGKLQDVVNQNAQALNTLVKQLSSNFGAISSVLNDILSRLDKVEAEVQIDRLITGRLQSLQTYVTQQLIRAAEIRASANLAATKMSECVLGQSKRCDFCGKGYHLMSFPQSAPHGVVFLHVTYVPAQEKNFTTAPAICHDGKAHFPREGVFVSNGTHWFVTQRNFYEPQIITTDNTFLSGNCDVVIGIVNNTVYDPLQPELDSFKEELDKYFKNHTSPDVDLGDISGINASVVNIQKEIDRLNEVAKNLNESLIDLQELGKYEQYIKWPWYIWLGFIAGLIAIVMVTIMLCCMTSCCSCLKGCCSCGSCCKFDEDDSEPVLKGVKLHYT

SEQ ID NO: 1204 - protein, 1273 aa, Artificial Sequence
  SARS-CoV-2/USA/UT-00034/2020__EPI_ISL_417977 spike protein (1-1273)(A890C_V1040C)
MFVFLVLLPLVSSQCVNLTTRTQLPPAYTNSFTRGVYYPDKVFRSSVLHSTQDLFLPFFSNVTWFHAIHVSGTNGTKRFDNPVLPFNDGVYFASTEKSNIIRGWIFGTTLDSKTQSLLIVNNATNVVIKVCEFQFCNDPFLGVYYYKNNKSWMESEFRVYSSANNCTFEYVSQPFLMDLEGKQGNFKNLREFVFKNIDGYFKIYSKHTPINLVRDLPQGFSALEPLVDLPIGINITRFQTLLALHRSYLTPGDSSSGWTAGAAAYYVGYLQPRTFLLKYNENGTITDAVDCALDPLSETKCTLKSFTVEKGIYQTSNFRVQPTESIVRFPNITNLCPFGEVFNATRFASVYAWNRKRISNCVADYSVLYNSASFSTFKCYGVSPTKLNDLCFTNVYADSFVIRGDEVRQIAPGQTGKIADYNYKLPDDFTGCVIAWNSNNLDSKVGGNYNYLYRLFRKSNLKPFERDISTEIYQAGSTPCNGVEGFNCYFPLQSYGFQPTNGVGYQPYRVVVLSFELLHAPATVCGPKKSTNLVKNKCVNFNFNGLTGTGVLTESNKKFLPFQQFGRDIADTTDAVRDPQTLEILDITPCSFGGVSVITPGTNTSNQVAVLYQGVNCTEVPVAIHADQLTPTWRVYSTGSNVFQTRAGCLIGAEHVNNSYECDIPIGAGICASYQTQTNSPRRARSVASQSIIAYTMSLGAENSVAYSNNSIAIPTNFTISVTTEILPVSMTKTSVDCTMYICGDSTECSNLLLQYGSFCTQLNRALTGIAVEQDKNTQEVFAQVKQIYKTPPIKDFGGFNFSQILPDPSKPSKRSFIEDLLFNKVTLADAGFIKQYGDCLGDIAARDLICAQKFNGLTVLPPLLTDEMIAQYTSALLAGTITSGWTFGCGAALQIPFAMQMAYRFNGIGVTQNVLYENQKLIANQFNSAIGKIQDSLSSTASALGKLQDVVNQNAQALNTLVKQLSSNFGAISSVLNDILSRLDKVEAEVQIDRLITGRLQSLQTYVTQQLIRAAEIRASANLAATKMSECVLGQSKRCDFCGKGYHLMSFPQSAPHGVVFLHVTYVPAQEKNFTTAPAICHDGKAHFPREGVFVSNGTHWFVTQRNFYEPQIITTDNTFVSGNCDVVIGIVNNTVYDPLQPELDSFKEELDKYFKNHTSPDVDLGDISGINASVVNIQKEIDRLNEVAKNLNESLIDLQELGKYEQYIKWPWYIWLGFIAGLIAIVMVTIMLCCMTSCCSCLKGCCSCGSCCKFDEDDSEPVLKGVKLHYT

SEQ ID NO: 1205 - protein, 1273 aa, Artificial Sequence
  SARS-CoV-2/USA/UT-00033/2020__EPI_ISL_417976 spike protein (1-1273)(A890C_V1040C)
MFVFLVLLPLVSSQCVNLTTRTQLPPAYTNSFTRGVYYPDKVFRSSVLHSTQDLFLPFFSNVTWFHAIHVSGTNGTKRFDNPVLPFNDGVYFASTEKSNIIRGWIFGTTLDSKTQSLLIVNNATNVVIKVCEFQFCNDPFLGVYYHKNNKSWMESEFRVYSSANNCTFEYVSQPFLMDLEGKQGNFKNLREFVFKNIDGYFKIYSKHTPINLVRDLPQGFSALEPLVDLPIGINITRFQTLLALHRSYLTPGDSSSGLTAGAAAYYVGYLQPRTFLLKYNENGTITDAVDCALDPLSETKCTLKSFTVEKGIYQTSNFRVQPTESIVRFPNITNLCPFGEVFNATRFASVYAWNRKRISNCVADYSVLYNSASFSTFKCYGVSPTKLNDLCFTNVYADSFVIRGDEVRQIAPGQTGKIADYNYKLPDDFTGCVIAWNSNNLDSKVGGNYNYLYRLFRKSNLKPFERDISTEIYQAGSTPCNGVEGFNCYFPLQSYGFQPTNGVGYQPYRVVVLSFELLHAPATVCGPKKSTNLVKNKCVNFNFNGLTGTGVLTESNKKFLPFQQFGRDIADTTDAVRDPQTLEILDITPCSFGGVSVITPGTNTSNQVAVLYQGVNCTEVPVAIHADQLTPTWRVYSTGSNVFQTRAGCLIGAEHVNNSYECDIPIGAGICASYQTQTNSPRRARSVASQSIIAYTMSLGAENSVAYSNNSIAIPTNFTISVTTEILPVSMTKTSVDCTMYICGDSTECSNLLLQYGSFCTQLNRALTGIAVEQDKNTQEVFAQVKQIYKTPPIKDFGGFNFSQILPDPSKPSKRSFIEDLLFNKVTLADAGFIKQYGDCLGDIAARDLICAQKFNGLTVLPPLLTDEMIAQYTSALLAGTITSGWTFGCGAALQIPFAMQMAYRFNGIGVTQNVLYENQKLIANQFNSAIGKIQDSLSSTASALGKLQDVVNQNAQALNTLVKQLSSNFGAISSVLNDILSRLDKVEAEVQIDRLITGRLQSLQTYVTQQLIRAAEIRASANLAATKMSECVLGQSKRCDFCGKGYHLMSFPQSAPHGVVFLHVTYVPAQEKNFTTAPAICHDGKAHFPREGVFVSNGTHWFVTQRNFYEPQIITTDNTFVSGNCDVVIGIVNNTVYDPLQPELDSFKEELDKYFKNHTSPDVDLGDISGINASVVNIQKEIDRLNEVAKNLNESLIDLQELGKYEQYIKWPWYIWLGFIAGLIAIVMVTIMLCCMTSCCSCLKGCCSCGSCCKFDEDDSEPVLKGVKLHYT

SEQ ID NO: 1206 - protein, 1273 aa, Artificial Sequence
  SARS-CoV-2/USA/WI-13/2020__EPI_ISL_417516 spike protein (1-1273)(A890C_V1040C)
MFVFLVLLPLVSSQCVNLTTRTQLPPAYTNSFTRGVYYPDKVFRSSVLHSTQDLFLPFFSNVTWFHAIHVSGTNGTKRFDNPVLPFNDGVYFASTEKSNIIRGWIFGTTLDSKTQSLLIVNNATNVVIKVCEFQFCNDPFLGVYYHKNNKSWMESEFRVYSSANNCTFEYVSQPFLMDLEGKQGNFKNLREFVFKNIDGYFKIYSKHTPINLVRDLPQGFSALEPLVDLPIGINITRFQTLLALHRSYLTPGDSSSGWTAGAAAYYVGYLQPRTFLLKYNENGTITDAVDCALDPLSETKCTLKSFTVEKGIYQTSNFRVLPTESIVRFPNITNLCPFGEVFNATRFASVYAWNRKRISNCVADYSVLYNSASFSTFKCYGVSPTKLNDLCFTNVYADSFVIRGDEVRQIAPGQTGKIADYNYKLPDDFTGCVIAWNSNNLDSKVGGNYNYLYRLFRKSNLKPFERDISTEIYQAGSTPCNGVEGFNCYFPLQSYGFQPTNGVGYQPYRVVVLSFELLHAPATVCGPKKSTNLVKNKCVNFNFNGLTGTGVLTESNKKFLPFQQFGRDIADTTDAVRDPQTLEILDITPCSFGGVSVITPGTNTSNQVAVLYQGVNCTEVPVAIHADQLTPTWRVYSTGSNVFQTRAGCLIGAEHVNNSYECDIPIGAGICASYQTQTNSPRRARSVASQSIIAYTMSLGAENSVAYSNNSIAIPTNFTISVTTEILPVSMTKTSVDCTMYICGDSTECSNLLLQYGSFCTQLNRALTGIAVEQDKNTQEVFAQVKQIYKTPPIKDFGGFNFSQILPDPSKPSKRSFIEDLLFNKVTLADAGFIKQYGDCLGDIAARDLICAQKFNGLTVLPPLLTDEMIAQYTSALLAGTITSGWTFGCGAALQIPFAMQMAYRFNGIGVTQNVLYENQKLIANQFNSAIGKIQDSLSSTASALGKLQDVVNQNAQALNTLVKQLSSNFGAISSVLNDILSRLDKVEAEVQIDRLITGRLQSLQTYVTQQLIRAAEIRASANLAATKMSECVLGQSKRCDFCGKGYHLMSFPQSAPHGVVFLHVTYVPAQEKNFTTAPAICHDGKAHFPREGVFVSNGTHWFVTQRNFYEPQIITTDNTFVSGNCDVVIGIVNNTVYDPLQPELDSFKEELDKYFKNHTSPDVDLGDISGINASVVNIQKEIDRLNEVAKNLNESLIDLQELGKYEQYIKWPWYIWLGFIAGLIAIVMVTIMLCCMTSCCSCLKGCCSCGSCCKFDEDDSEPVLKGVKLHYT

SEQ ID NO: 1207 - protein, 1272 aa, Artificial Sequence
  SARS-CoV-2/India/1-27/2020__EPI_ISL_413522 spike protein (1-1272)(A889C_V1039C)
MFVFLVLLPLVSSQCVNLTTRTQLPPAYTNSFTRGVYYPDKVFRSSVLHSTQDLFLPFFSNVTWFHAIHVSGTNGTKRFDNPVLPFNDGVYFASTEKSNIIRGWIFGTTLDSKTQSLLIVNNATNVVIKVCEFQFCNDPFLGVYHKNNKSWMESEFRVYSSANNCTFEYVSQPFLMDLEGKQGNFKNLREFVFKNIDGYFKIYSKHTPINLVRDLPQGFSALEPLVDLPIGINITRFQTLLALHRSYLTPGDSSSGWTAGAAAYYVGYLQPRTFLLKYNENGTITDAVDCALDPLSETKCTLKSFTVEKGIYQTSNFRVQPTESIVRFPNITNLCPFGEVFNATRFASVYAWNRKRISNCVADYSVLYNSASFSTFKCYGVSPTKLNDLCFTNVYADSFVIRGDEVIQIAPGQTGKIADYNYKLPDDFTGCVIAWNSNNLDSKVGGNYNYLYRLFRKSNLKPFERDISTEIYQAGSTPCNGVEGFNCYFPLQSYGFQPTNGVGYQPYRVVVLSFELLHAPATVCGPKKSTNLVKNKCVNFNFNGLTGTGVLTESNKKFLPFQQFGRDIADTTDAVRDPQTLEILDITPCSFGGVSVITPGTNTSNQVAVLYQDVNCTEVPVAIHADQLTPTWRVYSTGSNVFQTRAGCLIGAEHVNNSYECDIPIGAGICASYQTQTNSPRRARSVASQSIIAYTMSLGAENSVAYSNNSIAIPTNFTISVTTEILPVSMTKTSVDCTMYICGDSTECSNLLLQYGSFCTQLNRALTGIAVEQDKNTQEVFAQVKQIYKTPPIKDFGGFNFSQILPDPSKPSKRSFIEDLLFNKVTLADAGFIKQYGDCLGDIAARDLICAQKFNGLTVLPPLLTDEMIAQYTSALLAGTITSGWTFGCGAALQIPFAMQMAYRFNGIGVTQNVLYENQKLIANQFNSAIGKIQDSLSSTASALGKLQDVVNQNAQALNTLVKQLSSNFGAISSVLNDILSRLDKVEAEVQIDRLITGRLQSLQTYVTQQLIRAAEIRASANLAATKMSECVLGQSKRCDFCGKGYHLMSFPQSAPHGVVFLHVTYVPAQEKNFTTAPAICHDGKAHFPREGVFVSNGTHWFVTQRNFYEPQIITTDNTFVSGNCDVVIGIVNNTVYDPLQPELDSFKEELDKYFKNHTSPDVDLGDISGINASVVNIQKEIDRLNEVAKNLNESLIDLQELGKYEQYIKWPWYIWLGFIAGLIAIVMVTIMLCCMTSCCSCLKGCCSCGSCCKFDEDDSEPVLKGVKLHYT

SEQ ID NO: 1208 - protein, 1267 aa, Artificial Sequence
  SARS-CoV-2/pangolin/Guangxi/P4L/2017__EPI_ISL_410538 spike protein (1-1267)(A884C_V1034C)
MFVFLFVLPLVSSQCVNLTTRTGIPPGYTNSSTRGVYYPDKVFRSSILHLTQDLFLPFFSNVTWFNTINYQGGFKKFDNPVLPFNDGVYFASTEKSNIIRGWIFGTTLDARTQSLLIVNNATNVVIKVCEFQFCTDPFLGVYYHNNNKTWVENEFRVYSSANNCTFEYISQPFLMDLEGKQGNFKNLREFVFKNVDGYFKIYSKHTPIDLVRDLPRGFAALEPLVDLPIGINITRFQTLLALHRSYLTPGNLESGWTTGAAAYYVGYLQQRTFLLSYNQNGTITDAVDCSLDPLSETKCTLKSLTVEKGIYQTSNFRVQPTISIVRFPNITNLCPFGEVFNASKFASVYAWNRKRISNCVADYSVLYNSTSFSTFKCYGVSPTKLNDLCFTNVYADSFVVKGDEVRQIAPGQTGVIADYNYKLPDDFTGCVIAWNSVKQDALTGGNYGYLYRLFRKSKLKPFERDISTEIYQAGSTPCNGQVGLNCYYPLERYGFHPTTGVNYQPFRVVVLSFELLNGPATVCGPKLSTTLVKDKCVNFNFNGLTGTGVLTTSKKQFLPFQQFGRDISDTTDAVRDPQTLEILDITPCSFGGVSVITPGTNTSNQVAVLYQDVNCTEVPMAIHAEQLTPAWRVYSAGANVFQTRAGCLVGAEHVNNSYECDIPVGAGICASYHSMSSLRSVNQRSIIAYTMSLGAENSVAYSNNSIAIPTNFTISVTTEILPVSMTKTSVDCTMYICGDSIECSNLLLQYGSFCTQLNRALTGIAVEQDKNTQEVFAQVKQIYKTPPIKDFGGFNFSQILPDPSKPSKRSFIEDLLFNKVTLADAGFIKQYGDCLGDIAARDLICAQKFNGLTVLPPLLTDEMIAQYTSALLAGTITSGWTFGCGAALQIPFAMQMAYRFNGIGVTQNVLYENQKLIANQFNSAIGKIQDSLSSTASALGKLQDVVNQNAQALNTLVKQLSSNFGAISSVLNDILSRLDKVEAEVQIDRLITGRLQSLQTYVTQQLIRAAEIRASANLAATKMSECVLGQSKRCDFCGKGYHLMSFPQSAPHGVVFLHVTYVPAQEKNFTTAPAICHEGKAHFPREGVFVSNGTHWFITQRNFYEPQIITTDNTFVSGSCDVVIGIVNNTVYDPLQPELDSFKEELDKYFKNHTSPDVDLGDISGINASVVNIQKEIDRLNEVAKNLNESPIDLQELGKYEQYIKWPWYIWLGFIAGLIAIIMVTIMLCCMTSCCSCLKGCCSCGSCCKFDEDDSEPVLKGVKLHYT

SEQ ID NO: 1209 - protein, 1267 aa, Artificial Sequence
  SARS-CoV-2/pangolin/Guangxi/P5L/2017__EPI_ISL_410540 spike protein (1-1267)(A884C_V1034C)
MFVFLFVLPLVSSQCVNLTTRTGIPPGYTNSSTRGVYYPDKVFRSSILHLTQDLFLPFFSNVTWFNTINYQGGFKKFDNPVLPFNDGVYFASTEKSNIIRGWIFGTTLDARTQSLLIVNNATNVVIKVCEFQFCTDPFLGVYYHNNNKTWVENEFRVYSSANNCTFEYISQPFLMDLEGKQGNFKNLREFVFKNVDGYFKIYSKHTPIDLVRDLPRGFAALEPLVDLPIGINITRFQTLLALHRSYLTPGKLESGWTTGAAAYYVGYLQQRTFLLSYNQNGTITDAVDCSLDPLSETKCTLKSLTVEKGIYQTSNFRVQPTISIVRFPNITNLCPFGEVFNASKFASVYAWNRKRISNCVADYSVLYNSTSFSTFKCYGVSPTKLNDLCFTNVYADSFVVKGDEVRQIAPGQTGVIADYNYKLPDDFTGCVIAWNSVKQDALTGGNYGYLYRLFRKSKLKPFERDISTEIYQAGSTPCNGQVGLNCYYPLERYGFHPTTGVNYQPFRVVVLSFELLNGPATVCGPKLSTTLVKDKCVNFNFNGLTGTGVLTTSKKQFLPFQQFGRDISDTTDAVRDPQTLEILDITPCSFGGVSVITPGTNTSNQVAVLYQDVNCTEVPMAIHAEQLTPAWRVYSAGANVFQTRAGCLVGAEHVNNSYECDIPVGAGICASYHSMSSFRSVNQRSIIAYTMSLGAENSVAYSNNSIAIPTNFTISVTTEILPVSMTKTSVDCTMYICGDSIECSNLLLQYGSFCTQLNRALTGIAVEQDKNTQEVFAQVKQIYKTPPIKDFGGFNFSQILPDPSKPSKRSFIEDLLFNKVTLADAGFIKQYGDCLGDIAARDLICAQKFNGLTVLPPLLTDEMIAQYTSALLAGTITSGWTFGCGAALQIPFAMQMAYRFNGIGVTQNVLYENQKLIANQFNSAIGKIQDSLSSTASALGKLQDVVNQNAQALNTLVKQLSSNFGAISSVLNDILSRLDKVEAEVQIDRLITGRLQSLQTYVTQQLIRAAEIRASANLAATKMSECVLGQSKRCDFCGKGYHLMSFPQSAPHGVVFLHVTYVPAQEKNFTTAPAICHEGKAHFPREGVFVSNGTHWFITQRNFYEPQIITTDNTFVSGSCDVVIGIVNNTVYDPLQPELDSFKEELDKYFKNHTSPDVDLGDISGINASVVNIQKEIDRLNEVAKNLNESLIDLQELGKYEQYIKWPWYIWLGFIAGLIAIIMVTIMLCCMTSCCSCLKGCCSCGSCCKFDEDDSEPVLKGVKLHYT

SEQ ID NO: 1210 - protein, 1267 aa, Artificial Sequence
  SARS-CoV-2/pangolin/Guangxi/P5E/2017__EPI_ISL_410541 spike protein (1-1267)(A884C_V1034C)
MFVFLFVLPLVSSQCVNLTTRTGIPPGYTNSSTRGVYYPDKVFRSSILHLTQDLFLPFFSNVTWFNTITYQGGSKKFDNPVLPFNDGVYFASTEKSNIIRGWIFGTTLDARTQSLLIVNNATNVVIKVCEFQFCTDPFLGVYYHNNNKTWVENEFRVYSSANNCTFEYISQPFLMDLEGKQGNFKNLREFVFKNVDGYFKIYSKHTPIDLVRDLPRGFAALEPLVDLPIGINITRFQTLLALHRSYLTPGKLESGWTTGAAAYYVGYLQQRTFLLSYNQNGTITDAVDCSLDPLSETKCTLKSLTVEKGIYQTSNFRVQPTISIVRFPNITNLCPFGEVFNASKFASVYAWNRKRISNCVADYSVLYNSTSFSTFKCYGVSPTKLNDLCFTNVYADSFVVKGDEVRQIAPGQTGVIADYNYKLPDDFTGCVIAWNSVKQDALTGDNYGYLYRLFRKSKLKPFERDISTEIYQAGSTPCNGQVGLNCYYPLERYGFHPTTGVNYQPFRVVVLSFELLNGPATVCGPKLSTTLVKDKCVNFNFNGLTGTGVLTTSKKQFLPFQQFGRDISDTTDAVRDPQTLEILDITPCSFGGVSVITPGTNTSNQVAVLYQDVNCTEVPMAIHAEQLTPAWRVYSAGANVFQTRAGCLVGAEHVNNSYECDIPVGAGICASYHSMSSFRSVNQRSIIAYTMSLGAENSVAYSNNSIAIPTNFTISVTTEILPVSMTKTSVDCTMYICGDSIECSNLLLQYGSFCTQLNRALTGIAVEQDKNTQEVFAQVKQIYKTPPIKDFGGFNFSQILPDPSKPSKRSFIEDLLFNKVTLADAGFIKQYGDCLGDIAARDLICAQKFNGLTVLPPLLTDEMIAQYTSALLAGTITSGWTFGCGAALQIPFAMQMAYRFNGIGVTQNVLYENQKLIANQFNSAIGKIQDSLSSTASALGKLQDVVNQNAQALNTLVKQLSSNFGAISSVLNDILSRLDKVEAEVQIDRLITGRLQSLQTYVTQQLIRAAEIRASANLAATKMSECVLGQSKRCDFCGKGYHLMSFPQSAPHGVVFLHVTYVPAQEKNFTTAPAICHEGKAHFPREGVFVSNGTHWFITQRNFYEPQIITTDNTFVSGSCDVVIGIVNNTVYDPLQPELDSFKEELDKYFKNHTSPDVDLGDISGINASVVNIQKEIDRLNEVAKNLNESLIDLQELGKYEQYIKWPWYIWLGFIAGLIAIIMVTIMLCCMTSCCSCLKGCCSCGSCCKFDEDDSEPVLKGVKLHYT

SEQ ID NO: 1211 - protein, 1265 aa, Artificial Sequence
  SARS-CoV-2/pangolin/Guangxi/P1E/2017__EPI_ISL_410539 spike protein (1-1265)(A882C_V1032C)
MFVFLFVLPLVSSQCVNLTTRTGIQPGYTNSSTRGVYYPDKVFRSSILHLTQDLFLPFFSNVTWFNTINYQGGFKKFDNPVLPFNDGVYFASTEKSNIIRGWIFGTTLDARTQSLLIVNNATNVVIKVCEFQFCTDPFLGVYYHNNNKTWVENEFRVYSSANNCTFEYISQPFLMDLEGKQGNFKNLREFVFKNVDGYFKIYSKHTPIDLVRDLPRGFAALEPLVDLPIGINITRFQTLLALHRSYLTPGKLESGWTTGAAAYYVGYLQQRTFLLSYNQNGTITDAVDCSLDPLSETKCTLKSLTVEKGIYQTSNFRVQPTISIVRFPNITNLCPFGEVFNASKFASVYAWNRKRISNCVADYSVLYNSTSFSTFKCYGVSPTKLNDLCFTNVYADSFVVKGDEVRQIAPGQTGVIADYNYKLPDDFTGCVIAWNSVKQDALTGGNYLYRLFRKSKLKPFERDISTEIYQAGSTPCNGQVGLNCYYPLERYGFHPTTGVNYQPFRVVVLSFELLNGPATVCGPKLSTTLVKDKCVNFNFNGLTGTGVLTTSKKQFLPFQQFGRDISDTTDAVRDPQTLEILDITPCSFGGVSVITPGTNTSNQVAVLYQDVNCTEVPMAIHAEQLTPAWRVYSAGANVFQTRAGCLVGAEHVNNSYECDIPVGAGICASYHSMSSLRSVNQRSIIAYTMSLGAENSVAYSNNSIAIPTNFTISVTTEILPVSMTKTSVDCTMYICGDSIECSNLLLQYGSFCTQLNRALTGIAVEQDKNTQEVFAQVKQIYKTPPIKDFGGFNFSQILPDPSKPSKRSFIEDLLFNKVTLADAGFIKQYGDCLGDIAARDLICAQKFNGLTVLPPLLTDEMIAQYTSALLAGTITSGWTFGCGAALQIPFAMQMAYRFNGIGVTQNVLYENQKLIANQFNSAIGKIQDSLSSTASALGKLQDVVNQNAQALNTLVKQLSSNFGAISSVLNDILSRLDKVEAEVQIDRLITGRLQSLQTYVTQQLIRAAEIRASANLAATKMSECVLGQSKRCDFCGKGYHLMSFPQSAPHGVVFLHVTYVPAQEKNFTTAPAICHEGKAHFPREGVFVSNGTHWFITQRNFYEPQIITTDNTFVSGSCDVVIGIVNNTVYDPLQPELDSFKEELDKYFKNHTSPDVDLGDISGINASVVNIQKEIDRLNEVAKNLNESLIDLQELGKYEQYIKWPWYIWLGFIAGLIAIIMVTIMLCCMTSCCSCLKGCCSCGSCCKFDEDDSEPVLKGVKLHYT

SEQ ID NO: 1212 - protein, 1273 aa, Artificial Sequence
  SARS-CoV-2/Wuhan/WIV05/2019__EPI_ISL_402128 spike protein (1-1273)(T874C_S1055C)
MFVFLVLLPLVSSQCVNLTTRTQLPPAYTNSFTRGVYYPDKVFRSSVLHSTQDLFLPFFSNVTWFHAIHVSGTNGTKRFDNPVLPFNDGVYFASTEKSNIIRGWIFGTTLDSKTQSLLIVNNATNVVIKVCEFQFCNDPFLGVYYHKNNKSWMESEFRVYSSANNCTFEYVSQPFLMDLEGKQGNFKNLREFVFKNIDGYFKIYSKHTPINLVRDLPQGFSALEPLVDLPIGINITRFQTLLALHRSYLTPGDSSSGWTAGAAAYYVGYLQPRTFLLKYNENGTITDAVDCALDPLSETKCTLKSFTVEKGIYQTSNFRVQPTESIVRFPNITNLCPFGEVFNATRFASVYAWNRKRISNCVADYSVLYNSASFSTFKCYGVSPTKLNDLCFTNVYADSFVIRGDEVRQIAPGQTGKIADYNYKLPDDFTGCVIAWNSNNLDSKVGGNYNYLYRLFRKSNLKPFERDISTEIYQAGSTPCNGVEGFNCYFPLQSYGFQPTNGVGYQPYRVVVLSFELLHAPATVCGPKKSTNLVKNKCVNFNFNGLTGTGVLTESNKKFLPFQQFGRDIADTTDAVRDPQTLEILDITPCSFGGVSVITPGTNTSNQVAVLYQDVNCTEVPVAIHADQLTPTWRVYSTGSNVFQTRAGCLIGAEHVNNSYECDIPIGAGICASYQTQTNSPRRARSVASQSIIAYTMSLGAENSVAYSNNSIAIPTNFTISVTTEILPVSMTKTSVDCTMYICGDSTECSNLLLQYGSFCTQLNRALTGIAVEQDKNTQEVFAQVKQIYKTPPIKDFGGFNFSQILPDPSKPSKRSFIEDLLFNKVTLADAGFIKQYGDCLGDIAARDLICAQKFNGLTVLPPLLTDEMIAQYCSALLAGTITSGWTFGAGAALQIPFAMQMAYRFNGIGVTQNVLYENQKLIANQFNSAIGKIQDSLSSTASALGKLQDVVNQNAQALNTLVKQLSSNFGAISSVLNDILSRLDKVEAEVQIDRLITGRLQSLQTYVTQQLIRAAEIRASANLAATKMSECVLGQSKRVDFCGKGYHLMSFPQCAPHGVVFLHVTYVPAQEKNFTTAPAICHDGKAHFPREGVFVSNGTHWFVTQRNFYEPQIITTDNTFVSGNCDVVIGIVNNTVYDPLQPELDSFKEELDKYFKNHTSPDVDLGDISGINASVVNIQKEIDRLNEVAKNLNESLIDLQELGKYEQYIKWPWYIWLGFIAGLIAIVMVTIMLCCMTSCCSCLKGCCSCGSCCKFDEDDSEPVLKGVKLHYT

SEQ ID NO: 1213 - protein, 1269 aa, Artificial Sequence
  SARS-CoV-2/bat/Yunnan/RaTG13/2013__EPI_ISL_402131 spike protein (1-1269)(T870C_S1051C)
MFVFLVLLPLVSSQCVNLTTRTQLPPAYTNSSTRGVYYPDKVFRSSVLHLTQDLFLPFFSNVTWFHAIHVSGTNGIKRFDNPVLPFNDGVYFASTEKSNIIRGWIFGTTLDSKTQSLLIVNNATNVVIKVCEFQFCNDPFLGVYYHKNNKSWMESEFRVYSSANNCTFEYVSQPFLMDLEGKQGNFKNLREFVFKNIDGYFKIYSKHTPINLVRDLPPGFSALEPLVDLPIGINITRFQTLLALHRSYLTPGDSSSGWTAGAAAYYVGYLQPRTFLLKYNENGTITDAVDCALDPLSETKCTLKSFTVEKGIYQTSNFRVQPTDSIVRFPNITNLCPFGEVFNATTFASVYAWNRKRISNCVADYSVLYNSTSFSTFKCYGVSPTKLNDLCFTNVYADSFVITGDEVRQIAPGQTGKIADYNYKLPDDFTGCVIAWNSKHIDAKEGGNFNYLYRLFRKANLKPFERDISTEIYQAGSKPCNGQTGLNCYYPLYRYGFYPTDGVGHQPYRVVVLSFELLNAPATVCGPKKSTNLVKNKCVNFNFNGLTGTGVLTESNKKFLPFQQFGRDIADTTDAVRDPQTLEILDITPCSFGGVSVITPGTNASNQVAVLYQDVNCTEVPVAIHADQLTPTWRVYSTGSNVFQTRAGCLIGAEHVNNSYECDIPIGAGICASYQTQTNSRSVASQSIIAYTMSLGAENSVAYSNNSIAIPTNFTISVTTEILPVSMTKTSVDCTMYICGDSTECSNLLLQYGSFCTQLNRALTGIAVEQDKNTQEVFAQVKQIYKTPPIKDFGGFNFSQILPDPSKPSKRSFIEDLLFNKVTLADAGFIKQYGDCLGDIAARDLICAQKFNGLTVLPPLLTDEMIAQYCSALLAGTITSGWTFGAGAALQIPFAMQMAYRFNGIGVTQNVLYENQKLIANQFNSAIGKIQDSLSSTASALGKLQDVVNQNAQALNTLVKQLSSNFGAISSVLNDILSRLDKVEAEVQIDRLITGRLQSLQTYVTQQLIRAAEIRASANLAATKMSECVLGQSKRVDFCGKGYHLMSFPQCAPHGVVFLHVTYVPAQEKNFTTAPAICHDGKAHFPREGVFVSNGTHWFVTQRNFYEPQIITTDNTFVSGSCDVVIGIVNNTVYDPLQPELDSFKEELDKYFKNHTSPDVDLGDISGINASVVNIQKEIDRLNEVAKNLNESLIDLQELGKYEQYIKWPWYIWLGFIAGLIAIIMVTIMLCCMTSCCSCLKGCCSCGSCCKFDEDDSEPVLKGVKLHYT

SEQ ID NO: 1214 - protein, 1273 aa, Artificial Sequence
  SARS-CoV-2/Wuhan/HBCDC-HB-01/2019__EPI_ISL_402132 spike protein (1-1273)(T874C_S1055C)
MFVFLVLLPLVSSQCVNLTTRTQLPPAYTNSITRGVYYPDKVFRSSVLHSTQDLFLPFFSNVTWFHAIHVSGTNGTKRFDNPVLPFNDGVYFASTEKSNIIRGWIFGTTLDSKTQSLLIVNNATNVVIKVCEFQFCNDPFLGVYYHKNNKSWMESEFRVYSSANNCTFEYVSQPFLMDLEGKQGNFKNLREFVFKNIDGYFKIYSKHTPINLVRDLPQGFSALEPLVDLPIGINITRFQTLLALHRSYLTPGDSSSGWTAGAAAYYVGYLQPRTFLLKYNENGTITDAVDCALDPLSETKCTLKSFTVEKGIYQTSNFRVQPTESIVRFPNITNLCPFGEVFNATRFASVYAWNRKRISNCVADYSVLYNSASFSTFKCYGVSPTKLNDLCFTNVYADSFVIRGDEVRQIAPGQTGKIADYNYKLPDDFTGCVIAWNSNNLDSKVGGNYNYLYRLFRKSNLKPFERDISTEIYQAGSTPCNGVEGFNCYFPLQSYGFQPTNGVGYQPYRVVVLSFELLHAPATVCGPKKSTNLVKNKCVNFNFNGLTGTGVLTESNKKFLPFQQFGRDIADTTDAVRDPQTLEILDITPCSFGGVSVITPGTNTSNQVAVLYQDVNCTEVPVAIHADQLTPTWRVYSTGSNVFQTRAGCLIGAEHVNNSYECDIPIGAGICASYQTQTNSPRRARSVASQSIIAYTMSLGAENSVAYSNNSIAIPTNFTISVTTEILPVSMTKTSVDCTMYICGDSTECSNLLLQYGSFCTQLNRALTGIAVEQDKNTQEVFAQVKQIYKTPPIKDFGGFNFSQILPDPSKPSKRSFIEDLLFNKVTLADAGFIKQYGDCLGDIAARDLICAQKFNGLTVLPPLLTDEMIAQYCSALLAGTITSGWTFGAGAALQIPFAMQMAYRFNGIGVTQNVLYENQKLIANQFNSAIGKIQDSLSSTASALGKLQDVVNQNAQALNTLVKQLSSNFGAISSVLNDILSRLDKVEAEVQIDRLITGRLQSLQTYVTQQLIRAAEIRASANLAATKMSECVLGQSKRVDFCGKGYHLMSFPQCAPHGVVFLHVTYVPAQEKNFTTAPAICHDGKAHFPREGVFVSNGTHWFVTQRNFYEPQIITTDNTFVSGNCDVVIGIVNNTVYDPLQPELDSFKEELDKYFKNHTSPDVDLGDISGINASVVNIQKEIDRLNEVAKNLNESLIDLQELGKYEQYIKWPWYIWLGFIAGLIAIVMVTIMLCCMTSCCSCLKGCCSCGSCCKFDEDDSEPVLKGVKLHYT

SEQ ID NO: 1215 - protein, 1273 aa, Artificial Sequence
  SARS-CoV-2/Guangdong/20SF028/2020__EPI_ISL_403936 spike protein (1-1273)(T874C_S1055C)
MFVFLVLLPLVSSQCVNLTTRTQLPPAYTNSFTRGVYYPDKVFRSSVLYSTQDLFLPFFSNVTWFHAIHVSGTNGTKRFDNPVLPFNDGVYFASTEKSNIIRGWIFGTTLDSKTQSLLIVNNATNVVIKVCEFQFCNDPFLGVYYHKNNKSWMESEFRVYSSANNCTFEYVSQPFLMDLEGKQGNFKNLREFVFKNIDGYFKIYSKHTPINLVRDLPQGFSALEPLVDLPIGINITRFQTLLALHRSYLTPGDSSSGWTAGAAAYYVGYLQPRTFLLKYNENGTITDAVDCALDPLSETKCTLKSFTVEKGIYQTSNFRVQPTESIVRFPNITNLCPFGEVFNATRFASVYAWNRKRISNCVADYSVLYNSASFSTFKCYGVSPTKLNDLCFTNVYADSFVIRGDEVRQIAPGQTGKIADYNYKLPDDFTGCVIAWNSNNLDSKVGGNYNYLYRLFRKSNLKPFERDISTEIYQAGSTPCNGVEGFNCYFPLQSYGFQPTNGVGYQPYRVVVLSFELLHAPATVCGPKKSTNLVKNKCVNFNFNGLTGTGVLTESNKKFLPFQQFGRDIADTTDAVRDPQTLEILDITPCSFGGVSVITPGTNTSNQVAVLYQDVNCTEVPVAIHADQLTPTWRVYSTGSNVFQTRAGCLIGAEHVNNSYECDIPIGAGICASYQTQTNSPRRARSVASQSIIAYTMSLGAENSVAYSNNSIAIPTNFTISVTTEILPVSMTKTSVDCTMYICGDSTECSNLLLQYGSFCTQLNRALTGIAVEQDKNTQEVFAQVKQIYKTPPIKDFGGFNFSQILPDPSKPSKRSFIEDLLFNKVTLADAGFIKQYGDCLGDIAARDLICAQKFNGLTVLPPLLTDEMIAQYCSALLAGTITSGWTFGAGAALQIPFAMQMAYRFNGIGVTQNVLYENQKLIANQFNSAIGKIQDSLSSTASALGKLQDVVNQNAQALNTLVKQLSSNFGAISSVLNDILSRLDKVEAEVQIDRLITGRLQSLQTYVTQQLIRAAEIRASANLAATKMSECVLGQSKRVDFCGKGYHLMSFPQCAPHGVVFLHVTYVPAQEKNFTTAPAICHDGKAHFPREGVFVSNGTHWFVTQRNFYEPQIITTDNTFVSGNCDVVIGIVNNTVYDPLQPELDSFKEELDKYFKNHTSPDVDLGDISGINASVVNIQKEIDRLNEVAKNLNESLIDLQELGKYEQYIKWPWYIWLGFIAGLIAIVMVTIMLCCMTSCCSCLKGCCSCGSCCKFDEDDSEPVLKGVKLHYT

SEQ ID NO: 1216 - protein, 1273 aa, Artificial Sequence
  SARS-CoV-2/Shenzhen/SZTH-001/2020__EPI_ISL_406592 spike protein (1-1273)(T874C_S1055C)
MFVFLVLLPLVSSQCVNLTTRTQLPPAYTNSFTRGVYYPDKVFRSSVLHSTQDLFLPFFSNVTWFHAIHVSGTNGTKRFDNPVLPFNDGVYFASTEKSNIIRGWIFGTTLDSKTQSLLIVNNATNVVIKVCEFQFCNDPFLGVYYHKNNKSWMESEFRVYSSANNCTFEYVSQPFLMDLEGKQGNFKNLREFVFKNIDGYFKIYSKHTPINLVRDLPQGFSALEPLVDLPIGINITRFQTLLALHRSYLTPGDSSSGWTAGAAAYYVGYLQPRTFLLKYNENGTITDAVDCALDPLSETKCTLKSFTVEKGIYQTSNFRVQPTESIVRFPNITNLCPFGEVFNATRFASVYAWNRKRISNCVADYSVLYNSASFSTFKCYGVSPTKLNDLCFTNVYADSFVIRGDEVRQIAPGQTGKIADYNYKLPDDFTGCVIAWNSNNLDSKVGGNYNYLYRLFRKSNLKPFERDISTEIYQAGSTPCNGVEGFNCYFPLQSYGFQPTNGVGYQPYRVVVLSFELLHAPATVCGPKKSTNLVKNKCVNFNFNGLTGTGVLTESNKKFLPFQQFGRDIADTTDAVRDPQTLEILDITPCSFGGVSVITPGTNTSNQVAVLYQDVNCTEVPVAIHADQLTPTWRVYSTGSNVFQTRAGCLIGAEHVNNSYECDIPIGAGICASYQTQTNSPRRARSVASQSIIAYTMSLGAENSVAYSNNSIAIPTNFTISVTTEILPVSMTKTSVDCTMYICGDSTECSNLLLQYGSFCTQLNRALTGIAVEQDKNTQEVFAQVKQIYKTPPIKDFGGFNFSQILPDPSKPSKRSFIEDLLFNKVTLADAGFIKQYGDCLGDIAARDLICAQKFNGLTVLPPLLTDEMIAQYCSALLAGTITSGWTFGAGAALQIPFAMQMAYRFNGIGVTQNVLYENQKLIANQFNSAIGKIQDSLSSTASALGKLQDVVNQNAQALNTLVKQLSSNFGAISSVLNDILSRLDKVEAEVQIDRLITGRLQSLQTYVTQQLIRAAEIRASANLAATKMSECVLGQSKRVDFCGKGYHLMSFPQCAPHGVVFLHVTYVPAQEKNFTTAPAICHDGKAHFPREGVFVSNGTHWFVTQRNFYEPQIITTDNTFVSGNCDVLIGIVNNTVYDPLQPELDSFKEELDKYFKNHTSPDVDLGDISGINASVVNIQKEIDRLNEVAKNLNESLIDLQELGKYEQYIKWPWYIWLGFIAGLIAIVMVTIMLCCMTSCCSCLKGCCSCGSCCKFDEDDSGPVLKGVKLHYT

SEQ ID NO: 1217 - protein, 1273 aa, Artificial Sequence
  SARS-CoV-2/Shenzhen/SZTH-004/2020__EPI_ISL_406595 spike protein (1-1273)(T874C_S1055C)
MFVFLVLLPLVSSQCVNLTTRTQLPPAYTNSFTRGVYYPDKVFRSSVLHSTQDLFLPFFSNVTWFHAIHVSGTNGTKRFDNPVLPFNDGVYFASTEKSNIIRGWIFGTTLDSKTQSLLIVNNATNVVIKVCEFQFCNDPFLGVYYHKNNKSWMESEFRVYSSANNCTFEYVSQPFLMDLEGKQGNFKNLREFVFKNIDGYFKIYSKHTPINLVRDLPQGFSALEPLVDLPIGINITRFQTLLALHRSYLTPGDSSSGWTAGAAAYYVGYLQPRTFLLKYNENGTITDAVDCALDPLSETKCTLKSFTVEKGIYQTSNFRVQPTESIVRFPNITNLCPFGEVFNATRFASVYAWDRKRISNCVAYYSVLYNSASFSTFKCYGVSPTKLNDLCFTNVYADSFVIRGDEVRQIAPGQTGKIADYNYKLPDDFTGCVIAWNSNNLDSKVGGNYNYLYRLFRKSNLKPFERDISTEIYQAGSTPCNGVEGFNCYFPLQSYGFQPTNGVGYQPYRVVVLSFELLHAPATVCGPKKSTNLVKNKCVNFNFNGLTGTGVLTESNKKFLPFQQFGRDIADTTDAVRDPQTLEILDITPCSFGGVSVITPGTNTSNQVAVLYQDVNCTEVPVAIHADQLTPTWRVYSTGSNVFQTRAGCLIGAEHVNNSYECDIPIGAGICASYQTQTNSPRRARSVASQSIIAYTMSLGAENSVAYSNNSIAIPTNFTISVTTEILPVSMTKTSVDCTMYICGDSTECSNLLLQYGSFCTQLNRALTGIAVEQDKNTQEVFAQVKQIYKTPPIKDFGGFNFSQILPDPSKPSKRSFIEDLLFNKVTLADAGFIKQYGDCLGDIAARDLICAQKFNGLTVLPPLLTDEMIAQYCSALLAGTITSGWTFGAGAALQIPFAMQMAYRFNGIGVTQNVLYENQKLIANQFNSAIGKIQDSLSSTASALGKLQDVVNQNAQALNTLVKQLSSNFGAISSVLNDILSRLDKVEAEVQIDRLITGRLQSLQTYVTQQLIRAAEIRASANLAATKMSECVLGQSKRVDFCGKGYHLMSFPQCAPHGVVFLHVTYVPAQEKNFTTAPAICHDGKAHFPREGVFVSNGTHWFVTQRNFYEPQIITTDNTFVSGNCDVVIGIVNNTVYDPLQPELDSFKEELDKYFKNHTSPDVDLGDISGINASVVNIQKEIDRLNEVAKNLNESLIDLQELGKYEQYIKWPWYIWLGFIAGLIAIVMVTIMLCCMTSCCSCLKGCCSCGSCCKFDEDDSEPVLKGVKLHYT

SEQ ID NO: 1218 - protein, 1273 aa, Artificial Sequence
  SARS-CoV-2/France/IDF0372/2020__EPI_ISL_406596 spike protein (1-1273)(T874C_S1055C)
MFVFLVLLPLVSSQCVNLTTRTQLPPAYTNSFTRGVYYPDKVFRSSVLHSTQDLFLPFFSNVTWFHAIHVSGTNGTKRFDNPVLPFNDGVYFASTEKSNIIRGWIFGTTLDSKTQSLLIVNNATNVVIKVCEFQFCNDPFLGVYYHKNNKSWMESEFRVYSSANNCTFEYVSQPFLMDLEGKQGNFKNLREFVFKNIDGYFKIYSKHTPINLVRDLPQGFSALEPLVDLPIGINITRFQTLLALHRSYLTPGDSSSGWTAGAAAYYVGYLQPRTFLLKYNENGTITDAVDCALDPLSETKCTLKSFTVEKGIYQTSNFRVQPTESIVRFPNITNLCPFGEVFNATRFASVYAWNRKRISNCVADYSFLYNSASFSTFKCYGVSPTKLNDLCFTNVYADSFVIRGDEVRQIAPGQTGKIADYNYKLPDDFTGCVIAWNSNNLDSKVGGNYNYLYRLFRKSNLKPFERDISTEIYQAGSTPCNGVEGFNCYFPLQSYGFQPTNGVGYQPYRVVVLSFELLHAPATVCGPKKSTNLVKNKCVNFNFNGLTGTGVLTESNKKFLPFQQFGRDIADTTDAVRDPQTLEILDITPCSFGGVSVITPGTNTSNQVAVLYQDVNCTEVPVAIHADQLTPTWRVYSTGSNVFQTRAGCLIGAEHVNNSYECDIPIGAGICASYQTQTNSPRRARSVASQSIIAYTMSLGAENSVAYSNNSIAIPTNFTISVTTEILPVSMTKTSVDCTMYICGDSTECSNLLLQYGSFCTQLNRALTGIAVEQDKNTQEVFAQVKQIYKTPPIKDFGGFNFSQILPDPSKPSKRSFIEDLLFNKVTLADAGFIKQYGDCLGDIAARDLICAQKFNGLTVLPPLLTDEMIAQYCSALLAGTITSGWTFGAGAALQIPFAMQMAYRFNGIGVTQNVLYENQKLIANQFNSAIGKIQDSLSSTASALGKLQDVVNQNAQALNTLVKQLSSNFGAISSVLNDILSRLDKVEAEVQIDRLITGRLQSLQTYVTQQLIRAAEIRASANLAATKMSECVLGQSKRVDFCGKGYHLMSFPQCAPHGVVFLHVTYVPAQEKNFTTAPAICHDGKAHFPREGVFVSNGTHWFVTQRNFYEPQIITTDNTFVSGNCDVVIGIVNNTVYDPLQPELDSFKEELDKYFKNHTSPDVDLGDISGINASVVNIQKEIDRLNEVAKNLNESLIDLQELGKYEQYIKWPWYIWLGFIAGLIAIVMVTIMLCCMTSCCSCLKGCCSCGSCCKFDEDDSEPVLKGVKLHYT

SEQ ID NO: 1219 - protein, 1273 aa, Artificial Sequence
  SARS-CoV-2/Australia/VIC01/2020__EPI_ISL_406844 spike protein (1-1273)(T874C_S1055C)
MFVFLVLLPLVSSQCVNLTTRTQLPPAYTNSFTRGVYYPDKVFRSSVLHSTQDLFLPFFSNVTWFHAIHVSGTNGTKRFDNPVLPFNDGVYFASTEKSNIIRGWIFGTTLDSKTQSLLIVNNATNVVIKVCEFQFCNDPFLGVYYHKNNKSWMESEFRVYSSANNCTFEYVSQPFLMDLEGKQGNFKNLREFVFKNIDGYFKIYSKHTPINLVRDLPQGFSALEPLVDLPIGINITRFQTLLALHRRYLTPGDSSSGWTAGAAAYYVGYLQPRTFLLKYNENGTITDAVDCALDPLSETKCTLKSFTVEKGIYQTSNFRVQPTESIVRFPNITNLCPFGEVFNATRFASVYAWNRKRISNCVADYSVLYNSASFSTFKCYGVSPTKLNDLCFTNVYADSFVIRGDEVRQIAPGQTGKIADYNYKLPDDFTGCVIAWNSNNLDSKVGGNYNYLYRLFRKSNLKPFERDISTEIYQAGSTPCNGVEGFNCYFPLQSYGFQPTNGVGYQPYRVVVLSFELLHAPATVCGPKKSTNLVKNKCVNFNFNGLTGTGVLTESNKKFLPFQQFGRDIADTTDAVRDPQTLEILDITPCSFGGVSVITPGTNTSNQVAVLYQDVNCTEVPVAIHADQLTPTWRVYSTGSNVFQTRAGCLIGAEHVNNSYECDIPIGAGICASYQTQTNSPRRARSVASQSIIAYTMSLGAENSVAYSNNSIAIPTNFTISVTTEILPVSMTKTSVDCTMYICGDSTECSNLLLQYGSFCTQLNRALTGIAVEQDKNTQEVFAQVKQIYKTPPIKDFGGFNFSQILPDPSKPSKRSFIEDLLFNKVTLADAGFIKQYGDCLGDIAARDLICAQKFNGLTVLPPLLTDEMIAQYCSALLAGTITSGWTFGAGAALQIPFAMQMAYRFNGIGVTQNVLYENQKLIANQFNSAIGKIQDSLSSTASALGKLQDVVNQNAQALNTLVKQLSSNFGAISSVLNDILSRLDKVEAEVQIDRLITGRLQSLQTYVTQQLIRAAEIRASANLAATKMSECVLGQSKRVDFCGKGYHLMSFPQCAPHGVVFLHVTYVPAQEKNFTTAPAICHDGKAHFPREGVFVSNGTHWFVTQRNFYEPQIITTDNTFVSGNCDVVIGIVNNTVYDPLQPELDSFKEELDKYFKNHTSPDVDLGDISGINASVVNIQKEIDRLNEVAKNLNESLIDLQELGKYEQYIKWPWYIWLGFIAGLIAIVMVTIMLCCMTSCCSCLKGCCSCGSCCKFDEDDSEPVLKGVKLHYT

SEQ ID NO: 1220 - protein, 1273 aa, Artificial Sequence
  SARS-CoV-2/Germany/BavPat1/2020__EPI_ISL_406862 spike protein (1-1273)(T874C_S1055C)
MFVFLVLLPLVSSQCVNLTTRTQLPPAYTNSFTRGVYYPDKVFRSSVLHSTQDLFLPFFSNVTWFHAIHVSGTNGTKRFDNPVLPFNDGVYFASTEKSNIIRGWIFGTTLDSKTQSLLIVNNATNVVIKVCEFQFCNDPFLGVYYHKNNKSWMESEFRVYSSANNCTFEYVSQPFLMDLEGKQGNFKNLREFVFKNIDGYFKIYSKHTPINLVRDLPQGFSALEPLVDLPIGINITRFQTLLALHRSYLTPGDSSSGWTAGAAAYYVGYLQPRTFLLKYNENGTITDAVDCALDPLSETKCTLKSFTVEKGIYQTSNFRVQPTESIVRFPNITNLCPFGEVFNATRFASVYAWNRKRISNCVADYSVLYNSASFSTFKCYGVSPTKLNDLCFTNVYADSFVIRGDEVRQIAPGQTGKIADYNYKLPDDFTGCVIAWNSNNLDSKVGGNYNYLYRLFRKSNLKPFERDISTEIYQAGSTPCNGVEGFNCYFPLQSYGFQPTNGVGYQPYRVVVLSFELLHAPATVCGPKKSTNLVKNKCVNFNFNGLTGTGVLTESNKKFLPFQQFGRDIADTTDAVRDPQTLEILDITPCSFGGVSVITPGTNTSNQVAVLYQGVNCTEVPVAIHADQLTPTWRVYSTGSNVFQTRAGCLIGAEHVNNSYECDIPIGAGICASYQTQTNSPRRARSVASQSIIAYTMSLGAENSVAYSNNSIAIPTNFTISVTTEILPVSMTKTSVDCTMYICGDSTECSNLLLQYGSFCTQLNRALTGIAVEQDKNTQEVFAQVKQIYKTPPIKDFGGFNFSQILPDPSKPSKRSFIEDLLFNKVTLADAGFIKQYGDCLGDIAARDLICAQKFNGLTVLPPLLTDEMIAQYCSALLAGTITSGWTFGAGAALQIPFAMQMAYRFNGIGVTQNVLYENQKLIANQFNSAIGKIQDSLSSTASALGKLQDVVNQNAQALNTLVKQLSSNFGAISSVLNDILSRLDKVEAEVQIDRLITGRLQSLQTYVTQQLIRAAEIRASANLAATKMSECVLGQSKRVDFCGKGYHLMSFPQCAPHGVVFLHVTYVPAQEKNFTTAPAICHDGKAHFPREGVFVSNGTHWFVTQRNFYEPQIITTDNTFVSGNCDVVIGIVNNTVYDPLQPELDSFKEELDKYFKNHTSPDVDLGDISGINASVVNIQKEIDRLNEVAKNLNESLIDLQELGKYEQYIKWPWYIWLGFIAGLIAIVMVTIMLCCMTSCCSCLKGCCSCGSCCKFDEDDSEPVLKGVKLHYT

SEQ ID NO: 1221 - protein, 1273 aa, Artificial Sequence
  SARS-CoV-2/Wuhan/HBCDC-HB-02/2020__EPI_ISL_412978 spike protein (1-1273)(T874C_S1055C)
MFVFLVLLPLVSSQCVNLTTRTQLPPAYTNSFTRGVYYPDKVFRSSVLHSTQDLFLPFFSNVTWFHAIHVSGTNGTKRFDNPVLPFNDGVYFASTEKSNIIRGWIFGTTLDSKTQSLLIVNNATNVVIKVCEFQFCNDPFLGVYYHKNNKSWMESEFRVYSSANNCTFEYVSQPFLMDLEGKQGNFKNLREFVFKNIDGYFKIYSKHTPINLVRDLPQGFSALEPLVDLPIGINITRFQTLLALHRSYLTPGDSSSGWTAGAAAYYVGYLQPRTFLLKYNENGTITDAVDCALDPLSETKCTLKSFTVEKGIYQTSNFRVQPTESIVRFPNITNLCPFGEVFNATRFASVYAWNRKRISNCVADYSVLYNSASFSTFKCYGVSPTKLNDLCFTNVYADSFVIRGDEVRQIAPGQTGKIADYNYKLPDDFTGCVIAWNSNNLDSKVGGNYNYLYRLFRKSNLKPFERDISTEIYQAGSTPCNGVEGFNCYFPLQSYGFQPTNGVGYQPYRVVVLSFELLHAPATVCGPKKSTNLVKNKCVNFNFNGLTGTGVLTESNKKFLPFQQFGRDIADTTDAVRDPQTLEILDITPCSFGGVSVITPGTNTSNQVAVLYQDVNCTEVPVAIHADQLTPTWRVYSTGSNVFQTRAGCLIGAEHVNNSYECDIPIGAGICASYQTQTNSPRRARSVASQSIIAYTMSLGAENSVAYSNNSIAIPTNFTISVTTEILPVSMTKTSVDCTMYICGDSTECSNFLLQYGSFCTQLNRALTGIAVEQDKNTQEVFAQVKQIYKTPPIKDFGGFNFSQILPDPSKPSKRSFIEDLLFNKVTLADAGFIKQYGDCLGDIAARDLICAQKFNGLTVLPPLLTDEMIAQYCSALLAGTITSGWTFGAGAALQIPFAMQMAYRFNGIGVTQNVLYENQKLIANQFNSAIGKIQDSLSSTASALGKLQDVVNQNAQALNTLVKQLSSNFGAISSVLNDILSRLDKVEAEVQIDRLITGRLQSLQTYVTQQLIRAAEIRASANLAATKMSECVLGQSKRVDFCGKGYHLMSFPQCAPHGVVFLHVTYVPAQEKNFTTAPAICHDGKAHFPREGVFVSNGTHWFVTQRNFYEPQIITTDNTFVSGNCDVVIGIVNNTVYDPLQPELDSFKEELDKYFKNHTSPDVDLGDISGINASVVNIQKEIDRLNEVAKNLNESLIDLQELGKYEQYIKWPWYIWLGFIAGLIAIVMVTIMLCCMTSCCSCLKGCCSCGSCCKFDEDDSEPVLKGVKLHYT

SEQ ID NO: 1222 - protein, 1273 aa, Artificial Sequence
  SARS-CoV-2/Australia/QLD02/2020__EPI_ISL_407896 spike protein (1-1273)(T874C_S1055C)
MFVFLVLLPLVSSQCVNLTTRTQLPPAYTNSFTRGVYYPDKVFRSSVLHSTQDLFLPFFSNVTWFHAIHVSGTNGTKRFDNPVLPFNDGVYFASTEKSNIIRGWIFGTTLDSKTQSLLIVNNATNVVIKVCEFQFCNDPFLGVYYHKNNKSWMESEFRVYSSANNCTFEYVSQPFLMDLEGKQGNFKNLREFVFKNIDGYFKIYSKHTPINLVRDLPQGFSALEPLVDLPIGINITRFQTLLALHRSYLTPGDSSSGWTAGAAAYYVGYLQPRTFLLKYNENGTITDAVDCALDPLSETKCTLKSFTVEKGIYQTSNFRVQPTESIVRFPNITNLCPFGEVFNATRFASVYAWNRKRISNCVADYSVLYNSASFSTFKCYGVSPTKLNDLCFTNVYADSFVIRGDEVRQIAPGQTGKIADYNYKLPDDFTGCVIAWNSNNLDSKVGGNYNYLYRLFRKSNLKPFERDISTEIYQAGSTPCNGVEGFNCYFPLQSYGFQPTNGVGYQPYRVVVLSFELLHAPATVCGPKKSTNLVKNKCVNFNFNGLTGTGVLTESNKKFLPFQQFGRDIADTTDAVRDPQTLEILDITPCSFGGVSVITPGTNTSNQVAVLYQDVNCTEVPVAIHADQLTPTWRVYSTGSNVFQTRAGCLIGAEHVNNSYECDIPIGAGICASYQTQTNSPRRARSVASQSIIAYTMSLGAENSVAYSNNSIAIPTNFTISVTTEILPVSMTKTSVDCTMYICGDSTECSNLLLQYGSFCTQLNRALTGIAVEQDKNTQEVFAQVKQIYKTPPIKDFGGFNFSQILPDPSKPSKRSFIEDLLFNKVTLADAGFIKQYGDCLGDIAARDLICAQKFNGLTVLPPLLTDEMIAQYCSALLAGTITSGWTFGAGAALQIPFAMQMAYRFNGIGVTQNVLYENQKLIANQFNSAIGKIQDSLSSTASALGKLQDVVNQNAQALNTLVKQLSSNFGAISSVLNDILSRLDKVEAEVQIDRLITGRLQSLQTYVTQQLIRAAEIRASANLAATKMSECVLGQSKRVDFCGKGYHLMSFPQCAPHGVVFLHVTYVPAQEKNFTTAPAICHDGKAHFPREGVFVSNGTHWFVTQRNFYEPQIITTDNTFVSGNCDVVIGIVNNTVYDPLQLELDSFKEELDKYFKNHTSPDVDLGDISGINASVVNIQKEIDRLNEVAKNLNESLIDLQELGKYEQYIKWPWYIWLGFIAGLIAIVMVTIMLCCMTSCCSCLKGCCSCGSCCKFDEDDSEPVLKGVKLHYT

SEQ ID NO: 1223 - protein, 1273 aa, Artificial Sequence
  SARS-CoV-2/India/1-31/2020__EPI_ISL_413523 spike protein (1-1273)(T874C_S1055C)
MFVFLVLLPLVSSQCVNLTTRTQLPPAYTNSFTRGVYYPDKVFRSSVLHSTQDLFLPFFSNVTWFHAIHVSGTNGTKRFDNPVLPFNDGVYFASTEKSNIIRGWIFGTTLDSKTQSLLIVNNATNVVIKVCEFQFCNDPFLGVYYHKNNKSWMESEFRVYSSANNCTFEYVSQPFLMDLEGKQGNFKNLREFVFKNIDGYFKIYSKHTPINLVRDLPQGFSALEPLVDLPIGINITRFQTLLALHRSYLTPGDSSSGWTAGAAAYYVGYLQPRTFLLKYNENGTITDAVDCALDPLSETKCTLKSFTVEKGIYQTSNFRVQPTESIVRFPNITNLCPFGEVFNATRFASVYAWNRKRISNCVADYSVLYNSASFSTFKCYGVSPTKLNDLCFTNVYADSFVIRGDEVRQIAPGQTGKIADYNYKLPDDFTGCVIAWNSNNLDSKVGGNYNYLYRLFRKSNLKPFERDISTEIYQAGSTPCNGVEGFNCYFPLQSYGFQPTNGVGYQPYRVVVLSFELLHAPATVCGPKKSTNLVKNKCVNFNFNGLTGTGVLTESNKKFLPFQQFGRDIADTTDAVRDPQTLEILDITPCSFGGVSVITPGTNTSNQVAVLYQDVNCTEVPVAIHADQLTPTWRVYSTGSNVFQTRAGCLIGAEHVNNSYECDIPIGAGICASYQTQTNSPRRARSVASQSIIAYTMSLGAENSVAYSNNSIAIPTNFTISVTTEILPVSMTKTSVDCTMYICGDSTECSNLLLQYGSFCTQLNRALTGIAVEQDKNTQEVFAQVKQIYKTPPIKDFGGFNFSQILPDPSKPSKRSFIEDLLFNKVTLADAGFIKQYGDCLGDIAARDLICAQKFNGLTVLPPLLTDEMIAQYCSALLAGTITSGWTFGAGAALQIPFAMQMAYRFNGIGVTQNVLYENQKLIANQFNSVIGKIQDSLSSTASALGKLQDVVNQNAQALNTLVKQLSSNFGAISSVLNDILSRLDKVEAEVQIDRLITGRLQSLQTYVTQQLIRAAEIRASANLAATKMSECVLGQSKRVDFCGKGYHLMSFPQCAPHGVVFLHVTYVPAQEKNFTTAPAICHDGKAHFPREGVFVSNGTHWFVTQRNFYEPQIITTDNTFVSGNCDVVIGIVNNTVYDPLQPELDSFKEELDKYFKNHTSPDVDLGDISGINASVVNIQKEIDRLNEVAKNLNESLIDLQELGKYEQYIKWPWYIWLGFIAGLIAIVMVTIMLCCMTSCCSCLKGCCSCGSCCKFDEDDSEPVLKGVKLHYT

SEQ ID NO: 1224 - protein, 1273 aa, Artificial Sequence
  SARS-CoV-2/Guangdong/GD2020087-P0008/2020__EPI_ISL_413863 spike protein (1-1273)(T874C_S1055C)
MFVFLVLLPLVSSQCVNLTTRTQLPPAYTNSFTRGVYYPDKVFRSSVLHSTQDLFLPFFSNVTWFHAIHVSGTNGTKRFDNPVLPFNDGVYFASTEKSNIIRGWIFGTTLDSKTQSLLIVNNATNVVIKVCEFQFCNDPFLGVYYHKNNKSWMESEFRVYSSANNCTFEYVSQPFLMDLEGKQGNFKNLREFVFKNIDGYFKIYSKHTPINLVRDLPQGFSALEPLVDLPIGINITRFQTLLALHRSYLTPGDSSSGWTAGAAAYYVGYLQPRTFLLKYNENGTITDAVDCALDPLSETKCTLKSFTVEKGIYQTSNFRVQPTESIVRFPNITNLCPFGEVFNATRFASVYAWNRKRISNCVADYSVLYNSASFSTFKCYGVSPTKLNDLCFTNVYADSFVIRGDEVREIAPGQTGKIADYNYKLPDDFTGCVIAWNSNNLDSKVGGNYNYLYRLFRKSNLKPFERDISTEIYQAGSTPCNGVEGFNCYFPLQSYGFQPTNGVGYQPYRVVVLSFELLHAPATVCGPKKSTNLVKNKCVNFNFNGLTGTGVLTESNKKFLPFQQFGRDIADTTDAVRDPQTLEILDITPCSFGGVSVITPGTNTSNQVAVLYQDVNCTEVPVAIHADQLTPTWRVYSTGSNVFQTRAGCLIGAEHVNNSYECDIPIGAGICASYQTQTNSPRRARSVASQSIIAYTMSLGAENSVAYSNNSIAIPTNFTISVTTEILPVSMTKTSVDCTMYICGDSTECSNLLLQYGSFCTQLNRALTGIAVEQDKNTQEVFAQVKQIYKTPPIKDFGGFNFSQILPDPSKPSKRSFIEDLLFNKVTLADAGFIKQYGDCLGDIAARDLICAQKFNGLTVLPPLLTDEMIAQYCSALLAGTITSGWTFGAGAALQIPFAMQMAYRFNGIGVTQNVLYENQKLIANQFNSAIGKIQDSLSSTASALGKLQDVVNQNAQALNTLVKQLSSNFGAISSVLNDILSRLDKVEAEVQIDRLITGRLQSLQTYVTQQLIRAAEIRASANLAATKMSECVLGQSKRVDFCGKGYHLMSFPQCAPHGVVFLHVTYVPAQEKNFTTAPAICHDGKAHFPREGVFVSNGTHWFVTQRNFYEPQIITTDNTFVSGNCDVVIGIVNNTVYDPLQPELDSFKEELDKYFKNHTSPDVDLGDISGINASVVNIQKEIDRLNEVAKNLNESLIDLQELGKYEQYIKWPWYIWLGFIAGLIAIVMVTIMLCCMTSCCSCLKGCCSCGSCCKFDEDDSEPVLKGVKLHYT

SEQ ID NO: 1225 - protein, 1273 aa, Artificial Sequence
  SARS-CoV-2/Sweden/01/2020__EPI_ISL_411951 spike protein (1-1273)(T874C_S1055C)
MFVFLVLLPLVSSQCVNLTTRTQLPPAYTNSFTRGVYYPDKVFRSSVLHSTQDLFLPFFSNVTWFHAIHVSGTNGTKRFDNPVLPFNDGVYFASTEKSNIIRGWIFGTTLDSKTQSLLIVNNATNVVIKVCEFQFCNDPFLGVYYHKNNKSWMESEFRVYSSANNCTFEYVSQPFLMDLEGKQGNFKNLREFVFKNIDGYFKIYSKHTPINLVRDLPQGFSALEPLVDLPIGINITRFQTLLALHRSYLTPGDSSSGWTAGAAAYYVGYLQPRTFLLKYNENGTITDAVDCALDPLSETKCTLKSFTVEKGIYQTSNFRVQPTESIVRFPNITNLCPFGEVFNATRFASVYAWNRKRISNCVADYSVLYNSASFSTFKCYGVSPTKLNDLCFTNVYADSFVIRGDEVRQIAPGQTGKIADYNYKLPDDFTGCVIAWNSNNLDSKVGGNYNYLYRLFRKSNLKPFERDISTEIYQAGSTPCNGVEGFNCYFPLQSYGFQPTNGVGYQPYRVVVLSFELLHAPATVCGPKKSTNLVKNKCVNFNFNGLTGTGVLTESNKKFLPFQQFGRDIADTTDAVRDPQTLEILDITPCSFGGVSVITPGTNTSNQVAVLYQDVNCTEVPVAIHADQLTPTWRVYSTGSNVFQTRAGCLIGAEHVNNSYECDIPIGAGICASYQTQTNSPRRARSVASQSIIAYTMSLGAENSVAYSNNSIAIPTNFTISVTTEILPVSMTKTSVDCTMYICGDSTECSNLLLQYGSFCTQLNRALTGIAVEQDKNTQEVFAQVKQIYKTPPIKDCGGFNFSQILPDPSKPSKRSFIEDLLFNKVTLADAGFIKQYGDCLGDIAARDLICAQKFNGLTVLPPLLTDEMIAQYCSALLAGTITSGWTFGAGAALQIPFAMQMAYRFNGIGVTQNVLYENQKLIANQFNSAIGKIQDSLSSTASALGKLQDVVNQNAQALNTLVKQLSSNFGAISSVLNDILSRLDKVEAEVQIDRLITGRLQSLQTYVTQQLIRAAEIRASANLAATKMSECVLGQSKRVDFCGKGYHLMSFPQCAPHGVVFLHVTYVPAQEKNFTTAPAICHDGKAHFPREGVFVSNGTHWFVTQRNFYEPQIITTDNTFVSGNCDVVIGIVNNTVYDPLQPELDSFKEELDKYFKNHTSPDVDLGDISGINASVVNIQKEIDRLNEVAKNLNESLIDLQELGKYEQYIKWPWYIWLGFIAGLIAIVMVTIMLCCMTSCCSCLKGCCSCGSCCKFDEDDSEPVLKGVKLHYT

SEQ ID NO: 1226 - protein, 1273 aa, Artificial Sequence
  SARS-CoV-2/Tianmen/HBCDC-HB-07/2020__EPI_ISL_412983 spike protein (1-1273)(T874C_S1055C)
MFVFLVLLPLVSSQCVNLTTRTQLPPAYTNSFTRGVYYPDKVFRSSVLHSTQDLFLPFFSNVTWFHAIHVSGTNGTKRFDNPVLPFNDGVYFASTEKSNIIRGWIFGTTLDSKTQSLLIVNNATNVVIKVCEFQFCNDPFLGVYYHKNNKSWMESEFRVYSSANNCTFEYVSQPFLMDLEGKQGNFKNLREFVFKNIDGYFKIYSKHTPINLVRDLPQGFSALEPLVDLPIGINITRFQTLLALHRSYLTPGDSSSGWTAGAAAYYVGYLQPRTFLLKYNENGTITDAVDCALDPLSETKCTLKSFTVEKGIYQTSNFRVQPTESIVRFPNITNLCPFGEVFNATRFASVYAWNRKRISNCVADYSVLYNSASFSTFKCYGVSPTKLNDLCFTNVYADSFVIRGDEVRQIAPGQTGKIADYNYKLPDDFTGCVIAWNSNNLDSKVGGNYNYLYRLFRKSNLKPFERDISTEIYQAGSTPCNGVEGFNCYFPLQSYGFQPTNGVGYQPYRVVVLSFELLHAPATVCGPKKSTNLVKNKCVNFNFNGLTGTGVLTESNKKFLPFQQFGRDIADTTDAVRDPQTLEILDITPCSFGGVSVITPGTNTSNQVAVLYQDLNCTEVPVAIHADQLTPTWRVYSTGSNVFQTRAGCLIGAEHVNNSYECDIPIGAGICASYQTQTNSPRRARSVASQSIIAYTMSLGAENSVAYSNNSIAIPTNFTISVTTEILPVSMTKTSVDCTMYICGDSTECSNLLLQYGSFCTQLNRALTGIAVEQDKNTQEVFAQVKQIYKTPPIKDFGGFNFSQILPDPSKPSKRSFIEDLLFNKVTLADAGFIKQYGDCLGDIAARDLICAQKFNGLTVLPPLLTDEMIAQYCSALLAGTITSGWTFGAGAALQIPFAMQMAYRFNGIGVTQNVLYENQKLIANQFNSAIGKIQDSLSSTASALGKLQDVVNQNAQALNTLVKQLSSNFGAISSVLNDILSRLDKVEAEVQIDRLITGRLQSLQTYVTQQLIRAAEIRASANLAATKMSECVLGQSKRVDFCGKGYHLMSFPQCAPHGVVFLHVTYVPAQEKNFTTAPAICHDGKAHFPREGVFVSNGTHWFVTQRNFYEPQIITTDNTFVSGNCDVVIGIVNNTVYDPLQPELDSFKEELDKYFKNHTSPDVDLGDISGINASVVNIQKEIDRLNEVAKNLNESLIDLQELGKYEQYIKWPWYIWLGFIAGLIAIVMVTIMLCCMTSCCSCLKGCCSCGSCCKFDEDDSEPVLKGVKLHYT

SEQ ID NO: 1227 - protein, 1273 aa, Artificial Sequence
  SARS-CoV-2/Hong Kong/case42_VM20002493/2020__EPI_ISL_414527 spike protein (1-1273)(T874C_S1055C)
MFVFLVLLPLVSSQCVNLTTRTQLPPAYTNSFTRGVYYPDKVFRSSVLHSTQDLFLPFFSNVTWFHAIHVSGTNGTKRFDNPVLPFNDGVYFASTEKSNIIRGWIFGTTLDSKTQSLLIVNNATNVVIKVCEFQFCNDPFLGVYYHKNNKSWMESEFRVYSSANNCTFEYVSQPFLMDLEGKQGNFKNLREFVFKNIDGYFKIYSKHTPINLVRDLPQGFSALEPLVDLPIGINITRFQTLLALHRSYLTPGDSSSGWTAGAAAYYVGYLQPRTFLLKYNENGTITDAVDCALDPLSETKCTLKSFTVEKGIYQTSNFRVQPTESIVRFPNITNLCPFGEVFNATRFASVYAWNRKRISNCVADYSVLYNSASFSTFKCYGVSPTKLNDLCFTNVYADSFVIRGDEVRQIAPGQTGKIADYNYKLPDDFTGCVIAWNSNNLDSKVGGNYNYLYRLFRKSNLKPFERDISTEIYQAGSTPCNGVEGFNCYFPLQSYGFQPTNGVGYQPYRVVVLSFELLHAPATVCGPKKSTNLVKNKCVNFNFNGLTGTGVLTESNKKFLPFQQFGRDIADTTDAVRDPQTLEILDITPCSFGGVSVITPGTNTSNQVAVLYQDVNCTEVPVAIHADQLTPTWRVYSTGSNVFQTRAGCLIGAEHVNNSYECDIPIGAGICASYQTQTNSPRRARSVASQSIIAYTMSLGAENSVAYSNNSIAIPTNFAISVTTEILPVSMTKTSVDCTMYICGDSTECSNLLLQYGSFCTQLNRALTGIAVEQDKNTQEVFAQVKQIYKTPPIKDFGGFNFSQILPDPSKPSKRSFIEDLLFNKVTLADAGFIKQYGDCLGDIAARDLICAQKFNGLTVLPPLLTDEMIAQYCSALLAGTITSGWTFGAGAALQIPFAMQMAYRFNGIGVTQNVLYENQKLIANQFNSAIGKIQDSLSSTASALGKLQDVVNQNAQALNTLVKQLSSNFGAISSVLNDILSRLDKVEAEVQIDRLITGRLQSLQTYVTQQLIRAAEIRASANLAATKMSECVLGQSKRVDFCGKGYHLMSFPQCAPHGVVFLHVTYVPAQEKNFTTAPAICHDGKAHFPREGVFVSNGTHWFVTQRNFYEPQIITTDNTFVSGNCDVVIGIVNNTVYDPLQPELDSFKEELDKYFKNHTSPDVDLGDISGINASVVNIQKEIDRLNEVAKNLNESLIDLQELGKYEQYIKWPWYIWLGFIAGLIAIVMVTIMLCCMTSCCSCLKGCCSCGSCCKFDEDDSEPVLKGVKLHYT

SEQ ID NO: 1228 - protein, 1273 aa, Artificial Sequence
  SARS-CoV-2/USA/CruiseA-23/2020__EPI_ISL_414482 spike protein (1-1273)(T874C_S1055C)
MFVFLVLLPLVSSQCVNLTTRTQLPPAYTNSFTRGVYYPDKVFRSSVLHSTQDLFLPFFSNVTWFHAIHVSGTNGTKRFDNPVLPFNDGVYFASTEKSNIIRGWIFGTTLDSKTQSLLIVNNATNVVIKVCEFQFCNDPFLGVYYHKNNKSWMESEFRVYSSANNCTFEYVSQPFLMDLEVKQGNFKNLREFVFKNIDGYFKIYSKHTPINLVRDLPQGFSALEPLVDLPIGINITRFQTLLALHRSYLTPGDSSSGWTAGAAAYYVGYLQPRTFLLKYNENGTITDAVDCALDPLSETKCTLKSFTVEKGIYQTSNFRVQPTESIVRFPNITNLCPFGEVFNATRFASVYAWNRKRISNCVADYSVLYNSASFSTFKCYGVSPTKLNDLCFTNVYADSFVIRGDEVRQIAPGQTGKIADYNYKLPDDFTGCVIAWNSNNLDSKVGGNYNYLYRLFRKSNLKPFERDISTEIYQAGSTPCNGVEGFNCYFPLQSYGFQPTNGVGYQPYRVVVLSFELLHAPATVCGPKKSTNLVKNKCVNFNFNGLTGTGVLTESNKKFLPFQQFGRDIADTTDAVRDPQTLEILDITPCSFGGVSVITPGTNTSNQVAVLYQDVNCTEVPVAIHADQLTPTWRVYSTGSNVFQTRAGCLIGAEHVNNSYECDIPIGAGICASYQTQTNSPRRARSVASQSIIAYTMSLGAENSVAYSNNSIAIPTNFTISVTTEILPVSMTKTSVDCTMYICGDSTECSNLLLQYGSFCTQLNRALTGIAVEQDKNTQEVFAQVKQIYKTPPIKDFGGFNFSQILPDPSKPSKRSFIEDLLFNKVTLADAGFIKQYGDCLGDIAARDLICAQKFNGLTVLPPLLTDEMIAQYCSALLAGTITSGWTFGAGAALQIPFAMQMAYRFNGIGVTQNVLYENQKLIANQFNSAIGKIQDSLSSTASALGKLQDVVNQNAQALNTLVKQLSSNFGAISSVLNDILSRLDKVEAEVQIDRLITGRLQSLQTYVTQQLIRAAEIRASANLAATKMSECVLGQSKRVDFCGKGYHLMSFPQCAPHGVVFLHVTYVPAQEKNFTTAPAICHDGKAHFPREGVFVSNGTHWFVTQRNFYEPQIITTDNTFVSGNCDVVIGIVNNTVYDPLQPELDSFKEELDKYFKNHTSPDVDLGDISGINASVVNIQKEIDRLNEVAKNLNESLIDLQELGKYEQYIKWPWYIWLGFIAGLIAIVMVTIMLCCMTSCCSCLKGCCSCGSCCKFDEDDSEPVLKGVKLHYT

SEQ ID NO: 1229 - protein, 1273 aa, Artificial Sequence
  SARS-CoV-2/Hong Kong/case85_VM20002868/2020__EPI_ISL_414519 spike protein (1-1273)(T874C_S1055C)
MFVFLVLVPLVSSQCVNLTTRTQLPPAYTNSFTRGVYYPDKVFRSSVLHSTQDLFLPFFSNVTWFHAIHVSGTNGTKRFDNPVLPFNDGVYFASTEKSNIIRGWIFGTTLDSKTQSLLIVNNATNVVIKVCEFQFCNDPFLGVYYHKNNKSWMESEFRVYSSANNCTFEYVSQPFLMDLEGKQGNFKNLREFVFKNIDGYFKIYSKHTPINLVRDLPQGFSALEPLVDLPIGINITRFQTLLALHRSYLTPGDSSSGWTAGAAAYYVGYLQPRTFLLKYNENGTITDAVDCALDPLSETKCTLKSFTVEKGIYQTSNFRVQPTESIVRFPNITNLCPFGEVFNATRFASVYAWNRKRISNCVADYSVLYNSASFSTFKCYGVSPTKLNDLCFTNVYADSFVIRGDEVRQIAPGQTGKIADYNYKLPDDFTGCVIAWNSNNLDSKVGGNYNYLYRLFRKSNLKPFERDISTEIYQAGSTPCNGVEGFNCYFPLQSYGFQPTNGVGYQPYRVVVLSFELLHAPATVCGPKKSTNLVKNKCVNFNFNGLTGTGVLTESNKKFLPFQQFGRDIADTTDAVRDPQTLEILDITPCSFGGVSVITPGTNTSNQVAVLYQDVNCTEVPVAIHADQLTPTWRVYSTGSNVFQTRAGCLIGAEHVNNSYECDIPIGAGICASYQTQTNSPRRARSVASQSIIAYTMSLGAENSVAYSNNSIAIPTNFTISVTTEILPVSMTKTSVDCTMYICGDSTECSNLLLQYGSFCTQLNRALTGIAVEQDKNTQEVFAQVKQIYKTPPIKDFGGFNFSQILPDPSKPSKRSFIEDLLFNKVTLADAGFIKQYGDCLGDIAARDLICAQKFNGLTVLPPLLTDEMIAQYCSALLAGTITSGWTFGAGAALQIPFAMQMAYRFNGIGVTQNVLYENQKLIANQFNSAIGKIQDSLSSTASALGKLQDVVNQNAQALNTLVKQLSSNFGAISSVLNDILSRLDKVEAEVQIDRLITGRLQSLQTYVTQQLIRAAEIRASANLAATKMSECVLGQSKRVDFCGKGYHLMSFPQCAPHGVVFLHVTYVPAQEKNFTTAPAICHDGKAHFPREGVFVSNGTHWFVTQRNFYEPQIITTDNTFVSGNCDVVIGIVNNTVYDPLQPELDSFKEELDKYFKNHTSPDVDLGDISGINASVVNIQKEIDRLNEVAKNLNESLIDLQELGKYEQYIKWPWYIWLGFIAGLIAIVMVTIMLCCMTSCCSCLKGCCSCGSCCKFDEDDSEPVLKGVKLHYT

SEQ ID NO: 1230 - protein, 1273 aa, Artificial Sequence
  SARS-CoV-2/England/200990660/2020__EPI_ISL_414523 spike protein (1-1273)(T874C_S1055C)
MFVFLVLLPLVSSQCVNLTTRTQLPPAYTNSFTRGVYYPDKVFRSSVLHSTQDLFLPFFSNVTWFHAIHVSGTNGTKRFDNPVLPFNDGVYFASTEKSNIIRGWIFGTTLDSKTQSLLIVNNATNVVIKVCEFQFCNDPFLGVYYHKNNKSWMESEFRVYSSANNCTFEYVSQPFLMDLEGKQGNFKNLREFVFKNIDGYFKIYSKHTPINLVRDLPQGFSALEPLVDLPIGINITRFQTLLALHRSYLTPGDSSSGWTAGAAAYYVGYLQPRTFLLKYNENGTITDAVDCALDPLSETKCTLKSFTVEKGIYQTSNFRVQPTESIVRFPNITNLCPFGEVFNATRFASVYAWNRKRISNCVADYSVLYNSASFSTFKCYGVSPTKLNDLCFTNVYADSFVIRGDEVRQIAPGQTGKIADYNYKLPDDFTGCVIAWNSNNLDSKVGGNYNYLYRLFRKSNLKPFERDISTEIYQAGSTPCNGVEGFNCYFPLQSYGFQPTNGVGYQPYRVVVLSFELLHAPATVCGPKKSTNLVKNKCVNFNFNGLTGTGVLTESNKKFLPFQQFGRDIADTTDAVRDPQTLEILDITPCSFGGVSVITPGTNTSNQVAVLYQGVNCTEVPVAIHADQLTPTWRVYSTGSNVFQTRAGCLIGAEHVNNSYECDIPIGAGICASYQTQTNSPRRARSVASQSIIAYTMSLGAENSVAYSNNSIAIPTNFTISVTTEILPVSMTKTSVDCTMYICGDSTECSNLLLQYGSFCTQLNRALTGIAVEQDKNTQEVFAQVKQIYKTPPIKDFGGFNFSQILPDPSKPSKRSFIEDLLFNKVTLADAGFIKQYGDCLGDIAARDLICAQKFNGLTVLPPLLTDEMIAQYCSALLAGTITSGWTFGAGAALQIPFAMQMAYRFNGIGVTQNVLYENQKLIANQFNSAIGKIQDSLSSTASALGKLQDVVNQNAQALNTLVKQLSSNFGAISSVLNDILSRLDKVEAEVQIDRLITGRLQSLQTYVTQQLIRAAEIRASANLAATKMSECVLGQSKRVDFCGKGYHLMSFPQCAPHGVVFLHVTYVPAQEKNFTTAPAICHDGKAHFPREGVFVSNGTHWFVTQRNFYEPQIITTDNTFVSGNCDVVIGIVNNTVYDPLQPELDSFKEELDKYFKNHTSPDVDLGDISGINASVVNIQKEIDRLNEVAKNLNESLIDLQELGKYEQYIKWPWYIWLGFIAGLIAIVMVTIMLCCMTSCCSCLKGCCSCGSCCKFDEDDSELVLKGVKLHYT

SEQ ID NO: 1231 - protein, 1273 aa, Artificial Sequence
  SARS-CoV-2/Australia/NSW09/2020__EPI_ISL_413595 spike protein (1-1273)(T874C_S1055C)
MFVFLVLLPLVSSQCVNLTTRTQLPPAYTNSFTRGVYYPDKVFRSSVLHSTQDLFLPFFSNVTWFHAIHVSGTNGTKRFDNPVLPFNDGVYFASTEKSNIIRGWIFGTTLDSKTQSLLIVNNATNVVIKVCEFQFCNDPFLGVYYHKNNKSWMESEFRVYSSANNCTFEYVSQPFLMDLEGKQGNFKNLREFVFKNIDGYFKIYSKHTPINLVRDLPQGFSALEPLVDLPIGINITRFQTLLALHRSYLTPGDSSSGWTAGAAAYYVGYLQPRTFLLKYNENGTITDAVDCALDPLSETKCTLKSFTVEKGIYQTSNFRVQPTESIVRFPNITNLCPFGEVFNATRFASVYAWNRKRISNCVADYSVLYNSASFSTFKCYGVSPTKLNDLCFTNVYADSFVIRGDEVRQIAPGQTGKIADYNYKLPDDFTGCVIAWNSNNLDSKVGGNYNYLYRLFRKSNLKPFERDISTEIYQAGSTPCNGVEGFNCYFPLQSYGFQPTNGVGYQPYRVVVLSFELLHAPATVCGPKKSTNLVKNKCVNFNFNGLTGTGVLTESNKKFLPFQQFGRDIADTTDAVRDPQTLEILDITPCSFGGVSVITPGTNTSNQVAVLYQDVNCTEVPVAIHADQLTPTWRVYSTGSNVFQTRAGCLIGAEHVNNSYECDIPIGAGICASYQTQTNSPRRARSVASQSIIAYTMSLGAENSVAYSNNSIAIPTNFTISVTTEILPVSMTKTSVDCTMYICGDSTECSNLLLQYGSFCTQLNRALTGIAVEQDKNTQEVFAQVKQIYKTPPIKDFGGFNFSQILPDPSKPSKRSFIEDLLFNKVTLADAGFIKQYGDCLGDIAARDLICAQKFNGLTVLPPLLTDEMIAQYCSALLAGTITSGWTFGAGAALQIPFAMQMAYRFNGIGVTQNVLYENQKLIANQFNSAIGKIQDSLSFTASALGKLQDVVNQNAQALNTLVKQLSSNFGAISSVLNDILSRLDKVEAEVQIDRLITGRLQSLQTYVTQQLIRAAEIRASANLAATKMSECVLGQSKRVDFCGKGYHLMSFPQCAPHGVVFLHVTYVPAQEKNFTTAPAICHDGKAHFPREGVFVSNGTHWFVTQRNFYEPQIITTDNTFVSGNCDVVIGIVNNTVYDPLQPELDSFKEELDKYFKNHTSPDVDLGDISGINASVVNIQKEIDRLNEVAKNLNESLIDLQELGKYEQYIKWPWYIWLGFIAGLIAIVMVTIMLCCMTSCCSCLKGCCSCGSCCKFDEDDSEPVLKGVKLHYT

SEQ ID NO: 1232 - protein, 1273 aa, Artificial Sequence
  SARS-CoV-2/Australia/NSW10/2020__EPI_ISL_413596 spike protein (1-1273)(T874C_S1055C)
MFVFLVLLPLVSSQCVNLTTRTQLPPAYTNSFTRGVYYPDKVFRSSVLHSTQDLFLPFFSNVTWFHAIHVSGTNGTKRFDNPVLPFNDGVYFASTEKSNIIRGWIFGTTLDSKTQSLLIVNNATNVVIKVCEFQFCNDPFLGVYYHKNNKSWMESEFRVYSSANNCTFEYVSQPFLMDLEGKQGNFKNLREFVFKNIDGYFKIYSKHTPINLVRDLPQGFSALEPLVDLPIGINITRFQTLLALHRSYLTPGDSSSGWTAGAAAYYVGYLQPRTFLLKYNENGTITDAVDCALDPLSETKCTLKSFTVEKGIYQTSNFRVQPTESIVRFPNITNLCPFGEVFNATRFASVYAWNRKRISNCVADYSVLYNSASFSTFKCYGVSPTKLNDLCFTNVYADSFVIRGDEVRQIAPGQTGKIADYNYKLPDDFTGCVIAWNSNNLDSKVGGNYNYLYRLFRKSNLKPFERDISTEIYQAGSTPCNGVEGFNCYFPLQSYGFQPTNGVGYQPYRVVVLSFELLHAPATVCGPKKSTNLVKNKCVNFNFNGLTGTGVLTESNKKFLPFQQFGRDIADTTDAVRDPQTLEILDITPCSFGGVSVITPGTNTSNQVAVLYQDVNCTEVPVAIHADQLTPTWRVYSTGSNVFQTRAGCLIGAEHVNNSYECDIPIGAGICASYQTQTNSPRRARSVASQSIIAYTMSLGAENSVAYSNNSIAIPTNFTISVTTEILPVSMTKTSVDCTMYICGDSTECSNLLLQYGSFCTQLNRALTGIAVEQDKNTQEVFAQVKQIYKTPPIKDFGGFNFSQILPDPSKPSKRSFIEDLLFNKVTLADAGFIKQYGDCLGDIAARDLICAQKFNGLTVLPPLLTDEMIAQYCSALLAGTITSGWTFGAGAALQIPFAMQMAYRFNGIGVTQNVLYENQKLIANQFNSAIGKIQDSLSSTASALGKLQDVVNQNAQALNTLVKQLSSNFGAISSVLNDILSRLDKVEAEVQIDRLITGRLQSLQTYVTQQLIRAAEIRASANLAATKMSECVLGQSKRVDFCGKGYHLMSFPQCAPHGVVFLHVTYVPAQEKNFTTAPAICHDGKAHFPREGVFVSNGTHWFVTQRNFYEPQIITTDNTFVSGNCDVVIGIVNNTVYDPLQPELDSFKEELDKYFKNHTSPDVDLGDISGINASVVNIQKEIDRLNEVAKNLNESLIDLQELGKYEQYIKWPWYIWLGFIAGLIAIVMVTIMLCCMTSCCSCLKGCCSCGSCFKFDEDDSEPVLKGVKLHYT

SEQ ID NO: 1233 - protein, 1273 aa, Artificial Sequence
  SARS-CoV-2/Switzerland/1000477797/2020__EPI_ISL_413023 spike protein (1-1273)(T874C_S1055C)
MFVFLVLLPLVSSQCVNLTTRTQLPPAYTNSFTRGVYYPDKVFRSSVLHSTQDLFLPFFSNVTWFHAIHVSGTNGTKRFDNPVLPFNDGVYFASTEKSNIIRGWIFGTTLDSKTQSLLIVNNATNVVIKVCEFQFCNDPFLGVYYHKNNKSWMESEFRVYSSANNCTFEYVSQPFLMDLEGKQGNFKNLREFVFKNIDGYFNIYSKHTPINLVRDLPQGFSALEPLVDLPIGINITRFQTLLALHRSYLTPGDSSSGWTAGAAAYYVGYLQPRTFLLKYNENGTITDAVDCALDPLSETKCTLKSFTVEKGIYQTSNFRVQPTESIVRFPNITNLCPFGEVFNATRFASVYAWNRKRISNCVADYSVLYNSASFSTFKCYGVSPTKLNDLCFTNVYADSFVIRGDEVRQIAPGQTGKIADYNYKLPDDFTGCVIAWNSNNLDSKVGGNYNYLYRLFRKSNLKPFERDISTEIYQAGSTPCNGVEGFNCYFPLQSYGFQPTNGVGYQPYRVVVLSFELLHAPATVCGPKKSTNLVKNKCVNFNFNGLTGTGVLTESNKKFLPFQQFGRDIADTTDAVRDPQTLEILDITPCSFGGVSVITPGTNTSNQVAVLYQGVNCTEVPVAIHADQLTPTWRVYSTGSNVFQTRAGCLIGAEHVNNSYECDIPIGAGICASYQTQTNSPRRARSVASQSIIAYTMSLGAENSVAYSNNSIAIPTNFTISVTTEILPVSMTKTSVDCTMYICGDSTECSNLLLQYGSFCTQLNRALTGIAVEQDKNTQEVFAQVKQIYKTPPIKDFGGFNFSQILPDPSKPSKRSFIEDLLFNKVTLADAGFIKQYGDCLGDIAARDLICAQKFNGLTVLPPLLTDEMIAQYCSALLAGTITSGWTFGAGAALQIPFAMQMAYRFNGIGVTQNVLYENQKLIANQFNSAIGKIQDSLSSTASALGKLQDVVNQNAQALNTLVKQLSSNFGAISSVLNDILSRLDKVEAEVQIDRLITGRLQSLQTYVTQQLIRAAEIRASANLAATKMSECVLGQSKRVDFCGKGYHLMSFPQCAPHGVVFLHVTYVPAQEKNFTTAPAICHDGKAHFPREGVFVSNGTHWFVTQRNFYEPQIITTDNTFVSGNCDVVIGIVNNTVYDPLQPELDSFKEELDKYFKNHTSPDVDLGDISGINASVVNIQKEIDRLNEVAKNLNESLIDLQELGKYEQYIKWPWYIWLGFIAGLIAIVMVTIMLCCMTSCCSCLKGCCSCGSCCKFDEDDSEPVLKGVKLHYT

SEQ ID NO: 1234 - protein, 1273 aa, Artificial Sequence
  SARS-CoV-2/Belgium/BA-02291/2020__EPI_ISL_415159 spike protein (1-1273)(T874C_S1055C)
MFVFLVLLPLVSSQCVNLTTRTQLPPAYTNSFTRGVYYPDKVFRSSVLHSTQDLFLPFFSNVTWFHAIHVSGTNGTKRFDNPVLPFNDGVYFASTEKSNIIRGWIFGTTLDSKTQSLLIVNNATNVVIKVCEFQFCNDPFLGVYYHKNNKSWMESEFRVYSSANNCTFEYVSQPFLMDLEGKQGNFKNLREFVFKNIDGYFKIYSKHTPINLVRDLPQGFSALEPLVDLPIGINITRFQTLLALHRSYLTPGDSSSGWTAGAAAYYVGYLQPRTFLLKYNENGTITDAVDCALDPLSETKCTLKSFTVEKGIYQTSNFRVQPTESIVRFPNITNLCPFGEVFNATRFASVYAWNRKRISNCVADYSVLYNSASFSTFKCYGVSPTKLNDLCFTNVYADSFVIRGDEVRQIAPGQTGKIADYNYKLPDDFTGCVIAWNSNNLDSKVGGNYNYLYRLFRRSNLKPFERDISTEIYQAGSTPCNGVEGFNCYFPLQSYGFQPTNGVGYQPYRVVVLSFELLPAPATVCGPKKSTNLVKNKCVNFNFNGLTGTGVLTESNKKFLPFQQFGRDIADTTDAVRDPQTLEILDITPCSFGGVSVITPGTNTSNQVAVLYQGVNCTEVPVAIHADQLTPTWRVYSTGSNVFQTRAGCLIGAEHVNNSYECDIPIGAGICASYQTQTNSPRRARSVASQSIIAYTMSLGAENSVAYSNNSIAIPTNFTISVTTEILPVSMTKTSVDCTMYICGDSTECSNLLLQYGSFCTQLNRALTGIAVEQDKNTQEVFAQVKQIYKTPPIKDFGGFNFSQILPDPSKPSKRSFIEDLLFNKVTLADAGFIKQYGDCLGDIAARDLICAQKFNGLTVLPPLLTDEMIAQYCSALLAGTITSGWTFGAGAALQIPFAMQMAYRFNGIGVTQNVLYENQKLIANQFNSAIGKIQDSLSSAAPALGKLQDVVNQNAQALNTLVKQLSSNFGAISSVLNDILSRLDKVEAEVQIDRLITGRLQSLQTYVTQQLIRAAEIRASANLAATKMSECVLGQSKRVDFCGKGYHLMSFPQCAPHGVVFLHVTYVPAQEKNFTTAPAICHDGKAHFPREGVFVSNGTHWFVTQRNFYEPQIITTDNTFVSGNCDVVIGIVNNTVYDPLQPELDSFKEELDKYFKNHTSPDVDLGDISGINASVVNIQKEIDRLNEVAKNLNESLIDLQELGKYEQYIKWPWYIWLGFIAGLIAIVMVTIMLCCMTSCCSCLKGCCSCGSCCKFDEDDSEPVLKGVKLHYT

SEQ ID NO: 1235 - protein, 1273 aa, Artificial Sequence
  SARS-CoV-2/USA/WA8-UW5/2020__EPI_ISL_413486 spike protein (1-1273)(T874C_S1055C)
MFVFLVLLPLVSSQCVNLTTRTQLPPAYTNSFTRGVYYPDKVFRSSVLHSTQDLFLPFFSNVTWFHAIHVSGTNGTKRFDNPVLPFNDGVYFASTEKSNIIRGWIFGTTLDSKTQSLLIVNNATNVVIKVCEFQFCNDPFLGVYYHKNNKSWMESEFRVYSSANNCTFEYVSQPFLMDLEGKQGNFKNLREFVFKNIDGYFKIYSKHTPINLVRDLPQGFSALEPLVDLPIGINITRFQTLLALHRSYLTPGDSSSGWTAGAAAYYVGYLQPRTFLLKYNENGTITDAVDCALDPLSETKCTLKSFTVEKGIYQTSNFRVQPTESIVRFPNITNLCPFGEVFNATRFASVYAWNRKRISNCVADYSVLYNSASFSTFKCYGVSPTKLNDLCFTNVYADSFVIRGDEVRQIAPGQTGKIADYNYKLPDDFTGCVIAWNSNNLDSKVGGNYNYLYRLFRKSNLKPFERDISTEIYQAGSTPCNGVEGFNCYFPLQSYGFQPTNGVGYQPYRVVVLSFELLHAPATVCGPKKSTNLVKNKCVNFNFNGLTGTGVLTESNKKFLPFQQFGRDIADTTDAVRDPQTLEILDITPCSFGGVSVITPGTNTSNQVAVLYQDVNCTEVPVAIHADQLTPTWRVYSTGSNVFQTRAGCLIGAEYVNNSYECDIPIGAGICASYQTQTNSPRRARSVASQSIIAYTMSLGAENSVAYSNNSIAIPTNFTISVTTEILPVSMTKTSVDCTMYICGDSTECSNLLLQYGSFCTQLNRALTGIAVEQDKNTQEVFAQVKQIYKTPPIKDFGGFNFSQILPDPSKPSKRSFIEDLLFNKVTLADAGFIKQYGDCLGDIAARDLICAQKFNGLTVLPPLLTDEMIAQYCSALLAGTITSGWTFGAGAALQIPFAMQMAYRFNGIGVTQNVLYENQKLIANQFNSAIGKIQDSLSSTASALGKLQDVVNQNAQALNTLVKQLSSNFGAISSVLNDILSRLDKVEAEVQIDRLITGRLQSLQTYVTQQLIRAAEIRASANLAATKMSECVLGQSKRVDFCGKGYHLMSFPQCAPHGVVFLHVTYVPAQEKNFTTAPAICHDGKAHFPREGVFVSNGTHWFVTQRNFYEPQIITTDNTFVSGNCDVVIGIVNNTVYDPLQPELDSFKEELDKYFKNHTSPDVDLGDISGINASVVNIQKEIDRLNEVAKNLNESLIDLQELGKYEQYIKWPWYIWLGFIAGLIAIVMVTIMLCCMTSCCSCLKGCCSCGSCCKFDEDDSEPVLKGVKLHYT

SEQ ID NO: 1236 - protein, 1273 aa, Artificial Sequence
  SARS-CoV-2/England/20102000506/2020__EPI_ISL_415147 spike protein (1-1273)(T874C_S1055C)
MFVFLVLLPLVSSQCVNLTTRTQLPPAYTNSFTRGVYYPDKVFRSSVLHSTQDLFLPFFSNVTWFHAIHVSGTNGTKRFDNPVLPFNDGVYFASTEKSNIIRGWIFGTTLDSKTQSLLIVNNATNVVIKVCEFQFCNDPFLGVYYHKNNKSWMESEFRVYSSANNCTFEYVSQPFLMDLEGKQGNFKNLREFVFKNIDGYFKIYSKHTPINLVRDLPQGFSALEPLVDLPIGINITRFQTLLALHRSYLTPGDSSSGWTAGAAAYYVGYLQPRTFLLKYNENGTITDAVDCALDPLSETKCTLKSFTVEKGIYQTSNFRVQPTESIVRFPNITNLCPFGEVFNATRFASVYAWNRKRISNCVADYSVLYNSASFSTFKCYGVSPTKLNDLCFTNVYADSFVIRGDEVRQIAPGQTGKIADYNYKLPDDFTGCVIAWNSNNLDSKVGGNYNYLYRLFRKSNLKPFERDISTEIYQAGSTPCNGVEGFNCYFPLQSYGFQPTNGVGYQPYRVVVLSFELLHAPATVCGPKKSTNLVKNKCVNFNFNGLTGTGVLTESNKKFLPFQQFGRDIADTTDAVRDPQTLEILDITPCSFGGVSVITPGTNTSNQVAVLYQGVNCTEVPVAIHADQLTPTWRVYSTGSNVFQTRAGCLIGAEHVNNSYECDIPIGAGICASYQTQTNSPRRARSVASQSIIAYTMSLGAENSVAYSNNSIAIPTNFTISVTTEILPVSMTKTSVDCTMYICGDSTECSNLLLQYGSFCTQLNRALTGIAVEQDKNTQEVFAQVKQIYKTPPIKDFGGFNFSQILPDPSKPSKRSFIEDLLFNKVTLADAGFIKQYGYCLGDIAARDLICAQKFNGLTVLPPLLTDEMIAQYCSALLAGTITSGWTFGAGAALQIPFAMQMAYRFNGIGVTQNVLYENQKLIANQFNSAIGKIQDSLSSTASALGKLQDVVNQNAQALNTLVKQLSSNFGAISSVLNDILSRLDKVEAEVQIDRLITGRLQSLQTYVTQQLIRAAEIRASANLAATKMSECVLGQSKRVDFCGKGYHLMSFPQCAPHGVVFLHVTYVPAQEKNFTTAPAICHDGKAHFPREGVFVSNGTHWFVTQRNFYEPQIITTDNTFVSGNCDVVIGIVNNTVYDPLQPELDSFKEELDKYFKNHTSPDVDLGDISGINASVVNIQKEIDRLNEVAKNLNESLIDLQELGKYEQYIKWPWYIWLGFIAGLIAIVMVTIMLCCMTSCCSCLKGCCSCGSCCKFDEDDSEPVLKGVKLHYT

SEQ ID NO: 1237 - protein, 1273 aa, Artificial Sequence
  SARS-CoV-2/Belgium/VAG-03013/2020__EPI_ISL_415155 spike protein (1-1273)(T874C_S1055C)
MFVFLVLLPLVSSQCVNLTTRTQLPPAYTNSFTRGVYYPDKVFRSSVLHSTQDLFLPFFSNVTWFHAIHVSGTNGTKRFDNPVLPFNDGVYFASTEKSNIIRGWIFGTTLDSKTQSLLIVNNATNVVIKVCEFQFCNDPFLGVYYHKNNKSWMESEFRVYSSANNCTFEYVSQPFLMDLEGKQGNFKNLREFVFKNIDGYFKIYSKHTPINLVRDLPQGFSALEPLVDLPIGINITRFQTLLALHRSYLTPGDSSSGWTAGAAAYYVGYLQPRTFLLKYNENGTITDAVDCALDPLSETKCTLKSFTVEKGIYQTSNFRVQPTESIVRFPNITNLCPFGEVFNATRFASVYAWNRKRISNCVADYSVLYNSASFSTFKCYGVSPTKLNDLCFTNVYADSFVIRGDEVRQIAPGQTGKIADYNYKLPDDFTGCVIAWNSNNLDSKVGGNYNYLYRLFRKSNLKPFERDISTEIYQAGSTPCNGVEGFNCYFPLQSYGFQPTNGVGYQPYRVVVLSFELLHAPATVCGPKKSTNLVKNKCVNFNFNGLTGTGVLTESNKKFLPFQQFGRDIADTTDAVRDPQTLEILDITPCSFGGVSVITPGTNTSNQVAVLYQGVNCTEVPVAIHADQLTPTWRVYSTGSNVFQTRAGCLIGAEHVNNSYECDIPIGAGICASYQTQTNSPRRARSVASQSIIAYTMSLGAENSVAYSNNSIAIPTNFTISVTTEILPVSMTKTSVDCTMYICGDSTECSNLLLQYGSFCTQLNRALTGIAVEQDKNTQEVFAQVKQIYKTPPIKDFGGFNFSQILPDPSKPSKRSFIEDLLFNKVTLADAGFIKQYGDCLGDIAARDLICAQKFNGLTVLPPLLTDEMIAQYCSALLAGTITSGWTFGAGAALQIPFAMQMAYRFNGIGVTQNVLYENQKLIANQFNSAIGKIQDSLSSTATALGKLQDVVNQNAQALNTLVKQLSSNFGAISSVLNDILSRLDKVEAEVQIDRLITGRLQSLQTYVTQQLIRAAEIRASANLAATKMSECVLGQSKRVDFCGKGYHLMSFPQCAPHGVVFLHVTYVPAQEKNFTTAPAICHDGKAHFPREGVFVSNGTHWFVTQRNFYEPQIITTDNTFVSGNCDVVIGIVNNTVYDPLQPELDSFKEELDKYFKNHTSPDVDLGDISGINASVVNIQKEIDRLNEVAKNLNESLIDLQELGKYEQYIKWPWYIWLGFIAGLIAIVMVTIMLCCMTSCCSCLKGCCSCGSCCKFDEDDSEPVLKGVKLHYT

SEQ ID NO: 1238 - protein, 1273 aa, Artificial Sequence
  SARS-CoV-2/Belgium/BC-03016/2020__EPI_ISL_415157 spike protein (1-1273)(T874C_S1055C)
MFVFLVLLPLVSSQCVNLTTRTQLPPAYTNSFTRGVYYPDKVFRSSVLHSTQDLFLPFFSNVTWFHAIHVSGTNGTKRFDNPVLPFNDGVYFASTEKSNIIRGWIFGTTLDSKTQSLLIVNNATNVVIKVCEFQFCNDPFLGVYYHKNNKSWMESEFRVYSSANNCTFEYVSQPFLMDLEGKQGNFKNLREFVFKNIDGYFKIYSKHTPINLVRDLPQGFSALEPLVDLPIGINITRFQTLLALHRSYLTPGDSSSGWTAGAAAYYVGYLQPRTFLLKYNENGTITDAVDCALDPLSETKCTLKSFTVEKGIYQTSNFRVQPTESIVRFPNITNLCPFGEVFNATRFASVYAWNRKRISNCVADYSVLYNSASFSTFKCYGVSPTKLNDLCFTNVYADSFVIRGDEVRQIAPGQTGKIADYNYKLPDDFTGCVIAWNSNNLDSKVGGNYNYLYRLFRKSNLKPFERDISTEIYQAGSTPCNGVEGFNCYFPLQSYGFQPTNGVGYQPYRVVVLSFELLHAPATVCGPKKSTNLVKNKCVNFNFNGLTGTGVLTESNKKFLPFQQFGRDIADTTDAVRDPQTLEILDITPCSFGGVSVITPGTNTSNQVAVLYQGVNCTEVPVAIHADQLTPTWRVYSTGSNVFQTRAGCLIGAEHVNNSYECDIPIGAGICASYQTQTNSPRRARSVASQSIIAYTMSLGAENSVAYSNNSIAIPTNFTISVTTEILPVSMTKTSVDCTMYICGDSTECSNLLLQYGSFCTQLNRALTGIAVEQDKNTQEVFAQVKQIYKTPPIKDFGGFNFSQILPDPSKPSKRSFIEDLLFNKVTLADAGFIKQYGDCLGDIAARDLICAQKFNGLTVLPPLLTDEMIAQYCSALLAGTITSGWTFGAGAALQIPFAMQMAYRFNGIGVTQNVLYENQKLIANQFNSAIGKIQDSLSSTAPALGKLQDVVNQNAQALNTLVKQLSSNFGAISSVLNDILSRLDKVEAEVQIDRLITGRLQSLQTYVTQQLIRAAEIRASANLAATKMSECVLGQSKRVDFCGKGYHLMSFPQCAPHGVVFLHVTYVPAQEKNFTTAPAICHDGKAHFPREGVFVSNGTHWFVTQRNFYEPQIITTDNTFVSGNCDVVIGIVNNTVYDPLQPELDSFKEELDKYFKNHTSPDVDLGDISGINASVVNIQKEIDRLNEVAKNLNESLIDLQELGKYEQYIKWPWYIWLGFIAGLIAIVMVTIMLCCMTSCCSCLKGCCSCGSCCKFDEDDSEPVLKGVKLHYT

SEQ ID NO: 1239 - protein, 1273 aa, Artificial Sequence
  SARS-CoV-2/Germany/BavPat3/2020__EPI_ISL_414521 spike protein (1-1273)(T874C_S1055C)
MFVFLVLLPLVSSQCVNLTTRTQLPPAYTNSFTRGVYYPDKVFRSSVLHSTQDLFLPFFSNVTWFHAIHVSGTNGTKRFDNPVLPFNDGVYFASTEKSNIIRGWIFGTTLDSKTQSLLIVNNATNVVIKVCEFQFCNDPFLGVYYHKNNKSWMESEFRVYSSANNCTFEYVSQPFLMDLEGKQGNFKNLREFVFKNIDGYFKIYSKHTPINLVRDLPQGFSALEPLVDLPIGINITRFQTLLALHRSYLTPGDSSSGWTAGAAAYYVGYLQPRTFLLKYNENGTITDAVDCALDPLSETKCTLKSFTVEKGIYQTSNFRVQPTESIVRFPNITNLCPFGEVFNATRFASVYAWNRKRISNCVADYSVLYNSASFSTFKCYGVSPTKLNDLCFTNVYADSFVIRGDEVRQIAPGQTGKIADYNYKLPDDFTGCVIAWNSNNLDSKVGGNYNYLYRLFRKSNLKPFERDISTEIYQAGSTPCNGVEGFNCYFPLQSYGFQPTNGVGYQPYRVVVLSFELLHAPATVCGPKKSTNLVKNKCVNFNFNGLTGTGVLTESNKKFLPFQQFGRDIADTTDAVRDPQTLEILDITPCSFGGVSVITPGTNTSNQVAVLYQDVNCTEVPVAIHADQLTPTWRVYSTGSNVFQTRAGCLIGAEHVNNSYECDIPIGAGICASYQTQTNSPRRARSVASQSIIAYTMSLGAENSVAYSNNSIAIPTNFTISVTTEILPVSMTKTSVDCTMYICGDSTECSNLLLQYGSFCTQLNRALTGIAVEQDKNTQQVFAQVKQIYKTPPIKDFGGFNFSQILPDPSKPSKRSFIEDLLFNKVTLADAGFIKQYGDCLGDIAARDLICAQKFNGLTVLPPLLTDEMIAQYCSALLAGTITSGWTFGAGAALQIPFAMQMAYRFNGIGVTQNVLYENQKLIANQFNSAIGKIQDSLSSTASALGKLQDVVNQNAQALNTLVKQLSSNFGAISSVLNDILSRLDKVEAEVQIDRLITGRLQSLQTYVTQQLIRAAEIRASANLAATKMSECVLGQSKRVDFCGKGYHLMSFPQCAPHGVVFLHVTYVPAQEKNFTTAPAICHDGKAHFPREGVFVSNGTHWFVTQRNFYEPQIITTDNTFVSGNCDVVIGIVNNTVYDPLQPELDSFKEELDKYFKNHTSPDVDLGDISGINASVVNIQKEIDRLNEVAKNLNESLIDLQELGKYEQYIKWPWYIWLGFIAGLIAIVMVTIMLCCMTSCCSCLKGCCSCGSCCKFDEDDSEPVLKGVKLHYT

SEQ ID NO: 1240 - protein, 1273 aa, Artificial Sequence
  SARS-CoV-2/France/HF1805/2020__EPI_ISL_414628 spike protein (1-1273)(T874C_S1055C)
MFVFLVLLPLVSSQCVNLTTRTQLPPAYTNSFTRGVYYPDKVFRSSVLHSTQDLFLPFFSNVTWFHAIHVSGTNGTKRFDNPVLPFNDGVYFASTEKSNIIRGWIFGTTLDSKTQSLLIVNNATNVVIKVCEFQFCNDPFLGVYYHKNNKSWMESEFRVYSSANNCTFEYVSQPFLMDLEGKQGNFKNLREFVFKNIDGYFKIYSKHTPINLVRDLPQGFSALEPLVDLPIGINITRFQTLLALHRSYLTPGDSSSGWTAGAAAYYVGYLQPRTFLLKYNENGTITDAVDCALDPLSETKCTLKSFTVEKGIYQTSNFRVQPTESIVRFPNITNLCPFGEVFNATRFASVYAWNRKRISNCVADYSVLYNSASFSTFKCYGVSPTKLNDLCFTNVYADSFVIRGDEVRQIAPGQTGKIADYNYKLPDDFTGCVIAWNSNNLDSKVGGNYNYLYRLFRKSNLKPFERDISTEIYQAGSTPCNGVEGFNCYFPLQSYGFQPTNGVGYQPYRVVVLSFELLHAPATVCGPKKSTNLVKNKCVNFNFNGLTGTGVLTESNKKFLPFQQFGRDIADTTDAVRDPQTLEILDITPCSFGGVSVITPGTNTSNQVAVLYQGVNCTEVPVAIHADQLTPTWRVYSTGSNVFQTRAGCLIGAEHVNNSYECDIPIGAGICASYQTQTNSPRRARSVASQSIIAYTMSLGAENSVAYSNNSIAIPTNFTISVTTEILPVSMTKTSVDCTMYICGDSTECSNLLLQYGSFCTQLNRALTGIAVEQDKNTQEVFAQVKQIYKTPPIKDFGGFNFSQILPDPSKPSKRSFIEDLLFNKVTLADAGFIKQYGDCLGDIAARDLICAQKFNGLTVLPPLLTDEMIAQYCSALLAGTITSGWTFGAGAALQIPFAMQMAYRFNGIGVTQNVLYENQKLIANQFNSAIGKIQDSLSSTASALGKLQDVVNQNAQALNTLVKQLSSNFGAISSVLNDILSRLDKVEAEVQIDRLITGRLQSLQTYVTQQLIRAAEIRASANLAATKMSECVLGQSKRVDFCGKGYHLMSFPQCAPHGVVFLHVTYVPAQEKNFTTAPAICHDGKAHFPREGVFVSNGTHWFVTQRNFYEPQIITTDNTFVSGNCDVVIGVVNNTVYDPLQPELDSFKEELDKYFKNHTSPDVDLGDISGINASVVNIQKEIDRLNEVAKNLNESLIDLQELGKYEQYIKWPWYIWLGFIAGLIAIVMVTIMLCCMTSCCSCLKGCCSCGSCCKFDEDDSEPVLKGVKLHYT

SEQ ID NO: 1241 - protein, 1273 aa, Artificial Sequence
  SARS-CoV-2/Netherlands/ZuidHolland_9/2020__EPI_ISL_414445 spike protein (1-1273)(T874C_S1055C)
MFVFLVLLPLVSSQCVNLTTRTQLPPAYTNSFTRGVYYPDKVFRSSVLHSTQDLFLPFFSNVTWFHAIHVSGTNGTKRFDNPVLPFNDGVYFASTEKSNIIRGWIFGTTLDSKTQSLLIVNNATNVVIKVCEFQFCNDPFLGVYYHKNNKSWMESEFRVYSSANNCTFEYVSQPFLMDLEGKQGNFKNLREFVFKNIDGYFKIYSKHTPINLVRDLPQGFSALEPLVDLPIGINITRFQTLLALHRSYLTPGDSSSGWTAGAAAYYVGYLQPRTFLLKYNENGTITDAVDCALDPLSETKCTLKSFTVEKGIYQTSNFRVQPTESIVRFPNITNLCPFGEVFNATRFASVYAWNRKRISNCVADYSVLYNSASFSTFKCYGVSPTKLNDLCFTNVYADSFVIRGDEVRQIAPGQTGKIADYNYKLPDDFTGCVIAWNSNNLDSKVGGNYNYLYRLFRKSNLKPFERDISTEIYQAGSTPCNGVEGFNCYFPLQSYGFQPTNGVGYQPYRVVVLSFELLHAPATVCGPKKSTNLVKNKCVNFNFNGLTGTGVLTESNKKFLPFQQFGRDIADTTDAVRDPQTLEILDITPCSFGGVSVITPGTNTSNQVAVLYQGVNCTEVPVAIHADQLTPTWRVYSTGSNVFQTRAGCLIGAEHVNNSYECDIPIGAGICASYQTQTNSPRRARSVASQSIIAYTMSLGAENSVAYSNNSIAIPTNFTISVTTEILPVSMTKTSVDCTMYICGDSTECSNLLLQYGSFCTQLNRALTGIAVEQDKNTQEVFAQVKQIYKTPPIKDFGGFNFSQILPDPSKPSKRSFIEDLLFNKVTLADAGFIKQYGDCLGDIAARDLICVQKFNGLTVLPPLLTDEMIAQYCSALLAGTITSGWTFGAGAALQIPFAMQMAYRFNGIGVTQNVLYENQKLIANQFNSAIGKIQDSLSSTASALGKLQDVVNQNAQALNTLVKQLSSNFGAISSVLNDILSRLDKVEAEVQIDRLITGRLQSLQTYVTQQLIRAAEIRASANLAATKMSECVLGQSKRVDFCGKGYHLMSFPQCAPHGVVFLHVTYVPAQEKNFTTAPAICHDGKAHFPREGVFVSNGTHWFVTQRNFYEPQIITTDNTFVSGNCDVVIGIVNNTVYDPLQPELDSFKEELDKYFKNHTSPDVDLGDISGINASVVNIQKEIDRLNEVAKNLNESLIDLQELGKYEQYIKWPWYIWLGFIAGLIAIVMVTIMLCCMTSCCSCLKGCCSCGSCCKFDEDDSEPVLKGVKLHYT

SEQ ID NO: 1242 - protein, 1273 aa, Artificial Sequence
  SARS-CoV-2/Finland/FIN03032020A/2020__EPI_ISL_413602 spike protein (1-1273)(T874C_S1055C)
MFVFLVLLPLVSSQCVNLTTRTQLPPAYTNSFTRGVYYPDKVFRSSVLHSTQDLFLPFFSNVTWFHAIHVSGTNGTKRFDNPVLPFNDGVYFASTEKSNIIRGWIFGTTLDSKTQSLLIVNNATNVVIKVCEFQFCNDPFLGVYYHKNNKSWMESEFRVYSSANNCTFEYVSQPFLMDLEGKQGNFKNLREFVFKNIDGYFKIYSKHTPINLVRDLPQGFSALEPLVDLPIGINITRFQTLLALHRSYLTPGDSSSGWTAGAAAYYVGYLQPRTFLLKYNENGTITDAVDCALDPLSETKCTLKSFTVEKGIYQTSNFRVQPTESIVRFPNITNLCPFGEVFNATRFASVYAWNRKRISNCVADYSVLYNSASFSTFKCYGVSPTKLNDLCFTNVYADSFVIRGDEVRQIAPGQTGKIADYNYKLPDDFTGCVISWNSNNLDSKVGGNYNYLYRLFRKSNLKPFERDISTEIYQAGSTPCNGVEGFNCYFPLQSYGFQPTNGVGYQPYRVVVLSFELLHAPATVCGPKKSTNLVKNKCVNFNFNGLTGTGVLTESNKKFLPFQQFGRDIADTTDAVRDPQTLEILDITPCSFGGVSVITPGTNTSNQVAVLYQGVNCTEVPVAIHADQLTPTWRVYSTGSNVFQTRAGCLIGAEHVNNSYECDIPIGAGICASYQTQTNSPRRARSVASQSIIAYTMSLGAENSVAYSNNSIAIPTNFTISVTTEILPVSMTKTSVDCTMYICGDSTECSNLLLQYGSFCTQLNRALTGIAVEQDKNTQEVFAQVKQIYKTPPIKDFGGFNFSQILPDPSKPSKRSFIEDLLFNKVTLADAGFIKQYGDCLGDIAARDLICAQKFNGLTVLPPLLTDEMIAQYCSALLAGTITSGWTFGAGAALQIPFAMQMAYRFNGIGVTQNVLYENQKLIANQFNSAIGKIQDSLSSTASALGKLQDVVNQNAQALNTLVKQLSSNFGAISSVLNDILSRLDKVEAEVQIDRLITGRLQSLQTYVTQQLIRAAEIRASANLAATKMSECVLGQSKRVDFCGKGYHLMSFPQCAPHGVVFLHVTYVPAQEKNFTTAPAICHDGKAHFPREGVFVSNGTHWFVTQRNFYEPQIITTDNTFVSGNCDVVIGIVNNTVYDPLQPELDSFKEELDKYFKNHTSPDVDLGDISGINASVVNIQKEIDRLNEVAKNLNESLIDLQELGKYEQYIKWPWYIWLGFIAGLIAIVMVTIMLCCMTSCCSCLKGCCSCGSCCKFDEDDSEPVLKGVKLHYT

SEQ ID NO: 1243 - protein, 1273 aa, Artificial Sequence
  SARS-CoV-2/France/GE1977/2020__EPI_ISL_414632 spike protein (1-1273)(T874C_S1055C)
MFVFLVLLPLVSSQCVNLTTRTQLPPAYTNSFTRGVYYPDKVFRSSVLHSTQDLFLPFFSNVTWFHAIHVSGTNGTKRFDNPVLPFNDGVYFASTEKSNIIRGWIFGTTLDSKTQSLLIVNNATNVVIKVCEFQFCNDPFLGVYYHKNNKSWMESEFRVYSSANNCTFEYVSQPFLMDLEGKQGNFKNLREFVFKNIDGYFKIYSKHTPINLVRDLPQGFSALEPLVDLPIGINITRFQTLLALHRSYLTPGDSSSGWTAGAAAYYVGYLQPRTFLLKYNENGTITDAVDCALDPLSETKCTLKSFTVEKGIYQTSNFRVQPTESIVRFPNITNLCPFGEVFNATRFASVYAWNRKRISNCVADYSVLYNSASFSTFKCYGVSPTKLNDLCFTNVYADSFVIRGDEVRQIAPGQTGKIADYNYKLPDDFTGCVIAWNSNNLDSKVGGNYNYLYRLFRKSNLKPFERDISTEIYQAGSTPCNGVEGFNCYFPLQSYGFQPTNGVGYQPYRVVVLSFELLHAPATVCGPKKSTNLVKNKCVNFNFNGLTGTGVLTESNKKFLPFQQFGRDIADTTDAVRDPQTLEILDITPCSFGGVSVITPGTNTSNQVAVLYQGVNCTEVPVAIHADQLTPTWRVYSTGSNVFQTRAGCLIGAEHVNNSYECDIPIGAGICASYQTQTNSPRRARSVASQSIIAYTMSLGAENSVAYSNNSIAIPTNFTISVTTEILPVSMTKTSVDCTMYICGDSTECSNLLLQYGSFCTQLNRALTGIAVEQDKNTQEVFAQVKQIYKTPPIKDFGGFNFSQILPDPSKPSKRSFIEDLLFNKVTLADAGFIKQYGDCLGDIAARDLICAQKFNGLTVLPPLLTDEMIAQYCSALLAGTITSGWTFGAGAALQIPFAMQMAYRFNGIGVTQNVLYENQKLIANQFNSAIGKIQDSLFSTASALGKLQDVVNQNAQALNTLVKQLSSNFGAISSVLNDILSRLDKVEAEVQIDRLITGRLQSLQTYVTQQLIRAAEIRASANLAATKMSECVLGQSKRVDFCGKGYHLMSFPQCAPHGVVFLHVTYVPAQEKNFTTAPAICHDGKAHFPREGVFVSNGTHWFVTQRNFYEPQIITTDNTFVSGNCDVVIGIVNNTVYDPLQPELDSFKEELDKYFKNHTSPDVDLGDISGINASVVNIQKEIDRLNEVAKNLNESLIDLQELGKYEQYIKWPWYIWLGFIAGLIAIVMVTIMLCCMTSCCSCLKGCCSCGSCCKFDEDDSEPVLKGVKLHYT

SEQ ID NO: 1244 - protein, 1273 aa, Artificial Sequence
  SARS-CoV-2/Finland/FIN-313/2020__EPI_ISL_414641 spike protein (1-1273)(T874C_S1055C)
MFVFLVLLPLVSSQCVNLTTRTQLPPAYTNSFTRGVYYPDKVFRSSVLHSTQDLFLPFFSNVTWFHAIHVSGTNGTKRFDNPVLPFNDGVYFASTEKSNIIRGWIFGTTLDSKTQSLLIVNNATNVVIKVCEFQFCNDPFLGVYYHKNNKSWMESEFRVYSSANNCTFEYVSQPFLMDLEGKQGNFKNLREFVFKNIDGYFKIYSKHTPINLVRDLPQGFSALEPLVDLPIGINITRFKTLLALHRSYLTPGDSSSGWTAGAAAYYVGYLQPRTFLLKYNENGTITDAVDCALDPLSETKCTLKSFTVEKGIYQTSNFRVQPTESIVRFPNITNLCPFGEVFNATRFASVYAWNRKRISNCVADYSVLYNSASFSTFKCYGVSPTKLNDLCFTNVYADSFVIRGDEVRQIAPGQTGKIADYNYKLPDDFTGCVIAWNSNNLDSKVGGNYNYLYRLFRKSNLKPFERDISTEIYQAGSTPCNGVEGFNCYFPLQSYGFQPTNGVGYQPYRVVVLSFELLHAPATVCGPKKSTNLVKNKCVNFNFNGLTGTGVLTESNKKFLPFQQFGRDIADTTDAVRDPQTLEILDITPCSFGGVSVITPGTNTSNQVAVLYQGVNCTEVPVAIHADQLTPTWRVYSTGSNVFQTRAGCLIGAEHVNNSYECDIPIGAGICASYQTQTNSPRRARSVASQSIIAYTMSLGAENSVAYSNNSIAIPTNFTISVTTEILPVSMTKTSVDCTMYICGDSTECSNLLLQYGSFCTQLNRALTGIAVEQDKNTQEVFAQVKQIYKTPPIKDFGGFNFSQILPDPSKPSKRSFIEDLLFNKVTLADAGFIKQYGDCLGDIAARDLICAQKFNGLTVLPPLLTDEMIAQYCSALLAGTITSGWTFGAGAALQIPFAMQMAYRFNGIGVTQNVLYENQKLIANQFNSAIGKIQDSLSSTASALGKLQDVVNQNAQALNTLVKQLSSNFGAISSVLNDILSRLDKVEAEVQIDRLITGRLQSLQTYVTQQLIRAAEIRASANLAATKMSECVLGQSKRVDFCGKGYHLMSFPQCAPHGVVFLHVTYVPAQEKNFTTAPAICHDGKAHFPREGVFVSNGTHWFVTQRNFYEPQIITTDNTFVSGNCDVVIGIVNNTVYDPLQPELDSFKEELDKYFKNHTSPDVDLGDISGINASVVNIQKEIDRLNEVAKNLNESLIDLQELGKYEQYIKWPWYIWLGFIAGLIAIVMVTIMLCCMTSCCSCLKGCCSCGSCCKFDEDDSEPVLKGVKLHYT

SEQ ID NO: 1245 - protein, 1273 aa, Artificial Sequence
  SARS-CoV-2/Netherlands/ZuidHolland_2/2020__EPI_ISL_414556 spike protein (1-1273)(T874C_S1055C)
MFVFLVLLPLVSSQCVNLTTRTQLPPAYTNSFTRGVYYPDKVFRSSVLHSTQDLFLPFFSNVTWFHAIHVSGTNGTKRFDNPVLPFNDGVYFASTEKSNIIRGWIFGTTLDSKTQSLLIVNNATNVVIKVCEFQFCNDPFLGVYYHKNNKSWMESEFRVYSSANNCTFEYVSQPFLMDLEGKQGNFKNLREFVFKNIDGYFKIYSKHTPINLVRDLPQGFSALEPLVDLPIGINITRFQTLLALHRSYLTPGDSSSGWTAGAAAYYVGYLQPRTFLLKYNENGTITDAVDCALDPLSETKCTLKSFTVEKGIYQTSNFRVQPTESIVRFPNITNLCPFGEVFNATRFASVYAWNRKRISNCVADYSVLYNSASFSTFKCYGVSPTKLNDLCFTNVYADSFVIRGDEVRQIAPGQTGKIADYNYKLPDDFTGCVIAWNSNNLDSKVGGNYNYLYRLFRKSNLKPFERDISTEIYQAGSTPCNGVEGFNCYFPLQSYGFQPTNGVGYQPYRVVVLSFELLHAPATVCGPKKSTNLVKNKCVNFNFNGLTGTGVLTESNKKFLPFQQFGRDIADTTDAVRDPQTLEILDITPCSFGGVSVITPGTNTSNQVAVLYQGVNCTEVPVAIHADQLTPTWRVYSTGSNVFQTRAGCLIGAEHVNNSYECDIPIGAGICASYQTQTNSPRRARSVASQSIIAYTMSLGAENSVAYSNNSIAIPTNFTISVTTEILPVSMTKTSVDCTMYICGDSTECSNLLLQYGSFCTQLNRALTGIALEQDKNTQEVFAQVKQIYKTPPIKDFGGFNFSQILPDPSKPSKRSFIEDLLFNKVTLADAGFIKQYGDCLGDIAARDLICAQKFNGLTVLPPLLTDEMIAQYCSALLAGTITSGWTFGAGAALQIPFAMQMAYRFNGIGVTQNVLYENQKLIANQFNSAIGKIQDSLSSTASALGKLQDVVNQNAQALNTLVKQLSSNFGAISSVLNDILSRLDKVEAEVQIDRLITGRLQSLQTYVTQQLIRAAEIRASANLAATKMSECVLGQSKRVDFCGKGYHLMSFPQCAPHGVVFLHVTYVPAQEKNFTTAPAICHDGKAHFPREGVFVSNGTHWFVTQRNFYEPQIITTDNTFVSGNCDVVIGIVNNTVYDPLQPELDSFKEELDKYFKNHTSPDVDLGDISGINASVVNIQKEIDRLNEVAKNLNESLIDLQELGKYEQYIKWPWYIWLGFIAGLIAIVMVTIMLCCMTSCCSCLKGCCSCGSCCKFDEDDSEPVLKGVKLHYT

SEQ ID NO: 1246 - protein, 1273 aa, Artificial Sequence
  SARS-CoV-2/USA/WA-UW31/2020__EPI_ISL_414618 spike protein (1-1273)(T874C_S1055C)
MFVFLVLLPLVSSQCVNLTTRTQLPPAYTNSFTRGVYYPDKVFRSSVLHSTQDLFLPFFSNVTWFHAIHVSGTNGTKRFDNPVLPFNDGVYFASTEKSNIIRGWIFGTTLDSKTQSLLIVNNATNVVIKVCEFQFCNDPFLGVYYHKNNKSWMESEFRVYSSANNCTFEYVSQPFLMDLEGKQGNFKNLREFVFKNIDGYFKIYSKHTPINLVRDLPQGFSALEPLVDLPIGINITRFQTLLALHRSYLTPGDSSSGWTAGAAAYYVGYLQPRTFLLKYNENGTITDAVDCALDPLSETKCTLKSFTVEKGIYQTSNFRVQPTESIVRFPNITNLCPFGEVFNATRFASVYAWNRKRISNCVADYSVLYNSASFSTFKCYGVSPTKLNDLCFTNVYADSFVIRGDEVRQIAPGQTGKIADYNYKLPDDFTGCVIAWNSNNLDSKVGGNYNYLYRLFRKSNLKPFERDISTEIYQAGSTPCNGAEGFNCYFPLQSYGFQPTNGVGYQPYRVVVLSFELLHAPATVCGPKKSTNLVKNKCVNFNFNGLTGTGVLTESNKKFLPFQQFGRDIADTTDAVRDPQTLEILDITPCSFGGVSVITPGTNTSNQVAVLYQDVNCTEVPVAIHADQLTPTWRVYSTGSNVFQTRAGCLIGAEHVNNSYECDIPIGAGICASYQTQTNSPRRARSVASQSIIAYTMSLGAENSVAYSNNSIAIPTNFTISVTTEILPVSMTKTSVDCTMYICGDSTECSNLLLQYGSFCTQLNRALTGIAVEQDKNTQEVFAQVKQIYKTPPIKDFGGFNFSQILPDPSKPSKRSFIEDLLFNKVTLADAGFIKQYGDCLGDIAARDLICAQKFNGLTVLPPLLTDEMIAQYCSALLAGTITSGWTFGAGAALQIPFAMQMAYRFNGIGVTQNVLYENQKLIANQFNSAIGKIQDSLSSTASALGKLQDVVNQNAQALNTLVKQLSSNFGAISSVLNDILSRLDKVEAEVQIDRLITGRLQSLQTYVTQQLIRAAEIRASANLAATKMSECVLGQSKRVDFCGKGYHLMSFPQCAPHGVVFLHVTYVPAQEKNFTTAPAICHDGKAHFPREGVFVSNGTHWFVTQRNFYEPQIITTDNTFVSGNCDVVIGIVNNTVYDPLQPELDSFKEELDKYFKNHTSPDVDLGDISGINASVVNIQKEIDRLNEVAKNLNESLIDLQELGKYEQYIKWPWYIWLGFIAGLIAIVMVTIMLCCMTSCCSCLKGCCSCGSCCKFDEDDSEPVLKGVKLHYT

SEQ ID NO: 1247 - protein, 1273 aa, Artificial Sequence
  SARS-CoV-2/South Korea/SNU01/2020__EPI_ISL_411929 spike protein (1-1273)(T874C_S1055C)
MFVFLVLLPLVSSQCVNLTTRTQLPPAYTNSFTRGVYYPDKVFRSSVLHSTQDLFLPFFSNVTWFHAIHVSGTNGTKRFDNPVLPFNDGVYFASTEKSNIIRGWIFGTTLDSKTQSLLIVNNATNVVIKVCEFQFCNDPFLGVYYHKNNKSWMESEFRVYSSANNCTFEYVSQPFLMDLEGKQGNFKNLREFVFKNIDGYFKIYSKHTPINLVRDLPQGFWALEPLVDLPIGINITRFQTLLALHRSYLTPGDSSSGWTAGAAAYYVGYLQPRTFLLKYNENGTITDAVDCALDPLSETKCTLKSFTVEKGIYQTSNFRVQPTESIVRFPNITNLCPFGEVFNATRFASVYAWNRKRISNCVADYSVLYNSASFSTFKCYGVSPTKLNDLCFTNVYADSFVIRGDEVRQIAPGQTGKIADYNYKLPDDFTGCVIAWNSNNLDSKVGGNYNYLYRLFRKSNLKPFERDISTEIYQAGSTPCNGVEGFNCYFPLQSYGFQPTNGVGYQPYRVVVLSFELLHAPATVCGPKKSTNLVKNKCVNFNFNGLTGTGVLTESNKKFLPFQQFGRDIADTTDAVRDPQTLEILDITPCSFGGVSVITPGTNTSNQVAVLYQDVNCTEVPVAIHADQLTPTWRVYSTGSNVFQTRAGCLIGAEHVNNSYECDIPIGAGICASYQTQTNSPRRARSVASQSIIAYTMSLGAENSVAYSNNSIAIPTNFTISVTTEILPVSMTKTSVDCTMYICGDSTECSNLLLQYGSFCTQLNRALTGIAVEQDKNTQEVFAQVKQIYKTPPIKDFGGFNFSQILPDPSKPSKRSFIEDLLFNKVTLADAGFIKQYGDCLGDIAARDLICAQKFNGLTVLPPLLTDEMIAQYCSALLAGTITSGWTFGAGAALQIPFAMQMAYRFNGIGVTQNVLYENQKLIANQFNSAIGKIQDSLSSTASALGKLQDVVNQNAQALNTLVKQLSSNFGAISSVLNDILSRLDKVEAEVQIDRLITGRLQSLQTYVTQQLIRAAEIRASANLAATKMSECVLGQSKRVDFCGKGYHLMSFPQCAPHGVVFLHVTYVPAQEKNFTTAPAICHDGKAHFPREGVFVSNGTHWFVTQRNFYEPQIITTDNTFVSGNCDVVIGIVNNTVYDPLQPELDSFKEELDKYFKNHTSPDVDLGDISGINASVVNIQKEIDRLNEVAKNLNESLIDLQELGKYEQYIKWPWYIWLGFIAGLIAIVMVTIMLCCMTSCCSCLKGCCSCGSCCKFDEDDSEPVLKGVKLHYT

SEQ ID NO: 1248 - protein, 1273 aa, Artificial Sequence
  SARS-CoV-2/China/WF0004/2020__EPI_ISL_413694 spike protein (1-1273)(T874C_S1055C)
MFVFLVLLPLVSSQCVNLTTRTQLPPAYTNSFTRGVYYPDKVFRSSVLHSTQDLFLPFFSNVTWFHAIHVSGTNGTKRFDNPVLPFNDGVYFASTEKSNIIRGWIFGTTLDSKTQSLLIVNNATNVVIKVCEFQFCNDPFLGVYYHKNNKSWTESEFRVYSSANNCTFEYVSQPFLMDLEGKQGNFKNLREFVFKNIDGYFKIYSKHTPINLVRDLPQGFSALEPLVDLPIGINITRFQTLLALHRSYLTPGDSSSGWTAGAAAYYVGYLQPRTFLLKYNENGTITDAVDCALDPLSETKCTLKSFTVEKGIYQTSNFRVQPTESIVRFPNITNLCPFGEVFNATRFASVYAWNRKRISNCVADYSVLYNSASFSTFKCYGVSPTKLNDLCFTNVYADSFVIRGDEVRQIAPGQTGKIADYNYKLPDDFTGCVIAWNSNNLDSKVGGNYNYLYRLFRKSNLKPFERDISTEIYQAGSTPCNGVEGFNCYFPLQSYGFQPTNGVGYQPYRVVVLSFELLHAPATVCGPKKSTNLVKNKCVNFNFNGLTGTGVLTESNKKFLPFQQFGRDIADTTDAVRDPQTLEILDITPCSFGGVSVITPGTNTSNQVAVLYQDVNCTEVPVAIHADQLTPTWRVYSTGSNVFQTRAGCLIGAEHVNNSYECDIPIGAGICASYQTQTNSPRRARSVASQSIIAYTMSLGAENSVAYSNNSIAIPTNFTISVTTEILPVSMTKTSVDCTMYICGDSTECSNLLLQYGSFCTQLNRALTGIAVEQDKNTQEVFAQVKQIYKTPPIKDFGGFNFSQILPDPSKPSKRSFIEDLLFNKVTLADAGFIKQYGDCLGDIAARDLICAQKFNGLTVLPPLLTDEMIAQYCSALLAGTITSGWTFGAGAALQIPFAMQMAYRFNGIGVTQNVLYENQKLIANQFNSAIGKIQDSLSSTASALGKLQDVVNQNAQALNTLVKQLSSNFGAISSVLNDILSRLDKVEAEVQIDRLITGRLQSLQTYVTQQLIRAAEIRASANLAATKMSECVLGQSKRFDFCGKGYHLMSFPQCAPHGVVFLHVTYVPAQEKNFTTAPAICHDGKAHFPREGVFVSNGTHWFVTQRNFYEPQIITTDNTFVSGNCDVVIGIVNNTVYDPLQPELDSFKEELDKYFKNHTSPDVDLGDISGINASVVNIQKEIDRLNEVAKNLNESLIDLQELGKYEQYIKWPWYIWLGFIAGLIAIVMVTIMLCCMTSCCSCLKGCCSCGSCCKFDEDDSEPVLKGVKLHYT

SEQ ID NO: 1249 - protein, 1273 aa, Artificial Sequence
  SARS-CoV-2/China/WF0028/2020__EPI_ISL_413791 spike protein (1-1273)(T874C_S1055C)
MFVFLVLLPLVSSQCVNLTTRTQLPPAYTNSFTRGVYYPDKVFRSSVLHSTQDLFLPFFSNVTWFHAIHVSGTNGTKRFDNPVLPFNDGVYFASTEKSNIIRGWIFGTTLDSKTQSLLIVNNATNVVIKVCEFQFCNDPFLGVYYHKNNKSWMESEFRVYSSANNCTFEYVSQPFLMDLEGKQGNFKNLREFVFKNIDGYFKIYSKHTPINLVRDLPQGFSALEPLVDLPIGINITRFQTLLALHRSYLTPGDSSSGWTAGAAAYYVGYLQPRTFLLKYNENGTITDAVDCALDPLSETKCTLKSFTVEKGIYQTSNFRVQPTESIVRFPNITNLCPFGEVFNATRFASVYAWNRKRISNCVADYSVLYNSASFSTFKCYGVSPTKLNDLCFTNVYADSFVIRGDEVRQIAPGQTGKIADYNYKLPDDFTGCVIAWNSNNLDSKVGGNYNYLYRLFRKSNLKPFERDISTEIYQAGSTPCNGVEGFNCYFPLQSYGFQPTNGVGYQPYRVVVLSFELLHAPATVCGPKKSTNLVKNKCVNFNFNGLTGTGVLTESNKKFLPFQQFGRDIADTTDAVRDPQTLEILDITPCSFGGVSVITPGTNTSNQVAVLYQDVNCTEVPVAIHADQLTPTWRVYSTGSNVFQTRAGCLIGAEHVNNSYECDIPIGAGICASYQTQTNSPRRARSVASQSIIAYTMSLGAENSVAYSNNSIAIPTNFTISVTTEILPVSMTKTSVDCTMYICGDSTECSNLLLQYGSFCTQLNRALTGIAVEQDKNTQEVFAQVKQIYKTPPIKDFGGFNFSQILPDPSKPSKRSFIEDLLFNKVTLADAGFIKQYGDCLGDIAARDLICAQKFNGLTVLPPLLTDEMIAQYCSALLAGTITSGWTFGAGAALQIPFAMQMAYRFNGIGVTQNVLYENQKLIANQFNSAIGKIQDSLSSTASALGKLQDVVNQNAQALNTLVKQLSSNFGAISSVLNDILSRLDKVEAEVQIDRLITGRLQSLQTYVTQQLIRAAEIRASANLAATKMSECVLGQSKRVDFCGKGYHLMSFPQCAPHGVVFLHVTYVPAQEKNFTTAPAICHDGKAHFPREGVFVSNGTHWFVTQRNFYEPQIITTDNTFVSGNCDVVIGIVNNTVYDPLQPELESFKEELDKYFKNHTSPDVDLGDISGINASVVNIQKEIDRLNEVAKNLNESLIDLQELGKYEQYIKWPWYIWLGFIAGLIAIVMVTIMLCCMTSCCSCLKGCCSCGSCCKFDEDDSEPVLKGVKLHYT

SEQ ID NO: 1250 - protein, 1273 aa, Artificial Sequence
  SARS-CoV-2/2019-nCoV/USA-CruiseA-18/2020__MT159716.1 spike protein (1-1273)(T874C_S1055C)
MFVFLVLLPLVSSQCVNLTTRTQLPPAYTNSFTRGVYYPDKVFRSSVLHSTQDLFLPFFSNVTWFHAIHVSGTNGTKRFDNPVLPFNDGVYFASTEKSNIIRGWIFGTTLDSKTQSLLIVNNATNVVIKVCEFQFCNDPFLGVYYHKNNKSWMESELRVYSSANNCTFEYVSQPFLMDLEGKQGNFKNLREFVFKNIDGYFKIYSKHTPINLVRDLPQGFSALEPLVDLPIGINITRFQTLLALHRSYLTPGDSSSGWTAGAAAYYVGYLQPRTFLLKYNENGTITDAVDCALDPLSETKCTLKSFTVEKGIYQTSNFRVQPTESIVRFPNITNLCPFGEVFNATRFASVYAWNRKRISNCVADYSVLYNSASFSTFKCYGVSPTKLNDLCFTNVYADSFVIRGDEVRQIAPGQTGKIADYNYKLPDDFTGCVIAWNSNNLDSKVGGNYNYLYRLFRKSNLKPFERDISTEIYQAGSTPCNGVEGFNCYFPLQSYGFQPTNGVGYQPYRVVVLSFELLHAPATVCGPKKSTNLVKNKCVNFNFNGLTGTGVLTESNKKFLPFQQFGRDIADTTDAVRDPQTLEILDITPCSFGGVSVITPGTNTSNQVAVLYQDVNCTEVPVAIHADQLTPTWRVYSTGSNVFQTRAGCLIGAEHVNNSYECDIPIGAGICASYQTQTNSPRRARSVASQSIIAYTMSLGAENSVAYSNNSIAIPTNFTISVTTEILPVSMTKTSVDCTMYICGDSTECSNLLLQYGSFCTQLNRALTGIAVEQDKNTQEVFAQVKQIYKTPPIKDFGGFNFSQILPDPSKPSKRSFIEDLLFNKVTLADAGFIKQYGDCLGDIAARDLICAQKFNGLTVLPPLLTDEMIAQYCSALLAGTITSGWTFGAGAALQIPFAMQMAYRFNGIGVTQNVLYENQKLIANQFNSAIGKIQDSLSSTASALGKLQDVVNQNAQALNTLVKQLSSNFGAISSVLNDILSRLDKVEAEVQIDRLITGRLQSLQTYVTQQLIRAAEIRASANLAATKMSECVLGQSKRVDFCGKGYHLMSFPQCAPHGVVFLHVTYVPAQEKNFTTAPAICHDGKAHFPREGVFVSNGTHWFVTQRNFYEPQIITTDNTFVSGNCDVVIGIVNNTVYDPLQPELDSFKEELDKYFKNHTSPDVDLGDISGINASVVNIQKEIDRLNEVAKNLNESLIDLQELGKYEQYIKWPWYIWLGFIAGLIAIVMVTIMLCCMTSCCSCLKGCCSCGSCCKFDEDDSEPVLKGVKLHYT

SEQ ID NO: 1251 - protein, 1273 aa, Artificial Sequence
  SARS-CoV-2/SARS-CoV-2/Yunnan-01/human/2020/CHN__MT049951.1 spike protein (1-1273)(T874C_S1055C)
MFVFLVLLPLVSSQCVNLTTRTQLPPANTNSFTRGVYYPDKVFRSSVLHSTQDLFLPFFSNVTWFHAIHVSGTNGTKRFDNPVLPFNDGVYFASTEKSNIIRGWIFGTTLDSKTQSLLIVNNATNVVIKVCEFQFCNDPFLGVYYHKNNKSWMESEFRVYSSANNCTFEYVSQPFLMDLEGKQGNFKNLREFVFKNIDGYFKIYSKHTPINLVRDLPQGFSALEPLVDLPIGINITRFQTLLALHRSYLTPGDSSSGWTAGAAAYYVGYLQPRTFLLKYNENGTITDAVDCALDPLSETKCTLKSFTVEKGIYQTSNFRVQPTESIVRFPNITNLCPFGEVFNATRFASVYAWNRKRISNCVADYSVLYNSASFSTFKCYGVSPTKLNDLCFTNVYADSFVIRGDEVRQIAPGQTGKIADYNYKLPDDFTGCVIAWNSNNLDSKVGGNYNYLYRLFRKSNLKPFERDISTEIYQAGSTPCNGVEGFNCYFPLQSYGFQPTNGVGYQPYRVVVLSFELLHAPATVCGPKKSTNLVKNKCVNFNFNGLTGTGVLTESNKKFLPFQQFGRDIADTTDAVRDPQTLEILDITPCSFGGVSVITPGTNTSNQVAVLYQDVNCTEVPVAIHADQLTPTWRVYSTGSNVFQTRAGCLIGAEHVNNSYECDIPIGAGICASYQTQTNSPRRARSVASQSIIAYTMSLGAENSVAYSNNSIAIPTNFTISVTTEILPVSMTKTSVDCTMYICGDSTECSNLLLQYGSFCTQLNRALTGIAVEQDKNTQEVFAQVKQIYKTPPIKDFGGFNFSQILPDPSKPSKRSFIEDLLFNKVTLADAGFIKQYGDCLGDIAARDLICAQKFNGLTVLPPLLTDEMIAQYCSALLAGTITSGWTFGAGAALQIPFAMQMAYRFNGIGVTQNVLYENQKLIANQFNSAIGKIQDSLSSTASALGKLQDVVNQNAQALNTLVKQLSSNFGAISSVLNDILSRLDKVEAEVQIDRLITGRLQSLQTYVTQQLIRAAEIRASANLAATKMSECVLGQSKRVDFCGKGYHLMSFPQCAPHGVVFLHVTYVPAQEKNFTTAPAICHDGKAHFPREGVFVSNGTHWFVTQRNFYEPQIITTDNTFVSGNCDVVIGIVNNTVYDPLQPELDSFKEELDKYFKNHTSPDVDLGDISGINASVVNIQKEIDRLNEVAKNLNESLIDLQELGKYEQYIKWPWYIWLGFIAGLIAIVMVTIMLCCMTSCCSCLKGCCSCGSCCKFDEDDSEPVLKGVKLHYT

SEQ ID NO: 1252 - protein, 1273 aa, Artificial Sequence
  SARS-CoV-2/USA/WA-UW292/2020__EPI_ISL_418077 spike protein (1-1273)(T874C_S1055C)
MFVFLVLLPLVSSQCVNLTTRTQLPPAYTNSFTRGVYYPDKVFRSSVLHSTQDLFLPFFSNVTWFHAIHVSGTNGTKRFDNPVLPFNDGVYFASTEKSNIIRGWIFGTTLDSKTQSLLIVNNATNVVIKVCEFQFCNDPFLGVYYHKNNKSWMESEFRVYSSANNCTFEYVSQPFLMDLEGKQGNFKNLREFVFKNIDGYFKIYSKHTPINLVRDLPQGFSALEPLVDLPIGINITRFQTLLALHRSYLTPGDSSSGWTAGAAAYYVGYLQPRTFLLKYNENGTITDAVDCALDPLSETKCTLKSFTVEKGIYQTSNFRVQPTESIVRFPNITNLCPFGEVFNATRFASVYAWNRKRISNCVADYSVLYNSASFSTFKCYGVSPTKLNDLCFTNVYADSFVIRGDEVRQIAPGQTGKIADYNYKLPDDFTGCVIAWNSNNLDSKVGGNYNYLYRLFRKSNLKPFERDISTEIYQASSTPCNGVEGFNCYFPLQSYGFQPTNGVGYQPYRVVVLSFELLHAPATVCGPKKSTNLVKNKCVNFNFNGLTGTGVLTESNKKFLPFQQFGRDIADTTDAVRDPQTLEILDITPCSFGGVSVITPGTNTSNQVAVLYQDVNCTEVPVAIHADQLTPTWRVYSTGSNVFQTRAGCLIGAEHVNNSYECDIPIGAGICASYQTQTNSPRRARSVASQSIIAYTMSLGAENSVAYSNNSIAIPTNFTISVTTEILPVSMTKTSVDCTMYICGDSTECSNLLLQYGSFCTQLNRALTGIAVEQDKNTQEVFAQVKQIYKTPPIKDFGGFNFSQILPDPSKPSKRSFIEDLLFNKVTLADAGFIKQYGDCLGDIAARDLICAQKFNGLTVLPPLLTDEMIAQYCSALLAGTITSGWTFGAGAALQIPFAMQMAYRFNGIGVTQNVLYENQKLIANQFNSAIGKIQDSLSSTASALGKLQDVVNQNAQALNTLVKQLSSNFGAISSVLNDILSRLDKVEAEVQIDRLITGRLQSLQTYVTQQLIRAAEIRASANLAATKMSECVLGQSKRVDFCGKGYHLMSFPQCAPHGVVFLHVTYVPAQEKNFTTAPAICHDGKAHFPREGVFVSNGTHWFVTQRNFYEPQIITTDNTFVSGNCDVVIGIVNNTVYDPLQPELDSFKEELDKYFKNHTSPDVDLGDISGINASVVNIQKEIDRLNEVAKNLNESLIDLQELGKYEQYIKWPWYIWLGFIAGLIAIVMVTIMLCCMTSCCSCLKGCCSCGSCCKFDEDDSEPVLKGVKLHYT

SEQ ID NO: 1253 - protein, 1273 aa, Artificial Sequence
  SARS-CoV-2/Iceland/192/2020__EPI_ISL_417819 spike protein (1-1273)(T874C_S1055C)
MFVFFVLLPLVSSQCVNLTTRTQLPPAYTNSFTRGVYYPDKVFRSSVLHSTQDLFLPFFSNVTWFHAIHVSGTNGTKRFDNPVLPFNDGVYFASTEKSNIIRGWIFGTTLDSKTQSLLIVNNATNVVIKVCEFQFCNDPFLGVYYHKNNKSWMESEFRVYSSANNCTFEYVSQPFLMDLEGKQGNFKNLREFVFKNIDGYFKIYSKHTPINLVRDLPQGFSALEPLVDLPIGINITRFQTLLALHRSYLTPGDSSSGWTAGAAAYYVGYLQPRTFLLKYNENGTITDAVDCALDPLSETKCTLKSFTVEKGIYQTSNFRVQPTESIVRFPNITNLCPFGEVFNATRFASVYAWNRKRISNCVADYSVLYNSASFSTFKCYGVSPTKLNDLCFTNVYADSFVIRGDEVRQIAPGQTGKIADYNYKLPDDFTGCVIAWNSNNLDSKVGGNYNYLYRLFRKSNLKPFERDISTEIYQAGSTPCNGVEGFNCYFPLQSYGFQPTNGVGYQPYRVVVLSFELLHAPATVCGPKKSTNLVKNKCVNFNFNGLTGTGVLTESNKKFLPFQQFGRDIADTTDAVRDPQTLEILDITPCSFGGVSVITPGTNTSNQVAVLYQGVNCTEVPVAIHADQLTPTWRVYSTGSNVFQTRAGCLIGAEHVNNSYECDIPIGAGICASYQTQTNSPRRARSVASQSIIAYTMSLGAENSVAYSNNSIAIPTNFTISVTTEILPVSMTKTSVDCTMYICGDSTECSNLLLQYGSFCTQLNRALTGIAVEQDKNTQEVFAQVKQIYKTPPIKDFGGFNFSQILPDPSKPSKRSFIEDLLFNKVTLADAGFIKQYGDCLGDIAARDLICAQKFNGLTVLPPLLTDEMIAQYCSALLAGTITSGWTFGAGAALQIPFAMQMAYRFNGIGVTQNVLYENQKLIANQFNSAIGKIQDSLSSTASALGKLQDVVNQNAQALNTLVKQLSSNFGAISSVLNDILSRLDKVEAEVQIDRLITGRLQSLQTYVTQQLIRAAEIRASANLAATKMSECVLGQSKRVDFCGKGYHLMSFPQCAPHGVVFLHVTYVPAQEKNFTTAPAICHDGKAHFPREGVFVSNGTHWFVTQRNFYEPQIITTDNTFVSGNCDVVIGIVNNTVYDPLQPELDSFKEELDKYFKNHTSPDVDLGDISGINASVVNIQKEIDRLNEVAKNLNESLIDLQELGKYEQYIKWPWYIWLGFIAGLIAIVMVTIMLCCMTSCCSCLKGCCSCGSCCKFDEDDSEPVLKGVKLHYT

SEQ ID NO: 1254 - protein, 1273 aa, Artificial Sequence
  SARS-CoV-2/Belgium/ULG-6939/2020__EPI_ISL_417020 spike protein (1-1273)(T874C_S1055C)
MFVFLVLLPLVSSQCVNLTTRTQLPPAYTNSFTRGVYYPDKVFRSSVLHSTQDLFLPFFSNVTWFHAIHVSGTNGTKRFDNPVLPFNDGVYFASTEKSNIIRGWIFGTTLDSKTQSLLIVNNATNVVIKVCEFQFCNDPFLGVYYHKNNKSWMESEFRVYSSANNCTFEYVSQPFLMDLEGKQGNFKNLREFVFKNIDGYFKIYSKHTPINLVRDLPQGFSALEPLVDLPIGINITRFQTLLALHRSYLTPGDSSSGWTAGAAAYYVGYLQPRTFLLKYNENGTITDAVDCALDPLSETKCTLKSFTVEKGIYQTSNFRVQPTESIVRFPNITNLCPFGEVFNATRFASVYAWNRKRISNCVADYSVLYNSASFSTFKCYGVSPTKLNDLCFTNVYADSFVIRGDEVRQIAPGQTGKIADYNYKLPDDFTGCVIAWNSNNLDSKVGGNYNYLYRLFRKSNLKPFERDISTEIYQAGSTPCNGVEGFNCYFPLQSYGFQPTNGVGYQPYRVVVLSFELLHAPATVCGPKKSTNLVKNKCVNFNFNGLTGTGVLTESNKKFLPFQQFGRDIADTTDAVRDPQTLEILDITPCSFGGVSVITPGTNTSNQVAVLYQGVNCTEVPVAIHADQLTPTWRVYSTGSNVFQTRAGCLIGAEHVNNSYECDIPIGAGICASYQTQTNSPRRARSVASQSIIAYTMSLGAENSVVYSNNSIAIPTNFTISVTTEILPVSMTKTSVDCTMYICGDSTECSNLLLQYGSFCTQLNRALTGIAVEQDKNTQEVFAQVKQIYKTPPIKDFGGFNFSQILPDPSKPSKRSFIEDLLFNKVTLADAGFIKQYGDCLGDIAARDLICAQKFNGLTVLPPLLTDEMIAQYCSALLAGTITSGWTFGAGAALQIPFAMQMAYRFNGIGVTQNVLYENQKLIANQFNSAIGKIQDSLSSTASALGKLQDVVNQNAQALNTLVKQLSSNFGAISSVLNDILSRLDKVEAEVQIDRLITGRLQSLQTYVTQQLIRAAEIRASANLAATKMSECVLGQSKRVDFCGKGYHLMSFPQCAPHGVVFLHVTYVPAQEKNFTTAPAICHDGKAHFPREGVFVSNGTHWFVTQRNFYEPQIITTDNTFVSGNCDVVIGIVNNTVYDPLQPELDSFKEELDKYFKNHTSPDVDLGDISGINASVVNIQKEIDRLNEVAKNLNESLIDLQELGKYEQYIKWPWYIWLGFIAGLIAIVMVTIMLCCMTSCCSCLKGCCSCGSCCKFDEDDSEPVLKGVKLHYT

SEQ ID NO: 1255 - protein, 1273 aa, Artificial Sequence
  SARS-CoV-2/France/HF2496/2020__EPI_ISL_418231 spike protein (1-1273)(T874C_S1055C)
MFVFLVLLPLVSSQCVNLTTRTQLPPAYTNSFTRGVYYPDKVFRSSVLHSTQDLFLPFFSNVTWFHAIHVSGTNGTKRFDNPVLPFNDGVYFASTEKSNIIRGWIFGTTLDSKTQSLLIVNNATNVVIKVCEFQFCNDPFLGVYYHKNNKSWMESEFRVYSSANNCTFEYVSQPFLMDLEGKQGNFKNLREFVFKNIDGYFKIYSKHTPINLVRDLPQGFSALEPLVDLPIGINITRFQTLLALHRSYLTPGDSSSGWTAGAAAYYVGYLQPRTFLLKYNENGTITDAVDCALDPLSETKCTLKSFTVEKGIYQTSNFRVQPTESIVRFPNITNLCPFGEVFNATRFASVYAWNRKRISNCVADYSVLYNSASFSTFKCYGVSPTKLNDLCFTNVYADSFVIRGDEVRQIAPGQTGKIADYNYKLPDDFTGCVIAWNSNNLDSKVGGNYNYLYRLFRKSNLKPFERDISTEIYQAGSTPCNGVEGFNCYFPLQSYGFQPTNGVGYQPYRVVVLSFELLHAPATVCGPKKSTNLVKNKCVNFNFNGLTGTGVLTESNKKFLPFQQFGRDIADTTDAVRDPQTLEILDITPCSFGGVSVITPGTNTSNQVAVLYQGVNCTEVPVAIHADQLTPTWRVYSTGSNVFQTRAGCLIGAEHVNNSYECDIPIGAGICASYQTQTNSPRRARSVASQSIIAYTMSLGAENSVAYSNNSIAIPTNFTISVTTEILPVSMTKTSVDCTMYICGDSTECSNLLLQYGSFCTQLNRALTGIAVEQDKNTQEVFAQVKQIYKTPPIKDFGGFNFSQILPDPSKPSKRSFIEDLLFNKVTLADAGFIKQYGDCLGDIVARDLICAQKFNGLTVLPPLLTDEMIAQYCSALLAGTITSGWTFGAGAALQIPFAMQMAYRFNGIGVTQNVLYENQKLIANQFNSAIGKIQDSLSSTASALGKLQDVVNQNAQALNTLVKQLSSNFGAISSVLNDILSRLDKVEAEVQIDRLITGRLQSLQTYVTQQLIRAAEIRASANLAATKMSECVLGQSKRVDFCGKGYHLMSFPQCAPHGVVFLHVTYVPAQEKNFTTAPAICHDGKAHFPREGVFVSNGTHWFVTQRNFYEPQIITTDNTFVSGNCDVVIGIVNNTVYDPLQPELDSFKEELDKYFKNHTSPDVDLGDISGINASVVNIQKEIDRLNEVAKNLNESLIDLQELGKYEQYIKWPWYIWLGFIAGLIAIVMVTIMLCCMTSCCSCLKGCCSCGSCCKFDEDDSEPVLKGVKLHYT

SEQ ID NO: 1256 - protein, 1273 aa, Artificial Sequence
  SARS-CoV-2/USA/WA-UW291/2020__EPI_ISL_418076 spike protein (1-1273)(T874C_S1055C)
MFVFLVLLPLVSSQCVNLTTRTQLPPAYTNSFTRGVYYPDKVFRSSVLHSTQDLFLPFFSNVTWFHAIHVSGTNGTKRFDNPVLPFNDGVYFASTEKSNIIRGWIFGTTLDSKTQSLLIVNNATNVVIKVCEFQFCNDPFLGVYYHKNNKSWMESEFRVYSSANNCTFEYVSQPFLMDLEGKQGNFKNLREFVFKNIDGYFKIYSKHTPINLVRDLPQGFSALEPLVDLPIGINITRFQTLLALHRSYLTPGDSSSGWTAGAAAYYVGYLQPRTFLLKYNENGTITDAVDCALDPLSETKCTLKSFTVEKGIYQTSNFRVQPTESIVRFPNITNLCPFGEVFNATRFASVYAWNRKRISNCVADYSVLYNSASFSTFKCYGVSPTKLNDLCFTNVYADSFVIRGDEVRQIAPGQTGKIADYNYKLPDDFTGCVIAWNSNNLDSKVGGNYNYLYRLFRKSNLKPFERDISTEIYQAGSTPCNGVEGFNCYFPLQSYGFQPTNGVGYQPYRVVVLSFELLHAPATVCGPKKSTNLVKNKCVNFNFNGLTGTGVLTESNKKFLPFQQFGRDIADTTDAVRDPQTLEILDITPCSFGGVSVITPGTNTSNQVAVLYQGVNCTEVPVAIHADQLTPTWRVYSTGSNVFQTRAGCLIGAEHVNNSYECDIPIGAGICASYQTQTNSPRRARSVASQSIIAYTMSLGAENSVAYSNNSIAIPTNFTISVTTEILPVSMTKTSVDCTMYICGDSTECSNLLLQYGSFCTQLNRALTGIAVEQDKNTQEVFAQVKQIYKTPPIKDFGGFNFSQILPDPSKPSKRSFIEDLLFNKVTLADAGFIKQYGDCLGDIAARDLICAQKFNGLTVLPPLLTDEMIAQYCSALLAGTITSGWTFGAGAALQIPFAMQMAYRFNGIGVTQNVLYENQKLIANQFNSAIGKIQYSLSSTASALGKLQDVVNQNAQALNTLVKQLSSNFGAISSVLNDILSRLDKVEAEVQIDRLITGRLQSLQTYVTQQLIRAAEIRASANLAATKMSECVLGQSKRVDFCGKGYHLMSFPQCAPHGVVFLHVTYVPAQEKNFTTAPAICHDGKAHFPREGVFVSNGTHWFVTQRNFYEPQIITTDNTFVSGNCDVVIGIVNNTVYDPLQPELDSFKEELDKYFKNHTSPDVDLGDISGINASVVNIQKEIDRLNEVAKNLNESLIDLQELGKYEQYIKWPWYIWLGFIAGLIAIVMVTIMLCCMTSCCSCLKGCCSCGSCCKFDEDDSEPVLKGVKLHYT

SEQ ID NO: 1257 - protein, 1273 aa, Artificial Sequence
  SARS-CoV-2/Portugal/PT0034/2020__EPI_ISL_418019 spike protein (1-1273)(T874C_S1055C)
MFVFLVLLPLVSSQCVNLTTRTQLPPAYTNSFTRGVYYPDKVFRSSVLHSTQDLFLPFFSNVTWFHAIHVSGTNGTKRFDNPVLPFNDGVYFASTEKSNIIRGWIFGTTLDSKTQSLLIVNNATNVVIKVCEFQFCNDPFLGVYYHKNNKSWMESEFRVYSSANNCTFEYVSQPFLMDLEGKQGNFKNLREFVFKNIDGYFKIYSKHTPINLVRDLPQGFSALEPLVDLPIGINITRFQTLLALHRSYLTPGDSSSGWTAGAAAYYVGYLQPRTFLLKYNENGTITDAVDCALDPLSETKCTLKSFTVEKGIYQTSNFRVQPTESIVRFPNITNLCPFGEVFNATRFASVYAWNRKRISNCVADYSVLYNSASFSTFKCYGVSPTKLNDLCFTNVYADSFVIRGDEVRQIAPGQTGKIADYNYKLPDDFTGCVIAWNSNNLDSKVGGNYNYLYRLFRKSNLKPFERDISTEIYQAGSTPCNGVEGFNCYFPLQSYGFQPTNGVGYQPYRVVVLSFELLHAPATVCGPKKSTNLVKNKCVNFNFNGLTGTGVLTESNKKFLPFQQFGRDIADTTDAVRDPQTLEILDITPCSFGGVSVITPGTNTSNQVAVLYQGVNCTEVPVAIHADQLTPTWRVYSTGSNVFQTRAGCLIGAEHVNNSYECDIPIGAGICASYQTQTNSPRRARSVASQSIIAYTMSLGAENSVAYSNNSIAIPTNFTISVTTEILPVSMTKTSVDCTMYICGDSTECSNLLLQYGSFCTQLNRALTGIAVEQDKNTQEVFAQVKQIYKTPPIKDFGGFNFSQILPDPSKPSKRSFIEDLLFNKVTLADAGFIKQYGDCLGDIAARDLICAQKFNGLTVLPPLLTDEMIAQYCSALLAGTITSGWTFGAGAALQIPFAMQMAYRFNGIGVTQNVLYENQKLIANQFNSAIGKIQDSLSSTASALGKLQDVVNQNAQALNTLVKQLSSNFGAISSVLNDILSRLDKVEAEVQIDRLITGRLQSLQTYVTQQLIRAAEIRASANLAATKMSECVLGQSKRVDFCGKGYHLMSFPQCAPHGVVFLHVTYVPAQEKNFTTAPAICHDGKAHFPREGVFVSNGTHWFVTQRNFYEPQIITTDNTFVSGNCDVVIGIVNNTVYDPLQPELDSFKEELDKYFKNHTSPDVDLGDISGINASVVNIQKEIDRLNEVAKNLNESLIDLQELGKYEQYIKWPWYIWLGFIAGLIAIVMVTIMLCCITSCCSCLKGCCSCGSCCKFDEDDSEPVLKGVKLHYT

SEQ ID NO: 1258 - protein, 1273 aa, Artificial Sequence
  SARS-CoV-2/Iceland/202/2020__EPI_ISL_417750 spike protein (1-1273)(T874C_S1055C)
MFVFLVLLPLVSSQCVNLTTRTQLPPAYTNSFTRGVYYPDKVFRSSVLHSTQDLFLPFFSNVTWFHAIHVSGTNGTKRFDNPVLPFNDGVYFASTEKSNIIRGWIFGTTLDSKTQSLLIVNNATNVVIKVCEFQFCNDPFLGVYYHKNNKSWMESEFRVYSSANNCTFEYVSQPFLMDLEGKQGNFKNLREFVFKNIDGYFKIYSKHTPINLVRDLPQGFSALEPLVDLPIGINITRFQTLLALHRSYLTPGDSSSGWTAGAAAYYVGYLQPRTFLLKYNENGTITDAVDCALDPLSETKCTLKSFTVEKGIYQTSNFRVQPTESIVRFPNITNLCPFGEVFNATRFASVYAWNRKRISNCVADYSVLYNSASFSTFKCYGVSPTKLNDLCFTNVYADSFVIRGDEVRQIAPGQTGKIADYNYKLPDDFTGCVIAWNSNNLDSKVGGNYNYLYRLFRKSNLKPFERDISTEIYQAGSTPCNGVEGFNCYFPLQSYGFQPTNGVGYQPYRVVVLSFELLHAPATVCGPKKSTNLVKNKCVNFNFNGLTGTGVLTESNKKFLPFQQFGRDIADTTDAVRDPQTLEILDITPCSFGGVSVITPGTNTSNQVAVLYQDVNCTEVPVAIHADQLTPTWRVYSTGSNVFQTRAGCLIGAEHVNNSYECDIPIGAGICASYQTQTNSPRRARSVASQSIIAYTMSLGAENSVAYSNNSIAIPTNFTISVTTEILPVSMTKTSVDCTMYICGDSTECSNLLLQYGSFCTQLNRALTGIAVEQDKNTQEVFAQVKQIYKTPPIKDFGGFNFSQILPDPSKPSKRSFIEDLLFNKVTLADAGFIKQYGDCLGDIAARDLICAQKFNGLTVLPPLLTDEMIAQYCSALLAGTITSGWTFGAGAALQIPFAMQMAYRFNGIGVTQNVLYENQKLIANQFNSAIGKIQDSLSSTASALGKLQDVVNQNAQALNTLVKQLSSNFGAISSVLNDILSRLDKVEAEVQIDRLITGRLQSLQTYVTQQLIRAAEIRASANLAATKMSECVLGQSKRVDFCGKGYHLMSFPQCAPHGVVFLHVTYVPAQEKNFTTAPAICHDGKAHFPREGVFVSNGTHWFVTQRNFYEPQIITTDNTFVSGNCDVVIGIVNNTVYDPLQPELDSFKEELDKYFKNHTSPDVDLGDIPGINASVVNIQKEIDRLNEVAKNLNESLIDLQELGKYEQYIKWPWYIWLGFIAGLIAIVMVTIMLCCMTSCCSCLKGCCSCGSCCKFDEDDSEPVLKGVKLHYT

SEQ ID NO: 1259 - protein, 1273 aa, Artificial Sequence
  SARS-CoV-2/USA/WA-UW261/2020__EPI_ISL_418046 spike protein (1-1273)(T874C_S1055C)
MFVFLVLLPLVSSQCVNLTTRTQLPPAYTNSFTRGVYYPDKVFRSSVLHSTQDLFLPFFSNVTWFHAIHVSGTNGTKRFDNPVLPFNDGVYFASTEKSNIIRGWIFGTTLDSKTQSLLIVNNATNVVIKVCEFQFCNDPFLGVYYHKNNKSWMESEFRVYSSANNCTFEYVSQPFLMDLEGKQGNFKNLREFVFKNIDGYFKIYSKHTPINLVRDLPQGFSALEPLVDLPIGINITRFQTLLALHRSYLTPGDSSSGWTAGAAAYYVGYLQPRTFLLKYNENGTITDAVDCALDPLSETKCTLKSFTVEKGIYQTSNFRVQPTESIVRFPNITNLCPFGEVFNATRFTSVYAWNRKRISNCVADYSVLYNSASFSTFKCYGVSPTKLNDLCFTNVYADSFVIRGDEVRQIAPGQTGKIADYNYKLPDDFTGCVIAWNSNNLDSKVGGNYNYLYRLFRKSNLKPFERDISTEIYQAGSTPCNGVEGFNCYFPLQSYGFQPTNGVGYQPYRVVVLSFELLHAPATVCGPKKSTNLVKNKCVNFNFNGLTGTGVLTESNKKFLPFQQFGRDIADTTDAVRDPQTLEILDITPCSFGGVSVITPGTNTSNQVAVLYQDVNCTEVPVAIHADQLTPTWRVYSTGSNVFQTRAGCLIGAEHVNNSYECDIPIGAGICASYQTQTNSPRRARSVASQSIIAYTMSLGAENSVAYSNNSIAIPTNFTISVTTEILPVSMTKTSVDCTMYICGDSTECSNLLLQYGSFCTQLNRALTGIAVEQDKNTQEVFAQVKQIYKTPPIKDFGGFNFSQILPDPSKPSKRSFIEDLLFNKVTLADAGFIKQYGDCLGDIAARDLICAQKFNGLTVLPPLLTDEMIAQYCSALLAGTITSGWTFGAGAALQIPFAMQMAYRFNGIGVTQNVLYENQKLIANQFNSAIGKIQDSLSSTASALGKLQDVVNQNAQALNTLVKQLSSNFGAISSVLNDILSRLDKVEAEVQIDRLITGRLQSLQTYVTQQLIRAAEIRASANLAATKMSECVLGQSKRVDFCGKGYHLMSFPQCAPHGVVFLHVTYVPAQEKNFTTAPAICHDGKAHFPREGVFVSNGTHWFVTQRNFYEPQIITTDNTFVSGNCDVVIGIVNNTVYDPLQPELDSFKEELDKYFKNHTSPDVDLGDISGINASVVNIQKEIDRLNEVAKNLNESLIDLQELGKYEQYIKWPWYIWLGFIAGLIAIVMVTIMLCCMTSCCSCLKGCCSCGSCCKFDEDDSEPVLKGVKLHYT

SEQ ID NO: 1260 - protein, 1273 aa, Artificial Sequence
  SARS-CoV-2/Portugal/PT0035/2020__EPI_ISL_418020 spike protein (1-1273)(T874C_S1055C)
MFVFLVLLPLVSSQCVNLTTRTQLPPAYTNSFTRGVYYPDKVFRSSVLHSTQDLFLPFFSNVTWFHAIHVSGTNGTKRFDNPVLPFNDGVYFASTEKSNIIRGWIFGTTLDSKTQSLLIVNNATNVVIKVCEFQFCNDPFLGVYYHKNNKSWMESEFRVYSSANNCTFEYVSQPFLMDLEGKQGNFKNLREFVFKNIDGYFKIYSKHTPINLVRDLPQGFSALEPLVDLPIGINITRFQTLLALHRSYLTPGDSSSGWTAGAAAYYVGYLQPRTFLLKYNENGTITDAVDCALDPLSETKCTLKSFTVEKGIYQTSNFRVQPTESIVRFPNITNLCPFGEVFNATRFASVYAWNRKRISNCVADYSVLYNSASFSTFKCYGVSPTKLNDLCFTNVYADSFVIRGDEVRQIAPGQTGKIADYNYKLPDDFTGCVIAWNSNNLDSKVGGNYNYLYRLFRKSNLKPFERDISTEIYQAGSTPCNGVEGFNCYFPLQSYGFQPTNGVGYQPYRVVVLSFELLHAPATVCGPKKSTNLVKNKCVNFNFNGLTGTGVLTESNKKFLPFQQFGRDIADTTDAVRDPQTLEILDITPCSFGGVSVITPGTNTSNQVAVLYQDVNCTEVPVAIHADQLTPTWRVYSTGSNVFQTRAGCLIGAEHVNNSYECDIPIGAGICASYQTQTNSPRRARSVASQSIIAYTMSLGAENSVAYSNNSIAIPTNFTISVTTEILPVSMTKTSVDCTMYICGDSTECSNLLLQYGSFCTQLNRALTGIAVEQDKNTQEVFAQVKQIYKTPPIKDFGGFNFSQILPDPSKPSKRSFIEDLLFNKVTLADAGFIKQYGDCLGDISARDLICAQKFNGLTVLPPLLTDEMIAQYCSALLAGTITSGWTFGAGAALQIPFAMQMAYRFNGIGVTQNVLYENQKLIANQFNSAIGKIQDSLSSTASALGKLQDVVNQNAQALNTLVKQLSSNFGAISSVLNDILSRLDKVEAEVQIDRLITGRLQSLQTYVTQQLIRAAEIRASANLAATKMSECVLGQSKRVDFCGKGYHLMSFPQCAPHGVVFLHVTYVPAQEKNFTTAPAICHDGKAHFPREGVFVSNGTHWFVTQRNFYEPQIITTDNTFVSGNCDVVIGIVNNTVYDPLQPELDSFKEELDKYFKNHTSPDVDLGDISGINASVVNIQKEIDRLNEVAKNLNESLIDLQELGKYEQYIKWPWYIWLGFIAGLIAIVMVTIMLCCMTSCCSCLKGCCSCGSCCKFDEDDSEPVLKGVKLHYT

SEQ ID NO: 1261 - protein, 1273 aa, Artificial Sequence
  SARS-CoV-2/USA/NY-NYUMC7/2020__EPI_ISL_418192 spike protein (1-1273)(T874C_S1055C)
MFVFLVLLPLVSSQCVNLTTRTQLPPAYTNSFTRGVYYPDKVFRSSVLHSTQDLFLPFFSNVTWFHAIHVSGTNGTKRFDNPVLPFNDGVYFASTEKSNIIRGWIFGTTLDSKTQSLLIVNNATNVVIKVCEFQFCNDPFLGVYHHKNNKSWMESEFRVYSSANNCTFEYVSQPFLMDLEGKQGNFKNLREFVFKNIDGYFKIYSKHTPINLVRDLPQGFSALEPLVDLPIGINITRFQTLLALHRSYLTPGDSSSGWTAGAAAYYVGYLQPRTFLLKYNENGTITDAVDCALDPLSETKCTLKSFTVEKGIYQTSNFRVQPTESIVRFPNITNLCPFGEVFNATRFASVYAWNRKRISNCVADYSVLYNSASFSTFKCYGVSPTKLNDLCFTNVYADSFVIRGDEVRQIAPGQTGKIADYNYKLPDDFTGCVIAWNSNNLDSKVGGNYNYLYRLFRKSNLKPFERDISTEIYQAGSTPCNGVEGFNCYFPLQSYGFQPTNGVGYQPYRVVVLSFELLHAPATVCGPKKSTNLVKNKCVNFNFNGLTGTGVLTESNKKFLPFQQFGRDIADTTDAVRDPQTLEILDITPCSFGGVSVITPGTNTSNQVAVLYQGVNCTEVPVAIHADQLTPTWRVYSTGSNVFQTRAGCLIGAEHVNNSYECDIPIGAGICASYQTQTNSPRRARSVASQSIIAYTMSLGAENSVAYSNNSIAIPTNFTISVTTEILPVSMTKTSVDCTMYICGDSTECSNLLLQYGSFCTQLNRALTGIAVEQDKNTQEVFAQVKQIYKTPPIKDFGGFNFSQILPDPSKPSKRSFIEDLLFNKVTLADAGFIKQYGDCLGDIAARDLICAQKFNGLTVLPPLLTDEMIAQYCSALLAGTITSGWTFGAGAALQIPFAMQMAYRFNGIGVTQNVLYENQKLIANQFNSAIGKIQDSLSSTASALGKLQDVVNQNAQALNTLVKQLSSNFGAISSVLNDILSRLDKVEAEVQIDRLITGRLQSLQTYVTQQLIRAAEIRASANLAATKMSECVLGQSKRVDFCGKGYHLMSFPQCAPHGVVFLHVTYVPAQEKNFTTAPAICHDGKAHFPREGVFVSNGTHWFVTQRNFYEPQIITTDNTFVSGNCDVVIGIVNNTVYDPLQPELDSFKEELDKYFKNHTSPDVDLGDISGINASVVNIQKEIDRLNEVAKNLNESLIDLQELGKYEQYIKWPWYIWLGFIAGLIAIVMVTIMLCCMTSCCSCLKGCCSCGSCCKFDEDDSEPVLKGVKLHYT

SEQ ID NO: 1262 - protein, 1273 aa, Artificial Sequence
  SARS-CoV-2/Iceland/189/2020__EPI_ISL_417709 spike protein (1-1273)(T874C_S1055C)
MFVFLVLLPLVSSQCVNLTTRTQLPPAYTNSFTRGVYYPDKVFRSSVLHSTQDLFLPFFSNVTWFHAIHVSGTNGTKRFDNPVLPFNDGVYFASTEKSNIIRGWIFGTTLDSKTQSLLIVNNATNVVIKVCEFQFCNDPFLGVYYHKNNKSWMESEFRVYSSANNCTFEYVSQPFLMDLEGKQGNFKNLREFVFKNIDGYFKIYSKHTPINLVRDLPQGFSALEPLVDLPIGINITRFQTLLALHRSYLTPGDSSSGWTAGAAAYYVGYLQPRTFLLKYNENGTITDAVDCALDPLSETKCTLKSFTVEKGIYQTSNFRVQPTESIVRFPNITNLCPFGEVFNATRFASVYAWNRKRISNCVADYSVLYNSASFSTFKCYGVSPTKLNDLCFTNVYADSFVIRGDEVRQIAPGQTGKIADYNYKLPDDFTGCVIAWNSNNLDSKVGGNYNYLYRLFRKSNLKPFERDISTEIYQAGSTPCNGVEGFNCYFPLQSYGFQPTNGVGYQPYRVVVLSFELLHAPATVCGPKKSTNLVKNKCVNFNFNGLTGTGVLTESNKKFLPFQQFGRDIADTTDAVRDPQTLEILDITPCSFGGVSVITPGTNTSNQVAVLYQGVNCTEVPVAIHADQLTPTWRVYSTGSNVFQTRAGCLIGAEHVNNSYECDIPIGAGICASYQTQTNSPRRARSVASQSIIAYTMSLGAENSVAYSNNSIAIPTNFTISVTTEILPVSMTKTSVDCTMYICGDSTECSNLLLQYGSFCTQLNRALTGIAVEQDKNTQEVFAQVKQIYKTPPIKDFGGFNFSQILPDPSKPSKRSFIEDLLFNKVTLADAGFTKQYGDCLGDIAARDLICAQKFNGLTVLPPLLTDEMIAQYCSALLAGTITSGWTFGAGAALQIPFAMQMAYRFNGIGVTQNVLYENQKLIANQFNSAIGKIQDSLSSTASALGKLQDVVNQNAQALNTLVKQLSSNFGAISSVLNDILSRLDKVEAEVQIDRLITGRLQSLQTYVTQQLIRAAEIRASANLAATKMSECVLGQSKRVDFCGKGYHLMSFPQCAPHGVVFLHVTYVPAQEKNFTTAPAICHDGKAHFPREGVFVSNGTHWFVTQRNFYEPQIITTDNTFVSGNCDVVIGIVNNTVYDPLQPELDSFKEELDKYFKNHTSPDVDLGDISGINASVVNIQKEIDRLNEVAKNLNESLIDLQELGKYEQYIKWPWYIWLGFIAGLIAIVMVTIMLCCMTSCCSCLKGCCSCGSCCKFDEDDSEPVLKGVKLHYT

SEQ ID NO: 1263 - protein, 1273 aa, Artificial Sequence
  SARS-CoV-2/Australia/NSW56/2020__EPI_ISL_417408 spike protein (1-1273)(T874C_S1055C)
MFVFLVLLPLVSSQCVNLTTRTQLPPAYTNSFTRGVYYPDKVFRSSVLHSTQDLFLPFFSNVTWFHAIHVSGTNGTKRFDNPVLPFNDGVYFASTEKSNIIRGWIFGTTLDSKTQSLLIVNNATNVVIKVCEFQFCNDPFLGVYYHKNNKSWMESEFRVYSSANNCTFEYVSQPFLMDLEGKQGNFKNLREFVFKNIDGYFKIYSKHTPINLVRDLPQGFSALEPLVDLPIGINITRFQTLLALHRSYLTPGDSSSGWTAGAAAYYVGYLQPRTFLLKYNENGTITDAVDCALDPLSETKCTLKSFTVEKGIYQTSNFRVQPTESIVRFPNITNLCPFGEVFNATRFASVYAWNRKRISNCVADYSVLYNSASFSTFKCYGVSPTKLNDLCFTNVYADSFVIRGDEVRQIAPGQTGKIADYNYKLPDDFTGCVIAWNSNNLDSKVGGNYNYLYRLFRKSNLKPFERDISTEIYQAGSTPCNGVEGFNCYFPLQSYGFQPTNGVGYQPYRVVVLSFELLHAPATVCGPKKSTNLVKNKCVNFNFNGLTGTGVLTESNKKFLPFQQFGRDIADTTDAVRDPQTLEILDITPCSFGGVSVITPGTNTSNQVAVLYQDVNCTEVPVAIHADQLTPTWRVYSTGSNVFQTRAGCLIGAEHVNNSYECDIPIGAGICASYQTQTNSPRRARSVASQSIIAYTMSLGAENSVAYSNNSIAIPTNFTISVTTEILPVSMTKTSVDCTMYICGDSTECSNLLLQYGSFCTQLNRALTGIAVEQDKNTQEVFAQVKQIYKTPPIKDFGGFNFSQILPDSSKPSKRSFIEDLLFNKVTLADAGFIKQYGDCLGDIAARDLICAQKFNGLTVLPPLLTDEMIAQYCSALLAGTITSGWTFGAGAALQIPFAMQMAYRFNGIGVTQNVLYENQKLIANQFNSAIGKIQDSLSSTASALGKLQDVVNQNAQALNTLVKQLSSNFGAISSVLNDILSRLDKVEAEVQIDRLITGRLQSLQTYVTQQLIRAAEIRASANLAATKMSECVLGQSKRVDFCGKGYHLMSFPQCAPHGVVFLHVTYVPAQEKNFTTAPAICHDGKAHFPREGVFVSNGTHWFVTQRNFYEPQIITTDNTFVSGNCDVVIGIVNNTVYDPLQPELDSFKEELDKYFKNHTSPDVDLGDISGINASVVNIQKEIDRLNEVAKNLNESLIDLQELGKYEQYIKWPWYIWLGFIAGLIAIVMVTIMLCCMTSCCSCLKGCCSCGSCCKFDEDDSEPVLKGVKLHYT

SEQ ID NO: 1264 - protein, 1273 aa, Artificial Sequence
  SARS-CoV-2/Iceland/280/2020__EPI_ISL_417608 spike protein (1-1273)(T874C_S1055C)
MFVFLVLLPLVSSQCVNLTTRTQLPPAYTNSFTRGVYYPDKVFRSSVLHSTQDLFLPFFSNVTWFHAIHVSGTNGTKRFDNPVLPFNDGVYFASTEKSNIIRGWIFGTTLDSKTQSLLIVNNATNVVIKVCEFQFCNDPFLGVYYHKNNKSWMESEFRVYSSANNCTFEYVSQPFLMDLEGKQGNFKNLREFVFKNIDGYFKIYSKHTPINLVRDLPQGFSALEPLVDLPIGINITRFQTLLALHRSYLTPGDSSSGWTAGAAAYYVGYLQPRTFLLKYNENGTITDAVDCALDPLSETKCTLKSFTVEKGIYQTSNFRVQPTESIVRFPNITNLCPFGEVFNATRFASVYAWNRKRISNCVADYSVLYNSASFSTFKCYGVSPTKLNDLCFTNVYADSFVIRGDEVRQIAPGQTGKIADYNYKLPDDFTGCVIAWNSNNLDSKVGGNYNYLYRLFRKSNLKPFERDISTEIYQAGSTPCNGVEGFNCYFPLQSYGFQPTNGVGYQPYRVVVLSFELLHAPATVCGPKKSTNLVKNKCVNFNFNGLTGTGVLTESNKKFLPFQQFGRDIADTTDAVRDPQTLEILDITPCSFGGVSVITPGTNTSNQVAVLYQGVNCTEVPVAIHADQLTPTWRVYSTGSNVFQTRAGCLIGAEHVNNSYECDIPIGAGICASYHTQTNSPRRARSVASQSIIAYTMSLGAENSVAYSNNSIAIPTNFTISVTTEILPVSMTKTSVDCTMYICGDSTECSNLLLQYGSFCTQLNRALTGIAVEQDKNTQEVFAQVKQIYKTPPIKDFGGFNFSQILPDPSKPSKRSFIEDLLFNKVTLADAGFIKQYGDCLGDIAARDLICAQKFNGLTVLPPLLTDEMIAQYCSALLAGTITSGWTFGAGAALQIPFAMQMAYRFNGIGVTQNVLYENQKLIANQFNSAIGKIQDSLSSTASALGKLQDVVNQNAQALNTLVKQLSSNFGAISSVLNDILSRLDKVEAEVQIDRLITGRLQSLQTYVTQQLIRAAEIRASANLAATKMSECVLGQSKRVDFCGKGYHLMSFPQCAPHGVVFLHVTYVPAQEKNFTTAPAICHDGKAHFPREGVFVSNGTHWFVTQRNFYEPQIITTDNTFVSGNCDVVIGIVNNTVYDPLQPELDSFKEELDKYFKNHTSPDVDLGDISGINASVVNIQKEIDRLNEVAKNLNESLIDLQELGKYEQYIKWPWYIWLGFIAGLIAIVMVTIMLCCMTSCCSCLKGCCSCGSCCKFDEDDSEPVLKGVKLHYT

SEQ ID NO: 1265 - protein, 1273 aa, Artificial Sequence
  SARS-CoV-2/Iceland/247/2020__EPI_ISL_417575 spike protein (1-1273)(T874C_S1055C)
MFVFLVLLPLVSSQCVNLTTRTQLPPAYTNSFTRGVYYPDKVFRSSVLHSTQDLFLPFFSNVTWFHAIHVSGTNGTKRFDNPVLPFNDGVYFASTEKSNIIRGWIFGTTLDSKTQSLLIVNNATNVVIKVCEFQFCNDPFLGVYYHKNNKSWMESEFRVYSSANNCTFEYVSQPFLMDLEGKQGNFKNLREFVFKNIDGYFKIYSKHTPINLVRDLPQGFSALEPLVDLPIGINITRFQTLLALHRSYLTPGDSSSGWTAGAAAYYVGYLQPRTFLLKYNENGTITDAVDCALDPLSETKCTLKSFTVEKGIYQTSNFRVQPTESIVRFPNITNLCPFGEVFNATRFASVYAWNRKRISNCVADYSVLYNSASFSTFKCYGVSPTKLNDLCFTNVYADSFVIRGDEVRQIAPGQTGKIADYNYKLPDDFTGCVIAWNSNNLDSKVGGNYNYLYRLFRKSNLKPFERDISTEIYQAGSTPCNGVEGFNCYFPLQSYGFQPTNGVGYQPYRVVVLSFELLHAPATVCGPKKSTNLVKNKCVNFNFNGLTGTGVLTESNKKFLPFQQFGRDIADTTDAVRDPQTLEILDITPCSFGGVSVITPGTNTSNQVAVLYQGVNCTEVPVAIHADQLTPTWRVYSTGSNVFQTRAGCLIGAEHVNNSYECDIPIGAGICASYQTQTNSPRRARSVASQSIIAYTMSLGAENSVAYSNNSIAIPTNFTISVTTEILPVSMTKTSVDCTMYICGDSTECSNLLLQYGSFCTQLNRALTGIAVEQDKNTQEVFAQVKQIYKTPPIKDFGGFNFSQILPDPSKPSKRSFIEDLLFNKVTLADAGFIKQYGDCLGDIAARDLICAQKFNGLTVLPPLLTDEMIAQYCSALLAGTITSGWTFGAGAALQIPFAMQMAYRFNGIGVTQNVLYENQKLIANQFNSAIGKIQDSLSSTASALGKLQDVVNQNAQALNTLVKQLSSNFGAISSVLNDILSRLDKVEAEVQIDRLITGRLQSLQTYVTQQLIRAAEIRASANLAATKMSECVLGQSKRVDFCGKGYHLMSFPQCAPHGVVFLHVTYVPAQEKNFTTAPAICHDGKAHFPREGVFVSNGTHWFVTQRNFYEPQIITTDNTFVSGNCDVVIGIVNNTVYDPLQPELDSFKEELDKYFKNHTSPDVDLGDISGINASVVNIQKEIDRLNEVAKNLNESLIDLQELGKYEQYIKWPWYIWLGFIAGLIAIVIVTIMLCCMTSCCSCLKGCCSCGSCCKFDEDDSEPVLKGVKLHYT

SEQ ID NO: 1266 - protein, 1273 aa, Artificial Sequence
  SARS-CoV-2/Iceland/238/2020__EPI_ISL_417566 spike protein (1-1273)(T874C_S1055C)
MFVFLVLLPLVSSQCVNLTTRTQLPPAYTNSFTRGVYYPDKVFRSSVLHSTQDLFLPFFSNVTWFHAIHVSGTNGTKRFDNPVLPFNDGVYFASTEKSNIIRGWIFGTTLDSKTQSLLIVNNATNVVIKVCEFQFCNDPFLGVYYHKNNKSWMESEFRVYSSANNCTFEYVSQPFLMDLEGKQGNFKNLREFVFKNIDGYFKIYSKHTPINLVRDLPQGFSALEPLVDLPIGINITRFQTLLALHRSYLTPGDSSSGWTAGAAAYYVGYLQPRTFLLKYNENGTITDAVDCALDPLSETKCTLKSFTVEKGIYQTSNFRVQPTESIVRFPNITNLCPFGEVFNATRFASVYAWNRKRISNCVADYSVLYNSASFSTFKCYGVSPTKLNDLCFTNVYADSFVIRGDEVRQIAPGQTGKIADYNYKLPDDFTGCVIAWNSNNLDSKVGGNYNYLYRLFRKSNLKPFERDISTEIYQAGSTPCNGVEGFNCYFPLQSYGFQPTNGVGYQPYRVVVLSFELLHAPATVCGPKKSTNLVKNKCVNFNFNGLTGTGVLTESNKKFLPFQQFGRDIADTTDAVRDPQTLEILDITPCSFGGVSVITPGTNTSNQVAVLYQGVNCTEVPVAIHADQLTPTWRVYSTGSNVFQTRAGCLIGAEHVNNSYECDIPIGAGICASYQTQTNSPRRARSVASQSIIAYTMSLGAENSVAYSNNSIAIPTNFTISVTTEILPVSMTKTSVDCTMYICGDSTECSNLLLQYGSFCTQLNRALTGIAVEQDKNTQEVFAQVKQIYKTPPIKDFGGFNFSQILPDPSKPSKRSFIEDLLFNKVTLADVGFIKQYGDCLGDIAARDLICAQKFNGLTVLPPLLTDEMIAQYCSALLAGTITSGWTFGAGAALQIPFAMQMAYRFNGIGVTQNVLYENQKLIANQFNSAIGKIQDSLSSTASALGKLQDVVNQNAQALNTLVKQLSSNFGAISSVLNDILSRLDKVEAEVQIDRLITGRLQSLQTYVTQQLIRAAEIRASANLAATKMSECVLGQSKRVDFCGKGYHLMSFPQCAPHGVVFLHVTYVPAQEKNFTTAPAICHDGKAHFPREGVFVSNGTHWFVTQRNFYEPQIITTDNTFVSGNCDVVIGIVNNTVYDPLQPELDSFKEELDKYFKNHTSPDVDLGDISGINASVVNIQKEIDRLNEVAKNLNESLIDLQELGKYEQYIKWPWYIWLGFIAGLIAIVMVTIMLCCMTSCCSCLKGCCSCGSCCKFDEDDSEPVLKGVKLHYT

SEQ ID NO: 1267 - protein, 1273 aa, Artificial Sequence
  SARS-CoV-2/Greece/16/2020__EPI_ISL_418265 spike protein (1-1273)(T874C_S1055C)
MFVFLVLLPLVSSQCVNLTTRTQLPPAYTNSFTRGVYYPDKVFRSSVLHSTQDLFLPFFSNVTWFHAIHVSGTNGTKRFDNPVLPFNDGVYFASTEKSNIIRGWIFGTTLDSKTQSLLIVNNATNVVIKVCEFQFCNDPFLGVYYHKNNKSWMESEFRVYSSANNCTFEYVSQPFLMDLEGKQGNFKNLREFVFKNVDGYFKIYSKHTPINLVRDLPQGFSALEPLVDLPIGINITRFQTLLALHRSYLTPGDSSSGWTAGAAAYYVGYLQPRTFLLKYNENGTITDAVDCALDPLSETKCTLKSFTVEKGIYQTSNFRVQPTESIVRFPNITNLCPFGEVFNATRFASVYAWNRKRISNCVADYSVLYNSASFSTFKCYGVSPTKLNDLCFTNVYADSFVIRGDEVRQIAPGQTGKIADYNYKLPDDFTGCVIAWNSNNLDSKVGGNYNYLYRLFRKSNLKPFERDISTEIYQAGSTPCNGVEGFNCYFPLQSYGFQPTNGVGYQPYRVVVLSFELLHAPATVCGPKKSTNLVKNKCVNFNFNGLTGTGVLTESNKKFLPFQQFGRDIADTTDAVRDPQTLEILDITPCSFGGVSVITPGTNTSNQVAVLYQDVNCTEVPVAIHADQLTPTWRVYSTGSNVFQTRAGCLIGAEHVNNSYECDIPIGAGICASYQTQTNSPRRARSVASQSIIAYTMSLGAENSVAYSNNSIAIPTNFTISVTTEILPVSMTKTSVDCTMYICGDSTECSNLLLQYGSFCTQLNRALTGIAVEQDKNTQEVFAQVKQIYKTPPIKDFGGFNFSQILPDPSKPSKRSFIEDLLFNKVTLADAGFIKQYGDCLGDIAARDLICAQKFNGLTVLPPLLTDEMIAQYCSALLAGTITSGWTFGAGAALQIPFAMQMAYRFNGIGVTQNVLYENQKLIANQFNSAIGKIQDSLSSTASALGKLQDVVNQNAQALNTLVKQLSSNFGAISSVLNDILSRLDKVEAEVQIDRLITGRLQSLQTYVTQQLIRAAEIRASANLAATKMSECVLGQSKRVDFCGKGYHLMSFPQCAPHGVVFLHVTYVPAQEKNFTTAPAICHDGKAHFPREGVFVSNGTHWFVTQRNFYEPQIITTDNTFVSGNCDVVIGIVNNTVYDPLQPELDSFKEELDKYFKNHTSPDVDLGDISGINASVVNIQKEIDRLNEVAKNLNESLIDLQELGKYEQYIKWPWYIWLGFIAGLIAIVMVTIMLCCMTSCCSCLKGCCSCGSCCKFDEDDSEPVLKGVKLHYT

SEQ ID NO: 1268 - protein, 1273 aa, Artificial Sequence
  SARS-CoV-2/Iceland/319/2020__EPI_ISL_417648 spike protein (1-1273)(T874C_S1055C)
MFVFLVLLPLVSSQCVNLTTRTQLPPAYTNSFTRGVYYPDKVFRSSVLHSTQDLFLPFFSNVTWFHAIHVSGTNGTKRFDNPVLPFNDGVYFASTEKSNIIRGWIFGTTLDSKTQSLLIVNNATNVVIKVCEFQFCNDPFLGVYYHKNNKSWMESEFRVYSSANNCTFEYVSQPFLIDLEGKQGNFKNLREFVFKNIDGYFKIYSKHTPINLVRDLPQGFSALEPLVDLPIGINITRFQTLLALHRSYLTPGDSSSGWTAGAAAYYVGYLQPRTFLLKYNENGTITDAVDCALDPLSETKCTLKSFTVEKGIYQTSNFRVQPTESIVRFPNITNLCPFGEVFNATRFASVYAWNRKRISNCVADYSVLYNSASFSTFKCYGVSPTKLNDLCFTNVYADSFVIRGDEVRQIAPGQTGKIADYNYKLPDDFTGCVIAWNSNNLDSKVGGNYNYLYRLFRKSNLKPFERDISTEIYQAGSTPCNGVEGFNCYFPLQSYGFQPTNGVGYQPYRVVVLSFELLHAPATVCGPKKSTNLVKNKCVNFNFNGLTGTGVLTESNKKFLPFQQFGRDIADTTDAVRDPQTLEILDITPCSFGGVSVITPGTNTSNQVAVLYQGVNCTEVPVAIHADQLTPTWRVYSTGSNVFQTRAGCLIGAEHVNNSYECDIPIGAGICASYQTQTNSPRRARSVASQSIIAYTMSLGAENSVAYSNNSIAIPTNFTISVTTEILPVSMTKTSVDCTMYICGDSTECSNLLLQYGSFCTQLNRALTGIAVEQDKNTQEVFAQVKQIYKTPPIKDFGGFNFSQILPDPSKPSKRSFIEDLLFNKVTLADAGFIKQYGDCLGDIAARDLICAQKFNGLTVLPPLLTDEMIAQYCSALLAGTITSGWTFGAGAALQIPFAMQMAYRFNGIGVTQNVLYENQKLIANQFNSAIGKIQDSLSSTASALGKLQDVVNQNAQALNTLVKQLSSNFGAISSVLNDILSRLDKVEAEVQIDRLITGRLQSLQTYVTQQLIRAAEIRASANLAATKMSECVLGQSKRVDFCGKGYHLMSFPQCAPHGVVFLHVTYVPAQEKNFTTAPAICHDGKAHFPREGVFVSNGTHWFVTQRNFYEPQIITTDNTFVSGNCDVVIGIVNNTVYDPLQPELDSFKEELDKYFKNHTSPDVDLGDISGINASVVNIQKEIDRLNEVAKNLNESLIDLQELGKYEQYIKWPWYIWLGFIAGLIAIVMVTIMLCCMTSCCSCLKGCCSCGSCCKFDEDDSEPVLKGVKLHYT

SEQ ID NO: 1269 - protein, 1273 aa, Artificial Sequence
  SARS-CoV-2/Congo/94/2020__EPI_ISL_417947 spike protein (1-1273)(T874C_S1055C)
MFVFLVLLPLVSSQCVNLTTRTQLPPAYTNSFTRGVYYPDKVFRSSVLHSTQDLFLPFFSNVTWFHAIHVSGTNGTKRFDNPVLPFNDGVYFASTEKSNIIRGWIFGTTLDSKTQSLLIVNNATNVVIKVCEFQFCNDPFLGVYYHKNNKSWMESEFRVYSSANNCTFEYVSQPFLMDLEGKQGNFKNLREFVFKNIDGYFKIYSKHTPINLVRDLPQGFSALEPLVDLPIGINITRFQTLLALHRSYLTPGDSSSGWTAGAAAYYVGYLQPRTFLLKYNENGTITDAVDCALDPLSETKCTLKSFTVEKGIYQTSNFRVQPTESIVRFPNITNLCPFGEVFNATRFASVYAWNRKRISNCVADYSVLYNSASFSTFKCYGVSPTKLNDLCFTNVYADSFVIRGDEVRQIAPGQTGKIADYNYKLPDDFTGCVIAWNSNNLDSKVGGNYNYLYRLFRKSNLKPFERDISTEIYQAGSTPCNGVEGFNCYFPLQSYGFQPTNGVGYQPYRVVVLSFELLHAPATVCGPKKSTNLVKNKCVNFNFNGLTGTGVLTESNKKFLPFQQFGRDIADTTDAVRDPQTLEILDITPCSFGGVSVITPGTNTSNQVAVLYQGVNCTEVPVAIHADQLTPTWRVYSTGSNVFQTRAGCLIGAEHVNNSYECDIPIGAGICASYQTQTNSPRRARSVASQSIIAYTMSLGAENSVAYSNNSIAIPTNFTISVTTEILPVSMTKTSVDCTMYICGDSTECSNLLLQYGSFCTQLNRALTGIAVEQDKNTQEVFAQVKQIYKTPPIKDFGGFNFSQILPDPSKPSKRSFIEDILFNKVTLADAGFIKQYGDCLGDIAARDLICAQKFNGLTVLPPLLTDEMIAQYCSALLAGTITSGWTFGAGAALQIPFAMQMAYRFNGIGVTQNVLYENQKLIANQFNSAIGKIQDSLSSTASALGKLQDVVNQNAQALNTLVKQLSSNFGAISSVLNDILSRLDKVEAEVQIDRLITGRLQSLQTYVTQQLIRAAEIRASANLAATKMSECVLGQSKRVDFCGKGYHLMSFPQCAPHGVVFLHVTYVPAQEKNFTTAPAICHDGKAHFPREGVFVSNGTHWFVTQRNFYEPQIITTDNTFVSGNCDVVIGIVNNTVYDPLQPELDSFKEELDKYFKNHTSPDVDLGDISGINASVVNIQKEIDRLNEVAKNLNESLIDLQELGKYEQYIKWPWYIWLGFIAGLIAIVMVTIMLCCMTSCCSCLKGCCSCGSCCKFDEDDSEPVLKGVKLHYT

SEQ ID NO: 1270 - protein, 1273 aa, Artificial Sequence
  SARS-CoV-2/Congo/158/2020__EPI_ISL_417950 spike protein (1-1273)(T874C_S1055C)
MFVFLVLLPLVSSQCVNLTTRTQLPPAYTNSFTRGVYYPDKVFRSSVLHSTQDLFLPFFSNVTWFHAIHVSGTNGTKRFDNPVLPFNDGVYFASTEKSNIIRGWIFGTTLDSKTQSLLIVNNATNVVIKVCEFQFCNDPFLGVYYHKNNKSWMESEFRVYSSANNCTFEYVSQPFLMDLEGKQGNFKNLREFVFKNIDGYFKIYSKHTPINLVRDLPQGFSALEPLVDLPIGINITRFQTLLALHRSYLTPGDSSSGWTAGAAAYYVGYLQPRTFLLKYNENGTITDAVDCALDPLSETKCTLKSFTVEKGIYQTSNFRVQPTESIVRFPNITNLCPFGEVFNATRFASVYAWNRKRISNCVADYSVLYNSASFSTFKCYGVSPTKLNDLCFTNVYADSFVIRGDEVRQIAPGQTGKIADYNYKLPDDFTGCVIAWNSNNLDSKVGGNYNYLYRLFRKSNLKPFERDISTEIYQAGSTPCNGVEGFNCYFPLQSYGFQPTNGVGYQPYRVVVLSFELLHAPATVCGPKKSTNLVKNKCVNFNFNGLTGTGVLTESNKKFLPFQQFGRDIADTTDAVRDPQTLEILDITPCSFGGVSVITPGTNTSNQVAVLYQDVNCTEVPVAIHADQLTPTWRVYSTGSNVFQTRAGCLIGAEHVNNSYECDIPIGAGICASYQTQTNSPRRARSVASQSIIAYTMSLGAENSVAYSNNSIAIPTNFTISVTTEILPVSMTKTSVDCTMYICGDSTECSNLLLQYGSFCTQLNRALTGIAVEQDKNTQEVFAQVKQIYKTPPIKDFGGFNFSQILPDPSKPSKRSFIEDLLFNKVTLADAGFIKQYGDCLGDIAARDLICAQKFNGLTVLPPLLTDEMIAQYCSALLAGTITSGWTFGAGAALQIPFAMQMAYRFNGIGVTQNVLYENQKLIANQFNSAIGKIQDSLSSTASALGKLQDVVNQNAQALNTLVKQLSSNFGAISSVLNDILSRLDKVEAEVQIDRLITGRLQSLQTYVTQQLIRAAEIRASANLAATKMSECVLGQSKRVDFCGKGYHLMSFPQCAPHGVVFLHVTYVPAQEKNFTTAPAICHDGKAHFPREGVFVSNGTHWFVTQRNFYEPQIITTDNTFLSGNCDVVIGIVNNTVYDPLQPELDSFKEELDKYFKNHTSPDVDLGDISGINASVVNIQKEIDRLNEVAKNLNESLIDLQELGKYEQYIKWPWYIWLGFIAGLIAIVMVTIMLCCMTSCCSCLKGCCSCGSCCKFDEDDSEPVLKGVKLHYT

SEQ ID NO: 1271 - protein, 1273 aa, Artificial Sequence
  SARS-CoV-2/USA/UT-00034/2020__EPI_ISL_417977 spike protein (1-1273)(T874C_S1055C)
MFVFLVLLPLVSSQCVNLTTRTQLPPAYTNSFTRGVYYPDKVFRSSVLHSTQDLFLPFFSNVTWFHAIHVSGTNGTKRFDNPVLPFNDGVYFASTEKSNIIRGWIFGTTLDSKTQSLLIVNNATNVVIKVCEFQFCNDPFLGVYYYKNNKSWMESEFRVYSSANNCTFEYVSQPFLMDLEGKQGNFKNLREFVFKNIDGYFKIYSKHTPINLVRDLPQGFSALEPLVDLPIGINITRFQTLLALHRSYLTPGDSSSGWTAGAAAYYVGYLQPRTFLLKYNENGTITDAVDCALDPLSETKCTLKSFTVEKGIYQTSNFRVQPTESIVRFPNITNLCPFGEVFNATRFASVYAWNRKRISNCVADYSVLYNSASFSTFKCYGVSPTKLNDLCFTNVYADSFVIRGDEVRQIAPGQTGKIADYNYKLPDDFTGCVIAWNSNNLDSKVGGNYNYLYRLFRKSNLKPFERDISTEIYQAGSTPCNGVEGFNCYFPLQSYGFQPTNGVGYQPYRVVVLSFELLHAPATVCGPKKSTNLVKNKCVNFNFNGLTGTGVLTESNKKFLPFQQFGRDIADTTDAVRDPQTLEILDITPCSFGGVSVITPGTNTSNQVAVLYQGVNCTEVPVAIHADQLTPTWRVYSTGSNVFQTRAGCLIGAEHVNNSYECDIPIGAGICASYQTQTNSPRRARSVASQSIIAYTMSLGAENSVAYSNNSIAIPTNFTISVTTEILPVSMTKTSVDCTMYICGDSTECSNLLLQYGSFCTQLNRALTGIAVEQDKNTQEVFAQVKQIYKTPPIKDFGGFNFSQILPDPSKPSKRSFIEDLLFNKVTLADAGFIKQYGDCLGDIAARDLICAQKFNGLTVLPPLLTDEMIAQYCSALLAGTITSGWTFGAGAALQIPFAMQMAYRFNGIGVTQNVLYENQKLIANQFNSAIGKIQDSLSSTASALGKLQDVVNQNAQALNTLVKQLSSNFGAISSVLNDILSRLDKVEAEVQIDRLITGRLQSLQTYVTQQLIRAAEIRASANLAATKMSECVLGQSKRVDFCGKGYHLMSFPQCAPHGVVFLHVTYVPAQEKNFTTAPAICHDGKAHFPREGVFVSNGTHWFVTQRNFYEPQIITTDNTFVSGNCDVVIGIVNNTVYDPLQPELDSFKEELDKYFKNHTSPDVDLGDISGINASVVNIQKEIDRLNEVAKNLNESLIDLQELGKYEQYIKWPWYIWLGFIAGLIAIVMVTIMLCCMTSCCSCLKGCCSCGSCCKFDEDDSEPVLKGVKLHYT

SEQ ID NO: 1272 - protein, 1273 aa, Artificial Sequence
  SARS-CoV-2/USA/UT-00033/2020__EPI_ISL_417976 spike protein (1-1273)(T874C_S1055C)
MFVFLVLLPLVSSQCVNLTTRTQLPPAYTNSFTRGVYYPDKVFRSSVLHSTQDLFLPFFSNVTWFHAIHVSGTNGTKRFDNPVLPFNDGVYFASTEKSNIIRGWIFGTTLDSKTQSLLIVNNATNVVIKVCEFQFCNDPFLGVYYHKNNKSWMESEFRVYSSANNCTFEYVSQPFLMDLEGKQGNFKNLREFVFKNIDGYFKIYSKHTPINLVRDLPQGFSALEPLVDLPIGINITRFQTLLALHRSYLTPGDSSSGLTAGAAAYYVGYLQPRTFLLKYNENGTITDAVDCALDPLSETKCTLKSFTVEKGIYQTSNFRVQPTESIVRFPNITNLCPFGEVFNATRFASVYAWNRKRISNCVADYSVLYNSASFSTFKCYGVSPTKLNDLCFTNVYADSFVIRGDEVRQIAPGQTGKIADYNYKLPDDFTGCVIAWNSNNLDSKVGGNYNYLYRLFRKSNLKPFERDISTEIYQAGSTPCNGVEGFNCYFPLQSYGFQPTNGVGYQPYRVVVLSFELLHAPATVCGPKKSTNLVKNKCVNFNFNGLTGTGVLTESNKKFLPFQQFGRDIADTTDAVRDPQTLEILDITPCSFGGVSVITPGTNTSNQVAVLYQGVNCTEVPVAIHADQLTPTWRVYSTGSNVFQTRAGCLIGAEHVNNSYECDIPIGAGICASYQTQTNSPRRARSVASQSIIAYTMSLGAENSVAYSNNSIAIPTNFTISVTTEILPVSMTKTSVDCTMYICGDSTECSNLLLQYGSFCTQLNRALTGIAVEQDKNTQEVFAQVKQIYKTPPIKDFGGFNFSQILPDPSKPSKRSFIEDLLFNKVTLADAGFIKQYGDCLGDIAARDLICAQKFNGLTVLPPLLTDEMIAQYCSALLAGTITSGWTFGAGAALQIPFAMQMAYRFNGIGVTQNVLYENQKLIANQFNSAIGKIQDSLSSTASALGKLQDVVNQNAQALNTLVKQLSSNFGAISSVLNDILSRLDKVEAEVQIDRLITGRLQSLQTYVTQQLIRAAEIRASANLAATKMSECVLGQSKRVDFCGKGYHLMSFPQCAPHGVVFLHVTYVPAQEKNFTTAPAICHDGKAHFPREGVFVSNGTHWFVTQRNFYEPQIITTDNTFVSGNCDVVIGIVNNTVYDPLQPELDSFKEELDKYFKNHTSPDVDLGDISGINASVVNIQKEIDRLNEVAKNLNESLIDLQELGKYEQYIKWPWYIWLGFIAGLIAIVMVTIMLCCMTSCCSCLKGCCSCGSCCKFDEDDSEPVLKGVKLHYT

SEQ ID NO: 1273 - protein, 1273 aa, Artificial Sequence
  SARS-CoV-2/USA/WI-13/2020__EPI_ISL_417516 spike protein (1-1273)(T874C_S1055C)
MFVFLVLLPLVSSQCVNLTTRTQLPPAYTNSFTRGVYYPDKVFRSSVLHSTQDLFLPFFSNVTWFHAIHVSGTNGTKRFDNPVLPFNDGVYFASTEKSNIIRGWIFGTTLDSKTQSLLIVNNATNVVIKVCEFQFCNDPFLGVYYHKNNKSWMESEFRVYSSANNCTFEYVSQPFLMDLEGKQGNFKNLREFVFKNIDGYFKIYSKHTPINLVRDLPQGFSALEPLVDLPIGINITRFQTLLALHRSYLTPGDSSSGWTAGAAAYYVGYLQPRTFLLKYNENGTITDAVDCALDPLSETKCTLKSFTVEKGIYQTSNFRVLPTESIVRFPNITNLCPFGEVFNATRFASVYAWNRKRISNCVADYSVLYNSASFSTFKCYGVSPTKLNDLCFTNVYADSFVIRGDEVRQIAPGQTGKIADYNYKLPDDFTGCVIAWNSNNLDSKVGGNYNYLYRLFRKSNLKPFERDISTEIYQAGSTPCNGVEGFNCYFPLQSYGFQPTNGVGYQPYRVVVLSFELLHAPATVCGPKKSTNLVKNKCVNFNFNGLTGTGVLTESNKKFLPFQQFGRDIADTTDAVRDPQTLEILDITPCSFGGVSVITPGTNTSNQVAVLYQGVNCTEVPVAIHADQLTPTWRVYSTGSNVFQTRAGCLIGAEHVNNSYECDIPIGAGICASYQTQTNSPRRARSVASQSIIAYTMSLGAENSVAYSNNSIAIPTNFTISVTTEILPVSMTKTSVDCTMYICGDSTECSNLLLQYGSFCTQLNRALTGIAVEQDKNTQEVFAQVKQIYKTPPIKDFGGFNFSQILPDPSKPSKRSFIEDLLFNKVTLADAGFIKQYGDCLGDIAARDLICAQKFNGLTVLPPLLTDEMIAQYCSALLAGTITSGWTFGAGAALQIPFAMQMAYRFNGIGVTQNVLYENQKLIANQFNSAIGKIQDSLSSTASALGKLQDVVNQNAQALNTLVKQLSSNFGAISSVLNDILSRLDKVEAEVQIDRLITGRLQSLQTYVTQQLIRAAEIRASANLAATKMSECVLGQSKRVDFCGKGYHLMSFPQCAPHGVVFLHVTYVPAQEKNFTTAPAICHDGKAHFPREGVFVSNGTHWFVTQRNFYEPQIITTDNTFVSGNCDVVIGIVNNTVYDPLQPELDSFKEELDKYFKNHTSPDVDLGDISGINASVVNIQKEIDRLNEVAKNLNESLIDLQELGKYEQYIKWPWYIWLGFIAGLIAIVMVTIMLCCMTSCCSCLKGCCSCGSCCKFDEDDSEPVLKGVKLHYT

SEQ ID NO: 1274 - protein, 1272 aa, Artificial Sequence
  SARS-CoV-2/India/1-27/2020__EPI_ISL_413522 spike protein (1-1272)(T873C_S1054C)
MFVFLVLLPLVSSQCVNLTTRTQLPPAYTNSFTRGVYYPDKVFRSSVLHSTQDLFLPFFSNVTWFHAIHVSGTNGTKRFDNPVLPFNDGVYFASTEKSNIIRGWIFGTTLDSKTQSLLIVNNATNVVIKVCEFQFCNDPFLGVYHKNNKSWMESEFRVYSSANNCTFEYVSQPFLMDLEGKQGNFKNLREFVFKNIDGYFKIYSKHTPINLVRDLPQGFSALEPLVDLPIGINITRFQTLLALHRSYLTPGDSSSGWTAGAAAYYVGYLQPRTFLLKYNENGTITDAVDCALDPLSETKCTLKSFTVEKGIYQTSNFRVQPTESIVRFPNITNLCPFGEVFNATRFASVYAWNRKRISNCVADYSVLYNSASFSTFKCYGVSPTKLNDLCFTNVYADSFVIRGDEVIQIAPGQTGKIADYNYKLPDDFTGCVIAWNSNNLDSKVGGNYNYLYRLFRKSNLKPFERDISTEIYQAGSTPCNGVEGFNCYFPLQSYGFQPTNGVGYQPYRVVVLSFELLHAPATVCGPKKSTNLVKNKCVNFNFNGLTGTGVLTESNKKFLPFQQFGRDIADTTDAVRDPQTLEILDITPCSFGGVSVITPGTNTSNQVAVLYQDVNCTEVPVAIHADQLTPTWRVYSTGSNVFQTRAGCLIGAEHVNNSYECDIPIGAGICASYQTQTNSPRRARSVASQSIIAYTMSLGAENSVAYSNNSIAIPTNFTISVTTEILPVSMTKTSVDCTMYICGDSTECSNLLLQYGSFCTQLNRALTGIAVEQDKNTQEVFAQVKQIYKTPPIKDFGGFNFSQILPDPSKPSKRSFIEDLLFNKVTLADAGFIKQYGDCLGDIAARDLICAQKFNGLTVLPPLLTDEMIAQYCSALLAGTITSGWTFGAGAALQIPFAMQMAYRFNGIGVTQNVLYENQKLIANQFNSAIGKIQDSLSSTASALGKLQDVVNQNAQALNTLVKQLSSNFGAISSVLNDILSRLDKVEAEVQIDRLITGRLQSLQTYVTQQLIRAAEIRASANLAATKMSECVLGQSKRVDFCGKGYHLMSFPQCAPHGVVFLHVTYVPAQEKNFTTAPAICHDGKAHFPREGVFVSNGTHWFVTQRNFYEPQIITTDNTFVSGNCDVVIGIVNNTVYDPLQPELDSFKEELDKYFKNHTSPDVDLGDISGINASVVNIQKEIDRLNEVAKNLNESLIDLQELGKYEQYIKWPWYIWLGFIAGLIAIVMVTIMLCCMTSCCSCLKGCCSCGSCCKFDEDDSEPVLKGVKLHYT

SEQ ID NO: 1275 - protein, 1267 aa, Artificial Sequence
  SARS-CoV-2/pangolin/Guangxi/P4L/2017__EPI_ISL_410538 spike protein (1-1267)(T868C_S1049C)
MFVFLFVLPLVSSQCVNLTTRTGIPPGYTNSSTRGVYYPDKVFRSSILHLTQDLFLPFFSNVTWFNTINYQGGFKKFDNPVLPFNDGVYFASTEKSNIIRGWIFGTTLDARTQSLLIVNNATNVVIKVCEFQFCTDPFLGVYYHNNNKTWVENEFRVYSSANNCTFEYISQPFLMDLEGKQGNFKNLREFVFKNVDGYFKIYSKHTPIDLVRDLPRGFAALEPLVDLPIGINITRFQTLLALHRSYLTPGNLESGWTTGAAAYYVGYLQQRTFLLSYNQNGTITDAVDCSLDPLSETKCTLKSLTVEKGIYQTSNFRVQPTISIVRFPNITNLCPFGEVFNASKFASVYAWNRKRISNCVADYSVLYNSTSFSTFKCYGVSPTKLNDLCFTNVYADSFVVKGDEVRQIAPGQTGVIADYNYKLPDDFTGCVIAWNSVKQDALTGGNYGYLYRLFRKSKLKPFERDISTEIYQAGSTPCNGQVGLNCYYPLERYGFHPTTGVNYQPFRVVVLSFELLNGPATVCGPKLSTTLVKDKCVNFNFNGLTGTGVLTTSKKQFLPFQQFGRDISDTTDAVRDPQTLEILDITPCSFGGVSVITPGTNTSNQVAVLYQDVNCTEVPMAIHAEQLTPAWRVYSAGANVFQTRAGCLVGAEHVNNSYECDIPVGAGICASYHSMSSLRSVNQRSIIAYTMSLGAENSVAYSNNSIAIPTNFTISVTTEILPVSMTKTSVDCTMYICGDSIECSNLLLQYGSFCTQLNRALTGIAVEQDKNTQEVFAQVKQIYKTPPIKDFGGFNFSQILPDPSKPSKRSFIEDLLFNKVTLADAGFIKQYGDCLGDIAARDLICAQKFNGLTVLPPLLTDEMIAQYCSALLAGTITSGWTFGAGAALQIPFAMQMAYRFNGIGVTQNVLYENQKLIANQFNSAIGKIQDSLSSTASALGKLQDVVNQNAQALNTLVKQLSSNFGAISSVLNDILSRLDKVEAEVQIDRLITGRLQSLQTYVTQQLIRAAEIRASANLAATKMSECVLGQSKRVDFCGKGYHLMSFPQCAPHGVVFLHVTYVPAQEKNFTTAPAICHEGKAHFPREGVFVSNGTHWFITQRNFYEPQIITTDNTFVSGSCDVVIGIVNNTVYDPLQPELDSFKEELDKYFKNHTSPDVDLGDISGINASVVNIQKEIDRLNEVAKNLNESPIDLQELGKYEQYIKWPWYIWLGFIAGLIAIIMVTIMLCCMTSCCSCLKGCCSCGSCCKFDEDDSEPVLKGVKLHYT

SEQ ID NO: 1276 - protein, 1267 aa, Artificial Sequence
  SARS-CoV-2/pangolin/Guangxi/P5L/2017__EPI_ISL_410540 spike protein (1-1267)(T868C_S1049C)
MFVFLFVLPLVSSQCVNLTTRTGIPPGYTNSSTRGVYYPDKVFRSSILHLTQDLFLPFFSNVTWFNTINYQGGFKKFDNPVLPFNDGVYFASTEKSNIIRGWIFGTTLDARTQSLLIVNNATNVVIKVCEFQFCTDPFLGVYYHNNNKTWVENEFRVYSSANNCTFEYISQPFLMDLEGKQGNFKNLREFVFKNVDGYFKIYSKHTPIDLVRDLPRGFAALEPLVDLPIGINITRFQTLLALHRSYLTPGKLESGWTTGAAAYYVGYLQQRTFLLSYNQNGTITDAVDCSLDPLSETKCTLKSLTVEKGIYQTSNFRVQPTISIVRFPNITNLCPFGEVFNASKFASVYAWNRKRISNCVADYSVLYNSTSFSTFKCYGVSPTKLNDLCFTNVYADSFVVKGDEVRQIAPGQTGVIADYNYKLPDDFTGCVIAWNSVKQDALTGGNYGYLYRLFRKSKLKPFERDISTEIYQAGSTPCNGQVGLNCYYPLERYGFHPTTGVNYQPFRVVVLSFELLNGPATVCGPKLSTTLVKDKCVNFNFNGLTGTGVLTTSKKQFLPFQQFGRDISDTTDAVRDPQTLEILDITPCSFGGVSVITPGTNTSNQVAVLYQDVNCTEVPMAIHAEQLTPAWRVYSAGANVFQTRAGCLVGAEHVNNSYECDIPVGAGICASYHSMSSFRSVNQRSIIAYTMSLGAENSVAYSNNSIAIPTNFTISVTTEILPVSMTKTSVDCTMYICGDSIECSNLLLQYGSFCTQLNRALTGIAVEQDKNTQEVFAQVKQIYKTPPIKDFGGFNFSQILPDPSKPSKRSFIEDLLFNKVTLADAGFIKQYGDCLGDIAARDLICAQKFNGLTVLPPLLTDEMIAQYCSALLAGTITSGWTFGAGAALQIPFAMQMAYRFNGIGVTQNVLYENQKLIANQFNSAIGKIQDSLSSTASALGKLQDVVNQNAQALNTLVKQLSSNFGAISSVLNDILSRLDKVEAEVQIDRLITGRLQSLQTYVTQQLIRAAEIRASANLAATKMSECVLGQSKRVDFCGKGYHLMSFPQCAPHGVVFLHVTYVPAQEKNFTTAPAICHEGKAHFPREGVFVSNGTHWFITQRNFYEPQIITTDNTFVSGSCDVVIGIVNNTVYDPLQPELDSFKEELDKYFKNHTSPDVDLGDISGINASVVNIQKEIDRLNEVAKNLNESLIDLQELGKYEQYIKWPWYIWLGFIAGLIAIIMVTIMLCCMTSCCSCLKGCCSCGSCCKFDEDDSEPVLKGVKLHYT

SEQ ID NO: 1277 - protein, 1267 aa, Artificial Sequence
  SARS-CoV-2/pangolin/Guangxi/P5E/2017__EPI_ISL_410541 spike protein (1-1267)(T868C_S1049C)
MFVFLFVLPLVSSQCVNLTTRTGIPPGYTNSSTRGVYYPDKVFRSSILHLTQDLFLPFFSNVTWFNTITYQGGSKKFDNPVLPFNDGVYFASTEKSNIIRGWIFGTTLDARTQSLLIVNNATNVVIKVCEFQFCTDPFLGVYYHNNNKTWVENEFRVYSSANNCTFEYISQPFLMDLEGKQGNFKNLREFVFKNVDGYFKIYSKHTPIDLVRDLPRGFAALEPLVDLPIGINITRFQTLLALHRSYLTPGKLESGWTTGAAAYYVGYLQQRTFLLSYNQNGTITDAVDCSLDPLSETKCTLKSLTVEKGIYQTSNFRVQPTISIVRFPNITNLCPFGEVFNASKFASVYAWNRKRISNCVADYSVLYNSTSFSTFKCYGVSPTKLNDLCFTNVYADSFVVKGDEVRQIAPGQTGVIADYNYKLPDDFTGCVIAWNSVKQDALTGDNYGYLYRLFRKSKLKPFERDISTEIYQAGSTPCNGQVGLNCYYPLERYGFHPTTGVNYQPFRVVVLSFELLNGPATVCGPKLSTTLVKDKCVNFNFNGLTGTGVLTTSKKQFLPFQQFGRDISDTTDAVRDPQTLEILDITPCSFGGVSVITPGTNTSNQVAVLYQDVNCTEVPMAIHAEQLTPAWRVYSAGANVFQTRAGCLVGAEHVNNSYECDIPVGAGICASYHSMSSFRSVNQRSIIAYTMSLGAENSVAYSNNSIAIPTNFTISVTTEILPVSMTKTSVDCTMYICGDSIECSNLLLQYGSFCTQLNRALTGIAVEQDKNTQEVFAQVKQIYKTPPIKDFGGFNFSQILPDPSKPSKRSFIEDLLFNKVTLADAGFIKQYGDCLGDIAARDLICAQKFNGLTVLPPLLTDEMIAQYCSALLAGTITSGWTFGAGAALQIPFAMQMAYRFNGIGVTQNVLYENQKLIANQFNSAIGKIQDSLSSTASALGKLQDVVNQNAQALNTLVKQLSSNFGAISSVLNDILSRLDKVEAEVQIDRLITGRLQSLQTYVTQQLIRAAEIRASANLAATKMSECVLGQSKRVDFCGKGYHLMSFPQCAPHGVVFLHVTYVPAQEKNFTTAPAICHEGKAHFPREGVFVSNGTHWFITQRNFYEPQIITTDNTFVSGSCDVVIGIVNNTVYDPLQPELDSFKEELDKYFKNHTSPDVDLGDISGINASVVNIQKEIDRLNEVAKNLNESLIDLQELGKYEQYIKWPWYIWLGFIAGLIAIIMVTIMLCCMTSCCSCLKGCCSCGSCCKFDEDDSEPVLKGVKLHYT

SEQ ID NO: 1278 - protein, 1265 aa, Artificial Sequence
  SARS-CoV-2/pangolin/Guangxi/P1E/2017__EPI_ISL_410539 spike protein (1-1265)(T866C_S1047C)
MFVFLFVLPLVSSQCVNLTTRTGIQPGYTNSSTRGVYYPDKVFRSSILHLTQDLFLPFFSNVTWFNTINYQGGFKKFDNPVLPFNDGVYFASTEKSNIIRGWIFGTTLDARTQSLLIVNNATNVVIKVCEFQFCTDPFLGVYYHNNNKTWVENEFRVYSSANNCTFEYISQPFLMDLEGKQGNFKNLREFVFKNVDGYFKIYSKHTPIDLVRDLPRGFAALEPLVDLPIGINITRFQTLLALHRSYLTPGKLESGWTTGAAAYYVGYLQQRTFLLSYNQNGTITDAVDCSLDPLSETKCTLKSLTVEKGIYQTSNFRVQPTISIVRFPNITNLCPFGEVFNASKFASVYAWNRKRISNCVADYSVLYNSTSFSTFKCYGVSPTKLNDLCFTNVYADSFVVKGDEVRQIAPGQTGVIADYNYKLPDDFTGCVIAWNSVKQDALTGGNYLYRLFRKSKLKPFERDISTEIYQAGSTPCNGQVGLNCYYPLERYGFHPTTGVNYQPFRVVVLSFELLNGPATVCGPKLSTTLVKDKCVNFNFNGLTGTGVLTTSKKQFLPFQQFGRDISDTTDAVRDPQTLEILDITPCSFGGVSVITPGTNTSNQVAVLYQDVNCTEVPMAIHAEQLTPAWRVYSAGANVFQTRAGCLVGAEHVNNSYECDIPVGAGICASYHSMSSLRSVNQRSIIAYTMSLGAENSVAYSNNSIAIPTNFTISVTTEILPVSMTKTSVDCTMYICGDSIECSNLLLQYGSFCTQLNRALTGIAVEQDKNTQEVFAQVKQIYKTPPIKDFGGFNFSQILPDPSKPSKRSFIEDLLFNKVTLADAGFIKQYGDCLGDIAARDLICAQKFNGLTVLPPLLTDEMIAQYCSALLAGTITSGWTFGAGAALQIPFAMQMAYRFNGIGVTQNVLYENQKLIANQFNSAIGKIQDSLSSTASALGKLQDVVNQNAQALNTLVKQLSSNFGAISSVLNDILSRLDKVEAEVQIDRLITGRLQSLQTYVTQQLIRAAEIRASANLAATKMSECVLGQSKRVDFCGKGYHLMSFPQCAPHGVVFLHVTYVPAQEKNFTTAPAICHEGKAHFPREGVFVSNGTHWFITQRNFYEPQIITTDNTFVSGSCDVVIGIVNNTVYDPLQPELDSFKEELDKYFKNHTSPDVDLGDISGINASVVNIQKEIDRLNEVAKNLNESLIDLQELGKYEQYIKWPWYIWLGFIAGLIAIIMVTIMLCCMTSCCSCLKGCCSCGSCCKFDEDDSEPVLKGVKLHYT

SEQ ID NO: 1279 - protein, 681 aa, Artificial Sequence; identical to SEQ ID NO: 27
  SARS-CoV-2/Wuhan/WIV05/2019__EPI_ISL_402128 spike protein (1-681)

SEQ ID NO: 1280 - protein, 680 aa, Artificial Sequence
  SARS-CoV-2/bat/Yunnan/RaTG13/2013__EPI_ISL_402131 spike protein (1-680)
MFVFLVLLPLVSSQCVNLTTRTQLPPAYTNSSTRGVYYPDKVFRSSVLHLTQDLFLPFFSNVTWFHAIHVSGTNGIKRFDNPVLPFNDGVYFASTEKSNIIRGWIFGTTLDSKTQSLLIVNNATNVVIKVCEFQFCNDPFLGVYYHKNNKSWMESEFRVYSSANNCTFEYVSQPFLMDLEGKQGNFKNLREFVFKNIDGYFKIYSKHTPINLVRDLPPGFSALEPLVDLPIGINITRFQTLLALHRSYLTPGDSSSGWTAGAAAYYVGYLQPRTFLLKYNENGTITDAVDCALDPLSETKCTLKSFTVEKGIYQTSNFRVQPTDSIVRFPNITNLCPFGEVFNATTFASVYAWNRKRISNCVADYSVLYNSTSFSTFKCYGVSPTKLNDLCFTNVYADSFVITGDEVRQIAPGQTGKIADYNYKLPDDFTGCVIAWNSKHIDAKEGGNFNYLYRLFRKANLKPFERDISTEIYQAGSKPCNGQTGLNCYYPLYRYGFYPTDGVGHQPYRVVVLSFELLNAPATVCGPKKSTNLVKNKCVNFNFNGLTGTGVLTESNKKFLPFQQFGRDIADTTDAVRDPQTLEILDITPCSFGGVSVITPGTNASNQVAVLYQDVNCTEVPVAIHADQLTPTWRVYSTGSNVFQTRAGCLIGAEHVNNSYECDIPIGAGICASYQTQTNS

SEQ ID NO: 1281 - protein, 681 aa, Artificial Sequence
  SARS-CoV-2/Wuhan/HBCDC-HB-01/2019__EPI_ISL_402132 spike protein (1-681)
MFVFLVLLPLVSSQCVNLTTRTQLPPAYTNSITRGVYYPDKVFRSSVLHSTQDLFLPFFSNVTWFHAIHVSGTNGTKRFDNPVLPFNDGVYFASTEKSNIIRGWIFGTTLDSKTQSLLIVNNATNVVIKVCEFQFCNDPFLGVYYHKNNKSWMESEFRVYSSANNCTFEYVSQPFLMDLEGKQGNFKNLREFVFKNIDGYFKIYSKHTPINLVRDLPQGFSALEPLVDLPIGINITRFQTLLALHRSYLTPGDSSSGWTAGAAAYYVGYLQPRTFLLKYNENGTITDAVDCALDPLSETKCTLKSFTVEKGIYQTSNFRVQPTESIVRFPNITNLCPFGEVFNATRFASVYAWNRKRISNCVADYSVLYNSASFSTFKCYGVSPTKLNDLCFTNVYADSFVIRGDEVRQIAPGQTGKIADYNYKLPDDFTGCVIAWNSNNLDSKVGGNYNYLYRLFRKSNLKPFERDISTEIYQAGSTPCNGVEGFNCYFPLQSYGFQPTNGVGYQPYRVVVLSFELLHAPATVCGPKKSTNLVKNKCVNFNFNGLTGTGVLTESNKKFLPFQQFGRDIADTTDAVRDPQTLEILDITPCSFGGVSVITPGTNTSNQVAVLYQDVNCTEVPVAIHADQLTPTWRVYSTGSNVFQTRAGCLIGAEHVNNSYECDIPIGAGICASYQTQTNSP

SEQ ID NO: 1282 - protein, 681 aa, Artificial Sequence
  SARS-CoV-2/Guangdong/20SF028/2020__EPI_ISL_403936 spike protein (1-681)
MFVFLVLLPLVSSQCVNLTTRTQLPPAYTNSFTRGVYYPDKVFRSSVLYSTQDLFLPFFSNVTWFHAIHVSGTNGTKRFDNPVLPFNDGVYFASTEKSNIIRGWIFGTTLDSKTQSLLIVNNATNVVIKVCEFQFCNDPFLGVYYHKNNKSWMESEFRVYSSANNCTFEYVSQPFLMDLEGKQGNFKNLREFVFKNIDGYFKIYSKHTPINLVRDLPQGFSALEPLVDLPIGINITRFQTLLALHRSYLTPGDSSSGWTAGAAAYYVGYLQPRTFLLKYNENGTITDAVDCALDPLSETKCTLKSFTVEKGIYQTSNFRVQPTESIVRFPNITNLCPFGEVFNATRFASVYAWNRKRISNCVADYSVLYNSASFSTFKCYGVSPTKLNDLCFTNVYADSFVIRGDEVRQIAPGQTGKIADYNYKLPDDFTGCVIAWNSNNLDSKVGGNYNYLYRLFRKSNLKPFERDISTEIYQAGSTPCNGVEGFNCYFPLQSYGFQPTNGVGYQPYRVVVLSFELLHAPATVCGPKKSTNLVKNKCVNFNFNGLTGTGVLTESNKKFLPFQQFGRDIADTTDAVRDPQTLEILDITPCSFGGVSVITPGTNTSNQVAVLYQDVNCTEVPVAIHADQLTPTWRVYSTGSNVFQTRAGCLIGAEHVNNSYECDIPIGAGICASYQTQTNSP

SEQ ID NO: 1283 - protein, 681 aa, Artificial Sequence; identical to SEQ ID NO: 27
  SARS-CoV-2/Shenzhen/SZTH-001/2020__EPI_ISL_406592 spike protein (1-681)

SEQ ID NO: 1284 - protein, 681 aa, Artificial Sequence
  SARS-CoV-2/Shenzhen/SZTH-004/2020__EPI_ISL_406595 spike protein (1-681)
MFVFLVLLPLVSSQCVNLTTRTQLPPAYTNSFTRGVYYPDKVFRSSVLHSTQDLFLPFFSNVTWFHAIHVSGTNGTKRFDNPVLPFNDGVYFASTEKSNIIRGWIFGTTLDSKTQSLLIVNNATNVVIKVCEFQFCNDPFLGVYYHKNNKSWMESEFRVYSSANNCTFEYVSQPFLMDLEGKQGNFKNLREFVFKNIDGYFKIYSKHTPINLVRDLPQGFSALEPLVDLPIGINITRFQTLLALHRSYLTPGDSSSGWTAGAAAYYVGYLQPRTFLLKYNENGTITDAVDCALDPLSETKCTLKSFTVEKGIYQTSNFRVQPTESIVRFPNITNLCPFGEVFNATRFASVYAWDRKRISNCVAYYSVLYNSASFSTFKCYGVSPTKLNDLCFTNVYADSFVIRGDEVRQIAPGQTGKIADYNYKLPDDFTGCVIAWNSNNLDSKVGGNYNYLYRLFRKSNLKPFERDISTEIYQAGSTPCNGVEGFNCYFPLQSYGFQPTNGVGYQPYRVVVLSFELLHAPATVCGPKKSTNLVKNKCVNFNFNGLTGTGVLTESNKKFLPFQQFGRDIADTTDAVRDPQTLEILDITPCSFGGVSVITPGTNTSNQVAVLYQDVNCTEVPVAIHADQLTPTWRVYSTGSNVFQTRAGCLIGAEHVNNSYECDIPIGAGICASYQTQTNSP

SEQ ID NO: 1285 - protein, 681 aa, Artificial Sequence
  SARS-CoV-2/France/IDF0372/2020__EPI_ISL_406596 spike protein (1-681)
MFVFLVLLPLVSSQCVNLTTRTQLPPAYTNSFTRGVYYPDKVFRSSVLHSTQDLFLPFFSNVTWFHAIHVSGTNGTKRFDNPVLPFNDGVYFASTEKSNIIRGWIFGTTLDSKTQSLLIVNNATNVVIKVCEFQFCNDPFLGVYYHKNNKSWMESEFRVYSSANNCTFEYVSQPFLMDLEGKQGNFKNLREFVFKNIDGYFKIYSKHTPINLVRDLPQGFSALEPLVDLPIGINITRFQTLLALHRSYLTPGDSSSGWTAGAAAYYVGYLQPRTFLLKYNENGTITDAVDCALDPLSETKCTLKSFTVEKGIYQTSNFRVQPTESIVRFPNITNLCPFGEVFNATRFASVYAWNRKRISNCVADYSFLYNSASFSTFKCYGVSPTKLNDLCFTNVYADSFVIRGDEVRQIAPGQTGKIADYNYKLPDDFTGCVIAWNSNNLDSKVGGNYNYLYRLFRKSNLKPFERDISTEIYQAGSTPCNGVEGFNCYFPLQSYGFQPTNGVGYQPYRVVVLSFELLHAPATVCGPKKSTNLVKNKCVNFNFNGLTGTGVLTESNKKFLPFQQFGRDIADTTDAVRDPQTLEILDITPCSFGGVSVITPGTNTSNQVAVLYQDVNCTEVPVAIHADQLTPTWRVYSTGSNVFQTRAGCLIGAEHVNNSYECDIPIGAGICASYQTQTNSP

SEQ ID NO: 1286 - protein, 681 aa, Artificial Sequence
  SARS-CoV-2/Australia/VIC01/2020__EPI_ISL_406844 spike protein (1-681)
MFVFLVLLPLVSSQCVNLTTRTQLPPAYTNSFTRGVYYPDKVFRSSVLHSTQDLFLPFFSNVTWFHAIHVSGTNGTKRFDNPVLPFNDGVYFASTEKSNIIRGWIFGTTLDSKTQSLLIVNNATNVVIKVCEFQFCNDPFLGVYYHKNNKSWMESEFRVYSSANNCTFEYVSQPFLMDLEGKQGNFKNLREFVFKNIDGYFKIYSKHTPINLVRDLPQGFSALEPLVDLPIGINITRFQTLLALHRRYLTPGDSSSGWTAGAAAYYVGYLQPRTFLLKYNENGTITDAVDCALDPLSETKCTLKSFTVEKGIYQTSNFRVQPTESIVRFPNITNLCPFGEVFNATRFASVYAWNRKRISNCVADYSVLYNSASFSTFKCYGVSPTKLNDLCFTNVYADSFVIRGDEVRQIAPGQTGKIADYNYKLPDDFTGCVIAWNSNNLDSKVGGNYNYLYRLFRKSNLKPFERDISTEIYQAGSTPCNGVEGFNCYFPLQSYGFQPTNGVGYQPYRVVVLSFELLHAPATVCGPKKSTNLVKNKCVNFNFNGLTGTGVLTESNKKFLPFQQFGRDIADTTDAVRDPQTLEILDITPCSFGGVSVITPGTNTSNQVAVLYQDVNCTEVPVAIHADQLTPTWRVYSTGSNVFQTRAGCLIGAEHVNNSYECDIPIGAGICASYQTQTNSP

SEQ ID NO: 1287 - protein, 681 aa, Artificial Sequence
  SARS-CoV-2/Germany/BavPat1/2020__EPI_ISL_406862 spike protein (1-681)
MFVFLVLLPLVSSQCVNLTTRTQLPPAYTNSFTRGVYYPDKVFRSSVLHSTQDLFLPFFSNVTWFHAIHVSGTNGTKRFDNPVLPFNDGVYFASTEKSNIIRGWIFGTTLDSKTQSLLIVNNATNVVIKVCEFQFCNDPFLGVYYHKNNKSWMESEFRVYSSANNCTFEYVSQPFLMDLEGKQGNFKNLREFVFKNIDGYFKIYSKHTPINLVRDLPQGFSALEPLVDLPIGINITRFQTLLALHRSYLTPGDSSSGWTAGAAAYYVGYLQPRTFLLKYNENGTITDAVDCALDPLSETKCTLKSFTVEKGIYQTSNFRVQPTESIVRFPNITNLCPFGEVFNATRFASVYAWNRKRISNCVADYSVLYNSASFSTFKCYGVSPTKLNDLCFTNVYADSFVIRGDEVRQIAPGQTGKIADYNYKLPDDFTGCVIAWNSNNLDSKVGGNYNYLYRLFRKSNLKPFERDISTEIYQAGSTPCNGVEGFNCYFPLQSYGFQPTNGVGYQPYRVVVLSFELLHAPATVCGPKKSTNLVKNKCVNFNFNGLTGTGVLTESNKKFLPFQQFGRDIADTTDAVRDPQTLEILDITPCSFGGVSVITPGTNTSNQVAVLYQGVNCTEVPVAIHADQLTPTWRVYSTGSNVFQTRAGCLIGAEHVNNSYECDIPIGAGICASYQTQTNSP

SEQ ID NO: 1288 - protein, 681 aa, Artificial Sequence; identical to SEQ ID NO: 27
  SARS-CoV-2/Wuhan/HBCDC-HB-02/2020__EPI_ISL_412978 spike protein (1-681)

SEQ ID NO: 1289 - protein, 681 aa, Artificial Sequence; identical to SEQ ID NO: 27
  SARS-CoV-2/Australia/QLD02/2020__EPI_ISL_407896 spike protein (1-681)

SEQ ID NO: 1290 - protein, 681 aa, Artificial Sequence; identical to SEQ ID NO: 27
  SARS-CoV-2/India/1-31/2020__EPI_ISL_413523 spike protein (1-681)

SEQ ID NO: 1291 - protein, 681 aa, Artificial Sequence
  SARS-CoV-2/Guangdong/GD2020087-P0008/2020__EPI_ISL_413863 spike protein (1-681)
MFVFLVLLPLVSSQCVNLTTRTQLPPAYTNSFTRGVYYPDKVFRSSVLHSTQDLFLPFFSNVTWFHAIHVSGTNGTKRFDNPVLPFNDGVYFASTEKSNIIRGWIFGTTLDSKTQSLLIVNNATNVVIKVCEFQFCNDPFLGVYYHKNNKSWMESEFRVYSSANNCTFEYVSQPFLMDLEGKQGNFKNLREFVFKNIDGYFKIYSKHTPINLVRDLPQGFSALEPLVDLPIGINITRFQTLLALHRSYLTPGDSSSGWTAGAAAYYVGYLQPRTFLLKYNENGTITDAVDCALDPLSETKCTLKSFTVEKGIYQTSNFRVQPTESIVRFPNITNLCPFGEVFNATRFASVYAWNRKRISNCVADYSVLYNSASFSTFKCYGVSPTKLNDLCFTNVYADSFVIRGDEVREIAPGQTGKIADYNYKLPDDFTGCVIAWNSNNLDSKVGGNYNYLYRLFRKSNLKPFERDISTEIYQAGSTPCNGVEGFNCYFPLQSYGFQPTNGVGYQPYRVVVLSFELLHAPATVCGPKKSTNLVKNKCVNFNFNGLTGTGVLTESNKKFLPFQQFGRDIADTTDAVRDPQTLEILDITPCSFGGVSVITPGTNTSNQVAVLYQDVNCTEVPVAIHADQLTPTWRVYSTGSNVFQTRAGCLIGAEHVNNSYECDIPIGAGICASYQTQTNSP

SEQ ID NO: 1292 - protein, 681 aa, Artificial Sequence; identical to SEQ ID NO: 27
  SARS-CoV-2/Sweden/01/2020__EPI_ISL_411951 spike protein (1-681)

SEQ ID NO: 1293 - protein, 681 aa, Artificial Sequence
  SARS-CoV-2/Tianmen/HBCDC-HB-07/2020__EPI_ISL_412983 spike protein (1-681)
MFVFLVLLPLVSSQCVNLTTRTQLPPAYTNSFTRGVYYPDKVFRSSVLHSTQDLFLPFFSNVTWFHAIHVSGTNGTKRFDNPVLPFNDGVYFASTEKSNIIRGWIFGTTLDSKTQSLLIVNNATNVVIKVCEFQFCNDPFLGVYYHKNNKSWMESEFRVYSSANNCTFEYVSQPFLMDLEGKQGNFKNLREFVFKNIDGYFKIYSKHTPINLVRDLPQGFSALEPLVDLPIGINITRFQTLLALHRSYLTPGDSSSGWTAGAAAYYVGYLQPRTFLLKYNENGTITDAVDCALDPLSETKCTLKSFTVEKGIYQTSNFRVQPTESIVRFPNITNLCPFGEVFNATRFASVYAWNRKRISNCVADYSVLYNSASFSTFKCYGVSPTKLNDLCFTNVYADSFVIRGDEVRQIAPGQTGKIADYNYKLPDDFTGCVIAWNSNNLDSKVGGNYNYLYRLFRKSNLKPFERDISTEIYQAGSTPCNGVEGFNCYFPLQSYGFQPTNGVGYQPYRVVVLSFELLHAPATVCGPKKSTNLVKNKCVNFNFNGLTGTGVLTESNKKFLPFQQFGRDIADTTDAVRDPQTLEILDITPCSFGGVSVITPGTNTSNQVAVLYQDLNCTEVPVAIHADQLTPTWRVYSTGSNVFQTRAGCLIGAEHVNNSYECDIPIGAGICASYQTQTNSP

SEQ ID NO: 1294 - protein, 681 aa, Artificial Sequence; identical to SEQ ID NO: 27
  SARS-CoV-2/Hong Kong/case42_VM20002493/2020__EPI_ISL_414527 spike protein (1-681)

SEQ ID NO: 1295 - protein, 681 aa, Artificial Sequence
  SARS-CoV-2/USA/CruiseA-23/2020__EPI_ISL_414482 spike protein (1-681)
MFVFLVLLPLVSSQCVNLTTRTQLPPAYTNSFTRGVYYPDKVFRSSVLHSTQDLFLPFFSNVTWFHAIHVSGTNGTKRFDNPVLPFNDGVYFASTEKSNIIRGWIFGTTLDSKTQSLLIVNNATNVVIKVCEFQFCNDPFLGVYYHKNNKSWMESEFRVYSSANNCTFEYVSQPFLMDLEVKQGNFKNLREFVFKNIDGYFKIYSKHTPINLVRDLPQGFSALEPLVDLPIGINITRFQTLLALHRSYLTPGDSSSGWTAGAAAYYVGYLQPRTFLLKYNENGTITDAVDCALDPLSETKCTLKSFTVEKGIYQTSNFRVQPTESIVRFPNITNLCPFGEVFNATRFASVYAWNRKRISNCVADYSVLYNSASFSTFKCYGVSPTKLNDLCFTNVYADSFVIRGDEVRQIAPGQTGKIADYNYKLPDDFTGCVIAWNSNNLDSKVGGNYNYLYRLFRKSNLKPFERDISTEIYQAGSTPCNGVEGFNCYFPLQSYGFQPTNGVGYQPYRVVVLSFELLHAPATVCGPKKSTNLVKNKCVNFNFNGLTGTGVLTESNKKFLPFQQFGRDIADTTDAVRDPQTLEILDITPCSFGGVSVITPGTNTSNQVAVLYQDVNCTEVPVAIHADQLTPTWRVYSTGSNVFQTRAGCLIGAEHVNNSYECDIPIGAGICASYQTQTNSP

SEQ ID NO: 1296 - protein, 681 aa, Artificial Sequence
  SARS-CoV-2/Hong Kong/case85_VM20002868/2020__EPI_ISL_414519 spike protein (1-681)
MFVFLVLVPLVSSQCVNLTTRTQLPPAYTNSFTRGVYYPDKVFRSSVLHSTQDLFLPFFSNVTWFHAIHVSGTNGTKRFDNPVLPFNDGVYFASTEKSNIIRGWIFGTTLDSKTQSLLIVNNATNVVIKVCEFQFCNDPFLGVYYHKNNKSWMESEFRVYSSANNCTFEYVSQPFLMDLEGKQGNFKNLREFVFKNIDGYFKIYSKHTPINLVRDLPQGFSALEPLVDLPIGINITRFQTLLALHRSYLTPGDSSSGWTAGAAAYYVGYLQPRTFLLKYNENGTITDAVDCALDPLSETKCTLKSFTVEKGIYQTSNFRVQPTESIVRFPNITNLCPFGEVFNATRFASVYAWNRKRISNCVADYSVLYNSASFSTFKCYGVSPTKLNDLCFTNVYADSFVIRGDEVRQIAPGQTGKIADYNYKLPDDFTGCVIAWNSNNLDSKVGGNYNYLYRLFRKSNLKPFERDISTEIYQAGSTPCNGVEGFNCYFPLQSYGFQPTNGVGYQPYRVVVLSFELLHAPATVCGPKKSTNLVKNKCVNFNFNGLTGTGVLTESNKKFLPFQQFGRDIADTTDAVRDPQTLEILDITPCSFGGVSVITPGTNTSNQVAVLYQDVNCTEVPVAIHADQLTPTWRVYSTGSNVFQTRAGCLIGAEHVNNSYECDIPIGAGICASYQTQTNSP

SEQ ID NO: 1297 - protein, 681 aa, Artificial Sequence; identical to SEQ ID NO: 1287
  SARS-CoV-2/England/200990660/2020__EPI_ISL_414523 spike protein (1-681)

SEQ ID NO: 1298 - protein, 681 aa, Artificial Sequence; identical to SEQ ID NO: 27
  SARS-CoV-2/Australia/NSW09/2020__EPI_ISL_413595 spike protein (1-681)

SEQ ID NO: 1299 - protein, 681 aa, Artificial Sequence; identical to SEQ ID NO: 27
  SARS-CoV-2/Australia/NSW10/2020__EPI_ISL_413596 spike protein (1-681)

SEQ ID NO: 1300 - protein, 681 aa, Artificial Sequence
  SARS-CoV-2/Switzerland/1000477797/2020__EPI_ISL_413023 spike protein (1-681)
MFVFLVLLPLVSSQCVNLTTRTQLPPAYTNSFTRGVYYPDKVFRSSVLHSTQDLFLPFFSNVTWFHAIHVSGTNGTKRFDNPVLPFNDGVYFASTEKSNIIRGWIFGTTLDSKTQSLLIVNNATNVVIKVCEFQFCNDPFLGVYYHKNNKSWMESEFRVYSSANNCTFEYVSQPFLMDLEGKQGNFKNLREFVFKNIDGYFNIYSKHTPINLVRDLPQGFSALEPLVDLPIGINITRFQTLLALHRSYLTPGDSSSGWTAGAAAYYVGYLQPRTFLLKYNENGTITDAVDCALDPLSETKCTLKSFTVEKGIYQTSNFRVQPTESIVRFPNITNLCPFGEVFNATRFASVYAWNRKRISNCVADYSVLYNSASFSTFKCYGVSPTKLNDLCFTNVYADSFVIRGDEVRQIAPGQTGKIADYNYKLPDDFTGCVIAWNSNNLDSKVGGNYNYLYRLFRKSNLKPFERDISTEIYQAGSTPCNGVEGFNCYFPLQSYGFQPTNGVGYQPYRVVVLSFELLHAPATVCGPKKSTNLVKNKCVNFNFNGLTGTGVLTESNKKFLPFQQFGRDIADTTDAVRDPQTLEILDITPCSFGGVSVITPGTNTSNQVAVLYQGVNCTEVPVAIHADQLTPTWRVYSTGSNVFQTRAGCLIGAEHVNNSYECDIPIGAGICASYQTQTNSP

SEQ ID NO: 1301 - protein, 681 aa, Artificial Sequence
  SARS-CoV-2/Belgium/BA-02291/2020__EPI_ISL_415159 spike protein (1-681)
MFVFLVLLPLVSSQCVNLTTRTQLPPAYTNSFTRGVYYPDKVFRSSVLHSTQDLFLPFFSNVTWFHAIHVSGTNGTKRFDNPVLPFNDGVYFASTEKSNIIRGWIFGTTLDSKTQSLLIVNNATNVVIKVCEFQFCNDPFLGVYYHKNNKSWMESEFRVYSSANNCTFEYVSQPFLMDLEGKQGNFKNLREFVFKNIDGYFKIYSKHTPINLVRDLPQGFSALEPLVDLPIGINITRFQTLLALHRSYLTPGDSSSGWTAGAAAYYVGYLQPRTFLLKYNENGTITDAVDCALDPLSETKCTLKSFTVEKGIYQTSNFRVQPTESIVRFPNITNLCPFGEVFNATRFASVYAWNRKRISNCVADYSVLYNSASFSTFKCYGVSPTKLNDLCFTNVYADSFVIRGDEVRQIAPGQTGKIADYNYKLPDDFTGCVIAWNSNNLDSKVGGNYNYLYRLFRRSNLKPFERDISTEIYQAGSTPCNGVEGFNCYFPLQSYGFQPTNGVGYQPYRVVVLSFELLPAPATVCGPKKSTNLVKNKCVNFNFNGLTGTGVLTESNKKFLPFQQFGRDIADTTDAVRDPQTLEILDITPCSFGGVSVITPGTNTSNQVAVLYQGVNCTEVPVAIHADQLTPTWRVYSTGSNVFQTRAGCLIGAEHVNNSYECDIPIGAGICASYQTQTNSP

SEQ ID NO: 1302 - protein, 681 aa, Artificial Sequence
  SARS-CoV-2/USA/WA8-UW5/2020__EPI_ISL_413486 spike protein (1-681)
MFVFLVLLPLVSSQCVNLTTRTQLPPAYTNSFTRGVYYPDKVFRSSVLHSTQDLFLPFFSNVTWFHAIHVSGTNGTKRFDNPVLPFNDGVYFASTEKSNIIRGWIFGTTLDSKTQSLLIVNNATNVVIKVCEFQFCNDPFLGVYYHKNNKSWMESEFRVYSSANNCTFEYVSQPFLMDLEGKQGNFKNLREFVFKNIDGYFKIYSKHTPINLVRDLPQGFSALEPLVDLPIGINITRFQTLLALHRSYLTPGDSSSGWTAGAAAYYVGYLQPRTFLLKYNENGTITDAVDCALDPLSETKCTLKSFTVEKGIYQTSNFRVQPTESIVRFPNITNLCPFGEVFNATRFASVYAWNRKRISNCVADYSVLYNSASFSTFKCYGVSPTKLNDLCFTNVYADSFVIRGDEVRQIAPGQTGKIADYNYKLPDDFTGCVIAWNSNNLDSKVGGNYNYLYRLFRKSNLKPFERDISTEIYQAGSTPCNGVEGFNCYFPLQSYGFQPTNGVGYQPYRVVVLSFELLHAPATVCGPKKSTNLVKNKCVNFNFNGLTGTGVLTESNKKFLPFQQFGRDIADTTDAVRDPQTLEILDITPCSFGGVSVITPGTNTSNQVAVLYQDVNCTEVPVAIHADQLTPTWRVYSTGSNVFQTRAGCLIGAEYVNNSYECDIPIGAGICASYQTQTNSP

SEQ ID NO: 1303 - protein, 681 aa, Artificial Sequence; identical to SEQ ID NO: 1287
  SARS-CoV-2/England/20102000506/2020__EPI_ISL_415147 spike protein (1-681)

SEQ ID NO: 1304 - protein, 681 aa, Artificial Sequence; identical to SEQ ID NO: 1287
  SARS-CoV-2/Belgium/VAG-03013/2020__EPI_ISL_415155 spike protein (1-681)

SEQ ID NO: 1305 - protein, 681 aa, Artificial Sequence; identical to SEQ ID NO: 1287
  SARS-CoV-2/Belgium/BC-03016/2020__EPI_ISL_415157 spike protein (1-681)

SEQ ID NO: 1306 - protein, 681 aa, Artificial Sequence; identical to SEQ ID NO: 27
  SARS-CoV-2/Germany/BavPat3/2020__EPI_ISL_414521 spike protein (1-681)

SEQ ID NO: 1307 - protein, 681 aa, Artificial Sequence; identical to SEQ ID NO: 1287
  SARS-CoV-2/France/HF1805/2020__EPI_ISL_414628 spike protein (1-681)

SEQ ID NO: 1308 - protein, 681 aa, Artificial Sequence; identical to SEQ ID NO: 1287
  SARS-CoV-2/Netherlands/ZuidHolland_9/2020__EPI_ISL_414445 spike protein (1-681)

SEQ ID NO: 1309 - protein, 681 aa, Artificial Sequence
  SARS-CoV-2/Finland/FIN03032020A/2020__EPI_ISL_413602 spike protein (1-681)
MFVFLVLLPLVSSQCVNLTTRTQLPPAYTNSFTRGVYYPDKVFRSSVLHSTQDLFLPFFSNVTWFHAIHVSGTNGTKRFDNPVLPFNDGVYFASTEKSNIIRGWIFGTTLDSKTQSLLIVNNATNVVIKVCEFQFCNDPFLGVYYHKNNKSWMESEFRVYSSANNCTFEYVSQPFLMDLEGKQGNFKNLREFVFKNIDGYFKIYSKHTPINLVRDLPQGFSALEPLVDLPIGINITRFQTLLALHRSYLTPGDSSSGWTAGAAAYYVGYLQPRTFLLKYNENGTITDAVDCALDPLSETKCTLKSFTVEKGIYQTSNFRVQPTESIVRFPNITNLCPFGEVFNATRFASVYAWNRKRISNCVADYSVLYNSASFSTFKCYGVSPTKLNDLCFTNVYADSFVIRGDEVRQIAPGQTGKIADYNYKLPDDFTGCVISWNSNNLDSKVGGNYNYLYRLFRKSNLKPFERDISTEIYQAGSTPCNGVEGFNCYFPLQSYGFQPTNGVGYQPYRVVVLSFELLHAPATVCGPKKSTNLVKNKCVNFNFNGLTGTGVLTESNKKFLPFQQFGRDIADTTDAVRDPQTLEILDITPCSFGGVSVITPGTNTSNQVAVLYQGVNCTEVPVAIHADQLTPTWRVYSTGSNVFQTRAGCLIGAEHVNNSYECDIPIGAGICASYQTQTNSP

SEQ ID NO: 1310 - protein, 681 aa, Artificial Sequence; identical to SEQ ID NO: 1287
  SARS-CoV-2/France/GE1977/2020__EPI_ISL_414632 spike protein (1-681)

SEQ ID NO: 1311 - protein, 681 aa, Artificial Sequence
  SARS-CoV-2/Finland/FIN-313/2020__EPI_ISL_414641 spike protein (1-681)
MFVFLVLLPLVSSQCVNLTTRTQLPPAYTNSFTRGVYYPDKVFRSSVLHSTQDLFLPFFSNVTWFHAIHVSGTNGTKRFDNPVLPFNDGVYFASTEKSNIIRGWIFGTTLDSKTQSLLIVNNATNVVIKVCEFQFCNDPFLGVYYHKNNKSWMESEFRVYSSANNCTFEYVSQPFLMDLEGKQGNFKNLREFVFKNIDGYFKIYSKHTPINLVRDLPQGFSALEPLVDLPIGINITRFKTLLALHRSYLTPGDSSSGWTAGAAAYYVGYLQPRTFLLKYNENGTITDAVDCALDPLSETKCTLKSFTVEKGIYQTSNFRVQPTESIVRFPNITNLCPFGEVFNATRFASVYAWNRKRISNCVADYSVLYNSASFSTFKCYGVSPTKLNDLCFTNVYADSFVIRGDEVRQIAPGQTGKIADYNYKLPDDFTGCVIAWNSNNLDSKVGGNYNYLYRLFRKSNLKPFERDISTEIYQAGSTPCNGVEGFNCYFPLQSYGFQPTNGVGYQPYRVVVLSFELLHAPATVCGPKKSTNLVKNKCVNFNFNGLTGTGVLTESNKKFLPFQQFGRDIADTTDAVRDPQTLEILDITPCSFGGVSVITPGTNTSNQVAVLYQGVNCTEVPVAIHADQLTPTWRVYSTGSNVFQTRAGCLIGAEHVNNSYECDIPIGAGICASYQTQTNSP

SEQ ID NO: 1312 - protein, 681 aa, Artificial Sequence; identical to SEQ ID NO: 1287
  SARS-CoV-2/Netherlands/ZuidHolland_2/2020__EPI_ISL_414556 spike protein (1-681)

SEQ ID NO: 1313 - protein, 681 aa, Artificial Sequence
  SARS-CoV-2/USA/WA-UW31/2020__EPI_ISL_414618 spike protein (1-681)
MFVFLVLLPLVSSQCVNLTTRTQLPPAYTNSFTRGVYYPDKVFRSSVLHSTQDLFLPFFSNVTWFHAIHVSGTNGTKRFDNPVLPFNDGVYFASTEKSNIIRGWIFGTTLDSKTQSLLIVNNATNVVIKVCEFQFCNDPFLGVYYHKNNKSWMESEFRVYSSANNCTFEYVSQPFLMDLEGKQGNFKNLREFVFKNIDGYFKIYSKHTPINLVRDLPQGFSALEPLVDLPIGINITRFQTLLALHRSYLTPGDSSSGWTAGAAAYYVGYLQPRTFLLKYNENGTITDAVDCALDPLSETKCTLKSFTVEKGIYQTSNFRVQPTESIVRFPNITNLCPFGEVFNATRFASVYAWNRKRISNCVADYSVLYNSASFSTFKCYGVSPTKLNDLCFTNVYADSFVIRGDEVRQIAPGQTGKIADYNYKLPDDFTGCVIAWNSNNLDSKVGGNYNYLYRLFRKSNLKPFERDISTEIYQAGSTPCNGAEGFNCYFPLQSYGFQPTNGVGYQPYRVVVLSFELLHAPATVCGPKKSTNLVKNKCVNFNFNGLTGTGVLTESNKKFLPFQQFGRDIADTTDAVRDPQTLEILDITPCSFGGVSVITPGTNTSNQVAVLYQDVNCTEVPVAIHADQLTPTWRVYSTGSNVFQTRAGCLIGAEHVNNSYECDIPIGAGICASYQTQTNSP

SEQ ID NO: 1314 - protein, 681 aa, Artificial Sequence
  SARS-CoV-2/South Korea/SNU01/2020__EPI_ISL_411929 spike protein (1-681)
MFVFLVLLPLVSSQCVNLTTRTQLPPAYTNSFTRGVYYPDKVFRSSVLHSTQDLFLPFFSNVTWFHAIHVSGTNGTKRFDNPVLPFNDGVYFASTEKSNIIRGWIFGTTLDSKTQSLLIVNNATNVVIKVCEFQFCNDPFLGVYYHKNNKSWMESEFRVYSSANNCTFEYVSQPFLMDLEGKQGNFKNLREFVFKNIDGYFKIYSKHTPINLVRDLPQGFWALEPLVDLPIGINITRFQTLLALHRSYLTPGDSSSGWTAGAAAYYVGYLQPRTFLLKYNENGTITDAVDCALDPLSETKCTLKSFTVEKGIYQTSNFRVQPTESIVRFPNITNLCPFGEVFNATRFASVYAWNRKRISNCVADYSVLYNSASFSTFKCYGVSPTKLNDLCFTNVYADSFVIRGDEVRQIAPGQTGKIADYNYKLPDDFTGCVIAWNSNNLDSKVGGNYNYLYRLFRKSNLKPFERDISTEIYQAGSTPCNGVEGFNCYFPLQSYGFQPTNGVGYQPYRVVVLSFELLHAPATVCGPKKSTNLVKNKCVNFNFNGLTGTGVLTESNKKFLPFQQFGRDIADTTDAVRDPQTLEILDITPCSFGGVSVITPGTNTSNQVAVLYQDVNCTEVPVAIHADQLTPTWRVYSTGSNVFQTRAGCLIGAEHVNNSYECDIPIGAGICASYQTQTNSP

SEQ ID NO: 1315 - protein, 681 aa, Artificial Sequence
  SARS-CoV-2/China/WF0004/2020__EPI_ISL_413694 spike protein (1-681)
MFVFLVLLPLVSSQCVNLTTRTQLPPAYTNSFTRGVYYPDKVFRSSVLHSTQDLFLPFFSNVTWFHAIHVSGTNGTKRFDNPVLPFNDGVYFASTEKSNIIRGWIFGTTLDSKTQSLLIVNNATNVVIKVCEFQFCNDPFLGVYYHKNNKSWTESEFRVYSSANNCTFEYVSQPFLMDLEGKQGNFKNLREFVFKNIDGYFKIYSKHTPINLVRDLPQGFSALEPLVDLPIGINITRFQTLLALHRSYLTPGDSSSGWTAGAAAYYVGYLQPRTFLLKYNENGTITDAVDCALDPLSETKCTLKSFTVEKGIYQTSNFRVQPTESIVRFPNITNLCPFGEVFNATRFASVYAWNRKRISNCVADYSVLYNSASFSTFKCYGVSPTKLNDLCFTNVYADSFVIRGDEVRQIAPGQTGKIADYNYKLPDDFTGCVIAWNSNNLDSKVGGNYNYLYRLFRKSNLKPFERDISTEIYQAGSTPCNGVEGFNCYFPLQSYGFQPTNGVGYQPYRVVVLSFELLHAPATVCGPKKSTNLVKNKCVNFNFNGLTGTGVLTESNKKFLPFQQFGRDIADTTDAVRDPQTLEILDITPCSFGGVSVITPGTNTSNQVAVLYQDVNCTEVPVAIHADQLTPTWRVYSTGSNVFQTRAGCLIGAEHVNNSYECDIPIGAGICASYQTQTNSP

SEQ ID NO: 1316 - protein, 681 aa, Artificial Sequence; identical to SEQ ID NO: 27
  SARS-CoV-2/China/WF0028/2020__EPI_ISL_413791 spike protein (1-681)

SEQ ID NO: 1317 - protein, 681 aa, Artificial Sequence
  SARS-CoV-2/2019-nCoV/USA-CruiseA-18/2020__MT159716.1 spike protein (1-681)
MFVFLVLLPLVSSQCVNLTTRTQLPPAYTNSFTRGVYYPDKVFRSSVLHSTQDLFLPFFSNVTWFHAIHVSGTNGTKRFDNPVLPFNDGVYFASTEKSNIIRGWIFGTTLDSKTQSLLIVNNATNVVIKVCEFQFCNDPFLGVYYHKNNKSWMESELRVYSSANNCTFEYVSQPFLMDLEGKQGNFKNLREFVFKNIDGYFKIYSKHTPINLVRDLPQGFSALEPLVDLPIGINITRFQTLLALHRSYLTPGDSSSGWTAGAAAYYVGYLQPRTFLLKYNENGTITDAVDCALDPLSETKCTLKSFTVEKGIYQTSNFRVQPTESIVRFPNITNLCPFGEVFNATRFASVYAWNRKRISNCVADYSVLYNSASFSTFKCYGVSPTKLNDLCFTNVYADSFVIRGDEVRQIAPGQTGKIADYNYKLPDDFTGCVIAWNSNNLDSKVGGNYNYLYRLFRKSNLKPFERDISTEIYQAGSTPCNGVEGFNCYFPLQSYGFQPTNGVGYQPYRVVVLSFELLHAPATVCGPKKSTNLVKNKCVNFNFNGLTGTGVLTESNKKFLPFQQFGRDIADTTDAVRDPQTLEILDITPCSFGGVSVITPGTNTSNQVAVLYQDVNCTEVPVAIHADQLTPTWRVYSTGSNVFQTRAGCLIGAEHVNNSYECDIPIGAGICASYQTQTNSP

SEQ ID NO: 1318 - protein, 681 aa, Artificial Sequence
  SARS-CoV-2/SARS-CoV-2/Yunnan-01/human/2020/CHN__MT049951.1 spike protein (1-681)
MFVFLVLLPLVSSQCVNLTTRTQLPPANTNSFTRGVYYPDKVFRSSVLHSTQDLFLPFFSNVTWFHAIHVSGTNGTKRFDNPVLPFNDGVYFASTEKSNIIRGWIFGTTLDSKTQSLLIVNNATNVVIKVCEFQFCNDPFLGVYYHKNNKSWMESEFRVYSSANNCTFEYVSQPFLMDLEGKQGNFKNLREFVFKNIDGYFKIYSKHTPINLVRDLPQGFSALEPLVDLPIGINITRFQTLLALHRSYLTPGDSSSGWTAGAAAYYVGYLQPRTFLLKYNENGTITDAVDCALDPLSETKCTLKSFTVEKGIYQTSNFRVQPTESIVRFPNITNLCPFGEVFNATRFASVYAWNRKRISNCVADYSVLYNSASFSTFKCYGVSPTKLNDLCFTNVYADSFVIRGDEVRQIAPGQTGKIADYNYKLPDDFTGCVIAWNSNNLDSKVGGNYNYLYRLFRKSNLKPFERDISTEIYQAGSTPCNGVEGFNCYFPLQSYGFQPTNGVGYQPYRVVVLSFELLHAPATVCGPKKSTNLVKNKCVNFNFNGLTGTGVLTESNKKFLPFQQFGRDIADTTDAVRDPQTLEILDITPCSFGGVSVITPGTNTSNQVAVLYQDVNCTEVPVAIHADQLTPTWRVYSTGSNVFQTRAGCLIGAEHVNNSYECDIPIGAGICASYQTQTNSP

SEQ ID NO: 1319 - protein, 681 aa, Artificial Sequence
  SARS-CoV-2/USA/WA-UW292/2020__EPI_ISL_418077 spike protein (1-681)
MFVFLVLLPLVSSQCVNLTTRTQLPPAYTNSFTRGVYYPDKVFRSSVLHSTQDLFLPFFSNVTWFHAIHVSGTNGTKRFDNPVLPFNDGVYFASTEKSNIIRGWIFGTTLDSKTQSLLIVNNATNVVIKVCEFQFCNDPFLGVYYHKNNKSWMESEFRVYSSANNCTFEYVSQPFLMDLEGKQGNFKNLREFVFKNIDGYFKIYSKHTPINLVRDLPQGFSALEPLVDLPIGINITRFQTLLALHRSYLTPGDSSSGWTAGAAAYYVGYLQPRTFLLKYNENGTITDAVDCALDPLSETKCTLKSFTVEKGIYQTSNFRVQPTESIVRFPNITNLCPFGEVFNATRFASVYAWNRKRISNCVADYSVLYNSASFSTFKCYGVSPTKLNDLCFTNVYADSFVIRGDEVRQIAPGQTGKIADYNYKLPDDFTGCVIAWNSNNLDSKVGGNYNYLYRLFRKSNLKPFERDISTEIYQASSTPCNGVEGFNCYFPLQSYGFQPTNGVGYQPYRVVVLSFELLHAPATVCGPKKSTNLVKNKCVNFNFNGLTGTGVLTESNKKFLPFQQFGRDIADTTDAVRDPQTLEILDITPCSFGGVSVITPGTNTSNQVAVLYQDVNCTEVPVAIHADQLTPTWRVYSTGSNVFQTRAGCLIGAEHVNNSYECDIPIGAGICASYQTQTNSP

SEQ ID NO: 1320 - protein, 681 aa, Artificial Sequence
  SARS-CoV-2/Iceland/192/2020__EPI_ISL_417819 spike protein (1-681)
MFVFFVLLPLVSSQCVNLTTRTQLPPAYTNSFTRGVYYPDKVFRSSVLHSTQDLFLPFFSNVTWFHAIHVSGTNGTKRFDNPVLPFNDGVYFASTEKSNIIRGWIFGTTLDSKTQSLLIVNNATNVVIKVCEFQFCNDPFLGVYYHKNNKSWMESEFRVYSSANNCTFEYVSQPFLMDLEGKQGNFKNLREFVFKNIDGYFKIYSKHTPINLVRDLPQGFSALEPLVDLPIGINITRFQTLLALHRSYLTPGDSSSGWTAGAAAYYVGYLQPRTFLLKYNENGTITDAVDCALDPLSETKCTLKSFTVEKGIYQTSNFRVQPTESIVRFPNITNLCPFGEVFNATRFASVYAWNRKRISNCVADYSVLYNSASFSTFKCYGVSPTKLNDLCFTNVYADSFVIRGDEVRQIAPGQTGKIADYNYKLPDDFTGCVIAWNSNNLDSKVGGNYNYLYRLFRKSNLKPFERDISTEIYQAGSTPCNGVEGFNCYFPLQSYGFQPTNGVGYQPYRVVVLSFELLHAPATVCGPKKSTNLVKNKCVNFNFNGLTGTGVLTESNKKFLPFQQFGRDIADTTDAVRDPQTLEILDITPCSFGGVSVITPGTNTSNQVAVLYQGVNCTEVPVAIHADQLTPTWRVYSTGSNVFQTRAGCLIGAEHVNNSYECDIPIGAGICASYQTQTNSP

SEQ ID NO: 1321 - protein, 681 aa, Artificial Sequence; identical to SEQ ID NO: 1287
  SARS-CoV-2/Belgium/ULG-6939/2020__EPI_ISL_417020 spike protein (1-681)

SEQ ID NO: 1322 - protein, 681 aa, Artificial Sequence; identical to SEQ ID NO: 1287
  SARS-CoV-2/France/HF2496/2020__EPI_ISL_418231 spike protein (1-681)

SEQ ID NO: 1323 - protein, 681 aa, Artificial Sequence; identical to SEQ ID NO: 1287
  SARS-CoV-2/USA/WA-UW291/2020__EPI_ISL_418076 spike protein (1-681)

SEQ ID NO: 1324 - protein, 681 aa, Artificial Sequence; identical to SEQ ID NO: 1287
  SARS-CoV-2/Portugal/PT0034/2020__EPI_ISL_418019 spike protein (1-681)

SEQ ID NO: 1325 - protein, 681 aa, Artificial Sequence; identical to SEQ ID NO: 27
  SARS-CoV-2/Iceland/202/2020__EPI_ISL_417750 spike protein (1-681)

SEQ ID NO: 1326 - protein, 681 aa, Artificial Sequence
  SARS-CoV-2/USA/WA-UW261/2020__EPI_ISL_418046 spike protein (1-681)
MFVFLVLLPLVSSQCVNLTTRTQLPPAYTNSFTRGVYYPDKVFRSSVLHSTQDLFLPFFSNVTWFHAIHVSGTNGTKRFDNPVLPFNDGVYFASTEKSNIIRGWIFGTTLDSKTQSLLIVNNATNVVIKVCEFQFCNDPFLGVYYHKNNKSWMESEFRVYSSANNCTFEYVSQPFLMDLEGKQGNFKNLREFVFKNIDGYFKIYSKHTPINLVRDLPQGFSALEPLVDLPIGINITRFQTLLALHRSYLTPGDSSSGWTAGAAAYYVGYLQPRTFLLKYNENGTITDAVDCALDPLSETKCTLKSFTVEKGIYQTSNFRVQPTESIVRFPNITNLCPFGEVFNATRFTSVYAWNRKRISNCVADYSVLYNSASFSTFKCYGVSPTKLNDLCFTNVYADSFVIRGDEVRQIAPGQTGKIADYNYKLPDDFTGCVIAWNSNNLDSKVGGNYNYLYRLFRKSNLKPFERDISTEIYQAGSTPCNGVEGFNCYFPLQSYGFQPTNGVGYQPYRVVVLSFELLHAPATVCGPKKSTNLVKNKCVNFNFNGLTGTGVLTESNKKFLPFQQFGRDIADTTDAVRDPQTLEILDITPCSFGGVSVITPGTNTSNQVAVLYQDVNCTEVPVAIHADQLTPTWRVYSTGSNVFQTRAGCLIGAEHVNNSYECDIPIGAGICASYQTQTNSP

SEQ ID NO: 1327 - protein, 681 aa, Artificial Sequence; identical to SEQ ID NO: 27
  SARS-CoV-2/Portugal/PT0035/2020__EPI_ISL_418020 spike protein (1-681)

SEQ ID NO: 1328 - protein, 681 aa, Artificial Sequence
  SARS-CoV-2/USA/NY-NYUMC7/2020__EPI_ISL_418192 spike protein (1-681)
MFVFLVLLPLVSSQCVNLTTRTQLPPAYTNSFTRGVYYPDKVFRSSVLHSTQDLFLPFFSNVTWFHAIHVSGTNGTKRFDNPVLPFNDGVYFASTEKSNIIRGWIFGTTLDSKTQSLLIVNNATNVVIKVCEFQFCNDPFLGVYHHKNNKSWMESEFRVYSSANNCTFEYVSQPFLMDLEGKQGNFKNLREFVFKNIDGYFKIYSKHTPINLVRDLPQGFSALEPLVDLPIGINITRFQTLLALHRSYLTPGDSSSGWTAGAAAYYVGYLQPRTFLLKYNENGTITDAVDCALDPLSETKCTLKSFTVEKGIYQTSNFRVQPTESIVRFPNITNLCPFGEVFNATRFASVYAWNRKRISNCVADYSVLYNSASFSTFKCYGVSPTKLNDLCFTNVYADSFVIRGDEVRQIAPGQTGKIADYNYKLPDDFTGCVIAWNSNNLDSKVGGNYNYLYRLFRKSNLKPFERDISTEIYQAGSTPCNGVEGFNCYFPLQSYGFQPTNGVGYQPYRVVVLSFELLHAPATVCGPKKSTNLVKNKCVNFNFNGLTGTGVLTESNKKFLPFQQFGRDIADTTDAVRDPQTLEILDITPCSFGGVSVITPGTNTSNQVAVLYQGVNCTEVPVAIHADQLTPTWRVYSTGSNVFQTRAGCLIGAEHVNNSYECDIPIGAGICASYQTQTNSP

SEQ ID NO: 1329 - protein, 681 aa, Artificial Sequence; identical to SEQ ID NO: 1287
  SARS-CoV-2/Iceland/189/2020__EPI_ISL_417709 spike protein (1-681)

SEQ ID NO: 1330 - protein, 681 aa, Artificial Sequence; identical to SEQ ID NO: 27
  SARS-CoV-2/Australia/NSW56/2020__EPI_ISL_417408 spike protein (1-681)

SEQ ID NO: 1331 - protein, 681 aa, Artificial Sequence
  SARS-CoV-2/Iceland/280/2020__EPI_ISL_417608 spike protein (1-681)
MFVFLVLLPLVSSQCVNLTTRTQLPPAYTNSFTRGVYYPDKVFRSSVLHSTQDLFLPFFSNVTWFHAIHVSGTNGTKRFDNPVLPFNDGVYFASTEKSNIIRGWIFGTTLDSKTQSLLIVNNATNVVIKVCEFQFCNDPFLGVYYHKNNKSWMESEFRVYSSANNCTFEYVSQPFLMDLEGKQGNFKNLREFVFKNIDGYFKIYSKHTPINLVRDLPQGFSALEPLVDLPIGINITRFQTLLALHRSYLTPGDSSSGWTAGAAAYYVGYLQPRTFLLKYNENGTITDAVDCALDPLSETKCTLKSFTVEKGIYQTSNFRVQPTESIVRFPNITNLCPFGEVFNATRFASVYAWNRKRISNCVADYSVLYNSASFSTFKCYGVSPTKLNDLCFTNVYADSFVIRGDEVRQIAPGQTGKIADYNYKLPDDFTGCVIAWNSNNLDSKVGGNYNYLYRLFRKSNLKPFERDISTEIYQAGSTPCNGVEGFNCYFPLQSYGFQPTNGVGYQPYRVVVLSFELLHAPATVCGPKKSTNLVKNKCVNFNFNGLTGTGVLTESNKKFLPFQQFGRDIADTTDAVRDPQTLEILDITPCSFGGVSVITPGTNTSNQVAVLYQGVNCTEVPVAIHADQLTPTWRVYSTGSNVFQTRAGCLIGAEHVNNSYECDIPIGAGICASYHTQTNSP

SEQ ID NO: 1332 - protein, 681 aa, Artificial Sequence; identical to SEQ ID NO: 1287
  SARS-CoV-2/Iceland/247/2020__EPI_ISL_417575 spike protein (1-681)

SEQ ID NO: 1333 - protein, 681 aa, Artificial Sequence; identical to SEQ ID NO: 1287
  SARS-CoV-2/Iceland/238/2020__EPI_ISL_417566 spike protein (1-681)

SEQ ID NO: 1334 - protein, 681 aa, Artificial Sequence
  SARS-CoV-2/Greece/16/2020__EPI_ISL_418265 spike protein (1-681)
MFVFLVLLPLVSSQCVNLTTRTQLPPAYTNSFTRGVYYPDKVFRSSVLHSTQDLFLPFFSNVTWFHAIHVSGTNGTKRFDNPVLPFNDGVYFASTEKSNIIRGWIFGTTLDSKTQSLLIVNNATNVVIKVCEFQFCNDPFLGVYYHKNNKSWMESEFRVYSSANNCTFEYVSQPFLMDLEGKQGNFKNLREFVFKNVDGYFKIYSKHTPINLVRDLPQGFSALEPLVDLPIGINITRFQTLLALHRSYLTPGDSSSGWTAGAAAYYVGYLQPRTFLLKYNENGTITDAVDCALDPLSETKCTLKSFTVEKGIYQTSNFRVQPTESIVRFPNITNLCPFGEVFNATRFASVYAWNRKRISNCVADYSVLYNSASFSTFKCYGVSPTKLNDLCFTNVYADSFVIRGDEVRQIAPGQTGKIADYNYKLPDDFTGCVIAWNSNNLDSKVGGNYNYLYRLFRKSNLKPFERDISTEIYQAGSTPCNGVEGFNCYFPLQSYGFQPTNGVGYQPYRVVVLSFELLHAPATVCGPKKSTNLVKNKCVNFNFNGLTGTGVLTESNKKFLPFQQFGRDIADTTDAVRDPQTLEILDITPCSFGGVSVITPGTNTSNQVAVLYQDVNCTEVPVAIHADQLTPTWRVYSTGSNVFQTRAGCLIGAEHVNNSYECDIPIGAGICASYQTQTNSP

SEQ ID NO: 1335 - protein, 681 aa, Artificial Sequence
  SARS-CoV-2/Iceland/319/2020__EPI_ISL_417648 spike protein (1-681)
MFVFLVLLPLVSSQCVNLTTRTQLPPAYTNSFTRGVYYPDKVFRSSVLHSTQDLFLPFFSNVTWFHAIHVSGTNGTKRFDNPVLPFNDGVYFASTEKSNIIRGWIFGTTLDSKTQSLLIVNNATNVVIKVCEFQFCNDPFLGVYYHKNNKSWMESEFRVYSSANNCTFEYVSQPFLIDLEGKQGNFKNLREFVFKNIDGYFKIYSKHTPINLVRDLPQGFSALEPLVDLPIGINITRFQTLLALHRSYLTPGDSSSGWTAGAAAYYVGYLQPRTFLLKYNENGTITDAVDCALDPLSETKCTLKSFTVEKGIYQTSNFRVQPTESIVRFPNITNLCPFGEVFNATRFASVYAWNRKRISNCVADYSVLYNSASFSTFKCYGVSPTKLNDLCFTNVYADSFVIRGDEVRQIAPGQTGKIADYNYKLPDDFTGCVIAWNSNNLDSKVGGNYNYLYRLFRKSNLKPFERDISTEIYQAGSTPCNGVEGFNCYFPLQSYGFQPTNGVGYQPYRVVVLSFELLHAPATVCGPKKSTNLVKNKCVNFNFNGLTGTGVLTESNKKFLPFQQFGRDIADTTDAVRDPQTLEILDITPCSFGGVSVITPGTNTSNQVAVLYQGVNCTEVPVAIHADQLTPTWRVYSTGSNVFQTRAGCLIGAEHVNNSYECDIPIGAGICASYQTQTNSP

SEQ ID NO: 1336 - protein, 681 aa, Artificial Sequence; identical to SEQ ID NO: 1287
  SARS-CoV-2/Congo/94/2020__EPI_ISL_417947 spike protein (1-681)

SEQ ID NO: 1337 - protein, 681 aa, Artificial Sequence; identical to SEQ ID NO: 27
  SARS-CoV-2/Congo/158/2020__EPI_ISL_417950 spike protein (1-681)

SEQ ID NO: 1338 - protein, 681 aa, Artificial Sequence
  SARS-CoV-2/USA/UT-00034/2020__EPI_ISL_417977 spike protein (1-681)
MFVFLVLLPLVSSQCVNLTTRTQLPPAYTNSFTRGVYYPDKVFRSSVLHSTQDLFLPFFSNVTWFHAIHVSGTNGTKRFDNPVLPFNDGVYFASTEKSNIIRGWIFGTTLDSKTQSLLIVNNATNVVIKVCEFQFCNDPFLGVYYYKNNKSWMESEFRVYSSANNCTFEYVSQPFLMDLEGKQGNFKNLREFVFKNIDGYFKIYSKHTPINLVRDLPQGFSALEPLVDLPIGINITRFQTLLALHRSYLTPGDSSSGWTAGAAAYYVGYLQPRTFLLKYNENGTITDAVDCALDPLSETKCTLKSFTVEKGIYQTSNFRVQPTESIVRFPNITNLCPFGEVFNATRFASVYAWNRKRISNCVADYSVLYNSASFSTFKCYGVSPTKLNDLCFTNVYADSFVIRGDEVRQIAPGQTGKIADYNYKLPDDFTGCVIAWNSNNLDSKVGGNYNYLYRLFRKSNLKPFERDISTEIYQAGSTPCNGVEGFNCYFPLQSYGFQPTNGVGYQPYRVVVLSFELLHAPATVCGPKKSTNLVKNKCVNFNFNGLTGTGVLTESNKKFLPFQQFGRDIADTTDAVRDPQTLEILDITPCSFGGVSVITPGTNTSNQVAVLYQGVNCTEVPVAIHADQLTPTWRVYSTGSNVFQTRAGCLIGAEHVNNSYECDIPIGAGICASYQTQTNSP

SEQ ID NO: 1339 - protein, 681 aa, Artificial Sequence
  SARS-CoV-2/USA/UT-00033/2020__EPI_ISL_417976 spike protein (1-681)
MFVFLVLLPLVSSQCVNLTTRTQLPPAYTNSFTRGVYYPDKVFRSSVLHSTQDLFLPFFSNVTWFHAIHVSGTNGTKRFDNPVLPFNDGVYFASTEKSNIIRGWIFGTTLDSKTQSLLIVNNATNVVIKVCEFQFCNDPFLGVYYHKNNKSWMESEFRVYSSANNCTFEYVSQPFLMDLEGKQGNFKNLREFVFKNIDGYFKIYSKHTPINLVRDLPQGFSALEPLVDLPIGINITRFQTLLALHRSYLTPGDSSSGLTAGAAAYYVGYLQPRTFLLKYNENGTITDAVDCALDPLSETKCTLKSFTVEKGIYQTSNFRVQPTESIVRFPNITNLCPFGEVFNATRFASVYAWNRKRISNCVADYSVLYNSASFSTFKCYGVSPTKLNDLCFTNVYADSFVIRGDEVRQIAPGQTGKIADYNYKLPDDFTGCVIAWNSNNLDSKVGGNYNYLYRLFRKSNLKPFERDISTEIYQAGSTPCNGVEGFNCYFPLQSYGFQPTNGVGYQPYRVVVLSFELLHAPATVCGPKKSTNLVKNKCVNFNFNGLTGTGVLTESNKKFLPFQQFGRDIADTTDAVRDPQTLEILDITPCSFGGVSVITPGTNTSNQVAVLYQGVNCTEVPVAIHADQLTPTWRVYSTGSNVFQTRAGCLIGAEHVNNSYECDIPIGAGICASYQTQTNSP

SEQ ID NO: 1340 - protein, 681 aa, Artificial Sequence
  SARS-CoV-2/USA/WI-13/2020__EPI_ISL_417516 spike protein (1-681)
MFVFLVLLPLVSSQCVNLTTRTQLPPAYTNSFTRGVYYPDKVFRSSVLHSTQDLFLPFFSNVTWFHAIHVSGTNGTKRFDNPVLPFNDGVYFASTEKSNIIRGWIFGTTLDSKTQSLLIVNNATNVVIKVCEFQFCNDPFLGVYYHKNNKSWMESEFRVYSSANNCTFEYVSQPFLMDLEGKQGNFKNLREFVFKNIDGYFKIYSKHTPINLVRDLPQGFSALEPLVDLPIGINITRFQTLLALHRSYLTPGDSSSGWTAGAAAYYVGYLQPRTFLLKYNENGTITDAVDCALDPLSETKCTLKSFTVEKGIYQTSNFRVLPTESIVRFPNITNLCPFGEVFNATRFASVYAWNRKRISNCVADYSVLYNSASFSTFKCYGVSPTKLNDLCFTNVYADSFVIRGDEVRQIAPGQTGKIADYNYKLPDDFTGCVIAWNSNNLDSKVGGNYNYLYRLFRKSNLKPFERDISTEIYQAGSTPCNGVEGFNCYFPLQSYGFQPTNGVGYQPYRVVVLSFELLHAPATVCGPKKSTNLVKNKCVNFNFNGLTGTGVLTESNKKFLPFQQFGRDIADTTDAVRDPQTLEILDITPCSFGGVSVITPGTNTSNQVAVLYQGVNCTEVPVAIHADQLTPTWRVYSTGSNVFQTRAGCLIGAEHVNNSYECDIPIGAGICASYQTQTNSP

SEQ ID NO: 1341 - protein, 680 aa, Artificial Sequence
  SARS-CoV-2/India/1-27/2020__EPI_ISL_413522 spike protein (1-680)
MFVFLVLLPLVSSQCVNLTTRTQLPPAYTNSFTRGVYYPDKVFRSSVLHSTQDLFLPFFSNVTWFHAIHVSGTNGTKRFDNPVLPFNDGVYFASTEKSNIIRGWIFGTTLDSKTQSLLIVNNATNVVIKVCEFQFCNDPFLGVYHKNNKSWMESEFRVYSSANNCTFEYVSQPFLMDLEGKQGNFKNLREFVFKNIDGYFKIYSKHTPINLVRDLPQGFSALEPLVDLPIGINITRFQTLLALHRSYLTPGDSSSGWTAGAAAYYVGYLQPRTFLLKYNENGTITDAVDCALDPLSETKCTLKSFTVEKGIYQTSNFRVQPTESIVRFPNITNLCPFGEVFNATRFASVYAWNRKRISNCVADYSVLYNSASFSTFKCYGVSPTKLNDLCFTNVYADSFVIRGDEVIQIAPGQTGKIADYNYKLPDDFTGCVIAWNSNNLDSKVGGNYNYLYRLFRKSNLKPFERDISTEIYQAGSTPCNGVEGFNCYFPLQSYGFQPTNGVGYQPYRVVVLSFELLHAPATVCGPKKSTNLVKNKCVNFNFNGLTGTGVLTESNKKFLPFQQFGRDIADTTDAVRDPQTLEILDITPCSFGGVSVITPGTNTSNQVAVLYQDVNCTEVPVAIHADQLTPTWRVYSTGSNVFQTRAGCLIGAEHVNNSYECDIPIGAGICASYQTQTNSP

SEQ ID NO: 1342 - protein, 677 aa, Artificial Sequence
  SARS-CoV-2/pangolin/Guangxi/P4L/2017__EPI_ISL_410538 spike protein (1-677)
MFVFLFVLPLVSSQCVNLTTRTGIPPGYTNSSTRGVYYPDKVFRSSILHLTQDLFLPFFSNVTWFNTINYQGGFKKFDNPVLPFNDGVYFASTEKSNIIRGWIFGTTLDARTQSLLIVNNATNVVIKVCEFQFCTDPFLGVYYHNNNKTWVENEFRVYSSANNCTFEYISQPFLMDLEGKQGNFKNLREFVFKNVDGYFKIYSKHTPIDLVRDLPRGFAALEPLVDLPIGINITRFQTLLALHRSYLTPGNLESGWTTGAAAYYVGYLQQRTFLLSYNQNGTITDAVDCSLDPLSETKCTLKSLTVEKGIYQTSNFRVQPTISIVRFPNITNLCPFGEVFNASKFASVYAWNRKRISNCVADYSVLYNSTSFSTFKCYGVSPTKLNDLCFTNVYADSFVVKGDEVRQIAPGQTGVIADYNYKLPDDFTGCVIAWNSVKQDALTGGNYGYLYRLFRKSKLKPFERDISTEIYQAGSTPCNGQVGLNCYYPLERYGFHPTTGVNYQPFRVVVLSFELLNGPATVCGPKLSTTLVKDKCVNFNFNGLTGTGVLTTSKKQFLPFQQFGRDISDTTDAVRDPQTLEILDITPCSFGGVSVITPGTNTSNQVAVLYQDVNCTEVPMAIHAEQLTPAWRVYSAGANVFQTRAGCLVGAEHVNNSYECDIPVGAGICASYHSMSS

SEQ ID NO: 1343 - protein, 677 aa, Artificial Sequence
  SARS-CoV-2/pangolin/Guangxi/P5L/2017__EPI_ISL_410540 spike protein (1-677)
MFVFLFVLPLVSSQCVNLTTRTGIPPGYTNSSTRGVYYPDKVFRSSILHLTQDLFLPFFSNVTWFNTINYQGGFKKFDNPVLPFNDGVYFASTEKSNIIRGWIFGTTLDARTQSLLIVNNATNVVIKVCEFQFCTDPFLGVYYHNNNKTWVENEFRVYSSANNCTFEYISQPFLMDLEGKQGNFKNLREFVFKNVDGYFKIYSKHTPIDLVRDLPRGFAALEPLVDLPIGINITRFQTLLALHRSYLTPGKLESGWTTGAAAYYVGYLQQRTFLLSYNQNGTITDAVDCSLDPLSETKCTLKSLTVEKGIYQTSNFRVQPTISIVRFPNITNLCPFGEVFNASKFASVYAWNRKRISNCVADYSVLYNSTSFSTFKCYGVSPTKLNDLCFTNVYADSFVVKGDEVRQIAPGQTGVIADYNYKLPDDFTGCVIAWNSVKQDALTGGNYGYLYRLFRKSKLKPFERDISTEIYQAGSTPCNGQVGLNCYYPLERYGFHPTTGVNYQPFRVVVLSFELLNGPATVCGPKLSTTLVKDKCVNFNFNGLTGTGVLTTSKKQFLPFQQFGRDISDTTDAVRDPQTLEILDITPCSFGGVSVITPGTNTSNQVAVLYQDVNCTEVPMAIHAEQLTPAWRVYSAGANVFQTRAGCLVGAEHVNNSYECDIPVGAGICASYHSMSS

SEQ ID NO: 1344 - protein, 677 aa, Artificial Sequence
  SARS-CoV-2/pangolin/Guangxi/P5E/2017__EPI_ISL_410541 spike protein (1-677)
MFVFLFVLPLVSSQCVNLTTRTGIPPGYTNSSTRGVYYPDKVFRSSILHLTQDLFLPFFSNVTWFNTITYQGGSKKFDNPVLPFNDGVYFASTEKSNIIRGWIFGTTLDARTQSLLIVNNATNVVIKVCEFQFCTDPFLGVYYHNNNKTWVENEFRVYSSANNCTFEYISQPFLMDLEGKQGNFKNLREFVFKNVDGYFKIYSKHTPIDLVRDLPRGFAALEPLVDLPIGINITRFQTLLALHRSYLTPGKLESGWTTGAAAYYVGYLQQRTFLLSYNQNGTITDAVDCSLDPLSETKCTLKSLTVEKGIYQTSNFRVQPTISIVRFPNITNLCPFGEVFNASKFASVYAWNRKRISNCVADYSVLYNSTSFSTFKCYGVSPTKLNDLCFTNVYADSFVVKGDEVRQIAPGQTGVIADYNYKLPDDFTGCVIAWNSVKQDALTGDNYGYLYRLFRKSKLKPFERDISTEIYQAGSTPCNGQVGLNCYYPLERYGFHPTTGVNYQPFRVVVLSFELLNGPATVCGPKLSTTLVKDKCVNFNFNGLTGTGVLTTSKKQFLPFQQFGRDISDTTDAVRDPQTLEILDITPCSFGGVSVITPGTNTSNQVAVLYQDVNCTEVPMAIHAEQLTPAWRVYSAGANVFQTRAGCLVGAEHVNNSYECDIPVGAGICASYHSMSS

SEQ ID NO: 1345 - protein, 675 aa, Artificial Sequence
  SARS-CoV-2/pangolin/Guangxi/P1E/2017__EPI_ISL_410539 spike protein (1-675)
MFVFLFVLPLVSSQCVNLTTRTGIQPGYTNSSTRGVYYPDKVFRSSILHLTQDLFLPFFSNVTWFNTINYQGGFKKFDNPVLPFNDGVYFASTEKSNIIRGWIFGTTLDARTQSLLIVNNATNVVIKVCEFQFCTDPFLGVYYHNNNKTWVENEFRVYSSANNCTFEYISQPFLMDLEGKQGNFKNLREFVFKNVDGYFKIYSKHTPIDLVRDLPRGFAALEPLVDLPIGINITRFQTLLALHRSYLTPGKLESGWTTGAAAYYVGYLQQRTFLLSYNQNGTITDAVDCSLDPLSETKCTLKSLTVEKGIYQTSNFRVQPTISIVRFPNITNLCPFGEVFNASKFASVYAWNRKRISNCVADYSVLYNSTSFSTFKCYGVSPTKLNDLCFTNVYADSFVVKGDEVRQIAPGQTGVIADYNYKLPDDFTGCVIAWNSVKQDALTGGNYLYRLFRKSKLKPFERDISTEIYQAGSTPCNGQVGLNCYYPLERYGFHPTTGVNYQPFRVVVLSFELLNGPATVCGPKLSTTLVKDKCVNFNFNGLTGTGVLTTSKKQFLPFQQFGRDISDTTDAVRDPQTLEILDITPCSFGGVSVITPGTNTSNQVAVLYQDVNCTEVPMAIHAEQLTPAWRVYSAGANVFQTRAGCLVGAEHVNNSYECDIPVGAGICASYHSMSS

SEQ ID NO: 1346 - protein, 592 aa, Artificial Sequence; identical to SEQ ID NO: 30
  SARS-CoV-2/Wuhan/WIV05/2019__EPI_ISL_402128 spike protein (682-1273)

SEQ ID NO: 1347 - protein, 589 aa, Artificial Sequence
  SARS-CoV-2/bat/Yunnan/RaTG13/2013__EPI_ISL_402131 spike protein (681-1269)
RSVASQSIIAYTMSLGAENSVAYSNNSIAIPTNFTISVTTEILPVSMTKTSVDCTMYICGDSTECSNLLLQYGSFCTQLNRALTGIAVEQDKNTQEVFAQVKQIYKTPPIKDFGGFNFSQILPDPSKPSKRSFIEDLLFNKVTLADAGFIKQYGDCLGDIAARDLICAQKFNGLTVLPPLLTDEMIAQYTSALLAGTITSGWTFGAGAALQIPFAMQMAYRFNGIGVTQNVLYENQKLIANQFNSAIGKIQDSLSSTASALGKLQDVVNQNAQALNTLVKQLSSNFGAISSVLNDILSRLDKVEAEVQIDRLITGRLQSLQTYVTQQLIRAAEIRASANLAATKMSECVLGQSKRVDFCGKGYHLMSFPQSAPHGVVFLHVTYVPAQEKNFTTAPAICHDGKAHFPREGVFVSNGTHWFVTQRNFYEPQIITTDNTFVSGSCDVVIGIVNNTVYDPLQPELDSFKEELDKYFKNHTSPDVDLGDISGINASVVNIQKEIDRLNEVAKNLNESLIDLQELGKYEQYIKWPWYIWLGFIAGLIAIIMVTIMLCCMTSCCSCLKGCCSCGSCCKFDEDDSEPVLKGVKLHYT

SEQ ID NO: 1348 - protein, 592 aa, Artificial Sequence; identical to SEQ ID NO: 30
  SARS-CoV-2/Wuhan/HBCDC-HB-01/2019__EPI_ISL_402132 spike protein (682-1273)

SEQ ID NO: 1349 - protein, 592 aa, Artificial Sequence; identical to SEQ ID NO: 30
  SARS-CoV-2/Guangdong/20SF028/2020__EPI_ISL_403936 spike protein (682-1273)

SEQ ID NO: 1350 - protein, 592 aa, Artificial Sequence
  SARS-CoV-2/Shenzhen/SZTH-001/2020__EPI_ISL_406592 spike protein (682-1273)
RRARSVASQSIIAYTMSLGAENSVAYSNNSIAIPTNFTISVTTEILPVSMTKTSVDCTMYICGDSTECSNLLLQYGSFCTQLNRALTGIAVEQDKNTQEVFAQVKQIYKTPPIKDFGGFNFSQILPDPSKPSKRSFIEDLLFNKVTLADAGFIKQYGDCLGDIAARDLICAQKFNGLTVLPPLLTDEMIAQYTSALLAGTITSGWTFGAGAALQIPFAMQMAYRFNGIGVTQNVLYENQKLIANQFNSAIGKIQDSLSSTASALGKLQDVVNQNAQALNTLVKQLSSNFGAISSVLNDILSRLDKVEAEVQIDRLITGRLQSLQTYVTQQLIRAAEIRASANLAATKMSECVLGQSKRVDFCGKGYHLMSFPQSAPHGVVFLHVTYVPAQEKNFTTAPAICHDGKAHFPREGVFVSNGTHWFVTQRNFYEPQIITTDNTFVSGNCDVLIGIVNNTVYDPLQPELDSFKEELDKYFKNHTSPDVDLGDISGINASVVNIQKEIDRLNEVAKNLNESLIDLQELGKYEQYIKWPWYIWLGFIAGLIAIVMVTIMLCCMTSCCSCLKGCCSCGSCCKFDEDDSGPVLKGVKLHYT

SEQ ID NO: 1351 - protein, 592 aa, Artificial Sequence; identical to SEQ ID NO: 30
  SARS-CoV-2/Shenzhen/SZTH-004/2020__EPI_ISL_406595 spike protein (682-1273)

SEQ ID NO: 1352 - protein, 592 aa, Artificial Sequence; identical to SEQ ID NO: 30
  SARS-CoV-2/France/IDF0372/2020__EPI_ISL_406596 spike protein (682-1273)

SEQ ID NO: 1353 - protein, 592 aa, Artificial Sequence; identical to SEQ ID NO: 30
  SARS-CoV-2/Australia/VIC01/2020__EPI_ISL_406844 spike protein (682-1273)

SEQ ID NO: 1354 - protein, 592 aa, Artificial Sequence; identical to SEQ ID NO: 30
  SARS-CoV-2/Germany/BavPat1/2020__EPI_ISL_406862 spike protein (682-1273)

SEQ ID NO: 1355 - protein, 592 aa, Artificial Sequence
  SARS-CoV-2/Wuhan/HBCDC-HB-02/2020__EPI_ISL_412978 spike protein (682-1273)
RRARSVASQSIIAYTMSLGAENSVAYSNNSIAIPTNFTISVTTEILPVSMTKTSVDCTMYICGDSTECSNFLLQYGSFCTQLNRALTGIAVEQDKNTQEVFAQVKQIYKTPPIKDFGGFNFSQILPDPSKPSKRSFIEDLLFNKVTLADAGFIKQYGDCLGDIAARDLICAQKFNGLTVLPPLLTDEMIAQYTSALLAGTITSGWTFGAGAALQIPFAMQMAYRFNGIGVTQNVLYENQKLIANQFNSAIGKIQDSLSSTASALGKLQDVVNQNAQALNTLVKQLSSNFGAISSVLNDILSRLDKVEAEVQIDRLITGRLQSLQTYVTQQLIRAAEIRASANLAATKMSECVLGQSKRVDFCGKGYHLMSFPQSAPHGVVFLHVTYVPAQEKNFTTAPAICHDGKAHFPREGVFVSNGTHWFVTQRNFYEPQIITTDNTFVSGNCDVVIGIVNNTVYDPLQPELDSFKEELDKYFKNHTSPDVDLGDISGINASVVNIQKEIDRLNEVAKNLNESLIDLQELGKYEQYIKWPWYIWLGFIAGLIAIVMVTIMLCCMTSCCSCLKGCCSCGSCCKFDEDDSEPVLKGVKLHYT

SEQ ID NO: 1356 - protein, 592 aa, Artificial Sequence
  SARS-CoV-2/Australia/QLD02/2020__EPI_ISL_407896 spike protein (682-1273)
RRARSVASQSIIAYTMSLGAENSVAYSNNSIAIPTNFTISVTTEILPVSMTKTSVDCTMYICGDSTECSNLLLQYGSFCTQLNRALTGIAVEQDKNTQEVFAQVKQIYKTPPIKDFGGFNFSQILPDPSKPSKRSFIEDLLFNKVTLADAGFIKQYGDCLGDIAARDLICAQKFNGLTVLPPLLTDEMIAQYTSALLAGTITSGWTFGAGAALQIPFAMQMAYRFNGIGVTQNVLYENQKLIANQFNSAIGKIQDSLSSTASALGKLQDVVNQNAQALNTLVKQLSSNFGAISSVLNDILSRLDKVEAEVQIDRLITGRLQSLQTYVTQQLIRAAEIRASANLAATKMSECVLGQSKRVDFCGKGYHLMSFPQSAPHGVVFLHVTYVPAQEKNFTTAPAICHDGKAHFPREGVFVSNGTHWFVTQRNFYEPQIITTDNTFVSGNCDVVIGIVNNTVYDPLQLELDSFKEELDKYFKNHTSPDVDLGDISGINASVVNIQKEIDRLNEVAKNLNESLIDLQELGKYEQYIKWPWYIWLGFIAGLIAIVMVTIMLCCMTSCCSCLKGCCSCGSCCKFDEDDSEPVLKGVKLHYT

SEQ ID NO: 1357 - protein, 592 aa, Artificial Sequence
  SARS-CoV-2/India/1-31/2020__EPI_ISL_413523 spike protein (682-1273)
RRARSVASQSIIAYTMSLGAENSVAYSNNSIAIPTNFTISVTTEILPVSMTKTSVDCTMYICGDSTECSNLLLQYGSFCTQLNRALTGIAVEQDKNTQEVFAQVKQIYKTPPIKDFGGFNFSQILPDPSKPSKRSFIEDLLFNKVTLADAGFIKQYGDCLGDIAARDLICAQKFNGLTVLPPLLTDEMIAQYTSALLAGTITSGWTFGAGAALQIPFAMQMAYRFNGIGVTQNVLYENQKLIANQFNSVIGKIQDSLSSTASALGKLQDVVNQNAQALNTLVKQLSSNFGAISSVLNDILSRLDKVEAEVQIDRLITGRLQSLQTYVTQQLIRAAEIRASANLAATKMSECVLGQSKRVDFCGKGYHLMSFPQSAPHGVVFLHVTYVPAQEKNFTTAPAICHDGKAHFPREGVFVSNGTHWFVTQRNFYEPQIITTDNTFVSGNCDVVIGIVNNTVYDPLQPELDSFKEELDKYFKNHTSPDVDLGDISGINASVVNIQKEIDRLNEVAKNLNESLIDLQELGKYEQYIKWPWYIWLGFIAGLIAIVMVTIMLCCMTSCCSCLKGCCSCGSCCKFDEDDSEPVLKGVKLHYT

SEQ ID NO: 1358 - protein, 592 aa, Artificial Sequence; identical to SEQ ID NO: 30
  SARS-CoV-2/Guangdong/GD2020087-P0008/2020__EPI_ISL_413863 spike protein (682-1273)

SEQ ID NO: 1359 - protein, 592 aa, Artificial Sequence
  SARS-CoV-2/Sweden/01/2020__EPI_ISL_411951 spike protein (682-1273)
RRARSVASQSIIAYTMSLGAENSVAYSNNSIAIPTNFTISVTTEILPVSMTKTSVDCTMYICGDSTECSNLLLQYGSFCTQLNRALTGIAVEQDKNTQEVFAQVKQIYKTPPIKDCGGFNFSQILPDPSKPSKRSFIEDLLFNKVTLADAGFIKQYGDCLGDIAARDLICAQKFNGLTVLPPLLTDEMIAQYTSALLAGTITSGWTFGAGAALQIPFAMQMAYRFNGIGVTQNVLYENQKLIANQFNSAIGKIQDSLSSTASALGKLQDVVNQNAQALNTLVKQLSSNFGAISSVLNDILSRLDKVEAEVQIDRLITGRLQSLQTYVTQQLIRAAEIRASANLAATKMSECVLGQSKRVDFCGKGYHLMSFPQSAPHGVVFLHVTYVPAQEKNFTTAPAICHDGKAHFPREGVFVSNGTHWFVTQRNFYEPQIITTDNTFVSGNCDVVIGIVNNTVYDPLQPELDSFKEELDKYFKNHTSPDVDLGDISGINASVVNIQKEIDRLNEVAKNLNESLIDLQELGKYEQYIKWPWYIWLGFIAGLIAIVMVTIMLCCMTSCCSCLKGCCSCGSCCKFDEDDSEPVLKGVKLHYT

SEQ ID NO: 1360 - protein, 592 aa, Artificial Sequence; identical to SEQ ID NO: 30
  SARS-CoV-2/Tianmen/HBCDC-HB-07/2020__EPI_ISL_412983 spike protein (682-1273)

SEQ ID NO: 1361 - protein, 592 aa, Artificial Sequence
  SARS-CoV-2/Hong Kong/case42_VM20002493/2020__EPI_ISL_414527 spike protein (682-1273)
RRARSVASQSIIAYTMSLGAENSVAYSNNSIAIPTNFAISVTTEILPVSMTKTSVDCTMYICGDSTECSNLLLQYGSFCTQLNRALTGIAVEQDKNTQEVFAQVKQIYKTPPIKDFGGFNFSQILPDPSKPSKRSFIEDLLFNKVTLADAGFIKQYGDCLGDIAARDLICAQKFNGLTVLPPLLTDEMIAQYTSALLAGTITSGWTFGAGAALQIPFAMQMAYRFNGIGVTQNVLYENQKLIANQFNSAIGKIQDSLSSTASALGKLQDVVNQNAQALNTLVKQLSSNFGAISSVLNDILSRLDKVEAEVQIDRLITGRLQSLQTYVTQQLIRAAEIRASANLAATKMSECVLGQSKRVDFCGKGYHLMSFPQSAPHGVVFLHVTYVPAQEKNFTTAPAICHDGKAHFPREGVFVSNGTHWFVTQRNFYEPQIITTDNTFVSGNCDVVIGIVNNTVYDPLQPELDSFKEELDKYFKNHTSPDVDLGDISGINASVVNIQKEIDRLNEVAKNLNESLIDLQELGKYEQYIKWPWYIWLGFIAGLIAIVMVTIMLCCMTSCCSCLKGCCSCGSCCKFDEDDSEPVLKGVKLHYT

SEQ ID NO: 1362 - protein, 592 aa, Artificial Sequence; identical to SEQ ID NO: 30
  SARS-CoV-2/USA/CruiseA-23/2020__EPI_ISL_414482 spike protein (682-1273)

SEQ ID NO: 1363 - protein, 592 aa, Artificial Sequence; identical to SEQ ID NO: 30
  SARS-CoV-2/Hong Kong/case85_VM20002868/2020__EPI_ISL_414519 spike protein (682-1273)

SEQ ID NO: 1364 - protein, 592 aa, Artificial Sequence
  SARS-CoV-2/England/200990660/2020__EPI_ISL_414523 spike protein (682-1273)
RRARSVASQSIIAYTMSLGAENSVAYSNNSIAIPTNFTISVTTEILPVSMTKTSVDCTMYICGDSTECSNLLLQYGSFCTQLNRALTGIAVEQDKNTQEVFAQVKQIYKTPPIKDFGGFNFSQILPDPSKPSKRSFIEDLLFNKVTLADAGFIKQYGDCLGDIAARDLICAQKFNGLTVLPPLLTDEMIAQYTSALLAGTITSGWTFGAGAALQIPFAMQMAYRFNGIGVTQNVLYENQKLIANQFNSAIGKIQDSLSSTASALGKLQDVVNQNAQALNTLVKQLSSNFGAISSVLNDILSRLDKVEAEVQIDRLITGRLQSLQTYVTQQLIRAAEIRASANLAATKMSECVLGQSKRVDFCGKGYHLMSFPQSAPHGVVFLHVTYVPAQEKNFTTAPAICHDGKAHFPREGVFVSNGTHWFVTQRNFYEPQIITTDNTFVSGNCDVVIGIVNNTVYDPLQPELDSFKEELDKYFKNHTSPDVDLGDISGINASVVNIQKEIDRLNEVAKNLNESLIDLQELGKYEQYIKWPWYIWLGFIAGLIAIVMVTIMLCCMTSCCSCLKGCCSCGSCCKFDEDDSELVLKGVKLHYT

SEQ ID NO: 1365 - protein, 592 aa, Artificial Sequence
  SARS-CoV-2/Australia/NSW09/2020__EPI_ISL_413595 spike protein (682-1273)
RRARSVASQSIIAYTMSLGAENSVAYSNNSIAIPTNFTISVTTEILPVSMTKTSVDCTMYICGDSTECSNLLLQYGSFCTQLNRALTGIAVEQDKNTQEVFAQVKQIYKTPPIKDFGGFNFSQILPDPSKPSKRSFIEDLLFNKVTLADAGFIKQYGDCLGDIAARDLICAQKFNGLTVLPPLLTDEMIAQYTSALLAGTITSGWTFGAGAALQIPFAMQMAYRFNGIGVTQNVLYENQKLIANQFNSAIGKIQDSLSFTASALGKLQDVVNQNAQALNTLVKQLSSNFGAISSVLNDILSRLDKVEAEVQIDRLITGRLQSLQTYVTQQLIRAAEIRASANLAATKMSECVLGQSKRVDFCGKGYHLMSFPQSAPHGVVFLHVTYVPAQEKNFTTAPAICHDGKAHFPREGVFVSNGTHWFVTQRNFYEPQIITTDNTFVSGNCDVVIGIVNNTVYDPLQPELDSFKEELDKYFKNHTSPDVDLGDISGINASVVNIQKEIDRLNEVAKNLNESLIDLQELGKYEQYIKWPWYIWLGFIAGLIAIVMVTIMLCCMTSCCSCLKGCCSCGSCCKFDEDDSEPVLKGVKLHYT

SEQ ID NO: 1366 - protein, 592 aa, Artificial Sequence
  SARS-CoV-2/Australia/NSW10/2020__EPI_ISL_413596 spike protein (682-1273)
RRARSVASQSIIAYTMSLGAENSVAYSNNSIAIPTNFTISVTTEILPVSMTKTSVDCTMYICGDSTECSNLLLQYGSFCTQLNRALTGIAVEQDKNTQEVFAQVKQIYKTPPIKDFGGFNFSQILPDPSKPSKRSFIEDLLFNKVTLADAGFIKQYGDCLGDIAARDLICAQKFNGLTVLPPLLTDEMIAQYTSALLAGTITSGWTFGAGAALQIPFAMQMAYRFNGIGVTQNVLYENQKLIANQFNSAIGKIQDSLSSTASALGKLQDVVNQNAQALNTLVKQLSSNFGAISSVLNDILSRLDKVEAEVQIDRLITGRLQSLQTYVTQQLIRAAEIRASANLAATKMSECVLGQSKRVDFCGKGYHLMSFPQSAPHGVVFLHVTYVPAQEKNFTTAPAICHDGKAHFPREGVFVSNGTHWFVTQRNFYEPQIITTDNTFVSGNCDVVIGIVNNTVYDPLQPELDSFKEELDKYFKNHTSPDVDLGDISGINASVVNIQKEIDRLNEVAKNLNESLIDLQELGKYEQYIKWPWYIWLGFIAGLIAIVMVTIMLCCMTSCCSCLKGCCSCGSCFKFDEDDSEPVLKGVKLHYT

SEQ ID NO: 1367 - protein, 592 aa, Artificial Sequence; identical to SEQ ID NO: 30
  SARS-CoV-2/Switzerland/1000477797/2020__EPI_ISL_413023 spike protein (682-1273)

SEQ ID NO: 1368 - protein, 592 aa, Artificial Sequence
  SARS-CoV-2/Belgium/BA-02291/2020__EPI_ISL_415159 spike protein (682-1273)
RRARSVASQSIIAYTMSLGAENSVAYSNNSIAIPTNFTISVTTEILPVSMTKTSVDCTMYICGDSTECSNLLLQYGSFCTQLNRALTGIAVEQDKNTQEVFAQVKQIYKTPPIKDFGGFNFSQILPDPSKPSKRSFIEDLLFNKVTLADAGFIKQYGDCLGDIAARDLICAQKFNGLTVLPPLLTDEMIAQYTSALLAGTITSGWTFGAGAALQIPFAMQMAYRFNGIGVTQNVLYENQKLIANQFNSAIGKIQDSLSSAAPALGKLQDVVNQNAQALNTLVKQLSSNFGAISSVLNDILSRLDKVEAEVQIDRLITGRLQSLQTYVTQQLIRAAEIRASANLAATKMSECVLGQSKRVDFCGKGYHLMSFPQSAPHGVVFLHVTYVPAQEKNFTTAPAICHDGKAHFPREGVFVSNGTHWFVTQRNFYEPQIITTDNTFVSGNCDVVIGIVNNTVYDPLQPELDSFKEELDKYFKNHTSPDVDLGDISGINASVVNIQKEIDRLNEVAKNLNESLIDLQELGKYEQYIKWPWYIWLGFIAGLIAIVMVTIMLCCMTSCCSCLKGCCSCGSCCKFDEDDSEPVLKGVKLHYT

SEQ ID NO: 1369 - protein, 592 aa, Artificial Sequence; identical to SEQ ID NO: 30
  SARS-CoV-2/USA/WA8-UW5/2020__EPI_ISL_413486 spike protein (682-1273)

SEQ ID NO: 1370 - protein, 592 aa, Artificial Sequence
  SARS-CoV-2/England/20102000506/2020__EPI_ISL_415147 spike protein (682-1273)
RRARSVASQSIIAYTMSLGAENSVAYSNNSIAIPTNFTISVTTEILPVSMTKTSVDCTMYICGDSTECSNLLLQYGSFCTQLNRALTGIAVEQDKNTQEVFAQVKQIYKTPPIKDFGGFNFSQILPDPSKPSKRSFIEDLLFNKVTLADAGFIKQYGYCLGDIAARDLICAQKFNGLTVLPPLLTDEMIAQYTSALLAGTITSGWTFGAGAALQIPFAMQMAYRFNGIGVTQNVLYENQKLIANQFNSAIGKIQDSLSSTASALGKLQDVVNQNAQALNTLVKQLSSNFGAISSVLNDILSRLDKVEAEVQIDRLITGRLQSLQTYVTQQLIRAAEIRASANLAATKMSECVLGQSKRVDFCGKGYHLMSFPQSAPHGVVFLHVTYVPAQEKNFTTAPAICHDGKAHFPREGVFVSNGTHWFVTQRNFYEPQIITTDNTFVSGNCDVVIGIVNNTVYDPLQPELDSFKEELDKYFKNHTSPDVDLGDISGINASVVNIQKEIDRLNEVAKNLNESLIDLQELGKYEQYIKWPWYIWLGFIAGLIAIVMVTIMLCCMTSCCSCLKGCCSCGSCCKFDEDDSEPVLKGVKLHYT

SEQ ID NO: 1371 - protein, 592 aa, Artificial Sequence
  SARS-CoV-2/Belgium/VAG-03013/2020__EPI_ISL_415155 spike protein (682-1273)
RRARSVASQSIIAYTMSLGAENSVAYSNNSIAIPTNFTISVTTEILPVSMTKTSVDCTMYICGDSTECSNLLLQYGSFCTQLNRALTGIAVEQDKNTQEVFAQVKQIYKTPPIKDFGGFNFSQILPDPSKPSKRSFIEDLLFNKVTLADAGFIKQYGDCLGDIAARDLICAQKFNGLTVLPPLLTDEMIAQYTSALLAGTITSGWTFGAGAALQIPFAMQMAYRFNGIGVTQNVLYENQKLIANQFNSAIGKIQDSLSSTATALGKLQDVVNQNAQALNTLVKQLSSNFGAISSVLNDILSRLDKVEAEVQIDRLITGRLQSLQTYVTQQLIRAAEIRASANLAATKMSECVLGQSKRVDFCGKGYHLMSFPQSAPHGVVFLHVTYVPAQEKNFTTAPAICHDGKAHFPREGVFVSNGTHWFVTQRNFYEPQIITTDNTFVSGNCDVVIGIVNNTVYDPLQPELDSFKEELDKYFKNHTSPDVDLGDISGINASVVNIQKEIDRLNEVAKNLNESLIDLQELGKYEQYIKWPWYIWLGFIAGLIAIVMVTIMLCCMTSCCSCLKGCCSCGSCCKFDEDDSEPVLKGVKLHYT

SEQ ID NO: 1372 - protein, 592 aa, Artificial Sequence
  SARS-CoV-2/Belgium/BC-03016/2020__EPI_ISL_415157 spike protein (682-1273)
RRARSVASQSIIAYTMSLGAENSVAYSNNSIAIPTNFTISVTTEILPVSMTKTSVDCTMYICGDSTECSNLLLQYGSFCTQLNRALTGIAVEQDKNTQEVFAQVKQIYKTPPIKDFGGFNFSQILPDPSKPSKRSFIEDLLFNKVTLADAGFIKQYGDCLGDIAARDLICAQKFNGLTVLPPLLTDEMIAQYTSALLAGTITSGWTFGAGAALQIPFAMQMAYRFNGIGVTQNVLYENQKLIANQFNSAIGKIQDSLSSTAPALGKLQDVVNQNAQALNTLVKQLSSNFGAISSVLNDILSRLDKVEAEVQIDRLITGRLQSLQTYVTQQLIRAAEIRASANLAATKMSECVLGQSKRVDFCGKGYHLMSFPQSAPHGVVFLHVTYVPAQEKNFTTAPAICHDGKAHFPREGVFVSNGTHWFVTQRNFYEPQIITTDNTFVSGNCDVVIGIVNNTVYDPLQPELDSFKEELDKYFKNHTSPDVDLGDISGINASVVNIQKEIDRLNEVAKNLNESLIDLQELGKYEQYIKWPWYIWLGFIAGLIAIVMVTIMLCCMTSCCSCLKGCCSCGSCCKFDEDDSEPVLKGVKLHYT

SEQ ID NO: 1373 - protein, 592 aa, Artificial Sequence
  SARS-CoV-2/Germany/BavPat3/2020__EPI_ISL_414521 spike protein (682-1273)
RRARSVASQSIIAYTMSLGAENSVAYSNNSIAIPTNFTISVTTEILPVSMTKTSVDCTMYICGDSTECSNLLLQYGSFCTQLNRALTGIAVEQDKNTQQVFAQVKQIYKTPPIKDFGGFNFSQILPDPSKPSKRSFIEDLLFNKVTLADAGFIKQYGDCLGDIAARDLICAQKFNGLTVLPPLLTDEMIAQYTSALLAGTITSGWTFGAGAALQIPFAMQMAYRFNGIGVTQNVLYENQKLIANQFNSAIGKIQDSLSSTASALGKLQDVVNQNAQALNTLVKQLSSNFGAISSVLNDILSRLDKVEAEVQIDRLITGRLQSLQTYVTQQLIRAAEIRASANLAATKMSECVLGQSKRVDFCGKGYHLMSFPQSAPHGVVFLHVTYVPAQEKNFTTAPAICHDGKAHFPREGVFVSNGTHWFVTQRNFYEPQIITTDNTFVSGNCDVVIGIVNNTVYDPLQPELDSFKEELDKYFKNHTSPDVDLGDISGINASVVNIQKEIDRLNEVAKNLNESLIDLQELGKYEQYIKWPWYIWLGFIAGLIAIVMVTIMLCCMTSCCSCLKGCCSCGSCCKFDEDDSEPVLKGVKLHYT

SEQ ID NO: 1374 - protein, 592 aa, Artificial Sequence
  SARS-CoV-2/France/HF1805/2020__EPI_ISL_414628 spike protein (682-1273)
RRARSVASQSIIAYTMSLGAENSVAYSNNSIAIPTNFTISVTTEILPVSMTKTSVDCTMYICGDSTECSNLLLQYGSFCTQLNRALTGIAVEQDKNTQEVFAQVKQIYKTPPIKDFGGFNFSQILPDPSKPSKRSFIEDLLFNKVTLADAGFIKQYGDCLGDIAARDLICAQKFNGLTVLPPLLTDEMIAQYTSALLAGTITSGWTFGAGAALQIPFAMQMAYRFNGIGVTQNVLYENQKLIANQFNSAIGKIQDSLSSTASALGKLQDVVNQNAQALNTLVKQLSSNFGAISSVLNDILSRLDKVEAEVQIDRLITGRLQSLQTYVTQQLIRAAEIRASANLAATKMSECVLGQSKRVDFCGKGYHLMSFPQSAPHGVVFLHVTYVPAQEKNFTTAPAICHDGKAHFPREGVFVSNGTHWFVTQRNFYEPQIITTDNTFVSGNCDVVIGVVNNTVYDPLQPELDSFKEELDKYFKNHTSPDVDLGDISGINASVVNIQKEIDRLNEVAKNLNESLIDLQELGKYEQYIKWPWYIWLGFIAGLIAIVMVTIMLCCMTSCCSCLKGCCSCGSCCKFDEDDSEPVLKGVKLHYT

SEQ ID NO: 1375 - protein, 592 aa, Artificial Sequence
  SARS-CoV-2/Netherlands/ZuidHolland_9/2020__EPI_ISL_414445 spike protein (682-1273)
RRARSVASQSIIAYTMSLGAENSVAYSNNSIAIPTNFTISVTTEILPVSMTKTSVDCTMYICGDSTECSNLLLQYGSFCTQLNRALTGIAVEQDKNTQEVFAQVKQIYKTPPIKDFGGFNFSQILPDPSKPSKRSFIEDLLFNKVTLADAGFIKQYGDCLGDIAARDLICVQKFNGLTVLPPLLTDEMIAQYTSALLAGTITSGWTFGAGAALQIPFAMQMAYRFNGIGVTQNVLYENQKLIANQFNSAIGKIQDSLSSTASALGKLQDVVNQNAQALNTLVKQLSSNFGAISSVLNDILSRLDKVEAEVQIDRLITGRLQSLQTYVTQQLIRAAEIRASANLAATKMSECVLGQSKRVDFCGKGYHLMSFPQSAPHGVVFLHVTYVPAQEKNFTTAPAICHDGKAHFPREGVFVSNGTHWFVTQRNFYEPQIITTDNTFVSGNCDVVIGIVNNTVYDPLQPELDSFKEELDKYFKNHTSPDVDLGDISGINASVVNIQKEIDRLNEVAKNLNESLIDLQELGKYEQYIKWPWYIWLGFIAGLIAIVMVTIMLCCMTSCCSCLKGCCSCGSCCKFDEDDSEPVLKGVKLHYT

SEQ ID NO: 1376 - protein, 592 aa, Artificial Sequence; identical to SEQ ID NO: 30
  SARS-CoV-2/Finland/FIN03032020A/2020__EPI_ISL_413602 spike protein (682-1273)

SEQ ID NO: 1377 - protein, 592 aa, Artificial Sequence
  SARS-CoV-2/France/GE1977/2020__EPI_ISL_414632 spike protein (682-1273)
RRARSVASQSIIAYTMSLGAENSVAYSNNSIAIPTNFTISVTTEILPVSMTKTSVDCTMYICGDSTECSNLLLQYGSFCTQLNRALTGIAVEQDKNTQEVFAQVKQIYKTPPIKDFGGFNFSQILPDPSKPSKRSFIEDLLFNKVTLADAGFIKQYGDCLGDIAARDLICAQKFNGLTVLPPLLTDEMIAQYTSALLAGTITSGWTFGAGAALQIPFAMQMAYRFNGIGVTQNVLYENQKLIANQFNSAIGKIQDSLFSTASALGKLQDVVNQNAQALNTLVKQLSSNFGAISSVLNDILSRLDKVEAEVQIDRLITGRLQSLQTYVTQQLIRAAEIRASANLAATKMSECVLGQSKRVDFCGKGYHLMSFPQSAPHGVVFLHVTYVPAQEKNFTTAPAICHDGKAHFPREGVFVSNGTHWFVTQRNFYEPQIITTDNTFVSGNCDVVIGIVNNTVYDPLQPELDSFKEELDKYFKNHTSPDVDLGDISGINASVVNIQKEIDRLNEVAKNLNESLIDLQELGKYEQYIKWPWYIWLGFIAGLIAIVMVTIMLCCMTSCCSCLKGCCSCGSCCKFDEDDSEPVLKGVKLHYT

SEQ ID NO: 1378 - protein, 592 aa, Artificial Sequence; identical to SEQ ID NO: 30
  SARS-CoV-2/Finland/FIN-313/2020__EPI_ISL_414641 spike protein (682-1273)

SEQ ID NO: 1379 - protein, 592 aa, Artificial Sequence
  SARS-CoV-2/Netherlands/ZuidHolland_2/2020__EPI_ISL_414556 spike protein (682-1273)
RRARSVASQSIIAYTMSLGAENSVAYSNNSIAIPTNFTISVTTEILPVSMTKTSVDCTMYICGDSTECSNLLLQYGSFCTQLNRALTGIALEQDKNTQEVFAQVKQIYKTPPIKDFGGFNFSQILPDPSKPSKRSFIEDLLFNKVTLADAGFIKQYGDCLGDIAARDLICAQKFNGLTVLPPLLTDEMIAQYTSALLAGTITSGWTFGAGAALQIPFAMQMAYRFNGIGVTQNVLYENQKLIANQFNSAIGKIQDSLSSTASALGKLQDVVNQNAQALNTLVKQLSSNFGAISSVLNDILSRLDKVEAEVQIDRLITGRLQSLQTYVTQQLIRAAEIRASANLAATKMSECVLGQSKRVDFCGKGYHLMSFPQSAPHGVVFLHVTYVPAQEKNFTTAPAICHDGKAHFPREGVFVSNGTHWFVTQRNFYEPQIITTDNTFVSGNCDVVIGIVNNTVYDPLQPELDSFKEELDKYFKNHTSPDVDLGDISGINASVVNIQKEIDRLNEVAKNLNESLIDLQELGKYEQYIKWPWYIWLGFIAGLIAIVMVTIMLCCMTSCCSCLKGCCSCGSCCKFDEDDSEPVLKGVKLHYT

SEQ ID NO: 1380 - protein, 592 aa, Artificial Sequence; identical to SEQ ID NO: 30
  SARS-CoV-2/USA/WA-UW31/2020__EPI_ISL_414618 spike protein (682-1273)

SEQ ID NO: 1381 - protein, 592 aa, Artificial Sequence; identical to SEQ ID NO: 30
  SARS-CoV-2/South Korea/SNU01/2020__EPI_ISL_411929 spike protein (682-1273)

SEQ ID NO: 1382 - protein, 592 aa, Artificial Sequence
  SARS-CoV-2/China/WF0004/2020__EPI_ISL_413694 spike protein (682-1273)
RRARSVASQSIIAYTMSLGAENSVAYSNNSIAIPTNFTISVTTEILPVSMTKTSVDCTMYICGDSTECSNLLLQYGSFCTQLNRALTGIAVEQDKNTQEVFAQVKQIYKTPPIKDFGGFNFSQILPDPSKPSKRSFIEDLLFNKVTLADAGFIKQYGDCLGDIAARDLICAQKFNGLTVLPPLLTDEMIAQYTSALLAGTITSGWTFGAGAALQIPFAMQMAYRFNGIGVTQNVLYENQKLIANQFNSAIGKIQDSLSSTASALGKLQDVVNQNAQALNTLVKQLSSNFGAISSVLNDILSRLDKVEAEVQIDRLITGRLQSLQTYVTQQLIRAAEIRASANLAATKMSECVLGQSKRFDFCGKGYHLMSFPQSAPHGVVFLHVTYVPAQEKNFTTAPAICHDGKAHFPREGVFVSNGTHWFVTQRNFYEPQIITTDNTFVSGNCDVVIGIVNNTVYDPLQPELDSFKEELDKYFKNHTSPDVDLGDISGINASVVNIQKEIDRLNEVAKNLNESLIDLQELGKYEQYIKWPWYIWLGFIAGLIAIVMVTIMLCCMTSCCSCLKGCCSCGSCCKFDEDDSEPVLKGVKLHYT

SEQ ID NO: 1383 - protein, 592 aa, Artificial Sequence
  SARS-CoV-2/China/WF0028/2020__EPI_ISL_413791 spike protein (682-1273)
RRARSVASQSIIAYTMSLGAENSVAYSNNSIAIPTNFTISVTTEILPVSMTKTSVDCTMYICGDSTECSNLLLQYGSFCTQLNRALTGIAVEQDKNTQEVFAQVKQIYKTPPIKDFGGFNFSQILPDPSKPSKRSFIEDLLFNKVTLADAGFIKQYGDCLGDIAARDLICAQKFNGLTVLPPLLTDEMIAQYTSALLAGTITSGWTFGAGAALQIPFAMQMAYRFNGIGVTQNVLYENQKLIANQFNSAIGKIQDSLSSTASALGKLQDVVNQNAQALNTLVKQLSSNFGAISSVLNDILSRLDKVEAEVQIDRLITGRLQSLQTYVTQQLIRAAEIRASANLAATKMSECVLGQSKRVDFCGKGYHLMSFPQSAPHGVVFLHVTYVPAQEKNFTTAPAICHDGKAHFPREGVFVSNGTHWFVTQRNFYEPQIITTDNTFVSGNCDVVIGIVNNTVYDPLQPELESFKEELDKYFKNHTSPDVDLGDISGINASVVNIQKEIDRLNEVAKNLNESLIDLQELGKYEQYIKWPWYIWLGFIAGLIAIVMVTIMLCCMTSCCSCLKGCCSCGSCCKFDEDDSEPVLKGVKLHYT

SEQ ID NO: 1384 - protein, 592 aa, Artificial Sequence; identical to SEQ ID NO: 30
  SARS-CoV-2/2019-nCoV/USA-CruiseA-18/2020__MT159716.1 spike protein (682-1273)

SEQ ID NO: 1385 - protein, 592 aa, Artificial Sequence; identical to SEQ ID NO: 30
  SARS-CoV-2/SARS-CoV-2/Yunnan-01/human/2020/CHN__MT049951.1 spike protein (682-1273)

SEQ ID NO: 1386 - protein, 592 aa, Artificial Sequence; identical to SEQ ID NO: 30
  SARS-CoV-2/USA/WA-UW292/2020__EPI_ISL_418077 spike protein (682-1273)

SEQ ID NO: 1387 - protein, 592 aa, Artificial Sequence; identical to SEQ ID NO: 30
  SARS-CoV-2/Iceland/192/2020__EPI_ISL_417819 spike protein (682-1273)

SEQ ID NO: 1388 - protein, 592 aa, Artificial Sequence
  SARS-CoV-2/Belgium/ULG-6939/2020__EPI_ISL_417020 spike protein (682-1273)
RRARSVASQSIIAYTMSLGAENSVVYSNNSIAIPTNFTISVTTEILPVSMTKTSVDCTMYICGDSTECSNLLLQYGSFCTQLNRALTGIAVEQDKNTQEVFAQVKQIYKTPPIKDFGGFNFSQILPDPSKPSKRSFIEDLLFNKVTLADAGFIKQYGDCLGDIAARDLICAQKFNGLTVLPPLLTDEMIAQYTSALLAGTITSGWTFGAGAALQIPFAMQMAYRFNGIGVTQNVLYENQKLIANQFNSAIGKIQDSLSSTASALGKLQDVVNQNAQALNTLVKQLSSNFGAISSVLNDILSRLDKVEAEVQIDRLITGRLQSLQTYVTQQLIRAAEIRASANLAATKMSECVLGQSKRVDFCGKGYHLMSFPQSAPHGVVFLHVTYVPAQEKNFTTAPAICHDGKAHFPREGVFVSNGTHWFVTQRNFYEPQIITTDNTFVSGNCDVVIGIVNNTVYDPLQPELDSFKEELDKYFKNHTSPDVDLGDISGINASVVNIQKEIDRLNEVAKNLNESLIDLQELGKYEQYIKWPWYIWLGFIAGLIAIVMVTIMLCCMTSCCSCLKGCCSCGSCCKFDEDDSEPVLKGVKLHYT

SEQ ID NO: 1389 - protein, 592 aa, Artificial Sequence
  SARS-CoV-2/France/HF2496/2020__EPI_ISL_418231 spike protein (682-1273)
RRARSVASQSIIAYTMSLGAENSVAYSNNSIAIPTNFTISVTTEILPVSMTKTSVDCTMYICGDSTECSNLLLQYGSFCTQLNRALTGIAVEQDKNTQEVFAQVKQIYKTPPIKDFGGFNFSQILPDPSKPSKRSFIEDLLFNKVTLADAGFIKQYGDCLGDIVARDLICAQKFNGLTVLPPLLTDEMIAQYTSALLAGTITSGWTFGAGAALQIPFAMQMAYRFNGIGVTQNVLYENQKLIANQFNSAIGKIQDSLSSTASALGKLQDVVNQNAQALNTLVKQLSSNFGAISSVLNDILSRLDKVEAEVQIDRLITGRLQSLQTYVTQQLIRAAEIRASANLAATKMSECVLGQSKRVDFCGKGYHLMSFPQSAPHGVVFLHVTYVPAQEKNFTTAPAICHDGKAHFPREGVFVSNGTHWFVTQRNFYEPQIITTDNTFVSGNCDVVIGIVNNTVYDPLQPELDSFKEELDKYFKNHTSPDVDLGDISGINASVVNIQKEIDRLNEVAKNLNESLIDLQELGKYEQYIKWPWYIWLGFIAGLIAIVMVTIMLCCMTSCCSCLKGCCSCGSCCKFDEDDSEPVLKGVKLHYT

SEQ ID NO: 1390 - protein, 592 aa, Artificial Sequence
  SARS-CoV-2/USA/WA-UW291/2020__EPI_ISL_418076 spike protein (682-1273)
RRARSVASQSIIAYTMSLGAENSVAYSNNSIAIPTNFTISVTTEILPVSMTKTSVDCTMYICGDSTECSNLLLQYGSFCTQLNRALTGIAVEQDKNTQEVFAQVKQIYKTPPIKDFGGFNFSQILPDPSKPSKRSFIEDLLFNKVTLADAGFIKQYGDCLGDIAARDLICAQKFNGLTVLPPLLTDEMIAQYTSALLAGTITSGWTFGAGAALQIPFAMQMAYRFNGIGVTQNVLYENQKLIANQFNSAIGKIQYSLSSTASALGKLQDVVNQNAQALNTLVKQLSSNFGAISSVLNDILSRLDKVEAEVQIDRLITGRLQSLQTYVTQQLIRAAEIRASANLAATKMSECVLGQSKRVDFCGKGYHLMSFPQSAPHGVVFLHVTYVPAQEKNFTTAPAICHDGKAHFPREGVFVSNGTHWFVTQRNFYEPQIITTDNTFVSGNCDVVIGIVNNTVYDPLQPELDSFKEELDKYFKNHTSPDVDLGDISGINASVVNIQKEIDRLNEVAKNLNESLIDLQELGKYEQYIKWPWYIWLGFIAGLIAIVMVTIMLCCMTSCCSCLKGCCSCGSCCKFDEDDSEPVLKGVKLHYT

SEQ ID NO: 1391 - protein, 592 aa, Artificial Sequence
  SARS-CoV-2/Portugal/PT0034/2020__EPI_ISL_418019 spike protein (682-1273)
RRARSVASQSIIAYTMSLGAENSVAYSNNSIAIPTNFTISVTTEILPVSMTKTSVDCTMYICGDSTECSNLLLQYGSFCTQLNRALTGIAVEQDKNTQEVFAQVKQIYKTPPIKDFGGFNFSQILPDPSKPSKRSFIEDLLFNKVTLADAGFIKQYGDCLGDIAARDLICAQKFNGLTVLPPLLTDEMIAQYTSALLAGTITSGWTFGAGAALQIPFAMQMAYRFNGIGVTQNVLYENQKLIANQFNSAIGKIQDSLSSTASALGKLQDVVNQNAQALNTLVKQLSSNFGAISSVLNDILSRLDKVEAEVQIDRLITGRLQSLQTYVTQQLIRAAEIRASANLAATKMSECVLGQSKRVDFCGKGYHLMSFPQSAPHGVVFLHVTYVPAQEKNFTTAPAICHDGKAHFPREGVFVSNGTHWFVTQRNFYEPQIITTDNTFVSGNCDVVIGIVNNTVYDPLQPELDSFKEELDKYFKNHTSPDVDLGDISGINASVVNIQKEIDRLNEVAKNLNESLIDLQELGKYEQYIKWPWYIWLGFIAGLIAIVMVTIMLCCITSCCSCLKGCCSCGSCCKFDEDDSEPVLKGVKLHYT

SEQ ID NO: 1392 - protein, 592 aa, Artificial Sequence
  SARS-CoV-2/Iceland/202/2020__EPI_ISL_417750 spike protein (682-1273)
RRARSVASQSIIAYTMSLGAENSVAYSNNSIAIPTNFTISVTTEILPVSMTKTSVDCTMYICGDSTECSNLLLQYGSFCTQLNRALTGIAVEQDKNTQEVFAQVKQIYKTPPIKDFGGFNFSQILPDPSKPSKRSFIEDLLFNKVTLADAGFIKQYGDCLGDIAARDLICAQKFNGLTVLPPLLTDEMIAQYTSALLAGTITSGWTFGAGAALQIPFAMQMAYRFNGIGVTQNVLYENQKLIANQFNSAIGKIQDSLSSTASALGKLQDVVNQNAQALNTLVKQLSSNFGAISSVLNDILSRLDKVEAEVQIDRLITGRLQSLQTYVTQQLIRAAEIRASANLAATKMSECVLGQSKRVDFCGKGYHLMSFPQSAPHGVVFLHVTYVPAQEKNFTTAPAICHDGKAHFPREGVFVSNGTHWFVTQRNFYEPQIITTDNTFVSGNCDVVIGIVNNTVYDPLQPELDSFKEELDKYFKNHTSPDVDLGDIPGINASVVNIQKEIDRLNEVAKNLNESLIDLQELGKYEQYIKWPWYIWLGFIAGLIAIVMVTIMLCCMTSCCSCLKGCCSCGSCCKFDEDDSEPVLKGVKLHYT

SEQ ID NO: 1393 - protein, 592 aa, Artificial Sequence; identical to SEQ ID NO: 30
  SARS-CoV-2/USA/WA-UW261/2020__EPI_ISL_418046 spike protein (682-1273)

SEQ ID NO: 1394 - protein, 592 aa, Artificial Sequence
  SARS-CoV-2/Portugal/PT0035/2020__EPI_ISL_418020 spike protein (682-1273)
RRARSVASQSIIAYTMSLGAENSVAYSNNSIAIPTNFTISVTTEILPVSMTKTSVDCTMYICGDSTECSNLLLQYGSFCTQLNRALTGIAVEQDKNTQEVFAQVKQIYKTPPIKDFGGFNFSQILPDPSKPSKRSFIEDLLFNKVTLADAGFIKQYGDCLGDISARDLICAQKFNGLTVLPPLLTDEMIAQYTSALLAGTITSGWTFGAGAALQIPFAMQMAYRFNGIGVTQNVLYENQKLIANQFNSAIGKIQDSLSSTASALGKLQDVVNQNAQALNTLVKQLSSNFGAISSVLNDILSRLDKVEAEVQIDRLITGRLQSLQTYVTQQLIRAAEIRASANLAATKMSECVLGQSKRVDFCGKGYHLMSFPQSAPHGVVFLHVTYVPAQEKNFTTAPAICHDGKAHFPREGVFVSNGTHWFVTQRNFYEPQIITTDNTFVSGNCDVVIGIVNNTVYDPLQPELDSFKEELDKYFKNHTSPDVDLGDISGINASVVNIQKEIDRLNEVAKNLNESLIDLQELGKYEQYIKWPWYIWLGFIAGLIAIVMVTIMLCCMTSCCSCLKGCCSCGSCCKFDEDDSEPVLKGVKLHYT

SEQ ID NO: 1395 - protein, 592 aa, Artificial Sequence; identical to SEQ ID NO: 30
  SARS-CoV-2/USA/NY-NYUMC7/2020__EPI_ISL_418192 spike protein (682-1273)

SEQ ID NO: 1396 - protein, 592 aa, Artificial Sequence
  SARS-CoV-2/Iceland/189/2020__EPI_ISL_417709 spike protein (682-1273)
RRARSVASQSIIAYTMSLGAENSVAYSNNSIAIPTNFTISVTTEILPVSMTKTSVDCTMYICGDSTECSNLLLQYGSFCTQLNRALTGIAVEQDKNTQEVFAQVKQIYKTPPIKDFGGFNFSQILPDPSKPSKRSFIEDLLFNKVTLADAGFTKQYGDCLGDIAARDLICAQKFNGLTVLPPLLTDEMIAQYTSALLAGTITSGWTFGAGAALQIPFAMQMAYRFNGIGVTQNVLYENQKLIANQFNSAIGKIQDSLSSTASALGKLQDVVNQNAQALNTLVKQLSSNFGAISSVLNDILSRLDKVEAEVQIDRLITGRLQSLQTYVTQQLIRAAEIRASANLAATKMSECVLGQSKRVDFCGKGYHLMSFPQSAPHGVVFLHVTYVPAQEKNFTTAPAICHDGKAHFPREGVFVSNGTHWFVTQRNFYEPQIITTDNTFVSGNCDVVIGIVNNTVYDPLQPELDSFKEELDKYFKNHTSPDVDLGDISGINASVVNIQKEIDRLNEVAKNLNESLIDLQELGKYEQYIKWPWYIWLGFIAGLIAIVMVTIMLCCMTSCCSCLKGCCSCGSCCKFDEDDSEPVLKGVKLHYT

SEQ ID NO: 1397 - protein, 592 aa, Artificial Sequence
  SARS-CoV-2/Australia/NSW56/2020__EPI_ISL_417408 spike protein (682-1273)
RRARSVASQSIIAYTMSLGAENSVAYSNNSIAIPTNFTISVTTEILPVSMTKTSVDCTMYICGDSTECSNLLLQYGSFCTQLNRALTGIAVEQDKNTQEVFAQVKQIYKTPPIKDFGGFNFSQILPDSSKPSKRSFIEDLLFNKVTLADAGFIKQYGDCLGDIAARDLICAQKFNGLTVLPPLLTDEMIAQYTSALLAGTITSGWTFGAGAALQIPFAMQMAYRFNGIGVTQNVLYENQKLIANQFNSAIGKIQDSLSSTASALGKLQDVVNQNAQALNTLVKQLSSNFGAISSVLNDILSRLDKVEAEVQIDRLITGRLQSLQTYVTQQLIRAAEIRASANLAATKMSECVLGQSKRVDFCGKGYHLMSFPQSAPHGVVFLHVTYVPAQEKNFTTAPAICHDGKAHFPREGVFVSNGTHWFVTQRNFYEPQIITTDNTFVSGNCDVVIGIVNNTVYDPLQPELDSFKEELDKYFKNHTSPDVDLGDISGINASVVNIQKEIDRLNEVAKNLNESLIDLQELGKYEQYIKWPWYIWLGFIAGLIAIVMVTIMLCCMTSCCSCLKGCCSCGSCCKFDEDDSEPVLKGVKLHYT

SEQ ID NO: 1398 - protein, 592 aa, Artificial Sequence; identical to SEQ ID NO: 30
  SARS-CoV-2/Iceland/280/2020__EPI_ISL_417608 spike protein (682-1273)

SEQ ID NO: 1399 - protein, 592 aa, Artificial Sequence
  SARS-CoV-2/Iceland/247/2020__EPI_ISL_417575 spike protein (682-1273)
RRARSVASQSIIAYTMSLGAENSVAYSNNSIAIPTNFTISVTTEILPVSMTKTSVDCTMYICGDSTECSNLLLQYGSFCTQLNRALTGIAVEQDKNTQEVFAQVKQIYKTPPIKDFGGFNFSQILPDPSKPSKRSFIEDLLFNKVTLADAGFIKQYGDCLGDIAARDLICAQKFNGLTVLPPLLTDEMIAQYTSALLAGTITSGWTFGAGAALQIPFAMQMAYRFNGIGVTQNVLYENQKLIANQFNSAIGKIQDSLSSTASALGKLQDVVNQNAQALNTLVKQLSSNFGAISSVLNDILSRLDKVEAEVQIDRLITGRLQSLQTYVTQQLIRAAEIRASANLAATKMSECVLGQSKRVDFCGKGYHLMSFPQSAPHGVVFLHVTYVPAQEKNFTTAPAICHDGKAHFPREGVFVSNGTHWFVTQRNFYEPQIITTDNTFVSGNCDVVIGIVNNTVYDPLQPELDSFKEELDKYFKNHTSPDVDLGDISGINASVVNIQKEIDRLNEVAKNLNESLIDLQELGKYEQYIKWPWYIWLGFIAGLIAIVIVTIMLCCMTSCCSCLKGCCSCGSCCKFDEDDSEPVLKGVKLHYT

SEQ ID NO: 1400 - protein, 592 aa, Artificial Sequence
  SARS-CoV-2/Iceland/238/2020__EPI_ISL_417566 spike protein (682-1273)
RRARSVASQSIIAYTMSLGAENSVAYSNNSIAIPTNFTISVTTEILPVSMTKTSVDCTMYICGDSTECSNLLLQYGSFCTQLNRALTGIAVEQDKNTQEVFAQVKQIYKTPPIKDFGGFNFSQILPDPSKPSKRSFIEDLLFNKVTLADVGFIKQYGDCLGDIAARDLICAQKFNGLTVLPPLLTDEMIAQYTSALLAGTITSGWTFGAGAALQIPFAMQMAYRFNGIGVTQNVLYENQKLIANQFNSAIGKIQDSLSSTASALGKLQDVVNQNAQALNTLVKQLSSNFGAISSVLNDILSRLDKVEAEVQIDRLITGRLQSLQTYVTQQLIRAAEIRASANLAATKMSECVLGQSKRVDFCGKGYHLMSFPQSAPHGVVFLHVTYVPAQEKNFTTAPAICHDGKAHFPREGVFVSNGTHWFVTQRNFYEPQIITTDNTFVSGNCDVVIGIVNNTVYDPLQPELDSFKEELDKYFKNHTSPDVDLGDISGINASVVNIQKEIDRLNEVAKNLNESLIDLQELGKYEQYIKWPWYIWLGFIAGLIAIVMVTIMLCCMTSCCSCLKGCCSCGSCCKFDEDDSEPVLKGVKLHYT

SEQ ID NO: 1401 - protein, 592 aa, Artificial Sequence; identical to SEQ ID NO: 30
  SARS-CoV-2/Greece/16/2020__EPI_ISL_418265 spike protein (682-1273)

SEQ ID NO: 1402 - protein, 592 aa, Artificial Sequence; identical to SEQ ID NO: 30
  SARS-CoV-2/Iceland/319/2020__EPI_ISL_417648 spike protein (682-1273)

SEQ ID NO: 1403 - protein, 592 aa, Artificial Sequence
  SARS-CoV-2/Congo/94/2020__EPI_ISL_417947 spike protein (682-1273)
RRARSVASQSIIAYTMSLGAENSVAYSNNSIAIPTNFTISVTTEILPVSMTKTSVDCTMYICGDSTECSNLLLQYGSFCTQLNRALTGIAVEQDKNTQEVFAQVKQIYKTPPIKDFGGFNFSQILPDPSKPSKRSFIEDILFNKVTLADAGFIKQYGDCLGDIAARDLICAQKFNGLTVLPPLLTDEMIAQYTSALLAGTITSGWTFGAGAALQIPFAMQMAYRFNGIGVTQNVLYENQKLIANQFNSAIGKIQDSLSSTASALGKLQDVVNQNAQALNTLVKQLSSNFGAISSVLNDILSRLDKVEAEVQIDRLITGRLQSLQTYVTQQLIRAAEIRASANLAATKMSECVLGQSKRVDFCGKGYHLMSFPQSAPHGVVFLHVTYVPAQEKNFTTAPAICHDGKAHFPREGVFVSNGTHWFVTQRNFYEPQIITTDNTFVSGNCDVVIGIVNNTVYDPLQPELDSFKEELDKYFKNHTSPDVDLGDISGINASVVNIQKEIDRLNEVAKNLNESLIDLQELGKYEQYIKWPWYIWLGFIAGLIAIVMVTIMLCCMTSCCSCLKGCCSCGSCCKFDEDDSEPVLKGVKLHYT

SEQ ID NO: 1404 - protein, 592 aa, Artificial Sequence
  SARS-CoV-2/Congo/158/2020__EPI_ISL_417950 spike protein (682-1273)
RRARSVASQSIIAYTMSLGAENSVAYSNNSIAIPTNFTISVTTEILPVSMTKTSVDCTMYICGDSTECSNLLLQYGSFCTQLNRALTGIAVEQDKNTQEVFAQVKQIYKTPPIKDFGGFNFSQILPDPSKPSKRSFIEDLLFNKVTLADAGFIKQYGDCLGDIAARDLICAQKFNGLTVLPPLLTDEMIAQYTSALLAGTITSGWTFGAGAALQIPFAMQMAYRFNGIGVTQNVLYENQKLIANQFNSAIGKIQDSLSSTASALGKLQDVVNQNAQALNTLVKQLSSNFGAISSVLNDILSRLDKVEAEVQIDRLITGRLQSLQTYVTQQLIRAAEIRASANLAATKMSECVLGQSKRVDFCGKGYHLMSFPQSAPHGVVFLHVTYVPAQEKNFTTAPAICHDGKAHFPREGVFVSNGTHWFVTQRNFYEPQIITTDNTFLSGNCDVVIGIVNNTVYDPLQPELDSFKEELDKYFKNHTSPDVDLGDISGINASVVNIQKEIDRLNEVAKNLNESLIDLQELGKYEQYIKWPWYIWLGFIAGLIAIVMVTIMLCCMTSCCSCLKGCCSCGSCCKFDEDDSEPVLKGVKLHYT

SEQ ID NO: 1405 - protein, 592 aa, Artificial Sequence; identical to SEQ ID NO: 30
  SARS-CoV-2/USA/UT-00034/2020__EPI_ISL_417977 spike protein (682-1273)

SEQ ID NO: 1406 - protein, 592 aa, Artificial Sequence; identical to SEQ ID NO: 30
  SARS-CoV-2/USA/UT-00033/2020__EPI_ISL_417976 spike protein (682-1273)

SEQ ID NO: 1407 - protein, 592 aa, Artificial Sequence; identical to SEQ ID NO: 30
  SARS-CoV-2/USA/WI-13/2020__EPI_ISL_417516 spike protein (682-1273)

SEQ ID NO: 1408 - protein, 592 aa, Artificial Sequence; identical to SEQ ID NO: 30
  SARS-CoV-2/India/1-27/2020__EPI_ISL_413522 spike protein (682-1272)

SEQ ID NO: 1409 - protein, 590 aa, Artificial Sequence
  SARS-CoV-2/pangolin/Guangxi/P4L/2017__EPI_ISL_410538 spike protein (682-1267)
LRSVNQRSIIAYTMSLGAENSVAYSNNSIAIPTNFTISVTTEILPVSMTKTSVDCTMYICGDSIECSNLLLQYGSFCTQLNRALTGIAVEQDKNTQEVFAQVKQIYKTPPIKDFGGFNFSQILPDPSKPSKRSFIEDLLFNKVTLADAGFIKQYGDCLGDIAARDLICAQKFNGLTVLPPLLTDEMIAQYTSALLAGTITSGWTFGAGAALQIPFAMQMAYRFNGIGVTQNVLYENQKLIANQFNSAIGKIQDSLSSTASALGKLQDVVNQNAQALNTLVKQLSSNFGAISSVLNDILSRLDKVEAEVQIDRLITGRLQSLQTYVTQQLIRAAEIRASANLAATKMSECVLGQSKRVDFCGKGYHLMSFPQSAPHGVVFLHVTYVPAQEKNFTTAPAICHEGKAHFPREGVFVSNGTHWFITQRNFYEPQIITTDNTFVSGSCDVVIGIVNNTVYDPLQPELDSFKEELDKYFKNHTSPDVDLGDISGINASVVNIQKEIDRLNEVAKNLNESPIDLQELGKYEQYIKWPWYIWLGFIAGLIAIIMVTIMLCCMTSCCSCLKGCCSCGSCCKFDEDDSEPVLKGVKLHYT

SEQ ID NO: 1410 - protein, 590 aa, Artificial Sequence
  SARS-CoV-2/pangolin/Guangxi/P5L/2017__EPI_ISL_410540 spike protein (682-1267)
FRSVNQRSIIAYTMSLGAENSVAYSNNSIAIPTNFTISVTTEILPVSMTKTSVDCTMYICGDSIECSNLLLQYGSFCTQLNRALTGIAVEQDKNTQEVFAQVKQIYKTPPIKDFGGFNFSQILPDPSKPSKRSFIEDLLFNKVTLADAGFIKQYGDCLGDIAARDLICAQKFNGLTVLPPLLTDEMIAQYTSALLAGTITSGWTFGAGAALQIPFAMQMAYRFNGIGVTQNVLYENQKLIANQFNSAIGKIQDSLSSTASALGKLQDVVNQNAQALNTLVKQLSSNFGAISSVLNDILSRLDKVEAEVQIDRLITGRLQSLQTYVTQQLIRAAEIRASANLAATKMSECVLGQSKRVDFCGKGYHLMSFPQSAPHGVVFLHVTYVPAQEKNFTTAPAICHEGKAHFPREGVFVSNGTHWFITQRNFYEPQIITTDNTFVSGSCDVVIGIVNNTVYDPLQPELDSFKEELDKYFKNHTSPDVDLGDISGINASVVNIQKEIDRLNEVAKNLNESLIDLQELGKYEQYIKWPWYIWLGFIAGLIAIIMVTIMLCCMTSCCSCLKGCCSCGSCCKFDEDDSEPVLKGVKLHYT

SEQ ID NO: 1411 - protein, 590 aa, Artificial Sequence; identical to SEQ ID NO: 1410
  SARS-CoV-2/pangolin/Guangxi/P5E/2017__EPI_ISL_410541 spike protein (682-1267)

SEQ ID NO: 1412 - protein, 590 aa, Artificial Sequence
  SARS-CoV-2/pangolin/Guangxi/P1E/2017__EPI_ISL_410539 spike protein (675-1265)
LRSVNQRSIIAYTMSLGAENSVAYSNNSIAIPTNFTISVTTEILPVSMTKTSVDCTMYICGDSIECSNLLLQYGSFCTQLNRALTGIAVEQDKNTQEVFAQVKQIYKTPPIKDFGGFNFSQILPDPSKPSKRSFIEDLLFNKVTLADAGFIKQYGDCLGDIAARDLICAQKFNGLTVLPPLLTDEMIAQYTSALLAGTITSGWTFGAGAALQIPFAMQMAYRFNGIGVTQNVLYENQKLIANQFNSAIGKIQDSLSSTASALGKLQDVVNQNAQALNTLVKQLSSNFGAISSVLNDILSRLDKVEAEVQIDRLITGRLQSLQTYVTQQLIRAAEIRASANLAATKMSECVLGQSKRVDFCGKGYHLMSFPQSAPHGVVFLHVTYVPAQEKNFTTAPAICHEGKAHFPREGVFVSNGTHWFITQRNFYEPQIITTDNTFVSGSCDVVIGIVNNTVYDPLQPELDSFKEELDKYFKNHTSPDVDLGDISGINASVVNIQKEIDRLNEVAKNLNESLIDLQELGKYEQYIKWPWYIWLGFIAGLIAIIMVTIMLCCMTSCCSCLKGCCSCGSCCKFDEDDSEPVLKGVKLHYT

SEQ ID NO: 1413 - protein, 15 aa, Artificial Sequence
  SARS-CoV-2/Wuhan/WIV05/2019__EPI_ISL_402128 spike protein (1-15)
MFVFLVLLPLVSSQC

SEQ ID NO: 1414 - protein, 15 aa, Artificial Sequence
  SARS-CoV-2/bat/Yunnan/RaTG13/2013__EPI_ISL_402131 spike protein (1-15)
MFVFLVLLPLVSSQC

SEQ ID NO: 1415 - protein, 15 aa, Artificial Sequence
  SARS-CoV-2/Wuhan/HBCDC-HB-01/2019__EPI_ISL_402132 spike protein (1-15)
MFVFLVLLPLVSSQC

SEQ ID NO: 1416 - protein, 15 aa, Artificial Sequence
  SARS-CoV-2/Guangdong/20SF028/2020__EPI_ISL_403936 spike protein (1-15)
MFVFLVLLPLVSSQC

SEQ ID NO: 1417 - protein, 15 aa, Artificial Sequence
  SARS-CoV-2/Shenzhen/SZTH-001/2020__EPI_ISL_406592 spike protein (1-15)
MFVFLVLLPLVSSQC

SEQ ID NO: 1418 - protein, 15 aa, Artificial Sequence
  SARS-CoV-2/Shenzhen/SZTH-004/2020__EPI_ISL_406595 spike protein (1-15)
MFVFLVLLPLVSSQC

SEQ ID NO: 1419 - protein, 15 aa, Artificial Sequence
  SARS-CoV-2/France/IDF0372/2020__EPI_ISL_406596 spike protein (1-15)
MFVFLVLLPLVSSQC

SEQ ID NO: 1420 - protein, 15 aa, Artificial Sequence
  SARS-CoV-2/Australia/VIC01/2020__EPI_ISL_406844 spike protein (1-15)
MFVFLVLLPLVSSQC

SEQ ID NO: 1421 - protein, 15 aa, Artificial Sequence
  SARS-CoV-2/Germany/BavPat1/2020__EPI_ISL_406862 spike protein (1-15)
MFVFLVLLPLVSSQC

SEQ ID NO: 1422 - protein, 15 aa, Artificial Sequence
  SARS-CoV-2/Wuhan/HBCDC-HB-02/2020__EPI_ISL_412978 spike protein (1-15)
MFVFLVLLPLVSSQC

SEQ ID NO: 1423 - protein, 15 aa, Artificial Sequence
  SARS-CoV-2/Australia/QLD02/2020__EPI_ISL_407896 spike protein (1-15)
MFVFLVLLPLVSSQC

SEQ ID NO: 1424 - protein, 15 aa, Artificial Sequence
  SARS-CoV-2/India/1-31/2020__EPI_ISL_413523 spike protein (1-15)
MFVFLVLLPLVSSQC

SEQ ID NO: 1425 - protein, 15 aa, Artificial Sequence
  SARS-CoV-2/Guangdong/GD2020087-P0008/2020__EPI_ISL_413863 spike protein (1-15)
MFVFLVLLPLVSSQC

SEQ ID NO: 1426 - protein, 15 aa, Artificial Sequence
  SARS-CoV-2/Sweden/01/2020__EPI_ISL_411951 spike protein (1-15)
MFVFLVLLPLVSSQC

SEQ ID NO: 1427 - protein, 15 aa, Artificial Sequence
  SARS-CoV-2/Tianmen/HBCDC-HB-07/2020__EPI_ISL_412983 spike protein (1-15)
MFVFLVLLPLVSSQC

SEQ ID NO: 1428 - protein, 15 aa, Artificial Sequence
  SARS-CoV-2/Hong Kong/case42_VM20002493/2020__EPI_ISL_414527 spike protein (1-15)
MFVFLVLLPLVSSQC

SEQ ID NO: 1429 - protein, 15 aa, Artificial Sequence
  SARS-CoV-2/USA/CruiseA-23/2020__EPI_ISL_414482 spike protein (1-15)
MFVFLVLLPLVSSQC

SEQ ID NO: 1430 - protein, 15 aa, Artificial Sequence
  SARS-CoV-2/Hong Kong/case85_VM20002868/2020__EPI_ISL_414519 spike protein (1-15)
MFVFLVLVPLVSSQC

SEQ ID NO: 1431 - protein, 15 aa, Artificial Sequence
  SARS-CoV-2/England/200990660/2020__EPI_ISL_414523 spike protein (1-15)
MFVFLVLLPLVSSQC

SEQ ID NO: 1432 - protein, 15 aa, Artificial Sequence
  SARS-CoV-2/Australia/NSW09/2020__EPI_ISL_413595 spike protein (1-15)
MFVFLVLLPLVSSQC

SEQ ID NO: 1433 - protein, 15 aa, Artificial Sequence
  SARS-CoV-2/Australia/NSW10/2020__EPI_ISL_413596 spike protein (1-15)
MFVFLVLLPLVSSQC

SEQ ID NO: 1434 - protein, 15 aa, Artificial Sequence
  SARS-CoV-2/Switzerland/1000477797/2020__EPI_ISL_413023 spike protein (1-15)
MFVFLVLLPLVSSQC

SEQ ID NO: 1435 - protein, 15 aa, Artificial Sequence
  SARS-CoV-2/Belgium/BA-02291/2020__EPI_ISL_415159 spike protein (1-15)
MFVFLVLLPLVSSQC

SEQ ID NO: 1436 - protein, 15 aa, Artificial Sequence
  SARS-CoV-2/USA/WA8-UW5/2020__EPI_ISL_413486 spike protein (1-15)
MFVFLVLLPLVSSQC

SEQ ID NO: 1437 - protein, 15 aa, Artificial Sequence
  SARS-CoV-2/England/20102000506/2020__EPI_ISL_415147 spike protein (1-15)
MFVFLVLLPLVSSQC

SEQ ID NO: 1438 - protein, 15 aa, Artificial Sequence
  SARS-CoV-2/Belgium/VAG-03013/2020__EPI_ISL_415155 spike protein (1-15)
MFVFLVLLPLVSSQC

SEQ ID NO: 1439 - protein, 15 aa, Artificial Sequence
  SARS-CoV-2/Belgium/BC-03016/2020__EPI_ISL_415157 spike protein (1-15)
MFVFLVLLPLVSSQC

SEQ ID NO: 1440 - protein, 15 aa, Artificial Sequence
  SARS-CoV-2/Germany/BavPat3/2020__EPI_ISL_414521 spike protein (1-15)
MFVFLVLLPLVSSQC

SEQ ID NO: 1441 - protein, 15 aa, Artificial Sequence
  SARS-CoV-2/France/HF1805/2020__EPI_ISL_414628 spike protein (1-15)
MFVFLVLLPLVSSQC

SEQ ID NO: 1442 - protein, 15 aa, Artificial Sequence
  SARS-CoV-2/Netherlands/ZuidHolland_9/2020__EPI_ISL_414445 spike protein (1-15)
MFVFLVLLPLVSSQC

SEQ ID NO: 1443 - protein, 15 aa, Artificial Sequence
  SARS-CoV-2/Finland/FIN03032020A/2020__EPI_ISL_413602 spike protein (1-15)
MFVFLVLLPLVSSQC

SEQ ID NO: 1444 - protein, 15 aa, Artificial Sequence
  SARS-CoV-2/France/GE1977/2020__EPI_ISL_414632 spike protein (1-15)
MFVFLVLLPLVSSQC

SEQ ID NO: 1445 - protein, 15 aa, Artificial Sequence
  SARS-CoV-2/Finland/FIN-313/2020__EPI_ISL_414641 spike protein (1-15)
MFVFLVLLPLVSSQC

SEQ ID NO: 1446 - protein, 15 aa, Artificial Sequence
  SARS-CoV-2/Netherlands/ZuidHolland_2/2020__EPI_ISL_414556 spike protein (1-15)
MFVFLVLLPLVSSQC

SEQ ID NO: 1447 - protein, 15 aa, Artificial Sequence
  SARS-CoV-2/USA/WA-UW31/2020__EPI_ISL_414618 spike protein (1-15)
MFVFLVLLPLVSSQC

SEQ ID NO: 1448 - protein, 15 aa, Artificial Sequence
  SARS-CoV-2/South Korea/SNU01/2020__EPI_ISL_411929 spike protein (1-15)
MFVFLVLLPLVSSQC

SEQ ID NO: 1449 - protein, 15 aa, Artificial Sequence
  SARS-CoV-2/China/WF0004/2020__EPI_ISL_413694 spike protein (1-15)
MFVFLVLLPLVSSQC

SEQ ID NO: 1450 - protein, 15 aa, Artificial Sequence
  SARS-CoV-2/China/WF0028/2020__EPI_ISL_413791 spike protein (1-15)
MFVFLVLLPLVSSQC

SEQ ID NO: 1451 - protein, 15 aa, Artificial Sequence
  SARS-CoV-2/2019-nCoV/USA-CruiseA-18/2020__MT159716.1 spike protein (1-15)
MFVFLVLLPLVSSQC

SEQ ID NO: 1452 - protein, 15 aa, Artificial Sequence
  SARS-CoV-2/SARS-CoV-2/Yunnan-01/human/2020/CHN__MT049951.1 spike protein (1-15)
MFVFLVLLPLVSSQC

SEQ ID NO: 1453 - protein, 15 aa, Artificial Sequence
  SARS-CoV-2/USA/WA-UW292/2020__EPI_ISL_418077 spike protein (1-15)
MFVFLVLLPLVSSQC

SEQ ID NO: 1454 - protein, 15 aa, Artificial Sequence
  SARS-CoV-2/Iceland/192/2020__EPI_ISL_417819 spike protein (1-15)
MFVFFVLLPLVSSQC

SEQ ID NO: 1455 - protein, 15 aa, Artificial Sequence
  SARS-CoV-2/Belgium/ULG-6939/2020__EPI_ISL_417020 spike protein (1-15)
MFVFLVLLPLVSSQC

SEQ ID NO: 1456 - protein, 15 aa, Artificial Sequence
  SARS-CoV-2/France/HF2496/2020__EPI_ISL_418231 spike protein (1-15)
MFVFLVLLPLVSSQC

SEQ ID NO: 1457 - protein, 15 aa, Artificial Sequence
  SARS-CoV-2/USA/WA-UW291/2020__EPI_ISL_418076 spike protein (1-15)
MFVFLVLLPLVSSQC

SEQ ID NO: 1458 - protein, 15 aa, Artificial Sequence
  SARS-CoV-2/Portugal/PT0034/2020__EPI_ISL_418019 spike protein (1-15)
MFVFLVLLPLVSSQC

SEQ ID NO: 1459 - protein, 15 aa, Artificial Sequence
  SARS-CoV-2/Iceland/202/2020__EPI_ISL_417750 spike protein (1-15)
MFVFLVLLPLVSSQC

SEQ ID NO: 1460 - protein, 15 aa, Artificial Sequence
  SARS-CoV-2/USA/WA-UW261/2020__EPI_ISL_418046 spike protein (1-15)
MFVFLVLLPLVSSQC

SEQ ID NO: 1461 - protein, 15 aa, Artificial Sequence
  SARS-CoV-2/Portugal/PT0035/2020__EPI_ISL_418020 spike protein (1-15)
MFVFLVLLPLVSSQC

SEQ ID NO: 1462 - protein, 15 aa, Artificial Sequence
  SARS-CoV-2/USA/NY-NYUMC7/2020__EPI_ISL_418192 spike protein (1-15)
MFVFLVLLPLVSSQC

SEQ ID NO: 1463 - protein, 15 aa, Artificial Sequence
  SARS-CoV-2/Iceland/189/2020__EPI_ISL_417709 spike protein (1-15)
MFVFLVLLPLVSSQC

SEQ ID NO: 1464 - protein, 15 aa, Artificial Sequence
  SARS-CoV-2/Australia/NSW56/2020__EPI_ISL_417408 spike protein (1-15)
MFVFLVLLPLVSSQC

SEQ ID NO: 1465 - protein, 15 aa, Artificial Sequence
  SARS-CoV-2/Iceland/280/2020__EPI_ISL_417608 spike protein (1-15)
MFVFLVLLPLVSSQC

SEQ ID NO: 1466 - protein, 15 aa, Artificial Sequence
  SARS-CoV-2/Iceland/247/2020__EPI_ISL_417575 spike protein (1-15)
MFVFLVLLPLVSSQC

SEQ ID NO: 1467 - protein, 15 aa, Artificial Sequence
  SARS-CoV-2/Iceland/238/2020__EPI_ISL_417566 spike protein (1-15)
MFVFLVLLPLVSSQC

SEQ ID NO: 1468 - protein, 15 aa, Artificial Sequence
  SARS-CoV-2/Greece/16/2020__EPI_ISL_418265 spike protein (1-15)
MFVFLVLLPLVSSQC

SEQ ID NO: 1469 - protein, 15 aa, Artificial Sequence
  SARS-CoV-2/Iceland/319/2020__EPI_ISL_417648 spike protein (1-15)
MFVFLVLLPLVSSQC

SEQ ID NO: 1470 - protein, 15 aa, Artificial Sequence
  SARS-CoV-2/Congo/94/2020__EPI_ISL_417947 spike protein (1-15)
MFVFLVLLPLVSSQC

SEQ ID NO: 1471 - protein, 15 aa, Artificial Sequence
  SARS-CoV-2/Congo/158/2020__EPI_ISL_417950 spike protein (1-15)
MFVFLVLLPLVSSQC

SEQ ID NO: 1472 - protein, 15 aa, Artificial Sequence
  SARS-CoV-2/USA/UT-00034/2020__EPI_ISL_417977 spike protein (1-15)
MFVFLVLLPLVSSQC

SEQ ID NO: 1473 - protein, 15 aa, Artificial Sequence
  SARS-CoV-2/USA/UT-00033/2020__EPI_ISL_417976 spike protein (1-15)
MFVFLVLLPLVSSQC

SEQ ID NO: 1474 - protein, 15 aa, Artificial Sequence
  SARS-CoV-2/USA/WI-13/2020__EPI_ISL_417516 spike protein (1-15)
MFVFLVLLPLVSSQC

SEQ ID NO: 1475 - protein, 15 aa, Artificial Sequence
  SARS-CoV-2/India/1-27/2020__EPI_ISL_413522 spike protein (1-15)
MFVFLVLLPLVSSQC

SEQ ID NO: 1476 - protein, 15 aa, Artificial Sequence
  SARS-CoV-2/pangolin/Guangxi/P4L/2017__EPI_ISL_410538 spike protein (1-15)
MFVFLFVLPLVSSQC

SEQ ID NO: 1477 - protein, 15 aa, Artificial Sequence
  SARS-CoV-2/pangolin/Guangxi/P5L/2017__EPI_ISL_410540 spike protein (1-15)
MFVFLFVLPLVSSQC

SEQ ID NO: 1478 - protein, 15 aa, Artificial Sequence
  SARS-CoV-2/pangolin/Guangxi/P5E/2017__EPI_ISL_410541 spike protein (1-15)
MFVFLFVLPLVSSQC

SEQ ID NO: 1479 - protein, 15 aa, Artificial Sequence
  SARS-CoV-2/pangolin/Guangxi/P1E/2017__EPI_ISL_410539 spike protein (1-15)
MFVFLFVLPLVSSQC

SEQ ID NO: 1480 - protein, 666 aa, Artificial Sequence; identical to SEQ ID NO: 29
  SARS-CoV-2/Wuhan/WIV05/2019__EPI_ISL_402128 spike protein (16-681)

SEQ ID NO: 1481 - protein, 665 aa, Artificial Sequence
  SARS-CoV-2/bat/Yunnan/RaTG13/2013__EPI_ISL_402131 spike protein (16-680)
VNLTTRTQLPPAYTNSSTRGVYYPDKVFRSSVLHLTQDLFLPFFSNVTWFHAIHVSGTNGIKRFDNPVLPFNDGVYFASTEKSNIIRGWIFGTTLDSKTQSLLIVNNATNVVIKVCEFQFCNDPFLGVYYHKNNKSWMESEFRVYSSANNCTFEYVSQPFLMDLEGKQGNFKNLREFVFKNIDGYFKIYSKHTPINLVRDLPPGFSALEPLVDLPIGINITRFQTLLALHRSYLTPGDSSSGWTAGAAAYYVGYLQPRTFLLKYNENGTITDAVDCALDPLSETKCTLKSFTVEKGIYQTSNFRVQPTDSIVRFPNITNLCPFGEVFNATTFASVYAWNRKRISNCVADYSVLYNSTSFSTFKCYGVSPTKLNDLCFTNVYADSFVITGDEVRQIAPGQTGKIADYNYKLPDDFTGCVIAWNSKHIDAKEGGNFNYLYRLFRKANLKPFERDISTEIYQAGSKPCNGQTGLNCYYPLYRYGFYPTDGVGHQPYRVVVLSFELLNAPATVCGPKKSTNLVKNKCVNFNFNGLTGTGVLTESNKKFLPFQQFGRDIADTTDAVRDPQTLEILDITPCSFGGVSVITPGTNASNQVAVLYQDVNCTEVPVAIHADQLTPTWRVYSTGSNVFQTRAGCLIGAEHVNNSYECDIPIGAGICASYQTQTNS

SEQ ID NO: 1482 - protein, 666 aa, Artificial Sequence
  SARS-CoV-2/Wuhan/HBCDC-HB-01/2019__EPI_ISL_402132 spike protein (16-681)
VNLTTRTQLPPAYTNSITRGVYYPDKVFRSSVLHSTQDLFLPFFSNVTWFHAIHVSGTNGTKRFDNPVLPFNDGVYFASTEKSNIIRGWIFGTTLDSKTQSLLIVNNATNVVIKVCEFQFCNDPFLGVYYHKNNKSWMESEFRVYSSANNCTFEYVSQPFLMDLEGKQGNFKNLREFVFKNIDGYFKIYSKHTPINLVRDLPQGFSALEPLVDLPIGINITRFQTLLALHRSYLTPGDSSSGWTAGAAAYYVGYLQPRTFLLKYNENGTITDAVDCALDPLSETKCTLKSFTVEKGIYQTSNFRVQPTESIVRFPNITNLCPFGEVFNATRFASVYAWNRKRISNCVADYSVLYNSASFSTFKCYGVSPTKLNDLCFTNVYADSFVIRGDEVRQIAPGQTGKIADYNYKLPDDFTGCVIAWNSNNLDSKVGGNYNYLYRLFRKSNLKPFERDISTEIYQAGSTPCNGVEGFNCYFPLQSYGFQPTNGVGYQPYRVVVLSFELLHAPATVCGPKKSTNLVKNKCVNFNFNGLTGTGVLTESNKKFLPFQQFGRDIADTTDAVRDPQTLEILDITPCSFGGVSVITPGTNTSNQVAVLYQDVNCTEVPVAIHADQLTPTWRVYSTGSNVFQTRAGCLIGAEHVNNSYECDIPIGAGICASYQTQTNSP

SEQ ID NO: 1483 - protein, 666 aa, Artificial Sequence
  SARS-CoV-2/Guangdong/20SF028/2020__EPI_ISL_403936 spike protein (16-681)
VNLTTRTQLPPAYTNSFTRGVYYPDKVFRSSVLYSTQDLFLPFFSNVTWFHAIHVSGTNGTKRFDNPVLPFNDGVYFASTEKSNIIRGWIFGTTLDSKTQSLLIVNNATNVVIKVCEFQFCNDPFLGVYYHKNNKSWMESEFRVYSSANNCTFEYVSQPFLMDLEGKQGNFKNLREFVFKNIDGYFKIYSKHTPINLVRDLPQGFSALEPLVDLPIGINITRFQTLLALHRSYLTPGDSSSGWTAGAAAYYVGYLQPRTFLLKYNENGTITDAVDCALDPLSETKCTLKSFTVEKGIYQTSNFRVQPTESIVRFPNITNLCPFGEVFNATRFASVYAWNRKRISNCVADYSVLYNSASFSTFKCYGVSPTKLNDLCFTNVYADSFVIRGDEVRQIAPGQTGKIADYNYKLPDDFTGCVIAWNSNNLDSKVGGNYNYLYRLFRKSNLKPFERDISTEIYQAGSTPCNGVEGFNCYFPLQSYGFQPTNGVGYQPYRVVVLSFELLHAPATVCGPKKSTNLVKNKCVNFNFNGLTGTGVLTESNKKFLPFQQFGRDIADTTDAVRDPQTLEILDITPCSFGGVSVITPGTNTSNQVAVLYQDVNCTEVPVAIHADQLTPTWRVYSTGSNVFQTRAGCLIGAEHVNNSYECDIPIGAGICASYQTQTNSP

SEQ ID NO: 1484 - protein, 666 aa, Artificial Sequence; identical to SEQ ID NO: 29
  SARS-CoV-2/Shenzhen/SZTH-001/2020__EPI_ISL_406592 spike protein (16-681)

SEQ ID NO: 1485 - protein, 666 aa, Artificial Sequence
  SARS-CoV-2/Shenzhen/SZTH-004/2020__EPI_ISL_406595 spike protein (16-681)
VNLTTRTQLPPAYTNSFTRGVYYPDKVFRSSVLHSTQDLFLPFFSNVTWFHAIHVSGTNGTKRFDNPVLPFNDGVYFASTEKSNIIRGWIFGTTLDSKTQSLLIVNNATNVVIKVCEFQFCNDPFLGVYYHKNNKSWMESEFRVYSSANNCTFEYVSQPFLMDLEGKQGNFKNLREFVFKNIDGYFKIYSKHTPINLVRDLPQGFSALEPLVDLPIGINITRFQTLLALHRSYLTPGDSSSGWTAGAAAYYVGYLQPRTFLLKYNENGTITDAVDCALDPLSETKCTLKSFTVEKGIYQTSNFRVQPTESIVRFPNITNLCPFGEVFNATRFASVYAWDRKRISNCVAYYSVLYNSASFSTFKCYGVSPTKLNDLCFTNVYADSFVIRGDEVRQIAPGQTGKIADYNYKLPDDFTGCVIAWNSNNLDSKVGGNYNYLYRLFRKSNLKPFERDISTEIYQAGSTPCNGVEGFNCYFPLQSYGFQPTNGVGYQPYRVVVLSFELLHAPATVCGPKKSTNLVKNKCVNFNFNGLTGTGVLTESNKKFLPFQQFGRDIADTTDAVRDPQTLEILDITPCSFGGVSVITPGTNTSNQVAVLYQDVNCTEVPVAIHADQLTPTWRVYSTGSNVFQTRAGCLIGAEHVNNSYECDIPIGAGICASYQTQTNSP

SEQ ID NO: 1486 - protein, 666 aa, Artificial Sequence
  SARS-CoV-2/France/IDF0372/2020__EPI_ISL_406596 spike protein (16-681)
VNLTTRTQLPPAYTNSFTRGVYYPDKVFRSSVLHSTQDLFLPFFSNVTWFHAIHVSGTNGTKRFDNPVLPFNDGVYFASTEKSNIIRGWIFGTTLDSKTQSLLIVNNATNVVIKVCEFQFCNDPFLGVYYHKNNKSWMESEFRVYSSANNCTFEYVSQPFLMDLEGKQGNFKNLREFVFKNIDGYFKIYSKHTPINLVRDLPQGFSALEPLVDLPIGINITRFQTLLALHRSYLTPGDSSSGWTAGAAAYYVGYLQPRTFLLKYNENGTITDAVDCALDPLSETKCTLKSFTVEKGIYQTSNFRVQPTESIVRFPNITNLCPFGEVFNATRFASVYAWNRKRISNCVADYSFLYNSASFSTFKCYGVSPTKLNDLCFTNVYADSFVIRGDEVRQIAPGQTGKIADYNYKLPDDFTGCVIAWNSNNLDSKVGGNYNYLYRLFRKSNLKPFERDISTEIYQAGSTPCNGVEGFNCYFPLQSYGFQPTNGVGYQPYRVVVLSFELLHAPATVCGPKKSTNLVKNKCVNFNFNGLTGTGVLTESNKKFLPFQQFGRDIADTTDAVRDPQTLEILDITPCSFGGVSVITPGTNTSNQVAVLYQDVNCTEVPVAIHADQLTPTWRVYSTGSNVFQTRAGCLIGAEHVNNSYECDIPIGAGICASYQTQTNSP

SEQ ID NO: 1487 - protein, 666 aa, Artificial Sequence
  SARS-CoV-2/Australia/VIC01/2020__EPI_ISL_406844 spike protein (16-681)
VNLTTRTQLPPAYTNSFTRGVYYPDKVFRSSVLHSTQDLFLPFFSNVTWFHAIHVSGTNGTKRFDNPVLPFNDGVYFASTEKSNIIRGWIFGTTLDSKTQSLLIVNNATNVVIKVCEFQFCNDPFLGVYYHKNNKSWMESEFRVYSSANNCTFEYVSQPFLMDLEGKQGNFKNLREFVFKNIDGYFKIYSKHTPINLVRDLPQGFSALEPLVDLPIGINITRFQTLLALHRRYLTPGDSSSGWTAGAAAYYVGYLQPRTFLLKYNENGTITDAVDCALDPLSETKCTLKSFTVEKGIYQTSNFRVQPTESIVRFPNITNLCPFGEVFNATRFASVYAWNRKRISNCVADYSVLYNSASFSTFKCYGVSPTKLNDLCFTNVYADSFVIRGDEVRQIAPGQTGKIADYNYKLPDDFTGCVIAWNSNNLDSKVGGNYNYLYRLFRKSNLKPFERDISTEIYQAGSTPCNGVEGFNCYFPLQSYGFQPTNGVGYQPYRVVVLSFELLHAPATVCGPKKSTNLVKNKCVNFNFNGLTGTGVLTESNKKFLPFQQFGRDIADTTDAVRDPQTLEILDITPCSFGGVSVITPGTNTSNQVAVLYQDVNCTEVPVAIHADQLTPTWRVYSTGSNVFQTRAGCLIGAEHVNNSYECDIPIGAGICASYQTQTNSP

SEQ ID NO: 1488 - protein, 666 aa, Artificial Sequence
  SARS-CoV-2/Germany/BavPat1/2020__EPI_ISL_406862 spike protein (16-681)
VNLTTRTQLPPAYTNSFTRGVYYPDKVFRSSVLHSTQDLFLPFFSNVTWFHAIHVSGTNGTKRFDNPVLPFNDGVYFASTEKSNIIRGWIFGTTLDSKTQSLLIVNNATNVVIKVCEFQFCNDPFLGVYYHKNNKSWMESEFRVYSSANNCTFEYVSQPFLMDLEGKQGNFKNLREFVFKNIDGYFKIYSKHTPINLVRDLPQGFSALEPLVDLPIGINITRFQTLLALHRSYLTPGDSSSGWTAGAAAYYVGYLQPRTFLLKYNENGTITDAVDCALDPLSETKCTLKSFTVEKGIYQTSNFRVQPTESIVRFPNITNLCPFGEVFNATRFASVYAWNRKRISNCVADYSVLYNSASFSTFKCYGVSPTKLNDLCFTNVYADSFVIRGDEVRQIAPGQTGKIADYNYKLPDDFTGCVIAWNSNNLDSKVGGNYNYLYRLFRKSNLKPFERDISTEIYQAGSTPCNGVEGFNCYFPLQSYGFQPTNGVGYQPYRVVVLSFELLHAPATVCGPKKSTNLVKNKCVNFNFNGLTGTGVLTESNKKFLPFQQFGRDIADTTDAVRDPQTLEILDITPCSFGGVSVITPGTNTSNQVAVLYQGVNCTEVPVAIHADQLTPTWRVYSTGSNVFQTRAGCLIGAEHVNNSYECDIPIGAGICASYQTQTNSP

SEQ ID NO: 1489 - protein, 666 aa, Artificial Sequence; identical to SEQ ID NO: 29
  SARS-CoV-2/Wuhan/HBCDC-HB-02/2020__EPI_ISL_412978 spike protein (16-681)

SEQ ID NO: 1490 - protein, 666 aa, Artificial Sequence; identical to SEQ ID NO: 29
  SARS-CoV-2/Australia/QLD02/2020__EPI_ISL_407896 spike protein (16-681)

SEQ ID NO: 1491 - protein, 666 aa, Artificial Sequence; identical to SEQ ID NO: 29
  SARS-CoV-2/India/1-31/2020__EPI_ISL_413523 spike protein (16-681)

SEQ ID NO: 1492 - protein, 666 aa, Artificial Sequence
  SARS-CoV-2/Guangdong/GD2020087-P0008/2020__EPI_ISL_413863 spike protein (16-681)
VNLTTRTQLPPAYTNSFTRGVYYPDKVFRSSVLHSTQDLFLPFFSNVTWFHAIHVSGTNGTKRFDNPVLPFNDGVYFASTEKSNIIRGWIFGTTLDSKTQSLLIVNNATNVVIKVCEFQFCNDPFLGVYYHKNNKSWMESEFRVYSSANNCTFEYVSQPFLMDLEGKQGNFKNLREFVFKNIDGYFKIYSKHTPINLVRDLPQGFSALEPLVDLPIGINITRFQTLLALHRSYLTPGDSSSGWTAGAAAYYVGYLQPRTFLLKYNENGTITDAVDCALDPLSETKCTLKSFTVEKGIYQTSNFRVQPTESIVRFPNITNLCPFGEVFNATRFASVYAWNRKRISNCVADYSVLYNSASFSTFKCYGVSPTKLNDLCFTNVYADSFVIRGDEVREIAPGQTGKIADYNYKLPDDFTGCVIAWNSNNLDSKVGGNYNYLYRLFRKSNLKPFERDISTEIYQAGSTPCNGVEGFNCYFPLQSYGFQPTNGVGYQPYRVVVLSFELLHAPATVCGPKKSTNLVKNKCVNFNFNGLTGTGVLTESNKKFLPFQQFGRDIADTTDAVRDPQTLEILDITPCSFGGVSVITPGTNTSNQVAVLYQDVNCTEVPVAIHADQLTPTWRVYSTGSNVFQTRAGCLIGAEHVNNSYECDIPIGAGICASYQTQTNSP

SEQ ID NO: 1493 - protein, 666 aa, Artificial Sequence; identical to SEQ ID NO: 29
  SARS-CoV-2/Sweden/01/2020__EPI_ISL_411951 spike protein (16-681)

SEQ ID NO: 1494 - protein, 666 aa, Artificial Sequence
  SARS-CoV-2/Tianmen/HBCDC-HB-07/2020__EPI_ISL_412983 spike protein (16-681)
VNLTTRTQLPPAYTNSFTRGVYYPDKVFRSSVLHSTQDLFLPFFSNVTWFHAIHVSGTNGTKRFDNPVLPFNDGVYFASTEKSNIIRGWIFGTTLDSKTQSLLIVNNATNVVIKVCEFQFCNDPFLGVYYHKNNKSWMESEFRVYSSANNCTFEYVSQPFLMDLEGKQGNFKNLREFVFKNIDGYFKIYSKHTPINLVRDLPQGFSALEPLVDLPIGINITRFQTLLALHRSYLTPGDSSSGWTAGAAAYYVGYLQPRTFLLKYNENGTITDAVDCALDPLSETKCTLKSFTVEKGIYQTSNFRVQPTESIVRFPNITNLCPFGEVFNATRFASVYAWNRKRISNCVADYSVLYNSASFSTFKCYGVSPTKLNDLCFTNVYADSFVIRGDEVRQIAPGQTGKIADYNYKLPDDFTGCVIAWNSNNLDSKVGGNYNYLYRLFRKSNLKPFERDISTEIYQAGSTPCNGVEGFNCYFPLQSYGFQPTNGVGYQPYRVVVLSFELLHAPATVCGPKKSTNLVKNKCVNFNFNGLTGTGVLTESNKKFLPFQQFGRDIADTTDAVRDPQTLEILDITPCSFGGVSVITPGTNTSNQVAVLYQDLNCTEVPVAIHADQLTPTWRVYSTGSNVFQTRAGCLIGAEHVNNSYECDIPIGAGICASYQTQTNSP

SEQ ID NO: 1495 - protein, 666 aa, Artificial Sequence; identical to SEQ ID NO: 29
  SARS-CoV-2/Hong Kong/case42_VM20002493/2020__EPI_ISL_414527 spike protein (16-681)

SEQ ID NO: 1496 - protein, 666 aa, Artificial Sequence
  SARS-CoV-2/USA/CruiseA-23/2020__EPI_ISL_414482 spike protein (16-681)
VNLTTRTQLPPAYTNSFTRGVYYPDKVFRSSVLHSTQDLFLPFFSNVTWFHAIHVSGTNGTKRFDNPVLPFNDGVYFASTEKSNIIRGWIFGTTLDSKTQSLLIVNNATNVVIKVCEFQFCNDPFLGVYYHKNNKSWMESEFRVYSSANNCTFEYVSQPFLMDLEVKQGNFKNLREFVFKNIDGYFKIYSKHTPINLVRDLPQGFSALEPLVDLPIGINITRFQTLLALHRSYLTPGDSSSGWTAGAAAYYVGYLQPRTFLLKYNENGTITDAVDCALDPLSETKCTLKSFTVEKGIYQTSNFRVQPTESIVRFPNITNLCPFGEVFNATRFASVYAWNRKRISNCVADYSVLYNSASFSTFKCYGVSPTKLNDLCFTNVYADSFVIRGDEVRQIAPGQTGKIADYNYKLPDDFTGCVIAWNSNNLDSKVGGNYNYLYRLFRKSNLKPFERDISTEIYQAGSTPCNGVEGFNCYFPLQSYGFQPTNGVGYQPYRVVVLSFELLHAPATVCGPKKSTNLVKNKCVNFNFNGLTGTGVLTESNKKFLPFQQFGRDIADTTDAVRDPQTLEILDITPCSFGGVSVITPGTNTSNQVAVLYQDVNCTEVPVAIHADQLTPTWRVYSTGSNVFQTRAGCLIGAEHVNNSYECDIPIGAGICASYQTQTNSP

SEQ ID NO: 1497 - protein, 666 aa, Artificial Sequence; identical to SEQ ID NO: 29
  SARS-CoV-2/Hong Kong/case85_VM20002868/2020__EPI_ISL_414519 spike protein (16-681)

SEQ ID NO: 1498 - protein, 666 aa, Artificial Sequence; identical to SEQ ID NO: 1488
  SARS-CoV-2/England/200990660/2020__EPI_ISL_414523 spike protein (16-681)

SEQ ID NO: 1499 - protein, 666 aa, Artificial Sequence; identical to SEQ ID NO: 29
  SARS-CoV-2/Australia/NSW09/2020__EPI_ISL_413595 spike protein (16-681)

SEQ ID NO: 1500 - protein, 666 aa, Artificial Sequence; identical to SEQ ID NO: 29
  SARS-CoV-2/Australia/NSW10/2020__EPI_ISL_413596 spike protein (16-681)

SEQ ID NO: 1501 - protein, 666 aa, Artificial Sequence
  SARS-CoV-2/Switzerland/1000477797/2020__EPI_ISL_413023 spike protein (16-681)
VNLTTRTQLPPAYTNSFTRGVYYPDKVFRSSVLHSTQDLFLPFFSNVTWFHAIHVSGTNGTKRFDNPVLPFNDGVYFASTEKSNIIRGWIFGTTLDSKTQSLLIVNNATNVVIKVCEFQFCNDPFLGVYYHKNNKSWMESEFRVYSSANNCTFEYVSQPFLMDLEGKQGNFKNLREFVFKNIDGYFNIYSKHTPINLVRDLPQGFSALEPLVDLPIGINITRFQTLLALHRSYLTPGDSSSGWTAGAAAYYVGYLQPRTFLLKYNENGTITDAVDCALDPLSETKCTLKSFTVEKGIYQTSNFRVQPTESIVRFPNITNLCPFGEVFNATRFASVYAWNRKRISNCVADYSVLYNSASFSTFKCYGVSPTKLNDLCFTNVYADSFVIRGDEVRQIAPGQTGKIADYNYKLPDDFTGCVIAWNSNNLDSKVGGNYNYLYRLFRKSNLKPFERDISTEIYQAGSTPCNGVEGFNCYFPLQSYGFQPTNGVGYQPYRVVVLSFELLHAPATVCGPKKSTNLVKNKCVNFNFNGLTGTGVLTESNKKFLPFQQFGRDIADTTDAVRDPQTLEILDITPCSFGGVSVITPGTNTSNQVAVLYQGVNCTEVPVAIHADQLTPTWRVYSTGSNVFQTRAGCLIGAEHVNNSYECDIPIGAGICASYQTQTNSP

SEQ ID NO: 1502 - protein, 666 aa, Artificial Sequence
  SARS-CoV-2/Belgium/BA-02291/2020__EPI_ISL_415159 spike protein (16-681)
VNLTTRTQLPPAYTNSFTRGVYYPDKVFRSSVLHSTQDLFLPFFSNVTWFHAIHVSGTNGTKRFDNPVLPFNDGVYFASTEKSNIIRGWIFGTTLDSKTQSLLIVNNATNVVIKVCEFQFCNDPFLGVYYHKNNKSWMESEFRVYSSANNCTFEYVSQPFLMDLEGKQGNFKNLREFVFKNIDGYFKIYSKHTPINLVRDLPQGFSALEPLVDLPIGINITRFQTLLALHRSYLTPGDSSSGWTAGAAAYYVGYLQPRTFLLKYNENGTITDAVDCALDPLSETKCTLKSFTVEKGIYQTSNFRVQPTESIVRFPNITNLCPFGEVFNATRFASVYAWNRKRISNCVADYSVLYNSASFSTFKCYGVSPTKLNDLCFTNVYADSFVIRGDEVRQIAPGQTGKIADYNYKLPDDFTGCVIAWNSNNLDSKVGGNYNYLYRLFRRSNLKPFERDISTEIYQAGSTPCNGVEGFNCYFPLQSYGFQPTNGVGYQPYRVVVLSFELLPAPATVCGPKKSTNLVKNKCVNFNFNGLTGTGVLTESNKKFLPFQQFGRDIADTTDAVRDPQTLEILDITPCSFGGVSVITPGTNTSNQVAVLYQGVNCTEVPVAIHADQLTPTWRVYSTGSNVFQTRAGCLIGAEHVNNSYECDIPIGAGICASYQTQTNSP

SEQ ID NO: 1503 - protein, 666 aa, Artificial Sequence
  SARS-CoV-2/USA/WA8-UW5/2020__EPI_ISL_413486 spike protein (16-681)
VNLTTRTQLPPAYTNSFTRGVYYPDKVFRSSVLHSTQDLFLPFFSNVTWFHAIHVSGTNGTKRFDNPVLPFNDGVYFASTEKSNIIRGWIFGTTLDSKTQSLLIVNNATNVVIKVCEFQFCNDPFLGVYYHKNNKSWMESEFRVYSSANNCTFEYVSQPFLMDLEGKQGNFKNLREFVFKNIDGYFKIYSKHTPINLVRDLPQGFSALEPLVDLPIGINITRFQTLLALHRSYLTPGDSSSGWTAGAAAYYVGYLQPRTFLLKYNENGTITDAVDCALDPLSETKCTLKSFTVEKGIYQTSNFRVQPTESIVRFPNITNLCPFGEVFNATRFASVYAWNRKRISNCVADYSVLYNSASFSTFKCYGVSPTKLNDLCFTNVYADSFVIRGDEVRQIAPGQTGKIADYNYKLPDDFTGCVIAWNSNNLDSKVGGNYNYLYRLFRKSNLKPFERDISTEIYQAGSTPCNGVEGFNCYFPLQSYGFQPTNGVGYQPYRVVVLSFELLHAPATVCGPKKSTNLVKNKCVNFNFNGLTGTGVLTESNKKFLPFQQFGRDIADTTDAVRDPQTLEILDITPCSFGGVSVITPGTNTSNQVAVLYQDVNCTEVPVAIHADQLTPTWRVYSTGSNVFQTRAGCLIGAEYVNNSYECDIPIGAGICASYQTQTNSP

SEQ ID NO: 1504 - protein, 666 aa, Artificial Sequence; identical to SEQ ID NO: 1488
  SARS-CoV-2/England/20102000506/2020__EPI_ISL_415147 spike protein (16-681)

SEQ ID NO: 1505 - protein, 666 aa, Artificial Sequence; identical to SEQ ID NO: 1488
  SARS-CoV-2/Belgium/VAG-03013/2020__EPI_ISL_415155 spike protein (16-681)

SEQ ID NO: 1506 - protein, 666 aa, Artificial Sequence; identical to SEQ ID NO: 1488
  SARS-CoV-2/Belgium/BC-03016/2020__EPI_ISL_415157 spike protein (16-681)

SEQ ID NO: 1507 - protein, 666 aa, Artificial Sequence; identical to SEQ ID NO: 29
  SARS-CoV-2/Germany/BavPat3/2020__EPI_ISL_414521 spike protein (16-681)

SEQ ID NO: 1508 - protein, 666 aa, Artificial Sequence; identical to SEQ ID NO: 1488
  SARS-CoV-2/France/HF1805/2020__EPI_ISL_414628 spike protein (16-681)

SEQ ID NO: 1509 - protein, 666 aa, Artificial Sequence; identical to SEQ ID NO: 1488
  SARS-CoV-2/Netherlands/ZuidHolland_9/2020__EPI_ISL_414445 spike protein (16-681)

SEQ ID NO: 1510 - protein, 666 aa, Artificial Sequence
  SARS-CoV-2/Finland/FIN03032020A/2020__EPI_ISL_413602 spike protein (16-681)
VNLTTRTQLPPAYTNSFTRGVYYPDKVFRSSVLHSTQDLFLPFFSNVTWFHAIHVSGTNGTKRFDNPVLPFNDGVYFASTEKSNIIRGWIFGTTLDSKTQSLLIVNNATNVVIKVCEFQFCNDPFLGVYYHKNNKSWMESEFRVYSSANNCTFEYVSQPFLMDLEGKQGNFKNLREFVFKNIDGYFKIYSKHTPINLVRDLPQGFSALEPLVDLPIGINITRFQTLLALHRSYLTPGDSSSGWTAGAAAYYVGYLQPRTFLLKYNENGTITDAVDCALDPLSETKCTLKSFTVEKGIYQTSNFRVQPTESIVRFPNITNLCPFGEVFNATRFASVYAWNRKRISNCVADYSVLYNSASFSTFKCYGVSPTKLNDLCFTNVYADSFVIRGDEVRQIAPGQTGKIADYNYKLPDDFTGCVISWNSNNLDSKVGGNYNYLYRLFRKSNLKPFERDISTEIYQAGSTPCNGVEGFNCYFPLQSYGFQPTNGVGYQPYRVVVLSFELLHAPATVCGPKKSTNLVKNKCVNFNFNGLTGTGVLTESNKKFLPFQQFGRDIADTTDAVRDPQTLEILDITPCSFGGVSVITPGTNTSNQVAVLYQGVNCTEVPVAIHADQLTPTWRVYSTGSNVFQTRAGCLIGAEHVNNSYECDIPIGAGICASYQTQTNSP

SEQ ID NO: 1511 - protein, 666 aa, Artificial Sequence; identical to SEQ ID NO: 1488
  SARS-CoV-2/France/GE1977/2020__EPI_ISL_414632 spike protein (16-681)

SEQ ID NO: 1512 - protein, 666 aa, Artificial Sequence
  SARS-CoV-2/Finland/FIN-313/2020__EPI_ISL_414641 spike protein (16-681)
VNLTTRTQLPPAYTNSFTRGVYYPDKVFRSSVLHSTQDLFLPFFSNVTWFHAIHVSGTNGTKRFDNPVLPFNDGVYFASTEKSNIIRGWIFGTTLDSKTQSLLIVNNATNVVIKVCEFQFCNDPFLGVYYHKNNKSWMESEFRVYSSANNCTFEYVSQPFLMDLEGKQGNFKNLREFVFKNIDGYFKIYSKHTPINLVRDLPQGFSALEPLVDLPIGINITRFKTLLALHRSYLTPGDSSSGWTAGAAAYYVGYLQPRTFLLKYNENGTITDAVDCALDPLSETKCTLKSFTVEKGIYQTSNFRVQPTESIVRFPNITNLCPFGEVFNATRFASVYAWNRKRISNCVADYSVLYNSASFSTFKCYGVSPTKLNDLCFTNVYADSFVIRGDEVRQIAPGQTGKIADYNYKLPDDFTGCVIAWNSNNLDSKVGGNYNYLYRLFRKSNLKPFERDISTEIYQAGSTPCNGVEGFNCYFPLQSYGFQPTNGVGYQPYRVVVLSFELLHAPATVCGPKKSTNLVKNKCVNFNFNGLTGTGVLTESNKKFLPFQQFGRDIADTTDAVRDPQTLEILDITPCSFGGVSVITPGTNTSNQVAVLYQGVNCTEVPVAIHADQLTPTWRVYSTGSNVFQTRAGCLIGAEHVNNSYECDIPIGAGICASYQTQTNSP

SEQ ID NO: 1513 - protein, 666 aa, Artificial Sequence; identical to SEQ ID NO: 1488
  SARS-CoV-2/Netherlands/ZuidHolland_2/2020__EPI_ISL_414556 spike protein (16-681)

SEQ ID NO: 1514 - protein, 666 aa, Artificial Sequence
  SARS-CoV-2/USA/WA-UW31/2020__EPI_ISL_414618 spike protein (16-681)
VNLTTRTQLPPAYTNSFTRGVYYPDKVFRSSVLHSTQDLFLPFFSNVTWFHAIHVSGTNGTKRFDNPVLPFNDGVYFASTEKSNIIRGWIFGTTLDSKTQSLLIVNNATNVVIKVCEFQFCNDPFLGVYYHKNNKSWMESEFRVYSSANNCTFEYVSQPFLMDLEGKQGNFKNLREFVFKNIDGYFKIYSKHTPINLVRDLPQGFSALEPLVDLPIGINITRFQTLLALHRSYLTPGDSSSGWTAGAAAYYVGYLQPRTFLLKYNENGTITDAVDCALDPLSETKCTLKSFTVEKGIYQTSNFRVQPTESIVRFPNITNLCPFGEVFNATRFASVYAWNRKRISNCVADYSVLYNSASFSTFKCYGVSPTKLNDLCFTNVYADSFVIRGDEVRQIAPGQTGKIADYNYKLPDDFTGCVIAWNSNNLDSKVGGNYNYLYRLFRKSNLKPFERDISTEIYQAGSTPCNGAEGFNCYFPLQSYGFQPTNGVGYQPYRVVVLSFELLHAPATVCGPKKSTNLVKNKCVNFNFNGLTGTGVLTESNKKFLPFQQFGRDIADTTDAVRDPQTLEILDITPCSFGGVSVITPGTNTSNQVAVLYQDVNCTEVPVAIHADQLTPTWRVYSTGSNVFQTRAGCLIGAEHVNNSYECDIPIGAGICASYQTQTNSP

SEQ ID NO: 1515 - protein, 666 aa, Artificial Sequence
  SARS-CoV-2/South Korea/SNU01/2020__EPI_ISL_411929 spike protein (16-681)
VNLTTRTQLPPAYTNSFTRGVYYPDKVFRSSVLHSTQDLFLPFFSNVTWFHAIHVSGTNGTKRFDNPVLPFNDGVYFASTEKSNIIRGWIFGTTLDSKTQSLLIVNNATNVVIKVCEFQFCNDPFLGVYYHKNNKSWMESEFRVYSSANNCTFEYVSQPFLMDLEGKQGNFKNLREFVFKNIDGYFKIYSKHTPINLVRDLPQGFWALEPLVDLPIGINITRFQTLLALHRSYLTPGDSSSGWTAGAAAYYVGYLQPRTFLLKYNENGTITDAVDCALDPLSETKCTLKSFTVEKGIYQTSNFRVQPTESIVRFPNITNLCPFGEVFNATRFASVYAWNRKRISNCVADYSVLYNSASFSTFKCYGVSPTKLNDLCFTNVYADSFVIRGDEVRQIAPGQTGKIADYNYKLPDDFTGCVIAWNSNNLDSKVGGNYNYLYRLFRKSNLKPFERDISTEIYQAGSTPCNGVEGFNCYFPLQSYGFQPTNGVGYQPYRVVVLSFELLHAPATVCGPKKSTNLVKNKCVNFNFNGLTGTGVLTESNKKFLPFQQFGRDIADTTDAVRDPQTLEILDITPCSFGGVSVITPGTNTSNQVAVLYQDVNCTEVPVAIHADQLTPTWRVYSTGSNVFQTRAGCLIGAEHVNNSYECDIPIGAGICASYQTQTNSP

SEQ ID NO: 1516 - protein, 666 aa, Artificial Sequence
  SARS-CoV-2/China/WF0004/2020__EPI_ISL_413694 spike protein (16-681)
VNLTTRTQLPPAYTNSFTRGVYYPDKVFRSSVLHSTQDLFLPFFSNVTWFHAIHVSGTNGTKRFDNPVLPFNDGVYFASTEKSNIIRGWIFGTTLDSKTQSLLIVNNATNVVIKVCEFQFCNDPFLGVYYHKNNKSWTESEFRVYSSANNCTFEYVSQPFLMDLEGKQGNFKNLREFVFKNIDGYFKIYSKHTPINLVRDLPQGFSALEPLVDLPIGINITRFQTLLALHRSYLTPGDSSSGWTAGAAAYYVGYLQPRTFLLKYNENGTITDAVDCALDPLSETKCTLKSFTVEKGIYQTSNFRVQPTESIVRFPNITNLCPFGEVFNATRFASVYAWNRKRISNCVADYSVLYNSASFSTFKCYGVSPTKLNDLCFTNVYADSFVIRGDEVRQIAPGQTGKIADYNYKLPDDFTGCVIAWNSNNLDSKVGGNYNYLYRLFRKSNLKPFERDISTEIYQAGSTPCNGVEGFNCYFPLQSYGFQPTNGVGYQPYRVVVLSFELLHAPATVCGPKKSTNLVKNKCVNFNFNGLTGTGVLTESNKKFLPFQQFGRDIADTTDAVRDPQTLEILDITPCSFGGVSVITPGTNTSNQVAVLYQDVNCTEVPVAIHADQLTPTWRVYSTGSNVFQTRAGCLIGAEHVNNSYECDIPIGAGICASYQTQTNSP

SEQ ID NO: 1517 - protein, 666 aa, Artificial Sequence; identical to SEQ ID NO: 29
  SARS-CoV-2/China/WF0028/2020__EPI_ISL_413791 spike protein (16-681)

SEQ ID NO: 1518 - protein, 666 aa, Artificial Sequence
  SARS-CoV-2/2019-nCoV/USA-CruiseA-18/2020__MT159716.1 spike protein (16-681)
VNLTTRTQLPPAYTNSFTRGVYYPDKVFRSSVLHSTQDLFLPFFSNVTWFHAIHVSGTNGTKRFDNPVLPFNDGVYFASTEKSNIIRGWIFGTTLDSKTQSLLIVNNATNVVIKVCEFQFCNDPFLGVYYHKNNKSWMESELRVYSSANNCTFEYVSQPFLMDLEGKQGNFKNLREFVFKNIDGYFKIYSKHTPINLVRDLPQGFSALEPLVDLPIGINITRFQTLLALHRSYLTPGDSSSGWTAGAAAYYVGYLQPRTFLLKYNENGTITDAVDCALDPLSETKCTLKSFTVEKGIYQTSNFRVQPTESIVRFPNITNLCPFGEVFNATRFASVYAWNRKRISNCVADYSVLYNSASFSTFKCYGVSPTKLNDLCFTNVYADSFVIRGDEVRQIAPGQTGKIADYNYKLPDDFTGCVIAWNSNNLDSKVGGNYNYLYRLFRKSNLKPFERDISTEIYQAGSTPCNGVEGFNCYFPLQSYGFQPTNGVGYQPYRVVVLSFELLHAPATVCGPKKSTNLVKNKCVNFNFNGLTGTGVLTESNKKFLPFQQFGRDIADTTDAVRDPQTLEILDITPCSFGGVSVITPGTNTSNQVAVLYQDVNCTEVPVAIHADQLTPTWRVYSTGSNVFQTRAGCLIGAEHVNNSYECDIPIGAGICASYQTQTNSP

SEQ ID NO: 1519 - protein, 666 aa, Artificial Sequence
  SARS-CoV-2/SARS-CoV-2/Yunnan-01/human/2020/CHN__MT049951.1 spike protein (16-681)
VNLTTRTQLPPANTNSFTRGVYYPDKVFRSSVLHSTQDLFLPFFSNVTWFHAIHVSGTNGTKRFDNPVLPFNDGVYFASTEKSNIIRGWIFGTTLDSKTQSLLIVNNATNVVIKVCEFQFCNDPFLGVYYHKNNKSWMESEFRVYSSANNCTFEYVSQPFLMDLEGKQGNFKNLREFVFKNIDGYFKIYSKHTPINLVRDLPQGFSALEPLVDLPIGINITRFQTLLALHRSYLTPGDSSSGWTAGAAAYYVGYLQPRTFLLKYNENGTITDAVDCALDPLSETKCTLKSFTVEKGIYQTSNFRVQPTESIVRFPNITNLCPFGEVFNATRFASVYAWNRKRISNCVADYSVLYNSASFSTFKCYGVSPTKLNDLCFTNVYADSFVIRGDEVRQIAPGQTGKIADYNYKLPDDFTGCVIAWNSNNLDSKVGGNYNYLYRLFRKSNLKPFERDISTEIYQAGSTPCNGVEGFNCYFPLQSYGFQPTNGVGYQPYRVVVLSFELLHAPATVCGPKKSTNLVKNKCVNFNFNGLTGTGVLTESNKKFLPFQQFGRDIADTTDAVRDPQTLEILDITPCSFGGVSVITPGTNTSNQVAVLYQDVNCTEVPVAIHADQLTPTWRVYSTGSNVFQTRAGCLIGAEHVNNSYECDIPIGAGICASYQTQTNSP

SEQ ID NO: 1520 - protein, 666 aa, Artificial Sequence
  SARS-CoV-2/USA/WA-UW292/2020__EPI_ISL_418077 spike protein (16-681)
VNLTTRTQLPPAYTNSFTRGVYYPDKVFRSSVLHSTQDLFLPFFSNVTWFHAIHVSGTNGTKRFDNPVLPFNDGVYFASTEKSNIIRGWIFGTTLDSKTQSLLIVNNATNVVIKVCEFQFCNDPFLGVYYHKNNKSWMESEFRVYSSANNCTFEYVSQPFLMDLEGKQGNFKNLREFVFKNIDGYFKIYSKHTPINLVRDLPQGFSALEPLVDLPIGINITRFQTLLALHRSYLTPGDSSSGWTAGAAAYYVGYLQPRTFLLKYNENGTITDAVDCALDPLSETKCTLKSFTVEKGIYQTSNFRVQPTESIVRFPNITNLCPFGEVFNATRFASVYAWNRKRISNCVADYSVLYNSASFSTFKCYGVSPTKLNDLCFTNVYADSFVIRGDEVRQIAPGQTGKIADYNYKLPDDFTGCVIAWNSNNLDSKVGGNYNYLYRLFRKSNLKPFERDISTEIYQASSTPCNGVEGFNCYFPLQSYGFQPTNGVGYQPYRVVVLSFELLHAPATVCGPKKSTNLVKNKCVNFNFNGLTGTGVLTESNKKFLPFQQFGRDIADTTDAVRDPQTLEILDITPCSFGGVSVITPGTNTSNQVAVLYQDVNCTEVPVAIHADQLTPTWRVYSTGSNVFQTRAGCLIGAEHVNNSYECDIPIGAGICASYQTQTNSP

SEQ ID NO: 1521 - protein, 666 aa, Artificial Sequence; identical to SEQ ID NO: 1488
  SARS-CoV-2/Iceland/192/2020__EPI_ISL_417819 spike protein (16-681)

SEQ ID NO: 1522 - protein, 666 aa, Artificial Sequence; identical to SEQ ID NO: 1488
  SARS-CoV-2/Belgium/ULG-6939/2020__EPI_ISL_417020 spike protein (16-681)

SEQ ID NO: 1523 - protein, 666 aa, Artificial Sequence; identical to SEQ ID NO: 1488
  SARS-CoV-2/France/HF2496/2020__EPI_ISL_418231 spike protein (16-681)

SEQ ID NO: 1524 - protein, 666 aa, Artificial Sequence; identical to SEQ ID NO: 1488
  SARS-CoV-2/USA/WA-UW291/2020__EPI_ISL_418076 spike protein (16-681)

SEQ ID NO: 1525 - protein, 666 aa, Artificial Sequence; identical to SEQ ID NO: 1488
  SARS-CoV-2/Portugal/PT0034/2020__EPI_ISL_418019 spike protein (16-681)

SEQ ID NO: 1526 - protein, 666 aa, Artificial Sequence; identical to SEQ ID NO: 29
  SARS-CoV-2/Iceland/202/2020__EPI_ISL_417750 spike protein (16-681)

SEQ ID NO: 1527 - protein, 666 aa, Artificial Sequence
  SARS-CoV-2/USA/WA-UW261/2020__EPI_ISL_418046 spike protein (16-681)
VNLTTRTQLPPAYTNSFTRGVYYPDKVFRSSVLHSTQDLFLPFFSNVTWFHAIHVSGTNGTKRFDNPVLPFNDGVYFASTEKSNIIRGWIFGTTLDSKTQSLLIVNNATNVVIKVCEFQFCNDPFLGVYYHKNNKSWMESEFRVYSSANNCTFEYVSQPFLMDLEGKQGNFKNLREFVFKNIDGYFKIYSKHTPINLVRDLPQGFSALEPLVDLPIGINITRFQTLLALHRSYLTPGDSSSGWTAGAAAYYVGYLQPRTFLLKYNENGTITDAVDCALDPLSETKCTLKSFTVEKGIYQTSNFRVQPTESIVRFPNITNLCPFGEVFNATRFTSVYAWNRKRISNCVADYSVLYNSASFSTFKCYGVSPTKLNDLCFTNVYADSFVIRGDEVRQIAPGQTGKIADYNYKLPDDFTGCVIAWNSNNLDSKVGGNYNYLYRLFRKSNLKPFERDISTEIYQAGSTPCNGVEGFNCYFPLQSYGFQPTNGVGYQPYRVVVLSFELLHAPATVCGPKKSTNLVKNKCVNFNFNGLTGTGVLTESNKKFLPFQQFGRDIADTTDAVRDPQTLEILDITPCSFGGVSVITPGTNTSNQVAVLYQDVNCTEVPVAIHADQLTPTWRVYSTGSNVFQTRAGCLIGAEHVNNSYECDIPIGAGICASYQTQTNSP

SEQ ID NO: 1528 - protein, 666 aa, Artificial Sequence; identical to SEQ ID NO: 29
  SARS-CoV-2/Portugal/PT0035/2020__EPI_ISL_418020 spike protein (16-681)

SEQ ID NO: 1529 - protein, 666 aa, Artificial Sequence
  SARS-CoV-2/USA/NY-NYUMC7/2020__EPI_ISL_418192 spike protein (16-681)
VNLTTRTQLPPAYTNSFTRGVYYPDKVFRSSVLHSTQDLFLPFFSNVTWFHAIHVSGTNGTKRFDNPVLPFNDGVYFASTEKSNIIRGWIFGTTLDSKTQSLLIVNNATNVVIKVCEFQFCNDPFLGVYHHKNNKSWMESEFRVYSSANNCTFEYVSQPFLMDLEGKQGNFKNLREFVFKNIDGYFKIYSKHTPINLVRDLPQGFSALEPLVDLPIGINITRFQTLLALHRSYLTPGDSSSGWTAGAAAYYVGYLQPRTFLLKYNENGTITDAVDCALDPLSETKCTLKSFTVEKGIYQTSNFRVQPTESIVRFPNITNLCPFGEVFNATRFASVYAWNRKRISNCVADYSVLYNSASFSTFKCYGVSPTKLNDLCFTNVYADSFVIRGDEVRQIAPGQTGKIADYNYKLPDDFTGCVIAWNSNNLDSKVGGNYNYLYRLFRKSNLKPFERDISTEIYQAGSTPCNGVEGFNCYFPLQSYGFQPTNGVGYQPYRVVVLSFELLHAPATVCGPKKSTNLVKNKCVNFNFNGLTGTGVLTESNKKFLPFQQFGRDIADTTDAVRDPQTLEILDITPCSFGGVSVITPGTNTSNQVAVLYQGVNCTEVPVAIHADQLTPTWRVYSTGSNVFQTRAGCLIGAEHVNNSYECDIPIGAGICASYQTQTNSP

SEQ ID NO: 1530 - protein, 666 aa, Artificial Sequence; identical to SEQ ID NO: 1488
  SARS-CoV-2/Iceland/189/2020__EPI_ISL_417709 spike protein (16-681)

SEQ ID NO: 1531 - protein, 666 aa, Artificial Sequence; identical to SEQ ID NO: 29
  SARS-CoV-2/Australia/NSW56/2020__EPI_ISL_417408 spike protein (16-681)

SEQ ID NO: 1532 - protein, 666 aa, Artificial Sequence
  SARS-CoV-2/Iceland/280/2020__EPI_ISL_417608 spike protein (16-681)
VNLTTRTQLPPAYTNSFTRGVYYPDKVFRSSVLHSTQDLFLPFFSNVTWFHAIHVSGTNGTKRFDNPVLPFNDGVYFASTEKSNIIRGWIFGTTLDSKTQSLLIVNNATNVVIKVCEFQFCNDPFLGVYYHKNNKSWMESEFRVYSSANNCTFEYVSQPFLMDLEGKQGNFKNLREFVFKNIDGYFKIYSKHTPINLVRDLPQGFSALEPLVDLPIGINITRFQTLLALHRSYLTPGDSSSGWTAGAAAYYVGYLQPRTFLLKYNENGTITDAVDCALDPLSETKCTLKSFTVEKGIYQTSNFRVQPTESIVRFPNITNLCPFGEVFNATRFASVYAWNRKRISNCVADYSVLYNSASFSTFKCYGVSPTKLNDLCFTNVYADSFVIRGDEVRQIAPGQTGKIADYNYKLPDDFTGCVIAWNSNNLDSKVGGNYNYLYRLFRKSNLKPFERDISTEIYQAGSTPCNGVEGFNCYFPLQSYGFQPTNGVGYQPYRVVVLSFELLHAPATVCGPKKSTNLVKNKCVNFNFNGLTGTGVLTESNKKFLPFQQFGRDIADTTDAVRDPQTLEILDITPCSFGGVSVITPGTNTSNQVAVLYQGVNCTEVPVAIHADQLTPTWRVYSTGSNVFQTRAGCLIGAEHVNNSYECDIPIGAGICASYHTQTNSP

SEQ ID NO: 1533 - protein, 666 aa, Artificial Sequence; identical to SEQ ID NO: 1488
  SARS-CoV-2/Iceland/247/2020__EPI_ISL_417575 spike protein (16-681)

SEQ ID NO: 1534 - protein, 666 aa, Artificial Sequence; identical to SEQ ID NO: 1488
  SARS-CoV-2/Iceland/238/2020__EPI_ISL_417566 spike protein (16-681)

SEQ ID NO: 1535 - protein, 666 aa, Artificial Sequence
  SARS-CoV-2/Greece/16/2020__EPI_ISL_418265 spike protein (16-681)
VNLTTRTQLPPAYTNSFTRGVYYPDKVFRSSVLHSTQDLFLPFFSNVTWFHAIHVSGTNGTKRFDNPVLPFNDGVYFASTEKSNIIRGWIFGTTLDSKTQSLLIVNNATNVVIKVCEFQFCNDPFLGVYYHKNNKSWMESEFRVYSSANNCTFEYVSQPFLMDLEGKQGNFKNLREFVFKNVDGYFKIYSKHTPINLVRDLPQGFSALEPLVDLPIGINITRFQTLLALHRSYLTPGDSSSGWTAGAAAYYVGYLQPRTFLLKYNENGTITDAVDCALDPLSETKCTLKSFTVEKGIYQTSNFRVQPTESIVRFPNITNLCPFGEVFNATRFASVYAWNRKRISNCVADYSVLYNSASFSTFKCYGVSPTKLNDLCFTNVYADSFVIRGDEVRQIAPGQTGKIADYNYKLPDDFTGCVIAWNSNNLDSKVGGNYNYLYRLFRKSNLKPFERDISTEIYQAGSTPCNGVEGFNCYFPLQSYGFQPTNGVGYQPYRVVVLSFELLHAPATVCGPKKSTNLVKNKCVNFNFNGLTGTGVLTESNKKFLPFQQFGRDIADTTDAVRDPQTLEILDITPCSFGGVSVITPGTNTSNQVAVLYQDVNCTEVPVAIHADQLTPTWRVYSTGSNVFQTRAGCLIGAEHVNNSYECDIPIGAGICASYQTQTNSP

SEQ ID NO: 1536 - protein, 666 aa, Artificial Sequence
  SARS-CoV-2/Iceland/319/2020__EPI_ISL_417648 spike protein (16-681)
VNLTTRTQLPPAYTNSFTRGVYYPDKVFRSSVLHSTQDLFLPFFSNVTWFHAIHVSGTNGTKRFDNPVLPFNDGVYFASTEKSNIIRGWIFGTTLDSKTQSLLIVNNATNVVIKVCEFQFCNDPFLGVYYHKNNKSWMESEFRVYSSANNCTFEYVSQPFLIDLEGKQGNFKNLREFVFKNIDGYFKIYSKHTPINLVRDLPQGFSALEPLVDLPIGINITRFQTLLALHRSYLTPGDSSSGWTAGAAAYYVGYLQPRTFLLKYNENGTITDAVDCALDPLSETKCTLKSFTVEKGIYQTSNFRVQPTESIVRFPNITNLCPFGEVFNATRFASVYAWNRKRISNCVADYSVLYNSASFSTFKCYGVSPTKLNDLCFTNVYADSFVIRGDEVRQIAPGQTGKIADYNYKLPDDFTGCVIAWNSNNLDSKVGGNYNYLYRLFRKSNLKPFERDISTEIYQAGSTPCNGVEGFNCYFPLQSYGFQPTNGVGYQPYRVVVLSFELLHAPATVCGPKKSTNLVKNKCVNFNFNGLTGTGVLTESNKKFLPFQQFGRDIADTTDAVRDPQTLEILDITPCSFGGVSVITPGTNTSNQVAVLYQGVNCTEVPVAIHADQLTPTWRVYSTGSNVFQTRAGCLIGAEHVNNSYECDIPIGAGICASYQTQTNSP

SEQ ID NO: 1537 - protein, 666 aa, Artificial Sequence; identical to SEQ ID NO: 1488
  SARS-CoV-2/Congo/94/2020__EPI_ISL_417947 spike protein (16-681)

(The sequence listing continues in the following parts.)

1. A pharmaceutical composition comprising:
(A) at least one component A comprising a mRNA having a coding sequence encoding a SARS-CoV-2 spike protein (S) at least 90% identical to SEQ ID NO: 10 that is a pre-fusion stabilized spike protein (S_stab) comprising pre-fusion stabilizing K₉₈₆P and V987P mutations; and
(B) at least one component B comprising a mRNA having a coding sequence encoding a first influenza virus hemagglutinin (HA) protein or an immunogenic fragment thereof,
wherein the mRNAs are complexed or associated with lipid nanoparticles (LNP) and wherein the LNP comprises:
(i) at least one cationic lipid according to formula III-3: [chemical structure]
(ii) at least one neutral lipid, comprising 1,2-distearoyl-sn-glycero-3-phosphocholine (DSPC);
(iii) at least one cholesterol; and
(iv) at least one PEG-lipid according to formula IVa: [chemical structure]
wherein n has a mean value ranging from 30 to 60,
wherein (i) to (iv) are in a molar ratio of about 20-60% cationic lipid, 5-25% neutral lipid, 25-55% cholesterol, and 0.5-15% PEG-lipid.

2. The composition of claim 1, further comprising at least a second component B comprising a mRNA having a coding sequence encoding a second influenza virus HA protein, or an immunogenic fragment thereof, wherein the second influenza virus HA protein is from a different strain of influenza virus than the first influenza virus HA protein.

3. The composition of claim 2, further comprising at least a third component B comprising a mRNA having a coding sequence encoding a third influenza virus HA protein, or an immunogenic fragment thereof, wherein the third influenza virus HA protein is from a different strain of influenza virus than the first and the second influenza virus HA protein.

4. The composition of claim 1, further comprising at least a second component B comprising a mRNA having a coding sequence encoding a first influenza virus neuraminidase (NA) protein, or an immunogenic fragment thereof.

5. The composition of claim 4, further comprising at least a third component B comprising a mRNA having a coding sequence encoding a second influenza virus NA protein, or an immunogenic fragment thereof, wherein the second influenza virus NA protein is from a different strain of influenza virus than the first influenza virus NA protein.

6. The composition of claim 2, wherein the composition comprises mRNAs encoding at least one influenza A HA and at least one influenza B HA.

7. The composition of claim 1, wherein the coding sequence of at least one of the mRNAs from component A or component B comprises a sequence encoding a signal peptide.

8. The composition of claim 1, wherein the mRNA from component A and/or component B comprise a coding sequence that is a codon modified sequence, the codon modified sequence selected from a C maximized coding sequence, CAI maximized coding sequence, human codon usage adapted coding sequence, G/C content modified coding sequence, and G/C optimized coding sequence, or any combination thereof.

9. The composition of claim 8, wherein the mRNA from component A and component B comprise a coding sequence that is modified to increase G/C content.

10. The composition of claim 9, wherein the mRNA from component A and/or component B comprise a coding sequence having a G/C content of at least about 50%.

11. The composition of claim 1, wherein the mRNA from component A and/or component B comprise a heterologous 5′ untranslated region (UTR) and/or a heterologous 3′ UTR.

12. The composition of claim 1, wherein the mRNA from component A and component B comprise a poly(A) sequence comprising 30 to 200 adenosine nucleotides.

13. The composition of claim 12, wherein the mRNAs from component A and component B comprise a 5′-cap structure.

14. The composition of claim 13, wherein the mRNAs from component A and component B comprise, from 5′ to 3′, the following elements:
(I) a 5′ Cap having a m7G;
(II) a coding sequence including a signal sequence; and
(III) a poly(A) sequence comprising 30 to 200 adenosine nucleotides.

15. The composition of claim 14, wherein the mRNAs from component A and component B comprise, from 5′ to 3′, the following elements:
(I) a 5′ Cap having a m7G;
(II) a heterologous 5′ UTR;
(III) a coding sequence including a signal sequence;
(IV) a heterologous 3′ UTR; and
(V) a poly(A) sequence comprising 30 to 200 adenosine nucleotides.

16. The composition of claim 14, wherein the mRNAs from component A and component B comprise at least one modified nucleotide selected from pseudouridine (ψ)) and N1-methylpseudouridine (m14)).

17. The composition of claim 16, wherein the LNP comprises elements (i) to (iv) in a molar ratio of about 20-60% cationic lipid, 5-25% neutral lipid, 25-55% cholesterol, and 0.5-10% PEG-lipid.

18. The composition of claim 16, wherein the mRNAs from component A and component B are each complexed or associated with different LNP.

19. The composition of claim 16, wherein the mRNAs from component A and component B are co-formulated in the same LNP.

20. The composition of claim 1, wherein the composition is a lyophilized or spray-dried composition and has a water content of less than about 10%.

21. The composition of claim 1, wherein when administered to a subject the composition elicits antigen-specific immune responses to the encoded proteins of the mRNAs from component A and component B.

22. The composition of claim 21, wherein the antigen specific immune response to the encoded protein of the mRNA of component A is not reduced as compared to a subject administered a composition having only component A and without component B.

23. A pharmaceutical composition comprising:
(A) at least one component A comprising a mRNA having a coding sequence encoding a SARS-CoV-2 spike protein (S) at least 90% identical to SEQ ID NO: 10 that is a pre-fusion stabilized spike protein (S_stab) comprising pre-fusion stabilizing K₉₈₆P and V987P mutations; and
(B) at least one component B comprising a mRNA having a coding sequence encoding a first influenza virus hemagglutinin (HA) protein or an immunogenic fragment thereof,
wherein the mRNAs of component A and component B are each complexed or associated with lipid nanoparticles (LNP) and wherein the LNP comprises:
(i) a cationic lipid according to formula III-3: [chemical structure]
(ii) 1,2-distearoyl-sn-glycero-3-phosphocholine (DSPC);
(iii) a cholesterol; and
(iv) a PEG-lipid according to formula IVa: [chemical structure]
wherein n has a mean value ranging from 30 to 60,
wherein (i) to (iv) are in a molar ratio of about 20-60% cationic lipid, 5-25% DSPC, 25-55% cholesterol, and 0.5-10% PEG-lipid,
wherein the mRNA from component A and component B each comprise a 5′ cap structure and a poly(A) sequence comprising 30 to 200 adenosine nucleotides, and
wherein when administered to a subject the composition elicits antigen-specific immune responses to the encoded proteins of the mRNAs from component A and component B.

24. The composition of claim 23, wherein the mRNAs from component A and component B each have all uracil nucleotides replaced by m1ψ nucleotides.

25. The composition of claim 24, wherein the LNP comprises elements (i) to (iv) in a molar ratio of about 20-60% cationic lipid, 5-25% DSPC, 25-55% cholesterol, and 0.5-5% PEG-lipid.

26. A pharmaceutical composition comprising:
(A) at least one component A comprising a mRNA having a coding sequence encoding a SARS-CoV-2 spike protein (S) at least 90% identical to SEQ ID NO: 10 that is a pre-fusion stabilized spike protein (S_stab) comprising pre-fusion stabilizing K₉₈₆P and V987P mutations; and
(B) at least one component B comprising at least two different mRNAs having a coding sequence encoding a first and a second influenza virus hemagglutinin (HA) protein or an immunogenic fragment thereof, wherein the first and second influenza virus HA proteins are from different strains of influenza virus,
wherein the mRNAs of component A and component B are each complexed or associated with lipid nanoparticles (LNP) and wherein the LNP comprises:
(i) a cationic lipid according to formula III-3: [chemical structure]
1,2-distearoyl-sn-glycero-3-phosphocholine (DSPC);
(iii) a cholesterol; and
(iv) a PEG-lipid according to formula IVa: [chemical structure]
wherein n has a mean value ranging from 30 to 60,
wherein (i) to (iv) are in a molar ratio of about 20-60% cationic lipid, 5-25% DSPC, 25-55% cholesterol, and 0.5-15% PEG-lipid,
wherein the mRNA from component A and component B each comprise a 5′ cap structure and a poly(A) sequence comprising 30 to 200 adenosine nucleotides,
wherein when administered to a subject the composition elicits antigen-specific immune responses to the encoded proteins of the mRNAs from component A and component B, and
wherein the mRNAs from component A and component B each have all uracil nucleotides replaced by m1ψ nucleotides.

27. The composition of claim 26, wherein the LNP comprises elements (i) to (iv) in a molar ratio of about 20-60% cationic lipid, 5-25% DSPC, 25-55% cholesterol, and 0.5-10% PEG-lipid.

28. The composition of claim 27, wherein the LNP comprises elements (i) to (iv) in a molar ratio of about 20-60% cationic lipid, 5-25% DSPC, 25-55% cholesterol, and 0.5-5% PEG-lipid.

29. The composition of claim 28, wherein the average molecular weight of the PEG lipid is about 2000 g/mol to about 3000 g/mol.

30. A method of stimulating an immune response in a subject comprising administering a composition according to claim 23 to the subject, wherein the composition is administered by intramuscular administration.
